United States Patent Application Publication US 2015/0232836 A1 - sequence listing, part 20

SEQ ID NO: 717340 - DNA, 15 bp, Homo sapiens
aaggccaggtgcggt

SEQ ID NO: 717341 - DNA, 15 bp, Homo sapiens
aggccaggtgcggtg

SEQ ID NO: 717342 - DNA, 15 bp, Homo sapiens
ggccaggtgcggtgg

SEQ ID NO: 717343 - DNA, 15 bp, Homo sapiens
gccaggtgcggtggc

SEQ ID NO: 717344 - DNA, 15 bp, Homo sapiens
ccaggtgcggtggct

SEQ ID NO: 717345 - DNA, 15 bp, Homo sapiens
caggtgcggtggctc

SEQ ID NO: 717346 - DNA, 15 bp, Homo sapiens
aggtgcggtggctca

SEQ ID NO: 717347 - DNA, 15 bp, Homo sapiens
gtgcggtggctcacg

SEQ ID NO: 717348 - DNA, 15 bp, Homo sapiens
tgcggtggctcacgc

SEQ ID NO: 717349 - DNA, 15 bp, Homo sapiens
agcactttgggaggg

SEQ ID NO: 717350 - DNA, 15 bp, Homo sapiens
gcactttgggagggc

SEQ ID NO: 717351 - DNA, 15 bp, Homo sapiens
cactttgggagggcg

SEQ ID NO: 717352 - DNA, 15 bp, Homo sapiens
actttgggagggcga

SEQ ID NO: 717353 - DNA, 15 bp, Homo sapiens
ctttgggagggcgag

SEQ ID NO: 717354 - DNA, 15 bp, Homo sapiens
tttgggagggcgagg

SEQ ID NO: 717355 - DNA, 15 bp, Homo sapiens
ttgggagggcgaggc

SEQ ID NO: 717356 - DNA, 15 bp, Homo sapiens
tgggagggcgaggcg

SEQ ID NO: 717357 - DNA, 15 bp, Homo sapiens
gggagggcgaggcgg

SEQ ID NO: 717358 - DNA, 15 bp, Homo sapiens
ggagggcgaggcggg

SEQ ID NO: 717359 - DNA, 15 bp, Homo sapiens
gagggcgaggcgggt

SEQ ID NO: 717360 - DNA, 15 bp, Homo sapiens
agggcgaggcgggtg

SEQ ID NO: 717361 - DNA, 15 bp, Homo sapiens
gggcgaggcgggtgg

SEQ ID NO: 717362 - DNA, 15 bp, Homo sapiens
ggcgaggcgggtgga

SEQ ID NO: 717363 - DNA, 15 bp, Homo sapiens
gcgaggcgggtggat

SEQ ID NO: 717364 - DNA, 15 bp, Homo sapiens
gaggcgggtggatcc

SEQ ID NO: 717365 - DNA, 15 bp, Homo sapiens
aggcgggtggatcca

SEQ ID NO: 717366 - DNA, 15 bp, Homo sapiens
ggcgggtggatccat

SEQ ID NO: 717367 - DNA, 15 bp, Homo sapiens
gcgggtggatccatg

SEQ ID NO: 717368 - DNA, 15 bp, Homo sapiens
cgggtggatccatga

SEQ ID NO: 717369 - DNA, 15 bp, Homo sapiens
gggtggatccatgag

SEQ ID NO: 717370 - DNA, 15 bp, Homo sapiens
ggtggatccatgagg

SEQ ID NO: 717371 - DNA, 15 bp, Homo sapiens
gtggatccatgaggt

SEQ ID NO: 717372 - DNA, 15 bp, Homo sapiens
tggatccatgaggtc

SEQ ID NO: 717373 - DNA, 15 bp, Homo sapiens
ggatccatgaggtca

SEQ ID NO: 717374 - DNA, 15 bp, Homo sapiens
gatccatgaggtcag

SEQ ID NO: 717375 - DNA, 15 bp, Homo sapiens
atccatgaggtcagg

SEQ ID NO: 717376 - DNA, 15 bp, Homo sapiens
tccatgaggtcagga

SEQ ID NO: 717377 - DNA, 15 bp, Homo sapiens
ccatgaggtcaggag

SEQ ID NO: 717378 - DNA, 15 bp, Homo sapiens
catgaggtcaggaga

SEQ ID NO: 717379 - DNA, 15 bp, Homo sapiens
atgaggtcaggagat

SEQ ID NO: 717380 - DNA, 15 bp, Homo sapiens
tgaggtcaggagatc

SEQ ID NO: 717381 - DNA, 15 bp, Homo sapiens
gccgggcatggtggt

SEQ ID NO: 717382 - DNA, 15 bp, Homo sapiens
ccgggcatggtggtg

SEQ ID NO: 717383 - DNA, 15 bp, Homo sapiens
cgggcatggtggtgg

SEQ ID NO: 717384 - DNA, 15 bp, Homo sapiens
gggcatggtggtggc

SEQ ID NO: 717385 - DNA, 15 bp, Homo sapiens
ggcatggtggtggcg

SEQ ID NO: 717386 - DNA, 15 bp, Homo sapiens
gcatggtggtggcgg

SEQ ID NO: 717387 - DNA, 15 bp, Homo sapiens
catggtggtggcggg

SEQ ID NO: 717388 - DNA, 15 bp, Homo sapiens
atggtggtggcgggc

SEQ ID NO: 717389 - DNA, 15 bp, Homo sapiens
tggtggtggcgggcg

SEQ ID NO: 717390 - DNA, 15 bp, Homo sapiens
ggtggtggcgggcgc

SEQ ID NO: 717391 - DNA, 15 bp, Homo sapiens
cgcctgtagtctcac

SEQ ID NO: 717392 - DNA, 15 bp, Homo sapiens
gcctgtagtctcacc

SEQ ID NO: 717393 - DNA, 15 bp, Homo sapiens
cctgtagtctcacct

SEQ ID NO: 717394 - DNA, 15 bp, Homo sapiens
ctgtagtctcaccta

SEQ ID NO: 717395 - DNA, 15 bp, Homo sapiens
tgtagtctcacctac

SEQ ID NO: 717396 - DNA, 15 bp, Homo sapiens
gtagtctcacctact

SEQ ID NO: 717397 - DNA, 15 bp, Homo sapiens
tagtctcacctactc

SEQ ID NO: 717398 - DNA, 15 bp, Homo sapiens
agtctcacctactcg

SEQ ID NO: 717399 - DNA, 15 bp, Homo sapiens
gtctcacctactcgg

SEQ ID NO: 717400 - DNA, 15 bp, Homo sapiens
tctcacctactcggg

SEQ ID NO: 717401 - DNA, 15 bp, Homo sapiens
ctcacctactcggga

SEQ ID NO: 717402 - DNA, 15 bp, Homo sapiens
tcacctactcgggag

SEQ ID NO: 717403 - DNA, 15 bp, Homo sapiens
cacctactcgggagg

SEQ ID NO: 717404 - DNA, 15 bp, Homo sapiens
acctactcgggaggc

SEQ ID NO: 717405 - DNA, 15 bp, Homo sapiens
cctactcgggaggct

SEQ ID NO: 717406 - DNA, 15 bp, Homo sapiens
cccgggaggtggagc

SEQ ID NO: 717407 - DNA, 15 bp, Homo sapiens
ccgggaggtggagct

SEQ ID NO: 717408 - DNA, 15 bp, Homo sapiens
cgggaggtggagctt

SEQ ID NO: 717409 - DNA, 15 bp, Homo sapiens
gggaggtggagcttg

SEQ ID NO: 717410 - DNA, 15 bp, Homo sapiens
ggaggtggagcttgc

SEQ ID NO: 717411 - DNA, 15 bp, Homo sapiens
gaggtggagcttgca

SEQ ID NO: 717412 - DNA, 15 bp, Homo sapiens
aggtggagcttgcag

SEQ ID NO: 717413 - DNA, 15 bp, Homo sapiens
ggtggagcttgcagt

SEQ ID NO: 717414 - DNA, 15 bp, Homo sapiens
gtggagcttgcagtg

SEQ ID NO: 717415 - DNA, 15 bp, Homo sapiens
tggagcttgcagtga

SEQ ID NO: 717416 - DNA, 15 bp, Homo sapiens
tgagccgagattgca

SEQ ID NO: 717417 - DNA, 15 bp, Homo sapiens
gagccgagattgcac

SEQ ID NO: 717418 - DNA, 15 bp, Homo sapiens
agccgagattgcacc

SEQ ID NO: 717419 - DNA, 15 bp, Homo sapiens
gccgagattgcacca

SEQ ID NO: 717420 - DNA, 15 bp, Homo sapiens
ccgagattgcaccac

SEQ ID NO: 717421 - DNA, 15 bp, Homo sapiens
cgagattgcaccact

SEQ ID NO: 717422 - DNA, 15 bp, Homo sapiens
gagattgcaccactg

SEQ ID NO: 717423 - DNA, 15 bp, Homo sapiens
agattgcaccactgc

SEQ ID NO: 717424 - DNA, 15 bp, Homo sapiens
gattgcaccactgca

SEQ ID NO: 717425 - DNA, 15 bp, Homo sapiens
attgcaccactgcac

SEQ ID NO: 717426 - DNA, 15 bp, Homo sapiens
ttgcaccactgcact

SEQ ID NO: 717427 - DNA, 15 bp, Homo sapiens
tgcaccactgcactc

SEQ ID NO: 717428 - DNA, 15 bp, Homo sapiens
cagcctgggtgacat

SEQ ID NO: 717429 - DNA, 15 bp, Homo sapiens
agcctgggtgacatg

SEQ ID NO: 717430 - DNA, 15 bp, Homo sapiens
gcctgggtgacatga

SEQ ID NO: 717431 - DNA, 15 bp, Homo sapiens
cctgggtgacatgag

SEQ ID NO: 717432 - DNA, 15 bp, Homo sapiens
ctgggtgacatgaga

SEQ ID NO: 717433 - DNA, 15 bp, Homo sapiens
tgggtgacatgagag

SEQ ID NO: 717434 - DNA, 15 bp, Homo sapiens
gggtgacatgagaga

SEQ ID NO: 717435 - DNA, 15 bp, Homo sapiens
ggtgacatgagagag

SEQ ID NO: 717436 - DNA, 15 bp, Homo sapiens
gtgacatgagagaga

SEQ ID NO: 717437 - DNA, 15 bp, Homo sapiens
ggctaaggcaggcca

SEQ ID NO: 717438 - DNA, 15 bp, Homo sapiens
gctaaggcaggccag

SEQ ID NO: 717439 - DNA, 15 bp, Homo sapiens
ctaaggcaggccagg

SEQ ID NO: 717440 - DNA, 15 bp, Homo sapiens
taaggcaggccaggt

SEQ ID NO: 717441 - DNA, 15 bp, Homo sapiens
aaggcaggccaggtg

SEQ ID NO: 717442 - DNA, 15 bp, Homo sapiens
aggcaggccaggtgt

SEQ ID NO: 717443 - DNA, 15 bp, Homo sapiens
ggcaggccaggtgta

SEQ ID NO: 717444 - DNA, 15 bp, Homo sapiens
gcaggccaggtgtac

SEQ ID NO: 717445 - DNA, 15 bp, Homo sapiens
caggccaggtgtaca

SEQ ID NO: 717446 - DNA, 15 bp, Homo sapiens
aggccaggtgtacac

SEQ ID NO: 717447 - DNA, 15 bp, Homo sapiens
ggccaggtgtacact

SEQ ID NO: 717448 - DNA, 15 bp, Homo sapiens
gccaggtgtacactt

SEQ ID NO: 717449 - DNA, 15 bp, Homo sapiens
ccaggtgtacacttc

SEQ ID NO: 717450 - DNA, 15 bp, Homo sapiens
caggtgtacacttca

SEQ ID NO: 717451 - DNA, 15 bp, Homo sapiens
aggtgtacacttcag

SEQ ID NO: 717452 - DNA, 15 bp, Homo sapiens
ggtgtacacttcagg

SEQ ID NO: 717453 - DNA, 15 bp, Homo sapiens
gtgtacacttcagga

SEQ ID NO: 717454 - DNA, 15 bp, Homo sapiens
tgtacacttcaggaa

SEQ ID NO: 717455 - DNA, 15 bp, Homo sapiens
gtacacttcaggaag

SEQ ID NO: 717456 - DNA, 15 bp, Homo sapiens
tacacttcaggaaga

SEQ ID NO: 717457 - DNA, 15 bp, Homo sapiens
acacttcaggaagac

SEQ ID NO: 717458 - DNA, 15 bp, Homo sapiens
cacttcaggaagacg

SEQ ID NO: 717459 - DNA, 15 bp, Homo sapiens
acttcaggaagacgt

SEQ ID NO: 717460 - DNA, 15 bp, Homo sapiens
cttcaggaagacgtg

SEQ ID NO: 717461 - DNA, 15 bp, Homo sapiens
ttcaggaagacgtgg

SEQ ID NO: 717462 - DNA, 15 bp, Homo sapiens
tcaggaagacgtgga

SEQ ID NO: 717463 - DNA, 15 bp, Homo sapiens
caggaagacgtggaa

SEQ ID NO: 717464 - DNA, 15 bp, Homo sapiens
aggaagacgtggaaa

SEQ ID NO: 717465 - DNA, 15 bp, Homo sapiens
ggaagacgtggaaat

SEQ ID NO: 717466 - DNA, 15 bp, Homo sapiens
gaagacgtggaaatt

SEQ ID NO: 717467 - DNA, 15 bp, Homo sapiens
aagacgtggaaattc

SEQ ID NO: 717468 - DNA, 15 bp, Homo sapiens
agacgtggaaattcc

SEQ ID NO: 717469 - DNA, 15 bp, Homo sapiens
gacgtggaaattccc

SEQ ID NO: 717470 - DNA, 15 bp, Homo sapiens
acgtggaaattccca

SEQ ID NO: 717471 - DNA, 15 bp, Homo sapiens
cgtggaaattcccag

SEQ ID NO: 717472 - DNA, 15 bp, Homo sapiens
gtggaaattcccagg

SEQ ID NO: 717473 - DNA, 15 bp, Homo sapiens
tggaaattcccaggg

SEQ ID NO: 717474 - DNA, 15 bp, Homo sapiens
ggaaattcccagggc

SEQ ID NO: 717475 - DNA, 15 bp, Homo sapiens
gaaattcccagggcg

SEQ ID NO: 717476 - DNA, 15 bp, Homo sapiens
aaattcccagggcgg

SEQ ID NO: 717477 - DNA, 15 bp, Homo sapiens
aattcccagggcgga

SEQ ID NO: 717478 - DNA, 15 bp, Homo sapiens
attcccagggcggac

SEQ ID NO: 717479 - DNA, 15 bp, Homo sapiens
ttcccagggcggacc

SEQ ID NO: 717480 - DNA, 15 bp, Homo sapiens
tcccagggcggacca

SEQ ID NO: 717481 - DNA, 15 bp, Homo sapiens
cccagggcggaccaa

SEQ ID NO: 717482 - DNA, 15 bp, Homo sapiens
ccagggcggaccaaa

SEQ ID NO: 717483 - DNA, 15 bp, Homo sapiens
cagggcggaccaaaa

SEQ ID NO: 717484 - DNA, 15 bp, Homo sapiens
agggcggaccaaaac

SEQ ID NO: 717485 - DNA, 15 bp, Homo sapiens
gggcggaccaaaact

SEQ ID NO: 717486 - DNA, 15 bp, Homo sapiens
ggcggaccaaaactt

SEQ ID NO: 717487 - DNA, 15 bp, Homo sapiens
gcggaccaaaacttg

SEQ ID NO: 717488 - DNA, 15 bp, Homo sapiens
cggaccaaaacttga

SEQ ID NO: 717489 - DNA, 15 bp, Homo sapiens
ggaccaaaacttgag

SEQ ID NO: 717490 - DNA, 15 bp, Homo sapiens
gaccaaaacttgagc

SEQ ID NO: 717491 - DNA, 15 bp, Homo sapiens
accaaaacttgagct

SEQ ID NO: 717492 - DNA, 15 bp, Homo sapiens
ccaaaacttgagctg

SEQ ID NO: 717493 - DNA, 15 bp, Homo sapiens
caaaacttgagctgt

SEQ ID NO: 717494 - DNA, 15 bp, Homo sapiens
aaaacttgagctgtt

SEQ ID NO: 717495 - DNA, 15 bp, Homo sapiens
aaacttgagctgttc

SEQ ID NO: 717496 - DNA, 15 bp, Homo sapiens
aacttgagctgttcc

SEQ ID NO: 717497 - DNA, 15 bp, Homo sapiens
acttgagctgttccg

SEQ ID NO: 717498 - DNA, 15 bp, Homo sapiens
cttgagctgttccgg

SEQ ID NO: 717499 - DNA, 15 bp, Homo sapiens
ttgagctgttccggc

SEQ ID NO: 717500 - DNA, 15 bp, Homo sapiens
tgagctgttccggcg

SEQ ID NO: 717501 - DNA, 15 bp, Homo sapiens
gagctgttccggcgg

SEQ ID NO: 717502 - DNA, 15 bp, Homo sapiens
agctgttccggcggt

SEQ ID NO: 717503 - DNA, 15 bp, Homo sapiens
gctgttccggcggta

SEQ ID NO: 717504 - DNA, 15 bp, Homo sapiens
ctgttccggcggtag

SEQ ID NO: 717505 - DNA, 15 bp, Homo sapiens
tgttccggcggtagt

SEQ ID NO: 717506 - DNA, 15 bp, Homo sapiens
gttccggcggtagtg

SEQ ID NO: 717507 - DNA, 15 bp, Homo sapiens
ttccggcggtagtga

SEQ ID NO: 717508 - DNA, 15 bp, Homo sapiens
tccggcggtagtgat

SEQ ID NO: 717509 - DNA, 15 bp, Homo sapiens
ccggcggtagtgatt

SEQ ID NO: 717510 - DNA, 15 bp, Homo sapiens
cggcggtagtgattt

SEQ ID NO: 717511 - DNA, 15 bp, Homo sapiens
ggcggtagtgatttg

SEQ ID NO: 717512 - DNA, 15 bp, Homo sapiens
gcggtagtgatttga

SEQ ID NO: 717513 - DNA, 15 bp, Homo sapiens
cggtagtgatttgag

SEQ ID NO: 717514 - DNA, 15 bp, Homo sapiens
ggtagtgatttgagg

SEQ ID NO: 717515 - DNA, 15 bp, Homo sapiens
gtagtgatttgaggt

SEQ ID NO: 717516 - DNA, 15 bp, Homo sapiens
tagtgatttgaggtc

SEQ ID NO: 717517 - DNA, 15 bp, Homo sapiens
agtgatttgaggtca

SEQ ID NO: 717518 - DNA, 15 bp, Homo sapiens
gtgatttgaggtcag

SEQ ID NO: 717519 - DNA, 15 bp, Homo sapiens
tgatttgaggtcagt

SEQ ID NO: 717520 - DNA, 15 bp, Homo sapiens
gatttgaggtcagtt

SEQ ID NO: 717521 - DNA, 15 bp, Homo sapiens
atttgaggtcagttt

SEQ ID NO: 717522 - DNA, 15 bp, Homo sapiens
tttgaggtcagtttg

SEQ ID NO: 717523 - DNA, 15 bp, Homo sapiens
ttgaggtcagtttga

SEQ ID NO: 717524 - DNA, 15 bp, Homo sapiens
tgaggtcagtttgaa

SEQ ID NO: 717525 - DNA, 15 bp, Homo sapiens
gaggtcagtttgaaa

SEQ ID NO: 717526 - DNA, 15 bp, Homo sapiens
aggtcagtttgaaag

SEQ ID NO: 717527 - DNA, 15 bp, Homo sapiens
ggtcagtttgaaaga

SEQ ID NO: 717528 - DNA, 15 bp, Homo sapiens
gtcagtttgaaagag

SEQ ID NO: 717529 - DNA, 15 bp, Homo sapiens
tcagtttgaaagaga

SEQ ID NO: 717530 - DNA, 15 bp, Homo sapiens
cagtttgaaagagaa

SEQ ID NO: 717531 - DNA, 15 bp, Homo sapiens
agtttgaaagagaag

SEQ ID NO: 717532 - DNA, 15 bp, Homo sapiens
gtttgaaagagaagt

SEQ ID NO: 717533 - DNA, 15 bp, Homo sapiens
tttgaaagagaagtt

SEQ ID NO: 717534 - DNA, 15 bp, Homo sapiens
ttgaaagagaagttg

SEQ ID NO: 717535 - DNA, 15 bp, Homo sapiens
tgaaagagaagttga

SEQ ID NO: 717536 - DNA, 15 bp, Homo sapiens
gaaagagaagttgag

SEQ ID NO: 717537 - DNA, 15 bp, Homo sapiens
aaagagaagttgaga

SEQ ID NO: 717538 - DNA, 15 bp, Homo sapiens
aagagaagttgagaa

SEQ ID NO: 717539 - DNA, 15 bp, Homo sapiens
agagaagttgagaaa

SEQ ID NO: 717540 - DNA, 15 bp, Homo sapiens
gagaagttgagaaag

SEQ ID NO: 717541 - DNA, 15 bp, Homo sapiens
agaagttgagaaagc

SEQ ID NO: 717542 - DNA, 15 bp, Homo sapiens
gaagttgagaaagcg

SEQ ID NO: 717543 - DNA, 15 bp, Homo sapiens
aagttgagaaagcgg

SEQ ID NO: 717544 - DNA, 15 bp, Homo sapiens
agttgagaaagcggc

SEQ ID NO: 717545 - DNA, 15 bp, Homo sapiens
gttgagaaagcggcc

SEQ ID NO: 717546 - DNA, 15 bp, Homo sapiens
ttgagaaagcggccg

SEQ ID NO: 717547 - DNA, 15 bp, Homo sapiens
tgagaaagcggccga

SEQ ID NO: 717548 - DNA, 15 bp, Homo sapiens
gagaaagcggccgag

SEQ ID NO: 717549 - DNA, 15 bp, Homo sapiens
agaaagcggccgagg

SEQ ID NO: 717550 - DNA, 15 bp, Homo sapiens
gaaagcggccgaggg

SEQ ID NO: 717551 - DNA, 15 bp, Homo sapiens
aaagcggccgagggg

SEQ ID NO: 717552 - DNA, 15 bp, Homo sapiens
aagcggccgaggggc

SEQ ID NO: 717553 - DNA, 15 bp, Homo sapiens
agcggccgaggggcg

SEQ ID NO: 717554 - DNA, 15 bp, Homo sapiens
gcggccgaggggcga

SEQ ID NO: 717555 - DNA, 15 bp, Homo sapiens
cggccgaggggcgaa

SEQ ID NO: 717556 - DNA, 15 bp, Homo sapiens
ggccgaggggcgaat

SEQ ID NO: 717557 - DNA, 15 bp, Homo sapiens
gccgaggggcgaatt

SEQ ID NO: 717558 - DNA, 15 bp, Homo sapiens
ccgaggggcgaattt

SEQ ID NO: 717559 - DNA, 15 bp, Homo sapiens
cgaggggcgaatttg

SEQ ID NO: 717560 - DNA, 15 bp, Homo sapiens
gaggggcgaatttgg

SEQ ID NO: 717561 - DNA, 15 bp, Homo sapiens
aggggcgaatttggc

SEQ ID NO: 717562 - DNA, 15 bp, Homo sapiens
ggggcgaatttggct

SEQ ID NO: 717563 - DNA, 15 bp, Homo sapiens
gggcgaatttggctg

SEQ ID NO: 717564 - DNA, 15 bp, Homo sapiens
ggcgaatttggctgc

SEQ ID NO: 717565 - DNA, 15 bp, Homo sapiens
gcgaatttggctgca

SEQ ID NO: 717566 - DNA, 15 bp, Homo sapiens
cgaatttggctgcac

SEQ ID NO: 717567 - DNA, 15 bp, Homo sapiens
gaatttggctgcact

SEQ ID NO: 717568 - DNA, 15 bp, Homo sapiens
aatttggctgcacta

SEQ ID NO: 717569 - DNA, 15 bp, Homo sapiens
atttggctgcactac

SEQ ID NO: 717570 - DNA, 15 bp, Homo sapiens
tttggctgcactaca

SEQ ID NO: 717571 - DNA, 15 bp, Homo sapiens
ttggctgcactacac

SEQ ID NO: 717572 - DNA, 15 bp, Homo sapiens
tggctgcactacacg

SEQ ID NO: 717573 - DNA, 15 bp, Homo sapiens
ggctgcactacacgc

SEQ ID NO: 717574 - DNA, 15 bp, Homo sapiens
gctgcactacacgct

SEQ ID NO: 717575 - DNA, 15 bp, Homo sapiens
ctgcactacacgctc

SEQ ID NO: 717576 - DNA, 15 bp, Homo sapiens
tgcactacacgctcg

SEQ ID NO: 717577 - DNA, 15 bp, Homo sapiens
gcactacacgctcgc

SEQ ID NO: 717578 - DNA, 15 bp, Homo sapiens
cactacacgctcgcc

SEQ ID NO: 717579 - DNA, 15 bp, Homo sapiens
actacacgctcgcca

SEQ ID NO: 717580 - DNA, 15 bp, Homo sapiens
ctacacgctcgccac

SEQ ID NO: 717581 - DNA, 15 bp, Homo sapiens
tacacgctcgccaca

SEQ ID NO: 717582 - DNA, 15 bp, Homo sapiens
acacgctcgccacaa

SEQ ID NO: 717583 - DNA, 15 bp, Homo sapiens
cacgctcgccacaaa

SEQ ID NO: 717584 - DNA, 15 bp, Homo sapiens
acgctcgccacaaag

SEQ ID NO: 717585 - DNA, 15 bp, Homo sapiens
cgctcgccacaaaga

SEQ ID NO: 717586 - DNA, 15 bp, Homo sapiens
gctcgccacaaagag

SEQ ID NO: 717587 - DNA, 15 bp, Homo sapiens
ctcgccacaaagagg

SEQ ID NO: 717588 - DNA, 15 bp, Homo sapiens
tcgccacaaagagga

SEQ ID NO: 717589 - DNA, 15 bp, Homo sapiens
cgccacaaagaggaa

SEQ ID NO: 717590 - DNA, 15 bp, Homo sapiens
gccacaaagaggaag

SEQ ID NO: 717591 - DNA, 15 bp, Homo sapiens
ccacaaagaggaagg

SEQ ID NO: 717592 - DNA, 15 bp, Homo sapiens
cacaaagaggaaggg

SEQ ID NO: 717593 - DNA, 15 bp, Homo sapiens
acaaagaggaagggc

SEQ ID NO: 717594 - DNA, 15 bp, Homo sapiens
caaagaggaagggcc

SEQ ID NO: 717595 - DNA, 15 bp, Homo sapiens
aaagaggaagggccg

SEQ ID NO: 717596 - DNA, 15 bp, Homo sapiens
aagaggaagggccgc

SEQ ID NO: 717597 - DNA, 15 bp, Homo sapiens
agaggaagggccgcc

SEQ ID NO: 717598 - DNA, 15 bp, Homo sapiens
gaggaagggccgccg

SEQ ID NO: 717599 - DNA, 15 bp, Homo sapiens
aggaagggccgccgg

SEQ ID NO: 717600 - DNA, 15 bp, Homo sapiens
ggaagggccgccggc

SEQ ID NO: 717601 - DNA, 15 bp, Homo sapiens
gaagggccgccggcc

SEQ ID NO: 717602 - DNA, 15 bp, Homo sapiens
aagggccgccggccg

SEQ ID NO: 717603 - DNA, 15 bp, Homo sapiens
agggccgccggccgc

SEQ ID NO: 717604 - DNA, 15 bp, Homo sapiens
gggccgccggccgcc

SEQ ID NO: 717605 - DNA, 15 bp, Homo sapiens
ggccgccggccgccg

SEQ ID NO: 717606 - DNA, 15 bp, Homo sapiens
gccgccggccgccgg

SEQ ID NO: 717607 - DNA, 15 bp, Homo sapiens
ccgccggccgccggg

SEQ ID NO: 717608 - DNA, 15 bp, Homo sapiens
cgccggccgccgggg

SEQ ID NO: 717609 - DNA, 15 bp, Homo sapiens
gccggccgccggggc

SEQ ID NO: 717610 - DNA, 15 bp, Homo sapiens
ccggccgccggggcc

SEQ ID NO: 717611 - DNA, 15 bp, Homo sapiens
cggccgccggggccg

SEQ ID NO: 717612 - DNA, 15 bp, Homo sapiens
ggccgccggggccga

SEQ ID NO: 717613 - DNA, 15 bp, Homo sapiens
gccgccggggccgag

SEQ ID NO: 717614 - DNA, 15 bp, Homo sapiens
ccgccggggccgagt

SEQ ID NO: 717615 - DNA, 15 bp, Homo sapiens
cgccggggccgagtg

SEQ ID NO: 717616 - DNA, 15 bp, Homo sapiens
gccggggccgagtgc

SEQ ID NO: 717617 - DNA, 15 bp, Homo sapiens
ccggggccgagtgcg

SEQ ID NO: 717618 - DNA, 15 bp, Homo sapiens
cggggccgagtgcgc

SEQ ID NO: 717619 - DNA, 15 bp, Homo sapiens
ggggccgagtgcgct

SEQ ID NO: 717620 - DNA, 15 bp, Homo sapiens
gggccgagtgcgctt

SEQ ID NO: 717621 - DNA, 15 bp, Homo sapiens
ggccgagtgcgcttc

SEQ ID NO: 717622 - DNA, 15 bp, Homo sapiens
gccgagtgcgcttcc

SEQ ID NO: 717623 - DNA, 15 bp, Homo sapiens
ccgagtgcgcttcca

SEQ ID NO: 717624 - DNA, 15 bp, Homo sapiens
cgagtgcgcttccag

SEQ ID NO: 717625 - DNA, 15 bp, Homo sapiens
gagtgcgcttccagc

SEQ ID NO: 717626 - DNA, 15 bp, Homo sapiens
agtgcgcttccagcc

SEQ ID NO: 717627 - DNA, 15 bp, Homo sapiens
gtgcgcttccagccc

SEQ ID NO: 717628 - DNA, 15 bp, Homo sapiens
tgcgcttccagccca

SEQ ID NO: 717629 - DNA, 15 bp, Homo sapiens
gcgcttccagcccag

SEQ ID NO: 717630 - DNA, 15 bp, Homo sapiens
cgcttccagcccagg

SEQ ID NO: 717631 - DNA, 15 bp, Homo sapiens
gcttccagcccaggc

SEQ ID NO: 717632 - DNA, 15 bp, Homo sapiens
cttccagcccaggcg

SEQ ID NO: 717633 - DNA, 15 bp, Homo sapiens
ttccagcccaggcgg

SEQ ID NO: 717634 - DNA, 15 bp, Homo sapiens
tccagcccaggcgga

SEQ ID NO: 717635 - DNA, 15 bp, Homo sapiens
ccagcccaggcggag

SEQ ID NO: 717636 - DNA, 15 bp, Homo sapiens
cagcccaggcggagc

SEQ ID NO: 717637 - DNA, 15 bp, Homo sapiens
agcccaggcggagcg

SEQ ID NO: 717638 - DNA, 15 bp, Homo sapiens
gcccaggcggagcgg

SEQ ID NO: 717639 - DNA, 15 bp, Homo sapiens
cccaggcggagcggt

SEQ ID NO: 717640 - DNA, 15 bp, Homo sapiens
ccaggcggagcggta

SEQ ID NO: 717641 - DNA, 15 bp, Homo sapiens
caggcggagcggtag

SEQ ID NO: 717642 - DNA, 15 bp, Homo sapiens
aggcggagcggtaga

SEQ ID NO: 717643 - DNA, 15 bp, Homo sapiens
ggcggagcggtagac

SEQ ID NO: 717644 - DNA, 15 bp, Homo sapiens
gcggagcggtagacg

SEQ ID NO: 717645 - DNA, 15 bp, Homo sapiens
cggagcggtagacgc

SEQ ID NO: 717646 - DNA, 15 bp, Homo sapiens
ggagcggtagacgca

SEQ ID NO: 717647 - DNA, 15 bp, Homo sapiens
gagcggtagacgcaa

SEQ ID NO: 717648 - DNA, 15 bp, Homo sapiens
agcggtagacgcaac

SEQ ID NO: 717649 - DNA, 15 bp, Homo sapiens
gcggtagacgcaaca

SEQ ID NO: 717650 - DNA, 15 bp, Homo sapiens
cggtagacgcaacag

SEQ ID NO: 717651 - DNA, 15 bp, Homo sapiens
ggtagacgcaacagc

SEQ ID NO: 717652 - DNA, 15 bp, Homo sapiens
gtagacgcaacagcc

SEQ ID NO: 717653 - DNA, 15 bp, Homo sapiens
tagacgcaacagcct

SEQ ID NO: 717654 - DNA, 15 bp, Homo sapiens
agacgcaacagcctc

SEQ ID NO: 717655 - DNA, 15 bp, Homo sapiens
gacgcaacagcctcc

SEQ ID NO: 717656 - DNA, 15 bp, Homo sapiens
acgcaacagcctccg

SEQ ID NO: 717657 - DNA, 15 bp, Homo sapiens
cgcaacagcctccgc

SEQ ID NO: 717658 - DNA, 15 bp, Homo sapiens
gcaacagcctccgcc

SEQ ID NO: 717659 - DNA, 15 bp, Homo sapiens
caacagcctccgccc

SEQ ID NO: 717660 - DNA, 15 bp, Homo sapiens
aacagcctccgcccg

SEQ ID NO: 717661 - DNA, 15 bp, Homo sapiens
acagcctccgcccgc

SEQ ID NO: 717662 - DNA, 15 bp, Homo sapiens
cagcctccgcccgcc

SEQ ID NO: 717663 - DNA, 15 bp, Homo sapiens
agcctccgcccgcca

SEQ ID NO: 717664 - DNA, 15 bp, Homo sapiens
gcctccgcccgccac

SEQ ID NO: 717665 - DNA, 15 bp, Homo sapiens
cctccgcccgccacg

SEQ ID NO: 717666 - DNA, 15 bp, Homo sapiens
ctccgcccgccacgt

SEQ ID NO: 717667 - DNA, 15 bp, Homo sapiens
tccgcccgccacgtg

SEQ ID NO: 717668 - DNA, 15 bp, Homo sapiens
ccgcccgccacgtga

SEQ ID NO: 717669 - DNA, 15 bp, Homo sapiens
cgcccgccacgtgac

SEQ ID NO: 717670 - DNA, 15 bp, Homo sapiens
gcccgccacgtgacc

SEQ ID NO: 717671 - DNA, 15 bp, Homo sapiens
cccgccacgtgaccc

SEQ ID NO: 717672 - DNA, 15 bp, Homo sapiens
ccgccacgtgacccg

SEQ ID NO: 717673 - DNA, 15 bp, Homo sapiens
cgccacgtgacccgt

SEQ ID NO: 717674 - DNA, 15 bp, Homo sapiens
gccacgtgacccgta

SEQ ID NO: 717675 - DNA, 15 bp, Homo sapiens
ccacgtgacccgtag

SEQ ID NO: 717676 - DNA, 15 bp, Homo sapiens
cacgtgacccgtagt

SEQ ID NO: 717677 - DNA, 15 bp, Homo sapiens
acgtgacccgtagtg

SEQ ID NO: 717678 - DNA, 15 bp, Homo sapiens
cgtgacccgtagtgt

SEQ ID NO: 717679 - DNA, 15 bp, Homo sapiens
gtgacccgtagtgtt

SEQ ID NO: 717680 - DNA, 15 bp, Homo sapiens
tgacccgtagtgttg

SEQ ID NO: 717681 - DNA, 15 bp, Homo sapiens
gacccgtagtgttgt

SEQ ID NO: 717682 - DNA, 15 bp, Homo sapiens
acccgtagtgttgtg

SEQ ID NO: 717683 - DNA, 15 bp, Homo sapiens
cccgtagtgttgtgg

SEQ ID NO: 717684 - DNA, 15 bp, Homo sapiens
ccgtagtgttgtggt

SEQ ID NO: 717685 - DNA, 15 bp, Homo sapiens
cgtagtgttgtggtc

SEQ ID NO: 717686 - DNA, 15 bp, Homo sapiens
gtagtgttgtggtct

SEQ ID NO: 717687 - DNA, 15 bp, Homo sapiens
tagtgttgtggtctg

SEQ ID NO: 717688 - DNA, 15 bp, Homo sapiens
agtgttgtggtctgg

SEQ ID NO: 717689 - DNA, 15 bp, Homo sapiens
gtgttgtggtctggc

SEQ ID NO: 717690 - DNA, 15 bp, Homo sapiens
tgttgtggtctggcc

SEQ ID NO: 717691 - DNA, 15 bp, Homo sapiens
gttgtggtctggccc

SEQ ID NO: 717692 - DNA, 15 bp, Homo sapiens
ttgtggtctggcccg

SEQ ID NO: 717693 - DNA, 15 bp, Homo sapiens
tgtggtctggcccgc

SEQ ID NO: 717694 - DNA, 15 bp, Homo sapiens
gtggtctggcccgcg

SEQ ID NO: 717695 - DNA, 15 bp, Homo sapiens
tggtctggcccgcgt

SEQ ID NO: 717696 - DNA, 15 bp, Homo sapiens
ggtctggcccgcgtg

SEQ ID NO: 717697 - DNA, 15 bp, Homo sapiens
gtctggcccgcgtgg

SEQ ID NO: 717698 - DNA, 15 bp, Homo sapiens
tctggcccgcgtggg

SEQ ID NO: 717699 - DNA, 15 bp, Homo sapiens
ctggcccgcgtgggt

SEQ ID NO: 717700 - DNA, 15 bp, Homo sapiens
tggcccgcgtgggtg

SEQ ID NO: 717701 - DNA, 15 bp, Homo sapiens
ggcccgcgtgggtgg

SEQ ID NO: 717702 - DNA, 15 bp, Homo sapiens
gcccgcgtgggtggc

SEQ ID NO: 717703 - DNA, 15 bp, Homo sapiens
cccgcgtgggtggcg

SEQ ID NO: 717704 - DNA, 15 bp, Homo sapiens
ccgcgtgggtggcgg

SEQ ID NO: 717705 - DNA, 15 bp, Homo sapiens
cgcgtgggtggcggg

SEQ ID NO: 717706 - DNA, 15 bp, Homo sapiens
gcgtgggtggcggga

SEQ ID NO: 717707 - DNA, 15 bp, Homo sapiens
cgtgggtggcgggag

SEQ ID NO: 717708 - DNA, 15 bp, Homo sapiens
gtgggtggcgggagc

SEQ ID NO: 717709 - DNA, 15 bp, Homo sapiens
tgggtggcgggagcg

SEQ ID NO: 717710 - DNA, 15 bp, Homo sapiens
gggtggcgggagcgc

SEQ ID NO: 717711 - DNA, 15 bp, Homo sapiens
ggtggcgggagcgcc

SEQ ID NO: 717712 - DNA, 15 bp, Homo sapiens
gtggcgggagcgccg

SEQ ID NO: 717713 - DNA, 15 bp, Homo sapiens
tggcgggagcgccga

SEQ ID NO: 717714 - DNA, 15 bp, Homo sapiens
ggcgggagcgccgag

SEQ ID NO: 717715 - DNA, 15 bp, Homo sapiens
gcgggagcgccgaga

SEQ ID NO: 717716 - DNA, 15 bp, Homo sapiens
cgggagcgccgagag

SEQ ID NO: 717717 - DNA, 15 bp, Homo sapiens
gggagcgccgagagg

SEQ ID NO: 717718 - DNA, 15 bp, Homo sapiens
ggagcgccgagaggg

SEQ ID NO: 717719 - DNA, 15 bp, Homo sapiens
gagcgccgagagggc

SEQ ID NO: 717720 - DNA, 15 bp, Homo sapiens
agcgccgagagggcg

SEQ ID NO: 717721 - DNA, 15 bp, Homo sapiens
gcgccgagagggcgg

SEQ ID NO: 717722 - DNA, 15 bp, Homo sapiens
cgccgagagggcggg

SEQ ID NO: 717723 - DNA, 15 bp, Homo sapiens
gccgagagggcgggg

SEQ ID NO: 717724 - DNA, 15 bp, Homo sapiens
ccgagagggcggggg

SEQ ID NO: 717725 - DNA, 15 bp, Homo sapiens
cgagagggcgggggc

SEQ ID NO: 717726 - DNA, 15 bp, Homo sapiens
gagagggcgggggcg

SEQ ID NO: 717727 - DNA, 15 bp, Homo sapiens
agagggcgggggcgg

SEQ ID NO: 717728 - DNA, 15 bp, Homo sapiens
gagggcgggggcggc

SEQ ID NO: 717729 - DNA, 15 bp, Homo sapiens
agggcgggggcggcg

SEQ ID NO: 717730 - DNA, 15 bp, Homo sapiens
gggcgggggcggcga

SEQ ID NO: 717731 - DNA, 15 bp, Homo sapiens
ggcgggggcggcgat

SEQ ID NO: 717732 - DNA, 15 bp, Homo sapiens
gcgggggcggcgatg

SEQ ID NO: 717733 - DNA, 15 bp, Homo sapiens
cgggggcggcgatgg

SEQ ID NO: 717734 - DNA, 15 bp, Homo sapiens
gggggcggcgatggg

SEQ ID NO: 717735 - DNA, 15 bp, Homo sapiens
ggggcggcgatgggg

SEQ ID NO: 717736 - DNA, 15 bp, Homo sapiens
gggcggcgatggggc

SEQ ID NO: 717737 - DNA, 15 bp, Homo sapiens
ggcggcgatggggcg

SEQ ID NO: 717738 - DNA, 15 bp, Homo sapiens
gcggcgatggggcgg

SEQ ID NO: 717739 - DNA, 15 bp, Homo sapiens
cggcgatggggcggg

SEQ ID NO: 717740 - DNA, 15 bp, Homo sapiens
ggcgatggggcgggt

SEQ ID NO: 717741 - DNA, 15 bp, Homo sapiens
gcgatggggcgggtc

SEQ ID NO: 717742 - DNA, 15 bp, Homo sapiens
cgatggggcgggtca

SEQ ID NO: 717743 - DNA, 15 bp, Homo sapiens
gatggggcgggtcac

SEQ ID NO: 717744 - DNA, 15 bp, Homo sapiens
atggggcgggtcacg

SEQ ID NO: 717745 - DNA, 15 bp, Homo sapiens
tggggcgggtcacgt

SEQ ID NO: 717746 - DNA, 15 bp, Homo sapiens
ggggcgggtcacgtg

SEQ ID NO: 717747 - DNA, 15 bp, Homo sapiens
cggctatcttttctg

SEQ ID NO: 717748 - DNA, 15 bp, Homo sapiens
ggctatcttttctgt

SEQ ID NO: 717749 - DNA, 15 bp, Homo sapiens
gctatcttttctgtt

SEQ ID NO: 717750 - DNA, 15 bp, Homo sapiens
ctatcttttctgttt

SEQ ID NO: 717751 - DNA, 15 bp, Homo sapiens
tatcttttctgtttt

SEQ ID NO: 717752 - DNA, 15 bp, Homo sapiens
atcttttctgttttt

SEQ ID NO: 717753 - DNA, 15 bp, Homo sapiens
tcttttctgtttttt

SEQ ID NO: 717754 - DNA, 15 bp, Homo sapiens
cttttctgtttttta

SEQ ID NO: 717755 - DNA, 15 bp, Homo sapiens
ttttctgttttttaa

SEQ ID NO: 717756 - DNA, 15 bp, Homo sapiens
tttctgttttttaag

SEQ ID NO: 717757 - DNA, 15 bp, Homo sapiens
ttctgttttttaagt

SEQ ID NO: 717758 - DNA, 15 bp, Homo sapiens
tctgttttttaagta

SEQ ID NO: 717759 - DNA, 15 bp, Homo sapiens
ctgttttttaagtag

SEQ ID NO: 717760 - DNA, 15 bp, Homo sapiens
tgttttttaagtaga

SEQ ID NO: 717761 - DNA, 15 bp, Homo sapiens
gttttttaagtagac

SEQ ID NO: 717762 - DNA, 15 bp, Homo sapiens
ttttttaagtagact

SEQ ID NO: 717763 - DNA, 15 bp, Homo sapiens
tttttaagtagactt

SEQ ID NO: 717764 - DNA, 15 bp, Homo sapiens
ttttaagtagactta

SEQ ID NO: 717765 - DNA, 15 bp, Homo sapiens
tttaagtagacttaa

SEQ ID NO: 717766 - DNA, 15 bp, Homo sapiens
ttaagtagacttaat

SEQ ID NO: 717767 - DNA, 15 bp, Homo sapiens
taagtagacttaatt

SEQ ID NO: 717768 - DNA, 15 bp, Homo sapiens
aagtagacttaattt

SEQ ID NO: 717769 - DNA, 15 bp, Homo sapiens
agtagacttaattta

SEQ ID NO: 717770 - DNA, 15 bp, Homo sapiens
gtagacttaatttat

SEQ ID NO: 717771 - DNA, 15 bp, Homo sapiens
tagacttaatttatt

SEQ ID NO: 717772 - DNA, 15 bp, Homo sapiens
agacttaatttattt

SEQ ID NO: 717773 - DNA, 15 bp, Homo sapiens
gacttaatttatttt

SEQ ID NO: 717774 - DNA, 15 bp, Homo sapiens
acttaatttattttt

SEQ ID NO: 717775 - DNA, 15 bp, Homo sapiens
cttaatttattttta

SEQ ID NO: 717776 - DNA, 15 bp, Homo sapiens
ttaatttatttttag

SEQ ID NO: 717777 - DNA, 15 bp, Homo sapiens
taatttatttttaga

SEQ ID NO: 717778 - DNA, 15 bp, Homo sapiens
aatttatttttagat

SEQ ID NO: 717779 - DNA, 15 bp, Homo sapiens
atttatttttagatt

SEQ ID NO: 717780 - DNA, 15 bp, Homo sapiens
tttatttttagattt

SEQ ID NO: 717781 - DNA, 15 bp, Homo sapiens
ttatttttagatttt

SEQ ID NO: 717782 - DNA, 15 bp, Homo sapiens
tatttttagattttg

SEQ ID NO: 717783 - DNA, 15 bp, Homo sapiens
atttttagattttgg

SEQ ID NO: 717784 - DNA, 15 bp, Homo sapiens
tttttagattttggc

SEQ ID NO: 717785 - DNA, 15 bp, Homo sapiens
ttttagattttggct

SEQ ID NO: 717786 - DNA, 15 bp, Homo sapiens
tttagattttggctg

SEQ ID NO: 717787 - DNA, 15 bp, Homo sapiens
ttagattttggctga

SEQ ID NO: 717788 - DNA, 15 bp, Homo sapiens
tagattttggctgaa

SEQ ID NO: 717789 - DNA, 15 bp, Homo sapiens
agattttggctgaaa

SEQ ID NO: 717790 - DNA, 15 bp, Homo sapiens
gattttggctgaaac

SEQ ID NO: 717791 - DNA, 15 bp, Homo sapiens
attttggctgaaact

SEQ ID NO: 717792 - DNA, 15 bp, Homo sapiens
ttttggctgaaactg

SEQ ID NO: 717793 - DNA, 15 bp, Homo sapiens
tttggctgaaactga

SEQ ID NO: 717794 - DNA, 15 bp, Homo sapiens
ttggctgaaactgag

SEQ ID NO: 717795 - DNA, 15 bp, Homo sapiens
tggctgaaactgagt

SEQ ID NO: 717796 - DNA, 15 bp, Homo sapiens
ggctgaaactgagtg

SEQ ID NO: 717797 - DNA, 15 bp, Homo sapiens
gctgaaactgagtga

SEQ ID NO: 717798 - DNA, 15 bp, Homo sapiens
ctgaaactgagtgag

SEQ ID NO: 717799 - DNA, 15 bp, Homo sapiens
tgaaactgagtgagc

SEQ ID NO: 717800 - DNA, 15 bp, Homo sapiens
gaaactgagtgagca

SEQ ID NO: 717801 - DNA, 15 bp, Homo sapiens
aaactgagtgagcag

SEQ ID NO: 717802 - DNA, 15 bp, Homo sapiens
aactgagtgagcaga

SEQ ID NO: 717803 - DNA, 15 bp, Homo sapiens
actgagtgagcagaa

SEQ ID NO: 717804 - DNA, 15 bp, Homo sapiens
ctgagtgagcagaat

SEQ ID NO: 717805 - DNA, 15 bp, Homo sapiens
tgagtgagcagaatt

SEQ ID NO: 717806 - DNA, 15 bp, Homo sapiens
gagtgagcagaattc

SEQ ID NO: 717807 - DNA, 15 bp, Homo sapiens
agtgagcagaattcc

SEQ ID NO: 717808 - DNA, 15 bp, Homo sapiens
gtgagcagaattcct

SEQ ID NO: 717809 - DNA, 15 bp, Homo sapiens
tgagcagaattccta

SEQ ID NO: 717810 - DNA, 15 bp, Homo sapiens
gagcagaattcctaa

SEQ ID NO: 717811 - DNA, 15 bp, Homo sapiens
agcagaattcctaaa

SEQ ID NO: 717812 - DNA, 15 bp, Homo sapiens
gcagaattcctaaag

SEQ ID NO: 717813 - DNA, 15 bp, Homo sapiens
cagaattcctaaaga

SEQ ID NO: 717814 - DNA, 15 bp, Homo sapiens
agaattcctaaagat

SEQ ID NO: 717815 - DNA, 15 bp, Homo sapiens
gaattcctaaagatg

SEQ ID NO: 717816 - DNA, 15 bp, Homo sapiens
aattcctaaagatga

SEQ ID NO: 717817 - DNA, 15 bp, Homo sapiens
attcctaaagatgaa

SEQ ID NO: 717818 - DNA, 15 bp, Homo sapiens
ttcctaaagatgaag

SEQ ID NO: 717819 - DNA, 15 bp, Homo sapiens
tcctaaagatgaaga

SEQ ID NO: 717820 - DNA, 15 bp, Homo sapiens
cctaaagatgaagaa

SEQ ID NO: 717821 - DNA, 15 bp, Homo sapiens
ctaaagatgaagaaa

SEQ ID NO: 717822 - DNA, 15 bp, Homo sapiens
taaagatgaagaaac

SEQ ID NO: 717823 - DNA, 15 bp, Homo sapiens
aaagatgaagaaact

SEQ ID NO: 717824 - DNA, 15 bp, Homo sapiens
aagatgaagaaactg

SEQ ID NO: 717825 - DNA, 15 bp, Homo sapiens
agatgaagaaactgt

SEQ ID NO: 717826 - DNA, 15 bp, Homo sapiens
gatgaagaaactgtt

SEQ ID NO: 717827 - DNA, 15 bp, Homo sapiens
atgaagaaactgttc

SEQ ID NO: 717828 - DNA, 15 bp, Homo sapiens
tgaagaaactgttcc

SEQ ID NO: 717829 - DNA, 15 bp, Homo sapiens
gaagaaactgttcca

SEQ ID NO: 717830 - DNA, 15 bp, Homo sapiens
aagaaactgttccaa

SEQ ID NO: 717831 - DNA, 15 bp, Homo sapiens
agaaactgttccaat

SEQ ID NO: 717832 - DNA, 15 bp, Homo sapiens
gaaactgttccaatg

SEQ ID NO: 717833 - DNA, 15 bp, Homo sapiens
aaactgttccaatga

SEQ ID NO: 717834 - DNA, 15 bp, Homo sapiens
aactgttccaatgaa

SEQ ID NO: 717835 - DNA, 15 bp, Homo sapiens
actgttccaatgaac

SEQ ID NO: 717836 - DNA, 15 bp, Homo sapiens
ctgttccaatgaaca

SEQ ID NO: 717837 - DNA, 15 bp, Homo sapiens
tgttccaatgaacag

SEQ ID NO: 717838 - DNA, 15 bp, Homo sapiens
gttccaatgaacagt

SEQ ID NO: 717839 - DNA, 15 bp, Homo sapiens
ttccaatgaacagtg

SEQ ID NO: 717840 - DNA, 15 bp, Homo sapiens
tccaatgaacagtgc

SEQ ID NO: 717841 - DNA, 15 bp, Homo sapiens
ccaatgaacagtgca

SEQ ID NO: 717842 - DNA, 15 bp, Homo sapiens
caatgaacagtgcaa

SEQ ID NO: 717843 - DNA, 15 bp, Homo sapiens
aatgaacagtgcaag

SEQ ID NO: 717844 - DNA, 15 bp, Homo sapiens
atgaacagtgcaagc

SEQ ID NO: 717845 - DNA, 15 bp, Homo sapiens
tgaacagtgcaagct

SEQ ID NO: 717846 - DNA, 15 bp, Homo sapiens
gaacagtgcaagctg

SEQ ID NO: 717847 - DNA, 15 bp, Homo sapiens
aacagtgcaagctga

SEQ ID NO: 717848 - DNA, 15 bp, Homo sapiens
acagtgcaagctgac

SEQ ID NO: 717849 - DNA, 15 bp, Homo sapiens
cagtgcaagctgacc

SEQ ID NO: 717850 - DNA, 15 bp, Homo sapiens
agtgcaagctgaccc

SEQ ID NO: 717851 - DNA, 15 bp, Homo sapiens
gtgcaagctgacccc

SEQ ID NO: 717852 - DNA, 15 bp, Homo sapiens
tgcaagctgacccca

SEQ ID NO: 717853 - DNA, 15 bp, Homo sapiens
gcaagctgaccccat

SEQ ID NO: 717854 - DNA, 15 bp, Homo sapiens
caagctgaccccata

SEQ ID NO: 717855 - DNA, 15 bp, Homo sapiens
aagctgaccccatag

SEQ ID NO: 717856 - DNA, 15 bp, Homo sapiens
agctgaccccatagg

SEQ ID NO: 717857 - DNA, 15 bp, Homo sapiens
gctgaccccataggc

SEQ ID NO: 717858 - DNA, 15 bp, Homo sapiens
ctgaccccataggca

SEQ ID NO: 717859 - DNA, 15 bp, Homo sapiens
tgaccccataggcat

SEQ ID NO: 717860 - DNA, 15 bp, Homo sapiens
gaccccataggcatg

SEQ ID NO: 717861 - DNA, 15 bp, Homo sapiens
accccataggcatgc

SEQ ID NO: 717862 - DNA, 15 bp, Homo sapiens
ccccataggcatgct

SEQ ID NO: 717863 - DNA, 15 bp, Homo sapiens
cccataggcatgctt

SEQ ID NO: 717864 - DNA, 15 bp, Homo sapiens
ccataggcatgcttt

SEQ ID NO: 717865 - DNA, 15 bp, Homo sapiens
cataggcatgcttta

SEQ ID NO: 717866 - DNA, 15 bp, Homo sapiens
ataggcatgctttac

SEQ ID NO: 717867 - DNA, 15 bp, Homo sapiens
taggcatgctttaca

SEQ ID NO: 717868 - DNA, 15 bp, Homo sapiens
aggcatgctttacac

SEQ ID NO: 717869 - DNA, 15 bp, Homo sapiens
ggcatgctttacaca

SEQ ID NO: 717870 - DNA, 15 bp, Homo sapiens
gcatgctttacacac

SEQ ID NO: 717871 - DNA, 15 bp, Homo sapiens
catgctttacacacg

SEQ ID NO: 717872 - DNA, 15 bp, Homo sapiens
atgctttacacacgc

SEQ ID NO: 717873 - DNA, 15 bp, Homo sapiens
tgctttacacacgcc

SEQ ID NO: 717874 - DNA, 15 bp, Homo sapiens
gctttacacacgccg

SEQ ID NO: 717875 - DNA, 15 bp, Homo sapiens
ctttacacacgccgt

SEQ ID NO: 717876 - DNA, 15 bp, Homo sapiens
tttacacacgccgtg

SEQ ID NO: 717877 - DNA, 15 bp, Homo sapiens
ttacacacgccgtgt

SEQ ID NO: 717878 - DNA, 15 bp, Homo sapiens
tacacacgccgtgta

SEQ ID NO: 717879 - DNA, 15 bp, Homo sapiens
acacacgccgtgtaa

SEQ ID NO: 717880 - DNA, 15 bp, Homo sapiens
cacacgccgtgtaaa

SEQ ID NO: 717881 - DNA, 15 bp, Homo sapiens
acacgccgtgtaaat

SEQ ID NO: 717882 - DNA, 15 bp, Homo sapiens
cacgccgtgtaaatg

SEQ ID NO: 717883 - DNA, 15 bp, Homo sapiens
acgccgtgtaaatgt

SEQ ID NO: 717884 - DNA, 15 bp, Homo sapiens
cgccgtgtaaatgtt

SEQ ID NO: 717885 - DNA, 15 bp, Homo sapiens
gccgtgtaaatgtta

SEQ ID NO: 717886 - DNA, 15 bp, Homo sapiens
ccgtgtaaatgttaa

SEQ ID NO: 717887 - DNA, 15 bp, Homo sapiens
cgtgtaaatgttaaa

SEQ ID NO: 717888 - DNA, 15 bp, Homo sapiens
gtgtaaatgttaaat

SEQ ID NO: 717889 - DNA, 15 bp, Homo sapiens
tgtaaatgttaaatg

SEQ ID NO: 717890 - DNA, 15 bp, Homo sapiens
gtaaatgttaaatgc

SEQ ID NO: 717891 - DNA, 15 bp, Homo sapiens
taaatgttaaatgct

SEQ ID NO: 717892 - DNA, 15 bp, Homo sapiens
aaatgttaaatgctg

SEQ ID NO: 717893 - DNA, 15 bp, Homo sapiens
aatgttaaatgctgt

SEQ ID NO: 717894 - DNA, 15 bp, Homo sapiens
atgttaaatgctgta

SEQ ID NO: 717895 - DNA, 15 bp, Homo sapiens
tgttaaatgctgtac

SEQ ID NO: 717896 - DNA, 15 bp, Homo sapiens
gttaaatgctgtact

SEQ ID NO: 717897 - DNA, 15 bp, Homo sapiens
ttaaatgctgtactc

SEQ ID NO: 717898 - DNA, 15 bp, Homo sapiens
taaatgctgtactcg

SEQ ID NO: 717899 - DNA, 15 bp, Homo sapiens
aaatgctgtactcga

SEQ ID NO: 717900 - DNA, 15 bp, Homo sapiens
aatgctgtactcgat

SEQ ID NO: 717901 - DNA, 15 bp, Homo sapiens
atgctgtactcgatg

SEQ ID NO: 717902 - DNA, 15 bp, Homo sapiens
tgctgtactcgatga

SEQ ID NO: 717903 - DNA, 15 bp, Homo sapiens
gctgtactcgatgaa

SEQ ID NO: 717904 - DNA, 15 bp, Homo sapiens
ctgtactcgatgaaa

SEQ ID NO: 717905 - DNA, 15 bp, Homo sapiens
tgtactcgatgaaaa

SEQ ID NO: 717906 - DNA, 15 bp, Homo sapiens
gtactcgatgaaaat

SEQ ID NO: 717907 - DNA, 15 bp, Homo sapiens
tactcgatgaaaatg

SEQ ID NO: 717908 - DNA, 15 bp, Homo sapiens
actcgatgaaaatga

SEQ ID NO: 717909 - DNA, 15 bp, Homo sapiens
ctcgatgaaaatgat

SEQ ID NO: 717910 - DNA, 15 bp, Homo sapiens
tcgatgaaaatgatt

SEQ ID NO: 717911 - DNA, 15 bp, Homo sapiens
cgatgaaaatgattg

SEQ ID NO: 717912 - DNA, 15 bp, Homo sapiens
gatgaaaatgattgc

SEQ ID NO: 717913 - DNA, 15 bp, Homo sapiens
atgaaaatgattgct

SEQ ID NO: 717914 - DNA, 15 bp, Homo sapiens
tgaaaatgattgctc

SEQ ID NO: 717915 - DNA, 15 bp, Homo sapiens
gaaaatgattgctct

SEQ ID NO: 717916 - DNA, 15 bp, Homo sapiens
aaaatgattgctcta

SEQ ID NO: 717917 - DNA, 15 bp, Homo sapiens
aaatgattgctctat

SEQ ID NO: 717918 - DNA, 15 bp, Homo sapiens
aatgattgctctata

SEQ ID NO: 717919 - DNA, 15 bp, Homo sapiens
atgattgctctataa

SEQ ID NO: 717920 - DNA, 15 bp, Homo sapiens
tgattgctctataac

SEQ ID NO: 717921 - DNA, 15 bp, Homo sapiens
gattgctctataacc

SEQ ID NO: 717922 - DNA, 15 bp, Homo sapiens
attgctctataaccg

SEQ ID NO: 717923 - DNA, 15 bp, Homo sapiens
ttgctctataaccgt

SEQ ID NO: 717924 - DNA, 15 bp, Homo sapiens
tgctctataaccgtt

SEQ ID NO: 717925 - DNA, 15 bp, Homo sapiens
gctctataaccgttc

SEQ ID NO: 717926 - DNA, 15 bp, Homo sapiens
ctctataaccgttca

SEQ ID NO: 717927 - DNA, 15 bp, Homo sapiens
tctataaccgttcat

SEQ ID NO: 717928 - DNA, 15 bp, Homo sapiens
ctataaccgttcata

SEQ ID NO: 717929 - DNA, 15 bp, Homo sapiens
tataaccgttcatac

SEQ ID NO: 717930 - DNA, 15 bp, Homo sapiens
ataaccgttcataca

SEQ ID NO: 717931 - DNA, 15 bp, Homo sapiens
taaccgttcatacat

SEQ ID NO: 717932 - DNA, 15 bp, Homo sapiens
aaccgttcatacatt

SEQ ID NO: 717933 - DNA, 15 bp, Homo sapiens
accgttcatacattt

SEQ ID NO: 717934 - DNA, 15 bp, Homo sapiens
ccgttcatacatttt

SEQ ID NO: 717935 - DNA, 15 bp, Homo sapiens
cgttcatacatttta

SEQ ID NO: 717936 - DNA, 15 bp, Homo sapiens
gttcatacattttag

SEQ ID NO: 717937 - DNA, 15 bp, Homo sapiens
ttcatacattttagg

SEQ ID NO: 717938 - DNA, 15 bp, Homo sapiens
tcatacattttaggt

SEQ ID NO: 717939 - DNA, 15 bp, Homo sapiens
catacattttaggtg

SEQ ID NO: 717940 - DNA, 15 bp, Homo sapiens
atacattttaggtgc

SEQ ID NO: 717941 - DNA, 15 bp, Homo sapiens
tacattttaggtgca

SEQ ID NO: 717942 - DNA, 15 bp, Homo sapiens
acattttaggtgcat

SEQ ID NO: 717943 - DNA, 15 bp, Homo sapiens
cattttaggtgcatg

SEQ ID NO: 717944 - DNA, 15 bp, Homo sapiens
attttaggtgcatgt

SEQ ID NO: 717945 - DNA, 15 bp, Homo sapiens
ttttaggtgcatgtt

SEQ ID NO: 717946 - DNA, 15 bp, Homo sapiens
tttaggtgcatgttg

SEQ ID NO: 717947 - DNA, 15 bp, Homo sapiens
ttaggtgcatgttgt

SEQ ID NO: 717948 - DNA, 15 bp, Homo sapiens
taggtgcatgttgtt

SEQ ID NO: 717949 - DNA, 15 bp, Homo sapiens
aggtgcatgttgttt

SEQ ID NO: 717950 - DNA, 15 bp, Homo sapiens
ggtgcatgttgtttt

SEQ ID NO: 717951 - DNA, 15 bp, Homo sapiens
gtgcatgttgttttg

SEQ ID NO: 717952 - DNA, 15 bp, Homo sapiens
tgcatgttgttttga

SEQ ID NO: 717953 - DNA, 15 bp, Homo sapiens
gcatgttgttttgat

SEQ ID NO: 717954 - DNA, 15 bp, Homo sapiens
catgttgttttgata

SEQ ID NO: 717955 - DNA, 15 bp, Homo sapiens
atgttgttttgatag

SEQ ID NO: 717956 - DNA, 15 bp, Homo sapiens
tgttgttttgatagc

SEQ ID NO: 717957 - DNA, 15 bp, Homo sapiens
gttgttttgatagcc

SEQ ID NO: 717958 - DNA, 15 bp, Homo sapiens
ttgttttgatagcct

SEQ ID NO: 717959 - DNA, 15 bp, Homo sapiens
tgttttgatagcctt

SEQ ID NO: 717960 - DNA, 15 bp, Homo sapiens
gttttgatagccttg

SEQ ID NO: 717961 - DNA, 15 bp, Homo sapiens
ttttgatagccttga

SEQ ID NO: 717962 - DNA, 15 bp, Homo sapiens
tttgatagccttgac

SEQ ID NO: 717963 - DNA, 15 bp, Homo sapiens
ttgatagccttgact

SEQ ID NO: 717964 - DNA, 15 bp, Homo sapiens
tgatagccttgactg

SEQ ID NO: 717965 - DNA, 15 bp, Homo sapiens
gatagccttgactga

SEQ ID NO: 717966 - DNA, 15 bp, Homo sapiens
atagccttgactgac

SEQ ID NO: 717967 - DNA, 15 bp, Homo sapiens
tagccttgactgact

SEQ ID NO: 717968 - DNA, 15 bp, Homo sapiens
agccttgactgactt

SEQ ID NO: 717969 - DNA, 15 bp, Homo sapiens
gccttgactgacttg

SEQ ID NO: 717970 - DNA, 15 bp, Homo sapiens
ccttgactgacttgg

SEQ ID NO: 717971 - DNA, 15 bp, Homo sapiens
cttgactgacttggt

SEQ ID NO: 717972 - DNA, 15 bp, Homo sapiens
ttgactgacttggtt

SEQ ID NO: 717973 - DNA, 15 bp, Homo sapiens
tgactgacttggttt

SEQ ID NO: 717974 - DNA, 15 bp, Homo sapiens
gactgacttggtttc

SEQ ID NO: 717975 - DNA, 15 bp, Homo sapiens
actgacttggtttct

SEQ ID NO: 717976 - DNA, 15 bp, Homo sapiens
ctgacttggtttctt

SEQ ID NO: 717977 - DNA, 15 bp, Homo sapiens
tgacttggtttcttt

SEQ ID NO: 717978 - DNA, 15 bp, Homo sapiens
gacttggtttctttt

SEQ ID NO: 717979 - DNA, 15 bp, Homo sapiens
acttggtttcttttg

SEQ ID NO: 717980 - DNA, 15 bp, Homo sapiens
cttggtttcttttgc

SEQ ID NO: 717981 - DNA, 15 bp, Homo sapiens
ttggtttcttttgca

SEQ ID NO: 717982 - DNA, 15 bp, Homo sapiens
tggtttcttttgcag

SEQ ID NO: 717983 - DNA, 15 bp, Homo sapiens
ggtttcttttgcaga

SEQ ID NO: 717984 - DNA, 15 bp, Homo sapiens
gtttcttttgcagat

SEQ ID NO: 717985 - DNA, 15 bp, Homo sapiens
tttcttttgcagata

SEQ ID NO: 717986 - DNA, 15 bp, Homo sapiens
ttcttttgcagataa

SEQ ID NO: 717987 - DNA, 15 bp, Homo sapiens
tcttttgcagataac

SEQ ID NO: 717988 - DNA, 15 bp, Homo sapiens
cttttgcagataacc

SEQ ID NO: 717989 - DNA, 15 bp, Homo sapiens
ttttgcagataacct

SEQ ID NO: 717990 - DNA, 15 bp, Homo sapiens
tttgcagataacctt

SEQ ID NO: 717991 - DNA, 15 bp, Homo sapiens
ttgcagataaccttc

SEQ ID NO: 717992 - DNA, 15 bp, Homo sapiens
tgcagataaccttct

SEQ ID NO: 717993 - DNA, 15 bp, Homo sapiens
gcagataaccttctg

SEQ ID NO: 717994 - DNA, 15 bp, Homo sapiens
cagataaccttctgt

SEQ ID NO: 717995 - DNA, 15 bp, Homo sapiens
agataaccttctgtt

SEQ ID NO: 717996 - DNA, 15 bp, Homo sapiens
gataaccttctgttc

SEQ ID NO: 717997 - DNA, 15 bp, Homo sapiens
ataaccttctgttcg

SEQ ID NO: 717998 - DNA, 15 bp, Homo sapiens
taaccttctgttcgg

SEQ ID NO: 717999 - DNA, 15 bp, Homo sapiens
aaccttctgttcggt

SEQ ID NO: 718000 - DNA, 15 bp, Homo sapiens
accttctgttcggtg

SEQ ID NO: 718001 - DNA, 15 bp, Homo sapiens
ccttctgttcggtga

SEQ ID NO: 718002 - DNA, 15 bp, Homo sapiens
cttctgttcggtgat

SEQ ID NO: 718003 - DNA, 15 bp, Homo sapiens
ttctgttcggtgatg

SEQ ID NO: 718004 - DNA, 15 bp, Homo sapiens
tctgttcggtgatga

SEQ ID NO: 718005 - DNA, 15 bp, Homo sapiens
ctgttcggtgatgaa

SEQ ID NO: 718006 - DNA, 15 bp, Homo sapiens
tgttcggtgatgaaa

SEQ ID NO: 718007 - DNA, 15 bp, Homo sapiens
gttcggtgatgaaat

SEQ ID NO: 718008 - DNA, 15 bp, Homo sapiens
ttcggtgatgaaatt

SEQ ID NO: 718009 - DNA, 15 bp, Homo sapiens
tcggtgatgaaatta

SEQ ID NO: 718010 - DNA, 15 bp, Homo sapiens
cggtgatgaaattat

SEQ ID NO: 718011 - DNA, 15 bp, Homo sapiens
ggtgatgaaattatc

SEQ ID NO: 718012 - DNA, 15 bp, Homo sapiens
gtgatgaaattatca

SEQ ID NO: 718013 - DNA, 15 bp, Homo sapiens
tgatgaaattatcac

SEQ ID NO: 718014 - DNA, 15 bp, Homo sapiens
gatgaaattatcact

SEQ ID NO: 718015 - DNA, 15 bp, Homo sapiens
atgaaattatcacta

SEQ ID NO: 718016 - DNA, 15 bp, Homo sapiens
tgaaattatcactaa

SEQ ID NO: 718017 - DNA, 15 bp, Homo sapiens
gaaattatcactaat

SEQ ID NO: 718018 - DNA, 15 bp, Homo sapiens
aaattatcactaatg

SEQ ID NO: 718019 - DNA, 15 bp, Homo sapiens
aattatcactaatgg

SEQ ID NO: 718020 - DNA, 15 bp, Homo sapiens
attatcactaatggt

SEQ ID NO: 718021 - DNA, 15 bp, Homo sapiens
ttatcactaatggtt

SEQ ID NO: 718022 - DNA, 15 bp, Homo sapiens
tatcactaatggttt

SEQ ID NO: 718023 - DNA, 15 bp, Homo sapiens
atcactaatggtttt

SEQ ID NO: 718024 - DNA, 15 bp, Homo sapiens
tcactaatggttttc

SEQ ID NO: 718025 - DNA, 15 bp, Homo sapiens
cactaatggttttca

SEQ ID NO: 718026 - DNA, 15 bp, Homo sapiens
actaatggttttcat

SEQ ID NO: 718027 - DNA, 15 bp, Homo sapiens
ctaatggttttcatt

SEQ ID NO: 718028 - DNA, 15 bp, Homo sapiens
taatggttttcattc

SEQ ID NO: 718029 - DNA, 15 bp, Homo sapiens
aatggttttcattcc

SEQ ID NO: 718030 - DNA, 15 bp, Homo sapiens
atggttttcattcct

SEQ ID NO: 718031 - DNA, 15 bp, Homo sapiens
tggttttcattcctg

SEQ ID NO: 718032 - DNA, 15 bp, Homo sapiens
ggttttcattcctgt

SEQ ID NO: 718033 - DNA, 15 bp, Homo sapiens
gttttcattcctgtg

SEQ ID NO: 718034 - DNA, 15 bp, Homo sapiens
ttttcattcctgtga

SEQ ID NO: 718035 - DNA, 15 bp, Homo sapiens
tttcattcctgtgaa

SEQ ID NO: 718036 - DNA, 15 bp, Homo sapiens
ttcattcctgtgaaa

SEQ ID NO: 718037 - DNA, 15 bp, Homo sapiens
tcattcctgtgaaag

SEQ ID NO: 718038 - DNA, 15 bp, Homo sapiens
cattcctgtgaaagt

SEQ ID NO: 718039 - DNA, 15 bp, Homo sapiens
attcctgtgaaagtg

SEQ ID NO: 718040 - DNA, 15 bp, Homo sapiens
ttcctgtgaaagtga

SEQ ID NO: 718041 - DNA, 15 bp, Homo sapiens
tcctgtgaaagtgat

SEQ ID NO: 718042 - DNA, 15 bp, Homo sapiens
cctgtgaaagtgatg

SEQ ID NO: 718043 - DNA, 15 bp, Homo sapiens
ctgtgaaagtgatga

SEQ ID NO: 718044 - DNA, 15 bp, Homo sapiens
tgtgaaagtgatgag

SEQ ID NO: 718045 - DNA, 15 bp, Homo sapiens
gtgaaagtgatgagg

SEQ ID NO: 718046 - DNA, 15 bp, Homo sapiens
tgaaagtgatgagga

SEQ ID NO: 718047 - DNA, 15 bp, Homo sapiens
gaaagtgatgaggag

SEQ ID NO: 718048 - DNA, 15 bp, Homo sapiens
aaagtgatgaggagg

SEQ ID NO: 718049 - DNA, 15 bp, Homo sapiens
aagtgatgaggagga

SEQ ID NO: 718050 - DNA, 15 bp, Homo sapiens
agtgatgaggaggat

SEQ ID NO: 718051 - DNA, 15 bp, Homo sapiens
gtgatgaggaggata

SEQ ID NO: 718052 - DNA, 15 bp, Homo sapiens
tgatgaggaggatag

SEQ ID NO: 718053 - DNA, 15 bp, Homo sapiens
gatgaggaggataga

SEQ ID NO: 718054 - DNA, 15 bp, Homo sapiens
atgaggaggatagag

SEQ ID NO: 718055 - DNA, 15 bp, Homo sapiens
tgaggaggatagagc

SEQ ID NO: 718056 - DNA, 15 bp, Homo sapiens
gaggaggatagagcc

SEQ ID NO: 718057 - DNA, 15 bp, Homo sapiens
aggaggatagagcct

SEQ ID NO: 718058 - DNA, 15 bp, Homo sapiens
ggaggatagagcctc

SEQ ID NO: 718059 - DNA, 15 bp, Homo sapiens
gaggatagagcctca

SEQ ID NO: 718060 - DNA, 15 bp, Homo sapiens
aggatagagcctcac

SEQ ID NO: 718061 - DNA, 15 bp, Homo sapiens
ggatagagcctcaca

SEQ ID NO: 718062 - DNA, 15 bp, Homo sapiens
gatagagcctcacat

SEQ ID NO: 718063 - DNA, 15 bp, Homo sapiens
atagagcctcacatg

SEQ ID NO: 718064 - DNA, 15 bp, Homo sapiens
tagagcctcacatgc

SEQ ID NO: 718065 - DNA, 15 bp, Homo sapiens
agagcctcacatgca

SEQ ID NO: 718066 - DNA, 15 bp, Homo sapiens
gagcctcacatgcaa

SEQ ID NO: 718067 - DNA, 15 bp, Homo sapiens
agcctcacatgcaag

SEQ ID NO: 718068 - DNA, 15 bp, Homo sapiens
gcctcacatgcaagc

SEQ ID NO: 718069 - DNA, 15 bp, Homo sapiens
cctcacatgcaagct

SEQ ID NO: 718070 - DNA, 15 bp, Homo sapiens
ctcacatgcaagctc

SEQ ID NO: 718071 - DNA, 15 bp, Homo sapiens
tcacatgcaagctct

SEQ ID NO: 718072 - DNA, 15 bp, Homo sapiens
cacatgcaagctcta

SEQ ID NO: 718073 - DNA, 15 bp, Homo sapiens
acatgcaagctctag

SEQ ID NO: 718074 - DNA, 15 bp, Homo sapiens
catgcaagctctagt

SEQ ID NO: 718075 - DNA, 15 bp, Homo sapiens
atgcaagctctagtg

SEQ ID NO: 718076 - DNA, 15 bp, Homo sapiens
tgcaagctctagtga

SEQ ID NO: 718077 - DNA, 15 bp, Homo sapiens
gcaagctctagtgac

SEQ ID NO: 718078 - DNA, 15 bp, Homo sapiens
caagctctagtgact

SEQ ID NO: 718079 - DNA, 15 bp, Homo sapiens
aagctctagtgactg

SEQ ID NO: 718080 - DNA, 15 bp, Homo sapiens
agctctagtgactgg

SEQ ID NO: 718081 - DNA, 15 bp, Homo sapiens
gctctagtgactgga

SEQ ID NO: 718082 - DNA, 15 bp, Homo sapiens
ctctagtgactggac

SEQ ID NO: 718083 - DNA, 15 bp, Homo sapiens
tctagtgactggact

SEQ ID NO: 718084 - DNA, 15 bp, Homo sapiens
ctagtgactggactc

SEQ ID NO: 718085 - DNA, 15 bp, Homo sapiens
tagtgactggactcc

SEQ ID NO: 718086 - DNA, 15 bp, Homo sapiens
agtgactggactcca

SEQ ID NO: 718087 - DNA, 15 bp, Homo sapiens
gtgactggactccaa

SEQ ID NO: 718088 - DNA, 15 bp, Homo sapiens
tgactggactccaag

SEQ ID NO: 718089 - DNA, 15 bp, Homo sapiens
gactggactccaagg

SEQ ID NO: 718090 - DNA, 15 bp, Homo sapiens
actggactccaaggc

SEQ ID NO: 718091 - DNA, 15 bp, Homo sapiens
ctggactccaaggcc

SEQ ID NO: 718092 - DNA, 15 bp, Homo sapiens
tggactccaaggcca

SEQ ID NO: 718093 - DNA, 15 bp, Homo sapiens
ggactccaaggccac

SEQ ID NO: 718094 - DNA, 15 bp, Homo sapiens
gactccaaggccacg

SEQ ID NO: 718095 - DNA, 15 bp, Homo sapiens
actccaaggccacgg

SEQ ID NO: 718096 - DNA, 15 bp, Homo sapiens
ctccaaggccacgga

SEQ ID NO: 718097 - DNA, 15 bp, Homo sapiens
tccaaggccacggat

SEQ ID NO: 718098 - DNA, 15 bp, Homo sapiens
ccaaggccacggata

SEQ ID NO: 718099 - DNA, 15 bp, Homo sapiens
caaggccacggatag

SEQ ID NO: 718100 - DNA, 15 bp, Homo sapiens
aaggccacggatagg

SEQ ID NO: 718101 - DNA, 15 bp, Homo sapiens
aggccacggataggt

SEQ ID NO: 718102 - DNA, 15 bp, Homo sapiens
ggccacggataggta

SEQ ID NO: 718103 - DNA, 15 bp, Homo sapiens
gccacggataggtat

SEQ ID NO: 718104 - DNA, 15 bp, Homo sapiens
ccacggataggtatg

SEQ ID NO: 718105 - DNA, 15 bp, Homo sapiens
cacggataggtatgg

SEQ ID NO: 718106 - DNA, 15 bp, Homo sapiens
acggataggtatggc

SEQ ID NO: 718107 - DNA, 15 bp, Homo sapiens
cggataggtatggct

SEQ ID NO: 718108 - DNA, 15 bp, Homo sapiens
ggataggtatggctc

SEQ ID NO: 718109 - DNA, 15 bp, Homo sapiens
gataggtatggctca

SEQ ID NO: 718110 - DNA, 15 bp, Homo sapiens
ataggtatggctcag

SEQ ID NO: 718111 - DNA, 15 bp, Homo sapiens
taggtatggctcaga

SEQ ID NO: 718112 - DNA, 15 bp, Homo sapiens
aggtatggctcagag

SEQ ID NO: 718113 - DNA, 15 bp, Homo sapiens
ggtatggctcagagc

SEQ ID NO: 718114 - DNA, 15 bp, Homo sapiens
gtatggctcagagct

SEQ ID NO: 718115 - DNA, 15 bp, Homo sapiens
tatggctcagagctg

SEQ ID NO: 718116 - DNA, 15 bp, Homo sapiens
atggctcagagctgt

SEQ ID NO: 718117 - DNA, 15 bp, Homo sapiens
tggctcagagctgtt

SEQ ID NO: 718118 - DNA, 15 bp, Homo sapiens
ggctcagagctgtta

SEQ ID NO: 718119 - DNA, 15 bp, Homo sapiens
gctcagagctgttaa

SEQ ID NO: 718120 - DNA, 15 bp, Homo sapiens
ctcagagctgttaat

SEQ ID NO: 718121 - DNA, 15 bp, Homo sapiens
tcagagctgttaatt

SEQ ID NO: 718122 - DNA, 15 bp, Homo sapiens
cagagctgttaattt

SEQ ID NO: 718123 - DNA, 15 bp, Homo sapiens
agagctgttaatttt

SEQ ID NO: 718124 - DNA, 15 bp, Homo sapiens
gagctgttaatttta

SEQ ID NO: 718125 - DNA, 15 bp, Homo sapiens
agctgttaattttag

SEQ ID NO: 718126 - DNA, 15 bp, Homo sapiens
gctgttaattttaga

SEQ ID NO: 718127 - DNA, 15 bp, Homo sapiens
ctgttaattttagag

SEQ ID NO: 718128 - DNA, 15 bp, Homo sapiens
tgttaattttagaga

SEQ ID NO: 718129 - DNA, 15 bp, Homo sapiens
gttaattttagagag

SEQ ID NO: 718130 - DNA, 15 bp, Homo sapiens
ttaattttagagagt

SEQ ID NO: 718131 - DNA, 15 bp, Homo sapiens
taattttagagagta

SEQ ID NO: 718132 - DNA, 15 bp, Homo sapiens
aattttagagagtaa

SEQ ID NO: 718133 - DNA, 15 bp, Homo sapiens
attttagagagtaaa

SEQ ID NO: 718134 - DNA, 15 bp, Homo sapiens
ttttagagagtaaat

SEQ ID NO: 718135 - DNA, 15 bp, Homo sapiens
tttagagagtaaatg

SEQ ID NO: 718136 - DNA, 15 bp, Homo sapiens
ttagagagtaaatgt

SEQ ID NO: 718137 - DNA, 15 bp, Homo sapiens
tagagagtaaatgta

SEQ ID NO: 718138 - DNA, 15 bp, Homo sapiens
agagagtaaatgtac

SEQ ID NO: 718139 - DNA, 15 bp, Homo sapiens
gagagtaaatgtacg

SEQ ID NO: 718140 - DNA, 15 bp, Homo sapiens
agagtaaatgtacgg

SEQ ID NO: 718141 - DNA, 15 bp, Homo sapiens
gagtaaatgtacggt

SEQ ID NO: 718142 - DNA, 15 bp, Homo sapiens
agtaaatgtacggtt

SEQ ID NO: 718143 - DNA, 15 bp, Homo sapiens
gtaaatgtacggttt

SEQ ID NO: 718144 - DNA, 15 bp, Homo sapiens
taaatgtacggtttt

SEQ ID NO: 718145 - DNA, 15 bp, Homo sapiens
aaatgtacggttttt

SEQ ID NO: 718146 - DNA, 15 bp, Homo sapiens
aatgtacggtttttg

SEQ ID NO: 718147 - DNA, 15 bp, Homo sapiens
atgtacggtttttgg

SEQ ID NO: 718148 - DNA, 15 bp, Homo sapiens
tgtacggtttttggt

SEQ ID NO: 718149 - DNA, 15 bp, Homo sapiens
gtacggtttttggtt

SEQ ID NO: 718150 - DNA, 15 bp, Homo sapiens
tacggtttttggttt

SEQ ID NO: 718151 - DNA, 15 bp, Homo sapiens
acggtttttggtttg

SEQ ID NO: 718152 - DNA, 15 bp, Homo sapiens
cggtttttggtttgt

SEQ ID NO: 718153 - DNA, 15 bp, Homo sapiens
ggtttttggtttgtt

SEQ ID NO: 718154 - DNA, 15 bp, Homo sapiens
gtttttggtttgttt

SEQ ID NO: 718155 - DNA, 15 bp, Homo sapiens
tttttggtttgtttg

SEQ ID NO: 718156 - DNA, 15 bp, Homo sapiens
ttttggtttgtttgt

SEQ ID NO: 718157 - DNA, 15 bp, Homo sapiens
tttggtttgtttgtt

SEQ ID NO: 718158 - DNA, 15 bp, Homo sapiens
ttggtttgtttgttt

SEQ ID NO: 718159 - DNA, 15 bp, Homo sapiens
tggtttgtttgtttt

SEQ ID NO: 718160 - DNA, 15 bp, Homo sapiens
ggtttgtttgttttg

SEQ ID NO: 718161 - DNA, 15 bp, Homo sapiens
gtttgtttgttttga

SEQ ID NO: 718162 - DNA, 15 bp, Homo sapiens
tttgtttgttttgag

SEQ ID NO: 718163 - DNA, 15 bp, Homo sapiens
ttgtttgttttgaga

SEQ ID NO: 718164 - DNA, 15 bp, Homo sapiens
tgtttgttttgagac

SEQ ID NO: 718165 - DNA, 15 bp, Homo sapiens
gtttgttttgagaca

SEQ ID NO: 718166 - DNA, 15 bp, Homo sapiens
tttgttttgagacag

SEQ ID NO: 718167 - DNA, 15 bp, Homo sapiens
ttgttttgagacaga

SEQ ID NO: 718168 - DNA, 15 bp, Homo sapiens
tgttttgagacagag

SEQ ID NO: 718169 - DNA, 15 bp, Homo sapiens
gttttgagacagagt

SEQ ID NO: 718170 - DNA, 15 bp, Homo sapiens
tgagacagagtttcg

SEQ ID NO: 718171 - DNA, 15 bp, Homo sapiens
gagacagagtttcgc

SEQ ID NO: 718172 - DNA, 15 bp, Homo sapiens
agacagagtttcgct

SEQ ID NO: 718173 - DNA, 15 bp, Homo sapiens
gacagagtttcgctc

SEQ ID NO: 718174 - DNA, 15 bp, Homo sapiens
acagagtttcgctct

SEQ ID NO: 718175 - DNA, 15 bp, Homo sapiens
cagagtttcgctctt

SEQ ID NO: 718176 - DNA, 15 bp, Homo sapiens
agagtttcgctcttg

SEQ ID NO: 718177 - DNA, 15 bp, Homo sapiens
gtttcgctcttgttg

SEQ ID NO: 718178 - DNA, 15 bp, Homo sapiens
tttcgctcttgttgc

SEQ ID NO: 718179 - DNA, 15 bp, Homo sapiens
ttcgctcttgttgcg

SEQ ID NO: 718180 - DNA, 15 bp, Homo sapiens
tcgctcttgttgcgg

SEQ ID NO: 718181 - DNA, 15 bp, Homo sapiens
cgctcttgttgcgga

SEQ ID NO: 718182 - DNA, 15 bp, Homo sapiens
gctcttgttgcggag

SEQ ID NO: 718183 - DNA, 15 bp, Homo sapiens
ctcttgttgcggagg

SEQ ID NO: 718184 - DNA, 15 bp, Homo sapiens
tcttgttgcggaggc

SEQ ID NO: 718185 - DNA, 15 bp, Homo sapiens
cttgttgcggaggct

SEQ ID NO: 718186 - DNA, 15 bp, Homo sapiens
ttgttgcggaggctg

SEQ ID NO: 718187 - DNA, 15 bp, Homo sapiens
tgttgcggaggctgg

SEQ ID NO: 718188 - DNA, 15 bp, Homo sapiens
gttgcggaggctgga

SEQ ID NO: 718189 - DNA, 15 bp, Homo sapiens
ttgcggaggctggag

SEQ ID NO: 718190 - DNA, 15 bp, Homo sapiens
tgcggaggctggagt

SEQ ID NO: 718191 - DNA, 15 bp, Homo sapiens
gcggaggctggagtg

SEQ ID NO: 718192 - DNA, 15 bp, Homo sapiens
cggaggctggagtgc

SEQ ID NO: 718193 - DNA, 15 bp, Homo sapiens
ggaggctggagtgca

SEQ ID NO: 718194 - DNA, 15 bp, Homo sapiens
gaggctggagtgcaa

SEQ ID NO: 718195 - DNA, 15 bp, Homo sapiens
ggagtgcaatggcgc

SEQ ID NO: 718196 - DNA, 15 bp, Homo sapiens
gagtgcaatggcgcg

SEQ ID NO: 718197 - DNA, 15 bp, Homo sapiens
agtgcaatggcgcga

SEQ ID NO: 718198 - DNA, 15 bp, Homo sapiens
gtgcaatggcgcgat

SEQ ID NO: 718199 - DNA, 15 bp, Homo sapiens
tgcaatggcgcgatc

SEQ ID NO: 718200 - DNA, 15 bp, Homo sapiens
gcaatggcgcgatct

SEQ ID NO: 718201 - DNA, 15 bp, Homo sapiens
caatggcgcgatctc

SEQ ID NO: 718202 - DNA, 15 bp, Homo sapiens
aatggcgcgatctcg

SEQ ID NO: 718203 - DNA, 15 bp, Homo sapiens
atggcgcgatctcgg

SEQ ID NO: 718204 - DNA, 15 bp, Homo sapiens
atctcggctcaccgt

SEQ ID NO: 718205 - DNA, 15 bp, Homo sapiens
tctcggctcaccgta

SEQ ID NO: 718206 - DNA, 15 bp, Homo sapiens
ctcggctcaccgtac

SEQ ID NO: 718207 - DNA, 15 bp, Homo sapiens
tcggctcaccgtacc

SEQ ID NO: 718208 - DNA, 15 bp, Homo sapiens
cggctcaccgtaccc

SEQ ID NO: 718209 - DNA, 15 bp, Homo sapiens
ggctcaccgtaccct

SEQ ID NO: 718210 - DNA, 15 bp, Homo sapiens
gctcaccgtaccctc

SEQ ID NO: 718211 - DNA, 15 bp, Homo sapiens
ctcaccgtaccctcc

SEQ ID NO: 718212 - DNA, 15 bp, Homo sapiens
tcaccgtaccctccg

SEQ ID NO: 718213 - DNA, 15 bp, Homo sapiens
caccgtaccctccgc

SEQ ID NO: 718214 - DNA, 15 bp, Homo sapiens
accgtaccctccgcc

SEQ ID NO: 718215 - DNA, 15 bp, Homo sapiens
ccgtaccctccgcct

SEQ ID NO: 718216 - DNA, 15 bp, Homo sapiens
cgtaccctccgcctt

SEQ ID NO: 718217 - DNA, 15 bp, Homo sapiens
gtaccctccgccttc

SEQ ID NO: 718218 - DNA, 15 bp, Homo sapiens
taccctccgccttcc

SEQ ID NO: 718219 - DNA, 15 bp, Homo sapiens
accctccgccttcca

SEQ ID NO: 718220 - DNA, 15 bp, Homo sapiens
ccctccgccttccag

SEQ ID NO: 718221 - DNA, 15 bp, Homo sapiens
cctccgccttccagg

SEQ ID NO: 718222 - DNA, 15 bp, Homo sapiens
ctccgccttccaggt

SEQ ID NO: 718223 - DNA, 15 bp, Homo sapiens
tccgccttccaggtt

SEQ ID NO: 718224 - DNA, 15 bp, Homo sapiens
ccgccttccaggttc

SEQ ID NO: 718225 - DNA, 15 bp, Homo sapiens
cgccttccaggttca

SEQ ID NO: 718226 - DNA, 15 bp, Homo sapiens
gccttccaggttcaa

SEQ ID NO: 718227 - DNA, 15 bp, Homo sapiens
ccttccaggttcaag

SEQ ID NO: 718228 - DNA, 15 bp, Homo sapiens
cttccaggttcaagc

SEQ ID NO: 718229 - DNA, 15 bp, Homo sapiens
ttccaggttcaagcg

SEQ ID NO: 718230 - DNA, 15 bp, Homo sapiens
tccaggttcaagcga

SEQ ID NO: 718231 - DNA, 15 bp, Homo sapiens
tgcctcagcctcccc

SEQ ID NO: 718232 - DNA, 15 bp, Homo sapiens
gcctcagcctcccca

SEQ ID NO: 718233 - DNA, 15 bp, Homo sapiens
cctcagcctccccag

SEQ ID NO: 718234 - DNA, 15 bp, Homo sapiens
ctcagcctccccagc

SEQ ID NO: 718235 - DNA, 15 bp, Homo sapiens
tcagcctccccagca

SEQ ID NO: 718236 - DNA, 15 bp, Homo sapiens
cagcctccccagcag

SEQ ID NO: 718237 - DNA, 15 bp, Homo sapiens
agcctccccagcagc

SEQ ID NO: 718238 - DNA, 15 bp, Homo sapiens
gcctccccagcagct

SEQ ID NO: 718239 - DNA, 15 bp, Homo sapiens
cctccccagcagctg

SEQ ID NO: 718240 - DNA, 15 bp, Homo sapiens
ctccccagcagctgg

SEQ ID NO: 718241 - DNA, 15 bp, Homo sapiens
tccccagcagctggg

SEQ ID NO: 718242 - DNA, 15 bp, Homo sapiens
ccccagcagctggga

SEQ ID NO: 718243 - DNA, 15 bp, Homo sapiens
cccagcagctgggat

SEQ ID NO: 718244 - DNA, 15 bp, Homo sapiens
ccagcagctgggatt

SEQ ID NO: 718245 - DNA, 15 bp, Homo sapiens
cagcagctgggatta

SEQ ID NO: 718246 - DNA, 15 bp, Homo sapiens
agcagctgggattac

SEQ ID NO: 718247 - DNA, 15 bp, Homo sapiens
gcagctgggattaca

SEQ ID NO: 718248 - DNA, 15 bp, Homo sapiens
cagctgggattacat

SEQ ID NO: 718249 - DNA, 15 bp, Homo sapiens
agctgggattacatg

SEQ ID NO: 718250 - DNA, 15 bp, Homo sapiens
gctgggattacatgc

SEQ ID NO: 718251 - DNA, 15 bp, Homo sapiens
ctgggattacatgca

SEQ ID NO: 718252 - DNA, 15 bp, Homo sapiens
tgggattacatgcat

SEQ ID NO: 718253 - DNA, 15 bp, Homo sapiens
gggattacatgcata

SEQ ID NO: 718254 - DNA, 15 bp, Homo sapiens
ggattacatgcatat

SEQ ID NO: 718255 - DNA, 15 bp, Homo sapiens
gattacatgcatatg

SEQ ID NO: 718256 - DNA, 15 bp, Homo sapiens
attacatgcatatgc

SEQ ID NO: 718257 - DNA, 15 bp, Homo sapiens
ttacatgcatatgcc

SEQ ID NO: 718258 - DNA, 15 bp, Homo sapiens
tacatgcatatgcca

SEQ ID NO: 718259 - DNA, 15 bp, Homo sapiens
acatgcatatgccac

SEQ ID NO: 718260 - DNA, 15 bp, Homo sapiens
catgcatatgccact

SEQ ID NO: 718261 - DNA, 15 bp, Homo sapiens
atgcatatgccacta

SEQ ID NO: 718262 - DNA, 15 bp, Homo sapiens
tgcatatgccactac

SEQ ID NO: 718263 - DNA, 15 bp, Homo sapiens
gcatatgccactacg

SEQ ID NO: 718264 - DNA, 15 bp, Homo sapiens
catatgccactacgc

SEQ ID NO: 718265 - DNA, 15 bp, Homo sapiens
atatgccactacgcc

SEQ ID NO: 718266 - DNA, 15 bp, Homo sapiens
tatgccactacgccc

SEQ ID NO: 718267 - DNA, 15 bp, Homo sapiens
atgccactacgcccg

SEQ ID NO: 718268 - DNA, 15 bp, Homo sapiens
tgccactacgcccgg

SEQ ID NO: 718269 - DNA, 15 bp, Homo sapiens
gccactacgcccggc

SEQ ID NO: 718270 - DNA, 15 bp, Homo sapiens
ccactacgcccggct

SEQ ID NO: 718271 - DNA, 15 bp, Homo sapiens
cactacgcccggcta

SEQ ID NO: 718272 - DNA, 15 bp, Homo sapiens
actacgcccggctaa

SEQ ID NO: 718273 - DNA, 15 bp, Homo sapiens
ctacgcccggctaat

SEQ ID NO: 718274 - DNA, 15 bp, Homo sapiens
tacgcccggctaatt

SEQ ID NO: 718275 - DNA, 15 bp, Homo sapiens
cccggctaattttga

SEQ ID NO: 718276 - DNA, 15 bp, Homo sapiens
ccggctaattttgaa

SEQ ID NO: 718277 - DNA, 15 bp, Homo sapiens
cggctaattttgaat

SEQ ID NO: 718278 - DNA, 15 bp, Homo sapiens
ggctaattttgaatt

SEQ ID NO: 718279 - DNA, 15 bp, Homo sapiens
gctaattttgaattt

SEQ ID NO: 718280 - DNA, 15 bp, Homo sapiens
ctaattttgaatttt

SEQ ID NO: 718281 - DNA, 15 bp, Homo sapiens
taattttgaattttt

SEQ ID NO: 718282 - DNA, 15 bp, Homo sapiens
aattttgaattttta

SEQ ID NO: 718283 - DNA, 15 bp, Homo sapiens
attttgaatttttag

SEQ ID NO: 718284 - DNA, 15 bp, Homo sapiens
ttttgaatttttagt

SEQ ID NO: 718285 - DNA, 15 bp, Homo sapiens
tttgaatttttagta

SEQ ID NO: 718286 - DNA, 15 bp, Homo sapiens
ttgaatttttagtag

SEQ ID NO: 718287 - DNA, 15 bp, Homo sapiens
tgaatttttagtaga

SEQ ID NO: 718288 - DNA, 15 bp, Homo sapiens
gaatttttagtagag

SEQ ID NO: 718289 - DNA, 15 bp, Homo sapiens
ggtcaggctggtctt

SEQ ID NO: 718290 - DNA, 15 bp, Homo sapiens
gtcaggctggtcttg

SEQ ID NO: 718291 - DNA, 15 bp, Homo sapiens
tcaggctggtcttga

SEQ ID NO: 718292 - DNA, 15 bp, Homo sapiens
cttgaactcccgacc

SEQ ID NO: 718293 - DNA, 15 bp, Homo sapiens
ttgaactcccgacct

SEQ ID NO: 718294 - DNA, 15 bp, Homo sapiens
tgaactcccgacctc

SEQ ID NO: 718295 - DNA, 15 bp, Homo sapiens
gaactcccgacctca

SEQ ID NO: 718296 - DNA, 15 bp, Homo sapiens
aactcccgacctcag

SEQ ID NO: 718297 - DNA, 15 bp, Homo sapiens
actcccgacctcagg

SEQ ID NO: 718298 - DNA, 15 bp, Homo sapiens
ctcccgacctcaggt

SEQ ID NO: 718299 - DNA, 15 bp, Homo sapiens
tcccgacctcaggtg

SEQ ID NO: 718300 - DNA, 15 bp, Homo sapiens
cccgacctcaggtga

SEQ ID NO: 718301 - DNA, 15 bp, Homo sapiens
ccgacctcaggtgat

SEQ ID NO: 718302 - DNA, 15 bp, Homo sapiens
cgacctcaggtgatc

SEQ ID NO: 718303 - DNA, 15 bp, Homo sapiens
gacctcaggtgatcc

SEQ ID NO: 718304 - DNA, 15 bp, Homo sapiens
cctcaggtgatccgt

SEQ ID NO: 718305 - DNA, 15 bp, Homo sapiens
ctcaggtgatccgtc

SEQ ID NO: 718306 - DNA, 15 bp, Homo sapiens
tcaggtgatccgtcc

SEQ ID NO: 718307 - DNA, 15 bp, Homo sapiens
caggtgatccgtccg

SEQ ID NO: 718308 - DNA, 15 bp, Homo sapiens
aggtgatccgtccgc

SEQ ID NO: 718309 - DNA, 15 bp, Homo sapiens
ggtgatccgtccgcc

SEQ ID NO: 718310 - DNA, 15 bp, Homo sapiens
tgatccgtccgcctg

SEQ ID NO: 718311 - DNA, 15 bp, Homo sapiens
gatccgtccgcctgg

SEQ ID NO: 718312 - DNA, 15 bp, Homo sapiens
atccgtccgcctggg

SEQ ID NO: 718313 - DNA, 15 bp, Homo sapiens
tccgtccgcctgggc

SEQ ID NO: 718314 - DNA, 15 bp, Homo sapiens
ccgtccgcctgggcc

SEQ ID NO: 718315 - DNA, 15 bp, Homo sapiens
cgtccgcctgggcct

SEQ ID NO: 718316 - DNA, 15 bp, Homo sapiens
gtccgcctgggcctc

SEQ ID NO: 718317 - DNA, 15 bp, Homo sapiens
tccgcctgggcctcc

SEQ ID NO: 718318 - DNA, 15 bp, Homo sapiens
ccgcctgggcctccc

SEQ ID NO: 718319 - DNA, 15 bp, Homo sapiens
cgcctgggcctccca

SEQ ID NO: 718320 - DNA, 15 bp, Homo sapiens
gcctgggcctcccaa

SEQ ID NO: 718321 - DNA, 15 bp, Homo sapiens
cctgggcctcccaaa

SEQ ID NO: 718322 - DNA, 15 bp, Homo sapiens
ctgggcctcccaaag

SEQ ID NO: 718323 - DNA, 15 bp, Homo sapiens
tgggcctcccaaagt

SEQ ID NO: 718324 - DNA, 15 bp, Homo sapiens
gggcctcccaaagtg

SEQ ID NO: 718325 - DNA, 15 bp, Homo sapiens
aggcatgtgccacct

SEQ ID NO: 718326 - DNA, 15 bp, Homo sapiens
ggcatgtgccacctt

SEQ ID NO: 718327 - DNA, 15 bp, Homo sapiens
gcatgtgccaccttg

SEQ ID NO: 718328 - DNA, 15 bp, Homo sapiens
catgtgccaccttgc

SEQ ID NO: 718329 - DNA, 15 bp, Homo sapiens
atgtgccaccttgcc

SEQ ID NO: 718330 - DNA, 15 bp, Homo sapiens
tgtgccaccttgccc

SEQ ID NO: 718331 - DNA, 15 bp, Homo sapiens
gtgccaccttgcccc

SEQ ID NO: 718332 - DNA, 15 bp, Homo sapiens
tgccaccttgcccca

SEQ ID NO: 718333 - DNA, 15 bp, Homo sapiens
gccaccttgccccac

SEQ ID NO: 718334 - DNA, 15 bp, Homo sapiens
ccaccttgccccacc

SEQ ID NO: 718335 - DNA, 15 bp, Homo sapiens
caccttgccccacct

SEQ ID NO: 718336 - DNA, 15 bp, Homo sapiens
accttgccccacctc

SEQ ID NO: 718337 - DNA, 15 bp, Homo sapiens
ccttgccccacctca

SEQ ID NO: 718338 - DNA, 15 bp, Homo sapiens
cttgccccacctcac

SEQ ID NO: 718339 - DNA, 15 bp, Homo sapiens
ttgccccacctcact

SEQ ID NO: 718340 - DNA, 15 bp, Homo sapiens
tgccccacctcactt

SEQ ID NO: 718341 - DNA, 15 bp, Homo sapiens
gccccacctcacttg

SEQ ID NO: 718342 - DNA, 15 bp, Homo sapiens
ccccacctcacttgt

SEQ ID NO: 718343 - DNA, 15 bp, Homo sapiens
cccacctcacttgtc

SEQ ID NO: 718344 - DNA, 15 bp, Homo sapiens
ccacctcacttgtcc

SEQ ID NO: 718345 - DNA, 15 bp, Homo sapiens
cacctcacttgtccc

SEQ ID NO: 718346 - DNA, 15 bp, Homo sapiens
acctcacttgtcccc

SEQ ID NO: 718347 - DNA, 15 bp, Homo sapiens
cctcacttgtcccct

SEQ ID NO: 718348 - DNA, 15 bp, Homo sapiens
ctcacttgtcccctt

SEQ ID NO: 718349 - DNA, 15 bp, Homo sapiens
tcacttgtccccttt

SEQ ID NO: 718350 - DNA, 15 bp, Homo sapiens
cacttgtcccctttt

SEQ ID NO: 718351 - DNA, 15 bp, Homo sapiens
acttgtccccttttt

SEQ ID NO: 718352 - DNA, 15 bp, Homo sapiens
cttgtcccctttttg

SEQ ID NO: 718353 - DNA, 15 bp, Homo sapiens
ttgtcccctttttgt

SEQ ID NO: 718354 - DNA, 15 bp, Homo sapiens
tgtcccctttttgtg

SEQ ID NO: 718355 - DNA, 15 bp, Homo sapiens
gtcccctttttgtgt

SEQ ID NO: 718356 - DNA, 15 bp, Homo sapiens
tcccctttttgtgta

SEQ ID NO: 718357 - DNA, 15 bp, Homo sapiens
cccctttttgtgtag

SEQ ID NO: 718358 - DNA, 15 bp, Homo sapiens
ccctttttgtgtagt

SEQ ID NO: 718359 - DNA, 15 bp, Homo sapiens
cctttttgtgtagtg

SEQ ID NO: 718360 - DNA, 15 bp, Homo sapiens
ctttttgtgtagtgt

SEQ ID NO: 718361 - DNA, 15 bp, Homo sapiens
tttttgtgtagtgtt

SEQ ID NO: 718362 - DNA, 15 bp, Homo sapiens
ttttgtgtagtgttc

SEQ ID NO: 718363 - DNA, 15 bp, Homo sapiens
tttgtgtagtgttct

SEQ ID NO: 718364 - DNA, 15 bp, Homo sapiens
ttgtgtagtgttctt

SEQ ID NO: 718365 - DNA, 15 bp, Homo sapiens
tgtgtagtgttcttc

SEQ ID NO: 718366 - DNA, 15 bp, Homo sapiens
gtgtagtgttcttca

SEQ ID NO: 718367 - DNA, 15 bp, Homo sapiens
tgtagtgttcttcat

SEQ ID NO: 718368 - DNA, 15 bp, Homo sapiens
gtagtgttcttcatc

SEQ ID NO: 718369 - DNA, 15 bp, Homo sapiens
tagtgttcttcatcc

SEQ ID NO: 718370 - DNA, 15 bp, Homo sapiens
agtgttcttcatccg

SEQ ID NO: 718371 - DNA, 15 bp, Homo sapiens
gtgttcttcatccgg

SEQ ID NO: 718372 - DNA, 15 bp, Homo sapiens
tgttcttcatccggt

SEQ ID NO: 718373 - DNA, 15 bp, Homo sapiens
gttcttcatccggtt

SEQ ID NO: 718374 - DNA, 15 bp, Homo sapiens
ttcttcatccggtta

SEQ ID NO: 718375 - DNA, 15 bp, Homo sapiens
tcttcatccggttag

SEQ ID NO: 718376 - DNA, 15 bp, Homo sapiens
cttcatccggttaga

SEQ ID NO: 718377 - DNA, 15 bp, Homo sapiens
ttcatccggttagaa

SEQ ID NO: 718378 - DNA, 15 bp, Homo sapiens
tcatccggttagaat

SEQ ID NO: 718379 - DNA, 15 bp, Homo sapiens
catccggttagaata

SEQ ID NO: 718380 - DNA, 15 bp, Homo sapiens
atccggttagaatat

SEQ ID NO: 718381 - DNA, 15 bp, Homo sapiens
tccggttagaatatc

SEQ ID NO: 718382 - DNA, 15 bp, Homo sapiens
ccggttagaatatct

SEQ ID NO: 718383 - DNA, 15 bp, Homo sapiens
cggttagaatatctt

SEQ ID NO: 718384 - DNA, 15 bp, Homo sapiens
ggttagaatatcttc

SEQ ID NO: 718385 - DNA, 15 bp, Homo sapiens
gttagaatatcttcc

SEQ ID NO: 718386 - DNA, 15 bp, Homo sapiens
ttagaatatcttcct

SEQ ID NO: 718387 - DNA, 15 bp, Homo sapiens
tagaatatcttcctc

SEQ ID NO: 718388 - DNA, 15 bp, Homo sapiens
agaatatcttcctcc

SEQ ID NO: 718389 - DNA, 15 bp, Homo sapiens
gaatatcttcctccc

SEQ ID NO: 718390 - DNA, 15 bp, Homo sapiens
aatatcttcctccct

SEQ ID NO: 718391 - DNA, 15 bp, Homo sapiens
atatcttcctccctc

SEQ ID NO: 718392 - DNA, 15 bp, Homo sapiens
tatcttcctccctca

SEQ ID NO: 718393 - DNA, 15 bp, Homo sapiens
atcttcctccctcac

SEQ ID NO: 718394 - DNA, 15 bp, Homo sapiens
tcttcctccctcact

SEQ ID NO: 718395 - DNA, 15 bp, Homo sapiens
cttcctccctcactt

SEQ ID NO: 718396 - DNA, 15 bp, Homo sapiens
ttcctccctcacttc

SEQ ID NO: 718397 - DNA, 15 bp, Homo sapiens
tcctccctcacttca

SEQ ID NO: 718398 - DNA, 15 bp, Homo sapiens
cctccctcacttcat

SEQ ID NO: 718399 - DNA, 15 bp, Homo sapiens
ctccctcacttcata

SEQ ID NO: 718400 - DNA, 15 bp, Homo sapiens
tccctcacttcatat

SEQ ID NO: 718401 - DNA, 15 bp, Homo sapiens
ccctcacttcatatt

SEQ ID NO: 718402 - DNA, 15 bp, Homo sapiens
cctcacttcatattc

SEQ ID NO: 718403 - DNA, 15 bp, Homo sapiens
ctcacttcatattcc

SEQ ID NO: 718404 - DNA, 15 bp, Homo sapiens
tcacttcatattcct

SEQ ID NO: 718405 - DNA, 15 bp, Homo sapiens
cacttcatattcctt

SEQ ID NO: 718406 - DNA, 15 bp, Homo sapiens
acttcatattccttg

SEQ ID NO: 718407 - DNA, 15 bp, Homo sapiens
cttcatattccttgt

SEQ ID NO: 718408 - DNA, 15 bp, Homo sapiens
ttcatattccttgtt

SEQ ID NO: 718409 - DNA, 15 bp, Homo sapiens
tcatattccttgttt

SEQ ID NO: 718410 - DNA, 15 bp, Homo sapiens
catattccttgtttt

SEQ ID NO: 718411 - DNA, 15 bp, Homo sapiens
atattccttgttttt

SEQ ID NO: 718412 - DNA, 15 bp, Homo sapiens
tattccttgtttttt

SEQ ID NO: 718413 - DNA, 15 bp, Homo sapiens
attccttgttttttc

SEQ ID NO: 718414 - DNA, 15 bp, Homo sapiens
ttccttgttttttca

SEQ ID NO: 718415 - DNA, 15 bp, Homo sapiens
tccttgttttttcac

SEQ ID NO: 718416 - DNA, 15 bp, Homo sapiens
ccttgttttttcact

SEQ ID NO: 718417 - DNA, 15 bp, Homo sapiens
cttgttttttcactt

SEQ ID NO: 718418 - DNA, 15 bp, Homo sapiens
ttgttttttcacttt

SEQ ID NO: 718419 - DNA, 15 bp, Homo sapiens
tgttttttcacttta

SEQ ID NO: 718420 - DNA, 15 bp, Homo sapiens
gttttttcactttat

SEQ ID NO: 718421 - DNA, 15 bp, Homo sapiens
ttttttcactttatt

SEQ ID NO: 718422 - DNA, 15 bp, Homo sapiens
tttttcactttattg

SEQ ID NO: 718423 - DNA, 15 bp, Homo sapiens
ttttcactttattgt

SEQ ID NO: 718424 - DNA, 15 bp, Homo sapiens
tttcactttattgta

SEQ ID NO: 718425 - DNA, 15 bp, Homo sapiens
ttcactttattgtac

SEQ ID NO: 718426 - DNA, 15 bp, Homo sapiens
tcactttattgtaca

SEQ ID NO: 718427 - DNA, 15 bp, Homo sapiens
cactttattgtacac

SEQ ID NO: 718428 - DNA, 15 bp, Homo sapiens
actttattgtacact

SEQ ID NO: 718429 - DNA, 15 bp, Homo sapiens
ctttattgtacactt

SEQ ID NO: 718430 - DNA, 15 bp, Homo sapiens
tttattgtacactta

SEQ ID NO: 718431 - DNA, 15 bp, Homo sapiens
ttattgtacacttac

SEQ ID NO: 718432 - DNA, 15 bp, Homo sapiens
tattgtacacttacc

SEQ ID NO: 718433 - DNA, 15 bp, Homo sapiens
attgtacacttacca

SEQ ID NO: 718434 - DNA, 15 bp, Homo sapiens
ttgtacacttaccac

SEQ ID NO: 718435 - DNA, 15 bp, Homo sapiens
tgtacacttaccact

SEQ ID NO: 718436 - DNA, 15 bp, Homo sapiens
gtacacttaccactt

SEQ ID NO: 718437 - DNA, 15 bp, Homo sapiens
tacacttaccacttc

SEQ ID NO: 718438 - DNA, 15 bp, Homo sapiens
acacttaccacttct

SEQ ID NO: 718439 - DNA, 15 bp, Homo sapiens
cacttaccacttctt

SEQ ID NO: 718440 - DNA, 15 bp, Homo sapiens
acttaccacttcttg

SEQ ID NO: 718441 - DNA, 15 bp, Homo sapiens
cttaccacttcttga

SEQ ID NO: 718442 - DNA, 15 bp, Homo sapiens
ttaccacttcttgaa

SEQ ID NO: 718443 - DNA, 15 bp, Homo sapiens
taccacttcttgaaa

SEQ ID NO: 718444 - DNA, 15 bp, Homo sapiens
accacttcttgaaaa

SEQ ID NO: 718445 - DNA, 15 bp, Homo sapiens
ccacttcttgaaaag

SEQ ID NO: 718446 - DNA, 15 bp, Homo sapiens
cacttcttgaaaagc

SEQ ID NO: 718447 - DNA, 15 bp, Homo sapiens
acttcttgaaaagct

SEQ ID NO: 718448 - DNA, 15 bp, Homo sapiens
cttcttgaaaagctc

SEQ ID NO: 718449 - DNA, 15 bp, Homo sapiens
ttcttgaaaagctct

SEQ ID NO: 718450 - DNA, 15 bp, Homo sapiens
tcttgaaaagctctg

SEQ ID NO: 718451 - DNA, 15 bp, Homo sapiens
cttgaaaagctctgt

SEQ ID NO: 718452 - DNA, 15 bp, Homo sapiens
ttgaaaagctctgta

SEQ ID NO: 718453 - DNA, 15 bp, Homo sapiens
tgaaaagctctgtat

SEQ ID NO: 718454 - DNA, 15 bp, Homo sapiens
gaaaagctctgtatc

SEQ ID NO: 718455 - DNA, 15 bp, Homo sapiens
aaaagctctgtatct

SEQ ID NO: 718456 - DNA, 15 bp, Homo sapiens
aaagctctgtatctt

SEQ ID NO: 718457 - DNA, 15 bp, Homo sapiens
aagctctgtatctta

SEQ ID NO: 718458 - DNA, 15 bp, Homo sapiens
agctctgtatcttac

SEQ ID NO: 718459 - DNA, 15 bp, Homo sapiens
gctctgtatcttact

SEQ ID NO: 718460 - DNA, 15 bp, Homo sapiens
ctctgtatcttactt

SEQ ID NO: 718461 - DNA, 15 bp, Homo sapiens
tctgtatcttacttt

SEQ ID NO: 718462 - DNA, 15 bp, Homo sapiens
ctgtatcttactttt

SEQ ID NO: 718463 - DNA, 15 bp, Homo sapiens
tgtatcttacttttt

SEQ ID NO: 718464 - DNA, 15 bp, Homo sapiens
gtatcttacttttta

SEQ ID NO: 718465 - DNA, 15 bp, Homo sapiens
tatcttactttttaa

SEQ ID NO: 718466 - DNA, 15 bp, Homo sapiens
atcttactttttaaa

SEQ ID NO: 718467 - DNA, 15 bp, Homo sapiens
tcttactttttaaat

SEQ ID NO: 718468 - DNA, 15 bp, Homo sapiens
cttactttttaaatt

SEQ ID NO: 718469 - DNA, 15 bp, Homo sapiens
ttactttttaaattg

SEQ ID NO: 718470 - DNA, 15 bp, Homo sapiens
tactttttaaattgt

SEQ ID NO: 718471 - DNA, 15 bp, Homo sapiens
actttttaaattgtg

SEQ ID NO: 718472 - DNA, 15 bp, Homo sapiens
ctttttaaattgtgt

SEQ ID NO: 718473 - DNA, 15 bp, Homo sapiens
tttttaaattgtgtt

SEQ ID NO: 718474 - DNA, 15 bp, Homo sapiens
ttttaaattgtgttg

SEQ ID NO: 718475 - DNA, 15 bp, Homo sapiens
tttaaattgtgttgt

SEQ ID NO: 718476 - DNA, 15 bp, Homo sapiens
ttaaattgtgttgtt

SEQ ID NO: 718477 - DNA, 15 bp, Homo sapiens
taaattgtgttgttt

SEQ ID NO: 718478 - DNA, 15 bp, Homo sapiens
aaattgtgttgtttc

SEQ ID NO: 718479 - DNA, 15 bp, Homo sapiens
aattgtgttgtttcc

SEQ ID NO: 718480 - DNA, 15 bp, Homo sapiens
attgtgttgtttcct

SEQ ID NO: 718481 - DNA, 15 bp, Homo sapiens
ttgtgttgtttcctg

SEQ ID NO: 718482 - DNA, 15 bp, Homo sapiens
tgtgttgtttcctgg

SEQ ID NO: 718483 - DNA, 15 bp, Homo sapiens
gtgttgtttcctggt

SEQ ID NO: 718484 - DNA, 15 bp, Homo sapiens
tgttgtttcctggtc

SEQ ID NO: 718485 - DNA, 15 bp, Homo sapiens
gttgtttcctggtct

SEQ ID NO: 718486 - DNA, 15 bp, Homo sapiens
ttgtttcctggtcta

SEQ ID NO: 718487 - DNA, 15 bp, Homo sapiens
tgtttcctggtctag

SEQ ID NO: 718488 - DNA, 15 bp, Homo sapiens
gtttcctggtctaga

SEQ ID NO: 718489 - DNA, 15 bp, Homo sapiens
tttcctggtctagaa

SEQ ID NO: 718490 - DNA, 15 bp, Homo sapiens
ttcctggtctagaat

SEQ ID NO: 718491 - DNA, 15 bp, Homo sapiens
tcctggtctagaata

SEQ ID NO: 718492 - DNA, 15 bp, Homo sapiens
cctggtctagaatat

SEQ ID NO: 718493 - DNA, 15 bp, Homo sapiens
ctggtctagaatata

SEQ ID NO: 718494 - DNA, 15 bp, Homo sapiens
tggtctagaatataa

SEQ ID NO: 718495 - DNA, 15 bp, Homo sapiens
ggtctagaatataag

SEQ ID NO: 718496 - DNA, 15 bp, Homo sapiens
gtctagaatataagt

SEQ ID NO: 718497 - DNA, 15 bp, Homo sapiens
tctagaatataagtt

SEQ ID NO: 718498 - DNA, 15 bp, Homo sapiens
ctagaatataagttc

SEQ ID NO: 718499 - DNA, 15 bp, Homo sapiens
tagaatataagttct

SEQ ID NO: 718500 - DNA, 15 bp, Homo sapiens
agaatataagttcta

SEQ ID NO: 718501 - DNA, 15 bp, Homo sapiens
gaatataagttctac

SEQ ID NO: 718502 - DNA, 15 bp, Homo sapiens
aatataagttctacg

SEQ ID NO: 718503 - DNA, 15 bp, Homo sapiens
atataagttctacgg

SEQ ID NO: 718504 - DNA, 15 bp, Homo sapiens
tataagttctacggg

SEQ ID NO: 718505 - DNA, 15 bp, Homo sapiens
ataagttctacggga

SEQ ID NO: 718506 - DNA, 15 bp, Homo sapiens
taagttctacgggag

SEQ ID NO: 718507 - DNA, 15 bp, Homo sapiens
aagttctacgggagc

SEQ ID NO: 718508 - DNA, 15 bp, Homo sapiens
agttctacgggagca

SEQ ID NO: 718509 - DNA, 15 bp, Homo sapiens
gttctacgggagcag

SEQ ID NO: 718510 - DNA, 15 bp, Homo sapiens
ttctacgggagcagg

SEQ ID NO: 718511 - DNA, 15 bp, Homo sapiens
tctacgggagcagga

SEQ ID NO: 718512 - DNA, 15 bp, Homo sapiens
ctacgggagcaggaa

SEQ ID NO: 718513 - DNA, 15 bp, Homo sapiens
tacgggagcaggaat

SEQ ID NO: 718514 - DNA, 15 bp, Homo sapiens
acgggagcaggaatt

SEQ ID NO: 718515 - DNA, 15 bp, Homo sapiens
cgggagcaggaattt

SEQ ID NO: 718516 - DNA, 15 bp, Homo sapiens
gggagcaggaatttt

SEQ ID NO: 718517 - DNA, 15 bp, Homo sapiens
ggagcaggaattttt

SEQ ID NO: 718518 - DNA, 15 bp, Homo sapiens
gagcaggaatttttg

SEQ ID NO: 718519 - DNA, 15 bp, Homo sapiens
agcaggaatttttga

SEQ ID NO: 718520 - DNA, 15 bp, Homo sapiens
gcaggaatttttgac

SEQ ID NO: 718521 - DNA, 15 bp, Homo sapiens
caggaatttttgact

SEQ ID NO: 718522 - DNA, 15 bp, Homo sapiens
aggaatttttgactg

SEQ ID NO: 718523 - DNA, 15 bp, Homo sapiens
ggaatttttgactga

SEQ ID NO: 718524 - DNA, 15 bp, Homo sapiens
gaatttttgactgac

SEQ ID NO: 718525 - DNA, 15 bp, Homo sapiens
aatttttgactgact

SEQ ID NO: 718526 - DNA, 15 bp, Homo sapiens
atttttgactgactt

SEQ ID NO: 718527 - DNA, 15 bp, Homo sapiens
tttttgactgacttg

SEQ ID NO: 718528 - DNA, 15 bp, Homo sapiens
ttttgactgacttgt

SEQ ID NO: 718529 - DNA, 15 bp, Homo sapiens
tttgactgacttgta

SEQ ID NO: 718530 - DNA, 15 bp, Homo sapiens
ttgactgacttgtat

SEQ ID NO: 718531 - DNA, 15 bp, Homo sapiens
tgactgacttgtata

SEQ ID NO: 718532 - DNA, 15 bp, Homo sapiens
gactgacttgtatac

SEQ ID NO: 718533 - DNA, 15 bp, Homo sapiens
actgacttgtatact

SEQ ID NO: 718534 - DNA, 15 bp, Homo sapiens
ctgacttgtatactc

SEQ ID NO: 718535 - DNA, 15 bp, Homo sapiens
tgacttgtatactcc

SEQ ID NO: 718536 - DNA, 15 bp, Homo sapiens
gacttgtatactcct

SEQ ID NO: 718537 - DNA, 15 bp, Homo sapiens
acttgtatactcctg

SEQ ID NO: 718538 - DNA, 15 bp, Homo sapiens
cttgtatactcctgt

SEQ ID NO: 718539 - DNA, 15 bp, Homo sapiens
ttgtatactcctgtc

SEQ ID NO: 718540 - DNA, 15 bp, Homo sapiens
tgtatactcctgtct

SEQ ID NO: 718541 - DNA, 15 bp, Homo sapiens
gtatactcctgtctt

SEQ ID NO: 718542 - DNA, 15 bp, Homo sapiens
tatactcctgtcttt

SEQ ID NO: 718543 - DNA, 15 bp, Homo sapiens
atactcctgtctttt

SEQ ID NO: 718544 - DNA, 15 bp, Homo sapiens
tactcctgtcttttc

SEQ ID NO: 718545 - DNA, 15 bp, Homo sapiens
actcctgtcttttca

SEQ ID NO: 718546 - DNA, 15 bp, Homo sapiens
ctcctgtcttttcag

SEQ ID NO: 718547 - DNA, 15 bp, Homo sapiens
tcctgtcttttcagt

SEQ ID NO: 718548 - DNA, 15 bp, Homo sapiens
cctgtcttttcagtg

SEQ ID NO: 718549 - DNA, 15 bp, Homo sapiens
ctgtcttttcagtgc

SEQ ID NO: 718550 - DNA, 15 bp, Homo sapiens
tgtcttttcagtgcc

SEQ ID NO: 718551 - DNA, 15 bp, Homo sapiens
gtcttttcagtgcct

SEQ ID NO: 718552 - DNA, 15 bp, Homo sapiens
tcttttcagtgccta

SEQ ID NO: 718553 - DNA, 15 bp, Homo sapiens
cttttcagtgcctaa

SEQ ID NO: 718554 - DNA, 15 bp, Homo sapiens
ttttcagtgcctaaa

SEQ ID NO: 718555 - DNA, 15 bp, Homo sapiens
tttcagtgcctaaaa

SEQ ID NO: 718556 - DNA, 15 bp, Homo sapiens
ttcagtgcctaaaaa

SEQ ID NO: 718557 - DNA, 15 bp, Homo sapiens
tcagtgcctaaaaaa

SEQ ID NO: 718558 - DNA, 15 bp, Homo sapiens
cagtgcctaaaaaag

SEQ ID NO: 718559 - DNA, 15 bp, Homo sapiens
agtgcctaaaaaagt

SEQ ID NO: 718560 - DNA, 15 bp, Homo sapiens
gtgcctaaaaaagtg

SEQ ID NO: 718561 - DNA, 15 bp, Homo sapiens
tgcctaaaaaagtgc

SEQ ID NO: 718562 - DNA, 15 bp, Homo sapiens
gcctaaaaaagtgcc

SEQ ID NO: 718563 - DNA, 15 bp, Homo sapiens
cctaaaaaagtgcct

SEQ ID NO: 718564 - DNA, 15 bp, Homo sapiens
ctaaaaaagtgcctg

SEQ ID NO: 718565 - DNA, 15 bp, Homo sapiens
taaaaaagtgcctgg

SEQ ID NO: 718566 - DNA, 15 bp, Homo sapiens
aaaaaagtgcctggc

SEQ ID NO: 718567 - DNA, 15 bp, Homo sapiens
aaaaagtgcctggca

SEQ ID NO: 718568 - DNA, 15 bp, Homo sapiens
aaaagtgcctggcac

SEQ ID NO: 718569 - DNA, 15 bp, Homo sapiens
aaagtgcctggcaca

SEQ ID NO: 718570 - DNA, 15 bp, Homo sapiens
aagtgcctggcacat

SEQ ID NO: 718571 - DNA, 15 bp, Homo sapiens
agtgcctggcacata

SEQ ID NO: 718572 - DNA, 15 bp, Homo sapiens
gtgcctggcacatag

SEQ ID NO: 718573 - DNA, 15 bp, Homo sapiens
tgcctggcacatagt

SEQ ID NO: 718574 - DNA, 15 bp, Homo sapiens
gcctggcacatagtt

SEQ ID NO: 718575 - DNA, 15 bp, Homo sapiens
cctggcacatagttt

SEQ ID NO: 718576 - DNA, 15 bp, Homo sapiens
ctggcacatagtttg

SEQ ID NO: 718577 - DNA, 15 bp, Homo sapiens
tggcacatagtttgt

SEQ ID NO: 718578 - DNA, 15 bp, Homo sapiens
ggcacatagtttgtg

SEQ ID NO: 718579 - DNA, 15 bp, Homo sapiens
gcacatagtttgtgc

SEQ ID NO: 718580 - DNA, 15 bp, Homo sapiens
cacatagtttgtgct

SEQ ID NO: 718581 - DNA, 15 bp, Homo sapiens
acatagtttgtgctc

SEQ ID NO: 718582 - DNA, 15 bp, Homo sapiens
catagtttgtgctca

SEQ ID NO: 718583 - DNA, 15 bp, Homo sapiens
atagtttgtgctcaa

SEQ ID NO: 718584 - DNA, 15 bp, Homo sapiens
tagtttgtgctcaat

SEQ ID NO: 718585 - DNA, 15 bp, Homo sapiens
agtttgtgctcaata

SEQ ID NO: 718586 - DNA, 15 bp, Homo sapiens
gtttgtgctcaataa

SEQ ID NO: 718587 - DNA, 15 bp, Homo sapiens
tttgtgctcaataaa

SEQ ID NO: 718588 - DNA, 15 bp, Homo sapiens
ttgtgctcaataaat

SEQ ID NO: 718589 - DNA, 15 bp, Homo sapiens
tgtgctcaataaata

SEQ ID NO: 718590 - DNA, 15 bp, Homo sapiens
gtgctcaataaatat

SEQ ID NO: 718591 - DNA, 15 bp, Homo sapiens
tgctcaataaatatt

SEQ ID NO: 718592 - DNA, 15 bp, Homo sapiens
gctcaataaatattt

SEQ ID NO: 718593 - DNA, 15 bp, Homo sapiens
ctcaataaatattta

SEQ ID NO: 718594 - DNA, 15 bp, Homo sapiens
tcaataaatatttaa

SEQ ID NO: 718595 - DNA, 15 bp, Homo sapiens
caataaatatttaat

SEQ ID NO: 718596 - DNA, 15 bp, Homo sapiens
aataaatatttaata

SEQ ID NO: 718597 - DNA, 15 bp, Homo sapiens
ataaatatttaataa

SEQ ID NO: 718598 - DNA, 15 bp, Homo sapiens
taaatatttaataaa

SEQ ID NO: 718599 - DNA, 15 bp, Homo sapiens
aaatatttaataaat

SEQ ID NO: 718600 - DNA, 15 bp, Homo sapiens
aatatttaataaata

SEQ ID NO: 718601 - DNA, 15 bp, Homo sapiens
atatttaataaatat

SEQ ID NO: 718602 - DNA, 15 bp, Homo sapiens
tatttaataaatatg

SEQ ID NO: 718603 - DNA, 15 bp, Homo sapiens
atttaataaatatgt

SEQ ID NO: 718604 - DNA, 15 bp, Homo sapiens
tttaataaatatgtg

SEQ ID NO: 718605 - DNA, 15 bp, Homo sapiens
ttaataaatatgtga

SEQ ID NO: 718606 - DNA, 15 bp, Homo sapiens
taataaatatgtgaa

SEQ ID NO: 718607 - DNA, 15 bp, Homo sapiens
aataaatatgtgaat

SEQ ID NO: 718608 - DNA, 15 bp, Homo sapiens
ataaatatgtgaatg

SEQ ID NO: 718609 - DNA, 15 bp, Homo sapiens
taaatatgtgaatga

SEQ ID NO: 718610 - DNA, 15 bp, Homo sapiens
aaatatgtgaatgaa

SEQ ID NO: 718611 - DNA, 15 bp, Homo sapiens
aatatgtgaatgaaa

SEQ ID NO: 718612 - DNA, 15 bp, Homo sapiens
atatgtgaatgaaat

SEQ ID NO: 718613 - DNA, 15 bp, Homo sapiens
tatgtgaatgaaatg

SEQ ID NO: 718614 - DNA, 15 bp, Homo sapiens
atgtgaatgaaatgg

SEQ ID NO: 718615 - DNA, 15 bp, Homo sapiens
tgtgaatgaaatggg

SEQ ID NO: 718616 - DNA, 15 bp, Homo sapiens
gtgaatgaaatggga

SEQ ID NO: 718617 - DNA, 15 bp, Homo sapiens
tgaatgaaatgggaa

SEQ ID NO: 718618 - DNA, 15 bp, Homo sapiens
gaatgaaatgggaaa

SEQ ID NO: 718619 - DNA, 15 bp, Homo sapiens
aatgaaatgggaaag

SEQ ID NO: 718620 - DNA, 15 bp, Homo sapiens
atgaaatgggaaagt

SEQ ID NO: 718621 - DNA, 15 bp, Homo sapiens
tgaaatgggaaagta

SEQ ID NO: 718622 - DNA, 15 bp, Homo sapiens
gaaatgggaaagtat

SEQ ID NO: 718623 - DNA, 15 bp, Homo sapiens
aaatgggaaagtatt

SEQ ID NO: 718624 - DNA, 15 bp, Homo sapiens
aatgggaaagtattt

SEQ ID NO: 718625 - DNA, 15 bp, Homo sapiens
atgggaaagtatttc

SEQ ID NO: 718626 - DNA, 15 bp, Homo sapiens
tgggaaagtatttcg

SEQ ID NO: 718627 - DNA, 15 bp, Homo sapiens
gggaaagtatttcga

SEQ ID NO: 718628 - DNA, 15 bp, Homo sapiens
ggaaagtatttcgat

SEQ ID NO: 718629 - DNA, 15 bp, Homo sapiens
gaaagtatttcgatg

SEQ ID NO: 718630 - DNA, 15 bp, Homo sapiens
aaagtatttcgatgt

SEQ ID NO: 718631 - DNA, 15 bp, Homo sapiens
aagtatttcgatgta

SEQ ID NO: 718632 - DNA, 15 bp, Homo sapiens
agtatttcgatgtag

SEQ ID NO: 718633 - DNA, 15 bp, Homo sapiens
gtatttcgatgtaga

SEQ ID NO: 718634 - DNA, 15 bp, Homo sapiens
tatttcgatgtagaa

SEQ ID NO: 718635 - DNA, 15 bp, Homo sapiens
atttcgatgtagaaa

SEQ ID NO: 718636 - DNA, 15 bp, Homo sapiens
tttcgatgtagaaag

SEQ ID NO: 718637 - DNA, 15 bp, Homo sapiens
ttcgatgtagaaagc

SEQ ID NO: 718638 - DNA, 15 bp, Homo sapiens
tcgatgtagaaagca

SEQ ID NO: 718639 - DNA, 15 bp, Homo sapiens
cgatgtagaaagcat

SEQ ID NO: 718640 - DNA, 15 bp, Homo sapiens
gatgtagaaagcatt

SEQ ID NO: 718641 - DNA, 15 bp, Homo sapiens
atgtagaaagcatta

SEQ ID NO: 718642 - DNA, 15 bp, Homo sapiens
tgtagaaagcattat

SEQ ID NO: 718643 - DNA, 15 bp, Homo sapiens
gtagaaagcattatc

SEQ ID NO: 718644 - DNA, 15 bp, Homo sapiens
tagaaagcattatca

SEQ ID NO: 718645 - DNA, 15 bp, Homo sapiens
agaaagcattatcag

SEQ ID NO: 718646 - DNA, 15 bp, Homo sapiens
gaaagcattatcagt

SEQ ID NO: 718647 - DNA, 15 bp, Homo sapiens
aaagcattatcagtt

SEQ ID NO: 718648 - DNA, 15 bp, Homo sapiens
aagcattatcagttt

SEQ ID NO: 718649 - DNA, 15 bp, Homo sapiens
agcattatcagtttt

SEQ ID NO: 718650 - DNA, 15 bp, Homo sapiens
gcattatcagttttt

SEQ ID NO: 718651 - DNA, 15 bp, Homo sapiens
cattatcagtttttt

SEQ ID NO: 718652 - DNA, 15 bp, Homo sapiens
attatcagtttttta

SEQ ID NO: 718653 - DNA, 15 bp, Homo sapiens
ttatcagttttttat

SEQ ID NO: 718654 - DNA, 15 bp, Homo sapiens
tatcagttttttata

SEQ ID NO: 718655 - DNA, 15 bp, Homo sapiens
atcagttttttatac

SEQ ID NO: 718656 - DNA, 15 bp, Homo sapiens
tcagttttttatacc

SEQ ID NO: 718657 - DNA, 15 bp, Homo sapiens
cagttttttatacca

SEQ ID NO: 718658 - DNA, 15 bp, Homo sapiens
agttttttataccaa

SEQ ID NO: 718659 - DNA, 15 bp, Homo sapiens
gttttttataccaaa

SEQ ID NO: 718660 - DNA, 15 bp, Homo sapiens
ttttttataccaaag

SEQ ID NO: 718661 - DNA, 15 bp, Homo sapiens
tttttataccaaagg

SEQ ID NO: 718662 - DNA, 15 bp, Homo sapiens
ttttataccaaaggt

SEQ ID NO: 718663 - DNA, 15 bp, Homo sapiens
tttataccaaaggta

SEQ ID NO: 718664 - DNA, 15 bp, Homo sapiens
ttataccaaaggtat

SEQ ID NO: 718665 - DNA, 15 bp, Homo sapiens
tataccaaaggtata

SEQ ID NO: 718666 - DNA, 15 bp, Homo sapiens
ataccaaaggtataa

SEQ ID NO: 718667 - DNA, 15 bp, Homo sapiens
taccaaaggtataac

SEQ ID NO: 718668 - DNA, 15 bp, Homo sapiens
accaaaggtataacc

SEQ ID NO: 718669 - DNA, 15 bp, Homo sapiens
ccaaaggtataacca

SEQ ID NO: 718670 - DNA, 15 bp, Homo sapiens
caaaggtataaccat

SEQ ID NO: 718671 - DNA, 15 bp, Homo sapiens
aaaggtataaccatc

SEQ ID NO: 718672 - DNA, 15 bp, Homo sapiens
aaggtataaccatct

SEQ ID NO: 718673 - DNA, 15 bp, Homo sapiens
aggtataaccatctt

SEQ ID NO: 718674 - DNA, 15 bp, Homo sapiens
ggtataaccatcttg

SEQ ID NO: 718675 - DNA, 15 bp, Homo sapiens
gtataaccatcttga

SEQ ID NO: 718676 - DNA, 15 bp, Homo sapiens
tataaccatcttgaa

SEQ ID NO: 718677 - DNA, 15 bp, Homo sapiens
ataaccatcttgaaa

SEQ ID NO: 718678 - DNA, 15 bp, Homo sapiens
taaccatcttgaaag

SEQ ID NO: 718679 - DNA, 15 bp, Homo sapiens
aaccatcttgaaagt

SEQ ID NO: 718680 - DNA, 15 bp, Homo sapiens
accatcttgaaagtg

SEQ ID NO: 718681 - DNA, 15 bp, Homo sapiens
ccatcttgaaagtgg

SEQ ID NO: 718682 - DNA, 15 bp, Homo sapiens
catcttgaaagtgga

SEQ ID NO: 718683 - DNA, 15 bp, Homo sapiens
atcttgaaagtggat

SEQ ID NO: 718684 - DNA, 15 bp, Homo sapiens
tcttgaaagtggatc

SEQ ID NO: 718685 - DNA, 15 bp, Homo sapiens
cttgaaagtggatct

SEQ ID NO: 718686 - DNA, 15 bp, Homo sapiens
ttgaaagtggatctt

SEQ ID NO: 718687 - DNA, 15 bp, Homo sapiens
tgaaagtggatcttt

SEQ ID NO: 718688 - DNA, 15 bp, Homo sapiens
gaaagtggatctttt

SEQ ID NO: 718689 - DNA, 15 bp, Homo sapiens
aaagtggatcttttt

SEQ ID NO: 718690 - DNA, 15 bp, Homo sapiens
aagtggatctttttg

SEQ ID NO: 718691 - DNA, 15 bp, Homo sapiens
agtggatctttttgt

SEQ ID NO: 718692 - DNA, 15 bp, Homo sapiens
gtggatctttttgtg

SEQ ID NO: 718693 - DNA, 15 bp, Homo sapiens
tggatctttttgtgt

SEQ ID NO: 718694 - DNA, 15 bp, Homo sapiens
ggatctttttgtgtt

SEQ ID NO: 718695 - DNA, 15 bp, Homo sapiens
gatctttttgtgttc

SEQ ID NO: 718696 - DNA, 15 bp, Homo sapiens
atctttttgtgttct

SEQ ID NO: 718697 - DNA, 15 bp, Homo sapiens
tctttttgtgttctc

SEQ ID NO: 718698 - DNA, 15 bp, Homo sapiens
ctttttgtgttctca

SEQ ID NO: 718699 - DNA, 15 bp, Homo sapiens
tttttgtgttctcac

SEQ ID NO: 718700 - DNA, 15 bp, Homo sapiens
ttttgtgttctcact

SEQ ID NO: 718701 - DNA, 15 bp, Homo sapiens
tttgtgttctcactc

SEQ ID NO: 718702 - DNA, 15 bp, Homo sapiens
ttgtgttctcactct

SEQ ID NO: 718703 - DNA, 15 bp, Homo sapiens
tgtgttctcactctt

SEQ ID NO: 718704 - DNA, 15 bp, Homo sapiens
gtgttctcactctta

SEQ ID NO: 718705 - DNA, 15 bp, Homo sapiens
tgttctcactcttac

SEQ ID NO: 718706 - DNA, 15 bp, Homo sapiens
gttctcactcttaca

SEQ ID NO: 718707 - DNA, 15 bp, Homo sapiens
ttctcactcttacaa

SEQ ID NO: 718708 - DNA, 15 bp, Homo sapiens
tctcactcttacaaa

SEQ ID NO: 718709 - DNA, 15 bp, Homo sapiens
ctcactcttacaaat

SEQ ID NO: 718710 - DNA, 15 bp, Homo sapiens
tcactcttacaaatg

SEQ ID NO: 718711 - DNA, 15 bp, Homo sapiens
cactcttacaaatgg

SEQ ID NO: 718712 - DNA, 15 bp, Homo sapiens
actcttacaaatggc

SEQ ID NO: 718713 - DNA, 15 bp, Homo sapiens
ctcttacaaatggct

SEQ ID NO: 718714 - DNA, 15 bp, Homo sapiens
tcttacaaatggctt

SEQ ID NO: 718715 - DNA, 15 bp, Homo sapiens
cttacaaatggcttg

SEQ ID NO: 718716 - DNA, 15 bp, Homo sapiens
ttacaaatggcttga

SEQ ID NO: 718717 - DNA, 15 bp, Homo sapiens
tacaaatggcttgat

SEQ ID NO: 718718 - DNA, 15 bp, Homo sapiens
acaaatggcttgatt

SEQ ID NO: 718719 - DNA, 15 bp, Homo sapiens
caaatggcttgatta

SEQ ID NO: 718720 - DNA, 15 bp, Homo sapiens
aaatggcttgattat

SEQ ID NO: 718721 - DNA, 15 bp, Homo sapiens
aatggcttgattatt

SEQ ID NO: 718722 - DNA, 15 bp, Homo sapiens
atggcttgattattt

SEQ ID NO: 718723 - DNA, 15 bp, Homo sapiens
tggcttgattattta

SEQ ID NO: 718724 - DNA, 15 bp, Homo sapiens
ggcttgattatttaa

SEQ ID NO: 718725 - DNA, 15 bp, Homo sapiens
gcttgattatttaaa

SEQ ID NO: 718726 - DNA, 15 bp, Homo sapiens
cttgattatttaaac

SEQ ID NO: 718727 - DNA, 15 bp, Homo sapiens
ttgattatttaaaca

SEQ ID NO: 718728 - DNA, 15 bp, Homo sapiens
tgattatttaaacat

SEQ ID NO: 718729 - DNA, 15 bp, Homo sapiens
gattatttaaacata

SEQ ID NO: 718730 - DNA, 15 bp, Homo sapiens
attatttaaacatag

SEQ ID NO: 718731 - DNA, 15 bp, Homo sapiens
ttatttaaacatagt

SEQ ID NO: 718732 - DNA, 15 bp, Homo sapiens
tatttaaacatagtg

SEQ ID NO: 718733 - DNA, 15 bp, Homo sapiens
atttaaacatagtga

SEQ ID NO: 718734 - DNA, 15 bp, Homo sapiens
tttaaacatagtgaa

SEQ ID NO: 718735 - DNA, 15 bp, Homo sapiens
ttaaacatagtgaag

SEQ ID NO: 718736 - DNA, 15 bp, Homo sapiens
taaacatagtgaaga

SEQ ID NO: 718737 - DNA, 15 bp, Homo sapiens
aaacatagtgaagat

SEQ ID NO: 718738 - DNA, 15 bp, Homo sapiens
aacatagtgaagatc

SEQ ID NO: 718739 - DNA, 15 bp, Homo sapiens
acatagtgaagatca

SEQ ID NO: 718740 - DNA, 15 bp, Homo sapiens
catagtgaagatcag

SEQ ID NO: 718741 - DNA, 15 bp, Homo sapiens
atagtgaagatcagt

SEQ ID NO: 718742 - DNA, 15 bp, Homo sapiens
tagtgaagatcagtt

SEQ ID NO: 718743 - DNA, 15 bp, Homo sapiens
agtgaagatcagttt

SEQ ID NO: 718744 - DNA, 15 bp, Homo sapiens
gtgaagatcagtttc

SEQ ID NO: 718745 - DNA, 15 bp, Homo sapiens
tgaagatcagtttct

SEQ ID NO: 718746 - DNA, 15 bp, Homo sapiens
gaagatcagtttctc

SEQ ID NO: 718747 - DNA, 15 bp, Homo sapiens
aagatcagtttctct

SEQ ID NO: 718748 - DNA, 15 bp, Homo sapiens
agatcagtttctctt

SEQ ID NO: 718749 - DNA, 15 bp, Homo sapiens
gatcagtttctcttt

SEQ ID NO: 718750 - DNA, 15 bp, Homo sapiens
atcagtttctctttg

SEQ ID NO: 718751 - DNA, 15 bp, Homo sapiens
tcagtttctctttgg

SEQ ID NO: 718752 - DNA, 15 bp, Homo sapiens
cagtttctctttggt

SEQ ID NO: 718753 - DNA, 15 bp, Homo sapiens
agtttctctttggtg

SEQ ID NO: 718754 - DNA, 15 bp, Homo sapiens
gtttctctttggtgt

SEQ ID NO: 718755 - DNA, 15 bp, Homo sapiens
tttctctttggtgtc

SEQ ID NO: 718756 - DNA, 15 bp, Homo sapiens
ttctctttggtgtct

SEQ ID NO: 718757 - DNA, 15 bp, Homo sapiens
tctctttggtgtctg

SEQ ID NO: 718758 - DNA, 15 bp, Homo sapiens
ctctttggtgtctgt

SEQ ID NO: 718759 - DNA, 15 bp, Homo sapiens
tctttggtgtctgta

SEQ ID NO: 718760 - DNA, 15 bp, Homo sapiens
ctttggtgtctgtaa

SEQ ID NO: 718761 - DNA, 15 bp, Homo sapiens
tttggtgtctgtaat

SEQ ID NO: 718762 - DNA, 15 bp, Homo sapiens
ttggtgtctgtaatt

SEQ ID NO: 718763 - DNA, 15 bp, Homo sapiens
tggtgtctgtaattt

SEQ ID NO: 718764 - DNA, 15 bp, Homo sapiens
ggtgtctgtaattta

SEQ ID NO: 718765 - DNA, 15 bp, Homo sapiens
gtgtctgtaatttat

SEQ ID NO: 718766 - DNA, 15 bp, Homo sapiens
tgtctgtaatttatt

SEQ ID NO: 718767 - DNA, 15 bp, Homo sapiens
gtctgtaatttattt

SEQ ID NO: 718768 - DNA, 15 bp, Homo sapiens
tctgtaatttattta

SEQ ID NO: 718769 - DNA, 15 bp, Homo sapiens
ctgtaatttatttat

SEQ ID NO: 718770 - DNA, 15 bp, Homo sapiens
tgtaatttatttatt

SEQ ID NO: 718771 - DNA, 15 bp, Homo sapiens
gtaatttatttattt

SEQ ID NO: 718772 - DNA, 15 bp, Homo sapiens
taatttatttattta

SEQ ID NO: 718773 - DNA, 15 bp, Homo sapiens
aatttatttatttat

SEQ ID NO: 718774 - DNA, 15 bp, Homo sapiens
atttatttatttatt

SEQ ID NO: 718775 - DNA, 15 bp, Homo sapiens
tttatttatttattt

SEQ ID NO: 718776 - DNA, 15 bp, Homo sapiens
ttatttatttattta

SEQ ID NO: 718777 - DNA, 15 bp, Homo sapiens
tatttatttatttat

SEQ ID NO: 718778 - DNA, 15 bp, Homo sapiens
ttatttatttatttt

SEQ ID NO: 718779 - DNA, 15 bp, Homo sapiens
tatttatttattttt

SEQ ID NO: 718780 - DNA, 15 bp, Homo sapiens
atttatttatttttg

SEQ ID NO: 718781 - DNA, 15 bp, Homo sapiens
tttatttatttttgt

SEQ ID NO: 718782 - DNA, 15 bp, Homo sapiens
ttatttatttttgtt

SEQ ID NO: 718783 - DNA, 15 bp, Homo sapiens
tatttatttttgttt

SEQ ID NO: 718784 - DNA, 15 bp, Homo sapiens
atttatttttgtttt

SEQ ID NO: 718785 - DNA, 15 bp, Homo sapiens
tttatttttgttttc

SEQ ID NO: 718786 - DNA, 15 bp, Homo sapiens
ttatttttgttttct

SEQ ID NO: 718787 - DNA, 15 bp, Homo sapiens
tatttttgttttctc

SEQ ID NO: 718788 - DNA, 15 bp, Homo sapiens
atttttgttttctca

SEQ ID NO: 718789 - DNA, 15 bp, Homo sapiens
tttttgttttctcaa

SEQ ID NO: 718790 - DNA, 15 bp, Homo sapiens
ttttgttttctcaag

SEQ ID NO: 718791 - DNA, 15 bp, Homo sapiens
tttgttttctcaagc

SEQ ID NO: 718792 - DNA, 15 bp, Homo sapiens
ttgttttctcaagcc

SEQ ID NO: 718793 - DNA, 15 bp, Homo sapiens
tgttttctcaagcct

SEQ ID NO: 718794 - DNA, 15 bp, Homo sapiens
gttttctcaagccta

SEQ ID NO: 718795 - DNA, 15 bp, Homo sapiens
ttttctcaagcctag

SEQ ID NO: 718796 - DNA, 15 bp, Homo sapiens
tttctcaagcctagg

SEQ ID NO: 718797 - DNA, 15 bp, Homo sapiens
ttctcaagcctaggg

SEQ ID NO: 718798 - DNA, 15 bp, Homo sapiens
tctcaagcctaggga

SEQ ID NO: 718799 - DNA, 15 bp, Homo sapiens
ctcaagcctagggag

SEQ ID NO: 718800 - DNA, 15 bp, Homo sapiens
tcaagcctagggagc

SEQ ID NO: 718801 - DNA, 15 bp, Homo sapiens
caagcctagggagct

SEQ ID NO: 718802 - DNA, 15 bp, Homo sapiens
aagcctagggagctg

SEQ ID NO: 718803 - DNA, 15 bp, Homo sapiens
agcctagggagctgg

SEQ ID NO: 718804 - DNA, 15 bp, Homo sapiens
gcctagggagctggt

SEQ ID NO: 718805 - DNA, 15 bp, Homo sapiens
cctagggagctggtt

SEQ ID NO: 718806 - DNA, 15 bp, Homo sapiens
ctagggagctggttt

SEQ ID NO: 718807 - DNA, 15 bp, Homo sapiens
tagggagctggtttg

SEQ ID NO: 718808 - DNA, 15 bp, Homo sapiens
agggagctggtttga

SEQ ID NO: 718809 - DNA, 15 bp, Homo sapiens
gggagctggtttgag

SEQ ID NO: 718810 - DNA, 15 bp, Homo sapiens
ggagctggtttgagc

SEQ ID NO: 718811 - DNA, 15 bp, Homo sapiens
gagctggtttgagca

SEQ ID NO: 718812 - DNA, 15 bp, Homo sapiens
agctggtttgagcaa

SEQ ID NO: 718813 - DNA, 15 bp, Homo sapiens
gctggtttgagcaat

SEQ ID NO: 718814 - DNA, 15 bp, Homo sapiens
ctggtttgagcaatc

SEQ ID NO: 718815 - DNA, 15 bp, Homo sapiens
tggtttgagcaatct

SEQ ID NO: 718816 - DNA, 15 bp, Homo sapiens
ggtttgagcaatctc

SEQ ID NO: 718817 - DNA, 15 bp, Homo sapiens
gtttgagcaatctca

SEQ ID NO: 718818 - DNA, 15 bp, Homo sapiens
tttgagcaatctcag

SEQ ID NO: 718819 - DNA, 15 bp, Homo sapiens
ttgagcaatctcagg

SEQ ID NO: 718820 - DNA, 15 bp, Homo sapiens
tgagcaatctcaggg

SEQ ID NO: 718821 - DNA, 15 bp, Homo sapiens
gagcaatctcagggt

SEQ ID NO: 718822 - DNA, 15 bp, Homo sapiens
agcaatctcagggta

SEQ ID NO: 718823 - DNA, 15 bp, Homo sapiens
gcaatctcagggtaa

SEQ ID NO: 718824 - DNA, 15 bp, Homo sapiens
caatctcagggtaaa

SEQ ID NO: 718825 - DNA, 15 bp, Homo sapiens
aatctcagggtaaaa

SEQ ID NO: 718826 - DNA, 15 bp, Homo sapiens
atctcagggtaaaag

SEQ ID NO: 718827 - DNA, 15 bp, Homo sapiens
tctcagggtaaaaga

SEQ ID NO: 718828 - DNA, 15 bp, Homo sapiens
ctcagggtaaaagaa

SEQ ID NO: 718829 - DNA, 15 bp, Homo sapiens
tcagggtaaaagaaa

SEQ ID NO: 718830 - DNA, 15 bp, Homo sapiens
cagggtaaaagaaaa

SEQ ID NO: 718831 - DNA, 15 bp, Homo sapiens
agggtaaaagaaaat

SEQ ID NO: 718832 - DNA, 15 bp, Homo sapiens
gggtaaaagaaaatg

SEQ ID NO: 718833 - DNA, 15 bp, Homo sapiens
ggtaaaagaaaatga

SEQ ID NO: 718834 - DNA, 15 bp, Homo sapiens
gtaaaagaaaatgat

SEQ ID NO: 718835 - DNA, 15 bp, Homo sapiens
taaaagaaaatgatt

SEQ ID NO: 718836 - DNA, 15 bp, Homo sapiens
aaaagaaaatgatta

SEQ ID NO: 718837 - DNA, 15 bp, Homo sapiens
aaagaaaatgattag

SEQ ID NO: 718838 - DNA, 15 bp, Homo sapiens
aagaaaatgattagt

SEQ ID NO: 718839 - DNA, 15 bp, Homo sapiens
agaaaatgattagtt

SEQ ID NO: 718840 - DNA, 15 bp, Homo sapiens
gaaaatgattagttc

SEQ ID NO: 718841 - DNA, 15 bp, Homo sapiens
aaaatgattagttct

SEQ ID NO: 718842 - DNA, 15 bp, Homo sapiens
aaatgattagttctc

SEQ ID NO: 718843 - DNA, 15 bp, Homo sapiens
aatgattagttctca

SEQ ID NO: 718844 - DNA, 15 bp, Homo sapiens
atgattagttctcag

SEQ ID NO: 718845 - DNA, 15 bp, Homo sapiens
tgattagttctcaga

SEQ ID NO: 718846 - DNA, 15 bp, Homo sapiens
gattagttctcagaa

SEQ ID NO: 718847 - DNA, 15 bp, Homo sapiens
attagttctcagaac

SEQ ID NO: 718848 - DNA, 15 bp, Homo sapiens
ttagttctcagaaca

SEQ ID NO: 718849 - DNA, 15 bp, Homo sapiens
tagttctcagaacat

SEQ ID NO: 718850 - DNA, 15 bp, Homo sapiens
agttctcagaacatc

SEQ ID NO: 718851 - DNA, 15 bp, Homo sapiens
gttctcagaacatca

SEQ ID NO: 718852 - DNA, 15 bp, Homo sapiens
ttctcagaacatcaa

SEQ ID NO: 718853 - DNA, 15 bp, Homo sapiens
tctcagaacatcaac

SEQ ID NO: 718854 - DNA, 15 bp, Homo sapiens
ctcagaacatcaaca

SEQ ID NO: 718855 - DNA, 15 bp, Homo sapiens
tcagaacatcaacat

SEQ ID NO: 718856 - DNA, 15 bp, Homo sapiens
cagaacatcaacatt

SEQ ID NO: 718857 - DNA, 15 bp, Homo sapiens
agaacatcaacattg

SEQ ID NO: 718858 - DNA, 15 bp, Homo sapiens
gaacatcaacattgt

SEQ ID NO: 718859 - DNA, 15 bp, Homo sapiens
aacatcaacattgta

SEQ ID NO: 718860 - DNA, 15 bp, Homo sapiens
acatcaacattgtat

SEQ ID NO: 718861 - DNA, 15 bp, Homo sapiens
catcaacattgtatg

SEQ ID NO: 718862 - DNA, 15 bp, Homo sapiens
atcaacattgtatgt

SEQ ID NO: 718863 - DNA, 15 bp, Homo sapiens
tcaacattgtatgta

SEQ ID NO: 718864 - DNA, 15 bp, Homo sapiens
caacattgtatgtat

SEQ ID NO: 718865 - DNA, 15 bp, Homo sapiens
aacattgtatgtatt

SEQ ID NO: 718866 - DNA, 15 bp, Homo sapiens
acattgtatgtatta

SEQ ID NO: 718867 - DNA, 15 bp, Homo sapiens
cattgtatgtattat

SEQ ID NO: 718868 - DNA, 15 bp, Homo sapiens
attgtatgtattatc

SEQ ID NO: 718869 - DNA, 15 bp, Homo sapiens
ttgtatgtattatct

SEQ ID NO: 718870 - DNA, 15 bp, Homo sapiens
tgtatgtattatctt

SEQ ID NO: 718871 - DNA, 15 bp, Homo sapiens
gtatgtattatcttg

SEQ ID NO: 718872 - DNA, 15 bp, Homo sapiens
tatgtattatcttgg

SEQ ID NO: 718873 - DNA, 15 bp, Homo sapiens
atgtattatcttgga

SEQ ID NO: 718874 - DNA, 15 bp, Homo sapiens
tgtattatcttggaa

SEQ ID NO: 718875 - DNA, 15 bp, Homo sapiens
gtattatcttggaag

SEQ ID NO: 718876 - DNA, 15 bp, Homo sapiens
tattatcttggaaga

SEQ ID NO: 718877 - DNA, 15 bp, Homo sapiens
attatcttggaagat

SEQ ID NO: 718878 - DNA, 15 bp, Homo sapiens
ttatcttggaagatg

SEQ ID NO: 718879 - DNA, 15 bp, Homo sapiens
tatcttggaagatgg

SEQ ID NO: 718880 - DNA, 15 bp, Homo sapiens
atcttggaagatggg

SEQ ID NO: 718881 - DNA, 15 bp, Homo sapiens
tcttggaagatgggt

SEQ ID NO: 718882 - DNA, 15 bp, Homo sapiens
cttggaagatgggtt

SEQ ID NO: 718883 - DNA, 15 bp, Homo sapiens
ttggaagatgggtta

SEQ ID NO: 718884 - DNA, 15 bp, Homo sapiens
tggaagatgggttaa

SEQ ID NO: 718885 - DNA, 15 bp, Homo sapiens
ggaagatgggttaag

SEQ ID NO: 718886 - DNA, 15 bp, Homo sapiens
gaagatgggttaaga

SEQ ID NO: 718887 - DNA, 15 bp, Homo sapiens
aagatgggttaagat

SEQ ID NO: 718888 - DNA, 15 bp, Homo sapiens
agatgggttaagatc

SEQ ID NO: 718889 - DNA, 15 bp, Homo sapiens
gatgggttaagatca

SEQ ID NO: 718890 - DNA, 15 bp, Homo sapiens
atgggttaagatcaa

SEQ ID NO: 718891 - DNA, 15 bp, Homo sapiens
tgggttaagatcaaa

SEQ ID NO: 718892 - DNA, 15 bp, Homo sapiens
gggttaagatcaaat

SEQ ID NO: 718893 - DNA, 15 bp, Homo sapiens
ggttaagatcaaatt

SEQ ID NO: 718894 - DNA, 15 bp, Homo sapiens
gttaagatcaaattg

SEQ ID NO: 718895 - DNA, 15 bp, Homo sapiens
ttaagatcaaattga

SEQ ID NO: 718896 - DNA, 15 bp, Homo sapiens
taagatcaaattgaa

SEQ ID NO: 718897 - DNA, 15 bp, Homo sapiens
aagatcaaattgaaa

SEQ ID NO: 718898 - DNA, 15 bp, Homo sapiens
agatcaaattgaaaa

SEQ ID NO: 718899 - DNA, 15 bp, Homo sapiens
gatcaaattgaaaaa

SEQ ID NO: 718900 - DNA, 15 bp, Homo sapiens
atcaaattgaaaaat

SEQ ID NO: 718901 - DNA, 15 bp, Homo sapiens
tcaaattgaaaaatt

SEQ ID NO: 718902 - DNA, 15 bp, Homo sapiens
caaattgaaaaatta

SEQ ID NO: 718903 - DNA, 15 bp, Homo sapiens
aaattgaaaaattac

SEQ ID NO: 718904 - DNA, 15 bp, Homo sapiens
aattgaaaaattacc

SEQ ID NO: 718905 - DNA, 15 bp, Homo sapiens
attgaaaaattaccg

SEQ ID NO: 718906 - DNA, 15 bp, Homo sapiens
ttgaaaaattaccgg

SEQ ID NO: 718907 - DNA, 15 bp, Homo sapiens
tgaaaaattaccgga

SEQ ID NO: 718908 - DNA, 15 bp, Homo sapiens
gaaaaattaccggaa

SEQ ID NO: 718909 - DNA, 15 bp, Homo sapiens
aaaaattaccggaaa

SEQ ID NO: 718910 - DNA, 15 bp, Homo sapiens
aaaattaccggaaaa

SEQ ID NO: 718911 - DNA, 15 bp, Homo sapiens
aaattaccggaaaaa

SEQ ID NO: 718912 - DNA, 15 bp, Homo sapiens
aattaccggaaaaaa

SEQ ID NO: 718913 - DNA, 15 bp, Homo sapiens
attaccggaaaaaaa

SEQ ID NO: 718914 - DNA, 15 bp, Homo sapiens
ttaccggaaaaaaat

SEQ ID NO: 718915 - DNA, 15 bp, Homo sapiens
taccggaaaaaaatt

SEQ ID NO: 718916 - DNA, 15 bp, Homo sapiens
accggaaaaaaatta

SEQ ID NO: 718917 - DNA, 15 bp, Homo sapiens
ccggaaaaaaattaa

SEQ ID NO: 718918 - DNA, 15 bp, Homo sapiens
cggaaaaaaattaag

SEQ ID NO: 718919 - DNA, 15 bp, Homo sapiens
ggaaaaaaattaaga

SEQ ID NO: 718920 - DNA, 15 bp, Homo sapiens
gaaaaaaattaagat

SEQ ID NO: 718921 - DNA, 15 bp, Homo sapiens
aaaaaaattaagatg

SEQ ID NO: 718922 - DNA, 15 bp, Homo sapiens
aaaaaattaagatgg

SEQ ID NO: 718923 - DNA, 15 bp, Homo sapiens
aaaaattaagatggc

SEQ ID NO: 718924 - DNA, 15 bp, Homo sapiens
aaaattaagatggca

SEQ ID NO: 718925 - DNA, 15 bp, Homo sapiens
aaattaagatggcag

SEQ ID NO: 718926 - DNA, 15 bp, Homo sapiens
aattaagatggcagt

SEQ ID NO: 718927 - DNA, 15 bp, Homo sapiens
attaagatggcagtt

SEQ ID NO: 718928 - DNA, 15 bp, Homo sapiens
ttaagatggcagtta

SEQ ID NO: 718929 - DNA, 15 bp, Homo sapiens
taagatggcagttat

SEQ ID NO: 718930 - DNA, 15 bp, Homo sapiens
aagatggcagttatg

SEQ ID NO: 718931 - DNA, 15 bp, Homo sapiens
agatggcagttatgt

SEQ ID NO: 718932 - DNA, 15 bp, Homo sapiens
gatggcagttatgta

SEQ ID NO: 718933 - DNA, 15 bp, Homo sapiens
atggcagttatgtat

SEQ ID NO: 718934 - DNA, 15 bp, Homo sapiens
tggcagttatgtata

SEQ ID NO: 718935 - DNA, 15 bp, Homo sapiens
ggcagttatgtatag

SEQ ID NO: 718936 - DNA, 15 bp, Homo sapiens
gcagttatgtataga

SEQ ID NO: 718937 - DNA, 15 bp, Homo sapiens
cagttatgtatagat

SEQ ID NO: 718938 - DNA, 15 bp, Homo sapiens
agttatgtatagatt

SEQ ID NO: 718939 - DNA, 15 bp, Homo sapiens
gttatgtatagattt

SEQ ID NO: 718940 - DNA, 15 bp, Homo sapiens
ttatgtatagatttt

SEQ ID NO: 718941 - DNA, 15 bp, Homo sapiens
tatgtatagattttc

SEQ ID NO: 718942 - DNA, 15 bp, Homo sapiens
atgtatagattttca

SEQ ID NO: 718943 - DNA, 15 bp, Homo sapiens
tgtatagattttcat

SEQ ID NO: 718944 - DNA, 15 bp, Homo sapiens
gtatagattttcatt

SEQ ID NO: 718945 - DNA, 15 bp, Homo sapiens
tatagattttcattt

SEQ ID NO: 718946 - DNA, 15 bp, Homo sapiens
atagattttcatttc

SEQ ID NO: 718947 - DNA, 15 bp, Homo sapiens
tagattttcatttct

SEQ ID NO: 718948 - DNA, 15 bp, Homo sapiens
agattttcatttctt

SEQ ID NO: 718949 - DNA, 15 bp, Homo sapiens
gattttcatttcttt

SEQ ID NO: 718950 - DNA, 15 bp, Homo sapiens
attttcatttctttt

SEQ ID NO: 718951 - DNA, 15 bp, Homo sapiens
ttttcatttcttttt

SEQ ID NO: 718952 - DNA, 15 bp, Homo sapiens
tttcatttctttttc

SEQ ID NO: 718953 - DNA, 15 bp, Homo sapiens
ttcatttctttttcc

SEQ ID NO: 718954 - DNA, 15 bp, Homo sapiens
tcatttctttttcct

SEQ ID NO: 718955 - DNA, 15 bp, Homo sapiens
catttctttttcctg

SEQ ID NO: 718956 - DNA, 15 bp, Homo sapiens
atttctttttcctgt

SEQ ID NO: 718957 - DNA, 15 bp, Homo sapiens
tttctttttcctgtg

SEQ ID NO: 718958 - DNA, 15 bp, Homo sapiens
ttctttttcctgtgt

SEQ ID NO: 718959 - DNA, 15 bp, Homo sapiens
tctttttcctgtgtg

SEQ ID NO: 718960 - DNA, 15 bp, Homo sapiens
ctttttcctgtgtgg

SEQ ID NO: 718961 - DNA, 15 bp, Homo sapiens
tttttcctgtgtggt

SEQ ID NO: 718962 - DNA, 15 bp, Homo sapiens
ttttcctgtgtggtt

SEQ ID NO: 718963 - DNA, 15 bp, Homo sapiens
tttcctgtgtggttt

SEQ ID NO: 718964 - DNA, 15 bp, Homo sapiens
ttcctgtgtggtttt

SEQ ID NO: 718965 - DNA, 15 bp, Homo sapiens
tcctgtgtggtttta

SEQ ID NO: 718966 - DNA, 15 bp, Homo sapiens
cctgtgtggttttaa

SEQ ID NO: 718967 - DNA, 15 bp, Homo sapiens
ctgtgtggttttaat

SEQ ID NO: 718968 - DNA, 15 bp, Homo sapiens
tgtgtggttttaatg

SEQ ID NO: 718969 - DNA, 15 bp, Homo sapiens
gtgtggttttaatga

SEQ ID NO: 718970 - DNA, 15 bp, Homo sapiens
tgtggttttaatgat

SEQ ID NO: 718971 - DNA, 15 bp, Homo sapiens
gtggttttaatgata

SEQ ID NO: 718972 - DNA, 15 bp, Homo sapiens
tggttttaatgataa

SEQ ID NO: 718973 - DNA, 15 bp, Homo sapiens
ggttttaatgataag

SEQ ID NO: 718974 - DNA, 15 bp, Homo sapiens
gttttaatgataagt

SEQ ID NO: 718975 - DNA, 15 bp, Homo sapiens
ttttaatgataagta

SEQ ID NO: 718976 - DNA, 15 bp, Homo sapiens
tttaatgataagtag

SEQ ID NO: 718977 - DNA, 15 bp, Homo sapiens
ttaatgataagtagt

SEQ ID NO: 718978 - DNA, 15 bp, Homo sapiens
taatgataagtagta

SEQ ID NO: 718979 - DNA, 15 bp, Homo sapiens
aatgataagtagtac

SEQ ID NO: 718980 - DNA, 15 bp, Homo sapiens
atgataagtagtaca

SEQ ID NO: 718981 - DNA, 15 bp, Homo sapiens
tgataagtagtacag

SEQ ID NO: 718982 - DNA, 15 bp, Homo sapiens
gataagtagtacagg

SEQ ID NO: 718983 - DNA, 15 bp, Homo sapiens
ataagtagtacaggc

SEQ ID NO: 718984 - DNA, 15 bp, Homo sapiens
taagtagtacaggct

SEQ ID NO: 718985 - DNA, 15 bp, Homo sapiens
aagtagtacaggctt

SEQ ID NO: 718986 - DNA, 15 bp, Homo sapiens
agtagtacaggcttt

SEQ ID NO: 718987 - DNA, 15 bp, Homo sapiens
gtagtacaggctttt

SEQ ID NO: 718988 - DNA, 15 bp, Homo sapiens
tagtacaggctttta

SEQ ID NO: 718989 - DNA, 15 bp, Homo sapiens
agtacaggcttttag

SEQ ID NO: 718990 - DNA, 15 bp, Homo sapiens
gtacaggcttttagg

SEQ ID NO: 718991 - DNA, 15 bp, Homo sapiens
tacaggcttttagga

SEQ ID NO: 718992 - DNA, 15 bp, Homo sapiens
acaggcttttaggac

SEQ ID NO: 718993 - DNA, 15 bp, Homo sapiens
caggcttttaggact

SEQ ID NO: 718994 - DNA, 15 bp, Homo sapiens
aggcttttaggactg

SEQ ID NO: 718995 - DNA, 15 bp, Homo sapiens
ggcttttaggactgg

SEQ ID NO: 718996 - DNA, 15 bp, Homo sapiens
gcttttaggactggt

SEQ ID NO: 718997 - DNA, 15 bp, Homo sapiens
cttttaggactggta

SEQ ID NO: 718998 - DNA, 15 bp, Homo sapiens
ttttaggactggtac

SEQ ID NO: 718999 - DNA, 15 bp, Homo sapiens
tttaggactggtacg

SEQ ID NO: 719000 - DNA, 15 bp, Homo sapiens
ttaggactggtacga

SEQ ID NO: 719001 - DNA, 15 bp, Homo sapiens
taggactggtacgat

SEQ ID NO: 719002 - DNA, 15 bp, Homo sapiens
aggactggtacgatt

SEQ ID NO: 719003 - DNA, 15 bp, Homo sapiens
ggactggtacgattt

SEQ ID NO: 719004 - DNA, 15 bp, Homo sapiens
gactggtacgatttt

SEQ ID NO: 719005 - DNA, 15 bp, Homo sapiens
actggtacgattttt

SEQ ID NO: 719006 - DNA, 15 bp, Homo sapiens
ctggtacgatttttc

SEQ ID NO: 719007 - DNA, 15 bp, Homo sapiens
tggtacgatttttct

SEQ ID NO: 719008 - DNA, 15 bp, Homo sapiens
ggtacgatttttcta

SEQ ID NO: 719009 - DNA, 15 bp, Homo sapiens
gtacgatttttctat

SEQ ID NO: 719010 - DNA, 15 bp, Homo sapiens
tacgatttttctatg

SEQ ID NO: 719011 - DNA, 15 bp, Homo sapiens
acgatttttctatgt

SEQ ID NO: 719012 - DNA, 15 bp, Homo sapiens
cgatttttctatgtc

SEQ ID NO: 719013 - DNA, 15 bp, Homo sapiens
gatttttctatgtcg

SEQ ID NO: 719014 - DNA, 15 bp, Homo sapiens
atttttctatgtcgt

SEQ ID NO: 719015 - DNA, 15 bp, Homo sapiens
tttttctatgtcgta

SEQ ID NO: 719016 - DNA, 15 bp, Homo sapiens
ttttctatgtcgtag

SEQ ID NO: 719017 - DNA, 15 bp, Homo sapiens
tttctatgtcgtaga

SEQ ID NO: 719018 - DNA, 15 bp, Homo sapiens
ttctatgtcgtagaa

SEQ ID NO: 719019 - DNA, 15 bp, Homo sapiens
tctatgtcgtagaac

SEQ ID NO: 719020 - DNA, 15 bp, Homo sapiens
ctatgtcgtagaacc

SEQ ID NO: 719021 - DNA, 15 bp, Homo sapiens
tatgtcgtagaaccc

SEQ ID NO: 719022 - DNA, 15 bp, Homo sapiens
atgtcgtagaaccct

SEQ ID NO: 719023 - DNA, 15 bp, Homo sapiens
tgtcgtagaaccctt

SEQ ID NO: 719024 - DNA, 15 bp, Homo sapiens
gtcgtagaacccttt

SEQ ID NO: 719025 - DNA, 15 bp, Homo sapiens
tcgtagaaccctttt

SEQ ID NO: 719026 - DNA, 15 bp, Homo sapiens
cgtagaacccttttg

SEQ ID NO: 719027 - DNA, 15 bp, Homo sapiens
gtagaacccttttgt

SEQ ID NO: 719028 - DNA, 15 bp, Homo sapiens
tagaacccttttgta

SEQ ID NO: 719029 - DNA, 15 bp, Homo sapiens
agaacccttttgtaa

SEQ ID NO: 719030 - DNA, 15 bp, Homo sapiens
gaacccttttgtaaa

SEQ ID NO: 719031 - DNA, 15 bp, Homo sapiens
aacccttttgtaaat

SEQ ID NO: 719032 - DNA, 15 bp, Homo sapiens
acccttttgtaaata

SEQ ID NO: 719033 - DNA, 15 bp, Homo sapiens
cccttttgtaaatac

SEQ ID NO: 719034 - DNA, 15 bp, Homo sapiens
ccttttgtaaatact

SEQ ID NO: 719035 - DNA, 15 bp, Homo sapiens
cttttgtaaatactt

SEQ ID NO: 719036 - DNA, 15 bp, Homo sapiens
ttttgtaaatacttt

SEQ ID NO: 719037 - DNA, 15 bp, Homo sapiens
tttgtaaatactttt

SEQ ID NO: 719038 - DNA, 15 bp, Homo sapiens
ttgtaaatacttttg

SEQ ID NO: 719039 - DNA, 15 bp, Homo sapiens
tgtaaatacttttgg

SEQ ID NO: 719040 - DNA, 15 bp, Homo sapiens
gtaaatacttttggt

SEQ ID NO: 719041 - DNA, 15 bp, Homo sapiens
taaatacttttggta

SEQ ID NO: 719042 - DNA, 15 bp, Homo sapiens
aaatacttttggtat

SEQ ID NO: 719043 - DNA, 15 bp, Homo sapiens
aatacttttggtatt

SEQ ID NO: 719044 - DNA, 15 bp, Homo sapiens
atacttttggtatta

SEQ ID NO: 719045 - DNA, 15 bp, Homo sapiens
tacttttggtattat

SEQ ID NO: 719046 - DNA, 15 bp, Homo sapiens
acttttggtattatg

SEQ ID NO: 719047 - DNA, 15 bp, Homo sapiens
cttttggtattatgg

SEQ ID NO: 719048 - DNA, 15 bp, Homo sapiens
ttttggtattatggt

SEQ ID NO: 719049 - DNA, 15 bp, Homo sapiens
tttggtattatggtg

SEQ ID NO: 719050 - DNA, 15 bp, Homo sapiens
ttggtattatggtgt

SEQ ID NO: 719051 - DNA, 15 bp, Homo sapiens
tggtattatggtgtg

SEQ ID NO: 719052 - DNA, 15 bp, Homo sapiens
ggtattatggtgtgt

SEQ ID NO: 719053 - DNA, 15 bp, Homo sapiens
gtattatggtgtgtg

SEQ ID NO: 719054 - DNA, 15 bp, Homo sapiens
tattatggtgtgtgt

SEQ ID NO: 719055 - DNA, 15 bp, Homo sapiens
attatggtgtgtgtt

SEQ ID NO: 719056 - DNA, 15 bp, Homo sapiens
ttatggtgtgtgttt

SEQ ID NO: 719057 - DNA, 15 bp, Homo sapiens
tatggtgtgtgtttc

SEQ ID NO: 719058 - DNA, 15 bp, Homo sapiens
atggtgtgtgtttct

SEQ ID NO: 719059 - DNA, 15 bp, Homo sapiens
tggtgtgtgtttcta

SEQ ID NO: 719060 - DNA, 15 bp, Homo sapiens
ggtgtgtgtttctag

SEQ ID NO: 719061 - DNA, 15 bp, Homo sapiens
gtgtgtgtttctaga

SEQ ID NO: 719062 - DNA, 15 bp, Homo sapiens
tgtgtgtttctagat

SEQ ID NO: 719063 - DNA, 15 bp, Homo sapiens
gtgtgtttctagata

SEQ ID NO: 719064 - DNA, 15 bp, Homo sapiens
tgtgtttctagatat

SEQ ID NO: 719065 - DNA, 15 bp, Homo sapiens
gtgtttctagatatt

SEQ ID NO: 719066 - DNA, 15 bp, Homo sapiens
tgtttctagatatta

SEQ ID NO: 719067 - DNA, 15 bp, Homo sapiens
gtttctagatattaa

SEQ ID NO: 719068 - DNA, 15 bp, Homo sapiens
tttctagatattaac

SEQ ID NO: 719069 - DNA, 15 bp, Homo sapiens
ttctagatattaacc

SEQ ID NO: 719070 - DNA, 15 bp, Homo sapiens
tctagatattaacca

SEQ ID NO: 719071 - DNA, 15 bp, Homo sapiens
ctagatattaaccat

SEQ ID NO: 719072 - DNA, 15 bp, Homo sapiens
tagatattaaccata

SEQ ID NO: 719073 - DNA, 15 bp, Homo sapiens
agatattaaccataa

SEQ ID NO: 719074 - DNA, 15 bp, Homo sapiens
gatattaaccataag

SEQ ID NO: 719075 - DNA, 15 bp, Homo sapiens
atattaaccataaga

SEQ ID NO: 719076 - DNA, 15 bp, Homo sapiens
tattaaccataagaa

SEQ ID NO: 719077 - DNA, 15 bp, Homo sapiens
attaaccataagaac

SEQ ID NO: 719078 - DNA, 15 bp, Homo sapiens
ttaaccataagaact

SEQ ID NO: 719079 - DNA, 15 bp, Homo sapiens
taaccataagaactt

SEQ ID NO: 719080 - DNA, 15 bp, Homo sapiens
aaccataagaactta

SEQ ID NO: 719081 - DNA, 15 bp, Homo sapiens
accataagaacttaa

SEQ ID NO: 719082 - DNA, 15 bp, Homo sapiens
ccataagaacttaat

SEQ ID NO: 719083 - DNA, 15 bp, Homo sapiens
cataagaacttaatt

SEQ ID NO: 719084 - DNA, 15 bp, Homo sapiens
ataagaacttaattc

SEQ ID NO: 719085 - DNA, 15 bp, Homo sapiens
taagaacttaattct

SEQ ID NO: 719086 - DNA, 15 bp, Homo sapiens
aagaacttaattctg

SEQ ID NO: 719087 - DNA, 15 bp, Homo sapiens
agaacttaattctgg

SEQ ID NO: 719088 - DNA, 15 bp, Homo sapiens
gaacttaattctggt

SEQ ID NO: 719089 - DNA, 15 bp, Homo sapiens
aacttaattctggtt

SEQ ID NO: 719090 - DNA, 15 bp, Homo sapiens
acttaattctggttg

SEQ ID NO: 719091 - DNA, 15 bp, Homo sapiens
cttaattctggttgt

SEQ ID NO: 719092 - DNA, 15 bp, Homo sapiens
ttaattctggttgtt

SEQ ID NO: 719093 - DNA, 15 bp, Homo sapiens
taattctggttgtta

SEQ ID NO: 719094 - DNA, 15 bp, Homo sapiens
aattctggttgttaa

SEQ ID NO: 719095 - DNA, 15 bp, Homo sapiens
attctggttgttaat

SEQ ID NO: 719096 - DNA, 15 bp, Homo sapiens
ttctggttgttaatt

SEQ ID NO: 719097 - DNA, 15 bp, Homo sapiens
tctggttgttaatta

SEQ ID NO: 719098 - DNA, 15 bp, Homo sapiens
ctggttgttaattaa

SEQ ID NO: 719099 - DNA, 15 bp, Homo sapiens
tggttgttaattaat

SEQ ID NO: 719100 - DNA, 15 bp, Homo sapiens
ggttgttaattaatt

SEQ ID NO: 719101 - DNA, 15 bp, Homo sapiens
gttgttaattaatta

SEQ ID NO: 719102 - DNA, 15 bp, Homo sapiens
ttgttaattaattag

SEQ ID NO: 719103 - DNA, 15 bp, Homo sapiens
tgttaattaattaga

SEQ ID NO: 719104 - DNA, 15 bp, Homo sapiens
gttaattaattagac

SEQ ID NO: 719105 - DNA, 15 bp, Homo sapiens
ttaattaattagact

SEQ ID NO: 719106 - DNA, 15 bp, Homo sapiens
taattaattagactc

SEQ ID NO: 719107 - DNA, 15 bp, Homo sapiens
aattaattagactct

SEQ ID NO: 719108 - DNA, 15 bp, Homo sapiens
attaattagactctt

SEQ ID NO: 719109 - DNA, 15 bp, Homo sapiens
ttaattagactcttg

SEQ ID NO: 719110 - DNA, 15 bp, Homo sapiens
taattagactcttga

SEQ ID NO: 719111 - DNA, 15 bp, Homo sapiens
aattagactcttgaa

SEQ ID NO: 719112 - DNA, 15 bp, Homo sapiens
attagactcttgaaa

SEQ ID NO: 719113 - DNA, 15 bp, Homo sapiens
ttagactcttgaaat

SEQ ID NO: 719114 - DNA, 15 bp, Homo sapiens
tagactcttgaaata

SEQ ID NO: 719115 - DNA, 15 bp, Homo sapiens
agactcttgaaatat

SEQ ID NO: 719116 - DNA, 15 bp, Homo sapiens
gactcttgaaatata

SEQ ID NO: 719117 - DNA, 15 bp, Homo sapiens
actcttgaaatatat

SEQ ID NO: 719118 - DNA, 15 bp, Homo sapiens
ctcttgaaatatata

SEQ ID NO: 719119 - DNA, 15 bp, Homo sapiens
tcttgaaatatatac

SEQ ID NO: 719120 - DNA, 15 bp, Homo sapiens
cttgaaatatatact

SEQ ID NO: 719121 - DNA, 15 bp, Homo sapiens
ttgaaatatatactt

SEQ ID NO: 719122 - DNA, 15 bp, Homo sapiens
tgaaatatatactta

SEQ ID NO: 719123 - DNA, 15 bp, Homo sapiens
gaaatatatacttac

SEQ ID NO: 719124 - DNA, 15 bp, Homo sapiens
aaatatatacttaca

SEQ ID NO: 719125 - DNA, 15 bp, Homo sapiens
aatatatacttacag

SEQ ID NO: 719126 - DNA, 15 bp, Homo sapiens
atatatacttacagc

SEQ ID NO: 719127 - DNA, 15 bp, Homo sapiens
tatatacttacagct

SEQ ID NO: 719128 - DNA, 15 bp, Homo sapiens
atatacttacagctg

SEQ ID NO: 719129 - DNA, 15 bp, Homo sapiens
tatacttacagctga

SEQ ID NO: 719130 - DNA, 15 bp, Homo sapiens
atacttacagctgaa

SEQ ID NO: 719131 - DNA, 15 bp, Homo sapiens
tacttacagctgaag

SEQ ID NO: 719132 - DNA, 15 bp, Homo sapiens
acttacagctgaagg

SEQ ID NO: 719133 - DNA, 15 bp, Homo sapiens
cttacagctgaaggg

SEQ ID NO: 719134 - DNA, 15 bp, Homo sapiens
ttacagctgaagggg

SEQ ID NO: 719135 - DNA, 15 bp, Homo sapiens
tacagctgaaggggg

SEQ ID NO: 719136 - DNA, 15 bp, Homo sapiens
acagctgaagggggt

SEQ ID NO: 719137 - DNA, 15 bp, Homo sapiens
cagctgaagggggtc

SEQ ID NO: 719138 - DNA, 15 bp, Homo sapiens
agctgaagggggtct

SEQ ID NO: 719139 - DNA, 15 bp, Homo sapiens
gctgaagggggtctt

SEQ ID NO: 719140 - DNA, 15 bp, Homo sapiens
ctgaagggggtcttc

SEQ ID NO: 719141 - DNA, 15 bp, Homo sapiens
tgaagggggtcttcc

SEQ ID NO: 719142 - DNA, 15 bp, Homo sapiens
gaagggggtcttccc

SEQ ID NO: 719143 - DNA, 15 bp, Homo sapiens
aagggggtcttccca

SEQ ID NO: 719144 - DNA, 15 bp, Homo sapiens
agggggtcttcccaa

SEQ ID NO: 719145 - DNA, 15 bp, Homo sapiens
gggggtcttcccaac

SEQ ID NO: 719146 - DNA, 15 bp, Homo sapiens
ggggtcttcccaact

SEQ ID NO: 719147 - DNA, 15 bp, Homo sapiens
gggtcttcccaactc

SEQ ID NO: 719148 - DNA, 15 bp, Homo sapiens
ggtcttcccaactct

SEQ ID NO: 719149 - DNA, 15 bp, Homo sapiens
gtcttcccaactctt

SEQ ID NO: 719150 - DNA, 15 bp, Homo sapiens
tcttcccaactcttc

SEQ ID NO: 719151 - DNA, 15 bp, Homo sapiens
cttcccaactcttca

SEQ ID NO: 719152 - DNA, 15 bp, Homo sapiens
ttcccaactcttcat

SEQ ID NO: 719153 - DNA, 15 bp, Homo sapiens
tcccaactcttcatt

SEQ ID NO: 719154 - DNA, 15 bp, Homo sapiens
cccaactcttcatta

SEQ ID NO: 719155 - DNA, 15 bp, Homo sapiens
ccaactcttcattag

SEQ ID NO: 719156 - DNA, 15 bp, Homo sapiens
caactcttcattaga

SEQ ID NO: 719157 - DNA, 15 bp, Homo sapiens
aactcttcattagat

SEQ ID NO: 719158 - DNA, 15 bp, Homo sapiens
actcttcattagatc

SEQ ID NO: 719159 - DNA, 15 bp, Homo sapiens
ctcttcattagatct

SEQ ID NO: 719160 - DNA, 15 bp, Homo sapiens
tcttcattagatctt

SEQ ID NO: 719161 - DNA, 15 bp, Homo sapiens
cttcattagatcttc

SEQ ID NO: 719162 - DNA, 15 bp, Homo sapiens
ttcattagatcttcc

SEQ ID NO: 719163 - DNA, 15 bp, Homo sapiens
tcattagatcttcct

SEQ ID NO: 719164 - DNA, 15 bp, Homo sapiens
cattagatcttccta

SEQ ID NO: 719165 - DNA, 15 bp, Homo sapiens
attagatcttcctaa

SEQ ID NO: 719166 - DNA, 15 bp, Homo sapiens
ttagatcttcctaat

SEQ ID NO: 719167 - DNA, 15 bp, Homo sapiens
tagatcttcctaatc

SEQ ID NO: 719168 - DNA, 15 bp, Homo sapiens
agatcttcctaatct

SEQ ID NO: 719169 - DNA, 15 bp, Homo sapiens
gatcttcctaatctc

SEQ ID NO: 719170 - DNA, 15 bp, Homo sapiens
atcttcctaatctca

SEQ ID NO: 719171 - DNA, 15 bp, Homo sapiens
tcttcctaatctcat

SEQ ID NO: 719172 - DNA, 15 bp, Homo sapiens
cttcctaatctcatt

SEQ ID NO: 719173 - DNA, 15 bp, Homo sapiens
ttcctaatctcattg

SEQ ID NO: 719174 - DNA, 15 bp, Homo sapiens
tcctaatctcattgg

SEQ ID NO: 719175 - DNA, 15 bp, Homo sapiens
cctaatctcattggg

SEQ ID NO: 719176 - DNA, 15 bp, Homo sapiens
ctaatctcattggga

SEQ ID NO: 719177 - DNA, 15 bp, Homo sapiens
taatctcattgggat

SEQ ID NO: 719178 - DNA, 15 bp, Homo sapiens
aatctcattgggata

SEQ ID NO: 719179 - DNA, 15 bp, Homo sapiens
atctcattgggatat

SEQ ID NO: 719180 - DNA, 15 bp, Homo sapiens
tctcattgggatata

SEQ ID NO: 719181 - DNA, 15 bp, Homo sapiens
ctcattgggatatag

SEQ ID NO: 719182 - DNA, 15 bp, Homo sapiens
tcattgggatatagc

SEQ ID NO: 719183 - DNA, 15 bp, Homo sapiens
cattgggatatagca

SEQ ID NO: 719184 - DNA, 15 bp, Homo sapiens
attgggatatagcat

SEQ ID NO: 719185 - DNA, 15 bp, Homo sapiens
ttgggatatagcatt

SEQ ID NO: 719186 - DNA, 15 bp, Homo sapiens
tgggatatagcatta

SEQ ID NO: 719187 - DNA, 15 bp, Homo sapiens
gggatatagcattaa

SEQ ID NO: 719188 - DNA, 15 bp, Homo sapiens
ggatatagcattaat

SEQ ID NO: 719189 - DNA, 15 bp, Homo sapiens
gatatagcattaatt

SEQ ID NO: 719190 - DNA, 15 bp, Homo sapiens
atatagcattaattc

SEQ ID NO: 719191 - DNA, 15 bp, Homo sapiens
tatagcattaattct

SEQ ID NO: 719192 - DNA, 15 bp, Homo sapiens
atagcattaattctg

SEQ ID NO: 719193 - DNA, 15 bp, Homo sapiens
tagcattaattctga

SEQ ID NO: 719194 - DNA, 15 bp, Homo sapiens
agcattaattctgag

SEQ ID NO: 719195 - DNA, 15 bp, Homo sapiens
gcattaattctgagt

SEQ ID NO: 719196 - DNA, 15 bp, Homo sapiens
cattaattctgagtg

SEQ ID NO: 719197 - DNA, 15 bp, Homo sapiens
attaattctgagtgt

SEQ ID NO: 719198 - DNA, 15 bp, Homo sapiens
ttaattctgagtgta

SEQ ID NO: 719199 - DNA, 15 bp, Homo sapiens
taattctgagtgtac

SEQ ID NO: 719200 - DNA, 15 bp, Homo sapiens
aattctgagtgtacc

SEQ ID NO: 719201 - DNA, 15 bp, Homo sapiens
attctgagtgtaccg

SEQ ID NO: 719202 - DNA, 15 bp, Homo sapiens
ttctgagtgtaccga

SEQ ID NO: 719203 - DNA, 15 bp, Homo sapiens
tctgagtgtaccgag

SEQ ID NO: 719204 - DNA, 15 bp, Homo sapiens
ctgagtgtaccgaga

SEQ ID NO: 719205 - DNA, 15 bp, Homo sapiens
tgagtgtaccgagaa

SEQ ID NO: 719206 - DNA, 15 bp, Homo sapiens
gagtgtaccgagaat

SEQ ID NO: 719207 - DNA, 15 bp, Homo sapiens
agtgtaccgagaatg

SEQ ID NO: 719208 - DNA, 15 bp, Homo sapiens
gtgtaccgagaatga

SEQ ID NO: 719209 - DNA, 15 bp, Homo sapiens
tgtaccgagaatgaa

SEQ ID NO: 719210 - DNA, 15 bp, Homo sapiens
gtaccgagaatgaaa

SEQ ID NO: 719211 - DNA, 15 bp, Homo sapiens
taccgagaatgaaat

SEQ ID NO: 719212 - DNA, 15 bp, Homo sapiens
accgagaatgaaata

SEQ ID NO: 719213 - DNA, 15 bp, Homo sapiens
ccgagaatgaaatac

SEQ ID NO: 719214 - DNA, 15 bp, Homo sapiens
cgagaatgaaatacc

SEQ ID NO: 719215 - DNA, 15 bp, Homo sapiens
gagaatgaaatacca

SEQ ID NO: 719216 - DNA, 15 bp, Homo sapiens
agaatgaaataccat

SEQ ID NO: 719217 - DNA, 15 bp, Homo sapiens
gaatgaaataccatt

SEQ ID NO: 719218 - DNA, 15 bp, Homo sapiens
aatgaaataccatta

SEQ ID NO: 719219 - DNA, 15 bp, Homo sapiens
atgaaataccattaa

SEQ ID NO: 719220 - DNA, 15 bp, Homo sapiens
tgaaataccattaaa

SEQ ID NO: 719221 - DNA, 15 bp, Homo sapiens
gaaataccattaaat

SEQ ID NO: 719222 - DNA, 15 bp, Homo sapiens
aaataccattaaatt

SEQ ID NO: 719223 - DNA, 15 bp, Homo sapiens
aataccattaaattg

SEQ ID NO: 719224 - DNA, 15 bp, Homo sapiens
ataccattaaattgc

SEQ ID NO: 719225 - DNA, 15 bp, Homo sapiens
taccattaaattgca

SEQ ID NO: 719226 - DNA, 15 bp, Homo sapiens
accattaaattgcat

SEQ ID NO: 719227 - DNA, 15 bp, Homo sapiens
ccattaaattgcatt

SEQ ID NO: 719228 - DNA, 15 bp, Homo sapiens
cattaaattgcattt

SEQ ID NO: 719229 - DNA, 15 bp, Homo sapiens
attaaattgcatttt

SEQ ID NO: 719230 - DNA, 15 bp, Homo sapiens
ttaaattgcattttc

SEQ ID NO: 719231 - DNA, 15 bp, Homo sapiens
taaattgcattttct

SEQ ID NO: 719232 - DNA, 15 bp, Homo sapiens
aaattgcattttctt

SEQ ID NO: 719233 - DNA, 15 bp, Homo sapiens
aattgcattttctta

SEQ ID NO: 719234 - DNA, 15 bp, Homo sapiens
attgcattttcttac

SEQ ID NO: 719235 - DNA, 15 bp, Homo sapiens
ttgcattttcttact

SEQ ID NO: 719236 - DNA, 15 bp, Homo sapiens
tgcattttcttactt

SEQ ID NO: 719237 - DNA, 15 bp, Homo sapiens
gcattttcttacttt

SEQ ID NO: 719238 - DNA, 15 bp, Homo sapiens
cattttcttactttg

SEQ ID NO: 719239 - DNA, 15 bp, Homo sapiens
attttcttactttgc

SEQ ID NO: 719240 - DNA, 15 bp, Homo sapiens
ttttcttactttgca

SEQ ID NO: 719241 - DNA, 15 bp, Homo sapiens
tttcttactttgcaa

SEQ ID NO: 719242 - DNA, 15 bp, Homo sapiens
ttcttactttgcaaa

SEQ ID NO: 719243 - DNA, 15 bp, Homo sapiens
tcttactttgcaaaa

SEQ ID NO: 719244 - DNA, 15 bp, Homo sapiens
cttactttgcaaaaa

SEQ ID NO: 719245 - DNA, 15 bp, Homo sapiens
ttactttgcaaaaaa

SEQ ID NO: 719246 - DNA, 15 bp, Homo sapiens
tactttgcaaaaaac

SEQ ID NO: 719247 - DNA, 15 bp, Homo sapiens
actttgcaaaaaacc

SEQ ID NO: 719248 - DNA, 15 bp, Homo sapiens
ctttgcaaaaaaccc

SEQ ID NO: 719249 - DNA, 15 bp, Homo sapiens
tttgcaaaaaaccct

SEQ ID NO: 719250 - DNA, 15 bp, Homo sapiens
ttgcaaaaaaccctc

SEQ ID NO: 719251 - DNA, 15 bp, Homo sapiens
tgcaaaaaaccctca

SEQ ID NO: 719252 - DNA, 15 bp, Homo sapiens
gcaaaaaaccctcac

SEQ ID NO: 719253 - DNA, 15 bp, Homo sapiens
caaaaaaccctcaca

SEQ ID NO: 719254 - DNA, 15 bp, Homo sapiens
aaaaaaccctcacag

SEQ ID NO: 719255 - DNA, 15 bp, Homo sapiens
aaaaaccctcacaga

SEQ ID NO: 719256 - DNA, 15 bp, Homo sapiens
aaaaccctcacagaa

SEQ ID NO: 719257 - DNA, 15 bp, Homo sapiens
aaaccctcacagaat

SEQ ID NO: 719258 - DNA, 15 bp, Homo sapiens
aaccctcacagaatg

SEQ ID NO: 719259 - DNA, 15 bp, Homo sapiens
accctcacagaatgc

SEQ ID NO: 719260 - DNA, 15 bp, Homo sapiens
ccctcacagaatgct

SEQ ID NO: 719261 - DNA, 15 bp, Homo sapiens
cctcacagaatgcta

SEQ ID NO: 719262 - DNA, 15 bp, Homo sapiens
ctcacagaatgctaa

SEQ ID NO: 719263 - DNA, 15 bp, Homo sapiens
tcacagaatgctaac

SEQ ID NO: 719264 - DNA, 15 bp, Homo sapiens
cacagaatgctaact

SEQ ID NO: 719265 - DNA, 15 bp, Homo sapiens
acagaatgctaactc

SEQ ID NO: 719266 - DNA, 15 bp, Homo sapiens
cagaatgctaactca

SEQ ID NO: 719267 - DNA, 15 bp, Homo sapiens
agaatgctaactcat

SEQ ID NO: 719268 - DNA, 15 bp, Homo sapiens
gaatgctaactcatt

SEQ ID NO: 719269 - DNA, 15 bp, Homo sapiens
aatgctaactcatta

SEQ ID NO: 719270 - DNA, 15 bp, Homo sapiens
atgctaactcattac

SEQ ID NO: 719271 - DNA, 15 bp, Homo sapiens
tgctaactcattact

SEQ ID NO: 719272 - DNA, 15 bp, Homo sapiens
gctaactcattactt

SEQ ID NO: 719273 - DNA, 15 bp, Homo sapiens
ctaactcattacttc

SEQ ID NO: 719274 - DNA, 15 bp, Homo sapiens
taactcattacttca

SEQ ID NO: 719275 - DNA, 15 bp, Homo sapiens
aactcattacttcag

SEQ ID NO: 719276 - DNA, 15 bp, Homo sapiens
actcattacttcaga

SEQ ID NO: 719277 - DNA, 15 bp, Homo sapiens
ctcattacttcagaa

SEQ ID NO: 719278 - DNA, 15 bp, Homo sapiens
tcattacttcagaaa

SEQ ID NO: 719279 - DNA, 15 bp, Homo sapiens
cattacttcagaaaa

SEQ ID NO: 719280 - DNA, 15 bp, Homo sapiens
attacttcagaaaat

SEQ ID NO: 719281 - DNA, 15 bp, Homo sapiens
ttacttcagaaaata

SEQ ID NO: 719282 - DNA, 15 bp, Homo sapiens
tacttcagaaaataa

SEQ ID NO: 719283 - DNA, 15 bp, Homo sapiens
acttcagaaaataaa

SEQ ID NO: 719284 - DNA, 15 bp, Homo sapiens
cttcagaaaataaat

SEQ ID NO: 719285 - DNA, 15 bp, Homo sapiens
ttcagaaaataaatg

SEQ ID NO: 719286 - DNA, 15 bp, Homo sapiens
tcagaaaataaatga

SEQ ID NO: 719287 - DNA, 15 bp, Homo sapiens
cagaaaataaatgag

SEQ ID NO: 719288 - DNA, 15 bp, Homo sapiens
agaaaataaatgaga

SEQ ID NO: 719289 - DNA, 15 bp, Homo sapiens
gaaaataaatgagat

SEQ ID NO: 719290 - DNA, 15 bp, Homo sapiens
aaaataaatgagatt

SEQ ID NO: 719291 - DNA, 15 bp, Homo sapiens
aaataaatgagattt

SEQ ID NO: 719292 - DNA, 15 bp, Homo sapiens
aataaatgagatttt

SEQ ID NO: 719293 - DNA, 15 bp, Homo sapiens
ataaatgagattttg

SEQ ID NO: 719294 - DNA, 15 bp, Homo sapiens
taaatgagattttga

SEQ ID NO: 719295 - DNA, 15 bp, Homo sapiens
aaatgagattttgaa

SEQ ID NO: 719296 - DNA, 15 bp, Homo sapiens
aatgagattttgaat

SEQ ID NO: 719297 - DNA, 15 bp, Homo sapiens
atgagattttgaatt

SEQ ID NO: 719298 - DNA, 15 bp, Homo sapiens
tgagattttgaatta

SEQ ID NO: 719299 - DNA, 15 bp, Homo sapiens
gagattttgaattac

SEQ ID NO: 719300 - DNA, 15 bp, Homo sapiens
agattttgaattact

SEQ ID NO: 719301 - DNA, 15 bp, Homo sapiens
gattttgaattactt

SEQ ID NO: 719302 - DNA, 15 bp, Homo sapiens
attttgaattacttg

SEQ ID NO: 719303 - DNA, 15 bp, Homo sapiens
ttttgaattacttga

SEQ ID NO: 719304 - DNA, 15 bp, Homo sapiens
tttgaattacttgat

SEQ ID NO: 719305 - DNA, 15 bp, Homo sapiens
ttgaattacttgata

SEQ ID NO: 719306 - DNA, 15 bp, Homo sapiens
tgaattacttgataa

SEQ ID NO: 719307 - DNA, 15 bp, Homo sapiens
gaattacttgataag

SEQ ID NO: 719308 - DNA, 15 bp, Homo sapiens
aattacttgataagt

SEQ ID NO: 719309 - DNA, 15 bp, Homo sapiens
attacttgataagtt

SEQ ID NO: 719310 - DNA, 15 bp, Homo sapiens
ttacttgataagttg

SEQ ID NO: 719311 - DNA, 15 bp, Homo sapiens
tacttgataagttga

SEQ ID NO: 719312 - DNA, 15 bp, Homo sapiens
acttgataagttgac

SEQ ID NO: 719313 - DNA, 15 bp, Homo sapiens
cttgataagttgact

SEQ ID NO: 719314 - DNA, 15 bp, Homo sapiens
ttgataagttgactt

SEQ ID NO: 719315 - DNA, 15 bp, Homo sapiens
tgataagttgacttt

SEQ ID NO: 719316 - DNA, 15 bp, Homo sapiens
gataagttgacttta

SEQ ID NO: 719317 - DNA, 15 bp, Homo sapiens
ataagttgactttaa

SEQ ID NO: 719318 - DNA, 15 bp, Homo sapiens
taagttgactttaag

SEQ ID NO: 719319 - DNA, 15 bp, Homo sapiens
aagttgactttaagc

SEQ ID NO: 719320 - DNA, 15 bp, Homo sapiens
agttgactttaagcc

SEQ ID NO: 719321 - DNA, 15 bp, Homo sapiens
gttgactttaagcct

SEQ ID NO: 719322 - DNA, 15 bp, Homo sapiens
ttgactttaagcctt

SEQ ID NO: 719323 - DNA, 15 bp, Homo sapiens
tgactttaagccttt

SEQ ID NO: 719324 - DNA, 15 bp, Homo sapiens
gactttaagcctttt

SEQ ID NO: 719325 - DNA, 15 bp, Homo sapiens
actttaagccttttc

SEQ ID NO: 719326 - DNA, 15 bp, Homo sapiens
ctttaagccttttcc

SEQ ID NO: 719327 - DNA, 15 bp, Homo sapiens
tttaagccttttccc

SEQ ID NO: 719328 - DNA, 15 bp, Homo sapiens
ttaagccttttcccc

SEQ ID NO: 719329 - DNA, 15 bp, Homo sapiens
taagccttttccccc

SEQ ID NO: 719330 - DNA, 15 bp, Homo sapiens
aagccttttccccct

SEQ ID NO: 719331 - DNA, 15 bp, Homo sapiens
agccttttccccctt

SEQ ID NO: 719332 - DNA, 15 bp, Homo sapiens
gccttttccccctta

SEQ ID NO: 719333 - DNA, 15 bp, Homo sapiens
ccttttcccccttat

SEQ ID NO: 719334 - DNA, 15 bp, Homo sapiens
cttttcccccttatt

SEQ ID NO: 719335 - DNA, 15 bp, Homo sapiens
ttttcccccttattg

SEQ ID NO: 719336 - DNA, 15 bp, Homo sapiens
tttcccccttattgt

SEQ ID NO: 719337 - DNA, 15 bp, Homo sapiens
ttcccccttattgta

SEQ ID NO: 719338 - DNA, 15 bp, Homo sapiens
tcccccttattgtag

SEQ ID NO: 719339 - DNA, 15 bp, Homo sapiens
cccccttattgtagg

SEQ ID NO: 719340 - DNA, 15 bp, Homo sapiens
ccccttattgtaggt

SEQ ID NO: 719341 - DNA, 15 bp, Homo sapiens
cccttattgtaggtc

SEQ ID NO: 719342 - DNA, 15 bp, Homo sapiens
ccttattgtaggtcc

SEQ ID NO: 719343 - DNA, 15 bp, Homo sapiens
cttattgtaggtcca

SEQ ID NO: 719344 - DNA, 15 bp, Homo sapiens
ttattgtaggtccat

SEQ ID NO: 719345 - DNA, 15 bp, Homo sapiens
tattgtaggtccata

SEQ ID NO: 719346 - DNA, 15 bp, Homo sapiens
attgtaggtccatat

SEQ ID NO: 719347 - DNA, 15 bp, Homo sapiens
ttgtaggtccatata

SEQ ID NO: 719348 - DNA, 15 bp, Homo sapiens
tgtaggtccatatac

SEQ ID NO: 719349 - DNA, 15 bp, Homo sapiens
gtaggtccatatact

SEQ ID NO: 719350 - DNA, 15 bp, Homo sapiens
taggtccatatactt

SEQ ID NO: 719351 - DNA, 15 bp, Homo sapiens
aggtccatatacttt

SEQ ID NO: 719352 - DNA, 15 bp, Homo sapiens
ggtccatatactttt

SEQ ID NO: 719353 - DNA, 15 bp, Homo sapiens
gtccatatacttttg

SEQ ID NO: 719354 - DNA, 15 bp, Homo sapiens
tccatatacttttgt

SEQ ID NO: 719355 - DNA, 15 bp, Homo sapiens
ccatatacttttgtt

SEQ ID NO: 719356 - DNA, 15 bp, Homo sapiens
catatacttttgttc

SEQ ID NO: 719357 - DNA, 15 bp, Homo sapiens
atatacttttgttca

SEQ ID NO: 719358 - DNA, 15 bp, Homo sapiens
tatacttttgttcag

SEQ ID NO: 719359 - DNA, 15 bp, Homo sapiens
atacttttgttcagc

SEQ ID NO: 719360 - DNA, 15 bp, Homo sapiens
tacttttgttcagca

SEQ ID NO: 719361 - DNA, 15 bp, Homo sapiens
acttttgttcagcaa

SEQ ID NO: 719362 - DNA, 15 bp, Homo sapiens
cttttgttcagcaac

SEQ ID NO: 719363 - DNA, 15 bp, Homo sapiens
ttttgttcagcaaca

SEQ ID NO: 719364 - DNA, 15 bp, Homo sapiens
tttgttcagcaacat

SEQ ID NO: 719365 - DNA, 15 bp, Homo sapiens
ttgttcagcaacatc

SEQ ID NO: 719366 - DNA, 15 bp, Homo sapiens
tgttcagcaacatct

SEQ ID NO: 719367 - DNA, 15 bp, Homo sapiens
gttcagcaacatctt

SEQ ID NO: 719368 - DNA, 15 bp, Homo sapiens
ttcagcaacatctta

SEQ ID NO: 719369 - DNA, 15 bp, Homo sapiens
tcagcaacatcttat

SEQ ID NO: 719370 - DNA, 15 bp, Homo sapiens
cagcaacatcttatg

SEQ ID NO: 719371 - DNA, 15 bp, Homo sapiens
agcaacatcttatga

SEQ ID NO: 719372 - DNA, 15 bp, Homo sapiens
gcaacatcttatgat

SEQ ID NO: 719373 - DNA, 15 bp, Homo sapiens
caacatcttatgatt

SEQ ID NO: 719374 - DNA, 15 bp, Homo sapiens
aacatcttatgattg

SEQ ID NO: 719375 - DNA, 15 bp, Homo sapiens
acatcttatgattgg

SEQ ID NO: 719376 - DNA, 15 bp, Homo sapiens
catcttatgattggc

SEQ ID NO: 719377 - DNA, 15 bp, Homo sapiens
atcttatgattggca

SEQ ID NO: 719378 - DNA, 15 bp, Homo sapiens
tcttatgattggcac

SEQ ID NO: 719379 - DNA, 15 bp, Homo sapiens
cttatgattggcaca

SEQ ID NO: 719380 - DNA, 15 bp, Homo sapiens
ttatgattggcacag

SEQ ID NO: 719381 - DNA, 15 bp, Homo sapiens
tatgattggcacaga

SEQ ID NO: 719382 - DNA, 15 bp, Homo sapiens
atgattggcacagat

SEQ ID NO: 719383 - DNA, 15 bp, Homo sapiens
tgattggcacagatc

SEQ ID NO: 719384 - DNA, 15 bp, Homo sapiens
gattggcacagatcc

SEQ ID NO: 719385 - DNA, 15 bp, Homo sapiens
attggcacagatcct

SEQ ID NO: 719386 - DNA, 15 bp, Homo sapiens
ttggcacagatcctc

SEQ ID NO: 719387 - DNA, 15 bp, Homo sapiens
tggcacagatcctcg

SEQ ID NO: 719388 - DNA, 15 bp, Homo sapiens
ggcacagatcctcga

SEQ ID NO: 719389 - DNA, 15 bp, Homo sapiens
gcacagatcctcgaa

SEQ ID NO: 719390 - DNA, 15 bp, Homo sapiens
cacagatcctcgaac

SEQ ID NO: 719391 - DNA, 15 bp, Homo sapiens
acagatcctcgaaca

SEQ ID NO: 719392 - DNA, 15 bp, Homo sapiens
cagatcctcgaacaa

SEQ ID NO: 719393 - DNA, 15 bp, Homo sapiens
agatcctcgaacaat

SEQ ID NO: 719394 - DNA, 15 bp, Homo sapiens
gatcctcgaacaatt

SEQ ID NO: 719395 - DNA, 15 bp, Homo sapiens
atcctcgaacaattc

SEQ ID NO: 719396 - DNA, 15 bp, Homo sapiens
tcctcgaacaattct

SEQ ID NO: 719397 - DNA, 15 bp, Homo sapiens
cctcgaacaattctt

SEQ ID NO: 719398 - DNA, 15 bp, Homo sapiens
ctcgaacaattctta

SEQ ID NO: 719399 - DNA, 15 bp, Homo sapiens
tcgaacaattcttaa

SEQ ID NO: 719400 - DNA, 15 bp, Homo sapiens
cgaacaattcttaaa

SEQ ID NO: 719401 - DNA, 15 bp, Homo sapiens
gaacaattcttaaag

SEQ ID NO: 719402 - DNA, 15 bp, Homo sapiens
aacaattcttaaaga

SEQ ID NO: 719403 - DNA, 15 bp, Homo sapiens
acaattcttaaagat

SEQ ID NO: 719404 - DNA, 15 bp, Homo sapiens
caattcttaaagatt

SEQ ID NO: 719405 - DNA, 15 bp, Homo sapiens
aattcttaaagattt

SEQ ID NO: 719406 - DNA, 15 bp, Homo sapiens
attcttaaagattta

SEQ ID NO: 719407 - DNA, 15 bp, Homo sapiens
ttcttaaagatttat

SEQ ID NO: 719408 - DNA, 15 bp, Homo sapiens
tcttaaagatttatt

SEQ ID NO: 719409 - DNA, 15 bp, Homo sapiens
cttaaagatttattg

SEQ ID NO: 719410 - DNA, 15 bp, Homo sapiens
ttaaagatttattgc

SEQ ID NO: 719411 - DNA, 15 bp, Homo sapiens
taaagatttattgcc

SEQ ID NO: 719412 - DNA, 15 bp, Homo sapiens
aaagatttattgccg

SEQ ID NO: 719413 - DNA, 15 bp, Homo sapiens
aagatttattgccgg

SEQ ID NO: 719414 - DNA, 15 bp, Homo sapiens
agatttattgccgga

SEQ ID NO: 719415 - DNA, 15 bp, Homo sapiens
gatttattgccggaa

SEQ ID NO: 719416 - DNA, 15 bp, Homo sapiens
atttattgccggaaa

SEQ ID NO: 719417 - DNA, 15 bp, Homo sapiens
tttattgccggaaac

SEQ ID NO: 719418 - DNA, 15 bp, Homo sapiens
ttattgccggaaaca

SEQ ID NO: 719419 - DNA, 15 bp, Homo sapiens
tattgccggaaacaa

SEQ ID NO: 719420 - DNA, 15 bp, Homo sapiens
attgccggaaacaat

SEQ ID NO: 719421 - DNA, 15 bp, Homo sapiens
ttgccggaaacaata

SEQ ID NO: 719422 - DNA, 15 bp, Homo sapiens
tgccggaaacaatac

SEQ ID NO: 719423 - DNA, 15 bp, Homo sapiens
gccggaaacaatacc

SEQ ID NO: 719424 - DNA, 15 bp, Homo sapiens
ccggaaacaatacct

SEQ ID NO: 719425 - DNA, 15 bp, Homo sapiens
cggaaacaatacctc

SEQ ID NO: 719426 - DNA, 15 bp, Homo sapiens
ggaaacaatacctcc

SEQ ID NO: 719427 - DNA, 15 bp, Homo sapiens
gaaacaatacctcca

SEQ ID NO: 719428 - DNA, 15 bp, Homo sapiens
aaacaatacctccac

SEQ ID NO: 719429 - DNA, 15 bp, Homo sapiens
aacaatacctccacc

SEQ ID NO: 719430 - DNA, 15 bp, Homo sapiens
acaatacctccacct

SEQ ID NO: 719431 - DNA, 15 bp, Homo sapiens
aaaagatccaagacc

SEQ ID NO: 719432 - DNA, 15 bp, Homo sapiens
aaagatccaagacca

SEQ ID NO: 719433 - DNA, 15 bp, Homo sapiens
aagatccaagaccat

SEQ ID NO: 719434 - DNA, 15 bp, Homo sapiens
agatccaagaccatt

SEQ ID NO: 719435 - DNA, 15 bp, Homo sapiens
gatccaagaccattc

SEQ ID NO: 719436 - DNA, 15 bp, Homo sapiens
atccaagaccattct

SEQ ID NO: 719437 - DNA, 15 bp, Homo sapiens
tccaagaccattctt

SEQ ID NO: 719438 - DNA, 15 bp, Homo sapiens
ccaagaccattcttc

SEQ ID NO: 719439 - DNA, 15 bp, Homo sapiens
caagaccattcttca

SEQ ID NO: 719440 - DNA, 15 bp, Homo sapiens
aagaccattcttcaa

SEQ ID NO: 719441 - DNA, 15 bp, Homo sapiens
agaccattcttcaag

SEQ ID NO: 719442 - DNA, 15 bp, Homo sapiens
gaccattcttcaagt

SEQ ID NO: 719443 - DNA, 15 bp, Homo sapiens
accattcttcaagtt

SEQ ID NO: 719444 - DNA, 15 bp, Homo sapiens
ccattcttcaagttt

SEQ ID NO: 719445 - DNA, 15 bp, Homo sapiens
cattcttcaagtttg

SEQ ID NO: 719446 - DNA, 15 bp, Homo sapiens
attcttcaagtttgc

SEQ ID NO: 719447 - DNA, 15 bp, Homo sapiens
ttcttcaagtttgca

SEQ ID NO: 719448 - DNA, 15 bp, Homo sapiens
tcttcaagtttgcaa

SEQ ID NO: 719449 - DNA, 15 bp, Homo sapiens
cttcaagtttgcaaa

SEQ ID NO: 719450 - DNA, 15 bp, Homo sapiens
ttcaagtttgcaaag

SEQ ID NO: 719451 - DNA, 15 bp, Homo sapiens
tcaagtttgcaaagg

SEQ ID NO: 719452 - DNA, 15 bp, Homo sapiens
caagtttgcaaaggt

SEQ ID NO: 719453 - DNA, 15 bp, Homo sapiens
aagtttgcaaaggta

SEQ ID NO: 719454 - DNA, 15 bp, Homo sapiens
agtttgcaaaggtac

SEQ ID NO: 719455 - DNA, 15 bp, Homo sapiens
gtttgcaaaggtact

SEQ ID NO: 719456 - DNA, 15 bp, Homo sapiens
tttgcaaaggtacta

SEQ ID NO: 719457 - DNA, 15 bp, Homo sapiens
ttgcaaaggtactat

SEQ ID NO: 719458 - DNA, 15 bp, Homo sapiens
tgcaaaggtactatg

SEQ ID NO: 719459 - DNA, 15 bp, Homo sapiens
gcaaaggtactatga

SEQ ID NO: 719460 - DNA, 15 bp, Homo sapiens
caaaggtactatgaa

SEQ ID NO: 719461 - DNA, 15 bp, Homo sapiens
aaaggtactatgaac

SEQ ID NO: 719462 - DNA, 15 bp, Homo sapiens
aaggtactatgaact

SEQ ID NO: 719463 - DNA, 15 bp, Homo sapiens
aggtactatgaactc

SEQ ID NO: 719464 - DNA, 15 bp, Homo sapiens
ggtactatgaactct

SEQ ID NO: 719465 - DNA, 15 bp, Homo sapiens
gtactatgaactctt

SEQ ID NO: 719466 - DNA, 15 bp, Homo sapiens
tactatgaactcttc

SEQ ID NO: 719467 - DNA, 15 bp, Homo sapiens
actatgaactcttct

SEQ ID NO: 719468 - DNA, 15 bp, Homo sapiens
ctatgaactcttctg

SEQ ID NO: 719469 - DNA, 15 bp, Homo sapiens
tatgaactcttctgg

SEQ ID NO: 719470 - DNA, 15 bp, Homo sapiens
atgaactcttctggt

SEQ ID NO: 719471 - DNA, 15 bp, Homo sapiens
tgaactcttctggtt

SEQ ID NO: 719472 - DNA, 15 bp, Homo sapiens
gaactcttctggttg

SEQ ID NO: 719473 - DNA, 15 bp, Homo sapiens
aactcttctggttgt

SEQ ID NO: 719474 - DNA, 15 bp, Homo sapiens
actcttctggttgtt

SEQ ID NO: 719475 - DNA, 15 bp, Homo sapiens
ctcttctggttgttt

SEQ ID NO: 719476 - DNA, 15 bp, Homo sapiens
tcttctggttgtttc

SEQ ID NO: 719477 - DNA, 15 bp, Homo sapiens
cttctggttgtttct

SEQ ID NO: 719478 - DNA, 15 bp, Homo sapiens
ttctggttgtttctt

SEQ ID NO: 719479 - DNA, 15 bp, Homo sapiens
tctggttgtttcttt

SEQ ID NO: 719480 - DNA, 15 bp, Homo sapiens
ctggttgtttctttg

SEQ ID NO: 719481 - DNA, 15 bp, Homo sapiens
tggttgtttctttgg

SEQ ID NO: 719482 - DNA, 15 bp, Homo sapiens
ggttgtttctttggc

SEQ ID NO: 719483 - DNA, 15 bp, Homo sapiens
gttgtttctttggcc

SEQ ID NO: 719484 - DNA, 15 bp, Homo sapiens
ttgtttctttggcct

SEQ ID NO: 719485 - DNA, 15 bp, Homo sapiens
tgtttctttggcctt

SEQ ID NO: 719486 - DNA, 15 bp, Homo sapiens
gtttctttggccttc

SEQ ID NO: 719487 - DNA, 15 bp, Homo sapiens
tttctttggccttct

SEQ ID NO: 719488 - DNA, 15 bp, Homo sapiens
ttctttggccttctc

SEQ ID NO: 719489 - DNA, 15 bp, Homo sapiens
tctttggccttctct

SEQ ID NO: 719490 - DNA, 15 bp, Homo sapiens
ctttggccttctctc

SEQ ID NO: 719491 - DNA, 15 bp, Homo sapiens
tttggccttctctca

SEQ ID NO: 719492 - DNA, 15 bp, Homo sapiens
ttggccttctctcat

SEQ ID NO: 719493 - DNA, 15 bp, Homo sapiens
tggccttctctcatg

SEQ ID NO: 719494 - DNA, 15 bp, Homo sapiens
ggccttctctcatga

SEQ ID NO: 719495 - DNA, 15 bp, Homo sapiens
gccttctctcatgaa

SEQ ID NO: 719496 - DNA, 15 bp, Homo sapiens
ccttctctcatgaaa

SEQ ID NO: 719497 - DNA, 15 bp, Homo sapiens
cttctctcatgaaaa

SEQ ID NO: 719498 - DNA, 15 bp, Homo sapiens
ttctctcatgaaaaa

SEQ ID NO: 719499 - DNA, 15 bp, Homo sapiens
tctctcatgaaaaag

SEQ ID NO: 719500 - DNA, 15 bp, Homo sapiens
ctctcatgaaaaagt

SEQ ID NO: 719501 - DNA, 15 bp, Homo sapiens
tctcatgaaaaagta

SEQ ID NO: 719502 - DNA, 15 bp, Homo sapiens
ctcatgaaaaagtat

SEQ ID NO: 719503 - DNA, 15 bp, Homo sapiens
tcatgaaaaagtatt

SEQ ID NO: 719504 - DNA, 15 bp, Homo sapiens
catgaaaaagtattt

SEQ ID NO: 719505 - DNA, 15 bp, Homo sapiens
atgaaaaagtatttt

SEQ ID NO: 719506 - DNA, 15 bp, Homo sapiens
tgaaaaagtattttg

SEQ ID NO: 719507 - DNA, 15 bp, Homo sapiens
gaaaaagtattttgt

SEQ ID NO: 719508 - DNA, 15 bp, Homo sapiens
aaaaagtattttgtt

SEQ ID NO: 719509 - DNA, 15 bp, Homo sapiens
aaaagtattttgttc

SEQ ID NO: 719510 - DNA, 15 bp, Homo sapiens
aaagtattttgttca

SEQ ID NO: 719511 - DNA, 15 bp, Homo sapiens
aagtattttgttcac

SEQ ID NO: 719512 - DNA, 15 bp, Homo sapiens
agtattttgttcaca

SEQ ID NO: 719513 - DNA, 15 bp, Homo sapiens
gtattttgttcacat

SEQ ID NO: 719514 - DNA, 15 bp, Homo sapiens
tattttgttcacata

SEQ ID NO: 719515 - DNA, 15 bp, Homo sapiens
attttgttcacatac

SEQ ID NO: 719516 - DNA, 15 bp, Homo sapiens
ttttgttcacataca

SEQ ID NO: 719517 - DNA, 15 bp, Homo sapiens
tttgttcacatacag

SEQ ID NO: 719518 - DNA, 15 bp, Homo sapiens
ttgttcacatacagc

SEQ ID NO: 719519 - DNA, 15 bp, Homo sapiens
tgttcacatacagcc

SEQ ID NO: 719520 - DNA, 15 bp, Homo sapiens
gttcacatacagcca

SEQ ID NO: 719521 - DNA, 15 bp, Homo sapiens
ttcacatacagccac

SEQ ID NO: 719522 - DNA, 15 bp, Homo sapiens
tcacatacagccacc

SEQ ID NO: 719523 - DNA, 15 bp, Homo sapiens
cacatacagccacct

SEQ ID NO: 719524 - DNA, 15 bp, Homo sapiens
acatacagccacctt

SEQ ID NO: 719525 - DNA, 15 bp, Homo sapiens
catacagccacctta

SEQ ID NO: 719526 - DNA, 15 bp, Homo sapiens
atacagccaccttaa

SEQ ID NO: 719527 - DNA, 15 bp, Homo sapiens
tacagccaccttaag

SEQ ID NO: 719528 - DNA, 15 bp, Homo sapiens
acagccaccttaagg

SEQ ID NO: 719529 - DNA, 15 bp, Homo sapiens
cagccaccttaaggt

SEQ ID NO: 719530 - DNA, 15 bp, Homo sapiens
agccaccttaaggtt

SEQ ID NO: 719531 - DNA, 15 bp, Homo sapiens
gccaccttaaggtta

SEQ ID NO: 719532 - DNA, 15 bp, Homo sapiens
ccaccttaaggttat

SEQ ID NO: 719533 - DNA, 15 bp, Homo sapiens
caccttaaggttatc

SEQ ID NO: 719534 - DNA, 15 bp, Homo sapiens
accttaaggttatcg

SEQ ID NO: 719535 - DNA, 15 bp, Homo sapiens
ccttaaggttatcgt

SEQ ID NO: 719536 - DNA, 15 bp, Homo sapiens
cttaaggttatcgtt

SEQ ID NO: 719537 - DNA, 15 bp, Homo sapiens
ttaaggttatcgttc

SEQ ID NO: 719538 - DNA, 15 bp, Homo sapiens
taaggttatcgttca

SEQ ID NO: 719539 - DNA, 15 bp, Homo sapiens
aaggttatcgttcat

SEQ ID NO: 719540 - DNA, 15 bp, Homo sapiens
aggttatcgttcatt

SEQ ID NO: 719541 - DNA, 15 bp, Homo sapiens
ggttatcgttcattg

SEQ ID NO: 719542 - DNA, 15 bp, Homo sapiens
gttatcgttcattgt

SEQ ID NO: 719543 - DNA, 15 bp, Homo sapiens
ttatcgttcattgtt

SEQ ID NO: 719544 - DNA, 15 bp, Homo sapiens
tatcgttcattgttt

SEQ ID NO: 719545 - DNA, 15 bp, Homo sapiens
atcgttcattgttta

SEQ ID NO: 719546 - DNA, 15 bp, Homo sapiens
tcgttcattgtttag

SEQ ID NO: 719547 - DNA, 15 bp, Homo sapiens
cgttcattgtttagt

SEQ ID NO: 719548 - DNA, 15 bp, Homo sapiens
gttcattgtttagta

SEQ ID NO: 719549 - DNA, 15 bp, Homo sapiens
ttcattgtttagtaa

SEQ ID NO: 719550 - DNA, 15 bp, Homo sapiens
tcattgtttagtaaa

SEQ ID NO: 719551 - DNA, 15 bp, Homo sapiens
cattgtttagtaaag

SEQ ID NO: 719552 - DNA, 15 bp, Homo sapiens
attgtttagtaaagt

SEQ ID NO: 719553 - DNA, 15 bp, Homo sapiens
ttgtttagtaaagtg

SEQ ID NO: 719554 - DNA, 15 bp, Homo sapiens
tgtttagtaaagtga

SEQ ID NO: 719555 - DNA, 15 bp, Homo sapiens
gtttagtaaagtgaa

SEQ ID NO: 719556 - DNA, 15 bp, Homo sapiens
tttagtaaagtgaat

SEQ ID NO: 719557 - DNA, 15 bp, Homo sapiens
ttagtaaagtgaatg

SEQ ID NO: 719558 - DNA, 15 bp, Homo sapiens
tagtaaagtgaatgc

SEQ ID NO: 719559 - DNA, 15 bp, Homo sapiens
agtaaagtgaatgct

SEQ ID NO: 719560 - DNA, 15 bp, Homo sapiens
gtaaagtgaatgctg

SEQ ID NO: 719561 - DNA, 15 bp, Homo sapiens
taaagtgaatgctgc

SEQ ID NO: 719562 - DNA, 15 bp, Homo sapiens
aaagtgaatgctgct

SEQ ID NO: 719563 - DNA, 15 bp, Homo sapiens
aagtgaatgctgcta

SEQ ID NO: 719564 - DNA, 15 bp, Homo sapiens
agtgaatgctgctac

SEQ ID NO: 719565 - DNA, 15 bp, Homo sapiens
gtgaatgctgctact

SEQ ID NO: 719566 - DNA, 15 bp, Homo sapiens
tgaatgctgctactg

SEQ ID NO: 719567 - DNA, 15 bp, Homo sapiens
gaatgctgctactgt

SEQ ID NO: 719568 - DNA, 15 bp, Homo sapiens
aatgctgctactgtg

SEQ ID NO: 719569 - DNA, 15 bp, Homo sapiens
atgctgctactgtgg

SEQ ID NO: 719570 - DNA, 15 bp, Homo sapiens
tgctgctactgtggc

SEQ ID NO: 719571 - DNA, 15 bp, Homo sapiens
gctgctactgtggcg

SEQ ID NO: 719572 - DNA, 15 bp, Homo sapiens
ctgctactgtggcgg

SEQ ID NO: 719573 - DNA, 15 bp, Homo sapiens
tgctactgtggcgga

SEQ ID NO: 719574 - DNA, 15 bp, Homo sapiens
gctactgtggcggag

SEQ ID NO: 719575 - DNA, 15 bp, Homo sapiens
ctactgtggcggagt

SEQ ID NO: 719576 - DNA, 15 bp, Homo sapiens
tactgtggcggagta

SEQ ID NO: 719577 - DNA, 15 bp, Homo sapiens
actgtggcggagtaa

SEQ ID NO: 719578 - DNA, 15 bp, Homo sapiens
ctgtggcggagtaag

SEQ ID NO: 719579 - DNA, 15 bp, Homo sapiens
tgtggcggagtaaga

SEQ ID NO: 719580 - DNA, 15 bp, Homo sapiens
gtggcggagtaagat

SEQ ID NO: 719581 - DNA, 15 bp, Homo sapiens
tggcggagtaagatc

SEQ ID NO: 719582 - DNA, 15 bp, Homo sapiens
ggcggagtaagatca

SEQ ID NO: 719583 - DNA, 15 bp, Homo sapiens
gcggagtaagatcac

SEQ ID NO: 719584 - DNA, 15 bp, Homo sapiens
cggagtaagatcact

SEQ ID NO: 719585 - DNA, 15 bp, Homo sapiens
ggagtaagatcactc

SEQ ID NO: 719586 - DNA, 15 bp, Homo sapiens
gagtaagatcactca

SEQ ID NO: 719587 - DNA, 15 bp, Homo sapiens
agtaagatcactcat

SEQ ID NO: 719588 - DNA, 15 bp, Homo sapiens
gtaagatcactcatt

SEQ ID NO: 719589 - DNA, 15 bp, Homo sapiens
taagatcactcatta

SEQ ID NO: 719590 - DNA, 15 bp, Homo sapiens
aagatcactcattat

SEQ ID NO: 719591 - DNA, 15 bp, Homo sapiens
agatcactcattatg

SEQ ID NO: 719592 - DNA, 15 bp, Homo sapiens
gatcactcattatgg

SEQ ID NO: 719593 - DNA, 15 bp, Homo sapiens
atcactcattatggc

SEQ ID NO: 719594 - DNA, 15 bp, Homo sapiens
tcactcattatggct

SEQ ID NO: 719595 - DNA, 15 bp, Homo sapiens
cactcattatggcta

SEQ ID NO: 719596 - DNA, 15 bp, Homo sapiens
actcattatggctag

SEQ ID NO: 719597 - DNA, 15 bp, Homo sapiens
ctcattatggctaga

SEQ ID NO: 719598 - DNA, 15 bp, Homo sapiens
tcattatggctagaa

SEQ ID NO: 719599 - DNA, 15 bp, Homo sapiens
cattatggctagaat

SEQ ID NO: 719600 - DNA, 15 bp, Homo sapiens
attatggctagaatt

SEQ ID NO: 719601 - DNA, 15 bp, Homo sapiens
ttatggctagaattc

SEQ ID NO: 719602 - DNA, 15 bp, Homo sapiens
tatggctagaattcc

SEQ ID NO: 719603 - DNA, 15 bp, Homo sapiens
atggctagaattcct

SEQ ID NO: 719604 - DNA, 15 bp, Homo sapiens
tggctagaattcctt

SEQ ID NO: 719605 - DNA, 15 bp, Homo sapiens
ggctagaattccttt

SEQ ID NO: 719606 - DNA, 15 bp, Homo sapiens
gctagaattccttta

SEQ ID NO: 719607 - DNA, 15 bp, Homo sapiens
ctagaattcctttat

SEQ ID NO: 719608 - DNA, 15 bp, Homo sapiens
tagaattcctttatt

SEQ ID NO: 719609 - DNA, 15 bp, Homo sapiens
agaattcctttattc

SEQ ID NO: 719610 - DNA, 15 bp, Homo sapiens
gaattcctttattcc

SEQ ID NO: 719611 - DNA, 15 bp, Homo sapiens
aattcctttattcct

SEQ ID NO: 719612 - DNA, 15 bp, Homo sapiens
attcctttattccta

SEQ ID NO: 719613 - DNA, 15 bp, Homo sapiens
ttcctttattcctag

SEQ ID NO: 719614 - DNA, 15 bp, Homo sapiens
tcctttattcctaga

SEQ ID NO: 719615 - DNA, 15 bp, Homo sapiens
cctttattcctagag

SEQ ID NO: 719616 - DNA, 15 bp, Homo sapiens
ctttattcctagagg

SEQ ID NO: 719617 - DNA, 15 bp, Homo sapiens
tttattcctagagga

SEQ ID NO: 719618 - DNA, 15 bp, Homo sapiens
ttattcctagaggag

SEQ ID NO: 719619 - DNA, 15 bp, Homo sapiens
tattcctagaggagg

SEQ ID NO: 719620 - DNA, 15 bp, Homo sapiens
attcctagaggagga

SEQ ID NO: 719621 - DNA, 15 bp, Homo sapiens
ttcctagaggaggac

SEQ ID NO: 719622 - DNA, 15 bp, Homo sapiens
tcctagaggaggact

SEQ ID NO: 719623 - DNA, 15 bp, Homo sapiens
cctagaggaggacta

SEQ ID NO: 719624 - DNA, 15 bp, Homo sapiens
ctagaggaggactat

SEQ ID NO: 719625 - DNA, 15 bp, Homo sapiens
tagaggaggactatt

SEQ ID NO: 719626 - DNA, 15 bp, Homo sapiens
agaggaggactatta

SEQ ID NO: 719627 - DNA, 15 bp, Homo sapiens
gaggaggactattat

SEQ ID NO: 719628 - DNA, 15 bp, Homo sapiens
aggaggactattatc

SEQ ID NO: 719629 - DNA, 15 bp, Homo sapiens
ggaggactattatct

SEQ ID NO: 719630 - DNA, 15 bp, Homo sapiens
gaggactattatcta

SEQ ID NO: 719631 - DNA, 15 bp, Homo sapiens
aggactattatctac

SEQ ID NO: 719632 - DNA, 15 bp, Homo sapiens
ggactattatctact

SEQ ID NO: 719633 - DNA, 15 bp, Homo sapiens
gactattatctactt

SEQ ID NO: 719634 - DNA, 15 bp, Homo sapiens
actattatctacttc

SEQ ID NO: 719635 - DNA, 15 bp, Homo sapiens
ctattatctacttca

SEQ ID NO: 719636 - DNA, 15 bp, Homo sapiens
tattatctacttcat

SEQ ID NO: 719637 - DNA, 15 bp, Homo sapiens
attatctacttcatt

SEQ ID NO: 719638 - DNA, 15 bp, Homo sapiens
ttatctacttcattt

SEQ ID NO: 719639 - DNA, 15 bp, Homo sapiens
tatctacttcatttt

SEQ ID NO: 719640 - DNA, 15 bp, Homo sapiens
atctacttcatttta

SEQ ID NO: 719641 - DNA, 15 bp, Homo sapiens
tctacttcattttag

SEQ ID NO: 719642 - DNA, 15 bp, Homo sapiens
ctacttcattttagg

SEQ ID NO: 719643 - DNA, 15 bp, Homo sapiens
tacttcattttagga

SEQ ID NO: 719644 - DNA, 15 bp, Homo sapiens
acttcattttaggag

SEQ ID NO: 719645 - DNA, 15 bp, Homo sapiens
cttcattttaggagt

SEQ ID NO: 719646 - DNA, 15 bp, Homo sapiens
ttcattttaggagtg

SEQ ID NO: 719647 - DNA, 15 bp, Homo sapiens
tcattttaggagtga

SEQ ID NO: 719648 - DNA, 15 bp, Homo sapiens
cattttaggagtgag

SEQ ID NO: 719649 - DNA, 15 bp, Homo sapiens
attttaggagtgagc

SEQ ID NO: 719650 - DNA, 15 bp, Homo sapiens
ttttaggagtgagct

SEQ ID NO: 719651 - DNA, 15 bp, Homo sapiens
tttaggagtgagctt

SEQ ID NO: 719652 - DNA, 15 bp, Homo sapiens
ttaggagtgagctta

SEQ ID NO: 719653 - DNA, 15 bp, Homo sapiens
taggagtgagcttat

SEQ ID NO: 719654 - DNA, 15 bp, Homo sapiens
aggagtgagcttatt

SEQ ID NO: 719655 - DNA, 15 bp, Homo sapiens
ggagtgagcttattt

SEQ ID NO: 719656 - DNA, 15 bp, Homo sapiens
gagtgagcttatttt

SEQ ID NO: 719657 - DNA, 15 bp, Homo sapiens
agtgagcttattttc

SEQ ID NO: 719658 - DNA, 15 bp, Homo sapiens
gtgagcttattttca

SEQ ID NO: 719659 - DNA, 15 bp, Homo sapiens
tgagcttattttcaa

SEQ ID NO: 719660 - DNA, 15 bp, Homo sapiens
gagcttattttcaaa

SEQ ID NO: 719661 - DNA, 15 bp, Homo sapiens
agcttattttcaaag

SEQ ID NO: 719662 - DNA, 15 bp, Homo sapiens
gcttattttcaaaga

SEQ ID NO: 719663 - DNA, 15 bp, Homo sapiens
cttattttcaaagag

SEQ ID NO: 719664 - DNA, 15 bp, Homo sapiens
ttattttcaaagaga

SEQ ID NO: 719665 - DNA, 15 bp, Homo sapiens
tattttcaaagagat

SEQ ID NO: 719666 - DNA, 15 bp, Homo sapiens
attttcaaagagata

SEQ ID NO: 719667 - DNA, 15 bp, Homo sapiens
ttttcaaagagatag

SEQ ID NO: 719668 - DNA, 15 bp, Homo sapiens
tttcaaagagatagt

SEQ ID NO: 719669 - DNA, 15 bp, Homo sapiens
ttcaaagagatagtt

SEQ ID NO: 719670 - DNA, 15 bp, Homo sapiens
tcaaagagatagttc

SEQ ID NO: 719671 - DNA, 15 bp, Homo sapiens
caaagagatagttca

SEQ ID NO: 719672 - DNA, 15 bp, Homo sapiens
aaagagatagttcat

SEQ ID NO: 719673 - DNA, 15 bp, Homo sapiens
aagagatagttcata

SEQ ID NO: 719674 - DNA, 15 bp, Homo sapiens
agagatagttcatat

SEQ ID NO: 719675 - DNA, 15 bp, Homo sapiens
gagatagttcatatt

SEQ ID NO: 719676 - DNA, 15 bp, Homo sapiens
agatagttcatattt

SEQ ID NO: 719677 - DNA, 15 bp, Homo sapiens
gatagttcatatttt

SEQ ID NO: 719678 - DNA, 15 bp, Homo sapiens
atagttcatattttt

SEQ ID NO: 719679 - DNA, 15 bp, Homo sapiens
tagttcatattttta

SEQ ID NO: 719680 - DNA, 15 bp, Homo sapiens
agttcatatttttaa

SEQ ID NO: 719681 - DNA, 15 bp, Homo sapiens
gttcatatttttaaa

SEQ ID NO: 719682 - DNA, 15 bp, Homo sapiens
ttcatatttttaaaa

SEQ ID NO: 719683 - DNA, 15 bp, Homo sapiens
tcatatttttaaaat

SEQ ID NO: 719684 - DNA, 15 bp, Homo sapiens
catatttttaaaatt

SEQ ID NO: 719685 - DNA, 15 bp, Homo sapiens
atatttttaaaattt

SEQ ID NO: 719686 - DNA, 15 bp, Homo sapiens
tatttttaaaatttg

SEQ ID NO: 719687 - DNA, 15 bp, Homo sapiens
atttttaaaatttgc

SEQ ID NO: 719688 - DNA, 15 bp, Homo sapiens
tttttaaaatttgca

SEQ ID NO: 719689 - DNA, 15 bp, Homo sapiens
ttttaaaatttgcac

SEQ ID NO: 719690 - DNA, 15 bp, Homo sapiens
tttaaaatttgcact

SEQ ID NO: 719691 - DNA, 15 bp, Homo sapiens
ttaaaatttgcactg

SEQ ID NO: 719692 - DNA, 15 bp, Homo sapiens
taaaatttgcactgc

SEQ ID NO: 719693 - DNA, 15 bp, Homo sapiens
aaaatttgcactgca

SEQ ID NO: 719694 - DNA, 15 bp, Homo sapiens
aaatttgcactgcag

SEQ ID NO: 719695 - DNA, 15 bp, Homo sapiens
aatttgcactgcagc

SEQ ID NO: 719696 - DNA, 15 bp, Homo sapiens
atttgcactgcagcg

SEQ ID NO: 719697 - DNA, 15 bp, Homo sapiens
tttgcactgcagcga

SEQ ID NO: 719698 - DNA, 15 bp, Homo sapiens
ttgcactgcagcgat

SEQ ID NO: 719699 - DNA, 15 bp, Homo sapiens
tgcactgcagcgatg

SEQ ID NO: 719700 - DNA, 15 bp, Homo sapiens
gcactgcagcgatgg

SEQ ID NO: 719701 - DNA, 15 bp, Homo sapiens
cactgcagcgatggt

SEQ ID NO: 719702 - DNA, 15 bp, Homo sapiens
actgcagcgatggtc

SEQ ID NO: 719703 - DNA, 15 bp, Homo sapiens
ctgcagcgatggtcg

SEQ ID NO: 719704 - DNA, 15 bp, Homo sapiens
tgcagcgatggtcgt

SEQ ID NO: 719705 - DNA, 15 bp, Homo sapiens
gcagcgatggtcgtt

SEQ ID NO: 719706 - DNA, 15 bp, Homo sapiens
cagcgatggtcgtta

SEQ ID NO: 719707 - DNA, 15 bp, Homo sapiens
agcgatggtcgttat

SEQ ID NO: 719708 - DNA, 15 bp, Homo sapiens
gcgatggtcgttatt

SEQ ID NO: 719709 - DNA, 15 bp, Homo sapiens
cgatggtcgttattc

SEQ ID NO: 719710 - DNA, 15 bp, Homo sapiens
gatggtcgttattct

SEQ ID NO: 719711 - DNA, 15 bp, Homo sapiens
atggtcgttattctg

SEQ ID NO: 719712 - DNA, 15 bp, Homo sapiens
tggtcgttattctgc

SEQ ID NO: 719713 - DNA, 15 bp, Homo sapiens
ggtcgttattctgcc

SEQ ID NO: 719714 - DNA, 15 bp, Homo sapiens
gtcgttattctgcct

SEQ ID NO: 719715 - DNA, 15 bp, Homo sapiens
tcgttattctgcctg

SEQ ID NO: 719716 - DNA, 15 bp, Homo sapiens
cgttattctgcctgg

SEQ ID NO: 719717 - DNA, 15 bp, Homo sapiens
gttattctgcctggg

SEQ ID NO: 719718 - DNA, 15 bp, Homo sapiens
ttattctgcctgggc

SEQ ID NO: 719719 - DNA, 15 bp, Homo sapiens
tattctgcctgggct

SEQ ID NO: 719720 - DNA, 15 bp, Homo sapiens
attctgcctgggctt

SEQ ID NO: 719721 - DNA, 15 bp, Homo sapiens
ttctgcctgggcttt

SEQ ID NO: 719722 - DNA, 15 bp, Homo sapiens
tctgcctgggctttt

SEQ ID NO: 719723 - DNA, 15 bp, Homo sapiens
ctgcctgggcttttt

SEQ ID NO: 719724 - DNA, 15 bp, Homo sapiens
tgcctgggctttttt

SEQ ID NO: 719725 - DNA, 15 bp, Homo sapiens
gcctgggctttttta

SEQ ID NO: 719726 - DNA, 15 bp, Homo sapiens
cctgggcttttttaa

SEQ ID NO: 719727 - DNA, 15 bp, Homo sapiens
ctgggcttttttaag

SEQ ID NO: 719728 - DNA, 15 bp, Homo sapiens
tgggcttttttaaga

SEQ ID NO: 719729 - DNA, 15 bp, Homo sapiens
gggcttttttaagag

SEQ ID NO: 719730 - DNA, 15 bp, Homo sapiens
ggcttttttaagagg

SEQ ID NO: 719731 - DNA, 15 bp, Homo sapiens
gcttttttaagaggt

SEQ ID NO: 719732 - DNA, 15 bp, Homo sapiens
cttttttaagaggtt

SEQ ID NO: 719733 - DNA, 15 bp, Homo sapiens
ttttttaagaggttt

SEQ ID NO: 719734 - DNA, 15 bp, Homo sapiens
tttttaagaggtttg

SEQ ID NO: 719735 - DNA, 15 bp, Homo sapiens
ttttaagaggtttgc

SEQ ID NO: 719736 - DNA, 15 bp, Homo sapiens
tttaagaggtttgca

SEQ ID NO: 719737 - DNA, 15 bp, Homo sapiens
ttaagaggtttgcac

SEQ ID NO: 719738 - DNA, 15 bp, Homo sapiens
taagaggtttgcaca

SEQ ID NO: 719739 - DNA, 15 bp, Homo sapiens
aagaggtttgcacac

SEQ ID NO: 719740 - DNA, 15 bp, Homo sapiens
agaggtttgcacacc

SEQ ID NO: 719741 - DNA, 15 bp, Homo sapiens
gaggtttgcacacca

SEQ ID NO: 719742 - DNA, 15 bp, Homo sapiens
aggtttgcacaccat

SEQ ID NO: 719743 - DNA, 15 bp, Homo sapiens
ggtttgcacaccata

SEQ ID NO: 719744 - DNA, 15 bp, Homo sapiens
gtttgcacaccatat

SEQ ID NO: 719745 - DNA, 15 bp, Homo sapiens
tttgcacaccatata

SEQ ID NO: 719746 - DNA, 15 bp, Homo sapiens
ttgcacaccatataa

SEQ ID NO: 719747 - DNA, 15 bp, Homo sapiens
tgcacaccatataaa

SEQ ID NO: 719748 - DNA, 15 bp, Homo sapiens
gcacaccatataaaa

SEQ ID NO: 719749 - DNA, 15 bp, Homo sapiens
cacaccatataaaag

SEQ ID NO: 719750 - DNA, 15 bp, Homo sapiens
acaccatataaaagt

SEQ ID NO: 719751 - DNA, 15 bp, Homo sapiens
caccatataaaagta

SEQ ID NO: 719752 - DNA, 15 bp, Homo sapiens
accatataaaagtaa

SEQ ID NO: 719753 - DNA, 15 bp, Homo sapiens
ccatataaaagtaac

SEQ ID NO: 719754 - DNA, 15 bp, Homo sapiens
catataaaagtaaca

SEQ ID NO: 719755 - DNA, 15 bp, Homo sapiens
atataaaagtaacat

SEQ ID NO: 719756 - DNA, 15 bp, Homo sapiens
tataaaagtaacata

SEQ ID NO: 719757 - DNA, 15 bp, Homo sapiens
ataaaagtaacataa

SEQ ID NO: 719758 - DNA, 15 bp, Homo sapiens
taaaagtaacataac

SEQ ID NO: 719759 - DNA, 15 bp, Homo sapiens
aaaagtaacataact

SEQ ID NO: 719760 - DNA, 15 bp, Homo sapiens
aaagtaacataactt

SEQ ID NO: 719761 - DNA, 15 bp, Homo sapiens
aagtaacataacttg

SEQ ID NO: 719762 - DNA, 15 bp, Homo sapiens
agtaacataacttgt

SEQ ID NO: 719763 - DNA, 15 bp, Homo sapiens
gtaacataacttgtg

SEQ ID NO: 719764 - DNA, 15 bp, Homo sapiens
taacataacttgtga

SEQ ID NO: 719765 - DNA, 15 bp, Homo sapiens
aacataacttgtgat

SEQ ID NO: 719766 - DNA, 15 bp, Homo sapiens
acataacttgtgatt

SEQ ID NO: 719767 - DNA, 15 bp, Homo sapiens
cataacttgtgattt

SEQ ID NO: 719768 - DNA, 15 bp, Homo sapiens
ataacttgtgatttt

SEQ ID NO: 719769 - DNA, 15 bp, Homo sapiens
taacttgtgattttt

SEQ ID NO: 719770 - DNA, 15 bp, Homo sapiens
aacttgtgattttta

SEQ ID NO: 719771 - DNA, 15 bp, Homo sapiens
acttgtgatttttaa

SEQ ID NO: 719772 - DNA, 15 bp, Homo sapiens
cttgtgatttttaat

SEQ ID NO: 719773 - DNA, 15 bp, Homo sapiens
ttgtgatttttaata

SEQ ID NO: 719774 - DNA, 15 bp, Homo sapiens
tgtgatttttaatat

SEQ ID NO: 719775 - DNA, 15 bp, Homo sapiens
gtgatttttaatatt

SEQ ID NO: 719776 - DNA, 15 bp, Homo sapiens
tgatttttaatattt

SEQ ID NO: 719777 - DNA, 15 bp, Homo sapiens
gatttttaatatttt

SEQ ID NO: 719778 - DNA, 15 bp, Homo sapiens
atttttaatatttta

SEQ ID NO: 719779 - DNA, 15 bp, Homo sapiens
tttttaatattttat

SEQ ID NO: 719780 - DNA, 15 bp, Homo sapiens
ttttaatattttatt

SEQ ID NO: 719781 - DNA, 15 bp, Homo sapiens
tttaatattttatta

SEQ ID NO: 719782 - DNA, 15 bp, Homo sapiens
ttaatattttattag

SEQ ID NO: 719783 - DNA, 15 bp, Homo sapiens
taatattttattaga

SEQ ID NO: 719784 - DNA, 15 bp, Homo sapiens
aatattttattagag

SEQ ID NO: 719785 - DNA, 15 bp, Homo sapiens
atattttattagaga

SEQ ID NO: 719786 - DNA, 15 bp, Homo sapiens
tattttattagagat

SEQ ID NO: 719787 - DNA, 15 bp, Homo sapiens
attttattagagatt

SEQ ID NO: 719788 - DNA, 15 bp, Homo sapiens
ttttattagagattg

SEQ ID NO: 719789 - DNA, 15 bp, Homo sapiens
tttattagagattgt

SEQ ID NO: 719790 - DNA, 15 bp, Homo sapiens
ttattagagattgta

SEQ ID NO: 719791 - DNA, 15 bp, Homo sapiens
tattagagattgtaa

SEQ ID NO: 719792 - DNA, 15 bp, Homo sapiens
attagagattgtaaa

SEQ ID NO: 719793 - DNA, 15 bp, Homo sapiens
ttagagattgtaaag

SEQ ID NO: 719794 - DNA, 15 bp, Homo sapiens
tagagattgtaaagg

SEQ ID NO: 719795 - DNA, 15 bp, Homo sapiens
agagattgtaaaggt

SEQ ID NO: 719796 - DNA, 15 bp, Homo sapiens
gagattgtaaaggtt

SEQ ID NO: 719797 - DNA, 15 bp, Homo sapiens
agattgtaaaggtta

SEQ ID NO: 719798 - DNA, 15 bp, Homo sapiens
gattgtaaaggttat

SEQ ID NO: 719799 - DNA, 15 bp, Homo sapiens
attgtaaaggttata

SEQ ID NO: 719800 - DNA, 15 bp, Homo sapiens
ttgtaaaggttataa

SEQ ID NO: 719801 - DNA, 15 bp, Homo sapiens
tgtaaaggttataac

SEQ ID NO: 719802 - DNA, 15 bp, Homo sapiens
gtaaaggttataaca

SEQ ID NO: 719803 - DNA, 15 bp, Homo sapiens
taaaggttataacat

SEQ ID NO: 719804 - DNA, 15 bp, Homo sapiens
aaaggttataacatc

SEQ ID NO: 719805 - DNA, 15 bp, Homo sapiens
aaggttataacatca

SEQ ID NO: 719806 - DNA, 15 bp, Homo sapiens
aggttataacatcac

SEQ ID NO: 719807 - DNA, 15 bp, Homo sapiens
ggttataacatcact

SEQ ID NO: 719808 - DNA, 15 bp, Homo sapiens
gttataacatcactt

SEQ ID NO: 719809 - DNA, 15 bp, Homo sapiens
ttataacatcacttt

SEQ ID NO: 719810 - DNA, 15 bp, Homo sapiens
tataacatcactttg

SEQ ID NO: 719811 - DNA, 15 bp, Homo sapiens
ataacatcactttgg

SEQ ID NO: 719812 - DNA, 15 bp, Homo sapiens
taacatcactttggt

SEQ ID NO: 719813 - DNA, 15 bp, Homo sapiens
aacatcactttggtg

SEQ ID NO: 719814 - DNA, 15 bp, Homo sapiens
acatcactttggtgt

SEQ ID NO: 719815 - DNA, 15 bp, Homo sapiens
catcactttggtgtt

SEQ ID NO: 719816 - DNA, 15 bp, Homo sapiens
atcactttggtgttt

SEQ ID NO: 719817 - DNA, 15 bp, Homo sapiens
tcactttggtgtttc

SEQ ID NO: 719818 - DNA, 15 bp, Homo sapiens
cactttggtgtttcg

SEQ ID NO: 719819 - DNA, 15 bp, Homo sapiens
actttggtgtttcgt

SEQ ID NO: 719820 - DNA, 15 bp, Homo sapiens
ctttggtgtttcgta

SEQ ID NO: 719821 - DNA, 15 bp, Homo sapiens
tttggtgtttcgtag

SEQ ID NO: 719822 - DNA, 15 bp, Homo sapiens
ttggtgtttcgtagt

SEQ ID NO: 719823 - DNA, 15 bp, Homo sapiens
tggtgtttcgtagtc

SEQ ID NO: 719824 - DNA, 15 bp, Homo sapiens
ggtgtttcgtagtca

SEQ ID NO: 719825 - DNA, 15 bp, Homo sapiens
gtgtttcgtagtcaa

SEQ ID NO: 719826 - DNA, 15 bp, Homo sapiens
tgtttcgtagtcaag

SEQ ID NO: 719827 - DNA, 15 bp, Homo sapiens
gtttcgtagtcaagt

SEQ ID NO: 719828 - DNA, 15 bp, Homo sapiens
tttcgtagtcaagtt

SEQ ID NO: 719829 - DNA, 15 bp, Homo sapiens
ttcgtagtcaagttt

SEQ ID NO: 719830 - DNA, 15 bp, Homo sapiens
tcgtagtcaagtttt

SEQ ID NO: 719831 - DNA, 15 bp, Homo sapiens
cgtagtcaagtttta

SEQ ID NO: 719832 - DNA, 15 bp, Homo sapiens
gtagtcaagttttaa

SEQ ID NO: 719833 - DNA, 15 bp, Homo sapiens
tagtcaagttttaac

SEQ ID NO: 719834 - DNA, 15 bp, Homo sapiens
agtcaagttttaaca

SEQ ID NO: 719835 - DNA, 15 bp, Homo sapiens
gtcaagttttaacat

SEQ ID NO: 719836 - DNA, 15 bp, Homo sapiens
tcaagttttaacata

SEQ ID NO: 719837 - DNA, 15 bp, Homo sapiens
caagttttaacataa

SEQ ID NO: 719838 - DNA, 15 bp, Homo sapiens
aagttttaacataag

SEQ ID NO: 719839 - DNA, 15 bp, Homo sapiens
agttttaacataagg

SEQ ID NO: 719840 - DNA, 15 bp, Homo sapiens
gttttaacataagga

SEQ ID NO: 719841 - DNA, 15 bp, Homo sapiens
ttttaacataaggat

SEQ ID NO: 719842 - DNA, 15 bp, Homo sapiens
tttaacataaggatg

SEQ ID NO: 719843 - DNA, 15 bp, Homo sapiens
ttaacataaggatgt

SEQ ID NO: 719844 - DNA, 15 bp, Homo sapiens
taacataaggatgtg

SEQ ID NO: 719845 - DNA, 15 bp, Homo sapiens
aacataaggatgtgc

SEQ ID NO: 719846 - DNA, 15 bp, Homo sapiens
acataaggatgtgcc

SEQ ID NO: 719847 - DNA, 15 bp, Homo sapiens
cataaggatgtgcct

SEQ ID NO: 719848 - DNA, 15 bp, Homo sapiens
ataaggatgtgcctg

SEQ ID NO: 719849 - DNA, 15 bp, Homo sapiens
taaggatgtgcctga

SEQ ID NO: 719850 - DNA, 15 bp, Homo sapiens
aaggatgtgcctgaa

SEQ ID NO: 719851 - DNA, 15 bp, Homo sapiens
aggatgtgcctgaaa

SEQ ID NO: 719852 - DNA, 15 bp, Homo sapiens
ggatgtgcctgaaaa

SEQ ID NO: 719853 - DNA, 15 bp, Homo sapiens
gatgtgcctgaaaaa

SEQ ID NO: 719854 - DNA, 15 bp, Homo sapiens
atgtgcctgaaaaat

SEQ ID NO: 719855 - DNA, 15 bp, Homo sapiens
tgtgcctgaaaaatc

SEQ ID NO: 719856 - DNA, 15 bp, Homo sapiens
gtgcctgaaaaatca

SEQ ID NO: 719857 - DNA, 15 bp, Homo sapiens
tgcctgaaaaatcat

SEQ ID NO: 719858 - DNA, 15 bp, Homo sapiens
gcctgaaaaatcatt

SEQ ID NO: 719859 - DNA, 15 bp, Homo sapiens
cctgaaaaatcattt

SEQ ID NO: 719860 - DNA, 15 bp, Homo sapiens
ctgaaaaatcatttg

SEQ ID NO: 719861 - DNA, 15 bp, Homo sapiens
tgaaaaatcatttgt

SEQ ID NO: 719862 - DNA, 15 bp, Homo sapiens
gaaaaatcatttgta

SEQ ID NO: 719863 - DNA, 15 bp, Homo sapiens
aaaaatcatttgtaa

SEQ ID NO: 719864 - DNA, 15 bp, Homo sapiens
aaaatcatttgtaat

SEQ ID NO: 719865 - DNA, 15 bp, Homo sapiens
aaatcatttgtaatt

SEQ ID NO: 719866 - DNA, 15 bp, Homo sapiens
aatcatttgtaatta

SEQ ID NO: 719867 - DNA, 15 bp, Homo sapiens
atcatttgtaattag

SEQ ID NO: 719868 - DNA, 15 bp, Homo sapiens
tcatttgtaattaga

SEQ ID NO: 719869 - DNA, 15 bp, Homo sapiens
catttgtaattagag

SEQ ID NO: 719870 - DNA, 15 bp, Homo sapiens
atttgtaattagaga

SEQ ID NO: 719871 - DNA, 15 bp, Homo sapiens
tttgtaattagagaa

SEQ ID NO: 719872 - DNA, 15 bp, Homo sapiens
ttgtaattagagaat

SEQ ID NO: 719873 - DNA, 15 bp, Homo sapiens
tgtaattagagaatg

SEQ ID NO: 719874 - DNA, 15 bp, Homo sapiens
gtaattagagaatgg

SEQ ID NO: 719875 - DNA, 15 bp, Homo sapiens
taattagagaatggg

SEQ ID NO: 719876 - DNA, 15 bp, Homo sapiens
aattagagaatggga

SEQ ID NO: 719877 - DNA, 15 bp, Homo sapiens
attagagaatgggaa

SEQ ID NO: 719878 - DNA, 15 bp, Homo sapiens
ttagagaatgggaag

SEQ ID NO: 719879 - DNA, 15 bp, Homo sapiens
tagagaatgggaaga

SEQ ID NO: 719880 - DNA, 15 bp, Homo sapiens
agagaatgggaagat

SEQ ID NO: 719881 - DNA, 15 bp, Homo sapiens
gagaatgggaagatt

SEQ ID NO: 719882 - DNA, 15 bp, Homo sapiens
agaatgggaagattc

SEQ ID NO: 719883 - DNA, 15 bp, Homo sapiens
gaatgggaagattct

SEQ ID NO: 719884 - DNA, 15 bp, Homo sapiens
aatgggaagattctt

SEQ ID NO: 719885 - DNA, 15 bp, Homo sapiens
atgggaagattcttg

SEQ ID NO: 719886 - DNA, 15 bp, Homo sapiens
tgggaagattcttgg

SEQ ID NO: 719887 - DNA, 15 bp, Homo sapiens
gggaagattcttggg

SEQ ID NO: 719888 - DNA, 15 bp, Homo sapiens
ggaagattcttgggt

SEQ ID NO: 719889 - DNA, 15 bp, Homo sapiens
gaagattcttgggtt

SEQ ID NO: 719890 - DNA, 15 bp, Homo sapiens
aagattcttgggttg

SEQ ID NO: 719891 - DNA, 15 bp, Homo sapiens
agattcttgggttgc

SEQ ID NO: 719892 - DNA, 15 bp, Homo sapiens
gattcttgggttgca

SEQ ID NO: 719893 - DNA, 15 bp, Homo sapiens
attcttgggttgcat

SEQ ID NO: 719894 - DNA, 15 bp, Homo sapiens
ttcttgggttgcatt

SEQ ID NO: 719895 - DNA, 15 bp, Homo sapiens
tcttgggttgcattt

SEQ ID NO: 719896 - DNA, 15 bp, Homo sapiens
cttgggttgcatttt

SEQ ID NO: 719897 - DNA, 15 bp, Homo sapiens
ttgggttgcattttt

SEQ ID NO: 719898 - DNA, 15 bp, Homo sapiens
tgggttgcatttttg

SEQ ID NO: 719899 - DNA, 15 bp, Homo sapiens
gggttgcatttttgt

SEQ ID NO: 719900 - DNA, 15 bp, Homo sapiens
ggttgcatttttgtc

SEQ ID NO: 719901 - DNA, 15 bp, Homo sapiens
gttgcatttttgtca

SEQ ID NO: 719902 - DNA, 15 bp, Homo sapiens
ttgcatttttgtcag

SEQ ID NO: 719903 - DNA, 15 bp, Homo sapiens
tgcatttttgtcagc

SEQ ID NO: 719904 - DNA, 15 bp, Homo sapiens
gcatttttgtcagca

SEQ ID NO: 719905 - DNA, 15 bp, Homo sapiens
catttttgtcagcaa

SEQ ID NO: 719906 - DNA, 15 bp, Homo sapiens
atttttgtcagcaaa

SEQ ID NO: 719907 - DNA, 15 bp, Homo sapiens
tttttgtcagcaaat

SEQ ID NO: 719908 - DNA, 15 bp, Homo sapiens
ttttgtcagcaaatt

SEQ ID NO: 719909 - DNA, 15 bp, Homo sapiens
tttgtcagcaaattg

SEQ ID NO: 719910 - DNA, 15 bp, Homo sapiens
ttgtcagcaaattgc

SEQ ID NO: 719911 - DNA, 15 bp, Homo sapiens
tgtcagcaaattgca

SEQ ID NO: 719912 - DNA, 15 bp, Homo sapiens
gtcagcaaattgcag

SEQ ID NO: 719913 - DNA, 15 bp, Homo sapiens
tcagcaaattgcaga

SEQ ID NO: 719914 - DNA, 15 bp, Homo sapiens
cagcaaattgcagag

SEQ ID NO: 719915 - DNA, 15 bp, Homo sapiens
agcaaattgcagagg

SEQ ID NO: 719916 - DNA, 15 bp, Homo sapiens
gcaaattgcagagga

SEQ ID NO: 719917 - DNA, 15 bp, Homo sapiens
caaattgcagaggat

SEQ ID NO: 719918 - DNA, 15 bp, Homo sapiens
aaattgcagaggatc

SEQ ID NO: 719919 - DNA, 15 bp, Homo sapiens
aattgcagaggatca

SEQ ID NO: 719920 - DNA, 15 bp, Homo sapiens
attgcagaggatcat

SEQ ID NO: 719921 - DNA, 15 bp, Homo sapiens
ttgcagaggatcatt

SEQ ID NO: 719922 - DNA, 15 bp, Homo sapiens
tgcagaggatcatta

SEQ ID NO: 719923 - DNA, 15 bp, Homo sapiens
gcagaggatcattat

SEQ ID NO: 719924 - DNA, 15 bp, Homo sapiens
cagaggatcattatt

SEQ ID NO: 719925 - DNA, 15 bp, Homo sapiens
agaggatcattattc

SEQ ID NO: 719926 - DNA, 15 bp, Homo sapiens
gaggatcattattct

SEQ ID NO: 719927 - DNA, 15 bp, Homo sapiens
aggatcattattctg

SEQ ID NO: 719928 - DNA, 15 bp, Homo sapiens
ggatcattattctgc

SEQ ID NO: 719929 - DNA, 15 bp, Homo sapiens
gatcattattctgct

SEQ ID NO: 719930 - DNA, 15 bp, Homo sapiens
atcattattctgctc

SEQ ID NO: 719931 - DNA, 15 bp, Homo sapiens
tcattattctgctct

SEQ ID NO: 719932 - DNA, 15 bp, Homo sapiens
cattattctgctcta

SEQ ID NO: 719933 - DNA, 15 bp, Homo sapiens
attattctgctctag

SEQ ID NO: 719934 - DNA, 15 bp, Homo sapiens
ttattctgctctaga

SEQ ID NO: 719935 - DNA, 15 bp, Homo sapiens
tattctgctctagag

SEQ ID NO: 719936 - DNA, 15 bp, Homo sapiens
attctgctctagagt

SEQ ID NO: 719937 - DNA, 15 bp, Homo sapiens
ttctgctctagagtt

SEQ ID NO: 719938 - DNA, 15 bp, Homo sapiens
tctgctctagagttg

SEQ ID NO: 719939 - DNA, 15 bp, Homo sapiens
ctgctctagagttgc

SEQ ID NO: 719940 - DNA, 15 bp, Homo sapiens
tgctctagagttgca

SEQ ID NO: 719941 - DNA, 15 bp, Homo sapiens
gctctagagttgcac

SEQ ID NO: 719942 - DNA, 15 bp, Homo sapiens
ctctagagttgcacc

SEQ ID NO: 719943 - DNA, 15 bp, Homo sapiens
tctagagttgcaccg

SEQ ID NO: 719944 - DNA, 15 bp, Homo sapiens
ctagagttgcaccgt

SEQ ID NO: 719945 - DNA, 15 bp, Homo sapiens
tagagttgcaccgtc

SEQ ID NO: 719946 - DNA, 15 bp, Homo sapiens
agagttgcaccgtcc

SEQ ID NO: 719947 - DNA, 15 bp, Homo sapiens
gagttgcaccgtcca

SEQ ID NO: 719948 - DNA, 15 bp, Homo sapiens
agttgcaccgtccag

SEQ ID NO: 719949 - DNA, 15 bp, Homo sapiens
gttgcaccgtccagt

SEQ ID NO: 719950 - DNA, 15 bp, Homo sapiens
ttgcaccgtccagtt

SEQ ID NO: 719951 - DNA, 15 bp, Homo sapiens
tgcaccgtccagttc

SEQ ID NO: 719952 - DNA, 15 bp, Homo sapiens
gcaccgtccagttca

SEQ ID NO: 719953 - DNA, 15 bp, Homo sapiens
caccgtccagttcag

SEQ ID NO: 719954 - DNA, 15 bp, Homo sapiens
accgtccagttcaga

SEQ ID NO: 719955 - DNA, 15 bp, Homo sapiens
ccgtccagttcagaa

SEQ ID NO: 719956 - DNA, 15 bp, Homo sapiens
cgtccagttcagaag

SEQ ID NO: 719957 - DNA, 15 bp, Homo sapiens
gtccagttcagaagc

SEQ ID NO: 719958 - DNA, 15 bp, Homo sapiens
tccagttcagaagcc

SEQ ID NO: 719959 - DNA, 15 bp, Homo sapiens
ccagttcagaagcca

SEQ ID NO: 719960 - DNA, 15 bp, Homo sapiens
cagttcagaagccac

SEQ ID NO: 719961 - DNA, 15 bp, Homo sapiens
agttcagaagccact

SEQ ID NO: 719962 - DNA, 15 bp, Homo sapiens
gttcagaagccacta

SEQ ID NO: 719963 - DNA, 15 bp, Homo sapiens
ttcagaagccactag

SEQ ID NO: 719964 - DNA, 15 bp, Homo sapiens
tcagaagccactagc

SEQ ID NO: 719965 - DNA, 15 bp, Homo sapiens
cagaagccactagcc

SEQ ID NO: 719966 - DNA, 15 bp, Homo sapiens
agaagccactagcca

SEQ ID NO: 719967 - DNA, 15 bp, Homo sapiens
gaagccactagccac

SEQ ID NO: 719968 - DNA, 15 bp, Homo sapiens
aagccactagccaca

SEQ ID NO: 719969 - DNA, 15 bp, Homo sapiens
agccactagccacat

SEQ ID NO: 719970 - DNA, 15 bp, Homo sapiens
gccactagccacatg

SEQ ID NO: 719971 - DNA, 15 bp, Homo sapiens
ccactagccacatgt

SEQ ID NO: 719972 - DNA, 15 bp, Homo sapiens
cactagccacatgtg

SEQ ID NO: 719973 - DNA, 15 bp, Homo sapiens
actagccacatgtgg

SEQ ID NO: 719974 - DNA, 15 bp, Homo sapiens
ctagccacatgtggc

SEQ ID NO: 719975 - DNA, 15 bp, Homo sapiens
tagccacatgtggct

SEQ ID NO: 719976 - DNA, 15 bp, Homo sapiens
agccacatgtggctg

SEQ ID NO: 719977 - DNA, 15 bp, Homo sapiens
gccacatgtggctgt

SEQ ID NO: 719978 - DNA, 15 bp, Homo sapiens
ccacatgtggctgtt

SEQ ID NO: 719979 - DNA, 15 bp, Homo sapiens
cacatgtggctgttg

SEQ ID NO: 719980 - DNA, 15 bp, Homo sapiens
acatgtggctgttga

SEQ ID NO: 719981 - DNA, 15 bp, Homo sapiens
catgtggctgttgag

SEQ ID NO: 719982 - DNA, 15 bp, Homo sapiens
atgtggctgttgagt

SEQ ID NO: 719983 - DNA, 15 bp, Homo sapiens
tgtggctgttgagta

SEQ ID NO: 719984 - DNA, 15 bp, Homo sapiens
gtggctgttgagtac

SEQ ID NO: 719985 - DNA, 15 bp, Homo sapiens
tggctgttgagtact

SEQ ID NO: 719986 - DNA, 15 bp, Homo sapiens
ggctgttgagtactt

SEQ ID NO: 719987 - DNA, 15 bp, Homo sapiens
gctgttgagtacttg

SEQ ID NO: 719988 - DNA, 15 bp, Homo sapiens
ctgttgagtacttga

SEQ ID NO: 719989 - DNA, 15 bp, Homo sapiens
tgttgagtacttgaa

SEQ ID NO: 719990 - DNA, 15 bp, Homo sapiens
gttgagtacttgaaa

SEQ ID NO: 719991 - DNA, 15 bp, Homo sapiens
ttgagtacttgaaat

SEQ ID NO: 719992 - DNA, 15 bp, Homo sapiens
tgagtacttgaaatg

SEQ ID NO: 719993 - DNA, 15 bp, Homo sapiens
gagtacttgaaatgt

SEQ ID NO: 719994 - DNA, 15 bp, Homo sapiens
agtacttgaaatgta

SEQ ID NO: 719995 - DNA, 15 bp, Homo sapiens
gtacttgaaatgtat

SEQ ID NO: 719996 - DNA, 15 bp, Homo sapiens
tacttgaaatgtatt

SEQ ID NO: 719997 - DNA, 15 bp, Homo sapiens
acttgaaatgtattg

SEQ ID NO: 719998 - DNA, 15 bp, Homo sapiens
cttgaaatgtattga

SEQ ID NO: 719999 - DNA, 15 bp, Homo sapiens
ttgaaatgtattgat

SEQ ID NO: 720000 - DNA, 15 bp, Homo sapiens
tgaaatgtattgata

SEQ ID NO: 720001 - DNA, 15 bp, Homo sapiens
gaaatgtattgatat

SEQ ID NO: 720002 - DNA, 15 bp, Homo sapiens
aaatgtattgatatg

SEQ ID NO: 720003 - DNA, 15 bp, Homo sapiens
aatgtattgatatgt

SEQ ID NO: 720004 - DNA, 15 bp, Homo sapiens
atgtattgatatgtg

SEQ ID NO: 720005 - DNA, 15 bp, Homo sapiens
tgtattgatatgtgc

SEQ ID NO: 720006 - DNA, 15 bp, Homo sapiens
gtattgatatgtgca

SEQ ID NO: 720007 - DNA, 15 bp, Homo sapiens
tattgatatgtgcaa

SEQ ID NO: 720008 - DNA, 15 bp, Homo sapiens
attgatatgtgcaat

SEQ ID NO: 720009 - DNA, 15 bp, Homo sapiens
ttgatatgtgcaata

SEQ ID NO: 720010 - DNA, 15 bp, Homo sapiens
tgatatgtgcaataa

SEQ ID NO: 720011 - DNA, 15 bp, Homo sapiens
gatatgtgcaataag

SEQ ID NO: 720012 - DNA, 15 bp, Homo sapiens
atatgtgcaataagt

SEQ ID NO: 720013 - DNA, 15 bp, Homo sapiens
tatgtgcaataagtg

SEQ ID NO: 720014 - DNA, 15 bp, Homo sapiens
atgtgcaataagtgt

SEQ ID NO: 720015 - DNA, 15 bp, Homo sapiens
tgtgcaataagtgta

SEQ ID NO: 720016 - DNA, 15 bp, Homo sapiens
gtgcaataagtgtag

SEQ ID NO: 720017 - DNA, 15 bp, Homo sapiens
tgcaataagtgtaga

SEQ ID NO: 720018 - DNA, 15 bp, Homo sapiens
gcaataagtgtagaa

SEQ ID NO: 720019 - DNA, 15 bp, Homo sapiens
caataagtgtagaag

SEQ ID NO: 720020 - DNA, 15 bp, Homo sapiens
aataagtgtagaaga

SEQ ID NO: 720021 - DNA, 15 bp, Homo sapiens
ataagtgtagaagac

SEQ ID NO: 720022 - DNA, 15 bp, Homo sapiens
taagtgtagaagaca

SEQ ID NO: 720023 - DNA, 15 bp, Homo sapiens
aagtgtagaagacat

SEQ ID NO: 720024 - DNA, 15 bp, Homo sapiens
agtgtagaagacata

SEQ ID NO: 720025 - DNA, 15 bp, Homo sapiens
gtgtagaagacatat

SEQ ID NO: 720026 - DNA, 15 bp, Homo sapiens
tgtagaagacatatt

SEQ ID NO: 720027 - DNA, 15 bp, Homo sapiens
gtagaagacatattg

SEQ ID NO: 720028 - DNA, 15 bp, Homo sapiens
tagaagacatattgg

SEQ ID NO: 720029 - DNA, 15 bp, Homo sapiens
agaagacatattgga

SEQ ID NO: 720030 - DNA, 15 bp, Homo sapiens
gaagacatattggat

SEQ ID NO: 720031 - DNA, 15 bp, Homo sapiens
aagacatattggatt

SEQ ID NO: 720032 - DNA, 15 bp, Homo sapiens
agacatattggattt

SEQ ID NO: 720033 - DNA, 15 bp, Homo sapiens
gacatattggatttt

SEQ ID NO: 720034 - DNA, 15 bp, Homo sapiens
acatattggatttta

SEQ ID NO: 720035 - DNA, 15 bp, Homo sapiens
catattggattttag

SEQ ID NO: 720036 - DNA, 15 bp, Homo sapiens
atattggattttaga

SEQ ID NO: 720037 - DNA, 15 bp, Homo sapiens
tattggattttagag

SEQ ID NO: 720038 - DNA, 15 bp, Homo sapiens
attggattttagaga

SEQ ID NO: 720039 - DNA, 15 bp, Homo sapiens
ttggattttagagat

SEQ ID NO: 720040 - DNA, 15 bp, Homo sapiens
tggattttagagatc

SEQ ID NO: 720041 - DNA, 15 bp, Homo sapiens
ggattttagagatcc

SEQ ID NO: 720042 - DNA, 15 bp, Homo sapiens
gattttagagatcca

SEQ ID NO: 720043 - DNA, 15 bp, Homo sapiens
attttagagatccag

SEQ ID NO: 720044 - DNA, 15 bp, Homo sapiens
ttttagagatccagt

SEQ ID NO: 720045 - DNA, 15 bp, Homo sapiens
tttagagatccagta

SEQ ID NO: 720046 - DNA, 15 bp, Homo sapiens
ttagagatccagtat

SEQ ID NO: 720047 - DNA, 15 bp, Homo sapiens
tagagatccagtatg

SEQ ID NO: 720048 - DNA, 15 bp, Homo sapiens
agagatccagtatgg

SEQ ID NO: 720049 - DNA, 15 bp, Homo sapiens
gagatccagtatgga

SEQ ID NO: 720050 - DNA, 15 bp, Homo sapiens
agatccagtatggaa

SEQ ID NO: 720051 - DNA, 15 bp, Homo sapiens
gatccagtatggaaa

SEQ ID NO: 720052 - DNA, 15 bp, Homo sapiens
atccagtatggaaaa

SEQ ID NO: 720053 - DNA, 15 bp, Homo sapiens
tccagtatggaaaat

SEQ ID NO: 720054 - DNA, 15 bp, Homo sapiens
ccagtatggaaaata

SEQ ID NO: 720055 - DNA, 15 bp, Homo sapiens
cagtatggaaaatac

SEQ ID NO: 720056 - DNA, 15 bp, Homo sapiens
agtatggaaaataca

SEQ ID NO: 720057 - DNA, 15 bp, Homo sapiens
gtatggaaaatacaa

SEQ ID NO: 720058 - DNA, 15 bp, Homo sapiens
tatggaaaatacaaa

SEQ ID NO: 720059 - DNA, 15 bp, Homo sapiens
atggaaaatacaaag

SEQ ID NO: 720060 - DNA, 15 bp, Homo sapiens
tggaaaatacaaagt

SEQ ID NO: 720061 - DNA, 15 bp, Homo sapiens
ggaaaatacaaagta

SEQ ID NO: 720062 - DNA, 15 bp, Homo sapiens
gaaaatacaaagtat

SEQ ID NO: 720063 - DNA, 15 bp, Homo sapiens
aaaatacaaagtatt

SEQ ID NO: 720064 - DNA, 15 bp, Homo sapiens
aaatacaaagtattt

SEQ ID NO: 720065 - DNA, 15 bp, Homo sapiens
aatacaaagtatttc

SEQ ID NO: 720066 - DNA, 15 bp, Homo sapiens
atacaaagtatttca

SEQ ID NO: 720067 - DNA, 15 bp, Homo sapiens
tacaaagtatttcat

SEQ ID NO: 720068 - DNA, 15 bp, Homo sapiens
acaaagtatttcatt

SEQ ID NO: 720069 - DNA, 15 bp, Homo sapiens
caaagtatttcatta

SEQ ID NO: 720070 - DNA, 15 bp, Homo sapiens
aaagtatttcattag

SEQ ID NO: 720071 - DNA, 15 bp, Homo sapiens
aagtatttcattagt

SEQ ID NO: 720072 - DNA, 15 bp, Homo sapiens
agtatttcattagtt

SEQ ID NO: 720073 - DNA, 15 bp, Homo sapiens
gtatttcattagttt

SEQ ID NO: 720074 - DNA, 15 bp, Homo sapiens
tatttcattagtttt

SEQ ID NO: 720075 - DNA, 15 bp, Homo sapiens
atttcattagtttta

SEQ ID NO: 720076 - DNA, 15 bp, Homo sapiens
tttcattagttttat

SEQ ID NO: 720077 - DNA, 15 bp, Homo sapiens
ttcattagttttatt

SEQ ID NO: 720078 - DNA, 15 bp, Homo sapiens
tcattagttttattc

SEQ ID NO: 720079 - DNA, 15 bp, Homo sapiens
cattagttttattca

SEQ ID NO: 720080 - DNA, 15 bp, Homo sapiens
attagttttattcat

SEQ ID NO: 720081 - DNA, 15 bp, Homo sapiens
ttagttttattcatc

SEQ ID NO: 720082 - DNA, 15 bp, Homo sapiens
tagttttattcatca

SEQ ID NO: 720083 - DNA, 15 bp, Homo sapiens
agttttattcatcaa

SEQ ID NO: 720084 - DNA, 15 bp, Homo sapiens
gttttattcatcaaa

SEQ ID NO: 720085 - DNA, 15 bp, Homo sapiens
ttttattcatcaaat

SEQ ID NO: 720086 - DNA, 15 bp, Homo sapiens
tttattcatcaaata

SEQ ID NO: 720087 - DNA, 15 bp, Homo sapiens
ttattcatcaaatat

SEQ ID NO: 720088 - DNA, 15 bp, Homo sapiens
tattcatcaaatatt

SEQ ID NO: 720089 - DNA, 15 bp, Homo sapiens
attcatcaaatatta

SEQ ID NO: 720090 - DNA, 15 bp, Homo sapiens
ttcatcaaatattaa

SEQ ID NO: 720091 - DNA, 15 bp, Homo sapiens
tcatcaaatattaaa

SEQ ID NO: 720092 - DNA, 15 bp, Homo sapiens
catcaaatattaaac

SEQ ID NO: 720093 - DNA, 15 bp, Homo sapiens
atcaaatattaaaca

SEQ ID NO: 720094 - DNA, 15 bp, Homo sapiens
tcaaatattaaacaa

SEQ ID NO: 720095 - DNA, 15 bp, Homo sapiens
caaatattaaacaaa

SEQ ID NO: 720096 - DNA, 15 bp, Homo sapiens
aaatattaaacaaat

SEQ ID NO: 720097 - DNA, 15 bp, Homo sapiens
aatattaaacaaata

SEQ ID NO: 720098 - DNA, 15 bp, Homo sapiens
atattaaacaaatat

SEQ ID NO: 720099 - DNA, 15 bp, Homo sapiens
tattaaacaaatatt

SEQ ID NO: 720100 - DNA, 15 bp, Homo sapiens
attaaacaaatattg

SEQ ID NO: 720101 - DNA, 15 bp, Homo sapiens
ttaaacaaatattgg

SEQ ID NO: 720102 - DNA, 15 bp, Homo sapiens
taaacaaatattggt

SEQ ID NO: 720103 - DNA, 15 bp, Homo sapiens
aaacaaatattggtt

SEQ ID NO: 720104 - DNA, 15 bp, Homo sapiens
aacaaatattggttt

SEQ ID NO: 720105 - DNA, 15 bp, Homo sapiens
acaaatattggtttt

SEQ ID NO: 720106 - DNA, 15 bp, Homo sapiens
caaatattggttttt

SEQ ID NO: 720107 - DNA, 15 bp, Homo sapiens
aaatattggttttta

SEQ ID NO: 720108 - DNA, 15 bp, Homo sapiens
aatattggtttttat

SEQ ID NO: 720109 - DNA, 15 bp, Homo sapiens
atattggtttttata

SEQ ID NO: 720110 - DNA, 15 bp, Homo sapiens
tattggtttttatat

SEQ ID NO: 720111 - DNA, 15 bp, Homo sapiens
attggtttttatatg

SEQ ID NO: 720112 - DNA, 15 bp, Homo sapiens
ttggtttttatatgg

SEQ ID NO: 720113 - DNA, 15 bp, Homo sapiens
tggtttttatatgga

SEQ ID NO: 720114 - DNA, 15 bp, Homo sapiens
ggtttttatatggaa

SEQ ID NO: 720115 - DNA, 15 bp, Homo sapiens
gtttttatatggaaa

SEQ ID NO: 720116 - DNA, 15 bp, Homo sapiens
tttttatatggaaaa

SEQ ID NO: 720117 - DNA, 15 bp, Homo sapiens
ttttatatggaaaaa

SEQ ID NO: 720118 - DNA, 15 bp, Homo sapiens
tttatatggaaaaaa

SEQ ID NO: 720119 - DNA, 15 bp, Homo sapiens
ttatatggaaaaaat

SEQ ID NO: 720120 - DNA, 15 bp, Homo sapiens
tatatggaaaaaata

SEQ ID NO: 720121 - DNA, 15 bp, Homo sapiens
atatggaaaaaatac

SEQ ID NO: 720122 - DNA, 15 bp, Homo sapiens
tatggaaaaaatact

SEQ ID NO: 720123 - DNA, 15 bp, Homo sapiens
atggaaaaaatactt

SEQ ID NO: 720124 - DNA, 15 bp, Homo sapiens
tggaaaaaatactta

SEQ ID NO: 720125 - DNA, 15 bp, Homo sapiens
ggaaaaaatacttaa

SEQ ID NO: 720126 - DNA, 15 bp, Homo sapiens
gaaaaaatacttaaa

SEQ ID NO: 720127 - DNA, 15 bp, Homo sapiens
aaaaaatacttaaaa

SEQ ID NO: 720128 - DNA, 15 bp, Homo sapiens
aaaaatacttaaaat

SEQ ID NO: 720129 - DNA, 15 bp, Homo sapiens
aaaatacttaaaatt

SEQ ID NO: 720130 - DNA, 15 bp, Homo sapiens
aaatacttaaaatta

SEQ ID NO: 720131 - DNA, 15 bp, Homo sapiens
aatacttaaaattaa

SEQ ID NO: 720132 - DNA, 15 bp, Homo sapiens
atacttaaaattaat

SEQ ID NO: 720133 - DNA, 15 bp, Homo sapiens
tacttaaaattaatt

SEQ ID NO: 720134 - DNA, 15 bp, Homo sapiens
acttaaaattaattt

SEQ ID NO: 720135 - DNA, 15 bp, Homo sapiens
cttaaaattaatttt

SEQ ID NO: 720136 - DNA, 15 bp, Homo sapiens
ttaaaattaattttg

SEQ ID NO: 720137 - DNA, 15 bp, Homo sapiens
taaaattaattttga

SEQ ID NO: 720138 - DNA, 15 bp, Homo sapiens
aaaattaattttgaa

SEQ ID NO: 720139 - DNA, 15 bp, Homo sapiens
aaattaattttgaat

SEQ ID NO: 720140 - DNA, 15 bp, Homo sapiens
aattaattttgaatt

SEQ ID NO: 720141 - DNA, 15 bp, Homo sapiens
attaattttgaattc

SEQ ID NO: 720142 - DNA, 15 bp, Homo sapiens
ttaattttgaattct

SEQ ID NO: 720143 - DNA, 15 bp, Homo sapiens
taattttgaattctt

SEQ ID NO: 720144 - DNA, 15 bp, Homo sapiens
aattttgaattcttt

SEQ ID NO: 720145 - DNA, 15 bp, Homo sapiens
attttgaattctttt

SEQ ID NO: 720146 - DNA, 15 bp, Homo sapiens
ttttgaattcttttg

SEQ ID NO: 720147 - DNA, 15 bp, Homo sapiens
tttgaattcttttga

SEQ ID NO: 720148 - DNA, 15 bp, Homo sapiens
ttgaattcttttgaa

SEQ ID NO: 720149 - DNA, 15 bp, Homo sapiens
tgaattcttttgaaa

SEQ ID NO: 720150 - DNA, 15 bp, Homo sapiens
gaattcttttgaaat

SEQ ID NO: 720151 - DNA, 15 bp, Homo sapiens
aattcttttgaaata

SEQ ID NO: 720152 - DNA, 15 bp, Homo sapiens
attcttttgaaatac

SEQ ID NO: 720153 - DNA, 15 bp, Homo sapiens
ttcttttgaaatact

SEQ ID NO: 720154 - DNA, 15 bp, Homo sapiens
tcttttgaaatactt

SEQ ID NO: 720155 - DNA, 15 bp, Homo sapiens
cttttgaaatacttt

SEQ ID NO: 720156 - DNA, 15 bp, Homo sapiens
ttttgaaatactttt

SEQ ID NO: 720157 - DNA, 15 bp, Homo sapiens
tttgaaatacttttg

SEQ ID NO: 720158 - DNA, 15 bp, Homo sapiens
ttgaaatacttttga

SEQ ID NO: 720159 - DNA, 15 bp, Homo sapiens
tgaaatacttttgat

SEQ ID NO: 720160 - DNA, 15 bp, Homo sapiens
gaaatacttttgata

SEQ ID NO: 720161 - DNA, 15 bp, Homo sapiens
aaatacttttgatat

SEQ ID NO: 720162 - DNA, 15 bp, Homo sapiens
aatacttttgatatt

SEQ ID NO: 720163 - DNA, 15 bp, Homo sapiens
atacttttgatattg

SEQ ID NO: 720164 - DNA, 15 bp, Homo sapiens
tacttttgatattgg

SEQ ID NO: 720165 - DNA, 15 bp, Homo sapiens
acttttgatattggg

SEQ ID NO: 720166 - DNA, 15 bp, Homo sapiens
cttttgatattgggt

SEQ ID NO: 720167 - DNA, 15 bp, Homo sapiens
ttttgatattgggtt

SEQ ID NO: 720168 - DNA, 15 bp, Homo sapiens
tttgatattgggtta

SEQ ID NO: 720169 - DNA, 15 bp, Homo sapiens
ttgatattgggttaa

SEQ ID NO: 720170 - DNA, 15 bp, Homo sapiens
tgatattgggttaaa

SEQ ID NO: 720171 - DNA, 15 bp, Homo sapiens
gatattgggttaaat

SEQ ID NO: 720172 - DNA, 15 bp, Homo sapiens
atattgggttaaata

SEQ ID NO: 720173 - DNA, 15 bp, Homo sapiens
tattgggttaaataa

SEQ ID NO: 720174 - DNA, 15 bp, Homo sapiens
attgggttaaataaa

SEQ ID NO: 720175 - DNA, 15 bp, Homo sapiens
ttgggttaaataaaa

SEQ ID NO: 720176 - DNA, 15 bp, Homo sapiens
tgggttaaataaaat

SEQ ID NO: 720177 - DNA, 15 bp, Homo sapiens
gggttaaataaaatg

SEQ ID NO: 720178 - DNA, 15 bp, Homo sapiens
ggttaaataaaatgt

SEQ ID NO: 720179 - DNA, 15 bp, Homo sapiens
gttaaataaaatgta

SEQ ID NO: 720180 - DNA, 15 bp, Homo sapiens
ttaaataaaatgtat

SEQ ID NO: 720181 - DNA, 15 bp, Homo sapiens
taaataaaatgtatt

SEQ ID NO: 720182 - DNA, 15 bp, Homo sapiens
aaataaaatgtattt

SEQ ID NO: 720183 - DNA, 15 bp, Homo sapiens
aataaaatgtatttt

SEQ ID NO: 720184 - DNA, 15 bp, Homo sapiens
ataaaatgtattttg

SEQ ID NO: 720185 - DNA, 15 bp, Homo sapiens
taaaatgtattttgg

SEQ ID NO: 720186 - DNA, 15 bp, Homo sapiens
aaaatgtattttggg

SEQ ID NO: 720187 - DNA, 15 bp, Homo sapiens
aaatgtattttgggc

SEQ ID NO: 720188 - DNA, 15 bp, Homo sapiens
aatgtattttgggct

SEQ ID NO: 720189 - DNA, 15 bp, Homo sapiens
atgtattttgggctg

SEQ ID NO: 720190 - DNA, 15 bp, Homo sapiens
tgtattttgggctgt

SEQ ID NO: 720191 - DNA, 15 bp, Homo sapiens
gtattttgggctgtg

SEQ ID NO: 720192 - DNA, 15 bp, Homo sapiens
tattttgggctgtgc

SEQ ID NO: 720193 - DNA, 15 bp, Homo sapiens
attttgggctgtgcg

SEQ ID NO: 720194 - DNA, 15 bp, Homo sapiens
ttttgggctgtgcgt

SEQ ID NO: 720195 - DNA, 15 bp, Homo sapiens
tttgggctgtgcgtg

SEQ ID NO: 720196 - DNA, 15 bp, Homo sapiens
ttgggctgtgcgtgt

SEQ ID NO: 720197 - DNA, 15 bp, Homo sapiens
tgggctgtgcgtgtt

SEQ ID NO: 720198 - DNA, 15 bp, Homo sapiens
gggctgtgcgtgttg

SEQ ID NO: 720199 - DNA, 15 bp, Homo sapiens
ggctgtgcgtgttgc

SEQ ID NO: 720200 - DNA, 15 bp, Homo sapiens
gctgtgcgtgttgcc

SEQ ID NO: 720201 - DNA, 15 bp, Homo sapiens
ctgtgcgtgttgcct

SEQ ID NO: 720202 - DNA, 15 bp, Homo sapiens
tgtgcgtgttgcctc

SEQ ID NO: 720203 - DNA, 15 bp, Homo sapiens
gtgcgtgttgcctca

SEQ ID NO: 720204 - DNA, 15 bp, Homo sapiens
tgcgtgttgcctcat

SEQ ID NO: 720205 - DNA, 15 bp, Homo sapiens
gcgtgttgcctcatg

SEQ ID NO: 720206 - DNA, 15 bp, Homo sapiens
cgtgttgcctcatgc

SEQ ID NO: 720207 - DNA, 15 bp, Homo sapiens
gtgttgcctcatgcc

SEQ ID NO: 720208 - DNA, 15 bp, Homo sapiens
tgttgcctcatgcct

SEQ ID NO: 720209 - DNA, 15 bp, Homo sapiens
gttgcctcatgcctg

SEQ ID NO: 720210 - DNA, 15 bp, Homo sapiens
ttgcctcatgcctgt

SEQ ID NO: 720211 - DNA, 15 bp, Homo sapiens
tgcctcatgcctgta

SEQ ID NO: 720212 - DNA, 15 bp, Homo sapiens
gcctcatgcctgtaa

SEQ ID NO: 720213 - DNA, 15 bp, Homo sapiens
cctcatgcctgtaat

SEQ ID NO: 720214 - DNA, 15 bp, Homo sapiens
ctcatgcctgtaatt

SEQ ID NO: 720215 - DNA, 15 bp, Homo sapiens
tcatgcctgtaattt

SEQ ID NO: 720216 - DNA, 15 bp, Homo sapiens
catgcctgtaatttc

SEQ ID NO: 720217 - DNA, 15 bp, Homo sapiens
atgcctgtaatttca

SEQ ID NO: 720218 - DNA, 15 bp, Homo sapiens
tgcctgtaatttcag

SEQ ID NO: 720219 - DNA, 15 bp, Homo sapiens
gcctgtaatttcagc

SEQ ID NO: 720220 - DNA, 15 bp, Homo sapiens
cctgtaatttcagca

SEQ ID NO: 720221 - DNA, 15 bp, Homo sapiens
ctgtaatttcagcac

SEQ ID NO: 720222 - DNA, 15 bp, Homo sapiens
tgtaatttcagcact

SEQ ID NO: 720223 - DNA, 15 bp, Homo sapiens
gtaatttcagcactt

SEQ ID NO: 720224 - DNA, 15 bp, Homo sapiens
taatttcagcacttt

SEQ ID NO: 720225 - DNA, 15 bp, Homo sapiens
aatttcagcactttg

SEQ ID NO: 720226 - DNA, 15 bp, Homo sapiens
atttcagcactttgg

SEQ ID NO: 720227 - DNA, 15 bp, Homo sapiens
tttcagcactttggg

SEQ ID NO: 720228 - DNA, 15 bp, Homo sapiens
ttcagcactttggga

SEQ ID NO: 720229 - DNA, 15 bp, Homo sapiens
tcagcactttgggag

SEQ ID NO: 720230 - DNA, 15 bp, Homo sapiens
ttgggaggccaaggt

SEQ ID NO: 720231 - DNA, 15 bp, Homo sapiens
tgggaggccaaggtg

SEQ ID NO: 720232 - DNA, 15 bp, Homo sapiens
gggaggccaaggtgg

SEQ ID NO: 720233 - DNA, 15 bp, Homo sapiens
ggaggccaaggtggg

SEQ ID NO: 720234 - DNA, 15 bp, Homo sapiens
gaggccaaggtggga

SEQ ID NO: 720235 - DNA, 15 bp, Homo sapiens
aggccaaggtgggag

SEQ ID NO: 720236 - DNA, 15 bp, Homo sapiens
ggccaaggtgggagg

SEQ ID NO: 720237 - DNA, 15 bp, Homo sapiens
gccaaggtgggagga

SEQ ID NO: 720238 - DNA, 15 bp, Homo sapiens
ccaaggtgggaggat

SEQ ID NO: 720239 - DNA, 15 bp, Homo sapiens
caaggtgggaggatc

SEQ ID NO: 720240 - DNA, 15 bp, Homo sapiens
aaggtgggaggatca

SEQ ID NO: 720241 - DNA, 15 bp, Homo sapiens
aggtgggaggatcag

SEQ ID NO: 720242 - DNA, 15 bp, Homo sapiens
ggtgggaggatcagt

SEQ ID NO: 720243 - DNA, 15 bp, Homo sapiens
gtgggaggatcagtt

SEQ ID NO: 720244 - DNA, 15 bp, Homo sapiens
tgggaggatcagttg

SEQ ID NO: 720245 - DNA, 15 bp, Homo sapiens
gggaggatcagttga

SEQ ID NO: 720246 - DNA, 15 bp, Homo sapiens
ggaggatcagttgag

SEQ ID NO: 720247 - DNA, 15 bp, Homo sapiens
gaggatcagttgagc

SEQ ID NO: 720248 - DNA, 15 bp, Homo sapiens
aggatcagttgagcc

SEQ ID NO: 720249 - DNA, 15 bp, Homo sapiens
ggatcagttgagccc

SEQ ID NO: 720250 - DNA, 15 bp, Homo sapiens
gatcagttgagccca

SEQ ID NO: 720251 - DNA, 15 bp, Homo sapiens
atcagttgagcccag

SEQ ID NO: 720252 - DNA, 15 bp, Homo sapiens
tcagttgagcccagg

SEQ ID NO: 720253 - DNA, 15 bp, Homo sapiens
cagttgagcccagga

SEQ ID NO: 720254 - DNA, 15 bp, Homo sapiens
agttgagcccaggag

SEQ ID NO: 720255 - DNA, 15 bp, Homo sapiens
gttgagcccaggagt

SEQ ID NO: 720256 - DNA, 15 bp, Homo sapiens
ttgagcccaggagtt

SEQ ID NO: 720257 - DNA, 15 bp, Homo sapiens
tgagcccaggagttt

SEQ ID NO: 720258 - DNA, 15 bp, Homo sapiens
gagcccaggagtttg

SEQ ID NO: 720259 - DNA, 15 bp, Homo sapiens
agcccaggagtttga

SEQ ID NO: 720260 - DNA, 15 bp, Homo sapiens
gcccaggagtttgag

SEQ ID NO: 720261 - DNA, 15 bp, Homo sapiens
cccaggagtttgaga

SEQ ID NO: 720262 - DNA, 15 bp, Homo sapiens
ccaggagtttgagac

SEQ ID NO: 720263 - DNA, 15 bp, Homo sapiens
aggagtttgagacca

SEQ ID NO: 720264 - DNA, 15 bp, Homo sapiens
ggagtttgagaccag

SEQ ID NO: 720265 - DNA, 15 bp, Homo sapiens
gagtttgagaccagc

SEQ ID NO: 720266 - DNA, 15 bp, Homo sapiens
agtttgagaccagcc

SEQ ID NO: 720267 - DNA, 15 bp, Homo sapiens
gtttgagaccagcct

SEQ ID NO: 720268 - DNA, 15 bp, Homo sapiens
tttgagaccagcctg

SEQ ID NO: 720269 - DNA, 15 bp, Homo sapiens
ttgagaccagcctga

SEQ ID NO: 720270 - DNA, 15 bp, Homo sapiens
tgagaccagcctgag

SEQ ID NO: 720271 - DNA, 15 bp, Homo sapiens
gagaccagcctgagc

SEQ ID NO: 720272 - DNA, 15 bp, Homo sapiens
agaccagcctgagca

SEQ ID NO: 720273 - DNA, 15 bp, Homo sapiens
gaccagcctgagcaa

SEQ ID NO: 720274 - DNA, 15 bp, Homo sapiens
accagcctgagcaac

SEQ ID NO: 720275 - DNA, 15 bp, Homo sapiens
ccagcctgagcaaca

SEQ ID NO: 720276 - DNA, 15 bp, Homo sapiens
cagcctgagcaacat

SEQ ID NO: 720277 - DNA, 15 bp, Homo sapiens
agcctgagcaacata

SEQ ID NO: 720278 - DNA, 15 bp, Homo sapiens
gcctgagcaacataa

SEQ ID NO: 720279 - DNA, 15 bp, Homo sapiens
cctgagcaacataat

SEQ ID NO: 720280 - DNA, 15 bp, Homo sapiens
ctgagcaacataatg

SEQ ID NO: 720281 - DNA, 15 bp, Homo sapiens
tgagcaacataatga

SEQ ID NO: 720282 - DNA, 15 bp, Homo sapiens
gagcaacataatgag

SEQ ID NO: 720283 - DNA, 15 bp, Homo sapiens
agcaacataatgaga

SEQ ID NO: 720284 - DNA, 15 bp, Homo sapiens
gcaacataatgagac

SEQ ID NO: 720285 - DNA, 15 bp, Homo sapiens
caacataatgagact

SEQ ID NO: 720286 - DNA, 15 bp, Homo sapiens
aacataatgagactc

SEQ ID NO: 720287 - DNA, 15 bp, Homo sapiens
acataatgagactcc

SEQ ID NO: 720288 - DNA, 15 bp, Homo sapiens
cataatgagactcca

SEQ ID NO: 720289 - DNA, 15 bp, Homo sapiens
ataatgagactccat

SEQ ID NO: 720290 - DNA, 15 bp, Homo sapiens
taatgagactccatc

SEQ ID NO: 720291 - DNA, 15 bp, Homo sapiens
aatgagactccatct

SEQ ID NO: 720292 - DNA, 15 bp, Homo sapiens
atgagactccatctc

SEQ ID NO: 720293 - DNA, 15 bp, Homo sapiens
tgagactccatctct

SEQ ID NO: 720294 - DNA, 15 bp, Homo sapiens
gagactccatctcta

SEQ ID NO: 720295 - DNA, 15 bp, Homo sapiens
agactccatctctac

SEQ ID NO: 720296 - DNA, 15 bp, Homo sapiens
gactccatctctaca

SEQ ID NO: 720297 - DNA, 15 bp, Homo sapiens
actccatctctacaa

SEQ ID NO: 720298 - DNA, 15 bp, Homo sapiens
ctccatctctacaaa

SEQ ID NO: 720299 - DNA, 15 bp, Homo sapiens
tccatctctacaaaa

SEQ ID NO: 720300 - DNA, 15 bp, Homo sapiens
ccatctctacaaaat

SEQ ID NO: 720301 - DNA, 15 bp, Homo sapiens
catctctacaaaata

SEQ ID NO: 720302 - DNA, 15 bp, Homo sapiens
atctctacaaaataa

SEQ ID NO: 720303 - DNA, 15 bp, Homo sapiens
tctctacaaaataaa

SEQ ID NO: 720304 - DNA, 15 bp, Homo sapiens
ctctacaaaataaat

SEQ ID NO: 720305 - DNA, 15 bp, Homo sapiens
tctacaaaataaata

SEQ ID NO: 720306 - DNA, 15 bp, Homo sapiens
ctacaaaataaataa

SEQ ID NO: 720307 - DNA, 15 bp, Homo sapiens
tacaaaataaataat

SEQ ID NO: 720308 - DNA, 15 bp, Homo sapiens
acaaaataaataata

SEQ ID NO: 720309 - DNA, 15 bp, Homo sapiens
caaaataaataataa

SEQ ID NO: 720310 - DNA, 15 bp, Homo sapiens
aaaataaataataaa

SEQ ID NO: 720311 - DNA, 15 bp, Homo sapiens
aaataaataataaaa

SEQ ID NO: 720312 - DNA, 15 bp, Homo sapiens
aataaataataaaat

SEQ ID NO: 720313 - DNA, 15 bp, Homo sapiens
ataaataataaaatt

SEQ ID NO: 720314 - DNA, 15 bp, Homo sapiens
taaataataaaattt

SEQ ID NO: 720315 - DNA, 15 bp, Homo sapiens
aaataataaaatttg

SEQ ID NO: 720316 - DNA, 15 bp, Homo sapiens
aataataaaatttgc

SEQ ID NO: 720317 - DNA, 15 bp, Homo sapiens
ataataaaatttgct

SEQ ID NO: 720318 - DNA, 15 bp, Homo sapiens
taataaaatttgctg

SEQ ID NO: 720319 - DNA, 15 bp, Homo sapiens
aataaaatttgctga

SEQ ID NO: 720320 - DNA, 15 bp, Homo sapiens
ataaaatttgctgag

SEQ ID NO: 720321 - DNA, 15 bp, Homo sapiens
taaaatttgctgagc

SEQ ID NO: 720322 - DNA, 15 bp, Homo sapiens
aaaatttgctgagca

SEQ ID NO: 720323 - DNA, 15 bp, Homo sapiens
aaatttgctgagcat

SEQ ID NO: 720324 - DNA, 15 bp, Homo sapiens
aatttgctgagcatg

SEQ ID NO: 720325 - DNA, 15 bp, Homo sapiens
atttgctgagcatgg

SEQ ID NO: 720326 - DNA, 15 bp, Homo sapiens
tttgctgagcatggt

SEQ ID NO: 720327 - DNA, 15 bp, Homo sapiens
ttgctgagcatggtg

SEQ ID NO: 720328 - DNA, 15 bp, Homo sapiens
tgctgagcatggtgg

SEQ ID NO: 720329 - DNA, 15 bp, Homo sapiens
gctgagcatggtggt

SEQ ID NO: 720330 - DNA, 15 bp, Homo sapiens
ctgagcatggtggtg

SEQ ID NO: 720331 - DNA, 15 bp, Homo sapiens
tgagcatggtggtgt

SEQ ID NO: 720332 - DNA, 15 bp, Homo sapiens
gagcatggtggtgtg

SEQ ID NO: 720333 - DNA, 15 bp, Homo sapiens
agcatggtggtgtgc

SEQ ID NO: 720334 - DNA, 15 bp, Homo sapiens
gcatggtggtgtgca

SEQ ID NO: 720335 - DNA, 15 bp, Homo sapiens
catggtggtgtgcac

SEQ ID NO: 720336 - DNA, 15 bp, Homo sapiens
atggtggtgtgcacc

SEQ ID NO: 720337 - DNA, 15 bp, Homo sapiens
tggtggtgtgcacct

SEQ ID NO: 720338 - DNA, 15 bp, Homo sapiens
ggtggtgtgcacctg

SEQ ID NO: 720339 - DNA, 15 bp, Homo sapiens
gtggtgtgcacctgt

SEQ ID NO: 720340 - DNA, 15 bp, Homo sapiens
tggtgtgcacctgta

SEQ ID NO: 720341 - DNA, 15 bp, Homo sapiens
ggtgtgcacctgtag

SEQ ID NO: 720342 - DNA, 15 bp, Homo sapiens
gtgtgcacctgtaga

SEQ ID NO: 720343 - DNA, 15 bp, Homo sapiens
tgtgcacctgtagac

SEQ ID NO: 720344 - DNA, 15 bp, Homo sapiens
gtgcacctgtagacc

SEQ ID NO: 720345 - DNA, 15 bp, Homo sapiens
tgcacctgtagaccc

SEQ ID NO: 720346 - DNA, 15 bp, Homo sapiens
gcacctgtagaccca

SEQ ID NO: 720347 - DNA, 15 bp, Homo sapiens
cacctgtagacccat

SEQ ID NO: 720348 - DNA, 15 bp, Homo sapiens
acctgtagacccatc

SEQ ID NO: 720349 - DNA, 15 bp, Homo sapiens
cctgtagacccatcc

SEQ ID NO: 720350 - DNA, 15 bp, Homo sapiens
ctgtagacccatcca

SEQ ID NO: 720351 - DNA, 15 bp, Homo sapiens
tgtagacccatccac

SEQ ID NO: 720352 - DNA, 15 bp, Homo sapiens
gtagacccatccact

SEQ ID NO: 720353 - DNA, 15 bp, Homo sapiens
tagacccatccactc

SEQ ID NO: 720354 - DNA, 15 bp, Homo sapiens
agacccatccactca

SEQ ID NO: 720355 - DNA, 15 bp, Homo sapiens
gacccatccactcag

SEQ ID NO: 720356 - DNA, 15 bp, Homo sapiens
acccatccactcagt

SEQ ID NO: 720357 - DNA, 15 bp, Homo sapiens
cccatccactcagta

SEQ ID NO: 720358 - DNA, 15 bp, Homo sapiens
ccatccactcagtag

SEQ ID NO: 720359 - DNA, 15 bp, Homo sapiens
catccactcagtagt

SEQ ID NO: 720360 - DNA, 15 bp, Homo sapiens
atccactcagtagtc

SEQ ID NO: 720361 - DNA, 15 bp, Homo sapiens
tccactcagtagtct

SEQ ID NO: 720362 - DNA, 15 bp, Homo sapiens
ccactcagtagtctg

SEQ ID NO: 720363 - DNA, 15 bp, Homo sapiens
cactcagtagtctga

SEQ ID NO: 720364 - DNA, 15 bp, Homo sapiens
actcagtagtctgag

SEQ ID NO: 720365 - DNA, 15 bp, Homo sapiens
ctcagtagtctgagg

SEQ ID NO: 720366 - DNA, 15 bp, Homo sapiens
tcagtagtctgaggt

SEQ ID NO: 720367 - DNA, 15 bp, Homo sapiens
cagtagtctgaggtg

SEQ ID NO: 720368 - DNA, 15 bp, Homo sapiens
agtagtctgaggtgg

SEQ ID NO: 720369 - DNA, 15 bp, Homo sapiens
gtagtctgaggtggg

SEQ ID NO: 720370 - DNA, 15 bp, Homo sapiens
tagtctgaggtggga

SEQ ID NO: 720371 - DNA, 15 bp, Homo sapiens
agtctgaggtgggaa

SEQ ID NO: 720372 - DNA, 15 bp, Homo sapiens
gtctgaggtgggaag

SEQ ID NO: 720373 - DNA, 15 bp, Homo sapiens
tctgaggtgggaaga

SEQ ID NO: 720374 - DNA, 15 bp, Homo sapiens
ctgaggtgggaagat

SEQ ID NO: 720375 - DNA, 15 bp, Homo sapiens
tgaggtgggaagatc

SEQ ID NO: 720376 - DNA, 15 bp, Homo sapiens
gaggtgggaagatcc

SEQ ID NO: 720377 - DNA, 15 bp, Homo sapiens
aggtgggaagatccc

SEQ ID NO: 720378 - DNA, 15 bp, Homo sapiens
ggtgggaagatccct

SEQ ID NO: 720379 - DNA, 15 bp, Homo sapiens
gtgggaagatccctt

SEQ ID NO: 720380 - DNA, 15 bp, Homo sapiens
tgggaagatcccttg

SEQ ID NO: 720381 - DNA, 15 bp, Homo sapiens
gggaagatcccttga

SEQ ID NO: 720382 - DNA, 15 bp, Homo sapiens
ggaagatcccttgag

SEQ ID NO: 720383 - DNA, 15 bp, Homo sapiens
gaagatcccttgagc

SEQ ID NO: 720384 - DNA, 15 bp, Homo sapiens
aagatcccttgagct

SEQ ID NO: 720385 - DNA, 15 bp, Homo sapiens
agatcccttgagctc

SEQ ID NO: 720386 - DNA, 15 bp, Homo sapiens
gatcccttgagctca

SEQ ID NO: 720387 - DNA, 15 bp, Homo sapiens
atcccttgagctcag

SEQ ID NO: 720388 - DNA, 15 bp, Homo sapiens
tcccttgagctcagg

SEQ ID NO: 720389 - DNA, 15 bp, Homo sapiens
cccttgagctcagga

SEQ ID NO: 720390 - DNA, 15 bp, Homo sapiens
ccttgagctcaggag

SEQ ID NO: 720391 - DNA, 15 bp, Homo sapiens
cttgagctcaggagc

SEQ ID NO: 720392 - DNA, 15 bp, Homo sapiens
ttgagctcaggagct

SEQ ID NO: 720393 - DNA, 15 bp, Homo sapiens
tgagctcaggagctc

SEQ ID NO: 720394 - DNA, 15 bp, Homo sapiens
gagctcaggagctca

SEQ ID NO: 720395 - DNA, 15 bp, Homo sapiens
agctcaggagctcaa

SEQ ID NO: 720396 - DNA, 15 bp, Homo sapiens
gctcaggagctcaag

SEQ ID NO: 720397 - DNA, 15 bp, Homo sapiens
ctcaggagctcaaga

SEQ ID NO: 720398 - DNA, 15 bp, Homo sapiens
tcaggagctcaagac

SEQ ID NO: 720399 - DNA, 15 bp, Homo sapiens
caggagctcaagact

SEQ ID NO: 720400 - DNA, 15 bp, Homo sapiens
aggagctcaagactg

SEQ ID NO: 720401 - DNA, 15 bp, Homo sapiens
ggagctcaagactga

SEQ ID NO: 720402 - DNA, 15 bp, Homo sapiens
gagctcaagactgag

SEQ ID NO: 720403 - DNA, 15 bp, Homo sapiens
agctcaagactgagt

SEQ ID NO: 720404 - DNA, 15 bp, Homo sapiens
gctcaagactgagtg

SEQ ID NO: 720405 - DNA, 15 bp, Homo sapiens
ctcaagactgagtga

SEQ ID NO: 720406 - DNA, 15 bp, Homo sapiens
tcaagactgagtgaa

SEQ ID NO: 720407 - DNA, 15 bp, Homo sapiens
caagactgagtgaac

SEQ ID NO: 720408 - DNA, 15 bp, Homo sapiens
aagactgagtgaacc

SEQ ID NO: 720409 - DNA, 15 bp, Homo sapiens
agactgagtgaacca

SEQ ID NO: 720410 - DNA, 15 bp, Homo sapiens
gactgagtgaaccat

SEQ ID NO: 720411 - DNA, 15 bp, Homo sapiens
actgagtgaaccatg

SEQ ID NO: 720412 - DNA, 15 bp, Homo sapiens
ctgagtgaaccatga

SEQ ID NO: 720413 - DNA, 15 bp, Homo sapiens
tgagtgaaccatgat

SEQ ID NO: 720414 - DNA, 15 bp, Homo sapiens
gagtgaaccatgatc

SEQ ID NO: 720415 - DNA, 15 bp, Homo sapiens
agtgaaccatgatct

SEQ ID NO: 720416 - DNA, 15 bp, Homo sapiens
gtgaaccatgatctg

SEQ ID NO: 720417 - DNA, 15 bp, Homo sapiens
tgaaccatgatctgc

SEQ ID NO: 720418 - DNA, 15 bp, Homo sapiens
gaaccatgatctgcc

SEQ ID NO: 720419 - DNA, 15 bp, Homo sapiens
aaccatgatctgcca

SEQ ID NO: 720420 - DNA, 15 bp, Homo sapiens
accatgatctgccat

SEQ ID NO: 720421 - DNA, 15 bp, Homo sapiens
ccatgatctgccatt

SEQ ID NO: 720422 - DNA, 15 bp, Homo sapiens
catgatctgccattg

SEQ ID NO: 720423 - DNA, 15 bp, Homo sapiens
atgatctgccattgc

SEQ ID NO: 720424 - DNA, 15 bp, Homo sapiens
tgatctgccattgca

SEQ ID NO: 720425 - DNA, 15 bp, Homo sapiens
gatctgccattgcac

SEQ ID NO: 720426 - DNA, 15 bp, Homo sapiens
atctgccattgcact

SEQ ID NO: 720427 - DNA, 15 bp, Homo sapiens
tctgccattgcactc

SEQ ID NO: 720428 - DNA, 15 bp, Homo sapiens
ctgccattgcactcc

SEQ ID NO: 720429 - DNA, 15 bp, Homo sapiens
tgccattgcactcca

SEQ ID NO: 720430 - DNA, 15 bp, Homo sapiens
gccattgcactccac

SEQ ID NO: 720431 - DNA, 15 bp, Homo sapiens
ccattgcactccacc

SEQ ID NO: 720432 - DNA, 15 bp, Homo sapiens
cattgcactccaccc

SEQ ID NO: 720433 - DNA, 15 bp, Homo sapiens
attgcactccaccct

SEQ ID NO: 720434 - DNA, 15 bp, Homo sapiens
ttgcactccaccctg

SEQ ID NO: 720435 - DNA, 15 bp, Homo sapiens
tgcactccaccctgg

SEQ ID NO: 720436 - DNA, 15 bp, Homo sapiens
gcactccaccctggg

SEQ ID NO: 720437 - DNA, 15 bp, Homo sapiens
cactccaccctgggc

SEQ ID NO: 720438 - DNA, 15 bp, Homo sapiens
actccaccctgggca

SEQ ID NO: 720439 - DNA, 15 bp, Homo sapiens
ctccaccctgggcaa

SEQ ID NO: 720440 - DNA, 15 bp, Homo sapiens
tccaccctgggcaac

SEQ ID NO: 720441 - DNA, 15 bp, Homo sapiens
ccaccctgggcaaca

SEQ ID NO: 720442 - DNA, 15 bp, Homo sapiens
caccctgggcaacag

SEQ ID NO: 720443 - DNA, 15 bp, Homo sapiens
accctgggcaacaga

SEQ ID NO: 720444 - DNA, 15 bp, Homo sapiens
ccctgggcaacagag

SEQ ID NO: 720445 - DNA, 15 bp, Homo sapiens
ctgggcaacagagca

SEQ ID NO: 720446 - DNA, 15 bp, Homo sapiens
tgggcaacagagcaa

SEQ ID NO: 720447 - DNA, 15 bp, Homo sapiens
gggcaacagagcaag

SEQ ID NO: 720448 - DNA, 15 bp, Homo sapiens
ggcaacagagcaaga

SEQ ID NO: 720449 - DNA, 15 bp, Homo sapiens
gcaacagagcaagag

SEQ ID NO: 720450 - DNA, 15 bp, Homo sapiens
caacagagcaagagt

SEQ ID NO: 720451 - DNA, 15 bp, Homo sapiens
aacagagcaagagtg

SEQ ID NO: 720452 - DNA, 15 bp, Homo sapiens
acagagcaagagtgt

SEQ ID NO: 720453 - DNA, 15 bp, Homo sapiens
cagagcaagagtgtt

SEQ ID NO: 720454 - DNA, 15 bp, Homo sapiens
agagcaagagtgttt

SEQ ID NO: 720455 - DNA, 15 bp, Homo sapiens
gagcaagagtgtttc

SEQ ID NO: 720456 - DNA, 15 bp, Homo sapiens
agcaagagtgtttcc

SEQ ID NO: 720457 - DNA, 15 bp, Homo sapiens
gcaagagtgtttcca

SEQ ID NO: 720458 - DNA, 15 bp, Homo sapiens
caagagtgtttccaa

SEQ ID NO: 720459 - DNA, 15 bp, Homo sapiens
aagagtgtttccaaa

SEQ ID NO: 720460 - DNA, 15 bp, Homo sapiens
agagtgtttccaaaa

SEQ ID NO: 720461 - DNA, 15 bp, Homo sapiens
gagtgtttccaaaat

SEQ ID NO: 720462 - DNA, 15 bp, Homo sapiens
agtgtttccaaaata

SEQ ID NO: 720463 - DNA, 15 bp, Homo sapiens
gtgtttccaaaatat

SEQ ID NO: 720464 - DNA, 15 bp, Homo sapiens
tgtttccaaaatata

SEQ ID NO: 720465 - DNA, 15 bp, Homo sapiens
gtttccaaaatatat

SEQ ID NO: 720466 - DNA, 15 bp, Homo sapiens
tttccaaaatatatg

SEQ ID NO: 720467 - DNA, 15 bp, Homo sapiens
ttccaaaatatatgt

SEQ ID NO: 720468 - DNA, 15 bp, Homo sapiens
tccaaaatatatgta

SEQ ID NO: 720469 - DNA, 15 bp, Homo sapiens
ccaaaatatatgtat

SEQ ID NO: 720470 - DNA, 15 bp, Homo sapiens
caaaatatatgtatg

SEQ ID NO: 720471 - DNA, 15 bp, Homo sapiens
aaaatatatgtatgt

SEQ ID NO: 720472 - DNA, 15 bp, Homo sapiens
aaatatatgtatgtt

SEQ ID NO: 720473 - DNA, 15 bp, Homo sapiens
aatatatgtatgttt

SEQ ID NO: 720474 - DNA, 15 bp, Homo sapiens
atatatgtatgtttt

SEQ ID NO: 720475 - DNA, 15 bp, Homo sapiens
tatatgtatgttttt

SEQ ID NO: 720476 - DNA, 15 bp, Homo sapiens
atatgtatgtttttt

SEQ ID NO: 720477 - DNA, 15 bp, Homo sapiens
tatgtatgttttttg

SEQ ID NO: 720478 - DNA, 15 bp, Homo sapiens
atgtatgttttttga

SEQ ID NO: 720479 - DNA, 15 bp, Homo sapiens
tgtatgttttttgaa

SEQ ID NO: 720480 - DNA, 15 bp, Homo sapiens
gtatgttttttgaag

SEQ ID NO: 720481 - DNA, 15 bp, Homo sapiens
tatgttttttgaagt

SEQ ID NO: 720482 - DNA, 15 bp, Homo sapiens
atgttttttgaagtt

SEQ ID NO: 720483 - DNA, 15 bp, Homo sapiens
tgttttttgaagttt

SEQ ID NO: 720484 - DNA, 15 bp, Homo sapiens
gttttttgaagttta

SEQ ID NO: 720485 - DNA, 15 bp, Homo sapiens
ttttttgaagtttac

SEQ ID NO: 720486 - DNA, 15 bp, Homo sapiens
tttttgaagtttact

SEQ ID NO: 720487 - DNA, 15 bp, Homo sapiens
ttttgaagtttactt

SEQ ID NO: 720488 - DNA, 15 bp, Homo sapiens
tttgaagtttacttt

SEQ ID NO: 720489 - DNA, 15 bp, Homo sapiens
ttgaagtttactttt

SEQ ID NO: 720490 - DNA, 15 bp, Homo sapiens
tgaagtttacttttt

SEQ ID NO: 720491 - DNA, 15 bp, Homo sapiens
gaagtttactttttt

SEQ ID NO: 720492 - DNA, 15 bp, Homo sapiens
aagtttacttttttt

SEQ ID NO: 720493 - DNA, 15 bp, Homo sapiens
agtttactttttttt

SEQ ID NO: 720494 - DNA, 15 bp, Homo sapiens
gtttacttttttttt

SEQ ID NO: 720495 - DNA, 15 bp, Homo sapiens
tttactttttttttt

SEQ ID NO: 720496 - DNA, 15 bp, Homo sapiens
ttacttttttttttt

SEQ ID NO: 720497 - DNA, 15 bp, Homo sapiens
tactttttttttttt

SEQ ID NO: 720498 - DNA, 15 bp, Homo sapiens
acttttttttttttt

SEQ ID NO: 720499 - DNA, 15 bp, Homo sapiens
ctttttttttttttc

SEQ ID NO: 720500 - DNA, 15 bp, Homo sapiens
ttttttctttttttg

SEQ ID NO: 720501 - DNA, 15 bp, Homo sapiens
tttttctttttttga

SEQ ID NO: 720502 - DNA, 15 bp, Homo sapiens
ttttctttttttgag

SEQ ID NO: 720503 - DNA, 15 bp, Homo sapiens
tttctttttttgaga

SEQ ID NO: 720504 - DNA, 15 bp, Homo sapiens
ttctttttttgagaa

SEQ ID NO: 720505 - DNA, 15 bp, Homo sapiens
tctttttttgagaag

SEQ ID NO: 720506 - DNA, 15 bp, Homo sapiens
ctttttttgagaagt

SEQ ID NO: 720507 - DNA, 15 bp, Homo sapiens
tttttttgagaagta

SEQ ID NO: 720508 - DNA, 15 bp, Homo sapiens
ttttttgagaagtag

SEQ ID NO: 720509 - DNA, 15 bp, Homo sapiens
tttttgagaagtagt

SEQ ID NO: 720510 - DNA, 15 bp, Homo sapiens
ttttgagaagtagtc

SEQ ID NO: 720511 - DNA, 15 bp, Homo sapiens
tttgagaagtagtct

SEQ ID NO: 720512 - DNA, 15 bp, Homo sapiens
ttgagaagtagtctt

SEQ ID NO: 720513 - DNA, 15 bp, Homo sapiens
tgagaagtagtcttc

SEQ ID NO: 720514 - DNA, 15 bp, Homo sapiens
gagaagtagtcttcc

SEQ ID NO: 720515 - DNA, 15 bp, Homo sapiens
agaagtagtcttcct

SEQ ID NO: 720516 - DNA, 15 bp, Homo sapiens
gaagtagtcttcctt

SEQ ID NO: 720517 - DNA, 15 bp, Homo sapiens
aagtagtcttccttt

SEQ ID NO: 720518 - DNA, 15 bp, Homo sapiens
agtagtcttcctttg

SEQ ID NO: 720519 - DNA, 15 bp, Homo sapiens
gtagtcttcctttgt

SEQ ID NO: 720520 - DNA, 15 bp, Homo sapiens
tagtcttcctttgtc

SEQ ID NO: 720521 - DNA, 15 bp, Homo sapiens
agtcttcctttgtcc

SEQ ID NO: 720522 - DNA, 15 bp, Homo sapiens
gtcttcctttgtccc

SEQ ID NO: 720523 - DNA, 15 bp, Homo sapiens
tcttcctttgtcccc

SEQ ID NO: 720524 - DNA, 15 bp, Homo sapiens
cttcctttgtccccc

SEQ ID NO: 720525 - DNA, 15 bp, Homo sapiens
ttcctttgtccccca

SEQ ID NO: 720526 - DNA, 15 bp, Homo sapiens
tcctttgtcccccag

SEQ ID NO: 720527 - DNA, 15 bp, Homo sapiens
cctttgtcccccagg

SEQ ID NO: 720528 - DNA, 15 bp, Homo sapiens
ctttgtcccccaggc

SEQ ID NO: 720529 - DNA, 15 bp, Homo sapiens
tttgtcccccaggct

SEQ ID NO: 720530 - DNA, 15 bp, Homo sapiens
ttgtcccccaggctg

SEQ ID NO: 720531 - DNA, 15 bp, Homo sapiens
tgtcccccaggctgg

SEQ ID NO: 720532 - DNA, 15 bp, Homo sapiens
gtcccccaggctgga

SEQ ID NO: 720533 - DNA, 15 bp, Homo sapiens
tcccccaggctggag

SEQ ID NO: 720534 - DNA, 15 bp, Homo sapiens
cccccaggctggagt

SEQ ID NO: 720535 - DNA, 15 bp, Homo sapiens
ccccaggctggagtg

SEQ ID NO: 720536 - DNA, 15 bp, Homo sapiens
ggagtgcaatggcat

SEQ ID NO: 720537 - DNA, 15 bp, Homo sapiens
gagtgcaatggcatg

SEQ ID NO: 720538 - DNA, 15 bp, Homo sapiens
agtgcaatggcatga

SEQ ID NO: 720539 - DNA, 15 bp, Homo sapiens
gtgcaatggcatgat

SEQ ID NO: 720540 - DNA, 15 bp, Homo sapiens
atgatcttggctcat

SEQ ID NO: 720541 - DNA, 15 bp, Homo sapiens
tgatcttggctcata

SEQ ID NO: 720542 - DNA, 15 bp, Homo sapiens
gatcttggctcatag

SEQ ID NO: 720543 - DNA, 15 bp, Homo sapiens
atcttggctcatagc

SEQ ID NO: 720544 - DNA, 15 bp, Homo sapiens
tcttggctcatagca

SEQ ID NO: 720545 - DNA, 15 bp, Homo sapiens
cttggctcatagcaa

SEQ ID NO: 720546 - DNA, 15 bp, Homo sapiens
ttggctcatagcaac

SEQ ID NO: 720547 - DNA, 15 bp, Homo sapiens
tggctcatagcaacc

SEQ ID NO: 720548 - DNA, 15 bp, Homo sapiens
ggctcatagcaacct

SEQ ID NO: 720549 - DNA, 15 bp, Homo sapiens
gctcatagcaacctc

SEQ ID NO: 720550 - DNA, 15 bp, Homo sapiens
ctcatagcaacctct

SEQ ID NO: 720551 - DNA, 15 bp, Homo sapiens
tcatagcaacctctg

SEQ ID NO: 720552 - DNA, 15 bp, Homo sapiens
catagcaacctctgc

SEQ ID NO: 720553 - DNA, 15 bp, Homo sapiens
atagcaacctctgcc

SEQ ID NO: 720554 - DNA, 15 bp, Homo sapiens
tagcaacctctgcct

SEQ ID NO: 720555 - DNA, 15 bp, Homo sapiens
agcaacctctgcctc

SEQ ID NO: 720556 - DNA, 15 bp, Homo sapiens
caacctctgcctccc

SEQ ID NO: 720557 - DNA, 15 bp, Homo sapiens
aacctctgcctccca

SEQ ID NO: 720558 - DNA, 15 bp, Homo sapiens
acctctgcctcccag

SEQ ID NO: 720559 - DNA, 15 bp, Homo sapiens
cctctgcctcccagg

SEQ ID NO: 720560 - DNA, 15 bp, Homo sapiens
ctctgcctcccaggt

SEQ ID NO: 720561 - DNA, 15 bp, Homo sapiens
tctgcctcccaggtt

SEQ ID NO: 720562 - DNA, 15 bp, Homo sapiens
ctgcctcccaggttc

SEQ ID NO: 720563 - DNA, 15 bp, Homo sapiens
tgcctcccaggttca

SEQ ID NO: 720564 - DNA, 15 bp, Homo sapiens
ctcccaggttcaagt

SEQ ID NO: 720565 - DNA, 15 bp, Homo sapiens
tcccaggttcaagtg

SEQ ID NO: 720566 - DNA, 15 bp, Homo sapiens
cccaggttcaagtga

SEQ ID NO: 720567 - DNA, 15 bp, Homo sapiens
ccaggttcaagtgat

SEQ ID NO: 720568 - DNA, 15 bp, Homo sapiens
caggttcaagtgatt

SEQ ID NO: 720569 - DNA, 15 bp, Homo sapiens
aggttcaagtgattc

SEQ ID NO: 720570 - DNA, 15 bp, Homo sapiens
tctcctgcctcagca

SEQ ID NO: 720571 - DNA, 15 bp, Homo sapiens
ctcctgcctcagcat

SEQ ID NO: 720572 - DNA, 15 bp, Homo sapiens
tcctgcctcagcatc

SEQ ID NO: 720573 - DNA, 15 bp, Homo sapiens
cctgcctcagcatcc

SEQ ID NO: 720574 - DNA, 15 bp, Homo sapiens
ctgcctcagcatcct

SEQ ID NO: 720575 - DNA, 15 bp, Homo sapiens
tgcctcagcatcctg

SEQ ID NO: 720576 - DNA, 15 bp, Homo sapiens
gcctcagcatcctga

SEQ ID NO: 720577 - DNA, 15 bp, Homo sapiens
cctcagcatcctgag

SEQ ID NO: 720578 - DNA, 15 bp, Homo sapiens
ctcagcatcctgagt

SEQ ID NO: 720579 - DNA, 15 bp, Homo sapiens
tcagcatcctgagta

SEQ ID NO: 720580 - DNA, 15 bp, Homo sapiens
cagcatcctgagtag

SEQ ID NO: 720581 - DNA, 15 bp, Homo sapiens
agcatcctgagtagc

SEQ ID NO: 720582 - DNA, 15 bp, Homo sapiens
gcatcctgagtagct

SEQ ID NO: 720583 - DNA, 15 bp, Homo sapiens
catcctgagtagctg

SEQ ID NO: 720584 - DNA, 15 bp, Homo sapiens
atcctgagtagctgg

SEQ ID NO: 720585 - DNA, 15 bp, Homo sapiens
gggattacaggcgcc

SEQ ID NO: 720586 - DNA, 15 bp, Homo sapiens
ggattacaggcgccc

SEQ ID NO: 720587 - DNA, 15 bp, Homo sapiens
gattacaggcgcccg

SEQ ID NO: 720588 - DNA, 15 bp, Homo sapiens
attacaggcgcccgc

SEQ ID NO: 720589 - DNA, 15 bp, Homo sapiens
ttacaggcgcccgct

SEQ ID NO: 720590 - DNA, 15 bp, Homo sapiens
tacaggcgcccgcta

SEQ ID NO: 720591 - DNA, 15 bp, Homo sapiens
acaggcgcccgctac

SEQ ID NO: 720592 - DNA, 15 bp, Homo sapiens
caggcgcccgctacc

SEQ ID NO: 720593 - DNA, 15 bp, Homo sapiens
aggcgcccgctacca

SEQ ID NO: 720594 - DNA, 15 bp, Homo sapiens
ggcgcccgctaccat

SEQ ID NO: 720595 - DNA, 15 bp, Homo sapiens
gcgcccgctaccatg

SEQ ID NO: 720596 - DNA, 15 bp, Homo sapiens
cgcccgctaccatgc

SEQ ID NO: 720597 - DNA, 15 bp, Homo sapiens
gcccgctaccatgcc

SEQ ID NO: 720598 - DNA, 15 bp, Homo sapiens
cccgctaccatgccc

SEQ ID NO: 720599 - DNA, 15 bp, Homo sapiens
ccgctaccatgccca

SEQ ID NO: 720600 - DNA, 15 bp, Homo sapiens
cgctaccatgcccag

SEQ ID NO: 720601 - DNA, 15 bp, Homo sapiens
gctaccatgcccagc

SEQ ID NO: 720602 - DNA, 15 bp, Homo sapiens
ctaccatgcccagct

SEQ ID NO: 720603 - DNA, 15 bp, Homo sapiens
taccatgcccagcta

SEQ ID NO: 720604 - DNA, 15 bp, Homo sapiens
tgcccagctaatttc

SEQ ID NO: 720605 - DNA, 15 bp, Homo sapiens
gcccagctaatttct

SEQ ID NO: 720606 - DNA, 15 bp, Homo sapiens
cccagctaatttctg

SEQ ID NO: 720607 - DNA, 15 bp, Homo sapiens
ccagctaatttctgt

SEQ ID NO: 720608 - DNA, 15 bp, Homo sapiens
cagctaatttctgta

SEQ ID NO: 720609 - DNA, 15 bp, Homo sapiens
agctaatttctgtat

SEQ ID NO: 720610 - DNA, 15 bp, Homo sapiens
gctaatttctgtatt

SEQ ID NO: 720611 - DNA, 15 bp, Homo sapiens
ctaatttctgtattt

SEQ ID NO: 720612 - DNA, 15 bp, Homo sapiens
taatttctgtatttt

SEQ ID NO: 720613 - DNA, 15 bp, Homo sapiens
aatttctgtattttt

SEQ ID NO: 720614 - DNA, 15 bp, Homo sapiens
atttctgtattttta

SEQ ID NO: 720615 - DNA, 15 bp, Homo sapiens
tttctgtatttttag

SEQ ID NO: 720616 - DNA, 15 bp, Homo sapiens
ttctgtatttttagt

SEQ ID NO: 720617 - DNA, 15 bp, Homo sapiens
tctgtatttttagta

SEQ ID NO: 720618 - DNA, 15 bp, Homo sapiens
ctgtatttttagtag

SEQ ID NO: 720619 - DNA, 15 bp, Homo sapiens
agacagggtttcacc

SEQ ID NO: 720620 - DNA, 15 bp, Homo sapiens
gacagggtttcacca

SEQ ID NO: 720621 - DNA, 15 bp, Homo sapiens
acagggtttcaccag

SEQ ID NO: 720622 - DNA, 15 bp, Homo sapiens
cagggtttcaccagg

SEQ ID NO: 720623 - DNA, 15 bp, Homo sapiens
agggtttcaccaggt

SEQ ID NO: 720624 - DNA, 15 bp, Homo sapiens
gggtttcaccaggtt

SEQ ID NO: 720625 - DNA, 15 bp, Homo sapiens
ggtttcaccaggttg

SEQ ID NO: 720626 - DNA, 15 bp, Homo sapiens
gtttcaccaggttgg

SEQ ID NO: 720627 - DNA, 15 bp, Homo sapiens
tttcaccaggttggc

SEQ ID NO: 720628 - DNA, 15 bp, Homo sapiens
ttcaccaggttggcc

SEQ ID NO: 720629 - DNA, 15 bp, Homo sapiens
tcaccaggttggcca

SEQ ID NO: 720630 - DNA, 15 bp, Homo sapiens
caccaggttggccag

SEQ ID NO: 720631 - DNA, 15 bp, Homo sapiens
accaggttggccagg

SEQ ID NO: 720632 - DNA, 15 bp, Homo sapiens
ccaggttggccaggc

SEQ ID NO: 720633 - DNA, 15 bp, Homo sapiens
caggttggccaggct

SEQ ID NO: 720634 - DNA, 15 bp, Homo sapiens
aggttggccaggctg

SEQ ID NO: 720635 - DNA, 15 bp, Homo sapiens
ggttggccaggctgg

SEQ ID NO: 720636 - DNA, 15 bp, Homo sapiens
ttggccaggctggtg

SEQ ID NO: 720637 - DNA, 15 bp, Homo sapiens
tggccaggctggtgt

SEQ ID NO: 720638 - DNA, 15 bp, Homo sapiens
ggccaggctggtgtt

SEQ ID NO: 720639 - DNA, 15 bp, Homo sapiens
gccaggctggtgttg

SEQ ID NO: 720640 - DNA, 15 bp, Homo sapiens
ccaggctggtgttga

SEQ ID NO: 720641 - DNA, 15 bp, Homo sapiens
caggctggtgttgaa

SEQ ID NO: 720642 - DNA, 15 bp, Homo sapiens
aggctggtgttgaac

SEQ ID NO: 720643 - DNA, 15 bp, Homo sapiens
ggctggtgttgaact

SEQ ID NO: 720644 - DNA, 15 bp, Homo sapiens
gctggtgttgaactc

SEQ ID NO: 720645 - DNA, 15 bp, Homo sapiens
ctggtgttgaactcc

SEQ ID NO: 720646 - DNA, 15 bp, Homo sapiens
tggtgttgaactcct

SEQ ID NO: 720647 - DNA, 15 bp, Homo sapiens
ggtgttgaactcctg

SEQ ID NO: 720648 - DNA, 15 bp, Homo sapiens
gtgttgaactcctga

SEQ ID NO: 720649 - DNA, 15 bp, Homo sapiens
tgttgaactcctgac

SEQ ID NO: 720650 - DNA, 15 bp, Homo sapiens
gttgaactcctgact

SEQ ID NO: 720651 - DNA, 15 bp, Homo sapiens
ttgaactcctgactt

SEQ ID NO: 720652 - DNA, 15 bp, Homo sapiens
tgaactcctgacttc

SEQ ID NO: 720653 - DNA, 15 bp, Homo sapiens
gaactcctgacttca

SEQ ID NO: 720654 - DNA, 15 bp, Homo sapiens
aactcctgacttcag

SEQ ID NO: 720655 - DNA, 15 bp, Homo sapiens
actcctgacttcagg

SEQ ID NO: 720656 - DNA, 15 bp, Homo sapiens
ctcctgacttcaggt

SEQ ID NO: 720657 - DNA, 15 bp, Homo sapiens
tcctgacttcaggtg

SEQ ID NO: 720658 - DNA, 15 bp, Homo sapiens
cctgacttcaggtga

SEQ ID NO: 720659 - DNA, 15 bp, Homo sapiens
ctgacttcaggtgat

SEQ ID NO: 720660 - DNA, 15 bp, Homo sapiens
tgacttcaggtgatc

SEQ ID NO: 720661 - DNA, 15 bp, Homo sapiens
gacttcaggtgatcc

SEQ ID NO: 720662 - DNA, 15 bp, Homo sapiens
acttcaggtgatcca

SEQ ID NO: 720663 - DNA, 15 bp, Homo sapiens
cttcaggtgatccac

SEQ ID NO: 720664 - DNA, 15 bp, Homo sapiens
ttcaggtgatccacc

SEQ ID NO: 720665 - DNA, 15 bp, Homo sapiens
tcaggtgatccaccc

SEQ ID NO: 720666 - DNA, 15 bp, Homo sapiens
caggtgatccaccct

SEQ ID NO: 720667 - DNA, 15 bp, Homo sapiens
aggtgatccaccctc

SEQ ID NO: 720668 - DNA, 15 bp, Homo sapiens
ggtgatccaccctcc

SEQ ID NO: 720669 - DNA, 15 bp, Homo sapiens
gtgatccaccctcct

SEQ ID NO: 720670 - DNA, 15 bp, Homo sapiens
tgatccaccctcctc

SEQ ID NO: 720671 - DNA, 15 bp, Homo sapiens
gatccaccctcctcg

SEQ ID NO: 720672 - DNA, 15 bp, Homo sapiens
atccaccctcctcgg

SEQ ID NO: 720673 - DNA, 15 bp, Homo sapiens
tccaccctcctcggc

SEQ ID NO: 720674 - DNA, 15 bp, Homo sapiens
ccaccctcctcggcc

SEQ ID NO: 720675 - DNA, 15 bp, Homo sapiens
caccctcctcggcct

SEQ ID NO: 720676 - DNA, 15 bp, Homo sapiens
accctcctcggcctc

SEQ ID NO: 720677 - DNA, 15 bp, Homo sapiens
ccctcctcggcctcc

SEQ ID NO: 720678 - DNA, 15 bp, Homo sapiens
cctcctcggcctccc

SEQ ID NO: 720679 - DNA, 15 bp, Homo sapiens
ctcctcggcctccca

SEQ ID NO: 720680 - DNA, 15 bp, Homo sapiens
tcctcggcctcccaa

SEQ ID NO: 720681 - DNA, 15 bp, Homo sapiens
cctcggcctcccaag

SEQ ID NO: 720682 - DNA, 15 bp, Homo sapiens
ctcggcctcccaagg

SEQ ID NO: 720683 - DNA, 15 bp, Homo sapiens
tcggcctcccaaggc

SEQ ID NO: 720684 - DNA, 15 bp, Homo sapiens
cggcctcccaaggct

SEQ ID NO: 720685 - DNA, 15 bp, Homo sapiens
ggcctcccaaggctc

SEQ ID NO: 720686 - DNA, 15 bp, Homo sapiens
gcctcccaaggctct

SEQ ID NO: 720687 - DNA, 15 bp, Homo sapiens
cctcccaaggctctg

SEQ ID NO: 720688 - DNA, 15 bp, Homo sapiens
ctcccaaggctctgg

SEQ ID NO: 720689 - DNA, 15 bp, Homo sapiens
tcccaaggctctggg

SEQ ID NO: 720690 - DNA, 15 bp, Homo sapiens
cccaaggctctggga

SEQ ID NO: 720691 - DNA, 15 bp, Homo sapiens
ccaaggctctgggat

SEQ ID NO: 720692 - DNA, 15 bp, Homo sapiens
caaggctctgggatt

SEQ ID NO: 720693 - DNA, 15 bp, Homo sapiens
aaggctctgggatta

SEQ ID NO: 720694 - DNA, 15 bp, Homo sapiens
aggctctgggattat

SEQ ID NO: 720695 - DNA, 15 bp, Homo sapiens
ggctctgggattata

SEQ ID NO: 720696 - DNA, 15 bp, Homo sapiens
gctctgggattatag

SEQ ID NO: 720697 - DNA, 15 bp, Homo sapiens
ctctgggattatagg

SEQ ID NO: 720698 - DNA, 15 bp, Homo sapiens
tctgggattataggc

SEQ ID NO: 720699 - DNA, 15 bp, Homo sapiens
ctgggattataggcg

SEQ ID NO: 720700 - DNA, 15 bp, Homo sapiens
tgggattataggcgt

SEQ ID NO: 720701 - DNA, 15 bp, Homo sapiens
gggattataggcgtg

SEQ ID NO: 720702 - DNA, 15 bp, Homo sapiens
ggattataggcgtga

SEQ ID NO: 720703 - DNA, 15 bp, Homo sapiens
gattataggcgtgag

SEQ ID NO: 720704 - DNA, 15 bp, Homo sapiens
attataggcgtgagc

SEQ ID NO: 720705 - DNA, 15 bp, Homo sapiens
taggcgtgagccacc

SEQ ID NO: 720706 - DNA, 15 bp, Homo sapiens
ccaccgcgcctggcc

SEQ ID NO: 720707 - DNA, 15 bp, Homo sapiens
caccgcgcctggcca

SEQ ID NO: 720708 - DNA, 15 bp, Homo sapiens
accgcgcctggccag

SEQ ID NO: 720709 - DNA, 15 bp, Homo sapiens
ccgcgcctggccagt

SEQ ID NO: 720710 - DNA, 15 bp, Homo sapiens
cgcgcctggccagtt

SEQ ID NO: 720711 - DNA, 15 bp, Homo sapiens
gcgcctggccagttt

SEQ ID NO: 720712 - DNA, 15 bp, Homo sapiens
cgcctggccagtttt

SEQ ID NO: 720713 - DNA, 15 bp, Homo sapiens
gcctggccagttttc

SEQ ID NO: 720714 - DNA, 15 bp, Homo sapiens
cctggccagttttca

SEQ ID NO: 720715 - DNA, 15 bp, Homo sapiens
ctggccagttttcac

SEQ ID NO: 720716 - DNA, 15 bp, Homo sapiens
tggccagttttcacc

SEQ ID NO: 720717 - DNA, 15 bp, Homo sapiens
ggccagttttcacct

SEQ ID NO: 720718 - DNA, 15 bp, Homo sapiens
gccagttttcacctt

SEQ ID NO: 720719 - DNA, 15 bp, Homo sapiens
ccagttttcacctta

SEQ ID NO: 720720 - DNA, 15 bp, Homo sapiens
cagttttcaccttaa

SEQ ID NO: 720721 - DNA, 15 bp, Homo sapiens
agttttcaccttaat

SEQ ID NO: 720722 - DNA, 15 bp, Homo sapiens
gttttcaccttaatg

SEQ ID NO: 720723 - DNA, 15 bp, Homo sapiens
ttttcaccttaatgt

SEQ ID NO: 720724 - DNA, 15 bp, Homo sapiens
tttcaccttaatgtg

SEQ ID NO: 720725 - DNA, 15 bp, Homo sapiens
ttcaccttaatgtgg

SEQ ID NO: 720726 - DNA, 15 bp, Homo sapiens
tcaccttaatgtggt

SEQ ID NO: 720727 - DNA, 15 bp, Homo sapiens
caccttaatgtggtt

SEQ ID NO: 720728 - DNA, 15 bp, Homo sapiens
accttaatgtggtta

SEQ ID NO: 720729 - DNA, 15 bp, Homo sapiens
ccttaatgtggttac

SEQ ID NO: 720730 - DNA, 15 bp, Homo sapiens
cttaatgtggttact

SEQ ID NO: 720731 - DNA, 15 bp, Homo sapiens
ttaatgtggttacta

SEQ ID NO: 720732 - DNA, 15 bp, Homo sapiens
taatgtggttactaa

SEQ ID NO: 720733 - DNA, 15 bp, Homo sapiens
aatgtggttactaaa

SEQ ID NO: 720734 - DNA, 15 bp, Homo sapiens
atgtggttactaaac

SEQ ID NO: 720735 - DNA, 15 bp, Homo sapiens
tgtggttactaaaca

SEQ ID NO: 720736 - DNA, 15 bp, Homo sapiens
gtggttactaaacaa

SEQ ID NO: 720737 - DNA, 15 bp, Homo sapiens
tggttactaaacaat

SEQ ID NO: 720738 - DNA, 15 bp, Homo sapiens
ggttactaaacaatt

SEQ ID NO: 720739 - DNA, 15 bp, Homo sapiens
gttactaaacaattt

SEQ ID NO: 720740 - DNA, 15 bp, Homo sapiens
ttactaaacaattta

SEQ ID NO: 720741 - DNA, 15 bp, Homo sapiens
tactaaacaatttaa

SEQ ID NO: 720742 - DNA, 15 bp, Homo sapiens
actaaacaatttaaa

SEQ ID NO: 720743 - DNA, 15 bp, Homo sapiens
ctaaacaatttaaag

SEQ ID NO: 720744 - DNA, 15 bp, Homo sapiens
taaacaatttaaagt

SEQ ID NO: 720745 - DNA, 15 bp, Homo sapiens
aaacaatttaaagtt

SEQ ID NO: 720746 - DNA, 15 bp, Homo sapiens
aacaatttaaagtta

SEQ ID NO: 720747 - DNA, 15 bp, Homo sapiens
acaatttaaagttat

SEQ ID NO: 720748 - DNA, 15 bp, Homo sapiens
caatttaaagttata

SEQ ID NO: 720749 - DNA, 15 bp, Homo sapiens
aatttaaagttatat

SEQ ID NO: 720750 - DNA, 15 bp, Homo sapiens
atttaaagttatatg

SEQ ID NO: 720751 - DNA, 15 bp, Homo sapiens
tttaaagttatatgt

SEQ ID NO: 720752 - DNA, 15 bp, Homo sapiens
ttaaagttatatgta

SEQ ID NO: 720753 - DNA, 15 bp, Homo sapiens
taaagttatatgtat

SEQ ID NO: 720754 - DNA, 15 bp, Homo sapiens
aaagttatatgtatg

SEQ ID NO: 720755 - DNA, 15 bp, Homo sapiens
aagttatatgtatgt

SEQ ID NO: 720756 - DNA, 15 bp, Homo sapiens
agttatatgtatgtc

SEQ ID NO: 720757 - DNA, 15 bp, Homo sapiens
gttatatgtatgtct

SEQ ID NO: 720758 - DNA, 15 bp, Homo sapiens
ttatatgtatgtctc

SEQ ID NO: 720759 - DNA, 15 bp, Homo sapiens
tatatgtatgtctca

SEQ ID NO: 720760 - DNA, 15 bp, Homo sapiens
atatgtatgtctcac

SEQ ID NO: 720761 - DNA, 15 bp, Homo sapiens
tatgtatgtctcaca

SEQ ID NO: 720762 - DNA, 15 bp, Homo sapiens
atgtatgtctcacat

SEQ ID NO: 720763 - DNA, 15 bp, Homo sapiens
tgtatgtctcacatt

SEQ ID NO: 720764 - DNA, 15 bp, Homo sapiens
gtatgtctcacatta

SEQ ID NO: 720765 - DNA, 15 bp, Homo sapiens
tatgtctcacattat

SEQ ID NO: 720766 - DNA, 15 bp, Homo sapiens
atgtctcacattatg

SEQ ID NO: 720767 - DNA, 15 bp, Homo sapiens
tgtctcacattatgt

SEQ ID NO: 720768 - DNA, 15 bp, Homo sapiens
gtctcacattatgta

SEQ ID NO: 720769 - DNA, 15 bp, Homo sapiens
tctcacattatgtac

SEQ ID NO: 720770 - DNA, 15 bp, Homo sapiens
ctcacattatgtacc

SEQ ID NO: 720771 - DNA, 15 bp, Homo sapiens
tcacattatgtacct

SEQ ID NO: 720772 - DNA, 15 bp, Homo sapiens
cacattatgtaccta

SEQ ID NO: 720773 - DNA, 15 bp, Homo sapiens
acattatgtacctat

SEQ ID NO: 720774 - DNA, 15 bp, Homo sapiens
cattatgtacctatt

SEQ ID NO: 720775 - DNA, 15 bp, Homo sapiens
attatgtacctattg

SEQ ID NO: 720776 - DNA, 15 bp, Homo sapiens
ttatgtacctattgt

SEQ ID NO: 720777 - DNA, 15 bp, Homo sapiens
tatgtacctattgta

SEQ ID NO: 720778 - DNA, 15 bp, Homo sapiens
atgtacctattgtac

SEQ ID NO: 720779 - DNA, 15 bp, Homo sapiens
tgtacctattgtaca

SEQ ID NO: 720780 - DNA, 15 bp, Homo sapiens
gtacctattgtacag

SEQ ID NO: 720781 - DNA, 15 bp, Homo sapiens
tacctattgtacagc

SEQ ID NO: 720782 - DNA, 15 bp, Homo sapiens
acctattgtacagct

SEQ ID NO: 720783 - DNA, 15 bp, Homo sapiens
cctattgtacagctc

SEQ ID NO: 720784 - DNA, 15 bp, Homo sapiens
ctattgtacagctct

SEQ ID NO: 720785 - DNA, 15 bp, Homo sapiens
tattgtacagctctg

SEQ ID NO: 720786 - DNA, 15 bp, Homo sapiens
attgtacagctctgc

SEQ ID NO: 720787 - DNA, 15 bp, Homo sapiens
ttgtacagctctgct

SEQ ID NO: 720788 - DNA, 15 bp, Homo sapiens
tgtacagctctgctt

SEQ ID NO: 720789 - DNA, 15 bp, Homo sapiens
gtacagctctgcttt

SEQ ID NO: 720790 - DNA, 15 bp, Homo sapiens
tacagctctgcttta

SEQ ID NO: 720791 - DNA, 15 bp, Homo sapiens
acagctctgctttag

SEQ ID NO: 720792 - DNA, 15 bp, Homo sapiens
cagctctgctttagc

SEQ ID NO: 720793 - DNA, 15 bp, Homo sapiens
agctctgctttagca

SEQ ID NO: 720794 - DNA, 15 bp, Homo sapiens
gctctgctttagcat

SEQ ID NO: 720795 - DNA, 15 bp, Homo sapiens
ctctgctttagcata

SEQ ID NO: 720796 - DNA, 15 bp, Homo sapiens
tctgctttagcatag

SEQ ID NO: 720797 - DNA, 15 bp, Homo sapiens
ctgctttagcataga

SEQ ID NO: 720798 - DNA, 15 bp, Homo sapiens
tgctttagcatagaa

SEQ ID NO: 720799 - DNA, 15 bp, Homo sapiens
gctttagcatagaaa

SEQ ID NO: 720800 - DNA, 15 bp, Homo sapiens
ctttagcatagaaag

SEQ ID NO: 720801 - DNA, 15 bp, Homo sapiens
tttagcatagaaagt

SEQ ID NO: 720802 - DNA, 15 bp, Homo sapiens
ttagcatagaaagtt

SEQ ID NO: 720803 - DNA, 15 bp, Homo sapiens
tagcatagaaagttt

SEQ ID NO: 720804 - DNA, 15 bp, Homo sapiens
agcatagaaagttta

SEQ ID NO: 720805 - DNA, 15 bp, Homo sapiens
gcatagaaagtttaa

SEQ ID NO: 720806 - DNA, 15 bp, Homo sapiens
catagaaagtttaat

SEQ ID NO: 720807 - DNA, 15 bp, Homo sapiens
atagaaagtttaata

SEQ ID NO: 720808 - DNA, 15 bp, Homo sapiens
tagaaagtttaataa

SEQ ID NO: 720809 - DNA, 15 bp, Homo sapiens
agaaagtttaataat

SEQ ID NO: 720810 - DNA, 15 bp, Homo sapiens
gaaagtttaataatg

SEQ ID NO: 720811 - DNA, 15 bp, Homo sapiens
aaagtttaataatgc

SEQ ID NO: 720812 - DNA, 15 bp, Homo sapiens
aagtttaataatgca

SEQ ID NO: 720813 - DNA, 15 bp, Homo sapiens
agtttaataatgcat

SEQ ID NO: 720814 - DNA, 15 bp, Homo sapiens
gtttaataatgcatt

SEQ ID NO: 720815 - DNA, 15 bp, Homo sapiens
tttaataatgcatta

SEQ ID NO: 720816 - DNA, 15 bp, Homo sapiens
ttaataatgcattac

SEQ ID NO: 720817 - DNA, 15 bp, Homo sapiens
taataatgcattaca

SEQ ID NO: 720818 - DNA, 15 bp, Homo sapiens
aataatgcattacac

SEQ ID NO: 720819 - DNA, 15 bp, Homo sapiens
ataatgcattacacc

SEQ ID NO: 720820 - DNA, 15 bp, Homo sapiens
taatgcattacacca

SEQ ID NO: 720821 - DNA, 15 bp, Homo sapiens
aatgcattacaccat

SEQ ID NO: 720822 - DNA, 15 bp, Homo sapiens
atgcattacaccatt

SEQ ID NO: 720823 - DNA, 15 bp, Homo sapiens
tgcattacaccattc

SEQ ID NO: 720824 - DNA, 15 bp, Homo sapiens
gcattacaccattct

SEQ ID NO: 720825 - DNA, 15 bp, Homo sapiens
cattacaccattctc

SEQ ID NO: 720826 - DNA, 15 bp, Homo sapiens
attacaccattctca

SEQ ID NO: 720827 - DNA, 15 bp, Homo sapiens
ttacaccattctcaa

SEQ ID NO: 720828 - DNA, 15 bp, Homo sapiens
tacaccattctcaag

SEQ ID NO: 720829 - DNA, 15 bp, Homo sapiens
acaccattctcaaga

SEQ ID NO: 720830 - DNA, 15 bp, Homo sapiens
caccattctcaagag

SEQ ID NO: 720831 - DNA, 15 bp, Homo sapiens
accattctcaagaga

SEQ ID NO: 720832 - DNA, 15 bp, Homo sapiens
ccattctcaagagat

SEQ ID NO: 720833 - DNA, 15 bp, Homo sapiens
cattctcaagagatt

SEQ ID NO: 720834 - DNA, 15 bp, Homo sapiens
attctcaagagattg

SEQ ID NO: 720835 - DNA, 15 bp, Homo sapiens
ttctcaagagattga

SEQ ID NO: 720836 - DNA, 15 bp, Homo sapiens
tctcaagagattgag

SEQ ID NO: 720837 - DNA, 15 bp, Homo sapiens
ctcaagagattgagt

SEQ ID NO: 720838 - DNA, 15 bp, Homo sapiens
tcaagagattgagtc

SEQ ID NO: 720839 - DNA, 15 bp, Homo sapiens
caagagattgagtca

SEQ ID NO: 720840 - DNA, 15 bp, Homo sapiens
aagagattgagtcat

SEQ ID NO: 720841 - DNA, 15 bp, Homo sapiens
agagattgagtcatt

SEQ ID NO: 720842 - DNA, 15 bp, Homo sapiens
gagattgagtcatta

SEQ ID NO: 720843 - DNA, 15 bp, Homo sapiens
agattgagtcattag

SEQ ID NO: 720844 - DNA, 15 bp, Homo sapiens
gattgagtcattaga

SEQ ID NO: 720845 - DNA, 15 bp, Homo sapiens
attgagtcattagaa

SEQ ID NO: 720846 - DNA, 15 bp, Homo sapiens
ttgagtcattagaaa

SEQ ID NO: 720847 - DNA, 15 bp, Homo sapiens
tgagtcattagaaaa

SEQ ID NO: 720848 - DNA, 15 bp, Homo sapiens
gagtcattagaaaac

SEQ ID NO: 720849 - DNA, 15 bp, Homo sapiens
agtcattagaaaact

SEQ ID NO: 720850 - DNA, 15 bp, Homo sapiens
gtcattagaaaactg

SEQ ID NO: 720851 - DNA, 15 bp, Homo sapiens
tcattagaaaactgt

SEQ ID NO: 720852 - DNA, 15 bp, Homo sapiens
cattagaaaactgtt

SEQ ID NO: 720853 - DNA, 15 bp, Homo sapiens
attagaaaactgttt

SEQ ID NO: 720854 - DNA, 15 bp, Homo sapiens
ttagaaaactgtttt

SEQ ID NO: 720855 - DNA, 15 bp, Homo sapiens
tagaaaactgttttc

SEQ ID NO: 720856 - DNA, 15 bp, Homo sapiens
agaaaactgttttct

SEQ ID NO: 720857 - DNA, 15 bp, Homo sapiens
gaaaactgttttctt

SEQ ID NO: 720858 - DNA, 15 bp, Homo sapiens
aaaactgttttcttt

SEQ ID NO: 720859 - DNA, 15 bp, Homo sapiens
aaactgttttctttc

SEQ ID NO: 720860 - DNA, 15 bp, Homo sapiens
aactgttttctttcc

SEQ ID NO: 720861 - DNA, 15 bp, Homo sapiens
actgttttctttcct

SEQ ID NO: 720862 - DNA, 15 bp, Homo sapiens
ctgttttctttcctg

SEQ ID NO: 720863 - DNA, 15 bp, Homo sapiens
tgttttctttcctgt

SEQ ID NO: 720864 - DNA, 15 bp, Homo sapiens
gttttctttcctgta

SEQ ID NO: 720865 - DNA, 15 bp, Homo sapiens
ttttctttcctgtat

SEQ ID NO: 720866 - DNA, 15 bp, Homo sapiens
tttctttcctgtatt

SEQ ID NO: 720867 - DNA, 15 bp, Homo sapiens
ttctttcctgtattt

SEQ ID NO: 720868 - DNA, 15 bp, Homo sapiens
tctttcctgtatttc

SEQ ID NO: 720869 - DNA, 15 bp, Homo sapiens
ctttcctgtatttca

SEQ ID NO: 720870 - DNA, 15 bp, Homo sapiens
tttcctgtatttcag

SEQ ID NO: 720871 - DNA, 15 bp, Homo sapiens
ttcctgtatttcagt

SEQ ID NO: 720872 - DNA, 15 bp, Homo sapiens
tcctgtatttcagtc

SEQ ID NO: 720873 - DNA, 15 bp, Homo sapiens
cctgtatttcagtct

SEQ ID NO: 720874 - DNA, 15 bp, Homo sapiens
ctgtatttcagtctt

SEQ ID NO: 720875 - DNA, 15 bp, Homo sapiens
tgtatttcagtcttt

SEQ ID NO: 720876 - DNA, 15 bp, Homo sapiens
gtatttcagtctttt

SEQ ID NO: 720877 - DNA, 15 bp, Homo sapiens
tatttcagtcttttg

SEQ ID NO: 720878 - DNA, 15 bp, Homo sapiens
atttcagtcttttgg

SEQ ID NO: 720879 - DNA, 15 bp, Homo sapiens
tttcagtcttttgga

SEQ ID NO: 720880 - DNA, 15 bp, Homo sapiens
ttcagtcttttggaa

SEQ ID NO: 720881 - DNA, 15 bp, Homo sapiens
tcagtcttttggaaa

SEQ ID NO: 720882 - DNA, 15 bp, Homo sapiens
cagtcttttggaaag

SEQ ID NO: 720883 - DNA, 15 bp, Homo sapiens
agtcttttggaaaga

SEQ ID NO: 720884 - DNA, 15 bp, Homo sapiens
gtcttttggaaagaa

SEQ ID NO: 720885 - DNA, 15 bp, Homo sapiens
tcttttggaaagaaa

SEQ ID NO: 720886 - DNA, 15 bp, Homo sapiens
cttttggaaagaaat

SEQ ID NO: 720887 - DNA, 15 bp, Homo sapiens
ttttggaaagaaatt

SEQ ID NO: 720888 - DNA, 15 bp, Homo sapiens
tttggaaagaaatta

SEQ ID NO: 720889 - DNA, 15 bp, Homo sapiens
ttggaaagaaattac

SEQ ID NO: 720890 - DNA, 15 bp, Homo sapiens
tggaaagaaattaca

SEQ ID NO: 720891 - DNA, 15 bp, Homo sapiens
ggaaagaaattacaa

SEQ ID NO: 720892 - DNA, 15 bp, Homo sapiens
gaaagaaattacaaa

SEQ ID NO: 720893 - DNA, 15 bp, Homo sapiens
aaagaaattacaaaa

SEQ ID NO: 720894 - DNA, 15 bp, Homo sapiens
aagaaattacaaaat

SEQ ID NO: 720895 - DNA, 15 bp, Homo sapiens
agaaattacaaaatt

SEQ ID NO: 720896 - DNA, 15 bp, Homo sapiens
gaaattacaaaattt

SEQ ID NO: 720897 - DNA, 15 bp, Homo sapiens
aaattacaaaatttg

SEQ ID NO: 720898 - DNA, 15 bp, Homo sapiens
aattacaaaatttgt

SEQ ID NO: 720899 - DNA, 15 bp, Homo sapiens
attacaaaatttgtt

SEQ ID NO: 720900 - DNA, 15 bp, Homo sapiens
ttacaaaatttgtta

SEQ ID NO: 720901 - DNA, 15 bp, Homo sapiens
tacaaaatttgttat

SEQ ID NO: 720902 - DNA, 15 bp, Homo sapiens
acaaaatttgttatt

SEQ ID NO: 720903 - DNA, 15 bp, Homo sapiens
caaaatttgttattg

SEQ ID NO: 720904 - DNA, 15 bp, Homo sapiens
aaaatttgttattgt

SEQ ID NO: 720905 - DNA, 15 bp, Homo sapiens
aaatttgttattgtt

SEQ ID NO: 720906 - DNA, 15 bp, Homo sapiens
aatttgttattgtta

SEQ ID NO: 720907 - DNA, 15 bp, Homo sapiens
atttgttattgttaa

SEQ ID NO: 720908 - DNA, 15 bp, Homo sapiens
tttgttattgttaaa

SEQ ID NO: 720909 - DNA, 15 bp, Homo sapiens
ttgttattgttaaac

SEQ ID NO: 720910 - DNA, 15 bp, Homo sapiens
tgttattgttaaact

SEQ ID NO: 720911 - DNA, 15 bp, Homo sapiens
gttattgttaaactt

SEQ ID NO: 720912 - DNA, 15 bp, Homo sapiens
ttattgttaaacttg

SEQ ID NO: 720913 - DNA, 15 bp, Homo sapiens
tattgttaaacttgg

SEQ ID NO: 720914 - DNA, 15 bp, Homo sapiens
attgttaaacttgga

SEQ ID NO: 720915 - DNA, 15 bp, Homo sapiens
ttgttaaacttggag

SEQ ID NO: 720916 - DNA, 15 bp, Homo sapiens
tgttaaacttggagg

SEQ ID NO: 720917 - DNA, 15 bp, Homo sapiens
gttaaacttggaggt

SEQ ID NO: 720918 - DNA, 15 bp, Homo sapiens
ttaaacttggaggta

SEQ ID NO: 720919 - DNA, 15 bp, Homo sapiens
taaacttggaggtat

SEQ ID NO: 720920 - DNA, 15 bp, Homo sapiens
aaacttggaggtata

SEQ ID NO: 720921 - DNA, 15 bp, Homo sapiens
aacttggaggtatat

SEQ ID NO: 720922 - DNA, 15 bp, Homo sapiens
acttggaggtatata

SEQ ID NO: 720923 - DNA, 15 bp, Homo sapiens
cttggaggtatatat

SEQ ID NO: 720924 - DNA, 15 bp, Homo sapiens
ttggaggtatatata

SEQ ID NO: 720925 - DNA, 15 bp, Homo sapiens
tggaggtatatatat

SEQ ID NO: 720926 - DNA, 15 bp, Homo sapiens
ggaggtatatatatt

SEQ ID NO: 720927 - DNA, 15 bp, Homo sapiens
gaggtatatatattt

SEQ ID NO: 720928 - DNA, 15 bp, Homo sapiens
aggtatatatatttg

SEQ ID NO: 720929 - DNA, 15 bp, Homo sapiens
ggtatatatatttga

SEQ ID NO: 720930 - DNA, 15 bp, Homo sapiens
gtatatatatttgaa

SEQ ID NO: 720931 - DNA, 15 bp, Homo sapiens
tatatatatttgaaa

SEQ ID NO: 720932 - DNA, 15 bp, Homo sapiens
atatatatttgaaag

SEQ ID NO: 720933 - DNA, 15 bp, Homo sapiens
tatatatttgaaaga

SEQ ID NO: 720934 - DNA, 15 bp, Homo sapiens
atatatttgaaagag

SEQ ID NO: 720935 - DNA, 15 bp, Homo sapiens
tatatttgaaagagt

SEQ ID NO: 720936 - DNA, 15 bp, Homo sapiens
atatttgaaagagtc

SEQ ID NO: 720937 - DNA, 15 bp, Homo sapiens
tatttgaaagagtca

SEQ ID NO: 720938 - DNA, 15 bp, Homo sapiens
atttgaaagagtcat

SEQ ID NO: 720939 - DNA, 15 bp, Homo sapiens
tttgaaagagtcatt

SEQ ID NO: 720940 - DNA, 15 bp, Homo sapiens
ttgaaagagtcattt

SEQ ID NO: 720941 - DNA, 15 bp, Homo sapiens
tgaaagagtcatttt

SEQ ID NO: 720942 - DNA, 15 bp, Homo sapiens
gaaagagtcatttta

SEQ ID NO: 720943 - DNA, 15 bp, Homo sapiens
aaagagtcattttat

SEQ ID NO: 720944 - DNA, 15 bp, Homo sapiens
aagagtcattttatt

SEQ ID NO: 720945 - DNA, 15 bp, Homo sapiens
agagtcattttattt

SEQ ID NO: 720946 - DNA, 15 bp, Homo sapiens
gagtcattttatttt

SEQ ID NO: 720947 - DNA, 15 bp, Homo sapiens
agtcattttatttta

SEQ ID NO: 720948 - DNA, 15 bp, Homo sapiens
gtcattttattttat

SEQ ID NO: 720949 - DNA, 15 bp, Homo sapiens
tcattttattttatt

SEQ ID NO: 720950 - DNA, 15 bp, Homo sapiens
cattttattttattt

SEQ ID NO: 720951 - DNA, 15 bp, Homo sapiens
ttttattttatttta

SEQ ID NO: 720952 - DNA, 15 bp, Homo sapiens
tttattttattttac

SEQ ID NO: 720953 - DNA, 15 bp, Homo sapiens
ttattttattttact

SEQ ID NO: 720954 - DNA, 15 bp, Homo sapiens
tattttattttactt

SEQ ID NO: 720955 - DNA, 15 bp, Homo sapiens
attttattttacttt

SEQ ID NO: 720956 - DNA, 15 bp, Homo sapiens
ttttattttacttta

SEQ ID NO: 720957 - DNA, 15 bp, Homo sapiens
tttattttactttaa

SEQ ID NO: 720958 - DNA, 15 bp, Homo sapiens
ttattttactttaag

SEQ ID NO: 720959 - DNA, 15 bp, Homo sapiens
tattttactttaagt

SEQ ID NO: 720960 - DNA, 15 bp, Homo sapiens
attttactttaagtg

SEQ ID NO: 720961 - DNA, 15 bp, Homo sapiens
ttttactttaagtgc

SEQ ID NO: 720962 - DNA, 15 bp, Homo sapiens
tttactttaagtgcc

SEQ ID NO: 720963 - DNA, 15 bp, Homo sapiens
ttactttaagtgccg

SEQ ID NO: 720964 - DNA, 15 bp, Homo sapiens
tactttaagtgccgg

SEQ ID NO: 720965 - DNA, 15 bp, Homo sapiens
actttaagtgccggg

SEQ ID NO: 720966 - DNA, 15 bp, Homo sapiens
ctttaagtgccggga

SEQ ID NO: 720967 - DNA, 15 bp, Homo sapiens
tttaagtgccgggat

SEQ ID NO: 720968 - DNA, 15 bp, Homo sapiens
ttaagtgccgggata

SEQ ID NO: 720969 - DNA, 15 bp, Homo sapiens
taagtgccgggatac

SEQ ID NO: 720970 - DNA, 15 bp, Homo sapiens
aagtgccgggataca

SEQ ID NO: 720971 - DNA, 15 bp, Homo sapiens
agtgccgggatacat

SEQ ID NO: 720972 - DNA, 15 bp, Homo sapiens
gtgccgggatacatg

SEQ ID NO: 720973 - DNA, 15 bp, Homo sapiens
tgccgggatacatgt

SEQ ID NO: 720974 - DNA, 15 bp, Homo sapiens
gccgggatacatgtg

SEQ ID NO: 720975 - DNA, 15 bp, Homo sapiens
ccgggatacatgtgc

SEQ ID NO: 720976 - DNA, 15 bp, Homo sapiens
cgggatacatgtgca

SEQ ID NO: 720977 - DNA, 15 bp, Homo sapiens
gggatacatgtgcag

SEQ ID NO: 720978 - DNA, 15 bp, Homo sapiens
ggatacatgtgcaga

SEQ ID NO: 720979 - DNA, 15 bp, Homo sapiens
gatacatgtgcagaa

SEQ ID NO: 720980 - DNA, 15 bp, Homo sapiens
atacatgtgcagaat

SEQ ID NO: 720981 - DNA, 15 bp, Homo sapiens
tacatgtgcagaatg

SEQ ID NO: 720982 - DNA, 15 bp, Homo sapiens
acatgtgcagaatgc

SEQ ID NO: 720983 - DNA, 15 bp, Homo sapiens
catgtgcagaatgcg

SEQ ID NO: 720984 - DNA, 15 bp, Homo sapiens
atgtgcagaatgcgc

SEQ ID NO: 720985 - DNA, 15 bp, Homo sapiens
tgtgcagaatgcgca

SEQ ID NO: 720986 - DNA, 15 bp, Homo sapiens
gtgcagaatgcgcag

SEQ ID NO: 720987 - DNA, 15 bp, Homo sapiens
tgcagaatgcgcaga

SEQ ID NO: 720988 - DNA, 15 bp, Homo sapiens
gcagaatgcgcagat

SEQ ID NO: 720989 - DNA, 15 bp, Homo sapiens
cagaatgcgcagatt

SEQ ID NO: 720990 - DNA, 15 bp, Homo sapiens
agaatgcgcagattt

SEQ ID NO: 720991 - DNA, 15 bp, Homo sapiens
gaatgcgcagatttg

SEQ ID NO: 720992 - DNA, 15 bp, Homo sapiens
aatgcgcagatttgt

SEQ ID NO: 720993 - DNA, 15 bp, Homo sapiens
atgcgcagatttgtt

SEQ ID NO: 720994 - DNA, 15 bp, Homo sapiens
tgcgcagatttgtta

SEQ ID NO: 720995 - DNA, 15 bp, Homo sapiens
gcgcagatttgttaa

SEQ ID NO: 720996 - DNA, 15 bp, Homo sapiens
cgcagatttgttaac

SEQ ID NO: 720997 - DNA, 15 bp, Homo sapiens
gcagatttgttaaca

SEQ ID NO: 720998 - DNA, 15 bp, Homo sapiens
cagatttgttaacat

SEQ ID NO: 720999 - DNA, 15 bp, Homo sapiens
agatttgttaacata

SEQ ID NO: 721000 - DNA, 15 bp, Homo sapiens
gatttgttaacatag

SEQ ID NO: 721001 - DNA, 15 bp, Homo sapiens
atttgttaacatagg

SEQ ID NO: 721002 - DNA, 15 bp, Homo sapiens
tttgttaacataggt

SEQ ID NO: 721003 - DNA, 15 bp, Homo sapiens
ttgttaacataggta

SEQ ID NO: 721004 - DNA, 15 bp, Homo sapiens
tgttaacataggtat

SEQ ID NO: 721005 - DNA, 15 bp, Homo sapiens
gttaacataggtata

SEQ ID NO: 721006 - DNA, 15 bp, Homo sapiens
ttaacataggtatac

SEQ ID NO: 721007 - DNA, 15 bp, Homo sapiens
taacataggtataca

SEQ ID NO: 721008 - DNA, 15 bp, Homo sapiens
aacataggtatacat

SEQ ID NO: 721009 - DNA, 15 bp, Homo sapiens
acataggtatacatg

SEQ ID NO: 721010 - DNA, 15 bp, Homo sapiens
cataggtatacatgt

SEQ ID NO: 721011 - DNA, 15 bp, Homo sapiens
ataggtatacatgtg

SEQ ID NO: 721012 - DNA, 15 bp, Homo sapiens
taggtatacatgtgc

SEQ ID NO: 721013 - DNA, 15 bp, Homo sapiens
aggtatacatgtgcc

SEQ ID NO: 721014 - DNA, 15 bp, Homo sapiens
ggtatacatgtgcca

SEQ ID NO: 721015 - DNA, 15 bp, Homo sapiens
gtatacatgtgccat

SEQ ID NO: 721016 - DNA, 15 bp, Homo sapiens
tatacatgtgccatg

SEQ ID NO: 721017 - DNA, 15 bp, Homo sapiens
atacatgtgccatgg

SEQ ID NO: 721018 - DNA, 15 bp, Homo sapiens
tacatgtgccatggt

SEQ ID NO: 721019 - DNA, 15 bp, Homo sapiens
acatgtgccatggtg

SEQ ID NO: 721020 - DNA, 15 bp, Homo sapiens
catgtgccatggtgg

SEQ ID NO: 721021 - DNA, 15 bp, Homo sapiens
atgtgccatggtggt

SEQ ID NO: 721022 - DNA, 15 bp, Homo sapiens
tgtgccatggtggtt

SEQ ID NO: 721023 - DNA, 15 bp, Homo sapiens
gtgccatggtggttt

SEQ ID NO: 721024 - DNA, 15 bp, Homo sapiens
tgccatggtggtttg

SEQ ID NO: 721025 - DNA, 15 bp, Homo sapiens
ggtggtttgctgcat

SEQ ID NO: 721026 - DNA, 15 bp, Homo sapiens
gtggtttgctgcatc

SEQ ID NO: 721027 - DNA, 15 bp, Homo sapiens
tggtttgctgcatct

SEQ ID NO: 721028 - DNA, 15 bp, Homo sapiens
ggtttgctgcatcta

SEQ ID NO: 721029 - DNA, 15 bp, Homo sapiens
gtttgctgcatctat

SEQ ID NO: 721030 - DNA, 15 bp, Homo sapiens
tttgctgcatctatc

SEQ ID NO: 721031 - DNA, 15 bp, Homo sapiens
ttgctgcatctatca

SEQ ID NO: 721032 - DNA, 15 bp, Homo sapiens
tgctgcatctatcaa

SEQ ID NO: 721033 - DNA, 15 bp, Homo sapiens
gctgcatctatcaac

SEQ ID NO: 721034 - DNA, 15 bp, Homo sapiens
ctgcatctatcaacc

SEQ ID NO: 721035 - DNA, 15 bp, Homo sapiens
tgcatctatcaacct

SEQ ID NO: 721036 - DNA, 15 bp, Homo sapiens
gcatctatcaacctg

SEQ ID NO: 721037 - DNA, 15 bp, Homo sapiens
catctatcaacctgt

SEQ ID NO: 721038 - DNA, 15 bp, Homo sapiens
atctatcaacctgtc

SEQ ID NO: 721039 - DNA, 15 bp, Homo sapiens
tctatcaacctgtca

SEQ ID NO: 721040 - DNA, 15 bp, Homo sapiens
ctatcaacctgtcat

SEQ ID NO: 721041 - DNA, 15 bp, Homo sapiens
tatcaacctgtcatc

SEQ ID NO: 721042 - DNA, 15 bp, Homo sapiens
atcaacctgtcatct

SEQ ID NO: 721043 - DNA, 15 bp, Homo sapiens
tcaacctgtcatcta

SEQ ID NO: 721044 - DNA, 15 bp, Homo sapiens
caacctgtcatctag

SEQ ID NO: 721045 - DNA, 15 bp, Homo sapiens
aacctgtcatctagg

SEQ ID NO: 721046 - DNA, 15 bp, Homo sapiens
acctgtcatctaggt

SEQ ID NO: 721047 - DNA, 15 bp, Homo sapiens
cctgtcatctaggtt

SEQ ID NO: 721048 - DNA, 15 bp, Homo sapiens
ctgtcatctaggttg

SEQ ID NO: 721049 - DNA, 15 bp, Homo sapiens
tgtcatctaggttgt

SEQ ID NO: 721050 - DNA, 15 bp, Homo sapiens
gtcatctaggttgta

SEQ ID NO: 721051 - DNA, 15 bp, Homo sapiens
tcatctaggttgtaa

SEQ ID NO: 721052 - DNA, 15 bp, Homo sapiens
catctaggttgtaag

SEQ ID NO: 721053 - DNA, 15 bp, Homo sapiens
atctaggttgtaagc

SEQ ID NO: 721054 - DNA, 15 bp, Homo sapiens
tctaggttgtaagcc

SEQ ID NO: 721055 - DNA, 15 bp, Homo sapiens
ctaggttgtaagccc

SEQ ID NO: 721056 - DNA, 15 bp, Homo sapiens
taggttgtaagcccc

SEQ ID NO: 721057 - DNA, 15 bp, Homo sapiens
aggttgtaagcccca

SEQ ID NO: 721058 - DNA, 15 bp, Homo sapiens
ggttgtaagccccac

SEQ ID NO: 721059 - DNA, 15 bp, Homo sapiens
gttgtaagccccaca

SEQ ID NO: 721060 - DNA, 15 bp, Homo sapiens
ttgtaagccccacat

SEQ ID NO: 721061 - DNA, 15 bp, Homo sapiens
tgtaagccccacatt

SEQ ID NO: 721062 - DNA, 15 bp, Homo sapiens
gtaagccccacattc

SEQ ID NO: 721063 - DNA, 15 bp, Homo sapiens
taagccccacattca

SEQ ID NO: 721064 - DNA, 15 bp, Homo sapiens
aagccccacattcat

SEQ ID NO: 721065 - DNA, 15 bp, Homo sapiens
agccccacattcatt

SEQ ID NO: 721066 - DNA, 15 bp, Homo sapiens
gccccacattcatta

SEQ ID NO: 721067 - DNA, 15 bp, Homo sapiens
ccccacattcattag

SEQ ID NO: 721068 - DNA, 15 bp, Homo sapiens
cccacattcattagg

SEQ ID NO: 721069 - DNA, 15 bp, Homo sapiens
ccacattcattaggt

SEQ ID NO: 721070 - DNA, 15 bp, Homo sapiens
cacattcattaggta

SEQ ID NO: 721071 - DNA, 15 bp, Homo sapiens
acattcattaggtat

SEQ ID NO: 721072 - DNA, 15 bp, Homo sapiens
cattcattaggtatt

SEQ ID NO: 721073 - DNA, 15 bp, Homo sapiens
attcattaggtattt

SEQ ID NO: 721074 - DNA, 15 bp, Homo sapiens
ttcattaggtatttg

SEQ ID NO: 721075 - DNA, 15 bp, Homo sapiens
tcattaggtatttgt

SEQ ID NO: 721076 - DNA, 15 bp, Homo sapiens
cattaggtatttgtc

SEQ ID NO: 721077 - DNA, 15 bp, Homo sapiens
attaggtatttgtcc

SEQ ID NO: 721078 - DNA, 15 bp, Homo sapiens
ttaggtatttgtcct

SEQ ID NO: 721079 - DNA, 15 bp, Homo sapiens
taggtatttgtccta

SEQ ID NO: 721080 - DNA, 15 bp, Homo sapiens
aggtatttgtcctaa

SEQ ID NO: 721081 - DNA, 15 bp, Homo sapiens
ggtatttgtcctaat

SEQ ID NO: 721082 - DNA, 15 bp, Homo sapiens
gtatttgtcctaatg

SEQ ID NO: 721083 - DNA, 15 bp, Homo sapiens
tttgtcctaatgctt

SEQ ID NO: 721084 - DNA, 15 bp, Homo sapiens
ttgtcctaatgcttt

SEQ ID NO: 721085 - DNA, 15 bp, Homo sapiens
tgtcctaatgctttt

SEQ ID NO: 721086 - DNA, 15 bp, Homo sapiens
gtcctaatgcttttc

SEQ ID NO: 721087 - DNA, 15 bp, Homo sapiens
tcctaatgcttttcc

SEQ ID NO: 721088 - DNA, 15 bp, Homo sapiens
cctaatgcttttcca

SEQ ID NO: 721089 - DNA, 15 bp, Homo sapiens
ctaatgcttttccac

SEQ ID NO: 721090 - DNA, 15 bp, Homo sapiens
taatgcttttccacc

SEQ ID NO: 721091 - DNA, 15 bp, Homo sapiens
aatgcttttccaccc

SEQ ID NO: 721092 - DNA, 15 bp, Homo sapiens
atgcttttccacccc

SEQ ID NO: 721093 - DNA, 15 bp, Homo sapiens
tgcttttccacccct

SEQ ID NO: 721094 - DNA, 15 bp, Homo sapiens
gcttttccacccctt

SEQ ID NO: 721095 - DNA, 15 bp, Homo sapiens
cttttccaccccttg

SEQ ID NO: 721096 - DNA, 15 bp, Homo sapiens
ttttccaccccttgc

SEQ ID NO: 721097 - DNA, 15 bp, Homo sapiens
tttccaccccttgcc

SEQ ID NO: 721098 - DNA, 15 bp, Homo sapiens
ttccaccccttgccc

SEQ ID NO: 721099 - DNA, 15 bp, Homo sapiens
tccaccccttgcccc

SEQ ID NO: 721100 - DNA, 15 bp, Homo sapiens
ccaccccttgccccc

SEQ ID NO: 721101 - DNA, 15 bp, Homo sapiens
caccccttgcccccc

SEQ ID NO: 721102 - DNA, 15 bp, Homo sapiens
accccttgcccccca

SEQ ID NO: 721103 - DNA, 15 bp, Homo sapiens
ccccttgccccccac

SEQ ID NO: 721104 - DNA, 15 bp, Homo sapiens
cccttgccccccacc

SEQ ID NO: 721105 - DNA, 15 bp, Homo sapiens
ccttgccccccacct

SEQ ID NO: 721106 - DNA, 15 bp, Homo sapiens
cttgccccccacctc

SEQ ID NO: 721107 - DNA, 15 bp, Homo sapiens
ttgccccccacctcc

SEQ ID NO: 721108 - DNA, 15 bp, Homo sapiens
tgccccccacctcct

SEQ ID NO: 721109 - DNA, 15 bp, Homo sapiens
gccccccacctcctg

SEQ ID NO: 721110 - DNA, 15 bp, Homo sapiens
ccccccacctcctga

SEQ ID NO: 721111 - DNA, 15 bp, Homo sapiens
cccccacctcctgac

SEQ ID NO: 721112 - DNA, 15 bp, Homo sapiens
ccccacctcctgaca

SEQ ID NO: 721113 - DNA, 15 bp, Homo sapiens
cccacctcctgacag

SEQ ID NO: 721114 - DNA, 15 bp, Homo sapiens
ccacctcctgacagg

SEQ ID NO: 721115 - DNA, 15 bp, Homo sapiens
cacctcctgacaggc

SEQ ID NO: 721116 - DNA, 15 bp, Homo sapiens
acctcctgacaggcc

SEQ ID NO: 721117 - DNA, 15 bp, Homo sapiens
cctcctgacaggcct

SEQ ID NO: 721118 - DNA, 15 bp, Homo sapiens
ctcctgacaggcctc

SEQ ID NO: 721119 - DNA, 15 bp, Homo sapiens
tcctgacaggcctct

SEQ ID NO: 721120 - DNA, 15 bp, Homo sapiens
cctgacaggcctctg

SEQ ID NO: 721121 - DNA, 15 bp, Homo sapiens
ctgacaggcctctgt

SEQ ID NO: 721122 - DNA, 15 bp, Homo sapiens
tgacaggcctctgtg

SEQ ID NO: 721123 - DNA, 15 bp, Homo sapiens
gacaggcctctgtgt

SEQ ID NO: 721124 - DNA, 15 bp, Homo sapiens
acaggcctctgtgtg

SEQ ID NO: 721125 - DNA, 15 bp, Homo sapiens
caggcctctgtgtgt

SEQ ID NO: 721126 - DNA, 15 bp, Homo sapiens
aggcctctgtgtgtg

SEQ ID NO: 721127 - DNA, 15 bp, Homo sapiens
ggcctctgtgtgtgg

SEQ ID NO: 721128 - DNA, 15 bp, Homo sapiens
gcctctgtgtgtggt

SEQ ID NO: 721129 - DNA, 15 bp, Homo sapiens
cctctgtgtgtggtg

SEQ ID NO: 721130 - DNA, 15 bp, Homo sapiens
ctctgtgtgtggtgt

SEQ ID NO: 721131 - DNA, 15 bp, Homo sapiens
tctgtgtgtggtgtt

SEQ ID NO: 721132 - DNA, 15 bp, Homo sapiens
ctgtgtgtggtgttc

SEQ ID NO: 721133 - DNA, 15 bp, Homo sapiens
tgtgtgtggtgttcc

SEQ ID NO: 721134 - DNA, 15 bp, Homo sapiens
gtgtgtggtgttccc

SEQ ID NO: 721135 - DNA, 15 bp, Homo sapiens
tgtgtggtgttcccc

SEQ ID NO: 721136 - DNA, 15 bp, Homo sapiens
gtgtggtgttcccca

SEQ ID NO: 721137 - DNA, 15 bp, Homo sapiens
tgtggtgttccccac

SEQ ID NO: 721138 - DNA, 15 bp, Homo sapiens
gtggtgttccccacc

SEQ ID NO: 721139 - DNA, 15 bp, Homo sapiens
tggtgttccccaccc

SEQ ID NO: 721140 - DNA, 15 bp, Homo sapiens
ggtgttccccaccct

SEQ ID NO: 721141 - DNA, 15 bp, Homo sapiens
gtgttccccaccctg

SEQ ID NO: 721142 - DNA, 15 bp, Homo sapiens
tgttccccaccctgt

SEQ ID NO: 721143 - DNA, 15 bp, Homo sapiens
gttccccaccctgtg

SEQ ID NO: 721144 - DNA, 15 bp, Homo sapiens
ttccccaccctgtgt

SEQ ID NO: 721145 - DNA, 15 bp, Homo sapiens
tccccaccctgtgtc

SEQ ID NO: 721146 - DNA, 15 bp, Homo sapiens
ccccaccctgtgtcc

SEQ ID NO: 721147 - DNA, 15 bp, Homo sapiens
cccaccctgtgtcca

SEQ ID NO: 721148 - DNA, 15 bp, Homo sapiens
ccaccctgtgtccat

SEQ ID NO: 721149 - DNA, 15 bp, Homo sapiens
caccctgtgtccatg

SEQ ID NO: 721150 - DNA, 15 bp, Homo sapiens
accctgtgtccatgt

SEQ ID NO: 721151 - DNA, 15 bp, Homo sapiens
ccctgtgtccatgtg

SEQ ID NO: 721152 - DNA, 15 bp, Homo sapiens
cctgtgtccatgtgt

SEQ ID NO: 721153 - DNA, 15 bp, Homo sapiens
ctgtgtccatgtgtt

SEQ ID NO: 721154 - DNA, 15 bp, Homo sapiens
tgtgtccatgtgttc

SEQ ID NO: 721155 - DNA, 15 bp, Homo sapiens
gtgtccatgtgttct

SEQ ID NO: 721156 - DNA, 15 bp, Homo sapiens
tgtccatgtgttctt

SEQ ID NO: 721157 - DNA, 15 bp, Homo sapiens
gtccatgtgttctta

SEQ ID NO: 721158 - DNA, 15 bp, Homo sapiens
tccatgtgttcttat

SEQ ID NO: 721159 - DNA, 15 bp, Homo sapiens
ccatgtgttcttatt

SEQ ID NO: 721160 - DNA, 15 bp, Homo sapiens
catgtgttcttattg

SEQ ID NO: 721161 - DNA, 15 bp, Homo sapiens
atgtgttcttattgt

SEQ ID NO: 721162 - DNA, 15 bp, Homo sapiens
tgtgttcttattgtt

SEQ ID NO: 721163 - DNA, 15 bp, Homo sapiens
gtgttcttattgttc

SEQ ID NO: 721164 - DNA, 15 bp, Homo sapiens
tgttcttattgttca

SEQ ID NO: 721165 - DNA, 15 bp, Homo sapiens
gttcttattgttcaa

SEQ ID NO: 721166 - DNA, 15 bp, Homo sapiens
ttcttattgttcaac

SEQ ID NO: 721167 - DNA, 15 bp, Homo sapiens
tcttattgttcaact

SEQ ID NO: 721168 - DNA, 15 bp, Homo sapiens
cttattgttcaactc

SEQ ID NO: 721169 - DNA, 15 bp, Homo sapiens
ttattgttcaactct

SEQ ID NO: 721170 - DNA, 15 bp, Homo sapiens
tattgttcaactctc

SEQ ID NO: 721171 - DNA, 15 bp, Homo sapiens
attgttcaactctca

SEQ ID NO: 721172 - DNA, 15 bp, Homo sapiens
ttgttcaactctcac

SEQ ID NO: 721173 - DNA, 15 bp, Homo sapiens
tgttcaactctcact

SEQ ID NO: 721174 - DNA, 15 bp, Homo sapiens
gttcaactctcactt

SEQ ID NO: 721175 - DNA, 15 bp, Homo sapiens
ttcaactctcactta

SEQ ID NO: 721176 - DNA, 15 bp, Homo sapiens
tcaactctcacttat

SEQ ID NO: 721177 - DNA, 15 bp, Homo sapiens
caactctcacttatg

SEQ ID NO: 721178 - DNA, 15 bp, Homo sapiens
aactctcacttatga

SEQ ID NO: 721179 - DNA, 15 bp, Homo sapiens
actctcacttatgag

SEQ ID NO: 721180 - DNA, 15 bp, Homo sapiens
ctctcacttatgagt

SEQ ID NO: 721181 - DNA, 15 bp, Homo sapiens
tctcacttatgagtg

SEQ ID NO: 721182 - DNA, 15 bp, Homo sapiens
ctcacttatgagtga

SEQ ID NO: 721183 - DNA, 15 bp, Homo sapiens
tcacttatgagtgag

SEQ ID NO: 721184 - DNA, 15 bp, Homo sapiens
cacttatgagtgagg

SEQ ID NO: 721185 - DNA, 15 bp, Homo sapiens
acttatgagtgagga

SEQ ID NO: 721186 - DNA, 15 bp, Homo sapiens
cttatgagtgaggac

SEQ ID NO: 721187 - DNA, 15 bp, Homo sapiens
ttatgagtgaggaca

SEQ ID NO: 721188 - DNA, 15 bp, Homo sapiens
tatgagtgaggacat

SEQ ID NO: 721189 - DNA, 15 bp, Homo sapiens
atgagtgaggacatg

SEQ ID NO: 721190 - DNA, 15 bp, Homo sapiens
tgagtgaggacatgt

SEQ ID NO: 721191 - DNA, 15 bp, Homo sapiens
gagtgaggacatgtg

SEQ ID NO: 721192 - DNA, 15 bp, Homo sapiens
agtgaggacatgtgg

SEQ ID NO: 721193 - DNA, 15 bp, Homo sapiens
gtgaggacatgtggt

SEQ ID NO: 721194 - DNA, 15 bp, Homo sapiens
tgaggacatgtggtg

SEQ ID NO: 721195 - DNA, 15 bp, Homo sapiens
gaggacatgtggtgt

SEQ ID NO: 721196 - DNA, 15 bp, Homo sapiens
aggacatgtggtgtt

SEQ ID NO: 721197 - DNA, 15 bp, Homo sapiens
ggacatgtggtgttt

SEQ ID NO: 721198 - DNA, 15 bp, Homo sapiens
gacatgtggtgtttg

SEQ ID NO: 721199 - DNA, 15 bp, Homo sapiens
acatgtggtgtttgg

SEQ ID NO: 721200 - DNA, 15 bp, Homo sapiens
catgtggtgtttggt

SEQ ID NO: 721201 - DNA, 15 bp, Homo sapiens
atgtggtgtttggtt

SEQ ID NO: 721202 - DNA, 15 bp, Homo sapiens
tgtggtgtttggttt

SEQ ID NO: 721203 - DNA, 15 bp, Homo sapiens
gtggtgtttggtttt

SEQ ID NO: 721204 - DNA, 15 bp, Homo sapiens
tggtgtttggttttc

SEQ ID NO: 721205 - DNA, 15 bp, Homo sapiens
ggtgtttggttttct

SEQ ID NO: 721206 - DNA, 15 bp, Homo sapiens
gtgtttggttttctg

SEQ ID NO: 721207 - DNA, 15 bp, Homo sapiens
tgtttggttttctgt

SEQ ID NO: 721208 - DNA, 15 bp, Homo sapiens
gtttggttttctgtt

SEQ ID NO: 721209 - DNA, 15 bp, Homo sapiens
tttggttttctgttc

SEQ ID NO: 721210 - DNA, 15 bp, Homo sapiens
ttggttttctgttct

SEQ ID NO: 721211 - DNA, 15 bp, Homo sapiens
tggttttctgttctt

SEQ ID NO: 721212 - DNA, 15 bp, Homo sapiens
ggttttctgttcttg

SEQ ID NO: 721213 - DNA, 15 bp, Homo sapiens
gttttctgttcttgt

SEQ ID NO: 721214 - DNA, 15 bp, Homo sapiens
ttttctgttcttgtg

SEQ ID NO: 721215 - DNA, 15 bp, Homo sapiens
tttctgttcttgtgt

SEQ ID NO: 721216 - DNA, 15 bp, Homo sapiens
ttctgttcttgtgtt

SEQ ID NO: 721217 - DNA, 15 bp, Homo sapiens
tctgttcttgtgtta

SEQ ID NO: 721218 - DNA, 15 bp, Homo sapiens
ctgttcttgtgttag

SEQ ID NO: 721219 - DNA, 15 bp, Homo sapiens
tgttcttgtgttagt

SEQ ID NO: 721220 - DNA, 15 bp, Homo sapiens
gttcttgtgttagtt

SEQ ID NO: 721221 - DNA, 15 bp, Homo sapiens
ttcttgtgttagttt

SEQ ID NO: 721222 - DNA, 15 bp, Homo sapiens
tcttgtgttagtttg

SEQ ID NO: 721223 - DNA, 15 bp, Homo sapiens
cttgtgttagtttgc

SEQ ID NO: 721224 - DNA, 15 bp, Homo sapiens
ttgtgttagtttgct

SEQ ID NO: 721225 - DNA, 15 bp, Homo sapiens
tgtgttagtttgctg

SEQ ID NO: 721226 - DNA, 15 bp, Homo sapiens
gtgttagtttgctga

SEQ ID NO: 721227 - DNA, 15 bp, Homo sapiens
tgttagtttgctgag

SEQ ID NO: 721228 - DNA, 15 bp, Homo sapiens
gttagtttgctgagg

SEQ ID NO: 721229 - DNA, 15 bp, Homo sapiens
ttagtttgctgagga

SEQ ID NO: 721230 - DNA, 15 bp, Homo sapiens
tagtttgctgaggat

SEQ ID NO: 721231 - DNA, 15 bp, Homo sapiens
agtttgctgaggatg

SEQ ID NO: 721232 - DNA, 15 bp, Homo sapiens
gtttgctgaggatga

SEQ ID NO: 721233 - DNA, 15 bp, Homo sapiens
tttgctgaggatgat

SEQ ID NO: 721234 - DNA, 15 bp, Homo sapiens
ttgctgaggatgatg

SEQ ID NO: 721235 - DNA, 15 bp, Homo sapiens
tgctgaggatgatgg

SEQ ID NO: 721236 - DNA, 15 bp, Homo sapiens
gctgaggatgatggc

SEQ ID NO: 721237 - DNA, 15 bp, Homo sapiens
ctgaggatgatggct

SEQ ID NO: 721238 - DNA, 15 bp, Homo sapiens
tgaggatgatggctt

SEQ ID NO: 721239 - DNA, 15 bp, Homo sapiens
gaggatgatggcttc

SEQ ID NO: 721240 - DNA, 15 bp, Homo sapiens
aggatgatggcttcc

SEQ ID NO: 721241 - DNA, 15 bp, Homo sapiens
ggatgatggcttcca

SEQ ID NO: 721242 - DNA, 15 bp, Homo sapiens
gatgatggcttccag

SEQ ID NO: 721243 - DNA, 15 bp, Homo sapiens
atgatggcttccagc

SEQ ID NO: 721244 - DNA, 15 bp, Homo sapiens
tgatggcttccagcg

SEQ ID NO: 721245 - DNA, 15 bp, Homo sapiens
gatggcttccagcga

SEQ ID NO: 721246 - DNA, 15 bp, Homo sapiens
atggcttccagcgaa

SEQ ID NO: 721247 - DNA, 15 bp, Homo sapiens
tggcttccagcgaag

SEQ ID NO: 721248 - DNA, 15 bp, Homo sapiens
ggcttccagcgaagg

SEQ ID NO: 721249 - DNA, 15 bp, Homo sapiens
gcttccagcgaagga

SEQ ID NO: 721250 - DNA, 15 bp, Homo sapiens
cttccagcgaaggag

SEQ ID NO: 721251 - DNA, 15 bp, Homo sapiens
ttccagcgaaggagt

SEQ ID NO: 721252 - DNA, 15 bp, Homo sapiens
tccagcgaaggagtc

SEQ ID NO: 721253 - DNA, 15 bp, Homo sapiens
ccagcgaaggagtct

SEQ ID NO: 721254 - DNA, 15 bp, Homo sapiens
cagcgaaggagtctt

SEQ ID NO: 721255 - DNA, 15 bp, Homo sapiens
agcgaaggagtcttg

SEQ ID NO: 721256 - DNA, 15 bp, Homo sapiens
gcgaaggagtcttgt

SEQ ID NO: 721257 - DNA, 15 bp, Homo sapiens
cgaaggagtcttgta

SEQ ID NO: 721258 - DNA, 15 bp, Homo sapiens
gaaggagtcttgtat

SEQ ID NO: 721259 - DNA, 15 bp, Homo sapiens
aaggagtcttgtatt

SEQ ID NO: 721260 - DNA, 15 bp, Homo sapiens
aggagtcttgtatta

SEQ ID NO: 721261 - DNA, 15 bp, Homo sapiens
ggagtcttgtattag

SEQ ID NO: 721262 - DNA, 15 bp, Homo sapiens
gagtcttgtattagt

SEQ ID NO: 721263 - DNA, 15 bp, Homo sapiens
agtcttgtattagtg

SEQ ID NO: 721264 - DNA, 15 bp, Homo sapiens
gtcttgtattagtgg

SEQ ID NO: 721265 - DNA, 15 bp, Homo sapiens
tcttgtattagtggc

SEQ ID NO: 721266 - DNA, 15 bp, Homo sapiens
cttgtattagtggct

SEQ ID NO: 721267 - DNA, 15 bp, Homo sapiens
ttgtattagtggctt

SEQ ID NO: 721268 - DNA, 15 bp, Homo sapiens
tgtattagtggcttt

SEQ ID NO: 721269 - DNA, 15 bp, Homo sapiens
gtattagtggctttt

SEQ ID NO: 721270 - DNA, 15 bp, Homo sapiens
tattagtggcttttt

SEQ ID NO: 721271 - DNA, 15 bp, Homo sapiens
attagtggctttttc

SEQ ID NO: 721272 - DNA, 15 bp, Homo sapiens
ttagtggctttttcc

SEQ ID NO: 721273 - DNA, 15 bp, Homo sapiens
tagtggctttttccc

SEQ ID NO: 721274 - DNA, 15 bp, Homo sapiens
agtggctttttcccc

SEQ ID NO: 721275 - DNA, 15 bp, Homo sapiens
gtggctttttcccca

SEQ ID NO: 721276 - DNA, 15 bp, Homo sapiens
tggctttttccccac

SEQ ID NO: 721277 - DNA, 15 bp, Homo sapiens
ggctttttccccacc

SEQ ID NO: 721278 - DNA, 15 bp, Homo sapiens
gctttttccccacct

SEQ ID NO: 721279 - DNA, 15 bp, Homo sapiens
ctttttccccaccta

SEQ ID NO: 721280 - DNA, 15 bp, Homo sapiens
tttttccccacctaa

SEQ ID NO: 721281 - DNA, 15 bp, Homo sapiens
ttttccccacctaat

SEQ ID NO: 721282 - DNA, 15 bp, Homo sapiens
tttccccacctaatc

SEQ ID NO: 721283 - DNA, 15 bp, Homo sapiens
ttccccacctaatcg

SEQ ID NO: 721284 - DNA, 15 bp, Homo sapiens
tccccacctaatcgt

SEQ ID NO: 721285 - DNA, 15 bp, Homo sapiens
ccccacctaatcgtt

SEQ ID NO: 721286 - DNA, 15 bp, Homo sapiens
cccacctaatcgtta

SEQ ID NO: 721287 - DNA, 15 bp, Homo sapiens
ccacctaatcgttag

SEQ ID NO: 721288 - DNA, 15 bp, Homo sapiens
cacctaatcgttaga

SEQ ID NO: 721289 - DNA, 15 bp, Homo sapiens
acctaatcgttagaa

SEQ ID NO: 721290 - DNA, 15 bp, Homo sapiens
cctaatcgttagaag

SEQ ID NO: 721291 - DNA, 15 bp, Homo sapiens
ctaatcgttagaagt

SEQ ID NO: 721292 - DNA, 15 bp, Homo sapiens
taatcgttagaagtt

SEQ ID NO: 721293 - DNA, 15 bp, Homo sapiens
aatcgttagaagttg

SEQ ID NO: 721294 - DNA, 15 bp, Homo sapiens
atcgttagaagttgt

SEQ ID NO: 721295 - DNA, 15 bp, Homo sapiens
tcgttagaagttgtg

SEQ ID NO: 721296 - DNA, 15 bp, Homo sapiens
cgttagaagttgtga

SEQ ID NO: 721297 - DNA, 15 bp, Homo sapiens
gttagaagttgtgaa

SEQ ID NO: 721298 - DNA, 15 bp, Homo sapiens
ttagaagttgtgaat

SEQ ID NO: 721299 - DNA, 15 bp, Homo sapiens
tagaagttgtgaata

SEQ ID NO: 721300 - DNA, 15 bp, Homo sapiens
agaagttgtgaatag

SEQ ID NO: 721301 - DNA, 15 bp, Homo sapiens
gaagttgtgaatagg

SEQ ID NO: 721302 - DNA, 15 bp, Homo sapiens
aagttgtgaataggg

SEQ ID NO: 721303 - DNA, 15 bp, Homo sapiens
agttgtgaataggga

SEQ ID NO: 721304 - DNA, 15 bp, Homo sapiens
gttgtgaatagggac

SEQ ID NO: 721305 - DNA, 15 bp, Homo sapiens
ttgtgaatagggact

SEQ ID NO: 721306 - DNA, 15 bp, Homo sapiens
tgtgaatagggactt

SEQ ID NO: 721307 - DNA, 15 bp, Homo sapiens
gtgaatagggacttc

SEQ ID NO: 721308 - DNA, 15 bp, Homo sapiens
tgaatagggacttct

SEQ ID NO: 721309 - DNA, 15 bp, Homo sapiens
gaatagggacttctt

SEQ ID NO: 721310 - DNA, 15 bp, Homo sapiens
aatagggacttcttt

SEQ ID NO: 721311 - DNA, 15 bp, Homo sapiens
atagggacttcttta

SEQ ID NO: 721312 - DNA, 15 bp, Homo sapiens
tagggacttctttaa

SEQ ID NO: 721313 - DNA, 15 bp, Homo sapiens
agggacttctttaat

SEQ ID NO: 721314 - DNA, 15 bp, Homo sapiens
gggacttctttaatg

SEQ ID NO: 721315 - DNA, 15 bp, Homo sapiens
ggacttctttaatga

SEQ ID NO: 721316 - DNA, 15 bp, Homo sapiens
gacttctttaatgaa

SEQ ID NO: 721317 - DNA, 15 bp, Homo sapiens
acttctttaatgaat

SEQ ID NO: 721318 - DNA, 15 bp, Homo sapiens
cttctttaatgaatc

SEQ ID NO: 721319 - DNA, 15 bp, Homo sapiens
ttctttaatgaatcc

SEQ ID NO: 721320 - DNA, 15 bp, Homo sapiens
tctttaatgaatcca

SEQ ID NO: 721321 - DNA, 15 bp, Homo sapiens
ctttaatgaatccag

SEQ ID NO: 721322 - DNA, 15 bp, Homo sapiens
tttaatgaatccaga

SEQ ID NO: 721323 - DNA, 15 bp, Homo sapiens
ttaatgaatccagaa

SEQ ID NO: 721324 - DNA, 15 bp, Homo sapiens
taatgaatccagaag

SEQ ID NO: 721325 - DNA, 15 bp, Homo sapiens
aatgaatccagaagt

SEQ ID NO: 721326 - DNA, 15 bp, Homo sapiens
atgaatccagaagtt

SEQ ID NO: 721327 - DNA, 15 bp, Homo sapiens
tgaatccagaagtta

SEQ ID NO: 721328 - DNA, 15 bp, Homo sapiens
gaatccagaagttaa

SEQ ID NO: 721329 - DNA, 15 bp, Homo sapiens
aatccagaagttaat

SEQ ID NO: 721330 - DNA, 15 bp, Homo sapiens
atccagaagttaatg

SEQ ID NO: 721331 - DNA, 15 bp, Homo sapiens
tccagaagttaatga

SEQ ID NO: 721332 - DNA, 15 bp, Homo sapiens
ccagaagttaatgaa

SEQ ID NO: 721333 - DNA, 15 bp, Homo sapiens
cagaagttaatgaac

SEQ ID NO: 721334 - DNA, 15 bp, Homo sapiens
agaagttaatgaacc

SEQ ID NO: 721335 - DNA, 15 bp, Homo sapiens
gaagttaatgaacct

SEQ ID NO: 721336 - DNA, 15 bp, Homo sapiens
aagttaatgaaccta

SEQ ID NO: 721337 - DNA, 15 bp, Homo sapiens
agttaatgaacctag

SEQ ID NO: 721338 - DNA, 15 bp, Homo sapiens
gttaatgaacctagc

SEQ ID NO: 721339 - DNA, 15 bp, Homo sapiens
ttaatgaacctagct

SEQ ID NO: 721340 - DNA, 15 bp, Homo sapiens
taatgaacctagctt

SEQ ID NO: 721341 - DNA, 15 bp, Homo sapiens
aatgaacctagcttt

SEQ ID NO: 721342 - DNA, 15 bp, Homo sapiens
atgaacctagctttt

SEQ ID NO: 721343 - DNA, 15 bp, Homo sapiens
tgaacctagcttttt

SEQ ID NO: 721344 - DNA, 15 bp, Homo sapiens
gaacctagctttttt

SEQ ID NO: 721345 - DNA, 15 bp, Homo sapiens
aacctagcttttttt

SEQ ID NO: 721346 - DNA, 15 bp, Homo sapiens
acctagctttttttt

SEQ ID NO: 721347 - DNA, 15 bp, Homo sapiens
cctagcttttttttt

SEQ ID NO: 721348 - DNA, 15 bp, Homo sapiens
ctagctttttttttt

SEQ ID NO: 721349 - DNA, 15 bp, Homo sapiens
tagcttttttttttt

SEQ ID NO: 721350 - DNA, 15 bp, Homo sapiens
agctttttttttttt

SEQ ID NO: 721351 - DNA, 15 bp, Homo sapiens
gcttttttttttttt

SEQ ID NO: 721352 - DNA, 15 bp, Homo sapiens
tttttttttttttgg

SEQ ID NO: 721353 - DNA, 15 bp, Homo sapiens
ttttttttttttgga

SEQ ID NO: 721354 - DNA, 15 bp, Homo sapiens
tttttttttttggag

SEQ ID NO: 721355 - DNA, 15 bp, Homo sapiens
ttttttttttggaga

SEQ ID NO: 721356 - DNA, 15 bp, Homo sapiens
tttttttttggagac

SEQ ID NO: 721357 - DNA, 15 bp, Homo sapiens
ttttttttggagacg

SEQ ID NO: 721358 - DNA, 15 bp, Homo sapiens
tgggaatctaattta

SEQ ID NO: 721359 - DNA, 15 bp, Homo sapiens
gggaatctaatttag

SEQ ID NO: 721360 - DNA, 15 bp, Homo sapiens
ggaatctaatttagg

SEQ ID NO: 721361 - DNA, 15 bp, Homo sapiens
gaatctaatttaggt

SEQ ID NO: 721362 - DNA, 15 bp, Homo sapiens
aatctaatttaggtc

SEQ ID NO: 721363 - DNA, 15 bp, Homo sapiens
atctaatttaggtct

SEQ ID NO: 721364 - DNA, 15 bp, Homo sapiens
tctaatttaggtctc

SEQ ID NO: 721365 - DNA, 15 bp, Homo sapiens
ctaatttaggtctct

SEQ ID NO: 721366 - DNA, 15 bp, Homo sapiens
taatttaggtctctc

SEQ ID NO: 721367 - DNA, 15 bp, Homo sapiens
aatttaggtctctca

SEQ ID NO: 721368 - DNA, 15 bp, Homo sapiens
atttaggtctctcag

SEQ ID NO: 721369 - DNA, 15 bp, Homo sapiens
tttaggtctctcagt

SEQ ID NO: 721370 - DNA, 15 bp, Homo sapiens
ttaggtctctcagtt

SEQ ID NO: 721371 - DNA, 15 bp, Homo sapiens
taggtctctcagttt

SEQ ID NO: 721372 - DNA, 15 bp, Homo sapiens
aggtctctcagtttt

SEQ ID NO: 721373 - DNA, 15 bp, Homo sapiens
ggtctctcagttttt

SEQ ID NO: 721374 - DNA, 15 bp, Homo sapiens
gtctctcagttttta

SEQ ID NO: 721375 - DNA, 15 bp, Homo sapiens
tctctcagtttttac

SEQ ID NO: 721376 - DNA, 15 bp, Homo sapiens
ctctcagtttttaca

SEQ ID NO: 721377 - DNA, 15 bp, Homo sapiens
tctcagtttttacac

SEQ ID NO: 721378 - DNA, 15 bp, Homo sapiens
ctcagtttttacacc

SEQ ID NO: 721379 - DNA, 15 bp, Homo sapiens
tcagtttttacacct

SEQ ID NO: 721380 - DNA, 15 bp, Homo sapiens
cagtttttacaccta

SEQ ID NO: 721381 - DNA, 15 bp, Homo sapiens
agtttttacacctac

SEQ ID NO: 721382 - DNA, 15 bp, Homo sapiens
gtttttacacctaca

SEQ ID NO: 721383 - DNA, 15 bp, Homo sapiens
tttttacacctacat

SEQ ID NO: 721384 - DNA, 15 bp, Homo sapiens
ttttacacctacatt

SEQ ID NO: 721385 - DNA, 15 bp, Homo sapiens
tttacacctacattc

SEQ ID NO: 721386 - DNA, 15 bp, Homo sapiens
ttacacctacattct

SEQ ID NO: 721387 - DNA, 15 bp, Homo sapiens
tacacctacattctg

SEQ ID NO: 721388 - DNA, 15 bp, Homo sapiens
acacctacattctgg

SEQ ID NO: 721389 - DNA, 15 bp, Homo sapiens
cacctacattctggt

SEQ ID NO: 721390 - DNA, 15 bp, Homo sapiens
acctacattctggtt

SEQ ID NO: 721391 - DNA, 15 bp, Homo sapiens
cctacattctggttt

SEQ ID NO: 721392 - DNA, 15 bp, Homo sapiens
ctacattctggtttt

SEQ ID NO: 721393 - DNA, 15 bp, Homo sapiens
tacattctggtttta

SEQ ID NO: 721394 - DNA, 15 bp, Homo sapiens
acattctggttttat

SEQ ID NO: 721395 - DNA, 15 bp, Homo sapiens
cattctggttttatt

SEQ ID NO: 721396 - DNA, 15 bp, Homo sapiens
attctggttttattg

SEQ ID NO: 721397 - DNA, 15 bp, Homo sapiens
ttctggttttattgt

SEQ ID NO: 721398 - DNA, 15 bp, Homo sapiens
tctggttttattgtt

SEQ ID NO: 721399 - DNA, 15 bp, Homo sapiens
ctggttttattgttt

SEQ ID NO: 721400 - DNA, 15 bp, Homo sapiens
tggttttattgtttt

SEQ ID NO: 721401 - DNA, 15 bp, Homo sapiens
ggttttattgtttta

SEQ ID NO: 721402 - DNA, 15 bp, Homo sapiens
gttttattgttttat

SEQ ID NO: 721403 - DNA, 15 bp, Homo sapiens
ttttattgttttatt

SEQ ID NO: 721404 - DNA, 15 bp, Homo sapiens
tttattgttttattt

SEQ ID NO: 721405 - DNA, 15 bp, Homo sapiens
ttattgttttattta

SEQ ID NO: 721406 - DNA, 15 bp, Homo sapiens
tattgttttatttat

SEQ ID NO: 721407 - DNA, 15 bp, Homo sapiens
attgttttatttatt

SEQ ID NO: 721408 - DNA, 15 bp, Homo sapiens
ttgttttatttattt

SEQ ID NO: 721409 - DNA, 15 bp, Homo sapiens
tgttttatttatttt

SEQ ID NO: 721410 - DNA, 15 bp, Homo sapiens
gttttatttattttt

SEQ ID NO: 721411 - DNA, 15 bp, Homo sapiens
ttttatttattttta

SEQ ID NO: 721412 - DNA, 15 bp, Homo sapiens
tttatttatttttat

SEQ ID NO: 721413 - DNA, 15 bp, Homo sapiens
ttatttatttttatt

SEQ ID NO: 721414 - DNA, 15 bp, Homo sapiens
tatttatttttattt

SEQ ID NO: 721415 - DNA, 15 bp, Homo sapiens
atttatttttatttt

SEQ ID NO: 721416 - DNA, 15 bp, Homo sapiens
tttatttttattttt

SEQ ID NO: 721417 - DNA, 15 bp, Homo sapiens
atttttatttttttg

SEQ ID NO: 721418 - DNA, 15 bp, Homo sapiens
tttttatttttttga

SEQ ID NO: 721419 - DNA, 15 bp, Homo sapiens
tttatttttttgaga

SEQ ID NO: 721420 - DNA, 15 bp, Homo sapiens
ttatttttttgagac

SEQ ID NO: 721421 - DNA, 15 bp, Homo sapiens
tatttttttgagaca

SEQ ID NO: 721422 - DNA, 15 bp, Homo sapiens
atttttttgagacaa

SEQ ID NO: 721423 - DNA, 15 bp, Homo sapiens
tttttttgagacaag

SEQ ID NO: 721424 - DNA, 15 bp, Homo sapiens
ttttttgagacaagt

SEQ ID NO: 721425 - DNA, 15 bp, Homo sapiens
tttttgagacaagtc

SEQ ID NO: 721426 - DNA, 15 bp, Homo sapiens
ttttgagacaagtct

SEQ ID NO: 721427 - DNA, 15 bp, Homo sapiens
tttgagacaagtctt

SEQ ID NO: 721428 - DNA, 15 bp, Homo sapiens
ttgagacaagtcttg

SEQ ID NO: 721429 - DNA, 15 bp, Homo sapiens
tgagacaagtcttgc

SEQ ID NO: 721430 - DNA, 15 bp, Homo sapiens
gagacaagtcttgct

SEQ ID NO: 721431 - DNA, 15 bp, Homo sapiens
agacaagtcttgctc

SEQ ID NO: 721432 - DNA, 15 bp, Homo sapiens
gacaagtcttgctct

SEQ ID NO: 721433 - DNA, 15 bp, Homo sapiens
acaagtcttgctctg

SEQ ID NO: 721434 - DNA, 15 bp, Homo sapiens
caagtcttgctctgt

SEQ ID NO: 721435 - DNA, 15 bp, Homo sapiens
agtcttgctctgtcg

SEQ ID NO: 721436 - DNA, 15 bp, Homo sapiens
gtcttgctctgtcgc

SEQ ID NO: 721437 - DNA, 15 bp, Homo sapiens
tcttgctctgtcgcc

SEQ ID NO: 721438 - DNA, 15 bp, Homo sapiens
cttgctctgtcgccc

SEQ ID NO: 721439 - DNA, 15 bp, Homo sapiens
ttgctctgtcgccca

SEQ ID NO: 721440 - DNA, 15 bp, Homo sapiens
tgctctgtcgcccag

SEQ ID NO: 721441 - DNA, 15 bp, Homo sapiens
gctctgtcgcccagg

SEQ ID NO: 721442 - DNA, 15 bp, Homo sapiens
ggctggagtgcagta

SEQ ID NO: 721443 - DNA, 15 bp, Homo sapiens
gctggagtgcagtag

SEQ ID NO: 721444 - DNA, 15 bp, Homo sapiens
ctggagtgcagtagc

SEQ ID NO: 721445 - DNA, 15 bp, Homo sapiens
tggagtgcagtagcg

SEQ ID NO: 721446 - DNA, 15 bp, Homo sapiens
ggagtgcagtagcgc

SEQ ID NO: 721447 - DNA, 15 bp, Homo sapiens
gagtgcagtagcgcc

SEQ ID NO: 721448 - DNA, 15 bp, Homo sapiens
agtgcagtagcgcca

SEQ ID NO: 721449 - DNA, 15 bp, Homo sapiens
gtgcagtagcgccat

SEQ ID NO: 721450 - DNA, 15 bp, Homo sapiens
tgcagtagcgccatc

SEQ ID NO: 721451 - DNA, 15 bp, Homo sapiens
gcagtagcgccatct

SEQ ID NO: 721452 - DNA, 15 bp, Homo sapiens
cagtagcgccatctg

SEQ ID NO: 721453 - DNA, 15 bp, Homo sapiens
agtagcgccatctga

SEQ ID NO: 721454 - DNA, 15 bp, Homo sapiens
gtagcgccatctgag

SEQ ID NO: 721455 - DNA, 15 bp, Homo sapiens
tagcgccatctgagc

SEQ ID NO: 721456 - DNA, 15 bp, Homo sapiens
agcgccatctgagct

SEQ ID NO: 721457 - DNA, 15 bp, Homo sapiens
gcgccatctgagctc

SEQ ID NO: 721458 - DNA, 15 bp, Homo sapiens
cgccatctgagctca

SEQ ID NO: 721459 - DNA, 15 bp, Homo sapiens
gccatctgagctcac

SEQ ID NO: 721460 - DNA, 15 bp, Homo sapiens
ccatctgagctcact

SEQ ID NO: 721461 - DNA, 15 bp, Homo sapiens
catctgagctcactg

SEQ ID NO: 721462 - DNA, 15 bp, Homo sapiens
atctgagctcactgc

SEQ ID NO: 721463 - DNA, 15 bp, Homo sapiens
tctgagctcactgca

SEQ ID NO: 721464 - DNA, 15 bp, Homo sapiens
ctgagctcactgcaa

SEQ ID NO: 721465 - DNA, 15 bp, Homo sapiens
tgagctcactgcaac

SEQ ID NO: 721466 - DNA, 15 bp, Homo sapiens
gagctcactgcaacg

SEQ ID NO: 721467 - DNA, 15 bp, Homo sapiens
agctcactgcaacgt

SEQ ID NO: 721468 - DNA, 15 bp, Homo sapiens
gctcactgcaacgtc

SEQ ID NO: 721469 - DNA, 15 bp, Homo sapiens
ctcactgcaacgtcc

SEQ ID NO: 721470 - DNA, 15 bp, Homo sapiens
tcactgcaacgtccg

SEQ ID NO: 721471 - DNA, 15 bp, Homo sapiens
cactgcaacgtccgc

SEQ ID NO: 721472 - DNA, 15 bp, Homo sapiens
actgcaacgtccgcc

SEQ ID NO: 721473 - DNA, 15 bp, Homo sapiens
ctgcaacgtccgcct

SEQ ID NO: 721474 - DNA, 15 bp, Homo sapiens
tgcaacgtccgcctc

SEQ ID NO: 721475 - DNA, 15 bp, Homo sapiens
gcaacgtccgcctcc

SEQ ID NO: 721476 - DNA, 15 bp, Homo sapiens
caacgtccgcctccc

SEQ ID NO: 721477 - DNA, 15 bp, Homo sapiens
aacgtccgcctccca

SEQ ID NO: 721478 - DNA, 15 bp, Homo sapiens
acgtccgcctcccag

SEQ ID NO: 721479 - DNA, 15 bp, Homo sapiens
cgtccgcctcccagg

SEQ ID NO: 721480 - DNA, 15 bp, Homo sapiens
gtccgcctcccaggt

SEQ ID NO: 721481 - DNA, 15 bp, Homo sapiens
ccgagtagctgggag

SEQ ID NO: 721482 - DNA, 15 bp, Homo sapiens
cgagtagctgggagt

SEQ ID NO: 721483 - DNA, 15 bp, Homo sapiens
gagtagctgggagta

SEQ ID NO: 721484 - DNA, 15 bp, Homo sapiens
agtagctgggagtac

SEQ ID NO: 721485 - DNA, 15 bp, Homo sapiens
gtagctgggagtaca

SEQ ID NO: 721486 - DNA, 15 bp, Homo sapiens
tagctgggagtacag

SEQ ID NO: 721487 - DNA, 15 bp, Homo sapiens
agctgggagtacagg

SEQ ID NO: 721488 - DNA, 15 bp, Homo sapiens
gctgggagtacaggc

SEQ ID NO: 721489 - DNA, 15 bp, Homo sapiens
ctgggagtacaggca

SEQ ID NO: 721490 - DNA, 15 bp, Homo sapiens
tgggagtacaggcat

SEQ ID NO: 721491 - DNA, 15 bp, Homo sapiens
gggagtacaggcatc

SEQ ID NO: 721492 - DNA, 15 bp, Homo sapiens
ggagtacaggcatct

SEQ ID NO: 721493 - DNA, 15 bp, Homo sapiens
gagtacaggcatctg

SEQ ID NO: 721494 - DNA, 15 bp, Homo sapiens
agtacaggcatctgc

SEQ ID NO: 721495 - DNA, 15 bp, Homo sapiens
gtacaggcatctgcc

SEQ ID NO: 721496 - DNA, 15 bp, Homo sapiens
tacaggcatctgcca

SEQ ID NO: 721497 - DNA, 15 bp, Homo sapiens
acaggcatctgccac

SEQ ID NO: 721498 - DNA, 15 bp, Homo sapiens
caggcatctgccacc

SEQ ID NO: 721499 - DNA, 15 bp, Homo sapiens
aggcatctgccacca

SEQ ID NO: 721500 - DNA, 15 bp, Homo sapiens
ggcatctgccaccat

SEQ ID NO: 721501 - DNA, 15 bp, Homo sapiens
gcatctgccaccatg

SEQ ID NO: 721502 - DNA, 15 bp, Homo sapiens
catctgccaccatgc

SEQ ID NO: 721503 - DNA, 15 bp, Homo sapiens
atctgccaccatgca

SEQ ID NO: 721504 - DNA, 15 bp, Homo sapiens
tctgccaccatgcac

SEQ ID NO: 721505 - DNA, 15 bp, Homo sapiens
ctgccaccatgcacg

SEQ ID NO: 721506 - DNA, 15 bp, Homo sapiens
tgccaccatgcacgg

SEQ ID NO: 721507 - DNA, 15 bp, Homo sapiens
gccaccatgcacggc

SEQ ID NO: 721508 - DNA, 15 bp, Homo sapiens
ccaccatgcacggct

SEQ ID NO: 721509 - DNA, 15 bp, Homo sapiens
caccatgcacggcta

SEQ ID NO: 721510 - DNA, 15 bp, Homo sapiens
accatgcacggctaa

SEQ ID NO: 721511 - DNA, 15 bp, Homo sapiens
ccatgcacggctaat

SEQ ID NO: 721512 - DNA, 15 bp, Homo sapiens
catgcacggctaatt

SEQ ID NO: 721513 - DNA, 15 bp, Homo sapiens
atgcacggctaattt

SEQ ID NO: 721514 - DNA, 15 bp, Homo sapiens
tgcacggctaatttt

SEQ ID NO: 721515 - DNA, 15 bp, Homo sapiens
gcacggctaattttt

SEQ ID NO: 721516 - DNA, 15 bp, Homo sapiens
cacggctaatttttt

SEQ ID NO: 721517 - DNA, 15 bp, Homo sapiens
acggctaattttttg

SEQ ID NO: 721518 - DNA, 15 bp, Homo sapiens
atttttagtagagag

SEQ ID NO: 721519 - DNA, 15 bp, Homo sapiens
tttttagtagagaga

SEQ ID NO: 721520 - DNA, 15 bp, Homo sapiens
ttttagtagagagag

SEQ ID NO: 721521 - DNA, 15 bp, Homo sapiens
tttagtagagagaga

SEQ ID NO: 721522 - DNA, 15 bp, Homo sapiens
ttagtagagagagag

SEQ ID NO: 721523 - DNA, 15 bp, Homo sapiens
tagtagagagagaga

SEQ ID NO: 721524 - DNA, 15 bp, Homo sapiens
agtagagagagagag

SEQ ID NO: 721525 - DNA, 15 bp, Homo sapiens
gtagagagagagagg

SEQ ID NO: 721526 - DNA, 15 bp, Homo sapiens
tagagagagagaggg

SEQ ID NO: 721527 - DNA, 15 bp, Homo sapiens
agagagagagagggt

SEQ ID NO: 721528 - DNA, 15 bp, Homo sapiens
gagagagagagggtt

SEQ ID NO: 721529 - DNA, 15 bp, Homo sapiens
agagagagagggttt

SEQ ID NO: 721530 - DNA, 15 bp, Homo sapiens
gagagagagggtttc

SEQ ID NO: 721531 - DNA, 15 bp, Homo sapiens
agagagagggtttca

SEQ ID NO: 721532 - DNA, 15 bp, Homo sapiens
gagagagggtttcaa

SEQ ID NO: 721533 - DNA, 15 bp, Homo sapiens
agagagggtttcaat

SEQ ID NO: 721534 - DNA, 15 bp, Homo sapiens
gagagggtttcaata

SEQ ID NO: 721535 - DNA, 15 bp, Homo sapiens
agagggtttcaatat

SEQ ID NO: 721536 - DNA, 15 bp, Homo sapiens
gagggtttcaatatg

SEQ ID NO: 721537 - DNA, 15 bp, Homo sapiens
agggtttcaatatgt

SEQ ID NO: 721538 - DNA, 15 bp, Homo sapiens
gggtttcaatatgtt

SEQ ID NO: 721539 - DNA, 15 bp, Homo sapiens
ggtttcaatatgttg

SEQ ID NO: 721540 - DNA, 15 bp, Homo sapiens
gtttcaatatgttgg

SEQ ID NO: 721541 - DNA, 15 bp, Homo sapiens
tttcaatatgttggc

SEQ ID NO: 721542 - DNA, 15 bp, Homo sapiens
ttcaatatgttggcc

SEQ ID NO: 721543 - DNA, 15 bp, Homo sapiens
tcaatatgttggcca

SEQ ID NO: 721544 - DNA, 15 bp, Homo sapiens
caatatgttggccag

SEQ ID NO: 721545 - DNA, 15 bp, Homo sapiens
aatatgttggccagg

SEQ ID NO: 721546 - DNA, 15 bp, Homo sapiens
atatgttggccaggc

SEQ ID NO: 721547 - DNA, 15 bp, Homo sapiens
ggtctcgaactccta

SEQ ID NO: 721548 - DNA, 15 bp, Homo sapiens
gtctcgaactcctag

SEQ ID NO: 721549 - DNA, 15 bp, Homo sapiens
tctcgaactcctaga

SEQ ID NO: 721550 - DNA, 15 bp, Homo sapiens
ctcgaactcctagac

SEQ ID NO: 721551 - DNA, 15 bp, Homo sapiens
tcgaactcctagact

SEQ ID NO: 721552 - DNA, 15 bp, Homo sapiens
cgaactcctagactc

SEQ ID NO: 721553 - DNA, 15 bp, Homo sapiens
gaactcctagactca

SEQ ID NO: 721554 - DNA, 15 bp, Homo sapiens
aactcctagactcaa

SEQ ID NO: 721555 - DNA, 15 bp, Homo sapiens
actcctagactcaag

SEQ ID NO: 721556 - DNA, 15 bp, Homo sapiens
ctcctagactcaagc

SEQ ID NO: 721557 - DNA, 15 bp, Homo sapiens
tcctagactcaagcc

SEQ ID NO: 721558 - DNA, 15 bp, Homo sapiens
cctagactcaagcca

SEQ ID NO: 721559 - DNA, 15 bp, Homo sapiens
ctagactcaagccat

SEQ ID NO: 721560 - DNA, 15 bp, Homo sapiens
tagactcaagccatc

SEQ ID NO: 721561 - DNA, 15 bp, Homo sapiens
agactcaagccatct

SEQ ID NO: 721562 - DNA, 15 bp, Homo sapiens
gactcaagccatctg

SEQ ID NO: 721563 - DNA, 15 bp, Homo sapiens
actcaagccatctgc

SEQ ID NO: 721564 - DNA, 15 bp, Homo sapiens
ctcaagccatctgcc

SEQ ID NO: 721565 - DNA, 15 bp, Homo sapiens
tcaagccatctgccc

SEQ ID NO: 721566 - DNA, 15 bp, Homo sapiens
caagccatctgccca

SEQ ID NO: 721567 - DNA, 15 bp, Homo sapiens
aagccatctgcccac

SEQ ID NO: 721568 - DNA, 15 bp, Homo sapiens
agccatctgcccacc

SEQ ID NO: 721569 - DNA, 15 bp, Homo sapiens
gccatctgcccacct

SEQ ID NO: 721570 - DNA, 15 bp, Homo sapiens
ccatctgcccacctc

SEQ ID NO: 721571 - DNA, 15 bp, Homo sapiens
catctgcccacctca

SEQ ID NO: 721572 - DNA, 15 bp, Homo sapiens
atctgcccacctcag

SEQ ID NO: 721573 - DNA, 15 bp, Homo sapiens
tctgcccacctcagc

SEQ ID NO: 721574 - DNA, 15 bp, Homo sapiens
ctgcccacctcagcc

SEQ ID NO: 721575 - DNA, 15 bp, Homo sapiens
tgcccacctcagcct

SEQ ID NO: 721576 - DNA, 15 bp, Homo sapiens
gcccacctcagcctt

SEQ ID NO: 721577 - DNA, 15 bp, Homo sapiens
ccacctcagccttcc

SEQ ID NO: 721578 - DNA, 15 bp, Homo sapiens
cacctcagccttcca

SEQ ID NO: 721579 - DNA, 15 bp, Homo sapiens
acctcagccttccaa

SEQ ID NO: 721580 - DNA, 15 bp, Homo sapiens
cctcagccttccaag

SEQ ID NO: 721581 - DNA, 15 bp, Homo sapiens
ctcagccttccaagt

SEQ ID NO: 721582 - DNA, 15 bp, Homo sapiens
tcagccttccaagtg

SEQ ID NO: 721583 - DNA, 15 bp, Homo sapiens
cagccttccaagtgc

SEQ ID NO: 721584 - DNA, 15 bp, Homo sapiens
agccttccaagtgct

SEQ ID NO: 721585 - DNA, 15 bp, Homo sapiens
gccttccaagtgctg

SEQ ID NO: 721586 - DNA, 15 bp, Homo sapiens
ccttccaagtgctgg

SEQ ID NO: 721587 - DNA, 15 bp, Homo sapiens
cttccaagtgctggg

SEQ ID NO: 721588 - DNA, 15 bp, Homo sapiens
ttccaagtgctggga

SEQ ID NO: 721589 - DNA, 15 bp, Homo sapiens
tccaagtgctgggat

SEQ ID NO: 721590 - DNA, 15 bp, Homo sapiens
ccaagtgctgggatt

SEQ ID NO: 721591 - DNA, 15 bp, Homo sapiens
caagtgctgggatta

SEQ ID NO: 721592 - DNA, 15 bp, Homo sapiens
ctgggattataggtg

SEQ ID NO: 721593 - DNA, 15 bp, Homo sapiens
tgggattataggtgt

SEQ ID NO: 721594 - DNA, 15 bp, Homo sapiens
gggattataggtgta

SEQ ID NO: 721595 - DNA, 15 bp, Homo sapiens
ggattataggtgtaa

SEQ ID NO: 721596 - DNA, 15 bp, Homo sapiens
gattataggtgtaag

SEQ ID NO: 721597 - DNA, 15 bp, Homo sapiens
attataggtgtaagc

SEQ ID NO: 721598 - DNA, 15 bp, Homo sapiens
ttataggtgtaagcc

SEQ ID NO: 721599 - DNA, 15 bp, Homo sapiens
tataggtgtaagcca

SEQ ID NO: 721600 - DNA, 15 bp, Homo sapiens
ataggtgtaagccac

SEQ ID NO: 721601 - DNA, 15 bp, Homo sapiens
taggtgtaagccacc

SEQ ID NO: 721602 - DNA, 15 bp, Homo sapiens
aggtgtaagccacca

SEQ ID NO: 721603 - DNA, 15 bp, Homo sapiens
ggtgtaagccaccac

SEQ ID NO: 721604 - DNA, 15 bp, Homo sapiens
gtgtaagccaccacg

SEQ ID NO: 721605 - DNA, 15 bp, Homo sapiens
tgtaagccaccacgc

SEQ ID NO: 721606 - DNA, 15 bp, Homo sapiens
gtaagccaccacgcc

SEQ ID NO: 721607 - DNA, 15 bp, Homo sapiens
taagccaccacgccc

SEQ ID NO: 721608 - DNA, 15 bp, Homo sapiens
aagccaccacgccca

SEQ ID NO: 721609 - DNA, 15 bp, Homo sapiens
agccaccacgcccag

SEQ ID NO: 721610 - DNA, 15 bp, Homo sapiens
ccaccacgcccagcc

SEQ ID NO: 721611 - DNA, 15 bp, Homo sapiens
caccacgcccagcct

SEQ ID NO: 721612 - DNA, 15 bp, Homo sapiens
accacgcccagcctg

SEQ ID NO: 721613 - DNA, 15 bp, Homo sapiens
ccacgcccagcctgc

SEQ ID NO: 721614 - DNA, 15 bp, Homo sapiens
cacgcccagcctgca

SEQ ID NO: 721615 - DNA, 15 bp, Homo sapiens
acgcccagcctgcat

SEQ ID NO: 721616 - DNA, 15 bp, Homo sapiens
cgcccagcctgcatt

SEQ ID NO: 721617 - DNA, 15 bp, Homo sapiens
gcccagcctgcattc

SEQ ID NO: 721618 - DNA, 15 bp, Homo sapiens
cccagcctgcattct

SEQ ID NO: 721619 - DNA, 15 bp, Homo sapiens
ccagcctgcattctg

SEQ ID NO: 721620 - DNA, 15 bp, Homo sapiens
cagcctgcattctgg

SEQ ID NO: 721621 - DNA, 15 bp, Homo sapiens
agcctgcattctggt

SEQ ID NO: 721622 - DNA, 15 bp, Homo sapiens
gcctgcattctggtt

SEQ ID NO: 721623 - DNA, 15 bp, Homo sapiens
cctgcattctggttt

SEQ ID NO: 721624 - DNA, 15 bp, Homo sapiens
ctgcattctggtttt

SEQ ID NO: 721625 - DNA, 15 bp, Homo sapiens
tgcattctggtttta

SEQ ID NO: 721626 - DNA, 15 bp, Homo sapiens
gcattctggttttat

SEQ ID NO: 721627 - DNA, 15 bp, Homo sapiens
attctggttttattt

SEQ ID NO: 721628 - DNA, 15 bp, Homo sapiens
ttctggttttatttc

SEQ ID NO: 721629 - DNA, 15 bp, Homo sapiens
tctggttttatttcc

SEQ ID NO: 721630 - DNA, 15 bp, Homo sapiens
ctggttttatttcct

SEQ ID NO: 721631 - DNA, 15 bp, Homo sapiens
tggttttatttcctt

SEQ ID NO: 721632 - DNA, 15 bp, Homo sapiens
ggttttatttccttt

SEQ ID NO: 721633 - DNA, 15 bp, Homo sapiens
gttttatttcctttt

SEQ ID NO: 721634 - DNA, 15 bp, Homo sapiens
ttttatttcctttta

SEQ ID NO: 721635 - DNA, 15 bp, Homo sapiens
tttatttccttttaa

SEQ ID NO: 721636 - DNA, 15 bp, Homo sapiens
ttatttccttttaat

SEQ ID NO: 721637 - DNA, 15 bp, Homo sapiens
tatttccttttaatt

SEQ ID NO: 721638 - DNA, 15 bp, Homo sapiens
atttccttttaattg

SEQ ID NO: 721639 - DNA, 15 bp, Homo sapiens
tttccttttaattga

SEQ ID NO: 721640 - DNA, 15 bp, Homo sapiens
ttccttttaattgaa

SEQ ID NO: 721641 - DNA, 15 bp, Homo sapiens
tccttttaattgaaa

SEQ ID NO: 721642 - DNA, 15 bp, Homo sapiens
ccttttaattgaaag

SEQ ID NO: 721643 - DNA, 15 bp, Homo sapiens
cttttaattgaaagg

SEQ ID NO: 721644 - DNA, 15 bp, Homo sapiens
ttttaattgaaagga

SEQ ID NO: 721645 - DNA, 15 bp, Homo sapiens
tttaattgaaaggag

SEQ ID NO: 721646 - DNA, 15 bp, Homo sapiens
ttaattgaaaggagt

SEQ ID NO: 721647 - DNA, 15 bp, Homo sapiens
taattgaaaggagtg

SEQ ID NO: 721648 - DNA, 15 bp, Homo sapiens
aattgaaaggagtgt

SEQ ID NO: 721649 - DNA, 15 bp, Homo sapiens
attgaaaggagtgtc

SEQ ID NO: 721650 - DNA, 15 bp, Homo sapiens
ttgaaaggagtgtct

SEQ ID NO: 721651 - DNA, 15 bp, Homo sapiens
tgaaaggagtgtctt

SEQ ID NO: 721652 - DNA, 15 bp, Homo sapiens
gaaaggagtgtcttg

SEQ ID NO: 721653 - DNA, 15 bp, Homo sapiens
aaaggagtgtcttgg

SEQ ID NO: 721654 - DNA, 15 bp, Homo sapiens
aaggagtgtcttggt

SEQ ID NO: 721655 - DNA, 15 bp, Homo sapiens
aggagtgtcttggtt

SEQ ID NO: 721656 - DNA, 15 bp, Homo sapiens
ggagtgtcttggttc

SEQ ID NO: 721657 - DNA, 15 bp, Homo sapiens
gagtgtcttggttct

SEQ ID NO: 721658 - DNA, 15 bp, Homo sapiens
agtgtcttggttctg

SEQ ID NO: 721659 - DNA, 15 bp, Homo sapiens
gtgtcttggttctgc

SEQ ID NO: 721660 - DNA, 15 bp, Homo sapiens
tgtcttggttctgct

SEQ ID NO: 721661 - DNA, 15 bp, Homo sapiens
gtcttggttctgctg

SEQ ID NO: 721662 - DNA, 15 bp, Homo sapiens
tcttggttctgctgt

SEQ ID NO: 721663 - DNA, 15 bp, Homo sapiens
cttggttctgctgtc

SEQ ID NO: 721664 - DNA, 15 bp, Homo sapiens
ttggttctgctgtct

SEQ ID NO: 721665 - DNA, 15 bp, Homo sapiens
tggttctgctgtctt

SEQ ID NO: 721666 - DNA, 15 bp, Homo sapiens
ggttctgctgtctta

SEQ ID NO: 721667 - DNA, 15 bp, Homo sapiens
gttctgctgtcttat

SEQ ID NO: 721668 - DNA, 15 bp, Homo sapiens
ttctgctgtcttatt

SEQ ID NO: 721669 - DNA, 15 bp, Homo sapiens
tctgctgtcttatta

SEQ ID NO: 721670 - DNA, 15 bp, Homo sapiens
ctgctgtcttattaa

SEQ ID NO: 721671 - DNA, 15 bp, Homo sapiens
tgctgtcttattaat

SEQ ID NO: 721672 - DNA, 15 bp, Homo sapiens
gctgtcttattaatc

SEQ ID NO: 721673 - DNA, 15 bp, Homo sapiens
ctgtcttattaatca

SEQ ID NO: 721674 - DNA, 15 bp, Homo sapiens
tgtcttattaatcat

SEQ ID NO: 721675 - DNA, 15 bp, Homo sapiens
gtcttattaatcatc

SEQ ID NO: 721676 - DNA, 15 bp, Homo sapiens
tcttattaatcatcc

SEQ ID NO: 721677 - DNA, 15 bp, Homo sapiens
cttattaatcatcct

SEQ ID NO: 721678 - DNA, 15 bp, Homo sapiens
ttattaatcatcctg

SEQ ID NO: 721679 - DNA, 15 bp, Homo sapiens
tattaatcatcctga

SEQ ID NO: 721680 - DNA, 15 bp, Homo sapiens
attaatcatcctgaa

SEQ ID NO: 721681 - DNA, 15 bp, Homo sapiens
ttaatcatcctgaac

SEQ ID NO: 721682 - DNA, 15 bp, Homo sapiens
taatcatcctgaaca

SEQ ID NO: 721683 - DNA, 15 bp, Homo sapiens
aatcatcctgaacaa

SEQ ID NO: 721684 - DNA, 15 bp, Homo sapiens
atcatcctgaacaat

SEQ ID NO: 721685 - DNA, 15 bp, Homo sapiens
tcatcctgaacaatg

SEQ ID NO: 721686 - DNA, 15 bp, Homo sapiens
catcctgaacaatgg

SEQ ID NO: 721687 - DNA, 15 bp, Homo sapiens
atcctgaacaatggc

SEQ ID NO: 721688 - DNA, 15 bp, Homo sapiens
tcctgaacaatggct

SEQ ID NO: 721689 - DNA, 15 bp, Homo sapiens
cctgaacaatggcta

SEQ ID NO: 721690 - DNA, 15 bp, Homo sapiens
ctgaacaatggctaa

SEQ ID NO: 721691 - DNA, 15 bp, Homo sapiens
tgaacaatggctaat

SEQ ID NO: 721692 - DNA, 15 bp, Homo sapiens
gaacaatggctaata

SEQ ID NO: 721693 - DNA, 15 bp, Homo sapiens
aacaatggctaatag

SEQ ID NO: 721694 - DNA, 15 bp, Homo sapiens
acaatggctaatagc

SEQ ID NO: 721695 - DNA, 15 bp, Homo sapiens
caatggctaatagct

SEQ ID NO: 721696 - DNA, 15 bp, Homo sapiens
aatggctaatagctt

SEQ ID NO: 721697 - DNA, 15 bp, Homo sapiens
atggctaatagcttg

SEQ ID NO: 721698 - DNA, 15 bp, Homo sapiens
tggctaatagcttga

SEQ ID NO: 721699 - DNA, 15 bp, Homo sapiens
ggctaatagcttgaa

SEQ ID NO: 721700 - DNA, 15 bp, Homo sapiens
gctaatagcttgaat

SEQ ID NO: 721701 - DNA, 15 bp, Homo sapiens
ctaatagcttgaatg

SEQ ID NO: 721702 - DNA, 15 bp, Homo sapiens
taatagcttgaatga

SEQ ID NO: 721703 - DNA, 15 bp, Homo sapiens
aatagcttgaatgac

SEQ ID NO: 721704 - DNA, 15 bp, Homo sapiens
atagcttgaatgact

SEQ ID NO: 721705 - DNA, 15 bp, Homo sapiens
tagcttgaatgacta

SEQ ID NO: 721706 - DNA, 15 bp, Homo sapiens
agcttgaatgactac

SEQ ID NO: 721707 - DNA, 15 bp, Homo sapiens
gcttgaatgactact

SEQ ID NO: 721708 - DNA, 15 bp, Homo sapiens
cttgaatgactacta

SEQ ID NO: 721709 - DNA, 15 bp, Homo sapiens
ttgaatgactactaa

SEQ ID NO: 721710 - DNA, 15 bp, Homo sapiens
tgaatgactactaag

SEQ ID NO: 721711 - DNA, 15 bp, Homo sapiens
gaatgactactaaga

SEQ ID NO: 721712 - DNA, 15 bp, Homo sapiens
aatgactactaagac

SEQ ID NO: 721713 - DNA, 15 bp, Homo sapiens
atgactactaagaca

SEQ ID NO: 721714 - DNA, 15 bp, Homo sapiens
tgactactaagacag

SEQ ID NO: 721715 - DNA, 15 bp, Homo sapiens
gactactaagacagg

SEQ ID NO: 721716 - DNA, 15 bp, Homo sapiens
actactaagacagga

SEQ ID NO: 721717 - DNA, 15 bp, Homo sapiens
ctactaagacaggag

SEQ ID NO: 721718 - DNA, 15 bp, Homo sapiens
tactaagacaggaga

SEQ ID NO: 721719 - DNA, 15 bp, Homo sapiens
actaagacaggagag

SEQ ID NO: 721720 - DNA, 15 bp, Homo sapiens
ctaagacaggagagc

SEQ ID NO: 721721 - DNA, 15 bp, Homo sapiens
taagacaggagagct

SEQ ID NO: 721722 - DNA, 15 bp, Homo sapiens
aagacaggagagcta

SEQ ID NO: 721723 - DNA, 15 bp, Homo sapiens
agacaggagagctac

SEQ ID NO: 721724 - DNA, 15 bp, Homo sapiens
gacaggagagctaca

SEQ ID NO: 721725 - DNA, 15 bp, Homo sapiens
acaggagagctacac

SEQ ID NO: 721726 - DNA, 15 bp, Homo sapiens
caggagagctacaca

SEQ ID NO: 721727 - DNA, 15 bp, Homo sapiens
aggagagctacacac

SEQ ID NO: 721728 - DNA, 15 bp, Homo sapiens
ggagagctacacaca

SEQ ID NO: 721729 - DNA, 15 bp, Homo sapiens
gagagctacacacac

SEQ ID NO: 721730 - DNA, 15 bp, Homo sapiens
agagctacacacaca

SEQ ID NO: 721731 - DNA, 15 bp, Homo sapiens
gagctacacacacac

SEQ ID NO: 721732 - DNA, 15 bp, Homo sapiens
agctacacacacact

SEQ ID NO: 721733 - DNA, 15 bp, Homo sapiens
gctacacacacacta

SEQ ID NO: 721734 - DNA, 15 bp, Homo sapiens
ctacacacacactat

SEQ ID NO: 721735 - DNA, 15 bp, Homo sapiens
tacacacacactatg

SEQ ID NO: 721736 - DNA, 15 bp, Homo sapiens
acacacacactatgt

SEQ ID NO: 721737 - DNA, 15 bp, Homo sapiens
cacacacactatgta

SEQ ID NO: 721738 - DNA, 15 bp, Homo sapiens
acacacactatgtat

SEQ ID NO: 721739 - DNA, 15 bp, Homo sapiens
cacacactatgtatt

SEQ ID NO: 721740 - DNA, 15 bp, Homo sapiens
acacactatgtattt

SEQ ID NO: 721741 - DNA, 15 bp, Homo sapiens
cacactatgtatttg

SEQ ID NO: 721742 - DNA, 15 bp, Homo sapiens
acactatgtatttgt

SEQ ID NO: 721743 - DNA, 15 bp, Homo sapiens
cactatgtatttgta

SEQ ID NO: 721744 - DNA, 15 bp, Homo sapiens
actatgtatttgtac

SEQ ID NO: 721745 - DNA, 15 bp, Homo sapiens
ctatgtatttgtacc

SEQ ID NO: 721746 - DNA, 15 bp, Homo sapiens
tatgtatttgtacct

SEQ ID NO: 721747 - DNA, 15 bp, Homo sapiens
atgtatttgtacctt

SEQ ID NO: 721748 - DNA, 15 bp, Homo sapiens
tgtatttgtacctta

SEQ ID NO: 721749 - DNA, 15 bp, Homo sapiens
gtatttgtaccttac

SEQ ID NO: 721750 - DNA, 15 bp, Homo sapiens
tatttgtaccttaca

SEQ ID NO: 721751 - DNA, 15 bp, Homo sapiens
atttgtaccttacaa

SEQ ID NO: 721752 - DNA, 15 bp, Homo sapiens
tttgtaccttacaaa

SEQ ID NO: 721753 - DNA, 15 bp, Homo sapiens
ttgtaccttacaaat

SEQ ID NO: 721754 - DNA, 15 bp, Homo sapiens
tgtaccttacaaata

SEQ ID NO: 721755 - DNA, 15 bp, Homo sapiens
gtaccttacaaatag

SEQ ID NO: 721756 - DNA, 15 bp, Homo sapiens
taccttacaaataga

SEQ ID NO: 721757 - DNA, 15 bp, Homo sapiens
accttacaaatagat

SEQ ID NO: 721758 - DNA, 15 bp, Homo sapiens
ccttacaaatagatg

SEQ ID NO: 721759 - DNA, 15 bp, Homo sapiens
cttacaaatagatgt

SEQ ID NO: 721760 - DNA, 15 bp, Homo sapiens
ttacaaatagatgtg

SEQ ID NO: 721761 - DNA, 15 bp, Homo sapiens
tacaaatagatgtgt

SEQ ID NO: 721762 - DNA, 15 bp, Homo sapiens
acaaatagatgtgtg

SEQ ID NO: 721763 - DNA, 15 bp, Homo sapiens
caaatagatgtgtgg

SEQ ID NO: 721764 - DNA, 15 bp, Homo sapiens
aaatagatgtgtgga

SEQ ID NO: 721765 - DNA, 15 bp, Homo sapiens
aatagatgtgtggag

SEQ ID NO: 721766 - DNA, 15 bp, Homo sapiens
atagatgtgtggagg

SEQ ID NO: 721767 - DNA, 15 bp, Homo sapiens
tagatgtgtggaggc

SEQ ID NO: 721768 - DNA, 15 bp, Homo sapiens
agatgtgtggaggcc

SEQ ID NO: 721769 - DNA, 15 bp, Homo sapiens
gatgtgtggaggcca

SEQ ID NO: 721770 - DNA, 15 bp, Homo sapiens
atgtgtggaggccaa

SEQ ID NO: 721771 - DNA, 15 bp, Homo sapiens
tgtgtggaggccaaa

SEQ ID NO: 721772 - DNA, 15 bp, Homo sapiens
gtgtggaggccaaat

SEQ ID NO: 721773 - DNA, 15 bp, Homo sapiens
tgtggaggccaaata

SEQ ID NO: 721774 - DNA, 15 bp, Homo sapiens
gtggaggccaaatac

SEQ ID NO: 721775 - DNA, 15 bp, Homo sapiens
tggaggccaaatact

SEQ ID NO: 721776 - DNA, 15 bp, Homo sapiens
ggaggccaaatactt

SEQ ID NO: 721777 - DNA, 15 bp, Homo sapiens
gaggccaaatacttc

SEQ ID NO: 721778 - DNA, 15 bp, Homo sapiens
aggccaaatacttca

SEQ ID NO: 721779 - DNA, 15 bp, Homo sapiens
ggccaaatacttcag

SEQ ID NO: 721780 - DNA, 15 bp, Homo sapiens
gccaaatacttcagt

SEQ ID NO: 721781 - DNA, 15 bp, Homo sapiens
ccaaatacttcagta

SEQ ID NO: 721782 - DNA, 15 bp, Homo sapiens
caaatacttcagtat

SEQ ID NO: 721783 - DNA, 15 bp, Homo sapiens
aaatacttcagtatt

SEQ ID NO: 721784 - DNA, 15 bp, Homo sapiens
aatacttcagtattt

SEQ ID NO: 721785 - DNA, 15 bp, Homo sapiens
atacttcagtattta

SEQ ID NO: 721786 - DNA, 15 bp, Homo sapiens
tacttcagtatttag

SEQ ID NO: 721787 - DNA, 15 bp, Homo sapiens
acttcagtatttagc

SEQ ID NO: 721788 - DNA, 15 bp, Homo sapiens
cttcagtatttagcc

SEQ ID NO: 721789 - DNA, 15 bp, Homo sapiens
ttcagtatttagcca

SEQ ID NO: 721790 - DNA, 15 bp, Homo sapiens
tcagtatttagccaa

SEQ ID NO: 721791 - DNA, 15 bp, Homo sapiens
cagtatttagccaac

SEQ ID NO: 721792 - DNA, 15 bp, Homo sapiens
agtatttagccaact

SEQ ID NO: 721793 - DNA, 15 bp, Homo sapiens
gtatttagccaactc

SEQ ID NO: 721794 - DNA, 15 bp, Homo sapiens
tatttagccaactca

SEQ ID NO: 721795 - DNA, 15 bp, Homo sapiens
atttagccaactcaa

SEQ ID NO: 721796 - DNA, 15 bp, Homo sapiens
tttagccaactcaat

SEQ ID NO: 721797 - DNA, 15 bp, Homo sapiens
ttagccaactcaata

SEQ ID NO: 721798 - DNA, 15 bp, Homo sapiens
tagccaactcaataa

SEQ ID NO: 721799 - DNA, 15 bp, Homo sapiens
agccaactcaataat

SEQ ID NO: 721800 - DNA, 15 bp, Homo sapiens
gccaactcaataatc

SEQ ID NO: 721801 - DNA, 15 bp, Homo sapiens
ccaactcaataatca

SEQ ID NO: 721802 - DNA, 15 bp, Homo sapiens
caactcaataatcat

SEQ ID NO: 721803 - DNA, 15 bp, Homo sapiens
aactcaataatcata

SEQ ID NO: 721804 - DNA, 15 bp, Homo sapiens
actcaataatcatag

SEQ ID NO: 721805 - DNA, 15 bp, Homo sapiens
ctcaataatcatagt

SEQ ID NO: 721806 - DNA, 15 bp, Homo sapiens
tcaataatcatagtc

SEQ ID NO: 721807 - DNA, 15 bp, Homo sapiens
caataatcatagtcc

SEQ ID NO: 721808 - DNA, 15 bp, Homo sapiens
aataatcatagtccc

SEQ ID NO: 721809 - DNA, 15 bp, Homo sapiens
ataatcatagtccct

SEQ ID NO: 721810 - DNA, 15 bp, Homo sapiens
taatcatagtcccta

SEQ ID NO: 721811 - DNA, 15 bp, Homo sapiens
aatcatagtccctac

SEQ ID NO: 721812 - DNA, 15 bp, Homo sapiens
atcatagtccctaca

SEQ ID NO: 721813 - DNA, 15 bp, Homo sapiens
tcatagtccctacaa

SEQ ID NO: 721814 - DNA, 15 bp, Homo sapiens
catagtccctacaat

SEQ ID NO: 721815 - DNA, 15 bp, Homo sapiens
atagtccctacaatt

SEQ ID NO: 721816 - DNA, 15 bp, Homo sapiens
tagtccctacaattt

SEQ ID NO: 721817 - DNA, 15 bp, Homo sapiens
agtccctacaattta

SEQ ID NO: 721818 - DNA, 15 bp, Homo sapiens
gtccctacaatttag

SEQ ID NO: 721819 - DNA, 15 bp, Homo sapiens
tccctacaatttagc

SEQ ID NO: 721820 - DNA, 15 bp, Homo sapiens
ccctacaatttagca

SEQ ID NO: 721821 - DNA, 15 bp, Homo sapiens
cctacaatttagcaa

SEQ ID NO: 721822 - DNA, 15 bp, Homo sapiens
ctacaatttagcaaa

SEQ ID NO: 721823 - DNA, 15 bp, Homo sapiens
tacaatttagcaaat

SEQ ID NO: 721824 - DNA, 15 bp, Homo sapiens
acaatttagcaaatg

SEQ ID NO: 721825 - DNA, 15 bp, Homo sapiens
caatttagcaaatga

SEQ ID NO: 721826 - DNA, 15 bp, Homo sapiens
aatttagcaaatgat

SEQ ID NO: 721827 - DNA, 15 bp, Homo sapiens
atttagcaaatgatc

SEQ ID NO: 721828 - DNA, 15 bp, Homo sapiens
tttagcaaatgatct

SEQ ID NO: 721829 - DNA, 15 bp, Homo sapiens
ttagcaaatgatctg

SEQ ID NO: 721830 - DNA, 15 bp, Homo sapiens
tagcaaatgatctgc

SEQ ID NO: 721831 - DNA, 15 bp, Homo sapiens
agcaaatgatctgca

SEQ ID NO: 721832 - DNA, 15 bp, Homo sapiens
gcaaatgatctgcag

SEQ ID NO: 721833 - DNA, 15 bp, Homo sapiens
caaatgatctgcagc

SEQ ID NO: 721834 - DNA, 15 bp, Homo sapiens
aaatgatctgcagcc

SEQ ID NO: 721835 - DNA, 15 bp, Homo sapiens
aatgatctgcagcct

SEQ ID NO: 721836 - DNA, 15 bp, Homo sapiens
atgatctgcagcctt

SEQ ID NO: 721837 - DNA, 15 bp, Homo sapiens
tgatctgcagccttg

SEQ ID NO: 721838 - DNA, 15 bp, Homo sapiens
gatctgcagccttgc

SEQ ID NO: 721839 - DNA, 15 bp, Homo sapiens
atctgcagccttgct

SEQ ID NO: 721840 - DNA, 15 bp, Homo sapiens
tctgcagccttgctg

SEQ ID NO: 721841 - DNA, 15 bp, Homo sapiens
ctgcagccttgctgc

SEQ ID NO: 721842 - DNA, 15 bp, Homo sapiens
tgcagccttgctgct

SEQ ID NO: 721843 - DNA, 15 bp, Homo sapiens
gcagccttgctgctc

SEQ ID NO: 721844 - DNA, 15 bp, Homo sapiens
cagccttgctgctct

SEQ ID NO: 721845 - DNA, 15 bp, Homo sapiens
agccttgctgctctg

SEQ ID NO: 721846 - DNA, 15 bp, Homo sapiens
gccttgctgctctga

SEQ ID NO: 721847 - DNA, 15 bp, Homo sapiens
ccttgctgctctgat

SEQ ID NO: 721848 - DNA, 15 bp, Homo sapiens
cttgctgctctgatc

SEQ ID NO: 721849 - DNA, 15 bp, Homo sapiens
ttgctgctctgatct

SEQ ID NO: 721850 - DNA, 15 bp, Homo sapiens
tgctgctctgatcta

SEQ ID NO: 721851 - DNA, 15 bp, Homo sapiens
gctgctctgatctac

SEQ ID NO: 721852 - DNA, 15 bp, Homo sapiens
ctgctctgatctaca

SEQ ID NO: 721853 - DNA, 15 bp, Homo sapiens
tgctctgatctacaa

SEQ ID NO: 721854 - DNA, 15 bp, Homo sapiens
gctctgatctacaaa

SEQ ID NO: 721855 - DNA, 15 bp, Homo sapiens
ctctgatctacaaag

SEQ ID NO: 721856 - DNA, 15 bp, Homo sapiens
tctgatctacaaagc

SEQ ID NO: 721857 - DNA, 15 bp, Homo sapiens
ctgatctacaaagct

SEQ ID NO: 721858 - DNA, 15 bp, Homo sapiens
tgatctacaaagctc

SEQ ID NO: 721859 - DNA, 15 bp, Homo sapiens
gatctacaaagctcg

SEQ ID NO: 721860 - DNA, 15 bp, Homo sapiens
atctacaaagctcga

SEQ ID NO: 721861 - DNA, 15 bp, Homo sapiens
tctacaaagctcgag

SEQ ID NO: 721862 - DNA, 15 bp, Homo sapiens
ctacaaagctcgaga

SEQ ID NO: 721863 - DNA, 15 bp, Homo sapiens
tacaaagctcgagac

SEQ ID NO: 721864 - DNA, 15 bp, Homo sapiens
acaaagctcgagact

SEQ ID NO: 721865 - DNA, 15 bp, Homo sapiens
caaagctcgagactt

SEQ ID NO: 721866 - DNA, 15 bp, Homo sapiens
aaagctcgagacttc

SEQ ID NO: 721867 - DNA, 15 bp, Homo sapiens
aagctcgagacttct

SEQ ID NO: 721868 - DNA, 15 bp, Homo sapiens
agctcgagacttctt

SEQ ID NO: 721869 - DNA, 15 bp, Homo sapiens
gctcgagacttcttc

SEQ ID NO: 721870 - DNA, 15 bp, Homo sapiens
ctcgagacttcttct

SEQ ID NO: 721871 - DNA, 15 bp, Homo sapiens
tcgagacttcttctt

SEQ ID NO: 721872 - DNA, 15 bp, Homo sapiens
cgagacttcttcttg

SEQ ID NO: 721873 - DNA, 15 bp, Homo sapiens
gagacttcttcttgt

SEQ ID NO: 721874 - DNA, 15 bp, Homo sapiens
agacttcttcttgtt

SEQ ID NO: 721875 - DNA, 15 bp, Homo sapiens
gacttcttcttgttt

SEQ ID NO: 721876 - DNA, 15 bp, Homo sapiens
acttcttcttgtttt

SEQ ID NO: 721877 - DNA, 15 bp, Homo sapiens
cttcttcttgttttt

SEQ ID NO: 721878 - DNA, 15 bp, Homo sapiens
ttcttcttgtttttt

SEQ ID NO: 721879 - DNA, 15 bp, Homo sapiens
tcttcttgtttttta

SEQ ID NO: 721880 - DNA, 15 bp, Homo sapiens
cttcttgttttttaa

SEQ ID NO: 721881 - DNA, 15 bp, Homo sapiens
ttcttgttttttaaa

SEQ ID NO: 721882 - DNA, 15 bp, Homo sapiens
tcttgttttttaaaa

SEQ ID NO: 721883 - DNA, 15 bp, Homo sapiens
cttgttttttaaaag

SEQ ID NO: 721884 - DNA, 15 bp, Homo sapiens
ttgttttttaaaagt

SEQ ID NO: 721885 - DNA, 15 bp, Homo sapiens
tgttttttaaaagta

SEQ ID NO: 721886 - DNA, 15 bp, Homo sapiens
gttttttaaaagtaa

SEQ ID NO: 721887 - DNA, 15 bp, Homo sapiens
ttttttaaaagtaag

SEQ ID NO: 721888 - DNA, 15 bp, Homo sapiens
tttttaaaagtaagt

SEQ ID NO: 721889 - DNA, 15 bp, Homo sapiens
ttttaaaagtaagtg

SEQ ID NO: 721890 - DNA, 15 bp, Homo sapiens
tttaaaagtaagtgg

SEQ ID NO: 721891 - DNA, 15 bp, Homo sapiens
ttaaaagtaagtggc

SEQ ID NO: 721892 - DNA, 15 bp, Homo sapiens
taaaagtaagtggca

SEQ ID NO: 721893 - DNA, 15 bp, Homo sapiens
aaaagtaagtggcaa

SEQ ID NO: 721894 - DNA, 15 bp, Homo sapiens
aaagtaagtggcaat

SEQ ID NO: 721895 - DNA, 15 bp, Homo sapiens
aagtaagtggcaatt

SEQ ID NO: 721896 - DNA, 15 bp, Homo sapiens
agtaagtggcaattt

SEQ ID NO: 721897 - DNA, 15 bp, Homo sapiens
gtaagtggcaatttc

SEQ ID NO: 721898 - DNA, 15 bp, Homo sapiens
taagtggcaatttca

SEQ ID NO: 721899 - DNA, 15 bp, Homo sapiens
aagtggcaatttcag

SEQ ID NO: 721900 - DNA, 15 bp, Homo sapiens
agtggcaatttcaga

SEQ ID NO: 721901 - DNA, 15 bp, Homo sapiens
gtggcaatttcagaa

SEQ ID NO: 721902 - DNA, 15 bp, Homo sapiens
tggcaatttcagaaa

SEQ ID NO: 721903 - DNA, 15 bp, Homo sapiens
ggcaatttcagaaat

SEQ ID NO: 721904 - DNA, 15 bp, Homo sapiens
gcaatttcagaaatc

SEQ ID NO: 721905 - DNA, 15 bp, Homo sapiens
caatttcagaaatct

SEQ ID NO: 721906 - DNA, 15 bp, Homo sapiens
aatttcagaaatctt

SEQ ID NO: 721907 - DNA, 15 bp, Homo sapiens
atttcagaaatcttc

SEQ ID NO: 721908 - DNA, 15 bp, Homo sapiens
tttcagaaatcttca

SEQ ID NO: 721909 - DNA, 15 bp, Homo sapiens
ttcagaaatcttcaa

SEQ ID NO: 721910 - DNA, 15 bp, Homo sapiens
tcagaaatcttcaat

SEQ ID NO: 721911 - DNA, 15 bp, Homo sapiens
cagaaatcttcaatg

SEQ ID NO: 721912 - DNA, 15 bp, Homo sapiens
agaaatcttcaatgg

SEQ ID NO: 721913 - DNA, 15 bp, Homo sapiens
gaaatcttcaatggt

SEQ ID NO: 721914 - DNA, 15 bp, Homo sapiens
aaatcttcaatggta

SEQ ID NO: 721915 - DNA, 15 bp, Homo sapiens
aatcttcaatggtat

SEQ ID NO: 721916 - DNA, 15 bp, Homo sapiens
atcttcaatggtatt

SEQ ID NO: 721917 - DNA, 15 bp, Homo sapiens
tcttcaatggtattt

SEQ ID NO: 721918 - DNA, 15 bp, Homo sapiens
cttcaatggtatttt

SEQ ID NO: 721919 - DNA, 15 bp, Homo sapiens
ttcaatggtatttta

SEQ ID NO: 721920 - DNA, 15 bp, Homo sapiens
tcaatggtattttaa

SEQ ID NO: 721921 - DNA, 15 bp, Homo sapiens
caatggtattttaac

SEQ ID NO: 721922 - DNA, 15 bp, Homo sapiens
aatggtattttaact

SEQ ID NO: 721923 - DNA, 15 bp, Homo sapiens
atggtattttaactt

SEQ ID NO: 721924 - DNA, 15 bp, Homo sapiens
tggtattttaacttt

SEQ ID NO: 721925 - DNA, 15 bp, Homo sapiens
ggtattttaactttc

SEQ ID NO: 721926 - DNA, 15 bp, Homo sapiens
gtattttaactttct

SEQ ID NO: 721927 - DNA, 15 bp, Homo sapiens
tattttaactttcta

SEQ ID NO: 721928 - DNA, 15 bp, Homo sapiens
attttaactttctac

SEQ ID NO: 721929 - DNA, 15 bp, Homo sapiens
ttttaactttctacc

SEQ ID NO: 721930 - DNA, 15 bp, Homo sapiens
tttaactttctacca

SEQ ID NO: 721931 - DNA, 15 bp, Homo sapiens
ttaactttctaccat

SEQ ID NO: 721932 - DNA, 15 bp, Homo sapiens
taactttctaccatg

SEQ ID NO: 721933 - DNA, 15 bp, Homo sapiens
aactttctaccatga

SEQ ID NO: 721934 - DNA, 15 bp, Homo sapiens
actttctaccatgaa

SEQ ID NO: 721935 - DNA, 15 bp, Homo sapiens
ctttctaccatgaat

SEQ ID NO: 721936 - DNA, 15 bp, Homo sapiens
tttctaccatgaatc

SEQ ID NO: 721937 - DNA, 15 bp, Homo sapiens
ttctaccatgaatct

SEQ ID NO: 721938 - DNA, 15 bp, Homo sapiens
tctaccatgaatctc

SEQ ID NO: 721939 - DNA, 15 bp, Homo sapiens
ctaccatgaatctcc

SEQ ID NO: 721940 - DNA, 15 bp, Homo sapiens
taccatgaatctcct

SEQ ID NO: 721941 - DNA, 15 bp, Homo sapiens
accatgaatctcctt

SEQ ID NO: 721942 - DNA, 15 bp, Homo sapiens
ccatgaatctccttg

SEQ ID NO: 721943 - DNA, 15 bp, Homo sapiens
catgaatctccttgc

SEQ ID NO: 721944 - DNA, 15 bp, Homo sapiens
atgaatctccttgct

SEQ ID NO: 721945 - DNA, 15 bp, Homo sapiens
tgaatctccttgctg

SEQ ID NO: 721946 - DNA, 15 bp, Homo sapiens
gaatctccttgctgt

SEQ ID NO: 721947 - DNA, 15 bp, Homo sapiens
aatctccttgctgtt

SEQ ID NO: 721948 - DNA, 15 bp, Homo sapiens
atctccttgctgtta

SEQ ID NO: 721949 - DNA, 15 bp, Homo sapiens
tctccttgctgttaa

SEQ ID NO: 721950 - DNA, 15 bp, Homo sapiens
ctccttgctgttaat

SEQ ID NO: 721951 - DNA, 15 bp, Homo sapiens
tccttgctgttaata

SEQ ID NO: 721952 - DNA, 15 bp, Homo sapiens
ccttgctgttaatac

SEQ ID NO: 721953 - DNA, 15 bp, Homo sapiens
cttgctgttaataca

SEQ ID NO: 721954 - DNA, 15 bp, Homo sapiens
ttgctgttaatacat

SEQ ID NO: 721955 - DNA, 15 bp, Homo sapiens
tgctgttaatacatt

SEQ ID NO: 721956 - DNA, 15 bp, Homo sapiens
gctgttaatacattg

SEQ ID NO: 721957 - DNA, 15 bp, Homo sapiens
ctgttaatacattgt

SEQ ID NO: 721958 - DNA, 15 bp, Homo sapiens
tgttaatacattgta

SEQ ID NO: 721959 - DNA, 15 bp, Homo sapiens
gttaatacattgtat

SEQ ID NO: 721960 - DNA, 15 bp, Homo sapiens
ttaatacattgtatc

SEQ ID NO: 721961 - DNA, 15 bp, Homo sapiens
taatacattgtatca

SEQ ID NO: 721962 - DNA, 15 bp, Homo sapiens
aatacattgtatcac

SEQ ID NO: 721963 - DNA, 15 bp, Homo sapiens
atacattgtatcaca

SEQ ID NO: 721964 - DNA, 15 bp, Homo sapiens
tacattgtatcacag

SEQ ID NO: 721965 - DNA, 15 bp, Homo sapiens
acattgtatcacagt

SEQ ID NO: 721966 - DNA, 15 bp, Homo sapiens
cattgtatcacagtt

SEQ ID NO: 721967 - DNA, 15 bp, Homo sapiens
attgtatcacagttc

SEQ ID NO: 721968 - DNA, 15 bp, Homo sapiens
ttgtatcacagttct

SEQ ID NO: 721969 - DNA, 15 bp, Homo sapiens
tgtatcacagttctg

SEQ ID NO: 721970 - DNA, 15 bp, Homo sapiens
gtatcacagttctgg

SEQ ID NO: 721971 - DNA, 15 bp, Homo sapiens
tatcacagttctgga

SEQ ID NO: 721972 - DNA, 15 bp, Homo sapiens
atcacagttctggag

SEQ ID NO: 721973 - DNA, 15 bp, Homo sapiens
tcacagttctggagt

SEQ ID NO: 721974 - DNA, 15 bp, Homo sapiens
cacagttctggagta

SEQ ID NO: 721975 - DNA, 15 bp, Homo sapiens
acagttctggagtaa

SEQ ID NO: 721976 - DNA, 15 bp, Homo sapiens
cagttctggagtaac

SEQ ID NO: 721977 - DNA, 15 bp, Homo sapiens
agttctggagtaaca

SEQ ID NO: 721978 - DNA, 15 bp, Homo sapiens
gttctggagtaacag

SEQ ID NO: 721979 - DNA, 15 bp, Homo sapiens
ttctggagtaacagg

SEQ ID NO: 721980 - DNA, 15 bp, Homo sapiens
tctggagtaacaggg

SEQ ID NO: 721981 - DNA, 15 bp, Homo sapiens
ctggagtaacaggga

SEQ ID NO: 721982 - DNA, 15 bp, Homo sapiens
tggagtaacagggag

SEQ ID NO: 721983 - DNA, 15 bp, Homo sapiens
ggagtaacagggagg

SEQ ID NO: 721984 - DNA, 15 bp, Homo sapiens
gagtaacagggagga

SEQ ID NO: 721985 - DNA, 15 bp, Homo sapiens
agtaacagggaggaa

SEQ ID NO: 721986 - DNA, 15 bp, Homo sapiens
gtaacagggaggaaa

SEQ ID NO: 721987 - DNA, 15 bp, Homo sapiens
taacagggaggaaaa

SEQ ID NO: 721988 - DNA, 15 bp, Homo sapiens
aacagggaggaaaag

SEQ ID NO: 721989 - DNA, 15 bp, Homo sapiens
acagggaggaaaagt

SEQ ID NO: 721990 - DNA, 15 bp, Homo sapiens
cagggaggaaaagtc

SEQ ID NO: 721991 - DNA, 15 bp, Homo sapiens
agggaggaaaagtcc

SEQ ID NO: 721992 - DNA, 15 bp, Homo sapiens
gggaggaaaagtccc

SEQ ID NO: 721993 - DNA, 15 bp, Homo sapiens
ggaggaaaagtcccc

SEQ ID NO: 721994 - DNA, 15 bp, Homo sapiens
gaggaaaagtcccca

SEQ ID NO: 721995 - DNA, 15 bp, Homo sapiens
aggaaaagtccccaa

SEQ ID NO: 721996 - DNA, 15 bp, Homo sapiens
ggaaaagtccccaaa

SEQ ID NO: 721997 - DNA, 15 bp, Homo sapiens
gaaaagtccccaaat

SEQ ID NO: 721998 - DNA, 15 bp, Homo sapiens
aaaagtccccaaatt

SEQ ID NO: 721999 - DNA, 15 bp, Homo sapiens
aaagtccccaaatta

SEQ ID NO: 722000 - DNA, 15 bp, Homo sapiens
aagtccccaaattaa

SEQ ID NO: 722001 - DNA, 15 bp, Homo sapiens
agtccccaaattaaa

SEQ ID NO: 722002 - DNA, 15 bp, Homo sapiens
gtccccaaattaaac

SEQ ID NO: 722003 - DNA, 15 bp, Homo sapiens
tccccaaattaaact

SEQ ID NO: 722004 - DNA, 15 bp, Homo sapiens
ccccaaattaaactt

SEQ ID NO: 722005 - DNA, 15 bp, Homo sapiens
cccaaattaaacttt

SEQ ID NO: 722006 - DNA, 15 bp, Homo sapiens
ccaaattaaactttg

SEQ ID NO: 722007 - DNA, 15 bp, Homo sapiens
caaattaaactttgt

SEQ ID NO: 722008 - DNA, 15 bp, Homo sapiens
aaattaaactttgta

SEQ ID NO: 722009 - DNA, 15 bp, Homo sapiens
aattaaactttgtac

SEQ ID NO: 722010 - DNA, 15 bp, Homo sapiens
attaaactttgtaca

SEQ ID NO: 722011 - DNA, 15 bp, Homo sapiens
ttaaactttgtacag

SEQ ID NO: 722012 - DNA, 15 bp, Homo sapiens
taaactttgtacagt

SEQ ID NO: 722013 - DNA, 15 bp, Homo sapiens
aaactttgtacagtg

SEQ ID NO: 722014 - DNA, 15 bp, Homo sapiens
aactttgtacagtgt

SEQ ID NO: 722015 - DNA, 15 bp, Homo sapiens
actttgtacagtgtg

SEQ ID NO: 722016 - DNA, 15 bp, Homo sapiens
ctttgtacagtgtgc

SEQ ID NO: 722017 - DNA, 15 bp, Homo sapiens
tttgtacagtgtgct

SEQ ID NO: 722018 - DNA, 15 bp, Homo sapiens
ttgtacagtgtgctc

SEQ ID NO: 722019 - DNA, 15 bp, Homo sapiens
tgtacagtgtgctcc

SEQ ID NO: 722020 - DNA, 15 bp, Homo sapiens
gtacagtgtgctccc

SEQ ID NO: 722021 - DNA, 15 bp, Homo sapiens
tacagtgtgctccca

SEQ ID NO: 722022 - DNA, 15 bp, Homo sapiens
acagtgtgctcccag

SEQ ID NO: 722023 - DNA, 15 bp, Homo sapiens
cagtgtgctcccaga

SEQ ID NO: 722024 - DNA, 15 bp, Homo sapiens
agtgtgctcccagat

SEQ ID NO: 722025 - DNA, 15 bp, Homo sapiens
gtgtgctcccagatg

SEQ ID NO: 722026 - DNA, 15 bp, Homo sapiens
tgtgctcccagatgc

SEQ ID NO: 722027 - DNA, 15 bp, Homo sapiens
gtgctcccagatgct

SEQ ID NO: 722028 - DNA, 15 bp, Homo sapiens
tgctcccagatgcta

SEQ ID NO: 722029 - DNA, 15 bp, Homo sapiens
gctcccagatgctat

SEQ ID NO: 722030 - DNA, 15 bp, Homo sapiens
ctcccagatgctatt

SEQ ID NO: 722031 - DNA, 15 bp, Homo sapiens
tcccagatgctattc

SEQ ID NO: 722032 - DNA, 15 bp, Homo sapiens
cccagatgctattct

SEQ ID NO: 722033 - DNA, 15 bp, Homo sapiens
ccagatgctattctc

SEQ ID NO: 722034 - DNA, 15 bp, Homo sapiens
cagatgctattctct

SEQ ID NO: 722035 - DNA, 15 bp, Homo sapiens
agatgctattctctt

SEQ ID NO: 722036 - DNA, 15 bp, Homo sapiens
gatgctattctcttg

SEQ ID NO: 722037 - DNA, 15 bp, Homo sapiens
atgctattctcttgt

SEQ ID NO: 722038 - DNA, 15 bp, Homo sapiens
tgctattctcttgtt

SEQ ID NO: 722039 - DNA, 15 bp, Homo sapiens
gctattctcttgtta

SEQ ID NO: 722040 - DNA, 15 bp, Homo sapiens
ctattctcttgttaa

SEQ ID NO: 722041 - DNA, 15 bp, Homo sapiens
tattctcttgttaaa

SEQ ID NO: 722042 - DNA, 15 bp, Homo sapiens
attctcttgttaaaa

SEQ ID NO: 722043 - DNA, 15 bp, Homo sapiens
ttctcttgttaaaat

SEQ ID NO: 722044 - DNA, 15 bp, Homo sapiens
tctcttgttaaaata

SEQ ID NO: 722045 - DNA, 15 bp, Homo sapiens
ctcttgttaaaatat

SEQ ID NO: 722046 - DNA, 15 bp, Homo sapiens
tcttgttaaaatatt

SEQ ID NO: 722047 - DNA, 15 bp, Homo sapiens
cttgttaaaatattt

SEQ ID NO: 722048 - DNA, 15 bp, Homo sapiens
ttgttaaaatatttg

SEQ ID NO: 722049 - DNA, 15 bp, Homo sapiens
tgttaaaatatttgt

SEQ ID NO: 722050 - DNA, 15 bp, Homo sapiens
gttaaaatatttgtt

SEQ ID NO: 722051 - DNA, 15 bp, Homo sapiens
ttaaaatatttgttc

SEQ ID NO: 722052 - DNA, 15 bp, Homo sapiens
taaaatatttgttca

SEQ ID NO: 722053 - DNA, 15 bp, Homo sapiens
aaaatatttgttcat

SEQ ID NO: 722054 - DNA, 15 bp, Homo sapiens
aaatatttgttcatg

SEQ ID NO: 722055 - DNA, 15 bp, Homo sapiens
aatatttgttcatgg

SEQ ID NO: 722056 - DNA, 15 bp, Homo sapiens
atatttgttcatgga

SEQ ID NO: 722057 - DNA, 15 bp, Homo sapiens
tatttgttcatggaa

SEQ ID NO: 722058 - DNA, 15 bp, Homo sapiens
atttgttcatggaac

SEQ ID NO: 722059 - DNA, 15 bp, Homo sapiens
tttgttcatggaact

SEQ ID NO: 722060 - DNA, 15 bp, Homo sapiens
ttgttcatggaacta

SEQ ID NO: 722061 - DNA, 15 bp, Homo sapiens
tgttcatggaactat

SEQ ID NO: 722062 - DNA, 15 bp, Homo sapiens
gttcatggaactatt

SEQ ID NO: 722063 - DNA, 15 bp, Homo sapiens
ttcatggaactatta

SEQ ID NO: 722064 - DNA, 15 bp, Homo sapiens
tcatggaactattaa

SEQ ID NO: 722065 - DNA, 15 bp, Homo sapiens
catggaactattaat

SEQ ID NO: 722066 - DNA, 15 bp, Homo sapiens
atggaactattaatc

SEQ ID NO: 722067 - DNA, 15 bp, Homo sapiens
tggaactattaatcc

SEQ ID NO: 722068 - DNA, 15 bp, Homo sapiens
ggaactattaatcca

SEQ ID NO: 722069 - DNA, 15 bp, Homo sapiens
gaactattaatccaa

SEQ ID NO: 722070 - DNA, 15 bp, Homo sapiens
aactattaatccaaa

SEQ ID NO: 722071 - DNA, 15 bp, Homo sapiens
actattaatccaaag

SEQ ID NO: 722072 - DNA, 15 bp, Homo sapiens
ctattaatccaaagt

SEQ ID NO: 722073 - DNA, 15 bp, Homo sapiens
tattaatccaaagtg

SEQ ID NO: 722074 - DNA, 15 bp, Homo sapiens
attaatccaaagtgc

SEQ ID NO: 722075 - DNA, 15 bp, Homo sapiens
ttaatccaaagtgcc

SEQ ID NO: 722076 - DNA, 15 bp, Homo sapiens
taatccaaagtgcct

SEQ ID NO: 722077 - DNA, 15 bp, Homo sapiens
aatccaaagtgcctg

SEQ ID NO: 722078 - DNA, 15 bp, Homo sapiens
atccaaagtgcctgc

SEQ ID NO: 722079 - DNA, 15 bp, Homo sapiens
tccaaagtgcctgct

SEQ ID NO: 722080 - DNA, 15 bp, Homo sapiens
ccaaagtgcctgcta

SEQ ID NO: 722081 - DNA, 15 bp, Homo sapiens
caaagtgcctgctat

SEQ ID NO: 722082 - DNA, 15 bp, Homo sapiens
aaagtgcctgctatt

SEQ ID NO: 722083 - DNA, 15 bp, Homo sapiens
aagtgcctgctattt

SEQ ID NO: 722084 - DNA, 15 bp, Homo sapiens
agtgcctgctatttc

SEQ ID NO: 722085 - DNA, 15 bp, Homo sapiens
gtgcctgctatttca

SEQ ID NO: 722086 - DNA, 15 bp, Homo sapiens
tgcctgctatttcac

SEQ ID NO: 722087 - DNA, 15 bp, Homo sapiens
gcctgctatttcaca

SEQ ID NO: 722088 - DNA, 15 bp, Homo sapiens
cctgctatttcacaa

SEQ ID NO: 722089 - DNA, 15 bp, Homo sapiens
ctgctatttcacaaa

SEQ ID NO: 722090 - DNA, 15 bp, Homo sapiens
tgctatttcacaaat

SEQ ID NO: 722091 - DNA, 15 bp, Homo sapiens
gctatttcacaaatc

SEQ ID NO: 722092 - DNA, 15 bp, Homo sapiens
ctatttcacaaatca

SEQ ID NO: 722093 - DNA, 15 bp, Homo sapiens
tatttcacaaatcag

SEQ ID NO: 722094 - DNA, 15 bp, Homo sapiens
atttcacaaatcagc

SEQ ID NO: 722095 - DNA, 15 bp, Homo sapiens
tttcacaaatcagct

SEQ ID NO: 722096 - DNA, 15 bp, Homo sapiens
ttcacaaatcagctt

SEQ ID NO: 722097 - DNA, 15 bp, Homo sapiens
tcacaaatcagcttc

SEQ ID NO: 722098 - DNA, 15 bp, Homo sapiens
cacaaatcagcttca

SEQ ID NO: 722099 - DNA, 15 bp, Homo sapiens
acaaatcagcttcat

SEQ ID NO: 722100 - DNA, 15 bp, Homo sapiens
caaatcagcttcata

SEQ ID NO: 722101 - DNA, 15 bp, Homo sapiens
aaatcagcttcataa

SEQ ID NO: 722102 - DNA, 15 bp, Homo sapiens
aatcagcttcataat

SEQ ID NO: 722103 - DNA, 15 bp, Homo sapiens
atcagcttcataata

SEQ ID NO: 722104 - DNA, 15 bp, Homo sapiens
tcagcttcataatat

SEQ ID NO: 722105 - DNA, 15 bp, Homo sapiens
cagcttcataatata

SEQ ID NO: 722106 - DNA, 15 bp, Homo sapiens
agcttcataatatac

SEQ ID NO: 722107 - DNA, 15 bp, Homo sapiens
gcttcataatataca

SEQ ID NO: 722108 - DNA, 15 bp, Homo sapiens
cttcataatatacaa

SEQ ID NO: 722109 - DNA, 15 bp, Homo sapiens
ttcataatatacaaa

SEQ ID NO: 722110 - DNA, 15 bp, Homo sapiens
tcataatatacaaag

SEQ ID NO: 722111 - DNA, 15 bp, Homo sapiens
cataatatacaaagg

SEQ ID NO: 722112 - DNA, 15 bp, Homo sapiens
ataatatacaaaggt

SEQ ID NO: 722113 - DNA, 15 bp, Homo sapiens
taatatacaaaggtt

SEQ ID NO: 722114 - DNA, 15 bp, Homo sapiens
aatatacaaaggtta

SEQ ID NO: 722115 - DNA, 15 bp, Homo sapiens
atatacaaaggttac

SEQ ID NO: 722116 - DNA, 15 bp, Homo sapiens
tatacaaaggttact

SEQ ID NO: 722117 - DNA, 15 bp, Homo sapiens
atacaaaggttacta

SEQ ID NO: 722118 - DNA, 15 bp, Homo sapiens
tacaaaggttactac

SEQ ID NO: 722119 - DNA, 15 bp, Homo sapiens
acaaaggttactact

SEQ ID NO: 722120 - DNA, 15 bp, Homo sapiens
caaaggttactacta

SEQ ID NO: 722121 - DNA, 15 bp, Homo sapiens
aaaggttactactat

SEQ ID NO: 722122 - DNA, 15 bp, Homo sapiens
aaggttactactatt

SEQ ID NO: 722123 - DNA, 15 bp, Homo sapiens
aggttactactattg

SEQ ID NO: 722124 - DNA, 15 bp, Homo sapiens
ggttactactattga

SEQ ID NO: 722125 - DNA, 15 bp, Homo sapiens
gttactactattgag

SEQ ID NO: 722126 - DNA, 15 bp, Homo sapiens
ttactactattgaga

SEQ ID NO: 722127 - DNA, 15 bp, Homo sapiens
tactactattgagaa

SEQ ID NO: 722128 - DNA, 15 bp, Homo sapiens
actactattgagaaa

SEQ ID NO: 722129 - DNA, 15 bp, Homo sapiens
ctactattgagaaag

SEQ ID NO: 722130 - DNA, 15 bp, Homo sapiens
tactattgagaaaga

SEQ ID NO: 722131 - DNA, 15 bp, Homo sapiens
actattgagaaagag

SEQ ID NO: 722132 - DNA, 15 bp, Homo sapiens
ctattgagaaagagc

SEQ ID NO: 722133 - DNA, 15 bp, Homo sapiens
tattgagaaagagca

SEQ ID NO: 722134 - DNA, 15 bp, Homo sapiens
attgagaaagagcat

SEQ ID NO: 722135 - DNA, 15 bp, Homo sapiens
ttgagaaagagcatc

SEQ ID NO: 722136 - DNA, 15 bp, Homo sapiens
tgagaaagagcatct

SEQ ID NO: 722137 - DNA, 15 bp, Homo sapiens
gagaaagagcatctg

SEQ ID NO: 722138 - DNA, 15 bp, Homo sapiens
agaaagagcatctga

SEQ ID NO: 722139 - DNA, 15 bp, Homo sapiens
gaaagagcatctgac

SEQ ID NO: 722140 - DNA, 15 bp, Homo sapiens
aaagagcatctgaca

SEQ ID NO: 722141 - DNA, 15 bp, Homo sapiens
aagagcatctgacat

SEQ ID NO: 722142 - DNA, 15 bp, Homo sapiens
agagcatctgacatg

SEQ ID NO: 722143 - DNA, 15 bp, Homo sapiens
gagcatctgacatgc

SEQ ID NO: 722144 - DNA, 15 bp, Homo sapiens
agcatctgacatgct

SEQ ID NO: 722145 - DNA, 15 bp, Homo sapiens
gcatctgacatgctt

SEQ ID NO: 722146 - DNA, 15 bp, Homo sapiens
catctgacatgcttt

SEQ ID NO: 722147 - DNA, 15 bp, Homo sapiens
atctgacatgctttt

SEQ ID NO: 722148 - DNA, 15 bp, Homo sapiens
tctgacatgcttttg

SEQ ID NO: 722149 - DNA, 15 bp, Homo sapiens
ctgacatgcttttga

SEQ ID NO: 722150 - DNA, 15 bp, Homo sapiens
tgacatgcttttgat

SEQ ID NO: 722151 - DNA, 15 bp, Homo sapiens
gacatgcttttgatt

SEQ ID NO: 722152 - DNA, 15 bp, Homo sapiens
acatgcttttgattt

SEQ ID NO: 722153 - DNA, 15 bp, Homo sapiens
catgcttttgatttg

SEQ ID NO: 722154 - DNA, 15 bp, Homo sapiens
atgcttttgatttga

SEQ ID NO: 722155 - DNA, 15 bp, Homo sapiens
tgcttttgatttgaa

SEQ ID NO: 722156 - DNA, 15 bp, Homo sapiens
gcttttgatttgaat

SEQ ID NO: 722157 - DNA, 15 bp, Homo sapiens
cttttgatttgaata

SEQ ID NO: 722158 - DNA, 15 bp, Homo sapiens
ttttgatttgaataa

SEQ ID NO: 722159 - DNA, 15 bp, Homo sapiens
tttgatttgaataat

SEQ ID NO: 722160 - DNA, 15 bp, Homo sapiens
ttgatttgaataatt

SEQ ID NO: 722161 - DNA, 15 bp, Homo sapiens
tgatttgaataatta

SEQ ID NO: 722162 - DNA, 15 bp, Homo sapiens
gatttgaataattac

SEQ ID NO: 722163 - DNA, 15 bp, Homo sapiens
atttgaataattact

SEQ ID NO: 722164 - DNA, 15 bp, Homo sapiens
tttgaataattacta

SEQ ID NO: 722165 - DNA, 15 bp, Homo sapiens
ttgaataattactac

SEQ ID NO: 722166 - DNA, 15 bp, Homo sapiens
tgaataattactacc

SEQ ID NO: 722167 - DNA, 15 bp, Homo sapiens
gaataattactacct

SEQ ID NO: 722168 - DNA, 15 bp, Homo sapiens
aataattactacctc

SEQ ID NO: 722169 - DNA, 15 bp, Homo sapiens
ataattactacctca

SEQ ID NO: 722170 - DNA, 15 bp, Homo sapiens
taattactacctcaa

SEQ ID NO: 722171 - DNA, 15 bp, Homo sapiens
aattactacctcaag

SEQ ID NO: 722172 - DNA, 15 bp, Homo sapiens
attactacctcaaga

SEQ ID NO: 722173 - DNA, 15 bp, Homo sapiens
ttactacctcaagaa

SEQ ID NO: 722174 - DNA, 15 bp, Homo sapiens
tactacctcaagaag

SEQ ID NO: 722175 - DNA, 15 bp, Homo sapiens
actacctcaagaagt

SEQ ID NO: 722176 - DNA, 15 bp, Homo sapiens
ctacctcaagaagtg

SEQ ID NO: 722177 - DNA, 15 bp, Homo sapiens
tacctcaagaagtgg

SEQ ID NO: 722178 - DNA, 15 bp, Homo sapiens
acctcaagaagtgga

SEQ ID NO: 722179 - DNA, 15 bp, Homo sapiens
cctcaagaagtggat

SEQ ID NO: 722180 - DNA, 15 bp, Homo sapiens
ctcaagaagtggatg

SEQ ID NO: 722181 - DNA, 15 bp, Homo sapiens
tcaagaagtggatga

SEQ ID NO: 722182 - DNA, 15 bp, Homo sapiens
caagaagtggatgaa

SEQ ID NO: 722183 - DNA, 15 bp, Homo sapiens
aagaagtggatgaac

SEQ ID NO: 722184 - DNA, 15 bp, Homo sapiens
agaagtggatgaaca

SEQ ID NO: 722185 - DNA, 15 bp, Homo sapiens
gaagtggatgaacag

SEQ ID NO: 722186 - DNA, 15 bp, Homo sapiens
aagtggatgaacagg

SEQ ID NO: 722187 - DNA, 15 bp, Homo sapiens
agtggatgaacaggg

SEQ ID NO: 722188 - DNA, 15 bp, Homo sapiens
gtggatgaacaggga

SEQ ID NO: 722189 - DNA, 15 bp, Homo sapiens
tggatgaacagggaa

SEQ ID NO: 722190 - DNA, 15 bp, Homo sapiens
ggatgaacagggaaa

SEQ ID NO: 722191 - DNA, 15 bp, Homo sapiens
gatgaacagggaaaa

SEQ ID NO: 722192 - DNA, 15 bp, Homo sapiens
atgaacagggaaaat

SEQ ID NO: 722193 - DNA, 15 bp, Homo sapiens
tgaacagggaaaatg

SEQ ID NO: 722194 - DNA, 15 bp, Homo sapiens
gaacagggaaaatgg

SEQ ID NO: 722195 - DNA, 15 bp, Homo sapiens
aacagggaaaatggt

SEQ ID NO: 722196 - DNA, 15 bp, Homo sapiens
acagggaaaatggta

SEQ ID NO: 722197 - DNA, 15 bp, Homo sapiens
cagggaaaatggtat

SEQ ID NO: 722198 - DNA, 15 bp, Homo sapiens
agggaaaatggtata

SEQ ID NO: 722199 - DNA, 15 bp, Homo sapiens
gggaaaatggtataa

SEQ ID NO: 722200 - DNA, 15 bp, Homo sapiens
ggaaaatggtataat

SEQ ID NO: 722201 - DNA, 15 bp, Homo sapiens
gaaaatggtataata

SEQ ID NO: 722202 - DNA, 15 bp, Homo sapiens
aaaatggtataatat

SEQ ID NO: 722203 - DNA, 15 bp, Homo sapiens
aaatggtataatatc

SEQ ID NO: 722204 - DNA, 15 bp, Homo sapiens
aatggtataatatca

SEQ ID NO: 722205 - DNA, 15 bp, Homo sapiens
atggtataatatcag

SEQ ID NO: 722206 - DNA, 15 bp, Homo sapiens
tggtataatatcagg

SEQ ID NO: 722207 - DNA, 15 bp, Homo sapiens
ggtataatatcaggt

SEQ ID NO: 722208 - DNA, 15 bp, Homo sapiens
gtataatatcaggta

SEQ ID NO: 722209 - DNA, 15 bp, Homo sapiens
tataatatcaggtat

SEQ ID NO: 722210 - DNA, 15 bp, Homo sapiens
ataatatcaggtatg

SEQ ID NO: 722211 - DNA, 15 bp, Homo sapiens
taatatcaggtatgt

SEQ ID NO: 722212 - DNA, 15 bp, Homo sapiens
aatatcaggtatgtg

SEQ ID NO: 722213 - DNA, 15 bp, Homo sapiens
atatcaggtatgtgg

SEQ ID NO: 722214 - DNA, 15 bp, Homo sapiens
tatcaggtatgtgga

SEQ ID NO: 722215 - DNA, 15 bp, Homo sapiens
atcaggtatgtggaa

SEQ ID NO: 722216 - DNA, 15 bp, Homo sapiens
tcaggtatgtggaaa

SEQ ID NO: 722217 - DNA, 15 bp, Homo sapiens
caggtatgtggaaac

SEQ ID NO: 722218 - DNA, 15 bp, Homo sapiens
aggtatgtggaaaca

SEQ ID NO: 722219 - DNA, 15 bp, Homo sapiens
ggtatgtggaaacac

SEQ ID NO: 722220 - DNA, 15 bp, Homo sapiens
gtatgtggaaacact

SEQ ID NO: 722221 - DNA, 15 bp, Homo sapiens
tatgtggaaacactc

SEQ ID NO: 722222 - DNA, 15 bp, Homo sapiens
atgtggaaacactct

SEQ ID NO: 722223 - DNA, 15 bp, Homo sapiens
tgtggaaacactctc

SEQ ID NO: 722224 - DNA, 15 bp, Homo sapiens
gtggaaacactctca

SEQ ID NO: 722225 - DNA, 15 bp, Homo sapiens
tggaaacactctcat

SEQ ID NO: 722226 - DNA, 15 bp, Homo sapiens
ggaaacactctcatg

SEQ ID NO: 722227 - DNA, 15 bp, Homo sapiens
gaaacactctcatgg

SEQ ID NO: 722228 - DNA, 15 bp, Homo sapiens
aaacactctcatggg

SEQ ID NO: 722229 - DNA, 15 bp, Homo sapiens
aacactctcatgggg

SEQ ID NO: 722230 - DNA, 15 bp, Homo sapiens
acactctcatgggga

SEQ ID NO: 722231 - DNA, 15 bp, Homo sapiens
cactctcatggggaa

SEQ ID NO: 722232 - DNA, 15 bp, Homo sapiens
actctcatggggaag

SEQ ID NO: 722233 - DNA, 15 bp, Homo sapiens
ctctcatggggaaga

SEQ ID NO: 722234 - DNA, 15 bp, Homo sapiens
tctcatggggaagaa

SEQ ID NO: 722235 - DNA, 15 bp, Homo sapiens
ctcatggggaagaat

SEQ ID NO: 722236 - DNA, 15 bp, Homo sapiens
tcatggggaagaatg

SEQ ID NO: 722237 - DNA, 15 bp, Homo sapiens
catggggaagaatgc

SEQ ID NO: 722238 - DNA, 15 bp, Homo sapiens
atggggaagaatgct

SEQ ID NO: 722239 - DNA, 15 bp, Homo sapiens
tggggaagaatgcta

SEQ ID NO: 722240 - DNA, 15 bp, Homo sapiens
ggggaagaatgctac

SEQ ID NO: 722241 - DNA, 15 bp, Homo sapiens
gggaagaatgctact

SEQ ID NO: 722242 - DNA, 15 bp, Homo sapiens
ggaagaatgctacta

SEQ ID NO: 722243 - DNA, 15 bp, Homo sapiens
gaagaatgctactac

SEQ ID NO: 722244 - DNA, 15 bp, Homo sapiens
aagaatgctactact

SEQ ID NO: 722245 - DNA, 15 bp, Homo sapiens
agaatgctactactt

SEQ ID NO: 722246 - DNA, 15 bp, Homo sapiens
gaatgctactacttt

SEQ ID NO: 722247 - DNA, 15 bp, Homo sapiens
aatgctactactttg

SEQ ID NO: 722248 - DNA, 15 bp, Homo sapiens
atgctactactttga

SEQ ID NO: 722249 - DNA, 15 bp, Homo sapiens
tgctactactttgag

SEQ ID NO: 722250 - DNA, 15 bp, Homo sapiens
gctactactttgaga

SEQ ID NO: 722251 - DNA, 15 bp, Homo sapiens
ctactactttgagac

SEQ ID NO: 722252 - DNA, 15 bp, Homo sapiens
tactactttgagaca

SEQ ID NO: 722253 - DNA, 15 bp, Homo sapiens
actactttgagacaa

SEQ ID NO: 722254 - DNA, 15 bp, Homo sapiens
ctactttgagacaaa

SEQ ID NO: 722255 - DNA, 15 bp, Homo sapiens
tactttgagacaaag

SEQ ID NO: 722256 - DNA, 15 bp, Homo sapiens
actttgagacaaagt

SEQ ID NO: 722257 - DNA, 15 bp, Homo sapiens
ctttgagacaaagta

SEQ ID NO: 722258 - DNA, 15 bp, Homo sapiens
tttgagacaaagtac

SEQ ID NO: 722259 - DNA, 15 bp, Homo sapiens
ttgagacaaagtacc

SEQ ID NO: 722260 - DNA, 15 bp, Homo sapiens
tgagacaaagtacct

SEQ ID NO: 722261 - DNA, 15 bp, Homo sapiens
gagacaaagtacctt

SEQ ID NO: 722262 - DNA, 15 bp, Homo sapiens
agacaaagtacctta

SEQ ID NO: 722263 - DNA, 15 bp, Homo sapiens
gacaaagtaccttag

SEQ ID NO: 722264 - DNA, 15 bp, Homo sapiens
acaaagtaccttagg

SEQ ID NO: 722265 - DNA, 15 bp, Homo sapiens
caaagtaccttaggt

SEQ ID NO: 722266 - DNA, 15 bp, Homo sapiens
aaagtaccttaggtg

SEQ ID NO: 722267 - DNA, 15 bp, Homo sapiens
aagtaccttaggtga

SEQ ID NO: 722268 - DNA, 15 bp, Homo sapiens
agtaccttaggtgag

SEQ ID NO: 722269 - DNA, 15 bp, Homo sapiens
gtaccttaggtgaga

SEQ ID NO: 722270 - DNA, 15 bp, Homo sapiens
taccttaggtgagaa

SEQ ID NO: 722271 - DNA, 15 bp, Homo sapiens
accttaggtgagaat

SEQ ID NO: 722272 - DNA, 15 bp, Homo sapiens
ccttaggtgagaata

SEQ ID NO: 722273 - DNA, 15 bp, Homo sapiens
cttaggtgagaatat

SEQ ID NO: 722274 - DNA, 15 bp, Homo sapiens
ttaggtgagaatatt

SEQ ID NO: 722275 - DNA, 15 bp, Homo sapiens
taggtgagaatattg

SEQ ID NO: 722276 - DNA, 15 bp, Homo sapiens
aggtgagaatattgt

SEQ ID NO: 722277 - DNA, 15 bp, Homo sapiens
ggtgagaatattgtt

SEQ ID NO: 722278 - DNA, 15 bp, Homo sapiens
gtgagaatattgttt

SEQ ID NO: 722279 - DNA, 15 bp, Homo sapiens
tgagaatattgtttt

SEQ ID NO: 722280 - DNA, 15 bp, Homo sapiens
gagaatattgtttta

SEQ ID NO: 722281 - DNA, 15 bp, Homo sapiens
agaatattgttttag

SEQ ID NO: 722282 - DNA, 15 bp, Homo sapiens
gaatattgttttagt

SEQ ID NO: 722283 - DNA, 15 bp, Homo sapiens
aatattgttttagtg

SEQ ID NO: 722284 - DNA, 15 bp, Homo sapiens
atattgttttagtgc

SEQ ID NO: 722285 - DNA, 15 bp, Homo sapiens
tattgttttagtgct

SEQ ID NO: 722286 - DNA, 15 bp, Homo sapiens
attgttttagtgctt

SEQ ID NO: 722287 - DNA, 15 bp, Homo sapiens
ttgttttagtgcttc

SEQ ID NO: 722288 - DNA, 15 bp, Homo sapiens
tgttttagtgcttct

SEQ ID NO: 722289 - DNA, 15 bp, Homo sapiens
gttttagtgcttcta

SEQ ID NO: 722290 - DNA, 15 bp, Homo sapiens
ttttagtgcttctat

SEQ ID NO: 722291 - DNA, 15 bp, Homo sapiens
tttagtgcttctatc

SEQ ID NO: 722292 - DNA, 15 bp, Homo sapiens
ttagtgcttctatct

SEQ ID NO: 722293 - DNA, 15 bp, Homo sapiens
tagtgcttctatcta

SEQ ID NO: 722294 - DNA, 15 bp, Homo sapiens
agtgcttctatctat

SEQ ID NO: 722295 - DNA, 15 bp, Homo sapiens
gtgcttctatctata

SEQ ID NO: 722296 - DNA, 15 bp, Homo sapiens
tgcttctatctatag

SEQ ID NO: 722297 - DNA, 15 bp, Homo sapiens
gcttctatctataga

SEQ ID NO: 722298 - DNA, 15 bp, Homo sapiens
cttctatctatagaa

SEQ ID NO: 722299 - DNA, 15 bp, Homo sapiens
ttctatctatagaag

SEQ ID NO: 722300 - DNA, 15 bp, Homo sapiens
tctatctatagaaga

SEQ ID NO: 722301 - DNA, 15 bp, Homo sapiens
ctatctatagaagag

SEQ ID NO: 722302 - DNA, 15 bp, Homo sapiens
tatctatagaagagt

SEQ ID NO: 722303 - DNA, 15 bp, Homo sapiens
atctatagaagagtt

SEQ ID NO: 722304 - DNA, 15 bp, Homo sapiens
tctatagaagagttc

SEQ ID NO: 722305 - DNA, 15 bp, Homo sapiens
ctatagaagagttct

SEQ ID NO: 722306 - DNA, 15 bp, Homo sapiens
tatagaagagttcta

SEQ ID NO: 722307 - DNA, 15 bp, Homo sapiens
atagaagagttctat

SEQ ID NO: 722308 - DNA, 15 bp, Homo sapiens
tagaagagttctatg

SEQ ID NO: 722309 - DNA, 15 bp, Homo sapiens
agaagagttctatgg

SEQ ID NO: 722310 - DNA, 15 bp, Homo sapiens
gaagagttctatggt

SEQ ID NO: 722311 - DNA, 15 bp, Homo sapiens
aagagttctatggtt

SEQ ID NO: 722312 - DNA, 15 bp, Homo sapiens
agagttctatggttc

SEQ ID NO: 722313 - DNA, 15 bp, Homo sapiens
gagttctatggttcg

SEQ ID NO: 722314 - DNA, 15 bp, Homo sapiens
agttctatggttcgc

SEQ ID NO: 722315 - DNA, 15 bp, Homo sapiens
gttctatggttcgcc

SEQ ID NO: 722316 - DNA, 15 bp, Homo sapiens
ttctatggttcgcca

SEQ ID NO: 722317 - DNA, 15 bp, Homo sapiens
tctatggttcgccaa

SEQ ID NO: 722318 - DNA, 15 bp, Homo sapiens
ctatggttcgccaat

SEQ ID NO: 722319 - DNA, 15 bp, Homo sapiens
tatggttcgccaata

SEQ ID NO: 722320 - DNA, 15 bp, Homo sapiens
atggttcgccaatag

SEQ ID NO: 722321 - DNA, 15 bp, Homo sapiens
tggttcgccaatagt

SEQ ID NO: 722322 - DNA, 15 bp, Homo sapiens
ggttcgccaatagtt

SEQ ID NO: 722323 - DNA, 15 bp, Homo sapiens
gttcgccaatagttt

SEQ ID NO: 722324 - DNA, 15 bp, Homo sapiens
ttcgccaatagtttt

SEQ ID NO: 722325 - DNA, 15 bp, Homo sapiens
tcgccaatagttttt

SEQ ID NO: 722326 - DNA, 15 bp, Homo sapiens
cgccaatagtttttt

SEQ ID NO: 722327 - DNA, 15 bp, Homo sapiens
gccaatagtttttta

SEQ ID NO: 722328 - DNA, 15 bp, Homo sapiens
ccaatagttttttaa

SEQ ID NO: 722329 - DNA, 15 bp, Homo sapiens
caatagttttttaag

SEQ ID NO: 722330 - DNA, 15 bp, Homo sapiens
aatagttttttaagt

SEQ ID NO: 722331 - DNA, 15 bp, Homo sapiens
atagttttttaagtt

SEQ ID NO: 722332 - DNA, 15 bp, Homo sapiens
tagttttttaagtta

SEQ ID NO: 722333 - DNA, 15 bp, Homo sapiens
agttttttaagttaa

SEQ ID NO: 722334 - DNA, 15 bp, Homo sapiens
gttttttaagttaat

SEQ ID NO: 722335 - DNA, 15 bp, Homo sapiens
ttttttaagttaatc

SEQ ID NO: 722336 - DNA, 15 bp, Homo sapiens
tttttaagttaatct

SEQ ID NO: 722337 - DNA, 15 bp, Homo sapiens
ttttaagttaatcta

SEQ ID NO: 722338 - DNA, 15 bp, Homo sapiens
tttaagttaatctac

SEQ ID NO: 722339 - DNA, 15 bp, Homo sapiens
ttaagttaatctact

SEQ ID NO: 722340 - DNA, 15 bp, Homo sapiens
taagttaatctactg

SEQ ID NO: 722341 - DNA, 15 bp, Homo sapiens
aagttaatctactga

SEQ ID NO: 722342 - DNA, 15 bp, Homo sapiens
agttaatctactgaa

SEQ ID NO: 722343 - DNA, 15 bp, Homo sapiens
gttaatctactgaaa

SEQ ID NO: 722344 - DNA, 15 bp, Homo sapiens
ttaatctactgaaaa

SEQ ID NO: 722345 - DNA, 15 bp, Homo sapiens
taatctactgaaaag

SEQ ID NO: 722346 - DNA, 15 bp, Homo sapiens
aatctactgaaaagt

SEQ ID NO: 722347 - DNA, 15 bp, Homo sapiens
atctactgaaaagta

SEQ ID NO: 722348 - DNA, 15 bp, Homo sapiens
tctactgaaaagtac

SEQ ID NO: 722349 - DNA, 15 bp, Homo sapiens
ctactgaaaagtaca

SEQ ID NO: 722350 - DNA, 15 bp, Homo sapiens
tactgaaaagtacaa

SEQ ID NO: 722351 - DNA, 15 bp, Homo sapiens
actgaaaagtacaag

SEQ ID NO: 722352 - DNA, 15 bp, Homo sapiens
ctgaaaagtacaagt

SEQ ID NO: 722353 - DNA, 15 bp, Homo sapiens
tgaaaagtacaagtc

SEQ ID NO: 722354 - DNA, 15 bp, Homo sapiens
gaaaagtacaagtcc

SEQ ID NO: 722355 - DNA, 15 bp, Homo sapiens
aaaagtacaagtcca

SEQ ID NO: 722356 - DNA, 15 bp, Homo sapiens
aaagtacaagtccac

SEQ ID NO: 722357 - DNA, 15 bp, Homo sapiens
aagtacaagtccaca

SEQ ID NO: 722358 - DNA, 15 bp, Homo sapiens
agtacaagtccacaa

SEQ ID NO: 722359 - DNA, 15 bp, Homo sapiens
gtacaagtccacaat

SEQ ID NO: 722360 - DNA, 15 bp, Homo sapiens
tacaagtccacaatc

SEQ ID NO: 722361 - DNA, 15 bp, Homo sapiens
acaagtccacaatcc

SEQ ID NO: 722362 - DNA, 15 bp, Homo sapiens
caagtccacaatccc

SEQ ID NO: 722363 - DNA, 15 bp, Homo sapiens
aagtccacaatccct

SEQ ID NO: 722364 - DNA, 15 bp, Homo sapiens
agtccacaatccctt

SEQ ID NO: 722365 - DNA, 15 bp, Homo sapiens
gtccacaatccctta

SEQ ID NO: 722366 - DNA, 15 bp, Homo sapiens
tccacaatcccttat

SEQ ID NO: 722367 - DNA, 15 bp, Homo sapiens
ccacaatcccttatc

SEQ ID NO: 722368 - DNA, 15 bp, Homo sapiens
cacaatcccttatcc

SEQ ID NO: 722369 - DNA, 15 bp, Homo sapiens
acaatcccttatcca

SEQ ID NO: 722370 - DNA, 15 bp, Homo sapiens
caatcccttatccaa

SEQ ID NO: 722371 - DNA, 15 bp, Homo sapiens
aatcccttatccaac

SEQ ID NO: 722372 - DNA, 15 bp, Homo sapiens
atcccttatccaacc

SEQ ID NO: 722373 - DNA, 15 bp, Homo sapiens
tcccttatccaaccc

SEQ ID NO: 722374 - DNA, 15 bp, Homo sapiens
cccttatccaacccc

SEQ ID NO: 722375 - DNA, 15 bp, Homo sapiens
ccttatccaacccct

SEQ ID NO: 722376 - DNA, 15 bp, Homo sapiens
cttatccaacccctt

SEQ ID NO: 722377 - DNA, 15 bp, Homo sapiens
ttatccaaccccttg

SEQ ID NO: 722378 - DNA, 15 bp, Homo sapiens
tatccaaccccttgg

SEQ ID NO: 722379 - DNA, 15 bp, Homo sapiens
atccaaccccttggg

SEQ ID NO: 722380 - DNA, 15 bp, Homo sapiens
tccaaccccttgggc

SEQ ID NO: 722381 - DNA, 15 bp, Homo sapiens
ccaaccccttgggct

SEQ ID NO: 722382 - DNA, 15 bp, Homo sapiens
caaccccttgggctt

SEQ ID NO: 722383 - DNA, 15 bp, Homo sapiens
aaccccttgggctta

SEQ ID NO: 722384 - DNA, 15 bp, Homo sapiens
accccttgggcttat

SEQ ID NO: 722385 - DNA, 15 bp, Homo sapiens
ccccttgggcttatt

SEQ ID NO: 722386 - DNA, 15 bp, Homo sapiens
cccttgggcttattt

SEQ ID NO: 722387 - DNA, 15 bp, Homo sapiens
ccttgggcttatttg

SEQ ID NO: 722388 - DNA, 15 bp, Homo sapiens
cttgggcttatttgc

SEQ ID NO: 722389 - DNA, 15 bp, Homo sapiens
ttgggcttatttgca

SEQ ID NO: 722390 - DNA, 15 bp, Homo sapiens
tgggcttatttgcat

SEQ ID NO: 722391 - DNA, 15 bp, Homo sapiens
gggcttatttgcatt

SEQ ID NO: 722392 - DNA, 15 bp, Homo sapiens
ggcttatttgcattt

SEQ ID NO: 722393 - DNA, 15 bp, Homo sapiens
gcttatttgcatttt

SEQ ID NO: 722394 - DNA, 15 bp, Homo sapiens
cttatttgcattttg

SEQ ID NO: 722395 - DNA, 15 bp, Homo sapiens
ttatttgcattttgg

SEQ ID NO: 722396 - DNA, 15 bp, Homo sapiens
tatttgcattttgga

SEQ ID NO: 722397 - DNA, 15 bp, Homo sapiens
atttgcattttggaa

SEQ ID NO: 722398 - DNA, 15 bp, Homo sapiens
tttgcattttggaat

SEQ ID NO: 722399 - DNA, 15 bp, Homo sapiens
ttgcattttggaatt

SEQ ID NO: 722400 - DNA, 15 bp, Homo sapiens
tgcattttggaattg

SEQ ID NO: 722401 - DNA, 15 bp, Homo sapiens
gcattttggaattgt

SEQ ID NO: 722402 - DNA, 15 bp, Homo sapiens
cattttggaattgtg

SEQ ID NO: 722403 - DNA, 15 bp, Homo sapiens
attttggaattgtga

SEQ ID NO: 722404 - DNA, 15 bp, Homo sapiens
ttttggaattgtgaa

SEQ ID NO: 722405 - DNA, 15 bp, Homo sapiens
tttggaattgtgaat

SEQ ID NO: 722406 - DNA, 15 bp, Homo sapiens
ttggaattgtgaatt

SEQ ID NO: 722407 - DNA, 15 bp, Homo sapiens
tggaattgtgaattc

SEQ ID NO: 722408 - DNA, 15 bp, Homo sapiens
ggaattgtgaattct

SEQ ID NO: 722409 - DNA, 15 bp, Homo sapiens
gaattgtgaattctg

SEQ ID NO: 722410 - DNA, 15 bp, Homo sapiens
aattgtgaattctga

SEQ ID NO: 722411 - DNA, 15 bp, Homo sapiens
attgtgaattctgaa

SEQ ID NO: 722412 - DNA, 15 bp, Homo sapiens
ttgtgaattctgaag

SEQ ID NO: 722413 - DNA, 15 bp, Homo sapiens
tgtgaattctgaaga

SEQ ID NO: 722414 - DNA, 15 bp, Homo sapiens
gtgaattctgaagaa

SEQ ID NO: 722415 - DNA, 15 bp, Homo sapiens
tgaattctgaagaat

SEQ ID NO: 722416 - DNA, 15 bp, Homo sapiens
gaattctgaagaatt

SEQ ID NO: 722417 - DNA, 15 bp, Homo sapiens
aattctgaagaattt

SEQ ID NO: 722418 - DNA, 15 bp, Homo sapiens
attctgaagaatttt

SEQ ID NO: 722419 - DNA, 15 bp, Homo sapiens
ttctgaagaattttt

SEQ ID NO: 722420 - DNA, 15 bp, Homo sapiens
tctgaagaatttttt

SEQ ID NO: 722421 - DNA, 15 bp, Homo sapiens
ctgaagaatttttta

SEQ ID NO: 722422 - DNA, 15 bp, Homo sapiens
tgaagaattttttaa

SEQ ID NO: 722423 - DNA, 15 bp, Homo sapiens
gaagaattttttaaa

SEQ ID NO: 722424 - DNA, 15 bp, Homo sapiens
aagaattttttaaag

SEQ ID NO: 722425 - DNA, 15 bp, Homo sapiens
agaattttttaaagc

SEQ ID NO: 722426 - DNA, 15 bp, Homo sapiens
gaattttttaaagca

SEQ ID NO: 722427 - DNA, 15 bp, Homo sapiens
aattttttaaagcac

SEQ ID NO: 722428 - DNA, 15 bp, Homo sapiens
attttttaaagcacc

SEQ ID NO: 722429 - DNA, 15 bp, Homo sapiens
ttttttaaagcaccc

SEQ ID NO: 722430 - DNA, 15 bp, Homo sapiens
tttttaaagcaccca

SEQ ID NO: 722431 - DNA, 15 bp, Homo sapiens
ttttaaagcacccaa

SEQ ID NO: 722432 - DNA, 15 bp, Homo sapiens
tttaaagcacccaat

SEQ ID NO: 722433 - DNA, 15 bp, Homo sapiens
ttaaagcacccaata

SEQ ID NO: 722434 - DNA, 15 bp, Homo sapiens
taaagcacccaatag

SEQ ID NO: 722435 - DNA, 15 bp, Homo sapiens
aaagcacccaatagc

SEQ ID NO: 722436 - DNA, 15 bp, Homo sapiens
aagcacccaatagcg

SEQ ID NO: 722437 - DNA, 15 bp, Homo sapiens
agcacccaatagcgg

SEQ ID NO: 722438 - DNA, 15 bp, Homo sapiens
gcacccaatagcggt

SEQ ID NO: 722439 - DNA, 15 bp, Homo sapiens
cacccaatagcggtc

SEQ ID NO: 722440 - DNA, 15 bp, Homo sapiens
acccaatagcggtca

SEQ ID NO: 722441 - DNA, 15 bp, Homo sapiens
cccaatagcggtcat

SEQ ID NO: 722442 - DNA, 15 bp, Homo sapiens
ccaatagcggtcata

SEQ ID NO: 722443 - DNA, 15 bp, Homo sapiens
caatagcggtcatag

SEQ ID NO: 722444 - DNA, 15 bp, Homo sapiens
aatagcggtcatagt

SEQ ID NO: 722445 - DNA, 15 bp, Homo sapiens
atagcggtcatagtc

SEQ ID NO: 722446 - DNA, 15 bp, Homo sapiens
tagcggtcatagtct

SEQ ID NO: 722447 - DNA, 15 bp, Homo sapiens
agcggtcatagtctt

SEQ ID NO: 722448 - DNA, 15 bp, Homo sapiens
gcggtcatagtctta

SEQ ID NO: 722449 - DNA, 15 bp, Homo sapiens
cggtcatagtcttat

SEQ ID NO: 722450 - DNA, 15 bp, Homo sapiens
ggtcatagtcttatt

SEQ ID NO: 722451 - DNA, 15 bp, Homo sapiens
gtcatagtcttattt

SEQ ID NO: 722452 - DNA, 15 bp, Homo sapiens
tcatagtcttattta

SEQ ID NO: 722453 - DNA, 15 bp, Homo sapiens
catagtcttatttag

SEQ ID NO: 722454 - DNA, 15 bp, Homo sapiens
atagtcttatttagt

SEQ ID NO: 722455 - DNA, 15 bp, Homo sapiens
tagtcttatttagtg

SEQ ID NO: 722456 - DNA, 15 bp, Homo sapiens
agtcttatttagtga

SEQ ID NO: 722457 - DNA, 15 bp, Homo sapiens
gtcttatttagtgaa

SEQ ID NO: 722458 - DNA, 15 bp, Homo sapiens
tcttatttagtgaat

SEQ ID NO: 722459 - DNA, 15 bp, Homo sapiens
cttatttagtgaata

SEQ ID NO: 722460 - DNA, 15 bp, Homo sapiens
ttatttagtgaatac

SEQ ID NO: 722461 - DNA, 15 bp, Homo sapiens
tatttagtgaatacc

SEQ ID NO: 722462 - DNA, 15 bp, Homo sapiens
atttagtgaatacca

SEQ ID NO: 722463 - DNA, 15 bp, Homo sapiens
tttagtgaataccat

SEQ ID NO: 722464 - DNA, 15 bp, Homo sapiens
ttagtgaataccata

SEQ ID NO: 722465 - DNA, 15 bp, Homo sapiens
tagtgaataccataa

SEQ ID NO: 722466 - DNA, 15 bp, Homo sapiens
agtgaataccataaa

SEQ ID NO: 722467 - DNA, 15 bp, Homo sapiens
gtgaataccataaat

SEQ ID NO: 722468 - DNA, 15 bp, Homo sapiens
tgaataccataaata

SEQ ID NO: 722469 - DNA, 15 bp, Homo sapiens
gaataccataaatag

SEQ ID NO: 722470 - DNA, 15 bp, Homo sapiens
aataccataaatagc

SEQ ID NO: 722471 - DNA, 15 bp, Homo sapiens
ataccataaatagct

SEQ ID NO: 722472 - DNA, 15 bp, Homo sapiens
taccataaatagctt

SEQ ID NO: 722473 - DNA, 15 bp, Homo sapiens
accataaatagcttc

SEQ ID NO: 722474 - DNA, 15 bp, Homo sapiens
ccataaatagcttca

SEQ ID NO: 722475 - DNA, 15 bp, Homo sapiens
cataaatagcttcaa

SEQ ID NO: 722476 - DNA, 15 bp, Homo sapiens
ataaatagcttcaac

SEQ ID NO: 722477 - DNA, 15 bp, Homo sapiens
taaatagcttcaaca

SEQ ID NO: 722478 - DNA, 15 bp, Homo sapiens
aaatagcttcaacaa

SEQ ID NO: 722479 - DNA, 15 bp, Homo sapiens
aatagcttcaacaat

SEQ ID NO: 722480 - DNA, 15 bp, Homo sapiens
atagcttcaacaatt

SEQ ID NO: 722481 - DNA, 15 bp, Homo sapiens
tagcttcaacaattc

SEQ ID NO: 722482 - DNA, 15 bp, Homo sapiens
agcttcaacaattca

SEQ ID NO: 722483 - DNA, 15 bp, Homo sapiens
gcttcaacaattcag

SEQ ID NO: 722484 - DNA, 15 bp, Homo sapiens
cttcaacaattcaga

SEQ ID NO: 722485 - DNA, 15 bp, Homo sapiens
ttcaacaattcagat

SEQ ID NO: 722486 - DNA, 15 bp, Homo sapiens
tcaacaattcagatc

SEQ ID NO: 722487 - DNA, 15 bp, Homo sapiens
caacaattcagatca

SEQ ID NO: 722488 - DNA, 15 bp, Homo sapiens
aacaattcagatcag

SEQ ID NO: 722489 - DNA, 15 bp, Homo sapiens
acaattcagatcagg

SEQ ID NO: 722490 - DNA, 15 bp, Homo sapiens
caattcagatcaggt

SEQ ID NO: 722491 - DNA, 15 bp, Homo sapiens
aattcagatcaggtt

SEQ ID NO: 722492 - DNA, 15 bp, Homo sapiens
attcagatcaggttt

SEQ ID NO: 722493 - DNA, 15 bp, Homo sapiens
ttcagatcaggtttt

SEQ ID NO: 722494 - DNA, 15 bp, Homo sapiens
tcagatcaggttttt

SEQ ID NO: 722495 - DNA, 15 bp, Homo sapiens
cagatcaggtttttc

SEQ ID NO: 722496 - DNA, 15 bp, Homo sapiens
agatcaggtttttct

SEQ ID NO: 722497 - DNA, 15 bp, Homo sapiens
gatcaggtttttctg

SEQ ID NO: 722498 - DNA, 15 bp, Homo sapiens
atcaggtttttctgc

SEQ ID NO: 722499 - DNA, 15 bp, Homo sapiens
tcaggtttttctgca

SEQ ID NO: 722500 - DNA, 15 bp, Homo sapiens
caggtttttctgcaa

SEQ ID NO: 722501 - DNA, 15 bp, Homo sapiens
aggtttttctgcaaa

SEQ ID NO: 722502 - DNA, 15 bp, Homo sapiens
ggtttttctgcaaag

SEQ ID NO: 722503 - DNA, 15 bp, Homo sapiens
gtttttctgcaaagt

SEQ ID NO: 722504 - DNA, 15 bp, Homo sapiens
tttttctgcaaagtg

SEQ ID NO: 722505 - DNA, 15 bp, Homo sapiens
ttttctgcaaagtga

SEQ ID NO: 722506 - DNA, 15 bp, Homo sapiens
tttctgcaaagtgag

SEQ ID NO: 722507 - DNA, 15 bp, Homo sapiens
ttctgcaaagtgaga

SEQ ID NO: 722508 - DNA, 15 bp, Homo sapiens
tctgcaaagtgagag

SEQ ID NO: 722509 - DNA, 15 bp, Homo sapiens
ctgcaaagtgagaga

SEQ ID NO: 722510 - DNA, 15 bp, Homo sapiens
tgcaaagtgagagat

SEQ ID NO: 722511 - DNA, 15 bp, Homo sapiens
gcaaagtgagagatg

SEQ ID NO: 722512 - DNA, 15 bp, Homo sapiens
caaagtgagagatga

SEQ ID NO: 722513 - DNA, 15 bp, Homo sapiens
aaagtgagagatgac

SEQ ID NO: 722514 - DNA, 15 bp, Homo sapiens
aagtgagagatgaca

SEQ ID NO: 722515 - DNA, 15 bp, Homo sapiens
agtgagagatgacaa

SEQ ID NO: 722516 - DNA, 15 bp, Homo sapiens
gtgagagatgacaat

SEQ ID NO: 722517 - DNA, 15 bp, Homo sapiens
tgagagatgacaata

SEQ ID NO: 722518 - DNA, 15 bp, Homo sapiens
gagagatgacaatat

SEQ ID NO: 722519 - DNA, 15 bp, Homo sapiens
agagatgacaatatt

SEQ ID NO: 722520 - DNA, 15 bp, Homo sapiens
gagatgacaatattc

SEQ ID NO: 722521 - DNA, 15 bp, Homo sapiens
agatgacaatattct

SEQ ID NO: 722522 - DNA, 15 bp, Homo sapiens
gatgacaatattctt

SEQ ID NO: 722523 - DNA, 15 bp, Homo sapiens
atgacaatattcttt

SEQ ID NO: 722524 - DNA, 15 bp, Homo sapiens
tgacaatattctttt

SEQ ID NO: 722525 - DNA, 15 bp, Homo sapiens
gacaatattcttttc

SEQ ID NO: 722526 - DNA, 15 bp, Homo sapiens
acaatattcttttca

SEQ ID NO: 722527 - DNA, 15 bp, Homo sapiens
caatattcttttcag

SEQ ID NO: 722528 - DNA, 15 bp, Homo sapiens
aatattcttttcagt

SEQ ID NO: 722529 - DNA, 15 bp, Homo sapiens
atattcttttcagtt

SEQ ID NO: 722530 - DNA, 15 bp, Homo sapiens
tattcttttcagttt

SEQ ID NO: 722531 - DNA, 15 bp, Homo sapiens
attcttttcagtttt

SEQ ID NO: 722532 - DNA, 15 bp, Homo sapiens
ttcttttcagttttt

SEQ ID NO: 722533 - DNA, 15 bp, Homo sapiens
tcttttcagtttttt

SEQ ID NO: 722534 - DNA, 15 bp, Homo sapiens
cttttcagttttttt

SEQ ID NO: 722535 - DNA, 15 bp, Homo sapiens
ttttcagttttttta

SEQ ID NO: 722536 - DNA, 15 bp, Homo sapiens
tttcagtttttttaa

SEQ ID NO: 722537 - DNA, 15 bp, Homo sapiens
ttcagtttttttaaa

SEQ ID NO: 722538 - DNA, 15 bp, Homo sapiens
tcagtttttttaaat

SEQ ID NO: 722539 - DNA, 15 bp, Homo sapiens
cagtttttttaaatt

SEQ ID NO: 722540 - DNA, 15 bp, Homo sapiens
agtttttttaaattt

SEQ ID NO: 722541 - DNA, 15 bp, Homo sapiens
gtttttttaaatttt

SEQ ID NO: 722542 - DNA, 15 bp, Homo sapiens
tttttttaaatttta

SEQ ID NO: 722543 - DNA, 15 bp, Homo sapiens
ttttttaaattttag

SEQ ID NO: 722544 - DNA, 15 bp, Homo sapiens
tttttaaattttaga

SEQ ID NO: 722545 - DNA, 15 bp, Homo sapiens
ttttaaattttagaa

SEQ ID NO: 722546 - DNA, 15 bp, Homo sapiens
tttaaattttagaat

SEQ ID NO: 722547 - DNA, 15 bp, Homo sapiens
ttaaattttagaatt

SEQ ID NO: 722548 - DNA, 15 bp, Homo sapiens
taaattttagaattg

SEQ ID NO: 722549 - DNA, 15 bp, Homo sapiens
aaattttagaattgc

SEQ ID NO: 722550 - DNA, 15 bp, Homo sapiens
aattttagaattgca

SEQ ID NO: 722551 - DNA, 15 bp, Homo sapiens
attttagaattgcag

SEQ ID NO: 722552 - DNA, 15 bp, Homo sapiens
ttttagaattgcagg

SEQ ID NO: 722553 - DNA, 15 bp, Homo sapiens
tttagaattgcaggt

SEQ ID NO: 722554 - DNA, 15 bp, Homo sapiens
ttagaattgcaggtt

SEQ ID NO: 722555 - DNA, 15 bp, Homo sapiens
tagaattgcaggtta

SEQ ID NO: 722556 - DNA, 15 bp, Homo sapiens
agaattgcaggttaa

SEQ ID NO: 722557 - DNA, 15 bp, Homo sapiens
gaattgcaggttaag

SEQ ID NO: 722558 - DNA, 15 bp, Homo sapiens
aattgcaggttaaga

SEQ ID NO: 722559 - DNA, 15 bp, Homo sapiens
attgcaggttaagag

SEQ ID NO: 722560 - DNA, 15 bp, Homo sapiens
ttgcaggttaagaga

SEQ ID NO: 722561 - DNA, 15 bp, Homo sapiens
tgcaggttaagagac

SEQ ID NO: 722562 - DNA, 15 bp, Homo sapiens
gcaggttaagagact

SEQ ID NO: 722563 - DNA, 15 bp, Homo sapiens
caggttaagagactg

SEQ ID NO: 722564 - DNA, 15 bp, Homo sapiens
aggttaagagactgt

SEQ ID NO: 722565 - DNA, 15 bp, Homo sapiens
ggttaagagactgtg

SEQ ID NO: 722566 - DNA, 15 bp, Homo sapiens
gttaagagactgtgg

SEQ ID NO: 722567 - DNA, 15 bp, Homo sapiens
ttaagagactgtgga

SEQ ID NO: 722568 - DNA, 15 bp, Homo sapiens
taagagactgtggac

SEQ ID NO: 722569 - DNA, 15 bp, Homo sapiens
aagagactgtggacc

SEQ ID NO: 722570 - DNA, 15 bp, Homo sapiens
agagactgtggacct

SEQ ID NO: 722571 - DNA, 15 bp, Homo sapiens
gagactgtggacctc

SEQ ID NO: 722572 - DNA, 15 bp, Homo sapiens
agactgtggacctct

SEQ ID NO: 722573 - DNA, 15 bp, Homo sapiens
gactgtggacctcta

SEQ ID NO: 722574 - DNA, 15 bp, Homo sapiens
actgtggacctctat

SEQ ID NO: 722575 - DNA, 15 bp, Homo sapiens
ctgtggacctctata

SEQ ID NO: 722576 - DNA, 15 bp, Homo sapiens
tgtggacctctataa

SEQ ID NO: 722577 - DNA, 15 bp, Homo sapiens
gtggacctctataaa

SEQ ID NO: 722578 - DNA, 15 bp, Homo sapiens
tggacctctataaat

SEQ ID NO: 722579 - DNA, 15 bp, Homo sapiens
ggacctctataaatt

SEQ ID NO: 722580 - DNA, 15 bp, Homo sapiens
gacctctataaattc

SEQ ID NO: 722581 - DNA, 15 bp, Homo sapiens
acctctataaattca

SEQ ID NO: 722582 - DNA, 15 bp, Homo sapiens
cctctataaattcat

SEQ ID NO: 722583 - DNA, 15 bp, Homo sapiens
ctctataaattcatg

SEQ ID NO: 722584 - DNA, 15 bp, Homo sapiens
tctataaattcatgt

SEQ ID NO: 722585 - DNA, 15 bp, Homo sapiens
ctataaattcatgta

SEQ ID NO: 722586 - DNA, 15 bp, Homo sapiens
tataaattcatgtag

SEQ ID NO: 722587 - DNA, 15 bp, Homo sapiens
ataaattcatgtagg

SEQ ID NO: 722588 - DNA, 15 bp, Homo sapiens
taaattcatgtagga

SEQ ID NO: 722589 - DNA, 15 bp, Homo sapiens
aaattcatgtaggaa

SEQ ID NO: 722590 - DNA, 15 bp, Homo sapiens
aattcatgtaggaat

SEQ ID NO: 722591 - DNA, 15 bp, Homo sapiens
attcatgtaggaata

SEQ ID NO: 722592 - DNA, 15 bp, Homo sapiens
ttcatgtaggaatag

SEQ ID NO: 722593 - DNA, 15 bp, Homo sapiens
tcatgtaggaataga

SEQ ID NO: 722594 - DNA, 15 bp, Homo sapiens
catgtaggaatagaa

SEQ ID NO: 722595 - DNA, 15 bp, Homo sapiens
atgtaggaatagaaa

SEQ ID NO: 722596 - DNA, 15 bp, Homo sapiens
tgtaggaatagaaac

SEQ ID NO: 722597 - DNA, 15 bp, Homo sapiens
gtaggaatagaaaca

SEQ ID NO: 722598 - DNA, 15 bp, Homo sapiens
taggaatagaaacaa

SEQ ID NO: 722599 - DNA, 15 bp, Homo sapiens
aggaatagaaacaag

SEQ ID NO: 722600 - DNA, 15 bp, Homo sapiens
ggaatagaaacaagt

SEQ ID NO: 722601 - DNA, 15 bp, Homo sapiens
gaatagaaacaagtc

SEQ ID NO: 722602 - DNA, 15 bp, Homo sapiens
aatagaaacaagtca

SEQ ID NO: 722603 - DNA, 15 bp, Homo sapiens
atagaaacaagtcat

SEQ ID NO: 722604 - DNA, 15 bp, Homo sapiens
tagaaacaagtcatc

SEQ ID NO: 722605 - DNA, 15 bp, Homo sapiens
agaaacaagtcatcc

SEQ ID NO: 722606 - DNA, 15 bp, Homo sapiens
gaaacaagtcatccg

SEQ ID NO: 722607 - DNA, 15 bp, Homo sapiens
aaacaagtcatccga

SEQ ID NO: 722608 - DNA, 15 bp, Homo sapiens
aacaagtcatccgaa

SEQ ID NO: 722609 - DNA, 15 bp, Homo sapiens
acaagtcatccgaaa

SEQ ID NO: 722610 - DNA, 15 bp, Homo sapiens
caagtcatccgaaat

SEQ ID NO: 722611 - DNA, 15 bp, Homo sapiens
aagtcatccgaaatt

SEQ ID NO: 722612 - DNA, 15 bp, Homo sapiens
agtcatccgaaattt

SEQ ID NO: 722613 - DNA, 15 bp, Homo sapiens
gtcatccgaaattta

SEQ ID NO: 722614 - DNA, 15 bp, Homo sapiens
tcatccgaaatttaa

SEQ ID NO: 722615 - DNA, 15 bp, Homo sapiens
catccgaaatttaag

SEQ ID NO: 722616 - DNA, 15 bp, Homo sapiens
atccgaaatttaaga

SEQ ID NO: 722617 - DNA, 15 bp, Homo sapiens
tccgaaatttaagag

SEQ ID NO: 722618 - DNA, 15 bp, Homo sapiens
ccgaaatttaagaga

SEQ ID NO: 722619 - DNA, 15 bp, Homo sapiens
cgaaatttaagagac

SEQ ID NO: 722620 - DNA, 15 bp, Homo sapiens
gaaatttaagagacc

SEQ ID NO: 722621 - DNA, 15 bp, Homo sapiens
aaatttaagagacct

SEQ ID NO: 722622 - DNA, 15 bp, Homo sapiens
aatttaagagacctt

SEQ ID NO: 722623 - DNA, 15 bp, Homo sapiens
atttaagagaccttc

SEQ ID NO: 722624 - DNA, 15 bp, Homo sapiens
tttaagagaccttcc

SEQ ID NO: 722625 - DNA, 15 bp, Homo sapiens
ttaagagaccttccc

SEQ ID NO: 722626 - DNA, 15 bp, Homo sapiens
taagagaccttccct

SEQ ID NO: 722627 - DNA, 15 bp, Homo sapiens
aagagaccttccctg

SEQ ID NO: 722628 - DNA, 15 bp, Homo sapiens
agagaccttccctga

SEQ ID NO: 722629 - DNA, 15 bp, Homo sapiens
gagaccttccctgaa

SEQ ID NO: 722630 - DNA, 15 bp, Homo sapiens
agaccttccctgaac

SEQ ID NO: 722631 - DNA, 15 bp, Homo sapiens
gaccttccctgaacc

SEQ ID NO: 722632 - DNA, 15 bp, Homo sapiens
accttccctgaacca

SEQ ID NO: 722633 - DNA, 15 bp, Homo sapiens
ccttccctgaaccat

SEQ ID NO: 722634 - DNA, 15 bp, Homo sapiens
cttccctgaaccatc

SEQ ID NO: 722635 - DNA, 15 bp, Homo sapiens
ttccctgaaccatcc

SEQ ID NO: 722636 - DNA, 15 bp, Homo sapiens
tccctgaaccatccc

SEQ ID NO: 722637 - DNA, 15 bp, Homo sapiens
ccctgaaccatccct

SEQ ID NO: 722638 - DNA, 15 bp, Homo sapiens
cctgaaccatccctc

SEQ ID NO: 722639 - DNA, 15 bp, Homo sapiens
ctgaaccatccctct

SEQ ID NO: 722640 - DNA, 15 bp, Homo sapiens
tgaaccatccctctt

SEQ ID NO: 722641 - DNA, 15 bp, Homo sapiens
gaaccatccctcttt

SEQ ID NO: 722642 - DNA, 15 bp, Homo sapiens
aaccatccctctttt

SEQ ID NO: 722643 - DNA, 15 bp, Homo sapiens
accatccctcttttt

SEQ ID NO: 722644 - DNA, 15 bp, Homo sapiens
ccatccctctttttg

SEQ ID NO: 722645 - DNA, 15 bp, Homo sapiens
catccctctttttga

SEQ ID NO: 722646 - DNA, 15 bp, Homo sapiens
atccctctttttgaa

SEQ ID NO: 722647 - DNA, 15 bp, Homo sapiens
tccctctttttgaaa

SEQ ID NO: 722648 - DNA, 15 bp, Homo sapiens
ccctctttttgaaaa

SEQ ID NO: 722649 - DNA, 15 bp, Homo sapiens
cctctttttgaaaaa

SEQ ID NO: 722650 - DNA, 15 bp, Homo sapiens
ctctttttgaaaaat

SEQ ID NO: 722651 - DNA, 15 bp, Homo sapiens
tctttttgaaaaatt

SEQ ID NO: 722652 - DNA, 15 bp, Homo sapiens
ctttttgaaaaattt

SEQ ID NO: 722653 - DNA, 15 bp, Homo sapiens
tttttgaaaaatttt

SEQ ID NO: 722654 - DNA, 15 bp, Homo sapiens
ttttgaaaaattttg

SEQ ID NO: 722655 - DNA, 15 bp, Homo sapiens
tttgaaaaattttga

SEQ ID NO: 722656 - DNA, 15 bp, Homo sapiens
ttgaaaaattttgac

SEQ ID NO: 722657 - DNA, 15 bp, Homo sapiens
tgaaaaattttgact

SEQ ID NO: 722658 - DNA, 15 bp, Homo sapiens
gaaaaattttgactc

SEQ ID NO: 722659 - DNA, 15 bp, Homo sapiens
aaaaattttgactct

SEQ ID NO: 722660 - DNA, 15 bp, Homo sapiens
aaaattttgactctt

SEQ ID NO: 722661 - DNA, 15 bp, Homo sapiens
aaattttgactctta

SEQ ID NO: 722662 - DNA, 15 bp, Homo sapiens
aattttgactcttat

SEQ ID NO: 722663 - DNA, 15 bp, Homo sapiens
attttgactcttata

SEQ ID NO: 722664 - DNA, 15 bp, Homo sapiens
ttttgactcttatat

SEQ ID NO: 722665 - DNA, 15 bp, Homo sapiens
tttgactcttatatg

SEQ ID NO: 722666 - DNA, 15 bp, Homo sapiens
ttgactcttatatga

SEQ ID NO: 722667 - DNA, 15 bp, Homo sapiens
tgactcttatatgag

SEQ ID NO: 722668 - DNA, 15 bp, Homo sapiens
gactcttatatgaga

SEQ ID NO: 722669 - DNA, 15 bp, Homo sapiens
actcttatatgagaa

SEQ ID NO: 722670 - DNA, 15 bp, Homo sapiens
ctcttatatgagaac

SEQ ID NO: 722671 - DNA, 15 bp, Homo sapiens
tcttatatgagaacc

SEQ ID NO: 722672 - DNA, 15 bp, Homo sapiens
cttatatgagaacca

SEQ ID NO: 722673 - DNA, 15 bp, Homo sapiens
ttatatgagaaccac

SEQ ID NO: 722674 - DNA, 15 bp, Homo sapiens
tatatgagaaccact

SEQ ID NO: 722675 - DNA, 15 bp, Homo sapiens
atatgagaaccactg

SEQ ID NO: 722676 - DNA, 15 bp, Homo sapiens
tatgagaaccactga

SEQ ID NO: 722677 - DNA, 15 bp, Homo sapiens
atgagaaccactgaa

SEQ ID NO: 722678 - DNA, 15 bp, Homo sapiens
tgagaaccactgaaa

SEQ ID NO: 722679 - DNA, 15 bp, Homo sapiens
gagaaccactgaaag

SEQ ID NO: 722680 - DNA, 15 bp, Homo sapiens
agaaccactgaaagt

SEQ ID NO: 722681 - DNA, 15 bp, Homo sapiens
gaaccactgaaagtt

SEQ ID NO: 722682 - DNA, 15 bp, Homo sapiens
aaccactgaaagttt

SEQ ID NO: 722683 - DNA, 15 bp, Homo sapiens
accactgaaagttta

SEQ ID NO: 722684 - DNA, 15 bp, Homo sapiens
ccactgaaagtttaa

SEQ ID NO: 722685 - DNA, 15 bp, Homo sapiens
cactgaaagtttaaa

SEQ ID NO: 722686 - DNA, 15 bp, Homo sapiens
actgaaagtttaaat

SEQ ID NO: 722687 - DNA, 15 bp, Homo sapiens
ctgaaagtttaaata

SEQ ID NO: 722688 - DNA, 15 bp, Homo sapiens
tgaaagtttaaatat

SEQ ID NO: 722689 - DNA, 15 bp, Homo sapiens
gaaagtttaaatatt

SEQ ID NO: 722690 - DNA, 15 bp, Homo sapiens
aaagtttaaatatta

SEQ ID NO: 722691 - DNA, 15 bp, Homo sapiens
aagtttaaatattaa

SEQ ID NO: 722692 - DNA, 15 bp, Homo sapiens
agtttaaatattaaa

SEQ ID NO: 722693 - DNA, 15 bp, Homo sapiens
gtttaaatattaaaa

SEQ ID NO: 722694 - DNA, 15 bp, Homo sapiens
tttaaatattaaaac

SEQ ID NO: 722695 - DNA, 15 bp, Homo sapiens
ttaaatattaaaaca

SEQ ID NO: 722696 - DNA, 15 bp, Homo sapiens
taaatattaaaacaa

SEQ ID NO: 722697 - DNA, 15 bp, Homo sapiens
aaatattaaaacaat

SEQ ID NO: 722698 - DNA, 15 bp, Homo sapiens
aatattaaaacaata

SEQ ID NO: 722699 - DNA, 15 bp, Homo sapiens
atattaaaacaataa

SEQ ID NO: 722700 - DNA, 15 bp, Homo sapiens
tattaaaacaataaa

SEQ ID NO: 722701 - DNA, 15 bp, Homo sapiens
attaaaacaataaat

SEQ ID NO: 722702 - DNA, 15 bp, Homo sapiens
ttaaaacaataaatc

SEQ ID NO: 722703 - DNA, 15 bp, Homo sapiens
taaaacaataaatct

SEQ ID NO: 722704 - DNA, 15 bp, Homo sapiens
aaaacaataaatctt

SEQ ID NO: 722705 - DNA, 15 bp, Homo sapiens
aaacaataaatcttt

SEQ ID NO: 722706 - DNA, 15 bp, Homo sapiens
aacaataaatcttta

SEQ ID NO: 722707 - DNA, 15 bp, Homo sapiens
acaataaatctttat

SEQ ID NO: 722708 - DNA, 15 bp, Homo sapiens
caataaatctttatt

SEQ ID NO: 722709 - DNA, 15 bp, Homo sapiens
aataaatctttatta

SEQ ID NO: 722710 - DNA, 15 bp, Homo sapiens
ataaatctttattaa

SEQ ID NO: 722711 - DNA, 15 bp, Homo sapiens
taaatctttattaaa

SEQ ID NO: 722712 - DNA, 15 bp, Homo sapiens
aaatctttattaaac

SEQ ID NO: 722713 - DNA, 15 bp, Homo sapiens
aatctttattaaaca

SEQ ID NO: 722714 - DNA, 15 bp, Homo sapiens
atctttattaaacag

SEQ ID NO: 722715 - DNA, 15 bp, Homo sapiens
tctttattaaacagt

SEQ ID NO: 722716 - DNA, 15 bp, Homo sapiens
ctttattaaacagtt

SEQ ID NO: 722717 - DNA, 15 bp, Homo sapiens
tttattaaacagttt

SEQ ID NO: 722718 - DNA, 15 bp, Homo sapiens
ttattaaacagtttt

SEQ ID NO: 722719 - DNA, 15 bp, Homo sapiens
tattaaacagttttc

SEQ ID NO: 722720 - DNA, 15 bp, Homo sapiens
attaaacagttttca

SEQ ID NO: 722721 - DNA, 15 bp, Homo sapiens
ttaaacagttttcac

SEQ ID NO: 722722 - DNA, 15 bp, Homo sapiens
taaacagttttcacg

SEQ ID NO: 722723 - DNA, 15 bp, Homo sapiens
aaacagttttcacgg

SEQ ID NO: 722724 - DNA, 15 bp, Homo sapiens
aacagttttcacggc

SEQ ID NO: 722725 - DNA, 15 bp, Homo sapiens
acagttttcacggca

SEQ ID NO: 722726 - DNA, 15 bp, Homo sapiens
cagttttcacggcat

SEQ ID NO: 722727 - DNA, 15 bp, Homo sapiens
agttttcacggcatt

SEQ ID NO: 722728 - DNA, 15 bp, Homo sapiens
gttttcacggcattt

SEQ ID NO: 722729 - DNA, 15 bp, Homo sapiens
ttttcacggcatttt

SEQ ID NO: 722730 - DNA, 15 bp, Homo sapiens
tttcacggcatttta

SEQ ID NO: 722731 - DNA, 15 bp, Homo sapiens
ttcacggcattttaa

SEQ ID NO: 722732 - DNA, 15 bp, Homo sapiens
tcacggcattttaaa

SEQ ID NO: 722733 - DNA, 15 bp, Homo sapiens
cacggcattttaaaa

SEQ ID NO: 722734 - DNA, 15 bp, Homo sapiens
acggcattttaaaat

SEQ ID NO: 722735 - DNA, 15 bp, Homo sapiens
cggcattttaaaata

SEQ ID NO: 722736 - DNA, 15 bp, Homo sapiens
ggcattttaaaataa

SEQ ID NO: 722737 - DNA, 15 bp, Homo sapiens
gcattttaaaataaa

SEQ ID NO: 722738 - DNA, 15 bp, Homo sapiens
cattttaaaataaat

SEQ ID NO: 722739 - DNA, 15 bp, Homo sapiens
attttaaaataaatt

SEQ ID NO: 722740 - DNA, 15 bp, Homo sapiens
ttttaaaataaattt

SEQ ID NO: 722741 - DNA, 15 bp, Homo sapiens
tttaaaataaattta

SEQ ID NO: 722742 - DNA, 15 bp, Homo sapiens
ttaaaataaatttaa

SEQ ID NO: 722743 - DNA, 15 bp, Homo sapiens
taaaataaatttaaa

SEQ ID NO: 722744 - DNA, 15 bp, Homo sapiens
aaaataaatttaaaa

SEQ ID NO: 722745 - DNA, 15 bp, Homo sapiens
aaataaatttaaaaa

SEQ ID NO: 722746 - DNA, 15 bp, Homo sapiens
aataaatttaaaaaa

SEQ ID NO: 722747 - DNA, 15 bp, Homo sapiens
ataaatttaaaaaat

SEQ ID NO: 722748 - DNA, 15 bp, Homo sapiens
taaatttaaaaaata

SEQ ID NO: 722749 - DNA, 15 bp, Homo sapiens
aaatttaaaaaataa

SEQ ID NO: 722750 - DNA, 15 bp, Homo sapiens
aatttaaaaaataaa

SEQ ID NO: 722751 - DNA, 15 bp, Homo sapiens
atttaaaaaataaat

SEQ ID NO: 722752 - DNA, 15 bp, Homo sapiens
tttaaaaaataaata

SEQ ID NO: 722753 - DNA, 15 bp, Homo sapiens
ttaaaaaataaatat

SEQ ID NO: 722754 - DNA, 15 bp, Homo sapiens
taaaaaataaatatt

SEQ ID NO: 722755 - DNA, 15 bp, Homo sapiens
aaaaaataaatattt

SEQ ID NO: 722756 - DNA, 15 bp, Homo sapiens
aaaaataaatatttg

SEQ ID NO: 722757 - DNA, 15 bp, Homo sapiens
aaaataaatatttgc

SEQ ID NO: 722758 - DNA, 15 bp, Homo sapiens
aaataaatatttgca

SEQ ID NO: 722759 - DNA, 15 bp, Homo sapiens
aataaatatttgcat

SEQ ID NO: 722760 - DNA, 15 bp, Homo sapiens
ataaatatttgcatt

SEQ ID NO: 722761 - DNA, 15 bp, Homo sapiens
taaatatttgcatta

SEQ ID NO: 722762 - DNA, 15 bp, Homo sapiens
aaatatttgcattat

SEQ ID NO: 722763 - DNA, 15 bp, Homo sapiens
aatatttgcattata

SEQ ID NO: 722764 - DNA, 15 bp, Homo sapiens
atatttgcattatag

SEQ ID NO: 722765 - DNA, 15 bp, Homo sapiens
tatttgcattatagc

SEQ ID NO: 722766 - DNA, 15 bp, Homo sapiens
atttgcattatagca

SEQ ID NO: 722767 - DNA, 15 bp, Homo sapiens
tttgcattatagcag

SEQ ID NO: 722768 - DNA, 15 bp, Homo sapiens
ttgcattatagcaga

SEQ ID NO: 722769 - DNA, 15 bp, Homo sapiens
tgcattatagcagaa

SEQ ID NO: 722770 - DNA, 15 bp, Homo sapiens
gcattatagcagaaa

SEQ ID NO: 722771 - DNA, 15 bp, Homo sapiens
cattatagcagaaag

SEQ ID NO: 722772 - DNA, 15 bp, Homo sapiens
attatagcagaaagt

SEQ ID NO: 722773 - DNA, 15 bp, Homo sapiens
ttatagcagaaagtc

SEQ ID NO: 722774 - DNA, 15 bp, Homo sapiens
tatagcagaaagtca

SEQ ID NO: 722775 - DNA, 15 bp, Homo sapiens
atagcagaaagtcac

SEQ ID NO: 722776 - DNA, 15 bp, Homo sapiens
tagcagaaagtcaca

SEQ ID NO: 722777 - DNA, 15 bp, Homo sapiens
agcagaaagtcacat

SEQ ID NO: 722778 - DNA, 15 bp, Homo sapiens
gcagaaagtcacatg

SEQ ID NO: 722779 - DNA, 15 bp, Homo sapiens
cagaaagtcacatgt

SEQ ID NO: 722780 - DNA, 15 bp, Homo sapiens
agaaagtcacatgta

SEQ ID NO: 722781 - DNA, 15 bp, Homo sapiens
gaaagtcacatgtat

SEQ ID NO: 722782 - DNA, 15 bp, Homo sapiens
aaagtcacatgtatt

SEQ ID NO: 722783 - DNA, 15 bp, Homo sapiens
aagtcacatgtattg

SEQ ID NO: 722784 - DNA, 15 bp, Homo sapiens
agtcacatgtattgc

SEQ ID NO: 722785 - DNA, 15 bp, Homo sapiens
gtcacatgtattgca

SEQ ID NO: 722786 - DNA, 15 bp, Homo sapiens
tcacatgtattgcat

SEQ ID NO: 722787 - DNA, 15 bp, Homo sapiens
cacatgtattgcatc

SEQ ID NO: 722788 - DNA, 15 bp, Homo sapiens
acatgtattgcatca

SEQ ID NO: 722789 - DNA, 15 bp, Homo sapiens
catgtattgcatcaa

SEQ ID NO: 722790 - DNA, 15 bp, Homo sapiens
atgtattgcatcaac

SEQ ID NO: 722791 - DNA, 15 bp, Homo sapiens
tgtattgcatcaact

SEQ ID NO: 722792 - DNA, 15 bp, Homo sapiens
gtattgcatcaactc

SEQ ID NO: 722793 - DNA, 15 bp, Homo sapiens
tattgcatcaactca

SEQ ID NO: 722794 - DNA, 15 bp, Homo sapiens
attgcatcaactcac

SEQ ID NO: 722795 - DNA, 15 bp, Homo sapiens
ttgcatcaactcact

SEQ ID NO: 722796 - DNA, 15 bp, Homo sapiens
tgcatcaactcactt

SEQ ID NO: 722797 - DNA, 15 bp, Homo sapiens
gcatcaactcacttt

SEQ ID NO: 722798 - DNA, 15 bp, Homo sapiens
catcaactcactttt

SEQ ID NO: 722799 - DNA, 15 bp, Homo sapiens
atcaactcactttta

SEQ ID NO: 722800 - DNA, 15 bp, Homo sapiens
tcaactcacttttac

SEQ ID NO: 722801 - DNA, 15 bp, Homo sapiens
caactcacttttaca

SEQ ID NO: 722802 - DNA, 15 bp, Homo sapiens
aactcacttttacaa

SEQ ID NO: 722803 - DNA, 15 bp, Homo sapiens
actcacttttacaat

SEQ ID NO: 722804 - DNA, 15 bp, Homo sapiens
ctcacttttacaatt

SEQ ID NO: 722805 - DNA, 15 bp, Homo sapiens
tcacttttacaattt

SEQ ID NO: 722806 - DNA, 15 bp, Homo sapiens
cacttttacaattta

SEQ ID NO: 722807 - DNA, 15 bp, Homo sapiens
acttttacaatttaa

SEQ ID NO: 722808 - DNA, 15 bp, Homo sapiens
cttttacaatttaat

SEQ ID NO: 722809 - DNA, 15 bp, Homo sapiens
ttttacaatttaatg

SEQ ID NO: 722810 - DNA, 15 bp, Homo sapiens
tttacaatttaatgg

SEQ ID NO: 722811 - DNA, 15 bp, Homo sapiens
ttacaatttaatggc

SEQ ID NO: 722812 - DNA, 15 bp, Homo sapiens
tacaatttaatggca

SEQ ID NO: 722813 - DNA, 15 bp, Homo sapiens
acaatttaatggcat

SEQ ID NO: 722814 - DNA, 15 bp, Homo sapiens
caatttaatggcatg

SEQ ID NO: 722815 - DNA, 15 bp, Homo sapiens
aatttaatggcatga

SEQ ID NO: 722816 - DNA, 15 bp, Homo sapiens
atttaatggcatgag

SEQ ID NO: 722817 - DNA, 15 bp, Homo sapiens
tttaatggcatgaga

SEQ ID NO: 722818 - DNA, 15 bp, Homo sapiens
ttaatggcatgagac

SEQ ID NO: 722819 - DNA, 15 bp, Homo sapiens
taatggcatgagaca

SEQ ID NO: 722820 - DNA, 15 bp, Homo sapiens
aatggcatgagacaa

SEQ ID NO: 722821 - DNA, 15 bp, Homo sapiens
atggcatgagacaac

SEQ ID NO: 722822 - DNA, 15 bp, Homo sapiens
tggcatgagacaact

SEQ ID NO: 722823 - DNA, 15 bp, Homo sapiens
ggcatgagacaacta

SEQ ID NO: 722824 - DNA, 15 bp, Homo sapiens
gcatgagacaactaa

SEQ ID NO: 722825 - DNA, 15 bp, Homo sapiens
catgagacaactaag

SEQ ID NO: 722826 - DNA, 15 bp, Homo sapiens
atgagacaactaagc

SEQ ID NO: 722827 - DNA, 15 bp, Homo sapiens
tgagacaactaagca

SEQ ID NO: 722828 - DNA, 15 bp, Homo sapiens
gagacaactaagcat

SEQ ID NO: 722829 - DNA, 15 bp, Homo sapiens
agacaactaagcatc

SEQ ID NO: 722830 - DNA, 15 bp, Homo sapiens
gacaactaagcatca

SEQ ID NO: 722831 - DNA, 15 bp, Homo sapiens
acaactaagcatcag

SEQ ID NO: 722832 - DNA, 15 bp, Homo sapiens
caactaagcatcagc

SEQ ID NO: 722833 - DNA, 15 bp, Homo sapiens
aactaagcatcagca

SEQ ID NO: 722834 - DNA, 15 bp, Homo sapiens
actaagcatcagcac

SEQ ID NO: 722835 - DNA, 15 bp, Homo sapiens
ctaagcatcagcacc

SEQ ID NO: 722836 - DNA, 15 bp, Homo sapiens
taagcatcagcacca

SEQ ID NO: 722837 - DNA, 15 bp, Homo sapiens
aagcatcagcaccat

SEQ ID NO: 722838 - DNA, 15 bp, Homo sapiens
agcatcagcaccata

SEQ ID NO: 722839 - DNA, 15 bp, Homo sapiens
gcatcagcaccataa

SEQ ID NO: 722840 - DNA, 15 bp, Homo sapiens
catcagcaccataaa

SEQ ID NO: 722841 - DNA, 15 bp, Homo sapiens
atcagcaccataaaa

SEQ ID NO: 722842 - DNA, 15 bp, Homo sapiens
tcagcaccataaaac

SEQ ID NO: 722843 - DNA, 15 bp, Homo sapiens
cagcaccataaaact

SEQ ID NO: 722844 - DNA, 15 bp, Homo sapiens
agcaccataaaactg

SEQ ID NO: 722845 - DNA, 15 bp, Homo sapiens
gcaccataaaactgt

SEQ ID NO: 722846 - DNA, 15 bp, Homo sapiens
caccataaaactgtt

SEQ ID NO: 722847 - DNA, 15 bp, Homo sapiens
accataaaactgtta

SEQ ID NO: 722848 - DNA, 15 bp, Homo sapiens
ccataaaactgttaa

SEQ ID NO: 722849 - DNA, 15 bp, Homo sapiens
cataaaactgttaag

SEQ ID NO: 722850 - DNA, 15 bp, Homo sapiens
ataaaactgttaaga

SEQ ID NO: 722851 - DNA, 15 bp, Homo sapiens
taaaactgttaagat

SEQ ID NO: 722852 - DNA, 15 bp, Homo sapiens
aaaactgttaagatt

SEQ ID NO: 722853 - DNA, 15 bp, Homo sapiens
aaactgttaagattt

SEQ ID NO: 722854 - DNA, 15 bp, Homo sapiens
aactgttaagatttg

SEQ ID NO: 722855 - DNA, 15 bp, Homo sapiens
actgttaagatttgt

SEQ ID NO: 722856 - DNA, 15 bp, Homo sapiens
ctgttaagatttgtt

SEQ ID NO: 722857 - DNA, 15 bp, Homo sapiens
tgttaagatttgttt

SEQ ID NO: 722858 - DNA, 15 bp, Homo sapiens
gttaagatttgtttc

SEQ ID NO: 722859 - DNA, 15 bp, Homo sapiens
ttaagatttgtttct

SEQ ID NO: 722860 - DNA, 15 bp, Homo sapiens
taagatttgtttctt

SEQ ID NO: 722861 - DNA, 15 bp, Homo sapiens
aagatttgtttctta

SEQ ID NO: 722862 - DNA, 15 bp, Homo sapiens
agatttgtttcttaa

SEQ ID NO: 722863 - DNA, 15 bp, Homo sapiens
gatttgtttcttaaa

SEQ ID NO: 722864 - DNA, 15 bp, Homo sapiens
atttgtttcttaaat

SEQ ID NO: 722865 - DNA, 15 bp, Homo sapiens
tttgtttcttaaatt

SEQ ID NO: 722866 - DNA, 15 bp, Homo sapiens
ttgtttcttaaattc

SEQ ID NO: 722867 - DNA, 15 bp, Homo sapiens
tgtttcttaaattca

SEQ ID NO: 722868 - DNA, 15 bp, Homo sapiens
gtttcttaaattcaa

SEQ ID NO: 722869 - DNA, 15 bp, Homo sapiens
tttcttaaattcaag

SEQ ID NO: 722870 - DNA, 15 bp, Homo sapiens
ttcttaaattcaagg

SEQ ID NO: 722871 - DNA, 15 bp, Homo sapiens
tcttaaattcaagga

SEQ ID NO: 722872 - DNA, 15 bp, Homo sapiens
cttaaattcaaggaa

SEQ ID NO: 722873 - DNA, 15 bp, Homo sapiens
ttaaattcaaggaaa

SEQ ID NO: 722874 - DNA, 15 bp, Homo sapiens
taaattcaaggaaat

SEQ ID NO: 722875 - DNA, 15 bp, Homo sapiens
aaattcaaggaaata

SEQ ID NO: 722876 - DNA, 15 bp, Homo sapiens
aattcaaggaaatag

SEQ ID NO: 722877 - DNA, 15 bp, Homo sapiens
attcaaggaaatagc

SEQ ID NO: 722878 - DNA, 15 bp, Homo sapiens
ttcaaggaaatagct

SEQ ID NO: 722879 - DNA, 15 bp, Homo sapiens
tcaaggaaatagctc

SEQ ID NO: 722880 - DNA, 15 bp, Homo sapiens
caaggaaatagctct

SEQ ID NO: 722881 - DNA, 15 bp, Homo sapiens
aaggaaatagctcta

SEQ ID NO: 722882 - DNA, 15 bp, Homo sapiens
aggaaatagctctaa

SEQ ID NO: 722883 - DNA, 15 bp, Homo sapiens
ggaaatagctctaaa

SEQ ID NO: 722884 - DNA, 15 bp, Homo sapiens
gaaatagctctaaag

SEQ ID NO: 722885 - DNA, 15 bp, Homo sapiens
aaatagctctaaagc

SEQ ID NO: 722886 - DNA, 15 bp, Homo sapiens
aatagctctaaagca

SEQ ID NO: 722887 - DNA, 15 bp, Homo sapiens
atagctctaaagcac

SEQ ID NO: 722888 - DNA, 15 bp, Homo sapiens
tagctctaaagcact

SEQ ID NO: 722889 - DNA, 15 bp, Homo sapiens
agctctaaagcactg

SEQ ID NO: 722890 - DNA, 15 bp, Homo sapiens
gctctaaagcactgc

SEQ ID NO: 722891 - DNA, 15 bp, Homo sapiens
ctctaaagcactgca

SEQ ID NO: 722892 - DNA, 15 bp, Homo sapiens
tctaaagcactgcag

SEQ ID NO: 722893 - DNA, 15 bp, Homo sapiens
ctaaagcactgcagc

SEQ ID NO: 722894 - DNA, 15 bp, Homo sapiens
taaagcactgcagca

SEQ ID NO: 722895 - DNA, 15 bp, Homo sapiens
aaagcactgcagcat

SEQ ID NO: 722896 - DNA, 15 bp, Homo sapiens
aagcactgcagcatc

SEQ ID NO: 722897 - DNA, 15 bp, Homo sapiens
agcactgcagcatca

SEQ ID NO: 722898 - DNA, 15 bp, Homo sapiens
gcactgcagcatcaa

SEQ ID NO: 722899 - DNA, 15 bp, Homo sapiens
cactgcagcatcaat

SEQ ID NO: 722900 - DNA, 15 bp, Homo sapiens
actgcagcatcaata

SEQ ID NO: 722901 - DNA, 15 bp, Homo sapiens
ctgcagcatcaataa

SEQ ID NO: 722902 - DNA, 15 bp, Homo sapiens
tgcagcatcaataat

SEQ ID NO: 722903 - DNA, 15 bp, Homo sapiens
gcagcatcaataatt

SEQ ID NO: 722904 - DNA, 15 bp, Homo sapiens
cagcatcaataattt

SEQ ID NO: 722905 - DNA, 15 bp, Homo sapiens
agcatcaataatttt

SEQ ID NO: 722906 - DNA, 15 bp, Homo sapiens
gcatcaataattttg

SEQ ID NO: 722907 - DNA, 15 bp, Homo sapiens
catcaataattttga

SEQ ID NO: 722908 - DNA, 15 bp, Homo sapiens
atcaataattttgaa

SEQ ID NO: 722909 - DNA, 15 bp, Homo sapiens
tcaataattttgaaa

SEQ ID NO: 722910 - DNA, 15 bp, Homo sapiens
caataattttgaaag

SEQ ID NO: 722911 - DNA, 15 bp, Homo sapiens
aataattttgaaagc

SEQ ID NO: 722912 - DNA, 15 bp, Homo sapiens
ataattttgaaagct

SEQ ID NO: 722913 - DNA, 15 bp, Homo sapiens
taattttgaaagcta

SEQ ID NO: 722914 - DNA, 15 bp, Homo sapiens
aattttgaaagctat

SEQ ID NO: 722915 - DNA, 15 bp, Homo sapiens
attttgaaagctata

SEQ ID NO: 722916 - DNA, 15 bp, Homo sapiens
ttttgaaagctataa

SEQ ID NO: 722917 - DNA, 15 bp, Homo sapiens
tttgaaagctataac

SEQ ID NO: 722918 - DNA, 15 bp, Homo sapiens
ttgaaagctataacc

SEQ ID NO: 722919 - DNA, 15 bp, Homo sapiens
tgaaagctataaccc

SEQ ID NO: 722920 - DNA, 15 bp, Homo sapiens
gaaagctataaccca

SEQ ID NO: 722921 - DNA, 15 bp, Homo sapiens
aaagctataacccag

SEQ ID NO: 722922 - DNA, 15 bp, Homo sapiens
aagctataacccagt

SEQ ID NO: 722923 - DNA, 15 bp, Homo sapiens
agctataacccagtg

SEQ ID NO: 722924 - DNA, 15 bp, Homo sapiens
gctataacccagtga

SEQ ID NO: 722925 - DNA, 15 bp, Homo sapiens
ctataacccagtgat

SEQ ID NO: 722926 - DNA, 15 bp, Homo sapiens
tataacccagtgatt

SEQ ID NO: 722927 - DNA, 15 bp, Homo sapiens
ataacccagtgattg

SEQ ID NO: 722928 - DNA, 15 bp, Homo sapiens
taacccagtgattgg

SEQ ID NO: 722929 - DNA, 15 bp, Homo sapiens
aacccagtgattggt

SEQ ID NO: 722930 - DNA, 15 bp, Homo sapiens
acccagtgattggtg

SEQ ID NO: 722931 - DNA, 15 bp, Homo sapiens
cccagtgattggtgc

SEQ ID NO: 722932 - DNA, 15 bp, Homo sapiens
ccagtgattggtgct

SEQ ID NO: 722933 - DNA, 15 bp, Homo sapiens
cagtgattggtgctc

SEQ ID NO: 722934 - DNA, 15 bp, Homo sapiens
agtgattggtgctca

SEQ ID NO: 722935 - DNA, 15 bp, Homo sapiens
gtgattggtgctcat

SEQ ID NO: 722936 - DNA, 15 bp, Homo sapiens
tgattggtgctcata

SEQ ID NO: 722937 - DNA, 15 bp, Homo sapiens
gattggtgctcatag

SEQ ID NO: 722938 - DNA, 15 bp, Homo sapiens
attggtgctcatagt

SEQ ID NO: 722939 - DNA, 15 bp, Homo sapiens
ttggtgctcatagta

SEQ ID NO: 722940 - DNA, 15 bp, Homo sapiens
tggtgctcatagtag

SEQ ID NO: 722941 - DNA, 15 bp, Homo sapiens
ggtgctcatagtagc

SEQ ID NO: 722942 - DNA, 15 bp, Homo sapiens
gtgctcatagtagcc

SEQ ID NO: 722943 - DNA, 15 bp, Homo sapiens
tgctcatagtagcca

SEQ ID NO: 722944 - DNA, 15 bp, Homo sapiens
gctcatagtagccaa

SEQ ID NO: 722945 - DNA, 15 bp, Homo sapiens
ctcatagtagccaat

SEQ ID NO: 722946 - DNA, 15 bp, Homo sapiens
tcatagtagccaatg

SEQ ID NO: 722947 - DNA, 15 bp, Homo sapiens
catagtagccaatgt

SEQ ID NO: 722948 - DNA, 15 bp, Homo sapiens
atagtagccaatgtt

SEQ ID NO: 722949 - DNA, 15 bp, Homo sapiens
tagtagccaatgttt

SEQ ID NO: 722950 - DNA, 15 bp, Homo sapiens
agtagccaatgtttc

SEQ ID NO: 722951 - DNA, 15 bp, Homo sapiens
gtagccaatgtttct

SEQ ID NO: 722952 - DNA, 15 bp, Homo sapiens
tagccaatgtttctt

SEQ ID NO: 722953 - DNA, 15 bp, Homo sapiens
agccaatgtttcttt

SEQ ID NO: 722954 - DNA, 15 bp, Homo sapiens
gccaatgtttctttt

SEQ ID NO: 722955 - DNA, 15 bp, Homo sapiens
ccaatgtttcttttt

SEQ ID NO: 722956 - DNA, 15 bp, Homo sapiens
caatgtttcttttta

SEQ ID NO: 722957 - DNA, 15 bp, Homo sapiens
aatgtttctttttat

SEQ ID NO: 722958 - DNA, 15 bp, Homo sapiens
atgtttctttttatt

SEQ ID NO: 722959 - DNA, 15 bp, Homo sapiens
tgtttctttttatta

SEQ ID NO: 722960 - DNA, 15 bp, Homo sapiens
gtttctttttattac

SEQ ID NO: 722961 - DNA, 15 bp, Homo sapiens
tttctttttattact

SEQ ID NO: 722962 - DNA, 15 bp, Homo sapiens
ttctttttattactg

SEQ ID NO: 722963 - DNA, 15 bp, Homo sapiens
tctttttattactgg

SEQ ID NO: 722964 - DNA, 15 bp, Homo sapiens
ctttttattactggc

SEQ ID NO: 722965 - DNA, 15 bp, Homo sapiens
tttttattactggca

SEQ ID NO: 722966 - DNA, 15 bp, Homo sapiens
ttttattactggcaa

SEQ ID NO: 722967 - DNA, 15 bp, Homo sapiens
tttattactggcaac

SEQ ID NO: 722968 - DNA, 15 bp, Homo sapiens
ttattactggcaact

SEQ ID NO: 722969 - DNA, 15 bp, Homo sapiens
tattactggcaactg

SEQ ID NO: 722970 - DNA, 15 bp, Homo sapiens
attactggcaactgt

SEQ ID NO: 722971 - DNA, 15 bp, Homo sapiens
ttactggcaactgtg

SEQ ID NO: 722972 - DNA, 15 bp, Homo sapiens
tactggcaactgtgg

SEQ ID NO: 722973 - DNA, 15 bp, Homo sapiens
actggcaactgtgga

SEQ ID NO: 722974 - DNA, 15 bp, Homo sapiens
ctggcaactgtggag

SEQ ID NO: 722975 - DNA, 15 bp, Homo sapiens
tggcaactgtggaga

SEQ ID NO: 722976 - DNA, 15 bp, Homo sapiens
ggcaactgtggagac

SEQ ID NO: 722977 - DNA, 15 bp, Homo sapiens
gcaactgtggagaca

SEQ ID NO: 722978 - DNA, 15 bp, Homo sapiens
caactgtggagacag

SEQ ID NO: 722979 - DNA, 15 bp, Homo sapiens
aactgtggagacaga

SEQ ID NO: 722980 - DNA, 15 bp, Homo sapiens
actgtggagacagag

SEQ ID NO: 722981 - DNA, 15 bp, Homo sapiens
ctgtggagacagagt

SEQ ID NO: 722982 - DNA, 15 bp, Homo sapiens
tgtggagacagagtt

SEQ ID NO: 722983 - DNA, 15 bp, Homo sapiens
gtggagacagagttc

SEQ ID NO: 722984 - DNA, 15 bp, Homo sapiens
tggagacagagttct

SEQ ID NO: 722985 - DNA, 15 bp, Homo sapiens
ggagacagagttctt

SEQ ID NO: 722986 - DNA, 15 bp, Homo sapiens
gagacagagttcttc

SEQ ID NO: 722987 - DNA, 15 bp, Homo sapiens
agacagagttcttcc

SEQ ID NO: 722988 - DNA, 15 bp, Homo sapiens
gacagagttcttcca

SEQ ID NO: 722989 - DNA, 15 bp, Homo sapiens
acagagttcttccag

SEQ ID NO: 722990 - DNA, 15 bp, Homo sapiens
cagagttcttccagt

SEQ ID NO: 722991 - DNA, 15 bp, Homo sapiens
agagttcttccagta

SEQ ID NO: 722992 - DNA, 15 bp, Homo sapiens
gagttcttccagtac

SEQ ID NO: 722993 - DNA, 15 bp, Homo sapiens
agttcttccagtact

SEQ ID NO: 722994 - DNA, 15 bp, Homo sapiens
gttcttccagtacta

SEQ ID NO: 722995 - DNA, 15 bp, Homo sapiens
ttcttccagtactaa

SEQ ID NO: 722996 - DNA, 15 bp, Homo sapiens
tcttccagtactaaa

SEQ ID NO: 722997 - DNA, 15 bp, Homo sapiens
cttccagtactaaat

SEQ ID NO: 722998 - DNA, 15 bp, Homo sapiens
ttccagtactaaata

SEQ ID NO: 722999 - DNA, 15 bp, Homo sapiens
tccagtactaaatat

SEQ ID NO: 723000 - DNA, 15 bp, Homo sapiens
ccagtactaaatatt

SEQ ID NO: 723001 - DNA, 15 bp, Homo sapiens
cagtactaaatatta

SEQ ID NO: 723002 - DNA, 15 bp, Homo sapiens
agtactaaatattaa

SEQ ID NO: 723003 - DNA, 15 bp, Homo sapiens
gtactaaatattaat

SEQ ID NO: 723004 - DNA, 15 bp, Homo sapiens
tactaaatattaata

SEQ ID NO: 723005 - DNA, 15 bp, Homo sapiens
actaaatattaataa

SEQ ID NO: 723006 - DNA, 15 bp, Homo sapiens
ctaaatattaataag

SEQ ID NO: 723007 - DNA, 15 bp, Homo sapiens
taaatattaataagt

SEQ ID NO: 723008 - DNA, 15 bp, Homo sapiens
aaatattaataagtt

SEQ ID NO: 723009 - DNA, 15 bp, Homo sapiens
aatattaataagttc

SEQ ID NO: 723010 - DNA, 15 bp, Homo sapiens
atattaataagttct

SEQ ID NO: 723011 - DNA, 15 bp, Homo sapiens
tattaataagttctc

SEQ ID NO: 723012 - DNA, 15 bp, Homo sapiens
attaataagttctct

SEQ ID NO: 723013 - DNA, 15 bp, Homo sapiens
ttaataagttctctg

SEQ ID NO: 723014 - DNA, 15 bp, Homo sapiens
taataagttctctga

SEQ ID NO: 723015 - DNA, 15 bp, Homo sapiens
aataagttctctgat

SEQ ID NO: 723016 - DNA, 15 bp, Homo sapiens
ataagttctctgatc

SEQ ID NO: 723017 - DNA, 15 bp, Homo sapiens
taagttctctgatcg

SEQ ID NO: 723018 - DNA, 15 bp, Homo sapiens
aagttctctgatcga

SEQ ID NO: 723019 - DNA, 15 bp, Homo sapiens
agttctctgatcgac

SEQ ID NO: 723020 - DNA, 15 bp, Homo sapiens
gttctctgatcgaca

SEQ ID NO: 723021 - DNA, 15 bp, Homo sapiens
ttctctgatcgacaa

SEQ ID NO: 723022 - DNA, 15 bp, Homo sapiens
tctctgatcgacaat

SEQ ID NO: 723023 - DNA, 15 bp, Homo sapiens
ctctgatcgacaatc

SEQ ID NO: 723024 - DNA, 15 bp, Homo sapiens
tctgatcgacaatcc

SEQ ID NO: 723025 - DNA, 15 bp, Homo sapiens
ctgatcgacaatccc

SEQ ID NO: 723026 - DNA, 15 bp, Homo sapiens
tgatcgacaatcccc

SEQ ID NO: 723027 - DNA, 15 bp, Homo sapiens
gatcgacaatccccc

SEQ ID NO: 723028 - DNA, 15 bp, Homo sapiens
atcgacaatccccca

SEQ ID NO: 723029 - DNA, 15 bp, Homo sapiens
tcgacaatcccccat

SEQ ID NO: 723030 - DNA, 15 bp, Homo sapiens
cgacaatcccccatc

SEQ ID NO: 723031 - DNA, 15 bp, Homo sapiens
gacaatcccccatct

SEQ ID NO: 723032 - DNA, 15 bp, Homo sapiens
acaatcccccatcta

SEQ ID NO: 723033 - DNA, 15 bp, Homo sapiens
caatcccccatctat

SEQ ID NO: 723034 - DNA, 15 bp, Homo sapiens
aatcccccatctatc

SEQ ID NO: 723035 - DNA, 15 bp, Homo sapiens
atcccccatctatca

SEQ ID NO: 723036 - DNA, 15 bp, Homo sapiens
tcccccatctatcag

SEQ ID NO: 723037 - DNA, 15 bp, Homo sapiens
cccccatctatcagt

SEQ ID NO: 723038 - DNA, 15 bp, Homo sapiens
ccccatctatcagtg

SEQ ID NO: 723039 - DNA, 15 bp, Homo sapiens
cccatctatcagtgt

SEQ ID NO: 723040 - DNA, 15 bp, Homo sapiens
ccatctatcagtgtg

SEQ ID NO: 723041 - DNA, 15 bp, Homo sapiens
catctatcagtgtgt

SEQ ID NO: 723042 - DNA, 15 bp, Homo sapiens
atctatcagtgtgtc

SEQ ID NO: 723043 - DNA, 15 bp, Homo sapiens
tctatcagtgtgtca

SEQ ID NO: 723044 - DNA, 15 bp, Homo sapiens
ctatcagtgtgtcag

SEQ ID NO: 723045 - DNA, 15 bp, Homo sapiens
tatcagtgtgtcagg

SEQ ID NO: 723046 - DNA, 15 bp, Homo sapiens
atcagtgtgtcagga

SEQ ID NO: 723047 - DNA, 15 bp, Homo sapiens
tcagtgtgtcaggat

SEQ ID NO: 723048 - DNA, 15 bp, Homo sapiens
cagtgtgtcaggatt

SEQ ID NO: 723049 - DNA, 15 bp, Homo sapiens
agtgtgtcaggattc

SEQ ID NO: 723050 - DNA, 15 bp, Homo sapiens
gtgtgtcaggattca

SEQ ID NO: 723051 - DNA, 15 bp, Homo sapiens
tgtgtcaggattcac

SEQ ID NO: 723052 - DNA, 15 bp, Homo sapiens
gtgtcaggattcaca

SEQ ID NO: 723053 - DNA, 15 bp, Homo sapiens
tgtcaggattcacaa

SEQ ID NO: 723054 - DNA, 15 bp, Homo sapiens
gtcaggattcacaaa

SEQ ID NO: 723055 - DNA, 15 bp, Homo sapiens
tcaggattcacaaag

SEQ ID NO: 723056 - DNA, 15 bp, Homo sapiens
caggattcacaaaga

SEQ ID NO: 723057 - DNA, 15 bp, Homo sapiens
aggattcacaaagaa

SEQ ID NO: 723058 - DNA, 15 bp, Homo sapiens
ggattcacaaagaaa

SEQ ID NO: 723059 - DNA, 15 bp, Homo sapiens
gattcacaaagaaaa

SEQ ID NO: 723060 - DNA, 15 bp, Homo sapiens
attcacaaagaaaag

SEQ ID NO: 723061 - DNA, 15 bp, Homo sapiens
ttcacaaagaaaaga

SEQ ID NO: 723062 - DNA, 15 bp, Homo sapiens
tcacaaagaaaagaa

SEQ ID NO: 723063 - DNA, 15 bp, Homo sapiens
cacaaagaaaagaac

SEQ ID NO: 723064 - DNA, 15 bp, Homo sapiens
acaaagaaaagaact

SEQ ID NO: 723065 - DNA, 15 bp, Homo sapiens
caaagaaaagaactg

SEQ ID NO: 723066 - DNA, 15 bp, Homo sapiens
aaagaaaagaactgc

SEQ ID NO: 723067 - DNA, 15 bp, Homo sapiens
aagaaaagaactgca

SEQ ID NO: 723068 - DNA, 15 bp, Homo sapiens
agaaaagaactgcag

SEQ ID NO: 723069 - DNA, 15 bp, Homo sapiens
gaaaagaactgcagg

SEQ ID NO: 723070 - DNA, 15 bp, Homo sapiens
aaaagaactgcaggt

SEQ ID NO: 723071 - DNA, 15 bp, Homo sapiens
aaagaactgcaggtt

SEQ ID NO: 723072 - DNA, 15 bp, Homo sapiens
aagaactgcaggtta

SEQ ID NO: 723073 - DNA, 15 bp, Homo sapiens
agaactgcaggttat

SEQ ID NO: 723074 - DNA, 15 bp, Homo sapiens
gaactgcaggttatg

SEQ ID NO: 723075 - DNA, 15 bp, Homo sapiens
aactgcaggttatgt

SEQ ID NO: 723076 - DNA, 15 bp, Homo sapiens
actgcaggttatgta

SEQ ID NO: 723077 - DNA, 15 bp, Homo sapiens
ctgcaggttatgtag

SEQ ID NO: 723078 - DNA, 15 bp, Homo sapiens
tgcaggttatgtagt

SEQ ID NO: 723079 - DNA, 15 bp, Homo sapiens
gcaggttatgtagta

SEQ ID NO: 723080 - DNA, 15 bp, Homo sapiens
caggttatgtagtat

SEQ ID NO: 723081 - DNA, 15 bp, Homo sapiens
aggttatgtagtata

SEQ ID NO: 723082 - DNA, 15 bp, Homo sapiens
ggttatgtagtatat

SEQ ID NO: 723083 - DNA, 15 bp, Homo sapiens
gttatgtagtatatt

SEQ ID NO: 723084 - DNA, 15 bp, Homo sapiens
ttatgtagtatattc

SEQ ID NO: 723085 - DNA, 15 bp, Homo sapiens
tatgtagtatattcc

SEQ ID NO: 723086 - DNA, 15 bp, Homo sapiens
atgtagtatattccc

SEQ ID NO: 723087 - DNA, 15 bp, Homo sapiens
tgtagtatattccct

SEQ ID NO: 723088 - DNA, 15 bp, Homo sapiens
gtagtatattcccta

SEQ ID NO: 723089 - DNA, 15 bp, Homo sapiens
tagtatattccctat

SEQ ID NO: 723090 - DNA, 15 bp, Homo sapiens
agtatattccctatc

SEQ ID NO: 723091 - DNA, 15 bp, Homo sapiens
gtatattccctatct

SEQ ID NO: 723092 - DNA, 15 bp, Homo sapiens
tatattccctatctg

SEQ ID NO: 723093 - DNA, 15 bp, Homo sapiens
atattccctatctgt

SEQ ID NO: 723094 - DNA, 15 bp, Homo sapiens
tattccctatctgtg

SEQ ID NO: 723095 - DNA, 15 bp, Homo sapiens
attccctatctgtga

SEQ ID NO: 723096 - DNA, 15 bp, Homo sapiens
ttccctatctgtgat

SEQ ID NO: 723097 - DNA, 15 bp, Homo sapiens
tccctatctgtgatt

SEQ ID NO: 723098 - DNA, 15 bp, Homo sapiens
ccctatctgtgattt

SEQ ID NO: 723099 - DNA, 15 bp, Homo sapiens
cctatctgtgattta

SEQ ID NO: 723100 - DNA, 15 bp, Homo sapiens
ctatctgtgatttag

SEQ ID NO: 723101 - DNA, 15 bp, Homo sapiens
tatctgtgatttagg

SEQ ID NO: 723102 - DNA, 15 bp, Homo sapiens
atctgtgatttaggt

SEQ ID NO: 723103 - DNA, 15 bp, Homo sapiens
tctgtgatttaggtt

SEQ ID NO: 723104 - DNA, 15 bp, Homo sapiens
ctgtgatttaggttt

SEQ ID NO: 723105 - DNA, 15 bp, Homo sapiens
tgtgatttaggtttg

SEQ ID NO: 723106 - DNA, 15 bp, Homo sapiens
gtgatttaggtttgc

SEQ ID NO: 723107 - DNA, 15 bp, Homo sapiens
tgatttaggtttgca

SEQ ID NO: 723108 - DNA, 15 bp, Homo sapiens
gatttaggtttgcac

SEQ ID NO: 723109 - DNA, 15 bp, Homo sapiens
atttaggtttgcaca

SEQ ID NO: 723110 - DNA, 15 bp, Homo sapiens
tttaggtttgcacaa

SEQ ID NO: 723111 - DNA, 15 bp, Homo sapiens
ttaggtttgcacaaa

SEQ ID NO: 723112 - DNA, 15 bp, Homo sapiens
taggtttgcacaaag

SEQ ID NO: 723113 - DNA, 15 bp, Homo sapiens
aggtttgcacaaaga

SEQ ID NO: 723114 - DNA, 15 bp, Homo sapiens
ggtttgcacaaagac

SEQ ID NO: 723115 - DNA, 15 bp, Homo sapiens
gtttgcacaaagaca

SEQ ID NO: 723116 - DNA, 15 bp, Homo sapiens
tttgcacaaagacac

SEQ ID NO: 723117 - DNA, 15 bp, Homo sapiens
ttgcacaaagacact

SEQ ID NO: 723118 - DNA, 15 bp, Homo sapiens
tgcacaaagacactt

SEQ ID NO: 723119 - DNA, 15 bp, Homo sapiens
gcacaaagacactta

SEQ ID NO: 723120 - DNA, 15 bp, Homo sapiens
cacaaagacacttat

SEQ ID NO: 723121 - DNA, 15 bp, Homo sapiens
acaaagacacttatt

SEQ ID NO: 723122 - DNA, 15 bp, Homo sapiens
caaagacacttattc

SEQ ID NO: 723123 - DNA, 15 bp, Homo sapiens
aaagacacttattct

SEQ ID NO: 723124 - DNA, 15 bp, Homo sapiens
aagacacttattcta

SEQ ID NO: 723125 - DNA, 15 bp, Homo sapiens
agacacttattctag

SEQ ID NO: 723126 - DNA, 15 bp, Homo sapiens
gacacttattctagc

SEQ ID NO: 723127 - DNA, 15 bp, Homo sapiens
acacttattctagca

SEQ ID NO: 723128 - DNA, 15 bp, Homo sapiens
cacttattctagcaa

SEQ ID NO: 723129 - DNA, 15 bp, Homo sapiens
acttattctagcaaa

SEQ ID NO: 723130 - DNA, 15 bp, Homo sapiens
cttattctagcaaaa

SEQ ID NO: 723131 - DNA, 15 bp, Homo sapiens
ttattctagcaaaaa

SEQ ID NO: 723132 - DNA, 15 bp, Homo sapiens
tattctagcaaaaaa

SEQ ID NO: 723133 - DNA, 15 bp, Homo sapiens
attctagcaaaaaag

SEQ ID NO: 723134 - DNA, 15 bp, Homo sapiens
ttctagcaaaaaaga

SEQ ID NO: 723135 - DNA, 15 bp, Homo sapiens
tctagcaaaaaagaa

SEQ ID NO: 723136 - DNA, 15 bp, Homo sapiens
ctagcaaaaaagaaa

SEQ ID NO: 723137 - DNA, 15 bp, Homo sapiens
tagcaaaaaagaaaa

SEQ ID NO: 723138 - DNA, 15 bp, Homo sapiens
agcaaaaaagaaaag

SEQ ID NO: 723139 - DNA, 15 bp, Homo sapiens
gcaaaaaagaaaaga

SEQ ID NO: 723140 - DNA, 15 bp, Homo sapiens
caaaaaagaaaagat

SEQ ID NO: 723141 - DNA, 15 bp, Homo sapiens
aaaaagaaaagatag

SEQ ID NO: 723142 - DNA, 15 bp, Homo sapiens
aaaagaaaagatagt

SEQ ID NO: 723143 - DNA, 15 bp, Homo sapiens
aaagaaaagatagtg

SEQ ID NO: 723144 - DNA, 15 bp, Homo sapiens
aagaaaagatagtgt

SEQ ID NO: 723145 - DNA, 15 bp, Homo sapiens
agaaaagatagtgtt

SEQ ID NO: 723146 - DNA, 15 bp, Homo sapiens
gaaaagatagtgttt

SEQ ID NO: 723147 - DNA, 15 bp, Homo sapiens
aaaagatagtgtttc

SEQ ID NO: 723148 - DNA, 15 bp, Homo sapiens
aaagatagtgtttcc

SEQ ID NO: 723149 - DNA, 15 bp, Homo sapiens
aagatagtgtttcca

SEQ ID NO: 723150 - DNA, 15 bp, Homo sapiens
agatagtgtttccac

SEQ ID NO: 723151 - DNA, 15 bp, Homo sapiens
gatagtgtttccacc

SEQ ID NO: 723152 - DNA, 15 bp, Homo sapiens
atagtgtttccacca

SEQ ID NO: 723153 - DNA, 15 bp, Homo sapiens
tagtgtttccaccat

SEQ ID NO: 723154 - DNA, 15 bp, Homo sapiens
agtgtttccaccatg

SEQ ID NO: 723155 - DNA, 15 bp, Homo sapiens
gtgtttccaccatgc

SEQ ID NO: 723156 - DNA, 15 bp, Homo sapiens
tgtttccaccatgct

SEQ ID NO: 723157 - DNA, 15 bp, Homo sapiens
gtttccaccatgcta

SEQ ID NO: 723158 - DNA, 15 bp, Homo sapiens
tttccaccatgctac

SEQ ID NO: 723159 - DNA, 15 bp, Homo sapiens
ttccaccatgctacc

SEQ ID NO: 723160 - DNA, 15 bp, Homo sapiens
tccaccatgctacct

SEQ ID NO: 723161 - DNA, 15 bp, Homo sapiens
ccaccatgctacctt

SEQ ID NO: 723162 - DNA, 15 bp, Homo sapiens
caccatgctaccttt

SEQ ID NO: 723163 - DNA, 15 bp, Homo sapiens
accatgctacctttt

SEQ ID NO: 723164 - DNA, 15 bp, Homo sapiens
ccatgctaccttttt

SEQ ID NO: 723165 - DNA, 15 bp, Homo sapiens
catgctacctttttt

SEQ ID NO: 723166 - DNA, 15 bp, Homo sapiens
atgctaccttttttt

SEQ ID NO: 723167 - DNA, 15 bp, Homo sapiens
tgctacctttttttt

SEQ ID NO: 723168 - DNA, 15 bp, Homo sapiens
gctaccttttttttc

SEQ ID NO: 723169 - DNA, 15 bp, Homo sapiens
ctaccttttttttct

SEQ ID NO: 723170 - DNA, 15 bp, Homo sapiens
taccttttttttctt

SEQ ID NO: 723171 - DNA, 15 bp, Homo sapiens
accttttttttcttt

SEQ ID NO: 723172 - DNA, 15 bp, Homo sapiens
ccttttttttctttt

SEQ ID NO: 723173 - DNA, 15 bp, Homo sapiens
cttttttttcttttt

SEQ ID NO: 723174 - DNA, 15 bp, Homo sapiens
ttttttttcttttta

SEQ ID NO: 723175 - DNA, 15 bp, Homo sapiens
tttttttctttttat

SEQ ID NO: 723176 - DNA, 15 bp, Homo sapiens
ttttttctttttata

SEQ ID NO: 723177 - DNA, 15 bp, Homo sapiens
tttttctttttatag

SEQ ID NO: 723178 - DNA, 15 bp, Homo sapiens
ttttctttttataga

SEQ ID NO: 723179 - DNA, 15 bp, Homo sapiens
tttctttttatagag

SEQ ID NO: 723180 - DNA, 15 bp, Homo sapiens
ttctttttatagagt

SEQ ID NO: 723181 - DNA, 15 bp, Homo sapiens
tctttttatagagtc

SEQ ID NO: 723182 - DNA, 15 bp, Homo sapiens
ctttttatagagtct

SEQ ID NO: 723183 - DNA, 15 bp, Homo sapiens
tttttatagagtctc

SEQ ID NO: 723184 - DNA, 15 bp, Homo sapiens
ttttatagagtctca

SEQ ID NO: 723185 - DNA, 15 bp, Homo sapiens
tttatagagtctcag

SEQ ID NO: 723186 - DNA, 15 bp, Homo sapiens
ttatagagtctcaga

SEQ ID NO: 723187 - DNA, 15 bp, Homo sapiens
tatagagtctcagag

SEQ ID NO: 723188 - DNA, 15 bp, Homo sapiens
atagagtctcagagt

SEQ ID NO: 723189 - DNA, 15 bp, Homo sapiens
tagagtctcagagta

SEQ ID NO: 723190 - DNA, 15 bp, Homo sapiens
agagtctcagagtaa

SEQ ID NO: 723191 - DNA, 15 bp, Homo sapiens
gagtctcagagtaag

SEQ ID NO: 723192 - DNA, 15 bp, Homo sapiens
agtctcagagtaaga

SEQ ID NO: 723193 - DNA, 15 bp, Homo sapiens
gtctcagagtaagat

SEQ ID NO: 723194 - DNA, 15 bp, Homo sapiens
tctcagagtaagatt

SEQ ID NO: 723195 - DNA, 15 bp, Homo sapiens
ctcagagtaagattt

SEQ ID NO: 723196 - DNA, 15 bp, Homo sapiens
tcagagtaagattta

SEQ ID NO: 723197 - DNA, 15 bp, Homo sapiens
cagagtaagatttaa

SEQ ID NO: 723198 - DNA, 15 bp, Homo sapiens
agagtaagatttaaa

SEQ ID NO: 723199 - DNA, 15 bp, Homo sapiens
gagtaagatttaaat

SEQ ID NO: 723200 - DNA, 15 bp, Homo sapiens
agtaagatttaaatc

SEQ ID NO: 723201 - DNA, 15 bp, Homo sapiens
gtaagatttaaatca

SEQ ID NO: 723202 - DNA, 15 bp, Homo sapiens
taagatttaaatcat

SEQ ID NO: 723203 - DNA, 15 bp, Homo sapiens
aagatttaaatcata

SEQ ID NO: 723204 - DNA, 15 bp, Homo sapiens
agatttaaatcataa

SEQ ID NO: 723205 - DNA, 15 bp, Homo sapiens
gatttaaatcataat

SEQ ID NO: 723206 - DNA, 15 bp, Homo sapiens
atttaaatcataatt

SEQ ID NO: 723207 - DNA, 15 bp, Homo sapiens
tttaaatcataattt

SEQ ID NO: 723208 - DNA, 15 bp, Homo sapiens
ttaaatcataatttt

SEQ ID NO: 723209 - DNA, 15 bp, Homo sapiens
taaatcataattttt

SEQ ID NO: 723210 - DNA, 15 bp, Homo sapiens
aaatcataattttta

SEQ ID NO: 723211 - DNA, 15 bp, Homo sapiens
aatcataatttttaa

SEQ ID NO: 723212 - DNA, 15 bp, Homo sapiens
atcataatttttaac

SEQ ID NO: 723213 - DNA, 15 bp, Homo sapiens
tcataatttttaacc

SEQ ID NO: 723214 - DNA, 15 bp, Homo sapiens
cataatttttaacct

SEQ ID NO: 723215 - DNA, 15 bp, Homo sapiens
ataatttttaacctt

SEQ ID NO: 723216 - DNA, 15 bp, Homo sapiens
taatttttaaccttt

SEQ ID NO: 723217 - DNA, 15 bp, Homo sapiens
aatttttaaccttta

SEQ ID NO: 723218 - DNA, 15 bp, Homo sapiens
atttttaacctttaa

SEQ ID NO: 723219 - DNA, 15 bp, Homo sapiens
tttttaacctttaaa

SEQ ID NO: 723220 - DNA, 15 bp, Homo sapiens
ttttaacctttaaaa

SEQ ID NO: 723221 - DNA, 15 bp, Homo sapiens
tttaacctttaaaag

SEQ ID NO: 723222 - DNA, 15 bp, Homo sapiens
ttaacctttaaaagt

SEQ ID NO: 723223 - DNA, 15 bp, Homo sapiens
taacctttaaaagtc

SEQ ID NO: 723224 - DNA, 15 bp, Homo sapiens
aacctttaaaagtct

SEQ ID NO: 723225 - DNA, 15 bp, Homo sapiens
acctttaaaagtctg

SEQ ID NO: 723226 - DNA, 15 bp, Homo sapiens
cctttaaaagtctgt

SEQ ID NO: 723227 - DNA, 15 bp, Homo sapiens
ctttaaaagtctgtt

SEQ ID NO: 723228 - DNA, 15 bp, Homo sapiens
tttaaaagtctgttc

SEQ ID NO: 723229 - DNA, 15 bp, Homo sapiens
ttaaaagtctgttca

SEQ ID NO: 723230 - DNA, 15 bp, Homo sapiens
taaaagtctgttcaa

SEQ ID NO: 723231 - DNA, 15 bp, Homo sapiens
aaaagtctgttcaag

SEQ ID NO: 723232 - DNA, 15 bp, Homo sapiens
aaagtctgttcaagt

SEQ ID NO: 723233 - DNA, 15 bp, Homo sapiens
aagtctgttcaagtt

SEQ ID NO: 723234 - DNA, 15 bp, Homo sapiens
agtctgttcaagttc

SEQ ID NO: 723235 - DNA, 15 bp, Homo sapiens
gtctgttcaagttca

SEQ ID NO: 723236 - DNA, 15 bp, Homo sapiens
tctgttcaagttcaa

SEQ ID NO: 723237 - DNA, 15 bp, Homo sapiens
ctgttcaagttcaat

SEQ ID NO: 723238 - DNA, 15 bp, Homo sapiens
tgttcaagttcaatt

SEQ ID NO: 723239 - DNA, 15 bp, Homo sapiens
gttcaagttcaatta

SEQ ID NO: 723240 - DNA, 15 bp, Homo sapiens
ttcaagttcaattac

SEQ ID NO: 723241 - DNA, 15 bp, Homo sapiens
tcaagttcaattaca

SEQ ID NO: 723242 - DNA, 15 bp, Homo sapiens
caagttcaattacaa

SEQ ID NO: 723243 - DNA, 15 bp, Homo sapiens
aagttcaattacaac

SEQ ID NO: 723244 - DNA, 15 bp, Homo sapiens
agttcaattacaacc

SEQ ID NO: 723245 - DNA, 15 bp, Homo sapiens
gttcaattacaacca

SEQ ID NO: 723246 - DNA, 15 bp, Homo sapiens
ttcaattacaaccat

SEQ ID NO: 723247 - DNA, 15 bp, Homo sapiens
tcaattacaaccata

SEQ ID NO: 723248 - DNA, 15 bp, Homo sapiens
caattacaaccatag

SEQ ID NO: 723249 - DNA, 15 bp, Homo sapiens
aattacaaccataga

SEQ ID NO: 723250 - DNA, 15 bp, Homo sapiens
attacaaccatagaa

SEQ ID NO: 723251 - DNA, 15 bp, Homo sapiens
ttacaaccatagaaa

SEQ ID NO: 723252 - DNA, 15 bp, Homo sapiens
tacaaccatagaaac

SEQ ID NO: 723253 - DNA, 15 bp, Homo sapiens
acaaccatagaaact

SEQ ID NO: 723254 - DNA, 15 bp, Homo sapiens
caaccatagaaactg

SEQ ID NO: 723255 - DNA, 15 bp, Homo sapiens
aaccatagaaactgt

SEQ ID NO: 723256 - DNA, 15 bp, Homo sapiens
accatagaaactgta

SEQ ID NO: 723257 - DNA, 15 bp, Homo sapiens
ccatagaaactgtac

SEQ ID NO: 723258 - DNA, 15 bp, Homo sapiens
catagaaactgtact

SEQ ID NO: 723259 - DNA, 15 bp, Homo sapiens
atagaaactgtactg

SEQ ID NO: 723260 - DNA, 15 bp, Homo sapiens
tagaaactgtactgg

SEQ ID NO: 723261 - DNA, 15 bp, Homo sapiens
agaaactgtactggt

SEQ ID NO: 723262 - DNA, 15 bp, Homo sapiens
gaaactgtactggta

SEQ ID NO: 723263 - DNA, 15 bp, Homo sapiens
aaactgtactggtat

SEQ ID NO: 723264 - DNA, 15 bp, Homo sapiens
aactgtactggtatc

SEQ ID NO: 723265 - DNA, 15 bp, Homo sapiens
actgtactggtatca

SEQ ID NO: 723266 - DNA, 15 bp, Homo sapiens
ctgtactggtatcag

SEQ ID NO: 723267 - DNA, 15 bp, Homo sapiens
tgtactggtatcaga

SEQ ID NO: 723268 - DNA, 15 bp, Homo sapiens
gtactggtatcagaa

SEQ ID NO: 723269 - DNA, 15 bp, Homo sapiens
tactggtatcagaac

SEQ ID NO: 723270 - DNA, 15 bp, Homo sapiens
actggtatcagaaca

SEQ ID NO: 723271 - DNA, 15 bp, Homo sapiens
ctggtatcagaacat

SEQ ID NO: 723272 - DNA, 15 bp, Homo sapiens
tggtatcagaacata

SEQ ID NO: 723273 - DNA, 15 bp, Homo sapiens
ggtatcagaacataa

SEQ ID NO: 723274 - DNA, 15 bp, Homo sapiens
gtatcagaacataac

SEQ ID NO: 723275 - DNA, 15 bp, Homo sapiens
tatcagaacataact

SEQ ID NO: 723276 - DNA, 15 bp, Homo sapiens
atcagaacataacta

SEQ ID NO: 723277 - DNA, 15 bp, Homo sapiens
tcagaacataactat

SEQ ID NO: 723278 - DNA, 15 bp, Homo sapiens
cagaacataactatt

SEQ ID NO: 723279 - DNA, 15 bp, Homo sapiens
agaacataactattt

SEQ ID NO: 723280 - DNA, 15 bp, Homo sapiens
gaacataactatttt

SEQ ID NO: 723281 - DNA, 15 bp, Homo sapiens
aacataactatttta

SEQ ID NO: 723282 - DNA, 15 bp, Homo sapiens
acataactattttat

SEQ ID NO: 723283 - DNA, 15 bp, Homo sapiens
cataactattttatt

SEQ ID NO: 723284 - DNA, 15 bp, Homo sapiens
ataactattttatta

SEQ ID NO: 723285 - DNA, 15 bp, Homo sapiens
taactattttattac

SEQ ID NO: 723286 - DNA, 15 bp, Homo sapiens
aactattttattaca

SEQ ID NO: 723287 - DNA, 15 bp, Homo sapiens
actattttattacaa

SEQ ID NO: 723288 - DNA, 15 bp, Homo sapiens
ctattttattacaaa

SEQ ID NO: 723289 - DNA, 15 bp, Homo sapiens
tattttattacaaaa

SEQ ID NO: 723290 - DNA, 15 bp, Homo sapiens
attttattacaaaac

SEQ ID NO: 723291 - DNA, 15 bp, Homo sapiens
ttttattacaaaact

SEQ ID NO: 723292 - DNA, 15 bp, Homo sapiens
tttattacaaaactt

SEQ ID NO: 723293 - DNA, 15 bp, Homo sapiens
ttattacaaaactta

SEQ ID NO: 723294 - DNA, 15 bp, Homo sapiens
tattacaaaacttaa

SEQ ID NO: 723295 - DNA, 15 bp, Homo sapiens
attacaaaacttaac

SEQ ID NO: 723296 - DNA, 15 bp, Homo sapiens
ttacaaaacttaaca

SEQ ID NO: 723297 - DNA, 15 bp, Homo sapiens
tacaaaacttaacat

SEQ ID NO: 723298 - DNA, 15 bp, Homo sapiens
acaaaacttaacatt

SEQ ID NO: 723299 - DNA, 15 bp, Homo sapiens
caaaacttaacatta

SEQ ID NO: 723300 - DNA, 15 bp, Homo sapiens
aaaacttaacattat

SEQ ID NO: 723301 - DNA, 15 bp, Homo sapiens
aaacttaacattatt

SEQ ID NO: 723302 - DNA, 15 bp, Homo sapiens
aacttaacattattt

SEQ ID NO: 723303 - DNA, 15 bp, Homo sapiens
acttaacattattta

SEQ ID NO: 723304 - DNA, 15 bp, Homo sapiens
cttaacattatttac

SEQ ID NO: 723305 - DNA, 15 bp, Homo sapiens
ttaacattatttaca

SEQ ID NO: 723306 - DNA, 15 bp, Homo sapiens
taacattatttacaa

SEQ ID NO: 723307 - DNA, 15 bp, Homo sapiens
aacattatttacaaa

SEQ ID NO: 723308 - DNA, 15 bp, Homo sapiens
acattatttacaaaa

SEQ ID NO: 723309 - DNA, 15 bp, Homo sapiens
cattatttacaaaat

SEQ ID NO: 723310 - DNA, 15 bp, Homo sapiens
attatttacaaaatg

SEQ ID NO: 723311 - DNA, 15 bp, Homo sapiens
ttatttacaaaatga

SEQ ID NO: 723312 - DNA, 15 bp, Homo sapiens
tatttacaaaatgaa

SEQ ID NO: 723313 - DNA, 15 bp, Homo sapiens
atttacaaaatgaaa

SEQ ID NO: 723314 - DNA, 15 bp, Homo sapiens
tttacaaaatgaaaa

SEQ ID NO: 723315 - DNA, 15 bp, Homo sapiens
ttacaaaatgaaaaa

SEQ ID NO: 723316 - DNA, 15 bp, Homo sapiens
tacaaaatgaaaaaa

SEQ ID NO: 723317 - DNA, 15 bp, Homo sapiens
acaaaatgaaaaaat

SEQ ID NO: 723318 - DNA, 15 bp, Homo sapiens
caaaatgaaaaaata

SEQ ID NO: 723319 - DNA, 15 bp, Homo sapiens
aaaatgaaaaaataa

SEQ ID NO: 723320 - DNA, 15 bp, Homo sapiens
aaatgaaaaaataat

SEQ ID NO: 723321 - DNA, 15 bp, Homo sapiens
aatgaaaaaataatc

SEQ ID NO: 723322 - DNA, 15 bp, Homo sapiens
atgaaaaaataatca

SEQ ID NO: 723323 - DNA, 15 bp, Homo sapiens
tgaaaaaataatcaa

SEQ ID NO: 723324 - DNA, 15 bp, Homo sapiens
gaaaaaataatcaaa

SEQ ID NO: 723325 - DNA, 15 bp, Homo sapiens
aaaaaataatcaaat

SEQ ID NO: 723326 - DNA, 15 bp, Homo sapiens
aaaaataatcaaatg

SEQ ID NO: 723327 - DNA, 15 bp, Homo sapiens
aaaataatcaaatga

SEQ ID NO: 723328 - DNA, 15 bp, Homo sapiens
aaataatcaaatgac

SEQ ID NO: 723329 - DNA, 15 bp, Homo sapiens
aataatcaaatgact

SEQ ID NO: 723330 - DNA, 15 bp, Homo sapiens
ataatcaaatgacta

SEQ ID NO: 723331 - DNA, 15 bp, Homo sapiens
taatcaaatgactat

SEQ ID NO: 723332 - DNA, 15 bp, Homo sapiens
aatcaaatgactatt

SEQ ID NO: 723333 - DNA, 15 bp, Homo sapiens
atcaaatgactattg

SEQ ID NO: 723334 - DNA, 15 bp, Homo sapiens
tcaaatgactattgc

SEQ ID NO: 723335 - DNA, 15 bp, Homo sapiens
caaatgactattgca

SEQ ID NO: 723336 - DNA, 15 bp, Homo sapiens
aaatgactattgcag

SEQ ID NO: 723337 - DNA, 15 bp, Homo sapiens
aatgactattgcagg

SEQ ID NO: 723338 - DNA, 15 bp, Homo sapiens
atgactattgcaggc

SEQ ID NO: 723339 - DNA, 15 bp, Homo sapiens
tgactattgcaggcc

SEQ ID NO: 723340 - DNA, 15 bp, Homo sapiens
gactattgcaggcca

SEQ ID NO: 723341 - DNA, 15 bp, Homo sapiens
actattgcaggccaa

SEQ ID NO: 723342 - DNA, 15 bp, Homo sapiens
ctattgcaggccaaa

SEQ ID NO: 723343 - DNA, 15 bp, Homo sapiens
tattgcaggccaaag

SEQ ID NO: 723344 - DNA, 15 bp, Homo sapiens
attgcaggccaaagt

SEQ ID NO: 723345 - DNA, 15 bp, Homo sapiens
ttgcaggccaaagtt

SEQ ID NO: 723346 - DNA, 15 bp, Homo sapiens
tgcaggccaaagtta

SEQ ID NO: 723347 - DNA, 15 bp, Homo sapiens
gcaggccaaagttaa

SEQ ID NO: 723348 - DNA, 15 bp, Homo sapiens
caggccaaagttaaa

SEQ ID NO: 723349 - DNA, 15 bp, Homo sapiens
aggccaaagttaaag

SEQ ID NO: 723350 - DNA, 15 bp, Homo sapiens
ggccaaagttaaagg

SEQ ID NO: 723351 - DNA, 15 bp, Homo sapiens
gccaaagttaaaggt

SEQ ID NO: 723352 - DNA, 15 bp, Homo sapiens
ccaaagttaaaggtt

SEQ ID NO: 723353 - DNA, 15 bp, Homo sapiens
caaagttaaaggttt

SEQ ID NO: 723354 - DNA, 15 bp, Homo sapiens
aaagttaaaggtttt

SEQ ID NO: 723355 - DNA, 15 bp, Homo sapiens
aagttaaaggttttt

SEQ ID NO: 723356 - DNA, 15 bp, Homo sapiens
agttaaaggtttttc

SEQ ID NO: 723357 - DNA, 15 bp, Homo sapiens
gttaaaggtttttca

SEQ ID NO: 723358 - DNA, 15 bp, Homo sapiens
ttaaaggtttttcac

SEQ ID NO: 723359 - DNA, 15 bp, Homo sapiens
taaaggtttttcact

SEQ ID NO: 723360 - DNA, 15 bp, Homo sapiens
aaaggtttttcactc

SEQ ID NO: 723361 - DNA, 15 bp, Homo sapiens
aaggtttttcactca

SEQ ID NO: 723362 - DNA, 15 bp, Homo sapiens
aggtttttcactcaa

SEQ ID NO: 723363 - DNA, 15 bp, Homo sapiens
ggtttttcactcaat

SEQ ID NO: 723364 - DNA, 15 bp, Homo sapiens
gtttttcactcaatg

SEQ ID NO: 723365 - DNA, 15 bp, Homo sapiens
tttttcactcaatga

SEQ ID NO: 723366 - DNA, 15 bp, Homo sapiens
ttttcactcaatgat

SEQ ID NO: 723367 - DNA, 15 bp, Homo sapiens
tttcactcaatgatt

SEQ ID NO: 723368 - DNA, 15 bp, Homo sapiens
ttcactcaatgattg

SEQ ID NO: 723369 - DNA, 15 bp, Homo sapiens
tcactcaatgattga

SEQ ID NO: 723370 - DNA, 15 bp, Homo sapiens
cactcaatgattgaa

SEQ ID NO: 723371 - DNA, 15 bp, Homo sapiens
actcaatgattgaag

SEQ ID NO: 723372 - DNA, 15 bp, Homo sapiens
ctcaatgattgaaga

SEQ ID NO: 723373 - DNA, 15 bp, Homo sapiens
tcaatgattgaagaa

SEQ ID NO: 723374 - DNA, 15 bp, Homo sapiens
caatgattgaagaaa

SEQ ID NO: 723375 - DNA, 15 bp, Homo sapiens
aatgattgaagaaaa

SEQ ID NO: 723376 - DNA, 15 bp, Homo sapiens
atgattgaagaaaaa

SEQ ID NO: 723377 - DNA, 15 bp, Homo sapiens
tgattgaagaaaaat

SEQ ID NO: 723378 - DNA, 15 bp, Homo sapiens
gattgaagaaaaatt

SEQ ID NO: 723379 - DNA, 15 bp, Homo sapiens
attgaagaaaaatta

SEQ ID NO: 723380 - DNA, 15 bp, Homo sapiens
ttgaagaaaaattaa

SEQ ID NO: 723381 - DNA, 15 bp, Homo sapiens
tgaagaaaaattaag

SEQ ID NO: 723382 - DNA, 15 bp, Homo sapiens
gaagaaaaattaagc

SEQ ID NO: 723383 - DNA, 15 bp, Homo sapiens
aagaaaaattaagca

SEQ ID NO: 723384 - DNA, 15 bp, Homo sapiens
agaaaaattaagcaa

SEQ ID NO: 723385 - DNA, 15 bp, Homo sapiens
gaaaaattaagcaat

SEQ ID NO: 723386 - DNA, 15 bp, Homo sapiens
aaaaattaagcaata

SEQ ID NO: 723387 - DNA, 15 bp, Homo sapiens
aaaattaagcaatat

SEQ ID NO: 723388 - DNA, 15 bp, Homo sapiens
aaattaagcaatatt

SEQ ID NO: 723389 - DNA, 15 bp, Homo sapiens
aattaagcaatattt

SEQ ID NO: 723390 - DNA, 15 bp, Homo sapiens
attaagcaatatttc

SEQ ID NO: 723391 - DNA, 15 bp, Homo sapiens
ttaagcaatatttcc

SEQ ID NO: 723392 - DNA, 15 bp, Homo sapiens
taagcaatatttcca

SEQ ID NO: 723393 - DNA, 15 bp, Homo sapiens
aagcaatatttccat

SEQ ID NO: 723394 - DNA, 15 bp, Homo sapiens
agcaatatttccatg

SEQ ID NO: 723395 - DNA, 15 bp, Homo sapiens
gcaatatttccatgc

SEQ ID NO: 723396 - DNA, 15 bp, Homo sapiens
caatatttccatgca

SEQ ID NO: 723397 - DNA, 15 bp, Homo sapiens
aatatttccatgcac

SEQ ID NO: 723398 - DNA, 15 bp, Homo sapiens
atatttccatgcact

SEQ ID NO: 723399 - DNA, 15 bp, Homo sapiens
tatttccatgcactc

SEQ ID NO: 723400 - DNA, 15 bp, Homo sapiens
atttccatgcactca

SEQ ID NO: 723401 - DNA, 15 bp, Homo sapiens
tttccatgcactcac

SEQ ID NO: 723402 - DNA, 15 bp, Homo sapiens
ttccatgcactcaca

SEQ ID NO: 723403 - DNA, 15 bp, Homo sapiens
tccatgcactcacac

SEQ ID NO: 723404 - DNA, 15 bp, Homo sapiens
ccatgcactcacacc

SEQ ID NO: 723405 - DNA, 15 bp, Homo sapiens
catgcactcacacca

SEQ ID NO: 723406 - DNA, 15 bp, Homo sapiens
atgcactcacaccag

SEQ ID NO: 723407 - DNA, 15 bp, Homo sapiens
tgcactcacaccaga

SEQ ID NO: 723408 - DNA, 15 bp, Homo sapiens
gcactcacaccagat

SEQ ID NO: 723409 - DNA, 15 bp, Homo sapiens
cactcacaccagatc

SEQ ID NO: 723410 - DNA, 15 bp, Homo sapiens
actcacaccagatca

SEQ ID NO: 723411 - DNA, 15 bp, Homo sapiens
ctcacaccagatcat

SEQ ID NO: 723412 - DNA, 15 bp, Homo sapiens
tcacaccagatcatt

SEQ ID NO: 723413 - DNA, 15 bp, Homo sapiens
cacaccagatcattt

SEQ ID NO: 723414 - DNA, 15 bp, Homo sapiens
acaccagatcatttc

SEQ ID NO: 723415 - DNA, 15 bp, Homo sapiens
caccagatcatttct

SEQ ID NO: 723416 - DNA, 15 bp, Homo sapiens
accagatcatttctg

SEQ ID NO: 723417 - DNA, 15 bp, Homo sapiens
ccagatcatttctga

SEQ ID NO: 723418 - DNA, 15 bp, Homo sapiens
cagatcatttctgaa

SEQ ID NO: 723419 - DNA, 15 bp, Homo sapiens
agatcatttctgaaa

SEQ ID NO: 723420 - DNA, 15 bp, Homo sapiens
gatcatttctgaaat

SEQ ID NO: 723421 - DNA, 15 bp, Homo sapiens
atcatttctgaaata

SEQ ID NO: 723422 - DNA, 15 bp, Homo sapiens
tcatttctgaaatat

SEQ ID NO: 723423 - DNA, 15 bp, Homo sapiens
catttctgaaatatg

SEQ ID NO: 723424 - DNA, 15 bp, Homo sapiens
atttctgaaatatgc

SEQ ID NO: 723425 - DNA, 15 bp, Homo sapiens
tttctgaaatatgca

SEQ ID NO: 723426 - DNA, 15 bp, Homo sapiens
ttctgaaatatgcaa

SEQ ID NO: 723427 - DNA, 15 bp, Homo sapiens
tctgaaatatgcaaa

SEQ ID NO: 723428 - DNA, 15 bp, Homo sapiens
ctgaaatatgcaaac

SEQ ID NO: 723429 - DNA, 15 bp, Homo sapiens
tgaaatatgcaaact

SEQ ID NO: 723430 - DNA, 15 bp, Homo sapiens
gaaatatgcaaactc

SEQ ID NO: 723431 - DNA, 15 bp, Homo sapiens
aaatatgcaaactct

SEQ ID NO: 723432 - DNA, 15 bp, Homo sapiens
aatatgcaaactctt

SEQ ID NO: 723433 - DNA, 15 bp, Homo sapiens
atatgcaaactctta

SEQ ID NO: 723434 - DNA, 15 bp, Homo sapiens
tatgcaaactcttaa

SEQ ID NO: 723435 - DNA, 15 bp, Homo sapiens
atgcaaactcttaaa

SEQ ID NO: 723436 - DNA, 15 bp, Homo sapiens
tgcaaactcttaaaa

SEQ ID NO: 723437 - DNA, 15 bp, Homo sapiens
gcaaactcttaaaat

SEQ ID NO: 723438 - DNA, 15 bp, Homo sapiens
caaactcttaaaatt

SEQ ID NO: 723439 - DNA, 15 bp, Homo sapiens
aaactcttaaaattc

SEQ ID NO: 723440 - DNA, 15 bp, Homo sapiens
aactcttaaaattca

SEQ ID NO: 723441 - DNA, 15 bp, Homo sapiens
actcttaaaattcat

SEQ ID NO: 723442 - DNA, 15 bp, Homo sapiens
ctcttaaaattcatg

SEQ ID NO: 723443 - DNA, 15 bp, Homo sapiens
tcttaaaattcatgt

SEQ ID NO: 723444 - DNA, 15 bp, Homo sapiens
cttaaaattcatgtt

SEQ ID NO: 723445 - DNA, 15 bp, Homo sapiens
ttaaaattcatgtta

SEQ ID NO: 723446 - DNA, 15 bp, Homo sapiens
taaaattcatgttag

SEQ ID NO: 723447 - DNA, 15 bp, Homo sapiens
aaaattcatgttagt

SEQ ID NO: 723448 - DNA, 15 bp, Homo sapiens
aaattcatgttagta

SEQ ID NO: 723449 - DNA, 15 bp, Homo sapiens
aattcatgttagtaa

SEQ ID NO: 723450 - DNA, 15 bp, Homo sapiens
attcatgttagtaaa

SEQ ID NO: 723451 - DNA, 15 bp, Homo sapiens
ttcatgttagtaaaa

SEQ ID NO: 723452 - DNA, 15 bp, Homo sapiens
tcatgttagtaaaac

SEQ ID NO: 723453 - DNA, 15 bp, Homo sapiens
catgttagtaaaact

SEQ ID NO: 723454 - DNA, 15 bp, Homo sapiens
atgttagtaaaactt

SEQ ID NO: 723455 - DNA, 15 bp, Homo sapiens
tgttagtaaaacttt

SEQ ID NO: 723456 - DNA, 15 bp, Homo sapiens
gttagtaaaacttta

SEQ ID NO: 723457 - DNA, 15 bp, Homo sapiens
ttagtaaaactttaa

SEQ ID NO: 723458 - DNA, 15 bp, Homo sapiens
tagtaaaactttaat

SEQ ID NO: 723459 - DNA, 15 bp, Homo sapiens
agtaaaactttaatg

SEQ ID NO: 723460 - DNA, 15 bp, Homo sapiens
gtaaaactttaatgt

SEQ ID NO: 723461 - DNA, 15 bp, Homo sapiens
taaaactttaatgta

SEQ ID NO: 723462 - DNA, 15 bp, Homo sapiens
aaaactttaatgtat

SEQ ID NO: 723463 - DNA, 15 bp, Homo sapiens
aaactttaatgtatt

SEQ ID NO: 723464 - DNA, 15 bp, Homo sapiens
aactttaatgtattc

SEQ ID NO: 723465 - DNA, 15 bp, Homo sapiens
actttaatgtattca

SEQ ID NO: 723466 - DNA, 15 bp, Homo sapiens
ctttaatgtattcat

SEQ ID NO: 723467 - DNA, 15 bp, Homo sapiens
tttaatgtattcata

SEQ ID NO: 723468 - DNA, 15 bp, Homo sapiens
ttaatgtattcataa

SEQ ID NO: 723469 - DNA, 15 bp, Homo sapiens
taatgtattcataat

SEQ ID NO: 723470 - DNA, 15 bp, Homo sapiens
aatgtattcataata

SEQ ID NO: 723471 - DNA, 15 bp, Homo sapiens
atgtattcataatac

SEQ ID NO: 723472 - DNA, 15 bp, Homo sapiens
tgtattcataatact

SEQ ID NO: 723473 - DNA, 15 bp, Homo sapiens
gtattcataatactt

SEQ ID NO: 723474 - DNA, 15 bp, Homo sapiens
tattcataatacttg

SEQ ID NO: 723475 - DNA, 15 bp, Homo sapiens
attcataatacttgc

SEQ ID NO: 723476 - DNA, 15 bp, Homo sapiens
ttcataatacttgct

SEQ ID NO: 723477 - DNA, 15 bp, Homo sapiens
tcataatacttgcta

SEQ ID NO: 723478 - DNA, 15 bp, Homo sapiens
cataatacttgctat

SEQ ID NO: 723479 - DNA, 15 bp, Homo sapiens
ataatacttgctatg

SEQ ID NO: 723480 - DNA, 15 bp, Homo sapiens
taatacttgctatgt

SEQ ID NO: 723481 - DNA, 15 bp, Homo sapiens
aatacttgctatgtt

SEQ ID NO: 723482 - DNA, 15 bp, Homo sapiens
atacttgctatgttt

SEQ ID NO: 723483 - DNA, 15 bp, Homo sapiens
tacttgctatgttta

SEQ ID NO: 723484 - DNA, 15 bp, Homo sapiens
acttgctatgtttat

SEQ ID NO: 723485 - DNA, 15 bp, Homo sapiens
cttgctatgtttatt

SEQ ID NO: 723486 - DNA, 15 bp, Homo sapiens
ttgctatgtttatta

SEQ ID NO: 723487 - DNA, 15 bp, Homo sapiens
tgctatgtttattag

SEQ ID NO: 723488 - DNA, 15 bp, Homo sapiens
gctatgtttattaga

SEQ ID NO: 723489 - DNA, 15 bp, Homo sapiens
ctatgtttattagaa

SEQ ID NO: 723490 - DNA, 15 bp, Homo sapiens
tatgtttattagaag

SEQ ID NO: 723491 - DNA, 15 bp, Homo sapiens
atgtttattagaaga

SEQ ID NO: 723492 - DNA, 15 bp, Homo sapiens
tgtttattagaagat

SEQ ID NO: 723493 - DNA, 15 bp, Homo sapiens
gtttattagaagatg

SEQ ID NO: 723494 - DNA, 15 bp, Homo sapiens
tttattagaagatgg

SEQ ID NO: 723495 - DNA, 15 bp, Homo sapiens
ttattagaagatggt

SEQ ID NO: 723496 - DNA, 15 bp, Homo sapiens
tattagaagatggtc

SEQ ID NO: 723497 - DNA, 15 bp, Homo sapiens
attagaagatggtca

SEQ ID NO: 723498 - DNA, 15 bp, Homo sapiens
ttagaagatggtcaa

SEQ ID NO: 723499 - DNA, 15 bp, Homo sapiens
tagaagatggtcaaa

SEQ ID NO: 723500 - DNA, 15 bp, Homo sapiens
agaagatggtcaaaa

SEQ ID NO: 723501 - DNA, 15 bp, Homo sapiens
gaagatggtcaaaaa

SEQ ID NO: 723502 - DNA, 15 bp, Homo sapiens
aagatggtcaaaaaa

SEQ ID NO: 723503 - DNA, 15 bp, Homo sapiens
agatggtcaaaaaaa

SEQ ID NO: 723504 - DNA, 15 bp, Homo sapiens
gatggtcaaaaaaaa

SEQ ID NO: 723505 - DNA, 15 bp, Homo sapiens
atggtcaaaaaaaat

SEQ ID NO: 723506 - DNA, 15 bp, Homo sapiens
tggtcaaaaaaaatc

SEQ ID NO: 723507 - DNA, 15 bp, Homo sapiens
ggtcaaaaaaaatcc

SEQ ID NO: 723508 - DNA, 15 bp, Homo sapiens
gtcaaaaaaaatcca

SEQ ID NO: 723509 - DNA, 15 bp, Homo sapiens
tcaaaaaaaatccat

SEQ ID NO: 723510 - DNA, 15 bp, Homo sapiens
caaaaaaaatccatg

SEQ ID NO: 723511 - DNA, 15 bp, Homo sapiens
aaaaaaaatccatgg

SEQ ID NO: 723512 - DNA, 15 bp, Homo sapiens
aaaaaaatccatggt

SEQ ID NO: 723513 - DNA, 15 bp, Homo sapiens
aaaaaatccatggtt

SEQ ID NO: 723514 - DNA, 15 bp, Homo sapiens
aaaaatccatggttc

SEQ ID NO: 723515 - DNA, 15 bp, Homo sapiens
aaaatccatggttct

SEQ ID NO: 723516 - DNA, 15 bp, Homo sapiens
aaatccatggttctg

SEQ ID NO: 723517 - DNA, 15 bp, Homo sapiens
aatccatggttctgt

SEQ ID NO: 723518 - DNA, 15 bp, Homo sapiens
atccatggttctgta

SEQ ID NO: 723519 - DNA, 15 bp, Homo sapiens
tccatggttctgtac

SEQ ID NO: 723520 - DNA, 15 bp, Homo sapiens
ccatggttctgtaca

SEQ ID NO: 723521 - DNA, 15 bp, Homo sapiens
catggttctgtacaa

SEQ ID NO: 723522 - DNA, 15 bp, Homo sapiens
atggttctgtacaat

SEQ ID NO: 723523 - DNA, 15 bp, Homo sapiens
tggttctgtacaata

SEQ ID NO: 723524 - DNA, 15 bp, Homo sapiens
ggttctgtacaataa

SEQ ID NO: 723525 - DNA, 15 bp, Homo sapiens
gttctgtacaataat

SEQ ID NO: 723526 - DNA, 15 bp, Homo sapiens
ttctgtacaataata

SEQ ID NO: 723527 - DNA, 15 bp, Homo sapiens
tctgtacaataatat

SEQ ID NO: 723528 - DNA, 15 bp, Homo sapiens
ctgtacaataatatt

SEQ ID NO: 723529 - DNA, 15 bp, Homo sapiens
tgtacaataatatta

SEQ ID NO: 723530 - DNA, 15 bp, Homo sapiens
gtacaataatattaa

SEQ ID NO: 723531 - DNA, 15 bp, Homo sapiens
tacaataatattaac

SEQ ID NO: 723532 - DNA, 15 bp, Homo sapiens
acaataatattaaca

SEQ ID NO: 723533 - DNA, 15 bp, Homo sapiens
caataatattaacag

SEQ ID NO: 723534 - DNA, 15 bp, Homo sapiens
aataatattaacagt

SEQ ID NO: 723535 - DNA, 15 bp, Homo sapiens
ataatattaacagtt

SEQ ID NO: 723536 - DNA, 15 bp, Homo sapiens
taatattaacagttt

SEQ ID NO: 723537 - DNA, 15 bp, Homo sapiens
aatattaacagtttg

SEQ ID NO: 723538 - DNA, 15 bp, Homo sapiens
atattaacagtttgt

SEQ ID NO: 723539 - DNA, 15 bp, Homo sapiens
tattaacagtttgtt

SEQ ID NO: 723540 - DNA, 15 bp, Homo sapiens
attaacagtttgttc

SEQ ID NO: 723541 - DNA, 15 bp, Homo sapiens
ttaacagtttgttca

SEQ ID NO: 723542 - DNA, 15 bp, Homo sapiens
taacagtttgttcat

SEQ ID NO: 723543 - DNA, 15 bp, Homo sapiens
aacagtttgttcatt

SEQ ID NO: 723544 - DNA, 15 bp, Homo sapiens
acagtttgttcattt

SEQ ID NO: 723545 - DNA, 15 bp, Homo sapiens
cagtttgttcatttt

SEQ ID NO: 723546 - DNA, 15 bp, Homo sapiens
agtttgttcattttc

SEQ ID NO: 723547 - DNA, 15 bp, Homo sapiens
gtttgttcattttcc

SEQ ID NO: 723548 - DNA, 15 bp, Homo sapiens
tttgttcattttcct

SEQ ID NO: 723549 - DNA, 15 bp, Homo sapiens
ttgttcattttcctt

SEQ ID NO: 723550 - DNA, 15 bp, Homo sapiens
tgttcattttccttt

SEQ ID NO: 723551 - DNA, 15 bp, Homo sapiens
gttcattttccttta

SEQ ID NO: 723552 - DNA, 15 bp, Homo sapiens
ttcattttcctttaa

SEQ ID NO: 723553 - DNA, 15 bp, Homo sapiens
tcattttcctttaat

SEQ ID NO: 723554 - DNA, 15 bp, Homo sapiens
cattttcctttaata

SEQ ID NO: 723555 - DNA, 15 bp, Homo sapiens
attttcctttaatat

SEQ ID NO: 723556 - DNA, 15 bp, Homo sapiens
ttttcctttaatatt

SEQ ID NO: 723557 - DNA, 15 bp, Homo sapiens
tttcctttaatattt

SEQ ID NO: 723558 - DNA, 15 bp, Homo sapiens
ttcctttaatatttt

SEQ ID NO: 723559 - DNA, 15 bp, Homo sapiens
tcctttaatattttt

SEQ ID NO: 723560 - DNA, 15 bp, Homo sapiens
cctttaatatttttt

SEQ ID NO: 723561 - DNA, 15 bp, Homo sapiens
ctttaatattttttg

SEQ ID NO: 723562 - DNA, 15 bp, Homo sapiens
tttaatattttttgg

SEQ ID NO: 723563 - DNA, 15 bp, Homo sapiens
ttaatattttttggc

SEQ ID NO: 723564 - DNA, 15 bp, Homo sapiens
taatattttttggct

SEQ ID NO: 723565 - DNA, 15 bp, Homo sapiens
aatattttttggctt

SEQ ID NO: 723566 - DNA, 15 bp, Homo sapiens
atattttttggcttc

SEQ ID NO: 723567 - DNA, 15 bp, Homo sapiens
tattttttggcttcc

SEQ ID NO: 723568 - DNA, 15 bp, Homo sapiens
attttttggcttcca

SEQ ID NO: 723569 - DNA, 15 bp, Homo sapiens
ttttttggcttccat

SEQ ID NO: 723570 - DNA, 15 bp, Homo sapiens
tttttggcttccatg

SEQ ID NO: 723571 - DNA, 15 bp, Homo sapiens
ttttggcttccatga

SEQ ID NO: 723572 - DNA, 15 bp, Homo sapiens
tttggcttccatgaa

SEQ ID NO: 723573 - DNA, 15 bp, Homo sapiens
ttggcttccatgaac

SEQ ID NO: 723574 - DNA, 15 bp, Homo sapiens
tggcttccatgaaca

SEQ ID NO: 723575 - DNA, 15 bp, Homo sapiens
ggcttccatgaacac

SEQ ID NO: 723576 - DNA, 15 bp, Homo sapiens
gcttccatgaacact

SEQ ID NO: 723577 - DNA, 15 bp, Homo sapiens
cttccatgaacactc

SEQ ID NO: 723578 - DNA, 15 bp, Homo sapiens
ttccatgaacactcg

SEQ ID NO: 723579 - DNA, 15 bp, Homo sapiens
tccatgaacactcgt

SEQ ID NO: 723580 - DNA, 15 bp, Homo sapiens
ccatgaacactcgta

SEQ ID NO: 723581 - DNA, 15 bp, Homo sapiens
catgaacactcgtag

SEQ ID NO: 723582 - DNA, 15 bp, Homo sapiens
atgaacactcgtaga

SEQ ID NO: 723583 - DNA, 15 bp, Homo sapiens
tgaacactcgtagat

SEQ ID NO: 723584 - DNA, 15 bp, Homo sapiens
gaacactcgtagatt

SEQ ID NO: 723585 - DNA, 15 bp, Homo sapiens
aacactcgtagattg

SEQ ID NO: 723586 - DNA, 15 bp, Homo sapiens
acactcgtagattga

SEQ ID NO: 723587 - DNA, 15 bp, Homo sapiens
cactcgtagattgaa

SEQ ID NO: 723588 - DNA, 15 bp, Homo sapiens
actcgtagattgaac

SEQ ID NO: 723589 - DNA, 15 bp, Homo sapiens
ctcgtagattgaaca

SEQ ID NO: 723590 - DNA, 15 bp, Homo sapiens
tcgtagattgaacat

SEQ ID NO: 723591 - DNA, 15 bp, Homo sapiens
cgtagattgaacatt

SEQ ID NO: 723592 - DNA, 15 bp, Homo sapiens
gtagattgaacattc

SEQ ID NO: 723593 - DNA, 15 bp, Homo sapiens
tagattgaacattct

SEQ ID NO: 723594 - DNA, 15 bp, Homo sapiens
agattgaacattctg

SEQ ID NO: 723595 - DNA, 15 bp, Homo sapiens
gattgaacattctgc

SEQ ID NO: 723596 - DNA, 15 bp, Homo sapiens
attgaacattctgca

SEQ ID NO: 723597 - DNA, 15 bp, Homo sapiens
ttgaacattctgcaa

SEQ ID NO: 723598 - DNA, 15 bp, Homo sapiens
tgaacattctgcaag

SEQ ID NO: 723599 - DNA, 15 bp, Homo sapiens
gaacattctgcaagt

SEQ ID NO: 723600 - DNA, 15 bp, Homo sapiens
aacattctgcaagta

SEQ ID NO: 723601 - DNA, 15 bp, Homo sapiens
acattctgcaagtaa

SEQ ID NO: 723602 - DNA, 15 bp, Homo sapiens
cattctgcaagtaag

SEQ ID NO: 723603 - DNA, 15 bp, Homo sapiens
attctgcaagtaaga

SEQ ID NO: 723604 - DNA, 15 bp, Homo sapiens
ttctgcaagtaagaa

SEQ ID NO: 723605 - DNA, 15 bp, Homo sapiens
tctgcaagtaagaat

SEQ ID NO: 723606 - DNA, 15 bp, Homo sapiens
ctgcaagtaagaatt

SEQ ID NO: 723607 - DNA, 15 bp, Homo sapiens
tgcaagtaagaatta

SEQ ID NO: 723608 - DNA, 15 bp, Homo sapiens
gcaagtaagaattat

SEQ ID NO: 723609 - DNA, 15 bp, Homo sapiens
caagtaagaattata

SEQ ID NO: 723610 - DNA, 15 bp, Homo sapiens
aagtaagaattataa

SEQ ID NO: 723611 - DNA, 15 bp, Homo sapiens
agtaagaattataat

SEQ ID NO: 723612 - DNA, 15 bp, Homo sapiens
gtaagaattataata

SEQ ID NO: 723613 - DNA, 15 bp, Homo sapiens
taagaattataatag

SEQ ID NO: 723614 - DNA, 15 bp, Homo sapiens
aagaattataatagt

SEQ ID NO: 723615 - DNA, 15 bp, Homo sapiens
agaattataatagta

SEQ ID NO: 723616 - DNA, 15 bp, Homo sapiens
gaattataatagtac

SEQ ID NO: 723617 - DNA, 15 bp, Homo sapiens
aattataatagtacc

SEQ ID NO: 723618 - DNA, 15 bp, Homo sapiens
attataatagtacct

SEQ ID NO: 723619 - DNA, 15 bp, Homo sapiens
ttataatagtacctc

SEQ ID NO: 723620 - DNA, 15 bp, Homo sapiens
tataatagtacctct

SEQ ID NO: 723621 - DNA, 15 bp, Homo sapiens
ataatagtacctctg

SEQ ID NO: 723622 - DNA, 15 bp, Homo sapiens
taatagtacctctgt

SEQ ID NO: 723623 - DNA, 15 bp, Homo sapiens
aatagtacctctgtc

SEQ ID NO: 723624 - DNA, 15 bp, Homo sapiens
atagtacctctgtca

SEQ ID NO: 723625 - DNA, 15 bp, Homo sapiens
tagtacctctgtcac

SEQ ID NO: 723626 - DNA, 15 bp, Homo sapiens
agtacctctgtcacc

SEQ ID NO: 723627 - DNA, 15 bp, Homo sapiens
gtacctctgtcacct

SEQ ID NO: 723628 - DNA, 15 bp, Homo sapiens
tacctctgtcacctt

SEQ ID NO: 723629 - DNA, 15 bp, Homo sapiens
acctctgtcaccttg

SEQ ID NO: 723630 - DNA, 15 bp, Homo sapiens
cctctgtcaccttgc

SEQ ID NO: 723631 - DNA, 15 bp, Homo sapiens
ctctgtcaccttgct

SEQ ID NO: 723632 - DNA, 15 bp, Homo sapiens
tctgtcaccttgctg

SEQ ID NO: 723633 - DNA, 15 bp, Homo sapiens
ctgtcaccttgctga

SEQ ID NO: 723634 - DNA, 15 bp, Homo sapiens
tgtcaccttgctgaa

SEQ ID NO: 723635 - DNA, 15 bp, Homo sapiens
gtcaccttgctgaat

SEQ ID NO: 723636 - DNA, 15 bp, Homo sapiens
tcaccttgctgaatt

SEQ ID NO: 723637 - DNA, 15 bp, Homo sapiens
caccttgctgaattc

SEQ ID NO: 723638 - DNA, 15 bp, Homo sapiens
accttgctgaattca

SEQ ID NO: 723639 - DNA, 15 bp, Homo sapiens
ccttgctgaattcat

SEQ ID NO: 723640 - DNA, 15 bp, Homo sapiens
cttgctgaattcatc

SEQ ID NO: 723641 - DNA, 15 bp, Homo sapiens
ttgctgaattcatca

SEQ ID NO: 723642 - DNA, 15 bp, Homo sapiens
tgctgaattcatcac

SEQ ID NO: 723643 - DNA, 15 bp, Homo sapiens
gctgaattcatcacc

SEQ ID NO: 723644 - DNA, 15 bp, Homo sapiens
ctgaattcatcacca

SEQ ID NO: 723645 - DNA, 15 bp, Homo sapiens
tgaattcatcaccac

SEQ ID NO: 723646 - DNA, 15 bp, Homo sapiens
gaattcatcaccaca

SEQ ID NO: 723647 - DNA, 15 bp, Homo sapiens
aattcatcaccacaa

SEQ ID NO: 723648 - DNA, 15 bp, Homo sapiens
attcatcaccacaag

SEQ ID NO: 723649 - DNA, 15 bp, Homo sapiens
ttcatcaccacaaga

SEQ ID NO: 723650 - DNA, 15 bp, Homo sapiens
tcatcaccacaagaa

SEQ ID NO: 723651 - DNA, 15 bp, Homo sapiens
catcaccacaagaaa

SEQ ID NO: 723652 - DNA, 15 bp, Homo sapiens
atcaccacaagaaaa

SEQ ID NO: 723653 - DNA, 15 bp, Homo sapiens
tcaccacaagaaaaa

SEQ ID NO: 723654 - DNA, 15 bp, Homo sapiens
caccacaagaaaaac

SEQ ID NO: 723655 - DNA, 15 bp, Homo sapiens
accacaagaaaaaca

SEQ ID NO: 723656 - DNA, 15 bp, Homo sapiens
ccacaagaaaaacac

SEQ ID NO: 723657 - DNA, 15 bp, Homo sapiens
cacaagaaaaacaca

SEQ ID NO: 723658 - DNA, 15 bp, Homo sapiens
acaagaaaaacacaa

SEQ ID NO: 723659 - DNA, 15 bp, Homo sapiens
caagaaaaacacaaa

SEQ ID NO: 723660 - DNA, 15 bp, Homo sapiens
aagaaaaacacaaat

SEQ ID NO: 723661 - DNA, 15 bp, Homo sapiens
agaaaaacacaaata

SEQ ID NO: 723662 - DNA, 15 bp, Homo sapiens
gaaaaacacaaatag

SEQ ID NO: 723663 - DNA, 15 bp, Homo sapiens
aaaaacacaaatagt

SEQ ID NO: 723664 - DNA, 15 bp, Homo sapiens
aaaacacaaatagtt

SEQ ID NO: 723665 - DNA, 15 bp, Homo sapiens
aaacacaaatagttt

SEQ ID NO: 723666 - DNA, 15 bp, Homo sapiens
aacacaaatagttta

SEQ ID NO: 723667 - DNA, 15 bp, Homo sapiens
acacaaatagtttaa

SEQ ID NO: 723668 - DNA, 15 bp, Homo sapiens
cacaaatagtttaat

SEQ ID NO: 723669 - DNA, 15 bp, Homo sapiens
acaaatagtttaatg

SEQ ID NO: 723670 - DNA, 15 bp, Homo sapiens
caaatagtttaatgc

SEQ ID NO: 723671 - DNA, 15 bp, Homo sapiens
aaatagtttaatgct

SEQ ID NO: 723672 - DNA, 15 bp, Homo sapiens
aatagtttaatgctt

SEQ ID NO: 723673 - DNA, 15 bp, Homo sapiens
atagtttaatgcttt

SEQ ID NO: 723674 - DNA, 15 bp, Homo sapiens
tagtttaatgctttt

SEQ ID NO: 723675 - DNA, 15 bp, Homo sapiens
agtttaatgcttttg

SEQ ID NO: 723676 - DNA, 15 bp, Homo sapiens
gtttaatgcttttgc

SEQ ID NO: 723677 - DNA, 15 bp, Homo sapiens
tttaatgcttttgca

SEQ ID NO: 723678 - DNA, 15 bp, Homo sapiens
ttaatgcttttgcac

SEQ ID NO: 723679 - DNA, 15 bp, Homo sapiens
taatgcttttgcact

SEQ ID NO: 723680 - DNA, 15 bp, Homo sapiens
aatgcttttgcacta

SEQ ID NO: 723681 - DNA, 15 bp, Homo sapiens
atgcttttgcactaa

SEQ ID NO: 723682 - DNA, 15 bp, Homo sapiens
tgcttttgcactaaa

SEQ ID NO: 723683 - DNA, 15 bp, Homo sapiens
gcttttgcactaaac

SEQ ID NO: 723684 - DNA, 15 bp, Homo sapiens
cttttgcactaaact

SEQ ID NO: 723685 - DNA, 15 bp, Homo sapiens
ttttgcactaaactg

SEQ ID NO: 723686 - DNA, 15 bp, Homo sapiens
tttgcactaaactga

SEQ ID NO: 723687 - DNA, 15 bp, Homo sapiens
ttgcactaaactgaa

SEQ ID NO: 723688 - DNA, 15 bp, Homo sapiens
tgcactaaactgaat

SEQ ID NO: 723689 - DNA, 15 bp, Homo sapiens
gcactaaactgaata

SEQ ID NO: 723690 - DNA, 15 bp, Homo sapiens
cactaaactgaatag

SEQ ID NO: 723691 - DNA, 15 bp, Homo sapiens
actaaactgaatagt

SEQ ID NO: 723692 - DNA, 15 bp, Homo sapiens
ctaaactgaatagtt

SEQ ID NO: 723693 - DNA, 15 bp, Homo sapiens
taaactgaatagtta

SEQ ID NO: 723694 - DNA, 15 bp, Homo sapiens
aaactgaatagttat

SEQ ID NO: 723695 - DNA, 15 bp, Homo sapiens
aactgaatagttata

SEQ ID NO: 723696 - DNA, 15 bp, Homo sapiens
actgaatagttataa

SEQ ID NO: 723697 - DNA, 15 bp, Homo sapiens
ctgaatagttataac

SEQ ID NO: 723698 - DNA, 15 bp, Homo sapiens
tgaatagttataact

SEQ ID NO: 723699 - DNA, 15 bp, Homo sapiens
gaatagttataactc

SEQ ID NO: 723700 - DNA, 15 bp, Homo sapiens
aatagttataactcc

SEQ ID NO: 723701 - DNA, 15 bp, Homo sapiens
atagttataactcca

SEQ ID NO: 723702 - DNA, 15 bp, Homo sapiens
tagttataactccaa

SEQ ID NO: 723703 - DNA, 15 bp, Homo sapiens
agttataactccaaa

SEQ ID NO: 723704 - DNA, 15 bp, Homo sapiens
gttataactccaaag

SEQ ID NO: 723705 - DNA, 15 bp, Homo sapiens
ttataactccaaagt

SEQ ID NO: 723706 - DNA, 15 bp, Homo sapiens
tataactccaaagtt

SEQ ID NO: 723707 - DNA, 15 bp, Homo sapiens
ataactccaaagtta

SEQ ID NO: 723708 - DNA, 15 bp, Homo sapiens
taactccaaagttat

SEQ ID NO: 723709 - DNA, 15 bp, Homo sapiens
aactccaaagttata

SEQ ID NO: 723710 - DNA, 15 bp, Homo sapiens
actccaaagttatat

SEQ ID NO: 723711 - DNA, 15 bp, Homo sapiens
ctccaaagttatatt

SEQ ID NO: 723712 - DNA, 15 bp, Homo sapiens
tccaaagttatatta

SEQ ID NO: 723713 - DNA, 15 bp, Homo sapiens
ccaaagttatattaa

SEQ ID NO: 723714 - DNA, 15 bp, Homo sapiens
caaagttatattaaa

SEQ ID NO: 723715 - DNA, 15 bp, Homo sapiens
aaagttatattaaac

SEQ ID NO: 723716 - DNA, 15 bp, Homo sapiens
aagttatattaaact

SEQ ID NO: 723717 - DNA, 15 bp, Homo sapiens
agttatattaaactg

SEQ ID NO: 723718 - DNA, 15 bp, Homo sapiens
gttatattaaactga

SEQ ID NO: 723719 - DNA, 15 bp, Homo sapiens
ttatattaaactgaa

SEQ ID NO: 723720 - DNA, 15 bp, Homo sapiens
tatattaaactgaag

SEQ ID NO: 723721 - DNA, 15 bp, Homo sapiens
atattaaactgaagc

SEQ ID NO: 723722 - DNA, 15 bp, Homo sapiens
tattaaactgaagcc

SEQ ID NO: 723723 - DNA, 15 bp, Homo sapiens
attaaactgaagcct

SEQ ID NO: 723724 - DNA, 15 bp, Homo sapiens
ttaaactgaagcctt

SEQ ID NO: 723725 - DNA, 15 bp, Homo sapiens
taaactgaagccttc

SEQ ID NO: 723726 - DNA, 15 bp, Homo sapiens
aaactgaagccttca

SEQ ID NO: 723727 - DNA, 15 bp, Homo sapiens
aactgaagccttcat

SEQ ID NO: 723728 - DNA, 15 bp, Homo sapiens
actgaagccttcatt

SEQ ID NO: 723729 - DNA, 15 bp, Homo sapiens
ctgaagccttcattg

SEQ ID NO: 723730 - DNA, 15 bp, Homo sapiens
tgaagccttcattgt

SEQ ID NO: 723731 - DNA, 15 bp, Homo sapiens
gaagccttcattgtg

SEQ ID NO: 723732 - DNA, 15 bp, Homo sapiens
aagccttcattgtga

SEQ ID NO: 723733 - DNA, 15 bp, Homo sapiens
agccttcattgtgat

SEQ ID NO: 723734 - DNA, 15 bp, Homo sapiens
gccttcattgtgatc

SEQ ID NO: 723735 - DNA, 15 bp, Homo sapiens
ccttcattgtgatca

SEQ ID NO: 723736 - DNA, 15 bp, Homo sapiens
cttcattgtgatcaa

SEQ ID NO: 723737 - DNA, 15 bp, Homo sapiens
ttcattgtgatcaat

SEQ ID NO: 723738 - DNA, 15 bp, Homo sapiens
tcattgtgatcaata

SEQ ID NO: 723739 - DNA, 15 bp, Homo sapiens
cattgtgatcaatag

SEQ ID NO: 723740 - DNA, 15 bp, Homo sapiens
attgtgatcaatagc

SEQ ID NO: 723741 - DNA, 15 bp, Homo sapiens
ttgtgatcaatagct

SEQ ID NO: 723742 - DNA, 15 bp, Homo sapiens
tgtgatcaatagctt

SEQ ID NO: 723743 - DNA, 15 bp, Homo sapiens
gtgatcaatagcttg

SEQ ID NO: 723744 - DNA, 15 bp, Homo sapiens
tgatcaatagcttgg

SEQ ID NO: 723745 - DNA, 15 bp, Homo sapiens
gatcaatagcttgga

SEQ ID NO: 723746 - DNA, 15 bp, Homo sapiens
atcaatagcttggat

SEQ ID NO: 723747 - DNA, 15 bp, Homo sapiens
tcaatagcttggatc

SEQ ID NO: 723748 - DNA, 15 bp, Homo sapiens
caatagcttggatca

SEQ ID NO: 723749 - DNA, 15 bp, Homo sapiens
aatagcttggatcag

SEQ ID NO: 723750 - DNA, 15 bp, Homo sapiens
atagcttggatcagt

SEQ ID NO: 723751 - DNA, 15 bp, Homo sapiens
tagcttggatcagtt

SEQ ID NO: 723752 - DNA, 15 bp, Homo sapiens
agcttggatcagttt

SEQ ID NO: 723753 - DNA, 15 bp, Homo sapiens
gcttggatcagttta

SEQ ID NO: 723754 - DNA, 15 bp, Homo sapiens
cttggatcagtttag

SEQ ID NO: 723755 - DNA, 15 bp, Homo sapiens
ttggatcagtttaga

SEQ ID NO: 723756 - DNA, 15 bp, Homo sapiens
tggatcagtttagag

SEQ ID NO: 723757 - DNA, 15 bp, Homo sapiens
ggatcagtttagagc

SEQ ID NO: 723758 - DNA, 15 bp, Homo sapiens
gatcagtttagagcg

SEQ ID NO: 723759 - DNA, 15 bp, Homo sapiens
atcagtttagagcgt

SEQ ID NO: 723760 - DNA, 15 bp, Homo sapiens
tcagtttagagcgta

SEQ ID NO: 723761 - DNA, 15 bp, Homo sapiens
cagtttagagcgtag

SEQ ID NO: 723762 - DNA, 15 bp, Homo sapiens
agtttagagcgtaga

SEQ ID NO: 723763 - DNA, 15 bp, Homo sapiens
gtttagagcgtagag

SEQ ID NO: 723764 - DNA, 15 bp, Homo sapiens
tttagagcgtagagt

SEQ ID NO: 723765 - DNA, 15 bp, Homo sapiens
ttagagcgtagagtt

SEQ ID NO: 723766 - DNA, 15 bp, Homo sapiens
tagagcgtagagttt

SEQ ID NO: 723767 - DNA, 15 bp, Homo sapiens
agagcgtagagtttc

SEQ ID NO: 723768 - DNA, 15 bp, Homo sapiens
gagcgtagagtttct

SEQ ID NO: 723769 - DNA, 15 bp, Homo sapiens
agcgtagagtttctt

SEQ ID NO: 723770 - DNA, 15 bp, Homo sapiens
gcgtagagtttcttt

SEQ ID NO: 723771 - DNA, 15 bp, Homo sapiens
cgtagagtttctttt

SEQ ID NO: 723772 - DNA, 15 bp, Homo sapiens
gtagagtttcttttt

SEQ ID NO: 723773 - DNA, 15 bp, Homo sapiens
tagagtttctttttc

SEQ ID NO: 723774 - DNA, 15 bp, Homo sapiens
agagtttctttttct

SEQ ID NO: 723775 - DNA, 15 bp, Homo sapiens
gagtttctttttctg

SEQ ID NO: 723776 - DNA, 15 bp, Homo sapiens
agtttctttttctgt

SEQ ID NO: 723777 - DNA, 15 bp, Homo sapiens
gtttctttttctgta

SEQ ID NO: 723778 - DNA, 15 bp, Homo sapiens
tttctttttctgtat

SEQ ID NO: 723779 - DNA, 15 bp, Homo sapiens
ttctttttctgtata

SEQ ID NO: 723780 - DNA, 15 bp, Homo sapiens
tctttttctgtatat

SEQ ID NO: 723781 - DNA, 15 bp, Homo sapiens
ctttttctgtatatt

SEQ ID NO: 723782 - DNA, 15 bp, Homo sapiens
tttttctgtatattt

SEQ ID NO: 723783 - DNA, 15 bp, Homo sapiens
ttttctgtatatttt

SEQ ID NO: 723784 - DNA, 15 bp, Homo sapiens
tttctgtatattttg

SEQ ID NO: 723785 - DNA, 15 bp, Homo sapiens
ttctgtatattttgg

SEQ ID NO: 723786 - DNA, 15 bp, Homo sapiens
tctgtatattttgga

SEQ ID NO: 723787 - DNA, 15 bp, Homo sapiens
ctgtatattttggaa

SEQ ID NO: 723788 - DNA, 15 bp, Homo sapiens
tgtatattttggaag

SEQ ID NO: 723789 - DNA, 15 bp, Homo sapiens
gtatattttggaaga

SEQ ID NO: 723790 - DNA, 15 bp, Homo sapiens
tatattttggaagat

SEQ ID NO: 723791 - DNA, 15 bp, Homo sapiens
atattttggaagatc

SEQ ID NO: 723792 - DNA, 15 bp, Homo sapiens
tattttggaagatcc

SEQ ID NO: 723793 - DNA, 15 bp, Homo sapiens
attttggaagatcca

SEQ ID NO: 723794 - DNA, 15 bp, Homo sapiens
ttttggaagatccag

SEQ ID NO: 723795 - DNA, 15 bp, Homo sapiens
tttggaagatccaga

SEQ ID NO: 723796 - DNA, 15 bp, Homo sapiens
ttggaagatccagaa

SEQ ID NO: 723797 - DNA, 15 bp, Homo sapiens
tggaagatccagaag

SEQ ID NO: 723798 - DNA, 15 bp, Homo sapiens
ggaagatccagaaga

SEQ ID NO: 723799 - DNA, 15 bp, Homo sapiens
gaagatccagaagat

SEQ ID NO: 723800 - DNA, 15 bp, Homo sapiens
aagatccagaagatt

SEQ ID NO: 723801 - DNA, 15 bp, Homo sapiens
agatccagaagatta

SEQ ID NO: 723802 - DNA, 15 bp, Homo sapiens
gatccagaagattaa

SEQ ID NO: 723803 - DNA, 15 bp, Homo sapiens
atccagaagattaaa

SEQ ID NO: 723804 - DNA, 15 bp, Homo sapiens
tccagaagattaaaa

SEQ ID NO: 723805 - DNA, 15 bp, Homo sapiens
ccagaagattaaaac

SEQ ID NO: 723806 - DNA, 15 bp, Homo sapiens
cagaagattaaaaca

SEQ ID NO: 723807 - DNA, 15 bp, Homo sapiens
agaagattaaaacaa

SEQ ID NO: 723808 - DNA, 15 bp, Homo sapiens
gaagattaaaacaag

SEQ ID NO: 723809 - DNA, 15 bp, Homo sapiens
aagattaaaacaagt

SEQ ID NO: 723810 - DNA, 15 bp, Homo sapiens
agattaaaacaagta

SEQ ID NO: 723811 - DNA, 15 bp, Homo sapiens
gattaaaacaagtat

SEQ ID NO: 723812 - DNA, 15 bp, Homo sapiens
attaaaacaagtatg

SEQ ID NO: 723813 - DNA, 15 bp, Homo sapiens
ttaaaacaagtatgg

SEQ ID NO: 723814 - DNA, 15 bp, Homo sapiens
taaaacaagtatggg

SEQ ID NO: 723815 - DNA, 15 bp, Homo sapiens
aaaacaagtatggga

SEQ ID NO: 723816 - DNA, 15 bp, Homo sapiens
aaacaagtatgggaa

SEQ ID NO: 723817 - DNA, 15 bp, Homo sapiens
aacaagtatgggaaa

SEQ ID NO: 723818 - DNA, 15 bp, Homo sapiens
acaagtatgggaaac

SEQ ID NO: 723819 - DNA, 15 bp, Homo sapiens
caagtatgggaaact

SEQ ID NO: 723820 - DNA, 15 bp, Homo sapiens
aagtatgggaaactg

SEQ ID NO: 723821 - DNA, 15 bp, Homo sapiens
agtatgggaaactgg

SEQ ID NO: 723822 - DNA, 15 bp, Homo sapiens
gtatgggaaactggg

SEQ ID NO: 723823 - DNA, 15 bp, Homo sapiens
tatgggaaactggga

SEQ ID NO: 723824 - DNA, 15 bp, Homo sapiens
atgggaaactgggag

SEQ ID NO: 723825 - DNA, 15 bp, Homo sapiens
tgggaaactgggaga

SEQ ID NO: 723826 - DNA, 15 bp, Homo sapiens
gggaaactgggagat

SEQ ID NO: 723827 - DNA, 15 bp, Homo sapiens
ggaaactgggagata

SEQ ID NO: 723828 - DNA, 15 bp, Homo sapiens
gaaactgggagatac

SEQ ID NO: 723829 - DNA, 15 bp, Homo sapiens
aaactgggagatact

SEQ ID NO: 723830 - DNA, 15 bp, Homo sapiens
aactgggagatactc

SEQ ID NO: 723831 - DNA, 15 bp, Homo sapiens
actgggagatactcc

SEQ ID NO: 723832 - DNA, 15 bp, Homo sapiens
ctgggagatactcct

SEQ ID NO: 723833 - DNA, 15 bp, Homo sapiens
tgggagatactcctc

SEQ ID NO: 723834 - DNA, 15 bp, Homo sapiens
gggagatactcctca

SEQ ID NO: 723835 - DNA, 15 bp, Homo sapiens
ggagatactcctcac

SEQ ID NO: 723836 - DNA, 15 bp, Homo sapiens
gagatactcctcacc

SEQ ID NO: 723837 - DNA, 15 bp, Homo sapiens
agatactcctcacca

SEQ ID NO: 723838 - DNA, 15 bp, Homo sapiens
gatactcctcaccac

SEQ ID NO: 723839 - DNA, 15 bp, Homo sapiens
atactcctcaccacc

SEQ ID NO: 723840 - DNA, 15 bp, Homo sapiens
tactcctcaccacct

SEQ ID NO: 723841 - DNA, 15 bp, Homo sapiens
actcctcaccacctc

SEQ ID NO: 723842 - DNA, 15 bp, Homo sapiens
ctcctcaccacctcc

SEQ ID NO: 723843 - DNA, 15 bp, Homo sapiens
tcctcaccacctcct

SEQ ID NO: 723844 - DNA, 15 bp, Homo sapiens
cctcaccacctcctg

SEQ ID NO: 723845 - DNA, 15 bp, Homo sapiens
ctcaccacctcctgt

SEQ ID NO: 723846 - DNA, 15 bp, Homo sapiens
tcaccacctcctgtg

SEQ ID NO: 723847 - DNA, 15 bp, Homo sapiens
caccacctcctgtgg

SEQ ID NO: 723848 - DNA, 15 bp, Homo sapiens
accacctcctgtgga

SEQ ID NO: 723849 - DNA, 15 bp, Homo sapiens
ccacctcctgtggac

SEQ ID NO: 723850 - DNA, 15 bp, Homo sapiens
cacctcctgtggact

SEQ ID NO: 723851 - DNA, 15 bp, Homo sapiens
acctcctgtggactg

SEQ ID NO: 723852 - DNA, 15 bp, Homo sapiens
cctcctgtggactgg

SEQ ID NO: 723853 - DNA, 15 bp, Homo sapiens
ctcctgtggactgga

SEQ ID NO: 723854 - DNA, 15 bp, Homo sapiens
tcctgtggactggat

SEQ ID NO: 723855 - DNA, 15 bp, Homo sapiens
cctgtggactggatg

SEQ ID NO: 723856 - DNA, 15 bp, Homo sapiens
ctgtggactggatga

SEQ ID NO: 723857 - DNA, 15 bp, Homo sapiens
tgtggactggatgac

SEQ ID NO: 723858 - DNA, 15 bp, Homo sapiens
gtggactggatgact

SEQ ID NO: 723859 - DNA, 15 bp, Homo sapiens
tggactggatgacta

SEQ ID NO: 723860 - DNA, 15 bp, Homo sapiens
ggactggatgactag

SEQ ID NO: 723861 - DNA, 15 bp, Homo sapiens
gactggatgactagt

SEQ ID NO: 723862 - DNA, 15 bp, Homo sapiens
actggatgactagtt

SEQ ID NO: 723863 - DNA, 15 bp, Homo sapiens
ctggatgactagttt

SEQ ID NO: 723864 - DNA, 15 bp, Homo sapiens
tggatgactagtttc

SEQ ID NO: 723865 - DNA, 15 bp, Homo sapiens
ggatgactagtttca

SEQ ID NO: 723866 - DNA, 15 bp, Homo sapiens
gatgactagtttcag

SEQ ID NO: 723867 - DNA, 15 bp, Homo sapiens
atgactagtttcaga

SEQ ID NO: 723868 - DNA, 15 bp, Homo sapiens
tgactagtttcagac

SEQ ID NO: 723869 - DNA, 15 bp, Homo sapiens
gactagtttcagact

SEQ ID NO: 723870 - DNA, 15 bp, Homo sapiens
actagtttcagactc

SEQ ID NO: 723871 - DNA, 15 bp, Homo sapiens
ctagtttcagactct

SEQ ID NO: 723872 - DNA, 15 bp, Homo sapiens
tagtttcagactctt

SEQ ID NO: 723873 - DNA, 15 bp, Homo sapiens
agtttcagactcttc

SEQ ID NO: 723874 - DNA, 15 bp, Homo sapiens
gtttcagactcttca

SEQ ID NO: 723875 - DNA, 15 bp, Homo sapiens
tttcagactcttcat

SEQ ID NO: 723876 - DNA, 15 bp, Homo sapiens
ttcagactcttcata

SEQ ID NO: 723877 - DNA, 15 bp, Homo sapiens
tcagactcttcatac

SEQ ID NO: 723878 - DNA, 15 bp, Homo sapiens
cagactcttcatacc

SEQ ID NO: 723879 - DNA, 15 bp, Homo sapiens
agactcttcatacca

SEQ ID NO: 723880 - DNA, 15 bp, Homo sapiens
gactcttcataccaa

SEQ ID NO: 723881 - DNA, 15 bp, Homo sapiens
actcttcataccaag

SEQ ID NO: 723882 - DNA, 15 bp, Homo sapiens
ctcttcataccaaga

SEQ ID NO: 723883 - DNA, 15 bp, Homo sapiens
tcttcataccaagaa

SEQ ID NO: 723884 - DNA, 15 bp, Homo sapiens
cttcataccaagaat

SEQ ID NO: 723885 - DNA, 15 bp, Homo sapiens
ttcataccaagaata

SEQ ID NO: 723886 - DNA, 15 bp, Homo sapiens
tcataccaagaatag

SEQ ID NO: 723887 - DNA, 15 bp, Homo sapiens
cataccaagaatagg

SEQ ID NO: 723888 - DNA, 15 bp, Homo sapiens
ataccaagaatagga

SEQ ID NO: 723889 - DNA, 15 bp, Homo sapiens
taccaagaataggaa

SEQ ID NO: 723890 - DNA, 15 bp, Homo sapiens
accaagaataggaat

SEQ ID NO: 723891 - DNA, 15 bp, Homo sapiens
ccaagaataggaatg

SEQ ID NO: 723892 - DNA, 15 bp, Homo sapiens
caagaataggaatgc

SEQ ID NO: 723893 - DNA, 15 bp, Homo sapiens
aagaataggaatgcg

SEQ ID NO: 723894 - DNA, 15 bp, Homo sapiens
agaataggaatgcga

SEQ ID NO: 723895 - DNA, 15 bp, Homo sapiens
gaataggaatgcgat

SEQ ID NO: 723896 - DNA, 15 bp, Homo sapiens
aataggaatgcgatc

SEQ ID NO: 723897 - DNA, 15 bp, Homo sapiens
ataggaatgcgatca

SEQ ID NO: 723898 - DNA, 15 bp, Homo sapiens
taggaatgcgatcac

SEQ ID NO: 723899 - DNA, 15 bp, Homo sapiens
aggaatgcgatcact

SEQ ID NO: 723900 - DNA, 15 bp, Homo sapiens
ggaatgcgatcacta

SEQ ID NO: 723901 - DNA, 15 bp, Homo sapiens
gaatgcgatcactac

SEQ ID NO: 723902 - DNA, 15 bp, Homo sapiens
aatgcgatcactacc

SEQ ID NO: 723903 - DNA, 15 bp, Homo sapiens
atgcgatcactacct

SEQ ID NO: 723904 - DNA, 15 bp, Homo sapiens
tgcgatcactacctg

SEQ ID NO: 723905 - DNA, 15 bp, Homo sapiens
gcgatcactacctgt

SEQ ID NO: 723906 - DNA, 15 bp, Homo sapiens
cgatcactacctgtc

SEQ ID NO: 723907 - DNA, 15 bp, Homo sapiens
gatcactacctgtca

SEQ ID NO: 723908 - DNA, 15 bp, Homo sapiens
atcactacctgtcaa

SEQ ID NO: 723909 - DNA, 15 bp, Homo sapiens
tcactacctgtcaaa

SEQ ID NO: 723910 - DNA, 15 bp, Homo sapiens
cactacctgtcaaaa

SEQ ID NO: 723911 - DNA, 15 bp, Homo sapiens
actacctgtcaaaaa

SEQ ID NO: 723912 - DNA, 15 bp, Homo sapiens
ctacctgtcaaaaat

SEQ ID NO: 723913 - DNA, 15 bp, Homo sapiens
tacctgtcaaaaata

SEQ ID NO: 723914 - DNA, 15 bp, Homo sapiens
acctgtcaaaaatac

SEQ ID NO: 723915 - DNA, 15 bp, Homo sapiens
cctgtcaaaaatact

SEQ ID NO: 723916 - DNA, 15 bp, Homo sapiens
ctgtcaaaaatactg

SEQ ID NO: 723917 - DNA, 15 bp, Homo sapiens
tgtcaaaaatactgc

SEQ ID NO: 723918 - DNA, 15 bp, Homo sapiens
gtcaaaaatactgcc

SEQ ID NO: 723919 - DNA, 15 bp, Homo sapiens
tcaaaaatactgcca

SEQ ID NO: 723920 - DNA, 15 bp, Homo sapiens
caaaaatactgccaa

SEQ ID NO: 723921 - DNA, 15 bp, Homo sapiens
aaaaatactgccaag

SEQ ID NO: 723922 - DNA, 15 bp, Homo sapiens
aaaatactgccaaga

SEQ ID NO: 723923 - DNA, 15 bp, Homo sapiens
aaatactgccaagaa

SEQ ID NO: 723924 - DNA, 15 bp, Homo sapiens
aatactgccaagaaa

SEQ ID NO: 723925 - DNA, 15 bp, Homo sapiens
atactgccaagaaag

SEQ ID NO: 723926 - DNA, 15 bp, Homo sapiens
tactgccaagaaaga

SEQ ID NO: 723927 - DNA, 15 bp, Homo sapiens
actgccaagaaagaa

SEQ ID NO: 723928 - DNA, 15 bp, Homo sapiens
ctgccaagaaagaaa

SEQ ID NO: 723929 - DNA, 15 bp, Homo sapiens
tgccaagaaagaaat

SEQ ID NO: 723930 - DNA, 15 bp, Homo sapiens
gccaagaaagaaatc

SEQ ID NO: 723931 - DNA, 15 bp, Homo sapiens
ccaagaaagaaatca

SEQ ID NO: 723932 - DNA, 15 bp, Homo sapiens
caagaaagaaatcat

SEQ ID NO: 723933 - DNA, 15 bp, Homo sapiens
aagaaagaaatcatt

SEQ ID NO: 723934 - DNA, 15 bp, Homo sapiens
agaaagaaatcattc

SEQ ID NO: 723935 - DNA, 15 bp, Homo sapiens
gaaagaaatcattca

SEQ ID NO: 723936 - DNA, 15 bp, Homo sapiens
aaagaaatcattcag

SEQ ID NO: 723937 - DNA, 15 bp, Homo sapiens
aagaaatcattcagt

SEQ ID NO: 723938 - DNA, 15 bp, Homo sapiens
agaaatcattcagtc

SEQ ID NO: 723939 - DNA, 15 bp, Homo sapiens
gaaatcattcagtca

SEQ ID NO: 723940 - DNA, 15 bp, Homo sapiens
aaatcattcagtcaa

SEQ ID NO: 723941 - DNA, 15 bp, Homo sapiens
aatcattcagtcaac

SEQ ID NO: 723942 - DNA, 15 bp, Homo sapiens
atcattcagtcaacc

SEQ ID NO: 723943 - DNA, 15 bp, Homo sapiens
tcattcagtcaacca

SEQ ID NO: 723944 - DNA, 15 bp, Homo sapiens
cattcagtcaaccac

SEQ ID NO: 723945 - DNA, 15 bp, Homo sapiens
attcagtcaaccact

SEQ ID NO: 723946 - DNA, 15 bp, Homo sapiens
ttcagtcaaccactt

SEQ ID NO: 723947 - DNA, 15 bp, Homo sapiens
tcagtcaaccacttc

SEQ ID NO: 723948 - DNA, 15 bp, Homo sapiens
cagtcaaccacttca

SEQ ID NO: 723949 - DNA, 15 bp, Homo sapiens
agtcaaccacttcaa

SEQ ID NO: 723950 - DNA, 15 bp, Homo sapiens
gtcaaccacttcaaa

SEQ ID NO: 723951 - DNA, 15 bp, Homo sapiens
tcaaccacttcaaaa

SEQ ID NO: 723952 - DNA, 15 bp, Homo sapiens
caaccacttcaaaac

SEQ ID NO: 723953 - DNA, 15 bp, Homo sapiens
aaccacttcaaaaca

SEQ ID NO: 723954 - DNA, 15 bp, Homo sapiens
accacttcaaaacaa

SEQ ID NO: 723955 - DNA, 15 bp, Homo sapiens
ccacttcaaaacaaa

SEQ ID NO: 723956 - DNA, 15 bp, Homo sapiens
cacttcaaaacaaaa

SEQ ID NO: 723957 - DNA, 15 bp, Homo sapiens
acttcaaaacaaaaa

SEQ ID NO: 723958 - DNA, 15 bp, Homo sapiens
cttcaaaacaaaaag

SEQ ID NO: 723959 - DNA, 15 bp, Homo sapiens
ttcaaaacaaaaaga

SEQ ID NO: 723960 - DNA, 15 bp, Homo sapiens
tcaaaacaaaaagat

SEQ ID NO: 723961 - DNA, 15 bp, Homo sapiens
caaaacaaaaagata

SEQ ID NO: 723962 - DNA, 15 bp, Homo sapiens
aaaacaaaaagatac

SEQ ID NO: 723963 - DNA, 15 bp, Homo sapiens
aaacaaaaagataca

SEQ ID NO: 723964 - DNA, 15 bp, Homo sapiens
aacaaaaagatacag

SEQ ID NO: 723965 - DNA, 15 bp, Homo sapiens
acaaaaagatacagt

SEQ ID NO: 723966 - DNA, 15 bp, Homo sapiens
caaaaagatacagta

SEQ ID NO: 723967 - DNA, 15 bp, Homo sapiens
aaaaagatacagtag

SEQ ID NO: 723968 - DNA, 15 bp, Homo sapiens
aaaagatacagtagc

SEQ ID NO: 723969 - DNA, 15 bp, Homo sapiens
aaagatacagtagca

SEQ ID NO: 723970 - DNA, 15 bp, Homo sapiens
aagatacagtagcaa

SEQ ID NO: 723971 - DNA, 15 bp, Homo sapiens
agatacagtagcaag

SEQ ID NO: 723972 - DNA, 15 bp, Homo sapiens
gatacagtagcaagt

SEQ ID NO: 723973 - DNA, 15 bp, Homo sapiens
atacagtagcaagta

SEQ ID NO: 723974 - DNA, 15 bp, Homo sapiens
tacagtagcaagtaa

SEQ ID NO: 723975 - DNA, 15 bp, Homo sapiens
acagtagcaagtaat

SEQ ID NO: 723976 - DNA, 15 bp, Homo sapiens
cagtagcaagtaata

SEQ ID NO: 723977 - DNA, 15 bp, Homo sapiens
agtagcaagtaatat

SEQ ID NO: 723978 - DNA, 15 bp, Homo sapiens
gtagcaagtaatatt

SEQ ID NO: 723979 - DNA, 15 bp, Homo sapiens
tagcaagtaatattt

SEQ ID NO: 723980 - DNA, 15 bp, Homo sapiens
agcaagtaatatttg

SEQ ID NO: 723981 - DNA, 15 bp, Homo sapiens
gcaagtaatatttgg

SEQ ID NO: 723982 - DNA, 15 bp, Homo sapiens
caagtaatatttggt

SEQ ID NO: 723983 - DNA, 15 bp, Homo sapiens
aagtaatatttggta

SEQ ID NO: 723984 - DNA, 15 bp, Homo sapiens
agtaatatttggtac

SEQ ID NO: 723985 - DNA, 15 bp, Homo sapiens
gtaatatttggtaca

SEQ ID NO: 723986 - DNA, 15 bp, Homo sapiens
taatatttggtacag

SEQ ID NO: 723987 - DNA, 15 bp, Homo sapiens
aatatttggtacagt

SEQ ID NO: 723988 - DNA, 15 bp, Homo sapiens
atatttggtacagtc

SEQ ID NO: 723989 - DNA, 15 bp, Homo sapiens
tatttggtacagtcg

SEQ ID NO: 723990 - DNA, 15 bp, Homo sapiens
atttggtacagtcgc

SEQ ID NO: 723991 - DNA, 15 bp, Homo sapiens
tttggtacagtcgct

SEQ ID NO: 723992 - DNA, 15 bp, Homo sapiens
ttggtacagtcgcta

SEQ ID NO: 723993 - DNA, 15 bp, Homo sapiens
tggtacagtcgctac

SEQ ID NO: 723994 - DNA, 15 bp, Homo sapiens
ggtacagtcgctaca

SEQ ID NO: 723995 - DNA, 15 bp, Homo sapiens
gtacagtcgctacag

SEQ ID NO: 723996 - DNA, 15 bp, Homo sapiens
tacagtcgctacagc

SEQ ID NO: 723997 - DNA, 15 bp, Homo sapiens
acagtcgctacagca

SEQ ID NO: 723998 - DNA, 15 bp, Homo sapiens
cagtcgctacagcag

SEQ ID NO: 723999 - DNA, 15 bp, Homo sapiens
agtcgctacagcaga

SEQ ID NO: 724000 - DNA, 15 bp, Homo sapiens
gtcgctacagcagag

SEQ ID NO: 724001 - DNA, 15 bp, Homo sapiens
tcgctacagcagagc

SEQ ID NO: 724002 - DNA, 15 bp, Homo sapiens
cgctacagcagagct

SEQ ID NO: 724003 - DNA, 15 bp, Homo sapiens
gctacagcagagctt

SEQ ID NO: 724004 - DNA, 15 bp, Homo sapiens
ctacagcagagcttc

SEQ ID NO: 724005 - DNA, 15 bp, Homo sapiens
tacagcagagcttca

SEQ ID NO: 724006 - DNA, 15 bp, Homo sapiens
acagcagagcttcac

SEQ ID NO: 724007 - DNA, 15 bp, Homo sapiens
cagcagagcttcact

SEQ ID NO: 724008 - DNA, 15 bp, Homo sapiens
agcagagcttcactt

SEQ ID NO: 724009 - DNA, 15 bp, Homo sapiens
gcagagcttcacttt

SEQ ID NO: 724010 - DNA, 15 bp, Homo sapiens
cagagcttcacttta

SEQ ID NO: 724011 - DNA, 15 bp, Homo sapiens
agagcttcactttaa

SEQ ID NO: 724012 - DNA, 15 bp, Homo sapiens
gagcttcactttaac

SEQ ID NO: 724013 - DNA, 15 bp, Homo sapiens
agcttcactttaaca

SEQ ID NO: 724014 - DNA, 15 bp, Homo sapiens
gcttcactttaacat

SEQ ID NO: 724015 - DNA, 15 bp, Homo sapiens
cttcactttaacatc

SEQ ID NO: 724016 - DNA, 15 bp, Homo sapiens
ttcactttaacatct

SEQ ID NO: 724017 - DNA, 15 bp, Homo sapiens
tcactttaacatctg

SEQ ID NO: 724018 - DNA, 15 bp, Homo sapiens
cactttaacatctgc

SEQ ID NO: 724019 - DNA, 15 bp, Homo sapiens
actttaacatctgct

SEQ ID NO: 724020 - DNA, 15 bp, Homo sapiens
ctttaacatctgctc

SEQ ID NO: 724021 - DNA, 15 bp, Homo sapiens
tttaacatctgctct

SEQ ID NO: 724022 - DNA, 15 bp, Homo sapiens
ttaacatctgctcta

SEQ ID NO: 724023 - DNA, 15 bp, Homo sapiens
taacatctgctctaa

SEQ ID NO: 724024 - DNA, 15 bp, Homo sapiens
aacatctgctctaac

SEQ ID NO: 724025 - DNA, 15 bp, Homo sapiens
acatctgctctaacg

SEQ ID NO: 724026 - DNA, 15 bp, Homo sapiens
catctgctctaacgt

SEQ ID NO: 724027 - DNA, 15 bp, Homo sapiens
atctgctctaacgtg

SEQ ID NO: 724028 - DNA, 15 bp, Homo sapiens
tctgctctaacgtgt

SEQ ID NO: 724029 - DNA, 15 bp, Homo sapiens
ctgctctaacgtgtt

SEQ ID NO: 724030 - DNA, 15 bp, Homo sapiens
tgctctaacgtgtta

SEQ ID NO: 724031 - DNA, 15 bp, Homo sapiens
gctctaacgtgttat

SEQ ID NO: 724032 - DNA, 15 bp, Homo sapiens
ctctaacgtgttatc

SEQ ID NO: 724033 - DNA, 15 bp, Homo sapiens
tctaacgtgttatct

SEQ ID NO: 724034 - DNA, 15 bp, Homo sapiens
ctaacgtgttatctt

SEQ ID NO: 724035 - DNA, 15 bp, Homo sapiens
taacgtgttatctta

SEQ ID NO: 724036 - DNA, 15 bp, Homo sapiens
aacgtgttatcttac

SEQ ID NO: 724037 - DNA, 15 bp, Homo sapiens
acgtgttatcttact

SEQ ID NO: 724038 - DNA, 15 bp, Homo sapiens
cgtgttatcttactt

SEQ ID NO: 724039 - DNA, 15 bp, Homo sapiens
gtgttatcttacttc

SEQ ID NO: 724040 - DNA, 15 bp, Homo sapiens
tgttatcttacttcc

SEQ ID NO: 724041 - DNA, 15 bp, Homo sapiens
gttatcttacttcct

SEQ ID NO: 724042 - DNA, 15 bp, Homo sapiens
ttatcttacttccta

SEQ ID NO: 724043 - DNA, 15 bp, Homo sapiens
tatcttacttcctaa

SEQ ID NO: 724044 - DNA, 15 bp, Homo sapiens
atcttacttcctaat

SEQ ID NO: 724045 - DNA, 15 bp, Homo sapiens
tcttacttcctaatt

SEQ ID NO: 724046 - DNA, 15 bp, Homo sapiens
cttacttcctaattt

SEQ ID NO: 724047 - DNA, 15 bp, Homo sapiens
ttacttcctaatttg

SEQ ID NO: 724048 - DNA, 15 bp, Homo sapiens
tacttcctaatttgt

SEQ ID NO: 724049 - DNA, 15 bp, Homo sapiens
acttcctaatttgtg

SEQ ID NO: 724050 - DNA, 15 bp, Homo sapiens
cttcctaatttgtgg

SEQ ID NO: 724051 - DNA, 15 bp, Homo sapiens
ttcctaatttgtgga

SEQ ID NO: 724052 - DNA, 15 bp, Homo sapiens
tcctaatttgtggaa

SEQ ID NO: 724053 - DNA, 15 bp, Homo sapiens
cctaatttgtggaag

SEQ ID NO: 724054 - DNA, 15 bp, Homo sapiens
ctaatttgtggaaga

SEQ ID NO: 724055 - DNA, 15 bp, Homo sapiens
taatttgtggaagac

SEQ ID NO: 724056 - DNA, 15 bp, Homo sapiens
aatttgtggaagaca

SEQ ID NO: 724057 - DNA, 15 bp, Homo sapiens
atttgtggaagacaa

SEQ ID NO: 724058 - DNA, 15 bp, Homo sapiens
tttgtggaagacaag

SEQ ID NO: 724059 - DNA, 15 bp, Homo sapiens
ttgtggaagacaagt

SEQ ID NO: 724060 - DNA, 15 bp, Homo sapiens
tgtggaagacaagtt

SEQ ID NO: 724061 - DNA, 15 bp, Homo sapiens
gtggaagacaagttt

SEQ ID NO: 724062 - DNA, 15 bp, Homo sapiens
tggaagacaagtttt

SEQ ID NO: 724063 - DNA, 15 bp, Homo sapiens
ggaagacaagttttt

SEQ ID NO: 724064 - DNA, 15 bp, Homo sapiens
gaagacaagtttttt

SEQ ID NO: 724065 - DNA, 15 bp, Homo sapiens
aagacaagttttttg

SEQ ID NO: 724066 - DNA, 15 bp, Homo sapiens
agacaagttttttga

SEQ ID NO: 724067 - DNA, 15 bp, Homo sapiens
gacaagttttttgag

SEQ ID NO: 724068 - DNA, 15 bp, Homo sapiens
acaagttttttgaga

SEQ ID NO: 724069 - DNA, 15 bp, Homo sapiens
caagttttttgagac

SEQ ID NO: 724070 - DNA, 15 bp, Homo sapiens
aagttttttgagaca

SEQ ID NO: 724071 - DNA, 15 bp, Homo sapiens
agttttttgagacac

SEQ ID NO: 724072 - DNA, 15 bp, Homo sapiens
gttttttgagacaca

SEQ ID NO: 724073 - DNA, 15 bp, Homo sapiens
ttttttgagacacat

SEQ ID NO: 724074 - DNA, 15 bp, Homo sapiens
tttttgagacacatt

SEQ ID NO: 724075 - DNA, 15 bp, Homo sapiens
ttttgagacacattc

SEQ ID NO: 724076 - DNA, 15 bp, Homo sapiens
tttgagacacattct

SEQ ID NO: 724077 - DNA, 15 bp, Homo sapiens
ttgagacacattcta

SEQ ID NO: 724078 - DNA, 15 bp, Homo sapiens
tgagacacattctaa

SEQ ID NO: 724079 - DNA, 15 bp, Homo sapiens
gagacacattctaat

SEQ ID NO: 724080 - DNA, 15 bp, Homo sapiens
agacacattctaatt

SEQ ID NO: 724081 - DNA, 15 bp, Homo sapiens
gacacattctaattg

SEQ ID NO: 724082 - DNA, 15 bp, Homo sapiens
acacattctaattgc

SEQ ID NO: 724083 - DNA, 15 bp, Homo sapiens
cacattctaattgct

SEQ ID NO: 724084 - DNA, 15 bp, Homo sapiens
acattctaattgctc

SEQ ID NO: 724085 - DNA, 15 bp, Homo sapiens
cattctaattgctca

SEQ ID NO: 724086 - DNA, 15 bp, Homo sapiens
attctaattgctcat

SEQ ID NO: 724087 - DNA, 15 bp, Homo sapiens
ttctaattgctcatc

SEQ ID NO: 724088 - DNA, 15 bp, Homo sapiens
tctaattgctcatcc

SEQ ID NO: 724089 - DNA, 15 bp, Homo sapiens
ctaattgctcatcca

SEQ ID NO: 724090 - DNA, 15 bp, Homo sapiens
taattgctcatccac

SEQ ID NO: 724091 - DNA, 15 bp, Homo sapiens
aattgctcatccaca

SEQ ID NO: 724092 - DNA, 15 bp, Homo sapiens
attgctcatccacac

SEQ ID NO: 724093 - DNA, 15 bp, Homo sapiens
ttgctcatccacaca

SEQ ID NO: 724094 - DNA, 15 bp, Homo sapiens
tgctcatccacacaa

SEQ ID NO: 724095 - DNA, 15 bp, Homo sapiens
gctcatccacacaat

SEQ ID NO: 724096 - DNA, 15 bp, Homo sapiens
ctcatccacacaata

SEQ ID NO: 724097 - DNA, 15 bp, Homo sapiens
tcatccacacaatat

SEQ ID NO: 724098 - DNA, 15 bp, Homo sapiens
catccacacaatatt

SEQ ID NO: 724099 - DNA, 15 bp, Homo sapiens
atccacacaatattt

SEQ ID NO: 724100 - DNA, 15 bp, Homo sapiens
tccacacaatatttt

SEQ ID NO: 724101 - DNA, 15 bp, Homo sapiens
ccacacaatattttt

SEQ ID NO: 724102 - DNA, 15 bp, Homo sapiens
cacacaatatttttt

SEQ ID NO: 724103 - DNA, 15 bp, Homo sapiens
acacaatattttttc

SEQ ID NO: 724104 - DNA, 15 bp, Homo sapiens
cacaatattttttct

SEQ ID NO: 724105 - DNA, 15 bp, Homo sapiens
acaatattttttctt

SEQ ID NO: 724106 - DNA, 15 bp, Homo sapiens
caatattttttcttt

SEQ ID NO: 724107 - DNA, 15 bp, Homo sapiens
aatattttttcttta

SEQ ID NO: 724108 - DNA, 15 bp, Homo sapiens
atattttttctttaa

SEQ ID NO: 724109 - DNA, 15 bp, Homo sapiens
tattttttctttaaa

SEQ ID NO: 724110 - DNA, 15 bp, Homo sapiens
attttttctttaaaa

SEQ ID NO: 724111 - DNA, 15 bp, Homo sapiens
ttttttctttaaaag

SEQ ID NO: 724112 - DNA, 15 bp, Homo sapiens
tttttctttaaaagt

SEQ ID NO: 724113 - DNA, 15 bp, Homo sapiens
ttttctttaaaagta

SEQ ID NO: 724114 - DNA, 15 bp, Homo sapiens
tttctttaaaagtat

SEQ ID NO: 724115 - DNA, 15 bp, Homo sapiens
ttctttaaaagtata

SEQ ID NO: 724116 - DNA, 15 bp, Homo sapiens
tctttaaaagtataa

SEQ ID NO: 724117 - DNA, 15 bp, Homo sapiens
ctttaaaagtataat

SEQ ID NO: 724118 - DNA, 15 bp, Homo sapiens
tttaaaagtataatc

SEQ ID NO: 724119 - DNA, 15 bp, Homo sapiens
ttaaaagtataatct

SEQ ID NO: 724120 - DNA, 15 bp, Homo sapiens
taaaagtataatctt

SEQ ID NO: 724121 - DNA, 15 bp, Homo sapiens
aaaagtataatctta

SEQ ID NO: 724122 - DNA, 15 bp, Homo sapiens
aaagtataatcttaa

SEQ ID NO: 724123 - DNA, 15 bp, Homo sapiens
aagtataatcttaat

SEQ ID NO: 724124 - DNA, 15 bp, Homo sapiens
agtataatcttaata

SEQ ID NO: 724125 - DNA, 15 bp, Homo sapiens
gtataatcttaatac

SEQ ID NO: 724126 - DNA, 15 bp, Homo sapiens
tataatcttaatact

SEQ ID NO: 724127 - DNA, 15 bp, Homo sapiens
ataatcttaatactg

SEQ ID NO: 724128 - DNA, 15 bp, Homo sapiens
taatcttaatactgg

SEQ ID NO: 724129 - DNA, 15 bp, Homo sapiens
aatcttaatactggc

SEQ ID NO: 724130 - DNA, 15 bp, Homo sapiens
atcttaatactggca

SEQ ID NO: 724131 - DNA, 15 bp, Homo sapiens
tcttaatactggcac

SEQ ID NO: 724132 - DNA, 15 bp, Homo sapiens
cttaatactggcaca

SEQ ID NO: 724133 - DNA, 15 bp, Homo sapiens
ttaatactggcacaa

SEQ ID NO: 724134 - DNA, 15 bp, Homo sapiens
taatactggcacaaa

SEQ ID NO: 724135 - DNA, 15 bp, Homo sapiens
aatactggcacaaag

SEQ ID NO: 724136 - DNA, 15 bp, Homo sapiens
atactggcacaaagg

SEQ ID NO: 724137 - DNA, 15 bp, Homo sapiens
tactggcacaaagga

SEQ ID NO: 724138 - DNA, 15 bp, Homo sapiens
actggcacaaaggaa

SEQ ID NO: 724139 - DNA, 15 bp, Homo sapiens
ctggcacaaaggaag

SEQ ID NO: 724140 - DNA, 15 bp, Homo sapiens
tggcacaaaggaagt

SEQ ID NO: 724141 - DNA, 15 bp, Homo sapiens
ggcacaaaggaagtg

SEQ ID NO: 724142 - DNA, 15 bp, Homo sapiens
gcacaaaggaagtgc

SEQ ID NO: 724143 - DNA, 15 bp, Homo sapiens
cacaaaggaagtgct

SEQ ID NO: 724144 - DNA, 15 bp, Homo sapiens
acaaaggaagtgctt

SEQ ID NO: 724145 - DNA, 15 bp, Homo sapiens
caaaggaagtgctta

SEQ ID NO: 724146 - DNA, 15 bp, Homo sapiens
aaaggaagtgcttaa

SEQ ID NO: 724147 - DNA, 15 bp, Homo sapiens
aaggaagtgcttaat

SEQ ID NO: 724148 - DNA, 15 bp, Homo sapiens
aggaagtgcttaata

SEQ ID NO: 724149 - DNA, 15 bp, Homo sapiens
ggaagtgcttaataa

SEQ ID NO: 724150 - DNA, 15 bp, Homo sapiens
gaagtgcttaataaa

SEQ ID NO: 724151 - DNA, 15 bp, Homo sapiens
aagtgcttaataaat

SEQ ID NO: 724152 - DNA, 15 bp, Homo sapiens
agtgcttaataaatg

SEQ ID NO: 724153 - DNA, 15 bp, Homo sapiens
gtgcttaataaatgt

SEQ ID NO: 724154 - DNA, 15 bp, Homo sapiens
tgcttaataaatgtt

SEQ ID NO: 724155 - DNA, 15 bp, Homo sapiens
gcttaataaatgttt

SEQ ID NO: 724156 - DNA, 15 bp, Homo sapiens
cttaataaatgtttg

SEQ ID NO: 724157 - DNA, 15 bp, Homo sapiens
ttaataaatgtttga

SEQ ID NO: 724158 - DNA, 15 bp, Homo sapiens
taataaatgtttgat

SEQ ID NO: 724159 - DNA, 15 bp, Homo sapiens
aataaatgtttgata

SEQ ID NO: 724160 - DNA, 15 bp, Homo sapiens
ataaatgtttgataa

SEQ ID NO: 724161 - DNA, 15 bp, Homo sapiens
taaatgtttgataag

SEQ ID NO: 724162 - DNA, 15 bp, Homo sapiens
aaatgtttgataagt

SEQ ID NO: 724163 - DNA, 15 bp, Homo sapiens
aatgtttgataagtg

SEQ ID NO: 724164 - DNA, 15 bp, Homo sapiens
atgtttgataagtga

SEQ ID NO: 724165 - DNA, 15 bp, Homo sapiens
tgtttgataagtgag

SEQ ID NO: 724166 - DNA, 15 bp, Homo sapiens
gtttgataagtgagt

SEQ ID NO: 724167 - DNA, 15 bp, Homo sapiens
tttgataagtgagta

SEQ ID NO: 724168 - DNA, 15 bp, Homo sapiens
ttgataagtgagtat

SEQ ID NO: 724169 - DNA, 15 bp, Homo sapiens
tgataagtgagtatt

SEQ ID NO: 724170 - DNA, 15 bp, Homo sapiens
gataagtgagtattt

SEQ ID NO: 724171 - DNA, 15 bp, Homo sapiens
ataagtgagtatttt

SEQ ID NO: 724172 - DNA, 15 bp, Homo sapiens
taagtgagtattttg

SEQ ID NO: 724173 - DNA, 15 bp, Homo sapiens
aagtgagtattttgc

SEQ ID NO: 724174 - DNA, 15 bp, Homo sapiens
agtgagtattttgcc

SEQ ID NO: 724175 - DNA, 15 bp, Homo sapiens
gtgagtattttgcca

SEQ ID NO: 724176 - DNA, 15 bp, Homo sapiens
tgagtattttgccat

SEQ ID NO: 724177 - DNA, 15 bp, Homo sapiens
gagtattttgccatt

SEQ ID NO: 724178 - DNA, 15 bp, Homo sapiens
agtattttgccattg

SEQ ID NO: 724179 - DNA, 15 bp, Homo sapiens
gtattttgccattgc

SEQ ID NO: 724180 - DNA, 15 bp, Homo sapiens
tattttgccattgcc

SEQ ID NO: 724181 - DNA, 15 bp, Homo sapiens
attttgccattgcca

SEQ ID NO: 724182 - DNA, 15 bp, Homo sapiens
ttttgccattgccaa

SEQ ID NO: 724183 - DNA, 15 bp, Homo sapiens
tttgccattgccaaa

SEQ ID NO: 724184 - DNA, 15 bp, Homo sapiens
ttgccattgccaaaa

SEQ ID NO: 724185 - DNA, 15 bp, Homo sapiens
tgccattgccaaaac

SEQ ID NO: 724186 - DNA, 15 bp, Homo sapiens
gccattgccaaaaca

SEQ ID NO: 724187 - DNA, 15 bp, Homo sapiens
ccattgccaaaacat

SEQ ID NO: 724188 - DNA, 15 bp, Homo sapiens
cattgccaaaacatt

SEQ ID NO: 724189 - DNA, 15 bp, Homo sapiens
attgccaaaacattt

SEQ ID NO: 724190 - DNA, 15 bp, Homo sapiens
ttgccaaaacatttt

SEQ ID NO: 724191 - DNA, 15 bp, Homo sapiens
tgccaaaacattttg

SEQ ID NO: 724192 - DNA, 15 bp, Homo sapiens
gccaaaacattttga

SEQ ID NO: 724193 - DNA, 15 bp, Homo sapiens
ccaaaacattttgag

SEQ ID NO: 724194 - DNA, 15 bp, Homo sapiens
caaaacattttgaga

SEQ ID NO: 724195 - DNA, 15 bp, Homo sapiens
aaaacattttgagag

SEQ ID NO: 724196 - DNA, 15 bp, Homo sapiens
aaacattttgagagc

SEQ ID NO: 724197 - DNA, 15 bp, Homo sapiens
aacattttgagagcc

SEQ ID NO: 724198 - DNA, 15 bp, Homo sapiens
acattttgagagccc

SEQ ID NO: 724199 - DNA, 15 bp, Homo sapiens
cattttgagagccct

SEQ ID NO: 724200 - DNA, 15 bp, Homo sapiens
attttgagagccctt

SEQ ID NO: 724201 - DNA, 15 bp, Homo sapiens
ttttgagagcccttt

SEQ ID NO: 724202 - DNA, 15 bp, Homo sapiens
tttgagagccctttt

SEQ ID NO: 724203 - DNA, 15 bp, Homo sapiens
ttgagagcccttttt

SEQ ID NO: 724204 - DNA, 15 bp, Homo sapiens
tgagagccctttttt

SEQ ID NO: 724205 - DNA, 15 bp, Homo sapiens
gagagcccttttttg

SEQ ID NO: 724206 - DNA, 15 bp, Homo sapiens
agagcccttttttgg

SEQ ID NO: 724207 - DNA, 15 bp, Homo sapiens
gagcccttttttgga

SEQ ID NO: 724208 - DNA, 15 bp, Homo sapiens
agcccttttttggaa

SEQ ID NO: 724209 - DNA, 15 bp, Homo sapiens
gcccttttttggaaa

SEQ ID NO: 724210 - DNA, 15 bp, Homo sapiens
cccttttttggaaaa

SEQ ID NO: 724211 - DNA, 15 bp, Homo sapiens
ccttttttggaaaag

SEQ ID NO: 724212 - DNA, 15 bp, Homo sapiens
cttttttggaaaagc

SEQ ID NO: 724213 - DNA, 15 bp, Homo sapiens
ttttttggaaaagcc

SEQ ID NO: 724214 - DNA, 15 bp, Homo sapiens
tttttggaaaagcca

SEQ ID NO: 724215 - DNA, 15 bp, Homo sapiens
ttttggaaaagccat

SEQ ID NO: 724216 - DNA, 15 bp, Homo sapiens
tttggaaaagccatt

SEQ ID NO: 724217 - DNA, 15 bp, Homo sapiens
ttggaaaagccattc

SEQ ID NO: 724218 - DNA, 15 bp, Homo sapiens
tggaaaagccattca

SEQ ID NO: 724219 - DNA, 15 bp, Homo sapiens
ggaaaagccattcag

SEQ ID NO: 724220 - DNA, 15 bp, Homo sapiens
gaaaagccattcaga

SEQ ID NO: 724221 - DNA, 15 bp, Homo sapiens
aaaagccattcagaa

SEQ ID NO: 724222 - DNA, 15 bp, Homo sapiens
aaagccattcagaac

SEQ ID NO: 724223 - DNA, 15 bp, Homo sapiens
aagccattcagaact

SEQ ID NO: 724224 - DNA, 15 bp, Homo sapiens
agccattcagaacta

SEQ ID NO: 724225 - DNA, 15 bp, Homo sapiens
gccattcagaactag

SEQ ID NO: 724226 - DNA, 15 bp, Homo sapiens
ccattcagaactagt

SEQ ID NO: 724227 - DNA, 15 bp, Homo sapiens
cattcagaactagtt

SEQ ID NO: 724228 - DNA, 15 bp, Homo sapiens
attcagaactagttg

SEQ ID NO: 724229 - DNA, 15 bp, Homo sapiens
ttcagaactagttga

SEQ ID NO: 724230 - DNA, 15 bp, Homo sapiens
tcagaactagttgac

SEQ ID NO: 724231 - DNA, 15 bp, Homo sapiens
cagaactagttgaca

SEQ ID NO: 724232 - DNA, 15 bp, Homo sapiens
agaactagttgacaa

SEQ ID NO: 724233 - DNA, 15 bp, Homo sapiens
gaactagttgacaaa

SEQ ID NO: 724234 - DNA, 15 bp, Homo sapiens
aactagttgacaaac

SEQ ID NO: 724235 - DNA, 15 bp, Homo sapiens
actagttgacaaacc

SEQ ID NO: 724236 - DNA, 15 bp, Homo sapiens
ctagttgacaaacca

SEQ ID NO: 724237 - DNA, 15 bp, Homo sapiens
tagttgacaaaccaa

SEQ ID NO: 724238 - DNA, 15 bp, Homo sapiens
agttgacaaaccaaa

SEQ ID NO: 724239 - DNA, 15 bp, Homo sapiens
gttgacaaaccaaat

SEQ ID NO: 724240 - DNA, 15 bp, Homo sapiens
ttgacaaaccaaata

SEQ ID NO: 724241 - DNA, 15 bp, Homo sapiens
tgacaaaccaaatac

SEQ ID NO: 724242 - DNA, 15 bp, Homo sapiens
gacaaaccaaataca

SEQ ID NO: 724243 - DNA, 15 bp, Homo sapiens
acaaaccaaatacaa

SEQ ID NO: 724244 - DNA, 15 bp, Homo sapiens
caaaccaaatacaaa

SEQ ID NO: 724245 - DNA, 15 bp, Homo sapiens
aaaccaaatacaaaa

SEQ ID NO: 724246 - DNA, 15 bp, Homo sapiens
aaccaaatacaaaat

SEQ ID NO: 724247 - DNA, 15 bp, Homo sapiens
accaaatacaaaatg

SEQ ID NO: 724248 - DNA, 15 bp, Homo sapiens
ccaaatacaaaatgc

SEQ ID NO: 724249 - DNA, 15 bp, Homo sapiens
caaatacaaaatgca

SEQ ID NO: 724250 - DNA, 15 bp, Homo sapiens
aaatacaaaatgcag

SEQ ID NO: 724251 - DNA, 15 bp, Homo sapiens
aatacaaaatgcagt

SEQ ID NO: 724252 - DNA, 15 bp, Homo sapiens
atacaaaatgcagtt

SEQ ID NO: 724253 - DNA, 15 bp, Homo sapiens
tacaaaatgcagttt

SEQ ID NO: 724254 - DNA, 15 bp, Homo sapiens
acaaaatgcagtttt

SEQ ID NO: 724255 - DNA, 15 bp, Homo sapiens
caaaatgcagttttg

SEQ ID NO: 724256 - DNA, 15 bp, Homo sapiens
aaaatgcagttttga

SEQ ID NO: 724257 - DNA, 15 bp, Homo sapiens
aaatgcagttttgat

SEQ ID NO: 724258 - DNA, 15 bp, Homo sapiens
aatgcagttttgatt

SEQ ID NO: 724259 - DNA, 15 bp, Homo sapiens
atgcagttttgatta

SEQ ID NO: 724260 - DNA, 15 bp, Homo sapiens
tgcagttttgattat

SEQ ID NO: 724261 - DNA, 15 bp, Homo sapiens
gcagttttgattatg

SEQ ID NO: 724262 - DNA, 15 bp, Homo sapiens
cagttttgattatga

SEQ ID NO: 724263 - DNA, 15 bp, Homo sapiens
agttttgattatgat

SEQ ID NO: 724264 - DNA, 15 bp, Homo sapiens
gttttgattatgatt

SEQ ID NO: 724265 - DNA, 15 bp, Homo sapiens
ttttgattatgattt

SEQ ID NO: 724266 - DNA, 15 bp, Homo sapiens
tttgattatgatttc

SEQ ID NO: 724267 - DNA, 15 bp, Homo sapiens
ttgattatgatttct

SEQ ID NO: 724268 - DNA, 15 bp, Homo sapiens
tgattatgatttctt

SEQ ID NO: 724269 - DNA, 15 bp, Homo sapiens
gattatgatttcttt

SEQ ID NO: 724270 - DNA, 15 bp, Homo sapiens
attatgatttctttt

SEQ ID NO: 724271 - DNA, 15 bp, Homo sapiens
ttatgatttcttttt

SEQ ID NO: 724272 - DNA, 15 bp, Homo sapiens
tatgatttctttttc

SEQ ID NO: 724273 - DNA, 15 bp, Homo sapiens
atgatttctttttct

SEQ ID NO: 724274 - DNA, 15 bp, Homo sapiens
tgatttctttttcta

SEQ ID NO: 724275 - DNA, 15 bp, Homo sapiens
gatttctttttctat

SEQ ID NO: 724276 - DNA, 15 bp, Homo sapiens
atttctttttctatt

SEQ ID NO: 724277 - DNA, 15 bp, Homo sapiens
tttctttttctattt

SEQ ID NO: 724278 - DNA, 15 bp, Homo sapiens
ttctttttctatttg

SEQ ID NO: 724279 - DNA, 15 bp, Homo sapiens
tctttttctatttgc

SEQ ID NO: 724280 - DNA, 15 bp, Homo sapiens
ctttttctatttgct

SEQ ID NO: 724281 - DNA, 15 bp, Homo sapiens
tttttctatttgctt

SEQ ID NO: 724282 - DNA, 15 bp, Homo sapiens
ttttctatttgcttc

SEQ ID NO: 724283 - DNA, 15 bp, Homo sapiens
tttctatttgcttcg

SEQ ID NO: 724284 - DNA, 15 bp, Homo sapiens
ttctatttgcttcgt

SEQ ID NO: 724285 - DNA, 15 bp, Homo sapiens
tctatttgcttcgtt

SEQ ID NO: 724286 - DNA, 15 bp, Homo sapiens
ctatttgcttcgttt

SEQ ID NO: 724287 - DNA, 15 bp, Homo sapiens
tatttgcttcgtttc

SEQ ID NO: 724288 - DNA, 15 bp, Homo sapiens
atttgcttcgtttct

SEQ ID NO: 724289 - DNA, 15 bp, Homo sapiens
tttgcttcgtttctg

SEQ ID NO: 724290 - DNA, 15 bp, Homo sapiens
ttgcttcgtttctgt

SEQ ID NO: 724291 - DNA, 15 bp, Homo sapiens
tgcttcgtttctgtt

SEQ ID NO: 724292 - DNA, 15 bp, Homo sapiens
gcttcgtttctgtta

SEQ ID NO: 724293 - DNA, 15 bp, Homo sapiens
cttcgtttctgttat

SEQ ID NO: 724294 - DNA, 15 bp, Homo sapiens
ttcgtttctgttatt

SEQ ID NO: 724295 - DNA, 15 bp, Homo sapiens
tcgtttctgttattt

SEQ ID NO: 724296 - DNA, 15 bp, Homo sapiens
cgtttctgttatttt

SEQ ID NO: 724297 - DNA, 15 bp, Homo sapiens
gtttctgttattttt

SEQ ID NO: 724298 - DNA, 15 bp, Homo sapiens
tttctgttatttttt

SEQ ID NO: 724299 - DNA, 15 bp, Homo sapiens
ttctgttattttttt

SEQ ID NO: 724300 - DNA, 15 bp, Homo sapiens
tctgttatttttttt

SEQ ID NO: 724301 - DNA, 15 bp, Homo sapiens
ctgttatttttttta

SEQ ID NO: 724302 - DNA, 15 bp, Homo sapiens
tgttattttttttaa

SEQ ID NO: 724303 - DNA, 15 bp, Homo sapiens
gttattttttttaaa

SEQ ID NO: 724304 - DNA, 15 bp, Homo sapiens
ttattttttttaaat

SEQ ID NO: 724305 - DNA, 15 bp, Homo sapiens
tattttttttaaatc

SEQ ID NO: 724306 - DNA, 15 bp, Homo sapiens
attttttttaaatca

SEQ ID NO: 724307 - DNA, 15 bp, Homo sapiens
ttttttttaaatcag

SEQ ID NO: 724308 - DNA, 15 bp, Homo sapiens
tttttttaaatcaga

SEQ ID NO: 724309 - DNA, 15 bp, Homo sapiens
ttttttaaatcagaa

SEQ ID NO: 724310 - DNA, 15 bp, Homo sapiens
tttttaaatcagaaa

SEQ ID NO: 724311 - DNA, 15 bp, Homo sapiens
ttttaaatcagaaat

SEQ ID NO: 724312 - DNA, 15 bp, Homo sapiens
tttaaatcagaaatt

SEQ ID NO: 724313 - DNA, 15 bp, Homo sapiens
ttaaatcagaaattt

SEQ ID NO: 724314 - DNA, 15 bp, Homo sapiens
taaatcagaaattta

SEQ ID NO: 724315 - DNA, 15 bp, Homo sapiens
aaatcagaaatttat

SEQ ID NO: 724316 - DNA, 15 bp, Homo sapiens
aatcagaaatttata

SEQ ID NO: 724317 - DNA, 15 bp, Homo sapiens
atcagaaatttataa

SEQ ID NO: 724318 - DNA, 15 bp, Homo sapiens
tcagaaatttataat

SEQ ID NO: 724319 - DNA, 15 bp, Homo sapiens
cagaaatttataatg

SEQ ID NO: 724320 - DNA, 15 bp, Homo sapiens
agaaatttataatgg

SEQ ID NO: 724321 - DNA, 15 bp, Homo sapiens
gaaatttataatggg

SEQ ID NO: 724322 - DNA, 15 bp, Homo sapiens
aaatttataatgggc

SEQ ID NO: 724323 - DNA, 15 bp, Homo sapiens
aatttataatgggca

SEQ ID NO: 724324 - DNA, 15 bp, Homo sapiens
atttataatgggcag

SEQ ID NO: 724325 - DNA, 15 bp, Homo sapiens
tttataatgggcagc

SEQ ID NO: 724326 - DNA, 15 bp, Homo sapiens
ttataatgggcagcc

SEQ ID NO: 724327 - DNA, 15 bp, Homo sapiens
tataatgggcagcca

SEQ ID NO: 724328 - DNA, 15 bp, Homo sapiens
ataatgggcagccaa

SEQ ID NO: 724329 - DNA, 15 bp, Homo sapiens
taatgggcagccaaa

SEQ ID NO: 724330 - DNA, 15 bp, Homo sapiens
aatgggcagccaaaa

SEQ ID NO: 724331 - DNA, 15 bp, Homo sapiens
atgggcagccaaaat

SEQ ID NO: 724332 - DNA, 15 bp, Homo sapiens
tgggcagccaaaatt

SEQ ID NO: 724333 - DNA, 15 bp, Homo sapiens
gggcagccaaaattc

SEQ ID NO: 724334 - DNA, 15 bp, Homo sapiens
ggcagccaaaattca

SEQ ID NO: 724335 - DNA, 15 bp, Homo sapiens
gcagccaaaattcaa

SEQ ID NO: 724336 - DNA, 15 bp, Homo sapiens
cagccaaaattcaaa

SEQ ID NO: 724337 - DNA, 15 bp, Homo sapiens
agccaaaattcaaat

SEQ ID NO: 724338 - DNA, 15 bp, Homo sapiens
gccaaaattcaaatc

SEQ ID NO: 724339 - DNA, 15 bp, Homo sapiens
ccaaaattcaaatca

SEQ ID NO: 724340 - DNA, 15 bp, Homo sapiens
caaaattcaaatcat

SEQ ID NO: 724341 - DNA, 15 bp, Homo sapiens
aaaattcaaatcatt

SEQ ID NO: 724342 - DNA, 15 bp, Homo sapiens
aaattcaaatcattc

SEQ ID NO: 724343 - DNA, 15 bp, Homo sapiens
aattcaaatcattct

SEQ ID NO: 724344 - DNA, 15 bp, Homo sapiens
attcaaatcattctt

SEQ ID NO: 724345 - DNA, 15 bp, Homo sapiens
ttcaaatcattcttt

SEQ ID NO: 724346 - DNA, 15 bp, Homo sapiens
tcaaatcattctttt

SEQ ID NO: 724347 - DNA, 15 bp, Homo sapiens
caaatcattcttttt

SEQ ID NO: 724348 - DNA, 15 bp, Homo sapiens
aaatcattctttttt

SEQ ID NO: 724349 - DNA, 15 bp, Homo sapiens
aatcattcttttttt

SEQ ID NO: 724350 - DNA, 15 bp, Homo sapiens
atcattctttttttt

SEQ ID NO: 724351 - DNA, 15 bp, Homo sapiens
tcattcttttttttt

SEQ ID NO: 724352 - DNA, 15 bp, Homo sapiens
cattctttttttttt

SEQ ID NO: 724353 - DNA, 15 bp, Homo sapiens
attcttttttttttg

SEQ ID NO: 724354 - DNA, 15 bp, Homo sapiens
ttttttttgagacga

SEQ ID NO: 724355 - DNA, 15 bp, Homo sapiens
tttttttgagacgag

SEQ ID NO: 724356 - DNA, 15 bp, Homo sapiens
ttttttgagacgagt

SEQ ID NO: 724357 - DNA, 15 bp, Homo sapiens
tttttgagacgagtc

SEQ ID NO: 724358 - DNA, 15 bp, Homo sapiens
ttttgagacgagtct

SEQ ID NO: 724359 - DNA, 15 bp, Homo sapiens
tttgagacgagtctt

SEQ ID NO: 724360 - DNA, 15 bp, Homo sapiens
ttgagacgagtcttg

SEQ ID NO: 724361 - DNA, 15 bp, Homo sapiens
tgagacgagtcttgc

SEQ ID NO: 724362 - DNA, 15 bp, Homo sapiens
gagacgagtcttgct

SEQ ID NO: 724363 - DNA, 15 bp, Homo sapiens
agacgagtcttgctc

SEQ ID NO: 724364 - DNA, 15 bp, Homo sapiens
gacgagtcttgctca

SEQ ID NO: 724365 - DNA, 15 bp, Homo sapiens
acgagtcttgctcag

SEQ ID NO: 724366 - DNA, 15 bp, Homo sapiens
cgagtcttgctcagt

SEQ ID NO: 724367 - DNA, 15 bp, Homo sapiens
gagtcttgctcagtt

SEQ ID NO: 724368 - DNA, 15 bp, Homo sapiens
agtcttgctcagttg

SEQ ID NO: 724369 - DNA, 15 bp, Homo sapiens
gtcttgctcagttgc

SEQ ID NO: 724370 - DNA, 15 bp, Homo sapiens
tcttgctcagttgcc

SEQ ID NO: 724371 - DNA, 15 bp, Homo sapiens
cttgctcagttgccc

SEQ ID NO: 724372 - DNA, 15 bp, Homo sapiens
ttgctcagttgccca

SEQ ID NO: 724373 - DNA, 15 bp, Homo sapiens
tgctcagttgcccag

SEQ ID NO: 724374 - DNA, 15 bp, Homo sapiens
gctcagttgcccagg

SEQ ID NO: 724375 - DNA, 15 bp, Homo sapiens
ctcagttgcccaggc

SEQ ID NO: 724376 - DNA, 15 bp, Homo sapiens
tcagttgcccaggct

SEQ ID NO: 724377 - DNA, 15 bp, Homo sapiens
cagttgcccaggctg

SEQ ID NO: 724378 - DNA, 15 bp, Homo sapiens
agttgcccaggctgg

SEQ ID NO: 724379 - DNA, 15 bp, Homo sapiens
gctggagtgcagtgt

SEQ ID NO: 724380 - DNA, 15 bp, Homo sapiens
ctggagtgcagtgtg

SEQ ID NO: 724381 - DNA, 15 bp, Homo sapiens
tggagtgcagtgtgc

SEQ ID NO: 724382 - DNA, 15 bp, Homo sapiens
ggagtgcagtgtgcg

SEQ ID NO: 724383 - DNA, 15 bp, Homo sapiens
gagtgcagtgtgcgg

SEQ ID NO: 724384 - DNA, 15 bp, Homo sapiens
agtgcagtgtgcggt

SEQ ID NO: 724385 - DNA, 15 bp, Homo sapiens
gtgcagtgtgcggtc

SEQ ID NO: 724386 - DNA, 15 bp, Homo sapiens
tgcagtgtgcggtca

SEQ ID NO: 724387 - DNA, 15 bp, Homo sapiens
gcagtgtgcggtcac

SEQ ID NO: 724388 - DNA, 15 bp, Homo sapiens
cagtgtgcggtcaca

SEQ ID NO: 724389 - DNA, 15 bp, Homo sapiens
agtgtgcggtcacag

SEQ ID NO: 724390 - DNA, 15 bp, Homo sapiens
gtgtgcggtcacagt

SEQ ID NO: 724391 - DNA, 15 bp, Homo sapiens
tgtgcggtcacagtc

SEQ ID NO: 724392 - DNA, 15 bp, Homo sapiens
gtgcggtcacagtca

SEQ ID NO: 724393 - DNA, 15 bp, Homo sapiens
tgcggtcacagtcac

SEQ ID NO: 724394 - DNA, 15 bp, Homo sapiens
gcggtcacagtcaca

SEQ ID NO: 724395 - DNA, 15 bp, Homo sapiens
cggtcacagtcacag

SEQ ID NO: 724396 - DNA, 15 bp, Homo sapiens
ggtcacagtcacagc

SEQ ID NO: 724397 - DNA, 15 bp, Homo sapiens
gtcacagtcacagca

SEQ ID NO: 724398 - DNA, 15 bp, Homo sapiens
tcacagtcacagcag

SEQ ID NO: 724399 - DNA, 15 bp, Homo sapiens
cacagtcacagcagc

SEQ ID NO: 724400 - DNA, 15 bp, Homo sapiens
acagtcacagcagcc

SEQ ID NO: 724401 - DNA, 15 bp, Homo sapiens
cagtcacagcagcct

SEQ ID NO: 724402 - DNA, 15 bp, Homo sapiens
agtcacagcagcctc

SEQ ID NO: 724403 - DNA, 15 bp, Homo sapiens
gtcacagcagcctcg

SEQ ID NO: 724404 - DNA, 15 bp, Homo sapiens
tcacagcagcctcga

SEQ ID NO: 724405 - DNA, 15 bp, Homo sapiens
cacagcagcctcgac

SEQ ID NO: 724406 - DNA, 15 bp, Homo sapiens
acagcagcctcgacc

SEQ ID NO: 724407 - DNA, 15 bp, Homo sapiens
cagcagcctcgacct

SEQ ID NO: 724408 - DNA, 15 bp, Homo sapiens
agcagcctcgacctc

SEQ ID NO: 724409 - DNA, 15 bp, Homo sapiens
gcagcctcgacctcc

SEQ ID NO: 724410 - DNA, 15 bp, Homo sapiens
cagcctcgacctcct

SEQ ID NO: 724411 - DNA, 15 bp, Homo sapiens
agcctcgacctcctg

SEQ ID NO: 724412 - DNA, 15 bp, Homo sapiens
gcctcgacctcctgg

SEQ ID NO: 724413 - DNA, 15 bp, Homo sapiens
cctcgacctcctggg

SEQ ID NO: 724414 - DNA, 15 bp, Homo sapiens
ctcgacctcctgggc

SEQ ID NO: 724415 - DNA, 15 bp, Homo sapiens
tcgacctcctgggct

SEQ ID NO: 724416 - DNA, 15 bp, Homo sapiens
cgacctcctgggctc

SEQ ID NO: 724417 - DNA, 15 bp, Homo sapiens
gacctcctgggctca

SEQ ID NO: 724418 - DNA, 15 bp, Homo sapiens
acctcctgggctcaa

SEQ ID NO: 724419 - DNA, 15 bp, Homo sapiens
cctcctgggctcaag

SEQ ID NO: 724420 - DNA, 15 bp, Homo sapiens
cctgggctcaagcaa

SEQ ID NO: 724421 - DNA, 15 bp, Homo sapiens
ctgggctcaagcaat

SEQ ID NO: 724422 - DNA, 15 bp, Homo sapiens
tgggctcaagcaatc

SEQ ID NO: 724423 - DNA, 15 bp, Homo sapiens
gggctcaagcaatcc

SEQ ID NO: 724424 - DNA, 15 bp, Homo sapiens
ggctcaagcaatcct

SEQ ID NO: 724425 - DNA, 15 bp, Homo sapiens
gctcaagcaatcctc

SEQ ID NO: 724426 - DNA, 15 bp, Homo sapiens
ctcaagcaatcctct

SEQ ID NO: 724427 - DNA, 15 bp, Homo sapiens
tcaagcaatcctctc

SEQ ID NO: 724428 - DNA, 15 bp, Homo sapiens
caagcaatcctctct

SEQ ID NO: 724429 - DNA, 15 bp, Homo sapiens
aagcaatcctctcta

SEQ ID NO: 724430 - DNA, 15 bp, Homo sapiens
agcaatcctctctac

SEQ ID NO: 724431 - DNA, 15 bp, Homo sapiens
gcaatcctctctacc

SEQ ID NO: 724432 - DNA, 15 bp, Homo sapiens
caatcctctctacct

SEQ ID NO: 724433 - DNA, 15 bp, Homo sapiens
aatcctctctacctc

SEQ ID NO: 724434 - DNA, 15 bp, Homo sapiens
atcctctctacctca

SEQ ID NO: 724435 - DNA, 15 bp, Homo sapiens
tcctctctacctcag

SEQ ID NO: 724436 - DNA, 15 bp, Homo sapiens
cctctctacctcagc

SEQ ID NO: 724437 - DNA, 15 bp, Homo sapiens
ctctctacctcagct

SEQ ID NO: 724438 - DNA, 15 bp, Homo sapiens
tctctacctcagctt

SEQ ID NO: 724439 - DNA, 15 bp, Homo sapiens
ctctacctcagcttc

SEQ ID NO: 724440 - DNA, 15 bp, Homo sapiens
tctacctcagcttct

SEQ ID NO: 724441 - DNA, 15 bp, Homo sapiens
ctacctcagcttctg

SEQ ID NO: 724442 - DNA, 15 bp, Homo sapiens
tacctcagcttctgg

SEQ ID NO: 724443 - DNA, 15 bp, Homo sapiens
acctcagcttctgga

SEQ ID NO: 724444 - DNA, 15 bp, Homo sapiens
cctcagcttctggag

SEQ ID NO: 724445 - DNA, 15 bp, Homo sapiens
ctcagcttctggagt

SEQ ID NO: 724446 - DNA, 15 bp, Homo sapiens
tcagcttctggagta

SEQ ID NO: 724447 - DNA, 15 bp, Homo sapiens
cagcttctggagtag

SEQ ID NO: 724448 - DNA, 15 bp, Homo sapiens
agcttctggagtagc

SEQ ID NO: 724449 - DNA, 15 bp, Homo sapiens
gcttctggagtagct

SEQ ID NO: 724450 - DNA, 15 bp, Homo sapiens
cttctggagtagctg

SEQ ID NO: 724451 - DNA, 15 bp, Homo sapiens
ttctggagtagctgg

SEQ ID NO: 724452 - DNA, 15 bp, Homo sapiens
tctggagtagctggg

SEQ ID NO: 724453 - DNA, 15 bp, Homo sapiens
ctggagtagctggga

SEQ ID NO: 724454 - DNA, 15 bp, Homo sapiens
tggagtagctgggag

SEQ ID NO: 724455 - DNA, 15 bp, Homo sapiens
ggagtagctgggagc

SEQ ID NO: 724456 - DNA, 15 bp, Homo sapiens
gagtagctgggagca

SEQ ID NO: 724457 - DNA, 15 bp, Homo sapiens
agtagctgggagcac

SEQ ID NO: 724458 - DNA, 15 bp, Homo sapiens
gtagctgggagcaca

SEQ ID NO: 724459 - DNA, 15 bp, Homo sapiens
tagctgggagcacag

SEQ ID NO: 724460 - DNA, 15 bp, Homo sapiens
agctgggagcacagt

SEQ ID NO: 724461 - DNA, 15 bp, Homo sapiens
gctgggagcacagtc

SEQ ID NO: 724462 - DNA, 15 bp, Homo sapiens
ctgggagcacagtca

SEQ ID NO: 724463 - DNA, 15 bp, Homo sapiens
tgggagcacagtcac

SEQ ID NO: 724464 - DNA, 15 bp, Homo sapiens
gggagcacagtcacc

SEQ ID NO: 724465 - DNA, 15 bp, Homo sapiens
ggagcacagtcacca

SEQ ID NO: 724466 - DNA, 15 bp, Homo sapiens
gagcacagtcaccaa

SEQ ID NO: 724467 - DNA, 15 bp, Homo sapiens
agcacagtcaccaag

SEQ ID NO: 724468 - DNA, 15 bp, Homo sapiens
gcacagtcaccaagc

SEQ ID NO: 724469 - DNA, 15 bp, Homo sapiens
cacagtcaccaagcc

SEQ ID NO: 724470 - DNA, 15 bp, Homo sapiens
acagtcaccaagccc

SEQ ID NO: 724471 - DNA, 15 bp, Homo sapiens
cagtcaccaagccca

SEQ ID NO: 724472 - DNA, 15 bp, Homo sapiens
agtcaccaagcccag

SEQ ID NO: 724473 - DNA, 15 bp, Homo sapiens
gtcaccaagcccagg

SEQ ID NO: 724474 - DNA, 15 bp, Homo sapiens
tcaccaagcccaggg

SEQ ID NO: 724475 - DNA, 15 bp, Homo sapiens
caccaagcccagggc

SEQ ID NO: 724476 - DNA, 15 bp, Homo sapiens
accaagcccagggct

SEQ ID NO: 724477 - DNA, 15 bp, Homo sapiens
ccaagcccagggcta

SEQ ID NO: 724478 - DNA, 15 bp, Homo sapiens
caagcccagggctaa

SEQ ID NO: 724479 - DNA, 15 bp, Homo sapiens
aagcccagggctaat

SEQ ID NO: 724480 - DNA, 15 bp, Homo sapiens
agcccagggctaatt

SEQ ID NO: 724481 - DNA, 15 bp, Homo sapiens
gcccagggctaattt

SEQ ID NO: 724482 - DNA, 15 bp, Homo sapiens
cccagggctaatttt

SEQ ID NO: 724483 - DNA, 15 bp, Homo sapiens
ccagggctaattttt

SEQ ID NO: 724484 - DNA, 15 bp, Homo sapiens
cagggctaattttta

SEQ ID NO: 724485 - DNA, 15 bp, Homo sapiens
agggctaatttttat

SEQ ID NO: 724486 - DNA, 15 bp, Homo sapiens
gggctaatttttata

SEQ ID NO: 724487 - DNA, 15 bp, Homo sapiens
ggctaatttttatag

SEQ ID NO: 724488 - DNA, 15 bp, Homo sapiens
gctaatttttataga

SEQ ID NO: 724489 - DNA, 15 bp, Homo sapiens
ctaatttttatagag

SEQ ID NO: 724490 - DNA, 15 bp, Homo sapiens
taatttttatagaga

SEQ ID NO: 724491 - DNA, 15 bp, Homo sapiens
aatttttatagagat

SEQ ID NO: 724492 - DNA, 15 bp, Homo sapiens
atttttatagagatg

SEQ ID NO: 724493 - DNA, 15 bp, Homo sapiens
tttttatagagatga

SEQ ID NO: 724494 - DNA, 15 bp, Homo sapiens
ttttatagagatgag

SEQ ID NO: 724495 - DNA, 15 bp, Homo sapiens
tttatagagatgagg

SEQ ID NO: 724496 - DNA, 15 bp, Homo sapiens
ttatagagatgaggt

SEQ ID NO: 724497 - DNA, 15 bp, Homo sapiens
tatagagatgaggtt

SEQ ID NO: 724498 - DNA, 15 bp, Homo sapiens
atagagatgaggttt

SEQ ID NO: 724499 - DNA, 15 bp, Homo sapiens
tagagatgaggtttt

SEQ ID NO: 724500 - DNA, 15 bp, Homo sapiens
agagatgaggttttg

SEQ ID NO: 724501 - DNA, 15 bp, Homo sapiens
gagatgaggttttgc

SEQ ID NO: 724502 - DNA, 15 bp, Homo sapiens
agatgaggttttgcc

SEQ ID NO: 724503 - DNA, 15 bp, Homo sapiens
gatgaggttttgcca

SEQ ID NO: 724504 - DNA, 15 bp, Homo sapiens
atgaggttttgccat

SEQ ID NO: 724505 - DNA, 15 bp, Homo sapiens
tgaggttttgccatg

SEQ ID NO: 724506 - DNA, 15 bp, Homo sapiens
gaggttttgccatgt

SEQ ID NO: 724507 - DNA, 15 bp, Homo sapiens
aggttttgccatgtt

SEQ ID NO: 724508 - DNA, 15 bp, Homo sapiens
gttttgccatgttgc

SEQ ID NO: 724509 - DNA, 15 bp, Homo sapiens
ttttgccatgttgcc

SEQ ID NO: 724510 - DNA, 15 bp, Homo sapiens
tttgccatgttgccc

SEQ ID NO: 724511 - DNA, 15 bp, Homo sapiens
ttgccatgttgccca

SEQ ID NO: 724512 - DNA, 15 bp, Homo sapiens
tgccatgttgcccag

SEQ ID NO: 724513 - DNA, 15 bp, Homo sapiens
gccatgttgcccagg

SEQ ID NO: 724514 - DNA, 15 bp, Homo sapiens
atgttgcccaggctc

SEQ ID NO: 724515 - DNA, 15 bp, Homo sapiens
tgttgcccaggctca

SEQ ID NO: 724516 - DNA, 15 bp, Homo sapiens
gttgcccaggctcaa

SEQ ID NO: 724517 - DNA, 15 bp, Homo sapiens
ttgcccaggctcaaa

SEQ ID NO: 724518 - DNA, 15 bp, Homo sapiens
tgcccaggctcaaat

SEQ ID NO: 724519 - DNA, 15 bp, Homo sapiens
gcccaggctcaaatc

SEQ ID NO: 724520 - DNA, 15 bp, Homo sapiens
cccaggctcaaatca

SEQ ID NO: 724521 - DNA, 15 bp, Homo sapiens
ccaggctcaaatcac

SEQ ID NO: 724522 - DNA, 15 bp, Homo sapiens
caggctcaaatcact

SEQ ID NO: 724523 - DNA, 15 bp, Homo sapiens
aggctcaaatcactc

SEQ ID NO: 724524 - DNA, 15 bp, Homo sapiens
ggctcaaatcactct

SEQ ID NO: 724525 - DNA, 15 bp, Homo sapiens
gctcaaatcactctt

SEQ ID NO: 724526 - DNA, 15 bp, Homo sapiens
ctcaaatcactctta

SEQ ID NO: 724527 - DNA, 15 bp, Homo sapiens
tcaaatcactcttaa

SEQ ID NO: 724528 - DNA, 15 bp, Homo sapiens
caaatcactcttaaa

SEQ ID NO: 724529 - DNA, 15 bp, Homo sapiens
aaatcactcttaaag

SEQ ID NO: 724530 - DNA, 15 bp, Homo sapiens
aatcactcttaaaga

SEQ ID NO: 724531 - DNA, 15 bp, Homo sapiens
atcactcttaaagag

SEQ ID NO: 724532 - DNA, 15 bp, Homo sapiens
tcactcttaaagagt

SEQ ID NO: 724533 - DNA, 15 bp, Homo sapiens
cactcttaaagagta

SEQ ID NO: 724534 - DNA, 15 bp, Homo sapiens
actcttaaagagtaa

SEQ ID NO: 724535 - DNA, 15 bp, Homo sapiens
ctcttaaagagtaat

SEQ ID NO: 724536 - DNA, 15 bp, Homo sapiens
tcttaaagagtaatg

SEQ ID NO: 724537 - DNA, 15 bp, Homo sapiens
cttaaagagtaatga

SEQ ID NO: 724538 - DNA, 15 bp, Homo sapiens
ttaaagagtaatgat

SEQ ID NO: 724539 - DNA, 15 bp, Homo sapiens
taaagagtaatgatt

SEQ ID NO: 724540 - DNA, 15 bp, Homo sapiens
aaagagtaatgattt

SEQ ID NO: 724541 - DNA, 15 bp, Homo sapiens
aagagtaatgatttc

SEQ ID NO: 724542 - DNA, 15 bp, Homo sapiens
agagtaatgatttct

SEQ ID NO: 724543 - DNA, 15 bp, Homo sapiens
gagtaatgatttctc

SEQ ID NO: 724544 - DNA, 15 bp, Homo sapiens
agtaatgatttctca

SEQ ID NO: 724545 - DNA, 15 bp, Homo sapiens
gtaatgatttctcat

SEQ ID NO: 724546 - DNA, 15 bp, Homo sapiens
taatgatttctcatc

SEQ ID NO: 724547 - DNA, 15 bp, Homo sapiens
aatgatttctcatcc

SEQ ID NO: 724548 - DNA, 15 bp, Homo sapiens
atgatttctcatcct

SEQ ID NO: 724549 - DNA, 15 bp, Homo sapiens
tgatttctcatcctt

SEQ ID NO: 724550 - DNA, 15 bp, Homo sapiens
gatttctcatcctta

SEQ ID NO: 724551 - DNA, 15 bp, Homo sapiens
atttctcatccttat

SEQ ID NO: 724552 - DNA, 15 bp, Homo sapiens
tttctcatccttatg

SEQ ID NO: 724553 - DNA, 15 bp, Homo sapiens
ttctcatccttatga

SEQ ID NO: 724554 - DNA, 15 bp, Homo sapiens
tctcatccttatgac

SEQ ID NO: 724555 - DNA, 15 bp, Homo sapiens
ctcatccttatgaca

SEQ ID NO: 724556 - DNA, 15 bp, Homo sapiens
tcatccttatgacac

SEQ ID NO: 724557 - DNA, 15 bp, Homo sapiens
catccttatgacaca

SEQ ID NO: 724558 - DNA, 15 bp, Homo sapiens
atccttatgacacac

SEQ ID NO: 724559 - DNA, 15 bp, Homo sapiens
tccttatgacacaca

SEQ ID NO: 724560 - DNA, 15 bp, Homo sapiens
ccttatgacacacag

SEQ ID NO: 724561 - DNA, 15 bp, Homo sapiens
cttatgacacacaga

SEQ ID NO: 724562 - DNA, 15 bp, Homo sapiens
ttatgacacacagaa

SEQ ID NO: 724563 - DNA, 15 bp, Homo sapiens
tatgacacacagaag

SEQ ID NO: 724564 - DNA, 15 bp, Homo sapiens
atgacacacagaaga

SEQ ID NO: 724565 - DNA, 15 bp, Homo sapiens
tgacacacagaagaa

SEQ ID NO: 724566 - DNA, 15 bp, Homo sapiens
gacacacagaagaat

SEQ ID NO: 724567 - DNA, 15 bp, Homo sapiens
acacacagaagaatt

SEQ ID NO: 724568 - DNA, 15 bp, Homo sapiens
cacacagaagaattt

SEQ ID NO: 724569 - DNA, 15 bp, Homo sapiens
acacagaagaatttg

SEQ ID NO: 724570 - DNA, 15 bp, Homo sapiens
cacagaagaatttga

SEQ ID NO: 724571 - DNA, 15 bp, Homo sapiens
acagaagaatttgac

SEQ ID NO: 724572 - DNA, 15 bp, Homo sapiens
cagaagaatttgacc

SEQ ID NO: 724573 - DNA, 15 bp, Homo sapiens
agaagaatttgacca

SEQ ID NO: 724574 - DNA, 15 bp, Homo sapiens
gaagaatttgaccaa

SEQ ID NO: 724575 - DNA, 15 bp, Homo sapiens
aagaatttgaccaag

SEQ ID NO: 724576 - DNA, 15 bp, Homo sapiens
agaatttgaccaaga

SEQ ID NO: 724577 - DNA, 15 bp, Homo sapiens
gaatttgaccaagat

SEQ ID NO: 724578 - DNA, 15 bp, Homo sapiens
aatttgaccaagatt

SEQ ID NO: 724579 - DNA, 15 bp, Homo sapiens
atttgaccaagattc

SEQ ID NO: 724580 - DNA, 15 bp, Homo sapiens
tttgaccaagattct

SEQ ID NO: 724581 - DNA, 15 bp, Homo sapiens
ttgaccaagattctc

SEQ ID NO: 724582 - DNA, 15 bp, Homo sapiens
tgaccaagattctcg

SEQ ID NO: 724583 - DNA, 15 bp, Homo sapiens
gaccaagattctcgg

SEQ ID NO: 724584 - DNA, 15 bp, Homo sapiens
accaagattctcgga

SEQ ID NO: 724585 - DNA, 15 bp, Homo sapiens
ccaagattctcggag

SEQ ID NO: 724586 - DNA, 15 bp, Homo sapiens
caagattctcggagg

SEQ ID NO: 724587 - DNA, 15 bp, Homo sapiens
aagattctcggaggt

SEQ ID NO: 724588 - DNA, 15 bp, Homo sapiens
agattctcggaggtt

SEQ ID NO: 724589 - DNA, 15 bp, Homo sapiens
gattctcggaggttg

SEQ ID NO: 724590 - DNA, 15 bp, Homo sapiens
attctcggaggttgc

SEQ ID NO: 724591 - DNA, 15 bp, Homo sapiens
ttctcggaggttgcc

SEQ ID NO: 724592 - DNA, 15 bp, Homo sapiens
tctcggaggttgcca

SEQ ID NO: 724593 - DNA, 15 bp, Homo sapiens
ctcggaggttgccaa

SEQ ID NO: 724594 - DNA, 15 bp, Homo sapiens
tcggaggttgccaaa

SEQ ID NO: 724595 - DNA, 15 bp, Homo sapiens
cggaggttgccaaat

SEQ ID NO: 724596 - DNA, 15 bp, Homo sapiens
ggaggttgccaaatc

SEQ ID NO: 724597 - DNA, 15 bp, Homo sapiens
gaggttgccaaatca

SEQ ID NO: 724598 - DNA, 15 bp, Homo sapiens
aggttgccaaatcat

SEQ ID NO: 724599 - DNA, 15 bp, Homo sapiens
ggttgccaaatcatt

SEQ ID NO: 724600 - DNA, 15 bp, Homo sapiens
gttgccaaatcattc

SEQ ID NO: 724601 - DNA, 15 bp, Homo sapiens
ttgccaaatcattcc

SEQ ID NO: 724602 - DNA, 15 bp, Homo sapiens
tgccaaatcattcct

SEQ ID NO: 724603 - DNA, 15 bp, Homo sapiens
gccaaatcattcctg

SEQ ID NO: 724604 - DNA, 15 bp, Homo sapiens
ccaaatcattcctgg

SEQ ID NO: 724605 - DNA, 15 bp, Homo sapiens
caaatcattcctggc

SEQ ID NO: 724606 - DNA, 15 bp, Homo sapiens
aaatcattcctggca

SEQ ID NO: 724607 - DNA, 15 bp, Homo sapiens
aatcattcctggcaa

SEQ ID NO: 724608 - DNA, 15 bp, Homo sapiens
atcattcctggcaaa

SEQ ID NO: 724609 - DNA, 15 bp, Homo sapiens
tcattcctggcaaaa

SEQ ID NO: 724610 - DNA, 15 bp, Homo sapiens
cattcctggcaaaag

SEQ ID NO: 724611 - DNA, 15 bp, Homo sapiens
attcctggcaaaagc

SEQ ID NO: 724612 - DNA, 15 bp, Homo sapiens
ttcctggcaaaagca

SEQ ID NO: 724613 - DNA, 15 bp, Homo sapiens
tcctggcaaaagcag

SEQ ID NO: 724614 - DNA, 15 bp, Homo sapiens
cctggcaaaagcagg

SEQ ID NO: 724615 - DNA, 15 bp, Homo sapiens
ctggcaaaagcagga

SEQ ID NO: 724616 - DNA, 15 bp, Homo sapiens
tggcaaaagcaggag

SEQ ID NO: 724617 - DNA, 15 bp, Homo sapiens
ggcaaaagcaggagt

SEQ ID NO: 724618 - DNA, 15 bp, Homo sapiens
gcaaaagcaggagta

SEQ ID NO: 724619 - DNA, 15 bp, Homo sapiens
caaaagcaggagtat

SEQ ID NO: 724620 - DNA, 15 bp, Homo sapiens
aaaagcaggagtatc

SEQ ID NO: 724621 - DNA, 15 bp, Homo sapiens
aaagcaggagtatca

SEQ ID NO: 724622 - DNA, 15 bp, Homo sapiens
aagcaggagtatcaa

SEQ ID NO: 724623 - DNA, 15 bp, Homo sapiens
agcaggagtatcaaa

SEQ ID NO: 724624 - DNA, 15 bp, Homo sapiens
gcaggagtatcaaag

SEQ ID NO: 724625 - DNA, 15 bp, Homo sapiens
caggagtatcaaagg

SEQ ID NO: 724626 - DNA, 15 bp, Homo sapiens
aggagtatcaaagga

SEQ ID NO: 724627 - DNA, 15 bp, Homo sapiens
ggagtatcaaaggaa

SEQ ID NO: 724628 - DNA, 15 bp, Homo sapiens
gagtatcaaaggaaa

SEQ ID NO: 724629 - DNA, 15 bp, Homo sapiens
agtatcaaaggaaat

SEQ ID NO: 724630 - DNA, 15 bp, Homo sapiens
gtatcaaaggaaatg

SEQ ID NO: 724631 - DNA, 15 bp, Homo sapiens
tatcaaaggaaatgt

SEQ ID NO: 724632 - DNA, 15 bp, Homo sapiens
atcaaaggaaatgtc

SEQ ID NO: 724633 - DNA, 15 bp, Homo sapiens
tcaaaggaaatgtca

SEQ ID NO: 724634 - DNA, 15 bp, Homo sapiens
caaaggaaatgtcac

SEQ ID NO: 724635 - DNA, 15 bp, Homo sapiens
aaaggaaatgtcacc

SEQ ID NO: 724636 - DNA, 15 bp, Homo sapiens
aaggaaatgtcaccg

SEQ ID NO: 724637 - DNA, 15 bp, Homo sapiens
aggaaatgtcaccga

SEQ ID NO: 724638 - DNA, 15 bp, Homo sapiens
ggaaatgtcaccgat

SEQ ID NO: 724639 - DNA, 15 bp, Homo sapiens
gaaatgtcaccgatt

SEQ ID NO: 724640 - DNA, 15 bp, Homo sapiens
aaatgtcaccgattt

SEQ ID NO: 724641 - DNA, 15 bp, Homo sapiens
aatgtcaccgatttg

SEQ ID NO: 724642 - DNA, 15 bp, Homo sapiens
atgtcaccgatttgg

SEQ ID NO: 724643 - DNA, 15 bp, Homo sapiens
tgtcaccgatttgga

SEQ ID NO: 724644 - DNA, 15 bp, Homo sapiens
gtcaccgatttggac

SEQ ID NO: 724645 - DNA, 15 bp, Homo sapiens
tcaccgatttggaca

SEQ ID NO: 724646 - DNA, 15 bp, Homo sapiens
caccgatttggacac

SEQ ID NO: 724647 - DNA, 15 bp, Homo sapiens
accgatttggacaca

SEQ ID NO: 724648 - DNA, 15 bp, Homo sapiens
ccgatttggacacat

SEQ ID NO: 724649 - DNA, 15 bp, Homo sapiens
cgatttggacacata

SEQ ID NO: 724650 - DNA, 15 bp, Homo sapiens
gatttggacacataa

SEQ ID NO: 724651 - DNA, 15 bp, Homo sapiens
atttggacacataaa

SEQ ID NO: 724652 - DNA, 15 bp, Homo sapiens
tttggacacataaat

SEQ ID NO: 724653 - DNA, 15 bp, Homo sapiens
ttggacacataaatt

SEQ ID NO: 724654 - DNA, 15 bp, Homo sapiens
tggacacataaattc

SEQ ID NO: 724655 - DNA, 15 bp, Homo sapiens
ggacacataaattct

SEQ ID NO: 724656 - DNA, 15 bp, Homo sapiens
gacacataaattctg

SEQ ID NO: 724657 - DNA, 15 bp, Homo sapiens
acacataaattctga

SEQ ID NO: 724658 - DNA, 15 bp, Homo sapiens
cacataaattctgac

SEQ ID NO: 724659 - DNA, 15 bp, Homo sapiens
acataaattctgaca

SEQ ID NO: 724660 - DNA, 15 bp, Homo sapiens
cataaattctgacaa

SEQ ID NO: 724661 - DNA, 15 bp, Homo sapiens
ataaattctgacaac

SEQ ID NO: 724662 - DNA, 15 bp, Homo sapiens
taaattctgacaact

SEQ ID NO: 724663 - DNA, 15 bp, Homo sapiens
aaattctgacaactt

SEQ ID NO: 724664 - DNA, 15 bp, Homo sapiens
aattctgacaacttt

SEQ ID NO: 724665 - DNA, 15 bp, Homo sapiens
attctgacaacttta

SEQ ID NO: 724666 - DNA, 15 bp, Homo sapiens
ttctgacaactttaa

SEQ ID NO: 724667 - DNA, 15 bp, Homo sapiens
tctgacaactttaaa

SEQ ID NO: 724668 - DNA, 15 bp, Homo sapiens
ctgacaactttaaaa

SEQ ID NO: 724669 - DNA, 15 bp, Homo sapiens
tgacaactttaaaaa

SEQ ID NO: 724670 - DNA, 15 bp, Homo sapiens
gacaactttaaaaat

SEQ ID NO: 724671 - DNA, 15 bp, Homo sapiens
acaactttaaaaata

SEQ ID NO: 724672 - DNA, 15 bp, Homo sapiens
caactttaaaaataa

SEQ ID NO: 724673 - DNA, 15 bp, Homo sapiens
aactttaaaaataag

SEQ ID NO: 724674 - DNA, 15 bp, Homo sapiens
actttaaaaataagt

SEQ ID NO: 724675 - DNA, 15 bp, Homo sapiens
ctttaaaaataagtc

SEQ ID NO: 724676 - DNA, 15 bp, Homo sapiens
tttaaaaataagtca

SEQ ID NO: 724677 - DNA, 15 bp, Homo sapiens
ttaaaaataagtcaa

SEQ ID NO: 724678 - DNA, 15 bp, Homo sapiens
taaaaataagtcaaa

SEQ ID NO: 724679 - DNA, 15 bp, Homo sapiens
aaaaataagtcaaat

SEQ ID NO: 724680 - DNA, 15 bp, Homo sapiens
aaaataagtcaaatt

SEQ ID NO: 724681 - DNA, 15 bp, Homo sapiens
aaataagtcaaattt

SEQ ID NO: 724682 - DNA, 15 bp, Homo sapiens
aataagtcaaatttc

SEQ ID NO: 724683 - DNA, 15 bp, Homo sapiens
ataagtcaaatttca

SEQ ID NO: 724684 - DNA, 15 bp, Homo sapiens
taagtcaaatttcaa

SEQ ID NO: 724685 - DNA, 15 bp, Homo sapiens
aagtcaaatttcaat

SEQ ID NO: 724686 - DNA, 15 bp, Homo sapiens
agtcaaatttcaatt

SEQ ID NO: 724687 - DNA, 15 bp, Homo sapiens
gtcaaatttcaatta

SEQ ID NO: 724688 - DNA, 15 bp, Homo sapiens
tcaaatttcaattag

SEQ ID NO: 724689 - DNA, 15 bp, Homo sapiens
caaatttcaattaga

SEQ ID NO: 724690 - DNA, 15 bp, Homo sapiens
aaatttcaattagaa

SEQ ID NO: 724691 - DNA, 15 bp, Homo sapiens
aatttcaattagaat

SEQ ID NO: 724692 - DNA, 15 bp, Homo sapiens
atttcaattagaata

SEQ ID NO: 724693 - DNA, 15 bp, Homo sapiens
tttcaattagaatac

SEQ ID NO: 724694 - DNA, 15 bp, Homo sapiens
ttcaattagaataca

SEQ ID NO: 724695 - DNA, 15 bp, Homo sapiens
tcaattagaatacag

SEQ ID NO: 724696 - DNA, 15 bp, Homo sapiens
caattagaatacaga

SEQ ID NO: 724697 - DNA, 15 bp, Homo sapiens
aattagaatacagac

SEQ ID NO: 724698 - DNA, 15 bp, Homo sapiens
attagaatacagact

SEQ ID NO: 724699 - DNA, 15 bp, Homo sapiens
ttagaatacagactt

SEQ ID NO: 724700 - DNA, 15 bp, Homo sapiens
tagaatacagacttt

SEQ ID NO: 724701 - DNA, 15 bp, Homo sapiens
agaatacagacttta

SEQ ID NO: 724702 - DNA, 15 bp, Homo sapiens
gaatacagactttaa

SEQ ID NO: 724703 - DNA, 15 bp, Homo sapiens
aatacagactttaac

SEQ ID NO: 724704 - DNA, 15 bp, Homo sapiens
atacagactttaaca

SEQ ID NO: 724705 - DNA, 15 bp, Homo sapiens
tacagactttaacag

SEQ ID NO: 724706 - DNA, 15 bp, Homo sapiens
acagactttaacaga

SEQ ID NO: 724707 - DNA, 15 bp, Homo sapiens
cagactttaacagaa

SEQ ID NO: 724708 - DNA, 15 bp, Homo sapiens
agactttaacagaag

SEQ ID NO: 724709 - DNA, 15 bp, Homo sapiens
gactttaacagaaga

SEQ ID NO: 724710 - DNA, 15 bp, Homo sapiens
actttaacagaagaa

SEQ ID NO: 724711 - DNA, 15 bp, Homo sapiens
ctttaacagaagaaa

SEQ ID NO: 724712 - DNA, 15 bp, Homo sapiens
tttaacagaagaaag

SEQ ID NO: 724713 - DNA, 15 bp, Homo sapiens
ttaacagaagaaaga

SEQ ID NO: 724714 - DNA, 15 bp, Homo sapiens
taacagaagaaagat

SEQ ID NO: 724715 - DNA, 15 bp, Homo sapiens
aacagaagaaagata

SEQ ID NO: 724716 - DNA, 15 bp, Homo sapiens
acagaagaaagatac

SEQ ID NO: 724717 - DNA, 15 bp, Homo sapiens
cagaagaaagataca

SEQ ID NO: 724718 - DNA, 15 bp, Homo sapiens
agaagaaagatacac

SEQ ID NO: 724719 - DNA, 15 bp, Homo sapiens
gaagaaagatacaca

SEQ ID NO: 724720 - DNA, 15 bp, Homo sapiens
aagaaagatacacag

SEQ ID NO: 724721 - DNA, 15 bp, Homo sapiens
agaaagatacacagg

SEQ ID NO: 724722 - DNA, 15 bp, Homo sapiens
gaaagatacacaggc

SEQ ID NO: 724723 - DNA, 15 bp, Homo sapiens
aaagatacacaggca

SEQ ID NO: 724724 - DNA, 15 bp, Homo sapiens
aagatacacaggcat

SEQ ID NO: 724725 - DNA, 15 bp, Homo sapiens
agatacacaggcatc

SEQ ID NO: 724726 - DNA, 15 bp, Homo sapiens
gatacacaggcatca

SEQ ID NO: 724727 - DNA, 15 bp, Homo sapiens
atacacaggcatcag

SEQ ID NO: 724728 - DNA, 15 bp, Homo sapiens
tacacaggcatcagt

SEQ ID NO: 724729 - DNA, 15 bp, Homo sapiens
acacaggcatcagtt

SEQ ID NO: 724730 - DNA, 15 bp, Homo sapiens
cacaggcatcagtta

SEQ ID NO: 724731 - DNA, 15 bp, Homo sapiens
acaggcatcagttat

SEQ ID NO: 724732 - DNA, 15 bp, Homo sapiens
caggcatcagttata

SEQ ID NO: 724733 - DNA, 15 bp, Homo sapiens
aggcatcagttataa

SEQ ID NO: 724734 - DNA, 15 bp, Homo sapiens
ggcatcagttataaa

SEQ ID NO: 724735 - DNA, 15 bp, Homo sapiens
gcatcagttataaat

SEQ ID NO: 724736 - DNA, 15 bp, Homo sapiens
catcagttataaatg

SEQ ID NO: 724737 - DNA, 15 bp, Homo sapiens
atcagttataaatga

SEQ ID NO: 724738 - DNA, 15 bp, Homo sapiens
tcagttataaatgag

SEQ ID NO: 724739 - DNA, 15 bp, Homo sapiens
cagttataaatgagg

SEQ ID NO: 724740 - DNA, 15 bp, Homo sapiens
agttataaatgaggg

SEQ ID NO: 724741 - DNA, 15 bp, Homo sapiens
gttataaatgaggga

SEQ ID NO: 724742 - DNA, 15 bp, Homo sapiens
ttataaatgagggaa

SEQ ID NO: 724743 - DNA, 15 bp, Homo sapiens
tataaatgagggaac

SEQ ID NO: 724744 - DNA, 15 bp, Homo sapiens
ataaatgagggaact

SEQ ID NO: 724745 - DNA, 15 bp, Homo sapiens
taaatgagggaacta

SEQ ID NO: 724746 - DNA, 15 bp, Homo sapiens
aaatgagggaactaa

SEQ ID NO: 724747 - DNA, 15 bp, Homo sapiens
aatgagggaactaag

SEQ ID NO: 724748 - DNA, 15 bp, Homo sapiens
atgagggaactaagg

SEQ ID NO: 724749 - DNA, 15 bp, Homo sapiens
tgagggaactaaggc

SEQ ID NO: 724750 - DNA, 15 bp, Homo sapiens
gagggaactaaggcc

SEQ ID NO: 724751 - DNA, 15 bp, Homo sapiens
agggaactaaggcct

SEQ ID NO: 724752 - DNA, 15 bp, Homo sapiens
gggaactaaggcctg

SEQ ID NO: 724753 - DNA, 15 bp, Homo sapiens
ggaactaaggcctga

SEQ ID NO: 724754 - DNA, 15 bp, Homo sapiens
gaactaaggcctgaa

SEQ ID NO: 724755 - DNA, 15 bp, Homo sapiens
aactaaggcctgaaa

SEQ ID NO: 724756 - DNA, 15 bp, Homo sapiens
actaaggcctgaaaa

SEQ ID NO: 724757 - DNA, 15 bp, Homo sapiens
ctaaggcctgaaaaa

SEQ ID NO: 724758 - DNA, 15 bp, Homo sapiens
taaggcctgaaaaag

SEQ ID NO: 724759 - DNA, 15 bp, Homo sapiens
aaggcctgaaaaagc

SEQ ID NO: 724760 - DNA, 15 bp, Homo sapiens
aggcctgaaaaagct

SEQ ID NO: 724761 - DNA, 15 bp, Homo sapiens
ggcctgaaaaagctt

SEQ ID NO: 724762 - DNA, 15 bp, Homo sapiens
gcctgaaaaagcttt

SEQ ID NO: 724763 - DNA, 15 bp, Homo sapiens
cctgaaaaagcttta

SEQ ID NO: 724764 - DNA, 15 bp, Homo sapiens
ctgaaaaagctttat

SEQ ID NO: 724765 - DNA, 15 bp, Homo sapiens
tgaaaaagctttatt

SEQ ID NO: 724766 - DNA, 15 bp, Homo sapiens
gaaaaagctttattt

SEQ ID NO: 724767 - DNA, 15 bp, Homo sapiens
aaaaagctttatttt

SEQ ID NO: 724768 - DNA, 15 bp, Homo sapiens
aaaagctttatttta

SEQ ID NO: 724769 - DNA, 15 bp, Homo sapiens
aaagctttattttat

SEQ ID NO: 724770 - DNA, 15 bp, Homo sapiens
aagctttattttata

SEQ ID NO: 724771 - DNA, 15 bp, Homo sapiens
agctttattttatat

SEQ ID NO: 724772 - DNA, 15 bp, Homo sapiens
gctttattttatata

SEQ ID NO: 724773 - DNA, 15 bp, Homo sapiens
ctttattttatatag

SEQ ID NO: 724774 - DNA, 15 bp, Homo sapiens
tttattttatataga

SEQ ID NO: 724775 - DNA, 15 bp, Homo sapiens
ttattttatatagaa

SEQ ID NO: 724776 - DNA, 15 bp, Homo sapiens
tattttatatagaaa

SEQ ID NO: 724777 - DNA, 15 bp, Homo sapiens
attttatatagaaat

SEQ ID NO: 724778 - DNA, 15 bp, Homo sapiens
ttttatatagaaatt

SEQ ID NO: 724779 - DNA, 15 bp, Homo sapiens
tttatatagaaattg

SEQ ID NO: 724780 - DNA, 15 bp, Homo sapiens
ttatatagaaattgc

SEQ ID NO: 724781 - DNA, 15 bp, Homo sapiens
tatatagaaattgcc

SEQ ID NO: 724782 - DNA, 15 bp, Homo sapiens
atatagaaattgcca

SEQ ID NO: 724783 - DNA, 15 bp, Homo sapiens
tatagaaattgccaa

SEQ ID NO: 724784 - DNA, 15 bp, Homo sapiens
atagaaattgccaaa

SEQ ID NO: 724785 - DNA, 15 bp, Homo sapiens
tagaaattgccaaag

SEQ ID NO: 724786 - DNA, 15 bp, Homo sapiens
agaaattgccaaagt

SEQ ID NO: 724787 - DNA, 15 bp, Homo sapiens
gaaattgccaaagtt

SEQ ID NO: 724788 - DNA, 15 bp, Homo sapiens
aaattgccaaagttt

SEQ ID NO: 724789 - DNA, 15 bp, Homo sapiens
aattgccaaagtttt

SEQ ID NO: 724790 - DNA, 15 bp, Homo sapiens
attgccaaagtttta

SEQ ID NO: 724791 - DNA, 15 bp, Homo sapiens
ttgccaaagttttag

SEQ ID NO: 724792 - DNA, 15 bp, Homo sapiens
tgccaaagttttagt

SEQ ID NO: 724793 - DNA, 15 bp, Homo sapiens
gccaaagttttagtc

SEQ ID NO: 724794 - DNA, 15 bp, Homo sapiens
ccaaagttttagtct

SEQ ID NO: 724795 - DNA, 15 bp, Homo sapiens
caaagttttagtctt

SEQ ID NO: 724796 - DNA, 15 bp, Homo sapiens
aaagttttagtcttg

SEQ ID NO: 724797 - DNA, 15 bp, Homo sapiens
aagttttagtcttga

SEQ ID NO: 724798 - DNA, 15 bp, Homo sapiens
agttttagtcttgaa

SEQ ID NO: 724799 - DNA, 15 bp, Homo sapiens
gttttagtcttgaag

SEQ ID NO: 724800 - DNA, 15 bp, Homo sapiens
ttttagtcttgaagc

SEQ ID NO: 724801 - DNA, 15 bp, Homo sapiens
tttagtcttgaagca

SEQ ID NO: 724802 - DNA, 15 bp, Homo sapiens
ttagtcttgaagcaa

SEQ ID NO: 724803 - DNA, 15 bp, Homo sapiens
tagtcttgaagcaaa

SEQ ID NO: 724804 - DNA, 15 bp, Homo sapiens
agtcttgaagcaaaa

SEQ ID NO: 724805 - DNA, 15 bp, Homo sapiens
gtcttgaagcaaaaa

SEQ ID NO: 724806 - DNA, 15 bp, Homo sapiens
tcttgaagcaaaaag

SEQ ID NO: 724807 - DNA, 15 bp, Homo sapiens
cttgaagcaaaaaga

SEQ ID NO: 724808 - DNA, 15 bp, Homo sapiens
ttgaagcaaaaagaa

SEQ ID NO: 724809 - DNA, 15 bp, Homo sapiens
tgaagcaaaaagaaa

SEQ ID NO: 724810 - DNA, 15 bp, Homo sapiens
gaagcaaaaagaaaa

SEQ ID NO: 724811 - DNA, 15 bp, Homo sapiens
aagcaaaaagaaaaa

SEQ ID NO: 724812 - DNA, 15 bp, Homo sapiens
agcaaaaagaaaaag

SEQ ID NO: 724813 - DNA, 15 bp, Homo sapiens
gcaaaaagaaaaaga

SEQ ID NO: 724814 - DNA, 15 bp, Homo sapiens
caaaaagaaaaagaa

SEQ ID NO: 724815 - DNA, 15 bp, Homo sapiens
aaaagaaaaagaaaa

SEQ ID NO: 724816 - DNA, 15 bp, Homo sapiens
aaagaaaaagaaaaa

SEQ ID NO: 724817 - DNA, 15 bp, Homo sapiens
aagaaaaagaaaaag

SEQ ID NO: 724818 - DNA, 15 bp, Homo sapiens
agaaaaagaaaaaga

SEQ ID NO: 724819 - DNA, 15 bp, Homo sapiens
gaaaaagaaaaagaa

SEQ ID NO: 724820 - DNA, 15 bp, Homo sapiens
aaagaaaaagaaaat

SEQ ID NO: 724821 - DNA, 15 bp, Homo sapiens
aagaaaaagaaaatg

SEQ ID NO: 724822 - DNA, 15 bp, Homo sapiens
agaaaaagaaaatga

SEQ ID NO: 724823 - DNA, 15 bp, Homo sapiens
gaaaaagaaaatgaa

SEQ ID NO: 724824 - DNA, 15 bp, Homo sapiens
aaaaagaaaatgaag

SEQ ID NO: 724825 - DNA, 15 bp, Homo sapiens
aaaagaaaatgaaga

SEQ ID NO: 724826 - DNA, 15 bp, Homo sapiens
aaagaaaatgaagac

SEQ ID NO: 724827 - DNA, 15 bp, Homo sapiens
aagaaaatgaagacc

SEQ ID NO: 724828 - DNA, 15 bp, Homo sapiens
agaaaatgaagacca

SEQ ID NO: 724829 - DNA, 15 bp, Homo sapiens
gaaaatgaagaccaa

SEQ ID NO: 724830 - DNA, 15 bp, Homo sapiens
aaaatgaagaccaaa

SEQ ID NO: 724831 - DNA, 15 bp, Homo sapiens
aaatgaagaccaaac

SEQ ID NO: 724832 - DNA, 15 bp, Homo sapiens
aatgaagaccaaaca

SEQ ID NO: 724833 - DNA, 15 bp, Homo sapiens
atgaagaccaaacag

SEQ ID NO: 724834 - DNA, 15 bp, Homo sapiens
tgaagaccaaacaga

SEQ ID NO: 724835 - DNA, 15 bp, Homo sapiens
gaagaccaaacagag

SEQ ID NO: 724836 - DNA, 15 bp, Homo sapiens
aagaccaaacagaga

SEQ ID NO: 724837 - DNA, 15 bp, Homo sapiens
agaccaaacagagaa

SEQ ID NO: 724838 - DNA, 15 bp, Homo sapiens
gaccaaacagagaaa

SEQ ID NO: 724839 - DNA, 15 bp, Homo sapiens
accaaacagagaaaa

SEQ ID NO: 724840 - DNA, 15 bp, Homo sapiens
ccaaacagagaaaag

SEQ ID NO: 724841 - DNA, 15 bp, Homo sapiens
caaacagagaaaaga

SEQ ID NO: 724842 - DNA, 15 bp, Homo sapiens
aaacagagaaaagag

SEQ ID NO: 724843 - DNA, 15 bp, Homo sapiens
aacagagaaaagagc

SEQ ID NO: 724844 - DNA, 15 bp, Homo sapiens
acagagaaaagagca

SEQ ID NO: 724845 - DNA, 15 bp, Homo sapiens
cagagaaaagagcaa

SEQ ID NO: 724846 - DNA, 15 bp, Homo sapiens
agagaaaagagcaat

SEQ ID NO: 724847 - DNA, 15 bp, Homo sapiens
gagaaaagagcaata

SEQ ID NO: 724848 - DNA, 15 bp, Homo sapiens
agaaaagagcaatac

SEQ ID NO: 724849 - DNA, 15 bp, Homo sapiens
gaaaagagcaataca

SEQ ID NO: 724850 - DNA, 15 bp, Homo sapiens
aaaagagcaatacag

SEQ ID NO: 724851 - DNA, 15 bp, Homo sapiens
aaagagcaatacagt

SEQ ID NO: 724852 - DNA, 15 bp, Homo sapiens
aagagcaatacagtt

SEQ ID NO: 724853 - DNA, 15 bp, Homo sapiens
agagcaatacagttg

SEQ ID NO: 724854 - DNA, 15 bp, Homo sapiens
gagcaatacagttgg

SEQ ID NO: 724855 - DNA, 15 bp, Homo sapiens
agcaatacagttggc

SEQ ID NO: 724856 - DNA, 15 bp, Homo sapiens
gcaatacagttggcc

SEQ ID NO: 724857 - DNA, 15 bp, Homo sapiens
caatacagttggccc

SEQ ID NO: 724858 - DNA, 15 bp, Homo sapiens
aatacagttggccct

SEQ ID NO: 724859 - DNA, 15 bp, Homo sapiens
atacagttggccctc

SEQ ID NO: 724860 - DNA, 15 bp, Homo sapiens
tacagttggccctcc

SEQ ID NO: 724861 - DNA, 15 bp, Homo sapiens
acagttggccctccg

SEQ ID NO: 724862 - DNA, 15 bp, Homo sapiens
cagttggccctccgt

SEQ ID NO: 724863 - DNA, 15 bp, Homo sapiens
agttggccctccgta

SEQ ID NO: 724864 - DNA, 15 bp, Homo sapiens
gttggccctccgtat

SEQ ID NO: 724865 - DNA, 15 bp, Homo sapiens
ttggccctccgtatc

SEQ ID NO: 724866 - DNA, 15 bp, Homo sapiens
tggccctccgtatct

SEQ ID NO: 724867 - DNA, 15 bp, Homo sapiens
ggccctccgtatctg

SEQ ID NO: 724868 - DNA, 15 bp, Homo sapiens
gccctccgtatctgt

SEQ ID NO: 724869 - DNA, 15 bp, Homo sapiens
ccctccgtatctgtg

SEQ ID NO: 724870 - DNA, 15 bp, Homo sapiens
cctccgtatctgtga

SEQ ID NO: 724871 - DNA, 15 bp, Homo sapiens
ctccgtatctgtgag

SEQ ID NO: 724872 - DNA, 15 bp, Homo sapiens
tccgtatctgtgagc

SEQ ID NO: 724873 - DNA, 15 bp, Homo sapiens
ccgtatctgtgagct

SEQ ID NO: 724874 - DNA, 15 bp, Homo sapiens
cgtatctgtgagctc

SEQ ID NO: 724875 - DNA, 15 bp, Homo sapiens
gtatctgtgagctct

SEQ ID NO: 724876 - DNA, 15 bp, Homo sapiens
tatctgtgagctctg

SEQ ID NO: 724877 - DNA, 15 bp, Homo sapiens
atctgtgagctctgt

SEQ ID NO: 724878 - DNA, 15 bp, Homo sapiens
tctgtgagctctgta

SEQ ID NO: 724879 - DNA, 15 bp, Homo sapiens
ctgtgagctctgtat

SEQ ID NO: 724880 - DNA, 15 bp, Homo sapiens
tgtgagctctgtatc

SEQ ID NO: 724881 - DNA, 15 bp, Homo sapiens
gtgagctctgtatcc

SEQ ID NO: 724882 - DNA, 15 bp, Homo sapiens
tgagctctgtatcca

SEQ ID NO: 724883 - DNA, 15 bp, Homo sapiens
gagctctgtatccat

SEQ ID NO: 724884 - DNA, 15 bp, Homo sapiens
agctctgtatccatg

SEQ ID NO: 724885 - DNA, 15 bp, Homo sapiens
gctctgtatccatgg

SEQ ID NO: 724886 - DNA, 15 bp, Homo sapiens
ctctgtatccatgga

SEQ ID NO: 724887 - DNA, 15 bp, Homo sapiens
tctgtatccatggat

SEQ ID NO: 724888 - DNA, 15 bp, Homo sapiens
ctgtatccatggatt

SEQ ID NO: 724889 - DNA, 15 bp, Homo sapiens
tgtatccatggattg

SEQ ID NO: 724890 - DNA, 15 bp, Homo sapiens
gtatccatggattga

SEQ ID NO: 724891 - DNA, 15 bp, Homo sapiens
tatccatggattgaa

SEQ ID NO: 724892 - DNA, 15 bp, Homo sapiens
atccatggattgaac

SEQ ID NO: 724893 - DNA, 15 bp, Homo sapiens
tccatggattgaacc

SEQ ID NO: 724894 - DNA, 15 bp, Homo sapiens
ccatggattgaaccg

SEQ ID NO: 724895 - DNA, 15 bp, Homo sapiens
catggattgaaccga

SEQ ID NO: 724896 - DNA, 15 bp, Homo sapiens
atggattgaaccgac

SEQ ID NO: 724897 - DNA, 15 bp, Homo sapiens
tggattgaaccgact

SEQ ID NO: 724898 - DNA, 15 bp, Homo sapiens
ggattgaaccgactg

SEQ ID NO: 724899 - DNA, 15 bp, Homo sapiens
gattgaaccgactgc

SEQ ID NO: 724900 - DNA, 15 bp, Homo sapiens
attgaaccgactgca

SEQ ID NO: 724901 - DNA, 15 bp, Homo sapiens
ttgaaccgactgcaa

SEQ ID NO: 724902 - DNA, 15 bp, Homo sapiens
tgaaccgactgcaaa

SEQ ID NO: 724903 - DNA, 15 bp, Homo sapiens
gaaccgactgcaaat

SEQ ID NO: 724904 - DNA, 15 bp, Homo sapiens
aaccgactgcaaatc

SEQ ID NO: 724905 - DNA, 15 bp, Homo sapiens
accgactgcaaatcg

SEQ ID NO: 724906 - DNA, 15 bp, Homo sapiens
ccgactgcaaatcga

SEQ ID NO: 724907 - DNA, 15 bp, Homo sapiens
cgactgcaaatcgaa

SEQ ID NO: 724908 - DNA, 15 bp, Homo sapiens
gactgcaaatcgaaa

SEQ ID NO: 724909 - DNA, 15 bp, Homo sapiens
actgcaaatcgaaaa

SEQ ID NO: 724910 - DNA, 15 bp, Homo sapiens
ctgcaaatcgaaaat

SEQ ID NO: 724911 - DNA, 15 bp, Homo sapiens
tgcaaatcgaaaata

SEQ ID NO: 724912 - DNA, 15 bp, Homo sapiens
gcaaatcgaaaatat

SEQ ID NO: 724913 - DNA, 15 bp, Homo sapiens
caaatcgaaaatatt

SEQ ID NO: 724914 - DNA, 15 bp, Homo sapiens
aaatcgaaaatattt

SEQ ID NO: 724915 - DNA, 15 bp, Homo sapiens
aatcgaaaatatttt

SEQ ID NO: 724916 - DNA, 15 bp, Homo sapiens
atcgaaaatattttc

SEQ ID NO: 724917 - DNA, 15 bp, Homo sapiens
tcgaaaatattttca

SEQ ID NO: 724918 - DNA, 15 bp, Homo sapiens
cgaaaatattttcaa

SEQ ID NO: 724919 - DNA, 15 bp, Homo sapiens
gaaaatattttcaaa

SEQ ID NO: 724920 - DNA, 15 bp, Homo sapiens
aaaatattttcaaaa

SEQ ID NO: 724921 - DNA, 15 bp, Homo sapiens
aaatattttcaaaaa

SEQ ID NO: 724922 - DNA, 15 bp, Homo sapiens
aatattttcaaaaaa

SEQ ID NO: 724923 - DNA, 15 bp, Homo sapiens
atattttcaaaaaat

SEQ ID NO: 724924 - DNA, 15 bp, Homo sapiens
tattttcaaaaaatg

SEQ ID NO: 724925 - DNA, 15 bp, Homo sapiens
attttcaaaaaatgg

SEQ ID NO: 724926 - DNA, 15 bp, Homo sapiens
ttttcaaaaaatgga

SEQ ID NO: 724927 - DNA, 15 bp, Homo sapiens
tttcaaaaaatggat

SEQ ID NO: 724928 - DNA, 15 bp, Homo sapiens
ttcaaaaaatggatg

SEQ ID NO: 724929 - DNA, 15 bp, Homo sapiens
tcaaaaaatggatgc

SEQ ID NO: 724930 - DNA, 15 bp, Homo sapiens
caaaaaatggatgct

SEQ ID NO: 724931 - DNA, 15 bp, Homo sapiens
aaaaaatggatgctt

SEQ ID NO: 724932 - DNA, 15 bp, Homo sapiens
aaaaatggatgcttg

SEQ ID NO: 724933 - DNA, 15 bp, Homo sapiens
aaaatggatgcttgt

SEQ ID NO: 724934 - DNA, 15 bp, Homo sapiens
aaatggatgcttgtg

SEQ ID NO: 724935 - DNA, 15 bp, Homo sapiens
aatggatgcttgtga

SEQ ID NO: 724936 - DNA, 15 bp, Homo sapiens
atggatgcttgtgac

SEQ ID NO: 724937 - DNA, 15 bp, Homo sapiens
tggatgcttgtgact

SEQ ID NO: 724938 - DNA, 15 bp, Homo sapiens
ggatgcttgtgactg

SEQ ID NO: 724939 - DNA, 15 bp, Homo sapiens
gatgcttgtgactgt

SEQ ID NO: 724940 - DNA, 15 bp, Homo sapiens
atgcttgtgactgta

SEQ ID NO: 724941 - DNA, 15 bp, Homo sapiens
tgcttgtgactgtac

SEQ ID NO: 724942 - DNA, 15 bp, Homo sapiens
gcttgtgactgtact

SEQ ID NO: 724943 - DNA, 15 bp, Homo sapiens
cttgtgactgtactg

SEQ ID NO: 724944 - DNA, 15 bp, Homo sapiens
ttgtgactgtactga

SEQ ID NO: 724945 - DNA, 15 bp, Homo sapiens
tgtgactgtactgaa

SEQ ID NO: 724946 - DNA, 15 bp, Homo sapiens
gtgactgtactgaat

SEQ ID NO: 724947 - DNA, 15 bp, Homo sapiens
tgactgtactgaatg

SEQ ID NO: 724948 - DNA, 15 bp, Homo sapiens
gactgtactgaatgt

SEQ ID NO: 724949 - DNA, 15 bp, Homo sapiens
actgtactgaatgtg

SEQ ID NO: 724950 - DNA, 15 bp, Homo sapiens
ctgtactgaatgtgt

SEQ ID NO: 724951 - DNA, 15 bp, Homo sapiens
tgtactgaatgtgtc

SEQ ID NO: 724952 - DNA, 15 bp, Homo sapiens
gtactgaatgtgtca

SEQ ID NO: 724953 - DNA, 15 bp, Homo sapiens
tactgaatgtgtcaa

SEQ ID NO: 724954 - DNA, 15 bp, Homo sapiens
actgaatgtgtcaac

SEQ ID NO: 724955 - DNA, 15 bp, Homo sapiens
ctgaatgtgtcaact

SEQ ID NO: 724956 - DNA, 15 bp, Homo sapiens
tgaatgtgtcaactg

SEQ ID NO: 724957 - DNA, 15 bp, Homo sapiens
gaatgtgtcaactgt

SEQ ID NO: 724958 - DNA, 15 bp, Homo sapiens
aatgtgtcaactgtt

SEQ ID NO: 724959 - DNA, 15 bp, Homo sapiens
atgtgtcaactgttt

SEQ ID NO: 724960 - DNA, 15 bp, Homo sapiens
tgtgtcaactgtttt

SEQ ID NO: 724961 - DNA, 15 bp, Homo sapiens
gtgtcaactgttttt

SEQ ID NO: 724962 - DNA, 15 bp, Homo sapiens
tgtcaactgtttttc

SEQ ID NO: 724963 - DNA, 15 bp, Homo sapiens
gtcaactgtttttct

SEQ ID NO: 724964 - DNA, 15 bp, Homo sapiens
tcaactgtttttctt

SEQ ID NO: 724965 - DNA, 15 bp, Homo sapiens
caactgtttttcttg

SEQ ID NO: 724966 - DNA, 15 bp, Homo sapiens
aactgtttttcttga

SEQ ID NO: 724967 - DNA, 15 bp, Homo sapiens
actgtttttcttgac

SEQ ID NO: 724968 - DNA, 15 bp, Homo sapiens
ctgtttttcttgaca

SEQ ID NO: 724969 - DNA, 15 bp, Homo sapiens
tgtttttcttgacat

SEQ ID NO: 724970 - DNA, 15 bp, Homo sapiens
gtttttcttgacatt

SEQ ID NO: 724971 - DNA, 15 bp, Homo sapiens
tttttcttgacattg

SEQ ID NO: 724972 - DNA, 15 bp, Homo sapiens
ttttcttgacattgg

SEQ ID NO: 724973 - DNA, 15 bp, Homo sapiens
tttcttgacattggt

SEQ ID NO: 724974 - DNA, 15 bp, Homo sapiens
ttcttgacattggtc

SEQ ID NO: 724975 - DNA, 15 bp, Homo sapiens
tcttgacattggtcc

SEQ ID NO: 724976 - DNA, 15 bp, Homo sapiens
cttgacattggtccc

SEQ ID NO: 724977 - DNA, 15 bp, Homo sapiens
ttgacattggtccct

SEQ ID NO: 724978 - DNA, 15 bp, Homo sapiens
tgacattggtccctc

SEQ ID NO: 724979 - DNA, 15 bp, Homo sapiens
gacattggtccctca

SEQ ID NO: 724980 - DNA, 15 bp, Homo sapiens
acattggtccctcaa

SEQ ID NO: 724981 - DNA, 15 bp, Homo sapiens
cattggtccctcaac

SEQ ID NO: 724982 - DNA, 15 bp, Homo sapiens
attggtccctcaaca

SEQ ID NO: 724983 - DNA, 15 bp, Homo sapiens
ttggtccctcaacaa

SEQ ID NO: 724984 - DNA, 15 bp, Homo sapiens
tggtccctcaacaat

SEQ ID NO: 724985 - DNA, 15 bp, Homo sapiens
ggtccctcaacaata

SEQ ID NO: 724986 - DNA, 15 bp, Homo sapiens
gtccctcaacaatac

SEQ ID NO: 724987 - DNA, 15 bp, Homo sapiens
tccctcaacaataca

SEQ ID NO: 724988 - DNA, 15 bp, Homo sapiens
ccctcaacaatacag

SEQ ID NO: 724989 - DNA, 15 bp, Homo sapiens
cctcaacaatacagt

SEQ ID NO: 724990 - DNA, 15 bp, Homo sapiens
ctcaacaatacagta

SEQ ID NO: 724991 - DNA, 15 bp, Homo sapiens
tcaacaatacagtat

SEQ ID NO: 724992 - DNA, 15 bp, Homo sapiens
caacaatacagtata

SEQ ID NO: 724993 - DNA, 15 bp, Homo sapiens
aacaatacagtataa

SEQ ID NO: 724994 - DNA, 15 bp, Homo sapiens
acaatacagtataac

SEQ ID NO: 724995 - DNA, 15 bp, Homo sapiens
caatacagtataaca

SEQ ID NO: 724996 - DNA, 15 bp, Homo sapiens
aatacagtataacaa

SEQ ID NO: 724997 - DNA, 15 bp, Homo sapiens
atacagtataacaac

SEQ ID NO: 724998 - DNA, 15 bp, Homo sapiens
tacagtataacaact

SEQ ID NO: 724999 - DNA, 15 bp, Homo sapiens
acagtataacaacta

SEQ ID NO: 725000 - DNA, 15 bp, Homo sapiens
cagtataacaactat

SEQ ID NO: 725001 - DNA, 15 bp, Homo sapiens
agtataacaactatt

SEQ ID NO: 725002 - DNA, 15 bp, Homo sapiens
gtataacaactattt

SEQ ID NO: 725003 - DNA, 15 bp, Homo sapiens
tataacaactattta

SEQ ID NO: 725004 - DNA, 15 bp, Homo sapiens
ataacaactatttac

SEQ ID NO: 725005 - DNA, 15 bp, Homo sapiens
taacaactatttaca

SEQ ID NO: 725006 - DNA, 15 bp, Homo sapiens
aacaactatttacat

SEQ ID NO: 725007 - DNA, 15 bp, Homo sapiens
acaactatttacata

SEQ ID NO: 725008 - DNA, 15 bp, Homo sapiens
caactatttacatag

SEQ ID NO: 725009 - DNA, 15 bp, Homo sapiens
aactatttacatagc

SEQ ID NO: 725010 - DNA, 15 bp, Homo sapiens
actatttacatagca

SEQ ID NO: 725011 - DNA, 15 bp, Homo sapiens
ctatttacatagcat

SEQ ID NO: 725012 - DNA, 15 bp, Homo sapiens
tatttacatagcatt

SEQ ID NO: 725013 - DNA, 15 bp, Homo sapiens
atttacatagcattt

SEQ ID NO: 725014 - DNA, 15 bp, Homo sapiens
tttacatagcattta

SEQ ID NO: 725015 - DNA, 15 bp, Homo sapiens
ttacatagcatttac

SEQ ID NO: 725016 - DNA, 15 bp, Homo sapiens
tacatagcatttaca

SEQ ID NO: 725017 - DNA, 15 bp, Homo sapiens
acatagcatttacat

SEQ ID NO: 725018 - DNA, 15 bp, Homo sapiens
catagcatttacatt

SEQ ID NO: 725019 - DNA, 15 bp, Homo sapiens
atagcatttacattg

SEQ ID NO: 725020 - DNA, 15 bp, Homo sapiens
tagcatttacattgt

SEQ ID NO: 725021 - DNA, 15 bp, Homo sapiens
agcatttacattgta

SEQ ID NO: 725022 - DNA, 15 bp, Homo sapiens
gcatttacattgtat

SEQ ID NO: 725023 - DNA, 15 bp, Homo sapiens
catttacattgtatg

SEQ ID NO: 725024 - DNA, 15 bp, Homo sapiens
atttacattgtatga

SEQ ID NO: 725025 - DNA, 15 bp, Homo sapiens
tttacattgtatgag

SEQ ID NO: 725026 - DNA, 15 bp, Homo sapiens
ttacattgtatgagg

SEQ ID NO: 725027 - DNA, 15 bp, Homo sapiens
tacattgtatgaggt

SEQ ID NO: 725028 - DNA, 15 bp, Homo sapiens
acattgtatgaggta

SEQ ID NO: 725029 - DNA, 15 bp, Homo sapiens
cattgtatgaggtat

SEQ ID NO: 725030 - DNA, 15 bp, Homo sapiens
attgtatgaggtatt

SEQ ID NO: 725031 - DNA, 15 bp, Homo sapiens
ttgtatgaggtatta

SEQ ID NO: 725032 - DNA, 15 bp, Homo sapiens
tgtatgaggtattaa

SEQ ID NO: 725033 - DNA, 15 bp, Homo sapiens
gtatgaggtattaat

SEQ ID NO: 725034 - DNA, 15 bp, Homo sapiens
tatgaggtattaata

SEQ ID NO: 725035 - DNA, 15 bp, Homo sapiens
atgaggtattaataa

SEQ ID NO: 725036 - DNA, 15 bp, Homo sapiens
tgaggtattaataac

SEQ ID NO: 725037 - DNA, 15 bp, Homo sapiens
gaggtattaataaca

SEQ ID NO: 725038 - DNA, 15 bp, Homo sapiens
aggtattaataacat

SEQ ID NO: 725039 - DNA, 15 bp, Homo sapiens
ggtattaataacatg

SEQ ID NO: 725040 - DNA, 15 bp, Homo sapiens
gtattaataacatgt

SEQ ID NO: 725041 - DNA, 15 bp, Homo sapiens
tattaataacatgta

SEQ ID NO: 725042 - DNA, 15 bp, Homo sapiens
attaataacatgtac

SEQ ID NO: 725043 - DNA, 15 bp, Homo sapiens
ttaataacatgtaca

SEQ ID NO: 725044 - DNA, 15 bp, Homo sapiens
taataacatgtacat

SEQ ID NO: 725045 - DNA, 15 bp, Homo sapiens
aataacatgtacatt

SEQ ID NO: 725046 - DNA, 15 bp, Homo sapiens
ataacatgtacattc

SEQ ID NO: 725047 - DNA, 15 bp, Homo sapiens
taacatgtacattca

SEQ ID NO: 725048 - DNA, 15 bp, Homo sapiens
aacatgtacattcat

SEQ ID NO: 725049 - DNA, 15 bp, Homo sapiens
acatgtacattcatg

SEQ ID NO: 725050 - DNA, 15 bp, Homo sapiens
catgtacattcatgt

SEQ ID NO: 725051 - DNA, 15 bp, Homo sapiens
atgtacattcatgtg

SEQ ID NO: 725052 - DNA, 15 bp, Homo sapiens
tgtacattcatgtgt

SEQ ID NO: 725053 - DNA, 15 bp, Homo sapiens
gtacattcatgtgtc

SEQ ID NO: 725054 - DNA, 15 bp, Homo sapiens
tacattcatgtgtca

SEQ ID NO: 725055 - DNA, 15 bp, Homo sapiens
acattcatgtgtcac

SEQ ID NO: 725056 - DNA, 15 bp, Homo sapiens
cattcatgtgtcact

SEQ ID NO: 725057 - DNA, 15 bp, Homo sapiens
attcatgtgtcactt

SEQ ID NO: 725058 - DNA, 15 bp, Homo sapiens
ttcatgtgtcactta

SEQ ID NO: 725059 - DNA, 15 bp, Homo sapiens
tcatgtgtcacttaa

SEQ ID NO: 725060 - DNA, 15 bp, Homo sapiens
catgtgtcacttaac

SEQ ID NO: 725061 - DNA, 15 bp, Homo sapiens
atgtgtcacttaacg

SEQ ID NO: 725062 - DNA, 15 bp, Homo sapiens
tgtgtcacttaacga

SEQ ID NO: 725063 - DNA, 15 bp, Homo sapiens
gtgtcacttaacgat

SEQ ID NO: 725064 - DNA, 15 bp, Homo sapiens
tgtcacttaacgatg

SEQ ID NO: 725065 - DNA, 15 bp, Homo sapiens
gtcacttaacgatga

SEQ ID NO: 725066 - DNA, 15 bp, Homo sapiens
tcacttaacgatgat

SEQ ID NO: 725067 - DNA, 15 bp, Homo sapiens
cacttaacgatgatg

SEQ ID NO: 725068 - DNA, 15 bp, Homo sapiens
acttaacgatgatga

SEQ ID NO: 725069 - DNA, 15 bp, Homo sapiens
cttaacgatgatgat

SEQ ID NO: 725070 - DNA, 15 bp, Homo sapiens
ttaacgatgatgata

SEQ ID NO: 725071 - DNA, 15 bp, Homo sapiens
taacgatgatgatat

SEQ ID NO: 725072 - DNA, 15 bp, Homo sapiens
aacgatgatgatatg

SEQ ID NO: 725073 - DNA, 15 bp, Homo sapiens
acgatgatgatatgt

SEQ ID NO: 725074 - DNA, 15 bp, Homo sapiens
cgatgatgatatgtt

SEQ ID NO: 725075 - DNA, 15 bp, Homo sapiens
gatgatgatatgttc

SEQ ID NO: 725076 - DNA, 15 bp, Homo sapiens
atgatgatatgttct

SEQ ID NO: 725077 - DNA, 15 bp, Homo sapiens
tgatgatatgttctg

SEQ ID NO: 725078 - DNA, 15 bp, Homo sapiens
gatgatatgttctga

SEQ ID NO: 725079 - DNA, 15 bp, Homo sapiens
atgatatgttctgag

SEQ ID NO: 725080 - DNA, 15 bp, Homo sapiens
tgatatgttctgaga

SEQ ID NO: 725081 - DNA, 15 bp, Homo sapiens
gatatgttctgagaa

SEQ ID NO: 725082 - DNA, 15 bp, Homo sapiens
atatgttctgagaaa

SEQ ID NO: 725083 - DNA, 15 bp, Homo sapiens
tatgttctgagaaat

SEQ ID NO: 725084 - DNA, 15 bp, Homo sapiens
atgttctgagaaatg

SEQ ID NO: 725085 - DNA, 15 bp, Homo sapiens
tgttctgagaaatgc

SEQ ID NO: 725086 - DNA, 15 bp, Homo sapiens
gttctgagaaatgca

SEQ ID NO: 725087 - DNA, 15 bp, Homo sapiens
ttctgagaaatgcat

SEQ ID NO: 725088 - DNA, 15 bp, Homo sapiens
tctgagaaatgcatc

SEQ ID NO: 725089 - DNA, 15 bp, Homo sapiens
ctgagaaatgcatca

SEQ ID NO: 725090 - DNA, 15 bp, Homo sapiens
tgagaaatgcatcat

SEQ ID NO: 725091 - DNA, 15 bp, Homo sapiens
gagaaatgcatcatt

SEQ ID NO: 725092 - DNA, 15 bp, Homo sapiens
agaaatgcatcatta

SEQ ID NO: 725093 - DNA, 15 bp, Homo sapiens
gaaatgcatcattag

SEQ ID NO: 725094 - DNA, 15 bp, Homo sapiens
aaatgcatcattagg

SEQ ID NO: 725095 - DNA, 15 bp, Homo sapiens
aatgcatcattaggt

SEQ ID NO: 725096 - DNA, 15 bp, Homo sapiens
atgcatcattaggtg

SEQ ID NO: 725097 - DNA, 15 bp, Homo sapiens
tgcatcattaggtga

SEQ ID NO: 725098 - DNA, 15 bp, Homo sapiens
gcatcattaggtgat

SEQ ID NO: 725099 - DNA, 15 bp, Homo sapiens
catcattaggtgatt

SEQ ID NO: 725100 - DNA, 15 bp, Homo sapiens
atcattaggtgattt

SEQ ID NO: 725101 - DNA, 15 bp, Homo sapiens
tcattaggtgatttc

SEQ ID NO: 725102 - DNA, 15 bp, Homo sapiens
cattaggtgatttca

SEQ ID NO: 725103 - DNA, 15 bp, Homo sapiens
attaggtgatttcat

SEQ ID NO: 725104 - DNA, 15 bp, Homo sapiens
ttaggtgatttcatt

SEQ ID NO: 725105 - DNA, 15 bp, Homo sapiens
taggtgatttcattc

SEQ ID NO: 725106 - DNA, 15 bp, Homo sapiens
aggtgatttcattct

SEQ ID NO: 725107 - DNA, 15 bp, Homo sapiens
ggtgatttcattctg

SEQ ID NO: 725108 - DNA, 15 bp, Homo sapiens
gtgatttcattctgt

SEQ ID NO: 725109 - DNA, 15 bp, Homo sapiens
tgatttcattctgta

SEQ ID NO: 725110 - DNA, 15 bp, Homo sapiens
gatttcattctgtaa

SEQ ID NO: 725111 - DNA, 15 bp, Homo sapiens
atttcattctgtaaa

SEQ ID NO: 725112 - DNA, 15 bp, Homo sapiens
tttcattctgtaaac

SEQ ID NO: 725113 - DNA, 15 bp, Homo sapiens
ttcattctgtaaaca

SEQ ID NO: 725114 - DNA, 15 bp, Homo sapiens
tcattctgtaaacat

SEQ ID NO: 725115 - DNA, 15 bp, Homo sapiens
cattctgtaaacatc

SEQ ID NO: 725116 - DNA, 15 bp, Homo sapiens
attctgtaaacatca

SEQ ID NO: 725117 - DNA, 15 bp, Homo sapiens
ttctgtaaacatcat

SEQ ID NO: 725118 - DNA, 15 bp, Homo sapiens
tctgtaaacatcata

SEQ ID NO: 725119 - DNA, 15 bp, Homo sapiens
ctgtaaacatcatat

SEQ ID NO: 725120 - DNA, 15 bp, Homo sapiens
tgtaaacatcatata

SEQ ID NO: 725121 - DNA, 15 bp, Homo sapiens
gtaaacatcatatat

SEQ ID NO: 725122 - DNA, 15 bp, Homo sapiens
taaacatcatatatt

SEQ ID NO: 725123 - DNA, 15 bp, Homo sapiens
aaacatcatatattt

SEQ ID NO: 725124 - DNA, 15 bp, Homo sapiens
aacatcatatattta

SEQ ID NO: 725125 - DNA, 15 bp, Homo sapiens
acatcatatatttac

SEQ ID NO: 725126 - DNA, 15 bp, Homo sapiens
catcatatatttaca

SEQ ID NO: 725127 - DNA, 15 bp, Homo sapiens
atcatatatttacac

SEQ ID NO: 725128 - DNA, 15 bp, Homo sapiens
tcatatatttacaca

SEQ ID NO: 725129 - DNA, 15 bp, Homo sapiens
catatatttacacaa

SEQ ID NO: 725130 - DNA, 15 bp, Homo sapiens
atatatttacacaac

SEQ ID NO: 725131 - DNA, 15 bp, Homo sapiens
tatatttacacaacc

SEQ ID NO: 725132 - DNA, 15 bp, Homo sapiens
atatttacacaacct

SEQ ID NO: 725133 - DNA, 15 bp, Homo sapiens
tatttacacaaccta

SEQ ID NO: 725134 - DNA, 15 bp, Homo sapiens
atttacacaacctag

SEQ ID NO: 725135 - DNA, 15 bp, Homo sapiens
tttacacaacctaga

SEQ ID NO: 725136 - DNA, 15 bp, Homo sapiens
ttacacaacctagac

SEQ ID NO: 725137 - DNA, 15 bp, Homo sapiens
tacacaacctagaca

SEQ ID NO: 725138 - DNA, 15 bp, Homo sapiens
acacaacctagacag

SEQ ID NO: 725139 - DNA, 15 bp, Homo sapiens
cacaacctagacagt

SEQ ID NO: 725140 - DNA, 15 bp, Homo sapiens
acaacctagacagta

SEQ ID NO: 725141 - DNA, 15 bp, Homo sapiens
caacctagacagtat

SEQ ID NO: 725142 - DNA, 15 bp, Homo sapiens
aacctagacagtata

SEQ ID NO: 725143 - DNA, 15 bp, Homo sapiens
acctagacagtatat

SEQ ID NO: 725144 - DNA, 15 bp, Homo sapiens
cctagacagtatata

SEQ ID NO: 725145 - DNA, 15 bp, Homo sapiens
ctagacagtatatag

SEQ ID NO: 725146 - DNA, 15 bp, Homo sapiens
tagacagtatatagt

SEQ ID NO: 725147 - DNA, 15 bp, Homo sapiens
agacagtatatagtc

SEQ ID NO: 725148 - DNA, 15 bp, Homo sapiens
gacagtatatagtct

SEQ ID NO: 725149 - DNA, 15 bp, Homo sapiens
acagtatatagtcta

SEQ ID NO: 725150 - DNA, 15 bp, Homo sapiens
cagtatatagtctac

SEQ ID NO: 725151 - DNA, 15 bp, Homo sapiens
agtatatagtctact

SEQ ID NO: 725152 - DNA, 15 bp, Homo sapiens
gtatatagtctacta

SEQ ID NO: 725153 - DNA, 15 bp, Homo sapiens
tatatagtctactac

SEQ ID NO: 725154 - DNA, 15 bp, Homo sapiens
atatagtctactaca

SEQ ID NO: 725155 - DNA, 15 bp, Homo sapiens
tatagtctactacac

SEQ ID NO: 725156 - DNA, 15 bp, Homo sapiens
atagtctactacaca

SEQ ID NO: 725157 - DNA, 15 bp, Homo sapiens
tagtctactacacac

SEQ ID NO: 725158 - DNA, 15 bp, Homo sapiens
agtctactacacacc

SEQ ID NO: 725159 - DNA, 15 bp, Homo sapiens
gtctactacacacct

SEQ ID NO: 725160 - DNA, 15 bp, Homo sapiens
tctactacacaccta

SEQ ID NO: 725161 - DNA, 15 bp, Homo sapiens
ctactacacacctag

SEQ ID NO: 725162 - DNA, 15 bp, Homo sapiens
tactacacacctagg

SEQ ID NO: 725163 - DNA, 15 bp, Homo sapiens
actacacacctaggc

SEQ ID NO: 725164 - DNA, 15 bp, Homo sapiens
ctacacacctaggct

SEQ ID NO: 725165 - DNA, 15 bp, Homo sapiens
tacacacctaggcta

SEQ ID NO: 725166 - DNA, 15 bp, Homo sapiens
acacacctaggctac

SEQ ID NO: 725167 - DNA, 15 bp, Homo sapiens
cacacctaggctaca

SEQ ID NO: 725168 - DNA, 15 bp, Homo sapiens
acacctaggctacat

SEQ ID NO: 725169 - DNA, 15 bp, Homo sapiens
cacctaggctacatg

SEQ ID NO: 725170 - DNA, 15 bp, Homo sapiens
acctaggctacatga

SEQ ID NO: 725171 - DNA, 15 bp, Homo sapiens
cctaggctacatgat

SEQ ID NO: 725172 - DNA, 15 bp, Homo sapiens
ctaggctacatgata

SEQ ID NO: 725173 - DNA, 15 bp, Homo sapiens
taggctacatgatat

SEQ ID NO: 725174 - DNA, 15 bp, Homo sapiens
aggctacatgatata

SEQ ID NO: 725175 - DNA, 15 bp, Homo sapiens
ggctacatgatatag

SEQ ID NO: 725176 - DNA, 15 bp, Homo sapiens
gctacatgatatagc

SEQ ID NO: 725177 - DNA, 15 bp, Homo sapiens
ctacatgatatagcc

SEQ ID NO: 725178 - DNA, 15 bp, Homo sapiens
tacatgatatagccc

SEQ ID NO: 725179 - DNA, 15 bp, Homo sapiens
acatgatatagccct

SEQ ID NO: 725180 - DNA, 15 bp, Homo sapiens
catgatatagcccta

SEQ ID NO: 725181 - DNA, 15 bp, Homo sapiens
atgatatagccctat

SEQ ID NO: 725182 - DNA, 15 bp, Homo sapiens
tgatatagccctatt

SEQ ID NO: 725183 - DNA, 15 bp, Homo sapiens
gatatagccctattg

SEQ ID NO: 725184 - DNA, 15 bp, Homo sapiens
atatagccctattgc

SEQ ID NO: 725185 - DNA, 15 bp, Homo sapiens
tatagccctattgct

SEQ ID NO: 725186 - DNA, 15 bp, Homo sapiens
atagccctattgctc

SEQ ID NO: 725187 - DNA, 15 bp, Homo sapiens
tagccctattgctcc

SEQ ID NO: 725188 - DNA, 15 bp, Homo sapiens
agccctattgctcct

SEQ ID NO: 725189 - DNA, 15 bp, Homo sapiens
gccctattgctccta

SEQ ID NO: 725190 - DNA, 15 bp, Homo sapiens
ccctattgctcctag

SEQ ID NO: 725191 - DNA, 15 bp, Homo sapiens
cctattgctcctagg

SEQ ID NO: 725192 - DNA, 15 bp, Homo sapiens
ctattgctcctaggc

SEQ ID NO: 725193 - DNA, 15 bp, Homo sapiens
tattgctcctaggct

SEQ ID NO: 725194 - DNA, 15 bp, Homo sapiens
attgctcctaggcta

SEQ ID NO: 725195 - DNA, 15 bp, Homo sapiens
ttgctcctaggctac

SEQ ID NO: 725196 - DNA, 15 bp, Homo sapiens
tgctcctaggctaca

SEQ ID NO: 725197 - DNA, 15 bp, Homo sapiens
gctcctaggctacaa

SEQ ID NO: 725198 - DNA, 15 bp, Homo sapiens
ctcctaggctacaaa

SEQ ID NO: 725199 - DNA, 15 bp, Homo sapiens
tcctaggctacaaac

SEQ ID NO: 725200 - DNA, 15 bp, Homo sapiens
cctaggctacaaacc

SEQ ID NO: 725201 - DNA, 15 bp, Homo sapiens
ctaggctacaaacct

SEQ ID NO: 725202 - DNA, 15 bp, Homo sapiens
taggctacaaacctg

SEQ ID NO: 725203 - DNA, 15 bp, Homo sapiens
aggctacaaacctgt

SEQ ID NO: 725204 - DNA, 15 bp, Homo sapiens
ggctacaaacctgta

SEQ ID NO: 725205 - DNA, 15 bp, Homo sapiens
gctacaaacctgtac

SEQ ID NO: 725206 - DNA, 15 bp, Homo sapiens
ctacaaacctgtaca

SEQ ID NO: 725207 - DNA, 15 bp, Homo sapiens
tacaaacctgtacag

SEQ ID NO: 725208 - DNA, 15 bp, Homo sapiens
acaaacctgtacagc

SEQ ID NO: 725209 - DNA, 15 bp, Homo sapiens
caaacctgtacagca

SEQ ID NO: 725210 - DNA, 15 bp, Homo sapiens
aaacctgtacagcat

SEQ ID NO: 725211 - DNA, 15 bp, Homo sapiens
aacctgtacagcatg

SEQ ID NO: 725212 - DNA, 15 bp, Homo sapiens
acctgtacagcatgt

SEQ ID NO: 725213 - DNA, 15 bp, Homo sapiens
cctgtacagcatgtt

SEQ ID NO: 725214 - DNA, 15 bp, Homo sapiens
ctgtacagcatgtta

SEQ ID NO: 725215 - DNA, 15 bp, Homo sapiens
tgtacagcatgttac

SEQ ID NO: 725216 - DNA, 15 bp, Homo sapiens
gtacagcatgttact

SEQ ID NO: 725217 - DNA, 15 bp, Homo sapiens
tacagcatgttactg

SEQ ID NO: 725218 - DNA, 15 bp, Homo sapiens
acagcatgttactgt

SEQ ID NO: 725219 - DNA, 15 bp, Homo sapiens
cagcatgttactgta

SEQ ID NO: 725220 - DNA, 15 bp, Homo sapiens
agcatgttactgtac

SEQ ID NO: 725221 - DNA, 15 bp, Homo sapiens
gcatgttactgtact

SEQ ID NO: 725222 - DNA, 15 bp, Homo sapiens
catgttactgtactg

SEQ ID NO: 725223 - DNA, 15 bp, Homo sapiens
atgttactgtactga

SEQ ID NO: 725224 - DNA, 15 bp, Homo sapiens
tgttactgtactgaa

SEQ ID NO: 725225 - DNA, 15 bp, Homo sapiens
gttactgtactgaat

SEQ ID NO: 725226 - DNA, 15 bp, Homo sapiens
ttactgtactgaatt

SEQ ID NO: 725227 - DNA, 15 bp, Homo sapiens
tactgtactgaattc

SEQ ID NO: 725228 - DNA, 15 bp, Homo sapiens
actgtactgaattct

SEQ ID NO: 725229 - DNA, 15 bp, Homo sapiens
ctgtactgaattctg

SEQ ID NO: 725230 - DNA, 15 bp, Homo sapiens
tgtactgaattctgt

SEQ ID NO: 725231 - DNA, 15 bp, Homo sapiens
gtactgaattctgta

SEQ ID NO: 725232 - DNA, 15 bp, Homo sapiens
tactgaattctgtag

SEQ ID NO: 725233 - DNA, 15 bp, Homo sapiens
actgaattctgtagg

SEQ ID NO: 725234 - DNA, 15 bp, Homo sapiens
ctgaattctgtaggt

SEQ ID NO: 725235 - DNA, 15 bp, Homo sapiens
tgaattctgtaggta

SEQ ID NO: 725236 - DNA, 15 bp, Homo sapiens
gaattctgtaggtaa

SEQ ID NO: 725237 - DNA, 15 bp, Homo sapiens
aattctgtaggtaac

SEQ ID NO: 725238 - DNA, 15 bp, Homo sapiens
attctgtaggtaact

SEQ ID NO: 725239 - DNA, 15 bp, Homo sapiens
ttctgtaggtaactg

SEQ ID NO: 725240 - DNA, 15 bp, Homo sapiens
tctgtaggtaactgt

SEQ ID NO: 725241 - DNA, 15 bp, Homo sapiens
ctgtaggtaactgta

SEQ ID NO: 725242 - DNA, 15 bp, Homo sapiens
tgtaggtaactgtaa

SEQ ID NO: 725243 - DNA, 15 bp, Homo sapiens
gtaggtaactgtaac

SEQ ID NO: 725244 - DNA, 15 bp, Homo sapiens
taggtaactgtaaca

SEQ ID NO: 725245 - DNA, 15 bp, Homo sapiens
aggtaactgtaacat

SEQ ID NO: 725246 - DNA, 15 bp, Homo sapiens
ggtaactgtaacata

SEQ ID NO: 725247 - DNA, 15 bp, Homo sapiens
gtaactgtaacataa

SEQ ID NO: 725248 - DNA, 15 bp, Homo sapiens
taactgtaacataac

SEQ ID NO: 725249 - DNA, 15 bp, Homo sapiens
aactgtaacataaca

SEQ ID NO: 725250 - DNA, 15 bp, Homo sapiens
actgtaacataacag

SEQ ID NO: 725251 - DNA, 15 bp, Homo sapiens
ctgtaacataacagt

SEQ ID NO: 725252 - DNA, 15 bp, Homo sapiens
tgtaacataacagta

SEQ ID NO: 725253 - DNA, 15 bp, Homo sapiens
gtaacataacagtag

SEQ ID NO: 725254 - DNA, 15 bp, Homo sapiens
taacataacagtagg

SEQ ID NO: 725255 - DNA, 15 bp, Homo sapiens
aacataacagtaggt

SEQ ID NO: 725256 - DNA, 15 bp, Homo sapiens
acataacagtaggta

SEQ ID NO: 725257 - DNA, 15 bp, Homo sapiens
cataacagtaggtat

SEQ ID NO: 725258 - DNA, 15 bp, Homo sapiens
ataacagtaggtatt

SEQ ID NO: 725259 - DNA, 15 bp, Homo sapiens
taacagtaggtattt

SEQ ID NO: 725260 - DNA, 15 bp, Homo sapiens
aacagtaggtatttg

SEQ ID NO: 725261 - DNA, 15 bp, Homo sapiens
acagtaggtatttgt

SEQ ID NO: 725262 - DNA, 15 bp, Homo sapiens
cagtaggtatttgtg

SEQ ID NO: 725263 - DNA, 15 bp, Homo sapiens
agtaggtatttgtgt

SEQ ID NO: 725264 - DNA, 15 bp, Homo sapiens
gtaggtatttgtgta

SEQ ID NO: 725265 - DNA, 15 bp, Homo sapiens
taggtatttgtgtat

SEQ ID NO: 725266 - DNA, 15 bp, Homo sapiens
aggtatttgtgtatc

SEQ ID NO: 725267 - DNA, 15 bp, Homo sapiens
ggtatttgtgtatct

SEQ ID NO: 725268 - DNA, 15 bp, Homo sapiens
gtatttgtgtatcta

SEQ ID NO: 725269 - DNA, 15 bp, Homo sapiens
tatttgtgtatctaa

SEQ ID NO: 725270 - DNA, 15 bp, Homo sapiens
atttgtgtatctaaa

SEQ ID NO: 725271 - DNA, 15 bp, Homo sapiens
tttgtgtatctaaac

SEQ ID NO: 725272 - DNA, 15 bp, Homo sapiens
ttgtgtatctaaaca

SEQ ID NO: 725273 - DNA, 15 bp, Homo sapiens
tgtgtatctaaacat

SEQ ID NO: 725274 - DNA, 15 bp, Homo sapiens
gtgtatctaaacata

SEQ ID NO: 725275 - DNA, 15 bp, Homo sapiens
tgtatctaaacatag

SEQ ID NO: 725276 - DNA, 15 bp, Homo sapiens
gtatctaaacataga

SEQ ID NO: 725277 - DNA, 15 bp, Homo sapiens
tatctaaacatagaa

SEQ ID NO: 725278 - DNA, 15 bp, Homo sapiens
atctaaacatagaaa

SEQ ID NO: 725279 - DNA, 15 bp, Homo sapiens
tctaaacatagaaaa

SEQ ID NO: 725280 - DNA, 15 bp, Homo sapiens
ctaaacatagaaaag

SEQ ID NO: 725281 - DNA, 15 bp, Homo sapiens
taaacatagaaaagg

SEQ ID NO: 725282 - DNA, 15 bp, Homo sapiens
aaacatagaaaaggt

SEQ ID NO: 725283 - DNA, 15 bp, Homo sapiens
aacatagaaaaggta

SEQ ID NO: 725284 - DNA, 15 bp, Homo sapiens
acatagaaaaggtac

SEQ ID NO: 725285 - DNA, 15 bp, Homo sapiens
catagaaaaggtaca

SEQ ID NO: 725286 - DNA, 15 bp, Homo sapiens
atagaaaaggtacag

SEQ ID NO: 725287 - DNA, 15 bp, Homo sapiens
tagaaaaggtacagt

SEQ ID NO: 725288 - DNA, 15 bp, Homo sapiens
agaaaaggtacagta

SEQ ID NO: 725289 - DNA, 15 bp, Homo sapiens
gaaaaggtacagtag

SEQ ID NO: 725290 - DNA, 15 bp, Homo sapiens
aaaaggtacagtagc

SEQ ID NO: 725291 - DNA, 15 bp, Homo sapiens
aaaggtacagtagct

SEQ ID NO: 725292 - DNA, 15 bp, Homo sapiens
aaggtacagtagctg

SEQ ID NO: 725293 - DNA, 15 bp, Homo sapiens
aggtacagtagctgt

SEQ ID NO: 725294 - DNA, 15 bp, Homo sapiens
ggtacagtagctgta

SEQ ID NO: 725295 - DNA, 15 bp, Homo sapiens
gtacagtagctgtat

SEQ ID NO: 725296 - DNA, 15 bp, Homo sapiens
tacagtagctgtatt

SEQ ID NO: 725297 - DNA, 15 bp, Homo sapiens
acagtagctgtatta

SEQ ID NO: 725298 - DNA, 15 bp, Homo sapiens
cagtagctgtattat

SEQ ID NO: 725299 - DNA, 15 bp, Homo sapiens
agtagctgtattata

SEQ ID NO: 725300 - DNA, 15 bp, Homo sapiens
gtagctgtattataa

SEQ ID NO: 725301 - DNA, 15 bp, Homo sapiens
tagctgtattataat

SEQ ID NO: 725302 - DNA, 15 bp, Homo sapiens
agctgtattataatc

SEQ ID NO: 725303 - DNA, 15 bp, Homo sapiens
gctgtattataatct

SEQ ID NO: 725304 - DNA, 15 bp, Homo sapiens
ctgtattataatctt

SEQ ID NO: 725305 - DNA, 15 bp, Homo sapiens
tgtattataatctta

SEQ ID NO: 725306 - DNA, 15 bp, Homo sapiens
gtattataatcttac

SEQ ID NO: 725307 - DNA, 15 bp, Homo sapiens
tattataatcttaca

SEQ ID NO: 725308 - DNA, 15 bp, Homo sapiens
attataatcttacag

SEQ ID NO: 725309 - DNA, 15 bp, Homo sapiens
ttataatcttacagg

SEQ ID NO: 725310 - DNA, 15 bp, Homo sapiens
tataatcttacagga

SEQ ID NO: 725311 - DNA, 15 bp, Homo sapiens
ataatcttacaggac

SEQ ID NO: 725312 - DNA, 15 bp, Homo sapiens
taatcttacaggacc

SEQ ID NO: 725313 - DNA, 15 bp, Homo sapiens
aatcttacaggacca

SEQ ID NO: 725314 - DNA, 15 bp, Homo sapiens
atcttacaggaccac

SEQ ID NO: 725315 - DNA, 15 bp, Homo sapiens
tcttacaggaccact

SEQ ID NO: 725316 - DNA, 15 bp, Homo sapiens
cttacaggaccacta

SEQ ID NO: 725317 - DNA, 15 bp, Homo sapiens
ttacaggaccactat

SEQ ID NO: 725318 - DNA, 15 bp, Homo sapiens
tacaggaccactatc

SEQ ID NO: 725319 - DNA, 15 bp, Homo sapiens
acaggaccactatcg

SEQ ID NO: 725320 - DNA, 15 bp, Homo sapiens
caggaccactatcgt

SEQ ID NO: 725321 - DNA, 15 bp, Homo sapiens
aggaccactatcgta

SEQ ID NO: 725322 - DNA, 15 bp, Homo sapiens
ggaccactatcgtat

SEQ ID NO: 725323 - DNA, 15 bp, Homo sapiens
gaccactatcgtata

SEQ ID NO: 725324 - DNA, 15 bp, Homo sapiens
accactatcgtatat

SEQ ID NO: 725325 - DNA, 15 bp, Homo sapiens
ccactatcgtatata

SEQ ID NO: 725326 - DNA, 15 bp, Homo sapiens
cactatcgtatatat

SEQ ID NO: 725327 - DNA, 15 bp, Homo sapiens
actatcgtatatatg

SEQ ID NO: 725328 - DNA, 15 bp, Homo sapiens
ctatcgtatatatgg

SEQ ID NO: 725329 - DNA, 15 bp, Homo sapiens
tatcgtatatatggt

SEQ ID NO: 725330 - DNA, 15 bp, Homo sapiens
atcgtatatatggtc

SEQ ID NO: 725331 - DNA, 15 bp, Homo sapiens
tcgtatatatggtct

SEQ ID NO: 725332 - DNA, 15 bp, Homo sapiens
cgtatatatggtctg

SEQ ID NO: 725333 - DNA, 15 bp, Homo sapiens
gtatatatggtctgt

SEQ ID NO: 725334 - DNA, 15 bp, Homo sapiens
tatatatggtctgtc

SEQ ID NO: 725335 - DNA, 15 bp, Homo sapiens
atatatggtctgtca

SEQ ID NO: 725336 - DNA, 15 bp, Homo sapiens
tatatggtctgtcat

SEQ ID NO: 725337 - DNA, 15 bp, Homo sapiens
atatggtctgtcatt

SEQ ID NO: 725338 - DNA, 15 bp, Homo sapiens
tatggtctgtcattc

SEQ ID NO: 725339 - DNA, 15 bp, Homo sapiens
atggtctgtcattca

SEQ ID NO: 725340 - DNA, 15 bp, Homo sapiens
tggtctgtcattcac

SEQ ID NO: 725341 - DNA, 15 bp, Homo sapiens
ggtctgtcattcact

SEQ ID NO: 725342 - DNA, 15 bp, Homo sapiens
gtctgtcattcactg

SEQ ID NO: 725343 - DNA, 15 bp, Homo sapiens
tctgtcattcactga

SEQ ID NO: 725344 - DNA, 15 bp, Homo sapiens
ctgtcattcactgaa

SEQ ID NO: 725345 - DNA, 15 bp, Homo sapiens
tgtcattcactgaaa

SEQ ID NO: 725346 - DNA, 15 bp, Homo sapiens
gtcattcactgaaaa

SEQ ID NO: 725347 - DNA, 15 bp, Homo sapiens
tcattcactgaaaag

SEQ ID NO: 725348 - DNA, 15 bp, Homo sapiens
cattcactgaaaagt

SEQ ID NO: 725349 - DNA, 15 bp, Homo sapiens
attcactgaaaagtc

SEQ ID NO: 725350 - DNA, 15 bp, Homo sapiens
ttcactgaaaagtca

SEQ ID NO: 725351 - DNA, 15 bp, Homo sapiens
tcactgaaaagtcat

SEQ ID NO: 725352 - DNA, 15 bp, Homo sapiens
cactgaaaagtcatt

SEQ ID NO: 725353 - DNA, 15 bp, Homo sapiens
actgaaaagtcatta

SEQ ID NO: 725354 - DNA, 15 bp, Homo sapiens
ctgaaaagtcattat

SEQ ID NO: 725355 - DNA, 15 bp, Homo sapiens
tgaaaagtcattatg

SEQ ID NO: 725356 - DNA, 15 bp, Homo sapiens
gaaaagtcattatgt

SEQ ID NO: 725357 - DNA, 15 bp, Homo sapiens
aaaagtcattatgtg

SEQ ID NO: 725358 - DNA, 15 bp, Homo sapiens
aaagtcattatgtgg

SEQ ID NO: 725359 - DNA, 15 bp, Homo sapiens
aagtcattatgtggc

SEQ ID NO: 725360 - DNA, 15 bp, Homo sapiens
agtcattatgtggca

SEQ ID NO: 725361 - DNA, 15 bp, Homo sapiens
gtcattatgtggcac

SEQ ID NO: 725362 - DNA, 15 bp, Homo sapiens
tcattatgtggcaca

SEQ ID NO: 725363 - DNA, 15 bp, Homo sapiens
cattatgtggcacat

SEQ ID NO: 725364 - DNA, 15 bp, Homo sapiens
attatgtggcacatg

SEQ ID NO: 725365 - DNA, 15 bp, Homo sapiens
ttatgtggcacatga

SEQ ID NO: 725366 - DNA, 15 bp, Homo sapiens
tatgtggcacatgac

SEQ ID NO: 725367 - DNA, 15 bp, Homo sapiens
atgtggcacatgact

SEQ ID NO: 725368 - DNA, 15 bp, Homo sapiens
tgtggcacatgactg

SEQ ID NO: 725369 - DNA, 15 bp, Homo sapiens
gtggcacatgactgt

SEQ ID NO: 725370 - DNA, 15 bp, Homo sapiens
tggcacatgactgta

SEQ ID NO: 725371 - DNA, 15 bp, Homo sapiens
ggcacatgactgtaa

SEQ ID NO: 725372 - DNA, 15 bp, Homo sapiens
gcacatgactgtaat

SEQ ID NO: 725373 - DNA, 15 bp, Homo sapiens
cacatgactgtaatc

SEQ ID NO: 725374 - DNA, 15 bp, Homo sapiens
acatgactgtaatct

SEQ ID NO: 725375 - DNA, 15 bp, Homo sapiens
catgactgtaatcta

SEQ ID NO: 725376 - DNA, 15 bp, Homo sapiens
atgactgtaatctag

SEQ ID NO: 725377 - DNA, 15 bp, Homo sapiens
tgactgtaatctaga

SEQ ID NO: 725378 - DNA, 15 bp, Homo sapiens
gactgtaatctagag

SEQ ID NO: 725379 - DNA, 15 bp, Homo sapiens
actgtaatctagaga

SEQ ID NO: 725380 - DNA, 15 bp, Homo sapiens
ctgtaatctagagaa

SEQ ID NO: 725381 - DNA, 15 bp, Homo sapiens
tgtaatctagagaag

SEQ ID NO: 725382 - DNA, 15 bp, Homo sapiens
gtaatctagagaaga

SEQ ID NO: 725383 - DNA, 15 bp, Homo sapiens
taatctagagaagat

SEQ ID NO: 725384 - DNA, 15 bp, Homo sapiens
aatctagagaagatt

SEQ ID NO: 725385 - DNA, 15 bp, Homo sapiens
atctagagaagattt

SEQ ID NO: 725386 - DNA, 15 bp, Homo sapiens
tctagagaagattta

SEQ ID NO: 725387 - DNA, 15 bp, Homo sapiens
ctagagaagatttaa

SEQ ID NO: 725388 - DNA, 15 bp, Homo sapiens
tagagaagatttaaa

SEQ ID NO: 725389 - DNA, 15 bp, Homo sapiens
agagaagatttaaag

SEQ ID NO: 725390 - DNA, 15 bp, Homo sapiens
gagaagatttaaagt

SEQ ID NO: 725391 - DNA, 15 bp, Homo sapiens
agaagatttaaagta

SEQ ID NO: 725392 - DNA, 15 bp, Homo sapiens
gaagatttaaagtat

SEQ ID NO: 725393 - DNA, 15 bp, Homo sapiens
aagatttaaagtata

SEQ ID NO: 725394 - DNA, 15 bp, Homo sapiens
agatttaaagtataa

SEQ ID NO: 725395 - DNA, 15 bp, Homo sapiens
gatttaaagtataag

SEQ ID NO: 725396 - DNA, 15 bp, Homo sapiens
atttaaagtataagg

SEQ ID NO: 725397 - DNA, 15 bp, Homo sapiens
tttaaagtataagga

SEQ ID NO: 725398 - DNA, 15 bp, Homo sapiens
ttaaagtataaggat

SEQ ID NO: 725399 - DNA, 15 bp, Homo sapiens
taaagtataaggata

SEQ ID NO: 725400 - DNA, 15 bp, Homo sapiens
aaagtataaggatat

SEQ ID NO: 725401 - DNA, 15 bp, Homo sapiens
aagtataaggatatg

SEQ ID NO: 725402 - DNA, 15 bp, Homo sapiens
agtataaggatatgt

SEQ ID NO: 725403 - DNA, 15 bp, Homo sapiens
gtataaggatatgtg

SEQ ID NO: 725404 - DNA, 15 bp, Homo sapiens
tataaggatatgtgt

SEQ ID NO: 725405 - DNA, 15 bp, Homo sapiens
ataaggatatgtgta

SEQ ID NO: 725406 - DNA, 15 bp, Homo sapiens
taaggatatgtgtag

SEQ ID NO: 725407 - DNA, 15 bp, Homo sapiens
aaggatatgtgtagg

SEQ ID NO: 725408 - DNA, 15 bp, Homo sapiens
aggatatgtgtaggt

SEQ ID NO: 725409 - DNA, 15 bp, Homo sapiens
ggatatgtgtaggtt

SEQ ID NO: 725410 - DNA, 15 bp, Homo sapiens
gatatgtgtaggtta

SEQ ID NO: 725411 - DNA, 15 bp, Homo sapiens
atatgtgtaggttat

SEQ ID NO: 725412 - DNA, 15 bp, Homo sapiens
tatgtgtaggttata

SEQ ID NO: 725413 - DNA, 15 bp, Homo sapiens
atgtgtaggttatat

SEQ ID NO: 725414 - DNA, 15 bp, Homo sapiens
tgtgtaggttatatg

SEQ ID NO: 725415 - DNA, 15 bp, Homo sapiens
gtgtaggttatatgc

SEQ ID NO: 725416 - DNA, 15 bp, Homo sapiens
tgtaggttatatgca

SEQ ID NO: 725417 - DNA, 15 bp, Homo sapiens
gtaggttatatgcaa

SEQ ID NO: 725418 - DNA, 15 bp, Homo sapiens
taggttatatgcaaa

SEQ ID NO: 725419 - DNA, 15 bp, Homo sapiens
aggttatatgcaaat

SEQ ID NO: 725420 - DNA, 15 bp, Homo sapiens
ggttatatgcaaata

SEQ ID NO: 725421 - DNA, 15 bp, Homo sapiens
gttatatgcaaatac

SEQ ID NO: 725422 - DNA, 15 bp, Homo sapiens
ttatatgcaaatact

SEQ ID NO: 725423 - DNA, 15 bp, Homo sapiens
tatatgcaaatacta

SEQ ID NO: 725424 - DNA, 15 bp, Homo sapiens
atatgcaaatactat

SEQ ID NO: 725425 - DNA, 15 bp, Homo sapiens
tatgcaaatactatg

SEQ ID NO: 725426 - DNA, 15 bp, Homo sapiens
atgcaaatactatgc

SEQ ID NO: 725427 - DNA, 15 bp, Homo sapiens
tgcaaatactatgcc

SEQ ID NO: 725428 - DNA, 15 bp, Homo sapiens
gcaaatactatgcca

SEQ ID NO: 725429 - DNA, 15 bp, Homo sapiens
caaatactatgccaa

SEQ ID NO: 725430 - DNA, 15 bp, Homo sapiens
aaatactatgccaat

SEQ ID NO: 725431 - DNA, 15 bp, Homo sapiens
aatactatgccaatt

SEQ ID NO: 725432 - DNA, 15 bp, Homo sapiens
atactatgccaattt

SEQ ID NO: 725433 - DNA, 15 bp, Homo sapiens
tactatgccaattta

SEQ ID NO: 725434 - DNA, 15 bp, Homo sapiens
actatgccaatttat

SEQ ID NO: 725435 - DNA, 15 bp, Homo sapiens
ctatgccaatttata

SEQ ID NO: 725436 - DNA, 15 bp, Homo sapiens
tatgccaatttatac

SEQ ID NO: 725437 - DNA, 15 bp, Homo sapiens
atgccaatttataca

SEQ ID NO: 725438 - DNA, 15 bp, Homo sapiens
tgccaatttatacaa

SEQ ID NO: 725439 - DNA, 15 bp, Homo sapiens
gccaatttatacaag

SEQ ID NO: 725440 - DNA, 15 bp, Homo sapiens
ccaatttatacaaga

SEQ ID NO: 725441 - DNA, 15 bp, Homo sapiens
caatttatacaagaa

SEQ ID NO: 725442 - DNA, 15 bp, Homo sapiens
aatttatacaagaaa

SEQ ID NO: 725443 - DNA, 15 bp, Homo sapiens
atttatacaagaaac

SEQ ID NO: 725444 - DNA, 15 bp, Homo sapiens
tttatacaagaaact

SEQ ID NO: 725445 - DNA, 15 bp, Homo sapiens
ttatacaagaaactt

SEQ ID NO: 725446 - DNA, 15 bp, Homo sapiens
tatacaagaaacttg

SEQ ID NO: 725447 - DNA, 15 bp, Homo sapiens
atacaagaaacttga

SEQ ID NO: 725448 - DNA, 15 bp, Homo sapiens
tacaagaaacttgag

SEQ ID NO: 725449 - DNA, 15 bp, Homo sapiens
acaagaaacttgagc

SEQ ID NO: 725450 - DNA, 15 bp, Homo sapiens
caagaaacttgagca

SEQ ID NO: 725451 - DNA, 15 bp, Homo sapiens
aagaaacttgagcat

SEQ ID NO: 725452 - DNA, 15 bp, Homo sapiens
agaaacttgagcatc

SEQ ID NO: 725453 - DNA, 15 bp, Homo sapiens
gaaacttgagcatct

SEQ ID NO: 725454 - DNA, 15 bp, Homo sapiens
aaacttgagcatcta

SEQ ID NO: 725455 - DNA, 15 bp, Homo sapiens
aacttgagcatctac

SEQ ID NO: 725456 - DNA, 15 bp, Homo sapiens
acttgagcatctact

SEQ ID NO: 725457 - DNA, 15 bp, Homo sapiens
cttgagcatctactg

SEQ ID NO: 725458 - DNA, 15 bp, Homo sapiens
ttgagcatctactgg

SEQ ID NO: 725459 - DNA, 15 bp, Homo sapiens
tgagcatctactgga

SEQ ID NO: 725460 - DNA, 15 bp, Homo sapiens
gagcatctactggat

SEQ ID NO: 725461 - DNA, 15 bp, Homo sapiens
agcatctactggatt

SEQ ID NO: 725462 - DNA, 15 bp, Homo sapiens
gcatctactggattt

SEQ ID NO: 725463 - DNA, 15 bp, Homo sapiens
catctactggatttg

SEQ ID NO: 725464 - DNA, 15 bp, Homo sapiens
atctactggatttgg

SEQ ID NO: 725465 - DNA, 15 bp, Homo sapiens
tctactggatttggg

SEQ ID NO: 725466 - DNA, 15 bp, Homo sapiens
ctactggatttgggt

SEQ ID NO: 725467 - DNA, 15 bp, Homo sapiens
tactggatttgggta

SEQ ID NO: 725468 - DNA, 15 bp, Homo sapiens
actggatttgggtat

SEQ ID NO: 725469 - DNA, 15 bp, Homo sapiens
ctggatttgggtatc

SEQ ID NO: 725470 - DNA, 15 bp, Homo sapiens
tggatttgggtatcc

SEQ ID NO: 725471 - DNA, 15 bp, Homo sapiens
ggatttgggtatcct

SEQ ID NO: 725472 - DNA, 15 bp, Homo sapiens
gatttgggtatcctt

SEQ ID NO: 725473 - DNA, 15 bp, Homo sapiens
atttgggtatccttg

SEQ ID NO: 725474 - DNA, 15 bp, Homo sapiens
tttgggtatccttgg

SEQ ID NO: 725475 - DNA, 15 bp, Homo sapiens
ttgggtatccttggc

SEQ ID NO: 725476 - DNA, 15 bp, Homo sapiens
tgggtatccttggca

SEQ ID NO: 725477 - DNA, 15 bp, Homo sapiens
gggtatccttggcag

SEQ ID NO: 725478 - DNA, 15 bp, Homo sapiens
ggtatccttggcagg

SEQ ID NO: 725479 - DNA, 15 bp, Homo sapiens
gtatccttggcaggg

SEQ ID NO: 725480 - DNA, 15 bp, Homo sapiens
tatccttggcaggga

SEQ ID NO: 725481 - DNA, 15 bp, Homo sapiens
atccttggcagggag

SEQ ID NO: 725482 - DNA, 15 bp, Homo sapiens
tccttggcagggagg

SEQ ID NO: 725483 - DNA, 15 bp, Homo sapiens
ccttggcagggaggt

SEQ ID NO: 725484 - DNA, 15 bp, Homo sapiens
cttggcagggaggtc

SEQ ID NO: 725485 - DNA, 15 bp, Homo sapiens
ttggcagggaggtct

SEQ ID NO: 725486 - DNA, 15 bp, Homo sapiens
tggcagggaggtctt

SEQ ID NO: 725487 - DNA, 15 bp, Homo sapiens
ggcagggaggtcttg

SEQ ID NO: 725488 - DNA, 15 bp, Homo sapiens
gcagggaggtcttgg

SEQ ID NO: 725489 - DNA, 15 bp, Homo sapiens
cagggaggtcttgga

SEQ ID NO: 725490 - DNA, 15 bp, Homo sapiens
agggaggtcttggaa

SEQ ID NO: 725491 - DNA, 15 bp, Homo sapiens
gggaggtcttggaat

SEQ ID NO: 725492 - DNA, 15 bp, Homo sapiens
ggaggtcttggaatc

SEQ ID NO: 725493 - DNA, 15 bp, Homo sapiens
gaggtcttggaatca

SEQ ID NO: 725494 - DNA, 15 bp, Homo sapiens
aggtcttggaatcaa

SEQ ID NO: 725495 - DNA, 15 bp, Homo sapiens
ggtcttggaatcaat

SEQ ID NO: 725496 - DNA, 15 bp, Homo sapiens
gtcttggaatcaatc

SEQ ID NO: 725497 - DNA, 15 bp, Homo sapiens
tcttggaatcaatcc

SEQ ID NO: 725498 - DNA, 15 bp, Homo sapiens
cttggaatcaatccc

SEQ ID NO: 725499 - DNA, 15 bp, Homo sapiens
ttggaatcaatcccc

SEQ ID NO: 725500 - DNA, 15 bp, Homo sapiens
tggaatcaatccccc

SEQ ID NO: 725501 - DNA, 15 bp, Homo sapiens
ggaatcaatccccca

SEQ ID NO: 725502 - DNA, 15 bp, Homo sapiens
gaatcaatcccccat

SEQ ID NO: 725503 - DNA, 15 bp, Homo sapiens
aatcaatcccccatg

SEQ ID NO: 725504 - DNA, 15 bp, Homo sapiens
atcaatcccccatgt

SEQ ID NO: 725505 - DNA, 15 bp, Homo sapiens
tcaatcccccatgta

SEQ ID NO: 725506 - DNA, 15 bp, Homo sapiens
caatcccccatgtat

SEQ ID NO: 725507 - DNA, 15 bp, Homo sapiens
aatcccccatgtatg

SEQ ID NO: 725508 - DNA, 15 bp, Homo sapiens
atcccccatgtatgc

SEQ ID NO: 725509 - DNA, 15 bp, Homo sapiens
tcccccatgtatgcc

SEQ ID NO: 725510 - DNA, 15 bp, Homo sapiens
cccccatgtatgcca

SEQ ID NO: 725511 - DNA, 15 bp, Homo sapiens
ccccatgtatgccaa

SEQ ID NO: 725512 - DNA, 15 bp, Homo sapiens
cccatgtatgccaaa

SEQ ID NO: 725513 - DNA, 15 bp, Homo sapiens
ccatgtatgccaaag

SEQ ID NO: 725514 - DNA, 15 bp, Homo sapiens
catgtatgccaaagg

SEQ ID NO: 725515 - DNA, 15 bp, Homo sapiens
atgtatgccaaagga

SEQ ID NO: 725516 - DNA, 15 bp, Homo sapiens
tgtatgccaaaggat

SEQ ID NO: 725517 - DNA, 15 bp, Homo sapiens
gtatgccaaaggatg

SEQ ID NO: 725518 - DNA, 15 bp, Homo sapiens
tatgccaaaggatga

SEQ ID NO: 725519 - DNA, 15 bp, Homo sapiens
atgccaaaggatgac

SEQ ID NO: 725520 - DNA, 15 bp, Homo sapiens
tgccaaaggatgact

SEQ ID NO: 725521 - DNA, 15 bp, Homo sapiens
gccaaaggatgacta

SEQ ID NO: 725522 - DNA, 15 bp, Homo sapiens
ccaaaggatgactat

SEQ ID NO: 725523 - DNA, 15 bp, Homo sapiens
caaaggatgactata

SEQ ID NO: 725524 - DNA, 15 bp, Homo sapiens
aaaggatgactatac

SEQ ID NO: 725525 - DNA, 15 bp, Homo sapiens
aaggatgactatact

SEQ ID NO: 725526 - DNA, 15 bp, Homo sapiens
aggatgactatactc

SEQ ID NO: 725527 - DNA, 15 bp, Homo sapiens
ggatgactatactcc

SEQ ID NO: 725528 - DNA, 15 bp, Homo sapiens
gatgactatactcca

SEQ ID NO: 725529 - DNA, 15 bp, Homo sapiens
atgactatactccag

SEQ ID NO: 725530 - DNA, 15 bp, Homo sapiens
tgactatactccaga

SEQ ID NO: 725531 - DNA, 15 bp, Homo sapiens
gactatactccagag

SEQ ID NO: 725532 - DNA, 15 bp, Homo sapiens
actatactccagaga

SEQ ID NO: 725533 - DNA, 15 bp, Homo sapiens
ctatactccagagat

SEQ ID NO: 725534 - DNA, 15 bp, Homo sapiens
tatactccagagatc

SEQ ID NO: 725535 - DNA, 15 bp, Homo sapiens
atactccagagatct

SEQ ID NO: 725536 - DNA, 15 bp, Homo sapiens
tactccagagatctt

SEQ ID NO: 725537 - DNA, 15 bp, Homo sapiens
actccagagatcttt

SEQ ID NO: 725538 - DNA, 15 bp, Homo sapiens
ctccagagatctttt

SEQ ID NO: 725539 - DNA, 15 bp, Homo sapiens
tccagagatcttttt

SEQ ID NO: 725540 - DNA, 15 bp, Homo sapiens
ccagagatcttttta

SEQ ID NO: 725541 - DNA, 15 bp, Homo sapiens
cagagatctttttag

SEQ ID NO: 725542 - DNA, 15 bp, Homo sapiens
agagatctttttaga

SEQ ID NO: 725543 - DNA, 15 bp, Homo sapiens
gagatctttttagaa

SEQ ID NO: 725544 - DNA, 15 bp, Homo sapiens
agatctttttagaaa

SEQ ID NO: 725545 - DNA, 15 bp, Homo sapiens
gatctttttagaaat

SEQ ID NO: 725546 - DNA, 15 bp, Homo sapiens
atctttttagaaatc

SEQ ID NO: 725547 - DNA, 15 bp, Homo sapiens
tctttttagaaatct

SEQ ID NO: 725548 - DNA, 15 bp, Homo sapiens
ctttttagaaatcta

SEQ ID NO: 725549 - DNA, 15 bp, Homo sapiens
tttttagaaatctaa

SEQ ID NO: 725550 - DNA, 15 bp, Homo sapiens
ttttagaaatctaaa

SEQ ID NO: 725551 - DNA, 15 bp, Homo sapiens
tttagaaatctaaaa

SEQ ID NO: 725552 - DNA, 15 bp, Homo sapiens
ttagaaatctaaaag

SEQ ID NO: 725553 - DNA, 15 bp, Homo sapiens
tagaaatctaaaagg

SEQ ID NO: 725554 - DNA, 15 bp, Homo sapiens
agaaatctaaaagga

SEQ ID NO: 725555 - DNA, 15 bp, Homo sapiens
gaaatctaaaaggaa

SEQ ID NO: 725556 - DNA, 15 bp, Homo sapiens
aaatctaaaaggaat

SEQ ID NO: 725557 - DNA, 15 bp, Homo sapiens
aatctaaaaggaatt

SEQ ID NO: 725558 - DNA, 15 bp, Homo sapiens
atctaaaaggaattc

SEQ ID NO: 725559 - DNA, 15 bp, Homo sapiens
tctaaaaggaattct

SEQ ID NO: 725560 - DNA, 15 bp, Homo sapiens
ctaaaaggaattcta

SEQ ID NO: 725561 - DNA, 15 bp, Homo sapiens
taaaaggaattctac

SEQ ID NO: 725562 - DNA, 15 bp, Homo sapiens
aaaaggaattctaca

SEQ ID NO: 725563 - DNA, 15 bp, Homo sapiens
aaaggaattctacaa

SEQ ID NO: 725564 - DNA, 15 bp, Homo sapiens
aaggaattctacaat

SEQ ID NO: 725565 - DNA, 15 bp, Homo sapiens
aggaattctacaatc

SEQ ID NO: 725566 - DNA, 15 bp, Homo sapiens
ggaattctacaatcc

SEQ ID NO: 725567 - DNA, 15 bp, Homo sapiens
gaattctacaatcct

SEQ ID NO: 725568 - DNA, 15 bp, Homo sapiens
aattctacaatccta

SEQ ID NO: 725569 - DNA, 15 bp, Homo sapiens
attctacaatcctag

SEQ ID NO: 725570 - DNA, 15 bp, Homo sapiens
ttctacaatcctagt

SEQ ID NO: 725571 - DNA, 15 bp, Homo sapiens
tctacaatcctagtt

SEQ ID NO: 725572 - DNA, 15 bp, Homo sapiens
ctacaatcctagttt

SEQ ID NO: 725573 - DNA, 15 bp, Homo sapiens
tacaatcctagttta

SEQ ID NO: 725574 - DNA, 15 bp, Homo sapiens
acaatcctagtttat

SEQ ID NO: 725575 - DNA, 15 bp, Homo sapiens
caatcctagtttatt

SEQ ID NO: 725576 - DNA, 15 bp, Homo sapiens
aatcctagtttattg

SEQ ID NO: 725577 - DNA, 15 bp, Homo sapiens
atcctagtttattgt

SEQ ID NO: 725578 - DNA, 15 bp, Homo sapiens
tcctagtttattgta

SEQ ID NO: 725579 - DNA, 15 bp, Homo sapiens
cctagtttattgtaa

SEQ ID NO: 725580 - DNA, 15 bp, Homo sapiens
ctagtttattgtaac

SEQ ID NO: 725581 - DNA, 15 bp, Homo sapiens
tagtttattgtaacc

SEQ ID NO: 725582 - DNA, 15 bp, Homo sapiens
agtttattgtaacca

SEQ ID NO: 725583 - DNA, 15 bp, Homo sapiens
gtttattgtaaccac

SEQ ID NO: 725584 - DNA, 15 bp, Homo sapiens
tttattgtaaccaca

SEQ ID NO: 725585 - DNA, 15 bp, Homo sapiens
ttattgtaaccacag

SEQ ID NO: 725586 - DNA, 15 bp, Homo sapiens
tattgtaaccacagt

SEQ ID NO: 725587 - DNA, 15 bp, Homo sapiens
attgtaaccacagtt

SEQ ID NO: 725588 - DNA, 15 bp, Homo sapiens
ttgtaaccacagttt

SEQ ID NO: 725589 - DNA, 15 bp, Homo sapiens
tgtaaccacagttta

SEQ ID NO: 725590 - DNA, 15 bp, Homo sapiens
gtaaccacagtttat

SEQ ID NO: 725591 - DNA, 15 bp, Homo sapiens
taaccacagtttatt

SEQ ID NO: 725592 - DNA, 15 bp, Homo sapiens
aaccacagtttattg

SEQ ID NO: 725593 - DNA, 15 bp, Homo sapiens
accacagtttattgt

SEQ ID NO: 725594 - DNA, 15 bp, Homo sapiens
ccacagtttattgta

SEQ ID NO: 725595 - DNA, 15 bp, Homo sapiens
cacagtttattgtaa

SEQ ID NO: 725596 - DNA, 15 bp, Homo sapiens
acagtttattgtaac

SEQ ID NO: 725597 - DNA, 15 bp, Homo sapiens
cagtttattgtaact

SEQ ID NO: 725598 - DNA, 15 bp, Homo sapiens
agtttattgtaacta

SEQ ID NO: 725599 - DNA, 15 bp, Homo sapiens
gtttattgtaactat

SEQ ID NO: 725600 - DNA, 15 bp, Homo sapiens
tttattgtaactata

SEQ ID NO: 725601 - DNA, 15 bp, Homo sapiens
ttattgtaactataa

SEQ ID NO: 725602 - DNA, 15 bp, Homo sapiens
tattgtaactataac

SEQ ID NO: 725603 - DNA, 15 bp, Homo sapiens
attgtaactataaca

SEQ ID NO: 725604 - DNA, 15 bp, Homo sapiens
ttgtaactataacat

SEQ ID NO: 725605 - DNA, 15 bp, Homo sapiens
tgtaactataacata

SEQ ID NO: 725606 - DNA, 15 bp, Homo sapiens
gtaactataacatag

SEQ ID NO: 725607 - DNA, 15 bp, Homo sapiens
taactataacatagc

SEQ ID NO: 725608 - DNA, 15 bp, Homo sapiens
aactataacatagct

SEQ ID NO: 725609 - DNA, 15 bp, Homo sapiens
actataacatagcta

SEQ ID NO: 725610 - DNA, 15 bp, Homo sapiens
ctataacatagctat

SEQ ID NO: 725611 - DNA, 15 bp, Homo sapiens
tataacatagctata

SEQ ID NO: 725612 - DNA, 15 bp, Homo sapiens
ataacatagctatag

SEQ ID NO: 725613 - DNA, 15 bp, Homo sapiens
taacatagctatagt

SEQ ID NO: 725614 - DNA, 15 bp, Homo sapiens
aacatagctatagtt

SEQ ID NO: 725615 - DNA, 15 bp, Homo sapiens
acatagctatagttt

SEQ ID NO: 725616 - DNA, 15 bp, Homo sapiens
catagctatagtttg

SEQ ID NO: 725617 - DNA, 15 bp, Homo sapiens
atagctatagtttgc

SEQ ID NO: 725618 - DNA, 15 bp, Homo sapiens
tagctatagtttgct

SEQ ID NO: 725619 - DNA, 15 bp, Homo sapiens
agctatagtttgctt

SEQ ID NO: 725620 - DNA, 15 bp, Homo sapiens
gctatagtttgcttt

SEQ ID NO: 725621 - DNA, 15 bp, Homo sapiens
ctatagtttgctttc

SEQ ID NO: 725622 - DNA, 15 bp, Homo sapiens
tatagtttgctttca

SEQ ID NO: 725623 - DNA, 15 bp, Homo sapiens
atagtttgctttcat

SEQ ID NO: 725624 - DNA, 15 bp, Homo sapiens
tagtttgctttcatt

SEQ ID NO: 725625 - DNA, 15 bp, Homo sapiens
agtttgctttcattt

SEQ ID NO: 725626 - DNA, 15 bp, Homo sapiens
gtttgctttcatttc

SEQ ID NO: 725627 - DNA, 15 bp, Homo sapiens
tttgctttcatttcc

SEQ ID NO: 725628 - DNA, 15 bp, Homo sapiens
ttgctttcatttcca

SEQ ID NO: 725629 - DNA, 15 bp, Homo sapiens
tgctttcatttccaa

SEQ ID NO: 725630 - DNA, 15 bp, Homo sapiens
gctttcatttccaag

SEQ ID NO: 725631 - DNA, 15 bp, Homo sapiens
ctttcatttccaagt

SEQ ID NO: 725632 - DNA, 15 bp, Homo sapiens
tttcatttccaagtt

SEQ ID NO: 725633 - DNA, 15 bp, Homo sapiens
ttcatttccaagtta

SEQ ID NO: 725634 - DNA, 15 bp, Homo sapiens
tcatttccaagttag

SEQ ID NO: 725635 - DNA, 15 bp, Homo sapiens
catttccaagttagc

SEQ ID NO: 725636 - DNA, 15 bp, Homo sapiens
atttccaagttagct

SEQ ID NO: 725637 - DNA, 15 bp, Homo sapiens
tttccaagttagctt

SEQ ID NO: 725638 - DNA, 15 bp, Homo sapiens
ttccaagttagcttc

SEQ ID NO: 725639 - DNA, 15 bp, Homo sapiens
tccaagttagcttcc

SEQ ID NO: 725640 - DNA, 15 bp, Homo sapiens
ccaagttagcttcca

SEQ ID NO: 725641 - DNA, 15 bp, Homo sapiens
caagttagcttccat

SEQ ID NO: 725642 - DNA, 15 bp, Homo sapiens
aagttagcttccatt

SEQ ID NO: 725643 - DNA, 15 bp, Homo sapiens
agttagcttccattt

SEQ ID NO: 725644 - DNA, 15 bp, Homo sapiens
gttagcttccatttt

SEQ ID NO: 725645 - DNA, 15 bp, Homo sapiens
ttagcttccatttta

SEQ ID NO: 725646 - DNA, 15 bp, Homo sapiens
tagcttccattttac

SEQ ID NO: 725647 - DNA, 15 bp, Homo sapiens
agcttccattttact

SEQ ID NO: 725648 - DNA, 15 bp, Homo sapiens
gcttccattttactt

SEQ ID NO: 725649 - DNA, 15 bp, Homo sapiens
cttccattttacttc

SEQ ID NO: 725650 - DNA, 15 bp, Homo sapiens
ttccattttacttca

SEQ ID NO: 725651 - DNA, 15 bp, Homo sapiens
tccattttacttcat

SEQ ID NO: 725652 - DNA, 15 bp, Homo sapiens
ccattttacttcata

SEQ ID NO: 725653 - DNA, 15 bp, Homo sapiens
cattttacttcatag

SEQ ID NO: 725654 - DNA, 15 bp, Homo sapiens
attttacttcataga

SEQ ID NO: 725655 - DNA, 15 bp, Homo sapiens
ttttacttcatagaa

SEQ ID NO: 725656 - DNA, 15 bp, Homo sapiens
tttacttcatagaat

SEQ ID NO: 725657 - DNA, 15 bp, Homo sapiens
ttacttcatagaatg

SEQ ID NO: 725658 - DNA, 15 bp, Homo sapiens
tacttcatagaatga

SEQ ID NO: 725659 - DNA, 15 bp, Homo sapiens
acttcatagaatgaa

SEQ ID NO: 725660 - DNA, 15 bp, Homo sapiens
cttcatagaatgaat

SEQ ID NO: 725661 - DNA, 15 bp, Homo sapiens
ttcatagaatgaatc

SEQ ID NO: 725662 - DNA, 15 bp, Homo sapiens
tcatagaatgaatca

SEQ ID NO: 725663 - DNA, 15 bp, Homo sapiens
catagaatgaatcaa

SEQ ID NO: 725664 - DNA, 15 bp, Homo sapiens
atagaatgaatcaat

SEQ ID NO: 725665 - DNA, 15 bp, Homo sapiens
tagaatgaatcaatg

SEQ ID NO: 725666 - DNA, 15 bp, Homo sapiens
agaatgaatcaatgc

SEQ ID NO: 725667 - DNA, 15 bp, Homo sapiens
gaatgaatcaatgct

SEQ ID NO: 725668 - DNA, 15 bp, Homo sapiens
aatgaatcaatgcta

SEQ ID NO: 725669 - DNA, 15 bp, Homo sapiens
atgaatcaatgctat

SEQ ID NO: 725670 - DNA, 15 bp, Homo sapiens
tgaatcaatgctatt

SEQ ID NO: 725671 - DNA, 15 bp, Homo sapiens
gaatcaatgctattt

SEQ ID NO: 725672 - DNA, 15 bp, Homo sapiens
aatcaatgctatttt

SEQ ID NO: 725673 - DNA, 15 bp, Homo sapiens
atcaatgctattttg

SEQ ID NO: 725674 - DNA, 15 bp, Homo sapiens
tcaatgctattttga

SEQ ID NO: 725675 - DNA, 15 bp, Homo sapiens
caatgctattttgaa

SEQ ID NO: 725676 - DNA, 15 bp, Homo sapiens
aatgctattttgaag

SEQ ID NO: 725677 - DNA, 15 bp, Homo sapiens
atgctattttgaagg

SEQ ID NO: 725678 - DNA, 15 bp, Homo sapiens
tgctattttgaaggc

SEQ ID NO: 725679 - DNA, 15 bp, Homo sapiens
gctattttgaaggca

SEQ ID NO: 725680 - DNA, 15 bp, Homo sapiens
ctattttgaaggcaa

SEQ ID NO: 725681 - DNA, 15 bp, Homo sapiens
tattttgaaggcaaa

SEQ ID NO: 725682 - DNA, 15 bp, Homo sapiens
attttgaaggcaaac

SEQ ID NO: 725683 - DNA, 15 bp, Homo sapiens
ttttgaaggcaaact

SEQ ID NO: 725684 - DNA, 15 bp, Homo sapiens
tttgaaggcaaactg

SEQ ID NO: 725685 - DNA, 15 bp, Homo sapiens
ttgaaggcaaactga

SEQ ID NO: 725686 - DNA, 15 bp, Homo sapiens
tgaaggcaaactgaa

SEQ ID NO: 725687 - DNA, 15 bp, Homo sapiens
gaaggcaaactgaat

SEQ ID NO: 725688 - DNA, 15 bp, Homo sapiens
aaggcaaactgaatt

SEQ ID NO: 725689 - DNA, 15 bp, Homo sapiens
aggcaaactgaattt

SEQ ID NO: 725690 - DNA, 15 bp, Homo sapiens
ggcaaactgaattta

SEQ ID NO: 725691 - DNA, 15 bp, Homo sapiens
gcaaactgaatttag

SEQ ID NO: 725692 - DNA, 15 bp, Homo sapiens
caaactgaatttagc

SEQ ID NO: 725693 - DNA, 15 bp, Homo sapiens
aaactgaatttagcc

SEQ ID NO: 725694 - DNA, 15 bp, Homo sapiens
aactgaatttagcct

SEQ ID NO: 725695 - DNA, 15 bp, Homo sapiens
actgaatttagcctt

SEQ ID NO: 725696 - DNA, 15 bp, Homo sapiens
ctgaatttagccttt

SEQ ID NO: 725697 - DNA, 15 bp, Homo sapiens
tgaatttagcctttg

SEQ ID NO: 725698 - DNA, 15 bp, Homo sapiens
gaatttagcctttga

SEQ ID NO: 725699 - DNA, 15 bp, Homo sapiens
aatttagcctttgaa

SEQ ID NO: 725700 - DNA, 15 bp, Homo sapiens
atttagcctttgaaa

SEQ ID NO: 725701 - DNA, 15 bp, Homo sapiens
tttagcctttgaaat

SEQ ID NO: 725702 - DNA, 15 bp, Homo sapiens
ttagcctttgaaata

SEQ ID NO: 725703 - DNA, 15 bp, Homo sapiens
tagcctttgaaataa

SEQ ID NO: 725704 - DNA, 15 bp, Homo sapiens
agcctttgaaataag

SEQ ID NO: 725705 - DNA, 15 bp, Homo sapiens
gcctttgaaataaga

SEQ ID NO: 725706 - DNA, 15 bp, Homo sapiens
cctttgaaataagaa

SEQ ID NO: 725707 - DNA, 15 bp, Homo sapiens
ctttgaaataagaaa

SEQ ID NO: 725708 - DNA, 15 bp, Homo sapiens
tttgaaataagaaaa

SEQ ID NO: 725709 - DNA, 15 bp, Homo sapiens
ttgaaataagaaaat

SEQ ID NO: 725710 - DNA, 15 bp, Homo sapiens
tgaaataagaaaata

SEQ ID NO: 725711 - DNA, 15 bp, Homo sapiens
gaaataagaaaatac

SEQ ID NO: 725712 - DNA, 15 bp, Homo sapiens
aaataagaaaataca

SEQ ID NO: 725713 - DNA, 15 bp, Homo sapiens
aataagaaaatacat

SEQ ID NO: 725714 - DNA, 15 bp, Homo sapiens
ataagaaaatacatg

SEQ ID NO: 725715 - DNA, 15 bp, Homo sapiens
taagaaaatacatgt

SEQ ID NO: 725716 - DNA, 15 bp, Homo sapiens
aagaaaatacatgta

SEQ ID NO: 725717 - DNA, 15 bp, Homo sapiens
agaaaatacatgtac

SEQ ID NO: 725718 - DNA, 15 bp, Homo sapiens
gaaaatacatgtact

SEQ ID NO: 725719 - DNA, 15 bp, Homo sapiens
aaaatacatgtactg

SEQ ID NO: 725720 - DNA, 15 bp, Homo sapiens
aaatacatgtactga

SEQ ID NO: 725721 - DNA, 15 bp, Homo sapiens
aatacatgtactgaa

SEQ ID NO: 725722 - DNA, 15 bp, Homo sapiens
atacatgtactgaag

SEQ ID NO: 725723 - DNA, 15 bp, Homo sapiens
tacatgtactgaaga

SEQ ID NO: 725724 - DNA, 15 bp, Homo sapiens
acatgtactgaagag

SEQ ID NO: 725725 - DNA, 15 bp, Homo sapiens
catgtactgaagagt

SEQ ID NO: 725726 - DNA, 15 bp, Homo sapiens
atgtactgaagagtg

SEQ ID NO: 725727 - DNA, 15 bp, Homo sapiens
tgtactgaagagtgc

SEQ ID NO: 725728 - DNA, 15 bp, Homo sapiens
gtactgaagagtgca

SEQ ID NO: 725729 - DNA, 15 bp, Homo sapiens
tactgaagagtgcag

SEQ ID NO: 725730 - DNA, 15 bp, Homo sapiens
actgaagagtgcaga

SEQ ID NO: 725731 - DNA, 15 bp, Homo sapiens
ctgaagagtgcagat

SEQ ID NO: 725732 - DNA, 15 bp, Homo sapiens
tgaagagtgcagata

SEQ ID NO: 725733 - DNA, 15 bp, Homo sapiens
gaagagtgcagatag

SEQ ID NO: 725734 - DNA, 15 bp, Homo sapiens
aagagtgcagatagt

SEQ ID NO: 725735 - DNA, 15 bp, Homo sapiens
agagtgcagatagtt

SEQ ID NO: 725736 - DNA, 15 bp, Homo sapiens
gagtgcagatagttc

SEQ ID NO: 725737 - DNA, 15 bp, Homo sapiens
agtgcagatagttct

SEQ ID NO: 725738 - DNA, 15 bp, Homo sapiens
gtgcagatagttctg

SEQ ID NO: 725739 - DNA, 15 bp, Homo sapiens
tgcagatagttctgt

SEQ ID NO: 725740 - DNA, 15 bp, Homo sapiens
gcagatagttctgtt

SEQ ID NO: 725741 - DNA, 15 bp, Homo sapiens
cagatagttctgttt

SEQ ID NO: 725742 - DNA, 15 bp, Homo sapiens
agatagttctgtttc

SEQ ID NO: 725743 - DNA, 15 bp, Homo sapiens
gatagttctgtttca

SEQ ID NO: 725744 - DNA, 15 bp, Homo sapiens
atagttctgtttcaa

SEQ ID NO: 725745 - DNA, 15 bp, Homo sapiens
tagttctgtttcaaa

SEQ ID NO: 725746 - DNA, 15 bp, Homo sapiens
agttctgtttcaaaa

SEQ ID NO: 725747 - DNA, 15 bp, Homo sapiens
gttctgtttcaaaaa

SEQ ID NO: 725748 - DNA, 15 bp, Homo sapiens
ttctgtttcaaaaaa

SEQ ID NO: 725749 - DNA, 15 bp, Homo sapiens
tctgtttcaaaaaaa

SEQ ID NO: 725750 - DNA, 15 bp, Homo sapiens
ctgtttcaaaaaaat

SEQ ID NO: 725751 - DNA, 15 bp, Homo sapiens
tgtttcaaaaaaatt

SEQ ID NO: 725752 - DNA, 15 bp, Homo sapiens
gtttcaaaaaaatta

SEQ ID NO: 725753 - DNA, 15 bp, Homo sapiens
tttcaaaaaaattac

SEQ ID NO: 725754 - DNA, 15 bp, Homo sapiens
ttcaaaaaaattact

SEQ ID NO: 725755 - DNA, 15 bp, Homo sapiens
tcaaaaaaattactt

SEQ ID NO: 725756 - DNA, 15 bp, Homo sapiens
caaaaaaattacttg

SEQ ID NO: 725757 - DNA, 15 bp, Homo sapiens
aaaaaaattacttga

SEQ ID NO: 725758 - DNA, 15 bp, Homo sapiens
aaaaaattacttgaa

SEQ ID NO: 725759 - DNA, 15 bp, Homo sapiens
aaaaattacttgaag

SEQ ID NO: 725760 - DNA, 15 bp, Homo sapiens
aaaattacttgaaga

SEQ ID NO: 725761 - DNA, 15 bp, Homo sapiens
aaattacttgaagat

SEQ ID NO: 725762 - DNA, 15 bp, Homo sapiens
aattacttgaagatt

SEQ ID NO: 725763 - DNA, 15 bp, Homo sapiens
attacttgaagatta

SEQ ID NO: 725764 - DNA, 15 bp, Homo sapiens
ttacttgaagattaa

SEQ ID NO: 725765 - DNA, 15 bp, Homo sapiens
tacttgaagattaaa

SEQ ID NO: 725766 - DNA, 15 bp, Homo sapiens
acttgaagattaaaa

SEQ ID NO: 725767 - DNA, 15 bp, Homo sapiens
cttgaagattaaaac

SEQ ID NO: 725768 - DNA, 15 bp, Homo sapiens
ttgaagattaaaaca

SEQ ID NO: 725769 - DNA, 15 bp, Homo sapiens
tgaagattaaaacag

SEQ ID NO: 725770 - DNA, 15 bp, Homo sapiens
gaagattaaaacagg

SEQ ID NO: 725771 - DNA, 15 bp, Homo sapiens
aagattaaaacaggg

SEQ ID NO: 725772 - DNA, 15 bp, Homo sapiens
agattaaaacagggc

SEQ ID NO: 725773 - DNA, 15 bp, Homo sapiens
gattaaaacagggct

SEQ ID NO: 725774 - DNA, 15 bp, Homo sapiens
attaaaacagggctt

SEQ ID NO: 725775 - DNA, 15 bp, Homo sapiens
ttaaaacagggcttt

SEQ ID NO: 725776 - DNA, 15 bp, Homo sapiens
taaaacagggctttg

SEQ ID NO: 725777 - DNA, 15 bp, Homo sapiens
aaaacagggctttgg

SEQ ID NO: 725778 - DNA, 15 bp, Homo sapiens
aaacagggctttgga

SEQ ID NO: 725779 - DNA, 15 bp, Homo sapiens
aacagggctttggaa

SEQ ID NO: 725780 - DNA, 15 bp, Homo sapiens
acagggctttggaat

SEQ ID NO: 725781 - DNA, 15 bp, Homo sapiens
cagggctttggaata

SEQ ID NO: 725782 - DNA, 15 bp, Homo sapiens
agggctttggaataa

SEQ ID NO: 725783 - DNA, 15 bp, Homo sapiens
gggctttggaataat

SEQ ID NO: 725784 - DNA, 15 bp, Homo sapiens
ggctttggaataata

SEQ ID NO: 725785 - DNA, 15 bp, Homo sapiens
gctttggaataatac

SEQ ID NO: 725786 - DNA, 15 bp, Homo sapiens
ctttggaataatact

SEQ ID NO: 725787 - DNA, 15 bp, Homo sapiens
tttggaataatacta

SEQ ID NO: 725788 - DNA, 15 bp, Homo sapiens
ttggaataatactat

SEQ ID NO: 725789 - DNA, 15 bp, Homo sapiens
tggaataatactata

SEQ ID NO: 725790 - DNA, 15 bp, Homo sapiens
ggaataatactataa

SEQ ID NO: 725791 - DNA, 15 bp, Homo sapiens
gaataatactataat

SEQ ID NO: 725792 - DNA, 15 bp, Homo sapiens
aataatactataatt

SEQ ID NO: 725793 - DNA, 15 bp, Homo sapiens
ataatactataatta

SEQ ID NO: 725794 - DNA, 15 bp, Homo sapiens
taatactataattag

SEQ ID NO: 725795 - DNA, 15 bp, Homo sapiens
aatactataattaga

SEQ ID NO: 725796 - DNA, 15 bp, Homo sapiens
atactataattagat

SEQ ID NO: 725797 - DNA, 15 bp, Homo sapiens
tactataattagatt

SEQ ID NO: 725798 - DNA, 15 bp, Homo sapiens
actataattagattc

SEQ ID NO: 725799 - DNA, 15 bp, Homo sapiens
ctataattagattcc

SEQ ID NO: 725800 - DNA, 15 bp, Homo sapiens
tataattagattcca

SEQ ID NO: 725801 - DNA, 15 bp, Homo sapiens
ataattagattccag

SEQ ID NO: 725802 - DNA, 15 bp, Homo sapiens
taattagattccagt

SEQ ID NO: 725803 - DNA, 15 bp, Homo sapiens
aattagattccagtc

SEQ ID NO: 725804 - DNA, 15 bp, Homo sapiens
attagattccagtct

SEQ ID NO: 725805 - DNA, 15 bp, Homo sapiens
ttagattccagtctc

SEQ ID NO: 725806 - DNA, 15 bp, Homo sapiens
tagattccagtctca

SEQ ID NO: 725807 - DNA, 15 bp, Homo sapiens
agattccagtctcat

SEQ ID NO: 725808 - DNA, 15 bp, Homo sapiens
gattccagtctcata

SEQ ID NO: 725809 - DNA, 15 bp, Homo sapiens
attccagtctcataa

SEQ ID NO: 725810 - DNA, 15 bp, Homo sapiens
ttccagtctcataaa

SEQ ID NO: 725811 - DNA, 15 bp, Homo sapiens
tccagtctcataaag

SEQ ID NO: 725812 - DNA, 15 bp, Homo sapiens
ccagtctcataaagt

SEQ ID NO: 725813 - DNA, 15 bp, Homo sapiens
cagtctcataaagta

SEQ ID NO: 725814 - DNA, 15 bp, Homo sapiens
agtctcataaagtat

SEQ ID NO: 725815 - DNA, 15 bp, Homo sapiens
gtctcataaagtata

SEQ ID NO: 725816 - DNA, 15 bp, Homo sapiens
tctcataaagtatac

SEQ ID NO: 725817 - DNA, 15 bp, Homo sapiens
ctcataaagtataca

SEQ ID NO: 725818 - DNA, 15 bp, Homo sapiens
tcataaagtatacaa

SEQ ID NO: 725819 - DNA, 15 bp, Homo sapiens
cataaagtatacaac

SEQ ID NO: 725820 - DNA, 15 bp, Homo sapiens
ataaagtatacaact

SEQ ID NO: 725821 - DNA, 15 bp, Homo sapiens
taaagtatacaacta

SEQ ID NO: 725822 - DNA, 15 bp, Homo sapiens
aaagtatacaactag

SEQ ID NO: 725823 - DNA, 15 bp, Homo sapiens
aagtatacaactagt

SEQ ID NO: 725824 - DNA, 15 bp, Homo sapiens
agtatacaactagtt

SEQ ID NO: 725825 - DNA, 15 bp, Homo sapiens
gtatacaactagtta

SEQ ID NO: 725826 - DNA, 15 bp, Homo sapiens
tatacaactagttag

SEQ ID NO: 725827 - DNA, 15 bp, Homo sapiens
atacaactagttaga

SEQ ID NO: 725828 - DNA, 15 bp, Homo sapiens
tacaactagttagaa

SEQ ID NO: 725829 - DNA, 15 bp, Homo sapiens
acaactagttagaaa

SEQ ID NO: 725830 - DNA, 15 bp, Homo sapiens
caactagttagaaat

SEQ ID NO: 725831 - DNA, 15 bp, Homo sapiens
aactagttagaaata

SEQ ID NO: 725832 - DNA, 15 bp, Homo sapiens
actagttagaaatac

SEQ ID NO: 725833 - DNA, 15 bp, Homo sapiens
ctagttagaaatact

SEQ ID NO: 725834 - DNA, 15 bp, Homo sapiens
tagttagaaatactt

SEQ ID NO: 725835 - DNA, 15 bp, Homo sapiens
agttagaaatactta

SEQ ID NO: 725836 - DNA, 15 bp, Homo sapiens
gttagaaatacttac

SEQ ID NO: 725837 - DNA, 15 bp, Homo sapiens
ttagaaatacttaca

SEQ ID NO: 725838 - DNA, 15 bp, Homo sapiens
tagaaatacttacac

SEQ ID NO: 725839 - DNA, 15 bp, Homo sapiens
agaaatacttacaca

SEQ ID NO: 725840 - DNA, 15 bp, Homo sapiens
gaaatacttacacag

SEQ ID NO: 725841 - DNA, 15 bp, Homo sapiens
aaatacttacacaga

SEQ ID NO: 725842 - DNA, 15 bp, Homo sapiens
aatacttacacagaa

SEQ ID NO: 725843 - DNA, 15 bp, Homo sapiens
atacttacacagaaa

SEQ ID NO: 725844 - DNA, 15 bp, Homo sapiens
tacttacacagaaac

SEQ ID NO: 725845 - DNA, 15 bp, Homo sapiens
acttacacagaaact

SEQ ID NO: 725846 - DNA, 15 bp, Homo sapiens
cttacacagaaactg

SEQ ID NO: 725847 - DNA, 15 bp, Homo sapiens
ttacacagaaactgt

SEQ ID NO: 725848 - DNA, 15 bp, Homo sapiens
tacacagaaactgtt

SEQ ID NO: 725849 - DNA, 15 bp, Homo sapiens
acacagaaactgttt

SEQ ID NO: 725850 - DNA, 15 bp, Homo sapiens
cacagaaactgtttc

SEQ ID NO: 725851 - DNA, 15 bp, Homo sapiens
acagaaactgtttct

SEQ ID NO: 725852 - DNA, 15 bp, Homo sapiens
cagaaactgtttctt

SEQ ID NO: 725853 - DNA, 15 bp, Homo sapiens
agaaactgtttcttc

SEQ ID NO: 725854 - DNA, 15 bp, Homo sapiens
gaaactgtttcttct

SEQ ID NO: 725855 - DNA, 15 bp, Homo sapiens
aaactgtttcttctt

SEQ ID NO: 725856 - DNA, 15 bp, Homo sapiens
aactgtttcttcttt

SEQ ID NO: 725857 - DNA, 15 bp, Homo sapiens
actgtttcttctttt

SEQ ID NO: 725858 - DNA, 15 bp, Homo sapiens
ctgtttcttcttttc

SEQ ID NO: 725859 - DNA, 15 bp, Homo sapiens
tgtttcttcttttcc

SEQ ID NO: 725860 - DNA, 15 bp, Homo sapiens
gtttcttcttttcca

SEQ ID NO: 725861 - DNA, 15 bp, Homo sapiens
tttcttcttttccaa

SEQ ID NO: 725862 - DNA, 15 bp, Homo sapiens
ttcttcttttccaat

SEQ ID NO: 725863 - DNA, 15 bp, Homo sapiens
tcttcttttccaatg

SEQ ID NO: 725864 - DNA, 15 bp, Homo sapiens
cttcttttccaatgg

SEQ ID NO: 725865 - DNA, 15 bp, Homo sapiens
ttcttttccaatggt

SEQ ID NO: 725866 - DNA, 15 bp, Homo sapiens
tcttttccaatggta

SEQ ID NO: 725867 - DNA, 15 bp, Homo sapiens
cttttccaatggtaa

SEQ ID NO: 725868 - DNA, 15 bp, Homo sapiens
ttttccaatggtaat

SEQ ID NO: 725869 - DNA, 15 bp, Homo sapiens
tttccaatggtaatt

SEQ ID NO: 725870 - DNA, 15 bp, Homo sapiens
ttccaatggtaattc

SEQ ID NO: 725871 - DNA, 15 bp, Homo sapiens
tccaatggtaattcg

SEQ ID NO: 725872 - DNA, 15 bp, Homo sapiens
ccaatggtaattcgt

SEQ ID NO: 725873 - DNA, 15 bp, Homo sapiens
caatggtaattcgtg

SEQ ID NO: 725874 - DNA, 15 bp, Homo sapiens
aatggtaattcgtga

SEQ ID NO: 725875 - DNA, 15 bp, Homo sapiens
atggtaattcgtgaa

SEQ ID NO: 725876 - DNA, 15 bp, Homo sapiens
tggtaattcgtgaaa

SEQ ID NO: 725877 - DNA, 15 bp, Homo sapiens
ggtaattcgtgaaat

SEQ ID NO: 725878 - DNA, 15 bp, Homo sapiens
gtaattcgtgaaata

SEQ ID NO: 725879 - DNA, 15 bp, Homo sapiens
taattcgtgaaatac

SEQ ID NO: 725880 - DNA, 15 bp, Homo sapiens
aattcgtgaaatact

SEQ ID NO: 725881 - DNA, 15 bp, Homo sapiens
attcgtgaaatactt

SEQ ID NO: 725882 - DNA, 15 bp, Homo sapiens
ttcgtgaaatacttc

SEQ ID NO: 725883 - DNA, 15 bp, Homo sapiens
tcgtgaaatacttcc

SEQ ID NO: 725884 - DNA, 15 bp, Homo sapiens
cgtgaaatacttccc

SEQ ID NO: 725885 - DNA, 15 bp, Homo sapiens
gtgaaatacttccca

SEQ ID NO: 725886 - DNA, 15 bp, Homo sapiens
tgaaatacttcccaa

SEQ ID NO: 725887 - DNA, 15 bp, Homo sapiens
gaaatacttcccaaa

SEQ ID NO: 725888 - DNA, 15 bp, Homo sapiens
aaatacttcccaaaa

SEQ ID NO: 725889 - DNA, 15 bp, Homo sapiens
aatacttcccaaaaa

SEQ ID NO: 725890 - DNA, 15 bp, Homo sapiens
atacttcccaaaaaa

SEQ ID NO: 725891 - DNA, 15 bp, Homo sapiens
tacttcccaaaaaat

SEQ ID NO: 725892 - DNA, 15 bp, Homo sapiens
acttcccaaaaaatt

SEQ ID NO: 725893 - DNA, 15 bp, Homo sapiens
cttcccaaaaaattt

SEQ ID NO: 725894 - DNA, 15 bp, Homo sapiens
ttcccaaaaaatttt

SEQ ID NO: 725895 - DNA, 15 bp, Homo sapiens
tcccaaaaaattttt

SEQ ID NO: 725896 - DNA, 15 bp, Homo sapiens
cccaaaaaattttta

SEQ ID NO: 725897 - DNA, 15 bp, Homo sapiens
ccaaaaaatttttat

SEQ ID NO: 725898 - DNA, 15 bp, Homo sapiens
caaaaaatttttatc

SEQ ID NO: 725899 - DNA, 15 bp, Homo sapiens
aaaaaatttttatcg

SEQ ID NO: 725900 - DNA, 15 bp, Homo sapiens
aaaaatttttatcgt

SEQ ID NO: 725901 - DNA, 15 bp, Homo sapiens
aaaatttttatcgta

SEQ ID NO: 725902 - DNA, 15 bp, Homo sapiens
aaatttttatcgtag

SEQ ID NO: 725903 - DNA, 15 bp, Homo sapiens
aatttttatcgtagg

SEQ ID NO: 725904 - DNA, 15 bp, Homo sapiens
atttttatcgtagga

SEQ ID NO: 725905 - DNA, 15 bp, Homo sapiens
tttttatcgtaggat

SEQ ID NO: 725906 - DNA, 15 bp, Homo sapiens
ttttatcgtaggatg

SEQ ID NO: 725907 - DNA, 15 bp, Homo sapiens
tttatcgtaggatgt

SEQ ID NO: 725908 - DNA, 15 bp, Homo sapiens
ttatcgtaggatgtt

SEQ ID NO: 725909 - DNA, 15 bp, Homo sapiens
tatcgtaggatgttc

SEQ ID NO: 725910 - DNA, 15 bp, Homo sapiens
atcgtaggatgttct

SEQ ID NO: 725911 - DNA, 15 bp, Homo sapiens
tcgtaggatgttctg

SEQ ID NO: 725912 - DNA, 15 bp, Homo sapiens
cgtaggatgttctgc

SEQ ID NO: 725913 - DNA, 15 bp, Homo sapiens
gtaggatgttctgcc

SEQ ID NO: 725914 - DNA, 15 bp, Homo sapiens
taggatgttctgccc

SEQ ID NO: 725915 - DNA, 15 bp, Homo sapiens
aggatgttctgccca

SEQ ID NO: 725916 - DNA, 15 bp, Homo sapiens
ggatgttctgcccaa

SEQ ID NO: 725917 - DNA, 15 bp, Homo sapiens
gatgttctgcccaat

SEQ ID NO: 725918 - DNA, 15 bp, Homo sapiens
atgttctgcccaata

SEQ ID NO: 725919 - DNA, 15 bp, Homo sapiens
tgttctgcccaatat

SEQ ID NO: 725920 - DNA, 15 bp, Homo sapiens
gttctgcccaatatt

SEQ ID NO: 725921 - DNA, 15 bp, Homo sapiens
ttctgcccaatattc

SEQ ID NO: 725922 - DNA, 15 bp, Homo sapiens
tctgcccaatattcc

SEQ ID NO: 725923 - DNA, 15 bp, Homo sapiens
ctgcccaatattccc

SEQ ID NO: 725924 - DNA, 15 bp, Homo sapiens
tgcccaatattcccc

SEQ ID NO: 725925 - DNA, 15 bp, Homo sapiens
gcccaatattcccct

SEQ ID NO: 725926 - DNA, 15 bp, Homo sapiens
cccaatattcccctt

SEQ ID NO: 725927 - DNA, 15 bp, Homo sapiens
ccaatattccccttt

SEQ ID NO: 725928 - DNA, 15 bp, Homo sapiens
caatattcccctttg

SEQ ID NO: 725929 - DNA, 15 bp, Homo sapiens
aatattcccctttgt

SEQ ID NO: 725930 - DNA, 15 bp, Homo sapiens
atattcccctttgta

SEQ ID NO: 725931 - DNA, 15 bp, Homo sapiens
tattcccctttgtat

SEQ ID NO: 725932 - DNA, 15 bp, Homo sapiens
attcccctttgtatt

SEQ ID NO: 725933 - DNA, 15 bp, Homo sapiens
ttcccctttgtattc

SEQ ID NO: 725934 - DNA, 15 bp, Homo sapiens
tcccctttgtattct

SEQ ID NO: 725935 - DNA, 15 bp, Homo sapiens
cccctttgtattctg

SEQ ID NO: 725936 - DNA, 15 bp, Homo sapiens
ccctttgtattctgt

SEQ ID NO: 725937 - DNA, 15 bp, Homo sapiens
cctttgtattctgta

SEQ ID NO: 725938 - DNA, 15 bp, Homo sapiens
ctttgtattctgtat

SEQ ID NO: 725939 - DNA, 15 bp, Homo sapiens
tttgtattctgtatt

SEQ ID NO: 725940 - DNA, 15 bp, Homo sapiens
ttgtattctgtattc

SEQ ID NO: 725941 - DNA, 15 bp, Homo sapiens
tgtattctgtattct

SEQ ID NO: 725942 - DNA, 15 bp, Homo sapiens
gtattctgtattcta

SEQ ID NO: 725943 - DNA, 15 bp, Homo sapiens
tattctgtattctaa

SEQ ID NO: 725944 - DNA, 15 bp, Homo sapiens
attctgtattctaaa

SEQ ID NO: 725945 - DNA, 15 bp, Homo sapiens
ttctgtattctaaaa

SEQ ID NO: 725946 - DNA, 15 bp, Homo sapiens
tctgtattctaaaaa

SEQ ID NO: 725947 - DNA, 15 bp, Homo sapiens
ctgtattctaaaaac

SEQ ID NO: 725948 - DNA, 15 bp, Homo sapiens
tgtattctaaaaaca

SEQ ID NO: 725949 - DNA, 15 bp, Homo sapiens
gtattctaaaaacaa

SEQ ID NO: 725950 - DNA, 15 bp, Homo sapiens
tattctaaaaacaac

SEQ ID NO: 725951 - DNA, 15 bp, Homo sapiens
attctaaaaacaaca

SEQ ID NO: 725952 - DNA, 15 bp, Homo sapiens
ttctaaaaacaacat

SEQ ID NO: 725953 - DNA, 15 bp, Homo sapiens
tctaaaaacaacata

SEQ ID NO: 725954 - DNA, 15 bp, Homo sapiens
ctaaaaacaacataa

SEQ ID NO: 725955 - DNA, 15 bp, Homo sapiens
taaaaacaacataat

SEQ ID NO: 725956 - DNA, 15 bp, Homo sapiens
aaaaacaacataatc

SEQ ID NO: 725957 - DNA, 15 bp, Homo sapiens
aaaacaacataatct

SEQ ID NO: 725958 - DNA, 15 bp, Homo sapiens
aaacaacataatctt

SEQ ID NO: 725959 - DNA, 15 bp, Homo sapiens
aacaacataatcttt

SEQ ID NO: 725960 - DNA, 15 bp, Homo sapiens
acaacataatctttt

SEQ ID NO: 725961 - DNA, 15 bp, Homo sapiens
caacataatctttta

SEQ ID NO: 725962 - DNA, 15 bp, Homo sapiens
aacataatcttttat

SEQ ID NO: 725963 - DNA, 15 bp, Homo sapiens
acataatcttttatt

SEQ ID NO: 725964 - DNA, 15 bp, Homo sapiens
cataatcttttatta

SEQ ID NO: 725965 - DNA, 15 bp, Homo sapiens
ataatcttttattag

SEQ ID NO: 725966 - DNA, 15 bp, Homo sapiens
taatcttttattagt

SEQ ID NO: 725967 - DNA, 15 bp, Homo sapiens
aatcttttattagta

SEQ ID NO: 725968 - DNA, 15 bp, Homo sapiens
atcttttattagtat

SEQ ID NO: 725969 - DNA, 15 bp, Homo sapiens
tcttttattagtatt

SEQ ID NO: 725970 - DNA, 15 bp, Homo sapiens
cttttattagtatta

SEQ ID NO: 725971 - DNA, 15 bp, Homo sapiens
ttttattagtattaa

SEQ ID NO: 725972 - DNA, 15 bp, Homo sapiens
tttattagtattaag

SEQ ID NO: 725973 - DNA, 15 bp, Homo sapiens
ttattagtattaagg

SEQ ID NO: 725974 - DNA, 15 bp, Homo sapiens
tattagtattaaggg

SEQ ID NO: 725975 - DNA, 15 bp, Homo sapiens
attagtattaaggga

SEQ ID NO: 725976 - DNA, 15 bp, Homo sapiens
ttagtattaagggac

SEQ ID NO: 725977 - DNA, 15 bp, Homo sapiens
tagtattaagggaca

SEQ ID NO: 725978 - DNA, 15 bp, Homo sapiens
agtattaagggacac

SEQ ID NO: 725979 - DNA, 15 bp, Homo sapiens
gtattaagggacaca

SEQ ID NO: 725980 - DNA, 15 bp, Homo sapiens
tattaagggacacac

SEQ ID NO: 725981 - DNA, 15 bp, Homo sapiens
attaagggacacact

SEQ ID NO: 725982 - DNA, 15 bp, Homo sapiens
ttaagggacacactg

SEQ ID NO: 725983 - DNA, 15 bp, Homo sapiens
taagggacacactgg

SEQ ID NO: 725984 - DNA, 15 bp, Homo sapiens
aagggacacactggc

SEQ ID NO: 725985 - DNA, 15 bp, Homo sapiens
agggacacactggct

SEQ ID NO: 725986 - DNA, 15 bp, Homo sapiens
gggacacactggcta

SEQ ID NO: 725987 - DNA, 15 bp, Homo sapiens
ggacacactggctaa

SEQ ID NO: 725988 - DNA, 15 bp, Homo sapiens
gacacactggctaat

SEQ ID NO: 725989 - DNA, 15 bp, Homo sapiens
acacactggctaata

SEQ ID NO: 725990 - DNA, 15 bp, Homo sapiens
cacactggctaatat

SEQ ID NO: 725991 - DNA, 15 bp, Homo sapiens
acactggctaatata

SEQ ID NO: 725992 - DNA, 15 bp, Homo sapiens
cactggctaatatat

SEQ ID NO: 725993 - DNA, 15 bp, Homo sapiens
actggctaatatatt

SEQ ID NO: 725994 - DNA, 15 bp, Homo sapiens
ctggctaatatatta

SEQ ID NO: 725995 - DNA, 15 bp, Homo sapiens
tggctaatatattag

SEQ ID NO: 725996 - DNA, 15 bp, Homo sapiens
ggctaatatattagc

SEQ ID NO: 725997 - DNA, 15 bp, Homo sapiens
gctaatatattagca

SEQ ID NO: 725998 - DNA, 15 bp, Homo sapiens
ctaatatattagcac

SEQ ID NO: 725999 - DNA, 15 bp, Homo sapiens
taatatattagcaca

SEQ ID NO: 726000 - DNA, 15 bp, Homo sapiens
aatatattagcacat

SEQ ID NO: 726001 - DNA, 15 bp, Homo sapiens
atatattagcacata

SEQ ID NO: 726002 - DNA, 15 bp, Homo sapiens
tatattagcacataa

SEQ ID NO: 726003 - DNA, 15 bp, Homo sapiens
atattagcacataaa

SEQ ID NO: 726004 - DNA, 15 bp, Homo sapiens
tattagcacataaag

SEQ ID NO: 726005 - DNA, 15 bp, Homo sapiens
attagcacataaagc

SEQ ID NO: 726006 - DNA, 15 bp, Homo sapiens
ttagcacataaagct

SEQ ID NO: 726007 - DNA, 15 bp, Homo sapiens
tagcacataaagcta

SEQ ID NO: 726008 - DNA, 15 bp, Homo sapiens
agcacataaagctaa

SEQ ID NO: 726009 - DNA, 15 bp, Homo sapiens
gcacataaagctaac

SEQ ID NO: 726010 - DNA, 15 bp, Homo sapiens
cacataaagctaaca

SEQ ID NO: 726011 - DNA, 15 bp, Homo sapiens
acataaagctaacat

SEQ ID NO: 726012 - DNA, 15 bp, Homo sapiens
cataaagctaacatg

SEQ ID NO: 726013 - DNA, 15 bp, Homo sapiens
ataaagctaacatgg

SEQ ID NO: 726014 - DNA, 15 bp, Homo sapiens
taaagctaacatggt

SEQ ID NO: 726015 - DNA, 15 bp, Homo sapiens
aaagctaacatggtc

SEQ ID NO: 726016 - DNA, 15 bp, Homo sapiens
aagctaacatggtcc

SEQ ID NO: 726017 - DNA, 15 bp, Homo sapiens
agctaacatggtcca

SEQ ID NO: 726018 - DNA, 15 bp, Homo sapiens
gctaacatggtccag

SEQ ID NO: 726019 - DNA, 15 bp, Homo sapiens
ctaacatggtccagt

SEQ ID NO: 726020 - DNA, 15 bp, Homo sapiens
taacatggtccagta

SEQ ID NO: 726021 - DNA, 15 bp, Homo sapiens
aacatggtccagtag

SEQ ID NO: 726022 - DNA, 15 bp, Homo sapiens
acatggtccagtagt

SEQ ID NO: 726023 - DNA, 15 bp, Homo sapiens
catggtccagtagtt

SEQ ID NO: 726024 - DNA, 15 bp, Homo sapiens
atggtccagtagttt

SEQ ID NO: 726025 - DNA, 15 bp, Homo sapiens
tggtccagtagtttg

SEQ ID NO: 726026 - DNA, 15 bp, Homo sapiens
ggtccagtagtttgc

SEQ ID NO: 726027 - DNA, 15 bp, Homo sapiens
gtccagtagtttgca

SEQ ID NO: 726028 - DNA, 15 bp, Homo sapiens
tccagtagtttgcaa

SEQ ID NO: 726029 - DNA, 15 bp, Homo sapiens
ccagtagtttgcaac

SEQ ID NO: 726030 - DNA, 15 bp, Homo sapiens
cagtagtttgcaact

SEQ ID NO: 726031 - DNA, 15 bp, Homo sapiens
agtagtttgcaactt

SEQ ID NO: 726032 - DNA, 15 bp, Homo sapiens
gtagtttgcaacttg

SEQ ID NO: 726033 - DNA, 15 bp, Homo sapiens
tagtttgcaacttgt

SEQ ID NO: 726034 - DNA, 15 bp, Homo sapiens
agtttgcaacttgtg

SEQ ID NO: 726035 - DNA, 15 bp, Homo sapiens
gtttgcaacttgtgc

SEQ ID NO: 726036 - DNA, 15 bp, Homo sapiens
tttgcaacttgtgca

SEQ ID NO: 726037 - DNA, 15 bp, Homo sapiens
ttgcaacttgtgcaa

SEQ ID NO: 726038 - DNA, 15 bp, Homo sapiens
tgcaacttgtgcaat

SEQ ID NO: 726039 - DNA, 15 bp, Homo sapiens
gcaacttgtgcaatt

SEQ ID NO: 726040 - DNA, 15 bp, Homo sapiens
caacttgtgcaattc

SEQ ID NO: 726041 - DNA, 15 bp, Homo sapiens
aacttgtgcaattca

SEQ ID NO: 726042 - DNA, 15 bp, Homo sapiens
acttgtgcaattcaa

SEQ ID NO: 726043 - DNA, 15 bp, Homo sapiens
cttgtgcaattcaat

SEQ ID NO: 726044 - DNA, 15 bp, Homo sapiens
ttgtgcaattcaatg

SEQ ID NO: 726045 - DNA, 15 bp, Homo sapiens
tgtgcaattcaatgg

SEQ ID NO: 726046 - DNA, 15 bp, Homo sapiens
gtgcaattcaatgga

SEQ ID NO: 726047 - DNA, 15 bp, Homo sapiens
tgcaattcaatggat

SEQ ID NO: 726048 - DNA, 15 bp, Homo sapiens
gcaattcaatggatt

SEQ ID NO: 726049 - DNA, 15 bp, Homo sapiens
caattcaatggattg

SEQ ID NO: 726050 - DNA, 15 bp, Homo sapiens
aattcaatggattgc

SEQ ID NO: 726051 - DNA, 15 bp, Homo sapiens
attcaatggattgcc

SEQ ID NO: 726052 - DNA, 15 bp, Homo sapiens
ttcaatggattgccc

SEQ ID NO: 726053 - DNA, 15 bp, Homo sapiens
tcaatggattgccca

SEQ ID NO: 726054 - DNA, 15 bp, Homo sapiens
caatggattgcccac

SEQ ID NO: 726055 - DNA, 15 bp, Homo sapiens
aatggattgcccact

SEQ ID NO: 726056 - DNA, 15 bp, Homo sapiens
atggattgcccactg

SEQ ID NO: 726057 - DNA, 15 bp, Homo sapiens
tggattgcccactgt

SEQ ID NO: 726058 - DNA, 15 bp, Homo sapiens
ggattgcccactgtt

SEQ ID NO: 726059 - DNA, 15 bp, Homo sapiens
gattgcccactgttt

SEQ ID NO: 726060 - DNA, 15 bp, Homo sapiens
attgcccactgtttt

SEQ ID NO: 726061 - DNA, 15 bp, Homo sapiens
ttgcccactgttttc

SEQ ID NO: 726062 - DNA, 15 bp, Homo sapiens
tgcccactgttttct

SEQ ID NO: 726063 - DNA, 15 bp, Homo sapiens
gcccactgttttctg

SEQ ID NO: 726064 - DNA, 15 bp, Homo sapiens
cccactgttttctgg

SEQ ID NO: 726065 - DNA, 15 bp, Homo sapiens
ccactgttttctgga

SEQ ID NO: 726066 - DNA, 15 bp, Homo sapiens
cactgttttctggac

SEQ ID NO: 726067 - DNA, 15 bp, Homo sapiens
actgttttctggaca

SEQ ID NO: 726068 - DNA, 15 bp, Homo sapiens
ctgttttctggacat

SEQ ID NO: 726069 - DNA, 15 bp, Homo sapiens
tgttttctggacatt

SEQ ID NO: 726070 - DNA, 15 bp, Homo sapiens
gttttctggacattt

SEQ ID NO: 726071 - DNA, 15 bp, Homo sapiens
ttttctggacattta

SEQ ID NO: 726072 - DNA, 15 bp, Homo sapiens
tttctggacatttac

SEQ ID NO: 726073 - DNA, 15 bp, Homo sapiens
ttctggacatttaca

SEQ ID NO: 726074 - DNA, 15 bp, Homo sapiens
tctggacatttacaa

SEQ ID NO: 726075 - DNA, 15 bp, Homo sapiens
ctggacatttacaat

SEQ ID NO: 726076 - DNA, 15 bp, Homo sapiens
tggacatttacaatt

SEQ ID NO: 726077 - DNA, 15 bp, Homo sapiens
ggacatttacaattt

SEQ ID NO: 726078 - DNA, 15 bp, Homo sapiens
gacatttacaatttg

SEQ ID NO: 726079 - DNA, 15 bp, Homo sapiens
acatttacaatttga

SEQ ID NO: 726080 - DNA, 15 bp, Homo sapiens
catttacaatttgaa

SEQ ID NO: 726081 - DNA, 15 bp, Homo sapiens
atttacaatttgaag

SEQ ID NO: 726082 - DNA, 15 bp, Homo sapiens
tttacaatttgaagc

SEQ ID NO: 726083 - DNA, 15 bp, Homo sapiens
ttacaatttgaagct

SEQ ID NO: 726084 - DNA, 15 bp, Homo sapiens
tacaatttgaagcta

SEQ ID NO: 726085 - DNA, 15 bp, Homo sapiens
acaatttgaagctat

SEQ ID NO: 726086 - DNA, 15 bp, Homo sapiens
caatttgaagctatt

SEQ ID NO: 726087 - DNA, 15 bp, Homo sapiens
aatttgaagctatta

SEQ ID NO: 726088 - DNA, 15 bp, Homo sapiens
atttgaagctattag

SEQ ID NO: 726089 - DNA, 15 bp, Homo sapiens
tttgaagctattagt

SEQ ID NO: 726090 - DNA, 15 bp, Homo sapiens
ttgaagctattagtt

SEQ ID NO: 726091 - DNA, 15 bp, Homo sapiens
tgaagctattagttc

SEQ ID NO: 726092 - DNA, 15 bp, Homo sapiens
gaagctattagttcc

SEQ ID NO: 726093 - DNA, 15 bp, Homo sapiens
aagctattagttcca

SEQ ID NO: 726094 - DNA, 15 bp, Homo sapiens
agctattagttccag

SEQ ID NO: 726095 - DNA, 15 bp, Homo sapiens
gctattagttccagg

SEQ ID NO: 726096 - DNA, 15 bp, Homo sapiens
ctattagttccagga

SEQ ID NO: 726097 - DNA, 15 bp, Homo sapiens
tattagttccaggag

SEQ ID NO: 726098 - DNA, 15 bp, Homo sapiens
attagttccaggaga

SEQ ID NO: 726099 - DNA, 15 bp, Homo sapiens
ttagttccaggagaa

SEQ ID NO: 726100 - DNA, 15 bp, Homo sapiens
tagttccaggagaaa

SEQ ID NO: 726101 - DNA, 15 bp, Homo sapiens
agttccaggagaaaa

SEQ ID NO: 726102 - DNA, 15 bp, Homo sapiens
gttccaggagaaaaa

SEQ ID NO: 726103 - DNA, 15 bp, Homo sapiens
ttccaggagaaaaag

SEQ ID NO: 726104 - DNA, 15 bp, Homo sapiens
tccaggagaaaaaga

SEQ ID NO: 726105 - DNA, 15 bp, Homo sapiens
ccaggagaaaaagaa

SEQ ID NO: 726106 - DNA, 15 bp, Homo sapiens
caggagaaaaagaag

SEQ ID NO: 726107 - DNA, 15 bp, Homo sapiens
aggagaaaaagaaga

SEQ ID NO: 726108 - DNA, 15 bp, Homo sapiens
ggagaaaaagaagaa

SEQ ID NO: 726109 - DNA, 15 bp, Homo sapiens
gagaaaaagaagaaa

SEQ ID NO: 726110 - DNA, 15 bp, Homo sapiens
agaaaaagaagaaat

SEQ ID NO: 726111 - DNA, 15 bp, Homo sapiens
gaaaaagaagaaata

SEQ ID NO: 726112 - DNA, 15 bp, Homo sapiens
aaaaagaagaaatac

SEQ ID NO: 726113 - DNA, 15 bp, Homo sapiens
aaaagaagaaatacg

SEQ ID NO: 726114 - DNA, 15 bp, Homo sapiens
aaagaagaaatacgt

SEQ ID NO: 726115 - DNA, 15 bp, Homo sapiens
aagaagaaatacgta

SEQ ID NO: 726116 - DNA, 15 bp, Homo sapiens
agaagaaatacgtaa

SEQ ID NO: 726117 - DNA, 15 bp, Homo sapiens
gaagaaatacgtaag

SEQ ID NO: 726118 - DNA, 15 bp, Homo sapiens
aagaaatacgtaaga

SEQ ID NO: 726119 - DNA, 15 bp, Homo sapiens
agaaatacgtaagaa

SEQ ID NO: 726120 - DNA, 15 bp, Homo sapiens
gaaatacgtaagaat

SEQ ID NO: 726121 - DNA, 15 bp, Homo sapiens
aaatacgtaagaatc

SEQ ID NO: 726122 - DNA, 15 bp, Homo sapiens
aatacgtaagaatca

SEQ ID NO: 726123 - DNA, 15 bp, Homo sapiens
atacgtaagaatcac

SEQ ID NO: 726124 - DNA, 15 bp, Homo sapiens
tacgtaagaatcacc

SEQ ID NO: 726125 - DNA, 15 bp, Homo sapiens
acgtaagaatcacca

SEQ ID NO: 726126 - DNA, 15 bp, Homo sapiens
cgtaagaatcaccag

SEQ ID NO: 726127 - DNA, 15 bp, Homo sapiens
gtaagaatcaccaga

SEQ ID NO: 726128 - DNA, 15 bp, Homo sapiens
taagaatcaccagaa

SEQ ID NO: 726129 - DNA, 15 bp, Homo sapiens
aagaatcaccagaaa

SEQ ID NO: 726130 - DNA, 15 bp, Homo sapiens
agaatcaccagaaat

SEQ ID NO: 726131 - DNA, 15 bp, Homo sapiens
gaatcaccagaaatc

SEQ ID NO: 726132 - DNA, 15 bp, Homo sapiens
aatcaccagaaatct

SEQ ID NO: 726133 - DNA, 15 bp, Homo sapiens
atcaccagaaatctt

SEQ ID NO: 726134 - DNA, 15 bp, Homo sapiens
tcaccagaaatcttt

SEQ ID NO: 726135 - DNA, 15 bp, Homo sapiens
caccagaaatctttc

SEQ ID NO: 726136 - DNA, 15 bp, Homo sapiens
accagaaatctttcc

SEQ ID NO: 726137 - DNA, 15 bp, Homo sapiens
ccagaaatctttcct

SEQ ID NO: 726138 - DNA, 15 bp, Homo sapiens
cagaaatctttccta

SEQ ID NO: 726139 - DNA, 15 bp, Homo sapiens
agaaatctttcctag

SEQ ID NO: 726140 - DNA, 15 bp, Homo sapiens
gaaatctttcctagc

SEQ ID NO: 726141 - DNA, 15 bp, Homo sapiens
aaatctttcctagca

SEQ ID NO: 726142 - DNA, 15 bp, Homo sapiens
aatctttcctagcac

SEQ ID NO: 726143 - DNA, 15 bp, Homo sapiens
atctttcctagcact

SEQ ID NO: 726144 - DNA, 15 bp, Homo sapiens
tctttcctagcactt

SEQ ID NO: 726145 - DNA, 15 bp, Homo sapiens
ctttcctagcacttc

SEQ ID NO: 726146 - DNA, 15 bp, Homo sapiens
tttcctagcacttca

SEQ ID NO: 726147 - DNA, 15 bp, Homo sapiens
ttcctagcacttcaa

SEQ ID NO: 726148 - DNA, 15 bp, Homo sapiens
tcctagcacttcaaa

SEQ ID NO: 726149 - DNA, 15 bp, Homo sapiens
cctagcacttcaaag

SEQ ID NO: 726150 - DNA, 15 bp, Homo sapiens
ctagcacttcaaaga

SEQ ID NO: 726151 - DNA, 15 bp, Homo sapiens
tagcacttcaaagaa

SEQ ID NO: 726152 - DNA, 15 bp, Homo sapiens
agcacttcaaagaac

SEQ ID NO: 726153 - DNA, 15 bp, Homo sapiens
gcacttcaaagaaca

SEQ ID NO: 726154 - DNA, 15 bp, Homo sapiens
cacttcaaagaacat

SEQ ID NO: 726155 - DNA, 15 bp, Homo sapiens
acttcaaagaacatg

SEQ ID NO: 726156 - DNA, 15 bp, Homo sapiens
cttcaaagaacatga

SEQ ID NO: 726157 - DNA, 15 bp, Homo sapiens
ttcaaagaacatgat

SEQ ID NO: 726158 - DNA, 15 bp, Homo sapiens
tcaaagaacatgata

SEQ ID NO: 726159 - DNA, 15 bp, Homo sapiens
caaagaacatgatag

SEQ ID NO: 726160 - DNA, 15 bp, Homo sapiens
aaagaacatgatagg

SEQ ID NO: 726161 - DNA, 15 bp, Homo sapiens
aagaacatgatagga

SEQ ID NO: 726162 - DNA, 15 bp, Homo sapiens
agaacatgataggat

SEQ ID NO: 726163 - DNA, 15 bp, Homo sapiens
gaacatgataggatc

SEQ ID NO: 726164 - DNA, 15 bp, Homo sapiens
aacatgataggatca

SEQ ID NO: 726165 - DNA, 15 bp, Homo sapiens
acatgataggatcat

SEQ ID NO: 726166 - DNA, 15 bp, Homo sapiens
catgataggatcata

SEQ ID NO: 726167 - DNA, 15 bp, Homo sapiens
atgataggatcatac

SEQ ID NO: 726168 - DNA, 15 bp, Homo sapiens
tgataggatcatact

SEQ ID NO: 726169 - DNA, 15 bp, Homo sapiens
gataggatcatacta

SEQ ID NO: 726170 - DNA, 15 bp, Homo sapiens
ataggatcatactat

SEQ ID NO: 726171 - DNA, 15 bp, Homo sapiens
taggatcatactatc

SEQ ID NO: 726172 - DNA, 15 bp, Homo sapiens
aggatcatactatca

SEQ ID NO: 726173 - DNA, 15 bp, Homo sapiens
ggatcatactatcat

SEQ ID NO: 726174 - DNA, 15 bp, Homo sapiens
gatcatactatcatc

SEQ ID NO: 726175 - DNA, 15 bp, Homo sapiens
atcatactatcatct

SEQ ID NO: 726176 - DNA, 15 bp, Homo sapiens
tcatactatcatctt

SEQ ID NO: 726177 - DNA, 15 bp, Homo sapiens
catactatcatcttc

SEQ ID NO: 726178 - DNA, 15 bp, Homo sapiens
atactatcatcttca

SEQ ID NO: 726179 - DNA, 15 bp, Homo sapiens
tactatcatcttcaa

SEQ ID NO: 726180 - DNA, 15 bp, Homo sapiens
actatcatcttcaaa

SEQ ID NO: 726181 - DNA, 15 bp, Homo sapiens
ctatcatcttcaaaa

SEQ ID NO: 726182 - DNA, 15 bp, Homo sapiens
tatcatcttcaaaag

SEQ ID NO: 726183 - DNA, 15 bp, Homo sapiens
atcatcttcaaaagt

SEQ ID NO: 726184 - DNA, 15 bp, Homo sapiens
tcatcttcaaaagta

SEQ ID NO: 726185 - DNA, 15 bp, Homo sapiens
catcttcaaaagtaa

SEQ ID NO: 726186 - DNA, 15 bp, Homo sapiens
atcttcaaaagtaaa

SEQ ID NO: 726187 - DNA, 15 bp, Homo sapiens
tcttcaaaagtaaat

SEQ ID NO: 726188 - DNA, 15 bp, Homo sapiens
cttcaaaagtaaata

SEQ ID NO: 726189 - DNA, 15 bp, Homo sapiens
ttcaaaagtaaataa

SEQ ID NO: 726190 - DNA, 15 bp, Homo sapiens
tcaaaagtaaataaa

SEQ ID NO: 726191 - DNA, 15 bp, Homo sapiens
caaaagtaaataaag

SEQ ID NO: 726192 - DNA, 15 bp, Homo sapiens
aaaagtaaataaaga

SEQ ID NO: 726193 - DNA, 15 bp, Homo sapiens
aaagtaaataaagag

SEQ ID NO: 726194 - DNA, 15 bp, Homo sapiens
aagtaaataaagaga

SEQ ID NO: 726195 - DNA, 15 bp, Homo sapiens
agtaaataaagagaa

SEQ ID NO: 726196 - DNA, 15 bp, Homo sapiens
gtaaataaagagaaa

SEQ ID NO: 726197 - DNA, 15 bp, Homo sapiens
taaataaagagaaac

SEQ ID NO: 726198 - DNA, 15 bp, Homo sapiens
aaataaagagaaact

SEQ ID NO: 726199 - DNA, 15 bp, Homo sapiens
aataaagagaaacta

SEQ ID NO: 726200 - DNA, 15 bp, Homo sapiens
ataaagagaaactag

SEQ ID NO: 726201 - DNA, 15 bp, Homo sapiens
taaagagaaactaga

SEQ ID NO: 726202 - DNA, 15 bp, Homo sapiens
aaagagaaactagat

SEQ ID NO: 726203 - DNA, 15 bp, Homo sapiens
aagagaaactagata

SEQ ID NO: 726204 - DNA, 15 bp, Homo sapiens
agagaaactagataa

SEQ ID NO: 726205 - DNA, 15 bp, Homo sapiens
gagaaactagataaa

SEQ ID NO: 726206 - DNA, 15 bp, Homo sapiens
agaaactagataaaa

SEQ ID NO: 726207 - DNA, 15 bp, Homo sapiens
gaaactagataaaat

SEQ ID NO: 726208 - DNA, 15 bp, Homo sapiens
aaactagataaaata

SEQ ID NO: 726209 - DNA, 15 bp, Homo sapiens
aactagataaaataa

SEQ ID NO: 726210 - DNA, 15 bp, Homo sapiens
actagataaaataat

SEQ ID NO: 726211 - DNA, 15 bp, Homo sapiens
ctagataaaataatg

SEQ ID NO: 726212 - DNA, 15 bp, Homo sapiens
tagataaaataatgt

SEQ ID NO: 726213 - DNA, 15 bp, Homo sapiens
agataaaataatgtt

SEQ ID NO: 726214 - DNA, 15 bp, Homo sapiens
gataaaataatgtta

SEQ ID NO: 726215 - DNA, 15 bp, Homo sapiens
ataaaataatgttat

SEQ ID NO: 726216 - DNA, 15 bp, Homo sapiens
taaaataatgttata

SEQ ID NO: 726217 - DNA, 15 bp, Homo sapiens
aaaataatgttatag

SEQ ID NO: 726218 - DNA, 15 bp, Homo sapiens
aaataatgttatagg

SEQ ID NO: 726219 - DNA, 15 bp, Homo sapiens
aataatgttatagga

SEQ ID NO: 726220 - DNA, 15 bp, Homo sapiens
ataatgttataggac

SEQ ID NO: 726221 - DNA, 15 bp, Homo sapiens
taatgttataggacc

SEQ ID NO: 726222 - DNA, 15 bp, Homo sapiens
aatgttataggacca

SEQ ID NO: 726223 - DNA, 15 bp, Homo sapiens
atgttataggaccat

SEQ ID NO: 726224 - DNA, 15 bp, Homo sapiens
tgttataggaccatc

SEQ ID NO: 726225 - DNA, 15 bp, Homo sapiens
gttataggaccatca

SEQ ID NO: 726226 - DNA, 15 bp, Homo sapiens
ttataggaccatcaa

SEQ ID NO: 726227 - DNA, 15 bp, Homo sapiens
tataggaccatcaaa

SEQ ID NO: 726228 - DNA, 15 bp, Homo sapiens
ataggaccatcaaaa

SEQ ID NO: 726229 - DNA, 15 bp, Homo sapiens
taggaccatcaaaag

SEQ ID NO: 726230 - DNA, 15 bp, Homo sapiens
aggaccatcaaaagt

SEQ ID NO: 726231 - DNA, 15 bp, Homo sapiens
ggaccatcaaaagtc

SEQ ID NO: 726232 - DNA, 15 bp, Homo sapiens
gaccatcaaaagtct

SEQ ID NO: 726233 - DNA, 15 bp, Homo sapiens
accatcaaaagtctg

SEQ ID NO: 726234 - DNA, 15 bp, Homo sapiens
ccatcaaaagtctga

SEQ ID NO: 726235 - DNA, 15 bp, Homo sapiens
catcaaaagtctgac

SEQ ID NO: 726236 - DNA, 15 bp, Homo sapiens
atcaaaagtctgaca

SEQ ID NO: 726237 - DNA, 15 bp, Homo sapiens
tcaaaagtctgacat

SEQ ID NO: 726238 - DNA, 15 bp, Homo sapiens
caaaagtctgacatg

SEQ ID NO: 726239 - DNA, 15 bp, Homo sapiens
aaaagtctgacatgg

SEQ ID NO: 726240 - DNA, 15 bp, Homo sapiens
aaagtctgacatgga

SEQ ID NO: 726241 - DNA, 15 bp, Homo sapiens
aagtctgacatggaa

SEQ ID NO: 726242 - DNA, 15 bp, Homo sapiens
agtctgacatggaat

SEQ ID NO: 726243 - DNA, 15 bp, Homo sapiens
gtctgacatggaatt

SEQ ID NO: 726244 - DNA, 15 bp, Homo sapiens
tctgacatggaatta

SEQ ID NO: 726245 - DNA, 15 bp, Homo sapiens
ctgacatggaattat

SEQ ID NO: 726246 - DNA, 15 bp, Homo sapiens
tgacatggaattatc

SEQ ID NO: 726247 - DNA, 15 bp, Homo sapiens
gacatggaattatct

SEQ ID NO: 726248 - DNA, 15 bp, Homo sapiens
acatggaattatctg

SEQ ID NO: 726249 - DNA, 15 bp, Homo sapiens
catggaattatctgt

SEQ ID NO: 726250 - DNA, 15 bp, Homo sapiens
atggaattatctgtg

SEQ ID NO: 726251 - DNA, 15 bp, Homo sapiens
tggaattatctgtga

SEQ ID NO: 726252 - DNA, 15 bp, Homo sapiens
ggaattatctgtgat

SEQ ID NO: 726253 - DNA, 15 bp, Homo sapiens
gaattatctgtgata

SEQ ID NO: 726254 - DNA, 15 bp, Homo sapiens
aattatctgtgataa

SEQ ID NO: 726255 - DNA, 15 bp, Homo sapiens
attatctgtgataat

SEQ ID NO: 726256 - DNA, 15 bp, Homo sapiens
ttatctgtgataatc

SEQ ID NO: 726257 - DNA, 15 bp, Homo sapiens
tatctgtgataatca

SEQ ID NO: 726258 - DNA, 15 bp, Homo sapiens
atctgtgataatcag

SEQ ID NO: 726259 - DNA, 15 bp, Homo sapiens
tctgtgataatcaga

SEQ ID NO: 726260 - DNA, 15 bp, Homo sapiens
ctgtgataatcagaa

SEQ ID NO: 726261 - DNA, 15 bp, Homo sapiens
tgtgataatcagaaa

SEQ ID NO: 726262 - DNA, 15 bp, Homo sapiens
gtgataatcagaaaa

SEQ ID NO: 726263 - DNA, 15 bp, Homo sapiens
tgataatcagaaaat

SEQ ID NO: 726264 - DNA, 15 bp, Homo sapiens
gataatcagaaaatt

SEQ ID NO: 726265 - DNA, 15 bp, Homo sapiens
ataatcagaaaattc

SEQ ID NO: 726266 - DNA, 15 bp, Homo sapiens
taatcagaaaattcc

SEQ ID NO: 726267 - DNA, 15 bp, Homo sapiens
aatcagaaaattccc

SEQ ID NO: 726268 - DNA, 15 bp, Homo sapiens
atcagaaaattccct

SEQ ID NO: 726269 - DNA, 15 bp, Homo sapiens
tcagaaaattccctt

SEQ ID NO: 726270 - DNA, 15 bp, Homo sapiens
cagaaaattcccttt

SEQ ID NO: 726271 - DNA, 15 bp, Homo sapiens
agaaaattccctttc

SEQ ID NO: 726272 - DNA, 15 bp, Homo sapiens
gaaaattccctttct

SEQ ID NO: 726273 - DNA, 15 bp, Homo sapiens
aaaattccctttctc

SEQ ID NO: 726274 - DNA, 15 bp, Homo sapiens
aaattccctttctct

SEQ ID NO: 726275 - DNA, 15 bp, Homo sapiens
aattccctttctctg

SEQ ID NO: 726276 - DNA, 15 bp, Homo sapiens
attccctttctctgt

SEQ ID NO: 726277 - DNA, 15 bp, Homo sapiens
ttccctttctctgta

SEQ ID NO: 726278 - DNA, 15 bp, Homo sapiens
tccctttctctgtat

SEQ ID NO: 726279 - DNA, 15 bp, Homo sapiens
ccctttctctgtatt

SEQ ID NO: 726280 - DNA, 15 bp, Homo sapiens
cctttctctgtattc

SEQ ID NO: 726281 - DNA, 15 bp, Homo sapiens
ctttctctgtattca

SEQ ID NO: 726282 - DNA, 15 bp, Homo sapiens
tttctctgtattcat

SEQ ID NO: 726283 - DNA, 15 bp, Homo sapiens
ttctctgtattcatg

SEQ ID NO: 726284 - DNA, 15 bp, Homo sapiens
tctctgtattcatga

SEQ ID NO: 726285 - DNA, 15 bp, Homo sapiens
ctctgtattcatgaa

SEQ ID NO: 726286 - DNA, 15 bp, Homo sapiens
tctgtattcatgaac

SEQ ID NO: 726287 - DNA, 15 bp, Homo sapiens
ctgtattcatgaaca

SEQ ID NO: 726288 - DNA, 15 bp, Homo sapiens
tgtattcatgaacag

SEQ ID NO: 726289 - DNA, 15 bp, Homo sapiens
gtattcatgaacaga

SEQ ID NO: 726290 - DNA, 15 bp, Homo sapiens
tattcatgaacagaa

SEQ ID NO: 726291 - DNA, 15 bp, Homo sapiens
attcatgaacagaag

SEQ ID NO: 726292 - DNA, 15 bp, Homo sapiens
ttcatgaacagaagt

SEQ ID NO: 726293 - DNA, 15 bp, Homo sapiens
tcatgaacagaagtc

SEQ ID NO: 726294 - DNA, 15 bp, Homo sapiens
catgaacagaagtca

SEQ ID NO: 726295 - DNA, 15 bp, Homo sapiens
atgaacagaagtcaa

SEQ ID NO: 726296 - DNA, 15 bp, Homo sapiens
tgaacagaagtcaaa

SEQ ID NO: 726297 - DNA, 15 bp, Homo sapiens
gaacagaagtcaaac

SEQ ID NO: 726298 - DNA, 15 bp, Homo sapiens
aacagaagtcaaacc

SEQ ID NO: 726299 - DNA, 15 bp, Homo sapiens
acagaagtcaaacca

SEQ ID NO: 726300 - DNA, 15 bp, Homo sapiens
cagaagtcaaaccat

SEQ ID NO: 726301 - DNA, 15 bp, Homo sapiens
agaagtcaaaccatt

SEQ ID NO: 726302 - DNA, 15 bp, Homo sapiens
gaagtcaaaccatta

SEQ ID NO: 726303 - DNA, 15 bp, Homo sapiens
aagtcaaaccattac

SEQ ID NO: 726304 - DNA, 15 bp, Homo sapiens
agtcaaaccattaca

SEQ ID NO: 726305 - DNA, 15 bp, Homo sapiens
gtcaaaccattacaa

SEQ ID NO: 726306 - DNA, 15 bp, Homo sapiens
tcaaaccattacaat

SEQ ID NO: 726307 - DNA, 15 bp, Homo sapiens
caaaccattacaatt

SEQ ID NO: 726308 - DNA, 15 bp, Homo sapiens
aaaccattacaattt

SEQ ID NO: 726309 - DNA, 15 bp, Homo sapiens
aaccattacaattta

SEQ ID NO: 726310 - DNA, 15 bp, Homo sapiens
accattacaatttat

SEQ ID NO: 726311 - DNA, 15 bp, Homo sapiens
ccattacaatttatc

SEQ ID NO: 726312 - DNA, 15 bp, Homo sapiens
cattacaatttatct

SEQ ID NO: 726313 - DNA, 15 bp, Homo sapiens
attacaatttatctc

SEQ ID NO: 726314 - DNA, 15 bp, Homo sapiens
ttacaatttatctct

SEQ ID NO: 726315 - DNA, 15 bp, Homo sapiens
tacaatttatctctc

SEQ ID NO: 726316 - DNA, 15 bp, Homo sapiens
acaatttatctctcc

SEQ ID NO: 726317 - DNA, 15 bp, Homo sapiens
caatttatctctcct

SEQ ID NO: 726318 - DNA, 15 bp, Homo sapiens
aatttatctctcctt

SEQ ID NO: 726319 - DNA, 15 bp, Homo sapiens
atttatctctccttt

SEQ ID NO: 726320 - DNA, 15 bp, Homo sapiens
tttatctctcctttt

SEQ ID NO: 726321 - DNA, 15 bp, Homo sapiens
ttatctctcctttta

SEQ ID NO: 726322 - DNA, 15 bp, Homo sapiens
tatctctccttttaa

SEQ ID NO: 726323 - DNA, 15 bp, Homo sapiens
atctctccttttaaa

SEQ ID NO: 726324 - DNA, 15 bp, Homo sapiens
tctctccttttaaaa

SEQ ID NO: 726325 - DNA, 15 bp, Homo sapiens
ctctccttttaaaaa

SEQ ID NO: 726326 - DNA, 15 bp, Homo sapiens
tctccttttaaaaat

SEQ ID NO: 726327 - DNA, 15 bp, Homo sapiens
ctccttttaaaaata

SEQ ID NO: 726328 - DNA, 15 bp, Homo sapiens
tccttttaaaaatat

SEQ ID NO: 726329 - DNA, 15 bp, Homo sapiens
ccttttaaaaatatg

SEQ ID NO: 726330 - DNA, 15 bp, Homo sapiens
cttttaaaaatatgg

SEQ ID NO: 726331 - DNA, 15 bp, Homo sapiens
ttttaaaaatatggt

SEQ ID NO: 726332 - DNA, 15 bp, Homo sapiens
tttaaaaatatggta

SEQ ID NO: 726333 - DNA, 15 bp, Homo sapiens
ttaaaaatatggtac

SEQ ID NO: 726334 - DNA, 15 bp, Homo sapiens
taaaaatatggtact

SEQ ID NO: 726335 - DNA, 15 bp, Homo sapiens
aaaaatatggtacta

SEQ ID NO: 726336 - DNA, 15 bp, Homo sapiens
aaaatatggtactaa

SEQ ID NO: 726337 - DNA, 15 bp, Homo sapiens
aaatatggtactaag

SEQ ID NO: 726338 - DNA, 15 bp, Homo sapiens
aatatggtactaagc

SEQ ID NO: 726339 - DNA, 15 bp, Homo sapiens
atatggtactaagca

SEQ ID NO: 726340 - DNA, 15 bp, Homo sapiens
tatggtactaagcaa

SEQ ID NO: 726341 - DNA, 15 bp, Homo sapiens
atggtactaagcaac

SEQ ID NO: 726342 - DNA, 15 bp, Homo sapiens
tggtactaagcaaca

SEQ ID NO: 726343 - DNA, 15 bp, Homo sapiens
ggtactaagcaacac

SEQ ID NO: 726344 - DNA, 15 bp, Homo sapiens
gtactaagcaacact

SEQ ID NO: 726345 - DNA, 15 bp, Homo sapiens
tactaagcaacacta

SEQ ID NO: 726346 - DNA, 15 bp, Homo sapiens
actaagcaacactaa

SEQ ID NO: 726347 - DNA, 15 bp, Homo sapiens
ctaagcaacactaaa

SEQ ID NO: 726348 - DNA, 15 bp, Homo sapiens
taagcaacactaaaa

SEQ ID NO: 726349 - DNA, 15 bp, Homo sapiens
aagcaacactaaaaa

SEQ ID NO: 726350 - DNA, 15 bp, Homo sapiens
agcaacactaaaaat

SEQ ID NO: 726351 - DNA, 15 bp, Homo sapiens
gcaacactaaaaatt

SEQ ID NO: 726352 - DNA, 15 bp, Homo sapiens
caacactaaaaattt

SEQ ID NO: 726353 - DNA, 15 bp, Homo sapiens
aacactaaaaatttt

SEQ ID NO: 726354 - DNA, 15 bp, Homo sapiens
acactaaaaattttc

SEQ ID NO: 726355 - DNA, 15 bp, Homo sapiens
cactaaaaattttct

SEQ ID NO: 726356 - DNA, 15 bp, Homo sapiens
actaaaaattttctg

SEQ ID NO: 726357 - DNA, 15 bp, Homo sapiens
ctaaaaattttctga

SEQ ID NO: 726358 - DNA, 15 bp, Homo sapiens
taaaaattttctgag

SEQ ID NO: 726359 - DNA, 15 bp, Homo sapiens
aaaaattttctgagg

SEQ ID NO: 726360 - DNA, 15 bp, Homo sapiens
aaaattttctgaggt

SEQ ID NO: 726361 - DNA, 15 bp, Homo sapiens
aaattttctgaggta

SEQ ID NO: 726362 - DNA, 15 bp, Homo sapiens
aattttctgaggtag

SEQ ID NO: 726363 - DNA, 15 bp, Homo sapiens
attttctgaggtagt

SEQ ID NO: 726364 - DNA, 15 bp, Homo sapiens
ttttctgaggtagtt

SEQ ID NO: 726365 - DNA, 15 bp, Homo sapiens
tttctgaggtagttt

SEQ ID NO: 726366 - DNA, 15 bp, Homo sapiens
ttctgaggtagtttc

SEQ ID NO: 726367 - DNA, 15 bp, Homo sapiens
tctgaggtagtttcc

SEQ ID NO: 726368 - DNA, 15 bp, Homo sapiens
ctgaggtagtttcca

SEQ ID NO: 726369 - DNA, 15 bp, Homo sapiens
tgaggtagtttccaa

SEQ ID NO: 726370 - DNA, 15 bp, Homo sapiens
gaggtagtttccaag

SEQ ID NO: 726371 - DNA, 15 bp, Homo sapiens
aggtagtttccaaga

SEQ ID NO: 726372 - DNA, 15 bp, Homo sapiens
ggtagtttccaagat

SEQ ID NO: 726373 - DNA, 15 bp, Homo sapiens
gtagtttccaagatg

SEQ ID NO: 726374 - DNA, 15 bp, Homo sapiens
tagtttccaagatgg

SEQ ID NO: 726375 - DNA, 15 bp, Homo sapiens
agtttccaagatggc

SEQ ID NO: 726376 - DNA, 15 bp, Homo sapiens
gtttccaagatggcc

SEQ ID NO: 726377 - DNA, 15 bp, Homo sapiens
tttccaagatggcca

SEQ ID NO: 726378 - DNA, 15 bp, Homo sapiens
ttccaagatggccac

SEQ ID NO: 726379 - DNA, 15 bp, Homo sapiens
tccaagatggccacc

SEQ ID NO: 726380 - DNA, 15 bp, Homo sapiens
ccaagatggccacca

SEQ ID NO: 726381 - DNA, 15 bp, Homo sapiens
caagatggccaccag

SEQ ID NO: 726382 - DNA, 15 bp, Homo sapiens
aagatggccaccagt

SEQ ID NO: 726383 - DNA, 15 bp, Homo sapiens
agatggccaccagtg

SEQ ID NO: 726384 - DNA, 15 bp, Homo sapiens
gatggccaccagtga

SEQ ID NO: 726385 - DNA, 15 bp, Homo sapiens
atggccaccagtgag

SEQ ID NO: 726386 - DNA, 15 bp, Homo sapiens
tggccaccagtgagc

SEQ ID NO: 726387 - DNA, 15 bp, Homo sapiens
ggccaccagtgagca

SEQ ID NO: 726388 - DNA, 15 bp, Homo sapiens
gccaccagtgagcac

SEQ ID NO: 726389 - DNA, 15 bp, Homo sapiens
ccaccagtgagcact

SEQ ID NO: 726390 - DNA, 15 bp, Homo sapiens
caccagtgagcactg

SEQ ID NO: 726391 - DNA, 15 bp, Homo sapiens
accagtgagcactgc

SEQ ID NO: 726392 - DNA, 15 bp, Homo sapiens
ccagtgagcactgcc

SEQ ID NO: 726393 - DNA, 15 bp, Homo sapiens
cagtgagcactgcct

SEQ ID NO: 726394 - DNA, 15 bp, Homo sapiens
agtgagcactgcctc

SEQ ID NO: 726395 - DNA, 15 bp, Homo sapiens
gtgagcactgcctcc

SEQ ID NO: 726396 - DNA, 15 bp, Homo sapiens
tgagcactgcctcct

SEQ ID NO: 726397 - DNA, 15 bp, Homo sapiens
gagcactgcctcctg

SEQ ID NO: 726398 - DNA, 15 bp, Homo sapiens
agcactgcctcctgg

SEQ ID NO: 726399 - DNA, 15 bp, Homo sapiens
gcactgcctcctggt

SEQ ID NO: 726400 - DNA, 15 bp, Homo sapiens
cactgcctcctggta

SEQ ID NO: 726401 - DNA, 15 bp, Homo sapiens
actgcctcctggtat

SEQ ID NO: 726402 - DNA, 15 bp, Homo sapiens
ctgcctcctggtatt

SEQ ID NO: 726403 - DNA, 15 bp, Homo sapiens
tgcctcctggtattc

SEQ ID NO: 726404 - DNA, 15 bp, Homo sapiens
gcctcctggtattca

SEQ ID NO: 726405 - DNA, 15 bp, Homo sapiens
cctcctggtattcat

SEQ ID NO: 726406 - DNA, 15 bp, Homo sapiens
ctcctggtattcatg

SEQ ID NO: 726407 - DNA, 15 bp, Homo sapiens
tcctggtattcatgc

SEQ ID NO: 726408 - DNA, 15 bp, Homo sapiens
cctggtattcatgcc

SEQ ID NO: 726409 - DNA, 15 bp, Homo sapiens
ctggtattcatgccc

SEQ ID NO: 726410 - DNA, 15 bp, Homo sapiens
tggtattcatgcccg

SEQ ID NO: 726411 - DNA, 15 bp, Homo sapiens
ggtattcatgcccgt

SEQ ID NO: 726412 - DNA, 15 bp, Homo sapiens
gtattcatgcccgtg

SEQ ID NO: 726413 - DNA, 15 bp, Homo sapiens
tattcatgcccgtgt

SEQ ID NO: 726414 - DNA, 15 bp, Homo sapiens
attcatgcccgtgtg

SEQ ID NO: 726415 - DNA, 15 bp, Homo sapiens
ttcatgcccgtgtgt

SEQ ID NO: 726416 - DNA, 15 bp, Homo sapiens
tcatgcccgtgtgta

SEQ ID NO: 726417 - DNA, 15 bp, Homo sapiens
catgcccgtgtgtat

SEQ ID NO: 726418 - DNA, 15 bp, Homo sapiens
atgcccgtgtgtata

SEQ ID NO: 726419 - DNA, 15 bp, Homo sapiens
tgcccgtgtgtataa

SEQ ID NO: 726420 - DNA, 15 bp, Homo sapiens
gcccgtgtgtataag

SEQ ID NO: 726421 - DNA, 15 bp, Homo sapiens
cccgtgtgtataagg

SEQ ID NO: 726422 - DNA, 15 bp, Homo sapiens
ccgtgtgtataagga

SEQ ID NO: 726423 - DNA, 15 bp, Homo sapiens
cgtgtgtataaggat

SEQ ID NO: 726424 - DNA, 15 bp, Homo sapiens
gtgtgtataaggata

SEQ ID NO: 726425 - DNA, 15 bp, Homo sapiens
tgtgtataaggatac

SEQ ID NO: 726426 - DNA, 15 bp, Homo sapiens
gtgtataaggatact

SEQ ID NO: 726427 - DNA, 15 bp, Homo sapiens
tgtataaggatactg

SEQ ID NO: 726428 - DNA, 15 bp, Homo sapiens
gtataaggatactgt

SEQ ID NO: 726429 - DNA, 15 bp, Homo sapiens
tataaggatactgtg

SEQ ID NO: 726430 - DNA, 15 bp, Homo sapiens
ataaggatactgtga

SEQ ID NO: 726431 - DNA, 15 bp, Homo sapiens
taaggatactgtgaa

SEQ ID NO: 726432 - DNA, 15 bp, Homo sapiens
aaggatactgtgaat

SEQ ID NO: 726433 - DNA, 15 bp, Homo sapiens
aggatactgtgaata

SEQ ID NO: 726434 - DNA, 15 bp, Homo sapiens
ggatactgtgaatat

SEQ ID NO: 726435 - DNA, 15 bp, Homo sapiens
gatactgtgaatatg

SEQ ID NO: 726436 - DNA, 15 bp, Homo sapiens
atactgtgaatatga

SEQ ID NO: 726437 - DNA, 15 bp, Homo sapiens
tactgtgaatatgag

SEQ ID NO: 726438 - DNA, 15 bp, Homo sapiens
actgtgaatatgagg

SEQ ID NO: 726439 - DNA, 15 bp, Homo sapiens
ctgtgaatatgagga

SEQ ID NO: 726440 - DNA, 15 bp, Homo sapiens
tgtgaatatgaggaa

SEQ ID NO: 726441 - DNA, 15 bp, Homo sapiens
gtgaatatgaggaat

SEQ ID NO: 726442 - DNA, 15 bp, Homo sapiens
tgaatatgaggaatg

SEQ ID NO: 726443 - DNA, 15 bp, Homo sapiens
gaatatgaggaatgt

SEQ ID NO: 726444 - DNA, 15 bp, Homo sapiens
aatatgaggaatgta

SEQ ID NO: 726445 - DNA, 15 bp, Homo sapiens
atatgaggaatgtat

SEQ ID NO: 726446 - DNA, 15 bp, Homo sapiens
tatgaggaatgtatg

SEQ ID NO: 726447 - DNA, 15 bp, Homo sapiens
atgaggaatgtatga

SEQ ID NO: 726448 - DNA, 15 bp, Homo sapiens
tgaggaatgtatgac

SEQ ID NO: 726449 - DNA, 15 bp, Homo sapiens
gaggaatgtatgact

SEQ ID NO: 726450 - DNA, 15 bp, Homo sapiens
aggaatgtatgactt

SEQ ID NO: 726451 - DNA, 15 bp, Homo sapiens
ggaatgtatgacttc

SEQ ID NO: 726452 - DNA, 15 bp, Homo sapiens
gaatgtatgacttct

SEQ ID NO: 726453 - DNA, 15 bp, Homo sapiens
aatgtatgacttctg

SEQ ID NO: 726454 - DNA, 15 bp, Homo sapiens
atgtatgacttctga

SEQ ID NO: 726455 - DNA, 15 bp, Homo sapiens
tgtatgacttctgag

SEQ ID NO: 726456 - DNA, 15 bp, Homo sapiens
gtatgacttctgaga

SEQ ID NO: 726457 - DNA, 15 bp, Homo sapiens
tatgacttctgagac

SEQ ID NO: 726458 - DNA, 15 bp, Homo sapiens
atgacttctgagact

SEQ ID NO: 726459 - DNA, 15 bp, Homo sapiens
tgacttctgagacta

SEQ ID NO: 726460 - DNA, 15 bp, Homo sapiens
gacttctgagactaa

SEQ ID NO: 726461 - DNA, 15 bp, Homo sapiens
acttctgagactaaa

SEQ ID NO: 726462 - DNA, 15 bp, Homo sapiens
cttctgagactaaat

SEQ ID NO: 726463 - DNA, 15 bp, Homo sapiens
ttctgagactaaatc

SEQ ID NO: 726464 - DNA, 15 bp, Homo sapiens
tctgagactaaatca

SEQ ID NO: 726465 - DNA, 15 bp, Homo sapiens
ctgagactaaatcat

SEQ ID NO: 726466 - DNA, 15 bp, Homo sapiens
tgagactaaatcata

SEQ ID NO: 726467 - DNA, 15 bp, Homo sapiens
gagactaaatcataa

SEQ ID NO: 726468 - DNA, 15 bp, Homo sapiens
agactaaatcataaa

SEQ ID NO: 726469 - DNA, 15 bp, Homo sapiens
gactaaatcataaaa

SEQ ID NO: 726470 - DNA, 15 bp, Homo sapiens
actaaatcataaaaa

SEQ ID NO: 726471 - DNA, 15 bp, Homo sapiens
ctaaatcataaaaaa

SEQ ID NO: 726472 - DNA, 15 bp, Homo sapiens
taaatcataaaaaaa

SEQ ID NO: 726473 - DNA, 15 bp, Homo sapiens
aaatcataaaaaaaa

SEQ ID NO: 726474 - DNA, 15 bp, Homo sapiens
aatcataaaaaaaaa

SEQ ID NO: 726475 - DNA, 15 bp, Homo sapiens
atcataaaaaaaaaa

SEQ ID NO: 726476 - DNA, 15 bp, Homo sapiens
tcataaaaaaaaaaa

SEQ ID NO: 726477 - DNA, 15 bp, Homo sapiens
cataaaaaaaaaaac

SEQ ID NO: 726478 - DNA, 15 bp, Homo sapiens
ataaaaaaaaaaacc

SEQ ID NO: 726479 - DNA, 15 bp, Homo sapiens
taaaaaaaaaaacct

SEQ ID NO: 726480 - DNA, 15 bp, Homo sapiens
aaaaaaaaaaacctc

SEQ ID NO: 726481 - DNA, 15 bp, Homo sapiens
aaaaaaaaaacctct

SEQ ID NO: 726482 - DNA, 15 bp, Homo sapiens
aaaaaaaaacctcta

SEQ ID NO: 726483 - DNA, 15 bp, Homo sapiens
aaaaaaaacctctat

SEQ ID NO: 726484 - DNA, 15 bp, Homo sapiens
aaaaaaacctctatg

SEQ ID NO: 726485 - DNA, 15 bp, Homo sapiens
aaaaaacctctatgg

SEQ ID NO: 726486 - DNA, 15 bp, Homo sapiens
aaaaacctctatggc

SEQ ID NO: 726487 - DNA, 15 bp, Homo sapiens
aaaacctctatggct

SEQ ID NO: 726488 - DNA, 15 bp, Homo sapiens
aaacctctatggctt

SEQ ID NO: 726489 - DNA, 15 bp, Homo sapiens
aacctctatggcttc

SEQ ID NO: 726490 - DNA, 15 bp, Homo sapiens
acctctatggcttca

SEQ ID NO: 726491 - DNA, 15 bp, Homo sapiens
cctctatggcttcag

SEQ ID NO: 726492 - DNA, 15 bp, Homo sapiens
ctctatggcttcagc

SEQ ID NO: 726493 - DNA, 15 bp, Homo sapiens
tctatggcttcagcc

SEQ ID NO: 726494 - DNA, 15 bp, Homo sapiens
ctatggcttcagccc

SEQ ID NO: 726495 - DNA, 15 bp, Homo sapiens
tatggcttcagccct

SEQ ID NO: 726496 - DNA, 15 bp, Homo sapiens
atggcttcagccctt

SEQ ID NO: 726497 - DNA, 15 bp, Homo sapiens
tggcttcagcccttc

SEQ ID NO: 726498 - DNA, 15 bp, Homo sapiens
ggcttcagcccttct

SEQ ID NO: 726499 - DNA, 15 bp, Homo sapiens
gcttcagcccttctt

SEQ ID NO: 726500 - DNA, 15 bp, Homo sapiens
cttcagcccttcttc

SEQ ID NO: 726501 - DNA, 15 bp, Homo sapiens
ttcagcccttcttct

SEQ ID NO: 726502 - DNA, 15 bp, Homo sapiens
tcagcccttcttctg

SEQ ID NO: 726503 - DNA, 15 bp, Homo sapiens
cagcccttcttctgg

SEQ ID NO: 726504 - DNA, 15 bp, Homo sapiens
agcccttcttctgga

SEQ ID NO: 726505 - DNA, 15 bp, Homo sapiens
gcccttcttctggat

SEQ ID NO: 726506 - DNA, 15 bp, Homo sapiens
cccttcttctggatc

SEQ ID NO: 726507 - DNA, 15 bp, Homo sapiens
ccttcttctggatca

SEQ ID NO: 726508 - DNA, 15 bp, Homo sapiens
cttcttctggatcac

SEQ ID NO: 726509 - DNA, 15 bp, Homo sapiens
ttcttctggatcact

SEQ ID NO: 726510 - DNA, 15 bp, Homo sapiens
tcttctggatcactc

SEQ ID NO: 726511 - DNA, 15 bp, Homo sapiens
cttctggatcactca

SEQ ID NO: 726512 - DNA, 15 bp, Homo sapiens
ttctggatcactcac

SEQ ID NO: 726513 - DNA, 15 bp, Homo sapiens
tctggatcactcact

SEQ ID NO: 726514 - DNA, 15 bp, Homo sapiens
ctggatcactcactc

SEQ ID NO: 726515 - DNA, 15 bp, Homo sapiens
tggatcactcactct

SEQ ID NO: 726516 - DNA, 15 bp, Homo sapiens
ggatcactcactctg

SEQ ID NO: 726517 - DNA, 15 bp, Homo sapiens
gatcactcactctgg

SEQ ID NO: 726518 - DNA, 15 bp, Homo sapiens
atcactcactctggg

SEQ ID NO: 726519 - DNA, 15 bp, Homo sapiens
tcactcactctgggg

SEQ ID NO: 726520 - DNA, 15 bp, Homo sapiens
cactcactctggggg

SEQ ID NO: 726521 - DNA, 15 bp, Homo sapiens
actcactctggggga

SEQ ID NO: 726522 - DNA, 15 bp, Homo sapiens
ctcactctgggggaa

SEQ ID NO: 726523 - DNA, 15 bp, Homo sapiens
tcactctgggggaaa

SEQ ID NO: 726524 - DNA, 15 bp, Homo sapiens
cactctgggggaaac

SEQ ID NO: 726525 - DNA, 15 bp, Homo sapiens
actctgggggaaacc

SEQ ID NO: 726526 - DNA, 15 bp, Homo sapiens
ctctgggggaaacca

SEQ ID NO: 726527 - DNA, 15 bp, Homo sapiens
tctgggggaaaccag

SEQ ID NO: 726528 - DNA, 15 bp, Homo sapiens
ctgggggaaaccagt

SEQ ID NO: 726529 - DNA, 15 bp, Homo sapiens
tgggggaaaccagtt

SEQ ID NO: 726530 - DNA, 15 bp, Homo sapiens
gggggaaaccagttg

SEQ ID NO: 726531 - DNA, 15 bp, Homo sapiens
ggggaaaccagttgt

SEQ ID NO: 726532 - DNA, 15 bp, Homo sapiens
gggaaaccagttgtc

SEQ ID NO: 726533 - DNA, 15 bp, Homo sapiens
ggaaaccagttgtca

SEQ ID NO: 726534 - DNA, 15 bp, Homo sapiens
gaaaccagttgtcat

SEQ ID NO: 726535 - DNA, 15 bp, Homo sapiens
aaaccagttgtcatt

SEQ ID NO: 726536 - DNA, 15 bp, Homo sapiens
aaccagttgtcattt

SEQ ID NO: 726537 - DNA, 15 bp, Homo sapiens
accagttgtcatttc

SEQ ID NO: 726538 - DNA, 15 bp, Homo sapiens
ccagttgtcatttca

SEQ ID NO: 726539 - DNA, 15 bp, Homo sapiens
cagttgtcatttcat

SEQ ID NO: 726540 - DNA, 15 bp, Homo sapiens
agttgtcatttcatg

SEQ ID NO: 726541 - DNA, 15 bp, Homo sapiens
gttgtcatttcatga

SEQ ID NO: 726542 - DNA, 15 bp, Homo sapiens
ttgtcatttcatgag

SEQ ID NO: 726543 - DNA, 15 bp, Homo sapiens
tgtcatttcatgagg

SEQ ID NO: 726544 - DNA, 15 bp, Homo sapiens
gtcatttcatgagga

SEQ ID NO: 726545 - DNA, 15 bp, Homo sapiens
tcatttcatgaggat

SEQ ID NO: 726546 - DNA, 15 bp, Homo sapiens
catttcatgaggata

SEQ ID NO: 726547 - DNA, 15 bp, Homo sapiens
atttcatgaggatat

SEQ ID NO: 726548 - DNA, 15 bp, Homo sapiens
tttcatgaggatatt

SEQ ID NO: 726549 - DNA, 15 bp, Homo sapiens
ttcatgaggatattc

SEQ ID NO: 726550 - DNA, 15 bp, Homo sapiens
tcatgaggatattca

SEQ ID NO: 726551 - DNA, 15 bp, Homo sapiens
catgaggatattcaa

SEQ ID NO: 726552 - DNA, 15 bp, Homo sapiens
atgaggatattcaaa

SEQ ID NO: 726553 - DNA, 15 bp, Homo sapiens
tgaggatattcaaac

SEQ ID NO: 726554 - DNA, 15 bp, Homo sapiens
gaggatattcaaaca

SEQ ID NO: 726555 - DNA, 15 bp, Homo sapiens
aggatattcaaacat

SEQ ID NO: 726556 - DNA, 15 bp, Homo sapiens
ggatattcaaacatc

SEQ ID NO: 726557 - DNA, 15 bp, Homo sapiens
gatattcaaacatcc

SEQ ID NO: 726558 - DNA, 15 bp, Homo sapiens
atattcaaacatccc

SEQ ID NO: 726559 - DNA, 15 bp, Homo sapiens
tattcaaacatccct

SEQ ID NO: 726560 - DNA, 15 bp, Homo sapiens
attcaaacatcccta

SEQ ID NO: 726561 - DNA, 15 bp, Homo sapiens
ttcaaacatccctat

SEQ ID NO: 726562 - DNA, 15 bp, Homo sapiens
tcaaacatccctata

SEQ ID NO: 726563 - DNA, 15 bp, Homo sapiens
caaacatccctatat

SEQ ID NO: 726564 - DNA, 15 bp, Homo sapiens
aaacatccctatatg

SEQ ID NO: 726565 - DNA, 15 bp, Homo sapiens
aacatccctatatgg

SEQ ID NO: 726566 - DNA, 15 bp, Homo sapiens
acatccctatatgga

SEQ ID NO: 726567 - DNA, 15 bp, Homo sapiens
catccctatatggag

SEQ ID NO: 726568 - DNA, 15 bp, Homo sapiens
atccctatatggaga

SEQ ID NO: 726569 - DNA, 15 bp, Homo sapiens
tccctatatggagag

SEQ ID NO: 726570 - DNA, 15 bp, Homo sapiens
ccctatatggagaga

SEQ ID NO: 726571 - DNA, 15 bp, Homo sapiens
cctatatggagagaa

SEQ ID NO: 726572 - DNA, 15 bp, Homo sapiens
ctatatggagagaag

SEQ ID NO: 726573 - DNA, 15 bp, Homo sapiens
tatatggagagaagt

SEQ ID NO: 726574 - DNA, 15 bp, Homo sapiens
atatggagagaagta

SEQ ID NO: 726575 - DNA, 15 bp, Homo sapiens
tatggagagaagtac

SEQ ID NO: 726576 - DNA, 15 bp, Homo sapiens
atggagagaagtact

SEQ ID NO: 726577 - DNA, 15 bp, Homo sapiens
tggagagaagtactc

SEQ ID NO: 726578 - DNA, 15 bp, Homo sapiens
ggagagaagtactca

SEQ ID NO: 726579 - DNA, 15 bp, Homo sapiens
gagagaagtactcat

SEQ ID NO: 726580 - DNA, 15 bp, Homo sapiens
agagaagtactcatg

SEQ ID NO: 726581 - DNA, 15 bp, Homo sapiens
gagaagtactcatgg

SEQ ID NO: 726582 - DNA, 15 bp, Homo sapiens
agaagtactcatggt

SEQ ID NO: 726583 - DNA, 15 bp, Homo sapiens
gaagtactcatggtg

SEQ ID NO: 726584 - DNA, 15 bp, Homo sapiens
aagtactcatggtgc

SEQ ID NO: 726585 - DNA, 15 bp, Homo sapiens
agtactcatggtgct

SEQ ID NO: 726586 - DNA, 15 bp, Homo sapiens
gtactcatggtgcta

SEQ ID NO: 726587 - DNA, 15 bp, Homo sapiens
tactcatggtgctat

SEQ ID NO: 726588 - DNA, 15 bp, Homo sapiens
actcatggtgctata

SEQ ID NO: 726589 - DNA, 15 bp, Homo sapiens
ctcatggtgctatac

SEQ ID NO: 726590 - DNA, 15 bp, Homo sapiens
tcatggtgctatact

SEQ ID NO: 726591 - DNA, 15 bp, Homo sapiens
catggtgctatactg

SEQ ID NO: 726592 - DNA, 15 bp, Homo sapiens
atggtgctatactga

SEQ ID NO: 726593 - DNA, 15 bp, Homo sapiens
tggtgctatactgag

SEQ ID NO: 726594 - DNA, 15 bp, Homo sapiens
ggtgctatactgagg

SEQ ID NO: 726595 - DNA, 15 bp, Homo sapiens
gtgctatactgaggc

SEQ ID NO: 726596 - DNA, 15 bp, Homo sapiens
tgctatactgaggcc

SEQ ID NO: 726597 - DNA, 15 bp, Homo sapiens
gctatactgaggcct

SEQ ID NO: 726598 - DNA, 15 bp, Homo sapiens
ctatactgaggcctc

SEQ ID NO: 726599 - DNA, 15 bp, Homo sapiens
tatactgaggcctcc

SEQ ID NO: 726600 - DNA, 15 bp, Homo sapiens
atactgaggcctcct

SEQ ID NO: 726601 - DNA, 15 bp, Homo sapiens
tactgaggcctcctg

SEQ ID NO: 726602 - DNA, 15 bp, Homo sapiens
actgaggcctcctgc

SEQ ID NO: 726603 - DNA, 15 bp, Homo sapiens
ctgaggcctcctgcc

SEQ ID NO: 726604 - DNA, 15 bp, Homo sapiens
tgaggcctcctgcca

SEQ ID NO: 726605 - DNA, 15 bp, Homo sapiens
gaggcctcctgccaa

SEQ ID NO: 726606 - DNA, 15 bp, Homo sapiens
aggcctcctgccaac

SEQ ID NO: 726607 - DNA, 15 bp, Homo sapiens
ggcctcctgccaaca

SEQ ID NO: 726608 - DNA, 15 bp, Homo sapiens
gcctcctgccaacag

SEQ ID NO: 726609 - DNA, 15 bp, Homo sapiens
cctcctgccaacagt

SEQ ID NO: 726610 - DNA, 15 bp, Homo sapiens
ctcctgccaacagtc

SEQ ID NO: 726611 - DNA, 15 bp, Homo sapiens
tcctgccaacagtca

SEQ ID NO: 726612 - DNA, 15 bp, Homo sapiens
cctgccaacagtcat

SEQ ID NO: 726613 - DNA, 15 bp, Homo sapiens
ctgccaacagtcatg

SEQ ID NO: 726614 - DNA, 15 bp, Homo sapiens
tgccaacagtcatgt

SEQ ID NO: 726615 - DNA, 15 bp, Homo sapiens
gccaacagtcatgtg

SEQ ID NO: 726616 - DNA, 15 bp, Homo sapiens
ccaacagtcatgtga

SEQ ID NO: 726617 - DNA, 15 bp, Homo sapiens
caacagtcatgtgag

SEQ ID NO: 726618 - DNA, 15 bp, Homo sapiens
aacagtcatgtgagt

SEQ ID NO: 726619 - DNA, 15 bp, Homo sapiens
acagtcatgtgagta

SEQ ID NO: 726620 - DNA, 15 bp, Homo sapiens
cagtcatgtgagtaa

SEQ ID NO: 726621 - DNA, 15 bp, Homo sapiens
agtcatgtgagtaag

SEQ ID NO: 726622 - DNA, 15 bp, Homo sapiens
gtcatgtgagtaagc

SEQ ID NO: 726623 - DNA, 15 bp, Homo sapiens
tcatgtgagtaagcc

SEQ ID NO: 726624 - DNA, 15 bp, Homo sapiens
catgtgagtaagcca

SEQ ID NO: 726625 - DNA, 15 bp, Homo sapiens
atgtgagtaagccac

SEQ ID NO: 726626 - DNA, 15 bp, Homo sapiens
tgtgagtaagccacc

SEQ ID NO: 726627 - DNA, 15 bp, Homo sapiens
gtgagtaagccacct

SEQ ID NO: 726628 - DNA, 15 bp, Homo sapiens
tgagtaagccacctt

SEQ ID NO: 726629 - DNA, 15 bp, Homo sapiens
gagtaagccaccttg

SEQ ID NO: 726630 - DNA, 15 bp, Homo sapiens
agtaagccaccttgg

SEQ ID NO: 726631 - DNA, 15 bp, Homo sapiens
gtaagccaccttgga

SEQ ID NO: 726632 - DNA, 15 bp, Homo sapiens
taagccaccttggaa

SEQ ID NO: 726633 - DNA, 15 bp, Homo sapiens
aagccaccttggaag

SEQ ID NO: 726634 - DNA, 15 bp, Homo sapiens
agccaccttggaagt

SEQ ID NO: 726635 - DNA, 15 bp, Homo sapiens
gccaccttggaagtg

SEQ ID NO: 726636 - DNA, 15 bp, Homo sapiens
ccaccttggaagtga

SEQ ID NO: 726637 - DNA, 15 bp, Homo sapiens
caccttggaagtgaa

SEQ ID NO: 726638 - DNA, 15 bp, Homo sapiens
accttggaagtgaat

SEQ ID NO: 726639 - DNA, 15 bp, Homo sapiens
ccttggaagtgaatc

SEQ ID NO: 726640 - DNA, 15 bp, Homo sapiens
cttggaagtgaatct

SEQ ID NO: 726641 - DNA, 15 bp, Homo sapiens
ttggaagtgaatctc

SEQ ID NO: 726642 - DNA, 15 bp, Homo sapiens
tggaagtgaatctct

SEQ ID NO: 726643 - DNA, 15 bp, Homo sapiens
ggaagtgaatctcta

SEQ ID NO: 726644 - DNA, 15 bp, Homo sapiens
gaagtgaatctctat

SEQ ID NO: 726645 - DNA, 15 bp, Homo sapiens
aagtgaatctctatc

SEQ ID NO: 726646 - DNA, 15 bp, Homo sapiens
agtgaatctctatcc

SEQ ID NO: 726647 - DNA, 15 bp, Homo sapiens
gtgaatctctatcct

SEQ ID NO: 726648 - DNA, 15 bp, Homo sapiens
tgaatctctatcctt

SEQ ID NO: 726649 - DNA, 15 bp, Homo sapiens
gaatctctatcctta

SEQ ID NO: 726650 - DNA, 15 bp, Homo sapiens
aatctctatccttaa

SEQ ID NO: 726651 - DNA, 15 bp, Homo sapiens
atctctatccttaat

SEQ ID NO: 726652 - DNA, 15 bp, Homo sapiens
tctctatccttaatc

SEQ ID NO: 726653 - DNA, 15 bp, Homo sapiens
ctctatccttaatca

SEQ ID NO: 726654 - DNA, 15 bp, Homo sapiens
tctatccttaatcat

SEQ ID NO: 726655 - DNA, 15 bp, Homo sapiens
ctatccttaatcatg

SEQ ID NO: 726656 - DNA, 15 bp, Homo sapiens
tatccttaatcatgc

SEQ ID NO: 726657 - DNA, 15 bp, Homo sapiens
atccttaatcatgct

SEQ ID NO: 726658 - DNA, 15 bp, Homo sapiens
tccttaatcatgctt

SEQ ID NO: 726659 - DNA, 15 bp, Homo sapiens
ccttaatcatgcttt

SEQ ID NO: 726660 - DNA, 15 bp, Homo sapiens
cttaatcatgctttt

SEQ ID NO: 726661 - DNA, 15 bp, Homo sapiens
ttaatcatgctttta

SEQ ID NO: 726662 - DNA, 15 bp, Homo sapiens
taatcatgcttttag

SEQ ID NO: 726663 - DNA, 15 bp, Homo sapiens
aatcatgcttttaga

SEQ ID NO: 726664 - DNA, 15 bp, Homo sapiens
atcatgcttttagat

SEQ ID NO: 726665 - DNA, 15 bp, Homo sapiens
tcatgcttttagatg

SEQ ID NO: 726666 - DNA, 15 bp, Homo sapiens
catgcttttagatgc

SEQ ID NO: 726667 - DNA, 15 bp, Homo sapiens
atgcttttagatgcc

SEQ ID NO: 726668 - DNA, 15 bp, Homo sapiens
tgcttttagatgcct

SEQ ID NO: 726669 - DNA, 15 bp, Homo sapiens
gcttttagatgccta

SEQ ID NO: 726670 - DNA, 15 bp, Homo sapiens
cttttagatgcctat

SEQ ID NO: 726671 - DNA, 15 bp, Homo sapiens
ttttagatgcctata

SEQ ID NO: 726672 - DNA, 15 bp, Homo sapiens
tttagatgcctatag

SEQ ID NO: 726673 - DNA, 15 bp, Homo sapiens
ttagatgcctatagc

SEQ ID NO: 726674 - DNA, 15 bp, Homo sapiens
tagatgcctatagca

SEQ ID NO: 726675 - DNA, 15 bp, Homo sapiens
agatgcctatagcac

SEQ ID NO: 726676 - DNA, 15 bp, Homo sapiens
gatgcctatagcacc

SEQ ID NO: 726677 - DNA, 15 bp, Homo sapiens
atgcctatagcacca

SEQ ID NO: 726678 - DNA, 15 bp, Homo sapiens
tgcctatagcaccag

SEQ ID NO: 726679 - DNA, 15 bp, Homo sapiens
gcctatagcaccagc

SEQ ID NO: 726680 - DNA, 15 bp, Homo sapiens
cctatagcaccagcc

SEQ ID NO: 726681 - DNA, 15 bp, Homo sapiens
ctatagcaccagcca

SEQ ID NO: 726682 - DNA, 15 bp, Homo sapiens
tatagcaccagccaa

SEQ ID NO: 726683 - DNA, 15 bp, Homo sapiens
atagcaccagccaat

SEQ ID NO: 726684 - DNA, 15 bp, Homo sapiens
tagcaccagccaata

SEQ ID NO: 726685 - DNA, 15 bp, Homo sapiens
agcaccagccaatat

SEQ ID NO: 726686 - DNA, 15 bp, Homo sapiens
gcaccagccaatatt

SEQ ID NO: 726687 - DNA, 15 bp, Homo sapiens
caccagccaatattc

SEQ ID NO: 726688 - DNA, 15 bp, Homo sapiens
accagccaatattct

SEQ ID NO: 726689 - DNA, 15 bp, Homo sapiens
ccagccaatattctg

SEQ ID NO: 726690 - DNA, 15 bp, Homo sapiens
cagccaatattctga

SEQ ID NO: 726691 - DNA, 15 bp, Homo sapiens
agccaatattctgac

SEQ ID NO: 726692 - DNA, 15 bp, Homo sapiens
gccaatattctgact

SEQ ID NO: 726693 - DNA, 15 bp, Homo sapiens
ccaatattctgactg

SEQ ID NO: 726694 - DNA, 15 bp, Homo sapiens
caatattctgactgc

SEQ ID NO: 726695 - DNA, 15 bp, Homo sapiens
aatattctgactgca

SEQ ID NO: 726696 - DNA, 15 bp, Homo sapiens
atattctgactgcaa

SEQ ID NO: 726697 - DNA, 15 bp, Homo sapiens
tattctgactgcaac

SEQ ID NO: 726698 - DNA, 15 bp, Homo sapiens
attctgactgcaact

SEQ ID NO: 726699 - DNA, 15 bp, Homo sapiens
ttctgactgcaactt

SEQ ID NO: 726700 - DNA, 15 bp, Homo sapiens
tctgactgcaacttc

SEQ ID NO: 726701 - DNA, 15 bp, Homo sapiens
ctgactgcaacttca

SEQ ID NO: 726702 - DNA, 15 bp, Homo sapiens
tgactgcaacttcat

SEQ ID NO: 726703 - DNA, 15 bp, Homo sapiens
gactgcaacttcatg

SEQ ID NO: 726704 - DNA, 15 bp, Homo sapiens
actgcaacttcatga

SEQ ID NO: 726705 - DNA, 15 bp, Homo sapiens
ctgcaacttcatgag

SEQ ID NO: 726706 - DNA, 15 bp, Homo sapiens
tgcaacttcatgagg

SEQ ID NO: 726707 - DNA, 15 bp, Homo sapiens
gcaacttcatgaggg

SEQ ID NO: 726708 - DNA, 15 bp, Homo sapiens
caacttcatgaggga

SEQ ID NO: 726709 - DNA, 15 bp, Homo sapiens
aacttcatgagggaa

SEQ ID NO: 726710 - DNA, 15 bp, Homo sapiens
acttcatgagggaac

SEQ ID NO: 726711 - DNA, 15 bp, Homo sapiens
cttcatgagggaacc

SEQ ID NO: 726712 - DNA, 15 bp, Homo sapiens
ttcatgagggaaccc

SEQ ID NO: 726713 - DNA, 15 bp, Homo sapiens
tcatgagggaaccct

SEQ ID NO: 726714 - DNA, 15 bp, Homo sapiens
catgagggaaccctg

SEQ ID NO: 726715 - DNA, 15 bp, Homo sapiens
atgagggaaccctga

SEQ ID NO: 726716 - DNA, 15 bp, Homo sapiens
tgagggaaccctgag

SEQ ID NO: 726717 - DNA, 15 bp, Homo sapiens
gagggaaccctgagc

SEQ ID NO: 726718 - DNA, 15 bp, Homo sapiens
agggaaccctgagcc

SEQ ID NO: 726719 - DNA, 15 bp, Homo sapiens
gggaaccctgagccc

SEQ ID NO: 726720 - DNA, 15 bp, Homo sapiens
ggaaccctgagccca

SEQ ID NO: 726721 - DNA, 15 bp, Homo sapiens
gaaccctgagcccaa

SEQ ID NO: 726722 - DNA, 15 bp, Homo sapiens
aaccctgagcccaaa

SEQ ID NO: 726723 - DNA, 15 bp, Homo sapiens
accctgagcccaaac

SEQ ID NO: 726724 - DNA, 15 bp, Homo sapiens
ccctgagcccaaact

SEQ ID NO: 726725 - DNA, 15 bp, Homo sapiens
cctgagcccaaacta

SEQ ID NO: 726726 - DNA, 15 bp, Homo sapiens
ctgagcccaaactac

SEQ ID NO: 726727 - DNA, 15 bp, Homo sapiens
tgagcccaaactact

SEQ ID NO: 726728 - DNA, 15 bp, Homo sapiens
gagcccaaactactc

SEQ ID NO: 726729 - DNA, 15 bp, Homo sapiens
agcccaaactactca

SEQ ID NO: 726730 - DNA, 15 bp, Homo sapiens
gcccaaactactcag

SEQ ID NO: 726731 - DNA, 15 bp, Homo sapiens
cccaaactactcagc

SEQ ID NO: 726732 - DNA, 15 bp, Homo sapiens
ccaaactactcagct

SEQ ID NO: 726733 - DNA, 15 bp, Homo sapiens
caaactactcagcta

SEQ ID NO: 726734 - DNA, 15 bp, Homo sapiens
aaactactcagctaa

SEQ ID NO: 726735 - DNA, 15 bp, Homo sapiens
aactactcagctaag

SEQ ID NO: 726736 - DNA, 15 bp, Homo sapiens
actactcagctaagc

SEQ ID NO: 726737 - DNA, 15 bp, Homo sapiens
ctactcagctaagcc

SEQ ID NO: 726738 - DNA, 15 bp, Homo sapiens
tactcagctaagcca

SEQ ID NO: 726739 - DNA, 15 bp, Homo sapiens
actcagctaagccac

SEQ ID NO: 726740 - DNA, 15 bp, Homo sapiens
ctcagctaagccact

SEQ ID NO: 726741 - DNA, 15 bp, Homo sapiens
tcagctaagccactc

SEQ ID NO: 726742 - DNA, 15 bp, Homo sapiens
cagctaagccactcc

SEQ ID NO: 726743 - DNA, 15 bp, Homo sapiens
agctaagccactcct

SEQ ID NO: 726744 - DNA, 15 bp, Homo sapiens
gctaagccactcctg

SEQ ID NO: 726745 - DNA, 15 bp, Homo sapiens
ctaagccactcctga

SEQ ID NO: 726746 - DNA, 15 bp, Homo sapiens
taagccactcctgaa

SEQ ID NO: 726747 - DNA, 15 bp, Homo sapiens
aagccactcctgaat

SEQ ID NO: 726748 - DNA, 15 bp, Homo sapiens
agccactcctgaatt

SEQ ID NO: 726749 - DNA, 15 bp, Homo sapiens
gccactcctgaattc

SEQ ID NO: 726750 - DNA, 15 bp, Homo sapiens
ccactcctgaattcc

SEQ ID NO: 726751 - DNA, 15 bp, Homo sapiens
cactcctgaattcct

SEQ ID NO: 726752 - DNA, 15 bp, Homo sapiens
actcctgaattcctg

SEQ ID NO: 726753 - DNA, 15 bp, Homo sapiens
ctcctgaattcctga

SEQ ID NO: 726754 - DNA, 15 bp, Homo sapiens
tcctgaattcctgac

SEQ ID NO: 726755 - DNA, 15 bp, Homo sapiens
cctgaattcctgacc

SEQ ID NO: 726756 - DNA, 15 bp, Homo sapiens
ctgaattcctgaccc

SEQ ID NO: 726757 - DNA, 15 bp, Homo sapiens
tgaattcctgaccca

SEQ ID NO: 726758 - DNA, 15 bp, Homo sapiens
gaattcctgacccac

SEQ ID NO: 726759 - DNA, 15 bp, Homo sapiens
aattcctgacccaca

SEQ ID NO: 726760 - DNA, 15 bp, Homo sapiens
attcctgacccacag

SEQ ID NO: 726761 - DNA, 15 bp, Homo sapiens
ttcctgacccacaga

SEQ ID NO: 726762 - DNA, 15 bp, Homo sapiens
tcctgacccacagaa

SEQ ID NO: 726763 - DNA, 15 bp, Homo sapiens
cctgacccacagaaa

SEQ ID NO: 726764 - DNA, 15 bp, Homo sapiens
ctgacccacagaaac

SEQ ID NO: 726765 - DNA, 15 bp, Homo sapiens
tgacccacagaaact

SEQ ID NO: 726766 - DNA, 15 bp, Homo sapiens
gacccacagaaacta

SEQ ID NO: 726767 - DNA, 15 bp, Homo sapiens
acccacagaaactat

SEQ ID NO: 726768 - DNA, 15 bp, Homo sapiens
cccacagaaactatg

SEQ ID NO: 726769 - DNA, 15 bp, Homo sapiens
ccacagaaactatga

SEQ ID NO: 726770 - DNA, 15 bp, Homo sapiens
cacagaaactatgaa

SEQ ID NO: 726771 - DNA, 15 bp, Homo sapiens
acagaaactatgaaa

SEQ ID NO: 726772 - DNA, 15 bp, Homo sapiens
cagaaactatgaaac

SEQ ID NO: 726773 - DNA, 15 bp, Homo sapiens
agaaactatgaaaca

SEQ ID NO: 726774 - DNA, 15 bp, Homo sapiens
gaaactatgaaacaa

SEQ ID NO: 726775 - DNA, 15 bp, Homo sapiens
aaactatgaaacaag

SEQ ID NO: 726776 - DNA, 15 bp, Homo sapiens
aactatgaaacaaga

SEQ ID NO: 726777 - DNA, 15 bp, Homo sapiens
actatgaaacaagag

SEQ ID NO: 726778 - DNA, 15 bp, Homo sapiens
ctatgaaacaagagt

SEQ ID NO: 726779 - DNA, 15 bp, Homo sapiens
tatgaaacaagagtt

SEQ ID NO: 726780 - DNA, 15 bp, Homo sapiens
atgaaacaagagttt

SEQ ID NO: 726781 - DNA, 15 bp, Homo sapiens
tgaaacaagagtttc

SEQ ID NO: 726782 - DNA, 15 bp, Homo sapiens
gaaacaagagtttca

SEQ ID NO: 726783 - DNA, 15 bp, Homo sapiens
aaacaagagtttcat

SEQ ID NO: 726784 - DNA, 15 bp, Homo sapiens
aacaagagtttcatt

SEQ ID NO: 726785 - DNA, 15 bp, Homo sapiens
acaagagtttcattg

SEQ ID NO: 726786 - DNA, 15 bp, Homo sapiens
caagagtttcattgt

SEQ ID NO: 726787 - DNA, 15 bp, Homo sapiens
aagagtttcattgtt

SEQ ID NO: 726788 - DNA, 15 bp, Homo sapiens
agagtttcattgtta

SEQ ID NO: 726789 - DNA, 15 bp, Homo sapiens
gagtttcattgttat

SEQ ID NO: 726790 - DNA, 15 bp, Homo sapiens
agtttcattgttatt

SEQ ID NO: 726791 - DNA, 15 bp, Homo sapiens
gtttcattgttattt

SEQ ID NO: 726792 - DNA, 15 bp, Homo sapiens
tttcattgttatttt

SEQ ID NO: 726793 - DNA, 15 bp, Homo sapiens
ttcattgttattttg

SEQ ID NO: 726794 - DNA, 15 bp, Homo sapiens
tcattgttattttga

SEQ ID NO: 726795 - DNA, 15 bp, Homo sapiens
cattgttattttgaa

SEQ ID NO: 726796 - DNA, 15 bp, Homo sapiens
attgttattttgaag

SEQ ID NO: 726797 - DNA, 15 bp, Homo sapiens
ttgttattttgaagc

SEQ ID NO: 726798 - DNA, 15 bp, Homo sapiens
tgttattttgaagcc

SEQ ID NO: 726799 - DNA, 15 bp, Homo sapiens
gttattttgaagcca

SEQ ID NO: 726800 - DNA, 15 bp, Homo sapiens
ttattttgaagccaa

SEQ ID NO: 726801 - DNA, 15 bp, Homo sapiens
tattttgaagccaat

SEQ ID NO: 726802 - DNA, 15 bp, Homo sapiens
attttgaagccaata

SEQ ID NO: 726803 - DNA, 15 bp, Homo sapiens
ttttgaagccaataa

SEQ ID NO: 726804 - DNA, 15 bp, Homo sapiens
tttgaagccaataag

SEQ ID NO: 726805 - DNA, 15 bp, Homo sapiens
ttgaagccaataagt

SEQ ID NO: 726806 - DNA, 15 bp, Homo sapiens
tgaagccaataagtt

SEQ ID NO: 726807 - DNA, 15 bp, Homo sapiens
gaagccaataagttt

SEQ ID NO: 726808 - DNA, 15 bp, Homo sapiens
aagccaataagtttt

SEQ ID NO: 726809 - DNA, 15 bp, Homo sapiens
agccaataagttttg

SEQ ID NO: 726810 - DNA, 15 bp, Homo sapiens
gccaataagttttgg

SEQ ID NO: 726811 - DNA, 15 bp, Homo sapiens
ccaataagttttggg

SEQ ID NO: 726812 - DNA, 15 bp, Homo sapiens
caataagttttgggg

SEQ ID NO: 726813 - DNA, 15 bp, Homo sapiens
aataagttttggggt

SEQ ID NO: 726814 - DNA, 15 bp, Homo sapiens
ataagttttggggta

SEQ ID NO: 726815 - DNA, 15 bp, Homo sapiens
taagttttggggtaa

SEQ ID NO: 726816 - DNA, 15 bp, Homo sapiens
aagttttggggtaat

SEQ ID NO: 726817 - DNA, 15 bp, Homo sapiens
agttttggggtaatt

SEQ ID NO: 726818 - DNA, 15 bp, Homo sapiens
gttttggggtaattt

SEQ ID NO: 726819 - DNA, 15 bp, Homo sapiens
ttttggggtaatttg

SEQ ID NO: 726820 - DNA, 15 bp, Homo sapiens
tttggggtaatttgc

SEQ ID NO: 726821 - DNA, 15 bp, Homo sapiens
ttggggtaatttgct

SEQ ID NO: 726822 - DNA, 15 bp, Homo sapiens
tggggtaatttgctg

SEQ ID NO: 726823 - DNA, 15 bp, Homo sapiens
ggggtaatttgctgc

SEQ ID NO: 726824 - DNA, 15 bp, Homo sapiens
gggtaatttgctgca

SEQ ID NO: 726825 - DNA, 15 bp, Homo sapiens
ggtaatttgctgcaa

SEQ ID NO: 726826 - DNA, 15 bp, Homo sapiens
gtaatttgctgcaat

SEQ ID NO: 726827 - DNA, 15 bp, Homo sapiens
taatttgctgcaata

SEQ ID NO: 726828 - DNA, 15 bp, Homo sapiens
aatttgctgcaatag

SEQ ID NO: 726829 - DNA, 15 bp, Homo sapiens
atttgctgcaatagg

SEQ ID NO: 726830 - DNA, 15 bp, Homo sapiens
tttgctgcaatagga

SEQ ID NO: 726831 - DNA, 15 bp, Homo sapiens
ttgctgcaataggac

SEQ ID NO: 726832 - DNA, 15 bp, Homo sapiens
tgctgcaataggact

SEQ ID NO: 726833 - DNA, 15 bp, Homo sapiens
gctgcaataggacta

SEQ ID NO: 726834 - DNA, 15 bp, Homo sapiens
ctgcaataggactaa

SEQ ID NO: 726835 - DNA, 15 bp, Homo sapiens
tgcaataggactaaa

SEQ ID NO: 726836 - DNA, 15 bp, Homo sapiens
gcaataggactaaaa

SEQ ID NO: 726837 - DNA, 15 bp, Homo sapiens
caataggactaaaat

SEQ ID NO: 726838 - DNA, 15 bp, Homo sapiens
aataggactaaaata

SEQ ID NO: 726839 - DNA, 15 bp, Homo sapiens
ataggactaaaatat

SEQ ID NO: 726840 - DNA, 15 bp, Homo sapiens
taggactaaaatatc

SEQ ID NO: 726841 - DNA, 15 bp, Homo sapiens
aggactaaaatatct

SEQ ID NO: 726842 - DNA, 15 bp, Homo sapiens
ggactaaaatatctc

SEQ ID NO: 726843 - DNA, 15 bp, Homo sapiens
gactaaaatatctcc

SEQ ID NO: 726844 - DNA, 15 bp, Homo sapiens
actaaaatatctccc

SEQ ID NO: 726845 - DNA, 15 bp, Homo sapiens
ctaaaatatctcccc

SEQ ID NO: 726846 - DNA, 15 bp, Homo sapiens
taaaatatctcccct

SEQ ID NO: 726847 - DNA, 15 bp, Homo sapiens
aaaatatctcccctg

SEQ ID NO: 726848 - DNA, 15 bp, Homo sapiens
aaatatctcccctgt

SEQ ID NO: 726849 - DNA, 15 bp, Homo sapiens
aatatctcccctgtc

SEQ ID NO: 726850 - DNA, 15 bp, Homo sapiens
atatctcccctgtca

SEQ ID NO: 726851 - DNA, 15 bp, Homo sapiens
tatctcccctgtcaa

SEQ ID NO: 726852 - DNA, 15 bp, Homo sapiens
atctcccctgtcaaa

SEQ ID NO: 726853 - DNA, 15 bp, Homo sapiens
tctcccctgtcaaaa

SEQ ID NO: 726854 - DNA, 15 bp, Homo sapiens
ctcccctgtcaaaaa

SEQ ID NO: 726855 - DNA, 15 bp, Homo sapiens
tcccctgtcaaaaat

SEQ ID NO: 726856 - DNA, 15 bp, Homo sapiens
cccctgtcaaaaata

SEQ ID NO: 726857 - DNA, 15 bp, Homo sapiens
ccctgtcaaaaatat

SEQ ID NO: 726858 - DNA, 15 bp, Homo sapiens
cctgtcaaaaatatt

SEQ ID NO: 726859 - DNA, 15 bp, Homo sapiens
ctgtcaaaaatatta

SEQ ID NO: 726860 - DNA, 15 bp, Homo sapiens
tgtcaaaaatattag

SEQ ID NO: 726861 - DNA, 15 bp, Homo sapiens
gtcaaaaatattagt

SEQ ID NO: 726862 - DNA, 15 bp, Homo sapiens
tcaaaaatattagta

SEQ ID NO: 726863 - DNA, 15 bp, Homo sapiens
caaaaatattagtac

SEQ ID NO: 726864 - DNA, 15 bp, Homo sapiens
aaaaatattagtact

SEQ ID NO: 726865 - DNA, 15 bp, Homo sapiens
aaaatattagtactg

SEQ ID NO: 726866 - DNA, 15 bp, Homo sapiens
aaatattagtactgg

SEQ ID NO: 726867 - DNA, 15 bp, Homo sapiens
aatattagtactggc

SEQ ID NO: 726868 - DNA, 15 bp, Homo sapiens
atattagtactggcc

SEQ ID NO: 726869 - DNA, 15 bp, Homo sapiens
tattagtactggccg

SEQ ID NO: 726870 - DNA, 15 bp, Homo sapiens
attagtactggccgg

SEQ ID NO: 726871 - DNA, 15 bp, Homo sapiens
ttagtactggccggg

SEQ ID NO: 726872 - DNA, 15 bp, Homo sapiens
tagtactggccgggc

SEQ ID NO: 726873 - DNA, 15 bp, Homo sapiens
agtactggccgggcg

SEQ ID NO: 726874 - DNA, 15 bp, Homo sapiens
gtactggccgggcgc

SEQ ID NO: 726875 - DNA, 15 bp, Homo sapiens
tactggccgggcgcg

SEQ ID NO: 726876 - DNA, 15 bp, Homo sapiens
actggccgggcgcgg

SEQ ID NO: 726877 - DNA, 15 bp, Homo sapiens
ctggccgggcgcggt

SEQ ID NO: 726878 - DNA, 15 bp, Homo sapiens
tggccgggcgcggtg

SEQ ID NO: 726879 - DNA, 15 bp, Homo sapiens
ggtggctcacgccta

SEQ ID NO: 726880 - DNA, 15 bp, Homo sapiens
gtggctcacgcctat

SEQ ID NO: 726881 - DNA, 15 bp, Homo sapiens
tggctcacgcctata

SEQ ID NO: 726882 - DNA, 15 bp, Homo sapiens
ggctcacgcctataa

SEQ ID NO: 726883 - DNA, 15 bp, Homo sapiens
gctcacgcctataat

SEQ ID NO: 726884 - DNA, 15 bp, Homo sapiens
ctcacgcctataatc

SEQ ID NO: 726885 - DNA, 15 bp, Homo sapiens
tcacgcctataatcc

SEQ ID NO: 726886 - DNA, 15 bp, Homo sapiens
cacgcctataatccc

SEQ ID NO: 726887 - DNA, 15 bp, Homo sapiens
acgcctataatccca

SEQ ID NO: 726888 - DNA, 15 bp, Homo sapiens
cgcctataatcccag

SEQ ID NO: 726889 - DNA, 15 bp, Homo sapiens
gcctataatcccagc

SEQ ID NO: 726890 - DNA, 15 bp, Homo sapiens
cctataatcccagca

SEQ ID NO: 726891 - DNA, 15 bp, Homo sapiens
ctataatcccagcac

SEQ ID NO: 726892 - DNA, 15 bp, Homo sapiens
tataatcccagcact

SEQ ID NO: 726893 - DNA, 15 bp, Homo sapiens
ataatcccagcactt

SEQ ID NO: 726894 - DNA, 15 bp, Homo sapiens
cccagcactttgggt

SEQ ID NO: 726895 - DNA, 15 bp, Homo sapiens
ccagcactttgggtg

SEQ ID NO: 726896 - DNA, 15 bp, Homo sapiens
cagcactttgggtgt

SEQ ID NO: 726897 - DNA, 15 bp, Homo sapiens
agcactttgggtgtc

SEQ ID NO: 726898 - DNA, 15 bp, Homo sapiens
gcactttgggtgtcc

SEQ ID NO: 726899 - DNA, 15 bp, Homo sapiens
cactttgggtgtcca

SEQ ID NO: 726900 - DNA, 15 bp, Homo sapiens
actttgggtgtccaa

SEQ ID NO: 726901 - DNA, 15 bp, Homo sapiens
ctttgggtgtccaag

SEQ ID NO: 726902 - DNA, 15 bp, Homo sapiens
tttgggtgtccaagc

SEQ ID NO: 726903 - DNA, 15 bp, Homo sapiens
ttgggtgtccaagcc

SEQ ID NO: 726904 - DNA, 15 bp, Homo sapiens
tgggtgtccaagccg

SEQ ID NO: 726905 - DNA, 15 bp, Homo sapiens
gggtgtccaagccgg

SEQ ID NO: 726906 - DNA, 15 bp, Homo sapiens
ggtgtccaagccggg

SEQ ID NO: 726907 - DNA, 15 bp, Homo sapiens
gtgtccaagccgggc

SEQ ID NO: 726908 - DNA, 15 bp, Homo sapiens
tgtccaagccgggca

SEQ ID NO: 726909 - DNA, 15 bp, Homo sapiens
gtccaagccgggcag

SEQ ID NO: 726910 - DNA, 15 bp, Homo sapiens
tccaagccgggcaga

SEQ ID NO: 726911 - DNA, 15 bp, Homo sapiens
ccaagccgggcagat

SEQ ID NO: 726912 - DNA, 15 bp, Homo sapiens
caagccgggcagatc

SEQ ID NO: 726913 - DNA, 15 bp, Homo sapiens
aagccgggcagatca

SEQ ID NO: 726914 - DNA, 15 bp, Homo sapiens
agccgggcagatcac

SEQ ID NO: 726915 - DNA, 15 bp, Homo sapiens
gccgggcagatcact

SEQ ID NO: 726916 - DNA, 15 bp, Homo sapiens
ccgggcagatcactt

SEQ ID NO: 726917 - DNA, 15 bp, Homo sapiens
cgggcagatcacttg

SEQ ID NO: 726918 - DNA, 15 bp, Homo sapiens
gggcagatcacttga

SEQ ID NO: 726919 - DNA, 15 bp, Homo sapiens
ggcagatcacttgag

SEQ ID NO: 726920 - DNA, 15 bp, Homo sapiens
gcagatcacttgagg

SEQ ID NO: 726921 - DNA, 15 bp, Homo sapiens
cagatcacttgaggt

SEQ ID NO: 726922 - DNA, 15 bp, Homo sapiens
agatcacttgaggtc

SEQ ID NO: 726923 - DNA, 15 bp, Homo sapiens
gatcacttgaggtca

SEQ ID NO: 726924 - DNA, 15 bp, Homo sapiens
atcacttgaggtcag

SEQ ID NO: 726925 - DNA, 15 bp, Homo sapiens
tcacttgaggtcagg

SEQ ID NO: 726926 - DNA, 15 bp, Homo sapiens
cacttgaggtcagga

SEQ ID NO: 726927 - DNA, 15 bp, Homo sapiens
acttgaggtcaggag

SEQ ID NO: 726928 - DNA, 15 bp, Homo sapiens
gaggtcaggagttcc

SEQ ID NO: 726929 - DNA, 15 bp, Homo sapiens
aggtcaggagttcca

SEQ ID NO: 726930 - DNA, 15 bp, Homo sapiens
ggtcaggagttccag

SEQ ID NO: 726931 - DNA, 15 bp, Homo sapiens
gtcaggagttccaga

SEQ ID NO: 726932 - DNA, 15 bp, Homo sapiens
tcaggagttccagac

SEQ ID NO: 726933 - DNA, 15 bp, Homo sapiens
caggagttccagacc

SEQ ID NO: 726934 - DNA, 15 bp, Homo sapiens
aggagttccagacca

SEQ ID NO: 726935 - DNA, 15 bp, Homo sapiens
ggagttccagaccag

SEQ ID NO: 726936 - DNA, 15 bp, Homo sapiens
gagttccagaccagc

SEQ ID NO: 726937 - DNA, 15 bp, Homo sapiens
agttccagaccagcc

SEQ ID NO: 726938 - DNA, 15 bp, Homo sapiens
gttccagaccagcct

SEQ ID NO: 726939 - DNA, 15 bp, Homo sapiens
ttccagaccagcctg

SEQ ID NO: 726940 - DNA, 15 bp, Homo sapiens
tccagaccagcctgg

SEQ ID NO: 726941 - DNA, 15 bp, Homo sapiens
ccagaccagcctggc

SEQ ID NO: 726942 - DNA, 15 bp, Homo sapiens
cagaccagcctggcc

SEQ ID NO: 726943 - DNA, 15 bp, Homo sapiens
acatggtgaaacccc

SEQ ID NO: 726944 - DNA, 15 bp, Homo sapiens
catggtgaaacccca

SEQ ID NO: 726945 - DNA, 15 bp, Homo sapiens
atggtgaaaccccat

SEQ ID NO: 726946 - DNA, 15 bp, Homo sapiens
tggtgaaaccccatc

SEQ ID NO: 726947 - DNA, 15 bp, Homo sapiens
ggtgaaaccccatct

SEQ ID NO: 726948 - DNA, 15 bp, Homo sapiens
gtgaaaccccatctc

SEQ ID NO: 726949 - DNA, 15 bp, Homo sapiens
tgaaaccccatctct

SEQ ID NO: 726950 - DNA, 15 bp, Homo sapiens
gaaaccccatctcta

SEQ ID NO: 726951 - DNA, 15 bp, Homo sapiens
aaaccccatctctac

SEQ ID NO: 726952 - DNA, 15 bp, Homo sapiens
aaccccatctctact

SEQ ID NO: 726953 - DNA, 15 bp, Homo sapiens
accccatctctactg

SEQ ID NO: 726954 - DNA, 15 bp, Homo sapiens
ccccatctctactga

SEQ ID NO: 726955 - DNA, 15 bp, Homo sapiens
cccatctctactgaa

SEQ ID NO: 726956 - DNA, 15 bp, Homo sapiens
ccatctctactgaaa

SEQ ID NO: 726957 - DNA, 15 bp, Homo sapiens
catctctactgaaaa

SEQ ID NO: 726958 - DNA, 15 bp, Homo sapiens
atctctactgaaaat

SEQ ID NO: 726959 - DNA, 15 bp, Homo sapiens
tctctactgaaaata

SEQ ID NO: 726960 - DNA, 15 bp, Homo sapiens
ctctactgaaaatac

SEQ ID NO: 726961 - DNA, 15 bp, Homo sapiens
tctactgaaaataca

SEQ ID NO: 726962 - DNA, 15 bp, Homo sapiens
ctactgaaaatacaa

SEQ ID NO: 726963 - DNA, 15 bp, Homo sapiens
tactgaaaatacaaa

SEQ ID NO: 726964 - DNA, 15 bp, Homo sapiens
actgaaaatacaaaa

SEQ ID NO: 726965 - DNA, 15 bp, Homo sapiens
ctgaaaatacaaaaa

SEQ ID NO: 726966 - DNA, 15 bp, Homo sapiens
tgaaaatacaaaaat

SEQ ID NO: 726967 - DNA, 15 bp, Homo sapiens
gaaaatacaaaaatt

SEQ ID NO: 726968 - DNA, 15 bp, Homo sapiens
aattagctgggcatg

SEQ ID NO: 726969 - DNA, 15 bp, Homo sapiens
attagctgggcatgg

SEQ ID NO: 726970 - DNA, 15 bp, Homo sapiens
ttagctgggcatggt

SEQ ID NO: 726971 - DNA, 15 bp, Homo sapiens
tagctgggcatggtg

SEQ ID NO: 726972 - DNA, 15 bp, Homo sapiens
agctgggcatggtgg

SEQ ID NO: 726973 - DNA, 15 bp, Homo sapiens
gctgggcatggtggc

SEQ ID NO: 726974 - DNA, 15 bp, Homo sapiens
ctgggcatggtggca

SEQ ID NO: 726975 - DNA, 15 bp, Homo sapiens
tgggcatggtggcag

SEQ ID NO: 726976 - DNA, 15 bp, Homo sapiens
gcgcctgtaatcccg

SEQ ID NO: 726977 - DNA, 15 bp, Homo sapiens
cgcctgtaatcccgg

SEQ ID NO: 726978 - DNA, 15 bp, Homo sapiens
gcctgtaatcccggc

SEQ ID NO: 726979 - DNA, 15 bp, Homo sapiens
cctgtaatcccggct

SEQ ID NO: 726980 - DNA, 15 bp, Homo sapiens
ctgtaatcccggcta

SEQ ID NO: 726981 - DNA, 15 bp, Homo sapiens
tgtaatcccggctac

SEQ ID NO: 726982 - DNA, 15 bp, Homo sapiens
gtaatcccggctact

SEQ ID NO: 726983 - DNA, 15 bp, Homo sapiens
taatcccggctactt

SEQ ID NO: 726984 - DNA, 15 bp, Homo sapiens
aatcccggctacttg

SEQ ID NO: 726985 - DNA, 15 bp, Homo sapiens
atcccggctacttgg

SEQ ID NO: 726986 - DNA, 15 bp, Homo sapiens
tcccggctacttggg

SEQ ID NO: 726987 - DNA, 15 bp, Homo sapiens
cccggctacttgggg

SEQ ID NO: 726988 - DNA, 15 bp, Homo sapiens
ccggctacttggggg

SEQ ID NO: 726989 - DNA, 15 bp, Homo sapiens
cggctacttggggga

SEQ ID NO: 726990 - DNA, 15 bp, Homo sapiens
ggctacttgggggag

SEQ ID NO: 726991 - DNA, 15 bp, Homo sapiens
gctacttgggggagg

SEQ ID NO: 726992 - DNA, 15 bp, Homo sapiens
ctacttgggggaggc

SEQ ID NO: 726993 - DNA, 15 bp, Homo sapiens
tacttgggggaggct

SEQ ID NO: 726994 - DNA, 15 bp, Homo sapiens
acttgggggaggcta

SEQ ID NO: 726995 - DNA, 15 bp, Homo sapiens
cttgggggaggctaa

SEQ ID NO: 726996 - DNA, 15 bp, Homo sapiens
ttgggggaggctaag

SEQ ID NO: 726997 - DNA, 15 bp, Homo sapiens
tgggggaggctaagg

SEQ ID NO: 726998 - DNA, 15 bp, Homo sapiens
gggggaggctaaggc

SEQ ID NO: 726999 - DNA, 15 bp, Homo sapiens
ggggaggctaaggca

SEQ ID NO: 727000 - DNA, 15 bp, Homo sapiens
gggaggctaaggcag

SEQ ID NO: 727001 - DNA, 15 bp, Homo sapiens
ggaggctaaggcagg

SEQ ID NO: 727002 - DNA, 15 bp, Homo sapiens
gaggctaaggcagga

SEQ ID NO: 727003 - DNA, 15 bp, Homo sapiens
taaggcaggagaatc

SEQ ID NO: 727004 - DNA, 15 bp, Homo sapiens
aaggcaggagaatcg

SEQ ID NO: 727005 - DNA, 15 bp, Homo sapiens
aggcaggagaatcgc

SEQ ID NO: 727006 - DNA, 15 bp, Homo sapiens
ggcaggagaatcgct

SEQ ID NO: 727007 - DNA, 15 bp, Homo sapiens
gcaggagaatcgctt

SEQ ID NO: 727008 - DNA, 15 bp, Homo sapiens
caggagaatcgcttg

SEQ ID NO: 727009 - DNA, 15 bp, Homo sapiens
cttgaacttgggaga

SEQ ID NO: 727010 - DNA, 15 bp, Homo sapiens
ttgaacttgggagac

SEQ ID NO: 727011 - DNA, 15 bp, Homo sapiens
tgaacttgggagacg

SEQ ID NO: 727012 - DNA, 15 bp, Homo sapiens
gaacttgggagacgg

SEQ ID NO: 727013 - DNA, 15 bp, Homo sapiens
aacttgggagacgga

SEQ ID NO: 727014 - DNA, 15 bp, Homo sapiens
acttgggagacggag

SEQ ID NO: 727015 - DNA, 15 bp, Homo sapiens
cttgggagacggagg

SEQ ID NO: 727016 - DNA, 15 bp, Homo sapiens
ttgggagacggaggt

SEQ ID NO: 727017 - DNA, 15 bp, Homo sapiens
tgggagacggaggtt

SEQ ID NO: 727018 - DNA, 15 bp, Homo sapiens
gggagacggaggttg

SEQ ID NO: 727019 - DNA, 15 bp, Homo sapiens
ggagacggaggttgt

SEQ ID NO: 727020 - DNA, 15 bp, Homo sapiens
gagacggaggttgta

SEQ ID NO: 727021 - DNA, 15 bp, Homo sapiens
agacggaggttgtag

SEQ ID NO: 727022 - DNA, 15 bp, Homo sapiens
gacggaggttgtagt

SEQ ID NO: 727023 - DNA, 15 bp, Homo sapiens
acggaggttgtagtg

SEQ ID NO: 727024 - DNA, 15 bp, Homo sapiens
cggaggttgtagtga

SEQ ID NO: 727025 - DNA, 15 bp, Homo sapiens
aggttgtagtgagcc

SEQ ID NO: 727026 - DNA, 15 bp, Homo sapiens
ggttgtagtgagcca

SEQ ID NO: 727027 - DNA, 15 bp, Homo sapiens
gttgtagtgagccaa

SEQ ID NO: 727028 - DNA, 15 bp, Homo sapiens
ttgtagtgagccaag

SEQ ID NO: 727029 - DNA, 15 bp, Homo sapiens
tgtagtgagccaaga

SEQ ID NO: 727030 - DNA, 15 bp, Homo sapiens
gtagtgagccaagac

SEQ ID NO: 727031 - DNA, 15 bp, Homo sapiens
tagtgagccaagact

SEQ ID NO: 727032 - DNA, 15 bp, Homo sapiens
agtgagccaagactg

SEQ ID NO: 727033 - DNA, 15 bp, Homo sapiens
gtgagccaagactgt

SEQ ID NO: 727034 - DNA, 15 bp, Homo sapiens
tgagccaagactgtg

SEQ ID NO: 727035 - DNA, 15 bp, Homo sapiens
gagccaagactgtgc

SEQ ID NO: 727036 - DNA, 15 bp, Homo sapiens
agccaagactgtgcc

SEQ ID NO: 727037 - DNA, 15 bp, Homo sapiens
gccaagactgtgcca

SEQ ID NO: 727038 - DNA, 15 bp, Homo sapiens
ccaagactgtgccat

SEQ ID NO: 727039 - DNA, 15 bp, Homo sapiens
caagactgtgccatt

SEQ ID NO: 727040 - DNA, 15 bp, Homo sapiens
aagactgtgccattg

SEQ ID NO: 727041 - DNA, 15 bp, Homo sapiens
agactgtgccattgc

SEQ ID NO: 727042 - DNA, 15 bp, Homo sapiens
gactgtgccattgca

SEQ ID NO: 727043 - DNA, 15 bp, Homo sapiens
actgtgccattgcac

SEQ ID NO: 727044 - DNA, 15 bp, Homo sapiens
ctgtgccattgcact

SEQ ID NO: 727045 - DNA, 15 bp, Homo sapiens
cactccagcctggtc

SEQ ID NO: 727046 - DNA, 15 bp, Homo sapiens
actccagcctggtca

SEQ ID NO: 727047 - DNA, 15 bp, Homo sapiens
ctccagcctggtcaa

SEQ ID NO: 727048 - DNA, 15 bp, Homo sapiens
tccagcctggtcaac

SEQ ID NO: 727049 - DNA, 15 bp, Homo sapiens
ccagcctggtcaaca

SEQ ID NO: 727050 - DNA, 15 bp, Homo sapiens
cagcctggtcaacaa

SEQ ID NO: 727051 - DNA, 15 bp, Homo sapiens
agcctggtcaacaag

SEQ ID NO: 727052 - DNA, 15 bp, Homo sapiens
gcctggtcaacaaga

SEQ ID NO: 727053 - DNA, 15 bp, Homo sapiens
cctggtcaacaagag

SEQ ID NO: 727054 - DNA, 15 bp, Homo sapiens
ctggtcaacaagagc

SEQ ID NO: 727055 - DNA, 15 bp, Homo sapiens
tggtcaacaagagcg

SEQ ID NO: 727056 - DNA, 15 bp, Homo sapiens
ggtcaacaagagcga

SEQ ID NO: 727057 - DNA, 15 bp, Homo sapiens
gtcaacaagagcgaa

SEQ ID NO: 727058 - DNA, 15 bp, Homo sapiens
tcaacaagagcgaaa

SEQ ID NO: 727059 - DNA, 15 bp, Homo sapiens
caacaagagcgaaac

SEQ ID NO: 727060 - DNA, 15 bp, Homo sapiens
aacaagagcgaaact

SEQ ID NO: 727061 - DNA, 15 bp, Homo sapiens
acaagagcgaaactc

SEQ ID NO: 727062 - DNA, 15 bp, Homo sapiens
caagagcgaaactcc

SEQ ID NO: 727063 - DNA, 15 bp, Homo sapiens
aagagcgaaactcca

SEQ ID NO: 727064 - DNA, 15 bp, Homo sapiens
agagcgaaactccat

SEQ ID NO: 727065 - DNA, 15 bp, Homo sapiens
gagcgaaactccatc

SEQ ID NO: 727066 - DNA, 15 bp, Homo sapiens
agcgaaactccatct

SEQ ID NO: 727067 - DNA, 15 bp, Homo sapiens
gcgaaactccatctc

SEQ ID NO: 727068 - DNA, 15 bp, Homo sapiens
cgaaactccatctca

SEQ ID NO: 727069 - DNA, 15 bp, Homo sapiens
gaaactccatctcaa

SEQ ID NO: 727070 - DNA, 15 bp, Homo sapiens
aaactccatctcaat

SEQ ID NO: 727071 - DNA, 15 bp, Homo sapiens
aactccatctcaata

SEQ ID NO: 727072 - DNA, 15 bp, Homo sapiens
actccatctcaataa

SEQ ID NO: 727073 - DNA, 15 bp, Homo sapiens
ctccatctcaataaa

SEQ ID NO: 727074 - DNA, 15 bp, Homo sapiens
tccatctcaataaaa

SEQ ID NO: 727075 - DNA, 15 bp, Homo sapiens
ccatctcaataaaaa

SEQ ID NO: 727076 - DNA, 15 bp, Homo sapiens
catctcaataaaaaa

SEQ ID NO: 727077 - DNA, 15 bp, Homo sapiens
atctcaataaaaaaa

SEQ ID NO: 727078 - DNA, 15 bp, Homo sapiens
tctcaataaaaaaaa

SEQ ID NO: 727079 - DNA, 15 bp, Homo sapiens
ctcaataaaaaaaat

SEQ ID NO: 727080 - DNA, 15 bp, Homo sapiens
tcaataaaaaaaata

SEQ ID NO: 727081 - DNA, 15 bp, Homo sapiens
caataaaaaaaataa

SEQ ID NO: 727082 - DNA, 15 bp, Homo sapiens
aataaaaaaaataaa

SEQ ID NO: 727083 - DNA, 15 bp, Homo sapiens
ataaaaaaaataaaa

SEQ ID NO: 727084 - DNA, 15 bp, Homo sapiens
taaaaaaaataaaaa

SEQ ID NO: 727085 - DNA, 15 bp, Homo sapiens
aaaaaaaataaaaaa

SEQ ID NO: 727086 - DNA, 15 bp, Homo sapiens
aaaaaaataaaaaat

SEQ ID NO: 727087 - DNA, 15 bp, Homo sapiens
aaaaaataaaaaata

SEQ ID NO: 727088 - DNA, 15 bp, Homo sapiens
aaaaataaaaaataa

SEQ ID NO: 727089 - DNA, 15 bp, Homo sapiens
aaaataaaaaataaa

SEQ ID NO: 727090 - DNA, 15 bp, Homo sapiens
aaataaaaaataaaa

SEQ ID NO: 727091 - DNA, 15 bp, Homo sapiens
aataaaaaataaaaa

SEQ ID NO: 727092 - DNA, 15 bp, Homo sapiens
ataaaaaataaaaaa

SEQ ID NO: 727093 - DNA, 15 bp, Homo sapiens
taaaaaataaaaaaa

SEQ ID NO: 727094 - DNA, 15 bp, Homo sapiens
aaaaaataaaaaaaa

SEQ ID NO: 727095 - DNA, 15 bp, Homo sapiens
aaaaataaaaaaaaa

SEQ ID NO: 727096 - DNA, 15 bp, Homo sapiens
aaaataaaaaaaaaa

SEQ ID NO: 727097 - DNA, 15 bp, Homo sapiens
aaataaaaaaaaaaa

SEQ ID NO: 727098 - DNA, 15 bp, Homo sapiens
aataaaaaaaaaaaa

SEQ ID NO: 727099 - DNA, 15 bp, Homo sapiens
ataaaaaaaaaaaaa

SEQ ID NO: 727100 - DNA, 15 bp, Homo sapiens
taaaaaaaaaaaaaa

SEQ ID NO: 727101 - DNA, 15 bp, Homo sapiens
aaaaaacaaaaaaat

SEQ ID NO: 727102 - DNA, 15 bp, Homo sapiens
aaaaacaaaaaaatt

SEQ ID NO: 727103 - DNA, 15 bp, Homo sapiens
aaaacaaaaaaatta

SEQ ID NO: 727104 - DNA, 15 bp, Homo sapiens
aaacaaaaaaattag

SEQ ID NO: 727105 - DNA, 15 bp, Homo sapiens
aacaaaaaaattagt

SEQ ID NO: 727106 - DNA, 15 bp, Homo sapiens
acaaaaaaattagta

SEQ ID NO: 727107 - DNA, 15 bp, Homo sapiens
caaaaaaattagtac

SEQ ID NO: 727108 - DNA, 15 bp, Homo sapiens
aaaaaaattagtact

SEQ ID NO: 727109 - DNA, 15 bp, Homo sapiens
aaaaaattagtacta

SEQ ID NO: 727110 - DNA, 15 bp, Homo sapiens
aaaaattagtactaa

SEQ ID NO: 727111 - DNA, 15 bp, Homo sapiens
aaaattagtactaaa

SEQ ID NO: 727112 - DNA, 15 bp, Homo sapiens
aaattagtactaaaa

SEQ ID NO: 727113 - DNA, 15 bp, Homo sapiens
aattagtactaaaag

SEQ ID NO: 727114 - DNA, 15 bp, Homo sapiens
attagtactaaaaga

SEQ ID NO: 727115 - DNA, 15 bp, Homo sapiens
ttagtactaaaagag

SEQ ID NO: 727116 - DNA, 15 bp, Homo sapiens
tagtactaaaagaga

SEQ ID NO: 727117 - DNA, 15 bp, Homo sapiens
agtactaaaagagaa

SEQ ID NO: 727118 - DNA, 15 bp, Homo sapiens
gtactaaaagagaag

SEQ ID NO: 727119 - DNA, 15 bp, Homo sapiens
tactaaaagagaagc

SEQ ID NO: 727120 - DNA, 15 bp, Homo sapiens
actaaaagagaagca

SEQ ID NO: 727121 - DNA, 15 bp, Homo sapiens
ctaaaagagaagcag

SEQ ID NO: 727122 - DNA, 15 bp, Homo sapiens
taaaagagaagcagg

SEQ ID NO: 727123 - DNA, 15 bp, Homo sapiens
aaaagagaagcaggt

SEQ ID NO: 727124 - DNA, 15 bp, Homo sapiens
aaagagaagcaggta

SEQ ID NO: 727125 - DNA, 15 bp, Homo sapiens
aagagaagcaggtag

SEQ ID NO: 727126 - DNA, 15 bp, Homo sapiens
agagaagcaggtagg

SEQ ID NO: 727127 - DNA, 15 bp, Homo sapiens
gagaagcaggtagga

SEQ ID NO: 727128 - DNA, 15 bp, Homo sapiens
agaagcaggtaggaa

SEQ ID NO: 727129 - DNA, 15 bp, Homo sapiens
gaagcaggtaggaag

SEQ ID NO: 727130 - DNA, 15 bp, Homo sapiens
aagcaggtaggaagt

SEQ ID NO: 727131 - DNA, 15 bp, Homo sapiens
agcaggtaggaagta

SEQ ID NO: 727132 - DNA, 15 bp, Homo sapiens
gcaggtaggaagtag

SEQ ID NO: 727133 - DNA, 15 bp, Homo sapiens
caggtaggaagtaga

SEQ ID NO: 727134 - DNA, 15 bp, Homo sapiens
aggtaggaagtagag

SEQ ID NO: 727135 - DNA, 15 bp, Homo sapiens
ggtaggaagtagaga

SEQ ID NO: 727136 - DNA, 15 bp, Homo sapiens
gtaggaagtagagag

SEQ ID NO: 727137 - DNA, 15 bp, Homo sapiens
taggaagtagagagg

SEQ ID NO: 727138 - DNA, 15 bp, Homo sapiens
aggaagtagagagga

SEQ ID NO: 727139 - DNA, 15 bp, Homo sapiens
ggaagtagagaggaa

SEQ ID NO: 727140 - DNA, 15 bp, Homo sapiens
gaagtagagaggaaa

SEQ ID NO: 727141 - DNA, 15 bp, Homo sapiens
aagtagagaggaaat

SEQ ID NO: 727142 - DNA, 15 bp, Homo sapiens
agtagagaggaaata

SEQ ID NO: 727143 - DNA, 15 bp, Homo sapiens
gtagagaggaaatag

SEQ ID NO: 727144 - DNA, 15 bp, Homo sapiens
tagagaggaaatagt

SEQ ID NO: 727145 - DNA, 15 bp, Homo sapiens
agagaggaaatagtt

SEQ ID NO: 727146 - DNA, 15 bp, Homo sapiens
gagaggaaatagttt

SEQ ID NO: 727147 - DNA, 15 bp, Homo sapiens
agaggaaatagttta

SEQ ID NO: 727148 - DNA, 15 bp, Homo sapiens
gaggaaatagtttat

SEQ ID NO: 727149 - DNA, 15 bp, Homo sapiens
aggaaatagtttata

SEQ ID NO: 727150 - DNA, 15 bp, Homo sapiens
ggaaatagtttatac

SEQ ID NO: 727151 - DNA, 15 bp, Homo sapiens
gaaatagtttatact

SEQ ID NO: 727152 - DNA, 15 bp, Homo sapiens
aaatagtttatactg

SEQ ID NO: 727153 - DNA, 15 bp, Homo sapiens
aatagtttatactgt

SEQ ID NO: 727154 - DNA, 15 bp, Homo sapiens
atagtttatactgtg

SEQ ID NO: 727155 - DNA, 15 bp, Homo sapiens
tagtttatactgtga

SEQ ID NO: 727156 - DNA, 15 bp, Homo sapiens
agtttatactgtgaa

SEQ ID NO: 727157 - DNA, 15 bp, Homo sapiens
gtttatactgtgaac

SEQ ID NO: 727158 - DNA, 15 bp, Homo sapiens
tttatactgtgaact

SEQ ID NO: 727159 - DNA, 15 bp, Homo sapiens
ttatactgtgaactg

SEQ ID NO: 727160 - DNA, 15 bp, Homo sapiens
tatactgtgaactgt

SEQ ID NO: 727161 - DNA, 15 bp, Homo sapiens
atactgtgaactgtt

SEQ ID NO: 727162 - DNA, 15 bp, Homo sapiens
tactgtgaactgttc

SEQ ID NO: 727163 - DNA, 15 bp, Homo sapiens
actgtgaactgttct

SEQ ID NO: 727164 - DNA, 15 bp, Homo sapiens
ctgtgaactgttctt

SEQ ID NO: 727165 - DNA, 15 bp, Homo sapiens
tgtgaactgttctta

SEQ ID NO: 727166 - DNA, 15 bp, Homo sapiens
gtgaactgttcttat

SEQ ID NO: 727167 - DNA, 15 bp, Homo sapiens
tgaactgttcttatc

SEQ ID NO: 727168 - DNA, 15 bp, Homo sapiens
gaactgttcttatcc

SEQ ID NO: 727169 - DNA, 15 bp, Homo sapiens
aactgttcttatcca

SEQ ID NO: 727170 - DNA, 15 bp, Homo sapiens
actgttcttatccag

SEQ ID NO: 727171 - DNA, 15 bp, Homo sapiens
ctgttcttatccagc

SEQ ID NO: 727172 - DNA, 15 bp, Homo sapiens
tgttcttatccagcc

SEQ ID NO: 727173 - DNA, 15 bp, Homo sapiens
gttcttatccagccg

SEQ ID NO: 727174 - DNA, 15 bp, Homo sapiens
ttcttatccagccgc

SEQ ID NO: 727175 - DNA, 15 bp, Homo sapiens
tcttatccagccgca

SEQ ID NO: 727176 - DNA, 15 bp, Homo sapiens
cttatccagccgcag

SEQ ID NO: 727177 - DNA, 15 bp, Homo sapiens
ttatccagccgcagt

SEQ ID NO: 727178 - DNA, 15 bp, Homo sapiens
tatccagccgcagtt

SEQ ID NO: 727179 - DNA, 15 bp, Homo sapiens
atccagccgcagttg

SEQ ID NO: 727180 - DNA, 15 bp, Homo sapiens
tccagccgcagttgg

SEQ ID NO: 727181 - DNA, 15 bp, Homo sapiens
ccagccgcagttggc

SEQ ID NO: 727182 - DNA, 15 bp, Homo sapiens
cagccgcagttggct

SEQ ID NO: 727183 - DNA, 15 bp, Homo sapiens
agccgcagttggctt

SEQ ID NO: 727184 - DNA, 15 bp, Homo sapiens
gccgcagttggcttt

SEQ ID NO: 727185 - DNA, 15 bp, Homo sapiens
ccgcagttggcttta

SEQ ID NO: 727186 - DNA, 15 bp, Homo sapiens
cgcagttggctttaa

SEQ ID NO: 727187 - DNA, 15 bp, Homo sapiens
gcagttggctttaac

SEQ ID NO: 727188 - DNA, 15 bp, Homo sapiens
cagttggctttaact

SEQ ID NO: 727189 - DNA, 15 bp, Homo sapiens
agttggctttaactt

SEQ ID NO: 727190 - DNA, 15 bp, Homo sapiens
gttggctttaacttt

SEQ ID NO: 727191 - DNA, 15 bp, Homo sapiens
ttggctttaactttc

SEQ ID NO: 727192 - DNA, 15 bp, Homo sapiens
tggctttaactttca

SEQ ID NO: 727193 - DNA, 15 bp, Homo sapiens
ggctttaactttcag

SEQ ID NO: 727194 - DNA, 15 bp, Homo sapiens
gctttaactttcagt

SEQ ID NO: 727195 - DNA, 15 bp, Homo sapiens
ctttaactttcagtt

SEQ ID NO: 727196 - DNA, 15 bp, Homo sapiens
tttaactttcagttc

SEQ ID NO: 727197 - DNA, 15 bp, Homo sapiens
ttaactttcagttct

SEQ ID NO: 727198 - DNA, 15 bp, Homo sapiens
taactttcagttctt

SEQ ID NO: 727199 - DNA, 15 bp, Homo sapiens
aactttcagttcttc

SEQ ID NO: 727200 - DNA, 15 bp, Homo sapiens
actttcagttcttca

SEQ ID NO: 727201 - DNA, 15 bp, Homo sapiens
ctttcagttcttcag

SEQ ID NO: 727202 - DNA, 15 bp, Homo sapiens
tttcagttcttcaga

SEQ ID NO: 727203 - DNA, 15 bp, Homo sapiens
ttcagttcttcagat

SEQ ID NO: 727204 - DNA, 15 bp, Homo sapiens
tcagttcttcagatg

SEQ ID NO: 727205 - DNA, 15 bp, Homo sapiens
cagttcttcagatgc

SEQ ID NO: 727206 - DNA, 15 bp, Homo sapiens
agttcttcagatgcg

SEQ ID NO: 727207 - DNA, 15 bp, Homo sapiens
gttcttcagatgcgt

SEQ ID NO: 727208 - DNA, 15 bp, Homo sapiens
ttcttcagatgcgtc

SEQ ID NO: 727209 - DNA, 15 bp, Homo sapiens
tcttcagatgcgtca

SEQ ID NO: 727210 - DNA, 15 bp, Homo sapiens
cttcagatgcgtcag

SEQ ID NO: 727211 - DNA, 15 bp, Homo sapiens
ttcagatgcgtcagg

SEQ ID NO: 727212 - DNA, 15 bp, Homo sapiens
tcagatgcgtcaggt

SEQ ID NO: 727213 - DNA, 15 bp, Homo sapiens
cagatgcgtcaggtc

SEQ ID NO: 727214 - DNA, 15 bp, Homo sapiens
agatgcgtcaggtcc

SEQ ID NO: 727215 - DNA, 15 bp, Homo sapiens
gatgcgtcaggtcct

SEQ ID NO: 727216 - DNA, 15 bp, Homo sapiens
atgcgtcaggtcctt

SEQ ID NO: 727217 - DNA, 15 bp, Homo sapiens
tgcgtcaggtccttt

SEQ ID NO: 727218 - DNA, 15 bp, Homo sapiens
gcgtcaggtcctttg

SEQ ID NO: 727219 - DNA, 15 bp, Homo sapiens
cgtcaggtcctttgg

SEQ ID NO: 727220 - DNA, 15 bp, Homo sapiens
gtcaggtcctttgga

SEQ ID NO: 727221 - DNA, 15 bp, Homo sapiens
tcaggtcctttggac

SEQ ID NO: 727222 - DNA, 15 bp, Homo sapiens
caggtcctttggaca

SEQ ID NO: 727223 - DNA, 15 bp, Homo sapiens
aggtcctttggacat

SEQ ID NO: 727224 - DNA, 15 bp, Homo sapiens
ggtcctttggacata

SEQ ID NO: 727225 - DNA, 15 bp, Homo sapiens
gtcctttggacatac

SEQ ID NO: 727226 - DNA, 15 bp, Homo sapiens
tcctttggacatact

SEQ ID NO: 727227 - DNA, 15 bp, Homo sapiens
cctttggacatactg

SEQ ID NO: 727228 - DNA, 15 bp, Homo sapiens
ctttggacatactgt

SEQ ID NO: 727229 - DNA, 15 bp, Homo sapiens
tttggacatactgtt

SEQ ID NO: 727230 - DNA, 15 bp, Homo sapiens
ttggacatactgttc

SEQ ID NO: 727231 - DNA, 15 bp, Homo sapiens
tggacatactgttcc

SEQ ID NO: 727232 - DNA, 15 bp, Homo sapiens
ggacatactgttccc

SEQ ID NO: 727233 - DNA, 15 bp, Homo sapiens
gacatactgttccct

SEQ ID NO: 727234 - DNA, 15 bp, Homo sapiens
acatactgttccctc

SEQ ID NO: 727235 - DNA, 15 bp, Homo sapiens
catactgttccctca

SEQ ID NO: 727236 - DNA, 15 bp, Homo sapiens
atactgttccctcag

SEQ ID NO: 727237 - DNA, 15 bp, Homo sapiens
tactgttccctcagc

SEQ ID NO: 727238 - DNA, 15 bp, Homo sapiens
actgttccctcagcc

SEQ ID NO: 727239 - DNA, 15 bp, Homo sapiens
ctgttccctcagcct

SEQ ID NO: 727240 - DNA, 15 bp, Homo sapiens
tgttccctcagccta

SEQ ID NO: 727241 - DNA, 15 bp, Homo sapiens
gttccctcagcctac

SEQ ID NO: 727242 - DNA, 15 bp, Homo sapiens
ttccctcagcctaca

SEQ ID NO: 727243 - DNA, 15 bp, Homo sapiens
tccctcagcctacac

SEQ ID NO: 727244 - DNA, 15 bp, Homo sapiens
ccctcagcctacacc

SEQ ID NO: 727245 - DNA, 15 bp, Homo sapiens
cctcagcctacacca

SEQ ID NO: 727246 - DNA, 15 bp, Homo sapiens
ctcagcctacaccac

SEQ ID NO: 727247 - DNA, 15 bp, Homo sapiens
tcagcctacaccact

SEQ ID NO: 727248 - DNA, 15 bp, Homo sapiens
cagcctacaccactc

SEQ ID NO: 727249 - DNA, 15 bp, Homo sapiens
agcctacaccactca

SEQ ID NO: 727250 - DNA, 15 bp, Homo sapiens
gcctacaccactcag

SEQ ID NO: 727251 - DNA, 15 bp, Homo sapiens
cctacaccactcaga

SEQ ID NO: 727252 - DNA, 15 bp, Homo sapiens
ctacaccactcagac

SEQ ID NO: 727253 - DNA, 15 bp, Homo sapiens
tacaccactcagaca

SEQ ID NO: 727254 - DNA, 15 bp, Homo sapiens
acaccactcagacac

SEQ ID NO: 727255 - DNA, 15 bp, Homo sapiens
caccactcagacaca

SEQ ID NO: 727256 - DNA, 15 bp, Homo sapiens
accactcagacacat

SEQ ID NO: 727257 - DNA, 15 bp, Homo sapiens
ccactcagacacatc

SEQ ID NO: 727258 - DNA, 15 bp, Homo sapiens
cactcagacacatcc

SEQ ID NO: 727259 - DNA, 15 bp, Homo sapiens
actcagacacatcct

SEQ ID NO: 727260 - DNA, 15 bp, Homo sapiens
ctcagacacatcctt

SEQ ID NO: 727261 - DNA, 15 bp, Homo sapiens
tcagacacatccttt

SEQ ID NO: 727262 - DNA, 15 bp, Homo sapiens
cagacacatcctttc

SEQ ID NO: 727263 - DNA, 15 bp, Homo sapiens
agacacatcctttct

SEQ ID NO: 727264 - DNA, 15 bp, Homo sapiens
gacacatcctttctt

SEQ ID NO: 727265 - DNA, 15 bp, Homo sapiens
acacatcctttcttc

SEQ ID NO: 727266 - DNA, 15 bp, Homo sapiens
cacatcctttcttct

SEQ ID NO: 727267 - DNA, 15 bp, Homo sapiens
acatcctttcttctt

SEQ ID NO: 727268 - DNA, 15 bp, Homo sapiens
catcctttcttcttt

SEQ ID NO: 727269 - DNA, 15 bp, Homo sapiens
atcctttcttctttg

SEQ ID NO: 727270 - DNA, 15 bp, Homo sapiens
tcctttcttctttgg

SEQ ID NO: 727271 - DNA, 15 bp, Homo sapiens
cctttcttctttggt

SEQ ID NO: 727272 - DNA, 15 bp, Homo sapiens
ctttcttctttggtc

SEQ ID NO: 727273 - DNA, 15 bp, Homo sapiens
tttcttctttggtca

SEQ ID NO: 727274 - DNA, 15 bp, Homo sapiens
ttcttctttggtcat

SEQ ID NO: 727275 - DNA, 15 bp, Homo sapiens
tcttctttggtcatc

SEQ ID NO: 727276 - DNA, 15 bp, Homo sapiens
cttctttggtcatca

SEQ ID NO: 727277 - DNA, 15 bp, Homo sapiens
ttctttggtcatcag

SEQ ID NO: 727278 - DNA, 15 bp, Homo sapiens
tctttggtcatcagg

SEQ ID NO: 727279 - DNA, 15 bp, Homo sapiens
ctttggtcatcaggc

SEQ ID NO: 727280 - DNA, 15 bp, Homo sapiens
tttggtcatcaggct

SEQ ID NO: 727281 - DNA, 15 bp, Homo sapiens
ttggtcatcaggcta

SEQ ID NO: 727282 - DNA, 15 bp, Homo sapiens
tggtcatcaggctaa

SEQ ID NO: 727283 - DNA, 15 bp, Homo sapiens
ggtcatcaggctaat

SEQ ID NO: 727284 - DNA, 15 bp, Homo sapiens
gtcatcaggctaatt

SEQ ID NO: 727285 - DNA, 15 bp, Homo sapiens
tcatcaggctaattt

SEQ ID NO: 727286 - DNA, 15 bp, Homo sapiens
catcaggctaatttt

SEQ ID NO: 727287 - DNA, 15 bp, Homo sapiens
atcaggctaattttt

SEQ ID NO: 727288 - DNA, 15 bp, Homo sapiens
tcaggctaattttta

SEQ ID NO: 727289 - DNA, 15 bp, Homo sapiens
caggctaatttttac

SEQ ID NO: 727290 - DNA, 15 bp, Homo sapiens
aggctaatttttacc

SEQ ID NO: 727291 - DNA, 15 bp, Homo sapiens
ggctaatttttaccc

SEQ ID NO: 727292 - DNA, 15 bp, Homo sapiens
gctaatttttaccct

SEQ ID NO: 727293 - DNA, 15 bp, Homo sapiens
ctaatttttaccctt

SEQ ID NO: 727294 - DNA, 15 bp, Homo sapiens
taatttttacccttt

SEQ ID NO: 727295 - DNA, 15 bp, Homo sapiens
aatttttaccctttt

SEQ ID NO: 727296 - DNA, 15 bp, Homo sapiens
atttttaccctttta

SEQ ID NO: 727297 - DNA, 15 bp, Homo sapiens
tttttacccttttag

SEQ ID NO: 727298 - DNA, 15 bp, Homo sapiens
ttttacccttttagg

SEQ ID NO: 727299 - DNA, 15 bp, Homo sapiens
tttacccttttaggg

SEQ ID NO: 727300 - DNA, 15 bp, Homo sapiens
ttacccttttagggc

SEQ ID NO: 727301 - DNA, 15 bp, Homo sapiens
tacccttttagggct

SEQ ID NO: 727302 - DNA, 15 bp, Homo sapiens
acccttttagggctc

SEQ ID NO: 727303 - DNA, 15 bp, Homo sapiens
cccttttagggctca

SEQ ID NO: 727304 - DNA, 15 bp, Homo sapiens
ccttttagggctcag

SEQ ID NO: 727305 - DNA, 15 bp, Homo sapiens
cttttagggctcaga

SEQ ID NO: 727306 - DNA, 15 bp, Homo sapiens
ttttagggctcagat

SEQ ID NO: 727307 - DNA, 15 bp, Homo sapiens
tttagggctcagatt

SEQ ID NO: 727308 - DNA, 15 bp, Homo sapiens
ttagggctcagatta

SEQ ID NO: 727309 - DNA, 15 bp, Homo sapiens
tagggctcagattaa

SEQ ID NO: 727310 - DNA, 15 bp, Homo sapiens
agggctcagattaaa

SEQ ID NO: 727311 - DNA, 15 bp, Homo sapiens
gggctcagattaaat

SEQ ID NO: 727312 - DNA, 15 bp, Homo sapiens
ggctcagattaaatg

SEQ ID NO: 727313 - DNA, 15 bp, Homo sapiens
gctcagattaaatgc

SEQ ID NO: 727314 - DNA, 15 bp, Homo sapiens
ctcagattaaatgcc

SEQ ID NO: 727315 - DNA, 15 bp, Homo sapiens
tcagattaaatgcca

SEQ ID NO: 727316 - DNA, 15 bp, Homo sapiens
cagattaaatgccat

SEQ ID NO: 727317 - DNA, 15 bp, Homo sapiens
agattaaatgccatc

SEQ ID NO: 727318 - DNA, 15 bp, Homo sapiens
gattaaatgccatct

SEQ ID NO: 727319 - DNA, 15 bp, Homo sapiens
attaaatgccatcta

SEQ ID NO: 727320 - DNA, 15 bp, Homo sapiens
ttaaatgccatctaa

SEQ ID NO: 727321 - DNA, 15 bp, Homo sapiens
taaatgccatctaat

SEQ ID NO: 727322 - DNA, 15 bp, Homo sapiens
aaatgccatctaatt

SEQ ID NO: 727323 - DNA, 15 bp, Homo sapiens
aatgccatctaattc

SEQ ID NO: 727324 - DNA, 15 bp, Homo sapiens
atgccatctaattca

SEQ ID NO: 727325 - DNA, 15 bp, Homo sapiens
tgccatctaattcat

SEQ ID NO: 727326 - DNA, 15 bp, Homo sapiens
gccatctaattcatt

SEQ ID NO: 727327 - DNA, 15 bp, Homo sapiens
ccatctaattcattc

SEQ ID NO: 727328 - DNA, 15 bp, Homo sapiens
catctaattcattca

SEQ ID NO: 727329 - DNA, 15 bp, Homo sapiens
atctaattcattcat

SEQ ID NO: 727330 - DNA, 15 bp, Homo sapiens
tctaattcattcatt

SEQ ID NO: 727331 - DNA, 15 bp, Homo sapiens
ctaattcattcattg

SEQ ID NO: 727332 - DNA, 15 bp, Homo sapiens
taattcattcattga

SEQ ID NO: 727333 - DNA, 15 bp, Homo sapiens
aattcattcattgat

SEQ ID NO: 727334 - DNA, 15 bp, Homo sapiens
attcattcattgatt

SEQ ID NO: 727335 - DNA, 15 bp, Homo sapiens
ttcattcattgattc

SEQ ID NO: 727336 - DNA, 15 bp, Homo sapiens
tcattcattgattca

SEQ ID NO: 727337 - DNA, 15 bp, Homo sapiens
cattcattgattcat

SEQ ID NO: 727338 - DNA, 15 bp, Homo sapiens
attcattgattcatc

SEQ ID NO: 727339 - DNA, 15 bp, Homo sapiens
ttcattgattcatcc

SEQ ID NO: 727340 - DNA, 15 bp, Homo sapiens
tcattgattcatcca

SEQ ID NO: 727341 - DNA, 15 bp, Homo sapiens
cattgattcatccaa

SEQ ID NO: 727342 - DNA, 15 bp, Homo sapiens
attgattcatccaac

SEQ ID NO: 727343 - DNA, 15 bp, Homo sapiens
ttgattcatccaaca

SEQ ID NO: 727344 - DNA, 15 bp, Homo sapiens
tgattcatccaacaa

SEQ ID NO: 727345 - DNA, 15 bp, Homo sapiens
gattcatccaacaaa

SEQ ID NO: 727346 - DNA, 15 bp, Homo sapiens
attcatccaacaaat

SEQ ID NO: 727347 - DNA, 15 bp, Homo sapiens
ttcatccaacaaata

SEQ ID NO: 727348 - DNA, 15 bp, Homo sapiens
tcatccaacaaatat

SEQ ID NO: 727349 - DNA, 15 bp, Homo sapiens
catccaacaaatata

SEQ ID NO: 727350 - DNA, 15 bp, Homo sapiens
atccaacaaatatat

SEQ ID NO: 727351 - DNA, 15 bp, Homo sapiens
tccaacaaatatata

SEQ ID NO: 727352 - DNA, 15 bp, Homo sapiens
ccaacaaatatataa

SEQ ID NO: 727353 - DNA, 15 bp, Homo sapiens
caacaaatatataat

SEQ ID NO: 727354 - DNA, 15 bp, Homo sapiens
aacaaatatataatg

SEQ ID NO: 727355 - DNA, 15 bp, Homo sapiens
acaaatatataatga

SEQ ID NO: 727356 - DNA, 15 bp, Homo sapiens
caaatatataatgag

SEQ ID NO: 727357 - DNA, 15 bp, Homo sapiens
aaatatataatgagt

SEQ ID NO: 727358 - DNA, 15 bp, Homo sapiens
aatatataatgagtt

SEQ ID NO: 727359 - DNA, 15 bp, Homo sapiens
atatataatgagttt

SEQ ID NO: 727360 - DNA, 15 bp, Homo sapiens
tatataatgagtttt

SEQ ID NO: 727361 - DNA, 15 bp, Homo sapiens
atataatgagtttta

SEQ ID NO: 727362 - DNA, 15 bp, Homo sapiens
tataatgagttttag

SEQ ID NO: 727363 - DNA, 15 bp, Homo sapiens
ataatgagttttagt

SEQ ID NO: 727364 - DNA, 15 bp, Homo sapiens
taatgagttttagtc

SEQ ID NO: 727365 - DNA, 15 bp, Homo sapiens
aatgagttttagtca

SEQ ID NO: 727366 - DNA, 15 bp, Homo sapiens
atgagttttagtcaa

SEQ ID NO: 727367 - DNA, 15 bp, Homo sapiens
tgagttttagtcaat

SEQ ID NO: 727368 - DNA, 15 bp, Homo sapiens
gagttttagtcaatg

SEQ ID NO: 727369 - DNA, 15 bp, Homo sapiens
agttttagtcaatgt

SEQ ID NO: 727370 - DNA, 15 bp, Homo sapiens
gttttagtcaatgtt

SEQ ID NO: 727371 - DNA, 15 bp, Homo sapiens
ttttagtcaatgttt

SEQ ID NO: 727372 - DNA, 15 bp, Homo sapiens
tttagtcaatgtttt

SEQ ID NO: 727373 - DNA, 15 bp, Homo sapiens
ttagtcaatgttttg

SEQ ID NO: 727374 - DNA, 15 bp, Homo sapiens
tagtcaatgttttgg

SEQ ID NO: 727375 - DNA, 15 bp, Homo sapiens
agtcaatgttttggg

SEQ ID NO: 727376 - DNA, 15 bp, Homo sapiens
gtcaatgttttgggc

SEQ ID NO: 727377 - DNA, 15 bp, Homo sapiens
tcaatgttttgggcc

SEQ ID NO: 727378 - DNA, 15 bp, Homo sapiens
caatgttttgggccc

SEQ ID NO: 727379 - DNA, 15 bp, Homo sapiens
aatgttttgggccct

SEQ ID NO: 727380 - DNA, 15 bp, Homo sapiens
atgttttgggccctg

SEQ ID NO: 727381 - DNA, 15 bp, Homo sapiens
tgttttgggccctgg

SEQ ID NO: 727382 - DNA, 15 bp, Homo sapiens
gttttgggccctggg

SEQ ID NO: 727383 - DNA, 15 bp, Homo sapiens
ttttgggccctggga

SEQ ID NO: 727384 - DNA, 15 bp, Homo sapiens
tttgggccctgggaa

SEQ ID NO: 727385 - DNA, 15 bp, Homo sapiens
ttgggccctgggaaa

SEQ ID NO: 727386 - DNA, 15 bp, Homo sapiens
tgggccctgggaaaa

SEQ ID NO: 727387 - DNA, 15 bp, Homo sapiens
gggccctgggaaaac

SEQ ID NO: 727388 - DNA, 15 bp, Homo sapiens
ggccctgggaaaacc

SEQ ID NO: 727389 - DNA, 15 bp, Homo sapiens
gccctgggaaaacct

SEQ ID NO: 727390 - DNA, 15 bp, Homo sapiens
ccctgggaaaacctc

SEQ ID NO: 727391 - DNA, 15 bp, Homo sapiens
cctgggaaaacctca

SEQ ID NO: 727392 - DNA, 15 bp, Homo sapiens
ctgggaaaacctcag

SEQ ID NO: 727393 - DNA, 15 bp, Homo sapiens
tgggaaaacctcagt

SEQ ID NO: 727394 - DNA, 15 bp, Homo sapiens
gggaaaacctcagtg

SEQ ID NO: 727395 - DNA, 15 bp, Homo sapiens
ggaaaacctcagtga

SEQ ID NO: 727396 - DNA, 15 bp, Homo sapiens
gaaaacctcagtgaa

SEQ ID NO: 727397 - DNA, 15 bp, Homo sapiens
aaaacctcagtgaac

SEQ ID NO: 727398 - DNA, 15 bp, Homo sapiens
aaacctcagtgaaca

SEQ ID NO: 727399 - DNA, 15 bp, Homo sapiens
aacctcagtgaacag

SEQ ID NO: 727400 - DNA, 15 bp, Homo sapiens
acctcagtgaacaga

SEQ ID NO: 727401 - DNA, 15 bp, Homo sapiens
cctcagtgaacagaa

SEQ ID NO: 727402 - DNA, 15 bp, Homo sapiens
ctcagtgaacagaat

SEQ ID NO: 727403 - DNA, 15 bp, Homo sapiens
tcagtgaacagaatc

SEQ ID NO: 727404 - DNA, 15 bp, Homo sapiens
cagtgaacagaatcc

SEQ ID NO: 727405 - DNA, 15 bp, Homo sapiens
agtgaacagaatcct

SEQ ID NO: 727406 - DNA, 15 bp, Homo sapiens
gtgaacagaatcctc

SEQ ID NO: 727407 - DNA, 15 bp, Homo sapiens
tgaacagaatcctca

SEQ ID NO: 727408 - DNA, 15 bp, Homo sapiens
gaacagaatcctcac

SEQ ID NO: 727409 - DNA, 15 bp, Homo sapiens
aacagaatcctcact

SEQ ID NO: 727410 - DNA, 15 bp, Homo sapiens
acagaatcctcactt

SEQ ID NO: 727411 - DNA, 15 bp, Homo sapiens
cagaatcctcactta

SEQ ID NO: 727412 - DNA, 15 bp, Homo sapiens
agaatcctcacttac

SEQ ID NO: 727413 - DNA, 15 bp, Homo sapiens
gaatcctcacttacc

SEQ ID NO: 727414 - DNA, 15 bp, Homo sapiens
aatcctcacttacct

SEQ ID NO: 727415 - DNA, 15 bp, Homo sapiens
atcctcacttacctt

SEQ ID NO: 727416 - DNA, 15 bp, Homo sapiens
tcctcacttaccttg

SEQ ID NO: 727417 - DNA, 15 bp, Homo sapiens
cctcacttaccttgt

SEQ ID NO: 727418 - DNA, 15 bp, Homo sapiens
ctcacttaccttgtg

SEQ ID NO: 727419 - DNA, 15 bp, Homo sapiens
tcacttaccttgtgg

SEQ ID NO: 727420 - DNA, 15 bp, Homo sapiens
cacttaccttgtgga

SEQ ID NO: 727421 - DNA, 15 bp, Homo sapiens
acttaccttgtggag

SEQ ID NO: 727422 - DNA, 15 bp, Homo sapiens
cttaccttgtggagc

SEQ ID NO: 727423 - DNA, 15 bp, Homo sapiens
ttaccttgtggagct

SEQ ID NO: 727424 - DNA, 15 bp, Homo sapiens
taccttgtggagctc

SEQ ID NO: 727425 - DNA, 15 bp, Homo sapiens
accttgtggagctca

SEQ ID NO: 727426 - DNA, 15 bp, Homo sapiens
ccttgtggagctcac

SEQ ID NO: 727427 - DNA, 15 bp, Homo sapiens
cttgtggagctcacc

SEQ ID NO: 727428 - DNA, 15 bp, Homo sapiens
ttgtggagctcaccg

SEQ ID NO: 727429 - DNA, 15 bp, Homo sapiens
tgtggagctcaccgt

SEQ ID NO: 727430 - DNA, 15 bp, Homo sapiens
gtggagctcaccgtc

SEQ ID NO: 727431 - DNA, 15 bp, Homo sapiens
tggagctcaccgtct

SEQ ID NO: 727432 - DNA, 15 bp, Homo sapiens
ggagctcaccgtcta

SEQ ID NO: 727433 - DNA, 15 bp, Homo sapiens
gagctcaccgtctag

SEQ ID NO: 727434 - DNA, 15 bp, Homo sapiens
agctcaccgtctagt

SEQ ID NO: 727435 - DNA, 15 bp, Homo sapiens
gctcaccgtctagta

SEQ ID NO: 727436 - DNA, 15 bp, Homo sapiens
ctcaccgtctagtaa

SEQ ID NO: 727437 - DNA, 15 bp, Homo sapiens
tcaccgtctagtaag

SEQ ID NO: 727438 - DNA, 15 bp, Homo sapiens
caccgtctagtaaga

SEQ ID NO: 727439 - DNA, 15 bp, Homo sapiens
accgtctagtaagag

SEQ ID NO: 727440 - DNA, 15 bp, Homo sapiens
ccgtctagtaagagg

SEQ ID NO: 727441 - DNA, 15 bp, Homo sapiens
cgtctagtaagaggc

SEQ ID NO: 727442 - DNA, 15 bp, Homo sapiens
gtctagtaagaggcg

SEQ ID NO: 727443 - DNA, 15 bp, Homo sapiens
tctagtaagaggcgt

SEQ ID NO: 727444 - DNA, 15 bp, Homo sapiens
ctagtaagaggcgtt

SEQ ID NO: 727445 - DNA, 15 bp, Homo sapiens
tagtaagaggcgttc

SEQ ID NO: 727446 - DNA, 15 bp, Homo sapiens
agtaagaggcgttcc

SEQ ID NO: 727447 - DNA, 15 bp, Homo sapiens
gtaagaggcgttccc

SEQ ID NO: 727448 - DNA, 15 bp, Homo sapiens
taagaggcgttccca

SEQ ID NO: 727449 - DNA, 15 bp, Homo sapiens
aagaggcgttcccag

SEQ ID NO: 727450 - DNA, 15 bp, Homo sapiens
agaggcgttcccaga

SEQ ID NO: 727451 - DNA, 15 bp, Homo sapiens
gaggcgttcccagat

SEQ ID NO: 727452 - DNA, 15 bp, Homo sapiens
aggcgttcccagatt

SEQ ID NO: 727453 - DNA, 15 bp, Homo sapiens
ggcgttcccagattc

SEQ ID NO: 727454 - DNA, 15 bp, Homo sapiens
gcgttcccagattca

SEQ ID NO: 727455 - DNA, 15 bp, Homo sapiens
cgttcccagattcat

SEQ ID NO: 727456 - DNA, 15 bp, Homo sapiens
gttcccagattcatc

SEQ ID NO: 727457 - DNA, 15 bp, Homo sapiens
ttcccagattcatct

SEQ ID NO: 727458 - DNA, 15 bp, Homo sapiens
tcccagattcatcta

SEQ ID NO: 727459 - DNA, 15 bp, Homo sapiens
cccagattcatctag

SEQ ID NO: 727460 - DNA, 15 bp, Homo sapiens
ccagattcatctagc

SEQ ID NO: 727461 - DNA, 15 bp, Homo sapiens
cagattcatctagcc

SEQ ID NO: 727462 - DNA, 15 bp, Homo sapiens
agattcatctagcct

SEQ ID NO: 727463 - DNA, 15 bp, Homo sapiens
gattcatctagccta

SEQ ID NO: 727464 - DNA, 15 bp, Homo sapiens
attcatctagcctag

SEQ ID NO: 727465 - DNA, 15 bp, Homo sapiens
ttcatctagcctaga

SEQ ID NO: 727466 - DNA, 15 bp, Homo sapiens
tcatctagcctagat

SEQ ID NO: 727467 - DNA, 15 bp, Homo sapiens
catctagcctagatc

SEQ ID NO: 727468 - DNA, 15 bp, Homo sapiens
atctagcctagatca

SEQ ID NO: 727469 - DNA, 15 bp, Homo sapiens
tctagcctagatcag

SEQ ID NO: 727470 - DNA, 15 bp, Homo sapiens
ctagcctagatcagg

SEQ ID NO: 727471 - DNA, 15 bp, Homo sapiens
tagcctagatcaggc

SEQ ID NO: 727472 - DNA, 15 bp, Homo sapiens
agcctagatcaggct

SEQ ID NO: 727473 - DNA, 15 bp, Homo sapiens
gcctagatcaggctc

SEQ ID NO: 727474 - DNA, 15 bp, Homo sapiens
cctagatcaggctcc

SEQ ID NO: 727475 - DNA, 15 bp, Homo sapiens
ctagatcaggctcct

SEQ ID NO: 727476 - DNA, 15 bp, Homo sapiens
tagatcaggctcctc

SEQ ID NO: 727477 - DNA, 15 bp, Homo sapiens
agatcaggctcctcc

SEQ ID NO: 727478 - DNA, 15 bp, Homo sapiens
gatcaggctcctcct

SEQ ID NO: 727479 - DNA, 15 bp, Homo sapiens
atcaggctcctcctt

SEQ ID NO: 727480 - DNA, 15 bp, Homo sapiens
tcaggctcctcctta

SEQ ID NO: 727481 - DNA, 15 bp, Homo sapiens
caggctcctccttac

SEQ ID NO: 727482 - DNA, 15 bp, Homo sapiens
aggctcctccttacg

SEQ ID NO: 727483 - DNA, 15 bp, Homo sapiens
ggctcctccttacgc

SEQ ID NO: 727484 - DNA, 15 bp, Homo sapiens
gctcctccttacgca

SEQ ID NO: 727485 - DNA, 15 bp, Homo sapiens
ctcctccttacgcac

SEQ ID NO: 727486 - DNA, 15 bp, Homo sapiens
tcctccttacgcacc

SEQ ID NO: 727487 - DNA, 15 bp, Homo sapiens
cctccttacgcacca

SEQ ID NO: 727488 - DNA, 15 bp, Homo sapiens
ctccttacgcaccat

SEQ ID NO: 727489 - DNA, 15 bp, Homo sapiens
tccttacgcaccatt

SEQ ID NO: 727490 - DNA, 15 bp, Homo sapiens
ccttacgcaccattc

SEQ ID NO: 727491 - DNA, 15 bp, Homo sapiens
cttacgcaccattca

SEQ ID NO: 727492 - DNA, 15 bp, Homo sapiens
ttacgcaccattcac

SEQ ID NO: 727493 - DNA, 15 bp, Homo sapiens
tacgcaccattcact

SEQ ID NO: 727494 - DNA, 15 bp, Homo sapiens
acgcaccattcacta

SEQ ID NO: 727495 - DNA, 15 bp, Homo sapiens
cgcaccattcactaa

SEQ ID NO: 727496 - DNA, 15 bp, Homo sapiens
gcaccattcactaaa

SEQ ID NO: 727497 - DNA, 15 bp, Homo sapiens
caccattcactaaac

SEQ ID NO: 727498 - DNA, 15 bp, Homo sapiens
accattcactaaact

SEQ ID NO: 727499 - DNA, 15 bp, Homo sapiens
ccattcactaaactc

SEQ ID NO: 727500 - DNA, 15 bp, Homo sapiens
cattcactaaactct

SEQ ID NO: 727501 - DNA, 15 bp, Homo sapiens
attcactaaactctt

SEQ ID NO: 727502 - DNA, 15 bp, Homo sapiens
ttcactaaactcttt

SEQ ID NO: 727503 - DNA, 15 bp, Homo sapiens
tcactaaactctttt

SEQ ID NO: 727504 - DNA, 15 bp, Homo sapiens
cactaaactcttttt

SEQ ID NO: 727505 - DNA, 15 bp, Homo sapiens
actaaactctttttc

SEQ ID NO: 727506 - DNA, 15 bp, Homo sapiens
ctaaactctttttca

SEQ ID NO: 727507 - DNA, 15 bp, Homo sapiens
taaactctttttcac

SEQ ID NO: 727508 - DNA, 15 bp, Homo sapiens
aaactctttttcact

SEQ ID NO: 727509 - DNA, 15 bp, Homo sapiens
aactctttttcactg

SEQ ID NO: 727510 - DNA, 15 bp, Homo sapiens
actctttttcactgt

SEQ ID NO: 727511 - DNA, 15 bp, Homo sapiens
ctctttttcactgta

SEQ ID NO: 727512 - DNA, 15 bp, Homo sapiens
tctttttcactgtat

SEQ ID NO: 727513 - DNA, 15 bp, Homo sapiens
ctttttcactgtatt

SEQ ID NO: 727514 - DNA, 15 bp, Homo sapiens
tttttcactgtatta

SEQ ID NO: 727515 - DNA, 15 bp, Homo sapiens
ttttcactgtattaa

SEQ ID NO: 727516 - DNA, 15 bp, Homo sapiens
tttcactgtattaat

SEQ ID NO: 727517 - DNA, 15 bp, Homo sapiens
ttcactgtattaatt

SEQ ID NO: 727518 - DNA, 15 bp, Homo sapiens
tcactgtattaatta

SEQ ID NO: 727519 - DNA, 15 bp, Homo sapiens
cactgtattaattaa

SEQ ID NO: 727520 - DNA, 15 bp, Homo sapiens
actgtattaattaaa

SEQ ID NO: 727521 - DNA, 15 bp, Homo sapiens
ctgtattaattaaaa

SEQ ID NO: 727522 - DNA, 15 bp, Homo sapiens
tgtattaattaaaac

SEQ ID NO: 727523 - DNA, 15 bp, Homo sapiens
gtattaattaaaact

SEQ ID NO: 727524 - DNA, 15 bp, Homo sapiens
tattaattaaaactg

SEQ ID NO: 727525 - DNA, 15 bp, Homo sapiens
attaattaaaactgt

SEQ ID NO: 727526 - DNA, 15 bp, Homo sapiens
ttaattaaaactgtg

SEQ ID NO: 727527 - DNA, 15 bp, Homo sapiens
taattaaaactgtgt

SEQ ID NO: 727528 - DNA, 15 bp, Homo sapiens
aattaaaactgtgta

SEQ ID NO: 727529 - DNA, 15 bp, Homo sapiens
attaaaactgtgtat

SEQ ID NO: 727530 - DNA, 15 bp, Homo sapiens
ttaaaactgtgtatt

SEQ ID NO: 727531 - DNA, 15 bp, Homo sapiens
taaaactgtgtatta

SEQ ID NO: 727532 - DNA, 15 bp, Homo sapiens
aaaactgtgtattaa

SEQ ID NO: 727533 - DNA, 15 bp, Homo sapiens
aaactgtgtattaaa

SEQ ID NO: 727534 - DNA, 15 bp, Homo sapiens
aactgtgtattaaac

SEQ ID NO: 727535 - DNA, 15 bp, Homo sapiens
actgtgtattaaaca

SEQ ID NO: 727536 - DNA, 15 bp, Homo sapiens
ctgtgtattaaacat

SEQ ID NO: 727537 - DNA, 15 bp, Homo sapiens
tgtgtattaaacatt

SEQ ID NO: 727538 - DNA, 15 bp, Homo sapiens
gtgtattaaacattt

SEQ ID NO: 727539 - DNA, 15 bp, Homo sapiens
tgtattaaacattta

SEQ ID NO: 727540 - DNA, 15 bp, Homo sapiens
gtattaaacatttaa

SEQ ID NO: 727541 - DNA, 15 bp, Homo sapiens
tattaaacatttaat

SEQ ID NO: 727542 - DNA, 15 bp, Homo sapiens
attaaacatttaatt

SEQ ID NO: 727543 - DNA, 15 bp, Homo sapiens
ttaaacatttaattt

SEQ ID NO: 727544 - DNA, 15 bp, Homo sapiens
taaacatttaatttc

SEQ ID NO: 727545 - DNA, 15 bp, Homo sapiens
aaacatttaatttct

SEQ ID NO: 727546 - DNA, 15 bp, Homo sapiens
aacatttaatttcta

SEQ ID NO: 727547 - DNA, 15 bp, Homo sapiens
acatttaatttctag

SEQ ID NO: 727548 - DNA, 15 bp, Homo sapiens
catttaatttctagc

SEQ ID NO: 727549 - DNA, 15 bp, Homo sapiens
atttaatttctagct

SEQ ID NO: 727550 - DNA, 15 bp, Homo sapiens
tttaatttctagctc

SEQ ID NO: 727551 - DNA, 15 bp, Homo sapiens
ttaatttctagctct

SEQ ID NO: 727552 - DNA, 15 bp, Homo sapiens
taatttctagctctc

SEQ ID NO: 727553 - DNA, 15 bp, Homo sapiens
aatttctagctctct

SEQ ID NO: 727554 - DNA, 15 bp, Homo sapiens
atttctagctctctt

SEQ ID NO: 727555 - DNA, 15 bp, Homo sapiens
tttctagctctctta

SEQ ID NO: 727556 - DNA, 15 bp, Homo sapiens
ttctagctctcttat

SEQ ID NO: 727557 - DNA, 15 bp, Homo sapiens
tctagctctcttatt

SEQ ID NO: 727558 - DNA, 15 bp, Homo sapiens
ctagctctcttatta

SEQ ID NO: 727559 - DNA, 15 bp, Homo sapiens
tagctctcttattag

SEQ ID NO: 727560 - DNA, 15 bp, Homo sapiens
agctctcttattagg

SEQ ID NO: 727561 - DNA, 15 bp, Homo sapiens
gctctcttattaggg

SEQ ID NO: 727562 - DNA, 15 bp, Homo sapiens
ctctcttattagggc

SEQ ID NO: 727563 - DNA, 15 bp, Homo sapiens
tctcttattagggca

SEQ ID NO: 727564 - DNA, 15 bp, Homo sapiens
ctcttattagggcaa

SEQ ID NO: 727565 - DNA, 15 bp, Homo sapiens
tcttattagggcaaa

SEQ ID NO: 727566 - DNA, 15 bp, Homo sapiens
cttattagggcaaag

SEQ ID NO: 727567 - DNA, 15 bp, Homo sapiens
ttattagggcaaaga

SEQ ID NO: 727568 - DNA, 15 bp, Homo sapiens
tattagggcaaagac

SEQ ID NO: 727569 - DNA, 15 bp, Homo sapiens
attagggcaaagacc

SEQ ID NO: 727570 - DNA, 15 bp, Homo sapiens
ttagggcaaagacca

SEQ ID NO: 727571 - DNA, 15 bp, Homo sapiens
tagggcaaagaccat

SEQ ID NO: 727572 - DNA, 15 bp, Homo sapiens
agggcaaagaccatg

SEQ ID NO: 727573 - DNA, 15 bp, Homo sapiens
gggcaaagaccatgt

SEQ ID NO: 727574 - DNA, 15 bp, Homo sapiens
ggcaaagaccatgtc

SEQ ID NO: 727575 - DNA, 15 bp, Homo sapiens
gcaaagaccatgtct

SEQ ID NO: 727576 - DNA, 15 bp, Homo sapiens
caaagaccatgtctc

SEQ ID NO: 727577 - DNA, 15 bp, Homo sapiens
aaagaccatgtctct

SEQ ID NO: 727578 - DNA, 15 bp, Homo sapiens
aagaccatgtctcta

SEQ ID NO: 727579 - DNA, 15 bp, Homo sapiens
agaccatgtctctat

SEQ ID NO: 727580 - DNA, 15 bp, Homo sapiens
gaccatgtctctatc

SEQ ID NO: 727581 - DNA, 15 bp, Homo sapiens
accatgtctctatct

SEQ ID NO: 727582 - DNA, 15 bp, Homo sapiens
ccatgtctctatctt

SEQ ID NO: 727583 - DNA, 15 bp, Homo sapiens
catgtctctatctta

SEQ ID NO: 727584 - DNA, 15 bp, Homo sapiens
atgtctctatcttat

SEQ ID NO: 727585 - DNA, 15 bp, Homo sapiens
tgtctctatcttatt

SEQ ID NO: 727586 - DNA, 15 bp, Homo sapiens
gtctctatcttattt

SEQ ID NO: 727587 - DNA, 15 bp, Homo sapiens
tctctatcttatttc

SEQ ID NO: 727588 - DNA, 15 bp, Homo sapiens
ctctatcttatttcc

SEQ ID NO: 727589 - DNA, 15 bp, Homo sapiens
tctatcttatttcct

SEQ ID NO: 727590 - DNA, 15 bp, Homo sapiens
ctatcttatttcctg

SEQ ID NO: 727591 - DNA, 15 bp, Homo sapiens
tatcttatttcctgc

SEQ ID NO: 727592 - DNA, 15 bp, Homo sapiens
atcttatttcctgcc

SEQ ID NO: 727593 - DNA, 15 bp, Homo sapiens
tcttatttcctgccc

SEQ ID NO: 727594 - DNA, 15 bp, Homo sapiens
cttatttcctgccct

SEQ ID NO: 727595 - DNA, 15 bp, Homo sapiens
ttatttcctgccctc

SEQ ID NO: 727596 - DNA, 15 bp, Homo sapiens
tatttcctgccctct

SEQ ID NO: 727597 - DNA, 15 bp, Homo sapiens
atttcctgccctctc

SEQ ID NO: 727598 - DNA, 15 bp, Homo sapiens
tttcctgccctctct

SEQ ID NO: 727599 - DNA, 15 bp, Homo sapiens
ttcctgccctctctt

SEQ ID NO: 727600 - DNA, 15 bp, Homo sapiens
tcctgccctctcttc

SEQ ID NO: 727601 - DNA, 15 bp, Homo sapiens
cctgccctctcttca

SEQ ID NO: 727602 - DNA, 15 bp, Homo sapiens
ctgccctctcttcaa

SEQ ID NO: 727603 - DNA, 15 bp, Homo sapiens
tgccctctcttcaat

SEQ ID NO: 727604 - DNA, 15 bp, Homo sapiens
gccctctcttcaatc

SEQ ID NO: 727605 - DNA, 15 bp, Homo sapiens
ccctctcttcaatct

SEQ ID NO: 727606 - DNA, 15 bp, Homo sapiens
cctctcttcaatctc

SEQ ID NO: 727607 - DNA, 15 bp, Homo sapiens
ctctcttcaatctct

SEQ ID NO: 727608 - DNA, 15 bp, Homo sapiens
tctcttcaatctctt

SEQ ID NO: 727609 - DNA, 15 bp, Homo sapiens
ctcttcaatctcttg

SEQ ID NO: 727610 - DNA, 15 bp, Homo sapiens
tcttcaatctcttgc

SEQ ID NO: 727611 - DNA, 15 bp, Homo sapiens
cttcaatctcttgca

SEQ ID NO: 727612 - DNA, 15 bp, Homo sapiens
ttcaatctcttgcat

SEQ ID NO: 727613 - DNA, 15 bp, Homo sapiens
tcaatctcttgcatg

SEQ ID NO: 727614 - DNA, 15 bp, Homo sapiens
caatctcttgcatgg

SEQ ID NO: 727615 - DNA, 15 bp, Homo sapiens
aatctcttgcatggt

SEQ ID NO: 727616 - DNA, 15 bp, Homo sapiens
atctcttgcatggtt

SEQ ID NO: 727617 - DNA, 15 bp, Homo sapiens
tctcttgcatggttt

SEQ ID NO: 727618 - DNA, 15 bp, Homo sapiens
ctcttgcatggtttc

SEQ ID NO: 727619 - DNA, 15 bp, Homo sapiens
tcttgcatggtttca

SEQ ID NO: 727620 - DNA, 15 bp, Homo sapiens
cttgcatggtttcag

SEQ ID NO: 727621 - DNA, 15 bp, Homo sapiens
ttgcatggtttcagc

SEQ ID NO: 727622 - DNA, 15 bp, Homo sapiens
tgcatggtttcagct

SEQ ID NO: 727623 - DNA, 15 bp, Homo sapiens
gcatggtttcagctg

SEQ ID NO: 727624 - DNA, 15 bp, Homo sapiens
catggtttcagctgt

SEQ ID NO: 727625 - DNA, 15 bp, Homo sapiens
atggtttcagctgta

SEQ ID NO: 727626 - DNA, 15 bp, Homo sapiens
tggtttcagctgtac

SEQ ID NO: 727627 - DNA, 15 bp, Homo sapiens
ggtttcagctgtaca

SEQ ID NO: 727628 - DNA, 15 bp, Homo sapiens
gtttcagctgtacat

SEQ ID NO: 727629 - DNA, 15 bp, Homo sapiens
tttcagctgtacatt

SEQ ID NO: 727630 - DNA, 15 bp, Homo sapiens
ttcagctgtacatta

SEQ ID NO: 727631 - DNA, 15 bp, Homo sapiens
tcagctgtacattat

SEQ ID NO: 727632 - DNA, 15 bp, Homo sapiens
cagctgtacattatc

SEQ ID NO: 727633 - DNA, 15 bp, Homo sapiens
agctgtacattatcc

SEQ ID NO: 727634 - DNA, 15 bp, Homo sapiens
gctgtacattatccg

SEQ ID NO: 727635 - DNA, 15 bp, Homo sapiens
ctgtacattatccgg

SEQ ID NO: 727636 - DNA, 15 bp, Homo sapiens
tgtacattatccggc

SEQ ID NO: 727637 - DNA, 15 bp, Homo sapiens
gtacattatccggca

SEQ ID NO: 727638 - DNA, 15 bp, Homo sapiens
tacattatccggcac

SEQ ID NO: 727639 - DNA, 15 bp, Homo sapiens
acattatccggcaca

SEQ ID NO: 727640 - DNA, 15 bp, Homo sapiens
cattatccggcacac

SEQ ID NO: 727641 - DNA, 15 bp, Homo sapiens
attatccggcacaca

SEQ ID NO: 727642 - DNA, 15 bp, Homo sapiens
ttatccggcacacag

SEQ ID NO: 727643 - DNA, 15 bp, Homo sapiens
tatccggcacacagt

SEQ ID NO: 727644 - DNA, 15 bp, Homo sapiens
atccggcacacagta

SEQ ID NO: 727645 - DNA, 15 bp, Homo sapiens
tccggcacacagtag

SEQ ID NO: 727646 - DNA, 15 bp, Homo sapiens
ccggcacacagtaga

SEQ ID NO: 727647 - DNA, 15 bp, Homo sapiens
cggcacacagtagag

SEQ ID NO: 727648 - DNA, 15 bp, Homo sapiens
ggcacacagtagagg

SEQ ID NO: 727649 - DNA, 15 bp, Homo sapiens
gcacacagtagaggc

SEQ ID NO: 727650 - DNA, 15 bp, Homo sapiens
cacacagtagaggct

SEQ ID NO: 727651 - DNA, 15 bp, Homo sapiens
acacagtagaggctc

SEQ ID NO: 727652 - DNA, 15 bp, Homo sapiens
cacagtagaggctca

SEQ ID NO: 727653 - DNA, 15 bp, Homo sapiens
acagtagaggctcaa

SEQ ID NO: 727654 - DNA, 15 bp, Homo sapiens
cagtagaggctcaat

SEQ ID NO: 727655 - DNA, 15 bp, Homo sapiens
agtagaggctcaata

SEQ ID NO: 727656 - DNA, 15 bp, Homo sapiens
gtagaggctcaataa

SEQ ID NO: 727657 - DNA, 15 bp, Homo sapiens
tagaggctcaataaa

SEQ ID NO: 727658 - DNA, 15 bp, Homo sapiens
agaggctcaataaat

SEQ ID NO: 727659 - DNA, 15 bp, Homo sapiens
gaggctcaataaata

SEQ ID NO: 727660 - DNA, 15 bp, Homo sapiens
aggctcaataaatac

SEQ ID NO: 727661 - DNA, 15 bp, Homo sapiens
ggctcaataaatact

SEQ ID NO: 727662 - DNA, 15 bp, Homo sapiens
gctcaataaatactt

SEQ ID NO: 727663 - DNA, 15 bp, Homo sapiens
ctcaataaatacttg

SEQ ID NO: 727664 - DNA, 15 bp, Homo sapiens
tcaataaatacttgc

SEQ ID NO: 727665 - DNA, 15 bp, Homo sapiens
caataaatacttgct

SEQ ID NO: 727666 - DNA, 15 bp, Homo sapiens
aataaatacttgcta

SEQ ID NO: 727667 - DNA, 15 bp, Homo sapiens
ataaatacttgctaa

SEQ ID NO: 727668 - DNA, 15 bp, Homo sapiens
taaatacttgctaat

SEQ ID NO: 727669 - DNA, 15 bp, Homo sapiens
aaatacttgctaatg

SEQ ID NO: 727670 - DNA, 15 bp, Homo sapiens
aatacttgctaatgg

SEQ ID NO: 727671 - DNA, 15 bp, Homo sapiens
atacttgctaatggg

SEQ ID NO: 727672 - DNA, 15 bp, Homo sapiens
tacttgctaatgggc

SEQ ID NO: 727673 - DNA, 15 bp, Homo sapiens
acttgctaatgggct

SEQ ID NO: 727674 - DNA, 15 bp, Homo sapiens
cttgctaatgggctt

SEQ ID NO: 727675 - DNA, 15 bp, Homo sapiens
ttgctaatgggcttc

SEQ ID NO: 727676 - DNA, 15 bp, Homo sapiens
tgctaatgggcttct

SEQ ID NO: 727677 - DNA, 15 bp, Homo sapiens
gctaatgggcttctt

SEQ ID NO: 727678 - DNA, 15 bp, Homo sapiens
ctaatgggcttcttg

SEQ ID NO: 727679 - DNA, 15 bp, Homo sapiens
taatgggcttcttga

SEQ ID NO: 727680 - DNA, 15 bp, Homo sapiens
aatgggcttcttgaa

SEQ ID NO: 727681 - DNA, 15 bp, Homo sapiens
atgggcttcttgaat

SEQ ID NO: 727682 - DNA, 15 bp, Homo sapiens
tgggcttcttgaatt

SEQ ID NO: 727683 - DNA, 15 bp, Homo sapiens
gggcttcttgaattt

SEQ ID NO: 727684 - DNA, 15 bp, Homo sapiens
ggcttcttgaatttt

SEQ ID NO: 727685 - DNA, 15 bp, Homo sapiens
gcttcttgaattttg

SEQ ID NO: 727686 - DNA, 15 bp, Homo sapiens
cttcttgaattttgg

SEQ ID NO: 727687 - DNA, 15 bp, Homo sapiens
ttcttgaattttgga

SEQ ID NO: 727688 - DNA, 15 bp, Homo sapiens
tcttgaattttggac

SEQ ID NO: 727689 - DNA, 15 bp, Homo sapiens
cttgaattttggact

SEQ ID NO: 727690 - DNA, 15 bp, Homo sapiens
ttgaattttggactt

SEQ ID NO: 727691 - DNA, 15 bp, Homo sapiens
tgaattttggacttt

SEQ ID NO: 727692 - DNA, 15 bp, Homo sapiens
gaattttggactttc

SEQ ID NO: 727693 - DNA, 15 bp, Homo sapiens
aattttggactttcc

SEQ ID NO: 727694 - DNA, 15 bp, Homo sapiens
attttggactttcct

SEQ ID NO: 727695 - DNA, 15 bp, Homo sapiens
ttttggactttcctt

SEQ ID NO: 727696 - DNA, 15 bp, Homo sapiens
tttggactttcctta

SEQ ID NO: 727697 - DNA, 15 bp, Homo sapiens
ttggactttccttat

SEQ ID NO: 727698 - DNA, 15 bp, Homo sapiens
tggactttccttatt

SEQ ID NO: 727699 - DNA, 15 bp, Homo sapiens
ggactttccttattt

SEQ ID NO: 727700 - DNA, 15 bp, Homo sapiens
gactttccttatttg

SEQ ID NO: 727701 - DNA, 15 bp, Homo sapiens
actttccttatttgt

SEQ ID NO: 727702 - DNA, 15 bp, Homo sapiens
ctttccttatttgta

SEQ ID NO: 727703 - DNA, 15 bp, Homo sapiens
tttccttatttgtag

SEQ ID NO: 727704 - DNA, 15 bp, Homo sapiens
ttccttatttgtagc

SEQ ID NO: 727705 - DNA, 15 bp, Homo sapiens
tccttatttgtagcc

SEQ ID NO: 727706 - DNA, 15 bp, Homo sapiens
ccttatttgtagcca

SEQ ID NO: 727707 - DNA, 15 bp, Homo sapiens
cttatttgtagccat

SEQ ID NO: 727708 - DNA, 15 bp, Homo sapiens
ttatttgtagccatg

SEQ ID NO: 727709 - DNA, 15 bp, Homo sapiens
tatttgtagccatga

SEQ ID NO: 727710 - DNA, 15 bp, Homo sapiens
atttgtagccatgat

SEQ ID NO: 727711 - DNA, 15 bp, Homo sapiens
tttgtagccatgatt

SEQ ID NO: 727712 - DNA, 15 bp, Homo sapiens
ttgtagccatgattt

SEQ ID NO: 727713 - DNA, 15 bp, Homo sapiens
tgtagccatgattta

SEQ ID NO: 727714 - DNA, 15 bp, Homo sapiens
gtagccatgatttat

SEQ ID NO: 727715 - DNA, 15 bp, Homo sapiens
tagccatgatttatc

SEQ ID NO: 727716 - DNA, 15 bp, Homo sapiens
agccatgatttatct

SEQ ID NO: 727717 - DNA, 15 bp, Homo sapiens
gccatgatttatctt

SEQ ID NO: 727718 - DNA, 15 bp, Homo sapiens
ccatgatttatctta

SEQ ID NO: 727719 - DNA, 15 bp, Homo sapiens
catgatttatcttaa

SEQ ID NO: 727720 - DNA, 15 bp, Homo sapiens
atgatttatcttaat

SEQ ID NO: 727721 - DNA, 15 bp, Homo sapiens
tgatttatcttaatc

SEQ ID NO: 727722 - DNA, 15 bp, Homo sapiens
gatttatcttaatca

SEQ ID NO: 727723 - DNA, 15 bp, Homo sapiens
atttatcttaatcac

SEQ ID NO: 727724 - DNA, 15 bp, Homo sapiens
tttatcttaatcact

SEQ ID NO: 727725 - DNA, 15 bp, Homo sapiens
ttatcttaatcactg

SEQ ID NO: 727726 - DNA, 15 bp, Homo sapiens
tatcttaatcactga

SEQ ID NO: 727727 - DNA, 15 bp, Homo sapiens
atcttaatcactgaa

SEQ ID NO: 727728 - DNA, 15 bp, Homo sapiens
tcttaatcactgaac

SEQ ID NO: 727729 - DNA, 15 bp, Homo sapiens
cttaatcactgaact

SEQ ID NO: 727730 - DNA, 15 bp, Homo sapiens
ttaatcactgaactc

SEQ ID NO: 727731 - DNA, 15 bp, Homo sapiens
taatcactgaactct

SEQ ID NO: 727732 - DNA, 15 bp, Homo sapiens
aatcactgaactctc

SEQ ID NO: 727733 - DNA, 15 bp, Homo sapiens
atcactgaactctca

SEQ ID NO: 727734 - DNA, 15 bp, Homo sapiens
tcactgaactctcaa

SEQ ID NO: 727735 - DNA, 15 bp, Homo sapiens
cactgaactctcaat

SEQ ID NO: 727736 - DNA, 15 bp, Homo sapiens
actgaactctcaata

SEQ ID NO: 727737 - DNA, 15 bp, Homo sapiens
ctgaactctcaataa

SEQ ID NO: 727738 - DNA, 15 bp, Homo sapiens
tgaactctcaataat

SEQ ID NO: 727739 - DNA, 15 bp, Homo sapiens
gaactctcaataatt

SEQ ID NO: 727740 - DNA, 15 bp, Homo sapiens
aactctcaataattc

SEQ ID NO: 727741 - DNA, 15 bp, Homo sapiens
actctcaataattca

SEQ ID NO: 727742 - DNA, 15 bp, Homo sapiens
ctctcaataattcaa

SEQ ID NO: 727743 - DNA, 15 bp, Homo sapiens
tctcaataattcaaa

SEQ ID NO: 727744 - DNA, 15 bp, Homo sapiens
ctcaataattcaaat

SEQ ID NO: 727745 - DNA, 15 bp, Homo sapiens
tcaataattcaaata

SEQ ID NO: 727746 - DNA, 15 bp, Homo sapiens
caataattcaaatat

SEQ ID NO: 727747 - DNA, 15 bp, Homo sapiens
aataattcaaatatg

SEQ ID NO: 727748 - DNA, 15 bp, Homo sapiens
ataattcaaatatgc

SEQ ID NO: 727749 - DNA, 15 bp, Homo sapiens
taattcaaatatgca

SEQ ID NO: 727750 - DNA, 15 bp, Homo sapiens
aattcaaatatgcaa

SEQ ID NO: 727751 - DNA, 15 bp, Homo sapiens
attcaaatatgcaaa

SEQ ID NO: 727752 - DNA, 15 bp, Homo sapiens
ttcaaatatgcaaaa

SEQ ID NO: 727753 - DNA, 15 bp, Homo sapiens
tcaaatatgcaaaat

SEQ ID NO: 727754 - DNA, 15 bp, Homo sapiens
caaatatgcaaaata

SEQ ID NO: 727755 - DNA, 15 bp, Homo sapiens
aaatatgcaaaatat

SEQ ID NO: 727756 - DNA, 15 bp, Homo sapiens
aatatgcaaaatatt

SEQ ID NO: 727757 - DNA, 15 bp, Homo sapiens
atatgcaaaatattt

SEQ ID NO: 727758 - DNA, 15 bp, Homo sapiens
tatgcaaaatatttg

SEQ ID NO: 727759 - DNA, 15 bp, Homo sapiens
atgcaaaatatttgc

SEQ ID NO: 727760 - DNA, 15 bp, Homo sapiens
tgcaaaatatttgct

SEQ ID NO: 727761 - DNA, 15 bp, Homo sapiens
gcaaaatatttgctg

SEQ ID NO: 727762 - DNA, 15 bp, Homo sapiens
caaaatatttgctgt

SEQ ID NO: 727763 - DNA, 15 bp, Homo sapiens
aaaatatttgctgtt

SEQ ID NO: 727764 - DNA, 15 bp, Homo sapiens
aaatatttgctgtta

SEQ ID NO: 727765 - DNA, 15 bp, Homo sapiens
aatatttgctgttag

SEQ ID NO: 727766 - DNA, 15 bp, Homo sapiens
atatttgctgttagt

SEQ ID NO: 727767 - DNA, 15 bp, Homo sapiens
tatttgctgttagtt

SEQ ID NO: 727768 - DNA, 15 bp, Homo sapiens
atttgctgttagttg

SEQ ID NO: 727769 - DNA, 15 bp, Homo sapiens
tttgctgttagttgc

SEQ ID NO: 727770 - DNA, 15 bp, Homo sapiens
ttgctgttagttgca

SEQ ID NO: 727771 - DNA, 15 bp, Homo sapiens
tgctgttagttgcac

SEQ ID NO: 727772 - DNA, 15 bp, Homo sapiens
gctgttagttgcaca

SEQ ID NO: 727773 - DNA, 15 bp, Homo sapiens
ctgttagttgcacac

SEQ ID NO: 727774 - DNA, 15 bp, Homo sapiens
tgttagttgcacaca

SEQ ID NO: 727775 - DNA, 15 bp, Homo sapiens
gttagttgcacacaa

SEQ ID NO: 727776 - DNA, 15 bp, Homo sapiens
ttagttgcacacaag

SEQ ID NO: 727777 - DNA, 15 bp, Homo sapiens
tagttgcacacaagt

SEQ ID NO: 727778 - DNA, 15 bp, Homo sapiens
agttgcacacaagtt

SEQ ID NO: 727779 - DNA, 15 bp, Homo sapiens
gttgcacacaagttt

SEQ ID NO: 727780 - DNA, 15 bp, Homo sapiens
ttgcacacaagtttg

SEQ ID NO: 727781 - DNA, 15 bp, Homo sapiens
tgcacacaagtttga

SEQ ID NO: 727782 - DNA, 15 bp, Homo sapiens
gcacacaagtttgaa

SEQ ID NO: 727783 - DNA, 15 bp, Homo sapiens
cacacaagtttgaag

SEQ ID NO: 727784 - DNA, 15 bp, Homo sapiens
acacaagtttgaaga

SEQ ID NO: 727785 - DNA, 15 bp, Homo sapiens
cacaagtttgaagaa

SEQ ID NO: 727786 - DNA, 15 bp, Homo sapiens
acaagtttgaagaaa

SEQ ID NO: 727787 - DNA, 15 bp, Homo sapiens
caagtttgaagaaaa

SEQ ID NO: 727788 - DNA, 15 bp, Homo sapiens
aagtttgaagaaaac

SEQ ID NO: 727789 - DNA, 15 bp, Homo sapiens
agtttgaagaaaaca

SEQ ID NO: 727790 - DNA, 15 bp, Homo sapiens
gtttgaagaaaacag

SEQ ID NO: 727791 - DNA, 15 bp, Homo sapiens
tttgaagaaaacagc

SEQ ID NO: 727792 - DNA, 15 bp, Homo sapiens
ttgaagaaaacagct

SEQ ID NO: 727793 - DNA, 15 bp, Homo sapiens
tgaagaaaacagctt

SEQ ID NO: 727794 - DNA, 15 bp, Homo sapiens
gaagaaaacagcttg

SEQ ID NO: 727795 - DNA, 15 bp, Homo sapiens
aagaaaacagcttga

SEQ ID NO: 727796 - DNA, 15 bp, Homo sapiens
agaaaacagcttgaa

SEQ ID NO: 727797 - DNA, 15 bp, Homo sapiens
gaaaacagcttgaat

SEQ ID NO: 727798 - DNA, 15 bp, Homo sapiens
aaaacagcttgaatt

SEQ ID NO: 727799 - DNA, 15 bp, Homo sapiens
aaacagcttgaattc

SEQ ID NO: 727800 - DNA, 15 bp, Homo sapiens
aacagcttgaattct

SEQ ID NO: 727801 - DNA, 15 bp, Homo sapiens
acagcttgaattcta

SEQ ID NO: 727802 - DNA, 15 bp, Homo sapiens
cagcttgaattctag

SEQ ID NO: 727803 - DNA, 15 bp, Homo sapiens
agcttgaattctagc

SEQ ID NO: 727804 - DNA, 15 bp, Homo sapiens
gcttgaattctagca

SEQ ID NO: 727805 - DNA, 15 bp, Homo sapiens
cttgaattctagcat

SEQ ID NO: 727806 - DNA, 15 bp, Homo sapiens
ttgaattctagcatg

SEQ ID NO: 727807 - DNA, 15 bp, Homo sapiens
tgaattctagcatgg

SEQ ID NO: 727808 - DNA, 15 bp, Homo sapiens
gaattctagcatgga

SEQ ID NO: 727809 - DNA, 15 bp, Homo sapiens
aattctagcatggaa

SEQ ID NO: 727810 - DNA, 15 bp, Homo sapiens
attctagcatggaat

SEQ ID NO: 727811 - DNA, 15 bp, Homo sapiens
ttctagcatggaatt

SEQ ID NO: 727812 - DNA, 15 bp, Homo sapiens
tctagcatggaattt

SEQ ID NO: 727813 - DNA, 15 bp, Homo sapiens
ctagcatggaattta

SEQ ID NO: 727814 - DNA, 15 bp, Homo sapiens
tagcatggaatttat

SEQ ID NO: 727815 - DNA, 15 bp, Homo sapiens
agcatggaatttatg

SEQ ID NO: 727816 - DNA, 15 bp, Homo sapiens
gcatggaatttatgg

SEQ ID NO: 727817 - DNA, 15 bp, Homo sapiens
catggaatttatgga

SEQ ID NO: 727818 - DNA, 15 bp, Homo sapiens
atggaatttatggaa

SEQ ID NO: 727819 - DNA, 15 bp, Homo sapiens
tggaatttatggaat

SEQ ID NO: 727820 - DNA, 15 bp, Homo sapiens
ggaatttatggaatt

SEQ ID NO: 727821 - DNA, 15 bp, Homo sapiens
gaatttatggaattt

SEQ ID NO: 727822 - DNA, 15 bp, Homo sapiens
aatttatggaattta

SEQ ID NO: 727823 - DNA, 15 bp, Homo sapiens
atttatggaatttat

SEQ ID NO: 727824 - DNA, 15 bp, Homo sapiens
tttatggaatttatt

SEQ ID NO: 727825 - DNA, 15 bp, Homo sapiens
ttatggaatttattc

SEQ ID NO: 727826 - DNA, 15 bp, Homo sapiens
tatggaatttattca

SEQ ID NO: 727827 - DNA, 15 bp, Homo sapiens
atggaatttattcaa

SEQ ID NO: 727828 - DNA, 15 bp, Homo sapiens
tggaatttattcaac

SEQ ID NO: 727829 - DNA, 15 bp, Homo sapiens
ggaatttattcaact

SEQ ID NO: 727830 - DNA, 15 bp, Homo sapiens
gaatttattcaactg

SEQ ID NO: 727831 - DNA, 15 bp, Homo sapiens
aatttattcaactgt

SEQ ID NO: 727832 - DNA, 15 bp, Homo sapiens
atttattcaactgtt

SEQ ID NO: 727833 - DNA, 15 bp, Homo sapiens
tttattcaactgttt

SEQ ID NO: 727834 - DNA, 15 bp, Homo sapiens
ttattcaactgtttg

SEQ ID NO: 727835 - DNA, 15 bp, Homo sapiens
tattcaactgtttga

SEQ ID NO: 727836 - DNA, 15 bp, Homo sapiens
attcaactgtttgaa

SEQ ID NO: 727837 - DNA, 15 bp, Homo sapiens
ttcaactgtttgaat

SEQ ID NO: 727838 - DNA, 15 bp, Homo sapiens
tcaactgtttgaatt

SEQ ID NO: 727839 - DNA, 15 bp, Homo sapiens
caactgtttgaatta

SEQ ID NO: 727840 - DNA, 15 bp, Homo sapiens
aactgtttgaattaa

SEQ ID NO: 727841 - DNA, 15 bp, Homo sapiens
actgtttgaattaaa

SEQ ID NO: 727842 - DNA, 15 bp, Homo sapiens
ctgtttgaattaaag

SEQ ID NO: 727843 - DNA, 15 bp, Homo sapiens
tgtttgaattaaagt

SEQ ID NO: 727844 - DNA, 15 bp, Homo sapiens
gtttgaattaaagtc

SEQ ID NO: 727845 - DNA, 15 bp, Homo sapiens
tttgaattaaagtct

SEQ ID NO: 727846 - DNA, 15 bp, Homo sapiens
ttgaattaaagtctg

SEQ ID NO: 727847 - DNA, 15 bp, Homo sapiens
tgaattaaagtctgt

SEQ ID NO: 727848 - DNA, 15 bp, Homo sapiens
gaattaaagtctgtg

SEQ ID NO: 727849 - DNA, 15 bp, Homo sapiens
aattaaagtctgtga

SEQ ID NO: 727850 - DNA, 15 bp, Homo sapiens
attaaagtctgtgag

SEQ ID NO: 727851 - DNA, 15 bp, Homo sapiens
ttaaagtctgtgagc

SEQ ID NO: 727852 - DNA, 15 bp, Homo sapiens
taaagtctgtgagca

SEQ ID NO: 727853 - DNA, 15 bp, Homo sapiens
aaagtctgtgagcat

SEQ ID NO: 727854 - DNA, 15 bp, Homo sapiens
aagtctgtgagcatg

SEQ ID NO: 727855 - DNA, 15 bp, Homo sapiens
agtctgtgagcatgt

SEQ ID NO: 727856 - DNA, 15 bp, Homo sapiens
gtctgtgagcatgtt

SEQ ID NO: 727857 - DNA, 15 bp, Homo sapiens
tctgtgagcatgtta

SEQ ID NO: 727858 - DNA, 15 bp, Homo sapiens
ctgtgagcatgttag

SEQ ID NO: 727859 - DNA, 15 bp, Homo sapiens
tgtgagcatgttagt

SEQ ID NO: 727860 - DNA, 15 bp, Homo sapiens
gtgagcatgttagtg

SEQ ID NO: 727861 - DNA, 15 bp, Homo sapiens
tgagcatgttagtgg

SEQ ID NO: 727862 - DNA, 15 bp, Homo sapiens
gagcatgttagtggg

SEQ ID NO: 727863 - DNA, 15 bp, Homo sapiens
agcatgttagtgggg

SEQ ID NO: 727864 - DNA, 15 bp, Homo sapiens
gcatgttagtgggga

SEQ ID NO: 727865 - DNA, 15 bp, Homo sapiens
catgttagtggggaa

SEQ ID NO: 727866 - DNA, 15 bp, Homo sapiens
atgttagtggggaat

SEQ ID NO: 727867 - DNA, 15 bp, Homo sapiens
tgttagtggggaatg

SEQ ID NO: 727868 - DNA, 15 bp, Homo sapiens
gttagtggggaatga

SEQ ID NO: 727869 - DNA, 15 bp, Homo sapiens
ttagtggggaatgaa

SEQ ID NO: 727870 - DNA, 15 bp, Homo sapiens
tagtggggaatgaaa

SEQ ID NO: 727871 - DNA, 15 bp, Homo sapiens
agtggggaatgaaaa

SEQ ID NO: 727872 - DNA, 15 bp, Homo sapiens
gtggggaatgaaaag

SEQ ID NO: 727873 - DNA, 15 bp, Homo sapiens
tggggaatgaaaaga

SEQ ID NO: 727874 - DNA, 15 bp, Homo sapiens
ggggaatgaaaagag

SEQ ID NO: 727875 - DNA, 15 bp, Homo sapiens
gggaatgaaaagagg

SEQ ID NO: 727876 - DNA, 15 bp, Homo sapiens
ggaatgaaaagagga

SEQ ID NO: 727877 - DNA, 15 bp, Homo sapiens
gaatgaaaagaggat

SEQ ID NO: 727878 - DNA, 15 bp, Homo sapiens
aatgaaaagaggatg

SEQ ID NO: 727879 - DNA, 15 bp, Homo sapiens
atgaaaagaggatgg

SEQ ID NO: 727880 - DNA, 15 bp, Homo sapiens
tgaaaagaggatggc

SEQ ID NO: 727881 - DNA, 15 bp, Homo sapiens
gaaaagaggatggct

SEQ ID NO: 727882 - DNA, 15 bp, Homo sapiens
aaaagaggatggcta

SEQ ID NO: 727883 - DNA, 15 bp, Homo sapiens
aaagaggatggctaa

SEQ ID NO: 727884 - DNA, 15 bp, Homo sapiens
cttctcgagatgcaa

SEQ ID NO: 727885 - DNA, 15 bp, Homo sapiens
ttctcgagatgcaag

SEQ ID NO: 727886 - DNA, 15 bp, Homo sapiens
tctcgagatgcaaga

SEQ ID NO: 727887 - DNA, 15 bp, Homo sapiens
ctcgagatgcaagac

SEQ ID NO: 727888 - DNA, 15 bp, Homo sapiens
tcgagatgcaagact

SEQ ID NO: 727889 - DNA, 15 bp, Homo sapiens
cgagatgcaagactt

SEQ ID NO: 727890 - DNA, 15 bp, Homo sapiens
gagatgcaagacttt

SEQ ID NO: 727891 - DNA, 15 bp, Homo sapiens
agatgcaagactttc

SEQ ID NO: 727892 - DNA, 15 bp, Homo sapiens
gatgcaagactttcc

SEQ ID NO: 727893 - DNA, 15 bp, Homo sapiens
atgcaagactttcct

SEQ ID NO: 727894 - DNA, 15 bp, Homo sapiens
tgcaagactttcctc

SEQ ID NO: 727895 - DNA, 15 bp, Homo sapiens
gcaagactttcctct

SEQ ID NO: 727896 - DNA, 15 bp, Homo sapiens
caagactttcctctg

SEQ ID NO: 727897 - DNA, 15 bp, Homo sapiens
aagactttcctctgt

SEQ ID NO: 727898 - DNA, 15 bp, Homo sapiens
agactttcctctgta

SEQ ID NO: 727899 - DNA, 15 bp, Homo sapiens
gactttcctctgtaa

SEQ ID NO: 727900 - DNA, 15 bp, Homo sapiens
actttcctctgtaac

SEQ ID NO: 727901 - DNA, 15 bp, Homo sapiens
ctttcctctgtaact

SEQ ID NO: 727902 - DNA, 15 bp, Homo sapiens
tttcctctgtaactc

SEQ ID NO: 727903 - DNA, 15 bp, Homo sapiens
ttcctctgtaactcc

SEQ ID NO: 727904 - DNA, 15 bp, Homo sapiens
tcctctgtaactcct

SEQ ID NO: 727905 - DNA, 15 bp, Homo sapiens
cctctgtaactcctg

SEQ ID NO: 727906 - DNA, 15 bp, Homo sapiens
ctctgtaactcctga

SEQ ID NO: 727907 - DNA, 15 bp, Homo sapiens
tctgtaactcctgat

SEQ ID NO: 727908 - DNA, 15 bp, Homo sapiens
ctgtaactcctgatt

SEQ ID NO: 727909 - DNA, 15 bp, Homo sapiens
tgtaactcctgattc

SEQ ID NO: 727910 - DNA, 15 bp, Homo sapiens
gtaactcctgattct

SEQ ID NO: 727911 - DNA, 15 bp, Homo sapiens
taactcctgattctg

SEQ ID NO: 727912 - DNA, 15 bp, Homo sapiens
aactcctgattctga

SEQ ID NO: 727913 - DNA, 15 bp, Homo sapiens
actcctgattctgag

SEQ ID NO: 727914 - DNA, 15 bp, Homo sapiens
ctcctgattctgagc

SEQ ID NO: 727915 - DNA, 15 bp, Homo sapiens
tcctgattctgagca

SEQ ID NO: 727916 - DNA, 15 bp, Homo sapiens
cctgattctgagcag

SEQ ID NO: 727917 - DNA, 15 bp, Homo sapiens
ctgattctgagcagt

SEQ ID NO: 727918 - DNA, 15 bp, Homo sapiens
tgattctgagcagtg

SEQ ID NO: 727919 - DNA, 15 bp, Homo sapiens
gattctgagcagtgc

SEQ ID NO: 727920 - DNA, 15 bp, Homo sapiens
attctgagcagtgca

SEQ ID NO: 727921 - DNA, 15 bp, Homo sapiens
ttctgagcagtgcaa

SEQ ID NO: 727922 - DNA, 15 bp, Homo sapiens
tctgagcagtgcaag

SEQ ID NO: 727923 - DNA, 15 bp, Homo sapiens
ctgagcagtgcaagc

SEQ ID NO: 727924 - DNA, 15 bp, Homo sapiens
tgagcagtgcaagct

SEQ ID NO: 727925 - DNA, 15 bp, Homo sapiens
gagcagtgcaagctg

SEQ ID NO: 727926 - DNA, 15 bp, Homo sapiens
agcagtgcaagctga

SEQ ID NO: 727927 - DNA, 15 bp, Homo sapiens
gcagtgcaagctgac

SEQ ID NO: 727928 - DNA, 15 bp, Homo sapiens
cagtgcaagctgaca

SEQ ID NO: 727929 - DNA, 15 bp, Homo sapiens
agtgcaagctgacat

SEQ ID NO: 727930 - DNA, 15 bp, Homo sapiens
gtgcaagctgacatc

SEQ ID NO: 727931 - DNA, 15 bp, Homo sapiens
tgcaagctgacatcc

SEQ ID NO: 727932 - DNA, 15 bp, Homo sapiens
gcaagctgacatcct

SEQ ID NO: 727933 - DNA, 15 bp, Homo sapiens
caagctgacatcctg

SEQ ID NO: 727934 - DNA, 15 bp, Homo sapiens
aagctgacatcctga

SEQ ID NO: 727935 - DNA, 15 bp, Homo sapiens
agctgacatcctgaa

SEQ ID NO: 727936 - DNA, 15 bp, Homo sapiens
gctgacatcctgaaa

SEQ ID NO: 727937 - DNA, 15 bp, Homo sapiens
ctgacatcctgaaag

SEQ ID NO: 727938 - DNA, 15 bp, Homo sapiens
tgacatcctgaaagg

SEQ ID NO: 727939 - DNA, 15 bp, Homo sapiens
gacatcctgaaagga

SEQ ID NO: 727940 - DNA, 15 bp, Homo sapiens
acatcctgaaaggag

SEQ ID NO: 727941 - DNA, 15 bp, Homo sapiens
catcctgaaaggagg

SEQ ID NO: 727942 - DNA, 15 bp, Homo sapiens
atcctgaaaggagga

SEQ ID NO: 727943 - DNA, 15 bp, Homo sapiens
tcctgaaaggaggaa

SEQ ID NO: 727944 - DNA, 15 bp, Homo sapiens
cctgaaaggaggaag

SEQ ID NO: 727945 - DNA, 15 bp, Homo sapiens
ctgaaaggaggaaga

SEQ ID NO: 727946 - DNA, 15 bp, Homo sapiens
tgaaaggaggaagac

SEQ ID NO: 727947 - DNA, 15 bp, Homo sapiens
gaaaggaggaagacg

SEQ ID NO: 727948 - DNA, 15 bp, Homo sapiens
aaaggaggaagacgc

SEQ ID NO: 727949 - DNA, 15 bp, Homo sapiens
aaggaggaagacgca

SEQ ID NO: 727950 - DNA, 15 bp, Homo sapiens
aggaggaagacgcat

SEQ ID NO: 727951 - DNA, 15 bp, Homo sapiens
ggaggaagacgcatc

SEQ ID NO: 727952 - DNA, 15 bp, Homo sapiens
gaggaagacgcatcg

SEQ ID NO: 727953 - DNA, 15 bp, Homo sapiens
aggaagacgcatcga

SEQ ID NO: 727954 - DNA, 15 bp, Homo sapiens
ggaagacgcatcgac

SEQ ID NO: 727955 - DNA, 15 bp, Homo sapiens
gaagacgcatcgaca

SEQ ID NO: 727956 - DNA, 15 bp, Homo sapiens
aagacgcatcgacat

SEQ ID NO: 727957 - DNA, 15 bp, Homo sapiens
agacgcatcgacatt

SEQ ID NO: 727958 - DNA, 15 bp, Homo sapiens
gacgcatcgacattc

SEQ ID NO: 727959 - DNA, 15 bp, Homo sapiens
acgcatcgacattca

SEQ ID NO: 727960 - DNA, 15 bp, Homo sapiens
cgcatcgacattcag

SEQ ID NO: 727961 - DNA, 15 bp, Homo sapiens
gcatcgacattcagc

SEQ ID NO: 727962 - DNA, 15 bp, Homo sapiens
catcgacattcagca

SEQ ID NO: 727963 - DNA, 15 bp, Homo sapiens
atcgacattcagcat

SEQ ID NO: 727964 - DNA, 15 bp, Homo sapiens
tcgacattcagcata

SEQ ID NO: 727965 - DNA, 15 bp, Homo sapiens
cgacattcagcatat

SEQ ID NO: 727966 - DNA, 15 bp, Homo sapiens
gacattcagcatatg

SEQ ID NO: 727967 - DNA, 15 bp, Homo sapiens
acattcagcatatgc

SEQ ID NO: 727968 - DNA, 15 bp, Homo sapiens
cattcagcatatgcc

SEQ ID NO: 727969 - DNA, 15 bp, Homo sapiens
attcagcatatgcca

SEQ ID NO: 727970 - DNA, 15 bp, Homo sapiens
ttcagcatatgccag

SEQ ID NO: 727971 - DNA, 15 bp, Homo sapiens
tcagcatatgccagt

SEQ ID NO: 727972 - DNA, 15 bp, Homo sapiens
cagcatatgccagtc

SEQ ID NO: 727973 - DNA, 15 bp, Homo sapiens
agcatatgccagtca

SEQ ID NO: 727974 - DNA, 15 bp, Homo sapiens
gcatatgccagtcac

SEQ ID NO: 727975 - DNA, 15 bp, Homo sapiens
catatgccagtcacc

SEQ ID NO: 727976 - DNA, 15 bp, Homo sapiens
atatgccagtcacca

SEQ ID NO: 727977 - DNA, 15 bp, Homo sapiens
tatgccagtcaccag

SEQ ID NO: 727978 - DNA, 15 bp, Homo sapiens
atgccagtcaccagc

SEQ ID NO: 727979 - DNA, 15 bp, Homo sapiens
tgccagtcaccagct

SEQ ID NO: 727980 - DNA, 15 bp, Homo sapiens
gccagtcaccagctg

SEQ ID NO: 727981 - DNA, 15 bp, Homo sapiens
ccagtcaccagctgg

SEQ ID NO: 727982 - DNA, 15 bp, Homo sapiens
cagtcaccagctggc

SEQ ID NO: 727983 - DNA, 15 bp, Homo sapiens
agtcaccagctggcc

SEQ ID NO: 727984 - DNA, 15 bp, Homo sapiens
gtcaccagctggccc

SEQ ID NO: 727985 - DNA, 15 bp, Homo sapiens
tcaccagctggcccc

SEQ ID NO: 727986 - DNA, 15 bp, Homo sapiens
caccagctggcccca

SEQ ID NO: 727987 - DNA, 15 bp, Homo sapiens
accagctggccccac

SEQ ID NO: 727988 - DNA, 15 bp, Homo sapiens
ccagctggccccact

SEQ ID NO: 727989 - DNA, 15 bp, Homo sapiens
cagctggccccactg

SEQ ID NO: 727990 - DNA, 15 bp, Homo sapiens
agctggccccactga

SEQ ID NO: 727991 - DNA, 15 bp, Homo sapiens
gctggccccactgac

SEQ ID NO: 727992 - DNA, 15 bp, Homo sapiens
ctggccccactgaca

SEQ ID NO: 727993 - DNA, 15 bp, Homo sapiens
tggccccactgacat

SEQ ID NO: 727994 - DNA, 15 bp, Homo sapiens
ggccccactgacatc

SEQ ID NO: 727995 - DNA, 15 bp, Homo sapiens
gccccactgacatct

SEQ ID NO: 727996 - DNA, 15 bp, Homo sapiens
ccccactgacatctc

SEQ ID NO: 727997 - DNA, 15 bp, Homo sapiens
cccactgacatctcc

SEQ ID NO: 727998 - DNA, 15 bp, Homo sapiens
ccactgacatctccc

SEQ ID NO: 727999 - DNA, 15 bp, Homo sapiens
cactgacatctcccc

SEQ ID NO: 728000 - DNA, 15 bp, Homo sapiens
actgacatctccccc

SEQ ID NO: 728001 - DNA, 15 bp, Homo sapiens
ctgacatctccccca

SEQ ID NO: 728002 - DNA, 15 bp, Homo sapiens
tgacatctcccccag

SEQ ID NO: 728003 - DNA, 15 bp, Homo sapiens
gacatctcccccaga

SEQ ID NO: 728004 - DNA, 15 bp, Homo sapiens
acatctcccccagag

SEQ ID NO: 728005 - DNA, 15 bp, Homo sapiens
catctcccccagagg

SEQ ID NO: 728006 - DNA, 15 bp, Homo sapiens
atctcccccagaggc

SEQ ID NO: 728007 - DNA, 15 bp, Homo sapiens
tctcccccagaggcc

SEQ ID NO: 728008 - DNA, 15 bp, Homo sapiens
ctcccccagaggcct

SEQ ID NO: 728009 - DNA, 15 bp, Homo sapiens
tcccccagaggcctc

SEQ ID NO: 728010 - DNA, 15 bp, Homo sapiens
cccccagaggcctca

SEQ ID NO: 728011 - DNA, 15 bp, Homo sapiens
ccccagaggcctcac

SEQ ID NO: 728012 - DNA, 15 bp, Homo sapiens
cccagaggcctcacg

SEQ ID NO: 728013 - DNA, 15 bp, Homo sapiens
ccagaggcctcacgt

SEQ ID NO: 728014 - DNA, 15 bp, Homo sapiens
cagaggcctcacgtt

SEQ ID NO: 728015 - DNA, 15 bp, Homo sapiens
agaggcctcacgtta

SEQ ID NO: 728016 - DNA, 15 bp, Homo sapiens
gaggcctcacgttac

SEQ ID NO: 728017 - DNA, 15 bp, Homo sapiens
aggcctcacgttaca

SEQ ID NO: 728018 - DNA, 15 bp, Homo sapiens
ggcctcacgttacaa

SEQ ID NO: 728019 - DNA, 15 bp, Homo sapiens
gcctcacgttacaag

SEQ ID NO: 728020 - DNA, 15 bp, Homo sapiens
cctcacgttacaagc

SEQ ID NO: 728021 - DNA, 15 bp, Homo sapiens
ctcacgttacaagcc

SEQ ID NO: 728022 - DNA, 15 bp, Homo sapiens
tcacgttacaagcca

SEQ ID NO: 728023 - DNA, 15 bp, Homo sapiens
cacgttacaagccaa

SEQ ID NO: 728024 - DNA, 15 bp, Homo sapiens
acgttacaagccaag

SEQ ID NO: 728025 - DNA, 15 bp, Homo sapiens
cgttacaagccaaga

SEQ ID NO: 728026 - DNA, 15 bp, Homo sapiens
gttacaagccaagag

SEQ ID NO: 728027 - DNA, 15 bp, Homo sapiens
ttacaagccaagaga

SEQ ID NO: 728028 - DNA, 15 bp, Homo sapiens
tacaagccaagagaa

SEQ ID NO: 728029 - DNA, 15 bp, Homo sapiens
acaagccaagagaac

SEQ ID NO: 728030 - DNA, 15 bp, Homo sapiens
caagccaagagaacc

SEQ ID NO: 728031 - DNA, 15 bp, Homo sapiens
aagccaagagaaccc

SEQ ID NO: 728032 - DNA, 15 bp, Homo sapiens
agccaagagaaccca

SEQ ID NO: 728033 - DNA, 15 bp, Homo sapiens
gccaagagaacccaa

SEQ ID NO: 728034 - DNA, 15 bp, Homo sapiens
ccaagagaacccaag

SEQ ID NO: 728035 - DNA, 15 bp, Homo sapiens
caagagaacccaagg

SEQ ID NO: 728036 - DNA, 15 bp, Homo sapiens
aagagaacccaaggc

SEQ ID NO: 728037 - DNA, 15 bp, Homo sapiens
agagaacccaaggcc

SEQ ID NO: 728038 - DNA, 15 bp, Homo sapiens
gagaacccaaggcca

SEQ ID NO: 728039 - DNA, 15 bp, Homo sapiens
agaacccaaggccag

SEQ ID NO: 728040 - DNA, 15 bp, Homo sapiens
gaacccaaggccaga

SEQ ID NO: 728041 - DNA, 15 bp, Homo sapiens
aacccaaggccagag

SEQ ID NO: 728042 - DNA, 15 bp, Homo sapiens
acccaaggccagaga

SEQ ID NO: 728043 - DNA, 15 bp, Homo sapiens
cccaaggccagagag

SEQ ID NO: 728044 - DNA, 15 bp, Homo sapiens
ccaaggccagagagg

SEQ ID NO: 728045 - DNA, 15 bp, Homo sapiens
caaggccagagaggg

SEQ ID NO: 728046 - DNA, 15 bp, Homo sapiens
aaggccagagagggg

SEQ ID NO: 728047 - DNA, 15 bp, Homo sapiens
aggccagagagggga

SEQ ID NO: 728048 - DNA, 15 bp, Homo sapiens
ggccagagaggggaa

SEQ ID NO: 728049 - DNA, 15 bp, Homo sapiens
gccagagaggggaag

SEQ ID NO: 728050 - DNA, 15 bp, Homo sapiens
ccagagaggggaagt

SEQ ID NO: 728051 - DNA, 15 bp, Homo sapiens
cagagaggggaagtc

SEQ ID NO: 728052 - DNA, 15 bp, Homo sapiens
agagaggggaagtca

SEQ ID NO: 728053 - DNA, 15 bp, Homo sapiens
gagaggggaagtcat

SEQ ID NO: 728054 - DNA, 15 bp, Homo sapiens
agaggggaagtcatt

SEQ ID NO: 728055 - DNA, 15 bp, Homo sapiens
gaggggaagtcattc

SEQ ID NO: 728056 - DNA, 15 bp, Homo sapiens
aggggaagtcattca

SEQ ID NO: 728057 - DNA, 15 bp, Homo sapiens
ggggaagtcattcat

SEQ ID NO: 728058 - DNA, 15 bp, Homo sapiens
gggaagtcattcatc

SEQ ID NO: 728059 - DNA, 15 bp, Homo sapiens
ggaagtcattcatcc

SEQ ID NO: 728060 - DNA, 15 bp, Homo sapiens
gaagtcattcatcca

SEQ ID NO: 728061 - DNA, 15 bp, Homo sapiens
aagtcattcatccaa

SEQ ID NO: 728062 - DNA, 15 bp, Homo sapiens
agtcattcatccaag

SEQ ID NO: 728063 - DNA, 15 bp, Homo sapiens
gtcattcatccaagg

SEQ ID NO: 728064 - DNA, 15 bp, Homo sapiens
tcattcatccaaggt

SEQ ID NO: 728065 - DNA, 15 bp, Homo sapiens
cattcatccaaggtt

SEQ ID NO: 728066 - DNA, 15 bp, Homo sapiens
attcatccaaggtta

SEQ ID NO: 728067 - DNA, 15 bp, Homo sapiens
ttcatccaaggttac

SEQ ID NO: 728068 - DNA, 15 bp, Homo sapiens
tcatccaaggttact

SEQ ID NO: 728069 - DNA, 15 bp, Homo sapiens
catccaaggttactc

SEQ ID NO: 728070 - DNA, 15 bp, Homo sapiens
atccaaggttactcg

SEQ ID NO: 728071 - DNA, 15 bp, Homo sapiens
tccaaggttactcgg

SEQ ID NO: 728072 - DNA, 15 bp, Homo sapiens
ccaaggttactcggc

SEQ ID NO: 728073 - DNA, 15 bp, Homo sapiens
caaggttactcggca

SEQ ID NO: 728074 - DNA, 15 bp, Homo sapiens
aaggttactcggcag

SEQ ID NO: 728075 - DNA, 15 bp, Homo sapiens
aggttactcggcagg

SEQ ID NO: 728076 - DNA, 15 bp, Homo sapiens
ggttactcggcaggt

SEQ ID NO: 728077 - DNA, 15 bp, Homo sapiens
gttactcggcaggtc

SEQ ID NO: 728078 - DNA, 15 bp, Homo sapiens
ttactcggcaggtca

SEQ ID NO: 728079 - DNA, 15 bp, Homo sapiens
tactcggcaggtcag

SEQ ID NO: 728080 - DNA, 15 bp, Homo sapiens
actcggcaggtcaga

SEQ ID NO: 728081 - DNA, 15 bp, Homo sapiens
ctcggcaggtcagac

SEQ ID NO: 728082 - DNA, 15 bp, Homo sapiens
tcggcaggtcagaca

SEQ ID NO: 728083 - DNA, 15 bp, Homo sapiens
cggcaggtcagacag

SEQ ID NO: 728084 - DNA, 15 bp, Homo sapiens
ggcaggtcagacagg

SEQ ID NO: 728085 - DNA, 15 bp, Homo sapiens
gcaggtcagacaggg

SEQ ID NO: 728086 - DNA, 15 bp, Homo sapiens
caggtcagacagggc

SEQ ID NO: 728087 - DNA, 15 bp, Homo sapiens
aggtcagacagggct

SEQ ID NO: 728088 - DNA, 15 bp, Homo sapiens
ggtcagacagggctg

SEQ ID NO: 728089 - DNA, 15 bp, Homo sapiens
gtcagacagggctgg

SEQ ID NO: 728090 - DNA, 15 bp, Homo sapiens
tcagacagggctggg

SEQ ID NO: 728091 - DNA, 15 bp, Homo sapiens
cagacagggctggga

SEQ ID NO: 728092 - DNA, 15 bp, Homo sapiens
agacagggctgggat

SEQ ID NO: 728093 - DNA, 15 bp, Homo sapiens
gacagggctgggatt

SEQ ID NO: 728094 - DNA, 15 bp, Homo sapiens
acagggctgggattt

SEQ ID NO: 728095 - DNA, 15 bp, Homo sapiens
cagggctgggatttg

SEQ ID NO: 728096 - DNA, 15 bp, Homo sapiens
agggctgggatttga

SEQ ID NO: 728097 - DNA, 15 bp, Homo sapiens
gggctgggatttgaa

SEQ ID NO: 728098 - DNA, 15 bp, Homo sapiens
ggctgggatttgaac

SEQ ID NO: 728099 - DNA, 15 bp, Homo sapiens
gctgggatttgaacc

SEQ ID NO: 728100 - DNA, 15 bp, Homo sapiens
ctgggatttgaaccc

SEQ ID NO: 728101 - DNA, 15 bp, Homo sapiens
tgggatttgaaccca

SEQ ID NO: 728102 - DNA, 15 bp, Homo sapiens
gggatttgaacccac

SEQ ID NO: 728103 - DNA, 15 bp, Homo sapiens
ggatttgaacccaca

SEQ ID NO: 728104 - DNA, 15 bp, Homo sapiens
gatttgaacccacat

SEQ ID NO: 728105 - DNA, 15 bp, Homo sapiens
atttgaacccacatc

SEQ ID NO: 728106 - DNA, 15 bp, Homo sapiens
tttgaacccacatct

SEQ ID NO: 728107 - DNA, 15 bp, Homo sapiens
ttgaacccacatctg

SEQ ID NO: 728108 - DNA, 15 bp, Homo sapiens
tgaacccacatctgc

SEQ ID NO: 728109 - DNA, 15 bp, Homo sapiens
gaacccacatctgcc

SEQ ID NO: 728110 - DNA, 15 bp, Homo sapiens
aacccacatctgcct

SEQ ID NO: 728111 - DNA, 15 bp, Homo sapiens
acccacatctgcctg

SEQ ID NO: 728112 - DNA, 15 bp, Homo sapiens
cccacatctgcctgg

SEQ ID NO: 728113 - DNA, 15 bp, Homo sapiens
ccacatctgcctggt

SEQ ID NO: 728114 - DNA, 15 bp, Homo sapiens
cacatctgcctggtt

SEQ ID NO: 728115 - DNA, 15 bp, Homo sapiens
acatctgcctggttc

SEQ ID NO: 728116 - DNA, 15 bp, Homo sapiens
catctgcctggttcc

SEQ ID NO: 728117 - DNA, 15 bp, Homo sapiens
atctgcctggttcct

SEQ ID NO: 728118 - DNA, 15 bp, Homo sapiens
tctgcctggttccta

SEQ ID NO: 728119 - DNA, 15 bp, Homo sapiens
ctgcctggttcctag

SEQ ID NO: 728120 - DNA, 15 bp, Homo sapiens
tgcctggttcctagg

SEQ ID NO: 728121 - DNA, 15 bp, Homo sapiens
gcctggttcctaggt

SEQ ID NO: 728122 - DNA, 15 bp, Homo sapiens
cctggttcctaggtc

SEQ ID NO: 728123 - DNA, 15 bp, Homo sapiens
ctggttcctaggtcc

SEQ ID NO: 728124 - DNA, 15 bp, Homo sapiens
tggttcctaggtccc

SEQ ID NO: 728125 - DNA, 15 bp, Homo sapiens
ggttcctaggtccca

SEQ ID NO: 728126 - DNA, 15 bp, Homo sapiens
gttcctaggtcccat

SEQ ID NO: 728127 - DNA, 15 bp, Homo sapiens
ttcctaggtcccatt

SEQ ID NO: 728128 - DNA, 15 bp, Homo sapiens
tcctaggtcccattt

SEQ ID NO: 728129 - DNA, 15 bp, Homo sapiens
cctaggtcccatttc

SEQ ID NO: 728130 - DNA, 15 bp, Homo sapiens
ctaggtcccatttct

SEQ ID NO: 728131 - DNA, 15 bp, Homo sapiens
taggtcccatttctg

SEQ ID NO: 728132 - DNA, 15 bp, Homo sapiens
aggtcccatttctgc

SEQ ID NO: 728133 - DNA, 15 bp, Homo sapiens
ggtcccatttctgca

SEQ ID NO: 728134 - DNA, 15 bp, Homo sapiens
gtcccatttctgcat

SEQ ID NO: 728135 - DNA, 15 bp, Homo sapiens
tcccatttctgcatt

SEQ ID NO: 728136 - DNA, 15 bp, Homo sapiens
cccatttctgcatta

SEQ ID NO: 728137 - DNA, 15 bp, Homo sapiens
ccatttctgcattaa

SEQ ID NO: 728138 - DNA, 15 bp, Homo sapiens
catttctgcattaat

SEQ ID NO: 728139 - DNA, 15 bp, Homo sapiens
atttctgcattaata

SEQ ID NO: 728140 - DNA, 15 bp, Homo sapiens
tttctgcattaatat

SEQ ID NO: 728141 - DNA, 15 bp, Homo sapiens
ttctgcattaatatg

SEQ ID NO: 728142 - DNA, 15 bp, Homo sapiens
tctgcattaatatgg

SEQ ID NO: 728143 - DNA, 15 bp, Homo sapiens
ctgcattaatatgga

SEQ ID NO: 728144 - DNA, 15 bp, Homo sapiens
tgcattaatatggag

SEQ ID NO: 728145 - DNA, 15 bp, Homo sapiens
gcattaatatggagg

SEQ ID NO: 728146 - DNA, 15 bp, Homo sapiens
cattaatatggaggg

SEQ ID NO: 728147 - DNA, 15 bp, Homo sapiens
attaatatggagggg

SEQ ID NO: 728148 - DNA, 15 bp, Homo sapiens
ttaatatggaggggg

SEQ ID NO: 728149 - DNA, 15 bp, Homo sapiens
taatatggagggggc

SEQ ID NO: 728150 - DNA, 15 bp, Homo sapiens
aatatggagggggct

SEQ ID NO: 728151 - DNA, 15 bp, Homo sapiens
atatggagggggctt

SEQ ID NO: 728152 - DNA, 15 bp, Homo sapiens
tatggagggggcttc

SEQ ID NO: 728153 - DNA, 15 bp, Homo sapiens
atggagggggcttca

SEQ ID NO: 728154 - DNA, 15 bp, Homo sapiens
tggagggggcttcat

SEQ ID NO: 728155 - DNA, 15 bp, Homo sapiens
ggagggggcttcatt

SEQ ID NO: 728156 - DNA, 15 bp, Homo sapiens
gagggggcttcattc

SEQ ID NO: 728157 - DNA, 15 bp, Homo sapiens
agggggcttcattca

SEQ ID NO: 728158 - DNA, 15 bp, Homo sapiens
gggggcttcattcaa

SEQ ID NO: 728159 - DNA, 15 bp, Homo sapiens
ggggcttcattcaaa

SEQ ID NO: 728160 - DNA, 15 bp, Homo sapiens
gggcttcattcaaag

SEQ ID NO: 728161 - DNA, 15 bp, Homo sapiens
ggcttcattcaaagc

SEQ ID NO: 728162 - DNA, 15 bp, Homo sapiens
gcttcattcaaagct

SEQ ID NO: 728163 - DNA, 15 bp, Homo sapiens
cttcattcaaagctg

SEQ ID NO: 728164 - DNA, 15 bp, Homo sapiens
ttcattcaaagctga

SEQ ID NO: 728165 - DNA, 15 bp, Homo sapiens
tcattcaaagctgag

SEQ ID NO: 728166 - DNA, 15 bp, Homo sapiens
cattcaaagctgagc

SEQ ID NO: 728167 - DNA, 15 bp, Homo sapiens
attcaaagctgagcc

SEQ ID NO: 728168 - DNA, 15 bp, Homo sapiens
ttcaaagctgagccc

SEQ ID NO: 728169 - DNA, 15 bp, Homo sapiens
tcaaagctgagcccc

SEQ ID NO: 728170 - DNA, 15 bp, Homo sapiens
caaagctgagccccc

SEQ ID NO: 728171 - DNA, 15 bp, Homo sapiens
aaagctgagccccct

SEQ ID NO: 728172 - DNA, 15 bp, Homo sapiens
aagctgagccccctg

SEQ ID NO: 728173 - DNA, 15 bp, Homo sapiens
agctgagccccctgg

SEQ ID NO: 728174 - DNA, 15 bp, Homo sapiens
gctgagccccctgga

SEQ ID NO: 728175 - DNA, 15 bp, Homo sapiens
ctgagccccctggat

SEQ ID NO: 728176 - DNA, 15 bp, Homo sapiens
tgagccccctggatg

SEQ ID NO: 728177 - DNA, 15 bp, Homo sapiens
gagccccctggatgg

SEQ ID NO: 728178 - DNA, 15 bp, Homo sapiens
agccccctggatggg

SEQ ID NO: 728179 - DNA, 15 bp, Homo sapiens
gccccctggatgggt

SEQ ID NO: 728180 - DNA, 15 bp, Homo sapiens
ccccctggatgggtg

SEQ ID NO: 728181 - DNA, 15 bp, Homo sapiens
cccctggatgggtgt

SEQ ID NO: 728182 - DNA, 15 bp, Homo sapiens
ccctggatgggtgtg

SEQ ID NO: 728183 - DNA, 15 bp, Homo sapiens
cctggatgggtgtgg

SEQ ID NO: 728184 - DNA, 15 bp, Homo sapiens
ctggatgggtgtggt

SEQ ID NO: 728185 - DNA, 15 bp, Homo sapiens
tggatgggtgtggtg

SEQ ID NO: 728186 - DNA, 15 bp, Homo sapiens
ggatgggtgtggtgg

SEQ ID NO: 728187 - DNA, 15 bp, Homo sapiens
gatgggtgtggtggt

SEQ ID NO: 728188 - DNA, 15 bp, Homo sapiens
atgggtgtggtggtt

SEQ ID NO: 728189 - DNA, 15 bp, Homo sapiens
tgggtgtggtggttc

SEQ ID NO: 728190 - DNA, 15 bp, Homo sapiens
gggtgtggtggttca

SEQ ID NO: 728191 - DNA, 15 bp, Homo sapiens
ggtgtggtggttcac

SEQ ID NO: 728192 - DNA, 15 bp, Homo sapiens
gtgtggtggttcaca

SEQ ID NO: 728193 - DNA, 15 bp, Homo sapiens
tgtggtggttcacac

SEQ ID NO: 728194 - DNA, 15 bp, Homo sapiens
gtggtggttcacacc

SEQ ID NO: 728195 - DNA, 15 bp, Homo sapiens
tggtggttcacacct

SEQ ID NO: 728196 - DNA, 15 bp, Homo sapiens
ggtggttcacacctg

SEQ ID NO: 728197 - DNA, 15 bp, Homo sapiens
gtggttcacacctgt

SEQ ID NO: 728198 - DNA, 15 bp, Homo sapiens
tggttcacacctgta

SEQ ID NO: 728199 - DNA, 15 bp, Homo sapiens
ggttcacacctgtaa

SEQ ID NO: 728200 - DNA, 15 bp, Homo sapiens
gttcacacctgtaat

SEQ ID NO: 728201 - DNA, 15 bp, Homo sapiens
ttcacacctgtaatc

SEQ ID NO: 728202 - DNA, 15 bp, Homo sapiens
tcacacctgtaatcc

SEQ ID NO: 728203 - DNA, 15 bp, Homo sapiens
cacacctgtaatccc

SEQ ID NO: 728204 - DNA, 15 bp, Homo sapiens
acacctgtaatccca

SEQ ID NO: 728205 - DNA, 15 bp, Homo sapiens
actttgggaggccgt

SEQ ID NO: 728206 - DNA, 15 bp, Homo sapiens
ctttgggaggccgtg

SEQ ID NO: 728207 - DNA, 15 bp, Homo sapiens
tttgggaggccgtgg

SEQ ID NO: 728208 - DNA, 15 bp, Homo sapiens
ttgggaggccgtggt

SEQ ID NO: 728209 - DNA, 15 bp, Homo sapiens
tgggaggccgtggtg

SEQ ID NO: 728210 - DNA, 15 bp, Homo sapiens
gggaggccgtggtgg

SEQ ID NO: 728211 - DNA, 15 bp, Homo sapiens
ggaggccgtggtggg

SEQ ID NO: 728212 - DNA, 15 bp, Homo sapiens
gaggccgtggtgggc

SEQ ID NO: 728213 - DNA, 15 bp, Homo sapiens
aggccgtggtgggcg

SEQ ID NO: 728214 - DNA, 15 bp, Homo sapiens
ggccgtggtgggcgg

SEQ ID NO: 728215 - DNA, 15 bp, Homo sapiens
gccgtggtgggcgga

SEQ ID NO: 728216 - DNA, 15 bp, Homo sapiens
ccgtggtgggcggat

SEQ ID NO: 728217 - DNA, 15 bp, Homo sapiens
cgtggtgggcggatc

SEQ ID NO: 728218 - DNA, 15 bp, Homo sapiens
gtggtgggcggatca

SEQ ID NO: 728219 - DNA, 15 bp, Homo sapiens
tggtgggcggatcac

SEQ ID NO: 728220 - DNA, 15 bp, Homo sapiens
ggtgggcggatcacc

SEQ ID NO: 728221 - DNA, 15 bp, Homo sapiens
gtgggcggatcacct

SEQ ID NO: 728222 - DNA, 15 bp, Homo sapiens
tgggcggatcacctg

SEQ ID NO: 728223 - DNA, 15 bp, Homo sapiens
gggcggatcacctga

SEQ ID NO: 728224 - DNA, 15 bp, Homo sapiens
ggcggatcacctgag

SEQ ID NO: 728225 - DNA, 15 bp, Homo sapiens
gcggatcacctgagg

SEQ ID NO: 728226 - DNA, 15 bp, Homo sapiens
cggatcacctgaggt

SEQ ID NO: 728227 - DNA, 15 bp, Homo sapiens
ggatcacctgaggtc

SEQ ID NO: 728228 - DNA, 15 bp, Homo sapiens
acatggtgaaaccct

SEQ ID NO: 728229 - DNA, 15 bp, Homo sapiens
catggtgaaaccctg

SEQ ID NO: 728230 - DNA, 15 bp, Homo sapiens
atggtgaaaccctgc

SEQ ID NO: 728231 - DNA, 15 bp, Homo sapiens
tggtgaaaccctgcc

SEQ ID NO: 728232 - DNA, 15 bp, Homo sapiens
ggtgaaaccctgcct

SEQ ID NO: 728233 - DNA, 15 bp, Homo sapiens
gtgaaaccctgcctg

SEQ ID NO: 728234 - DNA, 15 bp, Homo sapiens
tgaaaccctgcctgt

SEQ ID NO: 728235 - DNA, 15 bp, Homo sapiens
gaaaccctgcctgta

SEQ ID NO: 728236 - DNA, 15 bp, Homo sapiens
aaaccctgcctgtac

SEQ ID NO: 728237 - DNA, 15 bp, Homo sapiens
aaccctgcctgtact

SEQ ID NO: 728238 - DNA, 15 bp, Homo sapiens
accctgcctgtacta

SEQ ID NO: 728239 - DNA, 15 bp, Homo sapiens
ccctgcctgtactaa

SEQ ID NO: 728240 - DNA, 15 bp, Homo sapiens
cctgcctgtactaaa

SEQ ID NO: 728241 - DNA, 15 bp, Homo sapiens
ctgcctgtactaaaa

SEQ ID NO: 728242 - DNA, 15 bp, Homo sapiens
tgcctgtactaaaaa

SEQ ID NO: 728243 - DNA, 15 bp, Homo sapiens
gcctgtactaaaaat

SEQ ID NO: 728244 - DNA, 15 bp, Homo sapiens
cctgtactaaaaatg

SEQ ID NO: 728245 - DNA, 15 bp, Homo sapiens
ctgtactaaaaatgc

SEQ ID NO: 728246 - DNA, 15 bp, Homo sapiens
tgtactaaaaatgca

SEQ ID NO: 728247 - DNA, 15 bp, Homo sapiens
gtactaaaaatgcaa

SEQ ID NO: 728248 - DNA, 15 bp, Homo sapiens
tactaaaaatgcaaa

SEQ ID NO: 728249 - DNA, 15 bp, Homo sapiens
actaaaaatgcaaaa

SEQ ID NO: 728250 - DNA, 15 bp, Homo sapiens
ctaaaaatgcaaaat

SEQ ID NO: 728251 - DNA, 15 bp, Homo sapiens
taaaaatgcaaaatt

SEQ ID NO: 728252 - DNA, 15 bp, Homo sapiens
aaaaatgcaaaatta

SEQ ID NO: 728253 - DNA, 15 bp, Homo sapiens
aaaatgcaaaattag

SEQ ID NO: 728254 - DNA, 15 bp, Homo sapiens
aaatgcaaaattagc

SEQ ID NO: 728255 - DNA, 15 bp, Homo sapiens
aatgcaaaattagcc

SEQ ID NO: 728256 - DNA, 15 bp, Homo sapiens
atgcaaaattagcca

SEQ ID NO: 728257 - DNA, 15 bp, Homo sapiens
tgcaaaattagccag

SEQ ID NO: 728258 - DNA, 15 bp, Homo sapiens
gcaaaattagccagg

SEQ ID NO: 728259 - DNA, 15 bp, Homo sapiens
caaaattagccaggt

SEQ ID NO: 728260 - DNA, 15 bp, Homo sapiens
gccaggtgtggtggt

SEQ ID NO: 728261 - DNA, 15 bp, Homo sapiens
ccaggtgtggtggtg

SEQ ID NO: 728262 - DNA, 15 bp, Homo sapiens
caggtgtggtggtgg

SEQ ID NO: 728263 - DNA, 15 bp, Homo sapiens
aggtgtggtggtggg

SEQ ID NO: 728264 - DNA, 15 bp, Homo sapiens
ggtgtggtggtgggc

SEQ ID NO: 728265 - DNA, 15 bp, Homo sapiens
gtgtggtggtgggcg

SEQ ID NO: 728266 - DNA, 15 bp, Homo sapiens
tgtggtggtgggcgc

SEQ ID NO: 728267 - DNA, 15 bp, Homo sapiens
gtggtggtgggcgcc

SEQ ID NO: 728268 - DNA, 15 bp, Homo sapiens
tggtggtgggcgcct

SEQ ID NO: 728269 - DNA, 15 bp, Homo sapiens
ggtggtgggcgccta

SEQ ID NO: 728270 - DNA, 15 bp, Homo sapiens
gtggtgggcgcctat

SEQ ID NO: 728271 - DNA, 15 bp, Homo sapiens
tggtgggcgcctata

SEQ ID NO: 728272 - DNA, 15 bp, Homo sapiens
ggtgggcgcctataa

SEQ ID NO: 728273 - DNA, 15 bp, Homo sapiens
gtgggcgcctataat

SEQ ID NO: 728274 - DNA, 15 bp, Homo sapiens
tgggcgcctataatt

SEQ ID NO: 728275 - DNA, 15 bp, Homo sapiens
gggcgcctataattc

SEQ ID NO: 728276 - DNA, 15 bp, Homo sapiens
ggcgcctataattcc

SEQ ID NO: 728277 - DNA, 15 bp, Homo sapiens
gcgcctataattcca

SEQ ID NO: 728278 - DNA, 15 bp, Homo sapiens
cgcctataattccag

SEQ ID NO: 728279 - DNA, 15 bp, Homo sapiens
gcctataattccagc

SEQ ID NO: 728280 - DNA, 15 bp, Homo sapiens
cctataattccagct

SEQ ID NO: 728281 - DNA, 15 bp, Homo sapiens
ctataattccagcta

SEQ ID NO: 728282 - DNA, 15 bp, Homo sapiens
tataattccagctac

SEQ ID NO: 728283 - DNA, 15 bp, Homo sapiens
ataattccagctact

SEQ ID NO: 728284 - DNA, 15 bp, Homo sapiens
taattccagctactt

SEQ ID NO: 728285 - DNA, 15 bp, Homo sapiens
aattccagctacttg

SEQ ID NO: 728286 - DNA, 15 bp, Homo sapiens
attccagctacttgg

SEQ ID NO: 728287 - DNA, 15 bp, Homo sapiens
ttccagctacttggg

SEQ ID NO: 728288 - DNA, 15 bp, Homo sapiens
tccagctacttggga

SEQ ID NO: 728289 - DNA, 15 bp, Homo sapiens
ccagctacttgggaa

SEQ ID NO: 728290 - DNA, 15 bp, Homo sapiens
cagctacttgggaac

SEQ ID NO: 728291 - DNA, 15 bp, Homo sapiens
agctacttgggaact

SEQ ID NO: 728292 - DNA, 15 bp, Homo sapiens
gctacttgggaactt

SEQ ID NO: 728293 - DNA, 15 bp, Homo sapiens
ctacttgggaacttg

SEQ ID NO: 728294 - DNA, 15 bp, Homo sapiens
tacttgggaacttgg

SEQ ID NO: 728295 - DNA, 15 bp, Homo sapiens
acttgggaacttggg

SEQ ID NO: 728296 - DNA, 15 bp, Homo sapiens
cttgggaacttggga

SEQ ID NO: 728297 - DNA, 15 bp, Homo sapiens
ttgggaacttgggag

SEQ ID NO: 728298 - DNA, 15 bp, Homo sapiens
tgggaacttgggagg

SEQ ID NO: 728299 - DNA, 15 bp, Homo sapiens
gggaacttgggaggc

SEQ ID NO: 728300 - DNA, 15 bp, Homo sapiens
ggaacttgggaggct

SEQ ID NO: 728301 - DNA, 15 bp, Homo sapiens
gaacttgggaggcta

SEQ ID NO: 728302 - DNA, 15 bp, Homo sapiens
aacttgggaggctaa

SEQ ID NO: 728303 - DNA, 15 bp, Homo sapiens
acttgggaggctaag

SEQ ID NO: 728304 - DNA, 15 bp, Homo sapiens
cttgggaggctaagg

SEQ ID NO: 728305 - DNA, 15 bp, Homo sapiens
tgggaggctaaggca

SEQ ID NO: 728306 - DNA, 15 bp, Homo sapiens
gggaggctaaggcag

SEQ ID NO: 728307 - DNA, 15 bp, Homo sapiens
ggaggctaaggcagg

SEQ ID NO: 728308 - DNA, 15 bp, Homo sapiens
gaggctaaggcagga

SEQ ID NO: 728309 - DNA, 15 bp, Homo sapiens
aggctaaggcaggag

SEQ ID NO: 728310 - DNA, 15 bp, Homo sapiens
ggctaaggcaggaga

SEQ ID NO: 728311 - DNA, 15 bp, Homo sapiens
gctaaggcaggagaa

SEQ ID NO: 728312 - DNA, 15 bp, Homo sapiens
ctaaggcaggagaat

SEQ ID NO: 728313 - DNA, 15 bp, Homo sapiens
taaggcaggagaatc

SEQ ID NO: 728314 - DNA, 15 bp, Homo sapiens
aaggcaggagaatcg

SEQ ID NO: 728315 - DNA, 15 bp, Homo sapiens
aggcaggagaatcga

SEQ ID NO: 728316 - DNA, 15 bp, Homo sapiens
ggcaggagaatcgat

SEQ ID NO: 728317 - DNA, 15 bp, Homo sapiens
gcaggagaatcgatt

SEQ ID NO: 728318 - DNA, 15 bp, Homo sapiens
caggagaatcgattg

SEQ ID NO: 728319 - DNA, 15 bp, Homo sapiens
aggagaatcgattga

SEQ ID NO: 728320 - DNA, 15 bp, Homo sapiens
ggagaatcgattgaa

SEQ ID NO: 728321 - DNA, 15 bp, Homo sapiens
gagaatcgattgaac

SEQ ID NO: 728322 - DNA, 15 bp, Homo sapiens
agaatcgattgaacc

SEQ ID NO: 728323 - DNA, 15 bp, Homo sapiens
gaatcgattgaaccc

SEQ ID NO: 728324 - DNA, 15 bp, Homo sapiens
aatcgattgaacccg

SEQ ID NO: 728325 - DNA, 15 bp, Homo sapiens
atcgattgaacccgg

SEQ ID NO: 728326 - DNA, 15 bp, Homo sapiens
tcgattgaacccggg

SEQ ID NO: 728327 - DNA, 15 bp, Homo sapiens
cgattgaacccggga

SEQ ID NO: 728328 - DNA, 15 bp, Homo sapiens
gattgaacccgggaa

SEQ ID NO: 728329 - DNA, 15 bp, Homo sapiens
attgaacccgggaag

SEQ ID NO: 728330 - DNA, 15 bp, Homo sapiens
ttgaacccgggaagt

SEQ ID NO: 728331 - DNA, 15 bp, Homo sapiens
tgaacccgggaagtg

SEQ ID NO: 728332 - DNA, 15 bp, Homo sapiens
gaacccgggaagtgg

SEQ ID NO: 728333 - DNA, 15 bp, Homo sapiens
aacccgggaagtgga

SEQ ID NO: 728334 - DNA, 15 bp, Homo sapiens
acccgggaagtggag

SEQ ID NO: 728335 - DNA, 15 bp, Homo sapiens
cccgggaagtggagg

SEQ ID NO: 728336 - DNA, 15 bp, Homo sapiens
ccgggaagtggaggt

SEQ ID NO: 728337 - DNA, 15 bp, Homo sapiens
cgggaagtggaggtt

SEQ ID NO: 728338 - DNA, 15 bp, Homo sapiens
gggaagtggaggttg

SEQ ID NO: 728339 - DNA, 15 bp, Homo sapiens
ggaagtggaggttgc

SEQ ID NO: 728340 - DNA, 15 bp, Homo sapiens
gaagtggaggttgca

SEQ ID NO: 728341 - DNA, 15 bp, Homo sapiens
aagtggaggttgcag

SEQ ID NO: 728342 - DNA, 15 bp, Homo sapiens
agtggaggttgcagt

SEQ ID NO: 728343 - DNA, 15 bp, Homo sapiens
gaggttgcagtgagt

SEQ ID NO: 728344 - DNA, 15 bp, Homo sapiens
aggttgcagtgagtc

SEQ ID NO: 728345 - DNA, 15 bp, Homo sapiens
ggttgcagtgagtca

SEQ ID NO: 728346 - DNA, 15 bp, Homo sapiens
gttgcagtgagtcaa

SEQ ID NO: 728347 - DNA, 15 bp, Homo sapiens
ttgcagtgagtcaag

SEQ ID NO: 728348 - DNA, 15 bp, Homo sapiens
tgcagtgagtcaaga

SEQ ID NO: 728349 - DNA, 15 bp, Homo sapiens
gcagtgagtcaagat

SEQ ID NO: 728350 - DNA, 15 bp, Homo sapiens
cagtgagtcaagatc

SEQ ID NO: 728351 - DNA, 15 bp, Homo sapiens
agtgagtcaagatcg

SEQ ID NO: 728352 - DNA, 15 bp, Homo sapiens
gtgagtcaagatcgc

SEQ ID NO: 728353 - DNA, 15 bp, Homo sapiens
tgagtcaagatcgca

SEQ ID NO: 728354 - DNA, 15 bp, Homo sapiens
gagtcaagatcgcac

SEQ ID NO: 728355 - DNA, 15 bp, Homo sapiens
agtcaagatcgcacc

SEQ ID NO: 728356 - DNA, 15 bp, Homo sapiens
gtcaagatcgcacca

SEQ ID NO: 728357 - DNA, 15 bp, Homo sapiens
tcaagatcgcaccat

SEQ ID NO: 728358 - DNA, 15 bp, Homo sapiens
caagatcgcaccatt

SEQ ID NO: 728359 - DNA, 15 bp, Homo sapiens
aagatcgcaccattg

SEQ ID NO: 728360 - DNA, 15 bp, Homo sapiens
agatcgcaccattgc

SEQ ID NO: 728361 - DNA, 15 bp, Homo sapiens
gatcgcaccattgca

SEQ ID NO: 728362 - DNA, 15 bp, Homo sapiens
atcgcaccattgcac

SEQ ID NO: 728363 - DNA, 15 bp, Homo sapiens
tcgcaccattgcact

SEQ ID NO: 728364 - DNA, 15 bp, Homo sapiens
cgcaccattgcactc

SEQ ID NO: 728365 - DNA, 15 bp, Homo sapiens
accattgcactccag

SEQ ID NO: 728366 - DNA, 15 bp, Homo sapiens
cagcctgggcaacaa

SEQ ID NO: 728367 - DNA, 15 bp, Homo sapiens
agcctgggcaacaag

SEQ ID NO: 728368 - DNA, 15 bp, Homo sapiens
gcctgggcaacaaga

SEQ ID NO: 728369 - DNA, 15 bp, Homo sapiens
cctgggcaacaagaa

SEQ ID NO: 728370 - DNA, 15 bp, Homo sapiens
ctgggcaacaagaat

SEQ ID NO: 728371 - DNA, 15 bp, Homo sapiens
tgggcaacaagaatg

SEQ ID NO: 728372 - DNA, 15 bp, Homo sapiens
gggcaacaagaatga

SEQ ID NO: 728373 - DNA, 15 bp, Homo sapiens
ggcaacaagaatgaa

SEQ ID NO: 728374 - DNA, 15 bp, Homo sapiens
gcaacaagaatgaaa

SEQ ID NO: 728375 - DNA, 15 bp, Homo sapiens
caacaagaatgaaac

SEQ ID NO: 728376 - DNA, 15 bp, Homo sapiens
aacaagaatgaaact

SEQ ID NO: 728377 - DNA, 15 bp, Homo sapiens
acaagaatgaaactc

SEQ ID NO: 728378 - DNA, 15 bp, Homo sapiens
caagaatgaaactct

SEQ ID NO: 728379 - DNA, 15 bp, Homo sapiens
aagaatgaaactctg

SEQ ID NO: 728380 - DNA, 15 bp, Homo sapiens
agaatgaaactctgt

SEQ ID NO: 728381 - DNA, 15 bp, Homo sapiens
gaatgaaactctgtg

SEQ ID NO: 728382 - DNA, 15 bp, Homo sapiens
aatgaaactctgtgt

SEQ ID NO: 728383 - DNA, 15 bp, Homo sapiens
atgaaactctgtgtc

SEQ ID NO: 728384 - DNA, 15 bp, Homo sapiens
tgaaactctgtgtca

SEQ ID NO: 728385 - DNA, 15 bp, Homo sapiens
gaaactctgtgtcaa

SEQ ID NO: 728386 - DNA, 15 bp, Homo sapiens
aaactctgtgtcaaa

SEQ ID NO: 728387 - DNA, 15 bp, Homo sapiens
aactctgtgtcaaaa

SEQ ID NO: 728388 - DNA, 15 bp, Homo sapiens
actctgtgtcaaaaa

SEQ ID NO: 728389 - DNA, 15 bp, Homo sapiens
ctctgtgtcaaaaaa

SEQ ID NO: 728390 - DNA, 15 bp, Homo sapiens
tctgtgtcaaaaaaa

SEQ ID NO: 728391 - DNA, 15 bp, Homo sapiens
ctgtgtcaaaaaaaa

SEQ ID NO: 728392 - DNA, 15 bp, Homo sapiens
tgtgtcaaaaaaaaa

SEQ ID NO: 728393 - DNA, 15 bp, Homo sapiens
gtgtcaaaaaaaaaa

SEQ ID NO: 728394 - DNA, 15 bp, Homo sapiens
tgtcaaaaaaaaaaa

SEQ ID NO: 728395 - DNA, 15 bp, Homo sapiens
gtcaaaaaaaaaaaa

SEQ ID NO: 728396 - DNA, 15 bp, Homo sapiens
aaaaaaaaaaaagct

SEQ ID NO: 728397 - DNA, 15 bp, Homo sapiens
aaaaaaaaaaagctg

SEQ ID NO: 728398 - DNA, 15 bp, Homo sapiens
aaaaaaaaaagctga

SEQ ID NO: 728399 - DNA, 15 bp, Homo sapiens
aaaaaaaaagctgag

SEQ ID NO: 728400 - DNA, 15 bp, Homo sapiens
aaaaaaaagctgagc

SEQ ID NO: 728401 - DNA, 15 bp, Homo sapiens
aaaaaaagctgagcc

SEQ ID NO: 728402 - DNA, 15 bp, Homo sapiens
aaaaaagctgagcct

SEQ ID NO: 728403 - DNA, 15 bp, Homo sapiens
aaaaagctgagcctc

SEQ ID NO: 728404 - DNA, 15 bp, Homo sapiens
aaaagctgagcctcc

SEQ ID NO: 728405 - DNA, 15 bp, Homo sapiens
aaagctgagcctcct

SEQ ID NO: 728406 - DNA, 15 bp, Homo sapiens
aagctgagcctccta

SEQ ID NO: 728407 - DNA, 15 bp, Homo sapiens
agctgagcctcctag

SEQ ID NO: 728408 - DNA, 15 bp, Homo sapiens
gctgagcctcctaga

SEQ ID NO: 728409 - DNA, 15 bp, Homo sapiens
ctgagcctcctagat

SEQ ID NO: 728410 - DNA, 15 bp, Homo sapiens
tgagcctcctagatt

SEQ ID NO: 728411 - DNA, 15 bp, Homo sapiens
gagcctcctagattc

SEQ ID NO: 728412 - DNA, 15 bp, Homo sapiens
agcctcctagattca

SEQ ID NO: 728413 - DNA, 15 bp, Homo sapiens
gcctcctagattcag

SEQ ID NO: 728414 - DNA, 15 bp, Homo sapiens
cctcctagattcagg

SEQ ID NO: 728415 - DNA, 15 bp, Homo sapiens
ctcctagattcaggc

SEQ ID NO: 728416 - DNA, 15 bp, Homo sapiens
tcctagattcaggca

SEQ ID NO: 728417 - DNA, 15 bp, Homo sapiens
cctagattcaggcag

SEQ ID NO: 728418 - DNA, 15 bp, Homo sapiens
ctagattcaggcagt

SEQ ID NO: 728419 - DNA, 15 bp, Homo sapiens
tagattcaggcagtg

SEQ ID NO: 728420 - DNA, 15 bp, Homo sapiens
agattcaggcagtga

SEQ ID NO: 728421 - DNA, 15 bp, Homo sapiens
gattcaggcagtgat

SEQ ID NO: 728422 - DNA, 15 bp, Homo sapiens
attcaggcagtgatg

SEQ ID NO: 728423 - DNA, 15 bp, Homo sapiens
ttcaggcagtgatgt

SEQ ID NO: 728424 - DNA, 15 bp, Homo sapiens
tcaggcagtgatgtt

SEQ ID NO: 728425 - DNA, 15 bp, Homo sapiens
caggcagtgatgttt

SEQ ID NO: 728426 - DNA, 15 bp, Homo sapiens
aggcagtgatgtttc

SEQ ID NO: 728427 - DNA, 15 bp, Homo sapiens
ggcagtgatgtttcc

SEQ ID NO: 728428 - DNA, 15 bp, Homo sapiens
gcagtgatgtttcca

SEQ ID NO: 728429 - DNA, 15 bp, Homo sapiens
cagtgatgtttccag

SEQ ID NO: 728430 - DNA, 15 bp, Homo sapiens
agtgatgtttccaga

SEQ ID NO: 728431 - DNA, 15 bp, Homo sapiens
gtgatgtttccagaa

SEQ ID NO: 728432 - DNA, 15 bp, Homo sapiens
tgatgtttccagaag

SEQ ID NO: 728433 - DNA, 15 bp, Homo sapiens
gatgtttccagaaga

SEQ ID NO: 728434 - DNA, 15 bp, Homo sapiens
atgtttccagaagat

SEQ ID NO: 728435 - DNA, 15 bp, Homo sapiens
tgtttccagaagatg

SEQ ID NO: 728436 - DNA, 15 bp, Homo sapiens
gtttccagaagatga

SEQ ID NO: 728437 - DNA, 15 bp, Homo sapiens
tttccagaagatgaa

SEQ ID NO: 728438 - DNA, 15 bp, Homo sapiens
ttccagaagatgaaa

SEQ ID NO: 728439 - DNA, 15 bp, Homo sapiens
tccagaagatgaaat

SEQ ID NO: 728440 - DNA, 15 bp, Homo sapiens
ccagaagatgaaata

SEQ ID NO: 728441 - DNA, 15 bp, Homo sapiens
cagaagatgaaatat

SEQ ID NO: 728442 - DNA, 15 bp, Homo sapiens
agaagatgaaatatc

SEQ ID NO: 728443 - DNA, 15 bp, Homo sapiens
gaagatgaaatatca

SEQ ID NO: 728444 - DNA, 15 bp, Homo sapiens
aagatgaaatatcag

SEQ ID NO: 728445 - DNA, 15 bp, Homo sapiens
agatgaaatatcagg

SEQ ID NO: 728446 - DNA, 15 bp, Homo sapiens
gatgaaatatcagga

SEQ ID NO: 728447 - DNA, 15 bp, Homo sapiens
atgaaatatcaggac

SEQ ID NO: 728448 - DNA, 15 bp, Homo sapiens
tgaaatatcaggaca

SEQ ID NO: 728449 - DNA, 15 bp, Homo sapiens
gaaatatcaggacaa

SEQ ID NO: 728450 - DNA, 15 bp, Homo sapiens
aaatatcaggacaac

SEQ ID NO: 728451 - DNA, 15 bp, Homo sapiens
aatatcaggacaacc

SEQ ID NO: 728452 - DNA, 15 bp, Homo sapiens
atatcaggacaacca

SEQ ID NO: 728453 - DNA, 15 bp, Homo sapiens
tatcaggacaaccag

SEQ ID NO: 728454 - DNA, 15 bp, Homo sapiens
atcaggacaaccagg

SEQ ID NO: 728455 - DNA, 15 bp, Homo sapiens
tcaggacaaccaggc

SEQ ID NO: 728456 - DNA, 15 bp, Homo sapiens
caggacaaccaggca

SEQ ID NO: 728457 - DNA, 15 bp, Homo sapiens
aggacaaccaggcat

SEQ ID NO: 728458 - DNA, 15 bp, Homo sapiens
ggacaaccaggcatc

SEQ ID NO: 728459 - DNA, 15 bp, Homo sapiens
gacaaccaggcatcc

SEQ ID NO: 728460 - DNA, 15 bp, Homo sapiens
acaaccaggcatcct

SEQ ID NO: 728461 - DNA, 15 bp, Homo sapiens
caaccaggcatcctg

SEQ ID NO: 728462 - DNA, 15 bp, Homo sapiens
aaccaggcatcctgg

SEQ ID NO: 728463 - DNA, 15 bp, Homo sapiens
accaggcatcctggg

SEQ ID NO: 728464 - DNA, 15 bp, Homo sapiens
ccaggcatcctggga

SEQ ID NO: 728465 - DNA, 15 bp, Homo sapiens
caggcatcctgggag

SEQ ID NO: 728466 - DNA, 15 bp, Homo sapiens
aggcatcctgggaga

SEQ ID NO: 728467 - DNA, 15 bp, Homo sapiens
ggcatcctgggagac

SEQ ID NO: 728468 - DNA, 15 bp, Homo sapiens
gcatcctgggagact

SEQ ID NO: 728469 - DNA, 15 bp, Homo sapiens
catcctgggagactc

SEQ ID NO: 728470 - DNA, 15 bp, Homo sapiens
atcctgggagactca

SEQ ID NO: 728471 - DNA, 15 bp, Homo sapiens
tcctgggagactcaa

SEQ ID NO: 728472 - DNA, 15 bp, Homo sapiens
cctgggagactcaag

SEQ ID NO: 728473 - DNA, 15 bp, Homo sapiens
ctgggagactcaagt

SEQ ID NO: 728474 - DNA, 15 bp, Homo sapiens
tgggagactcaagtt

SEQ ID NO: 728475 - DNA, 15 bp, Homo sapiens
gggagactcaagttt

SEQ ID NO: 728476 - DNA, 15 bp, Homo sapiens
ggagactcaagtttc

SEQ ID NO: 728477 - DNA, 15 bp, Homo sapiens
gagactcaagtttct

SEQ ID NO: 728478 - DNA, 15 bp, Homo sapiens
agactcaagtttctt

SEQ ID NO: 728479 - DNA, 15 bp, Homo sapiens
gactcaagtttcttt

SEQ ID NO: 728480 - DNA, 15 bp, Homo sapiens
actcaagtttctttt

SEQ ID NO: 728481 - DNA, 15 bp, Homo sapiens
ctcaagtttcttttt

SEQ ID NO: 728482 - DNA, 15 bp, Homo sapiens
tcaagtttctttttt

SEQ ID NO: 728483 - DNA, 15 bp, Homo sapiens
caagtttcttttttt

SEQ ID NO: 728484 - DNA, 15 bp, Homo sapiens
aagtttctttttttg

SEQ ID NO: 728485 - DNA, 15 bp, Homo sapiens
agtttctttttttgt

SEQ ID NO: 728486 - DNA, 15 bp, Homo sapiens
gtttctttttttgtt

SEQ ID NO: 728487 - DNA, 15 bp, Homo sapiens
tttctttttttgttt

SEQ ID NO: 728488 - DNA, 15 bp, Homo sapiens
ttctttttttgtttg

SEQ ID NO: 728489 - DNA, 15 bp, Homo sapiens
tctttttttgtttgt

SEQ ID NO: 728490 - DNA, 15 bp, Homo sapiens
ctttttttgtttgtt

SEQ ID NO: 728491 - DNA, 15 bp, Homo sapiens
tttttttgtttgttt

SEQ ID NO: 728492 - DNA, 15 bp, Homo sapiens
ttttttgtttgtttg

SEQ ID NO: 728493 - DNA, 15 bp, Homo sapiens
tttttgtttgtttgt

SEQ ID NO: 728494 - DNA, 15 bp, Homo sapiens
ttttgtttgtttgtt

SEQ ID NO: 728495 - DNA, 15 bp, Homo sapiens
tttgtttgtttgttt

SEQ ID NO: 728496 - DNA, 15 bp, Homo sapiens
ttgtttgtttgtttt

SEQ ID NO: 728497 - DNA, 15 bp, Homo sapiens
tgtttgtttgttttt

SEQ ID NO: 728498 - DNA, 15 bp, Homo sapiens
gtttgtttgtttttt

SEQ ID NO: 728499 - DNA, 15 bp, Homo sapiens
tttgtttgttttttg

SEQ ID NO: 728500 - DNA, 15 bp, Homo sapiens
ttgtttgttttttga

SEQ ID NO: 728501 - DNA, 15 bp, Homo sapiens
tgtttgttttttgag

SEQ ID NO: 728502 - DNA, 15 bp, Homo sapiens
gtttgttttttgaga

SEQ ID NO: 728503 - DNA, 15 bp, Homo sapiens
tttgttttttgagat

SEQ ID NO: 728504 - DNA, 15 bp, Homo sapiens
ttgttttttgagatg

SEQ ID NO: 728505 - DNA, 15 bp, Homo sapiens
tgttttttgagatgg

SEQ ID NO: 728506 - DNA, 15 bp, Homo sapiens
gttttttgagatgga

SEQ ID NO: 728507 - DNA, 15 bp, Homo sapiens
tgagatggagtctcg

SEQ ID NO: 728508 - DNA, 15 bp, Homo sapiens
gagatggagtctcgc

SEQ ID NO: 728509 - DNA, 15 bp, Homo sapiens
agatggagtctcgct

SEQ ID NO: 728510 - DNA, 15 bp, Homo sapiens
gatggagtctcgctc

SEQ ID NO: 728511 - DNA, 15 bp, Homo sapiens
atggagtctcgctct

SEQ ID NO: 728512 - DNA, 15 bp, Homo sapiens
tggagtctcgctctg

SEQ ID NO: 728513 - DNA, 15 bp, Homo sapiens
tcgcccaggctggaa

SEQ ID NO: 728514 - DNA, 15 bp, Homo sapiens
cgcccaggctggaat

SEQ ID NO: 728515 - DNA, 15 bp, Homo sapiens
gcccaggctggaatg

SEQ ID NO: 728516 - DNA, 15 bp, Homo sapiens
cccaggctggaatgc

SEQ ID NO: 728517 - DNA, 15 bp, Homo sapiens
ccaggctggaatgca

SEQ ID NO: 728518 - DNA, 15 bp, Homo sapiens
caggctggaatgcag

SEQ ID NO: 728519 - DNA, 15 bp, Homo sapiens
tggaatgcagtggca

SEQ ID NO: 728520 - DNA, 15 bp, Homo sapiens
ggaatgcagtggcac

SEQ ID NO: 728521 - DNA, 15 bp, Homo sapiens
gaatgcagtggcaca

SEQ ID NO: 728522 - DNA, 15 bp, Homo sapiens
aatgcagtggcacaa

SEQ ID NO: 728523 - DNA, 15 bp, Homo sapiens
atgcagtggcacaat

SEQ ID NO: 728524 - DNA, 15 bp, Homo sapiens
tgcagtggcacaatc

SEQ ID NO: 728525 - DNA, 15 bp, Homo sapiens
gcagtggcacaatct

SEQ ID NO: 728526 - DNA, 15 bp, Homo sapiens
cagtggcacaatctc

SEQ ID NO: 728527 - DNA, 15 bp, Homo sapiens
agtggcacaatctcg

SEQ ID NO: 728528 - DNA, 15 bp, Homo sapiens
gtggcacaatctcga

SEQ ID NO: 728529 - DNA, 15 bp, Homo sapiens
tggcacaatctcgac

SEQ ID NO: 728530 - DNA, 15 bp, Homo sapiens
ggcacaatctcgact

SEQ ID NO: 728531 - DNA, 15 bp, Homo sapiens
gcacaatctcgactc

SEQ ID NO: 728532 - DNA, 15 bp, Homo sapiens
cacaatctcgactca

SEQ ID NO: 728533 - DNA, 15 bp, Homo sapiens
acaatctcgactcac

SEQ ID NO: 728534 - DNA, 15 bp, Homo sapiens
caatctcgactcact

SEQ ID NO: 728535 - DNA, 15 bp, Homo sapiens
aatctcgactcactg

SEQ ID NO: 728536 - DNA, 15 bp, Homo sapiens
atctcgactcactgc

SEQ ID NO: 728537 - DNA, 15 bp, Homo sapiens
tctcgactcactgca

SEQ ID NO: 728538 - DNA, 15 bp, Homo sapiens
ctcgactcactgcaa

SEQ ID NO: 728539 - DNA, 15 bp, Homo sapiens
tcgactcactgcaag

SEQ ID NO: 728540 - DNA, 15 bp, Homo sapiens
cgactcactgcaagc

SEQ ID NO: 728541 - DNA, 15 bp, Homo sapiens
gactcactgcaagct

SEQ ID NO: 728542 - DNA, 15 bp, Homo sapiens
actcactgcaagctc

SEQ ID NO: 728543 - DNA, 15 bp, Homo sapiens
ctcactgcaagctct

SEQ ID NO: 728544 - DNA, 15 bp, Homo sapiens
tcactgcaagctctg

SEQ ID NO: 728545 - DNA, 15 bp, Homo sapiens
cactgcaagctctgc

SEQ ID NO: 728546 - DNA, 15 bp, Homo sapiens
actgcaagctctgcc

SEQ ID NO: 728547 - DNA, 15 bp, Homo sapiens
ctgcaagctctgcct

SEQ ID NO: 728548 - DNA, 15 bp, Homo sapiens
tgcaagctctgcctt

SEQ ID NO: 728549 - DNA, 15 bp, Homo sapiens
gcaagctctgccttc

SEQ ID NO: 728550 - DNA, 15 bp, Homo sapiens
caagctctgccttct

SEQ ID NO: 728551 - DNA, 15 bp, Homo sapiens
aagctctgccttctg

SEQ ID NO: 728552 - DNA, 15 bp, Homo sapiens
agctctgccttctgg

SEQ ID NO: 728553 - DNA, 15 bp, Homo sapiens
gctctgccttctggg

SEQ ID NO: 728554 - DNA, 15 bp, Homo sapiens
ctctgccttctgggt

SEQ ID NO: 728555 - DNA, 15 bp, Homo sapiens
tctgccttctgggtt

SEQ ID NO: 728556 - DNA, 15 bp, Homo sapiens
ctgccttctgggttc

SEQ ID NO: 728557 - DNA, 15 bp, Homo sapiens
tgccttctgggttca

SEQ ID NO: 728558 - DNA, 15 bp, Homo sapiens
gccttctgggttcac

SEQ ID NO: 728559 - DNA, 15 bp, Homo sapiens
ccttctgggttcacg

SEQ ID NO: 728560 - DNA, 15 bp, Homo sapiens
cttctgggttcacgc

SEQ ID NO: 728561 - DNA, 15 bp, Homo sapiens
ttctgggttcacgcc

SEQ ID NO: 728562 - DNA, 15 bp, Homo sapiens
tctgggttcacgcca

SEQ ID NO: 728563 - DNA, 15 bp, Homo sapiens
ctgggttcacgccat

SEQ ID NO: 728564 - DNA, 15 bp, Homo sapiens
tgggttcacgccatt

SEQ ID NO: 728565 - DNA, 15 bp, Homo sapiens
gggttcacgccattc

SEQ ID NO: 728566 - DNA, 15 bp, Homo sapiens
ggttcacgccattct

SEQ ID NO: 728567 - DNA, 15 bp, Homo sapiens
gttcacgccattctc

SEQ ID NO: 728568 - DNA, 15 bp, Homo sapiens
ttcacgccattctcc

SEQ ID NO: 728569 - DNA, 15 bp, Homo sapiens
tcacgccattctcct

SEQ ID NO: 728570 - DNA, 15 bp, Homo sapiens
cacgccattctcctg

SEQ ID NO: 728571 - DNA, 15 bp, Homo sapiens
acgccattctcctgc

SEQ ID NO: 728572 - DNA, 15 bp, Homo sapiens
cgccattctcctgcc

SEQ ID NO: 728573 - DNA, 15 bp, Homo sapiens
gccattctcctgcct

SEQ ID NO: 728574 - DNA, 15 bp, Homo sapiens
ctgggactacaggca

SEQ ID NO: 728575 - DNA, 15 bp, Homo sapiens
tgggactacaggcac

SEQ ID NO: 728576 - DNA, 15 bp, Homo sapiens
gggactacaggcacc

SEQ ID NO: 728577 - DNA, 15 bp, Homo sapiens
ggactacaggcaccc

SEQ ID NO: 728578 - DNA, 15 bp, Homo sapiens
gactacaggcacccg

SEQ ID NO: 728579 - DNA, 15 bp, Homo sapiens
actacaggcacccgc

SEQ ID NO: 728580 - DNA, 15 bp, Homo sapiens
ctacaggcacccgcc

SEQ ID NO: 728581 - DNA, 15 bp, Homo sapiens
tacaggcacccgcca

SEQ ID NO: 728582 - DNA, 15 bp, Homo sapiens
acaggcacccgccac

SEQ ID NO: 728583 - DNA, 15 bp, Homo sapiens
caggcacccgccacc

SEQ ID NO: 728584 - DNA, 15 bp, Homo sapiens
aggcacccgccacca

SEQ ID NO: 728585 - DNA, 15 bp, Homo sapiens
ggcacccgccaccaa

SEQ ID NO: 728586 - DNA, 15 bp, Homo sapiens
gcacccgccaccaag

SEQ ID NO: 728587 - DNA, 15 bp, Homo sapiens
cacccgccaccaagc

SEQ ID NO: 728588 - DNA, 15 bp, Homo sapiens
acccgccaccaagcc

SEQ ID NO: 728589 - DNA, 15 bp, Homo sapiens
cccgccaccaagccc

SEQ ID NO: 728590 - DNA, 15 bp, Homo sapiens
ccgccaccaagccca

SEQ ID NO: 728591 - DNA, 15 bp, Homo sapiens
cgccaccaagcccag

SEQ ID NO: 728592 - DNA, 15 bp, Homo sapiens
gccaccaagcccagt

SEQ ID NO: 728593 - DNA, 15 bp, Homo sapiens
ccaccaagcccagtt

SEQ ID NO: 728594 - DNA, 15 bp, Homo sapiens
caccaagcccagtta

SEQ ID NO: 728595 - DNA, 15 bp, Homo sapiens
accaagcccagttaa

SEQ ID NO: 728596 - DNA, 15 bp, Homo sapiens
ccaagcccagttaat

SEQ ID NO: 728597 - DNA, 15 bp, Homo sapiens
caagcccagttaatt

SEQ ID NO: 728598 - DNA, 15 bp, Homo sapiens
aagcccagttaattt

SEQ ID NO: 728599 - DNA, 15 bp, Homo sapiens
agcccagttaatttt

SEQ ID NO: 728600 - DNA, 15 bp, Homo sapiens
gcccagttaattttt

SEQ ID NO: 728601 - DNA, 15 bp, Homo sapiens
cccagttaatttttt

SEQ ID NO: 728602 - DNA, 15 bp, Homo sapiens
ccagttaattttttt

SEQ ID NO: 728603 - DNA, 15 bp, Homo sapiens
cagttaatttttttg

SEQ ID NO: 728604 - DNA, 15 bp, Homo sapiens
agttaatttttttgg

SEQ ID NO: 728605 - DNA, 15 bp, Homo sapiens
gttaatttttttgga

SEQ ID NO: 728606 - DNA, 15 bp, Homo sapiens
ttaatttttttggat

SEQ ID NO: 728607 - DNA, 15 bp, Homo sapiens
taatttttttggatt

SEQ ID NO: 728608 - DNA, 15 bp, Homo sapiens
aatttttttggattt

SEQ ID NO: 728609 - DNA, 15 bp, Homo sapiens
atttttttggatttt

SEQ ID NO: 728610 - DNA, 15 bp, Homo sapiens
tttttttggattttt

SEQ ID NO: 728611 - DNA, 15 bp, Homo sapiens
ttttttggatttttt

SEQ ID NO: 728612 - DNA, 15 bp, Homo sapiens
tttttggattttttg

SEQ ID NO: 728613 - DNA, 15 bp, Homo sapiens
ttttggattttttgt

SEQ ID NO: 728614 - DNA, 15 bp, Homo sapiens
tttggattttttgta

SEQ ID NO: 728615 - DNA, 15 bp, Homo sapiens
ttggattttttgtaa

SEQ ID NO: 728616 - DNA, 15 bp, Homo sapiens
tggattttttgtaaa

SEQ ID NO: 728617 - DNA, 15 bp, Homo sapiens
ggattttttgtaaag

SEQ ID NO: 728618 - DNA, 15 bp, Homo sapiens
gattttttgtaaaga

SEQ ID NO: 728619 - DNA, 15 bp, Homo sapiens
attttttgtaaagac

SEQ ID NO: 728620 - DNA, 15 bp, Homo sapiens
ttttttgtaaagaca

SEQ ID NO: 728621 - DNA, 15 bp, Homo sapiens
tttttgtaaagacag

SEQ ID NO: 728622 - DNA, 15 bp, Homo sapiens
ttttgtaaagacaga

SEQ ID NO: 728623 - DNA, 15 bp, Homo sapiens
tttgtaaagacagag

SEQ ID NO: 728624 - DNA, 15 bp, Homo sapiens
ttgtaaagacagagt

SEQ ID NO: 728625 - DNA, 15 bp, Homo sapiens
tgtaaagacagagtt

SEQ ID NO: 728626 - DNA, 15 bp, Homo sapiens
gtaaagacagagttt

SEQ ID NO: 728627 - DNA, 15 bp, Homo sapiens
taaagacagagtttc

SEQ ID NO: 728628 - DNA, 15 bp, Homo sapiens
aaagacagagtttca

SEQ ID NO: 728629 - DNA, 15 bp, Homo sapiens
aagacagagtttcac

SEQ ID NO: 728630 - DNA, 15 bp, Homo sapiens
agacagagtttcacc

SEQ ID NO: 728631 - DNA, 15 bp, Homo sapiens
gacagagtttcaccg

SEQ ID NO: 728632 - DNA, 15 bp, Homo sapiens
acagagtttcaccgt

SEQ ID NO: 728633 - DNA, 15 bp, Homo sapiens
cagagtttcaccgtg

SEQ ID NO: 728634 - DNA, 15 bp, Homo sapiens
agagtttcaccgtgg

SEQ ID NO: 728635 - DNA, 15 bp, Homo sapiens
gagtttcaccgtggt

SEQ ID NO: 728636 - DNA, 15 bp, Homo sapiens
agtttcaccgtggtc

SEQ ID NO: 728637 - DNA, 15 bp, Homo sapiens
gtttcaccgtggtct

SEQ ID NO: 728638 - DNA, 15 bp, Homo sapiens
tttcaccgtggtctc

SEQ ID NO: 728639 - DNA, 15 bp, Homo sapiens
ttcaccgtggtctcg

SEQ ID NO: 728640 - DNA, 15 bp, Homo sapiens
tcaccgtggtctcga

SEQ ID NO: 728641 - DNA, 15 bp, Homo sapiens
caccgtggtctcgat

SEQ ID NO: 728642 - DNA, 15 bp, Homo sapiens
accgtggtctcgatc

SEQ ID NO: 728643 - DNA, 15 bp, Homo sapiens
ccgtggtctcgatct

SEQ ID NO: 728644 - DNA, 15 bp, Homo sapiens
cgtggtctcgatctc

SEQ ID NO: 728645 - DNA, 15 bp, Homo sapiens
gtggtctcgatctcc

SEQ ID NO: 728646 - DNA, 15 bp, Homo sapiens
tggtctcgatctcct

SEQ ID NO: 728647 - DNA, 15 bp, Homo sapiens
ggtctcgatctcctg

SEQ ID NO: 728648 - DNA, 15 bp, Homo sapiens
gtctcgatctcctga

SEQ ID NO: 728649 - DNA, 15 bp, Homo sapiens
tctcgatctcctgaa

SEQ ID NO: 728650 - DNA, 15 bp, Homo sapiens
ctcgatctcctgaac

SEQ ID NO: 728651 - DNA, 15 bp, Homo sapiens
tcgatctcctgaact

SEQ ID NO: 728652 - DNA, 15 bp, Homo sapiens
cgatctcctgaactc

SEQ ID NO: 728653 - DNA, 15 bp, Homo sapiens
gatctcctgaactcg

SEQ ID NO: 728654 - DNA, 15 bp, Homo sapiens
atctcctgaactcgt

SEQ ID NO: 728655 - DNA, 15 bp, Homo sapiens
tctcctgaactcgtg

SEQ ID NO: 728656 - DNA, 15 bp, Homo sapiens
ctcctgaactcgtga

SEQ ID NO: 728657 - DNA, 15 bp, Homo sapiens
tcctgaactcgtgat

SEQ ID NO: 728658 - DNA, 15 bp, Homo sapiens
cctgaactcgtgatc

SEQ ID NO: 728659 - DNA, 15 bp, Homo sapiens
ctgaactcgtgatcc

SEQ ID NO: 728660 - DNA, 15 bp, Homo sapiens
tgaactcgtgatccg

SEQ ID NO: 728661 - DNA, 15 bp, Homo sapiens
gaactcgtgatccgc

SEQ ID NO: 728662 - DNA, 15 bp, Homo sapiens
aactcgtgatccgcc

SEQ ID NO: 728663 - DNA, 15 bp, Homo sapiens
actcgtgatccgcct

SEQ ID NO: 728664 - DNA, 15 bp, Homo sapiens
ctcgtgatccgcctg

SEQ ID NO: 728665 - DNA, 15 bp, Homo sapiens
tcgtgatccgcctgc

SEQ ID NO: 728666 - DNA, 15 bp, Homo sapiens
cgtgatccgcctgcc

SEQ ID NO: 728667 - DNA, 15 bp, Homo sapiens
gtgatccgcctgcct

SEQ ID NO: 728668 - DNA, 15 bp, Homo sapiens
tgatccgcctgcctc

SEQ ID NO: 728669 - DNA, 15 bp, Homo sapiens
gatccgcctgcctca

SEQ ID NO: 728670 - DNA, 15 bp, Homo sapiens
atccgcctgcctcag

SEQ ID NO: 728671 - DNA, 15 bp, Homo sapiens
tccgcctgcctcagc

SEQ ID NO: 728672 - DNA, 15 bp, Homo sapiens
ccgcctgcctcagcc

SEQ ID NO: 728673 - DNA, 15 bp, Homo sapiens
cgcctgcctcagcct

SEQ ID NO: 728674 - DNA, 15 bp, Homo sapiens
gcctgcctcagcctc

SEQ ID NO: 728675 - DNA, 15 bp, Homo sapiens
gtgctgggattacaa

SEQ ID NO: 728676 - DNA, 15 bp, Homo sapiens
tgctgggattacaag

SEQ ID NO: 728677 - DNA, 15 bp, Homo sapiens
gctgggattacaagt

SEQ ID NO: 728678 - DNA, 15 bp, Homo sapiens
ctgggattacaagtg

SEQ ID NO: 728679 - DNA, 15 bp, Homo sapiens
tgggattacaagtgt

SEQ ID NO: 728680 - DNA, 15 bp, Homo sapiens
gggattacaagtgtg

SEQ ID NO: 728681 - DNA, 15 bp, Homo sapiens
ggattacaagtgtga

SEQ ID NO: 728682 - DNA, 15 bp, Homo sapiens
gattacaagtgtgag

SEQ ID NO: 728683 - DNA, 15 bp, Homo sapiens
attacaagtgtgagc

SEQ ID NO: 728684 - DNA, 15 bp, Homo sapiens
ttacaagtgtgagcc

SEQ ID NO: 728685 - DNA, 15 bp, Homo sapiens
tacaagtgtgagcca

SEQ ID NO: 728686 - DNA, 15 bp, Homo sapiens
acaagtgtgagccac

SEQ ID NO: 728687 - DNA, 15 bp, Homo sapiens
caagtgtgagccacg

SEQ ID NO: 728688 - DNA, 15 bp, Homo sapiens
aagtgtgagccacgg

SEQ ID NO: 728689 - DNA, 15 bp, Homo sapiens
agtgtgagccacggc

SEQ ID NO: 728690 - DNA, 15 bp, Homo sapiens
gtgtgagccacggcg

SEQ ID NO: 728691 - DNA, 15 bp, Homo sapiens
tgtgagccacggcgc

SEQ ID NO: 728692 - DNA, 15 bp, Homo sapiens
gtgagccacggcgcc

SEQ ID NO: 728693 - DNA, 15 bp, Homo sapiens
tgagccacggcgccc

SEQ ID NO: 728694 - DNA, 15 bp, Homo sapiens
gagccacggcgcccg

SEQ ID NO: 728695 - DNA, 15 bp, Homo sapiens
agccacggcgcccgg

SEQ ID NO: 728696 - DNA, 15 bp, Homo sapiens
gccacggcgcccggc

SEQ ID NO: 728697 - DNA, 15 bp, Homo sapiens
ccacggcgcccggcc

SEQ ID NO: 728698 - DNA, 15 bp, Homo sapiens
cacggcgcccggccg

SEQ ID NO: 728699 - DNA, 15 bp, Homo sapiens
acggcgcccggccga

SEQ ID NO: 728700 - DNA, 15 bp, Homo sapiens
cggcgcccggccgag

SEQ ID NO: 728701 - DNA, 15 bp, Homo sapiens
ggcgcccggccgaga

SEQ ID NO: 728702 - DNA, 15 bp, Homo sapiens
gcgcccggccgagat

SEQ ID NO: 728703 - DNA, 15 bp, Homo sapiens
cgcccggccgagatt

SEQ ID NO: 728704 - DNA, 15 bp, Homo sapiens
gcccggccgagattc

SEQ ID NO: 728705 - DNA, 15 bp, Homo sapiens
cccggccgagattca

SEQ ID NO: 728706 - DNA, 15 bp, Homo sapiens
ccggccgagattcaa

SEQ ID NO: 728707 - DNA, 15 bp, Homo sapiens
cggccgagattcaag

SEQ ID NO: 728708 - DNA, 15 bp, Homo sapiens
ggccgagattcaagt

SEQ ID NO: 728709 - DNA, 15 bp, Homo sapiens
gccgagattcaagtt

SEQ ID NO: 728710 - DNA, 15 bp, Homo sapiens
ccgagattcaagttt

SEQ ID NO: 728711 - DNA, 15 bp, Homo sapiens
cgagattcaagtttc

SEQ ID NO: 728712 - DNA, 15 bp, Homo sapiens
gagattcaagtttca

SEQ ID NO: 728713 - DNA, 15 bp, Homo sapiens
agattcaagtttcat

SEQ ID NO: 728714 - DNA, 15 bp, Homo sapiens
gattcaagtttcatc

SEQ ID NO: 728715 - DNA, 15 bp, Homo sapiens
attcaagtttcatct

SEQ ID NO: 728716 - DNA, 15 bp, Homo sapiens
ttcaagtttcatctc

SEQ ID NO: 728717 - DNA, 15 bp, Homo sapiens
tcaagtttcatctct

SEQ ID NO: 728718 - DNA, 15 bp, Homo sapiens
caagtttcatctctc

SEQ ID NO: 728719 - DNA, 15 bp, Homo sapiens
aagtttcatctctcc

SEQ ID NO: 728720 - DNA, 15 bp, Homo sapiens
agtttcatctctccc

SEQ ID NO: 728721 - DNA, 15 bp, Homo sapiens
gtttcatctctccct

SEQ ID NO: 728722 - DNA, 15 bp, Homo sapiens
tttcatctctccctc

SEQ ID NO: 728723 - DNA, 15 bp, Homo sapiens
ttcatctctccctct

SEQ ID NO: 728724 - DNA, 15 bp, Homo sapiens
tcatctctccctctc

SEQ ID NO: 728725 - DNA, 15 bp, Homo sapiens
catctctccctctcc

SEQ ID NO: 728726 - DNA, 15 bp, Homo sapiens
atctctccctctccc

SEQ ID NO: 728727 - DNA, 15 bp, Homo sapiens
tctctccctctcccc

SEQ ID NO: 728728 - DNA, 15 bp, Homo sapiens
ctctccctctcccca

SEQ ID NO: 728729 - DNA, 15 bp, Homo sapiens
tctccctctccccat

SEQ ID NO: 728730 - DNA, 15 bp, Homo sapiens
ctccctctccccatg

SEQ ID NO: 728731 - DNA, 15 bp, Homo sapiens
tccctctccccatga

SEQ ID NO: 728732 - DNA, 15 bp, Homo sapiens
ccctctccccatgac

SEQ ID NO: 728733 - DNA, 15 bp, Homo sapiens
cctctccccatgacc

SEQ ID NO: 728734 - DNA, 15 bp, Homo sapiens
ctctccccatgacct

SEQ ID NO: 728735 - DNA, 15 bp, Homo sapiens
tctccccatgacctt

SEQ ID NO: 728736 - DNA, 15 bp, Homo sapiens
ctccccatgaccttg

SEQ ID NO: 728737 - DNA, 15 bp, Homo sapiens
tccccatgaccttgg

SEQ ID NO: 728738 - DNA, 15 bp, Homo sapiens
ccccatgaccttggg

SEQ ID NO: 728739 - DNA, 15 bp, Homo sapiens
cccatgaccttgggc

SEQ ID NO: 728740 - DNA, 15 bp, Homo sapiens
ccatgaccttgggcc

SEQ ID NO: 728741 - DNA, 15 bp, Homo sapiens
catgaccttgggcca

SEQ ID NO: 728742 - DNA, 15 bp, Homo sapiens
atgaccttgggccac

SEQ ID NO: 728743 - DNA, 15 bp, Homo sapiens
tgaccttgggccact

SEQ ID NO: 728744 - DNA, 15 bp, Homo sapiens
gaccttgggccactc

SEQ ID NO: 728745 - DNA, 15 bp, Homo sapiens
accttgggccactcc

SEQ ID NO: 728746 - DNA, 15 bp, Homo sapiens
ccttgggccactcca

SEQ ID NO: 728747 - DNA, 15 bp, Homo sapiens
cttgggccactccac

SEQ ID NO: 728748 - DNA, 15 bp, Homo sapiens
ttgggccactccact

SEQ ID NO: 728749 - DNA, 15 bp, Homo sapiens
tgggccactccactc

SEQ ID NO: 728750 - DNA, 15 bp, Homo sapiens
gggccactccactct

SEQ ID NO: 728751 - DNA, 15 bp, Homo sapiens
ggccactccactctc

SEQ ID NO: 728752 - DNA, 15 bp, Homo sapiens
gccactccactctct

SEQ ID NO: 728753 - DNA, 15 bp, Homo sapiens
ccactccactctctg

SEQ ID NO: 728754 - DNA, 15 bp, Homo sapiens
cactccactctctga

SEQ ID NO: 728755 - DNA, 15 bp, Homo sapiens
actccactctctgat

SEQ ID NO: 728756 - DNA, 15 bp, Homo sapiens
ctccactctctgatc

SEQ ID NO: 728757 - DNA, 15 bp, Homo sapiens
tccactctctgatct

SEQ ID NO: 728758 - DNA, 15 bp, Homo sapiens
ccactctctgatctc

SEQ ID NO: 728759 - DNA, 15 bp, Homo sapiens
cactctctgatctca

SEQ ID NO: 728760 - DNA, 15 bp, Homo sapiens
actctctgatctcag

SEQ ID NO: 728761 - DNA, 15 bp, Homo sapiens
ctctctgatctcagc

SEQ ID NO: 728762 - DNA, 15 bp, Homo sapiens
tctctgatctcagct

SEQ ID NO: 728763 - DNA, 15 bp, Homo sapiens
ctctgatctcagctt

SEQ ID NO: 728764 - DNA, 15 bp, Homo sapiens
tctgatctcagcttt

SEQ ID NO: 728765 - DNA, 15 bp, Homo sapiens
ctgatctcagctttt

SEQ ID NO: 728766 - DNA, 15 bp, Homo sapiens
tgatctcagcttttg

SEQ ID NO: 728767 - DNA, 15 bp, Homo sapiens
gatctcagcttttgt

SEQ ID NO: 728768 - DNA, 15 bp, Homo sapiens
atctcagcttttgtg

SEQ ID NO: 728769 - DNA, 15 bp, Homo sapiens
tctcagcttttgtgt

SEQ ID NO: 728770 - DNA, 15 bp, Homo sapiens
ctcagcttttgtgtc

SEQ ID NO: 728771 - DNA, 15 bp, Homo sapiens
tcagcttttgtgtct

SEQ ID NO: 728772 - DNA, 15 bp, Homo sapiens
cagcttttgtgtctg

SEQ ID NO: 728773 - DNA, 15 bp, Homo sapiens
agcttttgtgtctgt

SEQ ID NO: 728774 - DNA, 15 bp, Homo sapiens
gcttttgtgtctgta

SEQ ID NO: 728775 - DNA, 15 bp, Homo sapiens
cttttgtgtctgtaa

SEQ ID NO: 728776 - DNA, 15 bp, Homo sapiens
ttttgtgtctgtaaa

SEQ ID NO: 728777 - DNA, 15 bp, Homo sapiens
tttgtgtctgtaaaa

SEQ ID NO: 728778 - DNA, 15 bp, Homo sapiens
ttgtgtctgtaaaat

SEQ ID NO: 728779 - DNA, 15 bp, Homo sapiens
tgtgtctgtaaaatg

SEQ ID NO: 728780 - DNA, 15 bp, Homo sapiens
gtgtctgtaaaatgg

SEQ ID NO: 728781 - DNA, 15 bp, Homo sapiens
tgtctgtaaaatggg

SEQ ID NO: 728782 - DNA, 15 bp, Homo sapiens
gtctgtaaaatggga

SEQ ID NO: 728783 - DNA, 15 bp, Homo sapiens
tctgtaaaatgggat

SEQ ID NO: 728784 - DNA, 15 bp, Homo sapiens
ctgtaaaatgggata

SEQ ID NO: 728785 - DNA, 15 bp, Homo sapiens
tgtaaaatgggatac

SEQ ID NO: 728786 - DNA, 15 bp, Homo sapiens
gtaaaatgggataca

SEQ ID NO: 728787 - DNA, 15 bp, Homo sapiens
taaaatgggatacaa

SEQ ID NO: 728788 - DNA, 15 bp, Homo sapiens
aaaatgggatacaat

SEQ ID NO: 728789 - DNA, 15 bp, Homo sapiens
aaatgggatacaatt

SEQ ID NO: 728790 - DNA, 15 bp, Homo sapiens
aatgggatacaatta

SEQ ID NO: 728791 - DNA, 15 bp, Homo sapiens
atgggatacaattac

SEQ ID NO: 728792 - DNA, 15 bp, Homo sapiens
tgggatacaattacc

SEQ ID NO: 728793 - DNA, 15 bp, Homo sapiens
gggatacaattaccc

SEQ ID NO: 728794 - DNA, 15 bp, Homo sapiens
ggatacaattaccca

SEQ ID NO: 728795 - DNA, 15 bp, Homo sapiens
gatacaattacccag

SEQ ID NO: 728796 - DNA, 15 bp, Homo sapiens
atacaattacccagg

SEQ ID NO: 728797 - DNA, 15 bp, Homo sapiens
tacaattacccagga

SEQ ID NO: 728798 - DNA, 15 bp, Homo sapiens
acaattacccaggac

SEQ ID NO: 728799 - DNA, 15 bp, Homo sapiens
caattacccaggaca

SEQ ID NO: 728800 - DNA, 15 bp, Homo sapiens
aattacccaggacat

SEQ ID NO: 728801 - DNA, 15 bp, Homo sapiens
attacccaggacata

SEQ ID NO: 728802 - DNA, 15 bp, Homo sapiens
ttacccaggacatag

SEQ ID NO: 728803 - DNA, 15 bp, Homo sapiens
tacccaggacatagg

SEQ ID NO: 728804 - DNA, 15 bp, Homo sapiens
acccaggacataggg

SEQ ID NO: 728805 - DNA, 15 bp, Homo sapiens
cccaggacatagggt

SEQ ID NO: 728806 - DNA, 15 bp, Homo sapiens
ccaggacatagggtg

SEQ ID NO: 728807 - DNA, 15 bp, Homo sapiens
caggacatagggtgg

SEQ ID NO: 728808 - DNA, 15 bp, Homo sapiens
aggacatagggtggt

SEQ ID NO: 728809 - DNA, 15 bp, Homo sapiens
ggacatagggtggtg

SEQ ID NO: 728810 - DNA, 15 bp, Homo sapiens
gacatagggtggtgg

SEQ ID NO: 728811 - DNA, 15 bp, Homo sapiens
acatagggtggtggg

SEQ ID NO: 728812 - DNA, 15 bp, Homo sapiens
catagggtggtgggg

SEQ ID NO: 728813 - DNA, 15 bp, Homo sapiens
atagggtggtggggg

SEQ ID NO: 728814 - DNA, 15 bp, Homo sapiens
tagggtggtgggggg

SEQ ID NO: 728815 - DNA, 15 bp, Homo sapiens
agggtggtgggggga

SEQ ID NO: 728816 - DNA, 15 bp, Homo sapiens
gggtggtggggggaa

SEQ ID NO: 728817 - DNA, 15 bp, Homo sapiens
ggtggtggggggaat

SEQ ID NO: 728818 - DNA, 15 bp, Homo sapiens
gtggtggggggaatg

SEQ ID NO: 728819 - DNA, 15 bp, Homo sapiens
tggtggggggaatga

SEQ ID NO: 728820 - DNA, 15 bp, Homo sapiens
ggtggggggaatgac

SEQ ID NO: 728821 - DNA, 15 bp, Homo sapiens
gtggggggaatgacc

SEQ ID NO: 728822 - DNA, 15 bp, Homo sapiens
tggggggaatgaccc

SEQ ID NO: 728823 - DNA, 15 bp, Homo sapiens
ggggggaatgaccct

SEQ ID NO: 728824 - DNA, 15 bp, Homo sapiens
gggggaatgaccctg

SEQ ID NO: 728825 - DNA, 15 bp, Homo sapiens
ggggaatgaccctgg

SEQ ID NO: 728826 - DNA, 15 bp, Homo sapiens
gggaatgaccctgga

SEQ ID NO: 728827 - DNA, 15 bp, Homo sapiens
ggaatgaccctggat

SEQ ID NO: 728828 - DNA, 15 bp, Homo sapiens
gaatgaccctggata

SEQ ID NO: 728829 - DNA, 15 bp, Homo sapiens
aatgaccctggataa

SEQ ID NO: 728830 - DNA, 15 bp, Homo sapiens
atgaccctggataaa

SEQ ID NO: 728831 - DNA, 15 bp, Homo sapiens
tgaccctggataaag

SEQ ID NO: 728832 - DNA, 15 bp, Homo sapiens
gaccctggataaaga

SEQ ID NO: 728833 - DNA, 15 bp, Homo sapiens
accctggataaagat

SEQ ID NO: 728834 - DNA, 15 bp, Homo sapiens
ccctggataaagatg

SEQ ID NO: 728835 - DNA, 15 bp, Homo sapiens
cctggataaagatga

SEQ ID NO: 728836 - DNA, 15 bp, Homo sapiens
ctggataaagatgat

SEQ ID NO: 728837 - DNA, 15 bp, Homo sapiens
tggataaagatgatc

SEQ ID NO: 728838 - DNA, 15 bp, Homo sapiens
ggataaagatgatca

SEQ ID NO: 728839 - DNA, 15 bp, Homo sapiens
gataaagatgatcag

SEQ ID NO: 728840 - DNA, 15 bp, Homo sapiens
ataaagatgatcagg

SEQ ID NO: 728841 - DNA, 15 bp, Homo sapiens
taaagatgatcagga

SEQ ID NO: 728842 - DNA, 15 bp, Homo sapiens
aaagatgatcaggag

SEQ ID NO: 728843 - DNA, 15 bp, Homo sapiens
aagatgatcaggagc

SEQ ID NO: 728844 - DNA, 15 bp, Homo sapiens
agatgatcaggagct

SEQ ID NO: 728845 - DNA, 15 bp, Homo sapiens
gatgatcaggagctt

SEQ ID NO: 728846 - DNA, 15 bp, Homo sapiens
atgatcaggagctta

SEQ ID NO: 728847 - DNA, 15 bp, Homo sapiens
tgatcaggagcttag

SEQ ID NO: 728848 - DNA, 15 bp, Homo sapiens
gatcaggagcttagc

SEQ ID NO: 728849 - DNA, 15 bp, Homo sapiens
atcaggagcttagca

SEQ ID NO: 728850 - DNA, 15 bp, Homo sapiens
tcaggagcttagcag

SEQ ID NO: 728851 - DNA, 15 bp, Homo sapiens
caggagcttagcaga

SEQ ID NO: 728852 - DNA, 15 bp, Homo sapiens
aggagcttagcagat

SEQ ID NO: 728853 - DNA, 15 bp, Homo sapiens
ggagcttagcagatt

SEQ ID NO: 728854 - DNA, 15 bp, Homo sapiens
gagcttagcagattg

SEQ ID NO: 728855 - DNA, 15 bp, Homo sapiens
agcttagcagattgc

SEQ ID NO: 728856 - DNA, 15 bp, Homo sapiens
gcttagcagattgca

SEQ ID NO: 728857 - DNA, 15 bp, Homo sapiens
cttagcagattgcat

SEQ ID NO: 728858 - DNA, 15 bp, Homo sapiens
ttagcagattgcatt

SEQ ID NO: 728859 - DNA, 15 bp, Homo sapiens
tagcagattgcattt

SEQ ID NO: 728860 - DNA, 15 bp, Homo sapiens
agcagattgcattta

SEQ ID NO: 728861 - DNA, 15 bp, Homo sapiens
gcagattgcatttaa

SEQ ID NO: 728862 - DNA, 15 bp, Homo sapiens
cagattgcatttaag

SEQ ID NO: 728863 - DNA, 15 bp, Homo sapiens
agattgcatttaaga

SEQ ID NO: 728864 - DNA, 15 bp, Homo sapiens
gattgcatttaagaa

SEQ ID NO: 728865 - DNA, 15 bp, Homo sapiens
attgcatttaagaaa

SEQ ID NO: 728866 - DNA, 15 bp, Homo sapiens
ttgcatttaagaaag

SEQ ID NO: 728867 - DNA, 15 bp, Homo sapiens
tgcatttaagaaagg

SEQ ID NO: 728868 - DNA, 15 bp, Homo sapiens
gcatttaagaaaggg

SEQ ID NO: 728869 - DNA, 15 bp, Homo sapiens
catttaagaaagggg

SEQ ID NO: 728870 - DNA, 15 bp, Homo sapiens
atttaagaaagggga

SEQ ID NO: 728871 - DNA, 15 bp, Homo sapiens
tttaagaaaggggag

SEQ ID NO: 728872 - DNA, 15 bp, Homo sapiens
ttaagaaaggggaga

SEQ ID NO: 728873 - DNA, 15 bp, Homo sapiens
taagaaaggggagag

SEQ ID NO: 728874 - DNA, 15 bp, Homo sapiens
aagaaaggggagaga

SEQ ID NO: 728875 - DNA, 15 bp, Homo sapiens
agaaaggggagagac

SEQ ID NO: 728876 - DNA, 15 bp, Homo sapiens
gaaaggggagagacc

SEQ ID NO: 728877 - DNA, 15 bp, Homo sapiens
aaaggggagagacca

SEQ ID NO: 728878 - DNA, 15 bp, Homo sapiens
aaggggagagaccag

SEQ ID NO: 728879 - DNA, 15 bp, Homo sapiens
aggggagagaccagg

SEQ ID NO: 728880 - DNA, 15 bp, Homo sapiens
ggggagagaccaggc

SEQ ID NO: 728881 - DNA, 15 bp, Homo sapiens
gggagagaccaggcg

SEQ ID NO: 728882 - DNA, 15 bp, Homo sapiens
ggagagaccaggcgc

SEQ ID NO: 728883 - DNA, 15 bp, Homo sapiens
gagagaccaggcgca

SEQ ID NO: 728884 - DNA, 15 bp, Homo sapiens
agagaccaggcgcag

SEQ ID NO: 728885 - DNA, 15 bp, Homo sapiens
gagaccaggcgcagt

SEQ ID NO: 728886 - DNA, 15 bp, Homo sapiens
agaccaggcgcagtg

SEQ ID NO: 728887 - DNA, 15 bp, Homo sapiens
gaccaggcgcagtgg

SEQ ID NO: 728888 - DNA, 15 bp, Homo sapiens
accaggcgcagtggc

SEQ ID NO: 728889 - DNA, 15 bp, Homo sapiens
ccaggcgcagtggct

SEQ ID NO: 728890 - DNA, 15 bp, Homo sapiens
caggcgcagtggctc

SEQ ID NO: 728891 - DNA, 15 bp, Homo sapiens
aggcgcagtggctca

SEQ ID NO: 728892 - DNA, 15 bp, Homo sapiens
ggaggctgaggcggc

SEQ ID NO: 728893 - DNA, 15 bp, Homo sapiens
gaggctgaggcggcc

SEQ ID NO: 728894 - DNA, 15 bp, Homo sapiens
aggctgaggcggcca

SEQ ID NO: 728895 - DNA, 15 bp, Homo sapiens
ggctgaggcggccag

SEQ ID NO: 728896 - DNA, 15 bp, Homo sapiens
gctgaggcggccaga

SEQ ID NO: 728897 - DNA, 15 bp, Homo sapiens
ctgaggcggccagat

SEQ ID NO: 728898 - DNA, 15 bp, Homo sapiens
tgaggcggccagatc

SEQ ID NO: 728899 - DNA, 15 bp, Homo sapiens
gaggcggccagatca

SEQ ID NO: 728900 - DNA, 15 bp, Homo sapiens
aggcggccagatcac

SEQ ID NO: 728901 - DNA, 15 bp, Homo sapiens
ggcggccagatcacc

SEQ ID NO: 728902 - DNA, 15 bp, Homo sapiens
gcggccagatcacct

SEQ ID NO: 728903 - DNA, 15 bp, Homo sapiens
cggccagatcacctg

SEQ ID NO: 728904 - DNA, 15 bp, Homo sapiens
ggccagatcacctga

SEQ ID NO: 728905 - DNA, 15 bp, Homo sapiens
gccagatcacctgag

SEQ ID NO: 728906 - DNA, 15 bp, Homo sapiens
ccagatcacctgagg

SEQ ID NO: 728907 - DNA, 15 bp, Homo sapiens
tgaggtcaggagttt

SEQ ID NO: 728908 - DNA, 15 bp, Homo sapiens
gaggtcaggagtttg

SEQ ID NO: 728909 - DNA, 15 bp, Homo sapiens
aggtcaggagtttga

SEQ ID NO: 728910 - DNA, 15 bp, Homo sapiens
ggtcaggagtttgag

SEQ ID NO: 728911 - DNA, 15 bp, Homo sapiens
caggagtttgagact

SEQ ID NO: 728912 - DNA, 15 bp, Homo sapiens
aggagtttgagacta

SEQ ID NO: 728913 - DNA, 15 bp, Homo sapiens
ggagtttgagactag

SEQ ID NO: 728914 - DNA, 15 bp, Homo sapiens
gagtttgagactagc

SEQ ID NO: 728915 - DNA, 15 bp, Homo sapiens
agtttgagactagcc

SEQ ID NO: 728916 - DNA, 15 bp, Homo sapiens
gtttgagactagcct

SEQ ID NO: 728917 - DNA, 15 bp, Homo sapiens
tttgagactagcctg

SEQ ID NO: 728918 - DNA, 15 bp, Homo sapiens
ttgagactagcctgg

SEQ ID NO: 728919 - DNA, 15 bp, Homo sapiens
tgagactagcctggg

SEQ ID NO: 728920 - DNA, 15 bp, Homo sapiens
gagactagcctgggc

SEQ ID NO: 728921 - DNA, 15 bp, Homo sapiens
agactagcctgggca

SEQ ID NO: 728922 - DNA, 15 bp, Homo sapiens
gactagcctgggcaa

SEQ ID NO: 728923 - DNA, 15 bp, Homo sapiens
actagcctgggcaac

SEQ ID NO: 728924 - DNA, 15 bp, Homo sapiens
ctagcctgggcaaca

SEQ ID NO: 728925 - DNA, 15 bp, Homo sapiens
tagcctgggcaacac

SEQ ID NO: 728926 - DNA, 15 bp, Homo sapiens
cctgggcaacacagt

SEQ ID NO: 728927 - DNA, 15 bp, Homo sapiens
ctgggcaacacagtg

SEQ ID NO: 728928 - DNA, 15 bp, Homo sapiens
tgggcaacacagtga

SEQ ID NO: 728929 - DNA, 15 bp, Homo sapiens
gggcaacacagtgaa

SEQ ID NO: 728930 - DNA, 15 bp, Homo sapiens
ggcaacacagtgaaa

SEQ ID NO: 728931 - DNA, 15 bp, Homo sapiens
gcaacacagtgaaac

SEQ ID NO: 728932 - DNA, 15 bp, Homo sapiens
caacacagtgaaacc

SEQ ID NO: 728933 - DNA, 15 bp, Homo sapiens
aacacagtgaaaccc

SEQ ID NO: 728934 - DNA, 15 bp, Homo sapiens
acacagtgaaacccc

SEQ ID NO: 728935 - DNA, 15 bp, Homo sapiens
cacagtgaaacccca

SEQ ID NO: 728936 - DNA, 15 bp, Homo sapiens
acagtgaaaccccat

SEQ ID NO: 728937 - DNA, 15 bp, Homo sapiens
cagtgaaaccccatc

SEQ ID NO: 728938 - DNA, 15 bp, Homo sapiens
agtgaaaccccatct

SEQ ID NO: 728939 - DNA, 15 bp, Homo sapiens
gtgaaaccccatctc

SEQ ID NO: 728940 - DNA, 15 bp, Homo sapiens
aaccccatctctacc

SEQ ID NO: 728941 - DNA, 15 bp, Homo sapiens
accccatctctacca

SEQ ID NO: 728942 - DNA, 15 bp, Homo sapiens
ccccatctctaccaa

SEQ ID NO: 728943 - DNA, 15 bp, Homo sapiens
cccatctctaccaaa

SEQ ID NO: 728944 - DNA, 15 bp, Homo sapiens
ccatctctaccaaaa

SEQ ID NO: 728945 - DNA, 15 bp, Homo sapiens
catctctaccaaaaa

SEQ ID NO: 728946 - DNA, 15 bp, Homo sapiens
atctctaccaaaaat

SEQ ID NO: 728947 - DNA, 15 bp, Homo sapiens
tctctaccaaaaata

SEQ ID NO: 728948 - DNA, 15 bp, Homo sapiens
ctctaccaaaaatac

SEQ ID NO: 728949 - DNA, 15 bp, Homo sapiens
tctaccaaaaataca

SEQ ID NO: 728950 - DNA, 15 bp, Homo sapiens
ctaccaaaaatacaa

SEQ ID NO: 728951 - DNA, 15 bp, Homo sapiens
taccaaaaatacaaa

SEQ ID NO: 728952 - DNA, 15 bp, Homo sapiens
accaaaaatacaaag

SEQ ID NO: 728953 - DNA, 15 bp, Homo sapiens
ccaaaaatacaaaga

SEQ ID NO: 728954 - DNA, 15 bp, Homo sapiens
caaaaatacaaagaa

SEQ ID NO: 728955 - DNA, 15 bp, Homo sapiens
aaaaatacaaagaaa

SEQ ID NO: 728956 - DNA, 15 bp, Homo sapiens
aaaatacaaagaaat

SEQ ID NO: 728957 - DNA, 15 bp, Homo sapiens
aaatacaaagaaatt

SEQ ID NO: 728958 - DNA, 15 bp, Homo sapiens
aatacaaagaaatta

SEQ ID NO: 728959 - DNA, 15 bp, Homo sapiens
atacaaagaaattag

SEQ ID NO: 728960 - DNA, 15 bp, Homo sapiens
tacaaagaaattagc

SEQ ID NO: 728961 - DNA, 15 bp, Homo sapiens
acaaagaaattagct

SEQ ID NO: 728962 - DNA, 15 bp, Homo sapiens
caaagaaattagctg

SEQ ID NO: 728963 - DNA, 15 bp, Homo sapiens
aaagaaattagctgg

SEQ ID NO: 728964 - DNA, 15 bp, Homo sapiens
aagaaattagctggg

SEQ ID NO: 728965 - DNA, 15 bp, Homo sapiens
agaaattagctgggc

SEQ ID NO: 728966 - DNA, 15 bp, Homo sapiens
gaaattagctgggcg

SEQ ID NO: 728967 - DNA, 15 bp, Homo sapiens
ctgggcgtggtggcc

SEQ ID NO: 728968 - DNA, 15 bp, Homo sapiens
tgggcgtggtggcca

SEQ ID NO: 728969 - DNA, 15 bp, Homo sapiens
gggcgtggtggccat

SEQ ID NO: 728970 - DNA, 15 bp, Homo sapiens
ggcgtggtggccatg

SEQ ID NO: 728971 - DNA, 15 bp, Homo sapiens
gcgtggtggccatgc

SEQ ID NO: 728972 - DNA, 15 bp, Homo sapiens
cgtggtggccatgca

SEQ ID NO: 728973 - DNA, 15 bp, Homo sapiens
gtggtggccatgcac

SEQ ID NO: 728974 - DNA, 15 bp, Homo sapiens
tggtggccatgcacc

SEQ ID NO: 728975 - DNA, 15 bp, Homo sapiens
ggtggccatgcacct

SEQ ID NO: 728976 - DNA, 15 bp, Homo sapiens
gtggccatgcacctg

SEQ ID NO: 728977 - DNA, 15 bp, Homo sapiens
tggccatgcacctgt

SEQ ID NO: 728978 - DNA, 15 bp, Homo sapiens
ggccatgcacctgta

SEQ ID NO: 728979 - DNA, 15 bp, Homo sapiens
gccatgcacctgtaa

SEQ ID NO: 728980 - DNA, 15 bp, Homo sapiens
ccatgcacctgtaat

SEQ ID NO: 728981 - DNA, 15 bp, Homo sapiens
catgcacctgtaatc

SEQ ID NO: 728982 - DNA, 15 bp, Homo sapiens
atgcacctgtaatcc

SEQ ID NO: 728983 - DNA, 15 bp, Homo sapiens
ctgtaatcccagctt

SEQ ID NO: 728984 - DNA, 15 bp, Homo sapiens
tgtaatcccagcttc

SEQ ID NO: 728985 - DNA, 15 bp, Homo sapiens
gtaatcccagcttct

SEQ ID NO: 728986 - DNA, 15 bp, Homo sapiens
taatcccagcttctg

SEQ ID NO: 728987 - DNA, 15 bp, Homo sapiens
aatcccagcttctgg

SEQ ID NO: 728988 - DNA, 15 bp, Homo sapiens
atcccagcttctgga

SEQ ID NO: 728989 - DNA, 15 bp, Homo sapiens
tcccagcttctggag

SEQ ID NO: 728990 - DNA, 15 bp, Homo sapiens
cccagcttctggaga

SEQ ID NO: 728991 - DNA, 15 bp, Homo sapiens
ccagcttctggagag

SEQ ID NO: 728992 - DNA, 15 bp, Homo sapiens
cagcttctggagagg

SEQ ID NO: 728993 - DNA, 15 bp, Homo sapiens
agcttctggagaggc

SEQ ID NO: 728994 - DNA, 15 bp, Homo sapiens
gcttctggagaggct

SEQ ID NO: 728995 - DNA, 15 bp, Homo sapiens
cttctggagaggctg

SEQ ID NO: 728996 - DNA, 15 bp, Homo sapiens
ttctggagaggctga

SEQ ID NO: 728997 - DNA, 15 bp, Homo sapiens
tctggagaggctgag

SEQ ID NO: 728998 - DNA, 15 bp, Homo sapiens
ctggagaggctgagg

SEQ ID NO: 728999 - DNA, 15 bp, Homo sapiens
tggagaggctgaggc

SEQ ID NO: 729000 - DNA, 15 bp, Homo sapiens
ggagaggctgaggca

SEQ ID NO: 729001 - DNA, 15 bp, Homo sapiens
gagaggctgaggcag

SEQ ID NO: 729002 - DNA, 15 bp, Homo sapiens
agaggctgaggcagg

SEQ ID NO: 729003 - DNA, 15 bp, Homo sapiens
agtgagccaagatcg

SEQ ID NO: 729004 - DNA, 15 bp, Homo sapiens
gtgagccaagatcgc

SEQ ID NO: 729005 - DNA, 15 bp, Homo sapiens
tgagccaagatcgca

SEQ ID NO: 729006 - DNA, 15 bp, Homo sapiens
gagccaagatcgcac

SEQ ID NO: 729007 - DNA, 15 bp, Homo sapiens
agccaagatcgcacc

SEQ ID NO: 729008 - DNA, 15 bp, Homo sapiens
gccaagatcgcacca

SEQ ID NO: 729009 - DNA, 15 bp, Homo sapiens
ccaagatcgcaccac

SEQ ID NO: 729010 - DNA, 15 bp, Homo sapiens
caagatcgcaccact

SEQ ID NO: 729011 - DNA, 15 bp, Homo sapiens
aagatcgcaccactg

SEQ ID NO: 729012 - DNA, 15 bp, Homo sapiens
agatcgcaccactgc

SEQ ID NO: 729013 - DNA, 15 bp, Homo sapiens
gatcgcaccactgca

SEQ ID NO: 729014 - DNA, 15 bp, Homo sapiens
atcgcaccactgcac

SEQ ID NO: 729015 - DNA, 15 bp, Homo sapiens
tcgcaccactgcact

SEQ ID NO: 729016 - DNA, 15 bp, Homo sapiens
cgcaccactgcactc

SEQ ID NO: 729017 - DNA, 15 bp, Homo sapiens
tccagcctgggtgat

SEQ ID NO: 729018 - DNA, 15 bp, Homo sapiens
ccagcctgggtgata

SEQ ID NO: 729019 - DNA, 15 bp, Homo sapiens
cagcctgggtgatag

SEQ ID NO: 729020 - DNA, 15 bp, Homo sapiens
agcctgggtgataga

SEQ ID NO: 729021 - DNA, 15 bp, Homo sapiens
gcctgggtgatagaa

SEQ ID NO: 729022 - DNA, 15 bp, Homo sapiens
cctgggtgatagaag

SEQ ID NO: 729023 - DNA, 15 bp, Homo sapiens
ctgggtgatagaagg

SEQ ID NO: 729024 - DNA, 15 bp, Homo sapiens
tgggtgatagaagga

SEQ ID NO: 729025 - DNA, 15 bp, Homo sapiens
gggtgatagaaggag

SEQ ID NO: 729026 - DNA, 15 bp, Homo sapiens
ggtgatagaaggaga

SEQ ID NO: 729027 - DNA, 15 bp, Homo sapiens
gtgatagaaggagac

SEQ ID NO: 729028 - DNA, 15 bp, Homo sapiens
tgatagaaggagacc

SEQ ID NO: 729029 - DNA, 15 bp, Homo sapiens
gatagaaggagaccc

SEQ ID NO: 729030 - DNA, 15 bp, Homo sapiens
atagaaggagaccct

SEQ ID NO: 729031 - DNA, 15 bp, Homo sapiens
tagaaggagaccctt

SEQ ID NO: 729032 - DNA, 15 bp, Homo sapiens
agaaggagacccttc

SEQ ID NO: 729033 - DNA, 15 bp, Homo sapiens
gaaggagacccttcc

SEQ ID NO: 729034 - DNA, 15 bp, Homo sapiens
aaggagacccttcca

SEQ ID NO: 729035 - DNA, 15 bp, Homo sapiens
aggagacccttccac

SEQ ID NO: 729036 - DNA, 15 bp, Homo sapiens
ggagacccttccaca

SEQ ID NO: 729037 - DNA, 15 bp, Homo sapiens
gagacccttccacac

SEQ ID NO: 729038 - DNA, 15 bp, Homo sapiens
agacccttccacaca

SEQ ID NO: 729039 - DNA, 15 bp, Homo sapiens
gacccttccacacac

SEQ ID NO: 729040 - DNA, 15 bp, Homo sapiens
acccttccacacaca

SEQ ID NO: 729041 - DNA, 15 bp, Homo sapiens
cccttccacacacac

SEQ ID NO: 729042 - DNA, 15 bp, Homo sapiens
ccttccacacacaca

SEQ ID NO: 729043 - DNA, 15 bp, Homo sapiens
cttccacacacacaa

SEQ ID NO: 729044 - DNA, 15 bp, Homo sapiens
ttccacacacacaaa

SEQ ID NO: 729045 - DNA, 15 bp, Homo sapiens
tccacacacacaaaa

SEQ ID NO: 729046 - DNA, 15 bp, Homo sapiens
ccacacacacaaaaa

SEQ ID NO: 729047 - DNA, 15 bp, Homo sapiens
cacacacacaaaaag

SEQ ID NO: 729048 - DNA, 15 bp, Homo sapiens
acacacacaaaaagg

SEQ ID NO: 729049 - DNA, 15 bp, Homo sapiens
cacacacaaaaagga

SEQ ID NO: 729050 - DNA, 15 bp, Homo sapiens
acacacaaaaaggaa

SEQ ID NO: 729051 - DNA, 15 bp, Homo sapiens
cacacaaaaaggaag

SEQ ID NO: 729052 - DNA, 15 bp, Homo sapiens
acacaaaaaggaagt

SEQ ID NO: 729053 - DNA, 15 bp, Homo sapiens
cacaaaaaggaagtg

SEQ ID NO: 729054 - DNA, 15 bp, Homo sapiens
acaaaaaggaagtgt

SEQ ID NO: 729055 - DNA, 15 bp, Homo sapiens
caaaaaggaagtgtc

SEQ ID NO: 729056 - DNA, 15 bp, Homo sapiens
aaaaaggaagtgtct

SEQ ID NO: 729057 - DNA, 15 bp, Homo sapiens
aaaaggaagtgtcta

SEQ ID NO: 729058 - DNA, 15 bp, Homo sapiens
aaaggaagtgtctat

SEQ ID NO: 729059 - DNA, 15 bp, Homo sapiens
aaggaagtgtctatc

SEQ ID NO: 729060 - DNA, 15 bp, Homo sapiens
aggaagtgtctatct

SEQ ID NO: 729061 - DNA, 15 bp, Homo sapiens
ggaagtgtctatctt

SEQ ID NO: 729062 - DNA, 15 bp, Homo sapiens
gaagtgtctatcttc

SEQ ID NO: 729063 - DNA, 15 bp, Homo sapiens
aagtgtctatcttca

SEQ ID NO: 729064 - DNA, 15 bp, Homo sapiens
agtgtctatcttcag

SEQ ID NO: 729065 - DNA, 15 bp, Homo sapiens
gtgtctatcttcagg

SEQ ID NO: 729066 - DNA, 15 bp, Homo sapiens
tgtctatcttcaggc

SEQ ID NO: 729067 - DNA, 15 bp, Homo sapiens
gtctatcttcaggca

SEQ ID NO: 729068 - DNA, 15 bp, Homo sapiens
tctatcttcaggcag

SEQ ID NO: 729069 - DNA, 15 bp, Homo sapiens
ctatcttcaggcaga

SEQ ID NO: 729070 - DNA, 15 bp, Homo sapiens
tatcttcaggcagag

SEQ ID NO: 729071 - DNA, 15 bp, Homo sapiens
atcttcaggcagagg

SEQ ID NO: 729072 - DNA, 15 bp, Homo sapiens
tcttcaggcagaggg

SEQ ID NO: 729073 - DNA, 15 bp, Homo sapiens
cttcaggcagagggt

SEQ ID NO: 729074 - DNA, 15 bp, Homo sapiens
ttcaggcagagggtc

SEQ ID NO: 729075 - DNA, 15 bp, Homo sapiens
tcaggcagagggtca

SEQ ID NO: 729076 - DNA, 15 bp, Homo sapiens
caggcagagggtcag

SEQ ID NO: 729077 - DNA, 15 bp, Homo sapiens
aggcagagggtcaga

SEQ ID NO: 729078 - DNA, 15 bp, Homo sapiens
ggcagagggtcagaa

SEQ ID NO: 729079 - DNA, 15 bp, Homo sapiens
gcagagggtcagaat

SEQ ID NO: 729080 - DNA, 15 bp, Homo sapiens
cagagggtcagaata

SEQ ID NO: 729081 - DNA, 15 bp, Homo sapiens
agagggtcagaatag

SEQ ID NO: 729082 - DNA, 15 bp, Homo sapiens
gagggtcagaatagg

SEQ ID NO: 729083 - DNA, 15 bp, Homo sapiens
agggtcagaatagga

SEQ ID NO: 729084 - DNA, 15 bp, Homo sapiens
gggtcagaataggat

SEQ ID NO: 729085 - DNA, 15 bp, Homo sapiens
ggtcagaataggatg

SEQ ID NO: 729086 - DNA, 15 bp, Homo sapiens
gtcagaataggatgg

SEQ ID NO: 729087 - DNA, 15 bp, Homo sapiens
tcagaataggatggg

SEQ ID NO: 729088 - DNA, 15 bp, Homo sapiens
cagaataggatgggt

SEQ ID NO: 729089 - DNA, 15 bp, Homo sapiens
agaataggatgggtc

SEQ ID NO: 729090 - DNA, 15 bp, Homo sapiens
gaataggatgggtca

SEQ ID NO: 729091 - DNA, 15 bp, Homo sapiens
aataggatgggtcac

SEQ ID NO: 729092 - DNA, 15 bp, Homo sapiens
ataggatgggtcaca

SEQ ID NO: 729093 - DNA, 15 bp, Homo sapiens
taggatgggtcacac

SEQ ID NO: 729094 - DNA, 15 bp, Homo sapiens
aggatgggtcacact

SEQ ID NO: 729095 - DNA, 15 bp, Homo sapiens
ggatgggtcacactt

SEQ ID NO: 729096 - DNA, 15 bp, Homo sapiens
gatgggtcacacttt

SEQ ID NO: 729097 - DNA, 15 bp, Homo sapiens
atgggtcacactttg

SEQ ID NO: 729098 - DNA, 15 bp, Homo sapiens
tgggtcacactttgt

SEQ ID NO: 729099 - DNA, 15 bp, Homo sapiens
gggtcacactttgtc

SEQ ID NO: 729100 - DNA, 15 bp, Homo sapiens
ggtcacactttgtcc

SEQ ID NO: 729101 - DNA, 15 bp, Homo sapiens
gtcacactttgtcct

SEQ ID NO: 729102 - DNA, 15 bp, Homo sapiens
tcacactttgtcctt

SEQ ID NO: 729103 - DNA, 15 bp, Homo sapiens
cacactttgtccttt

SEQ ID NO: 729104 - DNA, 15 bp, Homo sapiens
acactttgtcctttt

SEQ ID NO: 729105 - DNA, 15 bp, Homo sapiens
cactttgtccttttt

SEQ ID NO: 729106 - DNA, 15 bp, Homo sapiens
actttgtcctttttc

SEQ ID NO: 729107 - DNA, 15 bp, Homo sapiens
ctttgtcctttttcc

SEQ ID NO: 729108 - DNA, 15 bp, Homo sapiens
tttgtcctttttccg

SEQ ID NO: 729109 - DNA, 15 bp, Homo sapiens
ttgtcctttttccgc

SEQ ID NO: 729110 - DNA, 15 bp, Homo sapiens
tgtcctttttccgca

SEQ ID NO: 729111 - DNA, 15 bp, Homo sapiens
gtcctttttccgcac

SEQ ID NO: 729112 - DNA, 15 bp, Homo sapiens
tcctttttccgcaca

SEQ ID NO: 729113 - DNA, 15 bp, Homo sapiens
cctttttccgcacac

SEQ ID NO: 729114 - DNA, 15 bp, Homo sapiens
ctttttccgcacacc

SEQ ID NO: 729115 - DNA, 15 bp, Homo sapiens
tttttccgcacacct

SEQ ID NO: 729116 - DNA, 15 bp, Homo sapiens
ttttccgcacacctt

SEQ ID NO: 729117 - DNA, 15 bp, Homo sapiens
tttccgcacaccttc

SEQ ID NO: 729118 - DNA, 15 bp, Homo sapiens
ttccgcacaccttct

SEQ ID NO: 729119 - DNA, 15 bp, Homo sapiens
tccgcacaccttcta

SEQ ID NO: 729120 - DNA, 15 bp, Homo sapiens
ccgcacaccttctag

SEQ ID NO: 729121 - DNA, 15 bp, Homo sapiens
cgcacaccttctagg

SEQ ID NO: 729122 - DNA, 15 bp, Homo sapiens
gcacaccttctaggg

SEQ ID NO: 729123 - DNA, 15 bp, Homo sapiens
cacaccttctagggg

SEQ ID NO: 729124 - DNA, 15 bp, Homo sapiens
acaccttctaggggg

SEQ ID NO: 729125 - DNA, 15 bp, Homo sapiens
caccttctagggggc

SEQ ID NO: 729126 - DNA, 15 bp, Homo sapiens
accttctagggggca

SEQ ID NO: 729127 - DNA, 15 bp, Homo sapiens
ccttctagggggcaa

SEQ ID NO: 729128 - DNA, 15 bp, Homo sapiens
cttctagggggcaaa

SEQ ID NO: 729129 - DNA, 15 bp, Homo sapiens
ttctagggggcaaag

SEQ ID NO: 729130 - DNA, 15 bp, Homo sapiens
tctagggggcaaagg

SEQ ID NO: 729131 - DNA, 15 bp, Homo sapiens
ctagggggcaaaggg

SEQ ID NO: 729132 - DNA, 15 bp, Homo sapiens
tagggggcaaagggt

SEQ ID NO: 729133 - DNA, 15 bp, Homo sapiens
agggggcaaagggtc

SEQ ID NO: 729134 - DNA, 15 bp, Homo sapiens
gggggcaaagggtcc

SEQ ID NO: 729135 - DNA, 15 bp, Homo sapiens
ggggcaaagggtccc

SEQ ID NO: 729136 - DNA, 15 bp, Homo sapiens
gggcaaagggtcccc

SEQ ID NO: 729137 - DNA, 15 bp, Homo sapiens
ggcaaagggtccccc

SEQ ID NO: 729138 - DNA, 15 bp, Homo sapiens
gcaaagggtccccca

SEQ ID NO: 729139 - DNA, 15 bp, Homo sapiens
caaagggtcccccaa

SEQ ID NO: 729140 - DNA, 15 bp, Homo sapiens
aaagggtcccccaaa

SEQ ID NO: 729141 - DNA, 15 bp, Homo sapiens
aagggtcccccaaac

SEQ ID NO: 729142 - DNA, 15 bp, Homo sapiens
agggtcccccaaacc

SEQ ID NO: 729143 - DNA, 15 bp, Homo sapiens
gggtcccccaaaccc

SEQ ID NO: 729144 - DNA, 15 bp, Homo sapiens
ggtcccccaaaccct

SEQ ID NO: 729145 - DNA, 15 bp, Homo sapiens
gtcccccaaaccctt

SEQ ID NO: 729146 - DNA, 15 bp, Homo sapiens
tcccccaaacccttg

SEQ ID NO: 729147 - DNA, 15 bp, Homo sapiens
cccccaaacccttgt

SEQ ID NO: 729148 - DNA, 15 bp, Homo sapiens
ccccaaacccttgtc

SEQ ID NO: 729149 - DNA, 15 bp, Homo sapiens
cccaaacccttgtcc

SEQ ID NO: 729150 - DNA, 15 bp, Homo sapiens
ccaaacccttgtcct

SEQ ID NO: 729151 - DNA, 15 bp, Homo sapiens
caaacccttgtccta

SEQ ID NO: 729152 - DNA, 15 bp, Homo sapiens
aaacccttgtcctac

SEQ ID NO: 729153 - DNA, 15 bp, Homo sapiens
aacccttgtcctaca

SEQ ID NO: 729154 - DNA, 15 bp, Homo sapiens
acccttgtcctacac

SEQ ID NO: 729155 - DNA, 15 bp, Homo sapiens
cccttgtcctacacc

SEQ ID NO: 729156 - DNA, 15 bp, Homo sapiens
ccttgtcctacacca

SEQ ID NO: 729157 - DNA, 15 bp, Homo sapiens
cttgtcctacaccat

SEQ ID NO: 729158 - DNA, 15 bp, Homo sapiens
ttgtcctacaccatc

SEQ ID NO: 729159 - DNA, 15 bp, Homo sapiens
tgtcctacaccatca

SEQ ID NO: 729160 - DNA, 15 bp, Homo sapiens
gtcctacaccatcac

SEQ ID NO: 729161 - DNA, 15 bp, Homo sapiens
tcctacaccatcact

SEQ ID NO: 729162 - DNA, 15 bp, Homo sapiens
cctacaccatcacta

SEQ ID NO: 729163 - DNA, 15 bp, Homo sapiens
ctacaccatcactag

SEQ ID NO: 729164 - DNA, 15 bp, Homo sapiens
tacaccatcactagg

SEQ ID NO: 729165 - DNA, 15 bp, Homo sapiens
acaccatcactaggc

SEQ ID NO: 729166 - DNA, 15 bp, Homo sapiens
caccatcactaggca

SEQ ID NO: 729167 - DNA, 15 bp, Homo sapiens
accatcactaggcat

SEQ ID NO: 729168 - DNA, 15 bp, Homo sapiens
ccatcactaggcatc

SEQ ID NO: 729169 - DNA, 15 bp, Homo sapiens
catcactaggcatct

SEQ ID NO: 729170 - DNA, 15 bp, Homo sapiens
atcactaggcatctt

SEQ ID NO: 729171 - DNA, 15 bp, Homo sapiens
tcactaggcatcttt

SEQ ID NO: 729172 - DNA, 15 bp, Homo sapiens
cactaggcatctttc

SEQ ID NO: 729173 - DNA, 15 bp, Homo sapiens
actaggcatctttcc

SEQ ID NO: 729174 - DNA, 15 bp, Homo sapiens
ctaggcatctttcca

SEQ ID NO: 729175 - DNA, 15 bp, Homo sapiens
taggcatctttccat

SEQ ID NO: 729176 - DNA, 15 bp, Homo sapiens
aggcatctttccatc

SEQ ID NO: 729177 - DNA, 15 bp, Homo sapiens
ggcatctttccatcc

SEQ ID NO: 729178 - DNA, 15 bp, Homo sapiens
gcatctttccatccc

SEQ ID NO: 729179 - DNA, 15 bp, Homo sapiens
catctttccatccct

SEQ ID NO: 729180 - DNA, 15 bp, Homo sapiens
atctttccatccctg

SEQ ID NO: 729181 - DNA, 15 bp, Homo sapiens
tctttccatccctgc

SEQ ID NO: 729182 - DNA, 15 bp, Homo sapiens
ctttccatccctgca

SEQ ID NO: 729183 - DNA, 15 bp, Homo sapiens
tttccatccctgcaa

SEQ ID NO: 729184 - DNA, 15 bp, Homo sapiens
ttccatccctgcaat

SEQ ID NO: 729185 - DNA, 15 bp, Homo sapiens
tccatccctgcaatc

SEQ ID NO: 729186 - DNA, 15 bp, Homo sapiens
ccatccctgcaatca

SEQ ID NO: 729187 - DNA, 15 bp, Homo sapiens
catccctgcaatcag

SEQ ID NO: 729188 - DNA, 15 bp, Homo sapiens
atccctgcaatcagt

SEQ ID NO: 729189 - DNA, 15 bp, Homo sapiens
tccctgcaatcagta

SEQ ID NO: 729190 - DNA, 15 bp, Homo sapiens
ccctgcaatcagtaa

SEQ ID NO: 729191 - DNA, 15 bp, Homo sapiens
cctgcaatcagtaag

SEQ ID NO: 729192 - DNA, 15 bp, Homo sapiens
ctgcaatcagtaaga

SEQ ID NO: 729193 - DNA, 15 bp, Homo sapiens
tgcaatcagtaagaa

SEQ ID NO: 729194 - DNA, 15 bp, Homo sapiens
gcaatcagtaagaag

SEQ ID NO: 729195 - DNA, 15 bp, Homo sapiens
caatcagtaagaagc

SEQ ID NO: 729196 - DNA, 15 bp, Homo sapiens
aatcagtaagaagca

SEQ ID NO: 729197 - DNA, 15 bp, Homo sapiens
atcagtaagaagcat

SEQ ID NO: 729198 - DNA, 15 bp, Homo sapiens
tcagtaagaagcatg

SEQ ID NO: 729199 - DNA, 15 bp, Homo sapiens
cagtaagaagcatga

SEQ ID NO: 729200 - DNA, 15 bp, Homo sapiens
agtaagaagcatgat

SEQ ID NO: 729201 - DNA, 15 bp, Homo sapiens
gtaagaagcatgatc

SEQ ID NO: 729202 - DNA, 15 bp, Homo sapiens
taagaagcatgatct

SEQ ID NO: 729203 - DNA, 15 bp, Homo sapiens
aagaagcatgatctc

SEQ ID NO: 729204 - DNA, 15 bp, Homo sapiens
agaagcatgatctct

SEQ ID NO: 729205 - DNA, 15 bp, Homo sapiens
gaagcatgatctctc

SEQ ID NO: 729206 - DNA, 15 bp, Homo sapiens
aagcatgatctctcc

SEQ ID NO: 729207 - DNA, 15 bp, Homo sapiens
agcatgatctctccc

SEQ ID NO: 729208 - DNA, 15 bp, Homo sapiens
gcatgatctctccca

SEQ ID NO: 729209 - DNA, 15 bp, Homo sapiens
catgatctctcccag

SEQ ID NO: 729210 - DNA, 15 bp, Homo sapiens
atgatctctcccaga

SEQ ID NO: 729211 - DNA, 15 bp, Homo sapiens
tgatctctcccagag

SEQ ID NO: 729212 - DNA, 15 bp, Homo sapiens
gatctctcccagaga

SEQ ID NO: 729213 - DNA, 15 bp, Homo sapiens
atctctcccagagag

SEQ ID NO: 729214 - DNA, 15 bp, Homo sapiens
tctctcccagagagg

SEQ ID NO: 729215 - DNA, 15 bp, Homo sapiens
ctctcccagagagga

SEQ ID NO: 729216 - DNA, 15 bp, Homo sapiens
tctcccagagaggag

SEQ ID NO: 729217 - DNA, 15 bp, Homo sapiens
ctcccagagaggaga

SEQ ID NO: 729218 - DNA, 15 bp, Homo sapiens
tcccagagaggagaa

SEQ ID NO: 729219 - DNA, 15 bp, Homo sapiens
cccagagaggagaat

SEQ ID NO: 729220 - DNA, 15 bp, Homo sapiens
ccagagaggagaatc

SEQ ID NO: 729221 - DNA, 15 bp, Homo sapiens
cagagaggagaatca

SEQ ID NO: 729222 - DNA, 15 bp, Homo sapiens
agagaggagaatcac

SEQ ID NO: 729223 - DNA, 15 bp, Homo sapiens
gagaggagaatcacc

SEQ ID NO: 729224 - DNA, 15 bp, Homo sapiens
agaggagaatcacct

SEQ ID NO: 729225 - DNA, 15 bp, Homo sapiens
gaggagaatcacctc

SEQ ID NO: 729226 - DNA, 15 bp, Homo sapiens
aggagaatcacctcc

SEQ ID NO: 729227 - DNA, 15 bp, Homo sapiens
ggagaatcacctcca

SEQ ID NO: 729228 - DNA, 15 bp, Homo sapiens
gagaatcacctccaa

SEQ ID NO: 729229 - DNA, 15 bp, Homo sapiens
agaatcacctccaat

SEQ ID NO: 729230 - DNA, 15 bp, Homo sapiens
gaatcacctccaatt

SEQ ID NO: 729231 - DNA, 15 bp, Homo sapiens
aatcacctccaattt

SEQ ID NO: 729232 - DNA, 15 bp, Homo sapiens
atcacctccaatttt

SEQ ID NO: 729233 - DNA, 15 bp, Homo sapiens
tcacctccaattttg

SEQ ID NO: 729234 - DNA, 15 bp, Homo sapiens
cacctccaattttgt

SEQ ID NO: 729235 - DNA, 15 bp, Homo sapiens
acctccaattttgtc

SEQ ID NO: 729236 - DNA, 15 bp, Homo sapiens
cctccaattttgtca

SEQ ID NO: 729237 - DNA, 15 bp, Homo sapiens
ctccaattttgtcag

SEQ ID NO: 729238 - DNA, 15 bp, Homo sapiens
tccaattttgtcaga

SEQ ID NO: 729239 - DNA, 15 bp, Homo sapiens
ccaattttgtcagac

SEQ ID NO: 729240 - DNA, 15 bp, Homo sapiens
caattttgtcagact

SEQ ID NO: 729241 - DNA, 15 bp, Homo sapiens
aattttgtcagactc

SEQ ID NO: 729242 - DNA, 15 bp, Homo sapiens
attttgtcagactct

SEQ ID NO: 729243 - DNA, 15 bp, Homo sapiens
ttttgtcagactcta

SEQ ID NO: 729244 - DNA, 15 bp, Homo sapiens
tttgtcagactctaa

SEQ ID NO: 729245 - DNA, 15 bp, Homo sapiens
ttgtcagactctaag

SEQ ID NO: 729246 - DNA, 15 bp, Homo sapiens
tgtcagactctaagc

SEQ ID NO: 729247 - DNA, 15 bp, Homo sapiens
gtcagactctaagct

SEQ ID NO: 729248 - DNA, 15 bp, Homo sapiens
tcagactctaagctg

SEQ ID NO: 729249 - DNA, 15 bp, Homo sapiens
cagactctaagctgt

SEQ ID NO: 729250 - DNA, 15 bp, Homo sapiens
agactctaagctgtg

SEQ ID NO: 729251 - DNA, 15 bp, Homo sapiens
gactctaagctgtgt

SEQ ID NO: 729252 - DNA, 15 bp, Homo sapiens
actctaagctgtgtg

SEQ ID NO: 729253 - DNA, 15 bp, Homo sapiens
ctctaagctgtgtgg

SEQ ID NO: 729254 - DNA, 15 bp, Homo sapiens
tctaagctgtgtggc

SEQ ID NO: 729255 - DNA, 15 bp, Homo sapiens
ctaagctgtgtggcc

SEQ ID NO: 729256 - DNA, 15 bp, Homo sapiens
taagctgtgtggcct

SEQ ID NO: 729257 - DNA, 15 bp, Homo sapiens
aagctgtgtggcctt

SEQ ID NO: 729258 - DNA, 15 bp, Homo sapiens
agctgtgtggcctta

SEQ ID NO: 729259 - DNA, 15 bp, Homo sapiens
gctgtgtggccttag

SEQ ID NO: 729260 - DNA, 15 bp, Homo sapiens
ctgtgtggccttagc

SEQ ID NO: 729261 - DNA, 15 bp, Homo sapiens
tgtgtggccttagcc

SEQ ID NO: 729262 - DNA, 15 bp, Homo sapiens
gtgtggccttagcca

SEQ ID NO: 729263 - DNA, 15 bp, Homo sapiens
tgtggccttagccac

SEQ ID NO: 729264 - DNA, 15 bp, Homo sapiens
gtggccttagccaca

SEQ ID NO: 729265 - DNA, 15 bp, Homo sapiens
tggccttagccacat

SEQ ID NO: 729266 - DNA, 15 bp, Homo sapiens
ggccttagccacatc

SEQ ID NO: 729267 - DNA, 15 bp, Homo sapiens
gccttagccacatct

SEQ ID NO: 729268 - DNA, 15 bp, Homo sapiens
ccttagccacatctc

SEQ ID NO: 729269 - DNA, 15 bp, Homo sapiens
cttagccacatctcc

SEQ ID NO: 729270 - DNA, 15 bp, Homo sapiens
ttagccacatctcct

SEQ ID NO: 729271 - DNA, 15 bp, Homo sapiens
tagccacatctcctt

SEQ ID NO: 729272 - DNA, 15 bp, Homo sapiens
agccacatctccttc

SEQ ID NO: 729273 - DNA, 15 bp, Homo sapiens
gccacatctccttct

SEQ ID NO: 729274 - DNA, 15 bp, Homo sapiens
ccacatctccttctc

SEQ ID NO: 729275 - DNA, 15 bp, Homo sapiens
cacatctccttctct

SEQ ID NO: 729276 - DNA, 15 bp, Homo sapiens
acatctccttctctc

SEQ ID NO: 729277 - DNA, 15 bp, Homo sapiens
catctccttctctct

SEQ ID NO: 729278 - DNA, 15 bp, Homo sapiens
atctccttctctctg

SEQ ID NO: 729279 - DNA, 15 bp, Homo sapiens
tctccttctctctgg

SEQ ID NO: 729280 - DNA, 15 bp, Homo sapiens
ctccttctctctggg

SEQ ID NO: 729281 - DNA, 15 bp, Homo sapiens
tccttctctctgggc

SEQ ID NO: 729282 - DNA, 15 bp, Homo sapiens
ccttctctctgggcc

SEQ ID NO: 729283 - DNA, 15 bp, Homo sapiens
cttctctctgggcct

SEQ ID NO: 729284 - DNA, 15 bp, Homo sapiens
ttctctctgggcctc

SEQ ID NO: 729285 - DNA, 15 bp, Homo sapiens
tctctctgggcctca

SEQ ID NO: 729286 - DNA, 15 bp, Homo sapiens
ctctctgggcctcag

SEQ ID NO: 729287 - DNA, 15 bp, Homo sapiens
tctctgggcctcagt

SEQ ID NO: 729288 - DNA, 15 bp, Homo sapiens
ctctgggcctcagtt

SEQ ID NO: 729289 - DNA, 15 bp, Homo sapiens
tctgggcctcagttt

SEQ ID NO: 729290 - DNA, 15 bp, Homo sapiens
ctgggcctcagtttc

SEQ ID NO: 729291 - DNA, 15 bp, Homo sapiens
tgggcctcagtttcc

SEQ ID NO: 729292 - DNA, 15 bp, Homo sapiens
gggcctcagtttcct

SEQ ID NO: 729293 - DNA, 15 bp, Homo sapiens
ggcctcagtttcctc

SEQ ID NO: 729294 - DNA, 15 bp, Homo sapiens
gcctcagtttcctcc

SEQ ID NO: 729295 - DNA, 15 bp, Homo sapiens
cctcagtttcctcca

SEQ ID NO: 729296 - DNA, 15 bp, Homo sapiens
ctcagtttcctccac

SEQ ID NO: 729297 - DNA, 15 bp, Homo sapiens
tcagtttcctccacg

SEQ ID NO: 729298 - DNA, 15 bp, Homo sapiens
cagtttcctccacga

SEQ ID NO: 729299 - DNA, 15 bp, Homo sapiens
agtttcctccacgag

SEQ ID NO: 729300 - DNA, 15 bp, Homo sapiens
gtttcctccacgagt

SEQ ID NO: 729301 - DNA, 15 bp, Homo sapiens
tttcctccacgagtg

SEQ ID NO: 729302 - DNA, 15 bp, Homo sapiens
ttcctccacgagtgt

SEQ ID NO: 729303 - DNA, 15 bp, Homo sapiens
tcctccacgagtgta

SEQ ID NO: 729304 - DNA, 15 bp, Homo sapiens
cctccacgagtgtag

SEQ ID NO: 729305 - DNA, 15 bp, Homo sapiens
ctccacgagtgtaga

SEQ ID NO: 729306 - DNA, 15 bp, Homo sapiens
tccacgagtgtagag

SEQ ID NO: 729307 - DNA, 15 bp, Homo sapiens
ccacgagtgtagagt

SEQ ID NO: 729308 - DNA, 15 bp, Homo sapiens
cacgagtgtagagtc

SEQ ID NO: 729309 - DNA, 15 bp, Homo sapiens
acgagtgtagagtct

SEQ ID NO: 729310 - DNA, 15 bp, Homo sapiens
cgagtgtagagtctg

SEQ ID NO: 729311 - DNA, 15 bp, Homo sapiens
gagtgtagagtctgg

SEQ ID NO: 729312 - DNA, 15 bp, Homo sapiens
agtgtagagtctggg

SEQ ID NO: 729313 - DNA, 15 bp, Homo sapiens
gtgtagagtctgggt

SEQ ID NO: 729314 - DNA, 15 bp, Homo sapiens
tgtagagtctgggtc

SEQ ID NO: 729315 - DNA, 15 bp, Homo sapiens
gtagagtctgggtcc

SEQ ID NO: 729316 - DNA, 15 bp, Homo sapiens
tagagtctgggtcca

SEQ ID NO: 729317 - DNA, 15 bp, Homo sapiens
agagtctgggtccag

SEQ ID NO: 729318 - DNA, 15 bp, Homo sapiens
gagtctgggtccagc

SEQ ID NO: 729319 - DNA, 15 bp, Homo sapiens
agtctgggtccagca

SEQ ID NO: 729320 - DNA, 15 bp, Homo sapiens
gtctgggtccagcac

SEQ ID NO: 729321 - DNA, 15 bp, Homo sapiens
tctgggtccagcact

SEQ ID NO: 729322 - DNA, 15 bp, Homo sapiens
ctgggtccagcacta

SEQ ID NO: 729323 - DNA, 15 bp, Homo sapiens
tgggtccagcactac

SEQ ID NO: 729324 - DNA, 15 bp, Homo sapiens
gggtccagcactacc

SEQ ID NO: 729325 - DNA, 15 bp, Homo sapiens
ggtccagcactaccc

SEQ ID NO: 729326 - DNA, 15 bp, Homo sapiens
gtccagcactaccca

SEQ ID NO: 729327 - DNA, 15 bp, Homo sapiens
tccagcactacccac

SEQ ID NO: 729328 - DNA, 15 bp, Homo sapiens
ccagcactacccacc

SEQ ID NO: 729329 - DNA, 15 bp, Homo sapiens
cagcactacccaccg

SEQ ID NO: 729330 - DNA, 15 bp, Homo sapiens
agcactacccaccga

SEQ ID NO: 729331 - DNA, 15 bp, Homo sapiens
gcactacccaccgag

SEQ ID NO: 729332 - DNA, 15 bp, Homo sapiens
cactacccaccgagt

SEQ ID NO: 729333 - DNA, 15 bp, Homo sapiens
actacccaccgagtc

SEQ ID NO: 729334 - DNA, 15 bp, Homo sapiens
ctacccaccgagtct

SEQ ID NO: 729335 - DNA, 15 bp, Homo sapiens
tacccaccgagtctc

SEQ ID NO: 729336 - DNA, 15 bp, Homo sapiens
acccaccgagtctcc

SEQ ID NO: 729337 - DNA, 15 bp, Homo sapiens
cccaccgagtctcca

SEQ ID NO: 729338 - DNA, 15 bp, Homo sapiens
ccaccgagtctccag

SEQ ID NO: 729339 - DNA, 15 bp, Homo sapiens
caccgagtctccagg

SEQ ID NO: 729340 - DNA, 15 bp, Homo sapiens
accgagtctccaggc

SEQ ID NO: 729341 - DNA, 15 bp, Homo sapiens
ccgagtctccaggcc

SEQ ID NO: 729342 - DNA, 15 bp, Homo sapiens
cgagtctccaggcca

SEQ ID NO: 729343 - DNA, 15 bp, Homo sapiens
gagtctccaggccat

SEQ ID NO: 729344 - DNA, 15 bp, Homo sapiens
agtctccaggccatc

SEQ ID NO: 729345 - DNA, 15 bp, Homo sapiens
gtctccaggccatcg

SEQ ID NO: 729346 - DNA, 15 bp, Homo sapiens
tctccaggccatcga

SEQ ID NO: 729347 - DNA, 15 bp, Homo sapiens
ctccaggccatcgat

SEQ ID NO: 729348 - DNA, 15 bp, Homo sapiens
tccaggccatcgata

SEQ ID NO: 729349 - DNA, 15 bp, Homo sapiens
ccaggccatcgatat

SEQ ID NO: 729350 - DNA, 15 bp, Homo sapiens
caggccatcgatata

SEQ ID NO: 729351 - DNA, 15 bp, Homo sapiens
aggccatcgatatat

SEQ ID NO: 729352 - DNA, 15 bp, Homo sapiens
ggccatcgatatatt

SEQ ID NO: 729353 - DNA, 15 bp, Homo sapiens
gccatcgatatattc

SEQ ID NO: 729354 - DNA, 15 bp, Homo sapiens
ccatcgatatattcc

SEQ ID NO: 729355 - DNA, 15 bp, Homo sapiens
catcgatatattcct

SEQ ID NO: 729356 - DNA, 15 bp, Homo sapiens
atcgatatattcctt

SEQ ID NO: 729357 - DNA, 15 bp, Homo sapiens
tcgatatattccttc

SEQ ID NO: 729358 - DNA, 15 bp, Homo sapiens
cgatatattccttct

SEQ ID NO: 729359 - DNA, 15 bp, Homo sapiens
gatatattccttctt

SEQ ID NO: 729360 - DNA, 15 bp, Homo sapiens
atatattccttcttc

SEQ ID NO: 729361 - DNA, 15 bp, Homo sapiens
tatattccttcttct

SEQ ID NO: 729362 - DNA, 15 bp, Homo sapiens
atattccttcttctt

SEQ ID NO: 729363 - DNA, 15 bp, Homo sapiens
tattccttcttcttc

SEQ ID NO: 729364 - DNA, 15 bp, Homo sapiens
attccttcttcttct

SEQ ID NO: 729365 - DNA, 15 bp, Homo sapiens
ttccttcttcttctt

SEQ ID NO: 729366 - DNA, 15 bp, Homo sapiens
tccttcttcttcttc

SEQ ID NO: 729367 - DNA, 15 bp, Homo sapiens
ccttcttcttcttcc

SEQ ID NO: 729368 - DNA, 15 bp, Homo sapiens
cttcttcttcttcct

SEQ ID NO: 729369 - DNA, 15 bp, Homo sapiens
ttcttcttcttcctg

SEQ ID NO: 729370 - DNA, 15 bp, Homo sapiens
tcttcttcttcctgc

SEQ ID NO: 729371 - DNA, 15 bp, Homo sapiens
cttcttcttcctgct

SEQ ID NO: 729372 - DNA, 15 bp, Homo sapiens
ttcttcttcctgctt

SEQ ID NO: 729373 - DNA, 15 bp, Homo sapiens
tcttcttcctgcttt

SEQ ID NO: 729374 - DNA, 15 bp, Homo sapiens
cttcttcctgctttc

SEQ ID NO: 729375 - DNA, 15 bp, Homo sapiens
ttcttcctgctttct

SEQ ID NO: 729376 - DNA, 15 bp, Homo sapiens
tcttcctgctttctt

SEQ ID NO: 729377 - DNA, 15 bp, Homo sapiens
cttcctgctttcttg

SEQ ID NO: 729378 - DNA, 15 bp, Homo sapiens
ttcctgctttcttgc

SEQ ID NO: 729379 - DNA, 15 bp, Homo sapiens
tcctgctttcttgcg

SEQ ID NO: 729380 - DNA, 15 bp, Homo sapiens
cctgctttcttgcgc

SEQ ID NO: 729381 - DNA, 15 bp, Homo sapiens
ctgctttcttgcgcc

SEQ ID NO: 729382 - DNA, 15 bp, Homo sapiens
tgctttcttgcgccg

SEQ ID NO: 729383 - DNA, 15 bp, Homo sapiens
gctttcttgcgccga

SEQ ID NO: 729384 - DNA, 15 bp, Homo sapiens
ctttcttgcgccgac

SEQ ID NO: 729385 - DNA, 15 bp, Homo sapiens
tttcttgcgccgact

SEQ ID NO: 729386 - DNA, 15 bp, Homo sapiens
ttcttgcgccgactg

SEQ ID NO: 729387 - DNA, 15 bp, Homo sapiens
tcttgcgccgactgc

SEQ ID NO: 729388 - DNA, 15 bp, Homo sapiens
cttgcgccgactgct

SEQ ID NO: 729389 - DNA, 15 bp, Homo sapiens
ttgcgccgactgctt

SEQ ID NO: 729390 - DNA, 15 bp, Homo sapiens
tgcgccgactgcttg

SEQ ID NO: 729391 - DNA, 15 bp, Homo sapiens
gcgccgactgcttgt

SEQ ID NO: 729392 - DNA, 15 bp, Homo sapiens
cgccgactgcttgtt

SEQ ID NO: 729393 - DNA, 15 bp, Homo sapiens
gccgactgcttgttc

SEQ ID NO: 729394 - DNA, 15 bp, Homo sapiens
ccgactgcttgttcc

SEQ ID NO: 729395 - DNA, 15 bp, Homo sapiens
cgactgcttgttccg

SEQ ID NO: 729396 - DNA, 15 bp, Homo sapiens
gactgcttgttccgg

SEQ ID NO: 729397 - DNA, 15 bp, Homo sapiens
actgcttgttccgga

SEQ ID NO: 729398 - DNA, 15 bp, Homo sapiens
ctgcttgttccggat

SEQ ID NO: 729399 - DNA, 15 bp, Homo sapiens
tgcttgttccggatt

SEQ ID NO: 729400 - DNA, 15 bp, Homo sapiens
gcttgttccggattt

SEQ ID NO: 729401 - DNA, 15 bp, Homo sapiens
cttgttccggatttt

SEQ ID NO: 729402 - DNA, 15 bp, Homo sapiens
ttgttccggattttc

SEQ ID NO: 729403 - DNA, 15 bp, Homo sapiens
tgttccggattttcc

SEQ ID NO: 729404 - DNA, 15 bp, Homo sapiens
gttccggattttccg

SEQ ID NO: 729405 - DNA, 15 bp, Homo sapiens
ttccggattttccgg

SEQ ID NO: 729406 - DNA, 15 bp, Homo sapiens
tccggattttccggc

SEQ ID NO: 729407 - DNA, 15 bp, Homo sapiens
ccggattttccggcg

SEQ ID NO: 729408 - DNA, 15 bp, Homo sapiens
cggattttccggcgg

SEQ ID NO: 729409 - DNA, 15 bp, Homo sapiens
ggattttccggcgga

SEQ ID NO: 729410 - DNA, 15 bp, Homo sapiens
gattttccggcggat

SEQ ID NO: 729411 - DNA, 15 bp, Homo sapiens
attttccggcggatt

SEQ ID NO: 729412 - DNA, 15 bp, Homo sapiens
ttttccggcggattt

SEQ ID NO: 729413 - DNA, 15 bp, Homo sapiens
tttccggcggatttt

SEQ ID NO: 729414 - DNA, 15 bp, Homo sapiens
ttccggcggattttt

SEQ ID NO: 729415 - DNA, 15 bp, Homo sapiens
tccggcggatttttt

SEQ ID NO: 729416 - DNA, 15 bp, Homo sapiens
ccggcggattttttt

SEQ ID NO: 729417 - DNA, 15 bp, Homo sapiens
cggcggatttttttc

SEQ ID NO: 729418 - DNA, 15 bp, Homo sapiens
ggcggatttttttca

SEQ ID NO: 729419 - DNA, 15 bp, Homo sapiens
gcggatttttttcag

SEQ ID NO: 729420 - DNA, 15 bp, Homo sapiens
cggatttttttcagc

SEQ ID NO: 729421 - DNA, 15 bp, Homo sapiens
ggatttttttcagca

SEQ ID NO: 729422 - DNA, 15 bp, Homo sapiens
gatttttttcagcac

SEQ ID NO: 729423 - DNA, 15 bp, Homo sapiens
atttttttcagcact

SEQ ID NO: 729424 - DNA, 15 bp, Homo sapiens
tttttttcagcactc

SEQ ID NO: 729425 - DNA, 15 bp, Homo sapiens
ttttttcagcactcg

SEQ ID NO: 729426 - DNA, 15 bp, Homo sapiens
tttttcagcactcgc

SEQ ID NO: 729427 - DNA, 15 bp, Homo sapiens
ttttcagcactcgct

SEQ ID NO: 729428 - DNA, 15 bp, Homo sapiens
tttcagcactcgctc

SEQ ID NO: 729429 - DNA, 15 bp, Homo sapiens
ttcagcactcgctcc

SEQ ID NO: 729430 - DNA, 15 bp, Homo sapiens
tcagcactcgctcct

SEQ ID NO: 729431 - DNA, 15 bp, Homo sapiens
cagcactcgctcctc

SEQ ID NO: 729432 - DNA, 15 bp, Homo sapiens
agcactcgctcctcg

SEQ ID NO: 729433 - DNA, 15 bp, Homo sapiens
gcactcgctcctcgt

SEQ ID NO: 729434 - DNA, 15 bp, Homo sapiens
cactcgctcctcgta

SEQ ID NO: 729435 - DNA, 15 bp, Homo sapiens
actcgctcctcgtac

SEQ ID NO: 729436 - DNA, 15 bp, Homo sapiens
ctcgctcctcgtact

SEQ ID NO: 729437 - DNA, 15 bp, Homo sapiens
tcgctcctcgtactg

SEQ ID NO: 729438 - DNA, 15 bp, Homo sapiens
cgctcctcgtactgc

SEQ ID NO: 729439 - DNA, 15 bp, Homo sapiens
gctcctcgtactgcc

SEQ ID NO: 729440 - DNA, 15 bp, Homo sapiens
ctcctcgtactgcca

SEQ ID NO: 729441 - DNA, 15 bp, Homo sapiens
tcctcgtactgccaa

SEQ ID NO: 729442 - DNA, 15 bp, Homo sapiens
cctcgtactgccaag

SEQ ID NO: 729443 - DNA, 15 bp, Homo sapiens
ctcgtactgccaagt

SEQ ID NO: 729444 - DNA, 15 bp, Homo sapiens
tcgtactgccaagtg

SEQ ID NO: 729445 - DNA, 15 bp, Homo sapiens
cgtactgccaagtga

SEQ ID NO: 729446 - DNA, 15 bp, Homo sapiens
gtactgccaagtgaa

SEQ ID NO: 729447 - DNA, 15 bp, Homo sapiens
tactgccaagtgaaa

SEQ ID NO: 729448 - DNA, 15 bp, Homo sapiens
actgccaagtgaaat

SEQ ID NO: 729449 - DNA, 15 bp, Homo sapiens
ctgccaagtgaaatg

SEQ ID NO: 729450 - DNA, 15 bp, Homo sapiens
tgccaagtgaaatgg

SEQ ID NO: 729451 - DNA, 15 bp, Homo sapiens
gccaagtgaaatggg

SEQ ID NO: 729452 - DNA, 15 bp, Homo sapiens
ccaagtgaaatgggg

SEQ ID NO: 729453 - DNA, 15 bp, Homo sapiens
caagtgaaatgggga

SEQ ID NO: 729454 - DNA, 15 bp, Homo sapiens
aagtgaaatggggag

SEQ ID NO: 729455 - DNA, 15 bp, Homo sapiens
agtgaaatggggagg

SEQ ID NO: 729456 - DNA, 15 bp, Homo sapiens
gtgaaatggggagga

SEQ ID NO: 729457 - DNA, 15 bp, Homo sapiens
tgaaatggggaggag

SEQ ID NO: 729458 - DNA, 15 bp, Homo sapiens
gaaatggggaggagg

SEQ ID NO: 729459 - DNA, 15 bp, Homo sapiens
aaatggggaggaggg

SEQ ID NO: 729460 - DNA, 15 bp, Homo sapiens
aatggggaggagggt

SEQ ID NO: 729461 - DNA, 15 bp, Homo sapiens
atggggaggagggtt

SEQ ID NO: 729462 - DNA, 15 bp, Homo sapiens
tggggaggagggttt

SEQ ID NO: 729463 - DNA, 15 bp, Homo sapiens
ggggaggagggtttc

SEQ ID NO: 729464 - DNA, 15 bp, Homo sapiens
gggaggagggtttca

SEQ ID NO: 729465 - DNA, 15 bp, Homo sapiens
ggaggagggtttcag

SEQ ID NO: 729466 - DNA, 15 bp, Homo sapiens
gaggagggtttcagg

SEQ ID NO: 729467 - DNA, 15 bp, Homo sapiens
aggagggtttcaggc

SEQ ID NO: 729468 - DNA, 15 bp, Homo sapiens
ggagggtttcaggcc

SEQ ID NO: 729469 - DNA, 15 bp, Homo sapiens
gagggtttcaggcca

SEQ ID NO: 729470 - DNA, 15 bp, Homo sapiens
agggtttcaggccag

SEQ ID NO: 729471 - DNA, 15 bp, Homo sapiens
gggtttcaggccaga

SEQ ID NO: 729472 - DNA, 15 bp, Homo sapiens
ggtttcaggccagaa

SEQ ID NO: 729473 - DNA, 15 bp, Homo sapiens
gtttcaggccagaaa

SEQ ID NO: 729474 - DNA, 15 bp, Homo sapiens
tttcaggccagaaag

SEQ ID NO: 729475 - DNA, 15 bp, Homo sapiens
ttcaggccagaaagt

SEQ ID NO: 729476 - DNA, 15 bp, Homo sapiens
tcaggccagaaagtc

SEQ ID NO: 729477 - DNA, 15 bp, Homo sapiens
caggccagaaagtcc

SEQ ID NO: 729478 - DNA, 15 bp, Homo sapiens
aggccagaaagtccc

SEQ ID NO: 729479 - DNA, 15 bp, Homo sapiens
ggccagaaagtcccc

SEQ ID NO: 729480 - DNA, 15 bp, Homo sapiens
gccagaaagtcccca

SEQ ID NO: 729481 - DNA, 15 bp, Homo sapiens
ccagaaagtccccac

SEQ ID NO: 729482 - DNA, 15 bp, Homo sapiens
cagaaagtccccact

SEQ ID NO: 729483 - DNA, 15 bp, Homo sapiens
agaaagtccccactt

SEQ ID NO: 729484 - DNA, 15 bp, Homo sapiens
gaaagtccccacttg

SEQ ID NO: 729485 - DNA, 15 bp, Homo sapiens
aaagtccccacttgg

SEQ ID NO: 729486 - DNA, 15 bp, Homo sapiens
aagtccccacttgga

SEQ ID NO: 729487 - DNA, 15 bp, Homo sapiens
agtccccacttggag

SEQ ID NO: 729488 - DNA, 15 bp, Homo sapiens
gtccccacttggagt

SEQ ID NO: 729489 - DNA, 15 bp, Homo sapiens
tccccacttggagtc

SEQ ID NO: 729490 - DNA, 15 bp, Homo sapiens
ccccacttggagtcc

SEQ ID NO: 729491 - DNA, 15 bp, Homo sapiens
cccacttggagtccg

SEQ ID NO: 729492 - DNA, 15 bp, Homo sapiens
ccacttggagtccgg

SEQ ID NO: 729493 - DNA, 15 bp, Homo sapiens
cacttggagtccggg

SEQ ID NO: 729494 - DNA, 15 bp, Homo sapiens
acttggagtccgggg

SEQ ID NO: 729495 - DNA, 15 bp, Homo sapiens
cttggagtccggggg

SEQ ID NO: 729496 - DNA, 15 bp, Homo sapiens
ttggagtccgggggc

SEQ ID NO: 729497 - DNA, 15 bp, Homo sapiens
tggagtccgggggca

SEQ ID NO: 729498 - DNA, 15 bp, Homo sapiens
ggagtccgggggcag

SEQ ID NO: 729499 - DNA, 15 bp, Homo sapiens
gagtccgggggcagt

SEQ ID NO: 729500 - DNA, 15 bp, Homo sapiens
agtccgggggcagta

SEQ ID NO: 729501 - DNA, 15 bp, Homo sapiens
gtccgggggcagtag

SEQ ID NO: 729502 - DNA, 15 bp, Homo sapiens
tccgggggcagtagc

SEQ ID NO: 729503 - DNA, 15 bp, Homo sapiens
ccgggggcagtagct

SEQ ID NO: 729504 - DNA, 15 bp, Homo sapiens
cgggggcagtagctc

SEQ ID NO: 729505 - DNA, 15 bp, Homo sapiens
gggggcagtagctct

SEQ ID NO: 729506 - DNA, 15 bp, Homo sapiens
ggggcagtagctctc

SEQ ID NO: 729507 - DNA, 15 bp, Homo sapiens
gggcagtagctctcg

SEQ ID NO: 729508 - DNA, 15 bp, Homo sapiens
ggcagtagctctcgc

SEQ ID NO: 729509 - DNA, 15 bp, Homo sapiens
gcagtagctctcgcc

SEQ ID NO: 729510 - DNA, 15 bp, Homo sapiens
cagtagctctcgcct

SEQ ID NO: 729511 - DNA, 15 bp, Homo sapiens
agtagctctcgcctg

SEQ ID NO: 729512 - DNA, 15 bp, Homo sapiens
gtagctctcgcctgt

SEQ ID NO: 729513 - DNA, 15 bp, Homo sapiens
tagctctcgcctgta

SEQ ID NO: 729514 - DNA, 15 bp, Homo sapiens
agctctcgcctgtaa

SEQ ID NO: 729515 - DNA, 15 bp, Homo sapiens
ggccgaggcaggcgt

SEQ ID NO: 729516 - DNA, 15 bp, Homo sapiens
gccgaggcaggcgta

SEQ ID NO: 729517 - DNA, 15 bp, Homo sapiens
ccgaggcaggcgtat

SEQ ID NO: 729518 - DNA, 15 bp, Homo sapiens
cgaggcaggcgtatc

SEQ ID NO: 729519 - DNA, 15 bp, Homo sapiens
gaggcaggcgtatca

SEQ ID NO: 729520 - DNA, 15 bp, Homo sapiens
aggcaggcgtatcac

SEQ ID NO: 729521 - DNA, 15 bp, Homo sapiens
ggcaggcgtatcacc

SEQ ID NO: 729522 - DNA, 15 bp, Homo sapiens
gcaggcgtatcacct

SEQ ID NO: 729523 - DNA, 15 bp, Homo sapiens
caggcgtatcacctg

SEQ ID NO: 729524 - DNA, 15 bp, Homo sapiens
aggcgtatcacctga

SEQ ID NO: 729525 - DNA, 15 bp, Homo sapiens
ggcgtatcacctgag

SEQ ID NO: 729526 - DNA, 15 bp, Homo sapiens
gcgtatcacctgagg

SEQ ID NO: 729527 - DNA, 15 bp, Homo sapiens
cgtatcacctgaggt

SEQ ID NO: 729528 - DNA, 15 bp, Homo sapiens
gtatcacctgaggtc

SEQ ID NO: 729529 - DNA, 15 bp, Homo sapiens
tatcacctgaggtca

SEQ ID NO: 729530 - DNA, 15 bp, Homo sapiens
ggagttcgagaccag

SEQ ID NO: 729531 - DNA, 15 bp, Homo sapiens
caacatggtgaaaca

SEQ ID NO: 729532 - DNA, 15 bp, Homo sapiens
aacatggtgaaacac

SEQ ID NO: 729533 - DNA, 15 bp, Homo sapiens
acatggtgaaacacc

SEQ ID NO: 729534 - DNA, 15 bp, Homo sapiens
catggtgaaacaccg

SEQ ID NO: 729535 - DNA, 15 bp, Homo sapiens
atggtgaaacaccgt

SEQ ID NO: 729536 - DNA, 15 bp, Homo sapiens
tggtgaaacaccgtc

SEQ ID NO: 729537 - DNA, 15 bp, Homo sapiens
ggtgaaacaccgtct

SEQ ID NO: 729538 - DNA, 15 bp, Homo sapiens
gtgaaacaccgtctc

SEQ ID NO: 729539 - DNA, 15 bp, Homo sapiens
tgaaacaccgtctct

SEQ ID NO: 729540 - DNA, 15 bp, Homo sapiens
gaaacaccgtctcta

SEQ ID NO: 729541 - DNA, 15 bp, Homo sapiens
aaacaccgtctctac

SEQ ID NO: 729542 - DNA, 15 bp, Homo sapiens
aacaccgtctctact

SEQ ID NO: 729543 - DNA, 15 bp, Homo sapiens
acaccgtctctacta

SEQ ID NO: 729544 - DNA, 15 bp, Homo sapiens
caccgtctctactaa

SEQ ID NO: 729545 - DNA, 15 bp, Homo sapiens
accgtctctactaaa

SEQ ID NO: 729546 - DNA, 15 bp, Homo sapiens
aaaaattagccaggc

SEQ ID NO: 729547 - DNA, 15 bp, Homo sapiens
aaaattagccaggca

SEQ ID NO: 729548 - DNA, 15 bp, Homo sapiens
aaattagccaggcat

SEQ ID NO: 729549 - DNA, 15 bp, Homo sapiens
aattagccaggcatg

SEQ ID NO: 729550 - DNA, 15 bp, Homo sapiens
attagccaggcatgg

SEQ ID NO: 729551 - DNA, 15 bp, Homo sapiens
ttagccaggcatggt

SEQ ID NO: 729552 - DNA, 15 bp, Homo sapiens
tagccaggcatggtg

SEQ ID NO: 729553 - DNA, 15 bp, Homo sapiens
agccaggcatggtgg

SEQ ID NO: 729554 - DNA, 15 bp, Homo sapiens
gccaggcatggtggc

SEQ ID NO: 729555 - DNA, 15 bp, Homo sapiens
ccaggcatggtggcg

SEQ ID NO: 729556 - DNA, 15 bp, Homo sapiens
caggcatggtggcgg

SEQ ID NO: 729557 - DNA, 15 bp, Homo sapiens
aggcatggtggcggg

SEQ ID NO: 729558 - DNA, 15 bp, Homo sapiens
ggcatggtggcgggt

SEQ ID NO: 729559 - DNA, 15 bp, Homo sapiens
gcatggtggcgggtg

SEQ ID NO: 729560 - DNA, 15 bp, Homo sapiens
catggtggcgggtgc

SEQ ID NO: 729561 - DNA, 15 bp, Homo sapiens
atggtggcgggtgcc

SEQ ID NO: 729562 - DNA, 15 bp, Homo sapiens
tggtggcgggtgcct

SEQ ID NO: 729563 - DNA, 15 bp, Homo sapiens
ggtggcgggtgcctg

SEQ ID NO: 729564 - DNA, 15 bp, Homo sapiens
gtggcgggtgcctgt

SEQ ID NO: 729565 - DNA, 15 bp, Homo sapiens
tggcgggtgcctgta

SEQ ID NO: 729566 - DNA, 15 bp, Homo sapiens
ggcgggtgcctgtaa

SEQ ID NO: 729567 - DNA, 15 bp, Homo sapiens
gcgggtgcctgtaat

SEQ ID NO: 729568 - DNA, 15 bp, Homo sapiens
cgggtgcctgtaatc

SEQ ID NO: 729569 - DNA, 15 bp, Homo sapiens
gggtgcctgtaatcc

SEQ ID NO: 729570 - DNA, 15 bp, Homo sapiens
ggtgcctgtaatccc

SEQ ID NO: 729571 - DNA, 15 bp, Homo sapiens
tgaggcaggagaatg

SEQ ID NO: 729572 - DNA, 15 bp, Homo sapiens
gaggcaggagaatgg

SEQ ID NO: 729573 - DNA, 15 bp, Homo sapiens
aggcaggagaatggc

SEQ ID NO: 729574 - DNA, 15 bp, Homo sapiens
ggcaggagaatggca

SEQ ID NO: 729575 - DNA, 15 bp, Homo sapiens
gcaggagaatggcat

SEQ ID NO: 729576 - DNA, 15 bp, Homo sapiens
caggagaatggcatg

SEQ ID NO: 729577 - DNA, 15 bp, Homo sapiens
aggagaatggcatga

SEQ ID NO: 729578 - DNA, 15 bp, Homo sapiens
ggagaatggcatgaa

SEQ ID NO: 729579 - DNA, 15 bp, Homo sapiens
gagaatggcatgaac

SEQ ID NO: 729580 - DNA, 15 bp, Homo sapiens
agaatggcatgaacc

SEQ ID NO: 729581 - DNA, 15 bp, Homo sapiens
gaatggcatgaaccc

SEQ ID NO: 729582 - DNA, 15 bp, Homo sapiens
aatggcatgaacccg

SEQ ID NO: 729583 - DNA, 15 bp, Homo sapiens
atggcatgaacccgg

SEQ ID NO: 729584 - DNA, 15 bp, Homo sapiens
tggcatgaacccggg

SEQ ID NO: 729585 - DNA, 15 bp, Homo sapiens
ggcatgaacccggga

SEQ ID NO: 729586 - DNA, 15 bp, Homo sapiens
gcatgaacccgggag

SEQ ID NO: 729587 - DNA, 15 bp, Homo sapiens
catgaacccgggagg

SEQ ID NO: 729588 - DNA, 15 bp, Homo sapiens
atgaacccgggaggc

SEQ ID NO: 729589 - DNA, 15 bp, Homo sapiens
gtgagccaagatcgt

SEQ ID NO: 729590 - DNA, 15 bp, Homo sapiens
tgagccaagatcgtg

SEQ ID NO: 729591 - DNA, 15 bp, Homo sapiens
gagccaagatcgtgc

SEQ ID NO: 729592 - DNA, 15 bp, Homo sapiens
agccaagatcgtgcc

SEQ ID NO: 729593 - DNA, 15 bp, Homo sapiens
gccaagatcgtgcca

SEQ ID NO: 729594 - DNA, 15 bp, Homo sapiens
ccaagatcgtgccat

SEQ ID NO: 729595 - DNA, 15 bp, Homo sapiens
caagatcgtgccatt

SEQ ID NO: 729596 - DNA, 15 bp, Homo sapiens
aagatcgtgccattg

SEQ ID NO: 729597 - DNA, 15 bp, Homo sapiens
agatcgtgccattgc

SEQ ID NO: 729598 - DNA, 15 bp, Homo sapiens
gatcgtgccattgca

SEQ ID NO: 729599 - DNA, 15 bp, Homo sapiens
atcgtgccattgcaa

SEQ ID NO: 729600 - DNA, 15 bp, Homo sapiens
tcgtgccattgcaat

SEQ ID NO: 729601 - DNA, 15 bp, Homo sapiens
cgtgccattgcaatc

SEQ ID NO: 729602 - DNA, 15 bp, Homo sapiens
gtgccattgcaatcc

SEQ ID NO: 729603 - DNA, 15 bp, Homo sapiens
tgccattgcaatcca

SEQ ID NO: 729604 - DNA, 15 bp, Homo sapiens
gccattgcaatccag

SEQ ID NO: 729605 - DNA, 15 bp, Homo sapiens
ccattgcaatccagc

SEQ ID NO: 729606 - DNA, 15 bp, Homo sapiens
cattgcaatccagcc

SEQ ID NO: 729607 - DNA, 15 bp, Homo sapiens
attgcaatccagcct

SEQ ID NO: 729608 - DNA, 15 bp, Homo sapiens
ttgcaatccagcctg

SEQ ID NO: 729609 - DNA, 15 bp, Homo sapiens
tgcaatccagcctgg

SEQ ID NO: 729610 - DNA, 15 bp, Homo sapiens
gcaatccagcctggg

SEQ ID NO: 729611 - DNA, 15 bp, Homo sapiens
caatccagcctgggc

SEQ ID NO: 729612 - DNA, 15 bp, Homo sapiens
aatccagcctgggca

SEQ ID NO: 729613 - DNA, 15 bp, Homo sapiens
atccagcctgggcaa

SEQ ID NO: 729614 - DNA, 15 bp, Homo sapiens
tgggcaacaagagcg

SEQ ID NO: 729615 - DNA, 15 bp, Homo sapiens
gggcaacaagagcga

SEQ ID NO: 729616 - DNA, 15 bp, Homo sapiens
ggcaacaagagcgaa

SEQ ID NO: 729617 - DNA, 15 bp, Homo sapiens
gcaacaagagcgaaa

SEQ ID NO: 729618 - DNA, 15 bp, Homo sapiens
caacaagagcgaaac

SEQ ID NO: 729619 - DNA, 15 bp, Homo sapiens
aacaagagcgaaact

SEQ ID NO: 729620 - DNA, 15 bp, Homo sapiens
acaagagcgaaactc

SEQ ID NO: 729621 - DNA, 15 bp, Homo sapiens
caagagcgaaactcc

SEQ ID NO: 729622 - DNA, 15 bp, Homo sapiens
aagagcgaaactcca

SEQ ID NO: 729623 - DNA, 15 bp, Homo sapiens
agagcgaaactccat

SEQ ID NO: 729624 - DNA, 15 bp, Homo sapiens
gagcgaaactccatc

SEQ ID NO: 729625 - DNA, 15 bp, Homo sapiens
agcgaaactccatct

SEQ ID NO: 729626 - DNA, 15 bp, Homo sapiens
gcgaaactccatctc

SEQ ID NO: 729627 - DNA, 15 bp, Homo sapiens
cgaaactccatctca

SEQ ID NO: 729628 - DNA, 15 bp, Homo sapiens
aaactccatctcaat

SEQ ID NO: 729629 - DNA, 15 bp, Homo sapiens
aactccatctcaata

SEQ ID NO: 729630 - DNA, 15 bp, Homo sapiens
actccatctcaataa

SEQ ID NO: 729631 - DNA, 15 bp, Homo sapiens
ctccatctcaataaa

SEQ ID NO: 729632 - DNA, 15 bp, Homo sapiens
tccatctcaataaat

SEQ ID NO: 729633 - DNA, 15 bp, Homo sapiens
ccatctcaataaata

SEQ ID NO: 729634 - DNA, 15 bp, Homo sapiens
catctcaataaataa

SEQ ID NO: 729635 - DNA, 15 bp, Homo sapiens
atctcaataaataaa

SEQ ID NO: 729636 - DNA, 15 bp, Homo sapiens
tctcaataaataaat

SEQ ID NO: 729637 - DNA, 15 bp, Homo sapiens
ctcaataaataaata

SEQ ID NO: 729638 - DNA, 15 bp, Homo sapiens
tcaataaataaatag

SEQ ID NO: 729639 - DNA, 15 bp, Homo sapiens
caataaataaataga

SEQ ID NO: 729640 - DNA, 15 bp, Homo sapiens
aataaataaatagat

SEQ ID NO: 729641 - DNA, 15 bp, Homo sapiens
ataaataaatagata

SEQ ID NO: 729642 - DNA, 15 bp, Homo sapiens
taaataaatagataa

SEQ ID NO: 729643 - DNA, 15 bp, Homo sapiens
aaataaatagataaa

SEQ ID NO: 729644 - DNA, 15 bp, Homo sapiens
aataaatagataaat

SEQ ID NO: 729645 - DNA, 15 bp, Homo sapiens
ataaatagataaata

SEQ ID NO: 729646 - DNA, 15 bp, Homo sapiens
taaatagataaataa

SEQ ID NO: 729647 - DNA, 15 bp, Homo sapiens
aaatagataaataaa

SEQ ID NO: 729648 - DNA, 15 bp, Homo sapiens
aatagataaataaat

SEQ ID NO: 729649 - DNA, 15 bp, Homo sapiens
atagataaataaata

SEQ ID NO: 729650 - DNA, 15 bp, Homo sapiens
tagataaataaataa

SEQ ID NO: 729651 - DNA, 15 bp, Homo sapiens
agataaataaataaa

SEQ ID NO: 729652 - DNA, 15 bp, Homo sapiens
gataaataaataaat

SEQ ID NO: 729653 - DNA, 15 bp, Homo sapiens
aataaataaaataat

SEQ ID NO: 729654 - DNA, 15 bp, Homo sapiens
ataaataaaataatt

SEQ ID NO: 729655 - DNA, 15 bp, Homo sapiens
taaataaaataatta

SEQ ID NO: 729656 - DNA, 15 bp, Homo sapiens
aaataaaataattaa

SEQ ID NO: 729657 - DNA, 15 bp, Homo sapiens
aataaaataattaaa

SEQ ID NO: 729658 - DNA, 15 bp, Homo sapiens
ataaaataattaaaa

SEQ ID NO: 729659 - DNA, 15 bp, Homo sapiens
taaaataattaaaat

SEQ ID NO: 729660 - DNA, 15 bp, Homo sapiens
aaaataattaaaatt

SEQ ID NO: 729661 - DNA, 15 bp, Homo sapiens
aaataattaaaatta

SEQ ID NO: 729662 - DNA, 15 bp, Homo sapiens
aataattaaaattaa

SEQ ID NO: 729663 - DNA, 15 bp, Homo sapiens
ataattaaaattaaa

SEQ ID NO: 729664 - DNA, 15 bp, Homo sapiens
taattaaaattaaaa

SEQ ID NO: 729665 - DNA, 15 bp, Homo sapiens
aattaaaattaaaaa

SEQ ID NO: 729666 - DNA, 15 bp, Homo sapiens
attaaaattaaaaaa

SEQ ID NO: 729667 - DNA, 15 bp, Homo sapiens
ttaaaattaaaaaat

SEQ ID NO: 729668 - DNA, 15 bp, Homo sapiens
taaaattaaaaaatt

SEQ ID NO: 729669 - DNA, 15 bp, Homo sapiens
aaaattaaaaaatta

SEQ ID NO: 729670 - DNA, 15 bp, Homo sapiens
aaattaaaaaattaa

SEQ ID NO: 729671 - DNA, 15 bp, Homo sapiens
aattaaaaaattaaa

SEQ ID NO: 729672 - DNA, 15 bp, Homo sapiens
attaaaaaattaaag

SEQ ID NO: 729673 - DNA, 15 bp, Homo sapiens
ttaaaaaattaaagt

SEQ ID NO: 729674 - DNA, 15 bp, Homo sapiens
taaaaaattaaagtc

SEQ ID NO: 729675 - DNA, 15 bp, Homo sapiens
aaaaaattaaagtct

SEQ ID NO: 729676 - DNA, 15 bp, Homo sapiens
aaaaattaaagtctt

SEQ ID NO: 729677 - DNA, 15 bp, Homo sapiens
aaaattaaagtcttc

SEQ ID NO: 729678 - DNA, 15 bp, Homo sapiens
aaattaaagtcttca

SEQ ID NO: 729679 - DNA, 15 bp, Homo sapiens
aattaaagtcttcac

SEQ ID NO: 729680 - DNA, 15 bp, Homo sapiens
attaaagtcttcact

SEQ ID NO: 729681 - DNA, 15 bp, Homo sapiens
ttaaagtcttcactt

SEQ ID NO: 729682 - DNA, 15 bp, Homo sapiens
taaagtcttcacttt

SEQ ID NO: 729683 - DNA, 15 bp, Homo sapiens
aaagtcttcactttg

SEQ ID NO: 729684 - DNA, 15 bp, Homo sapiens
aagtcttcactttgg

SEQ ID NO: 729685 - DNA, 15 bp, Homo sapiens
agtcttcactttggg

SEQ ID NO: 729686 - DNA, 15 bp, Homo sapiens
gtcttcactttgggg

SEQ ID NO: 729687 - DNA, 15 bp, Homo sapiens
tcttcactttgggga

SEQ ID NO: 729688 - DNA, 15 bp, Homo sapiens
cttcactttggggat

SEQ ID NO: 729689 - DNA, 15 bp, Homo sapiens
ttcactttggggatg

SEQ ID NO: 729690 - DNA, 15 bp, Homo sapiens
tcactttggggatgg

SEQ ID NO: 729691 - DNA, 15 bp, Homo sapiens
cactttggggatggt

SEQ ID NO: 729692 - DNA, 15 bp, Homo sapiens
actttggggatggtg

SEQ ID NO: 729693 - DNA, 15 bp, Homo sapiens
ctttggggatggtgc

SEQ ID NO: 729694 - DNA, 15 bp, Homo sapiens
tttggggatggtgcg

SEQ ID NO: 729695 - DNA, 15 bp, Homo sapiens
ttggggatggtgcga

SEQ ID NO: 729696 - DNA, 15 bp, Homo sapiens
tggggatggtgcgac

SEQ ID NO: 729697 - DNA, 15 bp, Homo sapiens
ggggatggtgcgaca

SEQ ID NO: 729698 - DNA, 15 bp, Homo sapiens
gggatggtgcgacag

SEQ ID NO: 729699 - DNA, 15 bp, Homo sapiens
ggatggtgcgacagt

SEQ ID NO: 729700 - DNA, 15 bp, Homo sapiens
gatggtgcgacagtc

SEQ ID NO: 729701 - DNA, 15 bp, Homo sapiens
atggtgcgacagtcc

SEQ ID NO: 729702 - DNA, 15 bp, Homo sapiens
tggtgcgacagtccc

SEQ ID NO: 729703 - DNA, 15 bp, Homo sapiens
ggtgcgacagtcccc

SEQ ID NO: 729704 - DNA, 15 bp, Homo sapiens
gtgcgacagtcccca

SEQ ID NO: 729705 - DNA, 15 bp, Homo sapiens
tgcgacagtccccac

SEQ ID NO: 729706 - DNA, 15 bp, Homo sapiens
gcgacagtccccact

SEQ ID NO: 729707 - DNA, 15 bp, Homo sapiens
cgacagtccccactg

SEQ ID NO: 729708 - DNA, 15 bp, Homo sapiens
gacagtccccactgt

SEQ ID NO: 729709 - DNA, 15 bp, Homo sapiens
acagtccccactgtc

SEQ ID NO: 729710 - DNA, 15 bp, Homo sapiens
cagtccccactgtcc

SEQ ID NO: 729711 - DNA, 15 bp, Homo sapiens
agtccccactgtcct

SEQ ID NO: 729712 - DNA, 15 bp, Homo sapiens
gtccccactgtcctg

SEQ ID NO: 729713 - DNA, 15 bp, Homo sapiens
tccccactgtcctga

SEQ ID NO: 729714 - DNA, 15 bp, Homo sapiens
ccccactgtcctgac

SEQ ID NO: 729715 - DNA, 15 bp, Homo sapiens
cccactgtcctgacc

SEQ ID NO: 729716 - DNA, 15 bp, Homo sapiens
ccactgtcctgaccc

SEQ ID NO: 729717 - DNA, 15 bp, Homo sapiens
cactgtcctgacccc

SEQ ID NO: 729718 - DNA, 15 bp, Homo sapiens
actgtcctgacccca

SEQ ID NO: 729719 - DNA, 15 bp, Homo sapiens
ctgtcctgaccccac

SEQ ID NO: 729720 - DNA, 15 bp, Homo sapiens
tgtcctgaccccact

SEQ ID NO: 729721 - DNA, 15 bp, Homo sapiens
gtcctgaccccactt

SEQ ID NO: 729722 - DNA, 15 bp, Homo sapiens
tcctgaccccacttc

SEQ ID NO: 729723 - DNA, 15 bp, Homo sapiens
cctgaccccacttca

SEQ ID NO: 729724 - DNA, 15 bp, Homo sapiens
ctgaccccacttcac

SEQ ID NO: 729725 - DNA, 15 bp, Homo sapiens
tgaccccacttcacc

SEQ ID NO: 729726 - DNA, 15 bp, Homo sapiens
gaccccacttcacct

SEQ ID NO: 729727 - DNA, 15 bp, Homo sapiens
accccacttcaccta

SEQ ID NO: 729728 - DNA, 15 bp, Homo sapiens
ccccacttcacctaa

SEQ ID NO: 729729 - DNA, 15 bp, Homo sapiens
cccacttcacctaac

SEQ ID NO: 729730 - DNA, 15 bp, Homo sapiens
ccacttcacctaacc

SEQ ID NO: 729731 - DNA, 15 bp, Homo sapiens
cacttcacctaacct

SEQ ID NO: 729732 - DNA, 15 bp, Homo sapiens
acttcacctaacctc

SEQ ID NO: 729733 - DNA, 15 bp, Homo sapiens
cttcacctaacctcg

SEQ ID NO: 729734 - DNA, 15 bp, Homo sapiens
ttcacctaacctcga

SEQ ID NO: 729735 - DNA, 15 bp, Homo sapiens
tcacctaacctcgac

SEQ ID NO: 729736 - DNA, 15 bp, Homo sapiens
cacctaacctcgacc

SEQ ID NO: 729737 - DNA, 15 bp, Homo sapiens
acctaacctcgaccc

SEQ ID NO: 729738 - DNA, 15 bp, Homo sapiens
cctaacctcgacccc

SEQ ID NO: 729739 - DNA, 15 bp, Homo sapiens
ctaacctcgacccca

SEQ ID NO: 729740 - DNA, 15 bp, Homo sapiens
taacctcgaccccac

SEQ ID NO: 729741 - DNA, 15 bp, Homo sapiens
aacctcgaccccaca

SEQ ID NO: 729742 - DNA, 15 bp, Homo sapiens
acctcgaccccacaa

SEQ ID NO: 729743 - DNA, 15 bp, Homo sapiens
cctcgaccccacaac

SEQ ID NO: 729744 - DNA, 15 bp, Homo sapiens
ctcgaccccacaact

SEQ ID NO: 729745 - DNA, 15 bp, Homo sapiens
tcgaccccacaactt

SEQ ID NO: 729746 - DNA, 15 bp, Homo sapiens
cgaccccacaacttc

SEQ ID NO: 729747 - DNA, 15 bp, Homo sapiens
gaccccacaacttca

SEQ ID NO: 729748 - DNA, 15 bp, Homo sapiens
accccacaacttcac

SEQ ID NO: 729749 - DNA, 15 bp, Homo sapiens
ccccacaacttcacc

SEQ ID NO: 729750 - DNA, 15 bp, Homo sapiens
cccacaacttcaccc

SEQ ID NO: 729751 - DNA, 15 bp, Homo sapiens
ccacaacttcacccc

SEQ ID NO: 729752 - DNA, 15 bp, Homo sapiens
cacaacttcacccca

SEQ ID NO: 729753 - DNA, 15 bp, Homo sapiens
acaacttcaccccat

SEQ ID NO: 729754 - DNA, 15 bp, Homo sapiens
caacttcaccccatc

SEQ ID NO: 729755 - DNA, 15 bp, Homo sapiens
aacttcaccccatcc

SEQ ID NO: 729756 - DNA, 15 bp, Homo sapiens
acttcaccccatcct

SEQ ID NO: 729757 - DNA, 15 bp, Homo sapiens
cttcaccccatcctc

SEQ ID NO: 729758 - DNA, 15 bp, Homo sapiens
ttcaccccatcctct

SEQ ID NO: 729759 - DNA, 15 bp, Homo sapiens
tcaccccatcctctt

SEQ ID NO: 729760 - DNA, 15 bp, Homo sapiens
caccccatcctcttt

SEQ ID NO: 729761 - DNA, 15 bp, Homo sapiens
accccatcctctttg

SEQ ID NO: 729762 - DNA, 15 bp, Homo sapiens
ccccatcctctttgc

SEQ ID NO: 729763 - DNA, 15 bp, Homo sapiens
cccatcctctttgca

SEQ ID NO: 729764 - DNA, 15 bp, Homo sapiens
ccatcctctttgcat

SEQ ID NO: 729765 - DNA, 15 bp, Homo sapiens
catcctctttgcata

SEQ ID NO: 729766 - DNA, 15 bp, Homo sapiens
atcctctttgcatac

SEQ ID NO: 729767 - DNA, 15 bp, Homo sapiens
tcctctttgcataca

SEQ ID NO: 729768 - DNA, 15 bp, Homo sapiens
cctctttgcatacaa

SEQ ID NO: 729769 - DNA, 15 bp, Homo sapiens
ctctttgcatacaag

SEQ ID NO: 729770 - DNA, 15 bp, Homo sapiens
tctttgcatacaaga

SEQ ID NO: 729771 - DNA, 15 bp, Homo sapiens
ctttgcatacaagac

SEQ ID NO: 729772 - DNA, 15 bp, Homo sapiens
tttgcatacaagaca

SEQ ID NO: 729773 - DNA, 15 bp, Homo sapiens
ttgcatacaagacat

SEQ ID NO: 729774 - DNA, 15 bp, Homo sapiens
tgcatacaagacatc

SEQ ID NO: 729775 - DNA, 15 bp, Homo sapiens
gcatacaagacatcc

SEQ ID NO: 729776 - DNA, 15 bp, Homo sapiens
catacaagacatccc

SEQ ID NO: 729777 - DNA, 15 bp, Homo sapiens
atacaagacatcccg

SEQ ID NO: 729778 - DNA, 15 bp, Homo sapiens
tacaagacatcccgg

SEQ ID NO: 729779 - DNA, 15 bp, Homo sapiens
acaagacatcccgga

SEQ ID NO: 729780 - DNA, 15 bp, Homo sapiens
caagacatcccggag

SEQ ID NO: 729781 - DNA, 15 bp, Homo sapiens
aagacatcccggagc

SEQ ID NO: 729782 - DNA, 15 bp, Homo sapiens
agacatcccggagcc

SEQ ID NO: 729783 - DNA, 15 bp, Homo sapiens
gacatcccggagcca

SEQ ID NO: 729784 - DNA, 15 bp, Homo sapiens
acatcccggagccaa

SEQ ID NO: 729785 - DNA, 15 bp, Homo sapiens
catcccggagccaag

SEQ ID NO: 729786 - DNA, 15 bp, Homo sapiens
atcccggagccaagg

SEQ ID NO: 729787 - DNA, 15 bp, Homo sapiens
tcccggagccaagga

SEQ ID NO: 729788 - DNA, 15 bp, Homo sapiens
cccggagccaaggac

SEQ ID NO: 729789 - DNA, 15 bp, Homo sapiens
ccggagccaaggacc

SEQ ID NO: 729790 - DNA, 15 bp, Homo sapiens
cggagccaaggaccc

SEQ ID NO: 729791 - DNA, 15 bp, Homo sapiens
ggagccaaggaccca

SEQ ID NO: 729792 - DNA, 15 bp, Homo sapiens
gagccaaggacccag

SEQ ID NO: 729793 - DNA, 15 bp, Homo sapiens
agccaaggacccaga

SEQ ID NO: 729794 - DNA, 15 bp, Homo sapiens
gccaaggacccagag

SEQ ID NO: 729795 - DNA, 15 bp, Homo sapiens
ccaaggacccagagg

SEQ ID NO: 729796 - DNA, 15 bp, Homo sapiens
caaggacccagaggc

SEQ ID NO: 729797 - DNA, 15 bp, Homo sapiens
aaggacccagaggca

SEQ ID NO: 729798 - DNA, 15 bp, Homo sapiens
aggacccagaggcag

SEQ ID NO: 729799 - DNA, 15 bp, Homo sapiens
ggacccagaggcaga

SEQ ID NO: 729800 - DNA, 15 bp, Homo sapiens
gacccagaggcagat

SEQ ID NO: 729801 - DNA, 15 bp, Homo sapiens
acccagaggcagatt

SEQ ID NO: 729802 - DNA, 15 bp, Homo sapiens
cccagaggcagattc

SEQ ID NO: 729803 - DNA, 15 bp, Homo sapiens
ccagaggcagattcc

SEQ ID NO: 729804 - DNA, 15 bp, Homo sapiens
cagaggcagattcct

SEQ ID NO: 729805 - DNA, 15 bp, Homo sapiens
agaggcagattccta

SEQ ID NO: 729806 - DNA, 15 bp, Homo sapiens
gaggcagattcctaa

SEQ ID NO: 729807 - DNA, 15 bp, Homo sapiens
aggcagattcctaat

SEQ ID NO: 729808 - DNA, 15 bp, Homo sapiens
ggcagattcctaatg

SEQ ID NO: 729809 - DNA, 15 bp, Homo sapiens
gcagattcctaatga

SEQ ID NO: 729810 - DNA, 15 bp, Homo sapiens
cagattcctaatgac

SEQ ID NO: 729811 - DNA, 15 bp, Homo sapiens
agattcctaatgact

SEQ ID NO: 729812 - DNA, 15 bp, Homo sapiens
gattcctaatgactt

SEQ ID NO: 729813 - DNA, 15 bp, Homo sapiens
attcctaatgacttg

SEQ ID NO: 729814 - DNA, 15 bp, Homo sapiens
ttcctaatgacttga

SEQ ID NO: 729815 - DNA, 15 bp, Homo sapiens
tcctaatgacttgaa

SEQ ID NO: 729816 - DNA, 15 bp, Homo sapiens
cctaatgacttgaag

SEQ ID NO: 729817 - DNA, 15 bp, Homo sapiens
ctaatgacttgaagc

SEQ ID NO: 729818 - DNA, 15 bp, Homo sapiens
taatgacttgaagct

SEQ ID NO: 729819 - DNA, 15 bp, Homo sapiens
aatgacttgaagcta

SEQ ID NO: 729820 - DNA, 15 bp, Homo sapiens
atgacttgaagctac

SEQ ID NO: 729821 - DNA, 15 bp, Homo sapiens
tgacttgaagctacc

SEQ ID NO: 729822 - DNA, 15 bp, Homo sapiens
gacttgaagctaccc

SEQ ID NO: 729823 - DNA, 15 bp, Homo sapiens
acttgaagctaccct

SEQ ID NO: 729824 - DNA, 15 bp, Homo sapiens
cttgaagctaccctt

SEQ ID NO: 729825 - DNA, 15 bp, Homo sapiens
ttgaagctacccttt

SEQ ID NO: 729826 - DNA, 15 bp, Homo sapiens
tgaagctaccctttg

SEQ ID NO: 729827 - DNA, 15 bp, Homo sapiens
gaagctaccctttgc

SEQ ID NO: 729828 - DNA, 15 bp, Homo sapiens
aagctaccctttgcc

SEQ ID NO: 729829 - DNA, 15 bp, Homo sapiens
agctaccctttgccc

SEQ ID NO: 729830 - DNA, 15 bp, Homo sapiens
gctaccctttgccca

SEQ ID NO: 729831 - DNA, 15 bp, Homo sapiens
ctaccctttgcccaa

SEQ ID NO: 729832 - DNA, 15 bp, Homo sapiens
taccctttgcccaaa

SEQ ID NO: 729833 - DNA, 15 bp, Homo sapiens
accctttgcccaaac

SEQ ID NO: 729834 - DNA, 15 bp, Homo sapiens
ccctttgcccaaacc

SEQ ID NO: 729835 - DNA, 15 bp, Homo sapiens
cctttgcccaaaccc

SEQ ID NO: 729836 - DNA, 15 bp, Homo sapiens
ctttgcccaaaccct

SEQ ID NO: 729837 - DNA, 15 bp, Homo sapiens
tttgcccaaaccctc

SEQ ID NO: 729838 - DNA, 15 bp, Homo sapiens
ttgcccaaaccctca

SEQ ID NO: 729839 - DNA, 15 bp, Homo sapiens
tgcccaaaccctcac

SEQ ID NO: 729840 - DNA, 15 bp, Homo sapiens
gcccaaaccctcaca

SEQ ID NO: 729841 - DNA, 15 bp, Homo sapiens
cccaaaccctcacag

SEQ ID NO: 729842 - DNA, 15 bp, Homo sapiens
ccaaaccctcacaga

SEQ ID NO: 729843 - DNA, 15 bp, Homo sapiens
caaaccctcacagag

SEQ ID NO: 729844 - DNA, 15 bp, Homo sapiens
aaaccctcacagagt

SEQ ID NO: 729845 - DNA, 15 bp, Homo sapiens
aaccctcacagagtc

SEQ ID NO: 729846 - DNA, 15 bp, Homo sapiens
accctcacagagtct

SEQ ID NO: 729847 - DNA, 15 bp, Homo sapiens
ccctcacagagtctc

SEQ ID NO: 729848 - DNA, 15 bp, Homo sapiens
cctcacagagtctct

SEQ ID NO: 729849 - DNA, 15 bp, Homo sapiens
ctcacagagtctctg

SEQ ID NO: 729850 - DNA, 15 bp, Homo sapiens
tcacagagtctctgg

SEQ ID NO: 729851 - DNA, 15 bp, Homo sapiens
cacagagtctctggg

SEQ ID NO: 729852 - DNA, 15 bp, Homo sapiens
acagagtctctggga

SEQ ID NO: 729853 - DNA, 15 bp, Homo sapiens
cagagtctctgggag

SEQ ID NO: 729854 - DNA, 15 bp, Homo sapiens
agagtctctgggagg

SEQ ID NO: 729855 - DNA, 15 bp, Homo sapiens
gagtctctgggaggt

SEQ ID NO: 729856 - DNA, 15 bp, Homo sapiens
agtctctgggaggtg

SEQ ID NO: 729857 - DNA, 15 bp, Homo sapiens
gtctctgggaggtgc

SEQ ID NO: 729858 - DNA, 15 bp, Homo sapiens
tctctgggaggtgcc

SEQ ID NO: 729859 - DNA, 15 bp, Homo sapiens
ctctgggaggtgcct

SEQ ID NO: 729860 - DNA, 15 bp, Homo sapiens
tctgggaggtgcctg

SEQ ID NO: 729861 - DNA, 15 bp, Homo sapiens
ctgggaggtgcctgg

SEQ ID NO: 729862 - DNA, 15 bp, Homo sapiens
tgggaggtgcctggg

SEQ ID NO: 729863 - DNA, 15 bp, Homo sapiens
gggaggtgcctgggt

SEQ ID NO: 729864 - DNA, 15 bp, Homo sapiens
ggaggtgcctgggtt

SEQ ID NO: 729865 - DNA, 15 bp, Homo sapiens
gaggtgcctgggttc

SEQ ID NO: 729866 - DNA, 15 bp, Homo sapiens
aggtgcctgggttct

SEQ ID NO: 729867 - DNA, 15 bp, Homo sapiens
ggtgcctgggttctg

SEQ ID NO: 729868 - DNA, 15 bp, Homo sapiens
gtgcctgggttctga

SEQ ID NO: 729869 - DNA, 15 bp, Homo sapiens
tgcctgggttctgag

SEQ ID NO: 729870 - DNA, 15 bp, Homo sapiens
gcctgggttctgagg

SEQ ID NO: 729871 - DNA, 15 bp, Homo sapiens
cctgggttctgaggg

SEQ ID NO: 729872 - DNA, 15 bp, Homo sapiens
ctgggttctgagggt

SEQ ID NO: 729873 - DNA, 15 bp, Homo sapiens
tgggttctgagggtc

SEQ ID NO: 729874 - DNA, 15 bp, Homo sapiens
gggttctgagggtct

SEQ ID NO: 729875 - DNA, 15 bp, Homo sapiens
ggttctgagggtctt

SEQ ID NO: 729876 - DNA, 15 bp, Homo sapiens
gttctgagggtcttt

SEQ ID NO: 729877 - DNA, 15 bp, Homo sapiens
ttctgagggtctttt

SEQ ID NO: 729878 - DNA, 15 bp, Homo sapiens
tctgagggtcttttc

SEQ ID NO: 729879 - DNA, 15 bp, Homo sapiens
ctgagggtcttttcc

SEQ ID NO: 729880 - DNA, 15 bp, Homo sapiens
tgagggtcttttccc

SEQ ID NO: 729881 - DNA, 15 bp, Homo sapiens
gagggtcttttccca

SEQ ID NO: 729882 - DNA, 15 bp, Homo sapiens
agggtcttttcccag

SEQ ID NO: 729883 - DNA, 15 bp, Homo sapiens
gggtcttttcccagc

SEQ ID NO: 729884 - DNA, 15 bp, Homo sapiens
ggtcttttcccagct

SEQ ID NO: 729885 - DNA, 15 bp, Homo sapiens
gtcttttcccagctc

SEQ ID NO: 729886 - DNA, 15 bp, Homo sapiens
tcttttcccagctcc

SEQ ID NO: 729887 - DNA, 15 bp, Homo sapiens
cttttcccagctccc

SEQ ID NO: 729888 - DNA, 15 bp, Homo sapiens
ttttcccagctccca

SEQ ID NO: 729889 - DNA, 15 bp, Homo sapiens
tttcccagctcccaa

SEQ ID NO: 729890 - DNA, 15 bp, Homo sapiens
ttcccagctcccaat

SEQ ID NO: 729891 - DNA, 15 bp, Homo sapiens
tcccagctcccaata

SEQ ID NO: 729892 - DNA, 15 bp, Homo sapiens
cccagctcccaatac

SEQ ID NO: 729893 - DNA, 15 bp, Homo sapiens
ccagctcccaatact

SEQ ID NO: 729894 - DNA, 15 bp, Homo sapiens
cagctcccaatactg

SEQ ID NO: 729895 - DNA, 15 bp, Homo sapiens
agctcccaatactgt

SEQ ID NO: 729896 - DNA, 15 bp, Homo sapiens
gctcccaatactgta

SEQ ID NO: 729897 - DNA, 15 bp, Homo sapiens
ctcccaatactgtaa

SEQ ID NO: 729898 - DNA, 15 bp, Homo sapiens
tcccaatactgtaaa

SEQ ID NO: 729899 - DNA, 15 bp, Homo sapiens
cccaatactgtaaaa

SEQ ID NO: 729900 - DNA, 15 bp, Homo sapiens
ccaatactgtaaaat

SEQ ID NO: 729901 - DNA, 15 bp, Homo sapiens
caatactgtaaaatg

SEQ ID NO: 729902 - DNA, 15 bp, Homo sapiens
aatactgtaaaatgg

SEQ ID NO: 729903 - DNA, 15 bp, Homo sapiens
atactgtaaaatggg

SEQ ID NO: 729904 - DNA, 15 bp, Homo sapiens
tactgtaaaatgggc

SEQ ID NO: 729905 - DNA, 15 bp, Homo sapiens
actgtaaaatgggca

SEQ ID NO: 729906 - DNA, 15 bp, Homo sapiens
ctgtaaaatgggcaa

SEQ ID NO: 729907 - DNA, 15 bp, Homo sapiens
tgtaaaatgggcaac

SEQ ID NO: 729908 - DNA, 15 bp, Homo sapiens
gtaaaatgggcaact

SEQ ID NO: 729909 - DNA, 15 bp, Homo sapiens
taaaatgggcaactg

SEQ ID NO: 729910 - DNA, 15 bp, Homo sapiens
aaaatgggcaactgc

SEQ ID NO: 729911 - DNA, 15 bp, Homo sapiens
aaatgggcaactgcc

SEQ ID NO: 729912 - DNA, 15 bp, Homo sapiens
aatgggcaactgccc

SEQ ID NO: 729913 - DNA, 15 bp, Homo sapiens
atgggcaactgccca

SEQ ID NO: 729914 - DNA, 15 bp, Homo sapiens
tgggcaactgcccac

SEQ ID NO: 729915 - DNA, 15 bp, Homo sapiens
gggcaactgcccacc

SEQ ID NO: 729916 - DNA, 15 bp, Homo sapiens
ggcaactgcccacca

SEQ ID NO: 729917 - DNA, 15 bp, Homo sapiens
gcaactgcccaccag

SEQ ID NO: 729918 - DNA, 15 bp, Homo sapiens
caactgcccaccaga

SEQ ID NO: 729919 - DNA, 15 bp, Homo sapiens
aactgcccaccagac

SEQ ID NO: 729920 - DNA, 15 bp, Homo sapiens
actgcccaccagact

SEQ ID NO: 729921 - DNA, 15 bp, Homo sapiens
ctgcccaccagactt

SEQ ID NO: 729922 - DNA, 15 bp, Homo sapiens
tgcccaccagacttt

SEQ ID NO: 729923 - DNA, 15 bp, Homo sapiens
gcccaccagactttg

SEQ ID NO: 729924 - DNA, 15 bp, Homo sapiens
cccaccagactttgg

SEQ ID NO: 729925 - DNA, 15 bp, Homo sapiens
ccaccagactttggg

SEQ ID NO: 729926 - DNA, 15 bp, Homo sapiens
caccagactttgggc

SEQ ID NO: 729927 - DNA, 15 bp, Homo sapiens
accagactttgggca

SEQ ID NO: 729928 - DNA, 15 bp, Homo sapiens
ccagactttgggcat

SEQ ID NO: 729929 - DNA, 15 bp, Homo sapiens
cagactttgggcatg

SEQ ID NO: 729930 - DNA, 15 bp, Homo sapiens
agactttgggcatgg

SEQ ID NO: 729931 - DNA, 15 bp, Homo sapiens
gactttgggcatggg

SEQ ID NO: 729932 - DNA, 15 bp, Homo sapiens
actttgggcatgggt

SEQ ID NO: 729933 - DNA, 15 bp, Homo sapiens
ctttgggcatgggta

SEQ ID NO: 729934 - DNA, 15 bp, Homo sapiens
tttgggcatgggtac

SEQ ID NO: 729935 - DNA, 15 bp, Homo sapiens
ttgggcatgggtacc

SEQ ID NO: 729936 - DNA, 15 bp, Homo sapiens
tgggcatgggtacca

SEQ ID NO: 729937 - DNA, 15 bp, Homo sapiens
gggcatgggtaccac

SEQ ID NO: 729938 - DNA, 15 bp, Homo sapiens
ggcatgggtaccact

SEQ ID NO: 729939 - DNA, 15 bp, Homo sapiens
gcatgggtaccactc

SEQ ID NO: 729940 - DNA, 15 bp, Homo sapiens
catgggtaccactcc

SEQ ID NO: 729941 - DNA, 15 bp, Homo sapiens
atgggtaccactcca

SEQ ID NO: 729942 - DNA, 15 bp, Homo sapiens
tgggtaccactccac

SEQ ID NO: 729943 - DNA, 15 bp, Homo sapiens
gggtaccactccacc

SEQ ID NO: 729944 - DNA, 15 bp, Homo sapiens
ggtaccactccacca

SEQ ID NO: 729945 - DNA, 15 bp, Homo sapiens
gtaccactccaccac

SEQ ID NO: 729946 - DNA, 15 bp, Homo sapiens
taccactccaccacc

SEQ ID NO: 729947 - DNA, 15 bp, Homo sapiens
accactccaccacct

SEQ ID NO: 729948 - DNA, 15 bp, Homo sapiens
ccactccaccacctt

SEQ ID NO: 729949 - DNA, 15 bp, Homo sapiens
cactccaccaccttg

SEQ ID NO: 729950 - DNA, 15 bp, Homo sapiens
actccaccaccttgt

SEQ ID NO: 729951 - DNA, 15 bp, Homo sapiens
ctccaccaccttgtg

SEQ ID NO: 729952 - DNA, 15 bp, Homo sapiens
tccaccaccttgtgg

SEQ ID NO: 729953 - DNA, 15 bp, Homo sapiens
ccaccaccttgtggc

SEQ ID NO: 729954 - DNA, 15 bp, Homo sapiens
caccaccttgtggcc

SEQ ID NO: 729955 - DNA, 15 bp, Homo sapiens
accaccttgtggcca

SEQ ID NO: 729956 - DNA, 15 bp, Homo sapiens
ccaccttgtggccat

SEQ ID NO: 729957 - DNA, 15 bp, Homo sapiens
caccttgtggccatc

SEQ ID NO: 729958 - DNA, 15 bp, Homo sapiens
accttgtggccatcc

SEQ ID NO: 729959 - DNA, 15 bp, Homo sapiens
ccttgtggccatccc

SEQ ID NO: 729960 - DNA, 15 bp, Homo sapiens
cttgtggccatccct

SEQ ID NO: 729961 - DNA, 15 bp, Homo sapiens
ttgtggccatccctg

SEQ ID NO: 729962 - DNA, 15 bp, Homo sapiens
tgtggccatccctgg

SEQ ID NO: 729963 - DNA, 15 bp, Homo sapiens
gtggccatccctgga

SEQ ID NO: 729964 - DNA, 15 bp, Homo sapiens
tggccatccctggaa

SEQ ID NO: 729965 - DNA, 15 bp, Homo sapiens
ggccatccctggaaa

SEQ ID NO: 729966 - DNA, 15 bp, Homo sapiens
gccatccctggaaac

SEQ ID NO: 729967 - DNA, 15 bp, Homo sapiens
ccatccctggaaaca

SEQ ID NO: 729968 - DNA, 15 bp, Homo sapiens
catccctggaaacat

SEQ ID NO: 729969 - DNA, 15 bp, Homo sapiens
atccctggaaacatc

SEQ ID NO: 729970 - DNA, 15 bp, Homo sapiens
tccctggaaacatca

SEQ ID NO: 729971 - DNA, 15 bp, Homo sapiens
ccctggaaacatcac

SEQ ID NO: 729972 - DNA, 15 bp, Homo sapiens
cctggaaacatcacc

SEQ ID NO: 729973 - DNA, 15 bp, Homo sapiens
ctggaaacatcacct

SEQ ID NO: 729974 - DNA, 15 bp, Homo sapiens
tggaaacatcacctt

SEQ ID NO: 729975 - DNA, 15 bp, Homo sapiens
ggaaacatcaccttt

SEQ ID NO: 729976 - DNA, 15 bp, Homo sapiens
gaaacatcacctttc

SEQ ID NO: 729977 - DNA, 15 bp, Homo sapiens
aaacatcacctttcc

SEQ ID NO: 729978 - DNA, 15 bp, Homo sapiens
aacatcacctttccc

SEQ ID NO: 729979 - DNA, 15 bp, Homo sapiens
acatcacctttccct

SEQ ID NO: 729980 - DNA, 15 bp, Homo sapiens
catcacctttccctg

SEQ ID NO: 729981 - DNA, 15 bp, Homo sapiens
atcacctttccctgg

SEQ ID NO: 729982 - DNA, 15 bp, Homo sapiens
tcacctttccctggc

SEQ ID NO: 729983 - DNA, 15 bp, Homo sapiens
cacctttccctggcg

SEQ ID NO: 729984 - DNA, 15 bp, Homo sapiens
acctttccctggcga

SEQ ID NO: 729985 - DNA, 15 bp, Homo sapiens
cctttccctggcgac

SEQ ID NO: 729986 - DNA, 15 bp, Homo sapiens
ctttccctggcgaca

SEQ ID NO: 729987 - DNA, 15 bp, Homo sapiens
tttccctggcgacag

SEQ ID NO: 729988 - DNA, 15 bp, Homo sapiens
ttccctggcgacagc

SEQ ID NO: 729989 - DNA, 15 bp, Homo sapiens
tccctggcgacagca

SEQ ID NO: 729990 - DNA, 15 bp, Homo sapiens
ccctggcgacagcaa

SEQ ID NO: 729991 - DNA, 15 bp, Homo sapiens
cctggcgacagcaag

SEQ ID NO: 729992 - DNA, 15 bp, Homo sapiens
ctggcgacagcaagt

SEQ ID NO: 729993 - DNA, 15 bp, Homo sapiens
tggcgacagcaagtg

SEQ ID NO: 729994 - DNA, 15 bp, Homo sapiens
ggcgacagcaagtgt

SEQ ID NO: 729995 - DNA, 15 bp, Homo sapiens
gcgacagcaagtgtt

SEQ ID NO: 729996 - DNA, 15 bp, Homo sapiens
cgacagcaagtgttt

SEQ ID NO: 729997 - DNA, 15 bp, Homo sapiens
gacagcaagtgtttt

SEQ ID NO: 729998 - DNA, 15 bp, Homo sapiens
acagcaagtgtttta

SEQ ID NO: 729999 - DNA, 15 bp, Homo sapiens
cagcaagtgttttaa

SEQ ID NO: 730000 - DNA, 15 bp, Homo sapiens
agcaagtgttttaag

SEQ ID NO: 730001 - DNA, 15 bp, Homo sapiens
gcaagtgttttaaga

SEQ ID NO: 730002 - DNA, 15 bp, Homo sapiens
caagtgttttaagac

SEQ ID NO: 730003 - DNA, 15 bp, Homo sapiens
aagtgttttaagact

SEQ ID NO: 730004 - DNA, 15 bp, Homo sapiens
agtgttttaagacta

SEQ ID NO: 730005 - DNA, 15 bp, Homo sapiens
gtgttttaagactaa

SEQ ID NO: 730006 - DNA, 15 bp, Homo sapiens
tgttttaagactaat

SEQ ID NO: 730007 - DNA, 15 bp, Homo sapiens
gttttaagactaatt

SEQ ID NO: 730008 - DNA, 15 bp, Homo sapiens
ttttaagactaatta

SEQ ID NO: 730009 - DNA, 15 bp, Homo sapiens
tttaagactaattaa

SEQ ID NO: 730010 - DNA, 15 bp, Homo sapiens
ttaagactaattaat

SEQ ID NO: 730011 - DNA, 15 bp, Homo sapiens
taagactaattaata

SEQ ID NO: 730012 - DNA, 15 bp, Homo sapiens
aagactaattaataa

SEQ ID NO: 730013 - DNA, 15 bp, Homo sapiens
agactaattaataat

SEQ ID NO: 730014 - DNA, 15 bp, Homo sapiens
gactaattaataatt

SEQ ID NO: 730015 - DNA, 15 bp, Homo sapiens
actaattaataattt

SEQ ID NO: 730016 - DNA, 15 bp, Homo sapiens
ctaattaataatttt

SEQ ID NO: 730017 - DNA, 15 bp, Homo sapiens
taattaataattttt

SEQ ID NO: 730018 - DNA, 15 bp, Homo sapiens
aattaataatttttt

SEQ ID NO: 730019 - DNA, 15 bp, Homo sapiens
attaataattttttt

SEQ ID NO: 730020 - DNA, 15 bp, Homo sapiens
ttaataatttttttc

SEQ ID NO: 730021 - DNA, 15 bp, Homo sapiens
taataatttttttct

SEQ ID NO: 730022 - DNA, 15 bp, Homo sapiens
aataatttttttctt

SEQ ID NO: 730023 - DNA, 15 bp, Homo sapiens
ataatttttttcttc

SEQ ID NO: 730024 - DNA, 15 bp, Homo sapiens
taatttttttcttct

SEQ ID NO: 730025 - DNA, 15 bp, Homo sapiens
aatttttttcttctt

SEQ ID NO: 730026 - DNA, 15 bp, Homo sapiens
atttttttcttcttt

SEQ ID NO: 730027 - DNA, 15 bp, Homo sapiens
tttttttcttctttc

SEQ ID NO: 730028 - DNA, 15 bp, Homo sapiens
ttttttcttctttct

SEQ ID NO: 730029 - DNA, 15 bp, Homo sapiens
tttttcttctttctt

SEQ ID NO: 730030 - DNA, 15 bp, Homo sapiens
ttttcttctttctta

SEQ ID NO: 730031 - DNA, 15 bp, Homo sapiens
tttcttctttcttac

SEQ ID NO: 730032 - DNA, 15 bp, Homo sapiens
ttcttctttcttacg

SEQ ID NO: 730033 - DNA, 15 bp, Homo sapiens
tcttctttcttacgt

SEQ ID NO: 730034 - DNA, 15 bp, Homo sapiens
cttctttcttacgtt

SEQ ID NO: 730035 - DNA, 15 bp, Homo sapiens
ttctttcttacgttt

SEQ ID NO: 730036 - DNA, 15 bp, Homo sapiens
tctttcttacgtttc

SEQ ID NO: 730037 - DNA, 15 bp, Homo sapiens
ctttcttacgtttct

SEQ ID NO: 730038 - DNA, 15 bp, Homo sapiens
tttcttacgtttctt

SEQ ID NO: 730039 - DNA, 15 bp, Homo sapiens
ttcttacgtttcttt

SEQ ID NO: 730040 - DNA, 15 bp, Homo sapiens
tcttacgtttctttc

SEQ ID NO: 730041 - DNA, 15 bp, Homo sapiens
cttacgtttctttct

SEQ ID NO: 730042 - DNA, 15 bp, Homo sapiens
ttacgtttctttctt

SEQ ID NO: 730043 - DNA, 15 bp, Homo sapiens
tacgtttctttcttt

SEQ ID NO: 730044 - DNA, 15 bp, Homo sapiens
acgtttctttctttt

SEQ ID NO: 730045 - DNA, 15 bp, Homo sapiens
cgtttctttcttttc

SEQ ID NO: 730046 - DNA, 15 bp, Homo sapiens
gtttctttcttttct

SEQ ID NO: 730047 - DNA, 15 bp, Homo sapiens
tttctttcttttctt

SEQ ID NO: 730048 - DNA, 15 bp, Homo sapiens
ttctttcttttcttt

SEQ ID NO: 730049 - DNA, 15 bp, Homo sapiens
tctttcttttctttc

SEQ ID NO: 730050 - DNA, 15 bp, Homo sapiens
ctttcttttctttcc

SEQ ID NO: 730051 - DNA, 15 bp, Homo sapiens
tttcttttctttcct

SEQ ID NO: 730052 - DNA, 15 bp, Homo sapiens
ttcttttctttcctt

SEQ ID NO: 730053 - DNA, 15 bp, Homo sapiens
tcttttctttccttt

SEQ ID NO: 730054 - DNA, 15 bp, Homo sapiens
cttttctttcctttc

SEQ ID NO: 730055 - DNA, 15 bp, Homo sapiens
ttttctttcctttct

SEQ ID NO: 730056 - DNA, 15 bp, Homo sapiens
tttctttcctttctt

SEQ ID NO: 730057 - DNA, 15 bp, Homo sapiens
ttctttcctttcttt

SEQ ID NO: 730058 - DNA, 15 bp, Homo sapiens
tctttcctttctttt

SEQ ID NO: 730059 - DNA, 15 bp, Homo sapiens
ctttcctttcttttc

SEQ ID NO: 730060 - DNA, 15 bp, Homo sapiens
tttcctttcttttcc

SEQ ID NO: 730061 - DNA, 15 bp, Homo sapiens
ttcctttcttttccc

SEQ ID NO: 730062 - DNA, 15 bp, Homo sapiens
tcctttcttttcccc

SEQ ID NO: 730063 - DNA, 15 bp, Homo sapiens
cctttcttttcccct

SEQ ID NO: 730064 - DNA, 15 bp, Homo sapiens
ctttcttttcccctc

SEQ ID NO: 730065 - DNA, 15 bp, Homo sapiens
tttcttttcccctcc

SEQ ID NO: 730066 - DNA, 15 bp, Homo sapiens
ttcttttcccctccc

SEQ ID NO: 730067 - DNA, 15 bp, Homo sapiens
tcttttcccctccct

SEQ ID NO: 730068 - DNA, 15 bp, Homo sapiens
cttttcccctccctc

SEQ ID NO: 730069 - DNA, 15 bp, Homo sapiens
ttttcccctccctcc

SEQ ID NO: 730070 - DNA, 15 bp, Homo sapiens
tttcccctccctccc

SEQ ID NO: 730071 - DNA, 15 bp, Homo sapiens
ttcccctccctccct

SEQ ID NO: 730072 - DNA, 15 bp, Homo sapiens
tcccctccctccctc

SEQ ID NO: 730073 - DNA, 15 bp, Homo sapiens
cccctccctccctcc

SEQ ID NO: 730074 - DNA, 15 bp, Homo sapiens
ccctccctccctccc

SEQ ID NO: 730075 - DNA, 15 bp, Homo sapiens
cctccctccctccct

SEQ ID NO: 730076 - DNA, 15 bp, Homo sapiens
ctccctccctccctc

SEQ ID NO: 730077 - DNA, 15 bp, Homo sapiens
tccctccctccctcc

SEQ ID NO: 730078 - DNA, 15 bp, Homo sapiens
ctccctccctccctt

SEQ ID NO: 730079 - DNA, 15 bp, Homo sapiens
tccctccctcccttc

SEQ ID NO: 730080 - DNA, 15 bp, Homo sapiens
ccctccctcccttcc

SEQ ID NO: 730081 - DNA, 15 bp, Homo sapiens
cctccctcccttcct

SEQ ID NO: 730082 - DNA, 15 bp, Homo sapiens
ctccctcccttcctt

SEQ ID NO: 730083 - DNA, 15 bp, Homo sapiens
tccctcccttccttc

SEQ ID NO: 730084 - DNA, 15 bp, Homo sapiens
ccctcccttccttcc

SEQ ID NO: 730085 - DNA, 15 bp, Homo sapiens
cctcccttccttcct

SEQ ID NO: 730086 - DNA, 15 bp, Homo sapiens
ctcccttccttcctt

SEQ ID NO: 730087 - DNA, 15 bp, Homo sapiens
tcccttccttccttt

SEQ ID NO: 730088 - DNA, 15 bp, Homo sapiens
cccttccttcctttc

SEQ ID NO: 730089 - DNA, 15 bp, Homo sapiens
ccttccttcctttct

SEQ ID NO: 730090 - DNA, 15 bp, Homo sapiens
cttccttcctttctc

SEQ ID NO: 730091 - DNA, 15 bp, Homo sapiens
ttccttcctttctcc

SEQ ID NO: 730092 - DNA, 15 bp, Homo sapiens
tccttcctttctccc

SEQ ID NO: 730093 - DNA, 15 bp, Homo sapiens
ccttcctttctccct

SEQ ID NO: 730094 - DNA, 15 bp, Homo sapiens
cttcctttctccctt

SEQ ID NO: 730095 - DNA, 15 bp, Homo sapiens
ttcctttctcccttt

SEQ ID NO: 730096 - DNA, 15 bp, Homo sapiens
tcctttctccctttc

SEQ ID NO: 730097 - DNA, 15 bp, Homo sapiens
cctttctccctttct

SEQ ID NO: 730098 - DNA, 15 bp, Homo sapiens
ctttctccctttctc

SEQ ID NO: 730099 - DNA, 15 bp, Homo sapiens
tttctccctttctct

SEQ ID NO: 730100 - DNA, 15 bp, Homo sapiens
ttctccctttctctc

SEQ ID NO: 730101 - DNA, 15 bp, Homo sapiens
tctccctttctctct

SEQ ID NO: 730102 - DNA, 15 bp, Homo sapiens
ctccctttctctctt

SEQ ID NO: 730103 - DNA, 15 bp, Homo sapiens
tccctttctctcttt

SEQ ID NO: 730104 - DNA, 15 bp, Homo sapiens
ccctttctctctttc

SEQ ID NO: 730105 - DNA, 15 bp, Homo sapiens
cctttctctctttct

SEQ ID NO: 730106 - DNA, 15 bp, Homo sapiens
ctttctctctttctc

SEQ ID NO: 730107 - DNA, 15 bp, Homo sapiens
tttctctctttctct

SEQ ID NO: 730108 - DNA, 15 bp, Homo sapiens
ttctctctttctctc

SEQ ID NO: 730109 - DNA, 15 bp, Homo sapiens
tctctctttctctct

SEQ ID NO: 730110 - DNA, 15 bp, Homo sapiens
ctctctttctctctt

SEQ ID NO: 730111 - DNA, 15 bp, Homo sapiens
tctctttctctcttt

SEQ ID NO: 730112 - DNA, 15 bp, Homo sapiens
ctctttctctctttc

SEQ ID NO: 730113 - DNA, 15 bp, Homo sapiens
tctttctctctttct

SEQ ID NO: 730114 - DNA, 15 bp, Homo sapiens
ttctctctttctctt

SEQ ID NO: 730115 - DNA, 15 bp, Homo sapiens
tctctctttctcttt

SEQ ID NO: 730116 - DNA, 15 bp, Homo sapiens
ctctctttctctttc

SEQ ID NO: 730117 - DNA, 15 bp, Homo sapiens
tctctttctctttct

SEQ ID NO: 730118 - DNA, 15 bp, Homo sapiens
ctctttctctttctc

SEQ ID NO: 730119 - DNA, 15 bp, Homo sapiens
tctttctctttctct

SEQ ID NO: 730120 - DNA, 15 bp, Homo sapiens
ctttctctttctctt

SEQ ID NO: 730121 - DNA, 15 bp, Homo sapiens
tttctctttctcttt

SEQ ID NO: 730122 - DNA, 15 bp, Homo sapiens
ttctctttctctttc

SEQ ID NO: 730123 - DNA, 15 bp, Homo sapiens
ctttctctttctctc

SEQ ID NO: 730124 - DNA, 15 bp, Homo sapiens
tttctctttctctct

SEQ ID NO: 730125 - DNA, 15 bp, Homo sapiens
ttctctttctctctt

SEQ ID NO: 730126 - DNA, 15 bp, Homo sapiens
ctttctctctttctt

SEQ ID NO: 730127 - DNA, 15 bp, Homo sapiens
tttctctctttcttt

SEQ ID NO: 730128 - DNA, 15 bp, Homo sapiens
ttctctctttctttc

SEQ ID NO: 730129 - DNA, 15 bp, Homo sapiens
tctctctttctttcc

SEQ ID NO: 730130 - DNA, 15 bp, Homo sapiens
ctctctttctttcct

SEQ ID NO: 730131 - DNA, 15 bp, Homo sapiens
tctctttctttcctt

SEQ ID NO: 730132 - DNA, 15 bp, Homo sapiens
ctctttctttccttt

SEQ ID NO: 730133 - DNA, 15 bp, Homo sapiens
tctttctttcctttt

SEQ ID NO: 730134 - DNA, 15 bp, Homo sapiens
ctttctttccttttc

SEQ ID NO: 730135 - DNA, 15 bp, Homo sapiens
tttctttccttttct

SEQ ID NO: 730136 - DNA, 15 bp, Homo sapiens
ttctttccttttctt

SEQ ID NO: 730137 - DNA, 15 bp, Homo sapiens
tctttccttttcttc

SEQ ID NO: 730138 - DNA, 15 bp, Homo sapiens
ctttccttttcttcc

SEQ ID NO: 730139 - DNA, 15 bp, Homo sapiens
tttccttttcttcct

SEQ ID NO: 730140 - DNA, 15 bp, Homo sapiens
ttccttttcttcctt

SEQ ID NO: 730141 - DNA, 15 bp, Homo sapiens
tccttttcttccttt

SEQ ID NO: 730142 - DNA, 15 bp, Homo sapiens
ccttttcttcctttc

SEQ ID NO: 730143 - DNA, 15 bp, Homo sapiens
cttttcttcctttct

SEQ ID NO: 730144 - DNA, 15 bp, Homo sapiens
ttttcttcctttctt

SEQ ID NO: 730145 - DNA, 15 bp, Homo sapiens
tttcttcctttcttt

SEQ ID NO: 730146 - DNA, 15 bp, Homo sapiens
ttcttcctttctttc

SEQ ID NO: 730147 - DNA, 15 bp, Homo sapiens
tcttcctttctttcc

SEQ ID NO: 730148 - DNA, 15 bp, Homo sapiens
cttcctttctttcct

SEQ ID NO: 730149 - DNA, 15 bp, Homo sapiens
ttcctttctttcctt

SEQ ID NO: 730150 - DNA, 15 bp, Homo sapiens
tcctttctttccttc

SEQ ID NO: 730151 - DNA, 15 bp, Homo sapiens
cctttctttccttct

SEQ ID NO: 730152 - DNA, 15 bp, Homo sapiens
ctttctttccttctt

SEQ ID NO: 730153 - DNA, 15 bp, Homo sapiens
tttctttccttcttt

SEQ ID NO: 730154 - DNA, 15 bp, Homo sapiens
ttctttccttctttt

SEQ ID NO: 730155 - DNA, 15 bp, Homo sapiens
tctttccttcttttc

SEQ ID NO: 730156 - DNA, 15 bp, Homo sapiens
ctttccttcttttct

SEQ ID NO: 730157 - DNA, 15 bp, Homo sapiens
tttccttcttttctt

SEQ ID NO: 730158 - DNA, 15 bp, Homo sapiens
ttccttcttttcttc

SEQ ID NO: 730159 - DNA, 15 bp, Homo sapiens
tccttcttttcttcc

SEQ ID NO: 730160 - DNA, 15 bp, Homo sapiens
ccttcttttcttcct

SEQ ID NO: 730161 - DNA, 15 bp, Homo sapiens
cttcttttcttcctt

SEQ ID NO: 730162 - DNA, 15 bp, Homo sapiens
ttcttttcttccttt

SEQ ID NO: 730163 - DNA, 15 bp, Homo sapiens
tcttttcttcctttc

SEQ ID NO: 730164 - DNA, 15 bp, Homo sapiens
tcttcctttctttct

SEQ ID NO: 730165 - DNA, 15 bp, Homo sapiens
cttcctttctttctt

SEQ ID NO: 730166 - DNA, 15 bp, Homo sapiens
ttcctttctttcttt

SEQ ID NO: 730167 - DNA, 15 bp, Homo sapiens
tcctttctttctttc

SEQ ID NO: 730168 - DNA, 15 bp, Homo sapiens
cctttctttctttcc

SEQ ID NO: 730169 - DNA, 15 bp, Homo sapiens
ctttctttctttcct

SEQ ID NO: 730170 - DNA, 15 bp, Homo sapiens
tttctttctttcctt

SEQ ID NO: 730171 - DNA, 15 bp, Homo sapiens
ttctttctttccttt

SEQ ID NO: 730172 - DNA, 15 bp, Homo sapiens
tctttctttcctttc

SEQ ID NO: 730173 - DNA, 15 bp, Homo sapiens
ctttctttcctttct

SEQ ID NO: 730174 - DNA, 15 bp, Homo sapiens
tctttcctttctttc

SEQ ID NO: 730175 - DNA, 15 bp, Homo sapiens
ctttcctttctttct

SEQ ID NO: 730176 - DNA, 15 bp, Homo sapiens
tttcctttctttctt

SEQ ID NO: 730177 - DNA, 15 bp, Homo sapiens
cctttctttctttct

SEQ ID NO: 730178 - DNA, 15 bp, Homo sapiens
ctttctttctttctt

SEQ ID NO: 730179 - DNA, 15 bp, Homo sapiens
tttctttctttcttt

SEQ ID NO: 730180 - DNA, 15 bp, Homo sapiens
ttctttctttctttt

SEQ ID NO: 730181 - DNA, 15 bp, Homo sapiens
tctttctttcttttc

SEQ ID NO: 730182 - DNA, 15 bp, Homo sapiens
ctttctttcttttct

SEQ ID NO: 730183 - DNA, 15 bp, Homo sapiens
ctttcttttctttct

SEQ ID NO: 730184 - DNA, 15 bp, Homo sapiens
tttcttttctttctt

SEQ ID NO: 730185 - DNA, 15 bp, Homo sapiens
ttcttttctttcttt

SEQ ID NO: 730186 - DNA, 15 bp, Homo sapiens
tcttttctttctttt

SEQ ID NO: 730187 - DNA, 15 bp, Homo sapiens
cttttctttcttttc

SEQ ID NO: 730188 - DNA, 15 bp, Homo sapiens
ttttctttcttttcc

SEQ ID NO: 730189 - DNA, 15 bp, Homo sapiens
tttctttcttttcct

SEQ ID NO: 730190 - DNA, 15 bp, Homo sapiens
ttctttcttttcctt

SEQ ID NO: 730191 - DNA, 15 bp, Homo sapiens
tctttcttttccttt

SEQ ID NO: 730192 - DNA, 15 bp, Homo sapiens
ctttcttttcctttc

SEQ ID NO: 730193 - DNA, 15 bp, Homo sapiens
tttcttttcctttct

SEQ ID NO: 730194 - DNA, 15 bp, Homo sapiens
ttcttttcctttctt

SEQ ID NO: 730195 - DNA, 15 bp, Homo sapiens
tcttttcctttcttt

SEQ ID NO: 730196 - DNA, 15 bp, Homo sapiens
cttttcctttctttc

SEQ ID NO: 730197 - DNA, 15 bp, Homo sapiens
ttttcctttctttct

SEQ ID NO: 730198 - DNA, 15 bp, Homo sapiens
ttctttctttctttc

SEQ ID NO: 730199 - DNA, 15 bp, Homo sapiens
tctttctttctttct

SEQ ID NO: 730200 - DNA, 15 bp, Homo sapiens
tcttttctttccttc

SEQ ID NO: 730201 - DNA, 15 bp, Homo sapiens
cttttctttccttcc

SEQ ID NO: 730202 - DNA, 15 bp, Homo sapiens
ttttctttccttcct

SEQ ID NO: 730203 - DNA, 15 bp, Homo sapiens
tttctttccttcctt

SEQ ID NO: 730204 - DNA, 15 bp, Homo sapiens
ttctttccttccttt

SEQ ID NO: 730205 - DNA, 15 bp, Homo sapiens
tctttccttcctttt

SEQ ID NO: 730206 - DNA, 15 bp, Homo sapiens
ctttccttccttttc

SEQ ID NO: 730207 - DNA, 15 bp, Homo sapiens
tttccttccttttct

SEQ ID NO: 730208 - DNA, 15 bp, Homo sapiens
ttccttccttttctc

SEQ ID NO: 730209 - DNA, 15 bp, Homo sapiens
tccttccttttctct

SEQ ID NO: 730210 - DNA, 15 bp, Homo sapiens
ccttccttttctctc

SEQ ID NO: 730211 - DNA, 15 bp, Homo sapiens
cttccttttctctct

SEQ ID NO: 730212 - DNA, 15 bp, Homo sapiens
ttccttttctctctc

SEQ ID NO: 730213 - DNA, 15 bp, Homo sapiens
tccttttctctctct

SEQ ID NO: 730214 - DNA, 15 bp, Homo sapiens
ccttttctctctctc

SEQ ID NO: 730215 - DNA, 15 bp, Homo sapiens
cttttctctctctct

SEQ ID NO: 730216 - DNA, 15 bp, Homo sapiens
ttttctctctctctc

SEQ ID NO: 730217 - DNA, 15 bp, Homo sapiens
tttctctctctctct

SEQ ID NO: 730218 - DNA, 15 bp, Homo sapiens
ttctctctctctctc

SEQ ID NO: 730219 - DNA, 15 bp, Homo sapiens
tctctctctctctct

SEQ ID NO: 730220 - DNA, 15 bp, Homo sapiens
ctctctctctctctc

SEQ ID NO: 730221 - DNA, 15 bp, Homo sapiens
ctctctctctctctt

SEQ ID NO: 730222 - DNA, 15 bp, Homo sapiens
tctctctctctcttt

SEQ ID NO: 730223 - DNA, 15 bp, Homo sapiens
ctctctctctctttc

SEQ ID NO: 730224 - DNA, 15 bp, Homo sapiens
tctctctctctttct

SEQ ID NO: 730225 - DNA, 15 bp, Homo sapiens
ctctctctctttctt

SEQ ID NO: 730226 - DNA, 15 bp, Homo sapiens
tctctctctttcttt

SEQ ID NO: 730227 - DNA, 15 bp, Homo sapiens
ctctctctttctttc

SEQ ID NO: 730228 - DNA, 15 bp, Homo sapiens
tctctctttctttct

SEQ ID NO: 730229 - DNA, 15 bp, Homo sapiens
ctctctttctttctt

SEQ ID NO: 730230 - DNA, 15 bp, Homo sapiens
tctctttctttcttt

SEQ ID NO: 730231 - DNA, 15 bp, Homo sapiens
ctctttctttctttc

SEQ ID NO: 730232 - DNA, 15 bp, Homo sapiens
tttctttctttcttg

SEQ ID NO: 730233 - DNA, 15 bp, Homo sapiens
ttctttctttcttgt

SEQ ID NO: 730234 - DNA, 15 bp, Homo sapiens
tctttctttcttgtt

SEQ ID NO: 730235 - DNA, 15 bp, Homo sapiens
ctttctttcttgttt

SEQ ID NO: 730236 - DNA, 15 bp, Homo sapiens
tttctttcttgtttc

SEQ ID NO: 730237 - DNA, 15 bp, Homo sapiens
ttctttcttgtttcg

SEQ ID NO: 730238 - DNA, 15 bp, Homo sapiens
tctttcttgtttcgc

SEQ ID NO: 730239 - DNA, 15 bp, Homo sapiens
ctttcttgtttcgct

SEQ ID NO: 730240 - DNA, 15 bp, Homo sapiens
tttcttgtttcgctc

SEQ ID NO: 730241 - DNA, 15 bp, Homo sapiens
ttcttgtttcgctct

SEQ ID NO: 730242 - DNA, 15 bp, Homo sapiens
tcttgtttcgctctt

SEQ ID NO: 730243 - DNA, 15 bp, Homo sapiens
cttgtttcgctcttg

SEQ ID NO: 730244 - DNA, 15 bp, Homo sapiens
ttgtttcgctcttgt

SEQ ID NO: 730245 - DNA, 15 bp, Homo sapiens
tgtttcgctcttgtc

SEQ ID NO: 730246 - DNA, 15 bp, Homo sapiens
gtttcgctcttgtca

SEQ ID NO: 730247 - DNA, 15 bp, Homo sapiens
tttcgctcttgtcac

SEQ ID NO: 730248 - DNA, 15 bp, Homo sapiens
ttcgctcttgtcacc

SEQ ID NO: 730249 - DNA, 15 bp, Homo sapiens
tcgctcttgtcaccc

SEQ ID NO: 730250 - DNA, 15 bp, Homo sapiens
cgctcttgtcaccca

SEQ ID NO: 730251 - DNA, 15 bp, Homo sapiens
gctcttgtcacccag

SEQ ID NO: 730252 - DNA, 15 bp, Homo sapiens
ctcttgtcacccagg

SEQ ID NO: 730253 - DNA, 15 bp, Homo sapiens
tcttgtcacccaggc

SEQ ID NO: 730254 - DNA, 15 bp, Homo sapiens
cttgtcacccaggct

SEQ ID NO: 730255 - DNA, 15 bp, Homo sapiens
ttgtcacccaggctg

SEQ ID NO: 730256 - DNA, 15 bp, Homo sapiens
tggagtgcagtggca

SEQ ID NO: 730257 - DNA, 15 bp, Homo sapiens
ggagtgcagtggcaa

SEQ ID NO: 730258 - DNA, 15 bp, Homo sapiens
gagtgcagtggcaag

SEQ ID NO: 730259 - DNA, 15 bp, Homo sapiens
agtgcagtggcaaga

SEQ ID NO: 730260 - DNA, 15 bp, Homo sapiens
gtgcagtggcaagat

SEQ ID NO: 730261 - DNA, 15 bp, Homo sapiens
tgcagtggcaagatc

SEQ ID NO: 730262 - DNA, 15 bp, Homo sapiens
gcagtggcaagatct

SEQ ID NO: 730263 - DNA, 15 bp, Homo sapiens
cagtggcaagatctc

SEQ ID NO: 730264 - DNA, 15 bp, Homo sapiens
agtggcaagatctca

SEQ ID NO: 730265 - DNA, 15 bp, Homo sapiens
gtggcaagatctcag

SEQ ID NO: 730266 - DNA, 15 bp, Homo sapiens
tggcaagatctcagc

SEQ ID NO: 730267 - DNA, 15 bp, Homo sapiens
ggcaagatctcagct

SEQ ID NO: 730268 - DNA, 15 bp, Homo sapiens
gcaagatctcagctc

SEQ ID NO: 730269 - DNA, 15 bp, Homo sapiens
caagatctcagctca

SEQ ID NO: 730270 - DNA, 15 bp, Homo sapiens
aagatctcagctcac

SEQ ID NO: 730271 - DNA, 15 bp, Homo sapiens
agatctcagctcact

SEQ ID NO: 730272 - DNA, 15 bp, Homo sapiens
ctgcaacctccaccc

SEQ ID NO: 730273 - DNA, 15 bp, Homo sapiens
tgcaacctccacccc

SEQ ID NO: 730274 - DNA, 15 bp, Homo sapiens
gcaacctccaccccc

SEQ ID NO: 730275 - DNA, 15 bp, Homo sapiens
caacctccaccccca

SEQ ID NO: 730276 - DNA, 15 bp, Homo sapiens
aacctccacccccag

SEQ ID NO: 730277 - DNA, 15 bp, Homo sapiens
acctccacccccagg

SEQ ID NO: 730278 - DNA, 15 bp, Homo sapiens
cctccacccccaggg

SEQ ID NO: 730279 - DNA, 15 bp, Homo sapiens
ctccacccccagggt

SEQ ID NO: 730280 - DNA, 15 bp, Homo sapiens
tccacccccagggtt

SEQ ID NO: 730281 - DNA, 15 bp, Homo sapiens
ccacccccagggttc

SEQ ID NO: 730282 - DNA, 15 bp, Homo sapiens
cacccccagggttca

SEQ ID NO: 730283 - DNA, 15 bp, Homo sapiens
acccccagggttcaa

SEQ ID NO: 730284 - DNA, 15 bp, Homo sapiens
cccccagggttcaag

SEQ ID NO: 730285 - DNA, 15 bp, Homo sapiens
ccccagggttcaagt

SEQ ID NO: 730286 - DNA, 15 bp, Homo sapiens
cccagggttcaagtg

SEQ ID NO: 730287 - DNA, 15 bp, Homo sapiens
ccagggttcaagtga

SEQ ID NO: 730288 - DNA, 15 bp, Homo sapiens
cagggttcaagtgat

SEQ ID NO: 730289 - DNA, 15 bp, Homo sapiens
agggttcaagtgatt

SEQ ID NO: 730290 - DNA, 15 bp, Homo sapiens
gggttcaagtgattc

SEQ ID NO: 730291 - DNA, 15 bp, Homo sapiens
ggttcaagtgattct

SEQ ID NO: 730292 - DNA, 15 bp, Homo sapiens
gttcaagtgattctc

SEQ ID NO: 730293 - DNA, 15 bp, Homo sapiens
ttcaagtgattctcc

SEQ ID NO: 730294 - DNA, 15 bp, Homo sapiens
tcaagtgattctccc

SEQ ID NO: 730295 - DNA, 15 bp, Homo sapiens
caagtgattctccca

SEQ ID NO: 730296 - DNA, 15 bp, Homo sapiens
aagtgattctcccac

SEQ ID NO: 730297 - DNA, 15 bp, Homo sapiens
agtgattctcccacc

SEQ ID NO: 730298 - DNA, 15 bp, Homo sapiens
gtgattctcccaccc

SEQ ID NO: 730299 - DNA, 15 bp, Homo sapiens
tgattctcccacccc

SEQ ID NO: 730300 - DNA, 15 bp, Homo sapiens
gattctcccacccca

SEQ ID NO: 730301 - DNA, 15 bp, Homo sapiens
attctcccaccccag

SEQ ID NO: 730302 - DNA, 15 bp, Homo sapiens
ttctcccaccccagc

SEQ ID NO: 730303 - DNA, 15 bp, Homo sapiens
tctcccaccccagct

SEQ ID NO: 730304 - DNA, 15 bp, Homo sapiens
ctcccaccccagctt

SEQ ID NO: 730305 - DNA, 15 bp, Homo sapiens
tcccaccccagcttc

SEQ ID NO: 730306 - DNA, 15 bp, Homo sapiens
cccaccccagcttcc

SEQ ID NO: 730307 - DNA, 15 bp, Homo sapiens
ccaccccagcttccc

SEQ ID NO: 730308 - DNA, 15 bp, Homo sapiens
caccccagcttccca

SEQ ID NO: 730309 - DNA, 15 bp, Homo sapiens
accccagcttcccaa

SEQ ID NO: 730310 - DNA, 15 bp, Homo sapiens
ccccagcttcccaag

SEQ ID NO: 730311 - DNA, 15 bp, Homo sapiens
cccagcttcccaagt

SEQ ID NO: 730312 - DNA, 15 bp, Homo sapiens
ccagcttcccaagta

SEQ ID NO: 730313 - DNA, 15 bp, Homo sapiens
cagcttcccaagtag

SEQ ID NO: 730314 - DNA, 15 bp, Homo sapiens
agcttcccaagtagc

SEQ ID NO: 730315 - DNA, 15 bp, Homo sapiens
gcttcccaagtagct

SEQ ID NO: 730316 - DNA, 15 bp, Homo sapiens
cttcccaagtagctg

SEQ ID NO: 730317 - DNA, 15 bp, Homo sapiens
ttcccaagtagctgg

SEQ ID NO: 730318 - DNA, 15 bp, Homo sapiens
gggattacaggtgca

SEQ ID NO: 730319 - DNA, 15 bp, Homo sapiens
ggattacaggtgcac

SEQ ID NO: 730320 - DNA, 15 bp, Homo sapiens
gattacaggtgcaca

SEQ ID NO: 730321 - DNA, 15 bp, Homo sapiens
attacaggtgcacaa

SEQ ID NO: 730322 - DNA, 15 bp, Homo sapiens
ttacaggtgcacaac

SEQ ID NO: 730323 - DNA, 15 bp, Homo sapiens
tacaggtgcacaaca

SEQ ID NO: 730324 - DNA, 15 bp, Homo sapiens
acaggtgcacaacac

SEQ ID NO: 730325 - DNA, 15 bp, Homo sapiens
caggtgcacaacacc

SEQ ID NO: 730326 - DNA, 15 bp, Homo sapiens
aggtgcacaacacca

SEQ ID NO: 730327 - DNA, 15 bp, Homo sapiens
ggtgcacaacaccat

SEQ ID NO: 730328 - DNA, 15 bp, Homo sapiens
gtgcacaacaccatg

SEQ ID NO: 730329 - DNA, 15 bp, Homo sapiens
tgcacaacaccatgc

SEQ ID NO: 730330 - DNA, 15 bp, Homo sapiens
gcacaacaccatgcc

SEQ ID NO: 730331 - DNA, 15 bp, Homo sapiens
cacaacaccatgcct

SEQ ID NO: 730332 - DNA, 15 bp, Homo sapiens
acaacaccatgcctg

SEQ ID NO: 730333 - DNA, 15 bp, Homo sapiens
caacaccatgcctgg

SEQ ID NO: 730334 - DNA, 15 bp, Homo sapiens
aacaccatgcctggc

SEQ ID NO: 730335 - DNA, 15 bp, Homo sapiens
acaccatgcctggct

SEQ ID NO: 730336 - DNA, 15 bp, Homo sapiens
ttttagtagagacag

SEQ ID NO: 730337 - DNA, 15 bp, Homo sapiens
tttagtagagacagg

SEQ ID NO: 730338 - DNA, 15 bp, Homo sapiens
ttagtagagacaggg

SEQ ID NO: 730339 - DNA, 15 bp, Homo sapiens
tagtagagacagggt

SEQ ID NO: 730340 - DNA, 15 bp, Homo sapiens
agtagagacagggtt

SEQ ID NO: 730341 - DNA, 15 bp, Homo sapiens
gtagagacagggttt

SEQ ID NO: 730342 - DNA, 15 bp, Homo sapiens
tagagacagggtttc

SEQ ID NO: 730343 - DNA, 15 bp, Homo sapiens
agagacagggtttca

SEQ ID NO: 730344 - DNA, 15 bp, Homo sapiens
gagacagggtttcac

SEQ ID NO: 730345 - DNA, 15 bp, Homo sapiens
agacagggtttcacc

SEQ ID NO: 730346 - DNA, 15 bp, Homo sapiens
gacagggtttcacca

SEQ ID NO: 730347 - DNA, 15 bp, Homo sapiens
acagggtttcaccat

SEQ ID NO: 730348 - DNA, 15 bp, Homo sapiens
cagggtttcaccatg

SEQ ID NO: 730349 - DNA, 15 bp, Homo sapiens
agggtttcaccatgt

SEQ ID NO: 730350 - DNA, 15 bp, Homo sapiens
gccaggctggtctca

SEQ ID NO: 730351 - DNA, 15 bp, Homo sapiens
gtctcaaactcctga

SEQ ID NO: 730352 - DNA, 15 bp, Homo sapiens
tctcaaactcctgac

SEQ ID NO: 730353 - DNA, 15 bp, Homo sapiens
ctcaaactcctgacc

SEQ ID NO: 730354 - DNA, 15 bp, Homo sapiens
tcaaactcctgacct

SEQ ID NO: 730355 - DNA, 15 bp, Homo sapiens
caaactcctgacctc

SEQ ID NO: 730356 - DNA, 15 bp, Homo sapiens
aaactcctgacctca

SEQ ID NO: 730357 - DNA, 15 bp, Homo sapiens
acctcaggtgatccg

SEQ ID NO: 730358 - DNA, 15 bp, Homo sapiens
cctcaggtgatccgc

SEQ ID NO: 730359 - DNA, 15 bp, Homo sapiens
ctcaggtgatccgcc

SEQ ID NO: 730360 - DNA, 15 bp, Homo sapiens
tcaggtgatccgccc

SEQ ID NO: 730361 - DNA, 15 bp, Homo sapiens
caggtgatccgccca

SEQ ID NO: 730362 - DNA, 15 bp, Homo sapiens
aggtgatccgcccat

SEQ ID NO: 730363 - DNA, 15 bp, Homo sapiens
ggtgatccgcccatc

SEQ ID NO: 730364 - DNA, 15 bp, Homo sapiens
gtgatccgcccatct

SEQ ID NO: 730365 - DNA, 15 bp, Homo sapiens
tgatccgcccatctt

SEQ ID NO: 730366 - DNA, 15 bp, Homo sapiens
gatccgcccatcttt

SEQ ID NO: 730367 - DNA, 15 bp, Homo sapiens
atccgcccatctttg

SEQ ID NO: 730368 - DNA, 15 bp, Homo sapiens
tccgcccatctttgc

SEQ ID NO: 730369 - DNA, 15 bp, Homo sapiens
ccgcccatctttgcc

SEQ ID NO: 730370 - DNA, 15 bp, Homo sapiens
cgcccatctttgcct

SEQ ID NO: 730371 - DNA, 15 bp, Homo sapiens
gcccatctttgcctc

SEQ ID NO: 730372 - DNA, 15 bp, Homo sapiens
cccatctttgcctcc

SEQ ID NO: 730373 - DNA, 15 bp, Homo sapiens
ccatctttgcctccc

SEQ ID NO: 730374 - DNA, 15 bp, Homo sapiens
catctttgcctccca

SEQ ID NO: 730375 - DNA, 15 bp, Homo sapiens
atctttgcctcccaa

SEQ ID NO: 730376 - DNA, 15 bp, Homo sapiens
tctttgcctcccaaa

SEQ ID NO: 730377 - DNA, 15 bp, Homo sapiens
ctttgcctcccaaag

SEQ ID NO: 730378 - DNA, 15 bp, Homo sapiens
tttgcctcccaaaga

SEQ ID NO: 730379 - DNA, 15 bp, Homo sapiens
ttgcctcccaaagag

SEQ ID NO: 730380 - DNA, 15 bp, Homo sapiens
tgcctcccaaagagc

SEQ ID NO: 730381 - DNA, 15 bp, Homo sapiens
gcctcccaaagagct

SEQ ID NO: 730382 - DNA, 15 bp, Homo sapiens
cctcccaaagagctg

SEQ ID NO: 730383 - DNA, 15 bp, Homo sapiens
ctcccaaagagctgg

SEQ ID NO: 730384 - DNA, 15 bp, Homo sapiens
tcccaaagagctggg

SEQ ID NO: 730385 - DNA, 15 bp, Homo sapiens
cccaaagagctggga

SEQ ID NO: 730386 - DNA, 15 bp, Homo sapiens
ccaaagagctgggat

SEQ ID NO: 730387 - DNA, 15 bp, Homo sapiens
caaagagctgggatt

SEQ ID NO: 730388 - DNA, 15 bp, Homo sapiens
aaagagctgggatta

SEQ ID NO: 730389 - DNA, 15 bp, Homo sapiens
aagagctgggattac

SEQ ID NO: 730390 - DNA, 15 bp, Homo sapiens
agagctgggattaca

SEQ ID NO: 730391 - DNA, 15 bp, Homo sapiens
gagctgggattacag

SEQ ID NO: 730392 - DNA, 15 bp, Homo sapiens
attacaggcatgaga

SEQ ID NO: 730393 - DNA, 15 bp, Homo sapiens
ttacaggcatgagac

SEQ ID NO: 730394 - DNA, 15 bp, Homo sapiens
tacaggcatgagaca

SEQ ID NO: 730395 - DNA, 15 bp, Homo sapiens
acaggcatgagacac

SEQ ID NO: 730396 - DNA, 15 bp, Homo sapiens
caggcatgagacacc

SEQ ID NO: 730397 - DNA, 15 bp, Homo sapiens
aggcatgagacacca

SEQ ID NO: 730398 - DNA, 15 bp, Homo sapiens
ggcatgagacaccac

SEQ ID NO: 730399 - DNA, 15 bp, Homo sapiens
gcatgagacaccaca

SEQ ID NO: 730400 - DNA, 15 bp, Homo sapiens
catgagacaccacac

SEQ ID NO: 730401 - DNA, 15 bp, Homo sapiens
atgagacaccacacc

SEQ ID NO: 730402 - DNA, 15 bp, Homo sapiens
tgagacaccacaccc

SEQ ID NO: 730403 - DNA, 15 bp, Homo sapiens
gagacaccacacccg

SEQ ID NO: 730404 - DNA, 15 bp, Homo sapiens
agacaccacacccgg

SEQ ID NO: 730405 - DNA, 15 bp, Homo sapiens
gacaccacacccggc

SEQ ID NO: 730406 - DNA, 15 bp, Homo sapiens
acaccacacccggcc

SEQ ID NO: 730407 - DNA, 15 bp, Homo sapiens
caccacacccggcca

SEQ ID NO: 730408 - DNA, 15 bp, Homo sapiens
accacacccggccaa

SEQ ID NO: 730409 - DNA, 15 bp, Homo sapiens
ccacacccggccaat

SEQ ID NO: 730410 - DNA, 15 bp, Homo sapiens
cacacccggccaata

SEQ ID NO: 730411 - DNA, 15 bp, Homo sapiens
acacccggccaataa

SEQ ID NO: 730412 - DNA, 15 bp, Homo sapiens
cacccggccaataag

SEQ ID NO: 730413 - DNA, 15 bp, Homo sapiens
acccggccaataagt

SEQ ID NO: 730414 - DNA, 15 bp, Homo sapiens
cccggccaataagtg

SEQ ID NO: 730415 - DNA, 15 bp, Homo sapiens
ccggccaataagtgt

SEQ ID NO: 730416 - DNA, 15 bp, Homo sapiens
cggccaataagtgtc

SEQ ID NO: 730417 - DNA, 15 bp, Homo sapiens
ggccaataagtgtct

SEQ ID NO: 730418 - DNA, 15 bp, Homo sapiens
gccaataagtgtctt

SEQ ID NO: 730419 - DNA, 15 bp, Homo sapiens
ccaataagtgtcttc

SEQ ID NO: 730420 - DNA, 15 bp, Homo sapiens
caataagtgtcttca

SEQ ID NO: 730421 - DNA, 15 bp, Homo sapiens
aataagtgtcttcaa

SEQ ID NO: 730422 - DNA, 15 bp, Homo sapiens
ataagtgtcttcaaa

SEQ ID NO: 730423 - DNA, 15 bp, Homo sapiens
taagtgtcttcaaat

SEQ ID NO: 730424 - DNA, 15 bp, Homo sapiens
aagtgtcttcaaatg

SEQ ID NO: 730425 - DNA, 15 bp, Homo sapiens
agtgtcttcaaatgg

SEQ ID NO: 730426 - DNA, 15 bp, Homo sapiens
gtgtcttcaaatggg

SEQ ID NO: 730427 - DNA, 15 bp, Homo sapiens
tgtcttcaaatggga

SEQ ID NO: 730428 - DNA, 15 bp, Homo sapiens
gtcttcaaatgggaa

SEQ ID NO: 730429 - DNA, 15 bp, Homo sapiens
tcttcaaatgggaat

SEQ ID NO: 730430 - DNA, 15 bp, Homo sapiens
cttcaaatgggaatg

SEQ ID NO: 730431 - DNA, 15 bp, Homo sapiens
ttcaaatgggaatgt

SEQ ID NO: 730432 - DNA, 15 bp, Homo sapiens
tcaaatgggaatgtc

SEQ ID NO: 730433 - DNA, 15 bp, Homo sapiens
caaatgggaatgtca

SEQ ID NO: 730434 - DNA, 15 bp, Homo sapiens
aaatgggaatgtcag

SEQ ID NO: 730435 - DNA, 15 bp, Homo sapiens
aatgggaatgtcagg

SEQ ID NO: 730436 - DNA, 15 bp, Homo sapiens
atgggaatgtcaggc

SEQ ID NO: 730437 - DNA, 15 bp, Homo sapiens
tgggaatgtcaggct

SEQ ID NO: 730438 - DNA, 15 bp, Homo sapiens
gggaatgtcaggctg

SEQ ID NO: 730439 - DNA, 15 bp, Homo sapiens
ggaatgtcaggctgg

SEQ ID NO: 730440 - DNA, 15 bp, Homo sapiens
gaatgtcaggctggg

SEQ ID NO: 730441 - DNA, 15 bp, Homo sapiens
aatgtcaggctgggc

SEQ ID NO: 730442 - DNA, 15 bp, Homo sapiens
atgtcaggctgggcg

SEQ ID NO: 730443 - DNA, 15 bp, Homo sapiens
tgtcaggctgggcgc

SEQ ID NO: 730444 - DNA, 15 bp, Homo sapiens
gtcaggctgggcgcg

SEQ ID NO: 730445 - DNA, 15 bp, Homo sapiens
tcaggctgggcgcgg

SEQ ID NO: 730446 - DNA, 15 bp, Homo sapiens
caggctgggcgcggt

SEQ ID NO: 730447 - DNA, 15 bp, Homo sapiens
aggctgggcgcggtg

SEQ ID NO: 730448 - DNA, 15 bp, Homo sapiens
ggctgggcgcggtgg

SEQ ID NO: 730449 - DNA, 15 bp, Homo sapiens
gctgggcgcggtggt

SEQ ID NO: 730450 - DNA, 15 bp, Homo sapiens
ctgggcgcggtggtt

SEQ ID NO: 730451 - DNA, 15 bp, Homo sapiens
tgggcgcggtggttc

SEQ ID NO: 730452 - DNA, 15 bp, Homo sapiens
gggcgcggtggttca

SEQ ID NO: 730453 - DNA, 15 bp, Homo sapiens
ggcgcggtggttcac

SEQ ID NO: 730454 - DNA, 15 bp, Homo sapiens
gcgcggtggttcaca

SEQ ID NO: 730455 - DNA, 15 bp, Homo sapiens
cgcggtggttcacag

SEQ ID NO: 730456 - DNA, 15 bp, Homo sapiens
gcggtggttcacagt

SEQ ID NO: 730457 - DNA, 15 bp, Homo sapiens
cggtggttcacagtg

SEQ ID NO: 730458 - DNA, 15 bp, Homo sapiens
ggtggttcacagtgc

SEQ ID NO: 730459 - DNA, 15 bp, Homo sapiens
gtggttcacagtgct

SEQ ID NO: 730460 - DNA, 15 bp, Homo sapiens
tggttcacagtgctg

SEQ ID NO: 730461 - DNA, 15 bp, Homo sapiens
ggttcacagtgctgt

SEQ ID NO: 730462 - DNA, 15 bp, Homo sapiens
gttcacagtgctgta

SEQ ID NO: 730463 - DNA, 15 bp, Homo sapiens
ttcacagtgctgtaa

SEQ ID NO: 730464 - DNA, 15 bp, Homo sapiens
tcacagtgctgtaat

SEQ ID NO: 730465 - DNA, 15 bp, Homo sapiens
cacagtgctgtaatc

SEQ ID NO: 730466 - DNA, 15 bp, Homo sapiens
acagtgctgtaatcc

SEQ ID NO: 730467 - DNA, 15 bp, Homo sapiens
cagtgctgtaatccc

SEQ ID NO: 730468 - DNA, 15 bp, Homo sapiens
agtgctgtaatccca

SEQ ID NO: 730469 - DNA, 15 bp, Homo sapiens
gtgctgtaatcccag

SEQ ID NO: 730470 - DNA, 15 bp, Homo sapiens
tgctgtaatcccagc

SEQ ID NO: 730471 - DNA, 15 bp, Homo sapiens
gctgtaatcccagca

SEQ ID NO: 730472 - DNA, 15 bp, Homo sapiens
tgggaggccaaggca

SEQ ID NO: 730473 - DNA, 15 bp, Homo sapiens
gggaggccaaggcaa

SEQ ID NO: 730474 - DNA, 15 bp, Homo sapiens
ggaggccaaggcaag

SEQ ID NO: 730475 - DNA, 15 bp, Homo sapiens
gaggccaaggcaaga

SEQ ID NO: 730476 - DNA, 15 bp, Homo sapiens
aggccaaggcaagag

SEQ ID NO: 730477 - DNA, 15 bp, Homo sapiens
ggccaaggcaagagg

SEQ ID NO: 730478 - DNA, 15 bp, Homo sapiens
gccaaggcaagagga

SEQ ID NO: 730479 - DNA, 15 bp, Homo sapiens
ccaaggcaagaggat

SEQ ID NO: 730480 - DNA, 15 bp, Homo sapiens
caaggcaagaggatc

SEQ ID NO: 730481 - DNA, 15 bp, Homo sapiens
aaggcaagaggatcg

SEQ ID NO: 730482 - DNA, 15 bp, Homo sapiens
aggcaagaggatcgc

SEQ ID NO: 730483 - DNA, 15 bp, Homo sapiens
ggcaagaggatcgca

SEQ ID NO: 730484 - DNA, 15 bp, Homo sapiens
gcaagaggatcgcat

SEQ ID NO: 730485 - DNA, 15 bp, Homo sapiens
caagaggatcgcata

SEQ ID NO: 730486 - DNA, 15 bp, Homo sapiens
aagaggatcgcataa

SEQ ID NO: 730487 - DNA, 15 bp, Homo sapiens
agaggatcgcataag

SEQ ID NO: 730488 - DNA, 15 bp, Homo sapiens
gaggatcgcataagt

SEQ ID NO: 730489 - DNA, 15 bp, Homo sapiens
aggatcgcataagtc

SEQ ID NO: 730490 - DNA, 15 bp, Homo sapiens
ggatcgcataagtcc

SEQ ID NO: 730491 - DNA, 15 bp, Homo sapiens
gatcgcataagtcca

SEQ ID NO: 730492 - DNA, 15 bp, Homo sapiens
atcgcataagtccag

SEQ ID NO: 730493 - DNA, 15 bp, Homo sapiens
tcgcataagtccagg

SEQ ID NO: 730494 - DNA, 15 bp, Homo sapiens
cgcataagtccagga

SEQ ID NO: 730495 - DNA, 15 bp, Homo sapiens
gcataagtccaggag

SEQ ID NO: 730496 - DNA, 15 bp, Homo sapiens
cataagtccaggagt

SEQ ID NO: 730497 - DNA, 15 bp, Homo sapiens
ataagtccaggagtt

SEQ ID NO: 730498 - DNA, 15 bp, Homo sapiens
taagtccaggagttc

SEQ ID NO: 730499 - DNA, 15 bp, Homo sapiens
aagtccaggagttca

SEQ ID NO: 730500 - DNA, 15 bp, Homo sapiens
agtccaggagttcaa

SEQ ID NO: 730501 - DNA, 15 bp, Homo sapiens
gtccaggagttcaag

SEQ ID NO: 730502 - DNA, 15 bp, Homo sapiens
tccaggagttcaaga

SEQ ID NO: 730503 - DNA, 15 bp, Homo sapiens
caggagttcaagact

SEQ ID NO: 730504 - DNA, 15 bp, Homo sapiens
aggagttcaagacta

SEQ ID NO: 730505 - DNA, 15 bp, Homo sapiens
ggagttcaagactag

SEQ ID NO: 730506 - DNA, 15 bp, Homo sapiens
gagttcaagactaga

SEQ ID NO: 730507 - DNA, 15 bp, Homo sapiens
agttcaagactagac

SEQ ID NO: 730508 - DNA, 15 bp, Homo sapiens
gttcaagactagact

SEQ ID NO: 730509 - DNA, 15 bp, Homo sapiens
ttcaagactagactg

SEQ ID NO: 730510 - DNA, 15 bp, Homo sapiens
tcaagactagactgg

SEQ ID NO: 730511 - DNA, 15 bp, Homo sapiens
caagactagactggg

SEQ ID NO: 730512 - DNA, 15 bp, Homo sapiens
aagactagactgggc

SEQ ID NO: 730513 - DNA, 15 bp, Homo sapiens
agactagactgggca

SEQ ID NO: 730514 - DNA, 15 bp, Homo sapiens
gactagactgggcaa

SEQ ID NO: 730515 - DNA, 15 bp, Homo sapiens
actagactgggcaac

SEQ ID NO: 730516 - DNA, 15 bp, Homo sapiens
ctagactgggcaaca

SEQ ID NO: 730517 - DNA, 15 bp, Homo sapiens
tagactgggcaacat

SEQ ID NO: 730518 - DNA, 15 bp, Homo sapiens
agactgggcaacatt

SEQ ID NO: 730519 - DNA, 15 bp, Homo sapiens
gactgggcaacattt

SEQ ID NO: 730520 - DNA, 15 bp, Homo sapiens
actgggcaacattta

SEQ ID NO: 730521 - DNA, 15 bp, Homo sapiens
ctgggcaacatttag

SEQ ID NO: 730522 - DNA, 15 bp, Homo sapiens
tgggcaacatttagt

SEQ ID NO: 730523 - DNA, 15 bp, Homo sapiens
gggcaacatttagta

SEQ ID NO: 730524 - DNA, 15 bp, Homo sapiens
ggcaacatttagtaa

SEQ ID NO: 730525 - DNA, 15 bp, Homo sapiens
gcaacatttagtaaa

SEQ ID NO: 730526 - DNA, 15 bp, Homo sapiens
caacatttagtaaag

SEQ ID NO: 730527 - DNA, 15 bp, Homo sapiens
aacatttagtaaaga

SEQ ID NO: 730528 - DNA, 15 bp, Homo sapiens
acatttagtaaagac

SEQ ID NO: 730529 - DNA, 15 bp, Homo sapiens
catttagtaaagacc

SEQ ID NO: 730530 - DNA, 15 bp, Homo sapiens
atttagtaaagaccc

SEQ ID NO: 730531 - DNA, 15 bp, Homo sapiens
tttagtaaagaccct

SEQ ID NO: 730532 - DNA, 15 bp, Homo sapiens
ttagtaaagaccctg

SEQ ID NO: 730533 - DNA, 15 bp, Homo sapiens
tagtaaagaccctgt

SEQ ID NO: 730534 - DNA, 15 bp, Homo sapiens
agtaaagaccctgtc

SEQ ID NO: 730535 - DNA, 15 bp, Homo sapiens
gtaaagaccctgtct

SEQ ID NO: 730536 - DNA, 15 bp, Homo sapiens
taaagaccctgtctc

SEQ ID NO: 730537 - DNA, 15 bp, Homo sapiens
aaagaccctgtctct

SEQ ID NO: 730538 - DNA, 15 bp, Homo sapiens
aagaccctgtctcta

SEQ ID NO: 730539 - DNA, 15 bp, Homo sapiens
agaccctgtctctac

SEQ ID NO: 730540 - DNA, 15 bp, Homo sapiens
gaccctgtctctact

SEQ ID NO: 730541 - DNA, 15 bp, Homo sapiens
tgtctctactaaaac

SEQ ID NO: 730542 - DNA, 15 bp, Homo sapiens
gtctctactaaaaca

SEQ ID NO: 730543 - DNA, 15 bp, Homo sapiens
tctctactaaaacaa

SEQ ID NO: 730544 - DNA, 15 bp, Homo sapiens
ctctactaaaacaaa

SEQ ID NO: 730545 - DNA, 15 bp, Homo sapiens
tctactaaaacaaaa

SEQ ID NO: 730546 - DNA, 15 bp, Homo sapiens
ctactaaaacaaaac

SEQ ID NO: 730547 - DNA, 15 bp, Homo sapiens
tactaaaacaaaaca

SEQ ID NO: 730548 - DNA, 15 bp, Homo sapiens
actaaaacaaaacaa

SEQ ID NO: 730549 - DNA, 15 bp, Homo sapiens
ctaaaacaaaacaac

SEQ ID NO: 730550 - DNA, 15 bp, Homo sapiens
taaaacaaaacaaca

SEQ ID NO: 730551 - DNA, 15 bp, Homo sapiens
aaaacaaaacaacaa

SEQ ID NO: 730552 - DNA, 15 bp, Homo sapiens
aaacaaaacaacaac

SEQ ID NO: 730553 - DNA, 15 bp, Homo sapiens
aacaaaacaacaacc

SEQ ID NO: 730554 - DNA, 15 bp, Homo sapiens
acaaaacaacaacca

SEQ ID NO: 730555 - DNA, 15 bp, Homo sapiens
caaaacaacaaccac

SEQ ID NO: 730556 - DNA, 15 bp, Homo sapiens
aaaacaacaaccaca

SEQ ID NO: 730557 - DNA, 15 bp, Homo sapiens
aaacaacaaccacaa

SEQ ID NO: 730558 - DNA, 15 bp, Homo sapiens
aacaacaaccacaaa

SEQ ID NO: 730559 - DNA, 15 bp, Homo sapiens
acaacaaccacaaaa

SEQ ID NO: 730560 - DNA, 15 bp, Homo sapiens
caacaaccacaaaat

SEQ ID NO: 730561 - DNA, 15 bp, Homo sapiens
aacaaccacaaaatc

SEQ ID NO: 730562 - DNA, 15 bp, Homo sapiens
acaaccacaaaatca

SEQ ID NO: 730563 - DNA, 15 bp, Homo sapiens
caaccacaaaatcag

SEQ ID NO: 730564 - DNA, 15 bp, Homo sapiens
aaccacaaaatcagc

SEQ ID NO: 730565 - DNA, 15 bp, Homo sapiens
accacaaaatcagct

SEQ ID NO: 730566 - DNA, 15 bp, Homo sapiens
ccacaaaatcagctg

SEQ ID NO: 730567 - DNA, 15 bp, Homo sapiens
cacaaaatcagctgg

SEQ ID NO: 730568 - DNA, 15 bp, Homo sapiens
acaaaatcagctggg

SEQ ID NO: 730569 - DNA, 15 bp, Homo sapiens
caaaatcagctgggt

SEQ ID NO: 730570 - DNA, 15 bp, Homo sapiens
aaaatcagctgggtg

SEQ ID NO: 730571 - DNA, 15 bp, Homo sapiens
aaatcagctgggtgt

SEQ ID NO: 730572 - DNA, 15 bp, Homo sapiens
aatcagctgggtgtg

SEQ ID NO: 730573 - DNA, 15 bp, Homo sapiens
atcagctgggtgtgg

SEQ ID NO: 730574 - DNA, 15 bp, Homo sapiens
tcagctgggtgtggt

SEQ ID NO: 730575 - DNA, 15 bp, Homo sapiens
cagctgggtgtggtg

SEQ ID NO: 730576 - DNA, 15 bp, Homo sapiens
agctgggtgtggtgg

SEQ ID NO: 730577 - DNA, 15 bp, Homo sapiens
gctgggtgtggtggt

SEQ ID NO: 730578 - DNA, 15 bp, Homo sapiens
ctgggtgtggtggtg

SEQ ID NO: 730579 - DNA, 15 bp, Homo sapiens
tgggtgtggtggtgc

SEQ ID NO: 730580 - DNA, 15 bp, Homo sapiens
gggtgtggtggtgca

SEQ ID NO: 730581 - DNA, 15 bp, Homo sapiens
ggtgtggtggtgcat

SEQ ID NO: 730582 - DNA, 15 bp, Homo sapiens
gtgtggtggtgcatg

SEQ ID NO: 730583 - DNA, 15 bp, Homo sapiens
tgtggtggtgcatgc

SEQ ID NO: 730584 - DNA, 15 bp, Homo sapiens
gtggtggtgcatgcc

SEQ ID NO: 730585 - DNA, 15 bp, Homo sapiens
tggtggtgcatgcct

SEQ ID NO: 730586 - DNA, 15 bp, Homo sapiens
ggtggtgcatgccta

SEQ ID NO: 730587 - DNA, 15 bp, Homo sapiens
gtggtgcatgcctat

SEQ ID NO: 730588 - DNA, 15 bp, Homo sapiens
tggtgcatgcctata

SEQ ID NO: 730589 - DNA, 15 bp, Homo sapiens
ggtgcatgcctatag

SEQ ID NO: 730590 - DNA, 15 bp, Homo sapiens
gtgcatgcctatagt

SEQ ID NO: 730591 - DNA, 15 bp, Homo sapiens
tgcatgcctatagtc

SEQ ID NO: 730592 - DNA, 15 bp, Homo sapiens
gcatgcctatagtcc

SEQ ID NO: 730593 - DNA, 15 bp, Homo sapiens
catgcctatagtccc

SEQ ID NO: 730594 - DNA, 15 bp, Homo sapiens
atgcctatagtccca

SEQ ID NO: 730595 - DNA, 15 bp, Homo sapiens
tgcctatagtcccag

SEQ ID NO: 730596 - DNA, 15 bp, Homo sapiens
gcctatagtcccagc

SEQ ID NO: 730597 - DNA, 15 bp, Homo sapiens
cctatagtcccagct

SEQ ID NO: 730598 - DNA, 15 bp, Homo sapiens
ctatagtcccagcta

SEQ ID NO: 730599 - DNA, 15 bp, Homo sapiens
tatagtcccagctac

SEQ ID NO: 730600 - DNA, 15 bp, Homo sapiens
atagtcccagctact

SEQ ID NO: 730601 - DNA, 15 bp, Homo sapiens
tcccagctacttggg

SEQ ID NO: 730602 - DNA, 15 bp, Homo sapiens
cccagctacttggga

SEQ ID NO: 730603 - DNA, 15 bp, Homo sapiens
ccagctacttgggag

SEQ ID NO: 730604 - DNA, 15 bp, Homo sapiens
cagctacttgggagg

SEQ ID NO: 730605 - DNA, 15 bp, Homo sapiens
agctacttgggaggc

SEQ ID NO: 730606 - DNA, 15 bp, Homo sapiens
gctacttgggaggct

SEQ ID NO: 730607 - DNA, 15 bp, Homo sapiens
tacttgggaggctga

SEQ ID NO: 730608 - DNA, 15 bp, Homo sapiens
acttgggaggctgag

SEQ ID NO: 730609 - DNA, 15 bp, Homo sapiens
cttgggaggctgagg

SEQ ID NO: 730610 - DNA, 15 bp, Homo sapiens
gaggcaggaggatcc

SEQ ID NO: 730611 - DNA, 15 bp, Homo sapiens
aggcaggaggatccc

SEQ ID NO: 730612 - DNA, 15 bp, Homo sapiens
ggcaggaggatccct

SEQ ID NO: 730613 - DNA, 15 bp, Homo sapiens
gcaggaggatccctt

SEQ ID NO: 730614 - DNA, 15 bp, Homo sapiens
caggaggatcccttg

SEQ ID NO: 730615 - DNA, 15 bp, Homo sapiens
aggaggatcccttga

SEQ ID NO: 730616 - DNA, 15 bp, Homo sapiens
ggaggatcccttgag

SEQ ID NO: 730617 - DNA, 15 bp, Homo sapiens
gaggatcccttgaga

SEQ ID NO: 730618 - DNA, 15 bp, Homo sapiens
aggatcccttgagac

SEQ ID NO: 730619 - DNA, 15 bp, Homo sapiens
ggatcccttgagacc

SEQ ID NO: 730620 - DNA, 15 bp, Homo sapiens
gatcccttgagacca

SEQ ID NO: 730621 - DNA, 15 bp, Homo sapiens
atcccttgagaccag

SEQ ID NO: 730622 - DNA, 15 bp, Homo sapiens
tcccttgagaccagg

SEQ ID NO: 730623 - DNA, 15 bp, Homo sapiens
cccttgagaccagga

SEQ ID NO: 730624 - DNA, 15 bp, Homo sapiens
ccttgagaccaggag

SEQ ID NO: 730625 - DNA, 15 bp, Homo sapiens
cttgagaccaggagt

SEQ ID NO: 730626 - DNA, 15 bp, Homo sapiens
ttgagaccaggagtt

SEQ ID NO: 730627 - DNA, 15 bp, Homo sapiens
tgagaccaggagttc

SEQ ID NO: 730628 - DNA, 15 bp, Homo sapiens
gagaccaggagttca

SEQ ID NO: 730629 - DNA, 15 bp, Homo sapiens
agaccaggagttcaa

SEQ ID NO: 730630 - DNA, 15 bp, Homo sapiens
gaccaggagttcaag

SEQ ID NO: 730631 - DNA, 15 bp, Homo sapiens
accaggagttcaagg

SEQ ID NO: 730632 - DNA, 15 bp, Homo sapiens
ccaggagttcaaggt

SEQ ID NO: 730633 - DNA, 15 bp, Homo sapiens
caggagttcaaggtt

SEQ ID NO: 730634 - DNA, 15 bp, Homo sapiens
aggagttcaaggttg

SEQ ID NO: 730635 - DNA, 15 bp, Homo sapiens
ggagttcaaggttgc

SEQ ID NO: 730636 - DNA, 15 bp, Homo sapiens
gagttcaaggttgca

SEQ ID NO: 730637 - DNA, 15 bp, Homo sapiens
agttcaaggttgcag

SEQ ID NO: 730638 - DNA, 15 bp, Homo sapiens
gttcaaggttgcagt

SEQ ID NO: 730639 - DNA, 15 bp, Homo sapiens
ttcaaggttgcagtt

SEQ ID NO: 730640 - DNA, 15 bp, Homo sapiens
tcaaggttgcagtta

SEQ ID NO: 730641 - DNA, 15 bp, Homo sapiens
caaggttgcagttag

SEQ ID NO: 730642 - DNA, 15 bp, Homo sapiens
aaggttgcagttagc

SEQ ID NO: 730643 - DNA, 15 bp, Homo sapiens
aggttgcagttagct

SEQ ID NO: 730644 - DNA, 15 bp, Homo sapiens
ggttgcagttagctg

SEQ ID NO: 730645 - DNA, 15 bp, Homo sapiens
gttgcagttagctgc

SEQ ID NO: 730646 - DNA, 15 bp, Homo sapiens
ttgcagttagctgct

SEQ ID NO: 730647 - DNA, 15 bp, Homo sapiens
tgcagttagctgcta

SEQ ID NO: 730648 - DNA, 15 bp, Homo sapiens
gcagttagctgctac

SEQ ID NO: 730649 - DNA, 15 bp, Homo sapiens
cagttagctgctacc

SEQ ID NO: 730650 - DNA, 15 bp, Homo sapiens
agttagctgctacct

SEQ ID NO: 730651 - DNA, 15 bp, Homo sapiens
gttagctgctacctg

SEQ ID NO: 730652 - DNA, 15 bp, Homo sapiens
ttagctgctacctgc

SEQ ID NO: 730653 - DNA, 15 bp, Homo sapiens
tagctgctacctgca

SEQ ID NO: 730654 - DNA, 15 bp, Homo sapiens
agctgctacctgcag

SEQ ID NO: 730655 - DNA, 15 bp, Homo sapiens
gctgctacctgcaga

SEQ ID NO: 730656 - DNA, 15 bp, Homo sapiens
ctgctacctgcagat

SEQ ID NO: 730657 - DNA, 15 bp, Homo sapiens
tgctacctgcagatt

SEQ ID NO: 730658 - DNA, 15 bp, Homo sapiens
gctacctgcagattg

SEQ ID NO: 730659 - DNA, 15 bp, Homo sapiens
ctacctgcagattgt

SEQ ID NO: 730660 - DNA, 15 bp, Homo sapiens
tacctgcagattgta

SEQ ID NO: 730661 - DNA, 15 bp, Homo sapiens
acctgcagattgtac

SEQ ID NO: 730662 - DNA, 15 bp, Homo sapiens
cctgcagattgtacc

SEQ ID NO: 730663 - DNA, 15 bp, Homo sapiens
ctgcagattgtacca

SEQ ID NO: 730664 - DNA, 15 bp, Homo sapiens
tgcagattgtaccac

SEQ ID NO: 730665 - DNA, 15 bp, Homo sapiens
gcagattgtaccact

SEQ ID NO: 730666 - DNA, 15 bp, Homo sapiens
cagattgtaccactg

SEQ ID NO: 730667 - DNA, 15 bp, Homo sapiens
agattgtaccactgc

SEQ ID NO: 730668 - DNA, 15 bp, Homo sapiens
gattgtaccactgca

SEQ ID NO: 730669 - DNA, 15 bp, Homo sapiens
attgtaccactgcac

SEQ ID NO: 730670 - DNA, 15 bp, Homo sapiens
ttgtaccactgcact

SEQ ID NO: 730671 - DNA, 15 bp, Homo sapiens
tgtaccactgcactc

SEQ ID NO: 730672 - DNA, 15 bp, Homo sapiens
gtaccactgcactcc

SEQ ID NO: 730673 - DNA, 15 bp, Homo sapiens
taccactgcactcca

SEQ ID NO: 730674 - DNA, 15 bp, Homo sapiens
actccagcctgagcg

SEQ ID NO: 730675 - DNA, 15 bp, Homo sapiens
ctccagcctgagcga

SEQ ID NO: 730676 - DNA, 15 bp, Homo sapiens
tccagcctgagcgac

SEQ ID NO: 730677 - DNA, 15 bp, Homo sapiens
ccagcctgagcgaca

SEQ ID NO: 730678 - DNA, 15 bp, Homo sapiens
cagcctgagcgacaa

SEQ ID NO: 730679 - DNA, 15 bp, Homo sapiens
agcctgagcgacaaa

SEQ ID NO: 730680 - DNA, 15 bp, Homo sapiens
gcctgagcgacaaag

SEQ ID NO: 730681 - DNA, 15 bp, Homo sapiens
cctgagcgacaaagt

SEQ ID NO: 730682 - DNA, 15 bp, Homo sapiens
ctgagcgacaaagtg

SEQ ID NO: 730683 - DNA, 15 bp, Homo sapiens
tgagcgacaaagtga

SEQ ID NO: 730684 - DNA, 15 bp, Homo sapiens
gagcgacaaagtgag

SEQ ID NO: 730685 - DNA, 15 bp, Homo sapiens
agcgacaaagtgaga

SEQ ID NO: 730686 - DNA, 15 bp, Homo sapiens
gcgacaaagtgagat

SEQ ID NO: 730687 - DNA, 15 bp, Homo sapiens
cgacaaagtgagatc

SEQ ID NO: 730688 - DNA, 15 bp, Homo sapiens
gacaaagtgagatcc

SEQ ID NO: 730689 - DNA, 15 bp, Homo sapiens
acaaagtgagatcct

SEQ ID NO: 730690 - DNA, 15 bp, Homo sapiens
caaagtgagatccta

SEQ ID NO: 730691 - DNA, 15 bp, Homo sapiens
aaagtgagatcctat

SEQ ID NO: 730692 - DNA, 15 bp, Homo sapiens
aagtgagatcctatc

SEQ ID NO: 730693 - DNA, 15 bp, Homo sapiens
agtgagatcctatct

SEQ ID NO: 730694 - DNA, 15 bp, Homo sapiens
gtgagatcctatctc

SEQ ID NO: 730695 - DNA, 15 bp, Homo sapiens
tgagatcctatctca

SEQ ID NO: 730696 - DNA, 15 bp, Homo sapiens
gagatcctatctcaa

SEQ ID NO: 730697 - DNA, 15 bp, Homo sapiens
agatcctatctcaaa

SEQ ID NO: 730698 - DNA, 15 bp, Homo sapiens
gatcctatctcaaaa

SEQ ID NO: 730699 - DNA, 15 bp, Homo sapiens
atcctatctcaaaac

SEQ ID NO: 730700 - DNA, 15 bp, Homo sapiens
tcctatctcaaaaca

SEQ ID NO: 730701 - DNA, 15 bp, Homo sapiens
cctatctcaaaacaa

SEQ ID NO: 730702 - DNA, 15 bp, Homo sapiens
ctatctcaaaacaaa

SEQ ID NO: 730703 - DNA, 15 bp, Homo sapiens
tatctcaaaacaaac

SEQ ID NO: 730704 - DNA, 15 bp, Homo sapiens
atctcaaaacaaaca

SEQ ID NO: 730705 - DNA, 15 bp, Homo sapiens
tctcaaaacaaacaa

SEQ ID NO: 730706 - DNA, 15 bp, Homo sapiens
ctcaaaacaaacaac

SEQ ID NO: 730707 - DNA, 15 bp, Homo sapiens
tcaaaacaaacaaca

SEQ ID NO: 730708 - DNA, 15 bp, Homo sapiens
caaaacaaacaacaa

SEQ ID NO: 730709 - DNA, 15 bp, Homo sapiens
aaaacaaacaacaac

SEQ ID NO: 730710 - DNA, 15 bp, Homo sapiens
aaacaaacaacaaca

SEQ ID NO: 730711 - DNA, 15 bp, Homo sapiens
aacaaacaacaacaa

SEQ ID NO: 730712 - DNA, 15 bp, Homo sapiens
acaaacaacaacaac

SEQ ID NO: 730713 - DNA, 15 bp, Homo sapiens
caaacaacaacaaca

SEQ ID NO: 730714 - DNA, 15 bp, Homo sapiens
aaacaacaacaacaa

SEQ ID NO: 730715 - DNA, 15 bp, Homo sapiens
aacaacaacaacaat

SEQ ID NO: 730716 - DNA, 15 bp, Homo sapiens
acaacaacaacaata

SEQ ID NO: 730717 - DNA, 15 bp, Homo sapiens
caacaacaacaatag

SEQ ID NO: 730718 - DNA, 15 bp, Homo sapiens
aacaacaacaataga

SEQ ID NO: 730719 - DNA, 15 bp, Homo sapiens
acaacaacaatagaa

SEQ ID NO: 730720 - DNA, 15 bp, Homo sapiens
caacaacaatagaaa

SEQ ID NO: 730721 - DNA, 15 bp, Homo sapiens
aacaacaatagaaac

SEQ ID NO: 730722 - DNA, 15 bp, Homo sapiens
acaacaatagaaaca

SEQ ID NO: 730723 - DNA, 15 bp, Homo sapiens
caacaatagaaacag

SEQ ID NO: 730724 - DNA, 15 bp, Homo sapiens
aacaatagaaacaga

SEQ ID NO: 730725 - DNA, 15 bp, Homo sapiens
acaatagaaacagat

SEQ ID NO: 730726 - DNA, 15 bp, Homo sapiens
caatagaaacagatg

SEQ ID NO: 730727 - DNA, 15 bp, Homo sapiens
aatagaaacagatgg

SEQ ID NO: 730728 - DNA, 15 bp, Homo sapiens
atagaaacagatggg

SEQ ID NO: 730729 - DNA, 15 bp, Homo sapiens
tagaaacagatgggg

SEQ ID NO: 730730 - DNA, 15 bp, Homo sapiens
agaaacagatggggc

SEQ ID NO: 730731 - DNA, 15 bp, Homo sapiens
gaaacagatggggcc

SEQ ID NO: 730732 - DNA, 15 bp, Homo sapiens
aaacagatggggcca

SEQ ID NO: 730733 - DNA, 15 bp, Homo sapiens
aacagatggggccag

SEQ ID NO: 730734 - DNA, 15 bp, Homo sapiens
acagatggggccagg

SEQ ID NO: 730735 - DNA, 15 bp, Homo sapiens
cagatggggccaggc

SEQ ID NO: 730736 - DNA, 15 bp, Homo sapiens
agatggggccaggca

SEQ ID NO: 730737 - DNA, 15 bp, Homo sapiens
gatggggccaggcac

SEQ ID NO: 730738 - DNA, 15 bp, Homo sapiens
atggggccaggcacg

SEQ ID NO: 730739 - DNA, 15 bp, Homo sapiens
tggggccaggcacgg

SEQ ID NO: 730740 - DNA, 15 bp, Homo sapiens
ggggccaggcacggt

SEQ ID NO: 730741 - DNA, 15 bp, Homo sapiens
gggccaggcacggtg

SEQ ID NO: 730742 - DNA, 15 bp, Homo sapiens
ggccaggcacggtgg

SEQ ID NO: 730743 - DNA, 15 bp, Homo sapiens
gccaggcacggtggc

SEQ ID NO: 730744 - DNA, 15 bp, Homo sapiens
ccaggcacggtggct

SEQ ID NO: 730745 - DNA, 15 bp, Homo sapiens
caggcacggtggctc

SEQ ID NO: 730746 - DNA, 15 bp, Homo sapiens
aggcacggtggctca

SEQ ID NO: 730747 - DNA, 15 bp, Homo sapiens
ggcacggtggctcac

SEQ ID NO: 730748 - DNA, 15 bp, Homo sapiens
gcacggtggctcaca

SEQ ID NO: 730749 - DNA, 15 bp, Homo sapiens
cacggtggctcacac

SEQ ID NO: 730750 - DNA, 15 bp, Homo sapiens
acggtggctcacacc

SEQ ID NO: 730751 - DNA, 15 bp, Homo sapiens
cggtggctcacacct

SEQ ID NO: 730752 - DNA, 15 bp, Homo sapiens
ggtggctcacacctg

SEQ ID NO: 730753 - DNA, 15 bp, Homo sapiens
gtggctcacacctgt

SEQ ID NO: 730754 - DNA, 15 bp, Homo sapiens
tggctcacacctgta

SEQ ID NO: 730755 - DNA, 15 bp, Homo sapiens
ggctcacacctgtaa

SEQ ID NO: 730756 - DNA, 15 bp, Homo sapiens
gctcacacctgtaat

SEQ ID NO: 730757 - DNA, 15 bp, Homo sapiens
ctcacacctgtaatc

SEQ ID NO: 730758 - DNA, 15 bp, Homo sapiens
tcacacctgtaatct

SEQ ID NO: 730759 - DNA, 15 bp, Homo sapiens
cacacctgtaatctt

SEQ ID NO: 730760 - DNA, 15 bp, Homo sapiens
acacctgtaatctta

SEQ ID NO: 730761 - DNA, 15 bp, Homo sapiens
cacctgtaatcttaa

SEQ ID NO: 730762 - DNA, 15 bp, Homo sapiens
acctgtaatcttaac

SEQ ID NO: 730763 - DNA, 15 bp, Homo sapiens
cctgtaatcttaaca

SEQ ID NO: 730764 - DNA, 15 bp, Homo sapiens
ctgtaatcttaacac

SEQ ID NO: 730765 - DNA, 15 bp, Homo sapiens
tgtaatcttaacact

SEQ ID NO: 730766 - DNA, 15 bp, Homo sapiens
gtaatcttaacactt

SEQ ID NO: 730767 - DNA, 15 bp, Homo sapiens
taatcttaacacttt

SEQ ID NO: 730768 - DNA, 15 bp, Homo sapiens
aatcttaacactttg

SEQ ID NO: 730769 - DNA, 15 bp, Homo sapiens
atcttaacactttgg

SEQ ID NO: 730770 - DNA, 15 bp, Homo sapiens
tcttaacactttggg

SEQ ID NO: 730771 - DNA, 15 bp, Homo sapiens
cttaacactttggga

SEQ ID NO: 730772 - DNA, 15 bp, Homo sapiens
ttaacactttgggag

SEQ ID NO: 730773 - DNA, 15 bp, Homo sapiens
taacactttgggagg

SEQ ID NO: 730774 - DNA, 15 bp, Homo sapiens
aacactttgggaggc

SEQ ID NO: 730775 - DNA, 15 bp, Homo sapiens
acactttgggaggcc

SEQ ID NO: 730776 - DNA, 15 bp, Homo sapiens
tgggaggccaaggtc

SEQ ID NO: 730777 - DNA, 15 bp, Homo sapiens
gggaggccaaggtca

SEQ ID NO: 730778 - DNA, 15 bp, Homo sapiens
ggaggccaaggtcag

SEQ ID NO: 730779 - DNA, 15 bp, Homo sapiens
gaggccaaggtcaga

SEQ ID NO: 730780 - DNA, 15 bp, Homo sapiens
aggccaaggtcagag

SEQ ID NO: 730781 - DNA, 15 bp, Homo sapiens
ggccaaggtcagagg

SEQ ID NO: 730782 - DNA, 15 bp, Homo sapiens
gccaaggtcagagga

SEQ ID NO: 730783 - DNA, 15 bp, Homo sapiens
ccaaggtcagaggac

SEQ ID NO: 730784 - DNA, 15 bp, Homo sapiens
caaggtcagaggact

SEQ ID NO: 730785 - DNA, 15 bp, Homo sapiens
aaggtcagaggactg

SEQ ID NO: 730786 - DNA, 15 bp, Homo sapiens
aggtcagaggactgc

SEQ ID NO: 730787 - DNA, 15 bp, Homo sapiens
ggtcagaggactgct

SEQ ID NO: 730788 - DNA, 15 bp, Homo sapiens
gtcagaggactgctt

SEQ ID NO: 730789 - DNA, 15 bp, Homo sapiens
tcagaggactgcttg

SEQ ID NO: 730790 - DNA, 15 bp, Homo sapiens
cagaggactgcttga

SEQ ID NO: 730791 - DNA, 15 bp, Homo sapiens
agaggactgcttgag

SEQ ID NO: 730792 - DNA, 15 bp, Homo sapiens
gaggactgcttgagg

SEQ ID NO: 730793 - DNA, 15 bp, Homo sapiens
aggactgcttgaggc

SEQ ID NO: 730794 - DNA, 15 bp, Homo sapiens
ggactgcttgaggcc

SEQ ID NO: 730795 - DNA, 15 bp, Homo sapiens
gactgcttgaggcca

SEQ ID NO: 730796 - DNA, 15 bp, Homo sapiens
actgcttgaggccag

SEQ ID NO: 730797 - DNA, 15 bp, Homo sapiens
ctgcttgaggccagg

SEQ ID NO: 730798 - DNA, 15 bp, Homo sapiens
tgcttgaggccagga

SEQ ID NO: 730799 - DNA, 15 bp, Homo sapiens
gaggccaggagtttg

SEQ ID NO: 730800 - DNA, 15 bp, Homo sapiens
aggccaggagtttga

SEQ ID NO: 730801 - DNA, 15 bp, Homo sapiens
ggccaggagtttgag

SEQ ID NO: 730802 - DNA, 15 bp, Homo sapiens
gccaggagtttgaga

SEQ ID NO: 730803 - DNA, 15 bp, Homo sapiens
tgagaccagcctggg

SEQ ID NO: 730804 - DNA, 15 bp, Homo sapiens
gagaccagcctgggc

SEQ ID NO: 730805 - DNA, 15 bp, Homo sapiens
cagcctgggcaacat

SEQ ID NO: 730806 - DNA, 15 bp, Homo sapiens
agcctgggcaacata

SEQ ID NO: 730807 - DNA, 15 bp, Homo sapiens
gcctgggcaacatag

SEQ ID NO: 730808 - DNA, 15 bp, Homo sapiens
cctgggcaacatagc

SEQ ID NO: 730809 - DNA, 15 bp, Homo sapiens
ctgggcaacatagca

SEQ ID NO: 730810 - DNA, 15 bp, Homo sapiens
tgggcaacatagcaa

SEQ ID NO: 730811 - DNA, 15 bp, Homo sapiens
gggcaacatagcaag

SEQ ID NO: 730812 - DNA, 15 bp, Homo sapiens
ggcaacatagcaaga

SEQ ID NO: 730813 - DNA, 15 bp, Homo sapiens
gcaacatagcaagac

SEQ ID NO: 730814 - DNA, 15 bp, Homo sapiens
caacatagcaagacc

SEQ ID NO: 730815 - DNA, 15 bp, Homo sapiens
aacatagcaagaccc

SEQ ID NO: 730816 - DNA, 15 bp, Homo sapiens
acatagcaagaccct

SEQ ID NO: 730817 - DNA, 15 bp, Homo sapiens
catagcaagaccctg

SEQ ID NO: 730818 - DNA, 15 bp, Homo sapiens
atagcaagaccctgt

SEQ ID NO: 730819 - DNA, 15 bp, Homo sapiens
tagcaagaccctgtc

SEQ ID NO: 730820 - DNA, 15 bp, Homo sapiens
agcaagaccctgtct

SEQ ID NO: 730821 - DNA, 15 bp, Homo sapiens
gcaagaccctgtctc

SEQ ID NO: 730822 - DNA, 15 bp, Homo sapiens
caagaccctgtctct

SEQ ID NO: 730823 - DNA, 15 bp, Homo sapiens
agaccctgtctctaa

SEQ ID NO: 730824 - DNA, 15 bp, Homo sapiens
gaccctgtctctaag

SEQ ID NO: 730825 - DNA, 15 bp, Homo sapiens
accctgtctctaagg

SEQ ID NO: 730826 - DNA, 15 bp, Homo sapiens
ccctgtctctaagga

SEQ ID NO: 730827 - DNA, 15 bp, Homo sapiens
cctgtctctaaggaa

SEQ ID NO: 730828 - DNA, 15 bp, Homo sapiens
ctgtctctaaggaaa

SEQ ID NO: 730829 - DNA, 15 bp, Homo sapiens
tgtctctaaggaaaa

SEQ ID NO: 730830 - DNA, 15 bp, Homo sapiens
gtctctaaggaaaaa

SEQ ID NO: 730831 - DNA, 15 bp, Homo sapiens
tctctaaggaaaaaa

SEQ ID NO: 730832 - DNA, 15 bp, Homo sapiens
ctctaaggaaaaaaa

SEQ ID NO: 730833 - DNA, 15 bp, Homo sapiens
tctaaggaaaaaaaa

SEQ ID NO: 730834 - DNA, 15 bp, Homo sapiens
ctaaggaaaaaaaaa

SEQ ID NO: 730835 - DNA, 15 bp, Homo sapiens
taaggaaaaaaaaaa

SEQ ID NO: 730836 - DNA, 15 bp, Homo sapiens
aaggaaaaaaaaaaa

SEQ ID NO: 730837 - DNA, 15 bp, Homo sapiens
aggaaaaaaaaaaat

SEQ ID NO: 730838 - DNA, 15 bp, Homo sapiens
ggaaaaaaaaaaatg

SEQ ID NO: 730839 - DNA, 15 bp, Homo sapiens
gaaaaaaaaaaatgc

SEQ ID NO: 730840 - DNA, 15 bp, Homo sapiens
aaaaaaaaaaatgct

SEQ ID NO: 730841 - DNA, 15 bp, Homo sapiens
aaaaaaaaaatgctg

SEQ ID NO: 730842 - DNA, 15 bp, Homo sapiens
aaaaaaaaatgctgg

SEQ ID NO: 730843 - DNA, 15 bp, Homo sapiens
aaaaaaaatgctggg

SEQ ID NO: 730844 - DNA, 15 bp, Homo sapiens
aaaaaaatgctgggc

SEQ ID NO: 730845 - DNA, 15 bp, Homo sapiens
aaaaaatgctgggcg

SEQ ID NO: 730846 - DNA, 15 bp, Homo sapiens
aaaaatgctgggcgc

SEQ ID NO: 730847 - DNA, 15 bp, Homo sapiens
aaaatgctgggcgca

SEQ ID NO: 730848 - DNA, 15 bp, Homo sapiens
aaatgctgggcgcag

SEQ ID NO: 730849 - DNA, 15 bp, Homo sapiens
aatgctgggcgcagt

SEQ ID NO: 730850 - DNA, 15 bp, Homo sapiens
atgctgggcgcagtg

SEQ ID NO: 730851 - DNA, 15 bp, Homo sapiens
tgctgggcgcagtgg

SEQ ID NO: 730852 - DNA, 15 bp, Homo sapiens
gcgcagtggctcaca

SEQ ID NO: 730853 - DNA, 15 bp, Homo sapiens
cgcagtggctcacac

SEQ ID NO: 730854 - DNA, 15 bp, Homo sapiens
gcagtggctcacacc

SEQ ID NO: 730855 - DNA, 15 bp, Homo sapiens
cagtggctcacacct

SEQ ID NO: 730856 - DNA, 15 bp, Homo sapiens
agtggctcacacctg

SEQ ID NO: 730857 - DNA, 15 bp, Homo sapiens
cacctgtaatcccaa

SEQ ID NO: 730858 - DNA, 15 bp, Homo sapiens
acctgtaatcccaac

SEQ ID NO: 730859 - DNA, 15 bp, Homo sapiens
cctgtaatcccaaca

SEQ ID NO: 730860 - DNA, 15 bp, Homo sapiens
ctgtaatcccaacac

SEQ ID NO: 730861 - DNA, 15 bp, Homo sapiens
tgtaatcccaacact

SEQ ID NO: 730862 - DNA, 15 bp, Homo sapiens
gtaatcccaacactt

SEQ ID NO: 730863 - DNA, 15 bp, Homo sapiens
taatcccaacacttt

SEQ ID NO: 730864 - DNA, 15 bp, Homo sapiens
aatcccaacactttg

SEQ ID NO: 730865 - DNA, 15 bp, Homo sapiens
atcccaacactttgg

SEQ ID NO: 730866 - DNA, 15 bp, Homo sapiens
tcccaacactttggg

SEQ ID NO: 730867 - DNA, 15 bp, Homo sapiens
cccaacactttggga

SEQ ID NO: 730868 - DNA, 15 bp, Homo sapiens
ccaacactttgggag

SEQ ID NO: 730869 - DNA, 15 bp, Homo sapiens
caacactttgggagg

SEQ ID NO: 730870 - DNA, 15 bp, Homo sapiens
acactttgggaggct

SEQ ID NO: 730871 - DNA, 15 bp, Homo sapiens
tttgggaggctgagc

SEQ ID NO: 730872 - DNA, 15 bp, Homo sapiens
ttgggaggctgagct

SEQ ID NO: 730873 - DNA, 15 bp, Homo sapiens
tgggaggctgagctg

SEQ ID NO: 730874 - DNA, 15 bp, Homo sapiens
gggaggctgagctgg

SEQ ID NO: 730875 - DNA, 15 bp, Homo sapiens
ggaggctgagctggg

SEQ ID NO: 730876 - DNA, 15 bp, Homo sapiens
gaggctgagctgggc

SEQ ID NO: 730877 - DNA, 15 bp, Homo sapiens
aggctgagctgggca

SEQ ID NO: 730878 - DNA, 15 bp, Homo sapiens
ggctgagctgggcag

SEQ ID NO: 730879 - DNA, 15 bp, Homo sapiens
gctgagctgggcaga

SEQ ID NO: 730880 - DNA, 15 bp, Homo sapiens
ctgagctgggcagat

SEQ ID NO: 730881 - DNA, 15 bp, Homo sapiens
tgagctgggcagatc

SEQ ID NO: 730882 - DNA, 15 bp, Homo sapiens
gagctgggcagatca

SEQ ID NO: 730883 - DNA, 15 bp, Homo sapiens
agctgggcagatcac

SEQ ID NO: 730884 - DNA, 15 bp, Homo sapiens
gctgggcagatcaca

SEQ ID NO: 730885 - DNA, 15 bp, Homo sapiens
ctgggcagatcacaa

SEQ ID NO: 730886 - DNA, 15 bp, Homo sapiens
tgggcagatcacaag

SEQ ID NO: 730887 - DNA, 15 bp, Homo sapiens
gggcagatcacaagg

SEQ ID NO: 730888 - DNA, 15 bp, Homo sapiens
ggcagatcacaaggt

SEQ ID NO: 730889 - DNA, 15 bp, Homo sapiens
gcagatcacaaggtc

SEQ ID NO: 730890 - DNA, 15 bp, Homo sapiens
cagatcacaaggtca

SEQ ID NO: 730891 - DNA, 15 bp, Homo sapiens
agatcacaaggtcaa

SEQ ID NO: 730892 - DNA, 15 bp, Homo sapiens
tcacaaggtcaagag

SEQ ID NO: 730893 - DNA, 15 bp, Homo sapiens
cacaaggtcaagaga

SEQ ID NO: 730894 - DNA, 15 bp, Homo sapiens
acaaggtcaagagat

SEQ ID NO: 730895 - DNA, 15 bp, Homo sapiens
caaggtcaagagatc

SEQ ID NO: 730896 - DNA, 15 bp, Homo sapiens
aaggtcaagagatcg

SEQ ID NO: 730897 - DNA, 15 bp, Homo sapiens
aggtcaagagatcga

SEQ ID NO: 730898 - DNA, 15 bp, Homo sapiens
ggtcaagagatcgag

SEQ ID NO: 730899 - DNA, 15 bp, Homo sapiens
gtcaagagatcgaga

SEQ ID NO: 730900 - DNA, 15 bp, Homo sapiens
tcaagagatcgagac

SEQ ID NO: 730901 - DNA, 15 bp, Homo sapiens
caagagatcgagacc

SEQ ID NO: 730902 - DNA, 15 bp, Homo sapiens
aagagatcgagacca

SEQ ID NO: 730903 - DNA, 15 bp, Homo sapiens
agagatcgagaccat

SEQ ID NO: 730904 - DNA, 15 bp, Homo sapiens
gagaccatcctggcc

SEQ ID NO: 730905 - DNA, 15 bp, Homo sapiens
agaccatcctggcca

SEQ ID NO: 730906 - DNA, 15 bp, Homo sapiens
gaccatcctggccaa

SEQ ID NO: 730907 - DNA, 15 bp, Homo sapiens
accatcctggccaac

SEQ ID NO: 730908 - DNA, 15 bp, Homo sapiens
ccatcctggccaaca

SEQ ID NO: 730909 - DNA, 15 bp, Homo sapiens
catcctggccaacat

SEQ ID NO: 730910 - DNA, 15 bp, Homo sapiens
atcctggccaacatg

SEQ ID NO: 730911 - DNA, 15 bp, Homo sapiens
tcctggccaacatgg

SEQ ID NO: 730912 - DNA, 15 bp, Homo sapiens
caacatggtgaaact

SEQ ID NO: 730913 - DNA, 15 bp, Homo sapiens
aacatggtgaaactc

SEQ ID NO: 730914 - DNA, 15 bp, Homo sapiens
acatggtgaaactct

SEQ ID NO: 730915 - DNA, 15 bp, Homo sapiens
catggtgaaactctg

SEQ ID NO: 730916 - DNA, 15 bp, Homo sapiens
atggtgaaactctgt

SEQ ID NO: 730917 - DNA, 15 bp, Homo sapiens
tggtgaaactctgtc

SEQ ID NO: 730918 - DNA, 15 bp, Homo sapiens
ggtgaaactctgtct

SEQ ID NO: 730919 - DNA, 15 bp, Homo sapiens
gtgaaactctgtctc

SEQ ID NO: 730920 - DNA, 15 bp, Homo sapiens
tgaaactctgtctct

SEQ ID NO: 730921 - DNA, 15 bp, Homo sapiens
gaaactctgtctcta

SEQ ID NO: 730922 - DNA, 15 bp, Homo sapiens
aaactctgtctctac

SEQ ID NO: 730923 - DNA, 15 bp, Homo sapiens
aactctgtctctact

SEQ ID NO: 730924 - DNA, 15 bp, Homo sapiens
actctgtctctactc

SEQ ID NO: 730925 - DNA, 15 bp, Homo sapiens
ctctgtctctactca

SEQ ID NO: 730926 - DNA, 15 bp, Homo sapiens
tctgtctctactcaa

SEQ ID NO: 730927 - DNA, 15 bp, Homo sapiens
ctgtctctactcaaa

SEQ ID NO: 730928 - DNA, 15 bp, Homo sapiens
tgtctctactcaaaa

SEQ ID NO: 730929 - DNA, 15 bp, Homo sapiens
gtctctactcaaaaa

SEQ ID NO: 730930 - DNA, 15 bp, Homo sapiens
tctctactcaaaaaa

SEQ ID NO: 730931 - DNA, 15 bp, Homo sapiens
ctctactcaaaaaaa

SEQ ID NO: 730932 - DNA, 15 bp, Homo sapiens
tctactcaaaaaaaa

SEQ ID NO: 730933 - DNA, 15 bp, Homo sapiens
ctactcaaaaaaaaa

SEQ ID NO: 730934 - DNA, 15 bp, Homo sapiens
tactcaaaaaaaaaa

SEQ ID NO: 730935 - DNA, 15 bp, Homo sapiens
actcaaaaaaaaaaa

SEQ ID NO: 730936 - DNA, 15 bp, Homo sapiens
aaaaaaaaaaaaatt

SEQ ID NO: 730937 - DNA, 15 bp, Homo sapiens
aaaaaaaaattagcc

SEQ ID NO: 730938 - DNA, 15 bp, Homo sapiens
aaaaaaaattagcca

SEQ ID NO: 730939 - DNA, 15 bp, Homo sapiens
aaaaaaattagccag

SEQ ID NO: 730940 - DNA, 15 bp, Homo sapiens
aaaaaattagccagg

SEQ ID NO: 730941 - DNA, 15 bp, Homo sapiens
aaaattagccaggcg

SEQ ID NO: 730942 - DNA, 15 bp, Homo sapiens
aaattagccaggcgt

SEQ ID NO: 730943 - DNA, 15 bp, Homo sapiens
aattagccaggcgtg

SEQ ID NO: 730944 - DNA, 15 bp, Homo sapiens
attagccaggcgtgg

SEQ ID NO: 730945 - DNA, 15 bp, Homo sapiens
ttagccaggcgtggt

SEQ ID NO: 730946 - DNA, 15 bp, Homo sapiens
tagccaggcgtggtg

SEQ ID NO: 730947 - DNA, 15 bp, Homo sapiens
agccaggcgtggtgg

SEQ ID NO: 730948 - DNA, 15 bp, Homo sapiens
gccaggcgtggtggc

SEQ ID NO: 730949 - DNA, 15 bp, Homo sapiens
ccaggcgtggtggcg

SEQ ID NO: 730950 - DNA, 15 bp, Homo sapiens
caggcgtggtggcgc

SEQ ID NO: 730951 - DNA, 15 bp, Homo sapiens
aggcgtggtggcgcg

SEQ ID NO: 730952 - DNA, 15 bp, Homo sapiens
ggcgtggtggcgcgt

SEQ ID NO: 730953 - DNA, 15 bp, Homo sapiens
gcgtggtggcgcgtg

SEQ ID NO: 730954 - DNA, 15 bp, Homo sapiens
cgtggtggcgcgtgc

SEQ ID NO: 730955 - DNA, 15 bp, Homo sapiens
gtggtggcgcgtgcc

SEQ ID NO: 730956 - DNA, 15 bp, Homo sapiens
tggtggcgcgtgcct

SEQ ID NO: 730957 - DNA, 15 bp, Homo sapiens
ggtggcgcgtgcctg

SEQ ID NO: 730958 - DNA, 15 bp, Homo sapiens
gtggcgcgtgcctgt

SEQ ID NO: 730959 - DNA, 15 bp, Homo sapiens
tggcgcgtgcctgta

SEQ ID NO: 730960 - DNA, 15 bp, Homo sapiens
ggcgcgtgcctgtaa

SEQ ID NO: 730961 - DNA, 15 bp, Homo sapiens
gcgcgtgcctgtaat

SEQ ID NO: 730962 - DNA, 15 bp, Homo sapiens
cgcgtgcctgtaatc

SEQ ID NO: 730963 - DNA, 15 bp, Homo sapiens
taatcccagctactt

SEQ ID NO: 730964 - DNA, 15 bp, Homo sapiens
aatcccagctactta

SEQ ID NO: 730965 - DNA, 15 bp, Homo sapiens
atcccagctacttag

SEQ ID NO: 730966 - DNA, 15 bp, Homo sapiens
tcccagctacttagg

SEQ ID NO: 730967 - DNA, 15 bp, Homo sapiens
cccagctacttagga

SEQ ID NO: 730968 - DNA, 15 bp, Homo sapiens
ccagctacttaggag

SEQ ID NO: 730969 - DNA, 15 bp, Homo sapiens
cagctacttaggagg

SEQ ID NO: 730970 - DNA, 15 bp, Homo sapiens
agctacttaggaggc

SEQ ID NO: 730971 - DNA, 15 bp, Homo sapiens
gctacttaggaggct

SEQ ID NO: 730972 - DNA, 15 bp, Homo sapiens
ctacttaggaggctg

SEQ ID NO: 730973 - DNA, 15 bp, Homo sapiens
tacttaggaggctga

SEQ ID NO: 730974 - DNA, 15 bp, Homo sapiens
acttaggaggctgag

SEQ ID NO: 730975 - DNA, 15 bp, Homo sapiens
cttaggaggctgagg

SEQ ID NO: 730976 - DNA, 15 bp, Homo sapiens
ttaggaggctgaggc

SEQ ID NO: 730977 - DNA, 15 bp, Homo sapiens
taggaggctgaggca

SEQ ID NO: 730978 - DNA, 15 bp, Homo sapiens
gaatcacttgaacct

SEQ ID NO: 730979 - DNA, 15 bp, Homo sapiens
aatcacttgaacctg

SEQ ID NO: 730980 - DNA, 15 bp, Homo sapiens
atcacttgaacctgg

SEQ ID NO: 730981 - DNA, 15 bp, Homo sapiens
tcacttgaacctggg

SEQ ID NO: 730982 - DNA, 15 bp, Homo sapiens
cacttgaacctggga

SEQ ID NO: 730983 - DNA, 15 bp, Homo sapiens
acttgaacctgggaa

SEQ ID NO: 730984 - DNA, 15 bp, Homo sapiens
cttgaacctgggaag

SEQ ID NO: 730985 - DNA, 15 bp, Homo sapiens
ttgaacctgggaagc

SEQ ID NO: 730986 - DNA, 15 bp, Homo sapiens
tgaacctgggaagcg

SEQ ID NO: 730987 - DNA, 15 bp, Homo sapiens
gaacctgggaagcgg

SEQ ID NO: 730988 - DNA, 15 bp, Homo sapiens
aacctgggaagcgga

SEQ ID NO: 730989 - DNA, 15 bp, Homo sapiens
acctgggaagcggag

SEQ ID NO: 730990 - DNA, 15 bp, Homo sapiens
cctgggaagcggagg

SEQ ID NO: 730991 - DNA, 15 bp, Homo sapiens
ctgggaagcggaggt

SEQ ID NO: 730992 - DNA, 15 bp, Homo sapiens
tgggaagcggaggtt

SEQ ID NO: 730993 - DNA, 15 bp, Homo sapiens
gggaagcggaggttg

SEQ ID NO: 730994 - DNA, 15 bp, Homo sapiens
ggaagcggaggttgc

SEQ ID NO: 730995 - DNA, 15 bp, Homo sapiens
gaagcggaggttgca

SEQ ID NO: 730996 - DNA, 15 bp, Homo sapiens
aagcggaggttgcag

SEQ ID NO: 730997 - DNA, 15 bp, Homo sapiens
ttattgggcagctag

SEQ ID NO: 730998 - DNA, 15 bp, Homo sapiens
tattgggcagctagg

SEQ ID NO: 730999 - DNA, 15 bp, Homo sapiens
attgggcagctagga

SEQ ID NO: 731000 - DNA, 15 bp, Homo sapiens
ttgggcagctaggac

SEQ ID NO: 731001 - DNA, 15 bp, Homo sapiens
tgggcagctaggacc

SEQ ID NO: 731002 - DNA, 15 bp, Homo sapiens
gggcagctaggacct

SEQ ID NO: 731003 - DNA, 15 bp, Homo sapiens
ggcagctaggacctc

SEQ ID NO: 731004 - DNA, 15 bp, Homo sapiens
gcagctaggacctca

SEQ ID NO: 731005 - DNA, 15 bp, Homo sapiens
cagctaggacctcag

SEQ ID NO: 731006 - DNA, 15 bp, Homo sapiens
agctaggacctcaga

SEQ ID NO: 731007 - DNA, 15 bp, Homo sapiens
gctaggacctcagaa

SEQ ID NO: 731008 - DNA, 15 bp, Homo sapiens
ctaggacctcagaat

SEQ ID NO: 731009 - DNA, 15 bp, Homo sapiens
taggacctcagaatc

SEQ ID NO: 731010 - DNA, 15 bp, Homo sapiens
aggacctcagaatcc

SEQ ID NO: 731011 - DNA, 15 bp, Homo sapiens
ggacctcagaatcca

SEQ ID NO: 731012 - DNA, 15 bp, Homo sapiens
gacctcagaatccat

SEQ ID NO: 731013 - DNA, 15 bp, Homo sapiens
acctcagaatccatg

SEQ ID NO: 731014 - DNA, 15 bp, Homo sapiens
cctcagaatccatga

SEQ ID NO: 731015 - DNA, 15 bp, Homo sapiens
ctcagaatccatgat

SEQ ID NO: 731016 - DNA, 15 bp, Homo sapiens
tcagaatccatgata

SEQ ID NO: 731017 - DNA, 15 bp, Homo sapiens
cagaatccatgataa

SEQ ID NO: 731018 - DNA, 15 bp, Homo sapiens
agaatccatgataat

SEQ ID NO: 731019 - DNA, 15 bp, Homo sapiens
gaatccatgataata

SEQ ID NO: 731020 - DNA, 15 bp, Homo sapiens
aatccatgataatat

SEQ ID NO: 731021 - DNA, 15 bp, Homo sapiens
atccatgataatatg

SEQ ID NO: 731022 - DNA, 15 bp, Homo sapiens
tccatgataatatga

SEQ ID NO: 731023 - DNA, 15 bp, Homo sapiens
ccatgataatatgat

SEQ ID NO: 731024 - DNA, 15 bp, Homo sapiens
catgataatatgata

SEQ ID NO: 731025 - DNA, 15 bp, Homo sapiens
atgataatatgataa

SEQ ID NO: 731026 - DNA, 15 bp, Homo sapiens
tgataatatgataat

SEQ ID NO: 731027 - DNA, 15 bp, Homo sapiens
gataatatgataatt

SEQ ID NO: 731028 - DNA, 15 bp, Homo sapiens
ataatatgataatta

SEQ ID NO: 731029 - DNA, 15 bp, Homo sapiens
taatatgataattag

SEQ ID NO: 731030 - DNA, 15 bp, Homo sapiens
aatatgataattagc

SEQ ID NO: 731031 - DNA, 15 bp, Homo sapiens
atatgataattagca

SEQ ID NO: 731032 - DNA, 15 bp, Homo sapiens
tatgataattagcat

SEQ ID NO: 731033 - DNA, 15 bp, Homo sapiens
atgataattagcatc

SEQ ID NO: 731034 - DNA, 15 bp, Homo sapiens
tgataattagcatct

SEQ ID NO: 731035 - DNA, 15 bp, Homo sapiens
gataattagcatctg

SEQ ID NO: 731036 - DNA, 15 bp, Homo sapiens
ataattagcatctgt

SEQ ID NO: 731037 - DNA, 15 bp, Homo sapiens
taattagcatctgta

SEQ ID NO: 731038 - DNA, 15 bp, Homo sapiens
aattagcatctgtat

SEQ ID NO: 731039 - DNA, 15 bp, Homo sapiens
attagcatctgtata

SEQ ID NO: 731040 - DNA, 15 bp, Homo sapiens
ttagcatctgtatac

SEQ ID NO: 731041 - DNA, 15 bp, Homo sapiens
tagcatctgtatacc

SEQ ID NO: 731042 - DNA, 15 bp, Homo sapiens
agcatctgtatacca

SEQ ID NO: 731043 - DNA, 15 bp, Homo sapiens
gcatctgtataccac

SEQ ID NO: 731044 - DNA, 15 bp, Homo sapiens
catctgtataccact

SEQ ID NO: 731045 - DNA, 15 bp, Homo sapiens
atctgtataccactt

SEQ ID NO: 731046 - DNA, 15 bp, Homo sapiens
tctgtataccacttg

SEQ ID NO: 731047 - DNA, 15 bp, Homo sapiens
ctgtataccacttgg

SEQ ID NO: 731048 - DNA, 15 bp, Homo sapiens
tgtataccacttggt

SEQ ID NO: 731049 - DNA, 15 bp, Homo sapiens
gtataccacttggtt

SEQ ID NO: 731050 - DNA, 15 bp, Homo sapiens
tataccacttggttt

SEQ ID NO: 731051 - DNA, 15 bp, Homo sapiens
ataccacttggttta

SEQ ID NO: 731052 - DNA, 15 bp, Homo sapiens
taccacttggtttac

SEQ ID NO: 731053 - DNA, 15 bp, Homo sapiens
accacttggtttaca

SEQ ID NO: 731054 - DNA, 15 bp, Homo sapiens
ccacttggtttacat

SEQ ID NO: 731055 - DNA, 15 bp, Homo sapiens
cacttggtttacata

SEQ ID NO: 731056 - DNA, 15 bp, Homo sapiens
acttggtttacatag

SEQ ID NO: 731057 - DNA, 15 bp, Homo sapiens
cttggtttacatagc

SEQ ID NO: 731058 - DNA, 15 bp, Homo sapiens
ttggtttacatagca

SEQ ID NO: 731059 - DNA, 15 bp, Homo sapiens
tggtttacatagcac

SEQ ID NO: 731060 - DNA, 15 bp, Homo sapiens
ggtttacatagcact

SEQ ID NO: 731061 - DNA, 15 bp, Homo sapiens
gtttacatagcactg

SEQ ID NO: 731062 - DNA, 15 bp, Homo sapiens
tttacatagcactgg

SEQ ID NO: 731063 - DNA, 15 bp, Homo sapiens
ttacatagcactggg

SEQ ID NO: 731064 - DNA, 15 bp, Homo sapiens
tacatagcactgggg

SEQ ID NO: 731065 - DNA, 15 bp, Homo sapiens
acatagcactggggc

SEQ ID NO: 731066 - DNA, 15 bp, Homo sapiens
catagcactggggct

SEQ ID NO: 731067 - DNA, 15 bp, Homo sapiens
atagcactggggctc

SEQ ID NO: 731068 - DNA, 15 bp, Homo sapiens
tagcactggggctct

SEQ ID NO: 731069 - DNA, 15 bp, Homo sapiens
agcactggggctctt

SEQ ID NO: 731070 - DNA, 15 bp, Homo sapiens
gcactggggctcttg

SEQ ID NO: 731071 - DNA, 15 bp, Homo sapiens
cactggggctcttgt

SEQ ID NO: 731072 - DNA, 15 bp, Homo sapiens
actggggctcttgtg

SEQ ID NO: 731073 - DNA, 15 bp, Homo sapiens
ctggggctcttgtgg

SEQ ID NO: 731074 - DNA, 15 bp, Homo sapiens
tggggctcttgtggt

SEQ ID NO: 731075 - DNA, 15 bp, Homo sapiens
ggggctcttgtggtg

SEQ ID NO: 731076 - DNA, 15 bp, Homo sapiens
gggctcttgtggtgt

SEQ ID NO: 731077 - DNA, 15 bp, Homo sapiens
ggctcttgtggtgtg

SEQ ID NO: 731078 - DNA, 15 bp, Homo sapiens
gctcttgtggtgtga

SEQ ID NO: 731079 - DNA, 15 bp, Homo sapiens
ctcttgtggtgtgaa

SEQ ID NO: 731080 - DNA, 15 bp, Homo sapiens
tcttgtggtgtgaac

SEQ ID NO: 731081 - DNA, 15 bp, Homo sapiens
cttgtggtgtgaacg

SEQ ID NO: 731082 - DNA, 15 bp, Homo sapiens
ttgtggtgtgaacgt

SEQ ID NO: 731083 - DNA, 15 bp, Homo sapiens
tgtggtgtgaacgtc

SEQ ID NO: 731084 - DNA, 15 bp, Homo sapiens
gtggtgtgaacgtct

SEQ ID NO: 731085 - DNA, 15 bp, Homo sapiens
tggtgtgaacgtctc

SEQ ID NO: 731086 - DNA, 15 bp, Homo sapiens
ggtgtgaacgtctcc

SEQ ID NO: 731087 - DNA, 15 bp, Homo sapiens
gtgtgaacgtctcct

SEQ ID NO: 731088 - DNA, 15 bp, Homo sapiens
tgtgaacgtctcctc

SEQ ID NO: 731089 - DNA, 15 bp, Homo sapiens
gtgaacgtctcctcc

SEQ ID NO: 731090 - DNA, 15 bp, Homo sapiens
tgaacgtctcctccc

SEQ ID NO: 731091 - DNA, 15 bp, Homo sapiens
gaacgtctcctccca

SEQ ID NO: 731092 - DNA, 15 bp, Homo sapiens
aacgtctcctcccag

SEQ ID NO: 731093 - DNA, 15 bp, Homo sapiens
acgtctcctcccagc

SEQ ID NO: 731094 - DNA, 15 bp, Homo sapiens
cgtctcctcccagca

SEQ ID NO: 731095 - DNA, 15 bp, Homo sapiens
gtctcctcccagcaa

SEQ ID NO: 731096 - DNA, 15 bp, Homo sapiens
tctcctcccagcaac

SEQ ID NO: 731097 - DNA, 15 bp, Homo sapiens
ctcctcccagcaacc

SEQ ID NO: 731098 - DNA, 15 bp, Homo sapiens
tcctcccagcaaccc

SEQ ID NO: 731099 - DNA, 15 bp, Homo sapiens
cctcccagcaacccc

SEQ ID NO: 731100 - DNA, 15 bp, Homo sapiens
ctcccagcaacccca

SEQ ID NO: 731101 - DNA, 15 bp, Homo sapiens
tcccagcaaccccac

SEQ ID NO: 731102 - DNA, 15 bp, Homo sapiens
cccagcaaccccacc

SEQ ID NO: 731103 - DNA, 15 bp, Homo sapiens
ccagcaaccccaccg

SEQ ID NO: 731104 - DNA, 15 bp, Homo sapiens
cagcaaccccaccgt

SEQ ID NO: 731105 - DNA, 15 bp, Homo sapiens
agcaaccccaccgtg

SEQ ID NO: 731106 - DNA, 15 bp, Homo sapiens
gcaaccccaccgtga

SEQ ID NO: 731107 - DNA, 15 bp, Homo sapiens
caaccccaccgtgag

SEQ ID NO: 731108 - DNA, 15 bp, Homo sapiens
aaccccaccgtgagg

SEQ ID NO: 731109 - DNA, 15 bp, Homo sapiens
accccaccgtgagga

SEQ ID NO: 731110 - DNA, 15 bp, Homo sapiens
ccccaccgtgaggac

SEQ ID NO: 731111 - DNA, 15 bp, Homo sapiens
cccaccgtgaggact

SEQ ID NO: 731112 - DNA, 15 bp, Homo sapiens
ccaccgtgaggactt

SEQ ID NO: 731113 - DNA, 15 bp, Homo sapiens
caccgtgaggacttt

SEQ ID NO: 731114 - DNA, 15 bp, Homo sapiens
accgtgaggactttg

SEQ ID NO: 731115 - DNA, 15 bp, Homo sapiens
ccgtgaggactttgt

SEQ ID NO: 731116 - DNA, 15 bp, Homo sapiens
cgtgaggactttgtt

SEQ ID NO: 731117 - DNA, 15 bp, Homo sapiens
gtgaggactttgttc

SEQ ID NO: 731118 - DNA, 15 bp, Homo sapiens
tgaggactttgttct

SEQ ID NO: 731119 - DNA, 15 bp, Homo sapiens
gaggactttgttctt

SEQ ID NO: 731120 - DNA, 15 bp, Homo sapiens
aggactttgttcttg

SEQ ID NO: 731121 - DNA, 15 bp, Homo sapiens
ggactttgttcttgg

SEQ ID NO: 731122 - DNA, 15 bp, Homo sapiens
gactttgttcttgga

SEQ ID NO: 731123 - DNA, 15 bp, Homo sapiens
actttgttcttggag

SEQ ID NO: 731124 - DNA, 15 bp, Homo sapiens
ctttgttcttggagc

SEQ ID NO: 731125 - DNA, 15 bp, Homo sapiens
tttgttcttggagcc

SEQ ID NO: 731126 - DNA, 15 bp, Homo sapiens
ttgttcttggagcct

SEQ ID NO: 731127 - DNA, 15 bp, Homo sapiens
tgttcttggagcctc

SEQ ID NO: 731128 - DNA, 15 bp, Homo sapiens
gttcttggagcctca

SEQ ID NO: 731129 - DNA, 15 bp, Homo sapiens
ttcttggagcctcac

SEQ ID NO: 731130 - DNA, 15 bp, Homo sapiens
tcttggagcctcacg

SEQ ID NO: 731131 - DNA, 15 bp, Homo sapiens
cttggagcctcacgc

SEQ ID NO: 731132 - DNA, 15 bp, Homo sapiens
ttggagcctcacgct

SEQ ID NO: 731133 - DNA, 15 bp, Homo sapiens
tggagcctcacgctg

SEQ ID NO: 731134 - DNA, 15 bp, Homo sapiens
ggagcctcacgctga

SEQ ID NO: 731135 - DNA, 15 bp, Homo sapiens
gagcctcacgctgag

SEQ ID NO: 731136 - DNA, 15 bp, Homo sapiens
agcctcacgctgagt

SEQ ID NO: 731137 - DNA, 15 bp, Homo sapiens
gcctcacgctgagtc

SEQ ID NO: 731138 - DNA, 15 bp, Homo sapiens
cctcacgctgagtct

SEQ ID NO: 731139 - DNA, 15 bp, Homo sapiens
ctcacgctgagtctg

SEQ ID NO: 731140 - DNA, 15 bp, Homo sapiens
tcacgctgagtctgg

SEQ ID NO: 731141 - DNA, 15 bp, Homo sapiens
cacgctgagtctggc

SEQ ID NO: 731142 - DNA, 15 bp, Homo sapiens
acgctgagtctggca

SEQ ID NO: 731143 - DNA, 15 bp, Homo sapiens
cgctgagtctggcac

SEQ ID NO: 731144 - DNA, 15 bp, Homo sapiens
gctgagtctggcaca

SEQ ID NO: 731145 - DNA, 15 bp, Homo sapiens
ctgagtctggcacac

SEQ ID NO: 731146 - DNA, 15 bp, Homo sapiens
tgagtctggcacaca

SEQ ID NO: 731147 - DNA, 15 bp, Homo sapiens
gagtctggcacacag

SEQ ID NO: 731148 - DNA, 15 bp, Homo sapiens
agtctggcacacaga

SEQ ID NO: 731149 - DNA, 15 bp, Homo sapiens
gtctggcacacagaa

SEQ ID NO: 731150 - DNA, 15 bp, Homo sapiens
tctggcacacagaag

SEQ ID NO: 731151 - DNA, 15 bp, Homo sapiens
ctggcacacagaaga

SEQ ID NO: 731152 - DNA, 15 bp, Homo sapiens
tggcacacagaagac

SEQ ID NO: 731153 - DNA, 15 bp, Homo sapiens
ggcacacagaagaca

SEQ ID NO: 731154 - DNA, 15 bp, Homo sapiens
gcacacagaagacac

SEQ ID NO: 731155 - DNA, 15 bp, Homo sapiens
cacacagaagacaca

SEQ ID NO: 731156 - DNA, 15 bp, Homo sapiens
acacagaagacacaa

SEQ ID NO: 731157 - DNA, 15 bp, Homo sapiens
cacagaagacacaag

SEQ ID NO: 731158 - DNA, 15 bp, Homo sapiens
acagaagacacaaga

SEQ ID NO: 731159 - DNA, 15 bp, Homo sapiens
cagaagacacaagac

SEQ ID NO: 731160 - DNA, 15 bp, Homo sapiens
agaagacacaagaca

SEQ ID NO: 731161 - DNA, 15 bp, Homo sapiens
gaagacacaagacat

SEQ ID NO: 731162 - DNA, 15 bp, Homo sapiens
aagacacaagacatt

SEQ ID NO: 731163 - DNA, 15 bp, Homo sapiens
agacacaagacattg

SEQ ID NO: 731164 - DNA, 15 bp, Homo sapiens
gacacaagacattgt

SEQ ID NO: 731165 - DNA, 15 bp, Homo sapiens
acacaagacattgtt

SEQ ID NO: 731166 - DNA, 15 bp, Homo sapiens
cacaagacattgtta

SEQ ID NO: 731167 - DNA, 15 bp, Homo sapiens
acaagacattgttaa

SEQ ID NO: 731168 - DNA, 15 bp, Homo sapiens
caagacattgttaat

SEQ ID NO: 731169 - DNA, 15 bp, Homo sapiens
aagacattgttaatt

SEQ ID NO: 731170 - DNA, 15 bp, Homo sapiens
agacattgttaattc

SEQ ID NO: 731171 - DNA, 15 bp, Homo sapiens
gacattgttaattca

SEQ ID NO: 731172 - DNA, 15 bp, Homo sapiens
acattgttaattcag

SEQ ID NO: 731173 - DNA, 15 bp, Homo sapiens
cattgttaattcagt

SEQ ID NO: 731174 - DNA, 15 bp, Homo sapiens
attgttaattcagtg

SEQ ID NO: 731175 - DNA, 15 bp, Homo sapiens
ttgttaattcagtgt

SEQ ID NO: 731176 - DNA, 15 bp, Homo sapiens
tgttaattcagtgtt

SEQ ID NO: 731177 - DNA, 15 bp, Homo sapiens
gttaattcagtgttt

SEQ ID NO: 731178 - DNA, 15 bp, Homo sapiens
ttaattcagtgtttg

SEQ ID NO: 731179 - DNA, 15 bp, Homo sapiens
taattcagtgtttgt

SEQ ID NO: 731180 - DNA, 15 bp, Homo sapiens
aattcagtgtttgtt

SEQ ID NO: 731181 - DNA, 15 bp, Homo sapiens
attcagtgtttgttg

SEQ ID NO: 731182 - DNA, 15 bp, Homo sapiens
ttcagtgtttgttgt

SEQ ID NO: 731183 - DNA, 15 bp, Homo sapiens
tcagtgtttgttgta

SEQ ID NO: 731184 - DNA, 15 bp, Homo sapiens
cagtgtttgttgtat

SEQ ID NO: 731185 - DNA, 15 bp, Homo sapiens
agtgtttgttgtatg

SEQ ID NO: 731186 - DNA, 15 bp, Homo sapiens
gtgtttgttgtatga

SEQ ID NO: 731187 - DNA, 15 bp, Homo sapiens
tgtttgttgtatgag

SEQ ID NO: 731188 - DNA, 15 bp, Homo sapiens
gtttgttgtatgagg

SEQ ID NO: 731189 - DNA, 15 bp, Homo sapiens
tttgttgtatgagga

SEQ ID NO: 731190 - DNA, 15 bp, Homo sapiens
ttgttgtatgaggaa

SEQ ID NO: 731191 - DNA, 15 bp, Homo sapiens
tgttgtatgaggaag

SEQ ID NO: 731192 - DNA, 15 bp, Homo sapiens
gttgtatgaggaagg

SEQ ID NO: 731193 - DNA, 15 bp, Homo sapiens
ttgtatgaggaaggt

SEQ ID NO: 731194 - DNA, 15 bp, Homo sapiens
tgtatgaggaaggta

SEQ ID NO: 731195 - DNA, 15 bp, Homo sapiens
gtatgaggaaggtag

SEQ ID NO: 731196 - DNA, 15 bp, Homo sapiens
tatgaggaaggtaga

SEQ ID NO: 731197 - DNA, 15 bp, Homo sapiens
atgaggaaggtagac

SEQ ID NO: 731198 - DNA, 15 bp, Homo sapiens
tgaggaaggtagaca

SEQ ID NO: 731199 - DNA, 15 bp, Homo sapiens
gaggaaggtagacag

SEQ ID NO: 731200 - DNA, 15 bp, Homo sapiens
aggaaggtagacaga

SEQ ID NO: 731201 - DNA, 15 bp, Homo sapiens
ggaaggtagacagac

SEQ ID NO: 731202 - DNA, 15 bp, Homo sapiens
gaaggtagacagact

SEQ ID NO: 731203 - DNA, 15 bp, Homo sapiens
aaggtagacagactg

SEQ ID NO: 731204 - DNA, 15 bp, Homo sapiens
aggtagacagactgg

SEQ ID NO: 731205 - DNA, 15 bp, Homo sapiens
ggtagacagactgga

SEQ ID NO: 731206 - DNA, 15 bp, Homo sapiens
gtagacagactggaa

SEQ ID NO: 731207 - DNA, 15 bp, Homo sapiens
tagacagactggaaa

SEQ ID NO: 731208 - DNA, 15 bp, Homo sapiens
agacagactggaaac

SEQ ID NO: 731209 - DNA, 15 bp, Homo sapiens
gacagactggaaaca

SEQ ID NO: 731210 - DNA, 15 bp, Homo sapiens
acagactggaaacag

SEQ ID NO: 731211 - DNA, 15 bp, Homo sapiens
cagactggaaacaga

SEQ ID NO: 731212 - DNA, 15 bp, Homo sapiens
agactggaaacagac

SEQ ID NO: 731213 - DNA, 15 bp, Homo sapiens
gactggaaacagact

SEQ ID NO: 731214 - DNA, 15 bp, Homo sapiens
actggaaacagactt

SEQ ID NO: 731215 - DNA, 15 bp, Homo sapiens
ctggaaacagacttc

SEQ ID NO: 731216 - DNA, 15 bp, Homo sapiens
tggaaacagacttcc

SEQ ID NO: 731217 - DNA, 15 bp, Homo sapiens
ggaaacagacttccc

SEQ ID NO: 731218 - DNA, 15 bp, Homo sapiens
gaaacagacttccct

SEQ ID NO: 731219 - DNA, 15 bp, Homo sapiens
aaacagacttcccta

SEQ ID NO: 731220 - DNA, 15 bp, Homo sapiens
aacagacttccctaa

SEQ ID NO: 731221 - DNA, 15 bp, Homo sapiens
acagacttccctaag

SEQ ID NO: 731222 - DNA, 15 bp, Homo sapiens
cagacttccctaagg

SEQ ID NO: 731223 - DNA, 15 bp, Homo sapiens
agacttccctaaggt

SEQ ID NO: 731224 - DNA, 15 bp, Homo sapiens
gacttccctaaggtc

SEQ ID NO: 731225 - DNA, 15 bp, Homo sapiens
acttccctaaggtct

SEQ ID NO: 731226 - DNA, 15 bp, Homo sapiens
cttccctaaggtctt

SEQ ID NO: 731227 - DNA, 15 bp, Homo sapiens
ttccctaaggtctta

SEQ ID NO: 731228 - DNA, 15 bp, Homo sapiens
tccctaaggtcttat

SEQ ID NO: 731229 - DNA, 15 bp, Homo sapiens
ccctaaggtcttata

SEQ ID NO: 731230 - DNA, 15 bp, Homo sapiens
cctaaggtcttatag

SEQ ID NO: 731231 - DNA, 15 bp, Homo sapiens
ctaaggtcttatagc

SEQ ID NO: 731232 - DNA, 15 bp, Homo sapiens
taaggtcttatagct

SEQ ID NO: 731233 - DNA, 15 bp, Homo sapiens
aaggtcttatagcta

SEQ ID NO: 731234 - DNA, 15 bp, Homo sapiens
aggtcttatagctag

SEQ ID NO: 731235 - DNA, 15 bp, Homo sapiens
ggtcttatagctagc

SEQ ID NO: 731236 - DNA, 15 bp, Homo sapiens
gtcttatagctagca

SEQ ID NO: 731237 - DNA, 15 bp, Homo sapiens
tcttatagctagcaa

SEQ ID NO: 731238 - DNA, 15 bp, Homo sapiens
cttatagctagcaat

SEQ ID NO: 731239 - DNA, 15 bp, Homo sapiens
ttatagctagcaatg

SEQ ID NO: 731240 - DNA, 15 bp, Homo sapiens
tatagctagcaatgg

SEQ ID NO: 731241 - DNA, 15 bp, Homo sapiens
atagctagcaatggc

SEQ ID NO: 731242 - DNA, 15 bp, Homo sapiens
tagctagcaatggca

SEQ ID NO: 731243 - DNA, 15 bp, Homo sapiens
agctagcaatggcag

SEQ ID NO: 731244 - DNA, 15 bp, Homo sapiens
gctagcaatggcaga

SEQ ID NO: 731245 - DNA, 15 bp, Homo sapiens
ctagcaatggcagaa

SEQ ID NO: 731246 - DNA, 15 bp, Homo sapiens
tagcaatggcagaaa

SEQ ID NO: 731247 - DNA, 15 bp, Homo sapiens
agcaatggcagaaaa

SEQ ID NO: 731248 - DNA, 15 bp, Homo sapiens
gcaatggcagaaaag

SEQ ID NO: 731249 - DNA, 15 bp, Homo sapiens
caatggcagaaaagt

SEQ ID NO: 731250 - DNA, 15 bp, Homo sapiens
aatggcagaaaagtc

SEQ ID NO: 731251 - DNA, 15 bp, Homo sapiens
atggcagaaaagtct

SEQ ID NO: 731252 - DNA, 15 bp, Homo sapiens
tggcagaaaagtcta

SEQ ID NO: 731253 - DNA, 15 bp, Homo sapiens
ggcagaaaagtctat

SEQ ID NO: 731254 - DNA, 15 bp, Homo sapiens
gcagaaaagtctatt

SEQ ID NO: 731255 - DNA, 15 bp, Homo sapiens
cagaaaagtctattg

SEQ ID NO: 731256 - DNA, 15 bp, Homo sapiens
agaaaagtctattga

SEQ ID NO: 731257 - DNA, 15 bp, Homo sapiens
gaaaagtctattgaa

SEQ ID NO: 731258 - DNA, 15 bp, Homo sapiens
aaaagtctattgaat

SEQ ID NO: 731259 - DNA, 15 bp, Homo sapiens
aaagtctattgaatc

SEQ ID NO: 731260 - DNA, 15 bp, Homo sapiens
aagtctattgaatcc

SEQ ID NO: 731261 - DNA, 15 bp, Homo sapiens
agtctattgaatcct

SEQ ID NO: 731262 - DNA, 15 bp, Homo sapiens
gtctattgaatccta

SEQ ID NO: 731263 - DNA, 15 bp, Homo sapiens
tctattgaatcctaa

SEQ ID NO: 731264 - DNA, 15 bp, Homo sapiens
ctattgaatcctaaa

SEQ ID NO: 731265 - DNA, 15 bp, Homo sapiens
tattgaatcctaaag

SEQ ID NO: 731266 - DNA, 15 bp, Homo sapiens
attgaatcctaaagc

SEQ ID NO: 731267 - DNA, 15 bp, Homo sapiens
ttgaatcctaaagcc

SEQ ID NO: 731268 - DNA, 15 bp, Homo sapiens
tgaatcctaaagccg

SEQ ID NO: 731269 - DNA, 15 bp, Homo sapiens
gaatcctaaagccga

SEQ ID NO: 731270 - DNA, 15 bp, Homo sapiens
aatcctaaagccgag

SEQ ID NO: 731271 - DNA, 15 bp, Homo sapiens
atcctaaagccgagc

SEQ ID NO: 731272 - DNA, 15 bp, Homo sapiens
tcctaaagccgagct

SEQ ID NO: 731273 - DNA, 15 bp, Homo sapiens
cctaaagccgagctg

SEQ ID NO: 731274 - DNA, 15 bp, Homo sapiens
ctaaagccgagctga

SEQ ID NO: 731275 - DNA, 15 bp, Homo sapiens
taaagccgagctgag

SEQ ID NO: 731276 - DNA, 15 bp, Homo sapiens
aaagccgagctgagg

SEQ ID NO: 731277 - DNA, 15 bp, Homo sapiens
aagccgagctgaggg

SEQ ID NO: 731278 - DNA, 15 bp, Homo sapiens
agccgagctgagggc

SEQ ID NO: 731279 - DNA, 15 bp, Homo sapiens
gccgagctgagggcc

SEQ ID NO: 731280 - DNA, 15 bp, Homo sapiens
ccgagctgagggcct

SEQ ID NO: 731281 - DNA, 15 bp, Homo sapiens
cgagctgagggcctt

SEQ ID NO: 731282 - DNA, 15 bp, Homo sapiens
gagctgagggccttt

SEQ ID NO: 731283 - DNA, 15 bp, Homo sapiens
agctgagggcctttc

SEQ ID NO: 731284 - DNA, 15 bp, Homo sapiens
gctgagggcctttct

SEQ ID NO: 731285 - DNA, 15 bp, Homo sapiens
ctgagggcctttcta

SEQ ID NO: 731286 - DNA, 15 bp, Homo sapiens
tgagggcctttctat

SEQ ID NO: 731287 - DNA, 15 bp, Homo sapiens
gagggcctttctatt

SEQ ID NO: 731288 - DNA, 15 bp, Homo sapiens
agggcctttctattc

SEQ ID NO: 731289 - DNA, 15 bp, Homo sapiens
gggcctttctattct

SEQ ID NO: 731290 - DNA, 15 bp, Homo sapiens
ggcctttctattctc

SEQ ID NO: 731291 - DNA, 15 bp, Homo sapiens
gcctttctattctcc

SEQ ID NO: 731292 - DNA, 15 bp, Homo sapiens
cctttctattctcct

SEQ ID NO: 731293 - DNA, 15 bp, Homo sapiens
ctttctattctccta

SEQ ID NO: 731294 - DNA, 15 bp, Homo sapiens
tttctattctcctag

SEQ ID NO: 731295 - DNA, 15 bp, Homo sapiens
ttctattctcctagg

SEQ ID NO: 731296 - DNA, 15 bp, Homo sapiens
tctattctcctaggt

SEQ ID NO: 731297 - DNA, 15 bp, Homo sapiens
ctattctcctaggtc

SEQ ID NO: 731298 - DNA, 15 bp, Homo sapiens
tattctcctaggtct

SEQ ID NO: 731299 - DNA, 15 bp, Homo sapiens
attctcctaggtctg

SEQ ID NO: 731300 - DNA, 15 bp, Homo sapiens
ttctcctaggtctgc

SEQ ID NO: 731301 - DNA, 15 bp, Homo sapiens
tctcctaggtctgcg

SEQ ID NO: 731302 - DNA, 15 bp, Homo sapiens
ctcctaggtctgcgt

SEQ ID NO: 731303 - DNA, 15 bp, Homo sapiens
tcctaggtctgcgtt

SEQ ID NO: 731304 - DNA, 15 bp, Homo sapiens
cctaggtctgcgttg

SEQ ID NO: 731305 - DNA, 15 bp, Homo sapiens
ctaggtctgcgttgg

SEQ ID NO: 731306 - DNA, 15 bp, Homo sapiens
taggtctgcgttggg

SEQ ID NO: 731307 - DNA, 15 bp, Homo sapiens
aggtctgcgttggga

SEQ ID NO: 731308 - DNA, 15 bp, Homo sapiens
ggtctgcgttgggag

SEQ ID NO: 731309 - DNA, 15 bp, Homo sapiens
gtctgcgttgggaga

SEQ ID NO: 731310 - DNA, 15 bp, Homo sapiens
tctgcgttgggagaa

SEQ ID NO: 731311 - DNA, 15 bp, Homo sapiens
ctgcgttgggagaat

SEQ ID NO: 731312 - DNA, 15 bp, Homo sapiens
tgcgttgggagaatg

SEQ ID NO: 731313 - DNA, 15 bp, Homo sapiens
gcgttgggagaatga

SEQ ID NO: 731314 - DNA, 15 bp, Homo sapiens
cgttgggagaatgag

SEQ ID NO: 731315 - DNA, 15 bp, Homo sapiens
gttgggagaatgagc

SEQ ID NO: 731316 - DNA, 15 bp, Homo sapiens
ttgggagaatgagca

SEQ ID NO: 731317 - DNA, 15 bp, Homo sapiens
tgggagaatgagcaa

SEQ ID NO: 731318 - DNA, 15 bp, Homo sapiens
gggagaatgagcaag

SEQ ID NO: 731319 - DNA, 15 bp, Homo sapiens
ggagaatgagcaaga

SEQ ID NO: 731320 - DNA, 15 bp, Homo sapiens
gagaatgagcaagat

SEQ ID NO: 731321 - DNA, 15 bp, Homo sapiens
agaatgagcaagatg

SEQ ID NO: 731322 - DNA, 15 bp, Homo sapiens
gaatgagcaagatgc

SEQ ID NO: 731323 - DNA, 15 bp, Homo sapiens
aatgagcaagatgcc

SEQ ID NO: 731324 - DNA, 15 bp, Homo sapiens
atgagcaagatgcct

SEQ ID NO: 731325 - DNA, 15 bp, Homo sapiens
tgagcaagatgcctt

SEQ ID NO: 731326 - DNA, 15 bp, Homo sapiens
gagcaagatgccttg

SEQ ID NO: 731327 - DNA, 15 bp, Homo sapiens
agcaagatgccttgg

SEQ ID NO: 731328 - DNA, 15 bp, Homo sapiens
gcaagatgccttggc

SEQ ID NO: 731329 - DNA, 15 bp, Homo sapiens
caagatgccttggcc

SEQ ID NO: 731330 - DNA, 15 bp, Homo sapiens
aagatgccttggccc

SEQ ID NO: 731331 - DNA, 15 bp, Homo sapiens
agatgccttggccct

SEQ ID NO: 731332 - DNA, 15 bp, Homo sapiens
gatgccttggccctc

SEQ ID NO: 731333 - DNA, 15 bp, Homo sapiens
atgccttggccctca

SEQ ID NO: 731334 - DNA, 15 bp, Homo sapiens
tgccttggccctcac

SEQ ID NO: 731335 - DNA, 15 bp, Homo sapiens
gccttggccctcact

SEQ ID NO: 731336 - DNA, 15 bp, Homo sapiens
ccttggccctcactc

SEQ ID NO: 731337 - DNA, 15 bp, Homo sapiens
cttggccctcactcc

SEQ ID NO: 731338 - DNA, 15 bp, Homo sapiens
ttggccctcactcct

SEQ ID NO: 731339 - DNA, 15 bp, Homo sapiens
tggccctcactcctt

SEQ ID NO: 731340 - DNA, 15 bp, Homo sapiens
ggccctcactccttc

SEQ ID NO: 731341 - DNA, 15 bp, Homo sapiens
gccctcactccttcg

SEQ ID NO: 731342 - DNA, 15 bp, Homo sapiens
ccctcactccttcgg

SEQ ID NO: 731343 - DNA, 15 bp, Homo sapiens
cctcactccttcggt

SEQ ID NO: 731344 - DNA, 15 bp, Homo sapiens
ctcactccttcggtg

SEQ ID NO: 731345 - DNA, 15 bp, Homo sapiens
tcactccttcggtgg

SEQ ID NO: 731346 - DNA, 15 bp, Homo sapiens
cactccttcggtggg

SEQ ID NO: 731347 - DNA, 15 bp, Homo sapiens
actccttcggtgggt

SEQ ID NO: 731348 - DNA, 15 bp, Homo sapiens
ctccttcggtgggtc

SEQ ID NO: 731349 - DNA, 15 bp, Homo sapiens
tccttcggtgggtcc

SEQ ID NO: 731350 - DNA, 15 bp, Homo sapiens
ccttcggtgggtccc

SEQ ID NO: 731351 - DNA, 15 bp, Homo sapiens
cttcggtgggtccca

SEQ ID NO: 731352 - DNA, 15 bp, Homo sapiens
ttcggtgggtcccag

SEQ ID NO: 731353 - DNA, 15 bp, Homo sapiens
tcggtgggtcccagc

SEQ ID NO: 731354 - DNA, 15 bp, Homo sapiens
cggtgggtcccagca

SEQ ID NO: 731355 - DNA, 15 bp, Homo sapiens
ggtgggtcccagcac

SEQ ID NO: 731356 - DNA, 15 bp, Homo sapiens
gtgggtcccagcacg

SEQ ID NO: 731357 - DNA, 15 bp, Homo sapiens
tgggtcccagcacgt

SEQ ID NO: 731358 - DNA, 15 bp, Homo sapiens
gggtcccagcacgtg

SEQ ID NO: 731359 - DNA, 15 bp, Homo sapiens
ggtcccagcacgtgc

SEQ ID NO: 731360 - DNA, 15 bp, Homo sapiens
gtcccagcacgtgcc

SEQ ID NO: 731361 - DNA, 15 bp, Homo sapiens
tcccagcacgtgcca

SEQ ID NO: 731362 - DNA, 15 bp, Homo sapiens
cccagcacgtgccag

SEQ ID NO: 731363 - DNA, 15 bp, Homo sapiens
ccagcacgtgccagg

SEQ ID NO: 731364 - DNA, 15 bp, Homo sapiens
cagcacgtgccaggg

SEQ ID NO: 731365 - DNA, 15 bp, Homo sapiens
agcacgtgccagggg

SEQ ID NO: 731366 - DNA, 15 bp, Homo sapiens
gcacgtgccaggggc

SEQ ID NO: 731367 - DNA, 15 bp, Homo sapiens
cacgtgccaggggca

SEQ ID NO: 731368 - DNA, 15 bp, Homo sapiens
acgtgccaggggcag

SEQ ID NO: 731369 - DNA, 15 bp, Homo sapiens
cgtgccaggggcagc

SEQ ID NO: 731370 - DNA, 15 bp, Homo sapiens
gtgccaggggcagca

SEQ ID NO: 731371 - DNA, 15 bp, Homo sapiens
tgccaggggcagcat

SEQ ID NO: 731372 - DNA, 15 bp, Homo sapiens
gccaggggcagcatg

SEQ ID NO: 731373 - DNA, 15 bp, Homo sapiens
ccaggggcagcatgt

SEQ ID NO: 731374 - DNA, 15 bp, Homo sapiens
caggggcagcatgtg

SEQ ID NO: 731375 - DNA, 15 bp, Homo sapiens
aggggcagcatgtgc

SEQ ID NO: 731376 - DNA, 15 bp, Homo sapiens
ggggcagcatgtgcg

SEQ ID NO: 731377 - DNA, 15 bp, Homo sapiens
gggcagcatgtgcgg

SEQ ID NO: 731378 - DNA, 15 bp, Homo sapiens
ggcagcatgtgcggt

SEQ ID NO: 731379 - DNA, 15 bp, Homo sapiens
gcagcatgtgcggtc

SEQ ID NO: 731380 - DNA, 15 bp, Homo sapiens
cagcatgtgcggtca

SEQ ID NO: 731381 - DNA, 15 bp, Homo sapiens
agcatgtgcggtcac

SEQ ID NO: 731382 - DNA, 15 bp, Homo sapiens
gcatgtgcggtcacc

SEQ ID NO: 731383 - DNA, 15 bp, Homo sapiens
catgtgcggtcacct

SEQ ID NO: 731384 - DNA, 15 bp, Homo sapiens
atgtgcggtcacctg

SEQ ID NO: 731385 - DNA, 15 bp, Homo sapiens
tgtgcggtcacctgt

SEQ ID NO: 731386 - DNA, 15 bp, Homo sapiens
gtgcggtcacctgta

SEQ ID NO: 731387 - DNA, 15 bp, Homo sapiens
tgcggtcacctgtat

SEQ ID NO: 731388 - DNA, 15 bp, Homo sapiens
gcggtcacctgtatg

SEQ ID NO: 731389 - DNA, 15 bp, Homo sapiens
cggtcacctgtatga

SEQ ID NO: 731390 - DNA, 15 bp, Homo sapiens
ggtcacctgtatgac

SEQ ID NO: 731391 - DNA, 15 bp, Homo sapiens
gtcacctgtatgacc

SEQ ID NO: 731392 - DNA, 15 bp, Homo sapiens
tcacctgtatgaccc

SEQ ID NO: 731393 - DNA, 15 bp, Homo sapiens
cacctgtatgacccc

SEQ ID NO: 731394 - DNA, 15 bp, Homo sapiens
acctgtatgacccct

SEQ ID NO: 731395 - DNA, 15 bp, Homo sapiens
cctgtatgacccctt

SEQ ID NO: 731396 - DNA, 15 bp, Homo sapiens
ctgtatgaccccttt

SEQ ID NO: 731397 - DNA, 15 bp, Homo sapiens
tgtatgacccctttg

SEQ ID NO: 731398 - DNA, 15 bp, Homo sapiens
gtatgacccctttgc

SEQ ID NO: 731399 - DNA, 15 bp, Homo sapiens
tatgacccctttgct

SEQ ID NO: 731400 - DNA, 15 bp, Homo sapiens
atgacccctttgctc

SEQ ID NO: 731401 - DNA, 15 bp, Homo sapiens
tgacccctttgctct

SEQ ID NO: 731402 - DNA, 15 bp, Homo sapiens
gacccctttgctcta

SEQ ID NO: 731403 - DNA, 15 bp, Homo sapiens
acccctttgctctag

SEQ ID NO: 731404 - DNA, 15 bp, Homo sapiens
cccctttgctctagt

SEQ ID NO: 731405 - DNA, 15 bp, Homo sapiens
ccctttgctctagtc

SEQ ID NO: 731406 - DNA, 15 bp, Homo sapiens
cctttgctctagtcc

SEQ ID NO: 731407 - DNA, 15 bp, Homo sapiens
ctttgctctagtccc

SEQ ID NO: 731408 - DNA, 15 bp, Homo sapiens
tttgctctagtccca

SEQ ID NO: 731409 - DNA, 15 bp, Homo sapiens
ttgctctagtcccaa

SEQ ID NO: 731410 - DNA, 15 bp, Homo sapiens
tgctctagtcccaat

SEQ ID NO: 731411 - DNA, 15 bp, Homo sapiens
gctctagtcccaatt

SEQ ID NO: 731412 - DNA, 15 bp, Homo sapiens
ctctagtcccaattc

SEQ ID NO: 731413 - DNA, 15 bp, Homo sapiens
tctagtcccaattcc

SEQ ID NO: 731414 - DNA, 15 bp, Homo sapiens
ctagtcccaattccc

SEQ ID NO: 731415 - DNA, 15 bp, Homo sapiens
tagtcccaattccct

SEQ ID NO: 731416 - DNA, 15 bp, Homo sapiens
agtcccaattcccta

SEQ ID NO: 731417 - DNA, 15 bp, Homo sapiens
gtcccaattccctac

SEQ ID NO: 731418 - DNA, 15 bp, Homo sapiens
tcccaattccctact

SEQ ID NO: 731419 - DNA, 15 bp, Homo sapiens
cccaattccctacta

SEQ ID NO: 731420 - DNA, 15 bp, Homo sapiens
ccaattccctactac

SEQ ID NO: 731421 - DNA, 15 bp, Homo sapiens
caattccctactaca

SEQ ID NO: 731422 - DNA, 15 bp, Homo sapiens
aattccctactacag

SEQ ID NO: 731423 - DNA, 15 bp, Homo sapiens
attccctactacaga

SEQ ID NO: 731424 - DNA, 15 bp, Homo sapiens
ttccctactacagat

SEQ ID NO: 731425 - DNA, 15 bp, Homo sapiens
tccctactacagata

SEQ ID NO: 731426 - DNA, 15 bp, Homo sapiens
ccctactacagataa

SEQ ID NO: 731427 - DNA, 15 bp, Homo sapiens
cctactacagataaa

SEQ ID NO: 731428 - DNA, 15 bp, Homo sapiens
ctactacagataaaa

SEQ ID NO: 731429 - DNA, 15 bp, Homo sapiens
tactacagataaaac

SEQ ID NO: 731430 - DNA, 15 bp, Homo sapiens
actacagataaaaca

SEQ ID NO: 731431 - DNA, 15 bp, Homo sapiens
ctacagataaaacat

SEQ ID NO: 731432 - DNA, 15 bp, Homo sapiens
tacagataaaacatc

SEQ ID NO: 731433 - DNA, 15 bp, Homo sapiens
acagataaaacatca

SEQ ID NO: 731434 - DNA, 15 bp, Homo sapiens
cagataaaacatcat

SEQ ID NO: 731435 - DNA, 15 bp, Homo sapiens
agataaaacatcatt

SEQ ID NO: 731436 - DNA, 15 bp, Homo sapiens
gataaaacatcattc

SEQ ID NO: 731437 - DNA, 15 bp, Homo sapiens
ataaaacatcattca

SEQ ID NO: 731438 - DNA, 15 bp, Homo sapiens
taaaacatcattcac

SEQ ID NO: 731439 - DNA, 15 bp, Homo sapiens
aaaacatcattcacc

SEQ ID NO: 731440 - DNA, 15 bp, Homo sapiens
aaacatcattcaccc

SEQ ID NO: 731441 - DNA, 15 bp, Homo sapiens
aacatcattcacccc

SEQ ID NO: 731442 - DNA, 15 bp, Homo sapiens
acatcattcacccct

SEQ ID NO: 731443 - DNA, 15 bp, Homo sapiens
catcattcacccctc

SEQ ID NO: 731444 - DNA, 15 bp, Homo sapiens
atcattcacccctcc

SEQ ID NO: 731445 - DNA, 15 bp, Homo sapiens
tcattcacccctccg

SEQ ID NO: 731446 - DNA, 15 bp, Homo sapiens
cattcacccctccgc

SEQ ID NO: 731447 - DNA, 15 bp, Homo sapiens
attcacccctccgca

SEQ ID NO: 731448 - DNA, 15 bp, Homo sapiens
ttcacccctccgcag

SEQ ID NO: 731449 - DNA, 15 bp, Homo sapiens
tcacccctccgcagg

SEQ ID NO: 731450 - DNA, 15 bp, Homo sapiens
cacccctccgcaggc

SEQ ID NO: 731451 - DNA, 15 bp, Homo sapiens
acccctccgcaggct

SEQ ID NO: 731452 - DNA, 15 bp, Homo sapiens
cccctccgcaggctt

SEQ ID NO: 731453 - DNA, 15 bp, Homo sapiens
ccctccgcaggcttt

SEQ ID NO: 731454 - DNA, 15 bp, Homo sapiens
cctccgcaggctttc

SEQ ID NO: 731455 - DNA, 15 bp, Homo sapiens
ctccgcaggctttct

SEQ ID NO: 731456 - DNA, 15 bp, Homo sapiens
tccgcaggctttctg

SEQ ID NO: 731457 - DNA, 15 bp, Homo sapiens
ccgcaggctttctgt

SEQ ID NO: 731458 - DNA, 15 bp, Homo sapiens
cgcaggctttctgtt

SEQ ID NO: 731459 - DNA, 15 bp, Homo sapiens
gcaggctttctgttc

SEQ ID NO: 731460 - DNA, 15 bp, Homo sapiens
caggctttctgttct

SEQ ID NO: 731461 - DNA, 15 bp, Homo sapiens
aggctttctgttctg

SEQ ID NO: 731462 - DNA, 15 bp, Homo sapiens
ggctttctgttctga

SEQ ID NO: 731463 - DNA, 15 bp, Homo sapiens
gctttctgttctgaa

SEQ ID NO: 731464 - DNA, 15 bp, Homo sapiens
ctttctgttctgaat

SEQ ID NO: 731465 - DNA, 15 bp, Homo sapiens
tttctgttctgaatc

SEQ ID NO: 731466 - DNA, 15 bp, Homo sapiens
ttctgttctgaatca

SEQ ID NO: 731467 - DNA, 15 bp, Homo sapiens
tctgttctgaatcac

SEQ ID NO: 731468 - DNA, 15 bp, Homo sapiens
ctgttctgaatcacg

SEQ ID NO: 731469 - DNA, 15 bp, Homo sapiens
tgttctgaatcacga

SEQ ID NO: 731470 - DNA, 15 bp, Homo sapiens
gttctgaatcacgat

SEQ ID NO: 731471 - DNA, 15 bp, Homo sapiens
ttctgaatcacgatt

SEQ ID NO: 731472 - DNA, 15 bp, Homo sapiens
tctgaatcacgatta

SEQ ID NO: 731473 - DNA, 15 bp, Homo sapiens
ctgaatcacgattac

SEQ ID NO: 731474 - DNA, 15 bp, Homo sapiens
tgaatcacgattacc

SEQ ID NO: 731475 - DNA, 15 bp, Homo sapiens
gaatcacgattacca

SEQ ID NO: 731476 - DNA, 15 bp, Homo sapiens
aatcacgattaccag

SEQ ID NO: 731477 - DNA, 15 bp, Homo sapiens
atcacgattaccagc

SEQ ID NO: 731478 - DNA, 15 bp, Homo sapiens
tcacgattaccagca

SEQ ID NO: 731479 - DNA, 15 bp, Homo sapiens
cacgattaccagcat

SEQ ID NO: 731480 - DNA, 15 bp, Homo sapiens
acgattaccagcatg

SEQ ID NO: 731481 - DNA, 15 bp, Homo sapiens
cgattaccagcatgt

SEQ ID NO: 731482 - DNA, 15 bp, Homo sapiens
gattaccagcatgtc

SEQ ID NO: 731483 - DNA, 15 bp, Homo sapiens
attaccagcatgtct

SEQ ID NO: 731484 - DNA, 15 bp, Homo sapiens
ttaccagcatgtctc

SEQ ID NO: 731485 - DNA, 15 bp, Homo sapiens
taccagcatgtctca

SEQ ID NO: 731486 - DNA, 15 bp, Homo sapiens
accagcatgtctcat

SEQ ID NO: 731487 - DNA, 15 bp, Homo sapiens
ccagcatgtctcata

SEQ ID NO: 731488 - DNA, 15 bp, Homo sapiens
cagcatgtctcatag

SEQ ID NO: 731489 - DNA, 15 bp, Homo sapiens
agcatgtctcatagc

SEQ ID NO: 731490 - DNA, 15 bp, Homo sapiens
gcatgtctcatagct

SEQ ID NO: 731491 - DNA, 15 bp, Homo sapiens
catgtctcatagctc

SEQ ID NO: 731492 - DNA, 15 bp, Homo sapiens
atgtctcatagctca

SEQ ID NO: 731493 - DNA, 15 bp, Homo sapiens
tgtctcatagctcag

SEQ ID NO: 731494 - DNA, 15 bp, Homo sapiens
gtctcatagctcaga

SEQ ID NO: 731495 - DNA, 15 bp, Homo sapiens
tctcatagctcagat

SEQ ID NO: 731496 - DNA, 15 bp, Homo sapiens
ctcatagctcagatc

SEQ ID NO: 731497 - DNA, 15 bp, Homo sapiens
tcatagctcagatcc

SEQ ID NO: 731498 - DNA, 15 bp, Homo sapiens
catagctcagatcct

SEQ ID NO: 731499 - DNA, 15 bp, Homo sapiens
atagctcagatccta

SEQ ID NO: 731500 - DNA, 15 bp, Homo sapiens
tagctcagatcctaa

SEQ ID NO: 731501 - DNA, 15 bp, Homo sapiens
agctcagatcctaac

SEQ ID NO: 731502 - DNA, 15 bp, Homo sapiens
gctcagatcctaacc

SEQ ID NO: 731503 - DNA, 15 bp, Homo sapiens
ctcagatcctaacca

SEQ ID NO: 731504 - DNA, 15 bp, Homo sapiens
tcagatcctaaccag

SEQ ID NO: 731505 - DNA, 15 bp, Homo sapiens
cagatcctaaccagc

SEQ ID NO: 731506 - DNA, 15 bp, Homo sapiens
agatcctaaccagca

SEQ ID NO: 731507 - DNA, 15 bp, Homo sapiens
gatcctaaccagcac

SEQ ID NO: 731508 - DNA, 15 bp, Homo sapiens
atcctaaccagcact

SEQ ID NO: 731509 - DNA, 15 bp, Homo sapiens
tcctaaccagcactt

SEQ ID NO: 731510 - DNA, 15 bp, Homo sapiens
cctaaccagcactta

SEQ ID NO: 731511 - DNA, 15 bp, Homo sapiens
ctaaccagcacttac

SEQ ID NO: 731512 - DNA, 15 bp, Homo sapiens
taaccagcacttact

SEQ ID NO: 731513 - DNA, 15 bp, Homo sapiens
aaccagcacttacta

SEQ ID NO: 731514 - DNA, 15 bp, Homo sapiens
accagcacttactag

SEQ ID NO: 731515 - DNA, 15 bp, Homo sapiens
ccagcacttactagg

SEQ ID NO: 731516 - DNA, 15 bp, Homo sapiens
cagcacttactaggc

SEQ ID NO: 731517 - DNA, 15 bp, Homo sapiens
agcacttactaggca

SEQ ID NO: 731518 - DNA, 15 bp, Homo sapiens
gcacttactaggcag

SEQ ID NO: 731519 - DNA, 15 bp, Homo sapiens
cacttactaggcaga

SEQ ID NO: 731520 - DNA, 15 bp, Homo sapiens
acttactaggcagaa

SEQ ID NO: 731521 - DNA, 15 bp, Homo sapiens
cttactaggcagaat

SEQ ID NO: 731522 - DNA, 15 bp, Homo sapiens
ttactaggcagaatt

SEQ ID NO: 731523 - DNA, 15 bp, Homo sapiens
tactaggcagaattc

SEQ ID NO: 731524 - DNA, 15 bp, Homo sapiens
actaggcagaattca

SEQ ID NO: 731525 - DNA, 15 bp, Homo sapiens
ctaggcagaattcag

SEQ ID NO: 731526 - DNA, 15 bp, Homo sapiens
taggcagaattcagc

SEQ ID NO: 731527 - DNA, 15 bp, Homo sapiens
aggcagaattcagca

SEQ ID NO: 731528 - DNA, 15 bp, Homo sapiens
ggcagaattcagcac

SEQ ID NO: 731529 - DNA, 15 bp, Homo sapiens
gcagaattcagcact

SEQ ID NO: 731530 - DNA, 15 bp, Homo sapiens
cagaattcagcactt

SEQ ID NO: 731531 - DNA, 15 bp, Homo sapiens
agaattcagcactta

SEQ ID NO: 731532 - DNA, 15 bp, Homo sapiens
gaattcagcacttaa

SEQ ID NO: 731533 - DNA, 15 bp, Homo sapiens
aattcagcacttaag

SEQ ID NO: 731534 - DNA, 15 bp, Homo sapiens
attcagcacttaagt

SEQ ID NO: 731535 - DNA, 15 bp, Homo sapiens
ttcagcacttaagtg

SEQ ID NO: 731536 - DNA, 15 bp, Homo sapiens
tcagcacttaagtga

SEQ ID NO: 731537 - DNA, 15 bp, Homo sapiens
cagcacttaagtgac

SEQ ID NO: 731538 - DNA, 15 bp, Homo sapiens
agcacttaagtgacc

SEQ ID NO: 731539 - DNA, 15 bp, Homo sapiens
gcacttaagtgaccc

SEQ ID NO: 731540 - DNA, 15 bp, Homo sapiens
cacttaagtgaccca

SEQ ID NO: 731541 - DNA, 15 bp, Homo sapiens
acttaagtgacccat

SEQ ID NO: 731542 - DNA, 15 bp, Homo sapiens
cttaagtgacccatt

SEQ ID NO: 731543 - DNA, 15 bp, Homo sapiens
ttaagtgacccatta

SEQ ID NO: 731544 - DNA, 15 bp, Homo sapiens
taagtgacccattaa

SEQ ID NO: 731545 - DNA, 15 bp, Homo sapiens
aagtgacccattaag

SEQ ID NO: 731546 - DNA, 15 bp, Homo sapiens
agtgacccattaagg

SEQ ID NO: 731547 - DNA, 15 bp, Homo sapiens
gtgacccattaagga

SEQ ID NO: 731548 - DNA, 15 bp, Homo sapiens
tgacccattaaggac

SEQ ID NO: 731549 - DNA, 15 bp, Homo sapiens
gacccattaaggact

SEQ ID NO: 731550 - DNA, 15 bp, Homo sapiens
acccattaaggactt

SEQ ID NO: 731551 - DNA, 15 bp, Homo sapiens
cccattaaggacttt

SEQ ID NO: 731552 - DNA, 15 bp, Homo sapiens
ccattaaggactttt

SEQ ID NO: 731553 - DNA, 15 bp, Homo sapiens
cattaaggacttttg

SEQ ID NO: 731554 - DNA, 15 bp, Homo sapiens
attaaggacttttgg

SEQ ID NO: 731555 - DNA, 15 bp, Homo sapiens
ttaaggacttttggc

SEQ ID NO: 731556 - DNA, 15 bp, Homo sapiens
taaggacttttggca

SEQ ID NO: 731557 - DNA, 15 bp, Homo sapiens
aaggacttttggcag

SEQ ID NO: 731558 - DNA, 15 bp, Homo sapiens
aggacttttggcaga

SEQ ID NO: 731559 - DNA, 15 bp, Homo sapiens
ggacttttggcagag

SEQ ID NO: 731560 - DNA, 15 bp, Homo sapiens
gacttttggcagagg

SEQ ID NO: 731561 - DNA, 15 bp, Homo sapiens
acttttggcagagga

SEQ ID NO: 731562 - DNA, 15 bp, Homo sapiens
cttttggcagaggaa

SEQ ID NO: 731563 - DNA, 15 bp, Homo sapiens
ttttggcagaggaat

SEQ ID NO: 731564 - DNA, 15 bp, Homo sapiens
tttggcagaggaatg

SEQ ID NO: 731565 - DNA, 15 bp, Homo sapiens
ttggcagaggaatgg

SEQ ID NO: 731566 - DNA, 15 bp, Homo sapiens
tggcagaggaatggg

SEQ ID NO: 731567 - DNA, 15 bp, Homo sapiens
ggcagaggaatggga

SEQ ID NO: 731568 - DNA, 15 bp, Homo sapiens
gcagaggaatgggaa

SEQ ID NO: 731569 - DNA, 15 bp, Homo sapiens
cagaggaatgggaaa

SEQ ID NO: 731570 - DNA, 15 bp, Homo sapiens
agaggaatgggaaag

SEQ ID NO: 731571 - DNA, 15 bp, Homo sapiens
gaggaatgggaaaga

SEQ ID NO: 731572 - DNA, 15 bp, Homo sapiens
aggaatgggaaagat

SEQ ID NO: 731573 - DNA, 15 bp, Homo sapiens
ggaatgggaaagata

SEQ ID NO: 731574 - DNA, 15 bp, Homo sapiens
gaatgggaaagataa

SEQ ID NO: 731575 - DNA, 15 bp, Homo sapiens
aatgggaaagataaa

SEQ ID NO: 731576 - DNA, 15 bp, Homo sapiens
atgggaaagataaaa

SEQ ID NO: 731577 - DNA, 15 bp, Homo sapiens
tgggaaagataaaaa

SEQ ID NO: 731578 - DNA, 15 bp, Homo sapiens
gggaaagataaaaat

SEQ ID NO: 731579 - DNA, 15 bp, Homo sapiens
ggaaagataaaaata

SEQ ID NO: 731580 - DNA, 15 bp, Homo sapiens
gaaagataaaaatag

SEQ ID NO: 731581 - DNA, 15 bp, Homo sapiens
aaagataaaaatagg

SEQ ID NO: 731582 - DNA, 15 bp, Homo sapiens
aagataaaaatagga

SEQ ID NO: 731583 - DNA, 15 bp, Homo sapiens
agataaaaataggaa

SEQ ID NO: 731584 - DNA, 15 bp, Homo sapiens
gataaaaataggaaa

SEQ ID NO: 731585 - DNA, 15 bp, Homo sapiens
ataaaaataggaaaa

SEQ ID NO: 731586 - DNA, 15 bp, Homo sapiens
taaaaataggaaaaa

SEQ ID NO: 731587 - DNA, 15 bp, Homo sapiens
aaaaataggaaaaaa

SEQ ID NO: 731588 - DNA, 15 bp, Homo sapiens
aaaataggaaaaaaa

SEQ ID NO: 731589 - DNA, 15 bp, Homo sapiens
aaataggaaaaaaat

SEQ ID NO: 731590 - DNA, 15 bp, Homo sapiens
aataggaaaaaaatc

SEQ ID NO: 731591 - DNA, 15 bp, Homo sapiens
ataggaaaaaaatca

SEQ ID NO: 731592 - DNA, 15 bp, Homo sapiens
taggaaaaaaatcag

SEQ ID NO: 731593 - DNA, 15 bp, Homo sapiens
aggaaaaaaatcaga

SEQ ID NO: 731594 - DNA, 15 bp, Homo sapiens
ggaaaaaaatcagaa

SEQ ID NO: 731595 - DNA, 15 bp, Homo sapiens
gaaaaaaatcagaaa

SEQ ID NO: 731596 - DNA, 15 bp, Homo sapiens
aaaaaaatcagaaaa

SEQ ID NO: 731597 - DNA, 15 bp, Homo sapiens
aaaaaatcagaaaac

SEQ ID NO: 731598 - DNA, 15 bp, Homo sapiens
aaaaatcagaaaaca

SEQ ID NO: 731599 - DNA, 15 bp, Homo sapiens
aaaatcagaaaacag

SEQ ID NO: 731600 - DNA, 15 bp, Homo sapiens
aaatcagaaaacaga

SEQ ID NO: 731601 - DNA, 15 bp, Homo sapiens
aatcagaaaacagaa

SEQ ID NO: 731602 - DNA, 15 bp, Homo sapiens
atcagaaaacagaaa

SEQ ID NO: 731603 - DNA, 15 bp, Homo sapiens
tcagaaaacagaaaa

SEQ ID NO: 731604 - DNA, 15 bp, Homo sapiens
cagaaaacagaaaag

SEQ ID NO: 731605 - DNA, 15 bp, Homo sapiens
agaaaacagaaaagg

SEQ ID NO: 731606 - DNA, 15 bp, Homo sapiens
gaaaacagaaaagga

SEQ ID NO: 731607 - DNA, 15 bp, Homo sapiens
aaaacagaaaaggat

SEQ ID NO: 731608 - DNA, 15 bp, Homo sapiens
aaacagaaaaggata

SEQ ID NO: 731609 - DNA, 15 bp, Homo sapiens
aacagaaaaggataa

SEQ ID NO: 731610 - DNA, 15 bp, Homo sapiens
acagaaaaggataat

SEQ ID NO: 731611 - DNA, 15 bp, Homo sapiens
cagaaaaggataatt

SEQ ID NO: 731612 - DNA, 15 bp, Homo sapiens
agaaaaggataattt

SEQ ID NO: 731613 - DNA, 15 bp, Homo sapiens
gaaaaggataatttg

SEQ ID NO: 731614 - DNA, 15 bp, Homo sapiens
aaaaggataatttgg

SEQ ID NO: 731615 - DNA, 15 bp, Homo sapiens
aaaggataatttggt

SEQ ID NO: 731616 - DNA, 15 bp, Homo sapiens
aaggataatttggta

SEQ ID NO: 731617 - DNA, 15 bp, Homo sapiens
aggataatttggtag

SEQ ID NO: 731618 - DNA, 15 bp, Homo sapiens
ggataatttggtagc

SEQ ID NO: 731619 - DNA, 15 bp, Homo sapiens
gataatttggtagcc

SEQ ID NO: 731620 - DNA, 15 bp, Homo sapiens
ataatttggtagccc

SEQ ID NO: 731621 - DNA, 15 bp, Homo sapiens
taatttggtagccca

SEQ ID NO: 731622 - DNA, 15 bp, Homo sapiens
aatttggtagcccaa

SEQ ID NO: 731623 - DNA, 15 bp, Homo sapiens
atttggtagcccaat

SEQ ID NO: 731624 - DNA, 15 bp, Homo sapiens
tttggtagcccaatg

SEQ ID NO: 731625 - DNA, 15 bp, Homo sapiens
ttggtagcccaatgt

SEQ ID NO: 731626 - DNA, 15 bp, Homo sapiens
tggtagcccaatgtg

SEQ ID NO: 731627 - DNA, 15 bp, Homo sapiens
ggtagcccaatgtga

SEQ ID NO: 731628 - DNA, 15 bp, Homo sapiens
gtagcccaatgtgac

SEQ ID NO: 731629 - DNA, 15 bp, Homo sapiens
tagcccaatgtgacc

SEQ ID NO: 731630 - DNA, 15 bp, Homo sapiens
agcccaatgtgacca

SEQ ID NO: 731631 - DNA, 15 bp, Homo sapiens
gcccaatgtgaccag

SEQ ID NO: 731632 - DNA, 15 bp, Homo sapiens
cccaatgtgaccagg

SEQ ID NO: 731633 - DNA, 15 bp, Homo sapiens
ccaatgtgaccagga

SEQ ID NO: 731634 - DNA, 15 bp, Homo sapiens
caatgtgaccaggaa

SEQ ID NO: 731635 - DNA, 15 bp, Homo sapiens
aatgtgaccaggaac

SEQ ID NO: 731636 - DNA, 15 bp, Homo sapiens
atgtgaccaggaact

SEQ ID NO: 731637 - DNA, 15 bp, Homo sapiens
tgtgaccaggaactt

SEQ ID NO: 731638 - DNA, 15 bp, Homo sapiens
gtgaccaggaacttg

SEQ ID NO: 731639 - DNA, 15 bp, Homo sapiens
tgaccaggaacttgg

SEQ ID NO: 731640 - DNA, 15 bp, Homo sapiens
gaccaggaacttgga

SEQ ID NO: 731641 - DNA, 15 bp, Homo sapiens
accaggaacttggag

SEQ ID NO: 731642 - DNA, 15 bp, Homo sapiens
ccaggaacttggagc

SEQ ID NO: 731643 - DNA, 15 bp, Homo sapiens
caggaacttggagct

SEQ ID NO: 731644 - DNA, 15 bp, Homo sapiens
aggaacttggagctg

SEQ ID NO: 731645 - DNA, 15 bp, Homo sapiens
ggaacttggagctgc

SEQ ID NO: 731646 - DNA, 15 bp, Homo sapiens
gaacttggagctgcc

SEQ ID NO: 731647 - DNA, 15 bp, Homo sapiens
aacttggagctgccc

SEQ ID NO: 731648 - DNA, 15 bp, Homo sapiens
acttggagctgccca

SEQ ID NO: 731649 - DNA, 15 bp, Homo sapiens
cttggagctgcccag

SEQ ID NO: 731650 - DNA, 15 bp, Homo sapiens
ttggagctgcccagt

SEQ ID NO: 731651 - DNA, 15 bp, Homo sapiens
tggagctgcccagtt

SEQ ID NO: 731652 - DNA, 15 bp, Homo sapiens
ggagctgcccagttg

SEQ ID NO: 731653 - DNA, 15 bp, Homo sapiens
gagctgcccagttga

SEQ ID NO: 731654 - DNA, 15 bp, Homo sapiens
agctgcccagttgag

SEQ ID NO: 731655 - DNA, 15 bp, Homo sapiens
gctgcccagttgagt

SEQ ID NO: 731656 - DNA, 15 bp, Homo sapiens
ctgcccagttgagtg

SEQ ID NO: 731657 - DNA, 15 bp, Homo sapiens
tgcccagttgagtgg

SEQ ID NO: 731658 - DNA, 15 bp, Homo sapiens
gcccagttgagtggc

SEQ ID NO: 731659 - DNA, 15 bp, Homo sapiens
cccagttgagtggct

SEQ ID NO: 731660 - DNA, 15 bp, Homo sapiens
ccagttgagtggctg

SEQ ID NO: 731661 - DNA, 15 bp, Homo sapiens
cagttgagtggctgg

SEQ ID NO: 731662 - DNA, 15 bp, Homo sapiens
agttgagtggctgga

SEQ ID NO: 731663 - DNA, 15 bp, Homo sapiens
gttgagtggctggaa

SEQ ID NO: 731664 - DNA, 15 bp, Homo sapiens
ttgagtggctggaag

SEQ ID NO: 731665 - DNA, 15 bp, Homo sapiens
tgagtggctggaagc

SEQ ID NO: 731666 - DNA, 15 bp, Homo sapiens
gagtggctggaagct

SEQ ID NO: 731667 - DNA, 15 bp, Homo sapiens
agtggctggaagctg

SEQ ID NO: 731668 - DNA, 15 bp, Homo sapiens
gtggctggaagctgg

SEQ ID NO: 731669 - DNA, 15 bp, Homo sapiens
tggctggaagctgga

SEQ ID NO: 731670 - DNA, 15 bp, Homo sapiens
ggctggaagctggaa

SEQ ID NO: 731671 - DNA, 15 bp, Homo sapiens
gctggaagctggaat

SEQ ID NO: 731672 - DNA, 15 bp, Homo sapiens
ctggaagctggaatg

SEQ ID NO: 731673 - DNA, 15 bp, Homo sapiens
tggaagctggaatga

SEQ ID NO: 731674 - DNA, 15 bp, Homo sapiens
ggaagctggaatgaa

SEQ ID NO: 731675 - DNA, 15 bp, Homo sapiens
gaagctggaatgaag

SEQ ID NO: 731676 - DNA, 15 bp, Homo sapiens
aagctggaatgaaga

SEQ ID NO: 731677 - DNA, 15 bp, Homo sapiens
agctggaatgaagaa

SEQ ID NO: 731678 - DNA, 15 bp, Homo sapiens
gctggaatgaagaac

SEQ ID NO: 731679 - DNA, 15 bp, Homo sapiens
ctggaatgaagaact

SEQ ID NO: 731680 - DNA, 15 bp, Homo sapiens
tggaatgaagaactt

SEQ ID NO: 731681 - DNA, 15 bp, Homo sapiens
ggaatgaagaacttg

SEQ ID NO: 731682 - DNA, 15 bp, Homo sapiens
gaatgaagaacttgt

SEQ ID NO: 731683 - DNA, 15 bp, Homo sapiens
aatgaagaacttgtc

SEQ ID NO: 731684 - DNA, 15 bp, Homo sapiens
atgaagaacttgtct

SEQ ID NO: 731685 - DNA, 15 bp, Homo sapiens
tgaagaacttgtctg

SEQ ID NO: 731686 - DNA, 15 bp, Homo sapiens
gaagaacttgtctgc

SEQ ID NO: 731687 - DNA, 15 bp, Homo sapiens
aagaacttgtctgca

SEQ ID NO: 731688 - DNA, 15 bp, Homo sapiens
agaacttgtctgcaa

SEQ ID NO: 731689 - DNA, 15 bp, Homo sapiens
gaacttgtctgcaac

SEQ ID NO: 731690 - DNA, 15 bp, Homo sapiens
aacttgtctgcaaca

SEQ ID NO: 731691 - DNA, 15 bp, Homo sapiens
acttgtctgcaacat

SEQ ID NO: 731692 - DNA, 15 bp, Homo sapiens
cttgtctgcaacatg

SEQ ID NO: 731693 - DNA, 15 bp, Homo sapiens
ttgtctgcaacatgg

SEQ ID NO: 731694 - DNA, 15 bp, Homo sapiens
tgtctgcaacatggc

SEQ ID NO: 731695 - DNA, 15 bp, Homo sapiens
gtctgcaacatggcc

SEQ ID NO: 731696 - DNA, 15 bp, Homo sapiens
tctgcaacatggcca

SEQ ID NO: 731697 - DNA, 15 bp, Homo sapiens
ctgcaacatggccag

SEQ ID NO: 731698 - DNA, 15 bp, Homo sapiens
tgcaacatggccagt

SEQ ID NO: 731699 - DNA, 15 bp, Homo sapiens
gcaacatggccagtg

SEQ ID NO: 731700 - DNA, 15 bp, Homo sapiens
caacatggccagtga

SEQ ID NO: 731701 - DNA, 15 bp, Homo sapiens
aacatggccagtgag

SEQ ID NO: 731702 - DNA, 15 bp, Homo sapiens
acatggccagtgaga

SEQ ID NO: 731703 - DNA, 15 bp, Homo sapiens
catggccagtgagaa

SEQ ID NO: 731704 - DNA, 15 bp, Homo sapiens
atggccagtgagaaa

SEQ ID NO: 731705 - DNA, 15 bp, Homo sapiens
tggccagtgagaaat

SEQ ID NO: 731706 - DNA, 15 bp, Homo sapiens
ggccagtgagaaata

SEQ ID NO: 731707 - DNA, 15 bp, Homo sapiens
gccagtgagaaataa

SEQ ID NO: 731708 - DNA, 15 bp, Homo sapiens
ccagtgagaaataac

SEQ ID NO: 731709 - DNA, 15 bp, Homo sapiens
cagtgagaaataaca

SEQ ID NO: 731710 - DNA, 15 bp, Homo sapiens
agtgagaaataacac

SEQ ID NO: 731711 - DNA, 15 bp, Homo sapiens
gtgagaaataacacc

SEQ ID NO: 731712 - DNA, 15 bp, Homo sapiens
tgagaaataacacca

SEQ ID NO: 731713 - DNA, 15 bp, Homo sapiens
gagaaataacaccag

SEQ ID NO: 731714 - DNA, 15 bp, Homo sapiens
agaaataacaccagg

SEQ ID NO: 731715 - DNA, 15 bp, Homo sapiens
gaaataacaccagga

SEQ ID NO: 731716 - DNA, 15 bp, Homo sapiens
aaataacaccaggac

SEQ ID NO: 731717 - DNA, 15 bp, Homo sapiens
aataacaccaggacc

SEQ ID NO: 731718 - DNA, 15 bp, Homo sapiens
ataacaccaggaccc

SEQ ID NO: 731719 - DNA, 15 bp, Homo sapiens
taacaccaggaccca

SEQ ID NO: 731720 - DNA, 15 bp, Homo sapiens
aacaccaggacccat

SEQ ID NO: 731721 - DNA, 15 bp, Homo sapiens
acaccaggacccatc

SEQ ID NO: 731722 - DNA, 15 bp, Homo sapiens
caccaggacccatca

SEQ ID NO: 731723 - DNA, 15 bp, Homo sapiens
accaggacccatcag

SEQ ID NO: 731724 - DNA, 15 bp, Homo sapiens
ccaggacccatcagg

SEQ ID NO: 731725 - DNA, 15 bp, Homo sapiens
caggacccatcaggg

SEQ ID NO: 731726 - DNA, 15 bp, Homo sapiens
aggacccatcagggt

SEQ ID NO: 731727 - DNA, 15 bp, Homo sapiens
ggacccatcagggtc

SEQ ID NO: 731728 - DNA, 15 bp, Homo sapiens
gacccatcagggtcc

SEQ ID NO: 731729 - DNA, 15 bp, Homo sapiens
acccatcagggtcca

SEQ ID NO: 731730 - DNA, 15 bp, Homo sapiens
cccatcagggtccat

SEQ ID NO: 731731 - DNA, 15 bp, Homo sapiens
ccatcagggtccatc

SEQ ID NO: 731732 - DNA, 15 bp, Homo sapiens
catcagggtccatct

SEQ ID NO: 731733 - DNA, 15 bp, Homo sapiens
atcagggtccatctg

SEQ ID NO: 731734 - DNA, 15 bp, Homo sapiens
tcagggtccatctgg

SEQ ID NO: 731735 - DNA, 15 bp, Homo sapiens
cagggtccatctggg

SEQ ID NO: 731736 - DNA, 15 bp, Homo sapiens
agggtccatctgggt

SEQ ID NO: 731737 - DNA, 15 bp, Homo sapiens
gggtccatctgggtt

SEQ ID NO: 731738 - DNA, 15 bp, Homo sapiens
ggtccatctgggtta

SEQ ID NO: 731739 - DNA, 15 bp, Homo sapiens
gtccatctgggttag

SEQ ID NO: 731740 - DNA, 15 bp, Homo sapiens
tccatctgggttagg

SEQ ID NO: 731741 - DNA, 15 bp, Homo sapiens
ccatctgggttaggc

SEQ ID NO: 731742 - DNA, 15 bp, Homo sapiens
catctgggttaggct

SEQ ID NO: 731743 - DNA, 15 bp, Homo sapiens
atctgggttaggctc

SEQ ID NO: 731744 - DNA, 15 bp, Homo sapiens
tctgggttaggctca

SEQ ID NO: 731745 - DNA, 15 bp, Homo sapiens
ctgggttaggctcaa

SEQ ID NO: 731746 - DNA, 15 bp, Homo sapiens
tgggttaggctcaac

SEQ ID NO: 731747 - DNA, 15 bp, Homo sapiens
gggttaggctcaaca

SEQ ID NO: 731748 - DNA, 15 bp, Homo sapiens
ggttaggctcaacac

SEQ ID NO: 731749 - DNA, 15 bp, Homo sapiens
gttaggctcaacact

SEQ ID NO: 731750 - DNA, 15 bp, Homo sapiens
ttaggctcaacactg

SEQ ID NO: 731751 - DNA, 15 bp, Homo sapiens
taggctcaacactga

SEQ ID NO: 731752 - DNA, 15 bp, Homo sapiens
aggctcaacactgat

SEQ ID NO: 731753 - DNA, 15 bp, Homo sapiens
ggctcaacactgatt

SEQ ID NO: 731754 - DNA, 15 bp, Homo sapiens
gctcaacactgattt

SEQ ID NO: 731755 - DNA, 15 bp, Homo sapiens
ctcaacactgatttc

SEQ ID NO: 731756 - DNA, 15 bp, Homo sapiens
tcaacactgatttcc

SEQ ID NO: 731757 - DNA, 15 bp, Homo sapiens
caacactgatttcct

SEQ ID NO: 731758 - DNA, 15 bp, Homo sapiens
aacactgatttcctt

SEQ ID NO: 731759 - DNA, 15 bp, Homo sapiens
acactgatttccttg

SEQ ID NO: 731760 - DNA, 15 bp, Homo sapiens
cactgatttccttgc

SEQ ID NO: 731761 - DNA, 15 bp, Homo sapiens
actgatttccttgct

SEQ ID NO: 731762 - DNA, 15 bp, Homo sapiens
ctgatttccttgctt

SEQ ID NO: 731763 - DNA, 15 bp, Homo sapiens
tgatttccttgcttt

SEQ ID NO: 731764 - DNA, 15 bp, Homo sapiens
gatttccttgctttg

SEQ ID NO: 731765 - DNA, 15 bp, Homo sapiens
atttccttgctttgc

SEQ ID NO: 731766 - DNA, 15 bp, Homo sapiens
tttccttgctttgct

SEQ ID NO: 731767 - DNA, 15 bp, Homo sapiens
ttccttgctttgctg

SEQ ID NO: 731768 - DNA, 15 bp, Homo sapiens
tccttgctttgctgt

SEQ ID NO: 731769 - DNA, 15 bp, Homo sapiens
ccttgctttgctgtc

SEQ ID NO: 731770 - DNA, 15 bp, Homo sapiens
cttgctttgctgtct

SEQ ID NO: 731771 - DNA, 15 bp, Homo sapiens
ttgctttgctgtctt

SEQ ID NO: 731772 - DNA, 15 bp, Homo sapiens
tgctttgctgtcttt

SEQ ID NO: 731773 - DNA, 15 bp, Homo sapiens
gctttgctgtcttta

SEQ ID NO: 731774 - DNA, 15 bp, Homo sapiens
ctttgctgtctttaa

SEQ ID NO: 731775 - DNA, 15 bp, Homo sapiens
tttgctgtctttaaa

SEQ ID NO: 731776 - DNA, 15 bp, Homo sapiens
ttgctgtctttaaaa

SEQ ID NO: 731777 - DNA, 15 bp, Homo sapiens
tgctgtctttaaaat

SEQ ID NO: 731778 - DNA, 15 bp, Homo sapiens
gctgtctttaaaatc

SEQ ID NO: 731779 - DNA, 15 bp, Homo sapiens
ctgtctttaaaatca

SEQ ID NO: 731780 - DNA, 15 bp, Homo sapiens
tgtctttaaaatcaa

SEQ ID NO: 731781 - DNA, 15 bp, Homo sapiens
gtctttaaaatcaat

SEQ ID NO: 731782 - DNA, 15 bp, Homo sapiens
tctttaaaatcaatt

SEQ ID NO: 731783 - DNA, 15 bp, Homo sapiens
ctttaaaatcaattt

SEQ ID NO: 731784 - DNA, 15 bp, Homo sapiens
tttaaaatcaatttt

SEQ ID NO: 731785 - DNA, 15 bp, Homo sapiens
ttaaaatcaattttt

SEQ ID NO: 731786 - DNA, 15 bp, Homo sapiens
taaaatcaatttttt

SEQ ID NO: 731787 - DNA, 15 bp, Homo sapiens
aaaatcaatttttta

SEQ ID NO: 731788 - DNA, 15 bp, Homo sapiens
aaatcaattttttag

SEQ ID NO: 731789 - DNA, 15 bp, Homo sapiens
aatcaattttttagt

SEQ ID NO: 731790 - DNA, 15 bp, Homo sapiens
atcaattttttagta

SEQ ID NO: 731791 - DNA, 15 bp, Homo sapiens
tcaattttttagtac

SEQ ID NO: 731792 - DNA, 15 bp, Homo sapiens
caattttttagtacc

SEQ ID NO: 731793 - DNA, 15 bp, Homo sapiens
aattttttagtacct

SEQ ID NO: 731794 - DNA, 15 bp, Homo sapiens
attttttagtacctg

SEQ ID NO: 731795 - DNA, 15 bp, Homo sapiens
ttttttagtacctgt

SEQ ID NO: 731796 - DNA, 15 bp, Homo sapiens
tttttagtacctgta

SEQ ID NO: 731797 - DNA, 15 bp, Homo sapiens
ttttagtacctgtag

SEQ ID NO: 731798 - DNA, 15 bp, Homo sapiens
tttagtacctgtagg

SEQ ID NO: 731799 - DNA, 15 bp, Homo sapiens
ttagtacctgtaggg

SEQ ID NO: 731800 - DNA, 15 bp, Homo sapiens
tagtacctgtaggga

SEQ ID NO: 731801 - DNA, 15 bp, Homo sapiens
agtacctgtagggat

SEQ ID NO: 731802 - DNA, 15 bp, Homo sapiens
gtacctgtagggatc

SEQ ID NO: 731803 - DNA, 15 bp, Homo sapiens
tacctgtagggatca

SEQ ID NO: 731804 - DNA, 15 bp, Homo sapiens
acctgtagggatcag

SEQ ID NO: 731805 - DNA, 15 bp, Homo sapiens
cctgtagggatcagc

SEQ ID NO: 731806 - DNA, 15 bp, Homo sapiens
ctgtagggatcagcc

SEQ ID NO: 731807 - DNA, 15 bp, Homo sapiens
tgtagggatcagcca

SEQ ID NO: 731808 - DNA, 15 bp, Homo sapiens
gtagggatcagccaa

SEQ ID NO: 731809 - DNA, 15 bp, Homo sapiens
tagggatcagccaac

SEQ ID NO: 731810 - DNA, 15 bp, Homo sapiens
agggatcagccaact

SEQ ID NO: 731811 - DNA, 15 bp, Homo sapiens
gggatcagccaactg

SEQ ID NO: 731812 - DNA, 15 bp, Homo sapiens
ggatcagccaactgt

SEQ ID NO: 731813 - DNA, 15 bp, Homo sapiens
gatcagccaactgta

SEQ ID NO: 731814 - DNA, 15 bp, Homo sapiens
atcagccaactgtat

SEQ ID NO: 731815 - DNA, 15 bp, Homo sapiens
tcagccaactgtatg

SEQ ID NO: 731816 - DNA, 15 bp, Homo sapiens
cagccaactgtatgt

SEQ ID NO: 731817 - DNA, 15 bp, Homo sapiens
agccaactgtatgtc

SEQ ID NO: 731818 - DNA, 15 bp, Homo sapiens
gccaactgtatgtct

SEQ ID NO: 731819 - DNA, 15 bp, Homo sapiens
ccaactgtatgtctc

SEQ ID NO: 731820 - DNA, 15 bp, Homo sapiens
caactgtatgtctca

SEQ ID NO: 731821 - DNA, 15 bp, Homo sapiens
aactgtatgtctcac

SEQ ID NO: 731822 - DNA, 15 bp, Homo sapiens
actgtatgtctcacc

SEQ ID NO: 731823 - DNA, 15 bp, Homo sapiens
ctgtatgtctcaccg

SEQ ID NO: 731824 - DNA, 15 bp, Homo sapiens
tgtatgtctcaccgt

SEQ ID NO: 731825 - DNA, 15 bp, Homo sapiens
gtatgtctcaccgtc

SEQ ID NO: 731826 - DNA, 15 bp, Homo sapiens
tatgtctcaccgtct

SEQ ID NO: 731827 - DNA, 15 bp, Homo sapiens
atgtctcaccgtcta

SEQ ID NO: 731828 - DNA, 15 bp, Homo sapiens
tgtctcaccgtctat

SEQ ID NO: 731829 - DNA, 15 bp, Homo sapiens
gtctcaccgtctata

SEQ ID NO: 731830 - DNA, 15 bp, Homo sapiens
tctcaccgtctatac

SEQ ID NO: 731831 - DNA, 15 bp, Homo sapiens
ctcaccgtctatacg

SEQ ID NO: 731832 - DNA, 15 bp, Homo sapiens
tcaccgtctatacga

SEQ ID NO: 731833 - DNA, 15 bp, Homo sapiens
caccgtctatacgat

SEQ ID NO: 731834 - DNA, 15 bp, Homo sapiens
accgtctatacgata

SEQ ID NO: 731835 - DNA, 15 bp, Homo sapiens
ccgtctatacgataa

SEQ ID NO: 731836 - DNA, 15 bp, Homo sapiens
cgtctatacgataat

SEQ ID NO: 731837 - DNA, 15 bp, Homo sapiens
gtctatacgataatg

SEQ ID NO: 731838 - DNA, 15 bp, Homo sapiens
tctatacgataatgg

SEQ ID NO: 731839 - DNA, 15 bp, Homo sapiens
ctatacgataatggc

SEQ ID NO: 731840 - DNA, 15 bp, Homo sapiens
tatacgataatggca

SEQ ID NO: 731841 - DNA, 15 bp, Homo sapiens
atacgataatggcaa

SEQ ID NO: 731842 - DNA, 15 bp, Homo sapiens
tacgataatggcaaa

SEQ ID NO: 731843 - DNA, 15 bp, Homo sapiens
acgataatggcaaat

SEQ ID NO: 731844 - DNA, 15 bp, Homo sapiens
cgataatggcaaata

SEQ ID NO: 731845 - DNA, 15 bp, Homo sapiens
gataatggcaaataa

SEQ ID NO: 731846 - DNA, 15 bp, Homo sapiens
ataatggcaaataat

SEQ ID NO: 731847 - DNA, 15 bp, Homo sapiens
taatggcaaataata

SEQ ID NO: 731848 - DNA, 15 bp, Homo sapiens
aatggcaaataataa

SEQ ID NO: 731849 - DNA, 15 bp, Homo sapiens
atggcaaataataat

SEQ ID NO: 731850 - DNA, 15 bp, Homo sapiens
tggcaaataataatt

SEQ ID NO: 731851 - DNA, 15 bp, Homo sapiens
ggcaaataataattt

SEQ ID NO: 731852 - DNA, 15 bp, Homo sapiens
gcaaataataatttt

SEQ ID NO: 731853 - DNA, 15 bp, Homo sapiens
caaataataattttt

SEQ ID NO: 731854 - DNA, 15 bp, Homo sapiens
aaataataatttttt

SEQ ID NO: 731855 - DNA, 15 bp, Homo sapiens
aataataattttttg

SEQ ID NO: 731856 - DNA, 15 bp, Homo sapiens
ataataattttttgt

SEQ ID NO: 731857 - DNA, 15 bp, Homo sapiens
taataattttttgtt

SEQ ID NO: 731858 - DNA, 15 bp, Homo sapiens
aataattttttgttg

SEQ ID NO: 731859 - DNA, 15 bp, Homo sapiens
ataattttttgttgt

SEQ ID NO: 731860 - DNA, 15 bp, Homo sapiens
taattttttgttgtt

SEQ ID NO: 731861 - DNA, 15 bp, Homo sapiens
aattttttgttgttg

SEQ ID NO: 731862 - DNA, 15 bp, Homo sapiens
attttttgttgttgg

SEQ ID NO: 731863 - DNA, 15 bp, Homo sapiens
ttttttgttgttggc

SEQ ID NO: 731864 - DNA, 15 bp, Homo sapiens
tttttgttgttggca

SEQ ID NO: 731865 - DNA, 15 bp, Homo sapiens
ttttgttgttggcat

SEQ ID NO: 731866 - DNA, 15 bp, Homo sapiens
tttgttgttggcatt

SEQ ID NO: 731867 - DNA, 15 bp, Homo sapiens
ttgttgttggcattt

SEQ ID NO: 731868 - DNA, 15 bp, Homo sapiens
tgttgttggcatttg

SEQ ID NO: 731869 - DNA, 15 bp, Homo sapiens
gttgttggcatttga

SEQ ID NO: 731870 - DNA, 15 bp, Homo sapiens
ttgttggcatttgag

SEQ ID NO: 731871 - DNA, 15 bp, Homo sapiens
tgttggcatttgaga

SEQ ID NO: 731872 - DNA, 15 bp, Homo sapiens
gttggcatttgagag

SEQ ID NO: 731873 - DNA, 15 bp, Homo sapiens
ttggcatttgagagc

SEQ ID NO: 731874 - DNA, 15 bp, Homo sapiens
tggcatttgagagca

SEQ ID NO: 731875 - DNA, 15 bp, Homo sapiens
ggcatttgagagcat

SEQ ID NO: 731876 - DNA, 15 bp, Homo sapiens
gcatttgagagcatt

SEQ ID NO: 731877 - DNA, 15 bp, Homo sapiens
catttgagagcatta

SEQ ID NO: 731878 - DNA, 15 bp, Homo sapiens
atttgagagcattat

SEQ ID NO: 731879 - DNA, 15 bp, Homo sapiens
tttgagagcattatt

SEQ ID NO: 731880 - DNA, 15 bp, Homo sapiens
ttgagagcattattt

SEQ ID NO: 731881 - DNA, 15 bp, Homo sapiens
tgagagcattattta

SEQ ID NO: 731882 - DNA, 15 bp, Homo sapiens
gagagcattatttaa

SEQ ID NO: 731883 - DNA, 15 bp, Homo sapiens
agagcattatttaag

SEQ ID NO: 731884 - DNA, 15 bp, Homo sapiens
gagcattatttaagt

SEQ ID NO: 731885 - DNA, 15 bp, Homo sapiens
agcattatttaagta

SEQ ID NO: 731886 - DNA, 15 bp, Homo sapiens
gcattatttaagtac

SEQ ID NO: 731887 - DNA, 15 bp, Homo sapiens
cattatttaagtacc

SEQ ID NO: 731888 - DNA, 15 bp, Homo sapiens
attatttaagtaccc

SEQ ID NO: 731889 - DNA, 15 bp, Homo sapiens
ttatttaagtacccc

SEQ ID NO: 731890 - DNA, 15 bp, Homo sapiens
tatttaagtaccccc

SEQ ID NO: 731891 - DNA, 15 bp, Homo sapiens
atttaagtaccccca

SEQ ID NO: 731892 - DNA, 15 bp, Homo sapiens
tttaagtacccccat

SEQ ID NO: 731893 - DNA, 15 bp, Homo sapiens
ttaagtacccccatt

SEQ ID NO: 731894 - DNA, 15 bp, Homo sapiens
taagtacccccatta

SEQ ID NO: 731895 - DNA, 15 bp, Homo sapiens
aagtacccccattac

SEQ ID NO: 731896 - DNA, 15 bp, Homo sapiens
agtacccccattact

SEQ ID NO: 731897 - DNA, 15 bp, Homo sapiens
gtacccccattactg

SEQ ID NO: 731898 - DNA, 15 bp, Homo sapiens
tacccccattactga

SEQ ID NO: 731899 - DNA, 15 bp, Homo sapiens
acccccattactgag

SEQ ID NO: 731900 - DNA, 15 bp, Homo sapiens
cccccattactgagg

SEQ ID NO: 731901 - DNA, 15 bp, Homo sapiens
ccccattactgaggc

SEQ ID NO: 731902 - DNA, 15 bp, Homo sapiens
cccattactgaggca

SEQ ID NO: 731903 - DNA, 15 bp, Homo sapiens
ccattactgaggcat

SEQ ID NO: 731904 - DNA, 15 bp, Homo sapiens
cattactgaggcatc

SEQ ID NO: 731905 - DNA, 15 bp, Homo sapiens
attactgaggcatct

SEQ ID NO: 731906 - DNA, 15 bp, Homo sapiens
ttactgaggcatctc

SEQ ID NO: 731907 - DNA, 15 bp, Homo sapiens
tactgaggcatctca

SEQ ID NO: 731908 - DNA, 15 bp, Homo sapiens
actgaggcatctcag

SEQ ID NO: 731909 - DNA, 15 bp, Homo sapiens
ctgaggcatctcagc

SEQ ID NO: 731910 - DNA, 15 bp, Homo sapiens
tgaggcatctcagcc

SEQ ID NO: 731911 - DNA, 15 bp, Homo sapiens
gaggcatctcagcca

SEQ ID NO: 731912 - DNA, 15 bp, Homo sapiens
aggcatctcagccaa

SEQ ID NO: 731913 - DNA, 15 bp, Homo sapiens
ggcatctcagccaac

SEQ ID NO: 731914 - DNA, 15 bp, Homo sapiens
gcatctcagccaact

SEQ ID NO: 731915 - DNA, 15 bp, Homo sapiens
catctcagccaactt

SEQ ID NO: 731916 - DNA, 15 bp, Homo sapiens
atctcagccaacttc

SEQ ID NO: 731917 - DNA, 15 bp, Homo sapiens
tctcagccaacttcc

SEQ ID NO: 731918 - DNA, 15 bp, Homo sapiens
ctcagccaacttccc

SEQ ID NO: 731919 - DNA, 15 bp, Homo sapiens
tcagccaacttccct

SEQ ID NO: 731920 - DNA, 15 bp, Homo sapiens
cagccaacttccctg

SEQ ID NO: 731921 - DNA, 15 bp, Homo sapiens
agccaacttccctgc

SEQ ID NO: 731922 - DNA, 15 bp, Homo sapiens
gccaacttccctgct

SEQ ID NO: 731923 - DNA, 15 bp, Homo sapiens
ccaacttccctgctg

SEQ ID NO: 731924 - DNA, 15 bp, Homo sapiens
caacttccctgctga

SEQ ID NO: 731925 - DNA, 15 bp, Homo sapiens
aacttccctgctgag

SEQ ID NO: 731926 - DNA, 15 bp, Homo sapiens
acttccctgctgagg

SEQ ID NO: 731927 - DNA, 15 bp, Homo sapiens
cttccctgctgaggg

SEQ ID NO: 731928 - DNA, 15 bp, Homo sapiens
ttccctgctgagggt

SEQ ID NO: 731929 - DNA, 15 bp, Homo sapiens
tccctgctgagggta

SEQ ID NO: 731930 - DNA, 15 bp, Homo sapiens
ccctgctgagggtac

SEQ ID NO: 731931 - DNA, 15 bp, Homo sapiens
cctgctgagggtact

SEQ ID NO: 731932 - DNA, 15 bp, Homo sapiens
ctgctgagggtactt

SEQ ID NO: 731933 - DNA, 15 bp, Homo sapiens
tgctgagggtacttc

SEQ ID NO: 731934 - DNA, 15 bp, Homo sapiens
gctgagggtacttcc

SEQ ID NO: 731935 - DNA, 15 bp, Homo sapiens
ctgagggtacttccc

SEQ ID NO: 731936 - DNA, 15 bp, Homo sapiens
tgagggtacttccct

SEQ ID NO: 731937 - DNA, 15 bp, Homo sapiens
gagggtacttccctt

SEQ ID NO: 731938 - DNA, 15 bp, Homo sapiens
agggtacttcccttc

SEQ ID NO: 731939 - DNA, 15 bp, Homo sapiens
gggtacttcccttcc

SEQ ID NO: 731940 - DNA, 15 bp, Homo sapiens
ggtacttcccttcca

SEQ ID NO: 731941 - DNA, 15 bp, Homo sapiens
gtacttcccttccac

SEQ ID NO: 731942 - DNA, 15 bp, Homo sapiens
tacttcccttccact

SEQ ID NO: 731943 - DNA, 15 bp, Homo sapiens
acttcccttccactt

SEQ ID NO: 731944 - DNA, 15 bp, Homo sapiens
cttcccttccacttg

SEQ ID NO: 731945 - DNA, 15 bp, Homo sapiens
ttcccttccacttgt

SEQ ID NO: 731946 - DNA, 15 bp, Homo sapiens
tcccttccacttgtc

SEQ ID NO: 731947 - DNA, 15 bp, Homo sapiens
cccttccacttgtct

SEQ ID NO: 731948 - DNA, 15 bp, Homo sapiens
ccttccacttgtctt

SEQ ID NO: 731949 - DNA, 15 bp, Homo sapiens
cttccacttgtctta

SEQ ID NO: 731950 - DNA, 15 bp, Homo sapiens
ttccacttgtcttaa

SEQ ID NO: 731951 - DNA, 15 bp, Homo sapiens
tccacttgtcttaaa

SEQ ID NO: 731952 - DNA, 15 bp, Homo sapiens
ccacttgtcttaaaa

SEQ ID NO: 731953 - DNA, 15 bp, Homo sapiens
cacttgtcttaaaac

SEQ ID NO: 731954 - DNA, 15 bp, Homo sapiens
acttgtcttaaaact

SEQ ID NO: 731955 - DNA, 15 bp, Homo sapiens
cttgtcttaaaactg

SEQ ID NO: 731956 - DNA, 15 bp, Homo sapiens
ttgtcttaaaactgg

SEQ ID NO: 731957 - DNA, 15 bp, Homo sapiens
tgtcttaaaactggc

SEQ ID NO: 731958 - DNA, 15 bp, Homo sapiens
gtcttaaaactggca

SEQ ID NO: 731959 - DNA, 15 bp, Homo sapiens
tcttaaaactggcac

SEQ ID NO: 731960 - DNA, 15 bp, Homo sapiens
cttaaaactggcaca

SEQ ID NO: 731961 - DNA, 15 bp, Homo sapiens
ttaaaactggcacaa

SEQ ID NO: 731962 - DNA, 15 bp, Homo sapiens
taaaactggcacaac

SEQ ID NO: 731963 - DNA, 15 bp, Homo sapiens
aaaactggcacaact

SEQ ID NO: 731964 - DNA, 15 bp, Homo sapiens
aaactggcacaactt

SEQ ID NO: 731965 - DNA, 15 bp, Homo sapiens
aactggcacaacttc

SEQ ID NO: 731966 - DNA, 15 bp, Homo sapiens
actggcacaacttcc

SEQ ID NO: 731967 - DNA, 15 bp, Homo sapiens
ctggcacaacttcct

SEQ ID NO: 731968 - DNA, 15 bp, Homo sapiens
tggcacaacttccta

SEQ ID NO: 731969 - DNA, 15 bp, Homo sapiens
ggcacaacttcctaa

SEQ ID NO: 731970 - DNA, 15 bp, Homo sapiens
gcacaacttcctaac

SEQ ID NO: 731971 - DNA, 15 bp, Homo sapiens
cacaacttcctaaca

SEQ ID NO: 731972 - DNA, 15 bp, Homo sapiens
acaacttcctaacat

SEQ ID NO: 731973 - DNA, 15 bp, Homo sapiens
caacttcctaacatg

SEQ ID NO: 731974 - DNA, 15 bp, Homo sapiens
aacttcctaacatga

SEQ ID NO: 731975 - DNA, 15 bp, Homo sapiens
acttcctaacatgaa

SEQ ID NO: 731976 - DNA, 15 bp, Homo sapiens
cttcctaacatgaac

SEQ ID NO: 731977 - DNA, 15 bp, Homo sapiens
ttcctaacatgaacc

SEQ ID NO: 731978 - DNA, 15 bp, Homo sapiens
tcctaacatgaacca

SEQ ID NO: 731979 - DNA, 15 bp, Homo sapiens
cctaacatgaaccag

SEQ ID NO: 731980 - DNA, 15 bp, Homo sapiens
ctaacatgaaccagt

SEQ ID NO: 731981 - DNA, 15 bp, Homo sapiens
taacatgaaccagtt

SEQ ID NO: 731982 - DNA, 15 bp, Homo sapiens
aacatgaaccagttt

SEQ ID NO: 731983 - DNA, 15 bp, Homo sapiens
acatgaaccagtttg

SEQ ID NO: 731984 - DNA, 15 bp, Homo sapiens
catgaaccagtttga

SEQ ID NO: 731985 - DNA, 15 bp, Homo sapiens
atgaaccagtttgac

SEQ ID NO: 731986 - DNA, 15 bp, Homo sapiens
tgaaccagtttgact

SEQ ID NO: 731987 - DNA, 15 bp, Homo sapiens
gaaccagtttgactc

SEQ ID NO: 731988 - DNA, 15 bp, Homo sapiens
aaccagtttgactca

SEQ ID NO: 731989 - DNA, 15 bp, Homo sapiens
accagtttgactcaa

SEQ ID NO: 731990 - DNA, 15 bp, Homo sapiens
ccagtttgactcaag

SEQ ID NO: 731991 - DNA, 15 bp, Homo sapiens
cagtttgactcaagt

SEQ ID NO: 731992 - DNA, 15 bp, Homo sapiens
agtttgactcaagta

SEQ ID NO: 731993 - DNA, 15 bp, Homo sapiens
gtttgactcaagtaa

SEQ ID NO: 731994 - DNA, 15 bp, Homo sapiens
tttgactcaagtaag

SEQ ID NO: 731995 - DNA, 15 bp, Homo sapiens
ttgactcaagtaagg

SEQ ID NO: 731996 - DNA, 15 bp, Homo sapiens
tgactcaagtaaggc

SEQ ID NO: 731997 - DNA, 15 bp, Homo sapiens
gactcaagtaaggcc

SEQ ID NO: 731998 - DNA, 15 bp, Homo sapiens
actcaagtaaggcct

SEQ ID NO: 731999 - DNA, 15 bp, Homo sapiens
ctcaagtaaggcctg

SEQ ID NO: 732000 - DNA, 15 bp, Homo sapiens
tcaagtaaggcctgc

SEQ ID NO: 732001 - DNA, 15 bp, Homo sapiens
caagtaaggcctgct

SEQ ID NO: 732002 - DNA, 15 bp, Homo sapiens
aagtaaggcctgctc

SEQ ID NO: 732003 - DNA, 15 bp, Homo sapiens
agtaaggcctgctct

SEQ ID NO: 732004 - DNA, 15 bp, Homo sapiens
gtaaggcctgctctt

SEQ ID NO: 732005 - DNA, 15 bp, Homo sapiens
taaggcctgctcttg

SEQ ID NO: 732006 - DNA, 15 bp, Homo sapiens
aaggcctgctcttga

SEQ ID NO: 732007 - DNA, 15 bp, Homo sapiens
aggcctgctcttgat

SEQ ID NO: 732008 - DNA, 15 bp, Homo sapiens
ggcctgctcttgatc

SEQ ID NO: 732009 - DNA, 15 bp, Homo sapiens
gcctgctcttgatct

SEQ ID NO: 732010 - DNA, 15 bp, Homo sapiens
cctgctcttgatctg

SEQ ID NO: 732011 - DNA, 15 bp, Homo sapiens
ctgctcttgatctga

SEQ ID NO: 732012 - DNA, 15 bp, Homo sapiens
tgctcttgatctgag

SEQ ID NO: 732013 - DNA, 15 bp, Homo sapiens
gctcttgatctgagg

SEQ ID NO: 732014 - DNA, 15 bp, Homo sapiens
ctcttgatctgaggg

SEQ ID NO: 732015 - DNA, 15 bp, Homo sapiens
tcttgatctgagggg

SEQ ID NO: 732016 - DNA, 15 bp, Homo sapiens
cttgatctgaggggt

SEQ ID NO: 732017 - DNA, 15 bp, Homo sapiens
ttgatctgaggggtg

SEQ ID NO: 732018 - DNA, 15 bp, Homo sapiens
tgatctgaggggtgg

SEQ ID NO: 732019 - DNA, 15 bp, Homo sapiens
gatctgaggggtgga

SEQ ID NO: 732020 - DNA, 15 bp, Homo sapiens
atctgaggggtggag

SEQ ID NO: 732021 - DNA, 15 bp, Homo sapiens
tctgaggggtggaga

SEQ ID NO: 732022 - DNA, 15 bp, Homo sapiens
ctgaggggtggagat

SEQ ID NO: 732023 - DNA, 15 bp, Homo sapiens
tgaggggtggagatc

SEQ ID NO: 732024 - DNA, 15 bp, Homo sapiens
gaggggtggagatcg

SEQ ID NO: 732025 - DNA, 15 bp, Homo sapiens
aggggtggagatcgt

SEQ ID NO: 732026 - DNA, 15 bp, Homo sapiens
ggggtggagatcgtg

SEQ ID NO: 732027 - DNA, 15 bp, Homo sapiens
gggtggagatcgtgg

SEQ ID NO: 732028 - DNA, 15 bp, Homo sapiens
ggtggagatcgtggc

SEQ ID NO: 732029 - DNA, 15 bp, Homo sapiens
gtggagatcgtggcg

SEQ ID NO: 732030 - DNA, 15 bp, Homo sapiens
tggagatcgtggcga

SEQ ID NO: 732031 - DNA, 15 bp, Homo sapiens
ggagatcgtggcgat

SEQ ID NO: 732032 - DNA, 15 bp, Homo sapiens
gagatcgtggcgatc

SEQ ID NO: 732033 - DNA, 15 bp, Homo sapiens
agatcgtggcgatct

SEQ ID NO: 732034 - DNA, 15 bp, Homo sapiens
gatcgtggcgatctc

SEQ ID NO: 732035 - DNA, 15 bp, Homo sapiens
atcgtggcgatctct

SEQ ID NO: 732036 - DNA, 15 bp, Homo sapiens
tcgtggcgatctcta

SEQ ID NO: 732037 - DNA, 15 bp, Homo sapiens
cgtggcgatctctat

SEQ ID NO: 732038 - DNA, 15 bp, Homo sapiens
gtggcgatctctata

SEQ ID NO: 732039 - DNA, 15 bp, Homo sapiens
tggcgatctctatag

SEQ ID NO: 732040 - DNA, 15 bp, Homo sapiens
ggcgatctctatagt

SEQ ID NO: 732041 - DNA, 15 bp, Homo sapiens
gcgatctctatagtt

SEQ ID NO: 732042 - DNA, 15 bp, Homo sapiens
cgatctctatagtta

SEQ ID NO: 732043 - DNA, 15 bp, Homo sapiens
gatctctatagttat

SEQ ID NO: 732044 - DNA, 15 bp, Homo sapiens
atctctatagttatt

SEQ ID NO: 732045 - DNA, 15 bp, Homo sapiens
tctctatagttattt

SEQ ID NO: 732046 - DNA, 15 bp, Homo sapiens
ctctatagttatttg

SEQ ID NO: 732047 - DNA, 15 bp, Homo sapiens
tctatagttatttga

SEQ ID NO: 732048 - DNA, 15 bp, Homo sapiens
ctatagttatttgag

SEQ ID NO: 732049 - DNA, 15 bp, Homo sapiens
tatagttatttgagg

SEQ ID NO: 732050 - DNA, 15 bp, Homo sapiens
atagttatttgagga

SEQ ID NO: 732051 - DNA, 15 bp, Homo sapiens
tagttatttgaggag

SEQ ID NO: 732052 - DNA, 15 bp, Homo sapiens
agttatttgaggaga

SEQ ID NO: 732053 - DNA, 15 bp, Homo sapiens
gttatttgaggagaa

SEQ ID NO: 732054 - DNA, 15 bp, Homo sapiens
ttatttgaggagaaa

SEQ ID NO: 732055 - DNA, 15 bp, Homo sapiens
tatttgaggagaaac

SEQ ID NO: 732056 - DNA, 15 bp, Homo sapiens
atttgaggagaaact

SEQ ID NO: 732057 - DNA, 15 bp, Homo sapiens
tttgaggagaaactt

SEQ ID NO: 732058 - DNA, 15 bp, Homo sapiens
ttgaggagaaacttc

SEQ ID NO: 732059 - DNA, 15 bp, Homo sapiens
tgaggagaaacttct

SEQ ID NO: 732060 - DNA, 15 bp, Homo sapiens
gaggagaaacttctc

SEQ ID NO: 732061 - DNA, 15 bp, Homo sapiens
aggagaaacttctct

SEQ ID NO: 732062 - DNA, 15 bp, Homo sapiens
ggagaaacttctctg

SEQ ID NO: 732063 - DNA, 15 bp, Homo sapiens
gagaaacttctctgt

SEQ ID NO: 732064 - DNA, 15 bp, Homo sapiens
agaaacttctctgta

SEQ ID NO: 732065 - DNA, 15 bp, Homo sapiens
gaaacttctctgtaa

SEQ ID NO: 732066 - DNA, 15 bp, Homo sapiens
aaacttctctgtaac

SEQ ID NO: 732067 - DNA, 15 bp, Homo sapiens
aacttctctgtaacc

SEQ ID NO: 732068 - DNA, 15 bp, Homo sapiens
acttctctgtaaccg

SEQ ID NO: 732069 - DNA, 15 bp, Homo sapiens
cttctctgtaaccgt

SEQ ID NO: 732070 - DNA, 15 bp, Homo sapiens
ttctctgtaaccgta

SEQ ID NO: 732071 - DNA, 15 bp, Homo sapiens
tctctgtaaccgtag

SEQ ID NO: 732072 - DNA, 15 bp, Homo sapiens
ctctgtaaccgtaga

SEQ ID NO: 732073 - DNA, 15 bp, Homo sapiens
tctgtaaccgtagac

SEQ ID NO: 732074 - DNA, 15 bp, Homo sapiens
ctgtaaccgtagacg

SEQ ID NO: 732075 - DNA, 15 bp, Homo sapiens
tgtaaccgtagacga

SEQ ID NO: 732076 - DNA, 15 bp, Homo sapiens
gtaaccgtagacgat

SEQ ID NO: 732077 - DNA, 15 bp, Homo sapiens
taaccgtagacgatc

SEQ ID NO: 732078 - DNA, 15 bp, Homo sapiens
aaccgtagacgatct

SEQ ID NO: 732079 - DNA, 15 bp, Homo sapiens
accgtagacgatcta

SEQ ID NO: 732080 - DNA, 15 bp, Homo sapiens
ccgtagacgatctag

SEQ ID NO: 732081 - DNA, 15 bp, Homo sapiens
cgtagacgatctagt

SEQ ID NO: 732082 - DNA, 15 bp, Homo sapiens
gtagacgatctagtg

SEQ ID NO: 732083 - DNA, 15 bp, Homo sapiens
tagacgatctagtgt

SEQ ID NO: 732084 - DNA, 15 bp, Homo sapiens
agacgatctagtgtt

SEQ ID NO: 732085 - DNA, 15 bp, Homo sapiens
gacgatctagtgttt

SEQ ID NO: 732086 - DNA, 15 bp, Homo sapiens
acgatctagtgtttt

SEQ ID NO: 732087 - DNA, 15 bp, Homo sapiens
cgatctagtgttttt

SEQ ID NO: 732088 - DNA, 15 bp, Homo sapiens
gatctagtgtttttc

SEQ ID NO: 732089 - DNA, 15 bp, Homo sapiens
atctagtgtttttcc

SEQ ID NO: 732090 - DNA, 15 bp, Homo sapiens
tctagtgtttttcct

SEQ ID NO: 732091 - DNA, 15 bp, Homo sapiens
ctagtgtttttcctc

SEQ ID NO: 732092 - DNA, 15 bp, Homo sapiens
tagtgtttttcctcc

SEQ ID NO: 732093 - DNA, 15 bp, Homo sapiens
agtgtttttcctcca

SEQ ID NO: 732094 - DNA, 15 bp, Homo sapiens
gtgtttttcctccaa

SEQ ID NO: 732095 - DNA, 15 bp, Homo sapiens
tgtttttcctccaat

SEQ ID NO: 732096 - DNA, 15 bp, Homo sapiens
gtttttcctccaatg

SEQ ID NO: 732097 - DNA, 15 bp, Homo sapiens
tttttcctccaatgt

SEQ ID NO: 732098 - DNA, 15 bp, Homo sapiens
ttttcctccaatgtt

SEQ ID NO: 732099 - DNA, 15 bp, Homo sapiens
tttcctccaatgttt

SEQ ID NO: 732100 - DNA, 15 bp, Homo sapiens
ttcctccaatgtttt

SEQ ID NO: 732101 - DNA, 15 bp, Homo sapiens
tcctccaatgttttc

SEQ ID NO: 732102 - DNA, 15 bp, Homo sapiens
cctccaatgttttct

SEQ ID NO: 732103 - DNA, 15 bp, Homo sapiens
ctccaatgttttcta

SEQ ID NO: 732104 - DNA, 15 bp, Homo sapiens
tccaatgttttctac

SEQ ID NO: 732105 - DNA, 15 bp, Homo sapiens
ccaatgttttctaca

SEQ ID NO: 732106 - DNA, 15 bp, Homo sapiens
caatgttttctacag

SEQ ID NO: 732107 - DNA, 15 bp, Homo sapiens
aatgttttctacaga

SEQ ID NO: 732108 - DNA, 15 bp, Homo sapiens
atgttttctacagag

SEQ ID NO: 732109 - DNA, 15 bp, Homo sapiens
tgttttctacagaga

SEQ ID NO: 732110 - DNA, 15 bp, Homo sapiens
gttttctacagagaa

SEQ ID NO: 732111 - DNA, 15 bp, Homo sapiens
ttttctacagagaaa

SEQ ID NO: 732112 - DNA, 15 bp, Homo sapiens
tttctacagagaaaa

SEQ ID NO: 732113 - DNA, 15 bp, Homo sapiens
ttctacagagaaaac

SEQ ID NO: 732114 - DNA, 15 bp, Homo sapiens
tctacagagaaaact

SEQ ID NO: 732115 - DNA, 15 bp, Homo sapiens
ctacagagaaaactg

SEQ ID NO: 732116 - DNA, 15 bp, Homo sapiens
tacagagaaaactgc

SEQ ID NO: 732117 - DNA, 15 bp, Homo sapiens
acagagaaaactgcc

SEQ ID NO: 732118 - DNA, 15 bp, Homo sapiens
cagagaaaactgcct

SEQ ID NO: 732119 - DNA, 15 bp, Homo sapiens
agagaaaactgcctt

SEQ ID NO: 732120 - DNA, 15 bp, Homo sapiens
gagaaaactgccttc

SEQ ID NO: 732121 - DNA, 15 bp, Homo sapiens
agaaaactgccttct

SEQ ID NO: 732122 - DNA, 15 bp, Homo sapiens
gaaaactgccttctg

SEQ ID NO: 732123 - DNA, 15 bp, Homo sapiens
aaaactgccttctga

SEQ ID NO: 732124 - DNA, 15 bp, Homo sapiens
aaactgccttctgag

SEQ ID NO: 732125 - DNA, 15 bp, Homo sapiens
aactgccttctgagg

SEQ ID NO: 732126 - DNA, 15 bp, Homo sapiens
actgccttctgaggg

SEQ ID NO: 732127 - DNA, 15 bp, Homo sapiens
ctgccttctgaggga

SEQ ID NO: 732128 - DNA, 15 bp, Homo sapiens
tgccttctgagggag

SEQ ID NO: 732129 - DNA, 15 bp, Homo sapiens
gccttctgagggaga

SEQ ID NO: 732130 - DNA, 15 bp, Homo sapiens
ccttctgagggagat

SEQ ID NO: 732131 - DNA, 15 bp, Homo sapiens
cttctgagggagatg

SEQ ID NO: 732132 - DNA, 15 bp, Homo sapiens
ttctgagggagatgc

SEQ ID NO: 732133 - DNA, 15 bp, Homo sapiens
tctgagggagatgcc

SEQ ID NO: 732134 - DNA, 15 bp, Homo sapiens
ctgagggagatgccc

SEQ ID NO: 732135 - DNA, 15 bp, Homo sapiens
tgagggagatgccct

SEQ ID NO: 732136 - DNA, 15 bp, Homo sapiens
gagggagatgccctc

SEQ ID NO: 732137 - DNA, 15 bp, Homo sapiens
agggagatgccctcc

SEQ ID NO: 732138 - DNA, 15 bp, Homo sapiens
gggagatgccctccc

SEQ ID NO: 732139 - DNA, 15 bp, Homo sapiens
ggagatgccctccca

SEQ ID NO: 732140 - DNA, 15 bp, Homo sapiens
gagatgccctcccag

SEQ ID NO: 732141 - DNA, 15 bp, Homo sapiens
agatgccctcccaga

SEQ ID NO: 732142 - DNA, 15 bp, Homo sapiens
gatgccctcccagac

SEQ ID NO: 732143 - DNA, 15 bp, Homo sapiens
atgccctcccagacc

SEQ ID NO: 732144 - DNA, 15 bp, Homo sapiens
tgccctcccagacca

SEQ ID NO: 732145 - DNA, 15 bp, Homo sapiens
gccctcccagaccac

SEQ ID NO: 732146 - DNA, 15 bp, Homo sapiens
ccctcccagaccacc

SEQ ID NO: 732147 - DNA, 15 bp, Homo sapiens
cctcccagaccaccc

SEQ ID NO: 732148 - DNA, 15 bp, Homo sapiens
ctcccagaccaccca

SEQ ID NO: 732149 - DNA, 15 bp, Homo sapiens
tcccagaccacccac

SEQ ID NO: 732150 - DNA, 15 bp, Homo sapiens
cccagaccacccact

SEQ ID NO: 732151 - DNA, 15 bp, Homo sapiens
ccagaccacccactg

SEQ ID NO: 732152 - DNA, 15 bp, Homo sapiens
cagaccacccactgc

SEQ ID NO: 732153 - DNA, 15 bp, Homo sapiens
agaccacccactgca

SEQ ID NO: 732154 - DNA, 15 bp, Homo sapiens
gaccacccactgcag

SEQ ID NO: 732155 - DNA, 15 bp, Homo sapiens
accacccactgcagg

SEQ ID NO: 732156 - DNA, 15 bp, Homo sapiens
ccacccactgcaggg

SEQ ID NO: 732157 - DNA, 15 bp, Homo sapiens
cacccactgcaggga

SEQ ID NO: 732158 - DNA, 15 bp, Homo sapiens
acccactgcagggac

SEQ ID NO: 732159 - DNA, 15 bp, Homo sapiens
cccactgcagggacc

SEQ ID NO: 732160 - DNA, 15 bp, Homo sapiens
ccactgcagggacct

SEQ ID NO: 732161 - DNA, 15 bp, Homo sapiens
cactgcagggacctc

SEQ ID NO: 732162 - DNA, 15 bp, Homo sapiens
actgcagggacctca

SEQ ID NO: 732163 - DNA, 15 bp, Homo sapiens
ctgcagggacctcac

SEQ ID NO: 732164 - DNA, 15 bp, Homo sapiens
tgcagggacctcact

SEQ ID NO: 732165 - DNA, 15 bp, Homo sapiens
gcagggacctcactt

SEQ ID NO: 732166 - DNA, 15 bp, Homo sapiens
cagggacctcacttt

SEQ ID NO: 732167 - DNA, 15 bp, Homo sapiens
agggacctcactttc

SEQ ID NO: 732168 - DNA, 15 bp, Homo sapiens
gggacctcactttca

SEQ ID NO: 732169 - DNA, 15 bp, Homo sapiens
ggacctcactttcat

SEQ ID NO: 732170 - DNA, 15 bp, Homo sapiens
gacctcactttcatc

SEQ ID NO: 732171 - DNA, 15 bp, Homo sapiens
acctcactttcatca

SEQ ID NO: 732172 - DNA, 15 bp, Homo sapiens
cctcactttcatcac

SEQ ID NO: 732173 - DNA, 15 bp, Homo sapiens
ctcactttcatcact

SEQ ID NO: 732174 - DNA, 15 bp, Homo sapiens
tcactttcatcactg

SEQ ID NO: 732175 - DNA, 15 bp, Homo sapiens
cactttcatcactga

SEQ ID NO: 732176 - DNA, 15 bp, Homo sapiens
actttcatcactgac

SEQ ID NO: 732177 - DNA, 15 bp, Homo sapiens
ctttcatcactgact

SEQ ID NO: 732178 - DNA, 15 bp, Homo sapiens
tttcatcactgactt

SEQ ID NO: 732179 - DNA, 15 bp, Homo sapiens
ttcatcactgacttc

SEQ ID NO: 732180 - DNA, 15 bp, Homo sapiens
tcatcactgacttcc

SEQ ID NO: 732181 - DNA, 15 bp, Homo sapiens
catcactgacttcct

SEQ ID NO: 732182 - DNA, 15 bp, Homo sapiens
atcactgacttccta

SEQ ID NO: 732183 - DNA, 15 bp, Homo sapiens
tcactgacttcctat

SEQ ID NO: 732184 - DNA, 15 bp, Homo sapiens
cactgacttcctatg

SEQ ID NO: 732185 - DNA, 15 bp, Homo sapiens
actgacttcctatgg

SEQ ID NO: 732186 - DNA, 15 bp, Homo sapiens
ctgacttcctatggc

SEQ ID NO: 732187 - DNA, 15 bp, Homo sapiens
tgacttcctatggct

SEQ ID NO: 732188 - DNA, 15 bp, Homo sapiens
gacttcctatggctt

SEQ ID NO: 732189 - DNA, 15 bp, Homo sapiens
acttcctatggcttg

SEQ ID NO: 732190 - DNA, 15 bp, Homo sapiens
cttcctatggcttgg

SEQ ID NO: 732191 - DNA, 15 bp, Homo sapiens
ttcctatggcttggg

SEQ ID NO: 732192 - DNA, 15 bp, Homo sapiens
tcctatggcttggga

SEQ ID NO: 732193 - DNA, 15 bp, Homo sapiens
cctatggcttgggag

SEQ ID NO: 732194 - DNA, 15 bp, Homo sapiens
ctatggcttgggagt

SEQ ID NO: 732195 - DNA, 15 bp, Homo sapiens
tatggcttgggagtg

SEQ ID NO: 732196 - DNA, 15 bp, Homo sapiens
atggcttgggagtgt

SEQ ID NO: 732197 - DNA, 15 bp, Homo sapiens
tggcttgggagtgtt

SEQ ID NO: 732198 - DNA, 15 bp, Homo sapiens
ggcttgggagtgttt

SEQ ID NO: 732199 - DNA, 15 bp, Homo sapiens
gcttgggagtgttta

SEQ ID NO: 732200 - DNA, 15 bp, Homo sapiens
cttgggagtgtttat

SEQ ID NO: 732201 - DNA, 15 bp, Homo sapiens
ttgggagtgtttata

SEQ ID NO: 732202 - DNA, 15 bp, Homo sapiens
tgggagtgtttataa

SEQ ID NO: 732203 - DNA, 15 bp, Homo sapiens
gggagtgtttataaa

SEQ ID NO: 732204 - DNA, 15 bp, Homo sapiens
ggagtgtttataaag

SEQ ID NO: 732205 - DNA, 15 bp, Homo sapiens
gagtgtttataaagt

SEQ ID NO: 732206 - DNA, 15 bp, Homo sapiens
agtgtttataaagtt

SEQ ID NO: 732207 - DNA, 15 bp, Homo sapiens
gtgtttataaagtta

SEQ ID NO: 732208 - DNA, 15 bp, Homo sapiens
tgtttataaagttat

SEQ ID NO: 732209 - DNA, 15 bp, Homo sapiens
gtttataaagttata

SEQ ID NO: 732210 - DNA, 15 bp, Homo sapiens
tttataaagttatac

SEQ ID NO: 732211 - DNA, 15 bp, Homo sapiens
ttataaagttataca

SEQ ID NO: 732212 - DNA, 15 bp, Homo sapiens
tataaagttatacac

SEQ ID NO: 732213 - DNA, 15 bp, Homo sapiens
ataaagttatacact

SEQ ID NO: 732214 - DNA, 15 bp, Homo sapiens
taaagttatacactt

SEQ ID NO: 732215 - DNA, 15 bp, Homo sapiens
aaagttatacactta

SEQ ID NO: 732216 - DNA, 15 bp, Homo sapiens
aagttatacacttaa

SEQ ID NO: 732217 - DNA, 15 bp, Homo sapiens
agttatacacttaag

SEQ ID NO: 732218 - DNA, 15 bp, Homo sapiens
gttatacacttaagt

SEQ ID NO: 732219 - DNA, 15 bp, Homo sapiens
ttatacacttaagtg

SEQ ID NO: 732220 - DNA, 15 bp, Homo sapiens
tatacacttaagtga

SEQ ID NO: 732221 - DNA, 15 bp, Homo sapiens
atacacttaagtgat

SEQ ID NO: 732222 - DNA, 15 bp, Homo sapiens
tacacttaagtgata

SEQ ID NO: 732223 - DNA, 15 bp, Homo sapiens
acacttaagtgataa

SEQ ID NO: 732224 - DNA, 15 bp, Homo sapiens
cacttaagtgataag

SEQ ID NO: 732225 - DNA, 15 bp, Homo sapiens
acttaagtgataagt

SEQ ID NO: 732226 - DNA, 15 bp, Homo sapiens
cttaagtgataagtg

SEQ ID NO: 732227 - DNA, 15 bp, Homo sapiens
ttaagtgataagtgt

SEQ ID NO: 732228 - DNA, 15 bp, Homo sapiens
taagtgataagtgtg

SEQ ID NO: 732229 - DNA, 15 bp, Homo sapiens
aagtgataagtgtgg

SEQ ID NO: 732230 - DNA, 15 bp, Homo sapiens
agtgataagtgtggc

SEQ ID NO: 732231 - DNA, 15 bp, Homo sapiens
gtgataagtgtggct

SEQ ID NO: 732232 - DNA, 15 bp, Homo sapiens
tgataagtgtggctt

SEQ ID NO: 732233 - DNA, 15 bp, Homo sapiens
gataagtgtggcttg

SEQ ID NO: 732234 - DNA, 15 bp, Homo sapiens
ataagtgtggcttgg

SEQ ID NO: 732235 - DNA, 15 bp, Homo sapiens
taagtgtggcttggg

SEQ ID NO: 732236 - DNA, 15 bp, Homo sapiens
aagtgtggcttgggt

SEQ ID NO: 732237 - DNA, 15 bp, Homo sapiens
agtgtggcttgggta

SEQ ID NO: 732238 - DNA, 15 bp, Homo sapiens
gtgtggcttgggtat

SEQ ID NO: 732239 - DNA, 15 bp, Homo sapiens
tgtggcttgggtatt

SEQ ID NO: 732240 - DNA, 15 bp, Homo sapiens
gtggcttgggtattg

SEQ ID NO: 732241 - DNA, 15 bp, Homo sapiens
tggcttgggtattga

SEQ ID NO: 732242 - DNA, 15 bp, Homo sapiens
ggcttgggtattgaa

SEQ ID NO: 732243 - DNA, 15 bp, Homo sapiens
gcttgggtattgaaa

SEQ ID NO: 732244 - DNA, 15 bp, Homo sapiens
cttgggtattgaaaa

SEQ ID NO: 732245 - DNA, 15 bp, Homo sapiens
ttgggtattgaaaag

SEQ ID NO: 732246 - DNA, 15 bp, Homo sapiens
tgggtattgaaaagt

SEQ ID NO: 732247 - DNA, 15 bp, Homo sapiens
gggtattgaaaagtt

SEQ ID NO: 732248 - DNA, 15 bp, Homo sapiens
ggtattgaaaagtta

SEQ ID NO: 732249 - DNA, 15 bp, Homo sapiens
gtattgaaaagttag

SEQ ID NO: 732250 - DNA, 15 bp, Homo sapiens
tattgaaaagttagc

SEQ ID NO: 732251 - DNA, 15 bp, Homo sapiens
attgaaaagttagct

SEQ ID NO: 732252 - DNA, 15 bp, Homo sapiens
ttgaaaagttagctc

SEQ ID NO: 732253 - DNA, 15 bp, Homo sapiens
tgaaaagttagctca

SEQ ID NO: 732254 - DNA, 15 bp, Homo sapiens
gaaaagttagctcaa

SEQ ID NO: 732255 - DNA, 15 bp, Homo sapiens
aaaagttagctcaaa

SEQ ID NO: 732256 - DNA, 15 bp, Homo sapiens
aaagttagctcaaag

SEQ ID NO: 732257 - DNA, 15 bp, Homo sapiens
aagttagctcaaaga

SEQ ID NO: 732258 - DNA, 15 bp, Homo sapiens
agttagctcaaagaa

SEQ ID NO: 732259 - DNA, 15 bp, Homo sapiens
gttagctcaaagaaa

SEQ ID NO: 732260 - DNA, 15 bp, Homo sapiens
ttagctcaaagaaaa

SEQ ID NO: 732261 - DNA, 15 bp, Homo sapiens
tagctcaaagaaaac

SEQ ID NO: 732262 - DNA, 15 bp, Homo sapiens
agctcaaagaaaaca

SEQ ID NO: 732263 - DNA, 15 bp, Homo sapiens
gctcaaagaaaacaa

SEQ ID NO: 732264 - DNA, 15 bp, Homo sapiens
ctcaaagaaaacaaa

SEQ ID NO: 732265 - DNA, 15 bp, Homo sapiens
tcaaagaaaacaaaa

SEQ ID NO: 732266 - DNA, 15 bp, Homo sapiens
caaagaaaacaaaat

SEQ ID NO: 732267 - DNA, 15 bp, Homo sapiens
aaagaaaacaaaatt

SEQ ID NO: 732268 - DNA, 15 bp, Homo sapiens
aagaaaacaaaattt

SEQ ID NO: 732269 - DNA, 15 bp, Homo sapiens
agaaaacaaaatttc

SEQ ID NO: 732270 - DNA, 15 bp, Homo sapiens
gaaaacaaaatttcg

SEQ ID NO: 732271 - DNA, 15 bp, Homo sapiens
aaaacaaaatttcgt

SEQ ID NO: 732272 - DNA, 15 bp, Homo sapiens
aaacaaaatttcgtt

SEQ ID NO: 732273 - DNA, 15 bp, Homo sapiens
aacaaaatttcgttc

SEQ ID NO: 732274 - DNA, 15 bp, Homo sapiens
acaaaatttcgttcc

SEQ ID NO: 732275 - DNA, 15 bp, Homo sapiens
caaaatttcgttcct

SEQ ID NO: 732276 - DNA, 15 bp, Homo sapiens
aaaatttcgttcctt

SEQ ID NO: 732277 - DNA, 15 bp, Homo sapiens
aaatttcgttccttt

SEQ ID NO: 732278 - DNA, 15 bp, Homo sapiens
aatttcgttcctttt

SEQ ID NO: 732279 - DNA, 15 bp, Homo sapiens
atttcgttccttttt

SEQ ID NO: 732280 - DNA, 15 bp, Homo sapiens
tttcgttcctttttt

SEQ ID NO: 732281 - DNA, 15 bp, Homo sapiens
ttcgttccttttttt

SEQ ID NO: 732282 - DNA, 15 bp, Homo sapiens
tcgttcctttttttt

SEQ ID NO: 732283 - DNA, 15 bp, Homo sapiens
cgttccttttttttc

SEQ ID NO: 732284 - DNA, 15 bp, Homo sapiens
gttccttttttttct

SEQ ID NO: 732285 - DNA, 15 bp, Homo sapiens
ttccttttttttctg

SEQ ID NO: 732286 - DNA, 15 bp, Homo sapiens
tccttttttttctgt

SEQ ID NO: 732287 - DNA, 15 bp, Homo sapiens
ccttttttttctgtc

SEQ ID NO: 732288 - DNA, 15 bp, Homo sapiens
cttttttttctgtca

SEQ ID NO: 732289 - DNA, 15 bp, Homo sapiens
ttttttttctgtcac

SEQ ID NO: 732290 - DNA, 15 bp, Homo sapiens
tttttttctgtcact

SEQ ID NO: 732291 - DNA, 15 bp, Homo sapiens
ttttttctgtcactt

SEQ ID NO: 732292 - DNA, 15 bp, Homo sapiens
tttttctgtcactta

SEQ ID NO: 732293 - DNA, 15 bp, Homo sapiens
ttttctgtcacttag

SEQ ID NO: 732294 - DNA, 15 bp, Homo sapiens
tttctgtcacttagg

SEQ ID NO: 732295 - DNA, 15 bp, Homo sapiens
ttctgtcacttaggc

SEQ ID NO: 732296 - DNA, 15 bp, Homo sapiens
tctgtcacttaggct

SEQ ID NO: 732297 - DNA, 15 bp, Homo sapiens
ctgtcacttaggctg

SEQ ID NO: 732298 - DNA, 15 bp, Homo sapiens
tgtcacttaggctgg

SEQ ID NO: 732299 - DNA, 15 bp, Homo sapiens
gtcacttaggctgga

SEQ ID NO: 732300 - DNA, 15 bp, Homo sapiens
tcacttaggctggag

SEQ ID NO: 732301 - DNA, 15 bp, Homo sapiens
cacttaggctggaga

SEQ ID NO: 732302 - DNA, 15 bp, Homo sapiens
acttaggctggagag

SEQ ID NO: 732303 - DNA, 15 bp, Homo sapiens
cttaggctggagagc

SEQ ID NO: 732304 - DNA, 15 bp, Homo sapiens
ttaggctggagagca

SEQ ID NO: 732305 - DNA, 15 bp, Homo sapiens
taggctggagagcag

SEQ ID NO: 732306 - DNA, 15 bp, Homo sapiens
aggctggagagcagt

SEQ ID NO: 732307 - DNA, 15 bp, Homo sapiens
ggctggagagcagtg

SEQ ID NO: 732308 - DNA, 15 bp, Homo sapiens
gctggagagcagtgg

SEQ ID NO: 732309 - DNA, 15 bp, Homo sapiens
ctggagagcagtggt

SEQ ID NO: 732310 - DNA, 15 bp, Homo sapiens
tggagagcagtggtg

SEQ ID NO: 732311 - DNA, 15 bp, Homo sapiens
ggagagcagtggtgc

SEQ ID NO: 732312 - DNA, 15 bp, Homo sapiens
gagagcagtggtgca

SEQ ID NO: 732313 - DNA, 15 bp, Homo sapiens
agagcagtggtgcag

SEQ ID NO: 732314 - DNA, 15 bp, Homo sapiens
gagcagtggtgcagt

SEQ ID NO: 732315 - DNA, 15 bp, Homo sapiens
agcagtggtgcagtc

SEQ ID NO: 732316 - DNA, 15 bp, Homo sapiens
gcagtggtgcagtct

SEQ ID NO: 732317 - DNA, 15 bp, Homo sapiens
cagtggtgcagtctt

SEQ ID NO: 732318 - DNA, 15 bp, Homo sapiens
agtggtgcagtctta

SEQ ID NO: 732319 - DNA, 15 bp, Homo sapiens
gtggtgcagtcttag

SEQ ID NO: 732320 - DNA, 15 bp, Homo sapiens
tggtgcagtcttagc

SEQ ID NO: 732321 - DNA, 15 bp, Homo sapiens
ggtgcagtcttagct

SEQ ID NO: 732322 - DNA, 15 bp, Homo sapiens
gtgcagtcttagctc

SEQ ID NO: 732323 - DNA, 15 bp, Homo sapiens
tgcagtcttagctca

SEQ ID NO: 732324 - DNA, 15 bp, Homo sapiens
gcagtcttagctcac

SEQ ID NO: 732325 - DNA, 15 bp, Homo sapiens
cagtcttagctcact

SEQ ID NO: 732326 - DNA, 15 bp, Homo sapiens
agtcttagctcactg

SEQ ID NO: 732327 - DNA, 15 bp, Homo sapiens
gtcttagctcactgc

SEQ ID NO: 732328 - DNA, 15 bp, Homo sapiens
tcttagctcactgca

SEQ ID NO: 732329 - DNA, 15 bp, Homo sapiens
cttagctcactgcag

SEQ ID NO: 732330 - DNA, 15 bp, Homo sapiens
ttagctcactgcagc

SEQ ID NO: 732331 - DNA, 15 bp, Homo sapiens
tagctcactgcagcc

SEQ ID NO: 732332 - DNA, 15 bp, Homo sapiens
agctcactgcagcct

SEQ ID NO: 732333 - DNA, 15 bp, Homo sapiens
gctcactgcagcctc

SEQ ID NO: 732334 - DNA, 15 bp, Homo sapiens
ctcactgcagcctct

SEQ ID NO: 732335 - DNA, 15 bp, Homo sapiens
tcactgcagcctcta

SEQ ID NO: 732336 - DNA, 15 bp, Homo sapiens
cactgcagcctctac

SEQ ID NO: 732337 - DNA, 15 bp, Homo sapiens
actgcagcctctacc

SEQ ID NO: 732338 - DNA, 15 bp, Homo sapiens
ctgcagcctctacct

SEQ ID NO: 732339 - DNA, 15 bp, Homo sapiens
tgcagcctctacctc

SEQ ID NO: 732340 - DNA, 15 bp, Homo sapiens
gcagcctctacctca

SEQ ID NO: 732341 - DNA, 15 bp, Homo sapiens
cagcctctacctcag

SEQ ID NO: 732342 - DNA, 15 bp, Homo sapiens
agcctctacctcagg

SEQ ID NO: 732343 - DNA, 15 bp, Homo sapiens
gcctctacctcaggg

SEQ ID NO: 732344 - DNA, 15 bp, Homo sapiens
cctctacctcagggt

SEQ ID NO: 732345 - DNA, 15 bp, Homo sapiens
ctctacctcagggtc

SEQ ID NO: 732346 - DNA, 15 bp, Homo sapiens
tctacctcagggtct

SEQ ID NO: 732347 - DNA, 15 bp, Homo sapiens
ctacctcagggtctc

SEQ ID NO: 732348 - DNA, 15 bp, Homo sapiens
tacctcagggtctca

SEQ ID NO: 732349 - DNA, 15 bp, Homo sapiens
acctcagggtctcaa

SEQ ID NO: 732350 - DNA, 15 bp, Homo sapiens
cctcagggtctcaag

SEQ ID NO: 732351 - DNA, 15 bp, Homo sapiens
ctcagggtctcaagt

SEQ ID NO: 732352 - DNA, 15 bp, Homo sapiens
tcagggtctcaagtg

SEQ ID NO: 732353 - DNA, 15 bp, Homo sapiens
cagggtctcaagtga

SEQ ID NO: 732354 - DNA, 15 bp, Homo sapiens
agggtctcaagtgat

SEQ ID NO: 732355 - DNA, 15 bp, Homo sapiens
gggtctcaagtgatc

SEQ ID NO: 732356 - DNA, 15 bp, Homo sapiens
ggtctcaagtgatcc

SEQ ID NO: 732357 - DNA, 15 bp, Homo sapiens
gtctcaagtgatcct

SEQ ID NO: 732358 - DNA, 15 bp, Homo sapiens
tctcaagtgatcctc

SEQ ID NO: 732359 - DNA, 15 bp, Homo sapiens
ctcaagtgatcctcc

SEQ ID NO: 732360 - DNA, 15 bp, Homo sapiens
tcaagtgatcctccc

SEQ ID NO: 732361 - DNA, 15 bp, Homo sapiens
caagtgatcctccca

SEQ ID NO: 732362 - DNA, 15 bp, Homo sapiens
aagtgatcctcccac

SEQ ID NO: 732363 - DNA, 15 bp, Homo sapiens
agtgatcctcccacc

SEQ ID NO: 732364 - DNA, 15 bp, Homo sapiens
gtgatcctcccacct

SEQ ID NO: 732365 - DNA, 15 bp, Homo sapiens
tgatcctcccacctc

SEQ ID NO: 732366 - DNA, 15 bp, Homo sapiens
gatcctcccacctca

SEQ ID NO: 732367 - DNA, 15 bp, Homo sapiens
atcctcccacctcag

SEQ ID NO: 732368 - DNA, 15 bp, Homo sapiens
tcctcccacctcagc

SEQ ID NO: 732369 - DNA, 15 bp, Homo sapiens
cctcccacctcagcc

SEQ ID NO: 732370 - DNA, 15 bp, Homo sapiens
ctcccacctcagcct

SEQ ID NO: 732371 - DNA, 15 bp, Homo sapiens
tcccacctcagcctc

SEQ ID NO: 732372 - DNA, 15 bp, Homo sapiens
cccacctcagcctcc

SEQ ID NO: 732373 - DNA, 15 bp, Homo sapiens
ccacctcagcctcca

SEQ ID NO: 732374 - DNA, 15 bp, Homo sapiens
cacctcagcctccag

SEQ ID NO: 732375 - DNA, 15 bp, Homo sapiens
acctcagcctccaga

SEQ ID NO: 732376 - DNA, 15 bp, Homo sapiens
cctcagcctccagag

SEQ ID NO: 732377 - DNA, 15 bp, Homo sapiens
ctcagcctccagagt

SEQ ID NO: 732378 - DNA, 15 bp, Homo sapiens
tcagcctccagagta

SEQ ID NO: 732379 - DNA, 15 bp, Homo sapiens
cagcctccagagtag

SEQ ID NO: 732380 - DNA, 15 bp, Homo sapiens
agcctccagagtagc

SEQ ID NO: 732381 - DNA, 15 bp, Homo sapiens
gcctccagagtagct

SEQ ID NO: 732382 - DNA, 15 bp, Homo sapiens
cctccagagtagctg

SEQ ID NO: 732383 - DNA, 15 bp, Homo sapiens
ctccagagtagctgg

SEQ ID NO: 732384 - DNA, 15 bp, Homo sapiens
tccagagtagctggg

SEQ ID NO: 732385 - DNA, 15 bp, Homo sapiens
ccagagtagctggga

SEQ ID NO: 732386 - DNA, 15 bp, Homo sapiens
cagagtagctgggac

SEQ ID NO: 732387 - DNA, 15 bp, Homo sapiens
agagtagctgggact

SEQ ID NO: 732388 - DNA, 15 bp, Homo sapiens
gagtagctgggacta

SEQ ID NO: 732389 - DNA, 15 bp, Homo sapiens
ggactacaggcacgc

SEQ ID NO: 732390 - DNA, 15 bp, Homo sapiens
gactacaggcacgca

SEQ ID NO: 732391 - DNA, 15 bp, Homo sapiens
actacaggcacgcac

SEQ ID NO: 732392 - DNA, 15 bp, Homo sapiens
ctacaggcacgcacc

SEQ ID NO: 732393 - DNA, 15 bp, Homo sapiens
tacaggcacgcacca

SEQ ID NO: 732394 - DNA, 15 bp, Homo sapiens
acaggcacgcaccac

SEQ ID NO: 732395 - DNA, 15 bp, Homo sapiens
caggcacgcaccacc

SEQ ID NO: 732396 - DNA, 15 bp, Homo sapiens
aggcacgcaccacca

SEQ ID NO: 732397 - DNA, 15 bp, Homo sapiens
ggcacgcaccaccac

SEQ ID NO: 732398 - DNA, 15 bp, Homo sapiens
gcacgcaccaccacc

SEQ ID NO: 732399 - DNA, 15 bp, Homo sapiens
cacgcaccaccaccc

SEQ ID NO: 732400 - DNA, 15 bp, Homo sapiens
acgcaccaccacccc

SEQ ID NO: 732401 - DNA, 15 bp, Homo sapiens
cgcaccaccaccccc

SEQ ID NO: 732402 - DNA, 15 bp, Homo sapiens
gcaccaccaccccca

SEQ ID NO: 732403 - DNA, 15 bp, Homo sapiens
caccaccacccccag

SEQ ID NO: 732404 - DNA, 15 bp, Homo sapiens
accaccacccccagc

SEQ ID NO: 732405 - DNA, 15 bp, Homo sapiens
ccaccacccccagct

SEQ ID NO: 732406 - DNA, 15 bp, Homo sapiens
caccacccccagcta

SEQ ID NO: 732407 - DNA, 15 bp, Homo sapiens
accacccccagctaa

SEQ ID NO: 732408 - DNA, 15 bp, Homo sapiens
ccacccccagctaat

SEQ ID NO: 732409 - DNA, 15 bp, Homo sapiens
cacccccagctaatt

SEQ ID NO: 732410 - DNA, 15 bp, Homo sapiens
acccccagctaattt

SEQ ID NO: 732411 - DNA, 15 bp, Homo sapiens
cccccagctaatttt

SEQ ID NO: 732412 - DNA, 15 bp, Homo sapiens
ccccagctaattttt

SEQ ID NO: 732413 - DNA, 15 bp, Homo sapiens
cccagctaatttttg

SEQ ID NO: 732414 - DNA, 15 bp, Homo sapiens
ccagctaatttttgt

SEQ ID NO: 732415 - DNA, 15 bp, Homo sapiens
cagctaatttttgta

SEQ ID NO: 732416 - DNA, 15 bp, Homo sapiens
agctaatttttgtat

SEQ ID NO: 732417 - DNA, 15 bp, Homo sapiens
gctaatttttgtatt

SEQ ID NO: 732418 - DNA, 15 bp, Homo sapiens
ctaatttttgtatta

SEQ ID NO: 732419 - DNA, 15 bp, Homo sapiens
taatttttgtattat

SEQ ID NO: 732420 - DNA, 15 bp, Homo sapiens
aatttttgtattatt

SEQ ID NO: 732421 - DNA, 15 bp, Homo sapiens
atttttgtattatta

SEQ ID NO: 732422 - DNA, 15 bp, Homo sapiens
tttttgtattattat

SEQ ID NO: 732423 - DNA, 15 bp, Homo sapiens
ttttgtattattatt

SEQ ID NO: 732424 - DNA, 15 bp, Homo sapiens
tttgtattattatta

SEQ ID NO: 732425 - DNA, 15 bp, Homo sapiens
ttgtattattattat

SEQ ID NO: 732426 - DNA, 15 bp, Homo sapiens
tgtattattattatt

SEQ ID NO: 732427 - DNA, 15 bp, Homo sapiens
gtattattattatta

SEQ ID NO: 732428 - DNA, 15 bp, Homo sapiens
tattattattattat

SEQ ID NO: 732429 - DNA, 15 bp, Homo sapiens
attattattattatt

SEQ ID NO: 732430 - DNA, 15 bp, Homo sapiens
ttattattattatta

SEQ ID NO: 732431 - DNA, 15 bp, Homo sapiens
ttattattattattg

SEQ ID NO: 732432 - DNA, 15 bp, Homo sapiens
tattattattattga

SEQ ID NO: 732433 - DNA, 15 bp, Homo sapiens
attattattattgag

SEQ ID NO: 732434 - DNA, 15 bp, Homo sapiens
ttattattattgaga

SEQ ID NO: 732435 - DNA, 15 bp, Homo sapiens
tattattattgagat

SEQ ID NO: 732436 - DNA, 15 bp, Homo sapiens
attattattgagata

SEQ ID NO: 732437 - DNA, 15 bp, Homo sapiens
ttattattgagatag

SEQ ID NO: 732438 - DNA, 15 bp, Homo sapiens
tattattgagataga

SEQ ID NO: 732439 - DNA, 15 bp, Homo sapiens
attattgagatagaa

SEQ ID NO: 732440 - DNA, 15 bp, Homo sapiens
ttattgagatagaat

SEQ ID NO: 732441 - DNA, 15 bp, Homo sapiens
tattgagatagaatc

SEQ ID NO: 732442 - DNA, 15 bp, Homo sapiens
attgagatagaatct

SEQ ID NO: 732443 - DNA, 15 bp, Homo sapiens
ttgagatagaatctc

SEQ ID NO: 732444 - DNA, 15 bp, Homo sapiens
tgagatagaatctct

SEQ ID NO: 732445 - DNA, 15 bp, Homo sapiens
gagatagaatctctc

SEQ ID NO: 732446 - DNA, 15 bp, Homo sapiens
agatagaatctctct

SEQ ID NO: 732447 - DNA, 15 bp, Homo sapiens
gatagaatctctctc

SEQ ID NO: 732448 - DNA, 15 bp, Homo sapiens
atagaatctctctct

SEQ ID NO: 732449 - DNA, 15 bp, Homo sapiens
tagaatctctctctg

SEQ ID NO: 732450 - DNA, 15 bp, Homo sapiens
agaatctctctctgt

SEQ ID NO: 732451 - DNA, 15 bp, Homo sapiens
gaatctctctctgtc

SEQ ID NO: 732452 - DNA, 15 bp, Homo sapiens
aatctctctctgtca

SEQ ID NO: 732453 - DNA, 15 bp, Homo sapiens
atctctctctgtcac

SEQ ID NO: 732454 - DNA, 15 bp, Homo sapiens
tctctctctgtcacc

SEQ ID NO: 732455 - DNA, 15 bp, Homo sapiens
ctctctctgtcaccc

SEQ ID NO: 732456 - DNA, 15 bp, Homo sapiens
tctctctgtcaccca

SEQ ID NO: 732457 - DNA, 15 bp, Homo sapiens
ctctctgtcacccag

SEQ ID NO: 732458 - DNA, 15 bp, Homo sapiens
tctctgtcacccagg

SEQ ID NO: 732459 - DNA, 15 bp, Homo sapiens
gagtgcagtggcgca

SEQ ID NO: 732460 - DNA, 15 bp, Homo sapiens
agtgcagtggcgcag

SEQ ID NO: 732461 - DNA, 15 bp, Homo sapiens
gtgcagtggcgcagt

SEQ ID NO: 732462 - DNA, 15 bp, Homo sapiens
tgcagtggcgcagtc

SEQ ID NO: 732463 - DNA, 15 bp, Homo sapiens
gcagtggcgcagtct

SEQ ID NO: 732464 - DNA, 15 bp, Homo sapiens
cagtggcgcagtctg

SEQ ID NO: 732465 - DNA, 15 bp, Homo sapiens
agtggcgcagtctgg

SEQ ID NO: 732466 - DNA, 15 bp, Homo sapiens
gtggcgcagtctggg

SEQ ID NO: 732467 - DNA, 15 bp, Homo sapiens
tggcgcagtctgggc

SEQ ID NO: 732468 - DNA, 15 bp, Homo sapiens
ggcgcagtctgggct

SEQ ID NO: 732469 - DNA, 15 bp, Homo sapiens
gcgcagtctgggctc

SEQ ID NO: 732470 - DNA, 15 bp, Homo sapiens
cgcagtctgggctca

SEQ ID NO: 732471 - DNA, 15 bp, Homo sapiens
gcagtctgggctcac

SEQ ID NO: 732472 - DNA, 15 bp, Homo sapiens
cagtctgggctcact

SEQ ID NO: 732473 - DNA, 15 bp, Homo sapiens
agtctgggctcactg

SEQ ID NO: 732474 - DNA, 15 bp, Homo sapiens
gtctgggctcactgc

SEQ ID NO: 732475 - DNA, 15 bp, Homo sapiens
tctgggctcactgca

SEQ ID NO: 732476 - DNA, 15 bp, Homo sapiens
ctgggctcactgcaa

SEQ ID NO: 732477 - DNA, 15 bp, Homo sapiens
tgggctcactgcaac

SEQ ID NO: 732478 - DNA, 15 bp, Homo sapiens
gggctcactgcaacc

SEQ ID NO: 732479 - DNA, 15 bp, Homo sapiens
ctgcaacctctgcct

SEQ ID NO: 732480 - DNA, 15 bp, Homo sapiens
tgcaacctctgcctc

SEQ ID NO: 732481 - DNA, 15 bp, Homo sapiens
gcaacctctgcctcc

SEQ ID NO: 732482 - DNA, 15 bp, Homo sapiens
caacctctgcctccc

SEQ ID NO: 732483 - DNA, 15 bp, Homo sapiens
aacctctgcctcccg

SEQ ID NO: 732484 - DNA, 15 bp, Homo sapiens
acctctgcctcccgg

SEQ ID NO: 732485 - DNA, 15 bp, Homo sapiens
cctctgcctcccggg

SEQ ID NO: 732486 - DNA, 15 bp, Homo sapiens
ctctgcctcccgggt

SEQ ID NO: 732487 - DNA, 15 bp, Homo sapiens
tctgcctcccgggtt

SEQ ID NO: 732488 - DNA, 15 bp, Homo sapiens
ctgcctcccgggttc

SEQ ID NO: 732489 - DNA, 15 bp, Homo sapiens
tgcctcccgggttca

SEQ ID NO: 732490 - DNA, 15 bp, Homo sapiens
gcctcccgggttcaa

SEQ ID NO: 732491 - DNA, 15 bp, Homo sapiens
cctcccgggttcaag

SEQ ID NO: 732492 - DNA, 15 bp, Homo sapiens
ctcccgggttcaagc

SEQ ID NO: 732493 - DNA, 15 bp, Homo sapiens
tcccgggttcaagcg

SEQ ID NO: 732494 - DNA, 15 bp, Homo sapiens
cccgggttcaagcga

SEQ ID NO: 732495 - DNA, 15 bp, Homo sapiens
ccgggttcaagcgat

SEQ ID NO: 732496 - DNA, 15 bp, Homo sapiens
cgggttcaagcgatt

SEQ ID NO: 732497 - DNA, 15 bp, Homo sapiens
gggttcaagcgattc

SEQ ID NO: 732498 - DNA, 15 bp, Homo sapiens
ctgcctcagcctcct

SEQ ID NO: 732499 - DNA, 15 bp, Homo sapiens
tgcctcagcctcctg

SEQ ID NO: 732500 - DNA, 15 bp, Homo sapiens
gcctcagcctcctga

SEQ ID NO: 732501 - DNA, 15 bp, Homo sapiens
cctcagcctcctgag

SEQ ID NO: 732502 - DNA, 15 bp, Homo sapiens
ctcagcctcctgagt

SEQ ID NO: 732503 - DNA, 15 bp, Homo sapiens
tcagcctcctgagta

SEQ ID NO: 732504 - DNA, 15 bp, Homo sapiens
cagcctcctgagtag

SEQ ID NO: 732505 - DNA, 15 bp, Homo sapiens
agcctcctgagtagc

SEQ ID NO: 732506 - DNA, 15 bp, Homo sapiens
gcctcctgagtagct

SEQ ID NO: 732507 - DNA, 15 bp, Homo sapiens
cctcctgagtagctg

SEQ ID NO: 732508 - DNA, 15 bp, Homo sapiens
ctcctgagtagctgg

SEQ ID NO: 732509 - DNA, 15 bp, Homo sapiens
tcctgagtagctgga

SEQ ID NO: 732510 - DNA, 15 bp, Homo sapiens
cctgagtagctggaa

SEQ ID NO: 732511 - DNA, 15 bp, Homo sapiens
ctgagtagctggaat

SEQ ID NO: 732512 - DNA, 15 bp, Homo sapiens
tgagtagctggaatt

SEQ ID NO: 732513 - DNA, 15 bp, Homo sapiens
gagtagctggaatta

SEQ ID NO: 732514 - DNA, 15 bp, Homo sapiens
agtagctggaattac

SEQ ID NO: 732515 - DNA, 15 bp, Homo sapiens
gtagctggaattaca

SEQ ID NO: 732516 - DNA, 15 bp, Homo sapiens
tagctggaattacag

SEQ ID NO: 732517 - DNA, 15 bp, Homo sapiens
agctggaattacagg

SEQ ID NO: 732518 - DNA, 15 bp, Homo sapiens
gctggaattacaggt

SEQ ID NO: 732519 - DNA, 15 bp, Homo sapiens
ctggaattacaggtg

SEQ ID NO: 732520 - DNA, 15 bp, Homo sapiens
tggaattacaggtgc

SEQ ID NO: 732521 - DNA, 15 bp, Homo sapiens
ggaattacaggtgcc

SEQ ID NO: 732522 - DNA, 15 bp, Homo sapiens
gaattacaggtgcca

SEQ ID NO: 732523 - DNA, 15 bp, Homo sapiens
aattacaggtgccag

SEQ ID NO: 732524 - DNA, 15 bp, Homo sapiens
attacaggtgccagc

SEQ ID NO: 732525 - DNA, 15 bp, Homo sapiens
ttacaggtgccagcc

SEQ ID NO: 732526 - DNA, 15 bp, Homo sapiens
tacaggtgccagcca

SEQ ID NO: 732527 - DNA, 15 bp, Homo sapiens
acaggtgccagccac

SEQ ID NO: 732528 - DNA, 15 bp, Homo sapiens
caggtgccagccacc

SEQ ID NO: 732529 - DNA, 15 bp, Homo sapiens
aggtgccagccacca

SEQ ID NO: 732530 - DNA, 15 bp, Homo sapiens
ggtgccagccaccac

SEQ ID NO: 732531 - DNA, 15 bp, Homo sapiens
gtgccagccaccacg

SEQ ID NO: 732532 - DNA, 15 bp, Homo sapiens
tgccagccaccacgc

SEQ ID NO: 732533 - DNA, 15 bp, Homo sapiens
gccagccaccacgcc

SEQ ID NO: 732534 - DNA, 15 bp, Homo sapiens
ccagccaccacgccc

SEQ ID NO: 732535 - DNA, 15 bp, Homo sapiens
cagccaccacgccca

SEQ ID NO: 732536 - DNA, 15 bp, Homo sapiens
agccaccacgcccag

SEQ ID NO: 732537 - DNA, 15 bp, Homo sapiens
gccaccacgcccagc

SEQ ID NO: 732538 - DNA, 15 bp, Homo sapiens
ccaccacgcccagct

SEQ ID NO: 732539 - DNA, 15 bp, Homo sapiens
caccacgcccagcta

SEQ ID NO: 732540 - DNA, 15 bp, Homo sapiens
accacgcccagctaa

SEQ ID NO: 732541 - DNA, 15 bp, Homo sapiens
ccacgcccagctaat

SEQ ID NO: 732542 - DNA, 15 bp, Homo sapiens
cacgcccagctaatt

SEQ ID NO: 732543 - DNA, 15 bp, Homo sapiens
acgcccagctaattt

SEQ ID NO: 732544 - DNA, 15 bp, Homo sapiens
cgcccagctaatttt

SEQ ID NO: 732545 - DNA, 15 bp, Homo sapiens
gcccagctaattttt

SEQ ID NO: 732546 - DNA, 15 bp, Homo sapiens
gctaatttttgtata

SEQ ID NO: 732547 - DNA, 15 bp, Homo sapiens
ctaatttttgtatat

SEQ ID NO: 732548 - DNA, 15 bp, Homo sapiens
taatttttgtatatt

SEQ ID NO: 732549 - DNA, 15 bp, Homo sapiens
aatttttgtatattt

SEQ ID NO: 732550 - DNA, 15 bp, Homo sapiens
atttttgtatattta

SEQ ID NO: 732551 - DNA, 15 bp, Homo sapiens
tttttgtatatttag

SEQ ID NO: 732552 - DNA, 15 bp, Homo sapiens
ttttgtatatttagt

SEQ ID NO: 732553 - DNA, 15 bp, Homo sapiens
tttgtatatttagta

SEQ ID NO: 732554 - DNA, 15 bp, Homo sapiens
ttgtatatttagtag

SEQ ID NO: 732555 - DNA, 15 bp, Homo sapiens
tgtatatttagtaga

SEQ ID NO: 732556 - DNA, 15 bp, Homo sapiens
gtatatttagtagag

SEQ ID NO: 732557 - DNA, 15 bp, Homo sapiens
tatatttagtagaga

SEQ ID NO: 732558 - DNA, 15 bp, Homo sapiens
atatttagtagagac

SEQ ID NO: 732559 - DNA, 15 bp, Homo sapiens
tatttagtagagaca

SEQ ID NO: 732560 - DNA, 15 bp, Homo sapiens
atttagtagagacag

SEQ ID NO: 732561 - DNA, 15 bp, Homo sapiens
agtagagacagggtt

SEQ ID NO: 732562 - DNA, 15 bp, Homo sapiens
gtagagacagggttt

SEQ ID NO: 732563 - DNA, 15 bp, Homo sapiens
tagagacagggtttc

SEQ ID NO: 732564 - DNA, 15 bp, Homo sapiens
agagacagggtttca

SEQ ID NO: 732565 - DNA, 15 bp, Homo sapiens
gagacagggtttcac

SEQ ID NO: 732566 - DNA, 15 bp, Homo sapiens
agacagggtttcacc

SEQ ID NO: 732567 - DNA, 15 bp, Homo sapiens
gacagggtttcacca

SEQ ID NO: 732568 - DNA, 15 bp, Homo sapiens
acagggtttcaccat

SEQ ID NO: 732569 - DNA, 15 bp, Homo sapiens
cagggtttcaccatg

SEQ ID NO: 732570 - DNA, 15 bp, Homo sapiens
agggtttcaccatgt

SEQ ID NO: 732571 - DNA, 15 bp, Homo sapiens
gggtttcaccatgtt

SEQ ID NO: 732572 - DNA, 15 bp, Homo sapiens
ggtttcaccatgttg

SEQ ID NO: 732573 - DNA, 15 bp, Homo sapiens
tttcaccatgttggt

SEQ ID NO: 732574 - DNA, 15 bp, Homo sapiens
ttcaccatgttggtc

SEQ ID NO: 732575 - DNA, 15 bp, Homo sapiens
tcaccatgttggtca

SEQ ID NO: 732576 - DNA, 15 bp, Homo sapiens
caccatgttggtcag

SEQ ID NO: 732577 - DNA, 15 bp, Homo sapiens
accatgttggtcagg

SEQ ID NO: 732578 - DNA, 15 bp, Homo sapiens
ccatgttggtcaggc

SEQ ID NO: 732579 - DNA, 15 bp, Homo sapiens
catgttggtcaggct

SEQ ID NO: 732580 - DNA, 15 bp, Homo sapiens
atgttggtcaggctg

SEQ ID NO: 732581 - DNA, 15 bp, Homo sapiens
tgttggtcaggctgg

SEQ ID NO: 732582 - DNA, 15 bp, Homo sapiens
gttggtcaggctggt

SEQ ID NO: 732583 - DNA, 15 bp, Homo sapiens
ttggtcaggctggtc

SEQ ID NO: 732584 - DNA, 15 bp, Homo sapiens
tggtcaggctggtct

SEQ ID NO: 732585 - DNA, 15 bp, Homo sapiens
ggtcaggctggtctc

SEQ ID NO: 732586 - DNA, 15 bp, Homo sapiens
gtcaggctggtctcg

SEQ ID NO: 732587 - DNA, 15 bp, Homo sapiens
tcaggctggtctcga

SEQ ID NO: 732588 - DNA, 15 bp, Homo sapiens
caggctggtctcgaa

SEQ ID NO: 732589 - DNA, 15 bp, Homo sapiens
aggctggtctcgaac

SEQ ID NO: 732590 - DNA, 15 bp, Homo sapiens
ggctggtctcgaact

SEQ ID NO: 732591 - DNA, 15 bp, Homo sapiens
gctggtctcgaactc

SEQ ID NO: 732592 - DNA, 15 bp, Homo sapiens
ctggtctcgaactct

SEQ ID NO: 732593 - DNA, 15 bp, Homo sapiens
tggtctcgaactctt

SEQ ID NO: 732594 - DNA, 15 bp, Homo sapiens
ggtctcgaactcttg

SEQ ID NO: 732595 - DNA, 15 bp, Homo sapiens
gtctcgaactcttga

SEQ ID NO: 732596 - DNA, 15 bp, Homo sapiens
tctcgaactcttgac

SEQ ID NO: 732597 - DNA, 15 bp, Homo sapiens
ctcgaactcttgacc

SEQ ID NO: 732598 - DNA, 15 bp, Homo sapiens
tcgaactcttgacct

SEQ ID NO: 732599 - DNA, 15 bp, Homo sapiens
cgaactcttgacctc

SEQ ID NO: 732600 - DNA, 15 bp, Homo sapiens
gaactcttgacctca

SEQ ID NO: 732601 - DNA, 15 bp, Homo sapiens
aactcttgacctcag

SEQ ID NO: 732602 - DNA, 15 bp, Homo sapiens
actcttgacctcagg

SEQ ID NO: 732603 - DNA, 15 bp, Homo sapiens
ctcttgacctcaggt

SEQ ID NO: 732604 - DNA, 15 bp, Homo sapiens
tcttgacctcaggtg

SEQ ID NO: 732605 - DNA, 15 bp, Homo sapiens
cttgacctcaggtga

SEQ ID NO: 732606 - DNA, 15 bp, Homo sapiens
ttgacctcaggtgat

SEQ ID NO: 732607 - DNA, 15 bp, Homo sapiens
tgacctcaggtgatc

SEQ ID NO: 732608 - DNA, 15 bp, Homo sapiens
gacctcaggtgatcc

SEQ ID NO: 732609 - DNA, 15 bp, Homo sapiens
acctcaggtgatcca

SEQ ID NO: 732610 - DNA, 15 bp, Homo sapiens
cctcaggtgatccac

SEQ ID NO: 732611 - DNA, 15 bp, Homo sapiens
ctcaggtgatccacc

SEQ ID NO: 732612 - DNA, 15 bp, Homo sapiens
tcaggtgatccacct

SEQ ID NO: 732613 - DNA, 15 bp, Homo sapiens
caggtgatccacctg

SEQ ID NO: 732614 - DNA, 15 bp, Homo sapiens
aggtgatccacctgc

SEQ ID NO: 732615 - DNA, 15 bp, Homo sapiens
ggtgatccacctgcc

SEQ ID NO: 732616 - DNA, 15 bp, Homo sapiens
gtgatccacctgcct

SEQ ID NO: 732617 - DNA, 15 bp, Homo sapiens
tgatccacctgcctc

SEQ ID NO: 732618 - DNA, 15 bp, Homo sapiens
gatccacctgcctca

SEQ ID NO: 732619 - DNA, 15 bp, Homo sapiens
atccacctgcctcag

SEQ ID NO: 732620 - DNA, 15 bp, Homo sapiens
tccacctgcctcagc

SEQ ID NO: 732621 - DNA, 15 bp, Homo sapiens
ccacctgcctcagcc

SEQ ID NO: 732622 - DNA, 15 bp, Homo sapiens
cacctgcctcagcct

SEQ ID NO: 732623 - DNA, 15 bp, Homo sapiens
acctgcctcagcctc

SEQ ID NO: 732624 - DNA, 15 bp, Homo sapiens
cctcagcctcccaaa

SEQ ID NO: 732625 - DNA, 15 bp, Homo sapiens
ctcagcctcccaaag

SEQ ID NO: 732626 - DNA, 15 bp, Homo sapiens
tcagcctcccaaagt

SEQ ID NO: 732627 - DNA, 15 bp, Homo sapiens
cagcctcccaaagtg

SEQ ID NO: 732628 - DNA, 15 bp, Homo sapiens
agcctcccaaagtgc

SEQ ID NO: 732629 - DNA, 15 bp, Homo sapiens
acaggcgtgagccac

SEQ ID NO: 732630 - DNA, 15 bp, Homo sapiens
caggcgtgagccacc

SEQ ID NO: 732631 - DNA, 15 bp, Homo sapiens
aggcgtgagccacca

SEQ ID NO: 732632 - DNA, 15 bp, Homo sapiens
ggcgtgagccaccac

SEQ ID NO: 732633 - DNA, 15 bp, Homo sapiens
gcgtgagccaccacg

SEQ ID NO: 732634 - DNA, 15 bp, Homo sapiens
cgtgagccaccacgc

SEQ ID NO: 732635 - DNA, 15 bp, Homo sapiens
gtgagccaccacgct

SEQ ID NO: 732636 - DNA, 15 bp, Homo sapiens
tgagccaccacgctt

SEQ ID NO: 732637 - DNA, 15 bp, Homo sapiens
gagccaccacgcttg

SEQ ID NO: 732638 - DNA, 15 bp, Homo sapiens
agccaccacgcttgg

SEQ ID NO: 732639 - DNA, 15 bp, Homo sapiens
gccaccacgcttggc

SEQ ID NO: 732640 - DNA, 15 bp, Homo sapiens
ccaccacgcttggcc

SEQ ID NO: 732641 - DNA, 15 bp, Homo sapiens
caccacgcttggcca

SEQ ID NO: 732642 - DNA, 15 bp, Homo sapiens
accacgcttggccat

SEQ ID NO: 732643 - DNA, 15 bp, Homo sapiens
ccacgcttggccata

SEQ ID NO: 732644 - DNA, 15 bp, Homo sapiens
cacgcttggccataa

SEQ ID NO: 732645 - DNA, 15 bp, Homo sapiens
acgcttggccataat

SEQ ID NO: 732646 - DNA, 15 bp, Homo sapiens
cgcttggccataatt

SEQ ID NO: 732647 - DNA, 15 bp, Homo sapiens
gcttggccataattt

SEQ ID NO: 732648 - DNA, 15 bp, Homo sapiens
cttggccataatttt

SEQ ID NO: 732649 - DNA, 15 bp, Homo sapiens
ttggccataattttt

SEQ ID NO: 732650 - DNA, 15 bp, Homo sapiens
tggccataatttttg

SEQ ID NO: 732651 - DNA, 15 bp, Homo sapiens
ggccataatttttgt

SEQ ID NO: 732652 - DNA, 15 bp, Homo sapiens
gccataatttttgta

SEQ ID NO: 732653 - DNA, 15 bp, Homo sapiens
ccataatttttgtat

SEQ ID NO: 732654 - DNA, 15 bp, Homo sapiens
cataatttttgtatt

SEQ ID NO: 732655 - DNA, 15 bp, Homo sapiens
ataatttttgtattt

SEQ ID NO: 732656 - DNA, 15 bp, Homo sapiens
taatttttgtatttt

SEQ ID NO: 732657 - DNA, 15 bp, Homo sapiens
aatttttgtattttt

SEQ ID NO: 732658 - DNA, 15 bp, Homo sapiens
atttttgtatttttt

SEQ ID NO: 732659 - DNA, 15 bp, Homo sapiens
tttttgtattttttg

SEQ ID NO: 732660 - DNA, 15 bp, Homo sapiens
ttttgtattttttgt

SEQ ID NO: 732661 - DNA, 15 bp, Homo sapiens
tttgtattttttgta

SEQ ID NO: 732662 - DNA, 15 bp, Homo sapiens
ttgtattttttgtag

SEQ ID NO: 732663 - DNA, 15 bp, Homo sapiens
tgtattttttgtagg

SEQ ID NO: 732664 - DNA, 15 bp, Homo sapiens
gtattttttgtaggg

SEQ ID NO: 732665 - DNA, 15 bp, Homo sapiens
tattttttgtaggga

SEQ ID NO: 732666 - DNA, 15 bp, Homo sapiens
attttttgtagggac

SEQ ID NO: 732667 - DNA, 15 bp, Homo sapiens
ttttttgtagggacg

SEQ ID NO: 732668 - DNA, 15 bp, Homo sapiens
tttttgtagggacga

SEQ ID NO: 732669 - DNA, 15 bp, Homo sapiens
ttttgtagggacgag

SEQ ID NO: 732670 - DNA, 15 bp, Homo sapiens
tttgtagggacgagt

SEQ ID NO: 732671 - DNA, 15 bp, Homo sapiens
ttgtagggacgagtt

SEQ ID NO: 732672 - DNA, 15 bp, Homo sapiens
tgtagggacgagttc

SEQ ID NO: 732673 - DNA, 15 bp, Homo sapiens
gtagggacgagttcc

SEQ ID NO: 732674 - DNA, 15 bp, Homo sapiens
tagggacgagttccc

SEQ ID NO: 732675 - DNA, 15 bp, Homo sapiens
agggacgagttccca

SEQ ID NO: 732676 - DNA, 15 bp, Homo sapiens
gggacgagttcccac

SEQ ID NO: 732677 - DNA, 15 bp, Homo sapiens
ggacgagttcccact

SEQ ID NO: 732678 - DNA, 15 bp, Homo sapiens
gacgagttcccacta

SEQ ID NO: 732679 - DNA, 15 bp, Homo sapiens
acgagttcccactat

SEQ ID NO: 732680 - DNA, 15 bp, Homo sapiens
cgagttcccactatg

SEQ ID NO: 732681 - DNA, 15 bp, Homo sapiens
gagttcccactatgt

SEQ ID NO: 732682 - DNA, 15 bp, Homo sapiens
agttcccactatgtt

SEQ ID NO: 732683 - DNA, 15 bp, Homo sapiens
gttcccactatgttg

SEQ ID NO: 732684 - DNA, 15 bp, Homo sapiens
ttcccactatgttgc

SEQ ID NO: 732685 - DNA, 15 bp, Homo sapiens
tcccactatgttgcc

SEQ ID NO: 732686 - DNA, 15 bp, Homo sapiens
cccactatgttgccc

SEQ ID NO: 732687 - DNA, 15 bp, Homo sapiens
ccactatgttgccca

SEQ ID NO: 732688 - DNA, 15 bp, Homo sapiens
cactatgttgcccag

SEQ ID NO: 732689 - DNA, 15 bp, Homo sapiens
actatgttgcccagg

SEQ ID NO: 732690 - DNA, 15 bp, Homo sapiens
ctatgttgcccaggc

SEQ ID NO: 732691 - DNA, 15 bp, Homo sapiens
tatgttgcccaggct

SEQ ID NO: 732692 - DNA, 15 bp, Homo sapiens
atgttgcccaggctg

SEQ ID NO: 732693 - DNA, 15 bp, Homo sapiens
tgttgcccaggctgg

SEQ ID NO: 732694 - DNA, 15 bp, Homo sapiens
gttgcccaggctggt

SEQ ID NO: 732695 - DNA, 15 bp, Homo sapiens
ttgcccaggctggtc

SEQ ID NO: 732696 - DNA, 15 bp, Homo sapiens
tgcccaggctggtct

SEQ ID NO: 732697 - DNA, 15 bp, Homo sapiens
gcccaggctggtctc

SEQ ID NO: 732698 - DNA, 15 bp, Homo sapiens
cccaggctggtctcc

SEQ ID NO: 732699 - DNA, 15 bp, Homo sapiens
ccaggctggtctcca

SEQ ID NO: 732700 - DNA, 15 bp, Homo sapiens
caggctggtctccaa

SEQ ID NO: 732701 - DNA, 15 bp, Homo sapiens
aggctggtctccaac

SEQ ID NO: 732702 - DNA, 15 bp, Homo sapiens
ggctggtctccaact

SEQ ID NO: 732703 - DNA, 15 bp, Homo sapiens
gctggtctccaactc

SEQ ID NO: 732704 - DNA, 15 bp, Homo sapiens
ctggtctccaactcc

SEQ ID NO: 732705 - DNA, 15 bp, Homo sapiens
tggtctccaactcct

SEQ ID NO: 732706 - DNA, 15 bp, Homo sapiens
ggtctccaactcctg

SEQ ID NO: 732707 - DNA, 15 bp, Homo sapiens
gtctccaactcctgg

SEQ ID NO: 732708 - DNA, 15 bp, Homo sapiens
tctccaactcctggg

SEQ ID NO: 732709 - DNA, 15 bp, Homo sapiens
ctccaactcctgggc

SEQ ID NO: 732710 - DNA, 15 bp, Homo sapiens
tccaactcctgggct

SEQ ID NO: 732711 - DNA, 15 bp, Homo sapiens
ccaactcctgggctc

SEQ ID NO: 732712 - DNA, 15 bp, Homo sapiens
caactcctgggctca

SEQ ID NO: 732713 - DNA, 15 bp, Homo sapiens
aactcctgggctcag

SEQ ID NO: 732714 - DNA, 15 bp, Homo sapiens
actcctgggctcagg

SEQ ID NO: 732715 - DNA, 15 bp, Homo sapiens
ctcctgggctcaggc

SEQ ID NO: 732716 - DNA, 15 bp, Homo sapiens
tcctgggctcaggca

SEQ ID NO: 732717 - DNA, 15 bp, Homo sapiens
cctgggctcaggcag

SEQ ID NO: 732718 - DNA, 15 bp, Homo sapiens
ctgggctcaggcagt

SEQ ID NO: 732719 - DNA, 15 bp, Homo sapiens
tgggctcaggcagtc

SEQ ID NO: 732720 - DNA, 15 bp, Homo sapiens
gggctcaggcagtcc

SEQ ID NO: 732721 - DNA, 15 bp, Homo sapiens
ggctcaggcagtcct

SEQ ID NO: 732722 - DNA, 15 bp, Homo sapiens
gctcaggcagtcctc

SEQ ID NO: 732723 - DNA, 15 bp, Homo sapiens
ctcaggcagtcctcc

SEQ ID NO: 732724 - DNA, 15 bp, Homo sapiens
tcaggcagtcctccc

SEQ ID NO: 732725 - DNA, 15 bp, Homo sapiens
caggcagtcctccca

SEQ ID NO: 732726 - DNA, 15 bp, Homo sapiens
aggcagtcctcccac

SEQ ID NO: 732727 - DNA, 15 bp, Homo sapiens
ggcagtcctcccacc

SEQ ID NO: 732728 - DNA, 15 bp, Homo sapiens
gcagtcctcccacct

SEQ ID NO: 732729 - DNA, 15 bp, Homo sapiens
cagtcctcccacctc

SEQ ID NO: 732730 - DNA, 15 bp, Homo sapiens
agtcctcccacctca

SEQ ID NO: 732731 - DNA, 15 bp, Homo sapiens
gtcctcccacctcag

SEQ ID NO: 732732 - DNA, 15 bp, Homo sapiens
cctcccacctcagct

SEQ ID NO: 732733 - DNA, 15 bp, Homo sapiens
ctcccacctcagctg

SEQ ID NO: 732734 - DNA, 15 bp, Homo sapiens
tcccacctcagctgt

SEQ ID NO: 732735 - DNA, 15 bp, Homo sapiens
cccacctcagctgtc

SEQ ID NO: 732736 - DNA, 15 bp, Homo sapiens
ccacctcagctgtcc

SEQ ID NO: 732737 - DNA, 15 bp, Homo sapiens
cacctcagctgtcca

SEQ ID NO: 732738 - DNA, 15 bp, Homo sapiens
acctcagctgtccaa

SEQ ID NO: 732739 - DNA, 15 bp, Homo sapiens
cctcagctgtccaaa

SEQ ID NO: 732740 - DNA, 15 bp, Homo sapiens
ctcagctgtccaaag

SEQ ID NO: 732741 - DNA, 15 bp, Homo sapiens
tcagctgtccaaagt

SEQ ID NO: 732742 - DNA, 15 bp, Homo sapiens
cagctgtccaaagtg

SEQ ID NO: 732743 - DNA, 15 bp, Homo sapiens
agctgtccaaagtgc

SEQ ID NO: 732744 - DNA, 15 bp, Homo sapiens
gctgtccaaagtgct

SEQ ID NO: 732745 - DNA, 15 bp, Homo sapiens
ctgtccaaagtgctg

SEQ ID NO: 732746 - DNA, 15 bp, Homo sapiens
tgtccaaagtgctgg

SEQ ID NO: 732747 - DNA, 15 bp, Homo sapiens
gtccaaagtgctggg

SEQ ID NO: 732748 - DNA, 15 bp, Homo sapiens
tccaaagtgctggga

SEQ ID NO: 732749 - DNA, 15 bp, Homo sapiens
aggcgtgagccatca

SEQ ID NO: 732750 - DNA, 15 bp, Homo sapiens
ggcgtgagccatcac

SEQ ID NO: 732751 - DNA, 15 bp, Homo sapiens
gcgtgagccatcaca

SEQ ID NO: 732752 - DNA, 15 bp, Homo sapiens
cgtgagccatcacac

SEQ ID NO: 732753 - DNA, 15 bp, Homo sapiens
gtgagccatcacacc

SEQ ID NO: 732754 - DNA, 15 bp, Homo sapiens
tgagccatcacacca

SEQ ID NO: 732755 - DNA, 15 bp, Homo sapiens
gagccatcacaccag

SEQ ID NO: 732756 - DNA, 15 bp, Homo sapiens
agccatcacaccagg

SEQ ID NO: 732757 - DNA, 15 bp, Homo sapiens
gccatcacaccaggc

SEQ ID NO: 732758 - DNA, 15 bp, Homo sapiens
ccatcacaccaggca

SEQ ID NO: 732759 - DNA, 15 bp, Homo sapiens
catcacaccaggcat

SEQ ID NO: 732760 - DNA, 15 bp, Homo sapiens
atcacaccaggcatt

SEQ ID NO: 732761 - DNA, 15 bp, Homo sapiens
tcacaccaggcattg

SEQ ID NO: 732762 - DNA, 15 bp, Homo sapiens
cacaccaggcattgt

SEQ ID NO: 732763 - DNA, 15 bp, Homo sapiens
acaccaggcattgtt

SEQ ID NO: 732764 - DNA, 15 bp, Homo sapiens
caccaggcattgttc

SEQ ID NO: 732765 - DNA, 15 bp, Homo sapiens
accaggcattgttcc

SEQ ID NO: 732766 - DNA, 15 bp, Homo sapiens
ccaggcattgttcca

SEQ ID NO: 732767 - DNA, 15 bp, Homo sapiens
caggcattgttccag

SEQ ID NO: 732768 - DNA, 15 bp, Homo sapiens
aggcattgttccagg

SEQ ID NO: 732769 - DNA, 15 bp, Homo sapiens
ggcattgttccaggt

SEQ ID NO: 732770 - DNA, 15 bp, Homo sapiens
gcattgttccaggtg

SEQ ID NO: 732771 - DNA, 15 bp, Homo sapiens
cattgttccaggtgt

SEQ ID NO: 732772 - DNA, 15 bp, Homo sapiens
attgttccaggtgtg

SEQ ID NO: 732773 - DNA, 15 bp, Homo sapiens
ttgttccaggtgtgg

SEQ ID NO: 732774 - DNA, 15 bp, Homo sapiens
tgttccaggtgtggt

SEQ ID NO: 732775 - DNA, 15 bp, Homo sapiens
gttccaggtgtggtg

SEQ ID NO: 732776 - DNA, 15 bp, Homo sapiens
ttccaggtgtggtgg

SEQ ID NO: 732777 - DNA, 15 bp, Homo sapiens
tccaggtgtggtggc

SEQ ID NO: 732778 - DNA, 15 bp, Homo sapiens
ccaggtgtggtggct

SEQ ID NO: 732779 - DNA, 15 bp, Homo sapiens
caggtgtggtggctc

SEQ ID NO: 732780 - DNA, 15 bp, Homo sapiens
aggtgtggtggctca

SEQ ID NO: 732781 - DNA, 15 bp, Homo sapiens
ggtgtggtggctcat

SEQ ID NO: 732782 - DNA, 15 bp, Homo sapiens
gtgtggtggctcata

SEQ ID NO: 732783 - DNA, 15 bp, Homo sapiens
tgtggtggctcatat

SEQ ID NO: 732784 - DNA, 15 bp, Homo sapiens
gtggtggctcatatt

SEQ ID NO: 732785 - DNA, 15 bp, Homo sapiens
tggtggctcatattt

SEQ ID NO: 732786 - DNA, 15 bp, Homo sapiens
ggtggctcatatttg

SEQ ID NO: 732787 - DNA, 15 bp, Homo sapiens
gtggctcatatttgt

SEQ ID NO: 732788 - DNA, 15 bp, Homo sapiens
tggctcatatttgta

SEQ ID NO: 732789 - DNA, 15 bp, Homo sapiens
ggctcatatttgtaa

SEQ ID NO: 732790 - DNA, 15 bp, Homo sapiens
gctcatatttgtaat

SEQ ID NO: 732791 - DNA, 15 bp, Homo sapiens
ctcatatttgtaatc

SEQ ID NO: 732792 - DNA, 15 bp, Homo sapiens
tcatatttgtaatcc

SEQ ID NO: 732793 - DNA, 15 bp, Homo sapiens
catatttgtaatcct

SEQ ID NO: 732794 - DNA, 15 bp, Homo sapiens
atatttgtaatcctt

SEQ ID NO: 732795 - DNA, 15 bp, Homo sapiens
tatttgtaatccttt

SEQ ID NO: 732796 - DNA, 15 bp, Homo sapiens
atttgtaatcctttc

SEQ ID NO: 732797 - DNA, 15 bp, Homo sapiens
tttgtaatcctttct

SEQ ID NO: 732798 - DNA, 15 bp, Homo sapiens
ttgtaatcctttctt

SEQ ID NO: 732799 - DNA, 15 bp, Homo sapiens
tgtaatcctttcttt

SEQ ID NO: 732800 - DNA, 15 bp, Homo sapiens
gtaatcctttctttt

SEQ ID NO: 732801 - DNA, 15 bp, Homo sapiens
taatcctttcttttt

SEQ ID NO: 732802 - DNA, 15 bp, Homo sapiens
aatcctttctttttt

SEQ ID NO: 732803 - DNA, 15 bp, Homo sapiens
atcctttcttttttt

SEQ ID NO: 732804 - DNA, 15 bp, Homo sapiens
tcctttctttttttt

SEQ ID NO: 732805 - DNA, 15 bp, Homo sapiens
cctttcttttttttt

SEQ ID NO: 732806 - DNA, 15 bp, Homo sapiens
ctttctttttttttt

SEQ ID NO: 732807 - DNA, 15 bp, Homo sapiens
tttcttttttttttt

SEQ ID NO: 732808 - DNA, 15 bp, Homo sapiens
ttctttttttttttt

SEQ ID NO: 732809 - DNA, 15 bp, Homo sapiens
tcttttttttttttc

SEQ ID NO: 732810 - DNA, 15 bp, Homo sapiens
cttttttttttttct

SEQ ID NO: 732811 - DNA, 15 bp, Homo sapiens
ttttttttttttctt

SEQ ID NO: 732812 - DNA, 15 bp, Homo sapiens
tttttttttttcttt

SEQ ID NO: 732813 - DNA, 15 bp, Homo sapiens
ttttttttttctttt

SEQ ID NO: 732814 - DNA, 15 bp, Homo sapiens
tttttttttcttttt

SEQ ID NO: 732815 - DNA, 15 bp, Homo sapiens
ttttttttctttttg

SEQ ID NO: 732816 - DNA, 15 bp, Homo sapiens
tttttttctttttga

SEQ ID NO: 732817 - DNA, 15 bp, Homo sapiens
ttttttctttttgat

SEQ ID NO: 732818 - DNA, 15 bp, Homo sapiens
tttttctttttgata

SEQ ID NO: 732819 - DNA, 15 bp, Homo sapiens
ttttctttttgatag

SEQ ID NO: 732820 - DNA, 15 bp, Homo sapiens
tttctttttgatagg

SEQ ID NO: 732821 - DNA, 15 bp, Homo sapiens
ttctttttgatagga

SEQ ID NO: 732822 - DNA, 15 bp, Homo sapiens
tctttttgataggac

SEQ ID NO: 732823 - DNA, 15 bp, Homo sapiens
ctttttgataggaca

SEQ ID NO: 732824 - DNA, 15 bp, Homo sapiens
tttttgataggacaa

SEQ ID NO: 732825 - DNA, 15 bp, Homo sapiens
ttttgataggacaat

SEQ ID NO: 732826 - DNA, 15 bp, Homo sapiens
tttgataggacaatt

SEQ ID NO: 732827 - DNA, 15 bp, Homo sapiens
ttgataggacaatta

SEQ ID NO: 732828 - DNA, 15 bp, Homo sapiens
tgataggacaattag

SEQ ID NO: 732829 - DNA, 15 bp, Homo sapiens
gataggacaattagg

SEQ ID NO: 732830 - DNA, 15 bp, Homo sapiens
ataggacaattagga

SEQ ID NO: 732831 - DNA, 15 bp, Homo sapiens
taggacaattaggac

SEQ ID NO: 732832 - DNA, 15 bp, Homo sapiens
aggacaattaggact

SEQ ID NO: 732833 - DNA, 15 bp, Homo sapiens
ggacaattaggactc

SEQ ID NO: 732834 - DNA, 15 bp, Homo sapiens
gacaattaggactct

SEQ ID NO: 732835 - DNA, 15 bp, Homo sapiens
acaattaggactctg

SEQ ID NO: 732836 - DNA, 15 bp, Homo sapiens
caattaggactctga

SEQ ID NO: 732837 - DNA, 15 bp, Homo sapiens
aattaggactctgat

SEQ ID NO: 732838 - DNA, 15 bp, Homo sapiens
attaggactctgatc

SEQ ID NO: 732839 - DNA, 15 bp, Homo sapiens
ttaggactctgatca

SEQ ID NO: 732840 - DNA, 15 bp, Homo sapiens
taggactctgatcac

SEQ ID NO: 732841 - DNA, 15 bp, Homo sapiens
aggactctgatcacc

SEQ ID NO: 732842 - DNA, 15 bp, Homo sapiens
ggactctgatcacct

SEQ ID NO: 732843 - DNA, 15 bp, Homo sapiens
gactctgatcacctt

SEQ ID NO: 732844 - DNA, 15 bp, Homo sapiens
actctgatcaccttt

SEQ ID NO: 732845 - DNA, 15 bp, Homo sapiens
ctctgatcacctttg

SEQ ID NO: 732846 - DNA, 15 bp, Homo sapiens
tctgatcacctttgc

SEQ ID NO: 732847 - DNA, 15 bp, Homo sapiens
ctgatcacctttgcc

SEQ ID NO: 732848 - DNA, 15 bp, Homo sapiens
tgatcacctttgcct

SEQ ID NO: 732849 - DNA, 15 bp, Homo sapiens
gatcacctttgcctg

SEQ ID NO: 732850 - DNA, 15 bp, Homo sapiens
atcacctttgcctgg

SEQ ID NO: 732851 - DNA, 15 bp, Homo sapiens
tcacctttgcctggc

SEQ ID NO: 732852 - DNA, 15 bp, Homo sapiens
cacctttgcctggct

SEQ ID NO: 732853 - DNA, 15 bp, Homo sapiens
acctttgcctggcta

SEQ ID NO: 732854 - DNA, 15 bp, Homo sapiens
cctttgcctggctag

SEQ ID NO: 732855 - DNA, 15 bp, Homo sapiens
ctttgcctggctagt

SEQ ID NO: 732856 - DNA, 15 bp, Homo sapiens
tttgcctggctagtc

SEQ ID NO: 732857 - DNA, 15 bp, Homo sapiens
ttgcctggctagtca

SEQ ID NO: 732858 - DNA, 15 bp, Homo sapiens
tgcctggctagtcaa

SEQ ID NO: 732859 - DNA, 15 bp, Homo sapiens
gcctggctagtcaac

SEQ ID NO: 732860 - DNA, 15 bp, Homo sapiens
cctggctagtcaact

SEQ ID NO: 732861 - DNA, 15 bp, Homo sapiens
ctggctagtcaactc

SEQ ID NO: 732862 - DNA, 15 bp, Homo sapiens
tggctagtcaactca

SEQ ID NO: 732863 - DNA, 15 bp, Homo sapiens
ggctagtcaactcag

SEQ ID NO: 732864 - DNA, 15 bp, Homo sapiens
gctagtcaactcagc

SEQ ID NO: 732865 - DNA, 15 bp, Homo sapiens
ctagtcaactcagct

SEQ ID NO: 732866 - DNA, 15 bp, Homo sapiens
tagtcaactcagcta

SEQ ID NO: 732867 - DNA, 15 bp, Homo sapiens
agtcaactcagctaa

SEQ ID NO: 732868 - DNA, 15 bp, Homo sapiens
gtcaactcagctaat

SEQ ID NO: 732869 - DNA, 15 bp, Homo sapiens
tcaactcagctaatc

SEQ ID NO: 732870 - DNA, 15 bp, Homo sapiens
caactcagctaatct

SEQ ID NO: 732871 - DNA, 15 bp, Homo sapiens
aactcagctaatcta

SEQ ID NO: 732872 - DNA, 15 bp, Homo sapiens
actcagctaatctag

SEQ ID NO: 732873 - DNA, 15 bp, Homo sapiens
ctcagctaatctagt

SEQ ID NO: 732874 - DNA, 15 bp, Homo sapiens
tcagctaatctagtc

SEQ ID NO: 732875 - DNA, 15 bp, Homo sapiens
cagctaatctagtct

SEQ ID NO: 732876 - DNA, 15 bp, Homo sapiens
agctaatctagtcta

SEQ ID NO: 732877 - DNA, 15 bp, Homo sapiens
gctaatctagtctaa

SEQ ID NO: 732878 - DNA, 15 bp, Homo sapiens
ctaatctagtctaaa

SEQ ID NO: 732879 - DNA, 15 bp, Homo sapiens
taatctagtctaaaa

SEQ ID NO: 732880 - DNA, 15 bp, Homo sapiens
aatctagtctaaaat

SEQ ID NO: 732881 - DNA, 15 bp, Homo sapiens
atctagtctaaaata

SEQ ID NO: 732882 - DNA, 15 bp, Homo sapiens
tctagtctaaaatat

SEQ ID NO: 732883 - DNA, 15 bp, Homo sapiens
ctagtctaaaatatt

SEQ ID NO: 732884 - DNA, 15 bp, Homo sapiens
tagtctaaaatattt

SEQ ID NO: 732885 - DNA, 15 bp, Homo sapiens
agtctaaaatatttc

SEQ ID NO: 732886 - DNA, 15 bp, Homo sapiens
gtctaaaatatttct

SEQ ID NO: 732887 - DNA, 15 bp, Homo sapiens
tctaaaatatttctt

SEQ ID NO: 732888 - DNA, 15 bp, Homo sapiens
ctaaaatatttcttc

SEQ ID NO: 732889 - DNA, 15 bp, Homo sapiens
taaaatatttcttcc

SEQ ID NO: 732890 - DNA, 15 bp, Homo sapiens
aaaatatttcttcct

SEQ ID NO: 732891 - DNA, 15 bp, Homo sapiens
aaatatttcttcctt

SEQ ID NO: 732892 - DNA, 15 bp, Homo sapiens
aatatttcttccttt

SEQ ID NO: 732893 - DNA, 15 bp, Homo sapiens
atatttcttcctttg

SEQ ID NO: 732894 - DNA, 15 bp, Homo sapiens
tatttcttcctttgg

SEQ ID NO: 732895 - DNA, 15 bp, Homo sapiens
atttcttcctttggg

SEQ ID NO: 732896 - DNA, 15 bp, Homo sapiens
tttcttcctttggga

SEQ ID NO: 732897 - DNA, 15 bp, Homo sapiens
ttcttcctttgggaa

SEQ ID NO: 732898 - DNA, 15 bp, Homo sapiens
tcttcctttgggaaa

SEQ ID NO: 732899 - DNA, 15 bp, Homo sapiens
cttcctttgggaaac

SEQ ID NO: 732900 - DNA, 15 bp, Homo sapiens
ttcctttgggaaacc

SEQ ID NO: 732901 - DNA, 15 bp, Homo sapiens
tcctttgggaaacct

SEQ ID NO: 732902 - DNA, 15 bp, Homo sapiens
cctttgggaaacctt

SEQ ID NO: 732903 - DNA, 15 bp, Homo sapiens
ctttgggaaaccttt

SEQ ID NO: 732904 - DNA, 15 bp, Homo sapiens
tttgggaaacctttt

SEQ ID NO: 732905 - DNA, 15 bp, Homo sapiens
ttgggaaaccttttg

SEQ ID NO: 732906 - DNA, 15 bp, Homo sapiens
tgggaaaccttttga

SEQ ID NO: 732907 - DNA, 15 bp, Homo sapiens
gggaaaccttttgag

SEQ ID NO: 732908 - DNA, 15 bp, Homo sapiens
ggaaaccttttgagg

SEQ ID NO: 732909 - DNA, 15 bp, Homo sapiens
gaaaccttttgaggc

SEQ ID NO: 732910 - DNA, 15 bp, Homo sapiens
aaaccttttgaggcc

SEQ ID NO: 732911 - DNA, 15 bp, Homo sapiens
aaccttttgaggcct

SEQ ID NO: 732912 - DNA, 15 bp, Homo sapiens
accttttgaggcctc

SEQ ID NO: 732913 - DNA, 15 bp, Homo sapiens
ccttttgaggcctct

SEQ ID NO: 732914 - DNA, 15 bp, Homo sapiens
cttttgaggcctctc

SEQ ID NO: 732915 - DNA, 15 bp, Homo sapiens
ttttgaggcctctcc

SEQ ID NO: 732916 - DNA, 15 bp, Homo sapiens
tttgaggcctctccc

SEQ ID NO: 732917 - DNA, 15 bp, Homo sapiens
ttgaggcctctccca

SEQ ID NO: 732918 - DNA, 15 bp, Homo sapiens
tgaggcctctcccag

SEQ ID NO: 732919 - DNA, 15 bp, Homo sapiens
gaggcctctcccaga

SEQ ID NO: 732920 - DNA, 15 bp, Homo sapiens
aggcctctcccagac

SEQ ID NO: 732921 - DNA, 15 bp, Homo sapiens
ggcctctcccagaca

SEQ ID NO: 732922 - DNA, 15 bp, Homo sapiens
gcctctcccagacag

SEQ ID NO: 732923 - DNA, 15 bp, Homo sapiens
cctctcccagacaga

SEQ ID NO: 732924 - DNA, 15 bp, Homo sapiens
ctctcccagacagaa

SEQ ID NO: 732925 - DNA, 15 bp, Homo sapiens
tctcccagacagaat

SEQ ID NO: 732926 - DNA, 15 bp, Homo sapiens
ctcccagacagaatg

SEQ ID NO: 732927 - DNA, 15 bp, Homo sapiens
tcccagacagaatga

SEQ ID NO: 732928 - DNA, 15 bp, Homo sapiens
cccagacagaatgag

SEQ ID NO: 732929 - DNA, 15 bp, Homo sapiens
ccagacagaatgagt

SEQ ID NO: 732930 - DNA, 15 bp, Homo sapiens
cagacagaatgagtc

SEQ ID NO: 732931 - DNA, 15 bp, Homo sapiens
agacagaatgagtcc

SEQ ID NO: 732932 - DNA, 15 bp, Homo sapiens
gacagaatgagtccc

SEQ ID NO: 732933 - DNA, 15 bp, Homo sapiens
acagaatgagtccct

SEQ ID NO: 732934 - DNA, 15 bp, Homo sapiens
cagaatgagtccctt

SEQ ID NO: 732935 - DNA, 15 bp, Homo sapiens
agaatgagtcccttg

SEQ ID NO: 732936 - DNA, 15 bp, Homo sapiens
gaatgagtcccttga

SEQ ID NO: 732937 - DNA, 15 bp, Homo sapiens
aatgagtcccttgac

SEQ ID NO: 732938 - DNA, 15 bp, Homo sapiens
atgagtcccttgact

SEQ ID NO: 732939 - DNA, 15 bp, Homo sapiens
tgagtcccttgactt

SEQ ID NO: 732940 - DNA, 15 bp, Homo sapiens
gagtcccttgacttt

SEQ ID NO: 732941 - DNA, 15 bp, Homo sapiens
agtcccttgactttc

SEQ ID NO: 732942 - DNA, 15 bp, Homo sapiens
gtcccttgactttct

SEQ ID NO: 732943 - DNA, 15 bp, Homo sapiens
tcccttgactttctg

SEQ ID NO: 732944 - DNA, 15 bp, Homo sapiens
cccttgactttctgt

SEQ ID NO: 732945 - DNA, 15 bp, Homo sapiens
ccttgactttctgtt

SEQ ID NO: 732946 - DNA, 15 bp, Homo sapiens
cttgactttctgttc

SEQ ID NO: 732947 - DNA, 15 bp, Homo sapiens
ttgactttctgttct

SEQ ID NO: 732948 - DNA, 15 bp, Homo sapiens
tgactttctgttctt

SEQ ID NO: 732949 - DNA, 15 bp, Homo sapiens
gactttctgttctta

SEQ ID NO: 732950 - DNA, 15 bp, Homo sapiens
actttctgttcttag

SEQ ID NO: 732951 - DNA, 15 bp, Homo sapiens
ctttctgttcttaga

SEQ ID NO: 732952 - DNA, 15 bp, Homo sapiens
tttctgttcttagag

SEQ ID NO: 732953 - DNA, 15 bp, Homo sapiens
ttctgttcttagagc

SEQ ID NO: 732954 - DNA, 15 bp, Homo sapiens
tctgttcttagagcc

SEQ ID NO: 732955 - DNA, 15 bp, Homo sapiens
ctgttcttagagcca

SEQ ID NO: 732956 - DNA, 15 bp, Homo sapiens
tgttcttagagccag

SEQ ID NO: 732957 - DNA, 15 bp, Homo sapiens
gttcttagagccagt

SEQ ID NO: 732958 - DNA, 15 bp, Homo sapiens
ttcttagagccagtg

SEQ ID NO: 732959 - DNA, 15 bp, Homo sapiens
tcttagagccagtgc

SEQ ID NO: 732960 - DNA, 15 bp, Homo sapiens
cttagagccagtgcc

SEQ ID NO: 732961 - DNA, 15 bp, Homo sapiens
ttagagccagtgcct

SEQ ID NO: 732962 - DNA, 15 bp, Homo sapiens
tagagccagtgcctc

SEQ ID NO: 732963 - DNA, 15 bp, Homo sapiens
agagccagtgcctcc

SEQ ID NO: 732964 - DNA, 15 bp, Homo sapiens
gagccagtgcctcca

SEQ ID NO: 732965 - DNA, 15 bp, Homo sapiens
agccagtgcctccat

SEQ ID NO: 732966 - DNA, 15 bp, Homo sapiens
gccagtgcctccatt

SEQ ID NO: 732967 - DNA, 15 bp, Homo sapiens
ccagtgcctccattc

SEQ ID NO: 732968 - DNA, 15 bp, Homo sapiens
cagtgcctccattct

SEQ ID NO: 732969 - DNA, 15 bp, Homo sapiens
agtgcctccattctt

SEQ ID NO: 732970 - DNA, 15 bp, Homo sapiens
gtgcctccattcttg

SEQ ID NO: 732971 - DNA, 15 bp, Homo sapiens
tgcctccattcttgc

SEQ ID NO: 732972 - DNA, 15 bp, Homo sapiens
gcctccattcttgct

SEQ ID NO: 732973 - DNA, 15 bp, Homo sapiens
cctccattcttgctg

SEQ ID NO: 732974 - DNA, 15 bp, Homo sapiens
ctccattcttgctgc

SEQ ID NO: 732975 - DNA, 15 bp, Homo sapiens
tccattcttgctgct

SEQ ID NO: 732976 - DNA, 15 bp, Homo sapiens
ccattcttgctgctg

SEQ ID NO: 732977 - DNA, 15 bp, Homo sapiens
cattcttgctgctgg

SEQ ID NO: 732978 - DNA, 15 bp, Homo sapiens
attcttgctgctggg

SEQ ID NO: 732979 - DNA, 15 bp, Homo sapiens
ttcttgctgctgggg

SEQ ID NO: 732980 - DNA, 15 bp, Homo sapiens
tcttgctgctggggt

SEQ ID NO: 732981 - DNA, 15 bp, Homo sapiens
cttgctgctggggta

SEQ ID NO: 732982 - DNA, 15 bp, Homo sapiens
ttgctgctggggtaa

SEQ ID NO: 732983 - DNA, 15 bp, Homo sapiens
tgctgctggggtaac

SEQ ID NO: 732984 - DNA, 15 bp, Homo sapiens
gctgctggggtaaca

SEQ ID NO: 732985 - DNA, 15 bp, Homo sapiens
ctgctggggtaacac

SEQ ID NO: 732986 - DNA, 15 bp, Homo sapiens
tgctggggtaacact

SEQ ID NO: 732987 - DNA, 15 bp, Homo sapiens
gctggggtaacactg

SEQ ID NO: 732988 - DNA, 15 bp, Homo sapiens
ctggggtaacactga

SEQ ID NO: 732989 - DNA, 15 bp, Homo sapiens
tggggtaacactgat

SEQ ID NO: 732990 - DNA, 15 bp, Homo sapiens
ggggtaacactgatc

SEQ ID NO: 732991 - DNA, 15 bp, Homo sapiens
gggtaacactgatcc

SEQ ID NO: 732992 - DNA, 15 bp, Homo sapiens
ggtaacactgatccc

SEQ ID NO: 732993 - DNA, 15 bp, Homo sapiens
gtaacactgatccca

SEQ ID NO: 732994 - DNA, 15 bp, Homo sapiens
taacactgatcccat

SEQ ID NO: 732995 - DNA, 15 bp, Homo sapiens
aacactgatcccatt

SEQ ID NO: 732996 - DNA, 15 bp, Homo sapiens
acactgatcccattt

SEQ ID NO: 732997 - DNA, 15 bp, Homo sapiens
cactgatcccatttc

SEQ ID NO: 732998 - DNA, 15 bp, Homo sapiens
actgatcccatttca

SEQ ID NO: 732999 - DNA, 15 bp, Homo sapiens
ctgatcccatttcat

SEQ ID NO: 733000 - DNA, 15 bp, Homo sapiens
tgatcccatttcatg

SEQ ID NO: 733001 - DNA, 15 bp, Homo sapiens
gatcccatttcatga

SEQ ID NO: 733002 - DNA, 15 bp, Homo sapiens
atcccatttcatgag

SEQ ID NO: 733003 - DNA, 15 bp, Homo sapiens
tcccatttcatgaga

SEQ ID NO: 733004 - DNA, 15 bp, Homo sapiens
cccatttcatgagag

SEQ ID NO: 733005 - DNA, 15 bp, Homo sapiens
ccatttcatgagagt

SEQ ID NO: 733006 - DNA, 15 bp, Homo sapiens
catttcatgagagtt

SEQ ID NO: 733007 - DNA, 15 bp, Homo sapiens
atttcatgagagttt

SEQ ID NO: 733008 - DNA, 15 bp, Homo sapiens
tttcatgagagtttg

SEQ ID NO: 733009 - DNA, 15 bp, Homo sapiens
ttcatgagagtttgt

SEQ ID NO: 733010 - DNA, 15 bp, Homo sapiens
tcatgagagtttgtg

SEQ ID NO: 733011 - DNA, 15 bp, Homo sapiens
catgagagtttgtgg

SEQ ID NO: 733012 - DNA, 15 bp, Homo sapiens
atgagagtttgtggc

SEQ ID NO: 733013 - DNA, 15 bp, Homo sapiens
tgagagtttgtggct

SEQ ID NO: 733014 - DNA, 15 bp, Homo sapiens
gagagtttgtggctc

SEQ ID NO: 733015 - DNA, 15 bp, Homo sapiens
agagtttgtggctct

SEQ ID NO: 733016 - DNA, 15 bp, Homo sapiens
gagtttgtggctctc

SEQ ID NO: 733017 - DNA, 15 bp, Homo sapiens
agtttgtggctctcc

SEQ ID NO: 733018 - DNA, 15 bp, Homo sapiens
gtttgtggctctcct

SEQ ID NO: 733019 - DNA, 15 bp, Homo sapiens
tttgtggctctccta

SEQ ID NO: 733020 - DNA, 15 bp, Homo sapiens
ttgtggctctcctag

SEQ ID NO: 733021 - DNA, 15 bp, Homo sapiens
tgtggctctcctaga

SEQ ID NO: 733022 - DNA, 15 bp, Homo sapiens
gtggctctcctagac

SEQ ID NO: 733023 - DNA, 15 bp, Homo sapiens
tggctctcctagact

SEQ ID NO: 733024 - DNA, 15 bp, Homo sapiens
ggctctcctagactg

SEQ ID NO: 733025 - DNA, 15 bp, Homo sapiens
gctctcctagactgt

SEQ ID NO: 733026 - DNA, 15 bp, Homo sapiens
ctctcctagactgtg

SEQ ID NO: 733027 - DNA, 15 bp, Homo sapiens
tctcctagactgtgg

SEQ ID NO: 733028 - DNA, 15 bp, Homo sapiens
ctcctagactgtgga

SEQ ID NO: 733029 - DNA, 15 bp, Homo sapiens
tcctagactgtggac

SEQ ID NO: 733030 - DNA, 15 bp, Homo sapiens
cctagactgtggact

SEQ ID NO: 733031 - DNA, 15 bp, Homo sapiens
ctagactgtggactt

SEQ ID NO: 733032 - DNA, 15 bp, Homo sapiens
tagactgtggacttc

SEQ ID NO: 733033 - DNA, 15 bp, Homo sapiens
agactgtggacttct

SEQ ID NO: 733034 - DNA, 15 bp, Homo sapiens
gactgtggacttctt

SEQ ID NO: 733035 - DNA, 15 bp, Homo sapiens
actgtggacttcttg

SEQ ID NO: 733036 - DNA, 15 bp, Homo sapiens
ctgtggacttcttga

SEQ ID NO: 733037 - DNA, 15 bp, Homo sapiens
tgtggacttcttgag

SEQ ID NO: 733038 - DNA, 15 bp, Homo sapiens
gtggacttcttgagg

SEQ ID NO: 733039 - DNA, 15 bp, Homo sapiens
tggacttcttgaggg

SEQ ID NO: 733040 - DNA, 15 bp, Homo sapiens
ggacttcttgagggc

SEQ ID NO: 733041 - DNA, 15 bp, Homo sapiens
gacttcttgagggca

SEQ ID NO: 733042 - DNA, 15 bp, Homo sapiens
acttcttgagggcaa

SEQ ID NO: 733043 - DNA, 15 bp, Homo sapiens
cttcttgagggcaaa

SEQ ID NO: 733044 - DNA, 15 bp, Homo sapiens
ttcttgagggcaaag

SEQ ID NO: 733045 - DNA, 15 bp, Homo sapiens
tcttgagggcaaagg

SEQ ID NO: 733046 - DNA, 15 bp, Homo sapiens
cttgagggcaaaggc

SEQ ID NO: 733047 - DNA, 15 bp, Homo sapiens
ttgagggcaaaggct

SEQ ID NO: 733048 - DNA, 15 bp, Homo sapiens
tgagggcaaaggctg

SEQ ID NO: 733049 - DNA, 15 bp, Homo sapiens
gagggcaaaggctga

SEQ ID NO: 733050 - DNA, 15 bp, Homo sapiens
agggcaaaggctgat

SEQ ID NO: 733051 - DNA, 15 bp, Homo sapiens
gggcaaaggctgatt

SEQ ID NO: 733052 - DNA, 15 bp, Homo sapiens
ggcaaaggctgatta

SEQ ID NO: 733053 - DNA, 15 bp, Homo sapiens
gcaaaggctgattaa

SEQ ID NO: 733054 - DNA, 15 bp, Homo sapiens
caaaggctgattaat

SEQ ID NO: 733055 - DNA, 15 bp, Homo sapiens
aaaggctgattaatc

SEQ ID NO: 733056 - DNA, 15 bp, Homo sapiens
aaggctgattaatcc

SEQ ID NO: 733057 - DNA, 15 bp, Homo sapiens
aggctgattaatcct

SEQ ID NO: 733058 - DNA, 15 bp, Homo sapiens
ggctgattaatcctc

SEQ ID NO: 733059 - DNA, 15 bp, Homo sapiens
gctgattaatcctca

SEQ ID NO: 733060 - DNA, 15 bp, Homo sapiens
ctgattaatcctcac

SEQ ID NO: 733061 - DNA, 15 bp, Homo sapiens
tgattaatcctcaca

SEQ ID NO: 733062 - DNA, 15 bp, Homo sapiens
gattaatcctcacat

SEQ ID NO: 733063 - DNA, 15 bp, Homo sapiens
attaatcctcacatt

SEQ ID NO: 733064 - DNA, 15 bp, Homo sapiens
ttaatcctcacattt

SEQ ID NO: 733065 - DNA, 15 bp, Homo sapiens
taatcctcacattta

SEQ ID NO: 733066 - DNA, 15 bp, Homo sapiens
aatcctcacatttat

SEQ ID NO: 733067 - DNA, 15 bp, Homo sapiens
atcctcacatttata

SEQ ID NO: 733068 - DNA, 15 bp, Homo sapiens
tcctcacatttataa

SEQ ID NO: 733069 - DNA, 15 bp, Homo sapiens
cctcacatttataac

SEQ ID NO: 733070 - DNA, 15 bp, Homo sapiens
ctcacatttataacc

SEQ ID NO: 733071 - DNA, 15 bp, Homo sapiens
tcacatttataaccc

SEQ ID NO: 733072 - DNA, 15 bp, Homo sapiens
cacatttataaccct

SEQ ID NO: 733073 - DNA, 15 bp, Homo sapiens
acatttataaccctc

SEQ ID NO: 733074 - DNA, 15 bp, Homo sapiens
catttataaccctca

SEQ ID NO: 733075 - DNA, 15 bp, Homo sapiens
atttataaccctcag

SEQ ID NO: 733076 - DNA, 15 bp, Homo sapiens
tttataaccctcaga

SEQ ID NO: 733077 - DNA, 15 bp, Homo sapiens
ttataaccctcagag

SEQ ID NO: 733078 - DNA, 15 bp, Homo sapiens
tataaccctcagagg

SEQ ID NO: 733079 - DNA, 15 bp, Homo sapiens
ataaccctcagaggt

SEQ ID NO: 733080 - DNA, 15 bp, Homo sapiens
taaccctcagaggtc

SEQ ID NO: 733081 - DNA, 15 bp, Homo sapiens
aaccctcagaggtct

SEQ ID NO: 733082 - DNA, 15 bp, Homo sapiens
accctcagaggtctc

SEQ ID NO: 733083 - DNA, 15 bp, Homo sapiens
ccctcagaggtctct

SEQ ID NO: 733084 - DNA, 15 bp, Homo sapiens
cctcagaggtctctc

SEQ ID NO: 733085 - DNA, 15 bp, Homo sapiens
ctcagaggtctctcc

SEQ ID NO: 733086 - DNA, 15 bp, Homo sapiens
tcagaggtctctcct

SEQ ID NO: 733087 - DNA, 15 bp, Homo sapiens
cagaggtctctcctg

SEQ ID NO: 733088 - DNA, 15 bp, Homo sapiens
agaggtctctcctgg

SEQ ID NO: 733089 - DNA, 15 bp, Homo sapiens
gaggtctctcctgga

SEQ ID NO: 733090 - DNA, 15 bp, Homo sapiens
aggtctctcctggat

SEQ ID NO: 733091 - DNA, 15 bp, Homo sapiens
ggtctctcctggatc

SEQ ID NO: 733092 - DNA, 15 bp, Homo sapiens
gtctctcctggatcc

SEQ ID NO: 733093 - DNA, 15 bp, Homo sapiens
tctctcctggatcct

SEQ ID NO: 733094 - DNA, 15 bp, Homo sapiens
ctctcctggatcctg

SEQ ID NO: 733095 - DNA, 15 bp, Homo sapiens
tctcctggatcctga

SEQ ID NO: 733096 - DNA, 15 bp, Homo sapiens
ctcctggatcctgac

SEQ ID NO: 733097 - DNA, 15 bp, Homo sapiens
tcctggatcctgact

SEQ ID NO: 733098 - DNA, 15 bp, Homo sapiens
cctggatcctgactc

SEQ ID NO: 733099 - DNA, 15 bp, Homo sapiens
ctggatcctgactcc

SEQ ID NO: 733100 - DNA, 15 bp, Homo sapiens
tggatcctgactcca

SEQ ID NO: 733101 - DNA, 15 bp, Homo sapiens
ggatcctgactccaa

SEQ ID NO: 733102 - DNA, 15 bp, Homo sapiens
gatcctgactccaat

SEQ ID NO: 733103 - DNA, 15 bp, Homo sapiens
atcctgactccaatc

SEQ ID NO: 733104 - DNA, 15 bp, Homo sapiens
tcctgactccaatca

SEQ ID NO: 733105 - DNA, 15 bp, Homo sapiens
cctgactccaatcag

SEQ ID NO: 733106 - DNA, 15 bp, Homo sapiens
ctgactccaatcagc

SEQ ID NO: 733107 - DNA, 15 bp, Homo sapiens
tgactccaatcagct

SEQ ID NO: 733108 - DNA, 15 bp, Homo sapiens
gactccaatcagctc

SEQ ID NO: 733109 - DNA, 15 bp, Homo sapiens
actccaatcagctct

SEQ ID NO: 733110 - DNA, 15 bp, Homo sapiens
ctccaatcagctctg

SEQ ID NO: 733111 - DNA, 15 bp, Homo sapiens
tccaatcagctctga

SEQ ID NO: 733112 - DNA, 15 bp, Homo sapiens
ccaatcagctctgaa

SEQ ID NO: 733113 - DNA, 15 bp, Homo sapiens
caatcagctctgaat

SEQ ID NO: 733114 - DNA, 15 bp, Homo sapiens
aatcagctctgaatc

SEQ ID NO: 733115 - DNA, 15 bp, Homo sapiens
atcagctctgaatca

SEQ ID NO: 733116 - DNA, 15 bp, Homo sapiens
tcagctctgaatcag

SEQ ID NO: 733117 - DNA, 15 bp, Homo sapiens
cagctctgaatcagt

SEQ ID NO: 733118 - DNA, 15 bp, Homo sapiens
agctctgaatcagtg

SEQ ID NO: 733119 - DNA, 15 bp, Homo sapiens
gctctgaatcagtgc

SEQ ID NO: 733120 - DNA, 15 bp, Homo sapiens
ctctgaatcagtgct

SEQ ID NO: 733121 - DNA, 15 bp, Homo sapiens
tctgaatcagtgctg

SEQ ID NO: 733122 - DNA, 15 bp, Homo sapiens
ctgaatcagtgctgg

SEQ ID NO: 733123 - DNA, 15 bp, Homo sapiens
tgaatcagtgctggc

SEQ ID NO: 733124 - DNA, 15 bp, Homo sapiens
gaatcagtgctggct

SEQ ID NO: 733125 - DNA, 15 bp, Homo sapiens
aatcagtgctggcta

SEQ ID NO: 733126 - DNA, 15 bp, Homo sapiens
atcagtgctggctaa

SEQ ID NO: 733127 - DNA, 15 bp, Homo sapiens
tcagtgctggctaaa

SEQ ID NO: 733128 - DNA, 15 bp, Homo sapiens
cagtgctggctaaat

SEQ ID NO: 733129 - DNA, 15 bp, Homo sapiens
agtgctggctaaatg

SEQ ID NO: 733130 - DNA, 15 bp, Homo sapiens
gtgctggctaaatga

SEQ ID NO: 733131 - DNA, 15 bp, Homo sapiens
tgctggctaaatgaa

SEQ ID NO: 733132 - DNA, 15 bp, Homo sapiens
gctggctaaatgaat

SEQ ID NO: 733133 - DNA, 15 bp, Homo sapiens
ctggctaaatgaatt

SEQ ID NO: 733134 - DNA, 15 bp, Homo sapiens
tggctaaatgaattg

SEQ ID NO: 733135 - DNA, 15 bp, Homo sapiens
ggctaaatgaattga

SEQ ID NO: 733136 - DNA, 15 bp, Homo sapiens
gctaaatgaattgaa

SEQ ID NO: 733137 - DNA, 15 bp, Homo sapiens
ctaaatgaattgaaa

SEQ ID NO: 733138 - DNA, 15 bp, Homo sapiens
taaatgaattgaaaa

SEQ ID NO: 733139 - DNA, 15 bp, Homo sapiens
aaatgaattgaaaat

SEQ ID NO: 733140 - DNA, 15 bp, Homo sapiens
aatgaattgaaaatc

SEQ ID NO: 733141 - DNA, 15 bp, Homo sapiens
atgaattgaaaatca

SEQ ID NO: 733142 - DNA, 15 bp, Homo sapiens
tgaattgaaaatcat

SEQ ID NO: 733143 - DNA, 15 bp, Homo sapiens
gaattgaaaatcatg

SEQ ID NO: 733144 - DNA, 15 bp, Homo sapiens
aattgaaaatcatgt

SEQ ID NO: 733145 - DNA, 15 bp, Homo sapiens
attgaaaatcatgtg

SEQ ID NO: 733146 - DNA, 15 bp, Homo sapiens
ttgaaaatcatgtga

SEQ ID NO: 733147 - DNA, 15 bp, Homo sapiens
tgaaaatcatgtgaa

SEQ ID NO: 733148 - DNA, 15 bp, Homo sapiens
gaaaatcatgtgaac

SEQ ID NO: 733149 - DNA, 15 bp, Homo sapiens
aaaatcatgtgaaca

SEQ ID NO: 733150 - DNA, 15 bp, Homo sapiens
aaatcatgtgaacac

SEQ ID NO: 733151 - DNA, 15 bp, Homo sapiens
aatcatgtgaacacg

SEQ ID NO: 733152 - DNA, 15 bp, Homo sapiens
atcatgtgaacacgt

SEQ ID NO: 733153 - DNA, 15 bp, Homo sapiens
tcatgtgaacacgtt

SEQ ID NO: 733154 - DNA, 15 bp, Homo sapiens
catgtgaacacgttt

SEQ ID NO: 733155 - DNA, 15 bp, Homo sapiens
atgtgaacacgtttc

SEQ ID NO: 733156 - DNA, 15 bp, Homo sapiens
tgtgaacacgtttct

SEQ ID NO: 733157 - DNA, 15 bp, Homo sapiens
gtgaacacgtttctg

SEQ ID NO: 733158 - DNA, 15 bp, Homo sapiens
tgaacacgtttctgt

SEQ ID NO: 733159 - DNA, 15 bp, Homo sapiens
gaacacgtttctgtt

SEQ ID NO: 733160 - DNA, 15 bp, Homo sapiens
aacacgtttctgttc

SEQ ID NO: 733161 - DNA, 15 bp, Homo sapiens
acacgtttctgttcc

SEQ ID NO: 733162 - DNA, 15 bp, Homo sapiens
cacgtttctgttcca

SEQ ID NO: 733163 - DNA, 15 bp, Homo sapiens
acgtttctgttccaa

SEQ ID NO: 733164 - DNA, 15 bp, Homo sapiens
cgtttctgttccaaa

SEQ ID NO: 733165 - DNA, 15 bp, Homo sapiens
gtttctgttccaaaa

SEQ ID NO: 733166 - DNA, 15 bp, Homo sapiens
tttctgttccaaaaa

SEQ ID NO: 733167 - DNA, 15 bp, Homo sapiens
ttctgttccaaaaag

SEQ ID NO: 733168 - DNA, 15 bp, Homo sapiens
tctgttccaaaaagc

SEQ ID NO: 733169 - DNA, 15 bp, Homo sapiens
ctgttccaaaaagca

SEQ ID NO: 733170 - DNA, 15 bp, Homo sapiens
tgttccaaaaagcaa

SEQ ID NO: 733171 - DNA, 15 bp, Homo sapiens
gttccaaaaagcaaa

SEQ ID NO: 733172 - DNA, 15 bp, Homo sapiens
ttccaaaaagcaaag

SEQ ID NO: 733173 - DNA, 15 bp, Homo sapiens
tccaaaaagcaaagc

SEQ ID NO: 733174 - DNA, 15 bp, Homo sapiens
ccaaaaagcaaagct

SEQ ID NO: 733175 - DNA, 15 bp, Homo sapiens
caaaaagcaaagctc

SEQ ID NO: 733176 - DNA, 15 bp, Homo sapiens
aaaaagcaaagctct

SEQ ID NO: 733177 - DNA, 15 bp, Homo sapiens
aaaagcaaagctctc

SEQ ID NO: 733178 - DNA, 15 bp, Homo sapiens
aaagcaaagctctca

SEQ ID NO: 733179 - DNA, 15 bp, Homo sapiens
aagcaaagctctcat

SEQ ID NO: 733180 - DNA, 15 bp, Homo sapiens
agcaaagctctcatt

SEQ ID NO: 733181 - DNA, 15 bp, Homo sapiens
gcaaagctctcattt

SEQ ID NO: 733182 - DNA, 15 bp, Homo sapiens
caaagctctcatttt

SEQ ID NO: 733183 - DNA, 15 bp, Homo sapiens
aaagctctcattttc

SEQ ID NO: 733184 - DNA, 15 bp, Homo sapiens
aagctctcattttct

SEQ ID NO: 733185 - DNA, 15 bp, Homo sapiens
agctctcattttctc

SEQ ID NO: 733186 - DNA, 15 bp, Homo sapiens
gctctcattttctca

SEQ ID NO: 733187 - DNA, 15 bp, Homo sapiens
ctctcattttctcag

SEQ ID NO: 733188 - DNA, 15 bp, Homo sapiens
tctcattttctcaga

SEQ ID NO: 733189 - DNA, 15 bp, Homo sapiens
ctcattttctcagat

SEQ ID NO: 733190 - DNA, 15 bp, Homo sapiens
tcattttctcagatt

SEQ ID NO: 733191 - DNA, 15 bp, Homo sapiens
cattttctcagattg

SEQ ID NO: 733192 - DNA, 15 bp, Homo sapiens
attttctcagattgg

SEQ ID NO: 733193 - DNA, 15 bp, Homo sapiens
ttttctcagattggg

SEQ ID NO: 733194 - DNA, 15 bp, Homo sapiens
tttctcagattgggc

SEQ ID NO: 733195 - DNA, 15 bp, Homo sapiens
ttctcagattgggca

SEQ ID NO: 733196 - DNA, 15 bp, Homo sapiens
tctcagattgggcag

SEQ ID NO: 733197 - DNA, 15 bp, Homo sapiens
ctcagattgggcagg

SEQ ID NO: 733198 - DNA, 15 bp, Homo sapiens
tcagattgggcaggc

SEQ ID NO: 733199 - DNA, 15 bp, Homo sapiens
cagattgggcaggct

SEQ ID NO: 733200 - DNA, 15 bp, Homo sapiens
agattgggcaggctc

SEQ ID NO: 733201 - DNA, 15 bp, Homo sapiens
gattgggcaggctcc

SEQ ID NO: 733202 - DNA, 15 bp, Homo sapiens
attgggcaggctcct

SEQ ID NO: 733203 - DNA, 15 bp, Homo sapiens
ttgggcaggctcctt

SEQ ID NO: 733204 - DNA, 15 bp, Homo sapiens
tgggcaggctccttc

SEQ ID NO: 733205 - DNA, 15 bp, Homo sapiens
gggcaggctccttcc

SEQ ID NO: 733206 - DNA, 15 bp, Homo sapiens
ggcaggctccttcct

SEQ ID NO: 733207 - DNA, 15 bp, Homo sapiens
gcaggctccttcctg

SEQ ID NO: 733208 - DNA, 15 bp, Homo sapiens
caggctccttcctgt

SEQ ID NO: 733209 - DNA, 15 bp, Homo sapiens
aggctccttcctgtg

SEQ ID NO: 733210 - DNA, 15 bp, Homo sapiens
ggctccttcctgtgc

SEQ ID NO: 733211 - DNA, 15 bp, Homo sapiens
gctccttcctgtgcc

SEQ ID NO: 733212 - DNA, 15 bp, Homo sapiens
ctccttcctgtgcct

SEQ ID NO: 733213 - DNA, 15 bp, Homo sapiens
tccttcctgtgcctg

SEQ ID NO: 733214 - DNA, 15 bp, Homo sapiens
ccttcctgtgcctgt

SEQ ID NO: 733215 - DNA, 15 bp, Homo sapiens
cttcctgtgcctgtg

SEQ ID NO: 733216 - DNA, 15 bp, Homo sapiens
ttcctgtgcctgtgt

SEQ ID NO: 733217 - DNA, 15 bp, Homo sapiens
tcctgtgcctgtgtc

SEQ ID NO: 733218 - DNA, 15 bp, Homo sapiens
cctgtgcctgtgtca

SEQ ID NO: 733219 - DNA, 15 bp, Homo sapiens
ctgtgcctgtgtcat

SEQ ID NO: 733220 - DNA, 15 bp, Homo sapiens
tgtgcctgtgtcatc

SEQ ID NO: 733221 - DNA, 15 bp, Homo sapiens
gtgcctgtgtcatcc

SEQ ID NO: 733222 - DNA, 15 bp, Homo sapiens
tgcctgtgtcatcct

SEQ ID NO: 733223 - DNA, 15 bp, Homo sapiens
gcctgtgtcatcctg

SEQ ID NO: 733224 - DNA, 15 bp, Homo sapiens
cctgtgtcatcctga

SEQ ID NO: 733225 - DNA, 15 bp, Homo sapiens
ctgtgtcatcctgac

SEQ ID NO: 733226 - DNA, 15 bp, Homo sapiens
tgtgtcatcctgaca

SEQ ID NO: 733227 - DNA, 15 bp, Homo sapiens
gtgtcatcctgacag

SEQ ID NO: 733228 - DNA, 15 bp, Homo sapiens
tgtcatcctgacagc

SEQ ID NO: 733229 - DNA, 15 bp, Homo sapiens
gtcatcctgacagcc

SEQ ID NO: 733230 - DNA, 15 bp, Homo sapiens
tcatcctgacagccg

SEQ ID NO: 733231 - DNA, 15 bp, Homo sapiens
catcctgacagccgt

SEQ ID NO: 733232 - DNA, 15 bp, Homo sapiens
atcctgacagccgta

SEQ ID NO: 733233 - DNA, 15 bp, Homo sapiens
tcctgacagccgtat

SEQ ID NO: 733234 - DNA, 15 bp, Homo sapiens
cctgacagccgtatt

SEQ ID NO: 733235 - DNA, 15 bp, Homo sapiens
ctgacagccgtattt

SEQ ID NO: 733236 - DNA, 15 bp, Homo sapiens
tgacagccgtattta

SEQ ID NO: 733237 - DNA, 15 bp, Homo sapiens
gacagccgtatttat

SEQ ID NO: 733238 - DNA, 15 bp, Homo sapiens
acagccgtatttatc

SEQ ID NO: 733239 - DNA, 15 bp, Homo sapiens
cagccgtatttatct

SEQ ID NO: 733240 - DNA, 15 bp, Homo sapiens
agccgtatttatctt

SEQ ID NO: 733241 - DNA, 15 bp, Homo sapiens
gccgtatttatcttt

SEQ ID NO: 733242 - DNA, 15 bp, Homo sapiens
ccgtatttatctttt

SEQ ID NO: 733243 - DNA, 15 bp, Homo sapiens
cgtatttatcttttt

SEQ ID NO: 733244 - DNA, 15 bp, Homo sapiens
gtatttatctttttt

SEQ ID NO: 733245 - DNA, 15 bp, Homo sapiens
tatttatcttttttt

SEQ ID NO: 733246 - DNA, 15 bp, Homo sapiens
atttatctttttttt

SEQ ID NO: 733247 - DNA, 15 bp, Homo sapiens
tttatcttttttttt

SEQ ID NO: 733248 - DNA, 15 bp, Homo sapiens
ttatctttttttttt

SEQ ID NO: 733249 - DNA, 15 bp, Homo sapiens
tatcttttttttttt

SEQ ID NO: 733250 - DNA, 15 bp, Homo sapiens
atctttttttttttg

SEQ ID NO: 733251 - DNA, 15 bp, Homo sapiens
tctttttttttttga

SEQ ID NO: 733252 - DNA, 15 bp, Homo sapiens
ctttttttttttgag

SEQ ID NO: 733253 - DNA, 15 bp, Homo sapiens
agtctcactctgtcg

SEQ ID NO: 733254 - DNA, 15 bp, Homo sapiens
gtctcactctgtcgc

SEQ ID NO: 733255 - DNA, 15 bp, Homo sapiens
tctcactctgtcgcc

SEQ ID NO: 733256 - DNA, 15 bp, Homo sapiens
ctcactctgtcgccc

SEQ ID NO: 733257 - DNA, 15 bp, Homo sapiens
tcactctgtcgccca

SEQ ID NO: 733258 - DNA, 15 bp, Homo sapiens
cactctgtcgcccag

SEQ ID NO: 733259 - DNA, 15 bp, Homo sapiens
actctgtcgcccagg

SEQ ID NO: 733260 - DNA, 15 bp, Homo sapiens
ctctgtcgcccaggc

SEQ ID NO: 733261 - DNA, 15 bp, Homo sapiens
tctgtcgcccaggct

SEQ ID NO: 733262 - DNA, 15 bp, Homo sapiens
ctgtcgcccaggcta

SEQ ID NO: 733263 - DNA, 15 bp, Homo sapiens
tgtcgcccaggctag

SEQ ID NO: 733264 - DNA, 15 bp, Homo sapiens
gtcgcccaggctaga

SEQ ID NO: 733265 - DNA, 15 bp, Homo sapiens
tcgcccaggctagag

SEQ ID NO: 733266 - DNA, 15 bp, Homo sapiens
cgcccaggctagagt

SEQ ID NO: 733267 - DNA, 15 bp, Homo sapiens
gcccaggctagagtg

SEQ ID NO: 733268 - DNA, 15 bp, Homo sapiens
cccaggctagagtgc

SEQ ID NO: 733269 - DNA, 15 bp, Homo sapiens
ccaggctagagtgca

SEQ ID NO: 733270 - DNA, 15 bp, Homo sapiens
caggctagagtgcag

SEQ ID NO: 733271 - DNA, 15 bp, Homo sapiens
aggctagagtgcagt

SEQ ID NO: 733272 - DNA, 15 bp, Homo sapiens
ggctagagtgcagtg

SEQ ID NO: 733273 - DNA, 15 bp, Homo sapiens
gctagagtgcagtgt

SEQ ID NO: 733274 - DNA, 15 bp, Homo sapiens
ctagagtgcagtgtg

SEQ ID NO: 733275 - DNA, 15 bp, Homo sapiens
tagagtgcagtgtgg

SEQ ID NO: 733276 - DNA, 15 bp, Homo sapiens
agagtgcagtgtggt

SEQ ID NO: 733277 - DNA, 15 bp, Homo sapiens
gagtgcagtgtggtg

SEQ ID NO: 733278 - DNA, 15 bp, Homo sapiens
agtgcagtgtggtga

SEQ ID NO: 733279 - DNA, 15 bp, Homo sapiens
gtgcagtgtggtgat

SEQ ID NO: 733280 - DNA, 15 bp, Homo sapiens
tgcagtgtggtgatc

SEQ ID NO: 733281 - DNA, 15 bp, Homo sapiens
gcagtgtggtgatct

SEQ ID NO: 733282 - DNA, 15 bp, Homo sapiens
cagtgtggtgatctc

SEQ ID NO: 733283 - DNA, 15 bp, Homo sapiens
agtgtggtgatctca

SEQ ID NO: 733284 - DNA, 15 bp, Homo sapiens
gtgtggtgatctcag

SEQ ID NO: 733285 - DNA, 15 bp, Homo sapiens
tgtggtgatctcagc

SEQ ID NO: 733286 - DNA, 15 bp, Homo sapiens
gtggtgatctcagct

SEQ ID NO: 733287 - DNA, 15 bp, Homo sapiens
tggtgatctcagctc

SEQ ID NO: 733288 - DNA, 15 bp, Homo sapiens
ggtgatctcagctca

SEQ ID NO: 733289 - DNA, 15 bp, Homo sapiens
gtgatctcagctcac

SEQ ID NO: 733290 - DNA, 15 bp, Homo sapiens
tgatctcagctcact

SEQ ID NO: 733291 - DNA, 15 bp, Homo sapiens
ctcagctcactgcac

SEQ ID NO: 733292 - DNA, 15 bp, Homo sapiens
tcagctcactgcacc

SEQ ID NO: 733293 - DNA, 15 bp, Homo sapiens
cagctcactgcaccc

SEQ ID NO: 733294 - DNA, 15 bp, Homo sapiens
agctcactgcaccct

SEQ ID NO: 733295 - DNA, 15 bp, Homo sapiens
gctcactgcaccctc

SEQ ID NO: 733296 - DNA, 15 bp, Homo sapiens
ctcactgcaccctcg

SEQ ID NO: 733297 - DNA, 15 bp, Homo sapiens
tcactgcaccctcgg

SEQ ID NO: 733298 - DNA, 15 bp, Homo sapiens
cactgcaccctcggc

SEQ ID NO: 733299 - DNA, 15 bp, Homo sapiens
actgcaccctcggcc

SEQ ID NO: 733300 - DNA, 15 bp, Homo sapiens
ctgcaccctcggcct

SEQ ID NO: 733301 - DNA, 15 bp, Homo sapiens
tgcaccctcggcctc

SEQ ID NO: 733302 - DNA, 15 bp, Homo sapiens
gcaccctcggcctcc

SEQ ID NO: 733303 - DNA, 15 bp, Homo sapiens
caccctcggcctcct

SEQ ID NO: 733304 - DNA, 15 bp, Homo sapiens
accctcggcctcctg

SEQ ID NO: 733305 - DNA, 15 bp, Homo sapiens
ccctcggcctcctgg

SEQ ID NO: 733306 - DNA, 15 bp, Homo sapiens
cctcggcctcctggg

SEQ ID NO: 733307 - DNA, 15 bp, Homo sapiens
ctcggcctcctgggt

SEQ ID NO: 733308 - DNA, 15 bp, Homo sapiens
tcggcctcctgggtt

SEQ ID NO: 733309 - DNA, 15 bp, Homo sapiens
cggcctcctgggttc

SEQ ID NO: 733310 - DNA, 15 bp, Homo sapiens
ggcctcctgggttca

SEQ ID NO: 733311 - DNA, 15 bp, Homo sapiens
gcctcctgggttcaa

SEQ ID NO: 733312 - DNA, 15 bp, Homo sapiens
cctcctgggttcaag

SEQ ID NO: 733313 - DNA, 15 bp, Homo sapiens
ctcctgggttcaagt

SEQ ID NO: 733314 - DNA, 15 bp, Homo sapiens
tcctgggttcaagtg

SEQ ID NO: 733315 - DNA, 15 bp, Homo sapiens
cctgggttcaagtga

SEQ ID NO: 733316 - DNA, 15 bp, Homo sapiens
ctgggttcaagtgat

SEQ ID NO: 733317 - DNA, 15 bp, Homo sapiens
tgggttcaagtgatt

SEQ ID NO: 733318 - DNA, 15 bp, Homo sapiens
gggttcaagtgattc

SEQ ID NO: 733319 - DNA, 15 bp, Homo sapiens
ggttcaagtgattct

SEQ ID NO: 733320 - DNA, 15 bp, Homo sapiens
gttcaagtgattctc

SEQ ID NO: 733321 - DNA, 15 bp, Homo sapiens
ttcaagtgattctcc

SEQ ID NO: 733322 - DNA, 15 bp, Homo sapiens
tcaagtgattctcct

SEQ ID NO: 733323 - DNA, 15 bp, Homo sapiens
caagtgattctcctg

SEQ ID NO: 733324 - DNA, 15 bp, Homo sapiens
aagtgattctcctgc

SEQ ID NO: 733325 - DNA, 15 bp, Homo sapiens
agtgattctcctgcc

SEQ ID NO: 733326 - DNA, 15 bp, Homo sapiens
gtgattctcctgcct

SEQ ID NO: 733327 - DNA, 15 bp, Homo sapiens
tgattctcctgcctc

SEQ ID NO: 733328 - DNA, 15 bp, Homo sapiens
ccaagtagctgggat

SEQ ID NO: 733329 - DNA, 15 bp, Homo sapiens
caagtagctgggatt

SEQ ID NO: 733330 - DNA, 15 bp, Homo sapiens
aagtagctgggatta

SEQ ID NO: 733331 - DNA, 15 bp, Homo sapiens
agtagctgggattac

SEQ ID NO: 733332 - DNA, 15 bp, Homo sapiens
gtagctgggattaca

SEQ ID NO: 733333 - DNA, 15 bp, Homo sapiens
tagctgggattacag

SEQ ID NO: 733334 - DNA, 15 bp, Homo sapiens
agctgggattacagg

SEQ ID NO: 733335 - DNA, 15 bp, Homo sapiens
gctgggattacagga

SEQ ID NO: 733336 - DNA, 15 bp, Homo sapiens
ctgggattacaggag

SEQ ID NO: 733337 - DNA, 15 bp, Homo sapiens
tgggattacaggagc

SEQ ID NO: 733338 - DNA, 15 bp, Homo sapiens
gggattacaggagca

SEQ ID NO: 733339 - DNA, 15 bp, Homo sapiens
ggattacaggagcat

SEQ ID NO: 733340 - DNA, 15 bp, Homo sapiens
gattacaggagcatg

SEQ ID NO: 733341 - DNA, 15 bp, Homo sapiens
attacaggagcatgc

SEQ ID NO: 733342 - DNA, 15 bp, Homo sapiens
ttacaggagcatgcc

SEQ ID NO: 733343 - DNA, 15 bp, Homo sapiens
tacaggagcatgcca

SEQ ID NO: 733344 - DNA, 15 bp, Homo sapiens
acaggagcatgccac

SEQ ID NO: 733345 - DNA, 15 bp, Homo sapiens
caggagcatgccacc

SEQ ID NO: 733346 - DNA, 15 bp, Homo sapiens
aggagcatgccacca

SEQ ID NO: 733347 - DNA, 15 bp, Homo sapiens
ggagcatgccaccac

SEQ ID NO: 733348 - DNA, 15 bp, Homo sapiens
gagcatgccaccacg

SEQ ID NO: 733349 - DNA, 15 bp, Homo sapiens
agcatgccaccacgc

SEQ ID NO: 733350 - DNA, 15 bp, Homo sapiens
gcatgccaccacgcc

SEQ ID NO: 733351 - DNA, 15 bp, Homo sapiens
catgccaccacgcct

SEQ ID NO: 733352 - DNA, 15 bp, Homo sapiens
atgccaccacgcctg

SEQ ID NO: 733353 - DNA, 15 bp, Homo sapiens
tgccaccacgcctgg

SEQ ID NO: 733354 - DNA, 15 bp, Homo sapiens
gccaccacgcctggc

SEQ ID NO: 733355 - DNA, 15 bp, Homo sapiens
ccaccacgcctggct

SEQ ID NO: 733356 - DNA, 15 bp, Homo sapiens
caccacgcctggcta

SEQ ID NO: 733357 - DNA, 15 bp, Homo sapiens
accacgcctggctaa

SEQ ID NO: 733358 - DNA, 15 bp, Homo sapiens
ccacgcctggctaat

SEQ ID NO: 733359 - DNA, 15 bp, Homo sapiens
cacgcctggctaatt

SEQ ID NO: 733360 - DNA, 15 bp, Homo sapiens
acgcctggctaattt

SEQ ID NO: 733361 - DNA, 15 bp, Homo sapiens
cgcctggctaatttt

SEQ ID NO: 733362 - DNA, 15 bp, Homo sapiens
gcctggctaattttt

SEQ ID NO: 733363 - DNA, 15 bp, Homo sapiens
cctggctaatttttt

SEQ ID NO: 733364 - DNA, 15 bp, Homo sapiens
ctggctaattttttt

SEQ ID NO: 733365 - DNA, 15 bp, Homo sapiens
tggctaatttttttg

SEQ ID NO: 733366 - DNA, 15 bp, Homo sapiens
ggctaatttttttgt

SEQ ID NO: 733367 - DNA, 15 bp, Homo sapiens
gctaatttttttgta

SEQ ID NO: 733368 - DNA, 15 bp, Homo sapiens
ctaatttttttgtat

SEQ ID NO: 733369 - DNA, 15 bp, Homo sapiens
taatttttttgtatt

SEQ ID NO: 733370 - DNA, 15 bp, Homo sapiens
aatttttttgtattt

SEQ ID NO: 733371 - DNA, 15 bp, Homo sapiens
atttttttgtatttt

SEQ ID NO: 733372 - DNA, 15 bp, Homo sapiens
tttttttgtattttt

SEQ ID NO: 733373 - DNA, 15 bp, Homo sapiens
ttttttgtattttta

SEQ ID NO: 733374 - DNA, 15 bp, Homo sapiens
tttttgtatttttag

SEQ ID NO: 733375 - DNA, 15 bp, Homo sapiens
ttttgtatttttagt

SEQ ID NO: 733376 - DNA, 15 bp, Homo sapiens
tttgtatttttagta

SEQ ID NO: 733377 - DNA, 15 bp, Homo sapiens
gtatttttagtagaa

SEQ ID NO: 733378 - DNA, 15 bp, Homo sapiens
tatttttagtagaaa

SEQ ID NO: 733379 - DNA, 15 bp, Homo sapiens
atttttagtagaaat

SEQ ID NO: 733380 - DNA, 15 bp, Homo sapiens
tttttagtagaaatg

SEQ ID NO: 733381 - DNA, 15 bp, Homo sapiens
ttttagtagaaatgg

SEQ ID NO: 733382 - DNA, 15 bp, Homo sapiens
tttagtagaaatgga

SEQ ID NO: 733383 - DNA, 15 bp, Homo sapiens
ttagtagaaatggag

SEQ ID NO: 733384 - DNA, 15 bp, Homo sapiens
tagtagaaatggagt

SEQ ID NO: 733385 - DNA, 15 bp, Homo sapiens
agtagaaatggagtt

SEQ ID NO: 733386 - DNA, 15 bp, Homo sapiens
gtagaaatggagttt

SEQ ID NO: 733387 - DNA, 15 bp, Homo sapiens
tagaaatggagtttc

SEQ ID NO: 733388 - DNA, 15 bp, Homo sapiens
agaaatggagtttca

SEQ ID NO: 733389 - DNA, 15 bp, Homo sapiens
gaaatggagtttcac

SEQ ID NO: 733390 - DNA, 15 bp, Homo sapiens
aaatggagtttcacc

SEQ ID NO: 733391 - DNA, 15 bp, Homo sapiens
aatggagtttcacca

SEQ ID NO: 733392 - DNA, 15 bp, Homo sapiens
atggagtttcaccat

SEQ ID NO: 733393 - DNA, 15 bp, Homo sapiens
tggagtttcaccatg

SEQ ID NO: 733394 - DNA, 15 bp, Homo sapiens
ggagtttcaccatgt

SEQ ID NO: 733395 - DNA, 15 bp, Homo sapiens
gagtttcaccatgtt

SEQ ID NO: 733396 - DNA, 15 bp, Homo sapiens
agtttcaccatgttg

SEQ ID NO: 733397 - DNA, 15 bp, Homo sapiens
ccatgttggccaggc

SEQ ID NO: 733398 - DNA, 15 bp, Homo sapiens
catgttggccaggct

SEQ ID NO: 733399 - DNA, 15 bp, Homo sapiens
atgttggccaggctg

SEQ ID NO: 733400 - DNA, 15 bp, Homo sapiens
tgttggccaggctgg

SEQ ID NO: 733401 - DNA, 15 bp, Homo sapiens
gttggccaggctggt

SEQ ID NO: 733402 - DNA, 15 bp, Homo sapiens
ttggccaggctggtc

SEQ ID NO: 733403 - DNA, 15 bp, Homo sapiens
tggccaggctggtct

SEQ ID NO: 733404 - DNA, 15 bp, Homo sapiens
ggccaggctggtctc

SEQ ID NO: 733405 - DNA, 15 bp, Homo sapiens
gccaggctggtctca

SEQ ID NO: 733406 - DNA, 15 bp, Homo sapiens
ccaggctggtctcaa

SEQ ID NO: 733407 - DNA, 15 bp, Homo sapiens
caggctggtctcaaa

SEQ ID NO: 733408 - DNA, 15 bp, Homo sapiens
aggctggtctcaaac

SEQ ID NO: 733409 - DNA, 15 bp, Homo sapiens
ggctggtctcaaact

SEQ ID NO: 733410 - DNA, 15 bp, Homo sapiens
gctggtctcaaactc

SEQ ID NO: 733411 - DNA, 15 bp, Homo sapiens
ctggtctcaaactcc

SEQ ID NO: 733412 - DNA, 15 bp, Homo sapiens
tggtctcaaactcct

SEQ ID NO: 733413 - DNA, 15 bp, Homo sapiens
ggtctcaaactcctg

SEQ ID NO: 733414 - DNA, 15 bp, Homo sapiens
gtctcaaactcctga

SEQ ID NO: 733415 - DNA, 15 bp, Homo sapiens
tctcaaactcctgac

SEQ ID NO: 733416 - DNA, 15 bp, Homo sapiens
ctcaaactcctgacc

SEQ ID NO: 733417 - DNA, 15 bp, Homo sapiens
tcaaactcctgacct

SEQ ID NO: 733418 - DNA, 15 bp, Homo sapiens
caaactcctgacctc

SEQ ID NO: 733419 - DNA, 15 bp, Homo sapiens
aaactcctgacctca

SEQ ID NO: 733420 - DNA, 15 bp, Homo sapiens
aactcctgacctcaa

SEQ ID NO: 733421 - DNA, 15 bp, Homo sapiens
actcctgacctcaag

SEQ ID NO: 733422 - DNA, 15 bp, Homo sapiens
ctcctgacctcaagt

SEQ ID NO: 733423 - DNA, 15 bp, Homo sapiens
tcctgacctcaagtg

SEQ ID NO: 733424 - DNA, 15 bp, Homo sapiens
cctgacctcaagtga

SEQ ID NO: 733425 - DNA, 15 bp, Homo sapiens
ctgacctcaagtgat

SEQ ID NO: 733426 - DNA, 15 bp, Homo sapiens
tgacctcaagtgatc

SEQ ID NO: 733427 - DNA, 15 bp, Homo sapiens
gacctcaagtgatct

SEQ ID NO: 733428 - DNA, 15 bp, Homo sapiens
acctcaagtgatctg

SEQ ID NO: 733429 - DNA, 15 bp, Homo sapiens
cctcaagtgatctgc

SEQ ID NO: 733430 - DNA, 15 bp, Homo sapiens
ctcaagtgatctgcc

SEQ ID NO: 733431 - DNA, 15 bp, Homo sapiens
tcaagtgatctgccc

SEQ ID NO: 733432 - DNA, 15 bp, Homo sapiens
caagtgatctgcccg

SEQ ID NO: 733433 - DNA, 15 bp, Homo sapiens
aagtgatctgcccgc

SEQ ID NO: 733434 - DNA, 15 bp, Homo sapiens
agtgatctgcccgcc

SEQ ID NO: 733435 - DNA, 15 bp, Homo sapiens
gtgatctgcccgcct

SEQ ID NO: 733436 - DNA, 15 bp, Homo sapiens
tgatctgcccgcctt

SEQ ID NO: 733437 - DNA, 15 bp, Homo sapiens
gatctgcccgccttg

SEQ ID NO: 733438 - DNA, 15 bp, Homo sapiens
atctgcccgccttgg

SEQ ID NO: 733439 - DNA, 15 bp, Homo sapiens
tctgcccgccttggc

SEQ ID NO: 733440 - DNA, 15 bp, Homo sapiens
ctgcccgccttggcc

SEQ ID NO: 733441 - DNA, 15 bp, Homo sapiens
tgcccgccttggcct

SEQ ID NO: 733442 - DNA, 15 bp, Homo sapiens
gcccgccttggcctc

SEQ ID NO: 733443 - DNA, 15 bp, Homo sapiens
cccgccttggcctcc

SEQ ID NO: 733444 - DNA, 15 bp, Homo sapiens
ccgccttggcctccc

SEQ ID NO: 733445 - DNA, 15 bp, Homo sapiens
cgccttggcctccca

SEQ ID NO: 733446 - DNA, 15 bp, Homo sapiens
gccttggcctcccaa

SEQ ID NO: 733447 - DNA, 15 bp, Homo sapiens
ccttggcctcccaaa

SEQ ID NO: 733448 - DNA, 15 bp, Homo sapiens
cttggcctcccaaag

SEQ ID NO: 733449 - DNA, 15 bp, Homo sapiens
ttggcctcccaaagt

SEQ ID NO: 733450 - DNA, 15 bp, Homo sapiens
tggcctcccaaagtc

SEQ ID NO: 733451 - DNA, 15 bp, Homo sapiens
ggcctcccaaagtcc

SEQ ID NO: 733452 - DNA, 15 bp, Homo sapiens
gcctcccaaagtcct

SEQ ID NO: 733453 - DNA, 15 bp, Homo sapiens
cctcccaaagtcctg

SEQ ID NO: 733454 - DNA, 15 bp, Homo sapiens
ctcccaaagtcctgg

SEQ ID NO: 733455 - DNA, 15 bp, Homo sapiens
tcccaaagtcctggg

SEQ ID NO: 733456 - DNA, 15 bp, Homo sapiens
cccaaagtcctggga

SEQ ID NO: 733457 - DNA, 15 bp, Homo sapiens
ccaaagtcctgggat

SEQ ID NO: 733458 - DNA, 15 bp, Homo sapiens
caaagtcctgggatt

SEQ ID NO: 733459 - DNA, 15 bp, Homo sapiens
aaagtcctgggatta

SEQ ID NO: 733460 - DNA, 15 bp, Homo sapiens
aagtcctgggattac

SEQ ID NO: 733461 - DNA, 15 bp, Homo sapiens
agtcctgggattaca

SEQ ID NO: 733462 - DNA, 15 bp, Homo sapiens
gtcctgggattacag

SEQ ID NO: 733463 - DNA, 15 bp, Homo sapiens
tcctgggattacagg

SEQ ID NO: 733464 - DNA, 15 bp, Homo sapiens
cctgggattacaggc

SEQ ID NO: 733465 - DNA, 15 bp, Homo sapiens
caggcgtgagccact

SEQ ID NO: 733466 - DNA, 15 bp, Homo sapiens
aggcgtgagccactg

SEQ ID NO: 733467 - DNA, 15 bp, Homo sapiens
ggcgtgagccactgc

SEQ ID NO: 733468 - DNA, 15 bp, Homo sapiens
gcgtgagccactgcg

SEQ ID NO: 733469 - DNA, 15 bp, Homo sapiens
cgtgagccactgcgc

SEQ ID NO: 733470 - DNA, 15 bp, Homo sapiens
gtgagccactgcgcc

SEQ ID NO: 733471 - DNA, 15 bp, Homo sapiens
tgagccactgcgccc

SEQ ID NO: 733472 - DNA, 15 bp, Homo sapiens
gagccactgcgcccg

SEQ ID NO: 733473 - DNA, 15 bp, Homo sapiens
agccactgcgcccgg

SEQ ID NO: 733474 - DNA, 15 bp, Homo sapiens
gccactgcgcccggc

SEQ ID NO: 733475 - DNA, 15 bp, Homo sapiens
ccactgcgcccggcc

SEQ ID NO: 733476 - DNA, 15 bp, Homo sapiens
cactgcgcccggccc

SEQ ID NO: 733477 - DNA, 15 bp, Homo sapiens
actgcgcccggccct

SEQ ID NO: 733478 - DNA, 15 bp, Homo sapiens
ctgcgcccggccctg

SEQ ID NO: 733479 - DNA, 15 bp, Homo sapiens
tgcgcccggccctga

SEQ ID NO: 733480 - DNA, 15 bp, Homo sapiens
gcgcccggccctgac

SEQ ID NO: 733481 - DNA, 15 bp, Homo sapiens
cgcccggccctgaca

SEQ ID NO: 733482 - DNA, 15 bp, Homo sapiens
gcccggccctgacag

SEQ ID NO: 733483 - DNA, 15 bp, Homo sapiens
cccggccctgacagc

SEQ ID NO: 733484 - DNA, 15 bp, Homo sapiens
ccggccctgacagca

SEQ ID NO: 733485 - DNA, 15 bp, Homo sapiens
cggccctgacagcag

SEQ ID NO: 733486 - DNA, 15 bp, Homo sapiens
ggccctgacagcagt

SEQ ID NO: 733487 - DNA, 15 bp, Homo sapiens
gccctgacagcagta

SEQ ID NO: 733488 - DNA, 15 bp, Homo sapiens
ccctgacagcagtat

SEQ ID NO: 733489 - DNA, 15 bp, Homo sapiens
cctgacagcagtatt

SEQ ID NO: 733490 - DNA, 15 bp, Homo sapiens
ctgacagcagtattt

SEQ ID NO: 733491 - DNA, 15 bp, Homo sapiens
tgacagcagtattta

SEQ ID NO: 733492 - DNA, 15 bp, Homo sapiens
gacagcagtatttat

SEQ ID NO: 733493 - DNA, 15 bp, Homo sapiens
acagcagtatttatt

SEQ ID NO: 733494 - DNA, 15 bp, Homo sapiens
cagcagtatttatta

SEQ ID NO: 733495 - DNA, 15 bp, Homo sapiens
agcagtatttattag

SEQ ID NO: 733496 - DNA, 15 bp, Homo sapiens
gcagtatttattagg

SEQ ID NO: 733497 - DNA, 15 bp, Homo sapiens
cagtatttattaggc

SEQ ID NO: 733498 - DNA, 15 bp, Homo sapiens
agtatttattaggct

SEQ ID NO: 733499 - DNA, 15 bp, Homo sapiens
gtatttattaggctg

SEQ ID NO: 733500 - DNA, 15 bp, Homo sapiens
tatttattaggctgt

SEQ ID NO: 733501 - DNA, 15 bp, Homo sapiens
atttattaggctgtc

SEQ ID NO: 733502 - DNA, 15 bp, Homo sapiens
tttattaggctgtcc

SEQ ID NO: 733503 - DNA, 15 bp, Homo sapiens
ttattaggctgtcca

SEQ ID NO: 733504 - DNA, 15 bp, Homo sapiens
tattaggctgtccat

SEQ ID NO: 733505 - DNA, 15 bp, Homo sapiens
attaggctgtccatc

SEQ ID NO: 733506 - DNA, 15 bp, Homo sapiens
ttaggctgtccatcc

SEQ ID NO: 733507 - DNA, 15 bp, Homo sapiens
taggctgtccatccc

SEQ ID NO: 733508 - DNA, 15 bp, Homo sapiens
aggctgtccatccca

SEQ ID NO: 733509 - DNA, 15 bp, Homo sapiens
ggctgtccatcccag

SEQ ID NO: 733510 - DNA, 15 bp, Homo sapiens
gctgtccatcccagg

SEQ ID NO: 733511 - DNA, 15 bp, Homo sapiens
ctgtccatcccaggt

SEQ ID NO: 733512 - DNA, 15 bp, Homo sapiens
tgtccatcccaggtt

SEQ ID NO: 733513 - DNA, 15 bp, Homo sapiens
gtccatcccaggtta

SEQ ID NO: 733514 - DNA, 15 bp, Homo sapiens
tccatcccaggttag

SEQ ID NO: 733515 - DNA, 15 bp, Homo sapiens
ccatcccaggttagg

SEQ ID NO: 733516 - DNA, 15 bp, Homo sapiens
catcccaggttagga

SEQ ID NO: 733517 - DNA, 15 bp, Homo sapiens
atcccaggttaggac

SEQ ID NO: 733518 - DNA, 15 bp, Homo sapiens
tcccaggttaggact

SEQ ID NO: 733519 - DNA, 15 bp, Homo sapiens
cccaggttaggactt

SEQ ID NO: 733520 - DNA, 15 bp, Homo sapiens
ccaggttaggacttg

SEQ ID NO: 733521 - DNA, 15 bp, Homo sapiens
caggttaggacttgc

SEQ ID NO: 733522 - DNA, 15 bp, Homo sapiens
aggttaggacttgca

SEQ ID NO: 733523 - DNA, 15 bp, Homo sapiens
ggttaggacttgcac

SEQ ID NO: 733524 - DNA, 15 bp, Homo sapiens
gttaggacttgcacc

SEQ ID NO: 733525 - DNA, 15 bp, Homo sapiens
ttaggacttgcacct

SEQ ID NO: 733526 - DNA, 15 bp, Homo sapiens
taggacttgcacctg

SEQ ID NO: 733527 - DNA, 15 bp, Homo sapiens
aggacttgcacctga

SEQ ID NO: 733528 - DNA, 15 bp, Homo sapiens
ggacttgcacctgac

SEQ ID NO: 733529 - DNA, 15 bp, Homo sapiens
gacttgcacctgact

SEQ ID NO: 733530 - DNA, 15 bp, Homo sapiens
acttgcacctgactg

SEQ ID NO: 733531 - DNA, 15 bp, Homo sapiens
cttgcacctgactga

SEQ ID NO: 733532 - DNA, 15 bp, Homo sapiens
ttgcacctgactgat

SEQ ID NO: 733533 - DNA, 15 bp, Homo sapiens
tgcacctgactgata

SEQ ID NO: 733534 - DNA, 15 bp, Homo sapiens
gcacctgactgatat

SEQ ID NO: 733535 - DNA, 15 bp, Homo sapiens
cacctgactgatatc

SEQ ID NO: 733536 - DNA, 15 bp, Homo sapiens
acctgactgatatct

SEQ ID NO: 733537 - DNA, 15 bp, Homo sapiens
cctgactgatatctg

SEQ ID NO: 733538 - DNA, 15 bp, Homo sapiens
ctgactgatatctgg

SEQ ID NO: 733539 - DNA, 15 bp, Homo sapiens
tgactgatatctgga

SEQ ID NO: 733540 - DNA, 15 bp, Homo sapiens
gactgatatctggaa

SEQ ID NO: 733541 - DNA, 15 bp, Homo sapiens
actgatatctggaat

SEQ ID NO: 733542 - DNA, 15 bp, Homo sapiens
ctgatatctggaatg

SEQ ID NO: 733543 - DNA, 15 bp, Homo sapiens
tgatatctggaatga

SEQ ID NO: 733544 - DNA, 15 bp, Homo sapiens
gatatctggaatgac

SEQ ID NO: 733545 - DNA, 15 bp, Homo sapiens
atatctggaatgact

SEQ ID NO: 733546 - DNA, 15 bp, Homo sapiens
tatctggaatgactt

SEQ ID NO: 733547 - DNA, 15 bp, Homo sapiens
atctggaatgacttt

SEQ ID NO: 733548 - DNA, 15 bp, Homo sapiens
tctggaatgactttt

SEQ ID NO: 733549 - DNA, 15 bp, Homo sapiens
ctggaatgacttttg

SEQ ID NO: 733550 - DNA, 15 bp, Homo sapiens
tggaatgacttttga

SEQ ID NO: 733551 - DNA, 15 bp, Homo sapiens
ggaatgacttttgat

SEQ ID NO: 733552 - DNA, 15 bp, Homo sapiens
gaatgacttttgatt

SEQ ID NO: 733553 - DNA, 15 bp, Homo sapiens
aatgacttttgatta

SEQ ID NO: 733554 - DNA, 15 bp, Homo sapiens
atgacttttgattag

SEQ ID NO: 733555 - DNA, 15 bp, Homo sapiens
tgacttttgattagg

SEQ ID NO: 733556 - DNA, 15 bp, Homo sapiens
gacttttgattagga

SEQ ID NO: 733557 - DNA, 15 bp, Homo sapiens
acttttgattaggat

SEQ ID NO: 733558 - DNA, 15 bp, Homo sapiens
cttttgattaggatg

SEQ ID NO: 733559 - DNA, 15 bp, Homo sapiens
ttttgattaggatgg

SEQ ID NO: 733560 - DNA, 15 bp, Homo sapiens
tttgattaggatggg

SEQ ID NO: 733561 - DNA, 15 bp, Homo sapiens
ttgattaggatgggc

SEQ ID NO: 733562 - DNA, 15 bp, Homo sapiens
tgattaggatgggca

SEQ ID NO: 733563 - DNA, 15 bp, Homo sapiens
gattaggatgggcat

SEQ ID NO: 733564 - DNA, 15 bp, Homo sapiens
attaggatgggcatg

SEQ ID NO: 733565 - DNA, 15 bp, Homo sapiens
ttaggatgggcatgt

SEQ ID NO: 733566 - DNA, 15 bp, Homo sapiens
taggatgggcatgtt

SEQ ID NO: 733567 - DNA, 15 bp, Homo sapiens
aggatgggcatgttt

SEQ ID NO: 733568 - DNA, 15 bp, Homo sapiens
ggatgggcatgtttc

SEQ ID NO: 733569 - DNA, 15 bp, Homo sapiens
gatgggcatgtttcc

SEQ ID NO: 733570 - DNA, 15 bp, Homo sapiens
atgggcatgtttcct

SEQ ID NO: 733571 - DNA, 15 bp, Homo sapiens
tgggcatgtttcctc

SEQ ID NO: 733572 - DNA, 15 bp, Homo sapiens
gggcatgtttcctcg

SEQ ID NO: 733573 - DNA, 15 bp, Homo sapiens
ggcatgtttcctcgc

SEQ ID NO: 733574 - DNA, 15 bp, Homo sapiens
gcatgtttcctcgct

SEQ ID NO: 733575 - DNA, 15 bp, Homo sapiens
catgtttcctcgctg

SEQ ID NO: 733576 - DNA, 15 bp, Homo sapiens
atgtttcctcgctga

SEQ ID NO: 733577 - DNA, 15 bp, Homo sapiens
tgtttcctcgctgac

SEQ ID NO: 733578 - DNA, 15 bp, Homo sapiens
gtttcctcgctgact

SEQ ID NO: 733579 - DNA, 15 bp, Homo sapiens
tttcctcgctgactc

SEQ ID NO: 733580 - DNA, 15 bp, Homo sapiens
ttcctcgctgactct

SEQ ID NO: 733581 - DNA, 15 bp, Homo sapiens
tcctcgctgactctg

SEQ ID NO: 733582 - DNA, 15 bp, Homo sapiens
cctcgctgactctgg

SEQ ID NO: 733583 - DNA, 15 bp, Homo sapiens
ctcgctgactctggc

SEQ ID NO: 733584 - DNA, 15 bp, Homo sapiens
tcgctgactctggcc

SEQ ID NO: 733585 - DNA, 15 bp, Homo sapiens
cgctgactctggcca

SEQ ID NO: 733586 - DNA, 15 bp, Homo sapiens
gctgactctggccag

SEQ ID NO: 733587 - DNA, 15 bp, Homo sapiens
ctgactctggccagg

SEQ ID NO: 733588 - DNA, 15 bp, Homo sapiens
tgactctggccaggc

SEQ ID NO: 733589 - DNA, 15 bp, Homo sapiens
gactctggccaggct

SEQ ID NO: 733590 - DNA, 15 bp, Homo sapiens
actctggccaggctc

SEQ ID NO: 733591 - DNA, 15 bp, Homo sapiens
ctctggccaggctca

SEQ ID NO: 733592 - DNA, 15 bp, Homo sapiens
tctggccaggctcat

SEQ ID NO: 733593 - DNA, 15 bp, Homo sapiens
ctggccaggctcatg

SEQ ID NO: 733594 - DNA, 15 bp, Homo sapiens
tggccaggctcatga

SEQ ID NO: 733595 - DNA, 15 bp, Homo sapiens
ggccaggctcatgac

SEQ ID NO: 733596 - DNA, 15 bp, Homo sapiens
gccaggctcatgacg

SEQ ID NO: 733597 - DNA, 15 bp, Homo sapiens
ccaggctcatgacga

SEQ ID NO: 733598 - DNA, 15 bp, Homo sapiens
caggctcatgacgaa

SEQ ID NO: 733599 - DNA, 15 bp, Homo sapiens
aggctcatgacgaag

SEQ ID NO: 733600 - DNA, 15 bp, Homo sapiens
ggctcatgacgaagc

SEQ ID NO: 733601 - DNA, 15 bp, Homo sapiens
gctcatgacgaagca

SEQ ID NO: 733602 - DNA, 15 bp, Homo sapiens
ctcatgacgaagcag

SEQ ID NO: 733603 - DNA, 15 bp, Homo sapiens
tcatgacgaagcagc

SEQ ID NO: 733604 - DNA, 15 bp, Homo sapiens
catgacgaagcagcc

SEQ ID NO: 733605 - DNA, 15 bp, Homo sapiens
atgacgaagcagcct

SEQ ID NO: 733606 - DNA, 15 bp, Homo sapiens
tgacgaagcagcctc

SEQ ID NO: 733607 - DNA, 15 bp, Homo sapiens
gacgaagcagcctcc

SEQ ID NO: 733608 - DNA, 15 bp, Homo sapiens
acgaagcagcctcca

SEQ ID NO: 733609 - DNA, 15 bp, Homo sapiens
cgaagcagcctccac

SEQ ID NO: 733610 - DNA, 15 bp, Homo sapiens
gaagcagcctccacc

SEQ ID NO: 733611 - DNA, 15 bp, Homo sapiens
aagcagcctccaccc

SEQ ID NO: 733612 - DNA, 15 bp, Homo sapiens
agcagcctccaccct

SEQ ID NO: 733613 - DNA, 15 bp, Homo sapiens
gcagcctccaccctt

SEQ ID NO: 733614 - DNA, 15 bp, Homo sapiens
cagcctccacccttg

SEQ ID NO: 733615 - DNA, 15 bp, Homo sapiens
agcctccacccttgc

SEQ ID NO: 733616 - DNA, 15 bp, Homo sapiens
gcctccacccttgct

SEQ ID NO: 733617 - DNA, 15 bp, Homo sapiens
cctccacccttgctg

SEQ ID NO: 733618 - DNA, 15 bp, Homo sapiens
ctccacccttgctgt

SEQ ID NO: 733619 - DNA, 15 bp, Homo sapiens
tccacccttgctgtc

SEQ ID NO: 733620 - DNA, 15 bp, Homo sapiens
ccacccttgctgtct

SEQ ID NO: 733621 - DNA, 15 bp, Homo sapiens
cacccttgctgtctg

SEQ ID NO: 733622 - DNA, 15 bp, Homo sapiens
acccttgctgtctgg

SEQ ID NO: 733623 - DNA, 15 bp, Homo sapiens
cccttgctgtctggg

SEQ ID NO: 733624 - DNA, 15 bp, Homo sapiens
ccttgctgtctggga

SEQ ID NO: 733625 - DNA, 15 bp, Homo sapiens
cttgctgtctgggat

SEQ ID NO: 733626 - DNA, 15 bp, Homo sapiens
ttgctgtctgggatg

SEQ ID NO: 733627 - DNA, 15 bp, Homo sapiens
tgctgtctgggatga

SEQ ID NO: 733628 - DNA, 15 bp, Homo sapiens
gctgtctgggatgag

SEQ ID NO: 733629 - DNA, 15 bp, Homo sapiens
ctgtctgggatgaga

SEQ ID NO: 733630 - DNA, 15 bp, Homo sapiens
tgtctgggatgagac

SEQ ID NO: 733631 - DNA, 15 bp, Homo sapiens
gtctgggatgagaca

SEQ ID NO: 733632 - DNA, 15 bp, Homo sapiens
tctgggatgagacat

SEQ ID NO: 733633 - DNA, 15 bp, Homo sapiens
ctgggatgagacatt

SEQ ID NO: 733634 - DNA, 15 bp, Homo sapiens
tgggatgagacattg

SEQ ID NO: 733635 - DNA, 15 bp, Homo sapiens
gggatgagacattgg

SEQ ID NO: 733636 - DNA, 15 bp, Homo sapiens
ggatgagacattggc

SEQ ID NO: 733637 - DNA, 15 bp, Homo sapiens
gatgagacattggcc

SEQ ID NO: 733638 - DNA, 15 bp, Homo sapiens
atgagacattggcct

SEQ ID NO: 733639 - DNA, 15 bp, Homo sapiens
tgagacattggcctc

SEQ ID NO: 733640 - DNA, 15 bp, Homo sapiens
gagacattggcctct

SEQ ID NO: 733641 - DNA, 15 bp, Homo sapiens
agacattggcctctg

SEQ ID NO: 733642 - DNA, 15 bp, Homo sapiens
gacattggcctctgt

SEQ ID NO: 733643 - DNA, 15 bp, Homo sapiens
acattggcctctgtt

SEQ ID NO: 733644 - DNA, 15 bp, Homo sapiens
cattggcctctgttg

SEQ ID NO: 733645 - DNA, 15 bp, Homo sapiens
attggcctctgttgt

SEQ ID NO: 733646 - DNA, 15 bp, Homo sapiens
ttggcctctgttgtt

SEQ ID NO: 733647 - DNA, 15 bp, Homo sapiens
tggcctctgttgtta

SEQ ID NO: 733648 - DNA, 15 bp, Homo sapiens
ggcctctgttgttac

SEQ ID NO: 733649 - DNA, 15 bp, Homo sapiens
gcctctgttgttacc

SEQ ID NO: 733650 - DNA, 15 bp, Homo sapiens
cctctgttgttacca

SEQ ID NO: 733651 - DNA, 15 bp, Homo sapiens
ctctgttgttaccag

SEQ ID NO: 733652 - DNA, 15 bp, Homo sapiens
tctgttgttaccagc

SEQ ID NO: 733653 - DNA, 15 bp, Homo sapiens
ctgttgttaccagcc

SEQ ID NO: 733654 - DNA, 15 bp, Homo sapiens
tgttgttaccagcct

SEQ ID NO: 733655 - DNA, 15 bp, Homo sapiens
gttgttaccagcctc

SEQ ID NO: 733656 - DNA, 15 bp, Homo sapiens
ttgttaccagcctct

SEQ ID NO: 733657 - DNA, 15 bp, Homo sapiens
tgttaccagcctctt

SEQ ID NO: 733658 - DNA, 15 bp, Homo sapiens
gttaccagcctcttc

SEQ ID NO: 733659 - DNA, 15 bp, Homo sapiens
ttaccagcctcttcc

SEQ ID NO: 733660 - DNA, 15 bp, Homo sapiens
taccagcctcttcct

SEQ ID NO: 733661 - DNA, 15 bp, Homo sapiens
accagcctcttcctg

SEQ ID NO: 733662 - DNA, 15 bp, Homo sapiens
ccagcctcttcctgt

SEQ ID NO: 733663 - DNA, 15 bp, Homo sapiens
cagcctcttcctgta

SEQ ID NO: 733664 - DNA, 15 bp, Homo sapiens
agcctcttcctgtag

SEQ ID NO: 733665 - DNA, 15 bp, Homo sapiens
gcctcttcctgtagc

SEQ ID NO: 733666 - DNA, 15 bp, Homo sapiens
cctcttcctgtagca

SEQ ID NO: 733667 - DNA, 15 bp, Homo sapiens
ctcttcctgtagcaa

SEQ ID NO: 733668 - DNA, 15 bp, Homo sapiens
tcttcctgtagcaac

SEQ ID NO: 733669 - DNA, 15 bp, Homo sapiens
cttcctgtagcaact

SEQ ID NO: 733670 - DNA, 15 bp, Homo sapiens
ttcctgtagcaactg

SEQ ID NO: 733671 - DNA, 15 bp, Homo sapiens
tcctgtagcaactgc

SEQ ID NO: 733672 - DNA, 15 bp, Homo sapiens
cctgtagcaactgcc

SEQ ID NO: 733673 - DNA, 15 bp, Homo sapiens
ctgtagcaactgcct

SEQ ID NO: 733674 - DNA, 15 bp, Homo sapiens
tgtagcaactgcctc

SEQ ID NO: 733675 - DNA, 15 bp, Homo sapiens
gtagcaactgcctca

SEQ ID NO: 733676 - DNA, 15 bp, Homo sapiens
tagcaactgcctcac

SEQ ID NO: 733677 - DNA, 15 bp, Homo sapiens
agcaactgcctcaca

SEQ ID NO: 733678 - DNA, 15 bp, Homo sapiens
gcaactgcctcacag

SEQ ID NO: 733679 - DNA, 15 bp, Homo sapiens
caactgcctcacaga

SEQ ID NO: 733680 - DNA, 15 bp, Homo sapiens
aactgcctcacagag

SEQ ID NO: 733681 - DNA, 15 bp, Homo sapiens
actgcctcacagaga

SEQ ID NO: 733682 - DNA, 15 bp, Homo sapiens
ctgcctcacagagag

SEQ ID NO: 733683 - DNA, 15 bp, Homo sapiens
tgcctcacagagaga

SEQ ID NO: 733684 - DNA, 15 bp, Homo sapiens
gcctcacagagagag

SEQ ID NO: 733685 - DNA, 15 bp, Homo sapiens
cctcacagagagaga

SEQ ID NO: 733686 - DNA, 15 bp, Homo sapiens
ctcacagagagagaa

SEQ ID NO: 733687 - DNA, 15 bp, Homo sapiens
tcacagagagagaag

SEQ ID NO: 733688 - DNA, 15 bp, Homo sapiens
cacagagagagaagc

SEQ ID NO: 733689 - DNA, 15 bp, Homo sapiens
acagagagagaagct

SEQ ID NO: 733690 - DNA, 15 bp, Homo sapiens
cagagagagaagctg

SEQ ID NO: 733691 - DNA, 15 bp, Homo sapiens
agagagagaagctgt

SEQ ID NO: 733692 - DNA, 15 bp, Homo sapiens
gagagagaagctgtc

SEQ ID NO: 733693 - DNA, 15 bp, Homo sapiens
agagagaagctgtct

SEQ ID NO: 733694 - DNA, 15 bp, Homo sapiens
gagagaagctgtcta

SEQ ID NO: 733695 - DNA, 15 bp, Homo sapiens
agagaagctgtctat

SEQ ID NO: 733696 - DNA, 15 bp, Homo sapiens
gagaagctgtctata

SEQ ID NO: 733697 - DNA, 15 bp, Homo sapiens
agaagctgtctatag

SEQ ID NO: 733698 - DNA, 15 bp, Homo sapiens
gaagctgtctatagc

SEQ ID NO: 733699 - DNA, 15 bp, Homo sapiens
aagctgtctatagca

SEQ ID NO: 733700 - DNA, 15 bp, Homo sapiens
agctgtctatagcat

SEQ ID NO: 733701 - DNA, 15 bp, Homo sapiens
gctgtctatagcatc

SEQ ID NO: 733702 - DNA, 15 bp, Homo sapiens
ctgtctatagcatca

SEQ ID NO: 733703 - DNA, 15 bp, Homo sapiens
tgtctatagcatcat

SEQ ID NO: 733704 - DNA, 15 bp, Homo sapiens
gtctatagcatcatt

SEQ ID NO: 733705 - DNA, 15 bp, Homo sapiens
tctatagcatcattt

SEQ ID NO: 733706 - DNA, 15 bp, Homo sapiens
ctatagcatcatttc

SEQ ID NO: 733707 - DNA, 15 bp, Homo sapiens
tatagcatcatttcc

SEQ ID NO: 733708 - DNA, 15 bp, Homo sapiens
atagcatcatttcca

SEQ ID NO: 733709 - DNA, 15 bp, Homo sapiens
tagcatcatttccac

SEQ ID NO: 733710 - DNA, 15 bp, Homo sapiens
agcatcatttccacg

SEQ ID NO: 733711 - DNA, 15 bp, Homo sapiens
gcatcatttccacgt

SEQ ID NO: 733712 - DNA, 15 bp, Homo sapiens
catcatttccacgtg

SEQ ID NO: 733713 - DNA, 15 bp, Homo sapiens
atcatttccacgtgg

SEQ ID NO: 733714 - DNA, 15 bp, Homo sapiens
tcatttccacgtggg

SEQ ID NO: 733715 - DNA, 15 bp, Homo sapiens
catttccacgtggga

SEQ ID NO: 733716 - DNA, 15 bp, Homo sapiens
atttccacgtgggac

SEQ ID NO: 733717 - DNA, 15 bp, Homo sapiens
tttccacgtgggacc

SEQ ID NO: 733718 - DNA, 15 bp, Homo sapiens
ttccacgtgggacct

SEQ ID NO: 733719 - DNA, 15 bp, Homo sapiens
tccacgtgggacctt

SEQ ID NO: 733720 - DNA, 15 bp, Homo sapiens
ccacgtgggaccttg

SEQ ID NO: 733721 - DNA, 15 bp, Homo sapiens
cacgtgggaccttgc

SEQ ID NO: 733722 - DNA, 15 bp, Homo sapiens
acgtgggaccttgcc

SEQ ID NO: 733723 - DNA, 15 bp, Homo sapiens
cgtgggaccttgcca

SEQ ID NO: 733724 - DNA, 15 bp, Homo sapiens
gtgggaccttgccaa

SEQ ID NO: 733725 - DNA, 15 bp, Homo sapiens
tgggaccttgccaac

SEQ ID NO: 733726 - DNA, 15 bp, Homo sapiens
gggaccttgccaact

SEQ ID NO: 733727 - DNA, 15 bp, Homo sapiens
ggaccttgccaactt

SEQ ID NO: 733728 - DNA, 15 bp, Homo sapiens
gaccttgccaacttg

SEQ ID NO: 733729 - DNA, 15 bp, Homo sapiens
accttgccaacttgt

SEQ ID NO: 733730 - DNA, 15 bp, Homo sapiens
ccttgccaacttgtc

SEQ ID NO: 733731 - DNA, 15 bp, Homo sapiens
cttgccaacttgtcc

SEQ ID NO: 733732 - DNA, 15 bp, Homo sapiens
ttgccaacttgtcct

SEQ ID NO: 733733 - DNA, 15 bp, Homo sapiens
tgccaacttgtcctt

SEQ ID NO: 733734 - DNA, 15 bp, Homo sapiens
gccaacttgtccttt

SEQ ID NO: 733735 - DNA, 15 bp, Homo sapiens
ccaacttgtcctttt

SEQ ID NO: 733736 - DNA, 15 bp, Homo sapiens
caacttgtccttttc

SEQ ID NO: 733737 - DNA, 15 bp, Homo sapiens
aacttgtccttttct

SEQ ID NO: 733738 - DNA, 15 bp, Homo sapiens
acttgtccttttcta

SEQ ID NO: 733739 - DNA, 15 bp, Homo sapiens
cttgtccttttctac

SEQ ID NO: 733740 - DNA, 15 bp, Homo sapiens
ttgtccttttctaca

SEQ ID NO: 733741 - DNA, 15 bp, Homo sapiens
tgtccttttctacaa

SEQ ID NO: 733742 - DNA, 15 bp, Homo sapiens
gtccttttctacaag

SEQ ID NO: 733743 - DNA, 15 bp, Homo sapiens
tccttttctacaagg

SEQ ID NO: 733744 - DNA, 15 bp, Homo sapiens
ccttttctacaagga

SEQ ID NO: 733745 - DNA, 15 bp, Homo sapiens
cttttctacaaggac

SEQ ID NO: 733746 - DNA, 15 bp, Homo sapiens
ttttctacaaggaca

SEQ ID NO: 733747 - DNA, 15 bp, Homo sapiens
tttctacaaggacat

SEQ ID NO: 733748 - DNA, 15 bp, Homo sapiens
ttctacaaggacatc

SEQ ID NO: 733749 - DNA, 15 bp, Homo sapiens
tctacaaggacatca

SEQ ID NO: 733750 - DNA, 15 bp, Homo sapiens
ctacaaggacatcag

SEQ ID NO: 733751 - DNA, 15 bp, Homo sapiens
tacaaggacatcaga

SEQ ID NO: 733752 - DNA, 15 bp, Homo sapiens
acaaggacatcagaa

SEQ ID NO: 733753 - DNA, 15 bp, Homo sapiens
caaggacatcagaac

SEQ ID NO: 733754 - DNA, 15 bp, Homo sapiens
aaggacatcagaaca

SEQ ID NO: 733755 - DNA, 15 bp, Homo sapiens
aggacatcagaacaa

SEQ ID NO: 733756 - DNA, 15 bp, Homo sapiens
ggacatcagaacaac

SEQ ID NO: 733757 - DNA, 15 bp, Homo sapiens
gacatcagaacaacg

SEQ ID NO: 733758 - DNA, 15 bp, Homo sapiens
acatcagaacaacga

SEQ ID NO: 733759 - DNA, 15 bp, Homo sapiens
catcagaacaacgaa

SEQ ID NO: 733760 - DNA, 15 bp, Homo sapiens
atcagaacaacgaat

SEQ ID NO: 733761 - DNA, 15 bp, Homo sapiens
tcagaacaacgaatt

SEQ ID NO: 733762 - DNA, 15 bp, Homo sapiens
cagaacaacgaattt

SEQ ID NO: 733763 - DNA, 15 bp, Homo sapiens
agaacaacgaatttc

SEQ ID NO: 733764 - DNA, 15 bp, Homo sapiens
gaacaacgaatttca

SEQ ID NO: 733765 - DNA, 15 bp, Homo sapiens
aacaacgaatttcag

SEQ ID NO: 733766 - DNA, 15 bp, Homo sapiens
acaacgaatttcagg

SEQ ID NO: 733767 - DNA, 15 bp, Homo sapiens
caacgaatttcagga

SEQ ID NO: 733768 - DNA, 15 bp, Homo sapiens
aacgaatttcaggaa

SEQ ID NO: 733769 - DNA, 15 bp, Homo sapiens
acgaatttcaggaaa

SEQ ID NO: 733770 - DNA, 15 bp, Homo sapiens
cgaatttcaggaaat

SEQ ID NO: 733771 - DNA, 15 bp, Homo sapiens
gaatttcaggaaatg

SEQ ID NO: 733772 - DNA, 15 bp, Homo sapiens
aatttcaggaaatga

SEQ ID NO: 733773 - DNA, 15 bp, Homo sapiens
atttcaggaaatgag

SEQ ID NO: 733774 - DNA, 15 bp, Homo sapiens
tttcaggaaatgaga

SEQ ID NO: 733775 - DNA, 15 bp, Homo sapiens
ttcaggaaatgagaa

SEQ ID NO: 733776 - DNA, 15 bp, Homo sapiens
tcaggaaatgagaaa

SEQ ID NO: 733777 - DNA, 15 bp, Homo sapiens
caggaaatgagaaaa

SEQ ID NO: 733778 - DNA, 15 bp, Homo sapiens
aggaaatgagaaaag

SEQ ID NO: 733779 - DNA, 15 bp, Homo sapiens
ggaaatgagaaaagc

SEQ ID NO: 733780 - DNA, 15 bp, Homo sapiens
gaaatgagaaaagca

SEQ ID NO: 733781 - DNA, 15 bp, Homo sapiens
aaatgagaaaagcaa

SEQ ID NO: 733782 - DNA, 15 bp, Homo sapiens
aatgagaaaagcaag

SEQ ID NO: 733783 - DNA, 15 bp, Homo sapiens
atgagaaaagcaagc

SEQ ID NO: 733784 - DNA, 15 bp, Homo sapiens
tgagaaaagcaagca

SEQ ID NO: 733785 - DNA, 15 bp, Homo sapiens
gagaaaagcaagcag

SEQ ID NO: 733786 - DNA, 15 bp, Homo sapiens
agaaaagcaagcaga

SEQ ID NO: 733787 - DNA, 15 bp, Homo sapiens
gaaaagcaagcagag

SEQ ID NO: 733788 - DNA, 15 bp, Homo sapiens
aaaagcaagcagaga

SEQ ID NO: 733789 - DNA, 15 bp, Homo sapiens
aaagcaagcagagat

SEQ ID NO: 733790 - DNA, 15 bp, Homo sapiens
aagcaagcagagatt

SEQ ID NO: 733791 - DNA, 15 bp, Homo sapiens
agcaagcagagattt

SEQ ID NO: 733792 - DNA, 15 bp, Homo sapiens
gcaagcagagatttg

SEQ ID NO: 733793 - DNA, 15 bp, Homo sapiens
caagcagagatttga

SEQ ID NO: 733794 - DNA, 15 bp, Homo sapiens
aagcagagatttgaa

SEQ ID NO: 733795 - DNA, 15 bp, Homo sapiens
agcagagatttgaaa

SEQ ID NO: 733796 - DNA, 15 bp, Homo sapiens
gcagagatttgaaaa

SEQ ID NO: 733797 - DNA, 15 bp, Homo sapiens
cagagatttgaaaac

SEQ ID NO: 733798 - DNA, 15 bp, Homo sapiens
agagatttgaaaaca

SEQ ID NO: 733799 - DNA, 15 bp, Homo sapiens
gagatttgaaaacaa

SEQ ID NO: 733800 - DNA, 15 bp, Homo sapiens
agatttgaaaacaat

SEQ ID NO: 733801 - DNA, 15 bp, Homo sapiens
gatttgaaaacaatt

SEQ ID NO: 733802 - DNA, 15 bp, Homo sapiens
atttgaaaacaattt

SEQ ID NO: 733803 - DNA, 15 bp, Homo sapiens
tttgaaaacaattta

SEQ ID NO: 733804 - DNA, 15 bp, Homo sapiens
ttgaaaacaatttaa

SEQ ID NO: 733805 - DNA, 15 bp, Homo sapiens
tgaaaacaatttaaa

SEQ ID NO: 733806 - DNA, 15 bp, Homo sapiens
gaaaacaatttaaat

SEQ ID NO: 733807 - DNA, 15 bp, Homo sapiens
aaaacaatttaaatc

SEQ ID NO: 733808 - DNA, 15 bp, Homo sapiens
aaacaatttaaatct

SEQ ID NO: 733809 - DNA, 15 bp, Homo sapiens
aacaatttaaatctg

SEQ ID NO: 733810 - DNA, 15 bp, Homo sapiens
acaatttaaatctgt

SEQ ID NO: 733811 - DNA, 15 bp, Homo sapiens
caatttaaatctgtt

SEQ ID NO: 733812 - DNA, 15 bp, Homo sapiens
aatttaaatctgttt

SEQ ID NO: 733813 - DNA, 15 bp, Homo sapiens
atttaaatctgttta

SEQ ID NO: 733814 - DNA, 15 bp, Homo sapiens
tttaaatctgtttat

SEQ ID NO: 733815 - DNA, 15 bp, Homo sapiens
ttaaatctgtttatt

SEQ ID NO: 733816 - DNA, 15 bp, Homo sapiens
taaatctgtttattt

SEQ ID NO: 733817 - DNA, 15 bp, Homo sapiens
aaatctgtttatttt

SEQ ID NO: 733818 - DNA, 15 bp, Homo sapiens
aatctgtttattttt

SEQ ID NO: 733819 - DNA, 15 bp, Homo sapiens
atctgtttatttttg

SEQ ID NO: 733820 - DNA, 15 bp, Homo sapiens
tctgtttatttttga

SEQ ID NO: 733821 - DNA, 15 bp, Homo sapiens
ctgtttatttttgaa

SEQ ID NO: 733822 - DNA, 15 bp, Homo sapiens
tgtttatttttgaat

SEQ ID NO: 733823 - DNA, 15 bp, Homo sapiens
gtttatttttgaata

SEQ ID NO: 733824 - DNA, 15 bp, Homo sapiens
tttatttttgaataa

SEQ ID NO: 733825 - DNA, 15 bp, Homo sapiens
ttatttttgaataag

SEQ ID NO: 733826 - DNA, 15 bp, Homo sapiens
tatttttgaataagt

SEQ ID NO: 733827 - DNA, 15 bp, Homo sapiens
atttttgaataagta

SEQ ID NO: 733828 - DNA, 15 bp, Homo sapiens
tttttgaataagtaa

SEQ ID NO: 733829 - DNA, 15 bp, Homo sapiens
ttttgaataagtaac

SEQ ID NO: 733830 - DNA, 15 bp, Homo sapiens
tttgaataagtaaca

SEQ ID NO: 733831 - DNA, 15 bp, Homo sapiens
ttgaataagtaacac

SEQ ID NO: 733832 - DNA, 15 bp, Homo sapiens
tgaataagtaacaca

SEQ ID NO: 733833 - DNA, 15 bp, Homo sapiens
gaataagtaacacat

SEQ ID NO: 733834 - DNA, 15 bp, Homo sapiens
aataagtaacacatt

SEQ ID NO: 733835 - DNA, 15 bp, Homo sapiens
ataagtaacacattc

SEQ ID NO: 733836 - DNA, 15 bp, Homo sapiens
taagtaacacattca

SEQ ID NO: 733837 - DNA, 15 bp, Homo sapiens
aagtaacacattcac

SEQ ID NO: 733838 - DNA, 15 bp, Homo sapiens
agtaacacattcaca

SEQ ID NO: 733839 - DNA, 15 bp, Homo sapiens
gtaacacattcacac

SEQ ID NO: 733840 - DNA, 15 bp, Homo sapiens
taacacattcacacg

SEQ ID NO: 733841 - DNA, 15 bp, Homo sapiens
aacacattcacacgg

SEQ ID NO: 733842 - DNA, 15 bp, Homo sapiens
acacattcacacggt

SEQ ID NO: 733843 - DNA, 15 bp, Homo sapiens
cacattcacacggtt

SEQ ID NO: 733844 - DNA, 15 bp, Homo sapiens
acattcacacggttc

SEQ ID NO: 733845 - DNA, 15 bp, Homo sapiens
cattcacacggttca

SEQ ID NO: 733846 - DNA, 15 bp, Homo sapiens
attcacacggttcac

SEQ ID NO: 733847 - DNA, 15 bp, Homo sapiens
ttcacacggttcaca

SEQ ID NO: 733848 - DNA, 15 bp, Homo sapiens
tcacacggttcacaa

SEQ ID NO: 733849 - DNA, 15 bp, Homo sapiens
cacacggttcacaat

SEQ ID NO: 733850 - DNA, 15 bp, Homo sapiens
acacggttcacaatt

SEQ ID NO: 733851 - DNA, 15 bp, Homo sapiens
cacggttcacaattc

SEQ ID NO: 733852 - DNA, 15 bp, Homo sapiens
acggttcacaattca

SEQ ID NO: 733853 - DNA, 15 bp, Homo sapiens
cggttcacaattcaa

SEQ ID NO: 733854 - DNA, 15 bp, Homo sapiens
ggttcacaattcaaa

SEQ ID NO: 733855 - DNA, 15 bp, Homo sapiens
gttcacaattcaaaa

SEQ ID NO: 733856 - DNA, 15 bp, Homo sapiens
ttcacaattcaaaag

SEQ ID NO: 733857 - DNA, 15 bp, Homo sapiens
tcacaattcaaaagg

SEQ ID NO: 733858 - DNA, 15 bp, Homo sapiens
cacaattcaaaaggt

SEQ ID NO: 733859 - DNA, 15 bp, Homo sapiens
acaattcaaaaggta

SEQ ID NO: 733860 - DNA, 15 bp, Homo sapiens
caattcaaaaggtac

SEQ ID NO: 733861 - DNA, 15 bp, Homo sapiens
aattcaaaaggtaca

SEQ ID NO: 733862 - DNA, 15 bp, Homo sapiens
attcaaaaggtacaa

SEQ ID NO: 733863 - DNA, 15 bp, Homo sapiens
ttcaaaaggtacaaa

SEQ ID NO: 733864 - DNA, 15 bp, Homo sapiens
tcaaaaggtacaaaa

SEQ ID NO: 733865 - DNA, 15 bp, Homo sapiens
caaaaggtacaaaat

SEQ ID NO: 733866 - DNA, 15 bp, Homo sapiens
aaaaggtacaaaatt

SEQ ID NO: 733867 - DNA, 15 bp, Homo sapiens
aaaggtacaaaatta

SEQ ID NO: 733868 - DNA, 15 bp, Homo sapiens
aaggtacaaaattat

SEQ ID NO: 733869 - DNA, 15 bp, Homo sapiens
aggtacaaaattata

SEQ ID NO: 733870 - DNA, 15 bp, Homo sapiens
ggtacaaaattatac

SEQ ID NO: 733871 - DNA, 15 bp, Homo sapiens
gtacaaaattataca

SEQ ID NO: 733872 - DNA, 15 bp, Homo sapiens
tacaaaattatacag

SEQ ID NO: 733873 - DNA, 15 bp, Homo sapiens
acaaaattatacaga

SEQ ID NO: 733874 - DNA, 15 bp, Homo sapiens
caaaattatacagag

SEQ ID NO: 733875 - DNA, 15 bp, Homo sapiens
aaaattatacagagt

SEQ ID NO: 733876 - DNA, 15 bp, Homo sapiens
aaattatacagagta

SEQ ID NO: 733877 - DNA, 15 bp, Homo sapiens
aattatacagagtaa

SEQ ID NO: 733878 - DNA, 15 bp, Homo sapiens
attatacagagtaaa

SEQ ID NO: 733879 - DNA, 15 bp, Homo sapiens
ttatacagagtaaaa

SEQ ID NO: 733880 - DNA, 15 bp, Homo sapiens
tatacagagtaaaat

SEQ ID NO: 733881 - DNA, 15 bp, Homo sapiens
atacagagtaaaatt

SEQ ID NO: 733882 - DNA, 15 bp, Homo sapiens
tacagagtaaaattc

SEQ ID NO: 733883 - DNA, 15 bp, Homo sapiens
acagagtaaaattcc

SEQ ID NO: 733884 - DNA, 15 bp, Homo sapiens
cagagtaaaattccc

SEQ ID NO: 733885 - DNA, 15 bp, Homo sapiens
agagtaaaattcccc

SEQ ID NO: 733886 - DNA, 15 bp, Homo sapiens
gagtaaaattcccct

SEQ ID NO: 733887 - DNA, 15 bp, Homo sapiens
agtaaaattcccctc

SEQ ID NO: 733888 - DNA, 15 bp, Homo sapiens
gtaaaattcccctcc

SEQ ID NO: 733889 - DNA, 15 bp, Homo sapiens
taaaattcccctccc

SEQ ID NO: 733890 - DNA, 15 bp, Homo sapiens
aaaattcccctccca

SEQ ID NO: 733891 - DNA, 15 bp, Homo sapiens
aaattcccctcccag

SEQ ID NO: 733892 - DNA, 15 bp, Homo sapiens
aattcccctcccagt

SEQ ID NO: 733893 - DNA, 15 bp, Homo sapiens
attcccctcccagtt

SEQ ID NO: 733894 - DNA, 15 bp, Homo sapiens
ttcccctcccagttc

SEQ ID NO: 733895 - DNA, 15 bp, Homo sapiens
tcccctcccagttct

SEQ ID NO: 733896 - DNA, 15 bp, Homo sapiens
cccctcccagttctg

SEQ ID NO: 733897 - DNA, 15 bp, Homo sapiens
ccctcccagttctgt

SEQ ID NO: 733898 - DNA, 15 bp, Homo sapiens
cctcccagttctgtt

SEQ ID NO: 733899 - DNA, 15 bp, Homo sapiens
ctcccagttctgttc

SEQ ID NO: 733900 - DNA, 15 bp, Homo sapiens
tcccagttctgttct

SEQ ID NO: 733901 - DNA, 15 bp, Homo sapiens
cccagttctgttctt

SEQ ID NO: 733902 - DNA, 15 bp, Homo sapiens
ccagttctgttcttc

SEQ ID NO: 733903 - DNA, 15 bp, Homo sapiens
cagttctgttcttca

SEQ ID NO: 733904 - DNA, 15 bp, Homo sapiens
agttctgttcttcag

SEQ ID NO: 733905 - DNA, 15 bp, Homo sapiens
gttctgttcttcagc

SEQ ID NO: 733906 - DNA, 15 bp, Homo sapiens
ttctgttcttcagct

SEQ ID NO: 733907 - DNA, 15 bp, Homo sapiens
tctgttcttcagctg

SEQ ID NO: 733908 - DNA, 15 bp, Homo sapiens
ctgttcttcagctgt

SEQ ID NO: 733909 - DNA, 15 bp, Homo sapiens
tgttcttcagctgtc

SEQ ID NO: 733910 - DNA, 15 bp, Homo sapiens
gttcttcagctgtcc

SEQ ID NO: 733911 - DNA, 15 bp, Homo sapiens
ttcttcagctgtcca

SEQ ID NO: 733912 - DNA, 15 bp, Homo sapiens
tcttcagctgtccag

SEQ ID NO: 733913 - DNA, 15 bp, Homo sapiens
cttcagctgtccagg

SEQ ID NO: 733914 - DNA, 15 bp, Homo sapiens
ttcagctgtccaggg

SEQ ID NO: 733915 - DNA, 15 bp, Homo sapiens
tcagctgtccagggg

SEQ ID NO: 733916 - DNA, 15 bp, Homo sapiens
cagctgtccaggggc

SEQ ID NO: 733917 - DNA, 15 bp, Homo sapiens
agctgtccaggggcc

SEQ ID NO: 733918 - DNA, 15 bp, Homo sapiens
gctgtccaggggccc

SEQ ID NO: 733919 - DNA, 15 bp, Homo sapiens
ctgtccaggggccct

SEQ ID NO: 733920 - DNA, 15 bp, Homo sapiens
tgtccaggggccctc

SEQ ID NO: 733921 - DNA, 15 bp, Homo sapiens
gtccaggggccctcc

SEQ ID NO: 733922 - DNA, 15 bp, Homo sapiens
tccaggggccctcct

SEQ ID NO: 733923 - DNA, 15 bp, Homo sapiens
ccaggggccctcctt

SEQ ID NO: 733924 - DNA, 15 bp, Homo sapiens
caggggccctccttg

SEQ ID NO: 733925 - DNA, 15 bp, Homo sapiens
aggggccctccttgg

SEQ ID NO: 733926 - DNA, 15 bp, Homo sapiens
ggggccctccttgga

SEQ ID NO: 733927 - DNA, 15 bp, Homo sapiens
gggccctccttggag

SEQ ID NO: 733928 - DNA, 15 bp, Homo sapiens
ggccctccttggagg

SEQ ID NO: 733929 - DNA, 15 bp, Homo sapiens
gccctccttggagga

SEQ ID NO: 733930 - DNA, 15 bp, Homo sapiens
ccctccttggaggaa

SEQ ID NO: 733931 - DNA, 15 bp, Homo sapiens
cctccttggaggaaa

SEQ ID NO: 733932 - DNA, 15 bp, Homo sapiens
ctccttggaggaaac

SEQ ID NO: 733933 - DNA, 15 bp, Homo sapiens
tccttggaggaaacg

SEQ ID NO: 733934 - DNA, 15 bp, Homo sapiens
ccttggaggaaacgg

SEQ ID NO: 733935 - DNA, 15 bp, Homo sapiens
cttggaggaaacggc

SEQ ID NO: 733936 - DNA, 15 bp, Homo sapiens
ttggaggaaacggca

SEQ ID NO: 733937 - DNA, 15 bp, Homo sapiens
tggaggaaacggcat

SEQ ID NO: 733938 - DNA, 15 bp, Homo sapiens
ggaggaaacggcatc

SEQ ID NO: 733939 - DNA, 15 bp, Homo sapiens
gaggaaacggcatct

SEQ ID NO: 733940 - DNA, 15 bp, Homo sapiens
aggaaacggcatcta

SEQ ID NO: 733941 - DNA, 15 bp, Homo sapiens
ggaaacggcatctaa

SEQ ID NO: 733942 - DNA, 15 bp, Homo sapiens
gaaacggcatctaaa

SEQ ID NO: 733943 - DNA, 15 bp, Homo sapiens
aaacggcatctaaat

SEQ ID NO: 733944 - DNA, 15 bp, Homo sapiens
aacggcatctaaatg

SEQ ID NO: 733945 - DNA, 15 bp, Homo sapiens
acggcatctaaatgt

SEQ ID NO: 733946 - DNA, 15 bp, Homo sapiens
cggcatctaaatgtg

SEQ ID NO: 733947 - DNA, 15 bp, Homo sapiens
ggcatctaaatgtga

SEQ ID NO: 733948 - DNA, 15 bp, Homo sapiens
gcatctaaatgtgac

SEQ ID NO: 733949 - DNA, 15 bp, Homo sapiens
catctaaatgtgact

SEQ ID NO: 733950 - DNA, 15 bp, Homo sapiens
atctaaatgtgactg

SEQ ID NO: 733951 - DNA, 15 bp, Homo sapiens
tctaaatgtgactgt

SEQ ID NO: 733952 - DNA, 15 bp, Homo sapiens
ctaaatgtgactgta

SEQ ID NO: 733953 - DNA, 15 bp, Homo sapiens
taaatgtgactgtag

SEQ ID NO: 733954 - DNA, 15 bp, Homo sapiens
aaatgtgactgtaga

SEQ ID NO: 733955 - DNA, 15 bp, Homo sapiens
aatgtgactgtagat

SEQ ID NO: 733956 - DNA, 15 bp, Homo sapiens
atgtgactgtagatt

SEQ ID NO: 733957 - DNA, 15 bp, Homo sapiens
tgtgactgtagattt

SEQ ID NO: 733958 - DNA, 15 bp, Homo sapiens
gtgactgtagatttg

SEQ ID NO: 733959 - DNA, 15 bp, Homo sapiens
tgactgtagatttga

SEQ ID NO: 733960 - DNA, 15 bp, Homo sapiens
gactgtagatttgaa

SEQ ID NO: 733961 - DNA, 15 bp, Homo sapiens
actgtagatttgaat

SEQ ID NO: 733962 - DNA, 15 bp, Homo sapiens
ctgtagatttgaatg

SEQ ID NO: 733963 - DNA, 15 bp, Homo sapiens
tgtagatttgaatgt

SEQ ID NO: 733964 - DNA, 15 bp, Homo sapiens
gtagatttgaatgtc

SEQ ID NO: 733965 - DNA, 15 bp, Homo sapiens
tagatttgaatgtct

SEQ ID NO: 733966 - DNA, 15 bp, Homo sapiens
agatttgaatgtctc

SEQ ID NO: 733967 - DNA, 15 bp, Homo sapiens
gatttgaatgtctct

SEQ ID NO: 733968 - DNA, 15 bp, Homo sapiens
atttgaatgtctcta

SEQ ID NO: 733969 - DNA, 15 bp, Homo sapiens
tttgaatgtctctat

SEQ ID NO: 733970 - DNA, 15 bp, Homo sapiens
ttgaatgtctctatt

SEQ ID NO: 733971 - DNA, 15 bp, Homo sapiens
tgaatgtctctattg

SEQ ID NO: 733972 - DNA, 15 bp, Homo sapiens
gaatgtctctattgt

SEQ ID NO: 733973 - DNA, 15 bp, Homo sapiens
aatgtctctattgtc

SEQ ID NO: 733974 - DNA, 15 bp, Homo sapiens
atgtctctattgtcc

SEQ ID NO: 733975 - DNA, 15 bp, Homo sapiens
tgtctctattgtcct

SEQ ID NO: 733976 - DNA, 15 bp, Homo sapiens
gtctctattgtcctc

SEQ ID NO: 733977 - DNA, 15 bp, Homo sapiens
tctctattgtcctca

SEQ ID NO: 733978 - DNA, 15 bp, Homo sapiens
ctctattgtcctcac

SEQ ID NO: 733979 - DNA, 15 bp, Homo sapiens
tctattgtcctcact

SEQ ID NO: 733980 - DNA, 15 bp, Homo sapiens
ctattgtcctcactc

SEQ ID NO: 733981 - DNA, 15 bp, Homo sapiens
tattgtcctcactct

SEQ ID NO: 733982 - DNA, 15 bp, Homo sapiens
attgtcctcactctt

SEQ ID NO: 733983 - DNA, 15 bp, Homo sapiens
ttgtcctcactcttt

SEQ ID NO: 733984 - DNA, 15 bp, Homo sapiens
tgtcctcactcttta

SEQ ID NO: 733985 - DNA, 15 bp, Homo sapiens
gtcctcactctttac

SEQ ID NO: 733986 - DNA, 15 bp, Homo sapiens
tcctcactctttacc

SEQ ID NO: 733987 - DNA, 15 bp, Homo sapiens
cctcactctttacct

SEQ ID NO: 733988 - DNA, 15 bp, Homo sapiens
ctcactctttacctt

SEQ ID NO: 733989 - DNA, 15 bp, Homo sapiens
tcactctttaccttt

SEQ ID NO: 733990 - DNA, 15 bp, Homo sapiens
cactctttacctttt

SEQ ID NO: 733991 - DNA, 15 bp, Homo sapiens
actctttaccttttc

SEQ ID NO: 733992 - DNA, 15 bp, Homo sapiens
ctctttaccttttct

SEQ ID NO: 733993 - DNA, 15 bp, Homo sapiens
tctttaccttttctg

SEQ ID NO: 733994 - DNA, 15 bp, Homo sapiens
ctttaccttttctgg

SEQ ID NO: 733995 - DNA, 15 bp, Homo sapiens
tttaccttttctgga

SEQ ID NO: 733996 - DNA, 15 bp, Homo sapiens
ttaccttttctggat

SEQ ID NO: 733997 - DNA, 15 bp, Homo sapiens
taccttttctggatg

SEQ ID NO: 733998 - DNA, 15 bp, Homo sapiens
accttttctggatgt

SEQ ID NO: 733999 - DNA, 15 bp, Homo sapiens
ccttttctggatgtt

SEQ ID NO: 734000 - DNA, 15 bp, Homo sapiens
cttttctggatgttt

SEQ ID NO: 734001 - DNA, 15 bp, Homo sapiens
ttttctggatgtttc

SEQ ID NO: 734002 - DNA, 15 bp, Homo sapiens
tttctggatgtttct

SEQ ID NO: 734003 - DNA, 15 bp, Homo sapiens
ttctggatgtttctc

SEQ ID NO: 734004 - DNA, 15 bp, Homo sapiens
tctggatgtttctca

SEQ ID NO: 734005 - DNA, 15 bp, Homo sapiens
ctggatgtttctcat

SEQ ID NO: 734006 - DNA, 15 bp, Homo sapiens
tggatgtttctcatc

SEQ ID NO: 734007 - DNA, 15 bp, Homo sapiens
ggatgtttctcatct

SEQ ID NO: 734008 - DNA, 15 bp, Homo sapiens
gatgtttctcatctc

SEQ ID NO: 734009 - DNA, 15 bp, Homo sapiens
atgtttctcatctcc

SEQ ID NO: 734010 - DNA, 15 bp, Homo sapiens
tgtttctcatctcct

SEQ ID NO: 734011 - DNA, 15 bp, Homo sapiens
gtttctcatctcctc

SEQ ID NO: 734012 - DNA, 15 bp, Homo sapiens
tttctcatctcctcc

SEQ ID NO: 734013 - DNA, 15 bp, Homo sapiens
ttctcatctcctcca

SEQ ID NO: 734014 - DNA, 15 bp, Homo sapiens
tctcatctcctccat

SEQ ID NO: 734015 - DNA, 15 bp, Homo sapiens
ctcatctcctccata

SEQ ID NO: 734016 - DNA, 15 bp, Homo sapiens
tcatctcctccatag

SEQ ID NO: 734017 - DNA, 15 bp, Homo sapiens
catctcctccatagc

SEQ ID NO: 734018 - DNA, 15 bp, Homo sapiens
atctcctccatagca

SEQ ID NO: 734019 - DNA, 15 bp, Homo sapiens
tctcctccatagcaa

SEQ ID NO: 734020 - DNA, 15 bp, Homo sapiens
ctcctccatagcaac

SEQ ID NO: 734021 - DNA, 15 bp, Homo sapiens
tcctccatagcaaca

SEQ ID NO: 734022 - DNA, 15 bp, Homo sapiens
cctccatagcaacat

SEQ ID NO: 734023 - DNA, 15 bp, Homo sapiens
ctccatagcaacatt

SEQ ID NO: 734024 - DNA, 15 bp, Homo sapiens
tccatagcaacattc

SEQ ID NO: 734025 - DNA, 15 bp, Homo sapiens
ccatagcaacattca

SEQ ID NO: 734026 - DNA, 15 bp, Homo sapiens
catagcaacattcat

SEQ ID NO: 734027 - DNA, 15 bp, Homo sapiens
atagcaacattcatt

SEQ ID NO: 734028 - DNA, 15 bp, Homo sapiens
tagcaacattcattt

SEQ ID NO: 734029 - DNA, 15 bp, Homo sapiens
agcaacattcatttc

SEQ ID NO: 734030 - DNA, 15 bp, Homo sapiens
gcaacattcatttca

SEQ ID NO: 734031 - DNA, 15 bp, Homo sapiens
caacattcatttcat

SEQ ID NO: 734032 - DNA, 15 bp, Homo sapiens
aacattcatttcatc

SEQ ID NO: 734033 - DNA, 15 bp, Homo sapiens
acattcatttcatcc

SEQ ID NO: 734034 - DNA, 15 bp, Homo sapiens
cattcatttcatcct

SEQ ID NO: 734035 - DNA, 15 bp, Homo sapiens
attcatttcatcctg

SEQ ID NO: 734036 - DNA, 15 bp, Homo sapiens
ttcatttcatcctgc

SEQ ID NO: 734037 - DNA, 15 bp, Homo sapiens
tcatttcatcctgcc

SEQ ID NO: 734038 - DNA, 15 bp, Homo sapiens
catttcatcctgccc

SEQ ID NO: 734039 - DNA, 15 bp, Homo sapiens
atttcatcctgcccc

SEQ ID NO: 734040 - DNA, 15 bp, Homo sapiens
tttcatcctgccccc

SEQ ID NO: 734041 - DNA, 15 bp, Homo sapiens
ttcatcctgccccca

SEQ ID NO: 734042 - DNA, 15 bp, Homo sapiens
tcatcctgcccccat

SEQ ID NO: 734043 - DNA, 15 bp, Homo sapiens
catcctgcccccatt

SEQ ID NO: 734044 - DNA, 15 bp, Homo sapiens
atcctgcccccattc

SEQ ID NO: 734045 - DNA, 15 bp, Homo sapiens
tcctgcccccattcc

SEQ ID NO: 734046 - DNA, 15 bp, Homo sapiens
cctgcccccattcca

SEQ ID NO: 734047 - DNA, 15 bp, Homo sapiens
ctgcccccattccaa

SEQ ID NO: 734048 - DNA, 15 bp, Homo sapiens
tgcccccattccaat

SEQ ID NO: 734049 - DNA, 15 bp, Homo sapiens
gcccccattccaatc

SEQ ID NO: 734050 - DNA, 15 bp, Homo sapiens
cccccattccaatcc

SEQ ID NO: 734051 - DNA, 15 bp, Homo sapiens
ccccattccaatccc

SEQ ID NO: 734052 - DNA, 15 bp, Homo sapiens
cccattccaatccct

SEQ ID NO: 734053 - DNA, 15 bp, Homo sapiens
ccattccaatccctg

SEQ ID NO: 734054 - DNA, 15 bp, Homo sapiens
cattccaatccctga

SEQ ID NO: 734055 - DNA, 15 bp, Homo sapiens
attccaatccctgat

SEQ ID NO: 734056 - DNA, 15 bp, Homo sapiens
ttccaatccctgata

SEQ ID NO: 734057 - DNA, 15 bp, Homo sapiens
tccaatccctgatac

SEQ ID NO: 734058 - DNA, 15 bp, Homo sapiens
ccaatccctgatacc

SEQ ID NO: 734059 - DNA, 15 bp, Homo sapiens
caatccctgatacct

SEQ ID NO: 734060 - DNA, 15 bp, Homo sapiens
aatccctgataccta

SEQ ID NO: 734061 - DNA, 15 bp, Homo sapiens
atccctgatacctag

SEQ ID NO: 734062 - DNA, 15 bp, Homo sapiens
tccctgatacctagt

SEQ ID NO: 734063 - DNA, 15 bp, Homo sapiens
ccctgatacctagtt

SEQ ID NO: 734064 - DNA, 15 bp, Homo sapiens
cctgatacctagttg

SEQ ID NO: 734065 - DNA, 15 bp, Homo sapiens
ctgatacctagttgc

SEQ ID NO: 734066 - DNA, 15 bp, Homo sapiens
tgatacctagttgca

SEQ ID NO: 734067 - DNA, 15 bp, Homo sapiens
gatacctagttgcat

SEQ ID NO: 734068 - DNA, 15 bp, Homo sapiens
atacctagttgcatg

SEQ ID NO: 734069 - DNA, 15 bp, Homo sapiens
tacctagttgcatgc

SEQ ID NO: 734070 - DNA, 15 bp, Homo sapiens
acctagttgcatgct

SEQ ID NO: 734071 - DNA, 15 bp, Homo sapiens
cctagttgcatgctc

SEQ ID NO: 734072 - DNA, 15 bp, Homo sapiens
ctagttgcatgctct

SEQ ID NO: 734073 - DNA, 15 bp, Homo sapiens
tagttgcatgctctg

SEQ ID NO: 734074 - DNA, 15 bp, Homo sapiens
agttgcatgctctgg

SEQ ID NO: 734075 - DNA, 15 bp, Homo sapiens
gttgcatgctctgga

SEQ ID NO: 734076 - DNA, 15 bp, Homo sapiens
ttgcatgctctggat

SEQ ID NO: 734077 - DNA, 15 bp, Homo sapiens
tgcatgctctggata

SEQ ID NO: 734078 - DNA, 15 bp, Homo sapiens
gcatgctctggatag

SEQ ID NO: 734079 - DNA, 15 bp, Homo sapiens
catgctctggatagg

SEQ ID NO: 734080 - DNA, 15 bp, Homo sapiens
atgctctggataggc

SEQ ID NO: 734081 - DNA, 15 bp, Homo sapiens
tgctctggataggca

SEQ ID NO: 734082 - DNA, 15 bp, Homo sapiens
gctctggataggcac

SEQ ID NO: 734083 - DNA, 15 bp, Homo sapiens
ctctggataggcacc

SEQ ID NO: 734084 - DNA, 15 bp, Homo sapiens
tctggataggcacct

SEQ ID NO: 734085 - DNA, 15 bp, Homo sapiens
ctggataggcacctg

SEQ ID NO: 734086 - DNA, 15 bp, Homo sapiens
tggataggcacctgg

SEQ ID NO: 734087 - DNA, 15 bp, Homo sapiens
ggataggcacctggc

SEQ ID NO: 734088 - DNA, 15 bp, Homo sapiens
gataggcacctggca

SEQ ID NO: 734089 - DNA, 15 bp, Homo sapiens
ataggcacctggcaa

SEQ ID NO: 734090 - DNA, 15 bp, Homo sapiens
taggcacctggcaaa

SEQ ID NO: 734091 - DNA, 15 bp, Homo sapiens
aggcacctggcaaat

SEQ ID NO: 734092 - DNA, 15 bp, Homo sapiens
ggcacctggcaaatg

SEQ ID NO: 734093 - DNA, 15 bp, Homo sapiens
gcacctggcaaatgt

SEQ ID NO: 734094 - DNA, 15 bp, Homo sapiens
cacctggcaaatgtt

SEQ ID NO: 734095 - DNA, 15 bp, Homo sapiens
acctggcaaatgttg

SEQ ID NO: 734096 - DNA, 15 bp, Homo sapiens
cctggcaaatgttgg

SEQ ID NO: 734097 - DNA, 15 bp, Homo sapiens
ctggcaaatgttggg

SEQ ID NO: 734098 - DNA, 15 bp, Homo sapiens
tggcaaatgttgggg

SEQ ID NO: 734099 - DNA, 15 bp, Homo sapiens
ggcaaatgttgggga

SEQ ID NO: 734100 - DNA, 15 bp, Homo sapiens
gcaaatgttggggat

SEQ ID NO: 734101 - DNA, 15 bp, Homo sapiens
caaatgttggggatc

SEQ ID NO: 734102 - DNA, 15 bp, Homo sapiens
aaatgttggggatca

SEQ ID NO: 734103 - DNA, 15 bp, Homo sapiens
aatgttggggatcag

SEQ ID NO: 734104 - DNA, 15 bp, Homo sapiens
atgttggggatcagc

SEQ ID NO: 734105 - DNA, 15 bp, Homo sapiens
tgttggggatcagct

SEQ ID NO: 734106 - DNA, 15 bp, Homo sapiens
gttggggatcagctg

SEQ ID NO: 734107 - DNA, 15 bp, Homo sapiens
ttggggatcagctga

SEQ ID NO: 734108 - DNA, 15 bp, Homo sapiens
tggggatcagctgac

SEQ ID NO: 734109 - DNA, 15 bp, Homo sapiens
ggggatcagctgaca

SEQ ID NO: 734110 - DNA, 15 bp, Homo sapiens
gggatcagctgacag

SEQ ID NO: 734111 - DNA, 15 bp, Homo sapiens
ggatcagctgacagc

SEQ ID NO: 734112 - DNA, 15 bp, Homo sapiens
gatcagctgacagct

SEQ ID NO: 734113 - DNA, 15 bp, Homo sapiens
atcagctgacagctt

SEQ ID NO: 734114 - DNA, 15 bp, Homo sapiens
tcagctgacagcttg

SEQ ID NO: 734115 - DNA, 15 bp, Homo sapiens
cagctgacagcttgt

SEQ ID NO: 734116 - DNA, 15 bp, Homo sapiens
agctgacagcttgtc

SEQ ID NO: 734117 - DNA, 15 bp, Homo sapiens
gctgacagcttgtct

SEQ ID NO: 734118 - DNA, 15 bp, Homo sapiens
ctgacagcttgtctg

SEQ ID NO: 734119 - DNA, 15 bp, Homo sapiens
tgacagcttgtctgt

SEQ ID NO: 734120 - DNA, 15 bp, Homo sapiens
gacagcttgtctgta

SEQ ID NO: 734121 - DNA, 15 bp, Homo sapiens
acagcttgtctgtaa

SEQ ID NO: 734122 - DNA, 15 bp, Homo sapiens
cagcttgtctgtaat

SEQ ID NO: 734123 - DNA, 15 bp, Homo sapiens
agcttgtctgtaatc

SEQ ID NO: 734124 - DNA, 15 bp, Homo sapiens
gcttgtctgtaatcc

SEQ ID NO: 734125 - DNA, 15 bp, Homo sapiens
cttgtctgtaatcca

SEQ ID NO: 734126 - DNA, 15 bp, Homo sapiens
ttgtctgtaatccaa

SEQ ID NO: 734127 - DNA, 15 bp, Homo sapiens
tgtctgtaatccaag

SEQ ID NO: 734128 - DNA, 15 bp, Homo sapiens
gtctgtaatccaaga

SEQ ID NO: 734129 - DNA, 15 bp, Homo sapiens
tctgtaatccaagaa

SEQ ID NO: 734130 - DNA, 15 bp, Homo sapiens
ctgtaatccaagaat

SEQ ID NO: 734131 - DNA, 15 bp, Homo sapiens
tgtaatccaagaata

SEQ ID NO: 734132 - DNA, 15 bp, Homo sapiens
gtaatccaagaatat

SEQ ID NO: 734133 - DNA, 15 bp, Homo sapiens
taatccaagaatatt

SEQ ID NO: 734134 - DNA, 15 bp, Homo sapiens
aatccaagaatattt

SEQ ID NO: 734135 - DNA, 15 bp, Homo sapiens
atccaagaatatttg

SEQ ID NO: 734136 - DNA, 15 bp, Homo sapiens
tccaagaatatttgt

SEQ ID NO: 734137 - DNA, 15 bp, Homo sapiens
ccaagaatatttgtg

SEQ ID NO: 734138 - DNA, 15 bp, Homo sapiens
caagaatatttgtgg

SEQ ID NO: 734139 - DNA, 15 bp, Homo sapiens
aagaatatttgtgga

SEQ ID NO: 734140 - DNA, 15 bp, Homo sapiens
agaatatttgtggag

SEQ ID NO: 734141 - DNA, 15 bp, Homo sapiens
gaatatttgtggagt

SEQ ID NO: 734142 - DNA, 15 bp, Homo sapiens
aatatttgtggagtc

SEQ ID NO: 734143 - DNA, 15 bp, Homo sapiens
atatttgtggagtcc

SEQ ID NO: 734144 - DNA, 15 bp, Homo sapiens
tatttgtggagtccg

SEQ ID NO: 734145 - DNA, 15 bp, Homo sapiens
atttgtggagtccgg

SEQ ID NO: 734146 - DNA, 15 bp, Homo sapiens
tttgtggagtccggg

SEQ ID NO: 734147 - DNA, 15 bp, Homo sapiens
ttgtggagtccgggc

SEQ ID NO: 734148 - DNA, 15 bp, Homo sapiens
tgtggagtccgggct

SEQ ID NO: 734149 - DNA, 15 bp, Homo sapiens
gtggagtccgggctt

SEQ ID NO: 734150 - DNA, 15 bp, Homo sapiens
tggagtccgggctta

SEQ ID NO: 734151 - DNA, 15 bp, Homo sapiens
ggagtccgggcttat

SEQ ID NO: 734152 - DNA, 15 bp, Homo sapiens
gagtccgggcttata

SEQ ID NO: 734153 - DNA, 15 bp, Homo sapiens
agtccgggcttatag

SEQ ID NO: 734154 - DNA, 15 bp, Homo sapiens
gtccgggcttatagt

SEQ ID NO: 734155 - DNA, 15 bp, Homo sapiens
tccgggcttatagta

SEQ ID NO: 734156 - DNA, 15 bp, Homo sapiens
ccgggcttatagtat

SEQ ID NO: 734157 - DNA, 15 bp, Homo sapiens
cgggcttatagtatt

SEQ ID NO: 734158 - DNA, 15 bp, Homo sapiens
gggcttatagtattt

SEQ ID NO: 734159 - DNA, 15 bp, Homo sapiens
ggcttatagtatttt

SEQ ID NO: 734160 - DNA, 15 bp, Homo sapiens
gcttatagtattttt

SEQ ID NO: 734161 - DNA, 15 bp, Homo sapiens
cttatagtatttttg

SEQ ID NO: 734162 - DNA, 15 bp, Homo sapiens
ttatagtatttttgt

SEQ ID NO: 734163 - DNA, 15 bp, Homo sapiens
tatagtatttttgtt

SEQ ID NO: 734164 - DNA, 15 bp, Homo sapiens
atagtatttttgttt

SEQ ID NO: 734165 - DNA, 15 bp, Homo sapiens
tagtatttttgtttg

SEQ ID NO: 734166 - DNA, 15 bp, Homo sapiens
agtatttttgtttga

SEQ ID NO: 734167 - DNA, 15 bp, Homo sapiens
gtatttttgtttgat

SEQ ID NO: 734168 - DNA, 15 bp, Homo sapiens
tatttttgtttgata

SEQ ID NO: 734169 - DNA, 15 bp, Homo sapiens
atttttgtttgatag

SEQ ID NO: 734170 - DNA, 15 bp, Homo sapiens
tttttgtttgatagt

SEQ ID NO: 734171 - DNA, 15 bp, Homo sapiens
ttttgtttgatagtg

SEQ ID NO: 734172 - DNA, 15 bp, Homo sapiens
tttgtttgatagtga

SEQ ID NO: 734173 - DNA, 15 bp, Homo sapiens
ttgtttgatagtgaa

SEQ ID NO: 734174 - DNA, 15 bp, Homo sapiens
tgtttgatagtgaat

SEQ ID NO: 734175 - DNA, 15 bp, Homo sapiens
gtttgatagtgaatt

SEQ ID NO: 734176 - DNA, 15 bp, Homo sapiens
tttgatagtgaatta

SEQ ID NO: 734177 - DNA, 15 bp, Homo sapiens
ttgatagtgaattag

SEQ ID NO: 734178 - DNA, 15 bp, Homo sapiens
tgatagtgaattaga

SEQ ID NO: 734179 - DNA, 15 bp, Homo sapiens
gatagtgaattagat

SEQ ID NO: 734180 - DNA, 15 bp, Homo sapiens
atagtgaattagatg

SEQ ID NO: 734181 - DNA, 15 bp, Homo sapiens
tagtgaattagatgc

SEQ ID NO: 734182 - DNA, 15 bp, Homo sapiens
agtgaattagatgca

SEQ ID NO: 734183 - DNA, 15 bp, Homo sapiens
gtgaattagatgcat

SEQ ID NO: 734184 - DNA, 15 bp, Homo sapiens
tgaattagatgcatt

SEQ ID NO: 734185 - DNA, 15 bp, Homo sapiens
gaattagatgcattt

SEQ ID NO: 734186 - DNA, 15 bp, Homo sapiens
aattagatgcatttt

SEQ ID NO: 734187 - DNA, 15 bp, Homo sapiens
attagatgcattttc

SEQ ID NO: 734188 - DNA, 15 bp, Homo sapiens
ttagatgcattttca

SEQ ID NO: 734189 - DNA, 15 bp, Homo sapiens
tagatgcattttcat

SEQ ID NO: 734190 - DNA, 15 bp, Homo sapiens
agatgcattttcatt

SEQ ID NO: 734191 - DNA, 15 bp, Homo sapiens
gatgcattttcattc

SEQ ID NO: 734192 - DNA, 15 bp, Homo sapiens
atgcattttcattca

SEQ ID NO: 734193 - DNA, 15 bp, Homo sapiens
tgcattttcattcac

SEQ ID NO: 734194 - DNA, 15 bp, Homo sapiens
gcattttcattcact

SEQ ID NO: 734195 - DNA, 15 bp, Homo sapiens
cattttcattcactt

SEQ ID NO: 734196 - DNA, 15 bp, Homo sapiens
attttcattcactta

SEQ ID NO: 734197 - DNA, 15 bp, Homo sapiens
ttttcattcacttat

SEQ ID NO: 734198 - DNA, 15 bp, Homo sapiens
tttcattcacttatg

SEQ ID NO: 734199 - DNA, 15 bp, Homo sapiens
ttcattcacttatgt

SEQ ID NO: 734200 - DNA, 15 bp, Homo sapiens
tcattcacttatgtt

SEQ ID NO: 734201 - DNA, 15 bp, Homo sapiens
cattcacttatgttc

SEQ ID NO: 734202 - DNA, 15 bp, Homo sapiens
attcacttatgttcc

SEQ ID NO: 734203 - DNA, 15 bp, Homo sapiens
ttcacttatgttcct

SEQ ID NO: 734204 - DNA, 15 bp, Homo sapiens
tcacttatgttcctg

SEQ ID NO: 734205 - DNA, 15 bp, Homo sapiens
cacttatgttcctgt

SEQ ID NO: 734206 - DNA, 15 bp, Homo sapiens
acttatgttcctgtt

SEQ ID NO: 734207 - DNA, 15 bp, Homo sapiens
cttatgttcctgttc

SEQ ID NO: 734208 - DNA, 15 bp, Homo sapiens
ttatgttcctgttct

SEQ ID NO: 734209 - DNA, 15 bp, Homo sapiens
tatgttcctgttctt

SEQ ID NO: 734210 - DNA, 15 bp, Homo sapiens
atgttcctgttcttc

SEQ ID NO: 734211 - DNA, 15 bp, Homo sapiens
tgttcctgttcttcc

SEQ ID NO: 734212 - DNA, 15 bp, Homo sapiens
gttcctgttcttcca

SEQ ID NO: 734213 - DNA, 15 bp, Homo sapiens
ttcctgttcttccaa

SEQ ID NO: 734214 - DNA, 15 bp, Homo sapiens
tcctgttcttccaag

SEQ ID NO: 734215 - DNA, 15 bp, Homo sapiens
cctgttcttccaaga

SEQ ID NO: 734216 - DNA, 15 bp, Homo sapiens
ctgttcttccaagag

SEQ ID NO: 734217 - DNA, 15 bp, Homo sapiens
tgttcttccaagaga

SEQ ID NO: 734218 - DNA, 15 bp, Homo sapiens
gttcttccaagagaa

SEQ ID NO: 734219 - DNA, 15 bp, Homo sapiens
ttcttccaagagaag

SEQ ID NO: 734220 - DNA, 15 bp, Homo sapiens
tcttccaagagaagc

SEQ ID NO: 734221 - DNA, 15 bp, Homo sapiens
cttccaagagaagcc

SEQ ID NO: 734222 - DNA, 15 bp, Homo sapiens
ttccaagagaagcca

SEQ ID NO: 734223 - DNA, 15 bp, Homo sapiens
tccaagagaagccaa

SEQ ID NO: 734224 - DNA, 15 bp, Homo sapiens
ccaagagaagccaag

SEQ ID NO: 734225 - DNA, 15 bp, Homo sapiens
caagagaagccaaga

SEQ ID NO: 734226 - DNA, 15 bp, Homo sapiens
aagagaagccaagaa

SEQ ID NO: 734227 - DNA, 15 bp, Homo sapiens
agagaagccaagaag

SEQ ID NO: 734228 - DNA, 15 bp, Homo sapiens
gagaagccaagaagc

SEQ ID NO: 734229 - DNA, 15 bp, Homo sapiens
agaagccaagaagcg

SEQ ID NO: 734230 - DNA, 15 bp, Homo sapiens
gaagccaagaagcgt

SEQ ID NO: 734231 - DNA, 15 bp, Homo sapiens
aagccaagaagcgtt

SEQ ID NO: 734232 - DNA, 15 bp, Homo sapiens
agccaagaagcgttg

SEQ ID NO: 734233 - DNA, 15 bp, Homo sapiens
gccaagaagcgttga

SEQ ID NO: 734234 - DNA, 15 bp, Homo sapiens
ccaagaagcgttgat

SEQ ID NO: 734235 - DNA, 15 bp, Homo sapiens
caagaagcgttgatt

SEQ ID NO: 734236 - DNA, 15 bp, Homo sapiens
aagaagcgttgattg

SEQ ID NO: 734237 - DNA, 15 bp, Homo sapiens
agaagcgttgattgt

SEQ ID NO: 734238 - DNA, 15 bp, Homo sapiens
gaagcgttgattgtc

SEQ ID NO: 734239 - DNA, 15 bp, Homo sapiens
aagcgttgattgtcc

SEQ ID NO: 734240 - DNA, 15 bp, Homo sapiens
agcgttgattgtccc

SEQ ID NO: 734241 - DNA, 15 bp, Homo sapiens
gcgttgattgtccca

SEQ ID NO: 734242 - DNA, 15 bp, Homo sapiens
cgttgattgtcccat

SEQ ID NO: 734243 - DNA, 15 bp, Homo sapiens
gttgattgtcccatc

SEQ ID NO: 734244 - DNA, 15 bp, Homo sapiens
ttgattgtcccatca

SEQ ID NO: 734245 - DNA, 15 bp, Homo sapiens
tgattgtcccatcag

SEQ ID NO: 734246 - DNA, 15 bp, Homo sapiens
gattgtcccatcagc

SEQ ID NO: 734247 - DNA, 15 bp, Homo sapiens
attgtcccatcagcc

SEQ ID NO: 734248 - DNA, 15 bp, Homo sapiens
ttgtcccatcagcct

SEQ ID NO: 734249 - DNA, 15 bp, Homo sapiens
tgtcccatcagcctt

SEQ ID NO: 734250 - DNA, 15 bp, Homo sapiens
gtcccatcagccttc

SEQ ID NO: 734251 - DNA, 15 bp, Homo sapiens
tcccatcagccttcc

SEQ ID NO: 734252 - DNA, 15 bp, Homo sapiens
cccatcagccttcct

SEQ ID NO: 734253 - DNA, 15 bp, Homo sapiens
ccatcagccttcctt

SEQ ID NO: 734254 - DNA, 15 bp, Homo sapiens
catcagccttccttg

SEQ ID NO: 734255 - DNA, 15 bp, Homo sapiens
atcagccttccttgt

SEQ ID NO: 734256 - DNA, 15 bp, Homo sapiens
tcagccttccttgta

SEQ ID NO: 734257 - DNA, 15 bp, Homo sapiens
cagccttccttgtac

SEQ ID NO: 734258 - DNA, 15 bp, Homo sapiens
agccttccttgtact

SEQ ID NO: 734259 - DNA, 15 bp, Homo sapiens
gccttccttgtactg

SEQ ID NO: 734260 - DNA, 15 bp, Homo sapiens
ccttccttgtactgt

SEQ ID NO: 734261 - DNA, 15 bp, Homo sapiens
cttccttgtactgtc

SEQ ID NO: 734262 - DNA, 15 bp, Homo sapiens
ttccttgtactgtct

SEQ ID NO: 734263 - DNA, 15 bp, Homo sapiens
tccttgtactgtctt

SEQ ID NO: 734264 - DNA, 15 bp, Homo sapiens
ccttgtactgtcttc

SEQ ID NO: 734265 - DNA, 15 bp, Homo sapiens
cttgtactgtcttct

SEQ ID NO: 734266 - DNA, 15 bp, Homo sapiens
ttgtactgtcttctt

SEQ ID NO: 734267 - DNA, 15 bp, Homo sapiens
tgtactgtcttcttt

SEQ ID NO: 734268 - DNA, 15 bp, Homo sapiens
gtactgtcttctttt

SEQ ID NO: 734269 - DNA, 15 bp, Homo sapiens
tactgtcttcttttc

SEQ ID NO: 734270 - DNA, 15 bp, Homo sapiens
actgtcttcttttca

SEQ ID NO: 734271 - DNA, 15 bp, Homo sapiens
ctgtcttcttttcat

SEQ ID NO: 734272 - DNA, 15 bp, Homo sapiens
tgtcttcttttcata

SEQ ID NO: 734273 - DNA, 15 bp, Homo sapiens
gtcttcttttcataa

SEQ ID NO: 734274 - DNA, 15 bp, Homo sapiens
tcttcttttcataag

SEQ ID NO: 734275 - DNA, 15 bp, Homo sapiens
cttcttttcataagc

SEQ ID NO: 734276 - DNA, 15 bp, Homo sapiens
ttcttttcataagcc

SEQ ID NO: 734277 - DNA, 15 bp, Homo sapiens
tcttttcataagcca

SEQ ID NO: 734278 - DNA, 15 bp, Homo sapiens
cttttcataagccat

SEQ ID NO: 734279 - DNA, 15 bp, Homo sapiens
ttttcataagccatc

SEQ ID NO: 734280 - DNA, 15 bp, Homo sapiens
tttcataagccatca

SEQ ID NO: 734281 - DNA, 15 bp, Homo sapiens
ttcataagccatcac

SEQ ID NO: 734282 - DNA, 15 bp, Homo sapiens
tcataagccatcact

SEQ ID NO: 734283 - DNA, 15 bp, Homo sapiens
cataagccatcactt

SEQ ID NO: 734284 - DNA, 15 bp, Homo sapiens
ataagccatcacttc

SEQ ID NO: 734285 - DNA, 15 bp, Homo sapiens
taagccatcacttcc

SEQ ID NO: 734286 - DNA, 15 bp, Homo sapiens
aagccatcacttcca

SEQ ID NO: 734287 - DNA, 15 bp, Homo sapiens
agccatcacttccat

SEQ ID NO: 734288 - DNA, 15 bp, Homo sapiens
gccatcacttccatt

SEQ ID NO: 734289 - DNA, 15 bp, Homo sapiens
ccatcacttccattt

SEQ ID NO: 734290 - DNA, 15 bp, Homo sapiens
catcacttccatttg

SEQ ID NO: 734291 - DNA, 15 bp, Homo sapiens
atcacttccatttgt

SEQ ID NO: 734292 - DNA, 15 bp, Homo sapiens
tcacttccatttgta

SEQ ID NO: 734293 - DNA, 15 bp, Homo sapiens
cacttccatttgtat

SEQ ID NO: 734294 - DNA, 15 bp, Homo sapiens
acttccatttgtatt

SEQ ID NO: 734295 - DNA, 15 bp, Homo sapiens
cttccatttgtattg

SEQ ID NO: 734296 - DNA, 15 bp, Homo sapiens
ttccatttgtattgt

SEQ ID NO: 734297 - DNA, 15 bp, Homo sapiens
tccatttgtattgtt

SEQ ID NO: 734298 - DNA, 15 bp, Homo sapiens
ccatttgtattgttg

SEQ ID NO: 734299 - DNA, 15 bp, Homo sapiens
catttgtattgttgc

SEQ ID NO: 734300 - DNA, 15 bp, Homo sapiens
atttgtattgttgcc

SEQ ID NO: 734301 - DNA, 15 bp, Homo sapiens
tttgtattgttgcca

SEQ ID NO: 734302 - DNA, 15 bp, Homo sapiens
ttgtattgttgccag

SEQ ID NO: 734303 - DNA, 15 bp, Homo sapiens
tgtattgttgccagt

SEQ ID NO: 734304 - DNA, 15 bp, Homo sapiens
gtattgttgccagtt

SEQ ID NO: 734305 - DNA, 15 bp, Homo sapiens
tattgttgccagttg

SEQ ID NO: 734306 - DNA, 15 bp, Homo sapiens
attgttgccagttgt

SEQ ID NO: 734307 - DNA, 15 bp, Homo sapiens
ttgttgccagttgtg

SEQ ID NO: 734308 - DNA, 15 bp, Homo sapiens
tgttgccagttgtgc

SEQ ID NO: 734309 - DNA, 15 bp, Homo sapiens
gttgccagttgtgca

SEQ ID NO: 734310 - DNA, 15 bp, Homo sapiens
ttgccagttgtgcat

SEQ ID NO: 734311 - DNA, 15 bp, Homo sapiens
tgccagttgtgcatg

SEQ ID NO: 734312 - DNA, 15 bp, Homo sapiens
gccagttgtgcatgg

SEQ ID NO: 734313 - DNA, 15 bp, Homo sapiens
ccagttgtgcatggt

SEQ ID NO: 734314 - DNA, 15 bp, Homo sapiens
cagttgtgcatggtt

SEQ ID NO: 734315 - DNA, 15 bp, Homo sapiens
agttgtgcatggttt

SEQ ID NO: 734316 - DNA, 15 bp, Homo sapiens
gttgtgcatggttta

SEQ ID NO: 734317 - DNA, 15 bp, Homo sapiens
ttgtgcatggtttag

SEQ ID NO: 734318 - DNA, 15 bp, Homo sapiens
tgtgcatggtttagg

SEQ ID NO: 734319 - DNA, 15 bp, Homo sapiens
gtgcatggtttaggg

SEQ ID NO: 734320 - DNA, 15 bp, Homo sapiens
tgcatggtttagggc

SEQ ID NO: 734321 - DNA, 15 bp, Homo sapiens
gcatggtttagggct

SEQ ID NO: 734322 - DNA, 15 bp, Homo sapiens
catggtttagggctc

SEQ ID NO: 734323 - DNA, 15 bp, Homo sapiens
atggtttagggctca

SEQ ID NO: 734324 - DNA, 15 bp, Homo sapiens
tggtttagggctcac

SEQ ID NO: 734325 - DNA, 15 bp, Homo sapiens
ggtttagggctcact

SEQ ID NO: 734326 - DNA, 15 bp, Homo sapiens
gtttagggctcactc

SEQ ID NO: 734327 - DNA, 15 bp, Homo sapiens
tttagggctcactca

SEQ ID NO: 734328 - DNA, 15 bp, Homo sapiens
ttagggctcactcac

SEQ ID NO: 734329 - DNA, 15 bp, Homo sapiens
tagggctcactcaca

SEQ ID NO: 734330 - DNA, 15 bp, Homo sapiens
agggctcactcacac

SEQ ID NO: 734331 - DNA, 15 bp, Homo sapiens
gggctcactcacaca

SEQ ID NO: 734332 - DNA, 15 bp, Homo sapiens
ggctcactcacacat

SEQ ID NO: 734333 - DNA, 15 bp, Homo sapiens
gctcactcacacatt

SEQ ID NO: 734334 - DNA, 15 bp, Homo sapiens
ctcactcacacattt

SEQ ID NO: 734335 - DNA, 15 bp, Homo sapiens
tcactcacacatttt

SEQ ID NO: 734336 - DNA, 15 bp, Homo sapiens
cactcacacattttt

SEQ ID NO: 734337 - DNA, 15 bp, Homo sapiens
actcacacatttttc

SEQ ID NO: 734338 - DNA, 15 bp, Homo sapiens
ctcacacatttttca

SEQ ID NO: 734339 - DNA, 15 bp, Homo sapiens
tcacacatttttcag

SEQ ID NO: 734340 - DNA, 15 bp, Homo sapiens
cacacatttttcagg

SEQ ID NO: 734341 - DNA, 15 bp, Homo sapiens
acacatttttcaggg

SEQ ID NO: 734342 - DNA, 15 bp, Homo sapiens
cacatttttcagggg

SEQ ID NO: 734343 - DNA, 15 bp, Homo sapiens
acatttttcagggga

SEQ ID NO: 734344 - DNA, 15 bp, Homo sapiens
catttttcaggggat

SEQ ID NO: 734345 - DNA, 15 bp, Homo sapiens
atttttcaggggatg

SEQ ID NO: 734346 - DNA, 15 bp, Homo sapiens
tttttcaggggatga

SEQ ID NO: 734347 - DNA, 15 bp, Homo sapiens
ttttcaggggatgat

SEQ ID NO: 734348 - DNA, 15 bp, Homo sapiens
tttcaggggatgatt

SEQ ID NO: 734349 - DNA, 15 bp, Homo sapiens
ttcaggggatgattg

SEQ ID NO: 734350 - DNA, 15 bp, Homo sapiens
tcaggggatgattgt

SEQ ID NO: 734351 - DNA, 15 bp, Homo sapiens
caggggatgattgtg

SEQ ID NO: 734352 - DNA, 15 bp, Homo sapiens
aggggatgattgtgc

SEQ ID NO: 734353 - DNA, 15 bp, Homo sapiens
ggggatgattgtgca

SEQ ID NO: 734354 - DNA, 15 bp, Homo sapiens
gggatgattgtgcaa

SEQ ID NO: 734355 - DNA, 15 bp, Homo sapiens
ggatgattgtgcaag

SEQ ID NO: 734356 - DNA, 15 bp, Homo sapiens
gatgattgtgcaaga

SEQ ID NO: 734357 - DNA, 15 bp, Homo sapiens
atgattgtgcaagaa

SEQ ID NO: 734358 - DNA, 15 bp, Homo sapiens
tgattgtgcaagaaa

SEQ ID NO: 734359 - DNA, 15 bp, Homo sapiens
gattgtgcaagaaat

SEQ ID NO: 734360 - DNA, 15 bp, Homo sapiens
attgtgcaagaaatg

SEQ ID NO: 734361 - DNA, 15 bp, Homo sapiens
ttgtgcaagaaatgt

SEQ ID NO: 734362 - DNA, 15 bp, Homo sapiens
tgtgcaagaaatgtt

SEQ ID NO: 734363 - DNA, 15 bp, Homo sapiens
gtgcaagaaatgttg

SEQ ID NO: 734364 - DNA, 15 bp, Homo sapiens
tgcaagaaatgttga

SEQ ID NO: 734365 - DNA, 15 bp, Homo sapiens
gcaagaaatgttgat

SEQ ID NO: 734366 - DNA, 15 bp, Homo sapiens
caagaaatgttgatg

SEQ ID NO: 734367 - DNA, 15 bp, Homo sapiens
aagaaatgttgatgt

SEQ ID NO: 734368 - DNA, 15 bp, Homo sapiens
agaaatgttgatgtt

SEQ ID NO: 734369 - DNA, 15 bp, Homo sapiens
gaaatgttgatgttt

SEQ ID NO: 734370 - DNA, 15 bp, Homo sapiens
aaatgttgatgtttt

SEQ ID NO: 734371 - DNA, 15 bp, Homo sapiens
aatgttgatgttttc

SEQ ID NO: 734372 - DNA, 15 bp, Homo sapiens
atgttgatgttttcc

SEQ ID NO: 734373 - DNA, 15 bp, Homo sapiens
tgttgatgttttcca

SEQ ID NO: 734374 - DNA, 15 bp, Homo sapiens
gttgatgttttccag

SEQ ID NO: 734375 - DNA, 15 bp, Homo sapiens
ttgatgttttccagt

SEQ ID NO: 734376 - DNA, 15 bp, Homo sapiens
tgatgttttccagta

SEQ ID NO: 734377 - DNA, 15 bp, Homo sapiens
gatgttttccagtac

SEQ ID NO: 734378 - DNA, 15 bp, Homo sapiens
atgttttccagtact

SEQ ID NO: 734379 - DNA, 15 bp, Homo sapiens
tgttttccagtactt

SEQ ID NO: 734380 - DNA, 15 bp, Homo sapiens
gttttccagtacttt

SEQ ID NO: 734381 - DNA, 15 bp, Homo sapiens
ttttccagtactttt

SEQ ID NO: 734382 - DNA, 15 bp, Homo sapiens
tttccagtacttttt

SEQ ID NO: 734383 - DNA, 15 bp, Homo sapiens
ttccagtactttttt

SEQ ID NO: 734384 - DNA, 15 bp, Homo sapiens
tccagtacttttttg

SEQ ID NO: 734385 - DNA, 15 bp, Homo sapiens
ccagtacttttttgg

SEQ ID NO: 734386 - DNA, 15 bp, Homo sapiens
cagtacttttttggt

SEQ ID NO: 734387 - DNA, 15 bp, Homo sapiens
agtacttttttggtc

SEQ ID NO: 734388 - DNA, 15 bp, Homo sapiens
gtacttttttggtct

SEQ ID NO: 734389 - DNA, 15 bp, Homo sapiens
tacttttttggtctc

SEQ ID NO: 734390 - DNA, 15 bp, Homo sapiens
acttttttggtctcc

SEQ ID NO: 734391 - DNA, 15 bp, Homo sapiens
cttttttggtctcct

SEQ ID NO: 734392 - DNA, 15 bp, Homo sapiens
ttttttggtctcctc

SEQ ID NO: 734393 - DNA, 15 bp, Homo sapiens
tttttggtctcctca

SEQ ID NO: 734394 - DNA, 15 bp, Homo sapiens
ttttggtctcctcaa

SEQ ID NO: 734395 - DNA, 15 bp, Homo sapiens
tttggtctcctcaat

SEQ ID NO: 734396 - DNA, 15 bp, Homo sapiens
ttggtctcctcaatg

SEQ ID NO: 734397 - DNA, 15 bp, Homo sapiens
tggtctcctcaatgg

SEQ ID NO: 734398 - DNA, 15 bp, Homo sapiens
ggtctcctcaatggt

SEQ ID NO: 734399 - DNA, 15 bp, Homo sapiens
gtctcctcaatggtt

SEQ ID NO: 734400 - DNA, 15 bp, Homo sapiens
tctcctcaatggttt

SEQ ID NO: 734401 - DNA, 15 bp, Homo sapiens
ctcctcaatggtttc

SEQ ID NO: 734402 - DNA, 15 bp, Homo sapiens
tcctcaatggtttct

SEQ ID NO: 734403 - DNA, 15 bp, Homo sapiens
cctcaatggtttctt

SEQ ID NO: 734404 - DNA, 15 bp, Homo sapiens
ctcaatggtttcttc

SEQ ID NO: 734405 - DNA, 15 bp, Homo sapiens
tcaatggtttcttct

SEQ ID NO: 734406 - DNA, 15 bp, Homo sapiens
caatggtttcttctt

SEQ ID NO: 734407 - DNA, 15 bp, Homo sapiens
aatggtttcttcttt

SEQ ID NO: 734408 - DNA, 15 bp, Homo sapiens
atggtttcttctttt

SEQ ID NO: 734409 - DNA, 15 bp, Homo sapiens
tggtttcttcttttg

SEQ ID NO: 734410 - DNA, 15 bp, Homo sapiens
ggtttcttcttttgg

SEQ ID NO: 734411 - DNA, 15 bp, Homo sapiens
gtttcttcttttggc

SEQ ID NO: 734412 - DNA, 15 bp, Homo sapiens
tttcttcttttggct

SEQ ID NO: 734413 - DNA, 15 bp, Homo sapiens
ttcttcttttggctt

SEQ ID NO: 734414 - DNA, 15 bp, Homo sapiens
tcttcttttggcttg

SEQ ID NO: 734415 - DNA, 15 bp, Homo sapiens
cttcttttggcttgt

SEQ ID NO: 734416 - DNA, 15 bp, Homo sapiens
ttcttttggcttgtg

SEQ ID NO: 734417 - DNA, 15 bp, Homo sapiens
tcttttggcttgtgc

SEQ ID NO: 734418 - DNA, 15 bp, Homo sapiens
cttttggcttgtgca

SEQ ID NO: 734419 - DNA, 15 bp, Homo sapiens
ttttggcttgtgcaa

SEQ ID NO: 734420 - DNA, 15 bp, Homo sapiens
tttggcttgtgcaag

SEQ ID NO: 734421 - DNA, 15 bp, Homo sapiens
ttggcttgtgcaaga

SEQ ID NO: 734422 - DNA, 15 bp, Homo sapiens
tggcttgtgcaagaa

SEQ ID NO: 734423 - DNA, 15 bp, Homo sapiens
ggcttgtgcaagaaa

SEQ ID NO: 734424 - DNA, 15 bp, Homo sapiens
gcttgtgcaagaaaa

SEQ ID NO: 734425 - DNA, 15 bp, Homo sapiens
cttgtgcaagaaaaa

SEQ ID NO: 734426 - DNA, 15 bp, Homo sapiens
ttgtgcaagaaaaaa

SEQ ID NO: 734427 - DNA, 15 bp, Homo sapiens
tgtgcaagaaaaaaa

SEQ ID NO: 734428 - DNA, 15 bp, Homo sapiens
gtgcaagaaaaaaat

SEQ ID NO: 734429 - DNA, 15 bp, Homo sapiens
tgcaagaaaaaaatc

SEQ ID NO: 734430 - DNA, 15 bp, Homo sapiens
gcaagaaaaaaatct

SEQ ID NO: 734431 - DNA, 15 bp, Homo sapiens
caagaaaaaaatctt

SEQ ID NO: 734432 - DNA, 15 bp, Homo sapiens
aagaaaaaaatcttt

SEQ ID NO: 734433 - DNA, 15 bp, Homo sapiens
agaaaaaaatcttta

SEQ ID NO: 734434 - DNA, 15 bp, Homo sapiens
gaaaaaaatctttac

SEQ ID NO: 734435 - DNA, 15 bp, Homo sapiens
aaaaaaatctttacc

SEQ ID NO: 734436 - DNA, 15 bp, Homo sapiens
aaaaaatctttaccc

SEQ ID NO: 734437 - DNA, 15 bp, Homo sapiens
aaaaatctttacccc

SEQ ID NO: 734438 - DNA, 15 bp, Homo sapiens
aaaatctttacccct

SEQ ID NO: 734439 - DNA, 15 bp, Homo sapiens
aaatctttacccctg

SEQ ID NO: 734440 - DNA, 15 bp, Homo sapiens
aatctttacccctgt

SEQ ID NO: 734441 - DNA, 15 bp, Homo sapiens
atctttacccctgtc

SEQ ID NO: 734442 - DNA, 15 bp, Homo sapiens
tctttacccctgtcc

SEQ ID NO: 734443 - DNA, 15 bp, Homo sapiens
ctttacccctgtcct

SEQ ID NO: 734444 - DNA, 15 bp, Homo sapiens
tttacccctgtcctc

SEQ ID NO: 734445 - DNA, 15 bp, Homo sapiens
ttacccctgtcctca

SEQ ID NO: 734446 - DNA, 15 bp, Homo sapiens
tacccctgtcctcac

SEQ ID NO: 734447 - DNA, 15 bp, Homo sapiens
acccctgtcctcact

SEQ ID NO: 734448 - DNA, 15 bp, Homo sapiens
cccctgtcctcactc

SEQ ID NO: 734449 - DNA, 15 bp, Homo sapiens
ccctgtcctcactcc

SEQ ID NO: 734450 - DNA, 15 bp, Homo sapiens
cctgtcctcactccc

SEQ ID NO: 734451 - DNA, 15 bp, Homo sapiens
ctgtcctcactccca

SEQ ID NO: 734452 - DNA, 15 bp, Homo sapiens
tgtcctcactcccat

SEQ ID NO: 734453 - DNA, 15 bp, Homo sapiens
gtcctcactcccatc

SEQ ID NO: 734454 - DNA, 15 bp, Homo sapiens
tcctcactcccatca

SEQ ID NO: 734455 - DNA, 15 bp, Homo sapiens
cctcactcccatcaa

SEQ ID NO: 734456 - DNA, 15 bp, Homo sapiens
ctcactcccatcaac

SEQ ID NO: 734457 - DNA, 15 bp, Homo sapiens
tcactcccatcaaca

SEQ ID NO: 734458 - DNA, 15 bp, Homo sapiens
cactcccatcaacac

SEQ ID NO: 734459 - DNA, 15 bp, Homo sapiens
actcccatcaacaca

SEQ ID NO: 734460 - DNA, 15 bp, Homo sapiens
ctcccatcaacacac

SEQ ID NO: 734461 - DNA, 15 bp, Homo sapiens
tcccatcaacacaca

SEQ ID NO: 734462 - DNA, 15 bp, Homo sapiens
cccatcaacacacat

SEQ ID NO: 734463 - DNA, 15 bp, Homo sapiens
ccatcaacacacatc

SEQ ID NO: 734464 - DNA, 15 bp, Homo sapiens
catcaacacacatcc

SEQ ID NO: 734465 - DNA, 15 bp, Homo sapiens
atcaacacacatcca

SEQ ID NO: 734466 - DNA, 15 bp, Homo sapiens
tcaacacacatccat

SEQ ID NO: 734467 - DNA, 15 bp, Homo sapiens
caacacacatccata

SEQ ID NO: 734468 - DNA, 15 bp, Homo sapiens
aacacacatccatac

SEQ ID NO: 734469 - DNA, 15 bp, Homo sapiens
acacacatccataca

SEQ ID NO: 734470 - DNA, 15 bp, Homo sapiens
cacacatccatacat

SEQ ID NO: 734471 - DNA, 15 bp, Homo sapiens
acacatccatacatg

SEQ ID NO: 734472 - DNA, 15 bp, Homo sapiens
cacatccatacatgc

SEQ ID NO: 734473 - DNA, 15 bp, Homo sapiens
acatccatacatgct

SEQ ID NO: 734474 - DNA, 15 bp, Homo sapiens
catccatacatgctt

SEQ ID NO: 734475 - DNA, 15 bp, Homo sapiens
atccatacatgcttt

SEQ ID NO: 734476 - DNA, 15 bp, Homo sapiens
tccatacatgctttg

SEQ ID NO: 734477 - DNA, 15 bp, Homo sapiens
ccatacatgctttgg

SEQ ID NO: 734478 - DNA, 15 bp, Homo sapiens
catacatgctttggg

SEQ ID NO: 734479 - DNA, 15 bp, Homo sapiens
atacatgctttgggg

SEQ ID NO: 734480 - DNA, 15 bp, Homo sapiens
tacatgctttggggc

SEQ ID NO: 734481 - DNA, 15 bp, Homo sapiens
acatgctttggggcc

SEQ ID NO: 734482 - DNA, 15 bp, Homo sapiens
catgctttggggcct

SEQ ID NO: 734483 - DNA, 15 bp, Homo sapiens
atgctttggggcctc

SEQ ID NO: 734484 - DNA, 15 bp, Homo sapiens
tgctttggggcctct

SEQ ID NO: 734485 - DNA, 15 bp, Homo sapiens
gctttggggcctctc

SEQ ID NO: 734486 - DNA, 15 bp, Homo sapiens
ctttggggcctctct

SEQ ID NO: 734487 - DNA, 15 bp, Homo sapiens
tttggggcctctctc

SEQ ID NO: 734488 - DNA, 15 bp, Homo sapiens
ttggggcctctctct

SEQ ID NO: 734489 - DNA, 15 bp, Homo sapiens
tggggcctctctctg

SEQ ID NO: 734490 - DNA, 15 bp, Homo sapiens
ggggcctctctctgc

SEQ ID NO: 734491 - DNA, 15 bp, Homo sapiens
gggcctctctctgcc

SEQ ID NO: 734492 - DNA, 15 bp, Homo sapiens
ggcctctctctgccc

SEQ ID NO: 734493 - DNA, 15 bp, Homo sapiens
gcctctctctgccct

SEQ ID NO: 734494 - DNA, 15 bp, Homo sapiens
cctctctctgccctt

SEQ ID NO: 734495 - DNA, 15 bp, Homo sapiens
ctctctctgcccttc

SEQ ID NO: 734496 - DNA, 15 bp, Homo sapiens
tctctctgcccttct

SEQ ID NO: 734497 - DNA, 15 bp, Homo sapiens
ctctctgcccttctc

SEQ ID NO: 734498 - DNA, 15 bp, Homo sapiens
tctctgcccttctct

SEQ ID NO: 734499 - DNA, 15 bp, Homo sapiens
ctctgcccttctctt

SEQ ID NO: 734500 - DNA, 15 bp, Homo sapiens
tctgcccttctcttc

SEQ ID NO: 734501 - DNA, 15 bp, Homo sapiens
ctgcccttctcttct

SEQ ID NO: 734502 - DNA, 15 bp, Homo sapiens
tgcccttctcttctg

SEQ ID NO: 734503 - DNA, 15 bp, Homo sapiens
gcccttctcttctgg

SEQ ID NO: 734504 - DNA, 15 bp, Homo sapiens
cccttctcttctgga

SEQ ID NO: 734505 - DNA, 15 bp, Homo sapiens
ccttctcttctggaa

SEQ ID NO: 734506 - DNA, 15 bp, Homo sapiens
cttctcttctggaat

SEQ ID NO: 734507 - DNA, 15 bp, Homo sapiens
ttctcttctggaatc

SEQ ID NO: 734508 - DNA, 15 bp, Homo sapiens
tctcttctggaatcc

SEQ ID NO: 734509 - DNA, 15 bp, Homo sapiens
ctcttctggaatcca

SEQ ID NO: 734510 - DNA, 15 bp, Homo sapiens
tcttctggaatccac

SEQ ID NO: 734511 - DNA, 15 bp, Homo sapiens
cttctggaatccact

SEQ ID NO: 734512 - DNA, 15 bp, Homo sapiens
ttctggaatccactg

SEQ ID NO: 734513 - DNA, 15 bp, Homo sapiens
tctggaatccactga

SEQ ID NO: 734514 - DNA, 15 bp, Homo sapiens
ctggaatccactgac

SEQ ID NO: 734515 - DNA, 15 bp, Homo sapiens
tggaatccactgaca

SEQ ID NO: 734516 - DNA, 15 bp, Homo sapiens
ggaatccactgacaa

SEQ ID NO: 734517 - DNA, 15 bp, Homo sapiens
gaatccactgacaat

SEQ ID NO: 734518 - DNA, 15 bp, Homo sapiens
aatccactgacaatg

SEQ ID NO: 734519 - DNA, 15 bp, Homo sapiens
atccactgacaatga

SEQ ID NO: 734520 - DNA, 15 bp, Homo sapiens
tccactgacaatgag

SEQ ID NO: 734521 - DNA, 15 bp, Homo sapiens
ccactgacaatgagc

SEQ ID NO: 734522 - DNA, 15 bp, Homo sapiens
cactgacaatgagca

SEQ ID NO: 734523 - DNA, 15 bp, Homo sapiens
actgacaatgagcaa

SEQ ID NO: 734524 - DNA, 15 bp, Homo sapiens
ctgacaatgagcaaa

SEQ ID NO: 734525 - DNA, 15 bp, Homo sapiens
tgacaatgagcaaag

SEQ ID NO: 734526 - DNA, 15 bp, Homo sapiens
gacaatgagcaaaga

SEQ ID NO: 734527 - DNA, 15 bp, Homo sapiens
acaatgagcaaagaa

SEQ ID NO: 734528 - DNA, 15 bp, Homo sapiens
caatgagcaaagaac

SEQ ID NO: 734529 - DNA, 15 bp, Homo sapiens
aatgagcaaagaact

SEQ ID NO: 734530 - DNA, 15 bp, Homo sapiens
atgagcaaagaactg

SEQ ID NO: 734531 - DNA, 15 bp, Homo sapiens
tgagcaaagaactga

SEQ ID NO: 734532 - DNA, 15 bp, Homo sapiens
gagcaaagaactgaa

SEQ ID NO: 734533 - DNA, 15 bp, Homo sapiens
agcaaagaactgaaa

SEQ ID NO: 734534 - DNA, 15 bp, Homo sapiens
gcaaagaactgaaag

SEQ ID NO: 734535 - DNA, 15 bp, Homo sapiens
caaagaactgaaagg

SEQ ID NO: 734536 - DNA, 15 bp, Homo sapiens
aaagaactgaaaggc

SEQ ID NO: 734537 - DNA, 15 bp, Homo sapiens
aagaactgaaaggca

SEQ ID NO: 734538 - DNA, 15 bp, Homo sapiens
agaactgaaaggcag

SEQ ID NO: 734539 - DNA, 15 bp, Homo sapiens
gaactgaaaggcaga

SEQ ID NO: 734540 - DNA, 15 bp, Homo sapiens
aactgaaaggcagaa

SEQ ID NO: 734541 - DNA, 15 bp, Homo sapiens
actgaaaggcagaat

SEQ ID NO: 734542 - DNA, 15 bp, Homo sapiens
ctgaaaggcagaatc

SEQ ID NO: 734543 - DNA, 15 bp, Homo sapiens
tgaaaggcagaatcc

SEQ ID NO: 734544 - DNA, 15 bp, Homo sapiens
gaaaggcagaatcct

SEQ ID NO: 734545 - DNA, 15 bp, Homo sapiens
aaaggcagaatcctg

SEQ ID NO: 734546 - DNA, 15 bp, Homo sapiens
aaggcagaatcctgt

SEQ ID NO: 734547 - DNA, 15 bp, Homo sapiens
aggcagaatcctgtc

SEQ ID NO: 734548 - DNA, 15 bp, Homo sapiens
ggcagaatcctgtct

SEQ ID NO: 734549 - DNA, 15 bp, Homo sapiens
gcagaatcctgtctt

SEQ ID NO: 734550 - DNA, 15 bp, Homo sapiens
cagaatcctgtcttc

SEQ ID NO: 734551 - DNA, 15 bp, Homo sapiens
agaatcctgtcttct

SEQ ID NO: 734552 - DNA, 15 bp, Homo sapiens
gaatcctgtcttctc

SEQ ID NO: 734553 - DNA, 15 bp, Homo sapiens
aatcctgtcttctct

SEQ ID NO: 734554 - DNA, 15 bp, Homo sapiens
atcctgtcttctcta

SEQ ID NO: 734555 - DNA, 15 bp, Homo sapiens
tcctgtcttctctag

SEQ ID NO: 734556 - DNA, 15 bp, Homo sapiens
cctgtcttctctaga

SEQ ID NO: 734557 - DNA, 15 bp, Homo sapiens
ctgtcttctctagac

SEQ ID NO: 734558 - DNA, 15 bp, Homo sapiens
tgtcttctctagaca

SEQ ID NO: 734559 - DNA, 15 bp, Homo sapiens
gtcttctctagacag

SEQ ID NO: 734560 - DNA, 15 bp, Homo sapiens
tcttctctagacagg

SEQ ID NO: 734561 - DNA, 15 bp, Homo sapiens
cttctctagacaggc

SEQ ID NO: 734562 - DNA, 15 bp, Homo sapiens
ttctctagacaggca

SEQ ID NO: 734563 - DNA, 15 bp, Homo sapiens
tctctagacaggcac

SEQ ID NO: 734564 - DNA, 15 bp, Homo sapiens
ctctagacaggcact

SEQ ID NO: 734565 - DNA, 15 bp, Homo sapiens
tctagacaggcactt

SEQ ID NO: 734566 - DNA, 15 bp, Homo sapiens
ctagacaggcacttt

SEQ ID NO: 734567 - DNA, 15 bp, Homo sapiens
tagacaggcactttt

SEQ ID NO: 734568 - DNA, 15 bp, Homo sapiens
agacaggcacttttc

SEQ ID NO: 734569 - DNA, 15 bp, Homo sapiens
gacaggcacttttca

SEQ ID NO: 734570 - DNA, 15 bp, Homo sapiens
acaggcacttttcag

SEQ ID NO: 734571 - DNA, 15 bp, Homo sapiens
caggcacttttcagc

SEQ ID NO: 734572 - DNA, 15 bp, Homo sapiens
aggcacttttcagct

SEQ ID NO: 734573 - DNA, 15 bp, Homo sapiens
ggcacttttcagctt

SEQ ID NO: 734574 - DNA, 15 bp, Homo sapiens
gcacttttcagcttt

SEQ ID NO: 734575 - DNA, 15 bp, Homo sapiens
cacttttcagctttt

SEQ ID NO: 734576 - DNA, 15 bp, Homo sapiens
acttttcagctttta

SEQ ID NO: 734577 - DNA, 15 bp, Homo sapiens
cttttcagcttttac

SEQ ID NO: 734578 - DNA, 15 bp, Homo sapiens
ttttcagcttttact

SEQ ID NO: 734579 - DNA, 15 bp, Homo sapiens
tttcagcttttactt

SEQ ID NO: 734580 - DNA, 15 bp, Homo sapiens
ttcagcttttactta

SEQ ID NO: 734581 - DNA, 15 bp, Homo sapiens
tcagcttttacttat

SEQ ID NO: 734582 - DNA, 15 bp, Homo sapiens
cagcttttacttatc

SEQ ID NO: 734583 - DNA, 15 bp, Homo sapiens
agcttttacttatca

SEQ ID NO: 734584 - DNA, 15 bp, Homo sapiens
gcttttacttatcat

SEQ ID NO: 734585 - DNA, 15 bp, Homo sapiens
cttttacttatcatt

SEQ ID NO: 734586 - DNA, 15 bp, Homo sapiens
ttttacttatcattg

SEQ ID NO: 734587 - DNA, 15 bp, Homo sapiens
tttacttatcattgt

SEQ ID NO: 734588 - DNA, 15 bp, Homo sapiens
ttacttatcattgtt

SEQ ID NO: 734589 - DNA, 15 bp, Homo sapiens
tacttatcattgttt

SEQ ID NO: 734590 - DNA, 15 bp, Homo sapiens
acttatcattgtttt

SEQ ID NO: 734591 - DNA, 15 bp, Homo sapiens
cttatcattgttttg

SEQ ID NO: 734592 - DNA, 15 bp, Homo sapiens
ttatcattgttttga

SEQ ID NO: 734593 - DNA, 15 bp, Homo sapiens
tatcattgttttgag

SEQ ID NO: 734594 - DNA, 15 bp, Homo sapiens
atcattgttttgagg

SEQ ID NO: 734595 - DNA, 15 bp, Homo sapiens
tcattgttttgaggt

SEQ ID NO: 734596 - DNA, 15 bp, Homo sapiens
cattgttttgaggtg

SEQ ID NO: 734597 - DNA, 15 bp, Homo sapiens
attgttttgaggtgt

SEQ ID NO: 734598 - DNA, 15 bp, Homo sapiens
ttgttttgaggtgtc

SEQ ID NO: 734599 - DNA, 15 bp, Homo sapiens
tgttttgaggtgtca

SEQ ID NO: 734600 - DNA, 15 bp, Homo sapiens
gttttgaggtgtcaa

SEQ ID NO: 734601 - DNA, 15 bp, Homo sapiens
ttttgaggtgtcaag

SEQ ID NO: 734602 - DNA, 15 bp, Homo sapiens
tttgaggtgtcaaga

SEQ ID NO: 734603 - DNA, 15 bp, Homo sapiens
ttgaggtgtcaagag

SEQ ID NO: 734604 - DNA, 15 bp, Homo sapiens
tgaggtgtcaagagt

SEQ ID NO: 734605 - DNA, 15 bp, Homo sapiens
gaggtgtcaagagtt

SEQ ID NO: 734606 - DNA, 15 bp, Homo sapiens
aggtgtcaagagttt

SEQ ID NO: 734607 - DNA, 15 bp, Homo sapiens
ggtgtcaagagtttt

SEQ ID NO: 734608 - DNA, 15 bp, Homo sapiens
gtgtcaagagttttg

SEQ ID NO: 734609 - DNA, 15 bp, Homo sapiens
tgtcaagagttttgg

SEQ ID NO: 734610 - DNA, 15 bp, Homo sapiens
gtcaagagttttgga

SEQ ID NO: 734611 - DNA, 15 bp, Homo sapiens
tcaagagttttggag

SEQ ID NO: 734612 - DNA, 15 bp, Homo sapiens
caagagttttggaga

SEQ ID NO: 734613 - DNA, 15 bp, Homo sapiens
aagagttttggagat

SEQ ID NO: 734614 - DNA, 15 bp, Homo sapiens
agagttttggagatt

SEQ ID NO: 734615 - DNA, 15 bp, Homo sapiens
gagttttggagattt

SEQ ID NO: 734616 - DNA, 15 bp, Homo sapiens
agttttggagatttt

SEQ ID NO: 734617 - DNA, 15 bp, Homo sapiens
gttttggagattttt

SEQ ID NO: 734618 - DNA, 15 bp, Homo sapiens
ttttggagatttttt

SEQ ID NO: 734619 - DNA, 15 bp, Homo sapiens
tttggagattttttt

SEQ ID NO: 734620 - DNA, 15 bp, Homo sapiens
ttggagatttttttc

SEQ ID NO: 734621 - DNA, 15 bp, Homo sapiens
tggagatttttttcc

SEQ ID NO: 734622 - DNA, 15 bp, Homo sapiens
ggagatttttttccc

SEQ ID NO: 734623 - DNA, 15 bp, Homo sapiens
gagatttttttcccc

SEQ ID NO: 734624 - DNA, 15 bp, Homo sapiens
agatttttttcccct

SEQ ID NO: 734625 - DNA, 15 bp, Homo sapiens
gatttttttcccctc

SEQ ID NO: 734626 - DNA, 15 bp, Homo sapiens
atttttttcccctcc

SEQ ID NO: 734627 - DNA, 15 bp, Homo sapiens
tttttttcccctcct

SEQ ID NO: 734628 - DNA, 15 bp, Homo sapiens
ttttttcccctcctc

SEQ ID NO: 734629 - DNA, 15 bp, Homo sapiens
tttttcccctcctct

SEQ ID NO: 734630 - DNA, 15 bp, Homo sapiens
ttttcccctcctctt

SEQ ID NO: 734631 - DNA, 15 bp, Homo sapiens
tttcccctcctcttt

SEQ ID NO: 734632 - DNA, 15 bp, Homo sapiens
ttcccctcctctttc

SEQ ID NO: 734633 - DNA, 15 bp, Homo sapiens
tcccctcctctttct

SEQ ID NO: 734634 - DNA, 15 bp, Homo sapiens
cccctcctctttctc

SEQ ID NO: 734635 - DNA, 15 bp, Homo sapiens
ccctcctctttctct

SEQ ID NO: 734636 - DNA, 15 bp, Homo sapiens
cctcctctttctctc

SEQ ID NO: 734637 - DNA, 15 bp, Homo sapiens
ctcctctttctctct

SEQ ID NO: 734638 - DNA, 15 bp, Homo sapiens
tcctctttctctctc

SEQ ID NO: 734639 - DNA, 15 bp, Homo sapiens
cctctttctctctca

SEQ ID NO: 734640 - DNA, 15 bp, Homo sapiens
ctctttctctctcaa

SEQ ID NO: 734641 - DNA, 15 bp, Homo sapiens
tctttctctctcaag

SEQ ID NO: 734642 - DNA, 15 bp, Homo sapiens
ctttctctctcaagt

SEQ ID NO: 734643 - DNA, 15 bp, Homo sapiens
tttctctctcaagtc

SEQ ID NO: 734644 - DNA, 15 bp, Homo sapiens
ttctctctcaagtca

SEQ ID NO: 734645 - DNA, 15 bp, Homo sapiens
tctctctcaagtcag

SEQ ID NO: 734646 - DNA, 15 bp, Homo sapiens
ctctctcaagtcagg

SEQ ID NO: 734647 - DNA, 15 bp, Homo sapiens
tctctcaagtcaggc

SEQ ID NO: 734648 - DNA, 15 bp, Homo sapiens
ctctcaagtcaggcc

SEQ ID NO: 734649 - DNA, 15 bp, Homo sapiens
tctcaagtcaggccc

SEQ ID NO: 734650 - DNA, 15 bp, Homo sapiens
ctcaagtcaggcccc

SEQ ID NO: 734651 - DNA, 15 bp, Homo sapiens
tcaagtcaggcccct

SEQ ID NO: 734652 - DNA, 15 bp, Homo sapiens
caagtcaggcccctc

SEQ ID NO: 734653 - DNA, 15 bp, Homo sapiens
aagtcaggcccctcc

SEQ ID NO: 734654 - DNA, 15 bp, Homo sapiens
agtcaggcccctcca

SEQ ID NO: 734655 - DNA, 15 bp, Homo sapiens
gtcaggcccctccag

SEQ ID NO: 734656 - DNA, 15 bp, Homo sapiens
tcaggcccctccaga

SEQ ID NO: 734657 - DNA, 15 bp, Homo sapiens
caggcccctccagaa

SEQ ID NO: 734658 - DNA, 15 bp, Homo sapiens
aggcccctccagaag

SEQ ID NO: 734659 - DNA, 15 bp, Homo sapiens
ggcccctccagaagc

SEQ ID NO: 734660 - DNA, 15 bp, Homo sapiens
gcccctccagaagcc

SEQ ID NO: 734661 - DNA, 15 bp, Homo sapiens
cccctccagaagcct

SEQ ID NO: 734662 - DNA, 15 bp, Homo sapiens
ccctccagaagcctg

SEQ ID NO: 734663 - DNA, 15 bp, Homo sapiens
cctccagaagcctgc

SEQ ID NO: 734664 - DNA, 15 bp, Homo sapiens
ctccagaagcctgcc

SEQ ID NO: 734665 - DNA, 15 bp, Homo sapiens
tccagaagcctgcct

SEQ ID NO: 734666 - DNA, 15 bp, Homo sapiens
ccagaagcctgcctc

SEQ ID NO: 734667 - DNA, 15 bp, Homo sapiens
cagaagcctgcctct

SEQ ID NO: 734668 - DNA, 15 bp, Homo sapiens
agaagcctgcctctc

SEQ ID NO: 734669 - DNA, 15 bp, Homo sapiens
gaagcctgcctctcc

SEQ ID NO: 734670 - DNA, 15 bp, Homo sapiens
aagcctgcctctccc

SEQ ID NO: 734671 - DNA, 15 bp, Homo sapiens
agcctgcctctcccc

SEQ ID NO: 734672 - DNA, 15 bp, Homo sapiens
gcctgcctctcccct

SEQ ID NO: 734673 - DNA, 15 bp, Homo sapiens
cctgcctctcccctt

SEQ ID NO: 734674 - DNA, 15 bp, Homo sapiens
ctgcctctccccttg

SEQ ID NO: 734675 - DNA, 15 bp, Homo sapiens
tgcctctccccttgg

SEQ ID NO: 734676 - DNA, 15 bp, Homo sapiens
gcctctccccttggc

SEQ ID NO: 734677 - DNA, 15 bp, Homo sapiens
cctctccccttggca

SEQ ID NO: 734678 - DNA, 15 bp, Homo sapiens
ctctccccttggcag

SEQ ID NO: 734679 - DNA, 15 bp, Homo sapiens
tctccccttggcagg

SEQ ID NO: 734680 - DNA, 15 bp, Homo sapiens
ctccccttggcaggt

SEQ ID NO: 734681 - DNA, 15 bp, Homo sapiens
tccccttggcaggtg

SEQ ID NO: 734682 - DNA, 15 bp, Homo sapiens
ccccttggcaggtgt

SEQ ID NO: 734683 - DNA, 15 bp, Homo sapiens
cccttggcaggtgtg

SEQ ID NO: 734684 - DNA, 15 bp, Homo sapiens
ccttggcaggtgtgg

SEQ ID NO: 734685 - DNA, 15 bp, Homo sapiens
cttggcaggtgtgga

SEQ ID NO: 734686 - DNA, 15 bp, Homo sapiens
ttggcaggtgtggag

SEQ ID NO: 734687 - DNA, 15 bp, Homo sapiens
tggcaggtgtggaga

SEQ ID NO: 734688 - DNA, 15 bp, Homo sapiens
ggcaggtgtggagaa

SEQ ID NO: 734689 - DNA, 15 bp, Homo sapiens
gcaggtgtggagaat

SEQ ID NO: 734690 - DNA, 15 bp, Homo sapiens
caggtgtggagaatt

SEQ ID NO: 734691 - DNA, 15 bp, Homo sapiens
aggtgtggagaattc

SEQ ID NO: 734692 - DNA, 15 bp, Homo sapiens
ggtgtggagaattca

SEQ ID NO: 734693 - DNA, 15 bp, Homo sapiens
gtgtggagaattcac

SEQ ID NO: 734694 - DNA, 15 bp, Homo sapiens
tgtggagaattcacc

SEQ ID NO: 734695 - DNA, 15 bp, Homo sapiens
gtggagaattcacct

SEQ ID NO: 734696 - DNA, 15 bp, Homo sapiens
tggagaattcacctg

SEQ ID NO: 734697 - DNA, 15 bp, Homo sapiens
ggagaattcacctgc

SEQ ID NO: 734698 - DNA, 15 bp, Homo sapiens
gagaattcacctgct

SEQ ID NO: 734699 - DNA, 15 bp, Homo sapiens
agaattcacctgctt

SEQ ID NO: 734700 - DNA, 15 bp, Homo sapiens
gaattcacctgcttt

SEQ ID NO: 734701 - DNA, 15 bp, Homo sapiens
aattcacctgctttt

SEQ ID NO: 734702 - DNA, 15 bp, Homo sapiens
attcacctgcttttt

SEQ ID NO: 734703 - DNA, 15 bp, Homo sapiens
ttcacctgctttttc

SEQ ID NO: 734704 - DNA, 15 bp, Homo sapiens
tcacctgctttttcg

SEQ ID NO: 734705 - DNA, 15 bp, Homo sapiens
cacctgctttttcgg

SEQ ID NO: 734706 - DNA, 15 bp, Homo sapiens
acctgctttttcggt

SEQ ID NO: 734707 - DNA, 15 bp, Homo sapiens
cctgctttttcggtc

SEQ ID NO: 734708 - DNA, 15 bp, Homo sapiens
ctgctttttcggtca

SEQ ID NO: 734709 - DNA, 15 bp, Homo sapiens
tgctttttcggtcac

SEQ ID NO: 734710 - DNA, 15 bp, Homo sapiens
gctttttcggtcact

SEQ ID NO: 734711 - DNA, 15 bp, Homo sapiens
ctttttcggtcactt

SEQ ID NO: 734712 - DNA, 15 bp, Homo sapiens
tttttcggtcacttc

SEQ ID NO: 734713 - DNA, 15 bp, Homo sapiens
ttttcggtcacttcc

SEQ ID NO: 734714 - DNA, 15 bp, Homo sapiens
tttcggtcacttcct

SEQ ID NO: 734715 - DNA, 15 bp, Homo sapiens
ttcggtcacttcctg

SEQ ID NO: 734716 - DNA, 15 bp, Homo sapiens
tcggtcacttcctgt

SEQ ID NO: 734717 - DNA, 15 bp, Homo sapiens
cggtcacttcctgtg

SEQ ID NO: 734718 - DNA, 15 bp, Homo sapiens
ggtcacttcctgtgc

SEQ ID NO: 734719 - DNA, 15 bp, Homo sapiens
gtcacttcctgtgca

SEQ ID NO: 734720 - DNA, 15 bp, Homo sapiens
tcacttcctgtgcac

SEQ ID NO: 734721 - DNA, 15 bp, Homo sapiens
cacttcctgtgcact

SEQ ID NO: 734722 - DNA, 15 bp, Homo sapiens
acttcctgtgcactc

SEQ ID NO: 734723 - DNA, 15 bp, Homo sapiens
cttcctgtgcactct

SEQ ID NO: 734724 - DNA, 15 bp, Homo sapiens
ttcctgtgcactcta

SEQ ID NO: 734725 - DNA, 15 bp, Homo sapiens
tcctgtgcactctac

SEQ ID NO: 734726 - DNA, 15 bp, Homo sapiens
cctgtgcactctact

SEQ ID NO: 734727 - DNA, 15 bp, Homo sapiens
ctgtgcactctactg

SEQ ID NO: 734728 - DNA, 15 bp, Homo sapiens
tgtgcactctactgc

SEQ ID NO: 734729 - DNA, 15 bp, Homo sapiens
gtgcactctactgcc

SEQ ID NO: 734730 - DNA, 15 bp, Homo sapiens
tgcactctactgcct

SEQ ID NO: 734731 - DNA, 15 bp, Homo sapiens
gcactctactgcctt

SEQ ID NO: 734732 - DNA, 15 bp, Homo sapiens
cactctactgccttc

SEQ ID NO: 734733 - DNA, 15 bp, Homo sapiens
actctactgccttcc

SEQ ID NO: 734734 - DNA, 15 bp, Homo sapiens
ctctactgccttccc

SEQ ID NO: 734735 - DNA, 15 bp, Homo sapiens
tctactgccttccct

SEQ ID NO: 734736 - DNA, 15 bp, Homo sapiens
ctactgccttccctg

SEQ ID NO: 734737 - DNA, 15 bp, Homo sapiens
tactgccttccctgg

SEQ ID NO: 734738 - DNA, 15 bp, Homo sapiens
actgccttccctggc

SEQ ID NO: 734739 - DNA, 15 bp, Homo sapiens
ctgccttccctggct

SEQ ID NO: 734740 - DNA, 15 bp, Homo sapiens
tgccttccctggctg

SEQ ID NO: 734741 - DNA, 15 bp, Homo sapiens
gccttccctggctgc

SEQ ID NO: 734742 - DNA, 15 bp, Homo sapiens
ccttccctggctgct

SEQ ID NO: 734743 - DNA, 15 bp, Homo sapiens
cttccctggctgctc

SEQ ID NO: 734744 - DNA, 15 bp, Homo sapiens
ttccctggctgctca

SEQ ID NO: 734745 - DNA, 15 bp, Homo sapiens
tccctggctgctcag

SEQ ID NO: 734746 - DNA, 15 bp, Homo sapiens
ccctggctgctcaga

SEQ ID NO: 734747 - DNA, 15 bp, Homo sapiens
cctggctgctcagaa

SEQ ID NO: 734748 - DNA, 15 bp, Homo sapiens
ctggctgctcagaaa

SEQ ID NO: 734749 - DNA, 15 bp, Homo sapiens
tggctgctcagaaaa

SEQ ID NO: 734750 - DNA, 15 bp, Homo sapiens
ggctgctcagaaaac

SEQ ID NO: 734751 - DNA, 15 bp, Homo sapiens
gctgctcagaaaaca

SEQ ID NO: 734752 - DNA, 15 bp, Homo sapiens
ctgctcagaaaacat

SEQ ID NO: 734753 - DNA, 15 bp, Homo sapiens
tgctcagaaaacatg

SEQ ID NO: 734754 - DNA, 15 bp, Homo sapiens
gctcagaaaacatgg

SEQ ID NO: 734755 - DNA, 15 bp, Homo sapiens
ctcagaaaacatggg

SEQ ID NO: 734756 - DNA, 15 bp, Homo sapiens
tcagaaaacatgggc

SEQ ID NO: 734757 - DNA, 15 bp, Homo sapiens
cagaaaacatgggcc

SEQ ID NO: 734758 - DNA, 15 bp, Homo sapiens
agaaaacatgggcct

SEQ ID NO: 734759 - DNA, 15 bp, Homo sapiens
gaaaacatgggcctt

SEQ ID NO: 734760 - DNA, 15 bp, Homo sapiens
aaaacatgggccttg

SEQ ID NO: 734761 - DNA, 15 bp, Homo sapiens
aaacatgggccttgg

SEQ ID NO: 734762 - DNA, 15 bp, Homo sapiens
aacatgggccttgga

SEQ ID NO: 734763 - DNA, 15 bp, Homo sapiens
acatgggccttggag

SEQ ID NO: 734764 - DNA, 15 bp, Homo sapiens
catgggccttggagc

SEQ ID NO: 734765 - DNA, 15 bp, Homo sapiens
atgggccttggagca

SEQ ID NO: 734766 - DNA, 15 bp, Homo sapiens
tgggccttggagcaa

SEQ ID NO: 734767 - DNA, 15 bp, Homo sapiens
gggccttggagcaac

SEQ ID NO: 734768 - DNA, 15 bp, Homo sapiens
ggccttggagcaact

SEQ ID NO: 734769 - DNA, 15 bp, Homo sapiens
gccttggagcaactt

SEQ ID NO: 734770 - DNA, 15 bp, Homo sapiens
ccttggagcaacttc

SEQ ID NO: 734771 - DNA, 15 bp, Homo sapiens
cttggagcaacttcc

SEQ ID NO: 734772 - DNA, 15 bp, Homo sapiens
ttggagcaacttccc

SEQ ID NO: 734773 - DNA, 15 bp, Homo sapiens
tggagcaacttccct

SEQ ID NO: 734774 - DNA, 15 bp, Homo sapiens
ggagcaacttccctc

SEQ ID NO: 734775 - DNA, 15 bp, Homo sapiens
gagcaacttccctcg

SEQ ID NO: 734776 - DNA, 15 bp, Homo sapiens
agcaacttccctcga

SEQ ID NO: 734777 - DNA, 15 bp, Homo sapiens
gcaacttccctcgac

SEQ ID NO: 734778 - DNA, 15 bp, Homo sapiens
caacttccctcgact

SEQ ID NO: 734779 - DNA, 15 bp, Homo sapiens
aacttccctcgactt

SEQ ID NO: 734780 - DNA, 15 bp, Homo sapiens
acttccctcgacttc

SEQ ID NO: 734781 - DNA, 15 bp, Homo sapiens
cttccctcgacttcc

SEQ ID NO: 734782 - DNA, 15 bp, Homo sapiens
ttccctcgacttcct

SEQ ID NO: 734783 - DNA, 15 bp, Homo sapiens
tccctcgacttcctc

SEQ ID NO: 734784 - DNA, 15 bp, Homo sapiens
ccctcgacttcctct

SEQ ID NO: 734785 - DNA, 15 bp, Homo sapiens
cctcgacttcctctc

SEQ ID NO: 734786 - DNA, 15 bp, Homo sapiens
ctcgacttcctctct

SEQ ID NO: 734787 - DNA, 15 bp, Homo sapiens
tcgacttcctctctc

SEQ ID NO: 734788 - DNA, 15 bp, Homo sapiens
cgacttcctctctcc

SEQ ID NO: 734789 - DNA, 15 bp, Homo sapiens
gacttcctctctcct

SEQ ID NO: 734790 - DNA, 15 bp, Homo sapiens
acttcctctctcctc

SEQ ID NO: 734791 - DNA, 15 bp, Homo sapiens
cttcctctctcctct

SEQ ID NO: 734792 - DNA, 15 bp, Homo sapiens
ttcctctctcctcta

SEQ ID NO: 734793 - DNA, 15 bp, Homo sapiens
tcctctctcctctag

SEQ ID NO: 734794 - DNA, 15 bp, Homo sapiens
cctctctcctctaga

SEQ ID NO: 734795 - DNA, 15 bp, Homo sapiens
ctctctcctctagat

SEQ ID NO: 734796 - DNA, 15 bp, Homo sapiens
tctctcctctagatt

SEQ ID NO: 734797 - DNA, 15 bp, Homo sapiens
ctctcctctagattc

SEQ ID NO: 734798 - DNA, 15 bp, Homo sapiens
tctcctctagattcc

SEQ ID NO: 734799 - DNA, 15 bp, Homo sapiens
ctcctctagattcct

SEQ ID NO: 734800 - DNA, 15 bp, Homo sapiens
tcctctagattccta

SEQ ID NO: 734801 - DNA, 15 bp, Homo sapiens
cctctagattcctag

SEQ ID NO: 734802 - DNA, 15 bp, Homo sapiens
ctctagattcctagc

SEQ ID NO: 734803 - DNA, 15 bp, Homo sapiens
tctagattcctagcc

SEQ ID NO: 734804 - DNA, 15 bp, Homo sapiens
ctagattcctagcca

SEQ ID NO: 734805 - DNA, 15 bp, Homo sapiens
tagattcctagccag

SEQ ID NO: 734806 - DNA, 15 bp, Homo sapiens
agattcctagccagc

SEQ ID NO: 734807 - DNA, 15 bp, Homo sapiens
gattcctagccagca

SEQ ID NO: 734808 - DNA, 15 bp, Homo sapiens
attcctagccagcag

SEQ ID NO: 734809 - DNA, 15 bp, Homo sapiens
ttcctagccagcagc

SEQ ID NO: 734810 - DNA, 15 bp, Homo sapiens
tcctagccagcagcc

SEQ ID NO: 734811 - DNA, 15 bp, Homo sapiens
cctagccagcagccg

SEQ ID NO: 734812 - DNA, 15 bp, Homo sapiens
ctagccagcagccgg

SEQ ID NO: 734813 - DNA, 15 bp, Homo sapiens
tagccagcagccggt

SEQ ID NO: 734814 - DNA, 15 bp, Homo sapiens
agccagcagccggtc

SEQ ID NO: 734815 - DNA, 15 bp, Homo sapiens
gccagcagccggtca

SEQ ID NO: 734816 - DNA, 15 bp, Homo sapiens
ccagcagccggtcaa

SEQ ID NO: 734817 - DNA, 15 bp, Homo sapiens
cagcagccggtcaag

SEQ ID NO: 734818 - DNA, 15 bp, Homo sapiens
agcagccggtcaaga

SEQ ID NO: 734819 - DNA, 15 bp, Homo sapiens
gcagccggtcaagag

SEQ ID NO: 734820 - DNA, 15 bp, Homo sapiens
cagccggtcaagagg

SEQ ID NO: 734821 - DNA, 15 bp, Homo sapiens
agccggtcaagaggc

SEQ ID NO: 734822 - DNA, 15 bp, Homo sapiens
gccggtcaagaggca

SEQ ID NO: 734823 - DNA, 15 bp, Homo sapiens
ccggtcaagaggcag

SEQ ID NO: 734824 - DNA, 15 bp, Homo sapiens
cggtcaagaggcagc

SEQ ID NO: 734825 - DNA, 15 bp, Homo sapiens
ggtcaagaggcagcc

SEQ ID NO: 734826 - DNA, 15 bp, Homo sapiens
gtcaagaggcagccc

SEQ ID NO: 734827 - DNA, 15 bp, Homo sapiens
tcaagaggcagcccc

SEQ ID NO: 734828 - DNA, 15 bp, Homo sapiens
caagaggcagcccca

SEQ ID NO: 734829 - DNA, 15 bp, Homo sapiens
aagaggcagccccac

SEQ ID NO: 734830 - DNA, 15 bp, Homo sapiens
agaggcagccccaca

SEQ ID NO: 734831 - DNA, 15 bp, Homo sapiens
gaggcagccccacag

SEQ ID NO: 734832 - DNA, 15 bp, Homo sapiens
aggcagccccacagt

SEQ ID NO: 734833 - DNA, 15 bp, Homo sapiens
ggcagccccacagtc

SEQ ID NO: 734834 - DNA, 15 bp, Homo sapiens
gcagccccacagtcc

SEQ ID NO: 734835 - DNA, 15 bp, Homo sapiens
cagccccacagtcct

SEQ ID NO: 734836 - DNA, 15 bp, Homo sapiens
agccccacagtcctc

SEQ ID NO: 734837 - DNA, 15 bp, Homo sapiens
gccccacagtcctct

SEQ ID NO: 734838 - DNA, 15 bp, Homo sapiens
ccccacagtcctctg

SEQ ID NO: 734839 - DNA, 15 bp, Homo sapiens
cccacagtcctctgg

SEQ ID NO: 734840 - DNA, 15 bp, Homo sapiens
ccacagtcctctggg

SEQ ID NO: 734841 - DNA, 15 bp, Homo sapiens
cacagtcctctgggc

SEQ ID NO: 734842 - DNA, 15 bp, Homo sapiens
acagtcctctgggcg

SEQ ID NO: 734843 - DNA, 15 bp, Homo sapiens
cagtcctctgggcgg

SEQ ID NO: 734844 - DNA, 15 bp, Homo sapiens
agtcctctgggcggc

SEQ ID NO: 734845 - DNA, 15 bp, Homo sapiens
gtcctctgggcggca

SEQ ID NO: 734846 - DNA, 15 bp, Homo sapiens
tcctctgggcggcag

SEQ ID NO: 734847 - DNA, 15 bp, Homo sapiens
cctctgggcggcagt

SEQ ID NO: 734848 - DNA, 15 bp, Homo sapiens
ctctgggcggcagtg

SEQ ID NO: 734849 - DNA, 15 bp, Homo sapiens
tctgggcggcagtgg

SEQ ID NO: 734850 - DNA, 15 bp, Homo sapiens
ctgggcggcagtggc

SEQ ID NO: 734851 - DNA, 15 bp, Homo sapiens
tgggcggcagtggcc

SEQ ID NO: 734852 - DNA, 15 bp, Homo sapiens
gggcggcagtggccg

SEQ ID NO: 734853 - DNA, 15 bp, Homo sapiens
ggcggcagtggccgg

SEQ ID NO: 734854 - DNA, 15 bp, Homo sapiens
gcggcagtggccggt

SEQ ID NO: 734855 - DNA, 15 bp, Homo sapiens
cggcagtggccggtg

SEQ ID NO: 734856 - DNA, 15 bp, Homo sapiens
ggcagtggccggtga

SEQ ID NO: 734857 - DNA, 15 bp, Homo sapiens
gcagtggccggtgat

SEQ ID NO: 734858 - DNA, 15 bp, Homo sapiens
cagtggccggtgatt

SEQ ID NO: 734859 - DNA, 15 bp, Homo sapiens
agtggccggtgatta

SEQ ID NO: 734860 - DNA, 15 bp, Homo sapiens
gtggccggtgattaa

SEQ ID NO: 734861 - DNA, 15 bp, Homo sapiens
tggccggtgattaag

SEQ ID NO: 734862 - DNA, 15 bp, Homo sapiens
ggccggtgattaagt

SEQ ID NO: 734863 - DNA, 15 bp, Homo sapiens
gccggtgattaagta

SEQ ID NO: 734864 - DNA, 15 bp, Homo sapiens
ccggtgattaagtag

SEQ ID NO: 734865 - DNA, 15 bp, Homo sapiens
cggtgattaagtagc

SEQ ID NO: 734866 - DNA, 15 bp, Homo sapiens
ggtgattaagtagcc

SEQ ID NO: 734867 - DNA, 15 bp, Homo sapiens
gtgattaagtagcca

SEQ ID NO: 734868 - DNA, 15 bp, Homo sapiens
tgattaagtagccag

SEQ ID NO: 734869 - DNA, 15 bp, Homo sapiens
gattaagtagccagg

SEQ ID NO: 734870 - DNA, 15 bp, Homo sapiens
attaagtagccaggt

SEQ ID NO: 734871 - DNA, 15 bp, Homo sapiens
ttaagtagccaggtc

SEQ ID NO: 734872 - DNA, 15 bp, Homo sapiens
taagtagccaggtct

SEQ ID NO: 734873 - DNA, 15 bp, Homo sapiens
aagtagccaggtctt

SEQ ID NO: 734874 - DNA, 15 bp, Homo sapiens
agtagccaggtcttt

SEQ ID NO: 734875 - DNA, 15 bp, Homo sapiens
gtagccaggtcttta

SEQ ID NO: 734876 - DNA, 15 bp, Homo sapiens
tagccaggtctttag

SEQ ID NO: 734877 - DNA, 15 bp, Homo sapiens
agccaggtctttagc

SEQ ID NO: 734878 - DNA, 15 bp, Homo sapiens
gccaggtctttagct

SEQ ID NO: 734879 - DNA, 15 bp, Homo sapiens
ccaggtctttagctg

SEQ ID NO: 734880 - DNA, 15 bp, Homo sapiens
caggtctttagctga

SEQ ID NO: 734881 - DNA, 15 bp, Homo sapiens
aggtctttagctgat

SEQ ID NO: 734882 - DNA, 15 bp, Homo sapiens
ggtctttagctgatt

SEQ ID NO: 734883 - DNA, 15 bp, Homo sapiens
gtctttagctgattc

SEQ ID NO: 734884 - DNA, 15 bp, Homo sapiens
tctttagctgattcc

SEQ ID NO: 734885 - DNA, 15 bp, Homo sapiens
ctttagctgattcca

SEQ ID NO: 734886 - DNA, 15 bp, Homo sapiens
tttagctgattccat

SEQ ID NO: 734887 - DNA, 15 bp, Homo sapiens
ttagctgattccatc

SEQ ID NO: 734888 - DNA, 15 bp, Homo sapiens
tagctgattccatcc

SEQ ID NO: 734889 - DNA, 15 bp, Homo sapiens
agctgattccatcct

SEQ ID NO: 734890 - DNA, 15 bp, Homo sapiens
gctgattccatcctt

SEQ ID NO: 734891 - DNA, 15 bp, Homo sapiens
ctgattccatccttg

SEQ ID NO: 734892 - DNA, 15 bp, Homo sapiens
tgattccatccttgt

SEQ ID NO: 734893 - DNA, 15 bp, Homo sapiens
gattccatccttgtt

SEQ ID NO: 734894 - DNA, 15 bp, Homo sapiens
attccatccttgttt

SEQ ID NO: 734895 - DNA, 15 bp, Homo sapiens
ttccatccttgtttg

SEQ ID NO: 734896 - DNA, 15 bp, Homo sapiens
tccatccttgtttgt

SEQ ID NO: 734897 - DNA, 15 bp, Homo sapiens
ccatccttgtttgtc

SEQ ID NO: 734898 - DNA, 15 bp, Homo sapiens
catccttgtttgtca

SEQ ID NO: 734899 - DNA, 15 bp, Homo sapiens
atccttgtttgtcat

SEQ ID NO: 734900 - DNA, 15 bp, Homo sapiens
tccttgtttgtcata

SEQ ID NO: 734901 - DNA, 15 bp, Homo sapiens
ccttgtttgtcataa

SEQ ID NO: 734902 - DNA, 15 bp, Homo sapiens
cttgtttgtcataac

SEQ ID NO: 734903 - DNA, 15 bp, Homo sapiens
ttgtttgtcataact

SEQ ID NO: 734904 - DNA, 15 bp, Homo sapiens
tgtttgtcataactc

SEQ ID NO: 734905 - DNA, 15 bp, Homo sapiens
gtttgtcataactct

SEQ ID NO: 734906 - DNA, 15 bp, Homo sapiens
tttgtcataactctg

SEQ ID NO: 734907 - DNA, 15 bp, Homo sapiens
ttgtcataactctgc

SEQ ID NO: 734908 - DNA, 15 bp, Homo sapiens
tgtcataactctgct

SEQ ID NO: 734909 - DNA, 15 bp, Homo sapiens
gtcataactctgctg

SEQ ID NO: 734910 - DNA, 15 bp, Homo sapiens
tcataactctgctgc

SEQ ID NO: 734911 - DNA, 15 bp, Homo sapiens
cataactctgctgca

SEQ ID NO: 734912 - DNA, 15 bp, Homo sapiens
ataactctgctgcaa

SEQ ID NO: 734913 - DNA, 15 bp, Homo sapiens
taactctgctgcaag

SEQ ID NO: 734914 - DNA, 15 bp, Homo sapiens
aactctgctgcaagt

SEQ ID NO: 734915 - DNA, 15 bp, Homo sapiens
actctgctgcaagtt

SEQ ID NO: 734916 - DNA, 15 bp, Homo sapiens
ctctgctgcaagtta

SEQ ID NO: 734917 - DNA, 15 bp, Homo sapiens
tctgctgcaagttat

SEQ ID NO: 734918 - DNA, 15 bp, Homo sapiens
ctgctgcaagttatt

SEQ ID NO: 734919 - DNA, 15 bp, Homo sapiens
tgctgcaagttattt

SEQ ID NO: 734920 - DNA, 15 bp, Homo sapiens
gctgcaagttatttt

SEQ ID NO: 734921 - DNA, 15 bp, Homo sapiens
ctgcaagttattttg

SEQ ID NO: 734922 - DNA, 15 bp, Homo sapiens
tgcaagttattttgg

SEQ ID NO: 734923 - DNA, 15 bp, Homo sapiens
gcaagttattttggt

SEQ ID NO: 734924 - DNA, 15 bp, Homo sapiens
caagttattttggtc

SEQ ID NO: 734925 - DNA, 15 bp, Homo sapiens
aagttattttggtct

SEQ ID NO: 734926 - DNA, 15 bp, Homo sapiens
agttattttggtctc

SEQ ID NO: 734927 - DNA, 15 bp, Homo sapiens
gttattttggtctct

SEQ ID NO: 734928 - DNA, 15 bp, Homo sapiens
ttattttggtctctg

SEQ ID NO: 734929 - DNA, 15 bp, Homo sapiens
tattttggtctctgt

SEQ ID NO: 734930 - DNA, 15 bp, Homo sapiens
attttggtctctgtg

SEQ ID NO: 734931 - DNA, 15 bp, Homo sapiens
ttttggtctctgtga

SEQ ID NO: 734932 - DNA, 15 bp, Homo sapiens
tttggtctctgtgac

SEQ ID NO: 734933 - DNA, 15 bp, Homo sapiens
ttggtctctgtgact

SEQ ID NO: 734934 - DNA, 15 bp, Homo sapiens
tggtctctgtgactt

SEQ ID NO: 734935 - DNA, 15 bp, Homo sapiens
ggtctctgtgacttg

SEQ ID NO: 734936 - DNA, 15 bp, Homo sapiens
gtctctgtgacttgt

SEQ ID NO: 734937 - DNA, 15 bp, Homo sapiens
tctctgtgacttgtg

SEQ ID NO: 734938 - DNA, 15 bp, Homo sapiens
ctctgtgacttgtgg

SEQ ID NO: 734939 - DNA, 15 bp, Homo sapiens
tctgtgacttgtggc

SEQ ID NO: 734940 - DNA, 15 bp, Homo sapiens
ctgtgacttgtggcg

SEQ ID NO: 734941 - DNA, 15 bp, Homo sapiens
tgtgacttgtggcgg

SEQ ID NO: 734942 - DNA, 15 bp, Homo sapiens
gtgacttgtggcggc

SEQ ID NO: 734943 - DNA, 15 bp, Homo sapiens
tgacttgtggcggca

SEQ ID NO: 734944 - DNA, 15 bp, Homo sapiens
gacttgtggcggcac

SEQ ID NO: 734945 - DNA, 15 bp, Homo sapiens
acttgtggcggcacc

SEQ ID NO: 734946 - DNA, 15 bp, Homo sapiens
cttgtggcggcacca

SEQ ID NO: 734947 - DNA, 15 bp, Homo sapiens
ttgtggcggcaccat

SEQ ID NO: 734948 - DNA, 15 bp, Homo sapiens
tgtggcggcaccatg

SEQ ID NO: 734949 - DNA, 15 bp, Homo sapiens
gtggcggcaccatga

SEQ ID NO: 734950 - DNA, 15 bp, Homo sapiens
tggcggcaccatgat

SEQ ID NO: 734951 - DNA, 15 bp, Homo sapiens
ggcggcaccatgatt

SEQ ID NO: 734952 - DNA, 15 bp, Homo sapiens
gcggcaccatgatta

SEQ ID NO: 734953 - DNA, 15 bp, Homo sapiens
cggcaccatgattag

SEQ ID NO: 734954 - DNA, 15 bp, Homo sapiens
ggcaccatgattagg

SEQ ID NO: 734955 - DNA, 15 bp, Homo sapiens
gcaccatgattaggg

SEQ ID NO: 734956 - DNA, 15 bp, Homo sapiens
caccatgattagggt

SEQ ID NO: 734957 - DNA, 15 bp, Homo sapiens
accatgattagggtt

SEQ ID NO: 734958 - DNA, 15 bp, Homo sapiens
ccatgattagggttt

SEQ ID NO: 734959 - DNA, 15 bp, Homo sapiens
catgattagggtttg

SEQ ID NO: 734960 - DNA, 15 bp, Homo sapiens
atgattagggtttga

SEQ ID NO: 734961 - DNA, 15 bp, Homo sapiens
tgattagggtttgat

SEQ ID NO: 734962 - DNA, 15 bp, Homo sapiens
gattagggtttgatt

SEQ ID NO: 734963 - DNA, 15 bp, Homo sapiens
attagggtttgatta

SEQ ID NO: 734964 - DNA, 15 bp, Homo sapiens
ttagggtttgattac

SEQ ID NO: 734965 - DNA, 15 bp, Homo sapiens
tagggtttgattact

SEQ ID NO: 734966 - DNA, 15 bp, Homo sapiens
agggtttgattacta

SEQ ID NO: 734967 - DNA, 15 bp, Homo sapiens
gggtttgattactat

SEQ ID NO: 734968 - DNA, 15 bp, Homo sapiens
ggtttgattactatc

SEQ ID NO: 734969 - DNA, 15 bp, Homo sapiens
gtttgattactatca

SEQ ID NO: 734970 - DNA, 15 bp, Homo sapiens
tttgattactatcac

SEQ ID NO: 734971 - DNA, 15 bp, Homo sapiens
ttgattactatcacc

SEQ ID NO: 734972 - DNA, 15 bp, Homo sapiens
tgattactatcacca

SEQ ID NO: 734973 - DNA, 15 bp, Homo sapiens
gattactatcaccaa

SEQ ID NO: 734974 - DNA, 15 bp, Homo sapiens
attactatcaccaaa

SEQ ID NO: 734975 - DNA, 15 bp, Homo sapiens
ttactatcaccaaag

SEQ ID NO: 734976 - DNA, 15 bp, Homo sapiens
tactatcaccaaagc

SEQ ID NO: 734977 - DNA, 15 bp, Homo sapiens
actatcaccaaagcg

SEQ ID NO: 734978 - DNA, 15 bp, Homo sapiens
ctatcaccaaagcga

SEQ ID NO: 734979 - DNA, 15 bp, Homo sapiens
tatcaccaaagcgac

SEQ ID NO: 734980 - DNA, 15 bp, Homo sapiens
atcaccaaagcgact

SEQ ID NO: 734981 - DNA, 15 bp, Homo sapiens
tcaccaaagcgacta

SEQ ID NO: 734982 - DNA, 15 bp, Homo sapiens
caccaaagcgactaa

SEQ ID NO: 734983 - DNA, 15 bp, Homo sapiens
accaaagcgactaaa

SEQ ID NO: 734984 - DNA, 15 bp, Homo sapiens
ccaaagcgactaaaa

SEQ ID NO: 734985 - DNA, 15 bp, Homo sapiens
caaagcgactaaaag

SEQ ID NO: 734986 - DNA, 15 bp, Homo sapiens
aaagcgactaaaaga

SEQ ID NO: 734987 - DNA, 15 bp, Homo sapiens
aagcgactaaaagat

SEQ ID NO: 734988 - DNA, 15 bp, Homo sapiens
agcgactaaaagatg

SEQ ID NO: 734989 - DNA, 15 bp, Homo sapiens
gcgactaaaagatga

SEQ ID NO: 734990 - DNA, 15 bp, Homo sapiens
cgactaaaagatgaa

SEQ ID NO: 734991 - DNA, 15 bp, Homo sapiens
gactaaaagatgaaa

SEQ ID NO: 734992 - DNA, 15 bp, Homo sapiens
actaaaagatgaaaa

SEQ ID NO: 734993 - DNA, 15 bp, Homo sapiens
ctaaaagatgaaaat

SEQ ID NO: 734994 - DNA, 15 bp, Homo sapiens
taaaagatgaaaata

SEQ ID NO: 734995 - DNA, 15 bp, Homo sapiens
aaaagatgaaaatag

SEQ ID NO: 734996 - DNA, 15 bp, Homo sapiens
aaagatgaaaataga

SEQ ID NO: 734997 - DNA, 15 bp, Homo sapiens
aagatgaaaatagaa

SEQ ID NO: 734998 - DNA, 15 bp, Homo sapiens
agatgaaaatagaag

SEQ ID NO: 734999 - DNA, 15 bp, Homo sapiens
gatgaaaatagaagc

SEQ ID NO: 735000 - DNA, 15 bp, Homo sapiens
atgaaaatagaagcc

SEQ ID NO: 735001 - DNA, 15 bp, Homo sapiens
tgaaaatagaagcca

SEQ ID NO: 735002 - DNA, 15 bp, Homo sapiens
gaaaatagaagccac

SEQ ID NO: 735003 - DNA, 15 bp, Homo sapiens
aaaatagaagccaca

SEQ ID NO: 735004 - DNA, 15 bp, Homo sapiens
aaatagaagccacaa

SEQ ID NO: 735005 - DNA, 15 bp, Homo sapiens
aatagaagccacaac

SEQ ID NO: 735006 - DNA, 15 bp, Homo sapiens
atagaagccacaaca

SEQ ID NO: 735007 - DNA, 15 bp, Homo sapiens
tagaagccacaacag

SEQ ID NO: 735008 - DNA, 15 bp, Homo sapiens
agaagccacaacagg

SEQ ID NO: 735009 - DNA, 15 bp, Homo sapiens
gaagccacaacagga

SEQ ID NO: 735010 - DNA, 15 bp, Homo sapiens
aagccacaacaggaa

SEQ ID NO: 735011 - DNA, 15 bp, Homo sapiens
agccacaacaggaaa

SEQ ID NO: 735012 - DNA, 15 bp, Homo sapiens
gccacaacaggaaat

SEQ ID NO: 735013 - DNA, 15 bp, Homo sapiens
ccacaacaggaaata

SEQ ID NO: 735014 - DNA, 15 bp, Homo sapiens
cacaacaggaaataa

SEQ ID NO: 735015 - DNA, 15 bp, Homo sapiens
acaacaggaaataaa

SEQ ID NO: 735016 - DNA, 15 bp, Homo sapiens
caacaggaaataaac

SEQ ID NO: 735017 - DNA, 15 bp, Homo sapiens
aacaggaaataaaca

SEQ ID NO: 735018 - DNA, 15 bp, Homo sapiens
acaggaaataaacaa

SEQ ID NO: 735019 - DNA, 15 bp, Homo sapiens
caggaaataaacaac

SEQ ID NO: 735020 - DNA, 15 bp, Homo sapiens
aggaaataaacaact

SEQ ID NO: 735021 - DNA, 15 bp, Homo sapiens
ggaaataaacaactg

SEQ ID NO: 735022 - DNA, 15 bp, Homo sapiens
gaaataaacaactgc

SEQ ID NO: 735023 - DNA, 15 bp, Homo sapiens
aaataaacaactgca

SEQ ID NO: 735024 - DNA, 15 bp, Homo sapiens
aataaacaactgcaa

SEQ ID NO: 735025 - DNA, 15 bp, Homo sapiens
ataaacaactgcaaa

SEQ ID NO: 735026 - DNA, 15 bp, Homo sapiens
taaacaactgcaaat

SEQ ID NO: 735027 - DNA, 15 bp, Homo sapiens
aaacaactgcaaatg

SEQ ID NO: 735028 - DNA, 15 bp, Homo sapiens
aacaactgcaaatga

SEQ ID NO: 735029 - DNA, 15 bp, Homo sapiens
acaactgcaaatgag

SEQ ID NO: 735030 - DNA, 15 bp, Homo sapiens
caactgcaaatgagc

SEQ ID NO: 735031 - DNA, 15 bp, Homo sapiens
aactgcaaatgagct

SEQ ID NO: 735032 - DNA, 15 bp, Homo sapiens
actgcaaatgagcta

SEQ ID NO: 735033 - DNA, 15 bp, Homo sapiens
ctgcaaatgagctat

SEQ ID NO: 735034 - DNA, 15 bp, Homo sapiens
tgcaaatgagctatt

SEQ ID NO: 735035 - DNA, 15 bp, Homo sapiens
gcaaatgagctattt

SEQ ID NO: 735036 - DNA, 15 bp, Homo sapiens
caaatgagctatttt

SEQ ID NO: 735037 - DNA, 15 bp, Homo sapiens
aaatgagctatttta

SEQ ID NO: 735038 - DNA, 15 bp, Homo sapiens
aatgagctattttat

SEQ ID NO: 735039 - DNA, 15 bp, Homo sapiens
atgagctattttatt

SEQ ID NO: 735040 - DNA, 15 bp, Homo sapiens
tgagctattttattc

SEQ ID NO: 735041 - DNA, 15 bp, Homo sapiens
gagctattttattcc

SEQ ID NO: 735042 - DNA, 15 bp, Homo sapiens
agctattttattcca

SEQ ID NO: 735043 - DNA, 15 bp, Homo sapiens
gctattttattccat

SEQ ID NO: 735044 - DNA, 15 bp, Homo sapiens
ctattttattccata

SEQ ID NO: 735045 - DNA, 15 bp, Homo sapiens
tattttattccatat

SEQ ID NO: 735046 - DNA, 15 bp, Homo sapiens
attttattccatatt

SEQ ID NO: 735047 - DNA, 15 bp, Homo sapiens
ttttattccatattc

SEQ ID NO: 735048 - DNA, 15 bp, Homo sapiens
tttattccatattcc

SEQ ID NO: 735049 - DNA, 15 bp, Homo sapiens
ttattccatattccc

SEQ ID NO: 735050 - DNA, 15 bp, Homo sapiens
tattccatattccct

SEQ ID NO: 735051 - DNA, 15 bp, Homo sapiens
attccatattccctg

SEQ ID NO: 735052 - DNA, 15 bp, Homo sapiens
ttccatattccctgc

SEQ ID NO: 735053 - DNA, 15 bp, Homo sapiens
tccatattccctgcc

SEQ ID NO: 735054 - DNA, 15 bp, Homo sapiens
ccatattccctgcca

SEQ ID NO: 735055 - DNA, 15 bp, Homo sapiens
catattccctgccag

SEQ ID NO: 735056 - DNA, 15 bp, Homo sapiens
atattccctgccagc

SEQ ID NO: 735057 - DNA, 15 bp, Homo sapiens
tattccctgccagca

SEQ ID NO: 735058 - DNA, 15 bp, Homo sapiens
attccctgccagcaa

SEQ ID NO: 735059 - DNA, 15 bp, Homo sapiens
ttccctgccagcaaa

SEQ ID NO: 735060 - DNA, 15 bp, Homo sapiens
tccctgccagcaaat

SEQ ID NO: 735061 - DNA, 15 bp, Homo sapiens
ccctgccagcaaatg

SEQ ID NO: 735062 - DNA, 15 bp, Homo sapiens
cctgccagcaaatga

SEQ ID NO: 735063 - DNA, 15 bp, Homo sapiens
ctgccagcaaatgat

SEQ ID NO: 735064 - DNA, 15 bp, Homo sapiens
tgccagcaaatgatt

SEQ ID NO: 735065 - DNA, 15 bp, Homo sapiens
gccagcaaatgatta

SEQ ID NO: 735066 - DNA, 15 bp, Homo sapiens
ccagcaaatgattag

SEQ ID NO: 735067 - DNA, 15 bp, Homo sapiens
cagcaaatgattaga

SEQ ID NO: 735068 - DNA, 15 bp, Homo sapiens
agcaaatgattagaa

SEQ ID NO: 735069 - DNA, 15 bp, Homo sapiens
gcaaatgattagaat

SEQ ID NO: 735070 - DNA, 15 bp, Homo sapiens
caaatgattagaatc

SEQ ID NO: 735071 - DNA, 15 bp, Homo sapiens
aaatgattagaatca

SEQ ID NO: 735072 - DNA, 15 bp, Homo sapiens
aatgattagaatcaa

SEQ ID NO: 735073 - DNA, 15 bp, Homo sapiens
atgattagaatcaaa

SEQ ID NO: 735074 - DNA, 15 bp, Homo sapiens
tgattagaatcaaac

SEQ ID NO: 735075 - DNA, 15 bp, Homo sapiens
gattagaatcaaact

SEQ ID NO: 735076 - DNA, 15 bp, Homo sapiens
attagaatcaaactc

SEQ ID NO: 735077 - DNA, 15 bp, Homo sapiens
ttagaatcaaactca

SEQ ID NO: 735078 - DNA, 15 bp, Homo sapiens
tagaatcaaactcat

SEQ ID NO: 735079 - DNA, 15 bp, Homo sapiens
agaatcaaactcatt

SEQ ID NO: 735080 - DNA, 15 bp, Homo sapiens
gaatcaaactcattc

SEQ ID NO: 735081 - DNA, 15 bp, Homo sapiens
aatcaaactcattca

SEQ ID NO: 735082 - DNA, 15 bp, Homo sapiens
atcaaactcattcac

SEQ ID NO: 735083 - DNA, 15 bp, Homo sapiens
tcaaactcattcaca

SEQ ID NO: 735084 - DNA, 15 bp, Homo sapiens
caaactcattcacaa

SEQ ID NO: 735085 - DNA, 15 bp, Homo sapiens
aaactcattcacaat

SEQ ID NO: 735086 - DNA, 15 bp, Homo sapiens
aactcattcacaata

SEQ ID NO: 735087 - DNA, 15 bp, Homo sapiens
actcattcacaatag

SEQ ID NO: 735088 - DNA, 15 bp, Homo sapiens
ctcattcacaatagt

SEQ ID NO: 735089 - DNA, 15 bp, Homo sapiens
tcattcacaatagtt

SEQ ID NO: 735090 - DNA, 15 bp, Homo sapiens
cattcacaatagttt

SEQ ID NO: 735091 - DNA, 15 bp, Homo sapiens
attcacaatagtttg

SEQ ID NO: 735092 - DNA, 15 bp, Homo sapiens
ttcacaatagtttgg

SEQ ID NO: 735093 - DNA, 15 bp, Homo sapiens
tcacaatagtttggt

SEQ ID NO: 735094 - DNA, 15 bp, Homo sapiens
cacaatagtttggtg

SEQ ID NO: 735095 - DNA, 15 bp, Homo sapiens
acaatagtttggtga

SEQ ID NO: 735096 - DNA, 15 bp, Homo sapiens
caatagtttggtgaa

SEQ ID NO: 735097 - DNA, 15 bp, Homo sapiens
aatagtttggtgaac

SEQ ID NO: 735098 - DNA, 15 bp, Homo sapiens
atagtttggtgaact

SEQ ID NO: 735099 - DNA, 15 bp, Homo sapiens
tagtttggtgaactc

SEQ ID NO: 735100 - DNA, 15 bp, Homo sapiens
agtttggtgaactct

SEQ ID NO: 735101 - DNA, 15 bp, Homo sapiens
gtttggtgaactctt

SEQ ID NO: 735102 - DNA, 15 bp, Homo sapiens
tttggtgaactctta

SEQ ID NO: 735103 - DNA, 15 bp, Homo sapiens
ttggtgaactcttaa

SEQ ID NO: 735104 - DNA, 15 bp, Homo sapiens
tggtgaactcttaaa

SEQ ID NO: 735105 - DNA, 15 bp, Homo sapiens
ggtgaactcttaaac

SEQ ID NO: 735106 - DNA, 15 bp, Homo sapiens
gtgaactcttaaact

SEQ ID NO: 735107 - DNA, 15 bp, Homo sapiens
tgaactcttaaactt

SEQ ID NO: 735108 - DNA, 15 bp, Homo sapiens
gaactcttaaacttt

SEQ ID NO: 735109 - DNA, 15 bp, Homo sapiens
aactcttaaactttt

SEQ ID NO: 735110 - DNA, 15 bp, Homo sapiens
actcttaaacttttt

SEQ ID NO: 735111 - DNA, 15 bp, Homo sapiens
ctcttaaactttttt

SEQ ID NO: 735112 - DNA, 15 bp, Homo sapiens
tcttaaacttttttc

SEQ ID NO: 735113 - DNA, 15 bp, Homo sapiens
cttaaacttttttct

SEQ ID NO: 735114 - DNA, 15 bp, Homo sapiens
ttaaacttttttctt

SEQ ID NO: 735115 - DNA, 15 bp, Homo sapiens
taaacttttttctta

SEQ ID NO: 735116 - DNA, 15 bp, Homo sapiens
aaacttttttcttaa

SEQ ID NO: 735117 - DNA, 15 bp, Homo sapiens
aacttttttcttaag

SEQ ID NO: 735118 - DNA, 15 bp, Homo sapiens
acttttttcttaagg

SEQ ID NO: 735119 - DNA, 15 bp, Homo sapiens
cttttttcttaaggg

SEQ ID NO: 735120 - DNA, 15 bp, Homo sapiens
ttttttcttaagggt

SEQ ID NO: 735121 - DNA, 15 bp, Homo sapiens
tttttcttaagggtc

SEQ ID NO: 735122 - DNA, 15 bp, Homo sapiens
ttttcttaagggtca

SEQ ID NO: 735123 - DNA, 15 bp, Homo sapiens
tttcttaagggtcag

SEQ ID NO: 735124 - DNA, 15 bp, Homo sapiens
ttcttaagggtcaga

SEQ ID NO: 735125 - DNA, 15 bp, Homo sapiens
tcttaagggtcagaa

SEQ ID NO: 735126 - DNA, 15 bp, Homo sapiens
cttaagggtcagaat

SEQ ID NO: 735127 - DNA, 15 bp, Homo sapiens
ttaagggtcagaata

SEQ ID NO: 735128 - DNA, 15 bp, Homo sapiens
taagggtcagaatag

SEQ ID NO: 735129 - DNA, 15 bp, Homo sapiens
aagggtcagaatagt

SEQ ID NO: 735130 - DNA, 15 bp, Homo sapiens
agggtcagaatagtc

SEQ ID NO: 735131 - DNA, 15 bp, Homo sapiens
gggtcagaatagtct

SEQ ID NO: 735132 - DNA, 15 bp, Homo sapiens
ggtcagaatagtctg

SEQ ID NO: 735133 - DNA, 15 bp, Homo sapiens
gtcagaatagtctga

SEQ ID NO: 735134 - DNA, 15 bp, Homo sapiens
tcagaatagtctgaa

SEQ ID NO: 735135 - DNA, 15 bp, Homo sapiens
cagaatagtctgaaa

SEQ ID NO: 735136 - DNA, 15 bp, Homo sapiens
agaatagtctgaaac

SEQ ID NO: 735137 - DNA, 15 bp, Homo sapiens
gaatagtctgaaact

SEQ ID NO: 735138 - DNA, 15 bp, Homo sapiens
aatagtctgaaactg

SEQ ID NO: 735139 - DNA, 15 bp, Homo sapiens
atagtctgaaactgc

SEQ ID NO: 735140 - DNA, 15 bp, Homo sapiens
tagtctgaaactgcg

SEQ ID NO: 735141 - DNA, 15 bp, Homo sapiens
agtctgaaactgcgt

SEQ ID NO: 735142 - DNA, 15 bp, Homo sapiens
gtctgaaactgcgtg

SEQ ID NO: 735143 - DNA, 15 bp, Homo sapiens
tctgaaactgcgtgt

SEQ ID NO: 735144 - DNA, 15 bp, Homo sapiens
ctgaaactgcgtgtt

SEQ ID NO: 735145 - DNA, 15 bp, Homo sapiens
tgaaactgcgtgttt

SEQ ID NO: 735146 - DNA, 15 bp, Homo sapiens
gaaactgcgtgtttg

SEQ ID NO: 735147 - DNA, 15 bp, Homo sapiens
aaactgcgtgtttgt

SEQ ID NO: 735148 - DNA, 15 bp, Homo sapiens
aactgcgtgtttgtt

SEQ ID NO: 735149 - DNA, 15 bp, Homo sapiens
actgcgtgtttgttg

SEQ ID NO: 735150 - DNA, 15 bp, Homo sapiens
ctgcgtgtttgttgg

SEQ ID NO: 735151 - DNA, 15 bp, Homo sapiens
tgcgtgtttgttggc

SEQ ID NO: 735152 - DNA, 15 bp, Homo sapiens
gcgtgtttgttggcc

SEQ ID NO: 735153 - DNA, 15 bp, Homo sapiens
cgtgtttgttggcct

SEQ ID NO: 735154 - DNA, 15 bp, Homo sapiens
gtgtttgttggcctc

SEQ ID NO: 735155 - DNA, 15 bp, Homo sapiens
tgtttgttggcctcc

SEQ ID NO: 735156 - DNA, 15 bp, Homo sapiens
gtttgttggcctcct

SEQ ID NO: 735157 - DNA, 15 bp, Homo sapiens
tttgttggcctcctt

SEQ ID NO: 735158 - DNA, 15 bp, Homo sapiens
ttgttggcctccttt

SEQ ID NO: 735159 - DNA, 15 bp, Homo sapiens
tgttggcctcctttg

SEQ ID NO: 735160 - DNA, 15 bp, Homo sapiens
gttggcctcctttgt

SEQ ID NO: 735161 - DNA, 15 bp, Homo sapiens
ttggcctcctttgtg

SEQ ID NO: 735162 - DNA, 15 bp, Homo sapiens
tggcctcctttgtgc

SEQ ID NO: 735163 - DNA, 15 bp, Homo sapiens
ggcctcctttgtgcc

SEQ ID NO: 735164 - DNA, 15 bp, Homo sapiens
gcctcctttgtgcct

SEQ ID NO: 735165 - DNA, 15 bp, Homo sapiens
cctcctttgtgcctg

SEQ ID NO: 735166 - DNA, 15 bp, Homo sapiens
ctcctttgtgcctgt

SEQ ID NO: 735167 - DNA, 15 bp, Homo sapiens
tcctttgtgcctgtg

SEQ ID NO: 735168 - DNA, 15 bp, Homo sapiens
cctttgtgcctgtgg

SEQ ID NO: 735169 - DNA, 15 bp, Homo sapiens
ctttgtgcctgtgga

SEQ ID NO: 735170 - DNA, 15 bp, Homo sapiens
tttgtgcctgtggaa

SEQ ID NO: 735171 - DNA, 15 bp, Homo sapiens
ttgtgcctgtggaag

SEQ ID NO: 735172 - DNA, 15 bp, Homo sapiens
tgtgcctgtggaagg

SEQ ID NO: 735173 - DNA, 15 bp, Homo sapiens
gtgcctgtggaaggg

SEQ ID NO: 735174 - DNA, 15 bp, Homo sapiens
tgcctgtggaaggga

SEQ ID NO: 735175 - DNA, 15 bp, Homo sapiens
gcctgtggaagggaa

SEQ ID NO: 735176 - DNA, 15 bp, Homo sapiens
cctgtggaagggaaa

SEQ ID NO: 735177 - DNA, 15 bp, Homo sapiens
ctgtggaagggaaag

SEQ ID NO: 735178 - DNA, 15 bp, Homo sapiens
tgtggaagggaaaga

SEQ ID NO: 735179 - DNA, 15 bp, Homo sapiens
gtggaagggaaagaa

SEQ ID NO: 735180 - DNA, 15 bp, Homo sapiens
tggaagggaaagaaa

SEQ ID NO: 735181 - DNA, 15 bp, Homo sapiens
ggaagggaaagaaag

SEQ ID NO: 735182 - DNA, 15 bp, Homo sapiens
gaagggaaagaaaga

SEQ ID NO: 735183 - DNA, 15 bp, Homo sapiens
aagggaaagaaagaa

SEQ ID NO: 735184 - DNA, 15 bp, Homo sapiens
agggaaagaaagaaa

SEQ ID NO: 735185 - DNA, 15 bp, Homo sapiens
gggaaagaaagaaac

SEQ ID NO: 735186 - DNA, 15 bp, Homo sapiens
ggaaagaaagaaact

SEQ ID NO: 735187 - DNA, 15 bp, Homo sapiens
gaaagaaagaaacta

SEQ ID NO: 735188 - DNA, 15 bp, Homo sapiens
aaagaaagaaactac

SEQ ID NO: 735189 - DNA, 15 bp, Homo sapiens
aagaaagaaactacc

SEQ ID NO: 735190 - DNA, 15 bp, Homo sapiens
agaaagaaactacct

SEQ ID NO: 735191 - DNA, 15 bp, Homo sapiens
gaaagaaactacctt

SEQ ID NO: 735192 - DNA, 15 bp, Homo sapiens
aaagaaactaccttt

SEQ ID NO: 735193 - DNA, 15 bp, Homo sapiens
aagaaactacctttc

SEQ ID NO: 735194 - DNA, 15 bp, Homo sapiens
agaaactacctttct

SEQ ID NO: 735195 - DNA, 15 bp, Homo sapiens
gaaactacctttcta

SEQ ID NO: 735196 - DNA, 15 bp, Homo sapiens
aaactacctttctag

SEQ ID NO: 735197 - DNA, 15 bp, Homo sapiens
aactacctttctagg

SEQ ID NO: 735198 - DNA, 15 bp, Homo sapiens
actacctttctaggc

SEQ ID NO: 735199 - DNA, 15 bp, Homo sapiens
ctacctttctaggca

SEQ ID NO: 735200 - DNA, 15 bp, Homo sapiens
tacctttctaggcac

SEQ ID NO: 735201 - DNA, 15 bp, Homo sapiens
acctttctaggcaca

SEQ ID NO: 735202 - DNA, 15 bp, Homo sapiens
cctttctaggcacac

SEQ ID NO: 735203 - DNA, 15 bp, Homo sapiens
ctttctaggcacacc

SEQ ID NO: 735204 - DNA, 15 bp, Homo sapiens
tttctaggcacacca

SEQ ID NO: 735205 - DNA, 15 bp, Homo sapiens
ttctaggcacaccag

SEQ ID NO: 735206 - DNA, 15 bp, Homo sapiens
tctaggcacaccagc

SEQ ID NO: 735207 - DNA, 15 bp, Homo sapiens
ctaggcacaccagcc

SEQ ID NO: 735208 - DNA, 15 bp, Homo sapiens
taggcacaccagcct

SEQ ID NO: 735209 - DNA, 15 bp, Homo sapiens
aggcacaccagcctg

SEQ ID NO: 735210 - DNA, 15 bp, Homo sapiens
ggcacaccagcctgc

SEQ ID NO: 735211 - DNA, 15 bp, Homo sapiens
gcacaccagcctgct

SEQ ID NO: 735212 - DNA, 15 bp, Homo sapiens
cacaccagcctgctg

SEQ ID NO: 735213 - DNA, 15 bp, Homo sapiens
acaccagcctgctgg

SEQ ID NO: 735214 - DNA, 15 bp, Homo sapiens
caccagcctgctggg

SEQ ID NO: 735215 - DNA, 15 bp, Homo sapiens
accagcctgctggga

SEQ ID NO: 735216 - DNA, 15 bp, Homo sapiens
ccagcctgctgggaa

SEQ ID NO: 735217 - DNA, 15 bp, Homo sapiens
cagcctgctgggaat

SEQ ID NO: 735218 - DNA, 15 bp, Homo sapiens
agcctgctgggaatt

SEQ ID NO: 735219 - DNA, 15 bp, Homo sapiens
gcctgctgggaattc

SEQ ID NO: 735220 - DNA, 15 bp, Homo sapiens
cctgctgggaattcc

SEQ ID NO: 735221 - DNA, 15 bp, Homo sapiens
ctgctgggaattcct

SEQ ID NO: 735222 - DNA, 15 bp, Homo sapiens
tgctgggaattcctc

SEQ ID NO: 735223 - DNA, 15 bp, Homo sapiens
gctgggaattcctct

SEQ ID NO: 735224 - DNA, 15 bp, Homo sapiens
ctgggaattcctcta

SEQ ID NO: 735225 - DNA, 15 bp, Homo sapiens
tgggaattcctctac

SEQ ID NO: 735226 - DNA, 15 bp, Homo sapiens
gggaattcctctact

SEQ ID NO: 735227 - DNA, 15 bp, Homo sapiens
ggaattcctctactg

SEQ ID NO: 735228 - DNA, 15 bp, Homo sapiens
gaattcctctactgc

SEQ ID NO: 735229 - DNA, 15 bp, Homo sapiens
aattcctctactgcc

SEQ ID NO: 735230 - DNA, 15 bp, Homo sapiens
attcctctactgcca

SEQ ID NO: 735231 - DNA, 15 bp, Homo sapiens
ttcctctactgccag

SEQ ID NO: 735232 - DNA, 15 bp, Homo sapiens
tcctctactgccagg

SEQ ID NO: 735233 - DNA, 15 bp, Homo sapiens
cctctactgccaggc

SEQ ID NO: 735234 - DNA, 15 bp, Homo sapiens
ctctactgccaggct

SEQ ID NO: 735235 - DNA, 15 bp, Homo sapiens
tctactgccaggctt

SEQ ID NO: 735236 - DNA, 15 bp, Homo sapiens
ctactgccaggcttc

SEQ ID NO: 735237 - DNA, 15 bp, Homo sapiens
tactgccaggcttct

SEQ ID NO: 735238 - DNA, 15 bp, Homo sapiens
actgccaggcttctg

SEQ ID NO: 735239 - DNA, 15 bp, Homo sapiens
ctgccaggcttctgg

SEQ ID NO: 735240 - DNA, 15 bp, Homo sapiens
tgccaggcttctggc

SEQ ID NO: 735241 - DNA, 15 bp, Homo sapiens
gccaggcttctggct

SEQ ID NO: 735242 - DNA, 15 bp, Homo sapiens
ccaggcttctggctt

SEQ ID NO: 735243 - DNA, 15 bp, Homo sapiens
caggcttctggcttc

SEQ ID NO: 735244 - DNA, 15 bp, Homo sapiens
aggcttctggcttct

SEQ ID NO: 735245 - DNA, 15 bp, Homo sapiens
ggcttctggcttctt

SEQ ID NO: 735246 - DNA, 15 bp, Homo sapiens
gcttctggcttcttt

SEQ ID NO: 735247 - DNA, 15 bp, Homo sapiens
cttctggcttctttc

SEQ ID NO: 735248 - DNA, 15 bp, Homo sapiens
ttctggcttctttct

SEQ ID NO: 735249 - DNA, 15 bp, Homo sapiens
tctggcttctttctt

SEQ ID NO: 735250 - DNA, 15 bp, Homo sapiens
ctggcttctttcttg

SEQ ID NO: 735251 - DNA, 15 bp, Homo sapiens
tggcttctttcttgg

SEQ ID NO: 735252 - DNA, 15 bp, Homo sapiens
ggcttctttcttgga

SEQ ID NO: 735253 - DNA, 15 bp, Homo sapiens
gcttctttcttggag

SEQ ID NO: 735254 - DNA, 15 bp, Homo sapiens
cttctttcttggaga

SEQ ID NO: 735255 - DNA, 15 bp, Homo sapiens
ttctttcttggagag

SEQ ID NO: 735256 - DNA, 15 bp, Homo sapiens
tctttcttggagagg

SEQ ID NO: 735257 - DNA, 15 bp, Homo sapiens
ctttcttggagagga

SEQ ID NO: 735258 - DNA, 15 bp, Homo sapiens
tttcttggagaggag

SEQ ID NO: 735259 - DNA, 15 bp, Homo sapiens
ttcttggagaggaga

SEQ ID NO: 735260 - DNA, 15 bp, Homo sapiens
tcttggagaggagag

SEQ ID NO: 735261 - DNA, 15 bp, Homo sapiens
cttggagaggagagg

SEQ ID NO: 735262 - DNA, 15 bp, Homo sapiens
ttggagaggagaggg

SEQ ID NO: 735263 - DNA, 15 bp, Homo sapiens
tggagaggagaggga

SEQ ID NO: 735264 - DNA, 15 bp, Homo sapiens
ggagaggagagggat

SEQ ID NO: 735265 - DNA, 15 bp, Homo sapiens
gagaggagagggata

SEQ ID NO: 735266 - DNA, 15 bp, Homo sapiens
agaggagagggataa

SEQ ID NO: 735267 - DNA, 15 bp, Homo sapiens
gaggagagggataag

SEQ ID NO: 735268 - DNA, 15 bp, Homo sapiens
aggagagggataaga

SEQ ID NO: 735269 - DNA, 15 bp, Homo sapiens
ggagagggataagaa

SEQ ID NO: 735270 - DNA, 15 bp, Homo sapiens
gagagggataagaat

SEQ ID NO: 735271 - DNA, 15 bp, Homo sapiens
agagggataagaatg

SEQ ID NO: 735272 - DNA, 15 bp, Homo sapiens
gagggataagaatgt

SEQ ID NO: 735273 - DNA, 15 bp, Homo sapiens
agggataagaatgtg

SEQ ID NO: 735274 - DNA, 15 bp, Homo sapiens
gggataagaatgtga

SEQ ID NO: 735275 - DNA, 15 bp, Homo sapiens
ggataagaatgtgat

SEQ ID NO: 735276 - DNA, 15 bp, Homo sapiens
gataagaatgtgatg

SEQ ID NO: 735277 - DNA, 15 bp, Homo sapiens
ataagaatgtgatgg

SEQ ID NO: 735278 - DNA, 15 bp, Homo sapiens
taagaatgtgatggg

SEQ ID NO: 735279 - DNA, 15 bp, Homo sapiens
aagaatgtgatgggg

SEQ ID NO: 735280 - DNA, 15 bp, Homo sapiens
agaatgtgatggggt

SEQ ID NO: 735281 - DNA, 15 bp, Homo sapiens
gaatgtgatggggtg

SEQ ID NO: 735282 - DNA, 15 bp, Homo sapiens
aatgtgatggggtgg

SEQ ID NO: 735283 - DNA, 15 bp, Homo sapiens
atgtgatggggtggg

SEQ ID NO: 735284 - DNA, 15 bp, Homo sapiens
tgtgatggggtgggg

SEQ ID NO: 735285 - DNA, 15 bp, Homo sapiens
gtgatggggtggggc

SEQ ID NO: 735286 - DNA, 15 bp, Homo sapiens
tgatggggtggggct

SEQ ID NO: 735287 - DNA, 15 bp, Homo sapiens
gatggggtggggcta

SEQ ID NO: 735288 - DNA, 15 bp, Homo sapiens
atggggtggggctat

SEQ ID NO: 735289 - DNA, 15 bp, Homo sapiens
tggggtggggctatc

SEQ ID NO: 735290 - DNA, 15 bp, Homo sapiens
ggggtggggctatca

SEQ ID NO: 735291 - DNA, 15 bp, Homo sapiens
gggtggggctatcag

SEQ ID NO: 735292 - DNA, 15 bp, Homo sapiens
ggtggggctatcagg

SEQ ID NO: 735293 - DNA, 15 bp, Homo sapiens
gtggggctatcagga

SEQ ID NO: 735294 - DNA, 15 bp, Homo sapiens
tggggctatcaggaa

SEQ ID NO: 735295 - DNA, 15 bp, Homo sapiens
ggggctatcaggaaa

SEQ ID NO: 735296 - DNA, 15 bp, Homo sapiens
gggctatcaggaaag

SEQ ID NO: 735297 - DNA, 15 bp, Homo sapiens
ggctatcaggaaagc

SEQ ID NO: 735298 - DNA, 15 bp, Homo sapiens
gctatcaggaaagct

SEQ ID NO: 735299 - DNA, 15 bp, Homo sapiens
ctatcaggaaagctg

SEQ ID NO: 735300 - DNA, 15 bp, Homo sapiens
tatcaggaaagctgg

SEQ ID NO: 735301 - DNA, 15 bp, Homo sapiens
atcaggaaagctggg

SEQ ID NO: 735302 - DNA, 15 bp, Homo sapiens
tcaggaaagctggga

SEQ ID NO: 735303 - DNA, 15 bp, Homo sapiens
caggaaagctgggat

SEQ ID NO: 735304 - DNA, 15 bp, Homo sapiens
aggaaagctgggatg

SEQ ID NO: 735305 - DNA, 15 bp, Homo sapiens
ggaaagctgggatgt

SEQ ID NO: 735306 - DNA, 15 bp, Homo sapiens
gaaagctgggatgtt

SEQ ID NO: 735307 - DNA, 15 bp, Homo sapiens
aaagctgggatgtta

SEQ ID NO: 735308 - DNA, 15 bp, Homo sapiens
aagctgggatgttaa

SEQ ID NO: 735309 - DNA, 15 bp, Homo sapiens
agctgggatgttaac

SEQ ID NO: 735310 - DNA, 15 bp, Homo sapiens
gctgggatgttaact

SEQ ID NO: 735311 - DNA, 15 bp, Homo sapiens
ctgggatgttaactg

SEQ ID NO: 735312 - DNA, 15 bp, Homo sapiens
tgggatgttaactga

SEQ ID NO: 735313 - DNA, 15 bp, Homo sapiens
gggatgttaactgat

SEQ ID NO: 735314 - DNA, 15 bp, Homo sapiens
ggatgttaactgatt

SEQ ID NO: 735315 - DNA, 15 bp, Homo sapiens
gatgttaactgattc

SEQ ID NO: 735316 - DNA, 15 bp, Homo sapiens
atgttaactgattca

SEQ ID NO: 735317 - DNA, 15 bp, Homo sapiens
tgttaactgattcag

SEQ ID NO: 735318 - DNA, 15 bp, Homo sapiens
gttaactgattcagg

SEQ ID NO: 735319 - DNA, 15 bp, Homo sapiens
ttaactgattcaggg

SEQ ID NO: 735320 - DNA, 15 bp, Homo sapiens
taactgattcagggg

SEQ ID NO: 735321 - DNA, 15 bp, Homo sapiens
aactgattcagggga

SEQ ID NO: 735322 - DNA, 15 bp, Homo sapiens
actgattcaggggat

SEQ ID NO: 735323 - DNA, 15 bp, Homo sapiens
ctgattcaggggatg

SEQ ID NO: 735324 - DNA, 15 bp, Homo sapiens
tgattcaggggatgc

SEQ ID NO: 735325 - DNA, 15 bp, Homo sapiens
gattcaggggatgcc

SEQ ID NO: 735326 - DNA, 15 bp, Homo sapiens
attcaggggatgcca

SEQ ID NO: 735327 - DNA, 15 bp, Homo sapiens
ttcaggggatgccag

SEQ ID NO: 735328 - DNA, 15 bp, Homo sapiens
tcaggggatgccagg

SEQ ID NO: 735329 - DNA, 15 bp, Homo sapiens
caggggatgccaggg

SEQ ID NO: 735330 - DNA, 15 bp, Homo sapiens
aggggatgccaggga

SEQ ID NO: 735331 - DNA, 15 bp, Homo sapiens
ggggatgccagggag

SEQ ID NO: 735332 - DNA, 15 bp, Homo sapiens
gggatgccagggagc

SEQ ID NO: 735333 - DNA, 15 bp, Homo sapiens
ggatgccagggagct

SEQ ID NO: 735334 - DNA, 15 bp, Homo sapiens
gatgccagggagcta

SEQ ID NO: 735335 - DNA, 15 bp, Homo sapiens
atgccagggagctat

SEQ ID NO: 735336 - DNA, 15 bp, Homo sapiens
tgccagggagctata

SEQ ID NO: 735337 - DNA, 15 bp, Homo sapiens
gccagggagctataa

SEQ ID NO: 735338 - DNA, 15 bp, Homo sapiens
ccagggagctataaa

SEQ ID NO: 735339 - DNA, 15 bp, Homo sapiens
cagggagctataaag

SEQ ID NO: 735340 - DNA, 15 bp, Homo sapiens
agggagctataaagc

SEQ ID NO: 735341 - DNA, 15 bp, Homo sapiens
gggagctataaagca

SEQ ID NO: 735342 - DNA, 15 bp, Homo sapiens
ggagctataaagcag

SEQ ID NO: 735343 - DNA, 15 bp, Homo sapiens
gagctataaagcagc

SEQ ID NO: 735344 - DNA, 15 bp, Homo sapiens
agctataaagcagca

SEQ ID NO: 735345 - DNA, 15 bp, Homo sapiens
gctataaagcagcac

SEQ ID NO: 735346 - DNA, 15 bp, Homo sapiens
ctataaagcagcacc

SEQ ID NO: 735347 - DNA, 15 bp, Homo sapiens
tataaagcagcacca

SEQ ID NO: 735348 - DNA, 15 bp, Homo sapiens
ataaagcagcaccaa

SEQ ID NO: 735349 - DNA, 15 bp, Homo sapiens
taaagcagcaccaat

SEQ ID NO: 735350 - DNA, 15 bp, Homo sapiens
aaagcagcaccaatc

SEQ ID NO: 735351 - DNA, 15 bp, Homo sapiens
aagcagcaccaatca

SEQ ID NO: 735352 - DNA, 15 bp, Homo sapiens
agcagcaccaatcat

SEQ ID NO: 735353 - DNA, 15 bp, Homo sapiens
gcagcaccaatcatt

SEQ ID NO: 735354 - DNA, 15 bp, Homo sapiens
cagcaccaatcattg

SEQ ID NO: 735355 - DNA, 15 bp, Homo sapiens
agcaccaatcattgt

SEQ ID NO: 735356 - DNA, 15 bp, Homo sapiens
gcaccaatcattgta

SEQ ID NO: 735357 - DNA, 15 bp, Homo sapiens
caccaatcattgtag

SEQ ID NO: 735358 - DNA, 15 bp, Homo sapiens
accaatcattgtagc

SEQ ID NO: 735359 - DNA, 15 bp, Homo sapiens
ccaatcattgtagct

SEQ ID NO: 735360 - DNA, 15 bp, Homo sapiens
caatcattgtagcta

SEQ ID NO: 735361 - DNA, 15 bp, Homo sapiens
aatcattgtagctac

SEQ ID NO: 735362 - DNA, 15 bp, Homo sapiens
atcattgtagctact

SEQ ID NO: 735363 - DNA, 15 bp, Homo sapiens
tcattgtagctactt

SEQ ID NO: 735364 - DNA, 15 bp, Homo sapiens
cattgtagctacttg

SEQ ID NO: 735365 - DNA, 15 bp, Homo sapiens
attgtagctacttgc

SEQ ID NO: 735366 - DNA, 15 bp, Homo sapiens
ttgtagctacttgct

SEQ ID NO: 735367 - DNA, 15 bp, Homo sapiens
tgtagctacttgctc

SEQ ID NO: 735368 - DNA, 15 bp, Homo sapiens
gtagctacttgctca

SEQ ID NO: 735369 - DNA, 15 bp, Homo sapiens
tagctacttgctcag

SEQ ID NO: 735370 - DNA, 15 bp, Homo sapiens
agctacttgctcagc

SEQ ID NO: 735371 - DNA, 15 bp, Homo sapiens
gctacttgctcagca

SEQ ID NO: 735372 - DNA, 15 bp, Homo sapiens
ctacttgctcagcac

SEQ ID NO: 735373 - DNA, 15 bp, Homo sapiens
tacttgctcagcacc

SEQ ID NO: 735374 - DNA, 15 bp, Homo sapiens
acttgctcagcaccg

SEQ ID NO: 735375 - DNA, 15 bp, Homo sapiens
cttgctcagcaccgc

SEQ ID NO: 735376 - DNA, 15 bp, Homo sapiens
ttgctcagcaccgca

SEQ ID NO: 735377 - DNA, 15 bp, Homo sapiens
tgctcagcaccgcac

SEQ ID NO: 735378 - DNA, 15 bp, Homo sapiens
gctcagcaccgcacc

SEQ ID NO: 735379 - DNA, 15 bp, Homo sapiens
ctcagcaccgcaccc

SEQ ID NO: 735380 - DNA, 15 bp, Homo sapiens
tcagcaccgcaccca

SEQ ID NO: 735381 - DNA, 15 bp, Homo sapiens
cagcaccgcacccag

SEQ ID NO: 735382 - DNA, 15 bp, Homo sapiens
agcaccgcacccagc

SEQ ID NO: 735383 - DNA, 15 bp, Homo sapiens
gcaccgcacccagct

SEQ ID NO: 735384 - DNA, 15 bp, Homo sapiens
caccgcacccagctt

SEQ ID NO: 735385 - DNA, 15 bp, Homo sapiens
accgcacccagcttc

SEQ ID NO: 735386 - DNA, 15 bp, Homo sapiens
ccgcacccagcttct

SEQ ID NO: 735387 - DNA, 15 bp, Homo sapiens
cgcacccagcttcta

SEQ ID NO: 735388 - DNA, 15 bp, Homo sapiens
gcacccagcttctac

SEQ ID NO: 735389 - DNA, 15 bp, Homo sapiens
cacccagcttctacc

SEQ ID NO: 735390 - DNA, 15 bp, Homo sapiens
acccagcttctacct

SEQ ID NO: 735391 - DNA, 15 bp, Homo sapiens
cccagcttctaccta

SEQ ID NO: 735392 - DNA, 15 bp, Homo sapiens
ccagcttctacctag

SEQ ID NO: 735393 - DNA, 15 bp, Homo sapiens
cagcttctacctagg

SEQ ID NO: 735394 - DNA, 15 bp, Homo sapiens
agcttctacctaggg

SEQ ID NO: 735395 - DNA, 15 bp, Homo sapiens
gcttctacctagggt

SEQ ID NO: 735396 - DNA, 15 bp, Homo sapiens
cttctacctagggta

SEQ ID NO: 735397 - DNA, 15 bp, Homo sapiens
ttctacctagggtag

SEQ ID NO: 735398 - DNA, 15 bp, Homo sapiens
tctacctagggtagc

SEQ ID NO: 735399 - DNA, 15 bp, Homo sapiens
ctacctagggtagca

SEQ ID NO: 735400 - DNA, 15 bp, Homo sapiens
tacctagggtagcaa

SEQ ID NO: 735401 - DNA, 15 bp, Homo sapiens
acctagggtagcaaa

SEQ ID NO: 735402 - DNA, 15 bp, Homo sapiens
cctagggtagcaaaa

SEQ ID NO: 735403 - DNA, 15 bp, Homo sapiens
ctagggtagcaaaat

SEQ ID NO: 735404 - DNA, 15 bp, Homo sapiens
tagggtagcaaaatg

SEQ ID NO: 735405 - DNA, 15 bp, Homo sapiens
agggtagcaaaatgg

SEQ ID NO: 735406 - DNA, 15 bp, Homo sapiens
gggtagcaaaatgga

SEQ ID NO: 735407 - DNA, 15 bp, Homo sapiens
ggtagcaaaatggaa

SEQ ID NO: 735408 - DNA, 15 bp, Homo sapiens
gtagcaaaatggaag

SEQ ID NO: 735409 - DNA, 15 bp, Homo sapiens
tagcaaaatggaaga

SEQ ID NO: 735410 - DNA, 15 bp, Homo sapiens
agcaaaatggaagag

SEQ ID NO: 735411 - DNA, 15 bp, Homo sapiens
gcaaaatggaagagg

SEQ ID NO: 735412 - DNA, 15 bp, Homo sapiens
caaaatggaagagga

SEQ ID NO: 735413 - DNA, 15 bp, Homo sapiens
aaaatggaagaggaa

SEQ ID NO: 735414 - DNA, 15 bp, Homo sapiens
aaatggaagaggaaa

SEQ ID NO: 735415 - DNA, 15 bp, Homo sapiens
aatggaagaggaaag

SEQ ID NO: 735416 - DNA, 15 bp, Homo sapiens
atggaagaggaaagc

SEQ ID NO: 735417 - DNA, 15 bp, Homo sapiens
tggaagaggaaagcc

SEQ ID NO: 735418 - DNA, 15 bp, Homo sapiens
ggaagaggaaagccg

SEQ ID NO: 735419 - DNA, 15 bp, Homo sapiens
gaagaggaaagccgt

SEQ ID NO: 735420 - DNA, 15 bp, Homo sapiens
aagaggaaagccgtg

SEQ ID NO: 735421 - DNA, 15 bp, Homo sapiens
agaggaaagccgtgt

SEQ ID NO: 735422 - DNA, 15 bp, Homo sapiens
gaggaaagccgtgta

SEQ ID NO: 735423 - DNA, 15 bp, Homo sapiens
aggaaagccgtgtag

SEQ ID NO: 735424 - DNA, 15 bp, Homo sapiens
ggaaagccgtgtaga

SEQ ID NO: 735425 - DNA, 15 bp, Homo sapiens
gaaagccgtgtagag

SEQ ID NO: 735426 - DNA, 15 bp, Homo sapiens
aaagccgtgtagaga

SEQ ID NO: 735427 - DNA, 15 bp, Homo sapiens
aagccgtgtagagag

SEQ ID NO: 735428 - DNA, 15 bp, Homo sapiens
agccgtgtagagagg

SEQ ID NO: 735429 - DNA, 15 bp, Homo sapiens
gccgtgtagagaggg

SEQ ID NO: 735430 - DNA, 15 bp, Homo sapiens
ccgtgtagagagggg

SEQ ID NO: 735431 - DNA, 15 bp, Homo sapiens
cgtgtagagaggggt

SEQ ID NO: 735432 - DNA, 15 bp, Homo sapiens
gtgtagagaggggtg

SEQ ID NO: 735433 - DNA, 15 bp, Homo sapiens
tgtagagaggggtga

SEQ ID NO: 735434 - DNA, 15 bp, Homo sapiens
gtagagaggggtgac

SEQ ID NO: 735435 - DNA, 15 bp, Homo sapiens
tagagaggggtgaca

SEQ ID NO: 735436 - DNA, 15 bp, Homo sapiens
agagaggggtgacac

SEQ ID NO: 735437 - DNA, 15 bp, Homo sapiens
gagaggggtgacacc

SEQ ID NO: 735438 - DNA, 15 bp, Homo sapiens
agaggggtgacacct

SEQ ID NO: 735439 - DNA, 15 bp, Homo sapiens
gaggggtgacacctg

SEQ ID NO: 735440 - DNA, 15 bp, Homo sapiens
aggggtgacacctga

SEQ ID NO: 735441 - DNA, 15 bp, Homo sapiens
ggggtgacacctgaa

SEQ ID NO: 735442 - DNA, 15 bp, Homo sapiens
gggtgacacctgaat

SEQ ID NO: 735443 - DNA, 15 bp, Homo sapiens
ggtgacacctgaatt

SEQ ID NO: 735444 - DNA, 15 bp, Homo sapiens
gtgacacctgaatta

SEQ ID NO: 735445 - DNA, 15 bp, Homo sapiens
tgacacctgaattaa

SEQ ID NO: 735446 - DNA, 15 bp, Homo sapiens
gacacctgaattaat

SEQ ID NO: 735447 - DNA, 15 bp, Homo sapiens
acacctgaattaata

SEQ ID NO: 735448 - DNA, 15 bp, Homo sapiens
cacctgaattaatac

SEQ ID NO: 735449 - DNA, 15 bp, Homo sapiens
acctgaattaataca

SEQ ID NO: 735450 - DNA, 15 bp, Homo sapiens
cctgaattaatacac

SEQ ID NO: 735451 - DNA, 15 bp, Homo sapiens
ctgaattaatacacc

SEQ ID NO: 735452 - DNA, 15 bp, Homo sapiens
tgaattaatacacct

SEQ ID NO: 735453 - DNA, 15 bp, Homo sapiens
gaattaatacaccta

SEQ ID NO: 735454 - DNA, 15 bp, Homo sapiens
aattaatacacctac

SEQ ID NO: 735455 - DNA, 15 bp, Homo sapiens
attaatacacctaca

SEQ ID NO: 735456 - DNA, 15 bp, Homo sapiens
ttaatacacctacaa

SEQ ID NO: 735457 - DNA, 15 bp, Homo sapiens
taatacacctacaat

SEQ ID NO: 735458 - DNA, 15 bp, Homo sapiens
aatacacctacaatt

SEQ ID NO: 735459 - DNA, 15 bp, Homo sapiens
atacacctacaatta

SEQ ID NO: 735460 - DNA, 15 bp, Homo sapiens
tacacctacaattac

SEQ ID NO: 735461 - DNA, 15 bp, Homo sapiens
acacctacaattaca

SEQ ID NO: 735462 - DNA, 15 bp, Homo sapiens
cacctacaattacac

SEQ ID NO: 735463 - DNA, 15 bp, Homo sapiens
acctacaattacact

SEQ ID NO: 735464 - DNA, 15 bp, Homo sapiens
cctacaattacacta

SEQ ID NO: 735465 - DNA, 15 bp, Homo sapiens
ctacaattacactat

SEQ ID NO: 735466 - DNA, 15 bp, Homo sapiens
tacaattacactata

SEQ ID NO: 735467 - DNA, 15 bp, Homo sapiens
acaattacactatac

SEQ ID NO: 735468 - DNA, 15 bp, Homo sapiens
caattacactatacg

SEQ ID NO: 735469 - DNA, 15 bp, Homo sapiens
aattacactatacgg

SEQ ID NO: 735470 - DNA, 15 bp, Homo sapiens
attacactatacggg

SEQ ID NO: 735471 - DNA, 15 bp, Homo sapiens
ttacactatacggga

SEQ ID NO: 735472 - DNA, 15 bp, Homo sapiens
tacactatacgggaa

SEQ ID NO: 735473 - DNA, 15 bp, Homo sapiens
acactatacgggaac

SEQ ID NO: 735474 - DNA, 15 bp, Homo sapiens
cactatacgggaaca

SEQ ID NO: 735475 - DNA, 15 bp, Homo sapiens
actatacgggaacat

SEQ ID NO: 735476 - DNA, 15 bp, Homo sapiens
ctatacgggaacata

SEQ ID NO: 735477 - DNA, 15 bp, Homo sapiens
tatacgggaacatat

SEQ ID NO: 735478 - DNA, 15 bp, Homo sapiens
atacgggaacatatc

SEQ ID NO: 735479 - DNA, 15 bp, Homo sapiens
tacgggaacatatct

SEQ ID NO: 735480 - DNA, 15 bp, Homo sapiens
acgggaacatatctc

SEQ ID NO: 735481 - DNA, 15 bp, Homo sapiens
cgggaacatatctct

SEQ ID NO: 735482 - DNA, 15 bp, Homo sapiens
gggaacatatctctg

SEQ ID NO: 735483 - DNA, 15 bp, Homo sapiens
ggaacatatctctgc

SEQ ID NO: 735484 - DNA, 15 bp, Homo sapiens
gaacatatctctgca

SEQ ID NO: 735485 - DNA, 15 bp, Homo sapiens
aacatatctctgcaa

SEQ ID NO: 735486 - DNA, 15 bp, Homo sapiens
acatatctctgcaag

SEQ ID NO: 735487 - DNA, 15 bp, Homo sapiens
catatctctgcaagt

SEQ ID NO: 735488 - DNA, 15 bp, Homo sapiens
atatctctgcaagta

SEQ ID NO: 735489 - DNA, 15 bp, Homo sapiens
tatctctgcaagtac

SEQ ID NO: 735490 - DNA, 15 bp, Homo sapiens
atctctgcaagtaca

SEQ ID NO: 735491 - DNA, 15 bp, Homo sapiens
tctctgcaagtacat

SEQ ID NO: 735492 - DNA, 15 bp, Homo sapiens
ctctgcaagtacatg

SEQ ID NO: 735493 - DNA, 15 bp, Homo sapiens
tctgcaagtacatgc

SEQ ID NO: 735494 - DNA, 15 bp, Homo sapiens
ctgcaagtacatgca

SEQ ID NO: 735495 - DNA, 15 bp, Homo sapiens
tgcaagtacatgcat

SEQ ID NO: 735496 - DNA, 15 bp, Homo sapiens
gcaagtacatgcatg

SEQ ID NO: 735497 - DNA, 15 bp, Homo sapiens
caagtacatgcatgt

SEQ ID NO: 735498 - DNA, 15 bp, Homo sapiens
aagtacatgcatgtt

SEQ ID NO: 735499 - DNA, 15 bp, Homo sapiens
agtacatgcatgttc

SEQ ID NO: 735500 - DNA, 15 bp, Homo sapiens
gtacatgcatgttcc

SEQ ID NO: 735501 - DNA, 15 bp, Homo sapiens
tacatgcatgttcca

SEQ ID NO: 735502 - DNA, 15 bp, Homo sapiens
acatgcatgttccac

SEQ ID NO: 735503 - DNA, 15 bp, Homo sapiens
catgcatgttccacc

SEQ ID NO: 735504 - DNA, 15 bp, Homo sapiens
atgcatgttccaccc

SEQ ID NO: 735505 - DNA, 15 bp, Homo sapiens
tgcatgttccaccca

SEQ ID NO: 735506 - DNA, 15 bp, Homo sapiens
gcatgttccacccag

SEQ ID NO: 735507 - DNA, 15 bp, Homo sapiens
catgttccacccaga

SEQ ID NO: 735508 - DNA, 15 bp, Homo sapiens
atgttccacccagac

SEQ ID NO: 735509 - DNA, 15 bp, Homo sapiens
tgttccacccagaca

SEQ ID NO: 735510 - DNA, 15 bp, Homo sapiens
gttccacccagacaa

SEQ ID NO: 735511 - DNA, 15 bp, Homo sapiens
ttccacccagacaaa

SEQ ID NO: 735512 - DNA, 15 bp, Homo sapiens
tccacccagacaaac

SEQ ID NO: 735513 - DNA, 15 bp, Homo sapiens
ccacccagacaaacc

SEQ ID NO: 735514 - DNA, 15 bp, Homo sapiens
cacccagacaaaccg

SEQ ID NO: 735515 - DNA, 15 bp, Homo sapiens
acccagacaaaccgt

SEQ ID NO: 735516 - DNA, 15 bp, Homo sapiens
cccagacaaaccgtg

SEQ ID NO: 735517 - DNA, 15 bp, Homo sapiens
ccagacaaaccgtga

SEQ ID NO: 735518 - DNA, 15 bp, Homo sapiens
cagacaaaccgtgac

SEQ ID NO: 735519 - DNA, 15 bp, Homo sapiens
agacaaaccgtgacg

SEQ ID NO: 735520 - DNA, 15 bp, Homo sapiens
gacaaaccgtgacgt

SEQ ID NO: 735521 - DNA, 15 bp, Homo sapiens
acaaaccgtgacgtc

SEQ ID NO: 735522 - DNA, 15 bp, Homo sapiens
caaaccgtgacgtca

SEQ ID NO: 735523 - DNA, 15 bp, Homo sapiens
aaaccgtgacgtcag

SEQ ID NO: 735524 - DNA, 15 bp, Homo sapiens
aaccgtgacgtcaga

SEQ ID NO: 735525 - DNA, 15 bp, Homo sapiens
accgtgacgtcagac

SEQ ID NO: 735526 - DNA, 15 bp, Homo sapiens
ccgtgacgtcagact

SEQ ID NO: 735527 - DNA, 15 bp, Homo sapiens
cgtgacgtcagactc

SEQ ID NO: 735528 - DNA, 15 bp, Homo sapiens
gtgacgtcagactcc

SEQ ID NO: 735529 - DNA, 15 bp, Homo sapiens
tgacgtcagactcca

SEQ ID NO: 735530 - DNA, 15 bp, Homo sapiens
gacgtcagactccac

SEQ ID NO: 735531 - DNA, 15 bp, Homo sapiens
acgtcagactccact

SEQ ID NO: 735532 - DNA, 15 bp, Homo sapiens
cgtcagactccactc

SEQ ID NO: 735533 - DNA, 15 bp, Homo sapiens
gtcagactccactct

SEQ ID NO: 735534 - DNA, 15 bp, Homo sapiens
tcagactccactctt

SEQ ID NO: 735535 - DNA, 15 bp, Homo sapiens
cagactccactcttg

SEQ ID NO: 735536 - DNA, 15 bp, Homo sapiens
agactccactcttga

SEQ ID NO: 735537 - DNA, 15 bp, Homo sapiens
gactccactcttgaa

SEQ ID NO: 735538 - DNA, 15 bp, Homo sapiens
actccactcttgaaa

SEQ ID NO: 735539 - DNA, 15 bp, Homo sapiens
ctccactcttgaaac

SEQ ID NO: 735540 - DNA, 15 bp, Homo sapiens
tccactcttgaaaca

SEQ ID NO: 735541 - DNA, 15 bp, Homo sapiens
ccactcttgaaacac

SEQ ID NO: 735542 - DNA, 15 bp, Homo sapiens
cactcttgaaacacc

SEQ ID NO: 735543 - DNA, 15 bp, Homo sapiens
actcttgaaacaccc

SEQ ID NO: 735544 - DNA, 15 bp, Homo sapiens
ctcttgaaacaccca

SEQ ID NO: 735545 - DNA, 15 bp, Homo sapiens
tcttgaaacacccat

SEQ ID NO: 735546 - DNA, 15 bp, Homo sapiens
cttgaaacacccatg

SEQ ID NO: 735547 - DNA, 15 bp, Homo sapiens
ttgaaacacccatga

SEQ ID NO: 735548 - DNA, 15 bp, Homo sapiens
tgaaacacccatgaa

SEQ ID NO: 735549 - DNA, 15 bp, Homo sapiens
gaaacacccatgaaa

SEQ ID NO: 735550 - DNA, 15 bp, Homo sapiens
aaacacccatgaaac

SEQ ID NO: 735551 - DNA, 15 bp, Homo sapiens
aacacccatgaaacc

SEQ ID NO: 735552 - DNA, 15 bp, Homo sapiens
acacccatgaaacct

SEQ ID NO: 735553 - DNA, 15 bp, Homo sapiens
cacccatgaaaccta

SEQ ID NO: 735554 - DNA, 15 bp, Homo sapiens
acccatgaaacctac

SEQ ID NO: 735555 - DNA, 15 bp, Homo sapiens
cccatgaaacctacc

SEQ ID NO: 735556 - DNA, 15 bp, Homo sapiens
ccatgaaacctacct

SEQ ID NO: 735557 - DNA, 15 bp, Homo sapiens
catgaaacctacctg

SEQ ID NO: 735558 - DNA, 15 bp, Homo sapiens
atgaaacctacctgc

SEQ ID NO: 735559 - DNA, 15 bp, Homo sapiens
tgaaacctacctgcc

SEQ ID NO: 735560 - DNA, 15 bp, Homo sapiens
gaaacctacctgccc

SEQ ID NO: 735561 - DNA, 15 bp, Homo sapiens
aaacctacctgccct

SEQ ID NO: 735562 - DNA, 15 bp, Homo sapiens
aacctacctgccctg

SEQ ID NO: 735563 - DNA, 15 bp, Homo sapiens
acctacctgccctgt

SEQ ID NO: 735564 - DNA, 15 bp, Homo sapiens
cctacctgccctgtg

SEQ ID NO: 735565 - DNA, 15 bp, Homo sapiens
ctacctgccctgtgt

SEQ ID NO: 735566 - DNA, 15 bp, Homo sapiens
tacctgccctgtgtg

SEQ ID NO: 735567 - DNA, 15 bp, Homo sapiens
acctgccctgtgtgt

SEQ ID NO: 735568 - DNA, 15 bp, Homo sapiens
cctgccctgtgtgtg

SEQ ID NO: 735569 - DNA, 15 bp, Homo sapiens
ctgccctgtgtgtgc

SEQ ID NO: 735570 - DNA, 15 bp, Homo sapiens
tgccctgtgtgtgct

SEQ ID NO: 735571 - DNA, 15 bp, Homo sapiens
gccctgtgtgtgctc

SEQ ID NO: 735572 - DNA, 15 bp, Homo sapiens
ccctgtgtgtgctcc

SEQ ID NO: 735573 - DNA, 15 bp, Homo sapiens
cctgtgtgtgctccg

SEQ ID NO: 735574 - DNA, 15 bp, Homo sapiens
ctgtgtgtgctccgg

SEQ ID NO: 735575 - DNA, 15 bp, Homo sapiens
tgtgtgtgctccggc

SEQ ID NO: 735576 - DNA, 15 bp, Homo sapiens
gtgtgtgctccggcc

SEQ ID NO: 735577 - DNA, 15 bp, Homo sapiens
tgtgtgctccggcct

SEQ ID NO: 735578 - DNA, 15 bp, Homo sapiens
gtgtgctccggcctc

SEQ ID NO: 735579 - DNA, 15 bp, Homo sapiens
tgtgctccggcctct

SEQ ID NO: 735580 - DNA, 15 bp, Homo sapiens
gtgctccggcctctc

SEQ ID NO: 735581 - DNA, 15 bp, Homo sapiens
tgctccggcctctca

SEQ ID NO: 735582 - DNA, 15 bp, Homo sapiens
gctccggcctctcat

SEQ ID NO: 735583 - DNA, 15 bp, Homo sapiens
ctccggcctctcatt

SEQ ID NO: 735584 - DNA, 15 bp, Homo sapiens
tccggcctctcatta

SEQ ID NO: 735585 - DNA, 15 bp, Homo sapiens
ccggcctctcattac

SEQ ID NO: 735586 - DNA, 15 bp, Homo sapiens
cggcctctcattaca

SEQ ID NO: 735587 - DNA, 15 bp, Homo sapiens
ggcctctcattacag

SEQ ID NO: 735588 - DNA, 15 bp, Homo sapiens
gcctctcattacaga

SEQ ID NO: 735589 - DNA, 15 bp, Homo sapiens
cctctcattacagag

SEQ ID NO: 735590 - DNA, 15 bp, Homo sapiens
ctctcattacagagc

SEQ ID NO: 735591 - DNA, 15 bp, Homo sapiens
tctcattacagagcc

SEQ ID NO: 735592 - DNA, 15 bp, Homo sapiens
ctcattacagagcct

SEQ ID NO: 735593 - DNA, 15 bp, Homo sapiens
tcattacagagcctt

SEQ ID NO: 735594 - DNA, 15 bp, Homo sapiens
cattacagagcctta

SEQ ID NO: 735595 - DNA, 15 bp, Homo sapiens
attacagagccttag

SEQ ID NO: 735596 - DNA, 15 bp, Homo sapiens
ttacagagccttagc

SEQ ID NO: 735597 - DNA, 15 bp, Homo sapiens
tacagagccttagca

SEQ ID NO: 735598 - DNA, 15 bp, Homo sapiens
acagagccttagcac

SEQ ID NO: 735599 - DNA, 15 bp, Homo sapiens
cagagccttagcact

SEQ ID NO: 735600 - DNA, 15 bp, Homo sapiens
agagccttagcacta

SEQ ID NO: 735601 - DNA, 15 bp, Homo sapiens
gagccttagcactac

SEQ ID NO: 735602 - DNA, 15 bp, Homo sapiens
agccttagcactact

SEQ ID NO: 735603 - DNA, 15 bp, Homo sapiens
gccttagcactactg

SEQ ID NO: 735604 - DNA, 15 bp, Homo sapiens
ccttagcactactgg

SEQ ID NO: 735605 - DNA, 15 bp, Homo sapiens
cttagcactactggc

SEQ ID NO: 735606 - DNA, 15 bp, Homo sapiens
ttagcactactggcc

SEQ ID NO: 735607 - DNA, 15 bp, Homo sapiens
tagcactactggcca

SEQ ID NO: 735608 - DNA, 15 bp, Homo sapiens
agcactactggccag

SEQ ID NO: 735609 - DNA, 15 bp, Homo sapiens
gcactactggccaga

SEQ ID NO: 735610 - DNA, 15 bp, Homo sapiens
cactactggccagat

SEQ ID NO: 735611 - DNA, 15 bp, Homo sapiens
actactggccagatc

SEQ ID NO: 735612 - DNA, 15 bp, Homo sapiens
ctactggccagatct

SEQ ID NO: 735613 - DNA, 15 bp, Homo sapiens
tactggccagatctc

SEQ ID NO: 735614 - DNA, 15 bp, Homo sapiens
actggccagatctcc

SEQ ID NO: 735615 - DNA, 15 bp, Homo sapiens
ctggccagatctcca

SEQ ID NO: 735616 - DNA, 15 bp, Homo sapiens
tggccagatctccaa

SEQ ID NO: 735617 - DNA, 15 bp, Homo sapiens
ggccagatctccaaa

SEQ ID NO: 735618 - DNA, 15 bp, Homo sapiens
gccagatctccaaaa

SEQ ID NO: 735619 - DNA, 15 bp, Homo sapiens
ccagatctccaaaag

SEQ ID NO: 735620 - DNA, 15 bp, Homo sapiens
cagatctccaaaaga

SEQ ID NO: 735621 - DNA, 15 bp, Homo sapiens
agatctccaaaagat

SEQ ID NO: 735622 - DNA, 15 bp, Homo sapiens
gatctccaaaagatt

SEQ ID NO: 735623 - DNA, 15 bp, Homo sapiens
atctccaaaagattc

SEQ ID NO: 735624 - DNA, 15 bp, Homo sapiens
tctccaaaagattct

SEQ ID NO: 735625 - DNA, 15 bp, Homo sapiens
ctccaaaagattctt

SEQ ID NO: 735626 - DNA, 15 bp, Homo sapiens
tccaaaagattcttc

SEQ ID NO: 735627 - DNA, 15 bp, Homo sapiens
ccaaaagattcttca

SEQ ID NO: 735628 - DNA, 15 bp, Homo sapiens
caaaagattcttcag

SEQ ID NO: 735629 - DNA, 15 bp, Homo sapiens
aaaagattcttcaga

SEQ ID NO: 735630 - DNA, 15 bp, Homo sapiens
aaagattcttcagat

SEQ ID NO: 735631 - DNA, 15 bp, Homo sapiens
aagattcttcagatt

SEQ ID NO: 735632 - DNA, 15 bp, Homo sapiens
agattcttcagattc

SEQ ID NO: 735633 - DNA, 15 bp, Homo sapiens
gattcttcagattct

SEQ ID NO: 735634 - DNA, 15 bp, Homo sapiens
attcttcagattctc

SEQ ID NO: 735635 - DNA, 15 bp, Homo sapiens
ttcttcagattctcc

SEQ ID NO: 735636 - DNA, 15 bp, Homo sapiens
tcttcagattctcca

SEQ ID NO: 735637 - DNA, 15 bp, Homo sapiens
cttcagattctccat

SEQ ID NO: 735638 - DNA, 15 bp, Homo sapiens
ttcagattctccatt

SEQ ID NO: 735639 - DNA, 15 bp, Homo sapiens
tcagattctccattt

SEQ ID NO: 735640 - DNA, 15 bp, Homo sapiens
cagattctccattta

SEQ ID NO: 735641 - DNA, 15 bp, Homo sapiens
agattctccatttag

SEQ ID NO: 735642 - DNA, 15 bp, Homo sapiens
gattctccatttagc

SEQ ID NO: 735643 - DNA, 15 bp, Homo sapiens
attctccatttagcc

SEQ ID NO: 735644 - DNA, 15 bp, Homo sapiens
ttctccatttagcca

SEQ ID NO: 735645 - DNA, 15 bp, Homo sapiens
tctccatttagccaa

SEQ ID NO: 735646 - DNA, 15 bp, Homo sapiens
ctccatttagccaag

SEQ ID NO: 735647 - DNA, 15 bp, Homo sapiens
tccatttagccaaga

SEQ ID NO: 735648 - DNA, 15 bp, Homo sapiens
ccatttagccaagaa

SEQ ID NO: 735649 - DNA, 15 bp, Homo sapiens
catttagccaagaaa

SEQ ID NO: 735650 - DNA, 15 bp, Homo sapiens
atttagccaagaaac

SEQ ID NO: 735651 - DNA, 15 bp, Homo sapiens
tttagccaagaaact

SEQ ID NO: 735652 - DNA, 15 bp, Homo sapiens
ttagccaagaaactg

SEQ ID NO: 735653 - DNA, 15 bp, Homo sapiens
tagccaagaaactga

SEQ ID NO: 735654 - DNA, 15 bp, Homo sapiens
agccaagaaactgaa

SEQ ID NO: 735655 - DNA, 15 bp, Homo sapiens
gccaagaaactgaat

SEQ ID NO: 735656 - DNA, 15 bp, Homo sapiens
ccaagaaactgaatt

SEQ ID NO: 735657 - DNA, 15 bp, Homo sapiens
caagaaactgaatta

SEQ ID NO: 735658 - DNA, 15 bp, Homo sapiens
aagaaactgaattag

SEQ ID NO: 735659 - DNA, 15 bp, Homo sapiens
agaaactgaattaga

SEQ ID NO: 735660 - DNA, 15 bp, Homo sapiens
gaaactgaattagaa

SEQ ID NO: 735661 - DNA, 15 bp, Homo sapiens
aaactgaattagaat

SEQ ID NO: 735662 - DNA, 15 bp, Homo sapiens
aactgaattagaatt

SEQ ID NO: 735663 - DNA, 15 bp, Homo sapiens
actgaattagaatta

SEQ ID NO: 735664 - DNA, 15 bp, Homo sapiens
ctgaattagaattat

SEQ ID NO: 735665 - DNA, 15 bp, Homo sapiens
tgaattagaattatg

SEQ ID NO: 735666 - DNA, 15 bp, Homo sapiens
gaattagaattatga

SEQ ID NO: 735667 - DNA, 15 bp, Homo sapiens
aattagaattatgac

SEQ ID NO: 735668 - DNA, 15 bp, Homo sapiens
attagaattatgacc

SEQ ID NO: 735669 - DNA, 15 bp, Homo sapiens
ttagaattatgacct

SEQ ID NO: 735670 - DNA, 15 bp, Homo sapiens
tagaattatgacctc

SEQ ID NO: 735671 - DNA, 15 bp, Homo sapiens
agaattatgacctct

SEQ ID NO: 735672 - DNA, 15 bp, Homo sapiens
gaattatgacctcta

SEQ ID NO: 735673 - DNA, 15 bp, Homo sapiens
aattatgacctctac

SEQ ID NO: 735674 - DNA, 15 bp, Homo sapiens
attatgacctctact

SEQ ID NO: 735675 - DNA, 15 bp, Homo sapiens
ttatgacctctactt

SEQ ID NO: 735676 - DNA, 15 bp, Homo sapiens
tatgacctctacttt

SEQ ID NO: 735677 - DNA, 15 bp, Homo sapiens
atgacctctactttc

SEQ ID NO: 735678 - DNA, 15 bp, Homo sapiens
tgacctctactttct

SEQ ID NO: 735679 - DNA, 15 bp, Homo sapiens
gacctctactttctc

SEQ ID NO: 735680 - DNA, 15 bp, Homo sapiens
acctctactttctct

SEQ ID NO: 735681 - DNA, 15 bp, Homo sapiens
cctctactttctctg

SEQ ID NO: 735682 - DNA, 15 bp, Homo sapiens
ctctactttctctgc

SEQ ID NO: 735683 - DNA, 15 bp, Homo sapiens
tctactttctctgct

SEQ ID NO: 735684 - DNA, 15 bp, Homo sapiens
ctactttctctgctt

SEQ ID NO: 735685 - DNA, 15 bp, Homo sapiens
tactttctctgctta

SEQ ID NO: 735686 - DNA, 15 bp, Homo sapiens
actttctctgcttat

SEQ ID NO: 735687 - DNA, 15 bp, Homo sapiens
ctttctctgcttatt

SEQ ID NO: 735688 - DNA, 15 bp, Homo sapiens
tttctctgcttattt

SEQ ID NO: 735689 - DNA, 15 bp, Homo sapiens
ttctctgcttattta

SEQ ID NO: 735690 - DNA, 15 bp, Homo sapiens
tctctgcttatttaa

SEQ ID NO: 735691 - DNA, 15 bp, Homo sapiens
ctctgcttatttaag

SEQ ID NO: 735692 - DNA, 15 bp, Homo sapiens
tctgcttatttaagt

SEQ ID NO: 735693 - DNA, 15 bp, Homo sapiens
ctgcttatttaagtc

SEQ ID NO: 735694 - DNA, 15 bp, Homo sapiens
tgcttatttaagtcc

SEQ ID NO: 735695 - DNA, 15 bp, Homo sapiens
gcttatttaagtcct

SEQ ID NO: 735696 - DNA, 15 bp, Homo sapiens
cttatttaagtcctt

SEQ ID NO: 735697 - DNA, 15 bp, Homo sapiens
ttatttaagtccttt

SEQ ID NO: 735698 - DNA, 15 bp, Homo sapiens
tatttaagtcctttc

SEQ ID NO: 735699 - DNA, 15 bp, Homo sapiens
atttaagtcctttct

SEQ ID NO: 735700 - DNA, 15 bp, Homo sapiens
tttaagtcctttctg

SEQ ID NO: 735701 - DNA, 15 bp, Homo sapiens
ttaagtcctttctgt

SEQ ID NO: 735702 - DNA, 15 bp, Homo sapiens
taagtcctttctgtt

SEQ ID NO: 735703 - DNA, 15 bp, Homo sapiens
aagtcctttctgttg

SEQ ID NO: 735704 - DNA, 15 bp, Homo sapiens
agtcctttctgttgc

SEQ ID NO: 735705 - DNA, 15 bp, Homo sapiens
gtcctttctgttgct

SEQ ID NO: 735706 - DNA, 15 bp, Homo sapiens
tcctttctgttgcta

SEQ ID NO: 735707 - DNA, 15 bp, Homo sapiens
cctttctgttgctat

SEQ ID NO: 735708 - DNA, 15 bp, Homo sapiens
ctttctgttgctatg

SEQ ID NO: 735709 - DNA, 15 bp, Homo sapiens
tttctgttgctatga

SEQ ID NO: 735710 - DNA, 15 bp, Homo sapiens
ttctgttgctatgaa

SEQ ID NO: 735711 - DNA, 15 bp, Homo sapiens
tctgttgctatgaag

SEQ ID NO: 735712 - DNA, 15 bp, Homo sapiens
ctgttgctatgaagc

SEQ ID NO: 735713 - DNA, 15 bp, Homo sapiens
tgttgctatgaagcc

SEQ ID NO: 735714 - DNA, 15 bp, Homo sapiens
gttgctatgaagcct

SEQ ID NO: 735715 - DNA, 15 bp, Homo sapiens
ttgctatgaagcctg

SEQ ID NO: 735716 - DNA, 15 bp, Homo sapiens
tgctatgaagcctgg

SEQ ID NO: 735717 - DNA, 15 bp, Homo sapiens
gctatgaagcctggt

SEQ ID NO: 735718 - DNA, 15 bp, Homo sapiens
ctatgaagcctggtc

SEQ ID NO: 735719 - DNA, 15 bp, Homo sapiens
tatgaagcctggtct

SEQ ID NO: 735720 - DNA, 15 bp, Homo sapiens
atgaagcctggtctg

SEQ ID NO: 735721 - DNA, 15 bp, Homo sapiens
tgaagcctggtctga

SEQ ID NO: 735722 - DNA, 15 bp, Homo sapiens
gaagcctggtctgac

SEQ ID NO: 735723 - DNA, 15 bp, Homo sapiens
aagcctggtctgacc

SEQ ID NO: 735724 - DNA, 15 bp, Homo sapiens
agcctggtctgacca

SEQ ID NO: 735725 - DNA, 15 bp, Homo sapiens
gcctggtctgaccac

SEQ ID NO: 735726 - DNA, 15 bp, Homo sapiens
cctggtctgaccact

SEQ ID NO: 735727 - DNA, 15 bp, Homo sapiens
ctggtctgaccactc

SEQ ID NO: 735728 - DNA, 15 bp, Homo sapiens
tggtctgaccactct

SEQ ID NO: 735729 - DNA, 15 bp, Homo sapiens
ggtctgaccactctc

SEQ ID NO: 735730 - DNA, 15 bp, Homo sapiens
gtctgaccactctca

SEQ ID NO: 735731 - DNA, 15 bp, Homo sapiens
tctgaccactctcaa

SEQ ID NO: 735732 - DNA, 15 bp, Homo sapiens
ctgaccactctcaat

SEQ ID NO: 735733 - DNA, 15 bp, Homo sapiens
tgaccactctcaata

SEQ ID NO: 735734 - DNA, 15 bp, Homo sapiens
gaccactctcaataa

SEQ ID NO: 735735 - DNA, 15 bp, Homo sapiens
accactctcaataag

SEQ ID NO: 735736 - DNA, 15 bp, Homo sapiens
ccactctcaataagt

SEQ ID NO: 735737 - DNA, 15 bp, Homo sapiens
cactctcaataagtg

SEQ ID NO: 735738 - DNA, 15 bp, Homo sapiens
actctcaataagtga

SEQ ID NO: 735739 - DNA, 15 bp, Homo sapiens
ctctcaataagtgaa

SEQ ID NO: 735740 - DNA, 15 bp, Homo sapiens
tctcaataagtgaag

SEQ ID NO: 735741 - DNA, 15 bp, Homo sapiens
ctcaataagtgaaga

SEQ ID NO: 735742 - DNA, 15 bp, Homo sapiens
tcaataagtgaagat

SEQ ID NO: 735743 - DNA, 15 bp, Homo sapiens
caataagtgaagatc

SEQ ID NO: 735744 - DNA, 15 bp, Homo sapiens
aataagtgaagatct

SEQ ID NO: 735745 - DNA, 15 bp, Homo sapiens
ataagtgaagatctt

SEQ ID NO: 735746 - DNA, 15 bp, Homo sapiens
taagtgaagatcttt

SEQ ID NO: 735747 - DNA, 15 bp, Homo sapiens
aagtgaagatctttt

SEQ ID NO: 735748 - DNA, 15 bp, Homo sapiens
agtgaagatctttta

SEQ ID NO: 735749 - DNA, 15 bp, Homo sapiens
gtgaagatcttttag

SEQ ID NO: 735750 - DNA, 15 bp, Homo sapiens
tgaagatcttttagg

SEQ ID NO: 735751 - DNA, 15 bp, Homo sapiens
gaagatcttttaggg

SEQ ID NO: 735752 - DNA, 15 bp, Homo sapiens
aagatcttttaggga

SEQ ID NO: 735753 - DNA, 15 bp, Homo sapiens
agatcttttagggag

SEQ ID NO: 735754 - DNA, 15 bp, Homo sapiens
gatcttttagggaga

SEQ ID NO: 735755 - DNA, 15 bp, Homo sapiens
atcttttagggagat

SEQ ID NO: 735756 - DNA, 15 bp, Homo sapiens
tcttttagggagatc

SEQ ID NO: 735757 - DNA, 15 bp, Homo sapiens
cttttagggagatcc

SEQ ID NO: 735758 - DNA, 15 bp, Homo sapiens
ttttagggagatcca

SEQ ID NO: 735759 - DNA, 15 bp, Homo sapiens
tttagggagatccag

SEQ ID NO: 735760 - DNA, 15 bp, Homo sapiens
ttagggagatccaga

SEQ ID NO: 735761 - DNA, 15 bp, Homo sapiens
tagggagatccagaa

SEQ ID NO: 735762 - DNA, 15 bp, Homo sapiens
agggagatccagaac

SEQ ID NO: 735763 - DNA, 15 bp, Homo sapiens
gggagatccagaaca

SEQ ID NO: 735764 - DNA, 15 bp, Homo sapiens
ggagatccagaacag

SEQ ID NO: 735765 - DNA, 15 bp, Homo sapiens
gagatccagaacaga

SEQ ID NO: 735766 - DNA, 15 bp, Homo sapiens
agatccagaacagag

SEQ ID NO: 735767 - DNA, 15 bp, Homo sapiens
gatccagaacagaga

SEQ ID NO: 735768 - DNA, 15 bp, Homo sapiens
atccagaacagagag

SEQ ID NO: 735769 - DNA, 15 bp, Homo sapiens
tccagaacagagagg

SEQ ID NO: 735770 - DNA, 15 bp, Homo sapiens
ccagaacagagaggg

SEQ ID NO: 735771 - DNA, 15 bp, Homo sapiens
cagaacagagaggga

SEQ ID NO: 735772 - DNA, 15 bp, Homo sapiens
agaacagagagggaa

SEQ ID NO: 735773 - DNA, 15 bp, Homo sapiens
gaacagagagggaat

SEQ ID NO: 735774 - DNA, 15 bp, Homo sapiens
aacagagagggaatg

SEQ ID NO: 735775 - DNA, 15 bp, Homo sapiens
acagagagggaatgg

SEQ ID NO: 735776 - DNA, 15 bp, Homo sapiens
cagagagggaatggg

SEQ ID NO: 735777 - DNA, 15 bp, Homo sapiens
agagagggaatggga

SEQ ID NO: 735778 - DNA, 15 bp, Homo sapiens
gagagggaatgggac

SEQ ID NO: 735779 - DNA, 15 bp, Homo sapiens
agagggaatgggacc

SEQ ID NO: 735780 - DNA, 15 bp, Homo sapiens
gagggaatgggaccc

SEQ ID NO: 735781 - DNA, 15 bp, Homo sapiens
agggaatgggaccct

SEQ ID NO: 735782 - DNA, 15 bp, Homo sapiens
gggaatgggacccta

SEQ ID NO: 735783 - DNA, 15 bp, Homo sapiens
ggaatgggaccctag

SEQ ID NO: 735784 - DNA, 15 bp, Homo sapiens
gaatgggaccctaga

SEQ ID NO: 735785 - DNA, 15 bp, Homo sapiens
aatgggaccctagag

SEQ ID NO: 735786 - DNA, 15 bp, Homo sapiens
atgggaccctagaga

SEQ ID NO: 735787 - DNA, 15 bp, Homo sapiens
tgggaccctagagag

SEQ ID NO: 735788 - DNA, 15 bp, Homo sapiens
gggaccctagagagc

SEQ ID NO: 735789 - DNA, 15 bp, Homo sapiens
ggaccctagagagcg

SEQ ID NO: 735790 - DNA, 15 bp, Homo sapiens
gaccctagagagcgg

SEQ ID NO: 735791 - DNA, 15 bp, Homo sapiens
accctagagagcgga

SEQ ID NO: 735792 - DNA, 15 bp, Homo sapiens
ccctagagagcggaa

SEQ ID NO: 735793 - DNA, 15 bp, Homo sapiens
cctagagagcggaaa

SEQ ID NO: 735794 - DNA, 15 bp, Homo sapiens
ctagagagcggaaac

SEQ ID NO: 735795 - DNA, 15 bp, Homo sapiens
tagagagcggaaact

SEQ ID NO: 735796 - DNA, 15 bp, Homo sapiens
agagagcggaaactt

SEQ ID NO: 735797 - DNA, 15 bp, Homo sapiens
gagagcggaaacttg

SEQ ID NO: 735798 - DNA, 15 bp, Homo sapiens
agagcggaaacttgc

SEQ ID NO: 735799 - DNA, 15 bp, Homo sapiens
gagcggaaacttgcc

SEQ ID NO: 735800 - DNA, 15 bp, Homo sapiens
agcggaaacttgccc

SEQ ID NO: 735801 - DNA, 15 bp, Homo sapiens
gcggaaacttgccca

SEQ ID NO: 735802 - DNA, 15 bp, Homo sapiens
cggaaacttgcccag

SEQ ID NO: 735803 - DNA, 15 bp, Homo sapiens
ggaaacttgcccaga

SEQ ID NO: 735804 - DNA, 15 bp, Homo sapiens
gaaacttgcccagaa

SEQ ID NO: 735805 - DNA, 15 bp, Homo sapiens
aaacttgcccagaaa

SEQ ID NO: 735806 - DNA, 15 bp, Homo sapiens
aacttgcccagaaaa

SEQ ID NO: 735807 - DNA, 15 bp, Homo sapiens
acttgcccagaaaat

SEQ ID NO: 735808 - DNA, 15 bp, Homo sapiens
cttgcccagaaaatc

SEQ ID NO: 735809 - DNA, 15 bp, Homo sapiens
ttgcccagaaaatct

SEQ ID NO: 735810 - DNA, 15 bp, Homo sapiens
tgcccagaaaatctt

SEQ ID NO: 735811 - DNA, 15 bp, Homo sapiens
gcccagaaaatctta

SEQ ID NO: 735812 - DNA, 15 bp, Homo sapiens
cccagaaaatcttat

SEQ ID NO: 735813 - DNA, 15 bp, Homo sapiens
ccagaaaatcttata

SEQ ID NO: 735814 - DNA, 15 bp, Homo sapiens
cagaaaatcttataa

SEQ ID NO: 735815 - DNA, 15 bp, Homo sapiens
agaaaatcttataaa

SEQ ID NO: 735816 - DNA, 15 bp, Homo sapiens
gaaaatcttataaac

SEQ ID NO: 735817 - DNA, 15 bp, Homo sapiens
aaaatcttataaact

SEQ ID NO: 735818 - DNA, 15 bp, Homo sapiens
aaatcttataaactc

SEQ ID NO: 735819 - DNA, 15 bp, Homo sapiens
aatcttataaactct

SEQ ID NO: 735820 - DNA, 15 bp, Homo sapiens
atcttataaactctg

SEQ ID NO: 735821 - DNA, 15 bp, Homo sapiens
tcttataaactctgc

SEQ ID NO: 735822 - DNA, 15 bp, Homo sapiens
cttataaactctgcc

SEQ ID NO: 735823 - DNA, 15 bp, Homo sapiens
ttataaactctgcca

SEQ ID NO: 735824 - DNA, 15 bp, Homo sapiens
tataaactctgccaa

SEQ ID NO: 735825 - DNA, 15 bp, Homo sapiens
ataaactctgccaag

SEQ ID NO: 735826 - DNA, 15 bp, Homo sapiens
taaactctgccaagt

SEQ ID NO: 735827 - DNA, 15 bp, Homo sapiens
aaactctgccaagtg

SEQ ID NO: 735828 - DNA, 15 bp, Homo sapiens
aactctgccaagtgc

SEQ ID NO: 735829 - DNA, 15 bp, Homo sapiens
actctgccaagtgct

SEQ ID NO: 735830 - DNA, 15 bp, Homo sapiens
ctctgccaagtgctc

SEQ ID NO: 735831 - DNA, 15 bp, Homo sapiens
tctgccaagtgctcg

SEQ ID NO: 735832 - DNA, 15 bp, Homo sapiens
ctgccaagtgctcgc

SEQ ID NO: 735833 - DNA, 15 bp, Homo sapiens
tgccaagtgctcgcc

SEQ ID NO: 735834 - DNA, 15 bp, Homo sapiens
gccaagtgctcgcct

SEQ ID NO: 735835 - DNA, 15 bp, Homo sapiens
ccaagtgctcgccta

SEQ ID NO: 735836 - DNA, 15 bp, Homo sapiens
caagtgctcgcctaa

SEQ ID NO: 735837 - DNA, 15 bp, Homo sapiens
aagtgctcgcctaac

SEQ ID NO: 735838 - DNA, 15 bp, Homo sapiens
agtgctcgcctaacg

SEQ ID NO: 735839 - DNA, 15 bp, Homo sapiens
gtgctcgcctaacgt

SEQ ID NO: 735840 - DNA, 15 bp, Homo sapiens
tgctcgcctaacgtg

SEQ ID NO: 735841 - DNA, 15 bp, Homo sapiens
gctcgcctaacgtgg

SEQ ID NO: 735842 - DNA, 15 bp, Homo sapiens
ctcgcctaacgtggg

SEQ ID NO: 735843 - DNA, 15 bp, Homo sapiens
tcgcctaacgtgggg

SEQ ID NO: 735844 - DNA, 15 bp, Homo sapiens
cgcctaacgtgggga

SEQ ID NO: 735845 - DNA, 15 bp, Homo sapiens
gcctaacgtggggat

SEQ ID NO: 735846 - DNA, 15 bp, Homo sapiens
cctaacgtggggatt

SEQ ID NO: 735847 - DNA, 15 bp, Homo sapiens
ctaacgtggggattg

SEQ ID NO: 735848 - DNA, 15 bp, Homo sapiens
taacgtggggattgc

SEQ ID NO: 735849 - DNA, 15 bp, Homo sapiens
aacgtggggattgct

SEQ ID NO: 735850 - DNA, 15 bp, Homo sapiens
acgtggggattgctg

SEQ ID NO: 735851 - DNA, 15 bp, Homo sapiens
cgtggggattgctgt

SEQ ID NO: 735852 - DNA, 15 bp, Homo sapiens
gtggggattgctgtt

SEQ ID NO: 735853 - DNA, 15 bp, Homo sapiens
tggggattgctgttg

SEQ ID NO: 735854 - DNA, 15 bp, Homo sapiens
ggggattgctgttgg

SEQ ID NO: 735855 - DNA, 15 bp, Homo sapiens
gggattgctgttggc

SEQ ID NO: 735856 - DNA, 15 bp, Homo sapiens
ggattgctgttggcc

SEQ ID NO: 735857 - DNA, 15 bp, Homo sapiens
gattgctgttggccc

SEQ ID NO: 735858 - DNA, 15 bp, Homo sapiens
attgctgttggccct

SEQ ID NO: 735859 - DNA, 15 bp, Homo sapiens
ttgctgttggcccta

SEQ ID NO: 735860 - DNA, 15 bp, Homo sapiens
tgctgttggccctag

SEQ ID NO: 735861 - DNA, 15 bp, Homo sapiens
gctgttggccctagt

SEQ ID NO: 735862 - DNA, 15 bp, Homo sapiens
ctgttggccctagtt

SEQ ID NO: 735863 - DNA, 15 bp, Homo sapiens
tgttggccctagttg

SEQ ID NO: 735864 - DNA, 15 bp, Homo sapiens
gttggccctagttgc

SEQ ID NO: 735865 - DNA, 15 bp, Homo sapiens
ttggccctagttgct

SEQ ID NO: 735866 - DNA, 15 bp, Homo sapiens
tggccctagttgctt

SEQ ID NO: 735867 - DNA, 15 bp, Homo sapiens
ggccctagttgctta

SEQ ID NO: 735868 - DNA, 15 bp, Homo sapiens
gccctagttgcttaa

SEQ ID NO: 735869 - DNA, 15 bp, Homo sapiens
ccctagttgcttaac

SEQ ID NO: 735870 - DNA, 15 bp, Homo sapiens
cctagttgcttaacc

SEQ ID NO: 735871 - DNA, 15 bp, Homo sapiens
ctagttgcttaacca

SEQ ID NO: 735872 - DNA, 15 bp, Homo sapiens
tagttgcttaaccag

SEQ ID NO: 735873 - DNA, 15 bp, Homo sapiens
agttgcttaaccagt

SEQ ID NO: 735874 - DNA, 15 bp, Homo sapiens
gttgcttaaccagtg

SEQ ID NO: 735875 - DNA, 15 bp, Homo sapiens
ttgcttaaccagtga

SEQ ID NO: 735876 - DNA, 15 bp, Homo sapiens
tgcttaaccagtgag

SEQ ID NO: 735877 - DNA, 15 bp, Homo sapiens
gcttaaccagtgagc

SEQ ID NO: 735878 - DNA, 15 bp, Homo sapiens
cttaaccagtgagcg

SEQ ID NO: 735879 - DNA, 15 bp, Homo sapiens
ttaaccagtgagcgg

SEQ ID NO: 735880 - DNA, 15 bp, Homo sapiens
taaccagtgagcggc

SEQ ID NO: 735881 - DNA, 15 bp, Homo sapiens
aaccagtgagcggca

SEQ ID NO: 735882 - DNA, 15 bp, Homo sapiens
accagtgagcggcaa

SEQ ID NO: 735883 - DNA, 15 bp, Homo sapiens
ccagtgagcggcaac

SEQ ID NO: 735884 - DNA, 15 bp, Homo sapiens
cagtgagcggcaacg

SEQ ID NO: 735885 - DNA, 15 bp, Homo sapiens
agtgagcggcaacgc

SEQ ID NO: 735886 - DNA, 15 bp, Homo sapiens
gtgagcggcaacgcc

SEQ ID NO: 735887 - DNA, 15 bp, Homo sapiens
tgagcggcaacgccc

SEQ ID NO: 735888 - DNA, 15 bp, Homo sapiens
gagcggcaacgcccc

SEQ ID NO: 735889 - DNA, 15 bp, Homo sapiens
agcggcaacgcccca

SEQ ID NO: 735890 - DNA, 15 bp, Homo sapiens
gcggcaacgccccag

SEQ ID NO: 735891 - DNA, 15 bp, Homo sapiens
cggcaacgccccagc

SEQ ID NO: 735892 - DNA, 15 bp, Homo sapiens
ggcaacgccccagcc

SEQ ID NO: 735893 - DNA, 15 bp, Homo sapiens
gcaacgccccagcct

SEQ ID NO: 735894 - DNA, 15 bp, Homo sapiens
caacgccccagcctg

SEQ ID NO: 735895 - DNA, 15 bp, Homo sapiens
aacgccccagcctgg

SEQ ID NO: 735896 - DNA, 15 bp, Homo sapiens
acgccccagcctgga

SEQ ID NO: 735897 - DNA, 15 bp, Homo sapiens
cgccccagcctggaa

SEQ ID NO: 735898 - DNA, 15 bp, Homo sapiens
gccccagcctggaat

SEQ ID NO: 735899 - DNA, 15 bp, Homo sapiens
ccccagcctggaatc

SEQ ID NO: 735900 - DNA, 15 bp, Homo sapiens
cccagcctggaatca

SEQ ID NO: 735901 - DNA, 15 bp, Homo sapiens
ccagcctggaatcag

SEQ ID NO: 735902 - DNA, 15 bp, Homo sapiens
cagcctggaatcagg

SEQ ID NO: 735903 - DNA, 15 bp, Homo sapiens
agcctggaatcaggt

SEQ ID NO: 735904 - DNA, 15 bp, Homo sapiens
gcctggaatcaggtt

SEQ ID NO: 735905 - DNA, 15 bp, Homo sapiens
cctggaatcaggttt

SEQ ID NO: 735906 - DNA, 15 bp, Homo sapiens
ctggaatcaggtttt

SEQ ID NO: 735907 - DNA, 15 bp, Homo sapiens
tggaatcaggttttc

SEQ ID NO: 735908 - DNA, 15 bp, Homo sapiens
ggaatcaggttttct

SEQ ID NO: 735909 - DNA, 15 bp, Homo sapiens
gaatcaggttttctg

SEQ ID NO: 735910 - DNA, 15 bp, Homo sapiens
aatcaggttttctga

SEQ ID NO: 735911 - DNA, 15 bp, Homo sapiens
atcaggttttctgac

SEQ ID NO: 735912 - DNA, 15 bp, Homo sapiens
tcaggttttctgacc

SEQ ID NO: 735913 - DNA, 15 bp, Homo sapiens
caggttttctgacct

SEQ ID NO: 735914 - DNA, 15 bp, Homo sapiens
aggttttctgacctc

SEQ ID NO: 735915 - DNA, 15 bp, Homo sapiens
ggttttctgacctct

SEQ ID NO: 735916 - DNA, 15 bp, Homo sapiens
gttttctgacctcta

SEQ ID NO: 735917 - DNA, 15 bp, Homo sapiens
ttttctgacctctag

SEQ ID NO: 735918 - DNA, 15 bp, Homo sapiens
tttctgacctctagt

SEQ ID NO: 735919 - DNA, 15 bp, Homo sapiens
ttctgacctctagtc

SEQ ID NO: 735920 - DNA, 15 bp, Homo sapiens
tctgacctctagtct

SEQ ID NO: 735921 - DNA, 15 bp, Homo sapiens
ctgacctctagtctg

SEQ ID NO: 735922 - DNA, 15 bp, Homo sapiens
tgacctctagtctgg

SEQ ID NO: 735923 - DNA, 15 bp, Homo sapiens
gacctctagtctggt

SEQ ID NO: 735924 - DNA, 15 bp, Homo sapiens
acctctagtctggta

SEQ ID NO: 735925 - DNA, 15 bp, Homo sapiens
cctctagtctggtac

SEQ ID NO: 735926 - DNA, 15 bp, Homo sapiens
ctctagtctggtact

SEQ ID NO: 735927 - DNA, 15 bp, Homo sapiens
tctagtctggtactc

SEQ ID NO: 735928 - DNA, 15 bp, Homo sapiens
ctagtctggtactct

SEQ ID NO: 735929 - DNA, 15 bp, Homo sapiens
tagtctggtactctt

SEQ ID NO: 735930 - DNA, 15 bp, Homo sapiens
agtctggtactcttt

SEQ ID NO: 735931 - DNA, 15 bp, Homo sapiens
gtctggtactctttc

SEQ ID NO: 735932 - DNA, 15 bp, Homo sapiens
tctggtactctttct

SEQ ID NO: 735933 - DNA, 15 bp, Homo sapiens
ctggtactctttcta

SEQ ID NO: 735934 - DNA, 15 bp, Homo sapiens
tggtactctttctaa

SEQ ID NO: 735935 - DNA, 15 bp, Homo sapiens
ggtactctttctaag

SEQ ID NO: 735936 - DNA, 15 bp, Homo sapiens
gtactctttctaagc

SEQ ID NO: 735937 - DNA, 15 bp, Homo sapiens
tactctttctaagcc

SEQ ID NO: 735938 - DNA, 15 bp, Homo sapiens
actctttctaagcct

SEQ ID NO: 735939 - DNA, 15 bp, Homo sapiens
ctctttctaagcctt

SEQ ID NO: 735940 - DNA, 15 bp, Homo sapiens
tctttctaagccttt

SEQ ID NO: 735941 - DNA, 15 bp, Homo sapiens
ctttctaagcctttc

SEQ ID NO: 735942 - DNA, 15 bp, Homo sapiens
tttctaagcctttct

SEQ ID NO: 735943 - DNA, 15 bp, Homo sapiens
ttctaagcctttcta

SEQ ID NO: 735944 - DNA, 15 bp, Homo sapiens
tctaagcctttctaa

SEQ ID NO: 735945 - DNA, 15 bp, Homo sapiens
ctaagcctttctaag

SEQ ID NO: 735946 - DNA, 15 bp, Homo sapiens
taagcctttctaagg

SEQ ID NO: 735947 - DNA, 15 bp, Homo sapiens
aagcctttctaaggt

SEQ ID NO: 735948 - DNA, 15 bp, Homo sapiens
agcctttctaaggtg

SEQ ID NO: 735949 - DNA, 15 bp, Homo sapiens
gcctttctaaggtga

SEQ ID NO: 735950 - DNA, 15 bp, Homo sapiens
cctttctaaggtgaa

SEQ ID NO: 735951 - DNA, 15 bp, Homo sapiens
ctttctaaggtgaaa

SEQ ID NO: 735952 - DNA, 15 bp, Homo sapiens
tttctaaggtgaaaa

SEQ ID NO: 735953 - DNA, 15 bp, Homo sapiens
ttctaaggtgaaaat

SEQ ID NO: 735954 - DNA, 15 bp, Homo sapiens
tctaaggtgaaaata

SEQ ID NO: 735955 - DNA, 15 bp, Homo sapiens
ctaaggtgaaaatat

SEQ ID NO: 735956 - DNA, 15 bp, Homo sapiens
taaggtgaaaatatg

SEQ ID NO: 735957 - DNA, 15 bp, Homo sapiens
aaggtgaaaatatga

SEQ ID NO: 735958 - DNA, 15 bp, Homo sapiens
aggtgaaaatatgat

SEQ ID NO: 735959 - DNA, 15 bp, Homo sapiens
ggtgaaaatatgata

SEQ ID NO: 735960 - DNA, 15 bp, Homo sapiens
gtgaaaatatgatac

SEQ ID NO: 735961 - DNA, 15 bp, Homo sapiens
tgaaaatatgataca

SEQ ID NO: 735962 - DNA, 15 bp, Homo sapiens
gaaaatatgatacat

SEQ ID NO: 735963 - DNA, 15 bp, Homo sapiens
aaaatatgatacatt

SEQ ID NO: 735964 - DNA, 15 bp, Homo sapiens
aaatatgatacattt

SEQ ID NO: 735965 - DNA, 15 bp, Homo sapiens
aatatgatacatttc

SEQ ID NO: 735966 - DNA, 15 bp, Homo sapiens
atatgatacatttcc

SEQ ID NO: 735967 - DNA, 15 bp, Homo sapiens
tatgatacatttccc

SEQ ID NO: 735968 - DNA, 15 bp, Homo sapiens
atgatacatttccca

SEQ ID NO: 735969 - DNA, 15 bp, Homo sapiens
tgatacatttcccag

SEQ ID NO: 735970 - DNA, 15 bp, Homo sapiens
gatacatttcccaga

SEQ ID NO: 735971 - DNA, 15 bp, Homo sapiens
atacatttcccagac

SEQ ID NO: 735972 - DNA, 15 bp, Homo sapiens
tacatttcccagaca

SEQ ID NO: 735973 - DNA, 15 bp, Homo sapiens
acatttcccagacac

SEQ ID NO: 735974 - DNA, 15 bp, Homo sapiens
catttcccagacacc

SEQ ID NO: 735975 - DNA, 15 bp, Homo sapiens
atttcccagacacct

SEQ ID NO: 735976 - DNA, 15 bp, Homo sapiens
tttcccagacacctt

SEQ ID NO: 735977 - DNA, 15 bp, Homo sapiens
ttcccagacacctta

SEQ ID NO: 735978 - DNA, 15 bp, Homo sapiens
tcccagacaccttaa

SEQ ID NO: 735979 - DNA, 15 bp, Homo sapiens
cccagacaccttaaa

SEQ ID NO: 735980 - DNA, 15 bp, Homo sapiens
ccagacaccttaaaa

SEQ ID NO: 735981 - DNA, 15 bp, Homo sapiens
cagacaccttaaaaa

SEQ ID NO: 735982 - DNA, 15 bp, Homo sapiens
agacaccttaaaaat

SEQ ID NO: 735983 - DNA, 15 bp, Homo sapiens
gacaccttaaaaatc

SEQ ID NO: 735984 - DNA, 15 bp, Homo sapiens
acaccttaaaaatcc

SEQ ID NO: 735985 - DNA, 15 bp, Homo sapiens
caccttaaaaatccc

SEQ ID NO: 735986 - DNA, 15 bp, Homo sapiens
accttaaaaatccca

SEQ ID NO: 735987 - DNA, 15 bp, Homo sapiens
ccttaaaaatcccat

SEQ ID NO: 735988 - DNA, 15 bp, Homo sapiens
cttaaaaatcccatt

SEQ ID NO: 735989 - DNA, 15 bp, Homo sapiens
ttaaaaatcccattt

SEQ ID NO: 735990 - DNA, 15 bp, Homo sapiens
taaaaatcccatttc

SEQ ID NO: 735991 - DNA, 15 bp, Homo sapiens
aaaaatcccatttct

SEQ ID NO: 735992 - DNA, 15 bp, Homo sapiens
aaaatcccatttctg

SEQ ID NO: 735993 - DNA, 15 bp, Homo sapiens
aaatcccatttctgg

SEQ ID NO: 735994 - DNA, 15 bp, Homo sapiens
aatcccatttctggg

SEQ ID NO: 735995 - DNA, 15 bp, Homo sapiens
atcccatttctgggc

SEQ ID NO: 735996 - DNA, 15 bp, Homo sapiens
tcccatttctgggcc

SEQ ID NO: 735997 - DNA, 15 bp, Homo sapiens
cccatttctgggccg

SEQ ID NO: 735998 - DNA, 15 bp, Homo sapiens
ccatttctgggccgg

SEQ ID NO: 735999 - DNA, 15 bp, Homo sapiens
catttctgggccggg

SEQ ID NO: 736000 - DNA, 15 bp, Homo sapiens
atttctgggccgggc

SEQ ID NO: 736001 - DNA, 15 bp, Homo sapiens
tttctgggccgggcg

SEQ ID NO: 736002 - DNA, 15 bp, Homo sapiens
ttctgggccgggcgc

SEQ ID NO: 736003 - DNA, 15 bp, Homo sapiens
tctgggccgggcgct

SEQ ID NO: 736004 - DNA, 15 bp, Homo sapiens
ctgggccgggcgctg

SEQ ID NO: 736005 - DNA, 15 bp, Homo sapiens
tgggccgggcgctgt

SEQ ID NO: 736006 - DNA, 15 bp, Homo sapiens
gggccgggcgctgtg

SEQ ID NO: 736007 - DNA, 15 bp, Homo sapiens
ggccgggcgctgtgg

SEQ ID NO: 736008 - DNA, 15 bp, Homo sapiens
gccgggcgctgtggc

SEQ ID NO: 736009 - DNA, 15 bp, Homo sapiens
ccgggcgctgtggct

SEQ ID NO: 736010 - DNA, 15 bp, Homo sapiens
cgggcgctgtggctc

SEQ ID NO: 736011 - DNA, 15 bp, Homo sapiens
gggcgctgtggctca

SEQ ID NO: 736012 - DNA, 15 bp, Homo sapiens
ggcgctgtggctcat

SEQ ID NO: 736013 - DNA, 15 bp, Homo sapiens
gcgctgtggctcatg

SEQ ID NO: 736014 - DNA, 15 bp, Homo sapiens
cgctgtggctcatgc

SEQ ID NO: 736015 - DNA, 15 bp, Homo sapiens
gctgtggctcatgcc

SEQ ID NO: 736016 - DNA, 15 bp, Homo sapiens
ctgtggctcatgcct

SEQ ID NO: 736017 - DNA, 15 bp, Homo sapiens
tgtggctcatgcctg

SEQ ID NO: 736018 - DNA, 15 bp, Homo sapiens
gtggctcatgcctgt

SEQ ID NO: 736019 - DNA, 15 bp, Homo sapiens
tggctcatgcctgtt

SEQ ID NO: 736020 - DNA, 15 bp, Homo sapiens
ggctcatgcctgtta

SEQ ID NO: 736021 - DNA, 15 bp, Homo sapiens
gctcatgcctgttat

SEQ ID NO: 736022 - DNA, 15 bp, Homo sapiens
ctcatgcctgttatc

SEQ ID NO: 736023 - DNA, 15 bp, Homo sapiens
tcatgcctgttatcc

SEQ ID NO: 736024 - DNA, 15 bp, Homo sapiens
catgcctgttatccc

SEQ ID NO: 736025 - DNA, 15 bp, Homo sapiens
atgcctgttatccca

SEQ ID NO: 736026 - DNA, 15 bp, Homo sapiens
tgcctgttatcccac

SEQ ID NO: 736027 - DNA, 15 bp, Homo sapiens
gcctgttatcccaca

SEQ ID NO: 736028 - DNA, 15 bp, Homo sapiens
cctgttatcccacac

SEQ ID NO: 736029 - DNA, 15 bp, Homo sapiens
ctgttatcccacact

SEQ ID NO: 736030 - DNA, 15 bp, Homo sapiens
tgttatcccacactt

SEQ ID NO: 736031 - DNA, 15 bp, Homo sapiens
gttatcccacacttt

SEQ ID NO: 736032 - DNA, 15 bp, Homo sapiens
ttatcccacactttg

SEQ ID NO: 736033 - DNA, 15 bp, Homo sapiens
tatcccacactttgg

SEQ ID NO: 736034 - DNA, 15 bp, Homo sapiens
atcccacactttggg

SEQ ID NO: 736035 - DNA, 15 bp, Homo sapiens
tcccacactttggga

SEQ ID NO: 736036 - DNA, 15 bp, Homo sapiens
cccacactttgggag

SEQ ID NO: 736037 - DNA, 15 bp, Homo sapiens
ccacactttgggagg

SEQ ID NO: 736038 - DNA, 15 bp, Homo sapiens
cacactttgggaggc

SEQ ID NO: 736039 - DNA, 15 bp, Homo sapiens
acactttgggaggct

SEQ ID NO: 736040 - DNA, 15 bp, Homo sapiens
cactttgggaggctg

SEQ ID NO: 736041 - DNA, 15 bp, Homo sapiens
actttgggaggctga

SEQ ID NO: 736042 - DNA, 15 bp, Homo sapiens
ctttgggaggctgag

SEQ ID NO: 736043 - DNA, 15 bp, Homo sapiens
tttgggaggctgagg

SEQ ID NO: 736044 - DNA, 15 bp, Homo sapiens
ttgggaggctgaggc

SEQ ID NO: 736045 - DNA, 15 bp, Homo sapiens
tgggaggctgaggcg

SEQ ID NO: 736046 - DNA, 15 bp, Homo sapiens
gggaggctgaggcgg

SEQ ID NO: 736047 - DNA, 15 bp, Homo sapiens
ggaggctgaggcggg

SEQ ID NO: 736048 - DNA, 15 bp, Homo sapiens
gaggctgaggcgggt

SEQ ID NO: 736049 - DNA, 15 bp, Homo sapiens
aggctgaggcgggtg

SEQ ID NO: 736050 - DNA, 15 bp, Homo sapiens
ggctgaggcgggtgg

SEQ ID NO: 736051 - DNA, 15 bp, Homo sapiens
gctgaggcgggtgga

SEQ ID NO: 736052 - DNA, 15 bp, Homo sapiens
ctgaggcgggtggat

SEQ ID NO: 736053 - DNA, 15 bp, Homo sapiens
tgaggcgggtggatc

SEQ ID NO: 736054 - DNA, 15 bp, Homo sapiens
gaggcgggtggatcg

SEQ ID NO: 736055 - DNA, 15 bp, Homo sapiens
aggcgggtggatcgc

SEQ ID NO: 736056 - DNA, 15 bp, Homo sapiens
ggcgggtggatcgcc

SEQ ID NO: 736057 - DNA, 15 bp, Homo sapiens
gcgggtggatcgcct

SEQ ID NO: 736058 - DNA, 15 bp, Homo sapiens
cgggtggatcgcctg

SEQ ID NO: 736059 - DNA, 15 bp, Homo sapiens
gggtggatcgcctga

SEQ ID NO: 736060 - DNA, 15 bp, Homo sapiens
ggtggatcgcctgag

SEQ ID NO: 736061 - DNA, 15 bp, Homo sapiens
gtggatcgcctgagc

SEQ ID NO: 736062 - DNA, 15 bp, Homo sapiens
tggatcgcctgagct

SEQ ID NO: 736063 - DNA, 15 bp, Homo sapiens
ggatcgcctgagctc

SEQ ID NO: 736064 - DNA, 15 bp, Homo sapiens
gatcgcctgagctca

SEQ ID NO: 736065 - DNA, 15 bp, Homo sapiens
atcgcctgagctcag

SEQ ID NO: 736066 - DNA, 15 bp, Homo sapiens
tcgcctgagctcagg

SEQ ID NO: 736067 - DNA, 15 bp, Homo sapiens
cgcctgagctcagga

SEQ ID NO: 736068 - DNA, 15 bp, Homo sapiens
gcctgagctcaggag

SEQ ID NO: 736069 - DNA, 15 bp, Homo sapiens
cctgagctcaggagt

SEQ ID NO: 736070 - DNA, 15 bp, Homo sapiens
ctgagctcaggagtt

SEQ ID NO: 736071 - DNA, 15 bp, Homo sapiens
tgagctcaggagttc

SEQ ID NO: 736072 - DNA, 15 bp, Homo sapiens
gagctcaggagttcg

SEQ ID NO: 736073 - DNA, 15 bp, Homo sapiens
agctcaggagttcga

SEQ ID NO: 736074 - DNA, 15 bp, Homo sapiens
gctcaggagttcgag

SEQ ID NO: 736075 - DNA, 15 bp, Homo sapiens
ctcaggagttcgaga

SEQ ID NO: 736076 - DNA, 15 bp, Homo sapiens
tcaggagttcgagac

SEQ ID NO: 736077 - DNA, 15 bp, Homo sapiens
caggagttcgagact

SEQ ID NO: 736078 - DNA, 15 bp, Homo sapiens
aggagttcgagacta

SEQ ID NO: 736079 - DNA, 15 bp, Homo sapiens
ggagttcgagactag

SEQ ID NO: 736080 - DNA, 15 bp, Homo sapiens
gagttcgagactagc

SEQ ID NO: 736081 - DNA, 15 bp, Homo sapiens
agttcgagactagcc

SEQ ID NO: 736082 - DNA, 15 bp, Homo sapiens
gttcgagactagcct

SEQ ID NO: 736083 - DNA, 15 bp, Homo sapiens
ttcgagactagcctg

SEQ ID NO: 736084 - DNA, 15 bp, Homo sapiens
tcgagactagcctgg

SEQ ID NO: 736085 - DNA, 15 bp, Homo sapiens
cgagactagcctggg

SEQ ID NO: 736086 - DNA, 15 bp, Homo sapiens
gagactagcctgggc

SEQ ID NO: 736087 - DNA, 15 bp, Homo sapiens
agactagcctgggca

SEQ ID NO: 736088 - DNA, 15 bp, Homo sapiens
gactagcctgggcaa

SEQ ID NO: 736089 - DNA, 15 bp, Homo sapiens
actagcctgggcaac

SEQ ID NO: 736090 - DNA, 15 bp, Homo sapiens
ctagcctgggcaaca

SEQ ID NO: 736091 - DNA, 15 bp, Homo sapiens
tagcctgggcaacac

SEQ ID NO: 736092 - DNA, 15 bp, Homo sapiens
agcctgggcaacacg

SEQ ID NO: 736093 - DNA, 15 bp, Homo sapiens
gcctgggcaacacgg

SEQ ID NO: 736094 - DNA, 15 bp, Homo sapiens
cctgggcaacacggt

SEQ ID NO: 736095 - DNA, 15 bp, Homo sapiens
ctgggcaacacggtg

SEQ ID NO: 736096 - DNA, 15 bp, Homo sapiens
tgggcaacacggtga

SEQ ID NO: 736097 - DNA, 15 bp, Homo sapiens
gggcaacacggtgaa

SEQ ID NO: 736098 - DNA, 15 bp, Homo sapiens
ggcaacacggtgaaa

SEQ ID NO: 736099 - DNA, 15 bp, Homo sapiens
gcaacacggtgaaac

SEQ ID NO: 736100 - DNA, 15 bp, Homo sapiens
caacacggtgaaacc

SEQ ID NO: 736101 - DNA, 15 bp, Homo sapiens
aacacggtgaaacct

SEQ ID NO: 736102 - DNA, 15 bp, Homo sapiens
acacggtgaaacctt

SEQ ID NO: 736103 - DNA, 15 bp, Homo sapiens
cacggtgaaaccttg

SEQ ID NO: 736104 - DNA, 15 bp, Homo sapiens
acggtgaaaccttgt

SEQ ID NO: 736105 - DNA, 15 bp, Homo sapiens
cggtgaaaccttgtc

SEQ ID NO: 736106 - DNA, 15 bp, Homo sapiens
ggtgaaaccttgtct

SEQ ID NO: 736107 - DNA, 15 bp, Homo sapiens
gtgaaaccttgtctc

SEQ ID NO: 736108 - DNA, 15 bp, Homo sapiens
tgaaaccttgtctct

SEQ ID NO: 736109 - DNA, 15 bp, Homo sapiens
gaaaccttgtctctg

SEQ ID NO: 736110 - DNA, 15 bp, Homo sapiens
aaaccttgtctctgc

SEQ ID NO: 736111 - DNA, 15 bp, Homo sapiens
aaccttgtctctgct

SEQ ID NO: 736112 - DNA, 15 bp, Homo sapiens
accttgtctctgcta

SEQ ID NO: 736113 - DNA, 15 bp, Homo sapiens
ccttgtctctgctaa

SEQ ID NO: 736114 - DNA, 15 bp, Homo sapiens
cttgtctctgctaaa

SEQ ID NO: 736115 - DNA, 15 bp, Homo sapiens
ttgtctctgctaaaa

SEQ ID NO: 736116 - DNA, 15 bp, Homo sapiens
tgtctctgctaaaat

SEQ ID NO: 736117 - DNA, 15 bp, Homo sapiens
gtctctgctaaaata

SEQ ID NO: 736118 - DNA, 15 bp, Homo sapiens
tctctgctaaaatac

SEQ ID NO: 736119 - DNA, 15 bp, Homo sapiens
ctctgctaaaataca

SEQ ID NO: 736120 - DNA, 15 bp, Homo sapiens
tctgctaaaatacaa

SEQ ID NO: 736121 - DNA, 15 bp, Homo sapiens
ctgctaaaatacaaa

SEQ ID NO: 736122 - DNA, 15 bp, Homo sapiens
tgctaaaatacaaaa

SEQ ID NO: 736123 - DNA, 15 bp, Homo sapiens
gctaaaatacaaaaa

SEQ ID NO: 736124 - DNA, 15 bp, Homo sapiens
ctaaaatacaaaaaa

SEQ ID NO: 736125 - DNA, 15 bp, Homo sapiens
taaaatacaaaaaaa

SEQ ID NO: 736126 - DNA, 15 bp, Homo sapiens
aaaatacaaaaaaat

SEQ ID NO: 736127 - DNA, 15 bp, Homo sapiens
aaatacaaaaaaatt

SEQ ID NO: 736128 - DNA, 15 bp, Homo sapiens
aatacaaaaaaatta

SEQ ID NO: 736129 - DNA, 15 bp, Homo sapiens
atacaaaaaaattag

SEQ ID NO: 736130 - DNA, 15 bp, Homo sapiens
tacaaaaaaattagc

SEQ ID NO: 736131 - DNA, 15 bp, Homo sapiens
acaaaaaaattagcg

SEQ ID NO: 736132 - DNA, 15 bp, Homo sapiens
caaaaaaattagcga

SEQ ID NO: 736133 - DNA, 15 bp, Homo sapiens
aaaaaaattagcgag

SEQ ID NO: 736134 - DNA, 15 bp, Homo sapiens
aaaaaattagcgagg

SEQ ID NO: 736135 - DNA, 15 bp, Homo sapiens
aaaaattagcgaggt

SEQ ID NO: 736136 - DNA, 15 bp, Homo sapiens
aaaattagcgaggtg

SEQ ID NO: 736137 - DNA, 15 bp, Homo sapiens
aaattagcgaggtgt

SEQ ID NO: 736138 - DNA, 15 bp, Homo sapiens
aattagcgaggtgtg

SEQ ID NO: 736139 - DNA, 15 bp, Homo sapiens
attagcgaggtgtgg

SEQ ID NO: 736140 - DNA, 15 bp, Homo sapiens
ttagcgaggtgtgga

SEQ ID NO: 736141 - DNA, 15 bp, Homo sapiens
tagcgaggtgtggag

SEQ ID NO: 736142 - DNA, 15 bp, Homo sapiens
agcgaggtgtggagt

SEQ ID NO: 736143 - DNA, 15 bp, Homo sapiens
gcgaggtgtggagtg

SEQ ID NO: 736144 - DNA, 15 bp, Homo sapiens
cgaggtgtggagtgc

SEQ ID NO: 736145 - DNA, 15 bp, Homo sapiens
gaggtgtggagtgca

SEQ ID NO: 736146 - DNA, 15 bp, Homo sapiens
aggtgtggagtgcac

SEQ ID NO: 736147 - DNA, 15 bp, Homo sapiens
ggtgtggagtgcacg

SEQ ID NO: 736148 - DNA, 15 bp, Homo sapiens
gtgtggagtgcacgt

SEQ ID NO: 736149 - DNA, 15 bp, Homo sapiens
tgtggagtgcacgtg

SEQ ID NO: 736150 - DNA, 15 bp, Homo sapiens
gtggagtgcacgtgt

SEQ ID NO: 736151 - DNA, 15 bp, Homo sapiens
tggagtgcacgtgta

SEQ ID NO: 736152 - DNA, 15 bp, Homo sapiens
ggagtgcacgtgtag

SEQ ID NO: 736153 - DNA, 15 bp, Homo sapiens
gagtgcacgtgtagt

SEQ ID NO: 736154 - DNA, 15 bp, Homo sapiens
agtgcacgtgtagtt

SEQ ID NO: 736155 - DNA, 15 bp, Homo sapiens
gtgcacgtgtagttc

SEQ ID NO: 736156 - DNA, 15 bp, Homo sapiens
tgcacgtgtagttcc

SEQ ID NO: 736157 - DNA, 15 bp, Homo sapiens
gcacgtgtagttcca

SEQ ID NO: 736158 - DNA, 15 bp, Homo sapiens
cacgtgtagttccag

SEQ ID NO: 736159 - DNA, 15 bp, Homo sapiens
acgtgtagttccagc

SEQ ID NO: 736160 - DNA, 15 bp, Homo sapiens
cgtgtagttccagct

SEQ ID NO: 736161 - DNA, 15 bp, Homo sapiens
gtgtagttccagcta

SEQ ID NO: 736162 - DNA, 15 bp, Homo sapiens
tgtagttccagctac

SEQ ID NO: 736163 - DNA, 15 bp, Homo sapiens
gtagttccagctact

SEQ ID NO: 736164 - DNA, 15 bp, Homo sapiens
tagttccagctacta

SEQ ID NO: 736165 - DNA, 15 bp, Homo sapiens
agttccagctactag

SEQ ID NO: 736166 - DNA, 15 bp, Homo sapiens
gttccagctactagg

SEQ ID NO: 736167 - DNA, 15 bp, Homo sapiens
ttccagctactaggg

SEQ ID NO: 736168 - DNA, 15 bp, Homo sapiens
tccagctactaggga

SEQ ID NO: 736169 - DNA, 15 bp, Homo sapiens
ccagctactagggag

SEQ ID NO: 736170 - DNA, 15 bp, Homo sapiens
cagctactagggagg

SEQ ID NO: 736171 - DNA, 15 bp, Homo sapiens
agctactagggaggc

SEQ ID NO: 736172 - DNA, 15 bp, Homo sapiens
gctactagggaggct

SEQ ID NO: 736173 - DNA, 15 bp, Homo sapiens
ctactagggaggctg

SEQ ID NO: 736174 - DNA, 15 bp, Homo sapiens
tactagggaggctga

SEQ ID NO: 736175 - DNA, 15 bp, Homo sapiens
actagggaggctgag

SEQ ID NO: 736176 - DNA, 15 bp, Homo sapiens
ctagggaggctgagg

SEQ ID NO: 736177 - DNA, 15 bp, Homo sapiens
tagggaggctgaggc

SEQ ID NO: 736178 - DNA, 15 bp, Homo sapiens
agggaggctgaggca

SEQ ID NO: 736179 - DNA, 15 bp, Homo sapiens
gggaggctgaggcag

SEQ ID NO: 736180 - DNA, 15 bp, Homo sapiens
tgaggcaggagaatt

SEQ ID NO: 736181 - DNA, 15 bp, Homo sapiens
gaggcaggagaattg

SEQ ID NO: 736182 - DNA, 15 bp, Homo sapiens
aggcaggagaattgc

SEQ ID NO: 736183 - DNA, 15 bp, Homo sapiens
ggcaggagaattgct

SEQ ID NO: 736184 - DNA, 15 bp, Homo sapiens
gcaggagaattgctt

SEQ ID NO: 736185 - DNA, 15 bp, Homo sapiens
caggagaattgcttg

SEQ ID NO: 736186 - DNA, 15 bp, Homo sapiens
aggagaattgcttga

SEQ ID NO: 736187 - DNA, 15 bp, Homo sapiens
ggagaattgcttgaa

SEQ ID NO: 736188 - DNA, 15 bp, Homo sapiens
gagaattgcttgaac

SEQ ID NO: 736189 - DNA, 15 bp, Homo sapiens
agaattgcttgaacc

SEQ ID NO: 736190 - DNA, 15 bp, Homo sapiens
gaattgcttgaaccc

SEQ ID NO: 736191 - DNA, 15 bp, Homo sapiens
aattgcttgaaccca

SEQ ID NO: 736192 - DNA, 15 bp, Homo sapiens
attgcttgaacccag

SEQ ID NO: 736193 - DNA, 15 bp, Homo sapiens
ttgcttgaacccagg

SEQ ID NO: 736194 - DNA, 15 bp, Homo sapiens
tgcttgaacccagga

SEQ ID NO: 736195 - DNA, 15 bp, Homo sapiens
gcttgaacccaggag

SEQ ID NO: 736196 - DNA, 15 bp, Homo sapiens
cttgaacccaggagg

SEQ ID NO: 736197 - DNA, 15 bp, Homo sapiens
ttgaacccaggaggc

SEQ ID NO: 736198 - DNA, 15 bp, Homo sapiens
tgaacccaggaggcg

SEQ ID NO: 736199 - DNA, 15 bp, Homo sapiens
gaacccaggaggcgg

SEQ ID NO: 736200 - DNA, 15 bp, Homo sapiens
aacccaggaggcgga

SEQ ID NO: 736201 - DNA, 15 bp, Homo sapiens
acccaggaggcggag

SEQ ID NO: 736202 - DNA, 15 bp, Homo sapiens
cccaggaggcggagg

SEQ ID NO: 736203 - DNA, 15 bp, Homo sapiens
ccaggaggcggaggt

SEQ ID NO: 736204 - DNA, 15 bp, Homo sapiens
caggaggcggaggtt

SEQ ID NO: 736205 - DNA, 15 bp, Homo sapiens
aggaggcggaggttg

SEQ ID NO: 736206 - DNA, 15 bp, Homo sapiens
gaggcggaggttgca

SEQ ID NO: 736207 - DNA, 15 bp, Homo sapiens
aggcggaggttgcag

SEQ ID NO: 736208 - DNA, 15 bp, Homo sapiens
ggcggaggttgcagt

SEQ ID NO: 736209 - DNA, 15 bp, Homo sapiens
gcggaggttgcagtg

SEQ ID NO: 736210 - DNA, 15 bp, Homo sapiens
cggaggttgcagtga

SEQ ID NO: 736211 - DNA, 15 bp, Homo sapiens
ggaggttgcagtgag

SEQ ID NO: 736212 - DNA, 15 bp, Homo sapiens
gaggttgcagtgagc

SEQ ID NO: 736213 - DNA, 15 bp, Homo sapiens
aggttgcagtgagct

SEQ ID NO: 736214 - DNA, 15 bp, Homo sapiens
ggttgcagtgagctg

SEQ ID NO: 736215 - DNA, 15 bp, Homo sapiens
gttgcagtgagctga

SEQ ID NO: 736216 - DNA, 15 bp, Homo sapiens
ttgcagtgagctgag

SEQ ID NO: 736217 - DNA, 15 bp, Homo sapiens
tgcagtgagctgaga

SEQ ID NO: 736218 - DNA, 15 bp, Homo sapiens
gcagtgagctgagat

SEQ ID NO: 736219 - DNA, 15 bp, Homo sapiens
cagtgagctgagatc

SEQ ID NO: 736220 - DNA, 15 bp, Homo sapiens
agtgagctgagatca

SEQ ID NO: 736221 - DNA, 15 bp, Homo sapiens
gtgagctgagatcat

SEQ ID NO: 736222 - DNA, 15 bp, Homo sapiens
tgagctgagatcatg

SEQ ID NO: 736223 - DNA, 15 bp, Homo sapiens
gagctgagatcatgc

SEQ ID NO: 736224 - DNA, 15 bp, Homo sapiens
agctgagatcatgcc

SEQ ID NO: 736225 - DNA, 15 bp, Homo sapiens
gctgagatcatgcca

SEQ ID NO: 736226 - DNA, 15 bp, Homo sapiens
ctgagatcatgccac

SEQ ID NO: 736227 - DNA, 15 bp, Homo sapiens
tgagatcatgccact

SEQ ID NO: 736228 - DNA, 15 bp, Homo sapiens
gagatcatgccactg

SEQ ID NO: 736229 - DNA, 15 bp, Homo sapiens
agatcatgccactgc

SEQ ID NO: 736230 - DNA, 15 bp, Homo sapiens
gatcatgccactgcc

SEQ ID NO: 736231 - DNA, 15 bp, Homo sapiens
atcatgccactgccc

SEQ ID NO: 736232 - DNA, 15 bp, Homo sapiens
tcatgccactgccct

SEQ ID NO: 736233 - DNA, 15 bp, Homo sapiens
catgccactgccctc

SEQ ID NO: 736234 - DNA, 15 bp, Homo sapiens
atgccactgccctct

SEQ ID NO: 736235 - DNA, 15 bp, Homo sapiens
tgccactgccctcta

SEQ ID NO: 736236 - DNA, 15 bp, Homo sapiens
gccactgccctctag

SEQ ID NO: 736237 - DNA, 15 bp, Homo sapiens
ccactgccctctagg

SEQ ID NO: 736238 - DNA, 15 bp, Homo sapiens
cactgccctctaggc

SEQ ID NO: 736239 - DNA, 15 bp, Homo sapiens
actgccctctaggct

SEQ ID NO: 736240 - DNA, 15 bp, Homo sapiens
ctgccctctaggctg

SEQ ID NO: 736241 - DNA, 15 bp, Homo sapiens
tgccctctaggctgg

SEQ ID NO: 736242 - DNA, 15 bp, Homo sapiens
gccctctaggctggg

SEQ ID NO: 736243 - DNA, 15 bp, Homo sapiens
ccctctaggctgggt

SEQ ID NO: 736244 - DNA, 15 bp, Homo sapiens
cctctaggctgggtg

SEQ ID NO: 736245 - DNA, 15 bp, Homo sapiens
ctctaggctgggtga

SEQ ID NO: 736246 - DNA, 15 bp, Homo sapiens
tctaggctgggtgac

SEQ ID NO: 736247 - DNA, 15 bp, Homo sapiens
ctaggctgggtgaca

SEQ ID NO: 736248 - DNA, 15 bp, Homo sapiens
taggctgggtgacaa

SEQ ID NO: 736249 - DNA, 15 bp, Homo sapiens
aggctgggtgacaaa

SEQ ID NO: 736250 - DNA, 15 bp, Homo sapiens
ggctgggtgacaaag

SEQ ID NO: 736251 - DNA, 15 bp, Homo sapiens
gctgggtgacaaagc

SEQ ID NO: 736252 - DNA, 15 bp, Homo sapiens
ctgggtgacaaagca

SEQ ID NO: 736253 - DNA, 15 bp, Homo sapiens
tgggtgacaaagcaa

SEQ ID NO: 736254 - DNA, 15 bp, Homo sapiens
gggtgacaaagcaag

SEQ ID NO: 736255 - DNA, 15 bp, Homo sapiens
ggtgacaaagcaagg

SEQ ID NO: 736256 - DNA, 15 bp, Homo sapiens
gtgacaaagcaaggc

SEQ ID NO: 736257 - DNA, 15 bp, Homo sapiens
tgacaaagcaaggct

SEQ ID NO: 736258 - DNA, 15 bp, Homo sapiens
gacaaagcaaggctc

SEQ ID NO: 736259 - DNA, 15 bp, Homo sapiens
acaaagcaaggctcc

SEQ ID NO: 736260 - DNA, 15 bp, Homo sapiens
caaagcaaggctcca

SEQ ID NO: 736261 - DNA, 15 bp, Homo sapiens
aaagcaaggctccat

SEQ ID NO: 736262 - DNA, 15 bp, Homo sapiens
aagcaaggctccatc

SEQ ID NO: 736263 - DNA, 15 bp, Homo sapiens
agcaaggctccatct

SEQ ID NO: 736264 - DNA, 15 bp, Homo sapiens
gcaaggctccatctc

SEQ ID NO: 736265 - DNA, 15 bp, Homo sapiens
caaggctccatctca

SEQ ID NO: 736266 - DNA, 15 bp, Homo sapiens
aaggctccatctcaa

SEQ ID NO: 736267 - DNA, 15 bp, Homo sapiens
aggctccatctcaaa

SEQ ID NO: 736268 - DNA, 15 bp, Homo sapiens
ggctccatctcaaaa

SEQ ID NO: 736269 - DNA, 15 bp, Homo sapiens
gctccatctcaaaaa

SEQ ID NO: 736270 - DNA, 15 bp, Homo sapiens
ctccatctcaaaaaa

SEQ ID NO: 736271 - DNA, 15 bp, Homo sapiens
tccatctcaaaaaaa

SEQ ID NO: 736272 - DNA, 15 bp, Homo sapiens
ccatctcaaaaaaaa

SEQ ID NO: 736273 - DNA, 15 bp, Homo sapiens
catctcaaaaaaaaa

SEQ ID NO: 736274 - DNA, 15 bp, Homo sapiens
atctcaaaaaaaaaa

SEQ ID NO: 736275 - DNA, 15 bp, Homo sapiens
tctcaaaaaaaaaaa

SEQ ID NO: 736276 - DNA, 15 bp, Homo sapiens
ctcaaaaaaaaaaaa

SEQ ID NO: 736277 - DNA, 15 bp, Homo sapiens
tcaaaaaaaaaaaaa

SEQ ID NO: 736278 - DNA, 15 bp, Homo sapiens
caaaaaaaaaaaaaa

SEQ ID NO: 736279 - DNA, 15 bp, Homo sapiens
aaaaaaaaaaaaaaa

SEQ ID NO: 736280 - DNA, 15 bp, Homo sapiens
aaaaaaaaaaaaaat

SEQ ID NO: 736281 - DNA, 15 bp, Homo sapiens
aaaaaaaaaaaaatc

SEQ ID NO: 736282 - DNA, 15 bp, Homo sapiens
aaaaaaaaaaaatcc

SEQ ID NO: 736283 - DNA, 15 bp, Homo sapiens
aaaaaaaaaaatccc

SEQ ID NO: 736284 - DNA, 15 bp, Homo sapiens
aaaaaaaaaatccca

SEQ ID NO: 736285 - DNA, 15 bp, Homo sapiens
aaaaaaaaatcccac

SEQ ID NO: 736286 - DNA, 15 bp, Homo sapiens
aaaaaaaatcccact

SEQ ID NO: 736287 - DNA, 15 bp, Homo sapiens
aaaaaaatcccactt

SEQ ID NO: 736288 - DNA, 15 bp, Homo sapiens
aaaaaatcccacttc

SEQ ID NO: 736289 - DNA, 15 bp, Homo sapiens
aaaaatcccacttct

SEQ ID NO: 736290 - DNA, 15 bp, Homo sapiens
aaaatcccacttctg

SEQ ID NO: 736291 - DNA, 15 bp, Homo sapiens
aaatcccacttctgt

SEQ ID NO: 736292 - DNA, 15 bp, Homo sapiens
aatcccacttctgtc

SEQ ID NO: 736293 - DNA, 15 bp, Homo sapiens
atcccacttctgtct

SEQ ID NO: 736294 - DNA, 15 bp, Homo sapiens
tcccacttctgtctc

SEQ ID NO: 736295 - DNA, 15 bp, Homo sapiens
cccacttctgtctct

SEQ ID NO: 736296 - DNA, 15 bp, Homo sapiens
ccacttctgtctctt

SEQ ID NO: 736297 - DNA, 15 bp, Homo sapiens
cacttctgtctcttt

SEQ ID NO: 736298 - DNA, 15 bp, Homo sapiens
acttctgtctctttc

SEQ ID NO: 736299 - DNA, 15 bp, Homo sapiens
cttctgtctctttcg

SEQ ID NO: 736300 - DNA, 15 bp, Homo sapiens
ttctgtctctttcgt

SEQ ID NO: 736301 - DNA, 15 bp, Homo sapiens
tctgtctctttcgtc

SEQ ID NO: 736302 - DNA, 15 bp, Homo sapiens
ctgtctctttcgtct

SEQ ID NO: 736303 - DNA, 15 bp, Homo sapiens
tgtctctttcgtctt

SEQ ID NO: 736304 - DNA, 15 bp, Homo sapiens
gtctctttcgtcttc

SEQ ID NO: 736305 - DNA, 15 bp, Homo sapiens
tctctttcgtcttcc

SEQ ID NO: 736306 - DNA, 15 bp, Homo sapiens
ctctttcgtcttccc

SEQ ID NO: 736307 - DNA, 15 bp, Homo sapiens
tctttcgtcttccct

SEQ ID NO: 736308 - DNA, 15 bp, Homo sapiens
ctttcgtcttccctt

SEQ ID NO: 736309 - DNA, 15 bp, Homo sapiens
tttcgtcttcccttg

SEQ ID NO: 736310 - DNA, 15 bp, Homo sapiens
ttcgtcttcccttgc

SEQ ID NO: 736311 - DNA, 15 bp, Homo sapiens
tcgtcttcccttgcc

SEQ ID NO: 736312 - DNA, 15 bp, Homo sapiens
cgtcttcccttgcct

SEQ ID NO: 736313 - DNA, 15 bp, Homo sapiens
gtcttcccttgccta

SEQ ID NO: 736314 - DNA, 15 bp, Homo sapiens
tcttcccttgcctat

SEQ ID NO: 736315 - DNA, 15 bp, Homo sapiens
cttcccttgcctatc

SEQ ID NO: 736316 - DNA, 15 bp, Homo sapiens
ttcccttgcctatca

SEQ ID NO: 736317 - DNA, 15 bp, Homo sapiens
tcccttgcctatcat

SEQ ID NO: 736318 - DNA, 15 bp, Homo sapiens
cccttgcctatcatg

SEQ ID NO: 736319 - DNA, 15 bp, Homo sapiens
ccttgcctatcatga

SEQ ID NO: 736320 - DNA, 15 bp, Homo sapiens
cttgcctatcatgat

SEQ ID NO: 736321 - DNA, 15 bp, Homo sapiens
ttgcctatcatgata

SEQ ID NO: 736322 - DNA, 15 bp, Homo sapiens
tgcctatcatgatag

SEQ ID NO: 736323 - DNA, 15 bp, Homo sapiens
gcctatcatgatagg

SEQ ID NO: 736324 - DNA, 15 bp, Homo sapiens
cctatcatgataggc

SEQ ID NO: 736325 - DNA, 15 bp, Homo sapiens
ctatcatgataggcc

SEQ ID NO: 736326 - DNA, 15 bp, Homo sapiens
tatcatgataggcct

SEQ ID NO: 736327 - DNA, 15 bp, Homo sapiens
atcatgataggcctc

SEQ ID NO: 736328 - DNA, 15 bp, Homo sapiens
tcatgataggcctcc

SEQ ID NO: 736329 - DNA, 15 bp, Homo sapiens
catgataggcctccc

SEQ ID NO: 736330 - DNA, 15 bp, Homo sapiens
atgataggcctccca

SEQ ID NO: 736331 - DNA, 15 bp, Homo sapiens
tgataggcctcccaa

SEQ ID NO: 736332 - DNA, 15 bp, Homo sapiens
gataggcctcccaaa

SEQ ID NO: 736333 - DNA, 15 bp, Homo sapiens
ataggcctcccaaag

SEQ ID NO: 736334 - DNA, 15 bp, Homo sapiens
taggcctcccaaagt

SEQ ID NO: 736335 - DNA, 15 bp, Homo sapiens
aggcctcccaaagtg

SEQ ID NO: 736336 - DNA, 15 bp, Homo sapiens
gtgctgggattacac

SEQ ID NO: 736337 - DNA, 15 bp, Homo sapiens
tgctgggattacact

SEQ ID NO: 736338 - DNA, 15 bp, Homo sapiens
gctgggattacactc

SEQ ID NO: 736339 - DNA, 15 bp, Homo sapiens
ctgggattacactcc

SEQ ID NO: 736340 - DNA, 15 bp, Homo sapiens
tgggattacactcct

SEQ ID NO: 736341 - DNA, 15 bp, Homo sapiens
gggattacactcctt

SEQ ID NO: 736342 - DNA, 15 bp, Homo sapiens
ggattacactccttc

SEQ ID NO: 736343 - DNA, 15 bp, Homo sapiens
gattacactccttct

SEQ ID NO: 736344 - DNA, 15 bp, Homo sapiens
attacactccttctc

SEQ ID NO: 736345 - DNA, 15 bp, Homo sapiens
ttacactccttctcc

SEQ ID NO: 736346 - DNA, 15 bp, Homo sapiens
tacactccttctcca

SEQ ID NO: 736347 - DNA, 15 bp, Homo sapiens
acactccttctccat

SEQ ID NO: 736348 - DNA, 15 bp, Homo sapiens
cactccttctccatt

SEQ ID NO: 736349 - DNA, 15 bp, Homo sapiens
actccttctccattc

SEQ ID NO: 736350 - DNA, 15 bp, Homo sapiens
ctccttctccattct

SEQ ID NO: 736351 - DNA, 15 bp, Homo sapiens
tccttctccattctc

SEQ ID NO: 736352 - DNA, 15 bp, Homo sapiens
ccttctccattctct

SEQ ID NO: 736353 - DNA, 15 bp, Homo sapiens
cttctccattctctc

SEQ ID NO: 736354 - DNA, 15 bp, Homo sapiens
ttctccattctctcc

SEQ ID NO: 736355 - DNA, 15 bp, Homo sapiens
tctccattctctcct

SEQ ID NO: 736356 - DNA, 15 bp, Homo sapiens
ctccattctctcctg

SEQ ID NO: 736357 - DNA, 15 bp, Homo sapiens
tccattctctcctgt

SEQ ID NO: 736358 - DNA, 15 bp, Homo sapiens
ccattctctcctgtg

SEQ ID NO: 736359 - DNA, 15 bp, Homo sapiens
cattctctcctgtgc

SEQ ID NO: 736360 - DNA, 15 bp, Homo sapiens
attctctcctgtgct

SEQ ID NO: 736361 - DNA, 15 bp, Homo sapiens
ttctctcctgtgctt

SEQ ID NO: 736362 - DNA, 15 bp, Homo sapiens
tctctcctgtgcttt

SEQ ID NO: 736363 - DNA, 15 bp, Homo sapiens
ctctcctgtgctttc

SEQ ID NO: 736364 - DNA, 15 bp, Homo sapiens
tctcctgtgctttct

SEQ ID NO: 736365 - DNA, 15 bp, Homo sapiens
ctcctgtgctttctc

SEQ ID NO: 736366 - DNA, 15 bp, Homo sapiens
tcctgtgctttctca

SEQ ID NO: 736367 - DNA, 15 bp, Homo sapiens
cctgtgctttctcag

SEQ ID NO: 736368 - DNA, 15 bp, Homo sapiens
ctgtgctttctcagc

SEQ ID NO: 736369 - DNA, 15 bp, Homo sapiens
tgtgctttctcagct

SEQ ID NO: 736370 - DNA, 15 bp, Homo sapiens
gtgctttctcagctg

SEQ ID NO: 736371 - DNA, 15 bp, Homo sapiens
tgctttctcagctgc

SEQ ID NO: 736372 - DNA, 15 bp, Homo sapiens
gctttctcagctgct

SEQ ID NO: 736373 - DNA, 15 bp, Homo sapiens
ctttctcagctgctg

SEQ ID NO: 736374 - DNA, 15 bp, Homo sapiens
tttctcagctgctgt

SEQ ID NO: 736375 - DNA, 15 bp, Homo sapiens
ttctcagctgctgtc

SEQ ID NO: 736376 - DNA, 15 bp, Homo sapiens
tctcagctgctgtct

SEQ ID NO: 736377 - DNA, 15 bp, Homo sapiens
ctcagctgctgtctt

SEQ ID NO: 736378 - DNA, 15 bp, Homo sapiens
tcagctgctgtcttc

SEQ ID NO: 736379 - DNA, 15 bp, Homo sapiens
cagctgctgtcttca

SEQ ID NO: 736380 - DNA, 15 bp, Homo sapiens
agctgctgtcttcac

SEQ ID NO: 736381 - DNA, 15 bp, Homo sapiens
gctgctgtcttcaca

SEQ ID NO: 736382 - DNA, 15 bp, Homo sapiens
ctgctgtcttcacag

SEQ ID NO: 736383 - DNA, 15 bp, Homo sapiens
tgctgtcttcacagg

SEQ ID NO: 736384 - DNA, 15 bp, Homo sapiens
gctgtcttcacaggt

SEQ ID NO: 736385 - DNA, 15 bp, Homo sapiens
ctgtcttcacaggtt

SEQ ID NO: 736386 - DNA, 15 bp, Homo sapiens
tgtcttcacaggttg

SEQ ID NO: 736387 - DNA, 15 bp, Homo sapiens
gtcttcacaggttgc

SEQ ID NO: 736388 - DNA, 15 bp, Homo sapiens
tcttcacaggttgct

SEQ ID NO: 736389 - DNA, 15 bp, Homo sapiens
cttcacaggttgctt

SEQ ID NO: 736390 - DNA, 15 bp, Homo sapiens
ttcacaggttgcttc

SEQ ID NO: 736391 - DNA, 15 bp, Homo sapiens
tcacaggttgcttct

SEQ ID NO: 736392 - DNA, 15 bp, Homo sapiens
cacaggttgcttctt

SEQ ID NO: 736393 - DNA, 15 bp, Homo sapiens
acaggttgcttctta

SEQ ID NO: 736394 - DNA, 15 bp, Homo sapiens
caggttgcttcttag

SEQ ID NO: 736395 - DNA, 15 bp, Homo sapiens
aggttgcttcttaga

SEQ ID NO: 736396 - DNA, 15 bp, Homo sapiens
ggttgcttcttagaa

SEQ ID NO: 736397 - DNA, 15 bp, Homo sapiens
gttgcttcttagaat

SEQ ID NO: 736398 - DNA, 15 bp, Homo sapiens
ttgcttcttagaatg

SEQ ID NO: 736399 - DNA, 15 bp, Homo sapiens
tgcttcttagaatgt

SEQ ID NO: 736400 - DNA, 15 bp, Homo sapiens
gcttcttagaatgtt

SEQ ID NO: 736401 - DNA, 15 bp, Homo sapiens
cttcttagaatgttt

SEQ ID NO: 736402 - DNA, 15 bp, Homo sapiens
ttcttagaatgtttt

SEQ ID NO: 736403 - DNA, 15 bp, Homo sapiens
tcttagaatgttttt

SEQ ID NO: 736404 - DNA, 15 bp, Homo sapiens
cttagaatgtttttt

SEQ ID NO: 736405 - DNA, 15 bp, Homo sapiens
ttagaatgttttttt

SEQ ID NO: 736406 - DNA, 15 bp, Homo sapiens
tagaatgttttttta

SEQ ID NO: 736407 - DNA, 15 bp, Homo sapiens
agaatgtttttttaa

SEQ ID NO: 736408 - DNA, 15 bp, Homo sapiens
gaatgtttttttaat

SEQ ID NO: 736409 - DNA, 15 bp, Homo sapiens
aatgtttttttaata

SEQ ID NO: 736410 - DNA, 15 bp, Homo sapiens
atgtttttttaatac

SEQ ID NO: 736411 - DNA, 15 bp, Homo sapiens
tgtttttttaataca

SEQ ID NO: 736412 - DNA, 15 bp, Homo sapiens
gtttttttaatacac

SEQ ID NO: 736413 - DNA, 15 bp, Homo sapiens
tttttttaatacaca

SEQ ID NO: 736414 - DNA, 15 bp, Homo sapiens
ttttttaatacacac

SEQ ID NO: 736415 - DNA, 15 bp, Homo sapiens
tttttaatacacaca

SEQ ID NO: 736416 - DNA, 15 bp, Homo sapiens
ttttaatacacacac

SEQ ID NO: 736417 - DNA, 15 bp, Homo sapiens
tttaatacacacaca

SEQ ID NO: 736418 - DNA, 15 bp, Homo sapiens
ttaatacacacacaa

SEQ ID NO: 736419 - DNA, 15 bp, Homo sapiens
taatacacacacaag

SEQ ID NO: 736420 - DNA, 15 bp, Homo sapiens
aatacacacacaagg

SEQ ID NO: 736421 - DNA, 15 bp, Homo sapiens
atacacacacaaggt

SEQ ID NO: 736422 - DNA, 15 bp, Homo sapiens
tacacacacaaggtt

SEQ ID NO: 736423 - DNA, 15 bp, Homo sapiens
acacacacaaggttt

SEQ ID NO: 736424 - DNA, 15 bp, Homo sapiens
cacacacaaggtttc

SEQ ID NO: 736425 - DNA, 15 bp, Homo sapiens
acacacaaggtttca

SEQ ID NO: 736426 - DNA, 15 bp, Homo sapiens
cacacaaggtttcaa

SEQ ID NO: 736427 - DNA, 15 bp, Homo sapiens
acacaaggtttcaat

SEQ ID NO: 736428 - DNA, 15 bp, Homo sapiens
cacaaggtttcaatg

SEQ ID NO: 736429 - DNA, 15 bp, Homo sapiens
acaaggtttcaatgc

SEQ ID NO: 736430 - DNA, 15 bp, Homo sapiens
caaggtttcaatgcc

SEQ ID NO: 736431 - DNA, 15 bp, Homo sapiens
aaggtttcaatgccc

SEQ ID NO: 736432 - DNA, 15 bp, Homo sapiens
aggtttcaatgccct

SEQ ID NO: 736433 - DNA, 15 bp, Homo sapiens
ggtttcaatgccctt

SEQ ID NO: 736434 - DNA, 15 bp, Homo sapiens
gtttcaatgcccttt

SEQ ID NO: 736435 - DNA, 15 bp, Homo sapiens
tttcaatgccctttt

SEQ ID NO: 736436 - DNA, 15 bp, Homo sapiens
ttcaatgccctttta

SEQ ID NO: 736437 - DNA, 15 bp, Homo sapiens
tcaatgcccttttat

SEQ ID NO: 736438 - DNA, 15 bp, Homo sapiens
caatgcccttttata

SEQ ID NO: 736439 - DNA, 15 bp, Homo sapiens
aatgcccttttatac

SEQ ID NO: 736440 - DNA, 15 bp, Homo sapiens
atgcccttttataca

SEQ ID NO: 736441 - DNA, 15 bp, Homo sapiens
tgcccttttatacaa

SEQ ID NO: 736442 - DNA, 15 bp, Homo sapiens
gcccttttatacaag

SEQ ID NO: 736443 - DNA, 15 bp, Homo sapiens
cccttttatacaagc

SEQ ID NO: 736444 - DNA, 15 bp, Homo sapiens
ccttttatacaagcc

SEQ ID NO: 736445 - DNA, 15 bp, Homo sapiens
cttttatacaagcca

SEQ ID NO: 736446 - DNA, 15 bp, Homo sapiens
ttttatacaagccat

SEQ ID NO: 736447 - DNA, 15 bp, Homo sapiens
tttatacaagccata

SEQ ID NO: 736448 - DNA, 15 bp, Homo sapiens
ttatacaagccatat

SEQ ID NO: 736449 - DNA, 15 bp, Homo sapiens
tatacaagccatatt

SEQ ID NO: 736450 - DNA, 15 bp, Homo sapiens
atacaagccatattt

SEQ ID NO: 736451 - DNA, 15 bp, Homo sapiens
tacaagccatatttt

SEQ ID NO: 736452 - DNA, 15 bp, Homo sapiens
acaagccatatttta

SEQ ID NO: 736453 - DNA, 15 bp, Homo sapiens
caagccatattttaa

SEQ ID NO: 736454 - DNA, 15 bp, Homo sapiens
aagccatattttaat

SEQ ID NO: 736455 - DNA, 15 bp, Homo sapiens
agccatattttaatt

SEQ ID NO: 736456 - DNA, 15 bp, Homo sapiens
gccatattttaattt

SEQ ID NO: 736457 - DNA, 15 bp, Homo sapiens
ccatattttaattta

SEQ ID NO: 736458 - DNA, 15 bp, Homo sapiens
catattttaatttac

SEQ ID NO: 736459 - DNA, 15 bp, Homo sapiens
atattttaatttaca

SEQ ID NO: 736460 - DNA, 15 bp, Homo sapiens
tattttaatttacaa

SEQ ID NO: 736461 - DNA, 15 bp, Homo sapiens
attttaatttacaac

SEQ ID NO: 736462 - DNA, 15 bp, Homo sapiens
ttttaatttacaaca

SEQ ID NO: 736463 - DNA, 15 bp, Homo sapiens
tttaatttacaacaa

SEQ ID NO: 736464 - DNA, 15 bp, Homo sapiens
ttaatttacaacaaa

SEQ ID NO: 736465 - DNA, 15 bp, Homo sapiens
taatttacaacaaaa

SEQ ID NO: 736466 - DNA, 15 bp, Homo sapiens
aatttacaacaaaat

SEQ ID NO: 736467 - DNA, 15 bp, Homo sapiens
atttacaacaaaatt

SEQ ID NO: 736468 - DNA, 15 bp, Homo sapiens
tttacaacaaaatta

SEQ ID NO: 736469 - DNA, 15 bp, Homo sapiens
ttacaacaaaattat

SEQ ID NO: 736470 - DNA, 15 bp, Homo sapiens
tacaacaaaattatg

SEQ ID NO: 736471 - DNA, 15 bp, Homo sapiens
acaacaaaattatga

SEQ ID NO: 736472 - DNA, 15 bp, Homo sapiens
caacaaaattatgat

SEQ ID NO: 736473 - DNA, 15 bp, Homo sapiens
aacaaaattatgatg

SEQ ID NO: 736474 - DNA, 15 bp, Homo sapiens
acaaaattatgatgt

SEQ ID NO: 736475 - DNA, 15 bp, Homo sapiens
caaaattatgatgtt

SEQ ID NO: 736476 - DNA, 15 bp, Homo sapiens
aaaattatgatgtta

SEQ ID NO: 736477 - DNA, 15 bp, Homo sapiens
aaattatgatgttat

SEQ ID NO: 736478 - DNA, 15 bp, Homo sapiens
aattatgatgttata

SEQ ID NO: 736479 - DNA, 15 bp, Homo sapiens
attatgatgttatac

SEQ ID NO: 736480 - DNA, 15 bp, Homo sapiens
ttatgatgttataca

SEQ ID NO: 736481 - DNA, 15 bp, Homo sapiens
tatgatgttatacaa

SEQ ID NO: 736482 - DNA, 15 bp, Homo sapiens
atgatgttatacaac

SEQ ID NO: 736483 - DNA, 15 bp, Homo sapiens
tgatgttatacaact

SEQ ID NO: 736484 - DNA, 15 bp, Homo sapiens
gatgttatacaactg

SEQ ID NO: 736485 - DNA, 15 bp, Homo sapiens
atgttatacaactgc

SEQ ID NO: 736486 - DNA, 15 bp, Homo sapiens
tgttatacaactgca

SEQ ID NO: 736487 - DNA, 15 bp, Homo sapiens
gttatacaactgcag

SEQ ID NO: 736488 - DNA, 15 bp, Homo sapiens
ttatacaactgcagc

SEQ ID NO: 736489 - DNA, 15 bp, Homo sapiens
tatacaactgcagct

SEQ ID NO: 736490 - DNA, 15 bp, Homo sapiens
atacaactgcagctt

SEQ ID NO: 736491 - DNA, 15 bp, Homo sapiens
tacaactgcagctta

SEQ ID NO: 736492 - DNA, 15 bp, Homo sapiens
acaactgcagcttat

SEQ ID NO: 736493 - DNA, 15 bp, Homo sapiens
caactgcagcttatg

SEQ ID NO: 736494 - DNA, 15 bp, Homo sapiens
aactgcagcttatgt

SEQ ID NO: 736495 - DNA, 15 bp, Homo sapiens
actgcagcttatgtg

SEQ ID NO: 736496 - DNA, 15 bp, Homo sapiens
ctgcagcttatgtgg

SEQ ID NO: 736497 - DNA, 15 bp, Homo sapiens
tgcagcttatgtggc

SEQ ID NO: 736498 - DNA, 15 bp, Homo sapiens
gcagcttatgtggcc

SEQ ID NO: 736499 - DNA, 15 bp, Homo sapiens
cagcttatgtggcct

SEQ ID NO: 736500 - DNA, 15 bp, Homo sapiens
agcttatgtggcctt

SEQ ID NO: 736501 - DNA, 15 bp, Homo sapiens
gcttatgtggcctta

SEQ ID NO: 736502 - DNA, 15 bp, Homo sapiens
cttatgtggccttac

SEQ ID NO: 736503 - DNA, 15 bp, Homo sapiens
ttatgtggccttaca

SEQ ID NO: 736504 - DNA, 15 bp, Homo sapiens
tatgtggccttacac

SEQ ID NO: 736505 - DNA, 15 bp, Homo sapiens
atgtggccttacaca

SEQ ID NO: 736506 - DNA, 15 bp, Homo sapiens
tgtggccttacacag

SEQ ID NO: 736507 - DNA, 15 bp, Homo sapiens
gtggccttacacagt

SEQ ID NO: 736508 - DNA, 15 bp, Homo sapiens
tggccttacacagta

SEQ ID NO: 736509 - DNA, 15 bp, Homo sapiens
ggccttacacagtaa

SEQ ID NO: 736510 - DNA, 15 bp, Homo sapiens
gccttacacagtaaa

SEQ ID NO: 736511 - DNA, 15 bp, Homo sapiens
ccttacacagtaaat

SEQ ID NO: 736512 - DNA, 15 bp, Homo sapiens
cttacacagtaaatg

SEQ ID NO: 736513 - DNA, 15 bp, Homo sapiens
ttacacagtaaatgt

SEQ ID NO: 736514 - DNA, 15 bp, Homo sapiens
tacacagtaaatgtt

SEQ ID NO: 736515 - DNA, 15 bp, Homo sapiens
acacagtaaatgttc

SEQ ID NO: 736516 - DNA, 15 bp, Homo sapiens
cacagtaaatgttca

SEQ ID NO: 736517 - DNA, 15 bp, Homo sapiens
acagtaaatgttcag

SEQ ID NO: 736518 - DNA, 15 bp, Homo sapiens
cagtaaatgttcaga

SEQ ID NO: 736519 - DNA, 15 bp, Homo sapiens
agtaaatgttcagaa

SEQ ID NO: 736520 - DNA, 15 bp, Homo sapiens
gtaaatgttcagaat

SEQ ID NO: 736521 - DNA, 15 bp, Homo sapiens
taaatgttcagaatg

SEQ ID NO: 736522 - DNA, 15 bp, Homo sapiens
aaatgttcagaatgg

SEQ ID NO: 736523 - DNA, 15 bp, Homo sapiens
aatgttcagaatggc

SEQ ID NO: 736524 - DNA, 15 bp, Homo sapiens
atgttcagaatggca

SEQ ID NO: 736525 - DNA, 15 bp, Homo sapiens
tgttcagaatggcag

SEQ ID NO: 736526 - DNA, 15 bp, Homo sapiens
gttcagaatggcagc

SEQ ID NO: 736527 - DNA, 15 bp, Homo sapiens
ttcagaatggcagct

SEQ ID NO: 736528 - DNA, 15 bp, Homo sapiens
tcagaatggcagctt

SEQ ID NO: 736529 - DNA, 15 bp, Homo sapiens
cagaatggcagcttc

SEQ ID NO: 736530 - DNA, 15 bp, Homo sapiens
agaatggcagcttct

SEQ ID NO: 736531 - DNA, 15 bp, Homo sapiens
gaatggcagcttctg

SEQ ID NO: 736532 - DNA, 15 bp, Homo sapiens
aatggcagcttctgt

SEQ ID NO: 736533 - DNA, 15 bp, Homo sapiens
atggcagcttctgtc

SEQ ID NO: 736534 - DNA, 15 bp, Homo sapiens
tggcagcttctgtcc

SEQ ID NO: 736535 - DNA, 15 bp, Homo sapiens
ggcagcttctgtccg

SEQ ID NO: 736536 - DNA, 15 bp, Homo sapiens
gcagcttctgtccgt

SEQ ID NO: 736537 - DNA, 15 bp, Homo sapiens
cagcttctgtccgtc

SEQ ID NO: 736538 - DNA, 15 bp, Homo sapiens
agcttctgtccgtcc

SEQ ID NO: 736539 - DNA, 15 bp, Homo sapiens
gcttctgtccgtcca

SEQ ID NO: 736540 - DNA, 15 bp, Homo sapiens
cttctgtccgtccag

SEQ ID NO: 736541 - DNA, 15 bp, Homo sapiens
ttctgtccgtccagt

SEQ ID NO: 736542 - DNA, 15 bp, Homo sapiens
tctgtccgtccagta

SEQ ID NO: 736543 - DNA, 15 bp, Homo sapiens
ctgtccgtccagtag

SEQ ID NO: 736544 - DNA, 15 bp, Homo sapiens
tgtccgtccagtagg

SEQ ID NO: 736545 - DNA, 15 bp, Homo sapiens
gtccgtccagtaggg

SEQ ID NO: 736546 - DNA, 15 bp, Homo sapiens
tccgtccagtagggt

SEQ ID NO: 736547 - DNA, 15 bp, Homo sapiens
ccgtccagtagggtt

SEQ ID NO: 736548 - DNA, 15 bp, Homo sapiens
cgtccagtagggttc

SEQ ID NO: 736549 - DNA, 15 bp, Homo sapiens
gtccagtagggttct

SEQ ID NO: 736550 - DNA, 15 bp, Homo sapiens
tccagtagggttctg

SEQ ID NO: 736551 - DNA, 15 bp, Homo sapiens
ccagtagggttctgc

SEQ ID NO: 736552 - DNA, 15 bp, Homo sapiens
cagtagggttctgca

SEQ ID NO: 736553 - DNA, 15 bp, Homo sapiens
agtagggttctgcac

SEQ ID NO: 736554 - DNA, 15 bp, Homo sapiens
gtagggttctgcact

SEQ ID NO: 736555 - DNA, 15 bp, Homo sapiens
tagggttctgcactg

SEQ ID NO: 736556 - DNA, 15 bp, Homo sapiens
agggttctgcactgc

SEQ ID NO: 736557 - DNA, 15 bp, Homo sapiens
gggttctgcactgct

SEQ ID NO: 736558 - DNA, 15 bp, Homo sapiens
ggttctgcactgctt

SEQ ID NO: 736559 - DNA, 15 bp, Homo sapiens
gttctgcactgcttg

SEQ ID NO: 736560 - DNA, 15 bp, Homo sapiens
ttctgcactgcttgg

SEQ ID NO: 736561 - DNA, 15 bp, Homo sapiens
tctgcactgcttggc

SEQ ID NO: 736562 - DNA, 15 bp, Homo sapiens
ctgcactgcttggca

SEQ ID NO: 736563 - DNA, 15 bp, Homo sapiens
tgcactgcttggcat

SEQ ID NO: 736564 - DNA, 15 bp, Homo sapiens
gcactgcttggcatc

SEQ ID NO: 736565 - DNA, 15 bp, Homo sapiens
cactgcttggcatcc

SEQ ID NO: 736566 - DNA, 15 bp, Homo sapiens
actgcttggcatcct

SEQ ID NO: 736567 - DNA, 15 bp, Homo sapiens
ctgcttggcatccta

SEQ ID NO: 736568 - DNA, 15 bp, Homo sapiens
tgcttggcatcctac

SEQ ID NO: 736569 - DNA, 15 bp, Homo sapiens
gcttggcatcctact

SEQ ID NO: 736570 - DNA, 15 bp, Homo sapiens
cttggcatcctacta

SEQ ID NO: 736571 - DNA, 15 bp, Homo sapiens
ttggcatcctactat

SEQ ID NO: 736572 - DNA, 15 bp, Homo sapiens
tggcatcctactatc

SEQ ID NO: 736573 - DNA, 15 bp, Homo sapiens
ggcatcctactatct

SEQ ID NO: 736574 - DNA, 15 bp, Homo sapiens
gcatcctactatctt

SEQ ID NO: 736575 - DNA, 15 bp, Homo sapiens
catcctactatcttc

SEQ ID NO: 736576 - DNA, 15 bp, Homo sapiens
atcctactatcttcc

SEQ ID NO: 736577 - DNA, 15 bp, Homo sapiens
tcctactatcttcca

SEQ ID NO: 736578 - DNA, 15 bp, Homo sapiens
cctactatcttccaa

SEQ ID NO: 736579 - DNA, 15 bp, Homo sapiens
ctactatcttccaag

SEQ ID NO: 736580 - DNA, 15 bp, Homo sapiens
tactatcttccaagt

SEQ ID NO: 736581 - DNA, 15 bp, Homo sapiens
actatcttccaagtc

SEQ ID NO: 736582 - DNA, 15 bp, Homo sapiens
ctatcttccaagtca

SEQ ID NO: 736583 - DNA, 15 bp, Homo sapiens
tatcttccaagtcaa

SEQ ID NO: 736584 - DNA, 15 bp, Homo sapiens
atcttccaagtcaat

SEQ ID NO: 736585 - DNA, 15 bp, Homo sapiens
tcttccaagtcaata

SEQ ID NO: 736586 - DNA, 15 bp, Homo sapiens
cttccaagtcaataa

SEQ ID NO: 736587 - DNA, 15 bp, Homo sapiens
ttccaagtcaataag

SEQ ID NO: 736588 - DNA, 15 bp, Homo sapiens
tccaagtcaataagt

SEQ ID NO: 736589 - DNA, 15 bp, Homo sapiens
ccaagtcaataagtg

SEQ ID NO: 736590 - DNA, 15 bp, Homo sapiens
caagtcaataagtgt

SEQ ID NO: 736591 - DNA, 15 bp, Homo sapiens
aagtcaataagtgtt

SEQ ID NO: 736592 - DNA, 15 bp, Homo sapiens
agtcaataagtgtta

SEQ ID NO: 736593 - DNA, 15 bp, Homo sapiens
gtcaataagtgttag

SEQ ID NO: 736594 - DNA, 15 bp, Homo sapiens
tcaataagtgttagg

SEQ ID NO: 736595 - DNA, 15 bp, Homo sapiens
caataagtgttagga

SEQ ID NO: 736596 - DNA, 15 bp, Homo sapiens
aataagtgttaggat

SEQ ID NO: 736597 - DNA, 15 bp, Homo sapiens
ataagtgttaggatc

SEQ ID NO: 736598 - DNA, 15 bp, Homo sapiens
taagtgttaggatct

SEQ ID NO: 736599 - DNA, 15 bp, Homo sapiens
aagtgttaggatctc

SEQ ID NO: 736600 - DNA, 15 bp, Homo sapiens
agtgttaggatctcc

SEQ ID NO: 736601 - DNA, 15 bp, Homo sapiens
gtgttaggatctcct

SEQ ID NO: 736602 - DNA, 15 bp, Homo sapiens
tgttaggatctcctt

SEQ ID NO: 736603 - DNA, 15 bp, Homo sapiens
gttaggatctccttg

SEQ ID NO: 736604 - DNA, 15 bp, Homo sapiens
ttaggatctccttgc

SEQ ID NO: 736605 - DNA, 15 bp, Homo sapiens
taggatctccttgcc

SEQ ID NO: 736606 - DNA, 15 bp, Homo sapiens
aggatctccttgcct

SEQ ID NO: 736607 - DNA, 15 bp, Homo sapiens
ggatctccttgcctg

SEQ ID NO: 736608 - DNA, 15 bp, Homo sapiens
gatctccttgcctgg

SEQ ID NO: 736609 - DNA, 15 bp, Homo sapiens
atctccttgcctgga

SEQ ID NO: 736610 - DNA, 15 bp, Homo sapiens
tctccttgcctggaa

SEQ ID NO: 736611 - DNA, 15 bp, Homo sapiens
ctccttgcctggaaa

SEQ ID NO: 736612 - DNA, 15 bp, Homo sapiens
tccttgcctggaaat

SEQ ID NO: 736613 - DNA, 15 bp, Homo sapiens
ccttgcctggaaatg

SEQ ID NO: 736614 - DNA, 15 bp, Homo sapiens
cttgcctggaaatga

SEQ ID NO: 736615 - DNA, 15 bp, Homo sapiens
ttgcctggaaatgat

SEQ ID NO: 736616 - DNA, 15 bp, Homo sapiens
tgcctggaaatgatc

SEQ ID NO: 736617 - DNA, 15 bp, Homo sapiens
gcctggaaatgatca

SEQ ID NO: 736618 - DNA, 15 bp, Homo sapiens
cctggaaatgatcat

SEQ ID NO: 736619 - DNA, 15 bp, Homo sapiens
ctggaaatgatcatg

SEQ ID NO: 736620 - DNA, 15 bp, Homo sapiens
tggaaatgatcatgt

SEQ ID NO: 736621 - DNA, 15 bp, Homo sapiens
ggaaatgatcatgta

SEQ ID NO: 736622 - DNA, 15 bp, Homo sapiens
gaaatgatcatgtaa

SEQ ID NO: 736623 - DNA, 15 bp, Homo sapiens
aaatgatcatgtaag

SEQ ID NO: 736624 - DNA, 15 bp, Homo sapiens
aatgatcatgtaagc

SEQ ID NO: 736625 - DNA, 15 bp, Homo sapiens
atgatcatgtaagca

SEQ ID NO: 736626 - DNA, 15 bp, Homo sapiens
tgatcatgtaagcaa

SEQ ID NO: 736627 - DNA, 15 bp, Homo sapiens
gatcatgtaagcaat

SEQ ID NO: 736628 - DNA, 15 bp, Homo sapiens
atcatgtaagcaatg

SEQ ID NO: 736629 - DNA, 15 bp, Homo sapiens
tcatgtaagcaatgt

SEQ ID NO: 736630 - DNA, 15 bp, Homo sapiens
catgtaagcaatgtt

SEQ ID NO: 736631 - DNA, 15 bp, Homo sapiens
atgtaagcaatgttg

SEQ ID NO: 736632 - DNA, 15 bp, Homo sapiens
tgtaagcaatgttgc

SEQ ID NO: 736633 - DNA, 15 bp, Homo sapiens
gtaagcaatgttgct

SEQ ID NO: 736634 - DNA, 15 bp, Homo sapiens
taagcaatgttgctg

SEQ ID NO: 736635 - DNA, 15 bp, Homo sapiens
aagcaatgttgctga

SEQ ID NO: 736636 - DNA, 15 bp, Homo sapiens
agcaatgttgctgat

SEQ ID NO: 736637 - DNA, 15 bp, Homo sapiens
gcaatgttgctgatt

SEQ ID NO: 736638 - DNA, 15 bp, Homo sapiens
caatgttgctgattt

SEQ ID NO: 736639 - DNA, 15 bp, Homo sapiens
aatgttgctgatttc

SEQ ID NO: 736640 - DNA, 15 bp, Homo sapiens
atgttgctgatttcc

SEQ ID NO: 736641 - DNA, 15 bp, Homo sapiens
tgttgctgatttcct

SEQ ID NO: 736642 - DNA, 15 bp, Homo sapiens
gttgctgatttcctc

SEQ ID NO: 736643 - DNA, 15 bp, Homo sapiens
ttgctgatttcctct

SEQ ID NO: 736644 - DNA, 15 bp, Homo sapiens
tgctgatttcctctt

SEQ ID NO: 736645 - DNA, 15 bp, Homo sapiens
gctgatttcctcttg

SEQ ID NO: 736646 - DNA, 15 bp, Homo sapiens
ctgatttcctcttga

SEQ ID NO: 736647 - DNA, 15 bp, Homo sapiens
tgatttcctcttgaa

SEQ ID NO: 736648 - DNA, 15 bp, Homo sapiens
gatttcctcttgaat

SEQ ID NO: 736649 - DNA, 15 bp, Homo sapiens
atttcctcttgaatt

SEQ ID NO: 736650 - DNA, 15 bp, Homo sapiens
tttcctcttgaattt

SEQ ID NO: 736651 - DNA, 15 bp, Homo sapiens
ttcctcttgaattta

SEQ ID NO: 736652 - DNA, 15 bp, Homo sapiens
tcctcttgaatttat

SEQ ID NO: 736653 - DNA, 15 bp, Homo sapiens
cctcttgaatttata

SEQ ID NO: 736654 - DNA, 15 bp, Homo sapiens
ctcttgaatttatat

SEQ ID NO: 736655 - DNA, 15 bp, Homo sapiens
tcttgaatttatatt

SEQ ID NO: 736656 - DNA, 15 bp, Homo sapiens
cttgaatttatatta

SEQ ID NO: 736657 - DNA, 15 bp, Homo sapiens
ttgaatttatattac

SEQ ID NO: 736658 - DNA, 15 bp, Homo sapiens
tgaatttatattacc

SEQ ID NO: 736659 - DNA, 15 bp, Homo sapiens
gaatttatattacca

SEQ ID NO: 736660 - DNA, 15 bp, Homo sapiens
aatttatattaccaa

SEQ ID NO: 736661 - DNA, 15 bp, Homo sapiens
atttatattaccaaa

SEQ ID NO: 736662 - DNA, 15 bp, Homo sapiens
tttatattaccaaag

SEQ ID NO: 736663 - DNA, 15 bp, Homo sapiens
ttatattaccaaagg

SEQ ID NO: 736664 - DNA, 15 bp, Homo sapiens
tatattaccaaaggt

SEQ ID NO: 736665 - DNA, 15 bp, Homo sapiens
atattaccaaaggta

SEQ ID NO: 736666 - DNA, 15 bp, Homo sapiens
tattaccaaaggtac

SEQ ID NO: 736667 - DNA, 15 bp, Homo sapiens
attaccaaaggtact

SEQ ID NO: 736668 - DNA, 15 bp, Homo sapiens
ttaccaaaggtactt

SEQ ID NO: 736669 - DNA, 15 bp, Homo sapiens
taccaaaggtacttt

SEQ ID NO: 736670 - DNA, 15 bp, Homo sapiens
accaaaggtactttt

SEQ ID NO: 736671 - DNA, 15 bp, Homo sapiens
ccaaaggtacttttg

SEQ ID NO: 736672 - DNA, 15 bp, Homo sapiens
caaaggtacttttgg

SEQ ID NO: 736673 - DNA, 15 bp, Homo sapiens
aaaggtacttttggt

SEQ ID NO: 736674 - DNA, 15 bp, Homo sapiens
aaggtacttttggtg

SEQ ID NO: 736675 - DNA, 15 bp, Homo sapiens
aggtacttttggtgg

SEQ ID NO: 736676 - DNA, 15 bp, Homo sapiens
ggtacttttggtggg

SEQ ID NO: 736677 - DNA, 15 bp, Homo sapiens
gtacttttggtgggg

SEQ ID NO: 736678 - DNA, 15 bp, Homo sapiens
tacttttggtggggt

SEQ ID NO: 736679 - DNA, 15 bp, Homo sapiens
acttttggtggggtg

SEQ ID NO: 736680 - DNA, 15 bp, Homo sapiens
cttttggtggggtgg

SEQ ID NO: 736681 - DNA, 15 bp, Homo sapiens
ttttggtggggtgga

SEQ ID NO: 736682 - DNA, 15 bp, Homo sapiens
tttggtggggtggag

SEQ ID NO: 736683 - DNA, 15 bp, Homo sapiens
ttggtggggtggagg

SEQ ID NO: 736684 - DNA, 15 bp, Homo sapiens
tggtggggtggagga

SEQ ID NO: 736685 - DNA, 15 bp, Homo sapiens
ggtggggtggaggaa

SEQ ID NO: 736686 - DNA, 15 bp, Homo sapiens
gtggggtggaggaag

SEQ ID NO: 736687 - DNA, 15 bp, Homo sapiens
tggggtggaggaagg

SEQ ID NO: 736688 - DNA, 15 bp, Homo sapiens
ggggtggaggaaggg

SEQ ID NO: 736689 - DNA, 15 bp, Homo sapiens
gggtggaggaagggt

SEQ ID NO: 736690 - DNA, 15 bp, Homo sapiens
ggtggaggaagggtc

SEQ ID NO: 736691 - DNA, 15 bp, Homo sapiens
gtggaggaagggtcc

SEQ ID NO: 736692 - DNA, 15 bp, Homo sapiens
tggaggaagggtcca

SEQ ID NO: 736693 - DNA, 15 bp, Homo sapiens
ggaggaagggtccaa

SEQ ID NO: 736694 - DNA, 15 bp, Homo sapiens
gaggaagggtccaaa

SEQ ID NO: 736695 - DNA, 15 bp, Homo sapiens
aggaagggtccaaat

SEQ ID NO: 736696 - DNA, 15 bp, Homo sapiens
ggaagggtccaaatg

SEQ ID NO: 736697 - DNA, 15 bp, Homo sapiens
gaagggtccaaatgc

SEQ ID NO: 736698 - DNA, 15 bp, Homo sapiens
aagggtccaaatgcc

SEQ ID NO: 736699 - DNA, 15 bp, Homo sapiens
agggtccaaatgccc

SEQ ID NO: 736700 - DNA, 15 bp, Homo sapiens
gggtccaaatgcccc

SEQ ID NO: 736701 - DNA, 15 bp, Homo sapiens
ggtccaaatgcccct

SEQ ID NO: 736702 - DNA, 15 bp, Homo sapiens
gtccaaatgcccctt

SEQ ID NO: 736703 - DNA, 15 bp, Homo sapiens
tccaaatgcccctta

SEQ ID NO: 736704 - DNA, 15 bp, Homo sapiens
ccaaatgccccttaa

SEQ ID NO: 736705 - DNA, 15 bp, Homo sapiens
caaatgccccttaag

SEQ ID NO: 736706 - DNA, 15 bp, Homo sapiens
aaatgccccttaagc

SEQ ID NO: 736707 - DNA, 15 bp, Homo sapiens
aatgccccttaagcc

SEQ ID NO: 736708 - DNA, 15 bp, Homo sapiens
atgccccttaagccc

SEQ ID NO: 736709 - DNA, 15 bp, Homo sapiens
tgccccttaagccct

SEQ ID NO: 736710 - DNA, 15 bp, Homo sapiens
gccccttaagcccta

SEQ ID NO: 736711 - DNA, 15 bp, Homo sapiens
ccccttaagccctaa

SEQ ID NO: 736712 - DNA, 15 bp, Homo sapiens
cccttaagccctaag

SEQ ID NO: 736713 - DNA, 15 bp, Homo sapiens
ccttaagccctaagt

SEQ ID NO: 736714 - DNA, 15 bp, Homo sapiens
cttaagccctaagtg

SEQ ID NO: 736715 - DNA, 15 bp, Homo sapiens
ttaagccctaagtgt

SEQ ID NO: 736716 - DNA, 15 bp, Homo sapiens
taagccctaagtgtt

SEQ ID NO: 736717 - DNA, 15 bp, Homo sapiens
aagccctaagtgttg

SEQ ID NO: 736718 - DNA, 15 bp, Homo sapiens
agccctaagtgttga

SEQ ID NO: 736719 - DNA, 15 bp, Homo sapiens
gccctaagtgttgat

SEQ ID NO: 736720 - DNA, 15 bp, Homo sapiens
ccctaagtgttgatt

SEQ ID NO: 736721 - DNA, 15 bp, Homo sapiens
cctaagtgttgattt

SEQ ID NO: 736722 - DNA, 15 bp, Homo sapiens
ctaagtgttgatttc

SEQ ID NO: 736723 - DNA, 15 bp, Homo sapiens
taagtgttgatttct

SEQ ID NO: 736724 - DNA, 15 bp, Homo sapiens
aagtgttgatttcta

SEQ ID NO: 736725 - DNA, 15 bp, Homo sapiens
agtgttgatttctaa

SEQ ID NO: 736726 - DNA, 15 bp, Homo sapiens
gtgttgatttctaaa

SEQ ID NO: 736727 - DNA, 15 bp, Homo sapiens
tgttgatttctaaat

SEQ ID NO: 736728 - DNA, 15 bp, Homo sapiens
gttgatttctaaata

SEQ ID NO: 736729 - DNA, 15 bp, Homo sapiens
ttgatttctaaatat

SEQ ID NO: 736730 - DNA, 15 bp, Homo sapiens
tgatttctaaatatt

SEQ ID NO: 736731 - DNA, 15 bp, Homo sapiens
gatttctaaatattt

SEQ ID NO: 736732 - DNA, 15 bp, Homo sapiens
atttctaaatattta

SEQ ID NO: 736733 - DNA, 15 bp, Homo sapiens
tttctaaatatttat

SEQ ID NO: 736734 - DNA, 15 bp, Homo sapiens
ttctaaatatttatt

SEQ ID NO: 736735 - DNA, 15 bp, Homo sapiens
tctaaatatttatta

SEQ ID NO: 736736 - DNA, 15 bp, Homo sapiens
ctaaatatttattaa

SEQ ID NO: 736737 - DNA, 15 bp, Homo sapiens
taaatatttattaag

SEQ ID NO: 736738 - DNA, 15 bp, Homo sapiens
aaatatttattaagc

SEQ ID NO: 736739 - DNA, 15 bp, Homo sapiens
aatatttattaagca

SEQ ID NO: 736740 - DNA, 15 bp, Homo sapiens
atatttattaagcat

SEQ ID NO: 736741 - DNA, 15 bp, Homo sapiens
tatttattaagcatc

SEQ ID NO: 736742 - DNA, 15 bp, Homo sapiens
atttattaagcatct

SEQ ID NO: 736743 - DNA, 15 bp, Homo sapiens
tttattaagcatcta

SEQ ID NO: 736744 - DNA, 15 bp, Homo sapiens
ttattaagcatctac

SEQ ID NO: 736745 - DNA, 15 bp, Homo sapiens
tattaagcatctact

SEQ ID NO: 736746 - DNA, 15 bp, Homo sapiens
attaagcatctacta

SEQ ID NO: 736747 - DNA, 15 bp, Homo sapiens
ttaagcatctactat

SEQ ID NO: 736748 - DNA, 15 bp, Homo sapiens
taagcatctactatt

SEQ ID NO: 736749 - DNA, 15 bp, Homo sapiens
aagcatctactattg

SEQ ID NO: 736750 - DNA, 15 bp, Homo sapiens
agcatctactattgt

SEQ ID NO: 736751 - DNA, 15 bp, Homo sapiens
gcatctactattgta

SEQ ID NO: 736752 - DNA, 15 bp, Homo sapiens
catctactattgtac

SEQ ID NO: 736753 - DNA, 15 bp, Homo sapiens
atctactattgtact

SEQ ID NO: 736754 - DNA, 15 bp, Homo sapiens
tctactattgtacta

SEQ ID NO: 736755 - DNA, 15 bp, Homo sapiens
ctactattgtactaa

SEQ ID NO: 736756 - DNA, 15 bp, Homo sapiens
tactattgtactaat

SEQ ID NO: 736757 - DNA, 15 bp, Homo sapiens
actattgtactaata

SEQ ID NO: 736758 - DNA, 15 bp, Homo sapiens
ctattgtactaatat

SEQ ID NO: 736759 - DNA, 15 bp, Homo sapiens
tattgtactaatatg

SEQ ID NO: 736760 - DNA, 15 bp, Homo sapiens
attgtactaatatgt

SEQ ID NO: 736761 - DNA, 15 bp, Homo sapiens
ttgtactaatatgtt

SEQ ID NO: 736762 - DNA, 15 bp, Homo sapiens
tgtactaatatgtta

SEQ ID NO: 736763 - DNA, 15 bp, Homo sapiens
gtactaatatgttag

SEQ ID NO: 736764 - DNA, 15 bp, Homo sapiens
tactaatatgttaga

SEQ ID NO: 736765 - DNA, 15 bp, Homo sapiens
actaatatgttagaa

SEQ ID NO: 736766 - DNA, 15 bp, Homo sapiens
ctaatatgttagaaa

SEQ ID NO: 736767 - DNA, 15 bp, Homo sapiens
taatatgttagaaat

SEQ ID NO: 736768 - DNA, 15 bp, Homo sapiens
aatatgttagaaatc

SEQ ID NO: 736769 - DNA, 15 bp, Homo sapiens
atatgttagaaatct

SEQ ID NO: 736770 - DNA, 15 bp, Homo sapiens
tatgttagaaatctt

SEQ ID NO: 736771 - DNA, 15 bp, Homo sapiens
atgttagaaatcttt

SEQ ID NO: 736772 - DNA, 15 bp, Homo sapiens
tgttagaaatctttt

SEQ ID NO: 736773 - DNA, 15 bp, Homo sapiens
gttagaaatcttttt

SEQ ID NO: 736774 - DNA, 15 bp, Homo sapiens
ttagaaatcttttta

SEQ ID NO: 736775 - DNA, 15 bp, Homo sapiens
tagaaatctttttaa

SEQ ID NO: 736776 - DNA, 15 bp, Homo sapiens
agaaatctttttaat

SEQ ID NO: 736777 - DNA, 15 bp, Homo sapiens
gaaatctttttaatt

SEQ ID NO: 736778 - DNA, 15 bp, Homo sapiens
aaatctttttaattg

SEQ ID NO: 736779 - DNA, 15 bp, Homo sapiens
aatctttttaattgc

SEQ ID NO: 736780 - DNA, 15 bp, Homo sapiens
atctttttaattgct

SEQ ID NO: 736781 - DNA, 15 bp, Homo sapiens
tctttttaattgcta

SEQ ID NO: 736782 - DNA, 15 bp, Homo sapiens
ctttttaattgctag

SEQ ID NO: 736783 - DNA, 15 bp, Homo sapiens
tttttaattgctaga

SEQ ID NO: 736784 - DNA, 15 bp, Homo sapiens
ttttaattgctagag

SEQ ID NO: 736785 - DNA, 15 bp, Homo sapiens
tttaattgctagagg

SEQ ID NO: 736786 - DNA, 15 bp, Homo sapiens
ttaattgctagaggg

SEQ ID NO: 736787 - DNA, 15 bp, Homo sapiens
taattgctagagggg

SEQ ID NO: 736788 - DNA, 15 bp, Homo sapiens
aattgctagaggggg

SEQ ID NO: 736789 - DNA, 15 bp, Homo sapiens
attgctagaggggga

SEQ ID NO: 736790 - DNA, 15 bp, Homo sapiens
ttgctagagggggag

SEQ ID NO: 736791 - DNA, 15 bp, Homo sapiens
tgctagagggggaga

SEQ ID NO: 736792 - DNA, 15 bp, Homo sapiens
gctagagggggagag

SEQ ID NO: 736793 - DNA, 15 bp, Homo sapiens
ctagagggggagagg

SEQ ID NO: 736794 - DNA, 15 bp, Homo sapiens
tagagggggagagga

SEQ ID NO: 736795 - DNA, 15 bp, Homo sapiens
agagggggagaggac

SEQ ID NO: 736796 - DNA, 15 bp, Homo sapiens
gagggggagaggact

SEQ ID NO: 736797 - DNA, 15 bp, Homo sapiens
agggggagaggactt

SEQ ID NO: 736798 - DNA, 15 bp, Homo sapiens
gggggagaggacttg

SEQ ID NO: 736799 - DNA, 15 bp, Homo sapiens
ggggagaggacttga

SEQ ID NO: 736800 - DNA, 15 bp, Homo sapiens
gggagaggacttgag

SEQ ID NO: 736801 - DNA, 15 bp, Homo sapiens
ggagaggacttgagc

SEQ ID NO: 736802 - DNA, 15 bp, Homo sapiens
gagaggacttgagct

SEQ ID NO: 736803 - DNA, 15 bp, Homo sapiens
agaggacttgagctc

SEQ ID NO: 736804 - DNA, 15 bp, Homo sapiens
gaggacttgagctct

SEQ ID NO: 736805 - DNA, 15 bp, Homo sapiens
aggacttgagctcta

SEQ ID NO: 736806 - DNA, 15 bp, Homo sapiens
ggacttgagctctaa

SEQ ID NO: 736807 - DNA, 15 bp, Homo sapiens
gacttgagctctaaa

SEQ ID NO: 736808 - DNA, 15 bp, Homo sapiens
acttgagctctaaag

SEQ ID NO: 736809 - DNA, 15 bp, Homo sapiens
cttgagctctaaagg

SEQ ID NO: 736810 - DNA, 15 bp, Homo sapiens
ttgagctctaaaggc

SEQ ID NO: 736811 - DNA, 15 bp, Homo sapiens
tgagctctaaaggcg

SEQ ID NO: 736812 - DNA, 15 bp, Homo sapiens
gagctctaaaggcgg

SEQ ID NO: 736813 - DNA, 15 bp, Homo sapiens
agctctaaaggcggc

SEQ ID NO: 736814 - DNA, 15 bp, Homo sapiens
gctctaaaggcggct

SEQ ID NO: 736815 - DNA, 15 bp, Homo sapiens
ctctaaaggcggcta

SEQ ID NO: 736816 - DNA, 15 bp, Homo sapiens
tctaaaggcggctaa

SEQ ID NO: 736817 - DNA, 15 bp, Homo sapiens
ctaaaggcggctaag

SEQ ID NO: 736818 - DNA, 15 bp, Homo sapiens
taaaggcggctaaga

SEQ ID NO: 736819 - DNA, 15 bp, Homo sapiens
aaaggcggctaagat

SEQ ID NO: 736820 - DNA, 15 bp, Homo sapiens
aaggcggctaagatt

SEQ ID NO: 736821 - DNA, 15 bp, Homo sapiens
aggcggctaagattc

SEQ ID NO: 736822 - DNA, 15 bp, Homo sapiens
ggcggctaagattca

SEQ ID NO: 736823 - DNA, 15 bp, Homo sapiens
gcggctaagattcat

SEQ ID NO: 736824 - DNA, 15 bp, Homo sapiens
cggctaagattcatt

SEQ ID NO: 736825 - DNA, 15 bp, Homo sapiens
ggctaagattcattc

SEQ ID NO: 736826 - DNA, 15 bp, Homo sapiens
gctaagattcattcc

SEQ ID NO: 736827 - DNA, 15 bp, Homo sapiens
ctaagattcattcct

SEQ ID NO: 736828 - DNA, 15 bp, Homo sapiens
taagattcattcctg

SEQ ID NO: 736829 - DNA, 15 bp, Homo sapiens
aagattcattcctgc

SEQ ID NO: 736830 - DNA, 15 bp, Homo sapiens
agattcattcctgcc

SEQ ID NO: 736831 - DNA, 15 bp, Homo sapiens
gattcattcctgcct

SEQ ID NO: 736832 - DNA, 15 bp, Homo sapiens
attcattcctgcctt

SEQ ID NO: 736833 - DNA, 15 bp, Homo sapiens
ttcattcctgccttt

SEQ ID NO: 736834 - DNA, 15 bp, Homo sapiens
tcattcctgcctttt

SEQ ID NO: 736835 - DNA, 15 bp, Homo sapiens
cattcctgccttttc

SEQ ID NO: 736836 - DNA, 15 bp, Homo sapiens
attcctgccttttcc

SEQ ID NO: 736837 - DNA, 15 bp, Homo sapiens
ttcctgccttttcct

SEQ ID NO: 736838 - DNA, 15 bp, Homo sapiens
tcctgccttttcctt

SEQ ID NO: 736839 - DNA, 15 bp, Homo sapiens
cctgccttttccttt

SEQ ID NO: 736840 - DNA, 15 bp, Homo sapiens
ctgccttttcctttt

SEQ ID NO: 736841 - DNA, 15 bp, Homo sapiens
tgccttttcctttta

SEQ ID NO: 736842 - DNA, 15 bp, Homo sapiens
gccttttccttttaa

SEQ ID NO: 736843 - DNA, 15 bp, Homo sapiens
ccttttccttttaag

SEQ ID NO: 736844 - DNA, 15 bp, Homo sapiens
cttttccttttaaga

SEQ ID NO: 736845 - DNA, 15 bp, Homo sapiens
ttttccttttaagaa

SEQ ID NO: 736846 - DNA, 15 bp, Homo sapiens
tttccttttaagaac

SEQ ID NO: 736847 - DNA, 15 bp, Homo sapiens
ttccttttaagaaca

SEQ ID NO: 736848 - DNA, 15 bp, Homo sapiens
tccttttaagaacat

SEQ ID NO: 736849 - DNA, 15 bp, Homo sapiens
ccttttaagaacata

SEQ ID NO: 736850 - DNA, 15 bp, Homo sapiens
cttttaagaacatat

SEQ ID NO: 736851 - DNA, 15 bp, Homo sapiens
ttttaagaacatata

SEQ ID NO: 736852 - DNA, 15 bp, Homo sapiens
tttaagaacatataa

SEQ ID NO: 736853 - DNA, 15 bp, Homo sapiens
ttaagaacatataat

SEQ ID NO: 736854 - DNA, 15 bp, Homo sapiens
taagaacatataatt

SEQ ID NO: 736855 - DNA, 15 bp, Homo sapiens
aagaacatataattt

SEQ ID NO: 736856 - DNA, 15 bp, Homo sapiens
agaacatataattta

SEQ ID NO: 736857 - DNA, 15 bp, Homo sapiens
gaacatataatttag

SEQ ID NO: 736858 - DNA, 15 bp, Homo sapiens
aacatataatttagc

SEQ ID NO: 736859 - DNA, 15 bp, Homo sapiens
acatataatttagcc

SEQ ID NO: 736860 - DNA, 15 bp, Homo sapiens
catataatttagccg

SEQ ID NO: 736861 - DNA, 15 bp, Homo sapiens
atataatttagccgg

SEQ ID NO: 736862 - DNA, 15 bp, Homo sapiens
tataatttagccggc

SEQ ID NO: 736863 - DNA, 15 bp, Homo sapiens
ataatttagccggca

SEQ ID NO: 736864 - DNA, 15 bp, Homo sapiens
taatttagccggcaa

SEQ ID NO: 736865 - DNA, 15 bp, Homo sapiens
aatttagccggcaag

SEQ ID NO: 736866 - DNA, 15 bp, Homo sapiens
atttagccggcaaga

SEQ ID NO: 736867 - DNA, 15 bp, Homo sapiens
tttagccggcaagat

SEQ ID NO: 736868 - DNA, 15 bp, Homo sapiens
ttagccggcaagatg

SEQ ID NO: 736869 - DNA, 15 bp, Homo sapiens
tagccggcaagatgt

SEQ ID NO: 736870 - DNA, 15 bp, Homo sapiens
agccggcaagatgta

SEQ ID NO: 736871 - DNA, 15 bp, Homo sapiens
gccggcaagatgtac

SEQ ID NO: 736872 - DNA, 15 bp, Homo sapiens
ccggcaagatgtaca

SEQ ID NO: 736873 - DNA, 15 bp, Homo sapiens
cggcaagatgtacat

SEQ ID NO: 736874 - DNA, 15 bp, Homo sapiens
ggcaagatgtacatt

SEQ ID NO: 736875 - DNA, 15 bp, Homo sapiens
gcaagatgtacattt

SEQ ID NO: 736876 - DNA, 15 bp, Homo sapiens
caagatgtacatttc

SEQ ID NO: 736877 - DNA, 15 bp, Homo sapiens
aagatgtacatttca

SEQ ID NO: 736878 - DNA, 15 bp, Homo sapiens
agatgtacatttcat

SEQ ID NO: 736879 - DNA, 15 bp, Homo sapiens
gatgtacatttcatc

SEQ ID NO: 736880 - DNA, 15 bp, Homo sapiens
atgtacatttcatct

SEQ ID NO: 736881 - DNA, 15 bp, Homo sapiens
tgtacatttcatctt

SEQ ID NO: 736882 - DNA, 15 bp, Homo sapiens
gtacatttcatcttt

SEQ ID NO: 736883 - DNA, 15 bp, Homo sapiens
tacatttcatcttta

SEQ ID NO: 736884 - DNA, 15 bp, Homo sapiens
acatttcatctttac

SEQ ID NO: 736885 - DNA, 15 bp, Homo sapiens
catttcatctttact

SEQ ID NO: 736886 - DNA, 15 bp, Homo sapiens
atttcatctttactt

SEQ ID NO: 736887 - DNA, 15 bp, Homo sapiens
tttcatctttacttt

SEQ ID NO: 736888 - DNA, 15 bp, Homo sapiens
ttcatctttactttt

SEQ ID NO: 736889 - DNA, 15 bp, Homo sapiens
tcatctttacttttc

SEQ ID NO: 736890 - DNA, 15 bp, Homo sapiens
catctttacttttct

SEQ ID NO: 736891 - DNA, 15 bp, Homo sapiens
atctttacttttctt

SEQ ID NO: 736892 - DNA, 15 bp, Homo sapiens
tctttacttttcttt

SEQ ID NO: 736893 - DNA, 15 bp, Homo sapiens
ctttacttttctttt

SEQ ID NO: 736894 - DNA, 15 bp, Homo sapiens
tttacttttcttttt

SEQ ID NO: 736895 - DNA, 15 bp, Homo sapiens
ttacttttctttttt

SEQ ID NO: 736896 - DNA, 15 bp, Homo sapiens
tacttttcttttttt

SEQ ID NO: 736897 - DNA, 15 bp, Homo sapiens
acttttctttttttc

SEQ ID NO: 736898 - DNA, 15 bp, Homo sapiens
cttttctttttttct

SEQ ID NO: 736899 - DNA, 15 bp, Homo sapiens
ttttctttttttctt

SEQ ID NO: 736900 - DNA, 15 bp, Homo sapiens
tttctttttttcttt

SEQ ID NO: 736901 - DNA, 15 bp, Homo sapiens
ttctttttttctttt

SEQ ID NO: 736902 - DNA, 15 bp, Homo sapiens
tctttttttcttttc

SEQ ID NO: 736903 - DNA, 15 bp, Homo sapiens
ctttttttcttttct

SEQ ID NO: 736904 - DNA, 15 bp, Homo sapiens
tttttttcttttctt

SEQ ID NO: 736905 - DNA, 15 bp, Homo sapiens
ttttttcttttcttt

SEQ ID NO: 736906 - DNA, 15 bp, Homo sapiens
tttttcttttctttt

SEQ ID NO: 736907 - DNA, 15 bp, Homo sapiens
ttttcttttcttttt

SEQ ID NO: 736908 - DNA, 15 bp, Homo sapiens
tttcttttctttttt

SEQ ID NO: 736909 - DNA, 15 bp, Homo sapiens
ttcttttcttttttt

SEQ ID NO: 736910 - DNA, 15 bp, Homo sapiens
tcttttctttttttg

SEQ ID NO: 736911 - DNA, 15 bp, Homo sapiens
cttttctttttttga

SEQ ID NO: 736912 - DNA, 15 bp, Homo sapiens
ttttctttttttgag

SEQ ID NO: 736913 - DNA, 15 bp, Homo sapiens
tttctttttttgaga

SEQ ID NO: 736914 - DNA, 15 bp, Homo sapiens
ttctttttttgagac

SEQ ID NO: 736915 - DNA, 15 bp, Homo sapiens
tctttttttgagaca

SEQ ID NO: 736916 - DNA, 15 bp, Homo sapiens
ctttttttgagacag

SEQ ID NO: 736917 - DNA, 15 bp, Homo sapiens
tttttttgagacaga

SEQ ID NO: 736918 - DNA, 15 bp, Homo sapiens
ttttttgagacagag

SEQ ID NO: 736919 - DNA, 15 bp, Homo sapiens
tttttgagacagagt

SEQ ID NO: 736920 - DNA, 15 bp, Homo sapiens
ttttgagacagagtc

SEQ ID NO: 736921 - DNA, 15 bp, Homo sapiens
tttgagacagagtct

SEQ ID NO: 736922 - DNA, 15 bp, Homo sapiens
ttgagacagagtctc

SEQ ID NO: 736923 - DNA, 15 bp, Homo sapiens
tgagacagagtctca

SEQ ID NO: 736924 - DNA, 15 bp, Homo sapiens
gagacagagtctcac

SEQ ID NO: 736925 - DNA, 15 bp, Homo sapiens
agacagagtctcact

SEQ ID NO: 736926 - DNA, 15 bp, Homo sapiens
gacagagtctcactc

SEQ ID NO: 736927 - DNA, 15 bp, Homo sapiens
acagagtctcactct

SEQ ID NO: 736928 - DNA, 15 bp, Homo sapiens
cagagtctcactctg

SEQ ID NO: 736929 - DNA, 15 bp, Homo sapiens
agagtctcactctgt

SEQ ID NO: 736930 - DNA, 15 bp, Homo sapiens
gagtctcactctgtt

SEQ ID NO: 736931 - DNA, 15 bp, Homo sapiens
agtctcactctgttg

SEQ ID NO: 736932 - DNA, 15 bp, Homo sapiens
gtctcactctgttgc

SEQ ID NO: 736933 - DNA, 15 bp, Homo sapiens
tctcactctgttgcc

SEQ ID NO: 736934 - DNA, 15 bp, Homo sapiens
ctcactctgttgccc

SEQ ID NO: 736935 - DNA, 15 bp, Homo sapiens
tcactctgttgccca

SEQ ID NO: 736936 - DNA, 15 bp, Homo sapiens
cactctgttgcccag

SEQ ID NO: 736937 - DNA, 15 bp, Homo sapiens
actctgttgcccagg

SEQ ID NO: 736938 - DNA, 15 bp, Homo sapiens
ctctgttgcccagga

SEQ ID NO: 736939 - DNA, 15 bp, Homo sapiens
tctgttgcccaggat

SEQ ID NO: 736940 - DNA, 15 bp, Homo sapiens
ctgttgcccaggatg

SEQ ID NO: 736941 - DNA, 15 bp, Homo sapiens
tgttgcccaggatgg

SEQ ID NO: 736942 - DNA, 15 bp, Homo sapiens
gttgcccaggatgga

SEQ ID NO: 736943 - DNA, 15 bp, Homo sapiens
ttgcccaggatggag

SEQ ID NO: 736944 - DNA, 15 bp, Homo sapiens
tgcccaggatggagt

SEQ ID NO: 736945 - DNA, 15 bp, Homo sapiens
gcccaggatggagtg

SEQ ID NO: 736946 - DNA, 15 bp, Homo sapiens
cccaggatggagtgc

SEQ ID NO: 736947 - DNA, 15 bp, Homo sapiens
ccaggatggagtgca

SEQ ID NO: 736948 - DNA, 15 bp, Homo sapiens
caggatggagtgcag

SEQ ID NO: 736949 - DNA, 15 bp, Homo sapiens
aggatggagtgcagt

SEQ ID NO: 736950 - DNA, 15 bp, Homo sapiens
ggatggagtgcagtg

SEQ ID NO: 736951 - DNA, 15 bp, Homo sapiens
gatggagtgcagtgg

SEQ ID NO: 736952 - DNA, 15 bp, Homo sapiens
atggagtgcagtggc

SEQ ID NO: 736953 - DNA, 15 bp, Homo sapiens
cactgcaacctccgt

SEQ ID NO: 736954 - DNA, 15 bp, Homo sapiens
actgcaacctccgtc

SEQ ID NO: 736955 - DNA, 15 bp, Homo sapiens
ctgcaacctccgtct

SEQ ID NO: 736956 - DNA, 15 bp, Homo sapiens
tgcaacctccgtctc

SEQ ID NO: 736957 - DNA, 15 bp, Homo sapiens
gcaacctccgtctcc

SEQ ID NO: 736958 - DNA, 15 bp, Homo sapiens
caacctccgtctccc

SEQ ID NO: 736959 - DNA, 15 bp, Homo sapiens
aacctccgtctcccg

SEQ ID NO: 736960 - DNA, 15 bp, Homo sapiens
acctccgtctcccgg

SEQ ID NO: 736961 - DNA, 15 bp, Homo sapiens
cctccgtctcccggg

SEQ ID NO: 736962 - DNA, 15 bp, Homo sapiens
ctccgtctcccgggt

SEQ ID NO: 736963 - DNA, 15 bp, Homo sapiens
tccgtctcccgggtt

SEQ ID NO: 736964 - DNA, 15 bp, Homo sapiens
ccgtctcccgggttc

SEQ ID NO: 736965 - DNA, 15 bp, Homo sapiens
cgtctcccgggttca

SEQ ID NO: 736966 - DNA, 15 bp, Homo sapiens
gtctcccgggttcaa

SEQ ID NO: 736967 - DNA, 15 bp, Homo sapiens
tctcccgggttcaag

SEQ ID NO: 736968 - DNA, 15 bp, Homo sapiens
tcccgggttcaagca

SEQ ID NO: 736969 - DNA, 15 bp, Homo sapiens
cccgggttcaagcaa

SEQ ID NO: 736970 - DNA, 15 bp, Homo sapiens
ccgggttcaagcaat

SEQ ID NO: 736971 - DNA, 15 bp, Homo sapiens
cgggttcaagcaatt

SEQ ID NO: 736972 - DNA, 15 bp, Homo sapiens
gggttcaagcaattc

SEQ ID NO: 736973 - DNA, 15 bp, Homo sapiens
ggttcaagcaattct

SEQ ID NO: 736974 - DNA, 15 bp, Homo sapiens
gttcaagcaattctc

SEQ ID NO: 736975 - DNA, 15 bp, Homo sapiens
ttcaagcaattctcc

SEQ ID NO: 736976 - DNA, 15 bp, Homo sapiens
tcaagcaattctcct

SEQ ID NO: 736977 - DNA, 15 bp, Homo sapiens
caagcaattctcctg

SEQ ID NO: 736978 - DNA, 15 bp, Homo sapiens
aagcaattctcctgt

SEQ ID NO: 736979 - DNA, 15 bp, Homo sapiens
agcaattctcctgtc

SEQ ID NO: 736980 - DNA, 15 bp, Homo sapiens
gcaattctcctgtct

SEQ ID NO: 736981 - DNA, 15 bp, Homo sapiens
caattctcctgtctc

SEQ ID NO: 736982 - DNA, 15 bp, Homo sapiens
aattctcctgtctca

SEQ ID NO: 736983 - DNA, 15 bp, Homo sapiens
attctcctgtctcag

SEQ ID NO: 736984 - DNA, 15 bp, Homo sapiens
ttctcctgtctcagc

SEQ ID NO: 736985 - DNA, 15 bp, Homo sapiens
tctcctgtctcagct

SEQ ID NO: 736986 - DNA, 15 bp, Homo sapiens
ctcctgtctcagctg

SEQ ID NO: 736987 - DNA, 15 bp, Homo sapiens
tcctgtctcagctgg

SEQ ID NO: 736988 - DNA, 15 bp, Homo sapiens
cctgtctcagctggg

SEQ ID NO: 736989 - DNA, 15 bp, Homo sapiens
ctgtctcagctggga

SEQ ID NO: 736990 - DNA, 15 bp, Homo sapiens
tgtctcagctgggat

SEQ ID NO: 736991 - DNA, 15 bp, Homo sapiens
gtctcagctgggatt

SEQ ID NO: 736992 - DNA, 15 bp, Homo sapiens
tctcagctgggatta

SEQ ID NO: 736993 - DNA, 15 bp, Homo sapiens
ctcagctgggattac

SEQ ID NO: 736994 - DNA, 15 bp, Homo sapiens
tcagctgggattact

SEQ ID NO: 736995 - DNA, 15 bp, Homo sapiens
cagctgggattactg

SEQ ID NO: 736996 - DNA, 15 bp, Homo sapiens
agctgggattactgg

SEQ ID NO: 736997 - DNA, 15 bp, Homo sapiens
gctgggattactggc

SEQ ID NO: 736998 - DNA, 15 bp, Homo sapiens
ctgggattactggcg

SEQ ID NO: 736999 - DNA, 15 bp, Homo sapiens
tgggattactggcgc

SEQ ID NO: 737000 - DNA, 15 bp, Homo sapiens
gggattactggcgcg

SEQ ID NO: 737001 - DNA, 15 bp, Homo sapiens
ggattactggcgcgc

SEQ ID NO: 737002 - DNA, 15 bp, Homo sapiens
gattactggcgcgcg

SEQ ID NO: 737003 - DNA, 15 bp, Homo sapiens
attactggcgcgcgc

SEQ ID NO: 737004 - DNA, 15 bp, Homo sapiens
ttactggcgcgcgcc

SEQ ID NO: 737005 - DNA, 15 bp, Homo sapiens
tactggcgcgcgcca

SEQ ID NO: 737006 - DNA, 15 bp, Homo sapiens
actggcgcgcgccac

SEQ ID NO: 737007 - DNA, 15 bp, Homo sapiens
ctggcgcgcgccacc

SEQ ID NO: 737008 - DNA, 15 bp, Homo sapiens
tggcgcgcgccaccc

SEQ ID NO: 737009 - DNA, 15 bp, Homo sapiens
ggcgcgcgccacccg

SEQ ID NO: 737010 - DNA, 15 bp, Homo sapiens
gcgcgcgccacccgc

SEQ ID NO: 737011 - DNA, 15 bp, Homo sapiens
cgcgcgccacccgcc

SEQ ID NO: 737012 - DNA, 15 bp, Homo sapiens
gcgcgccacccgcct

SEQ ID NO: 737013 - DNA, 15 bp, Homo sapiens
cgcgccacccgcctg

SEQ ID NO: 737014 - DNA, 15 bp, Homo sapiens
gcgccacccgcctgg

SEQ ID NO: 737015 - DNA, 15 bp, Homo sapiens
cgccacccgcctggc

SEQ ID NO: 737016 - DNA, 15 bp, Homo sapiens
gccacccgcctggct

SEQ ID NO: 737017 - DNA, 15 bp, Homo sapiens
ccacccgcctggcta

SEQ ID NO: 737018 - DNA, 15 bp, Homo sapiens
cacccgcctggctaa

SEQ ID NO: 737019 - DNA, 15 bp, Homo sapiens
acccgcctggctaat

SEQ ID NO: 737020 - DNA, 15 bp, Homo sapiens
cccgcctggctaatt

SEQ ID NO: 737021 - DNA, 15 bp, Homo sapiens
ccgcctggctaattt

SEQ ID NO: 737022 - DNA, 15 bp, Homo sapiens
cctggctaatttttg

SEQ ID NO: 737023 - DNA, 15 bp, Homo sapiens
ctggctaatttttgt

SEQ ID NO: 737024 - DNA, 15 bp, Homo sapiens
tggctaatttttgta

SEQ ID NO: 737025 - DNA, 15 bp, Homo sapiens
ggctaatttttgtat

SEQ ID NO: 737026 - DNA, 15 bp, Homo sapiens
ctaatttttgtattt

SEQ ID NO: 737027 - DNA, 15 bp, Homo sapiens
atttttgtattttta

SEQ ID NO: 737028 - DNA, 15 bp, Homo sapiens
atttttagtagagac

SEQ ID NO: 737029 - DNA, 15 bp, Homo sapiens
tttttagtagagacg

SEQ ID NO: 737030 - DNA, 15 bp, Homo sapiens
ttttagtagagacgg

SEQ ID NO: 737031 - DNA, 15 bp, Homo sapiens
tttagtagagacggg

SEQ ID NO: 737032 - DNA, 15 bp, Homo sapiens
ttagtagagacgggt

SEQ ID NO: 737033 - DNA, 15 bp, Homo sapiens
tagtagagacgggtt

SEQ ID NO: 737034 - DNA, 15 bp, Homo sapiens
agtagagacgggttt

SEQ ID NO: 737035 - DNA, 15 bp, Homo sapiens
gtagagacgggtttc

SEQ ID NO: 737036 - DNA, 15 bp, Homo sapiens
tagagacgggtttca

SEQ ID NO: 737037 - DNA, 15 bp, Homo sapiens
agagacgggtttcac

SEQ ID NO: 737038 - DNA, 15 bp, Homo sapiens
gagacgggtttcacc

SEQ ID NO: 737039 - DNA, 15 bp, Homo sapiens
agacgggtttcacca

SEQ ID NO: 737040 - DNA, 15 bp, Homo sapiens
gacgggtttcaccat

SEQ ID NO: 737041 - DNA, 15 bp, Homo sapiens
acgggtttcaccatg

SEQ ID NO: 737042 - DNA, 15 bp, Homo sapiens
cgggtttcaccatgt

SEQ ID NO: 737043 - DNA, 15 bp, Homo sapiens
ctggtctcaaactct

SEQ ID NO: 737044 - DNA, 15 bp, Homo sapiens
tggtctcaaactctt

SEQ ID NO: 737045 - DNA, 15 bp, Homo sapiens
ggtctcaaactcttg

SEQ ID NO: 737046 - DNA, 15 bp, Homo sapiens
gtctcaaactcttga

SEQ ID NO: 737047 - DNA, 15 bp, Homo sapiens
tctcaaactcttgac

SEQ ID NO: 737048 - DNA, 15 bp, Homo sapiens
ctcaaactcttgacc

SEQ ID NO: 737049 - DNA, 15 bp, Homo sapiens
tcaaactcttgacct

SEQ ID NO: 737050 - DNA, 15 bp, Homo sapiens
caaactcttgacctc

SEQ ID NO: 737051 - DNA, 15 bp, Homo sapiens
aaactcttgacctca

SEQ ID NO: 737052 - DNA, 15 bp, Homo sapiens
gtgctgggattacaa

SEQ ID NO: 737053 - DNA, 15 bp, Homo sapiens
tgctgggattacaag

SEQ ID NO: 737054 - DNA, 15 bp, Homo sapiens
gctgggattacaagc

SEQ ID NO: 737055 - DNA, 15 bp, Homo sapiens
ctgggattacaagcg

SEQ ID NO: 737056 - DNA, 15 bp, Homo sapiens
tgggattacaagcgt

SEQ ID NO: 737057 - DNA, 15 bp, Homo sapiens
gggattacaagcgtg

SEQ ID NO: 737058 - DNA, 15 bp, Homo sapiens
ggattacaagcgtga

SEQ ID NO: 737059 - DNA, 15 bp, Homo sapiens
gattacaagcgtgag

SEQ ID NO: 737060 - DNA, 15 bp, Homo sapiens
attacaagcgtgagc

SEQ ID NO: 737061 - DNA, 15 bp, Homo sapiens
ttacaagcgtgagcc

SEQ ID NO: 737062 - DNA, 15 bp, Homo sapiens
tacaagcgtgagcca

SEQ ID NO: 737063 - DNA, 15 bp, Homo sapiens
acaagcgtgagccat

SEQ ID NO: 737064 - DNA, 15 bp, Homo sapiens
caagcgtgagccatc

SEQ ID NO: 737065 - DNA, 15 bp, Homo sapiens
aagcgtgagccatcg

SEQ ID NO: 737066 - DNA, 15 bp, Homo sapiens
agcgtgagccatcgc

SEQ ID NO: 737067 - DNA, 15 bp, Homo sapiens
gcgtgagccatcgca

SEQ ID NO: 737068 - DNA, 15 bp, Homo sapiens
cgtgagccatcgcac

SEQ ID NO: 737069 - DNA, 15 bp, Homo sapiens
gtgagccatcgcacc

SEQ ID NO: 737070 - DNA, 15 bp, Homo sapiens
tgagccatcgcacct

SEQ ID NO: 737071 - DNA, 15 bp, Homo sapiens
gagccatcgcacctg

SEQ ID NO: 737072 - DNA, 15 bp, Homo sapiens
agccatcgcacctgg

SEQ ID NO: 737073 - DNA, 15 bp, Homo sapiens
gccatcgcacctggg

SEQ ID NO: 737074 - DNA, 15 bp, Homo sapiens
ccatcgcacctgggc

SEQ ID NO: 737075 - DNA, 15 bp, Homo sapiens
catcgcacctgggca

SEQ ID NO: 737076 - DNA, 15 bp, Homo sapiens
atcgcacctgggcac

SEQ ID NO: 737077 - DNA, 15 bp, Homo sapiens
tcgcacctgggcaca

SEQ ID NO: 737078 - DNA, 15 bp, Homo sapiens
cgcacctgggcacat

SEQ ID NO: 737079 - DNA, 15 bp, Homo sapiens
gcacctgggcacatt

SEQ ID NO: 737080 - DNA, 15 bp, Homo sapiens
cacctgggcacattt

SEQ ID NO: 737081 - DNA, 15 bp, Homo sapiens
acctgggcacatttc

SEQ ID NO: 737082 - DNA, 15 bp, Homo sapiens
cctgggcacatttca

SEQ ID NO: 737083 - DNA, 15 bp, Homo sapiens
ctgggcacatttcac

SEQ ID NO: 737084 - DNA, 15 bp, Homo sapiens
tgggcacatttcacc

SEQ ID NO: 737085 - DNA, 15 bp, Homo sapiens
gggcacatttcacct

SEQ ID NO: 737086 - DNA, 15 bp, Homo sapiens
ggcacatttcacctt

SEQ ID NO: 737087 - DNA, 15 bp, Homo sapiens
gcacatttcaccttt

SEQ ID NO: 737088 - DNA, 15 bp, Homo sapiens
cacatttcacctttt

SEQ ID NO: 737089 - DNA, 15 bp, Homo sapiens
acatttcaccttttc

SEQ ID NO: 737090 - DNA, 15 bp, Homo sapiens
catttcaccttttct

SEQ ID NO: 737091 - DNA, 15 bp, Homo sapiens
atttcaccttttcta

SEQ ID NO: 737092 - DNA, 15 bp, Homo sapiens
tttcaccttttctaa

SEQ ID NO: 737093 - DNA, 15 bp, Homo sapiens
ttcaccttttctaaa

SEQ ID NO: 737094 - DNA, 15 bp, Homo sapiens
tcaccttttctaaag

SEQ ID NO: 737095 - DNA, 15 bp, Homo sapiens
caccttttctaaaga

SEQ ID NO: 737096 - DNA, 15 bp, Homo sapiens
accttttctaaagat

SEQ ID NO: 737097 - DNA, 15 bp, Homo sapiens
ccttttctaaagatt

SEQ ID NO: 737098 - DNA, 15 bp, Homo sapiens
cttttctaaagatta

SEQ ID NO: 737099 - DNA, 15 bp, Homo sapiens
ttttctaaagattat

SEQ ID NO: 737100 - DNA, 15 bp, Homo sapiens
tttctaaagattatt

SEQ ID NO: 737101 - DNA, 15 bp, Homo sapiens
ttctaaagattattt

SEQ ID NO: 737102 - DNA, 15 bp, Homo sapiens
tctaaagattatttt

SEQ ID NO: 737103 - DNA, 15 bp, Homo sapiens
ctaaagattatttta

SEQ ID NO: 737104 - DNA, 15 bp, Homo sapiens
taaagattattttaa

SEQ ID NO: 737105 - DNA, 15 bp, Homo sapiens
aaagattattttaag

SEQ ID NO: 737106 - DNA, 15 bp, Homo sapiens
aagattattttaagg

SEQ ID NO: 737107 - DNA, 15 bp, Homo sapiens
agattattttaaggc

SEQ ID NO: 737108 - DNA, 15 bp, Homo sapiens
gattattttaaggcc

SEQ ID NO: 737109 - DNA, 15 bp, Homo sapiens
attattttaaggcca

SEQ ID NO: 737110 - DNA, 15 bp, Homo sapiens
ttattttaaggccag

SEQ ID NO: 737111 - DNA, 15 bp, Homo sapiens
tattttaaggccagg

SEQ ID NO: 737112 - DNA, 15 bp, Homo sapiens
attttaaggccaggt

SEQ ID NO: 737113 - DNA, 15 bp, Homo sapiens
ttttaaggccaggtg

SEQ ID NO: 737114 - DNA, 15 bp, Homo sapiens
tttaaggccaggtgc

SEQ ID NO: 737115 - DNA, 15 bp, Homo sapiens
ttaaggccaggtgca

SEQ ID NO: 737116 - DNA, 15 bp, Homo sapiens
taaggccaggtgcag

SEQ ID NO: 737117 - DNA, 15 bp, Homo sapiens
aaggccaggtgcagt

SEQ ID NO: 737118 - DNA, 15 bp, Homo sapiens
aggccaggtgcagtg

SEQ ID NO: 737119 - DNA, 15 bp, Homo sapiens
ggccaggtgcagtgg

SEQ ID NO: 737120 - DNA, 15 bp, Homo sapiens
gccaggtgcagtggc

SEQ ID NO: 737121 - DNA, 15 bp, Homo sapiens
ccaggtgcagtggct

SEQ ID NO: 737122 - DNA, 15 bp, Homo sapiens
caggtgcagtggctc

SEQ ID NO: 737123 - DNA, 15 bp, Homo sapiens
aggtgcagtggctca

SEQ ID NO: 737124 - DNA, 15 bp, Homo sapiens
ggtgcagtggctcac

SEQ ID NO: 737125 - DNA, 15 bp, Homo sapiens
gtgcagtggctcacg

SEQ ID NO: 737126 - DNA, 15 bp, Homo sapiens
tgcagtggctcacgc

SEQ ID NO: 737127 - DNA, 15 bp, Homo sapiens
gcagtggctcacgcc

SEQ ID NO: 737128 - DNA, 15 bp, Homo sapiens
cagtggctcacgcct

SEQ ID NO: 737129 - DNA, 15 bp, Homo sapiens
agtggctcacgcctg

SEQ ID NO: 737130 - DNA, 15 bp, Homo sapiens
gtggctcacgcctgt

SEQ ID NO: 737131 - DNA, 15 bp, Homo sapiens
tggctcacgcctgta

SEQ ID NO: 737132 - DNA, 15 bp, Homo sapiens
ggctcacgcctgtac

SEQ ID NO: 737133 - DNA, 15 bp, Homo sapiens
gctcacgcctgtact

SEQ ID NO: 737134 - DNA, 15 bp, Homo sapiens
ctcacgcctgtactc

SEQ ID NO: 737135 - DNA, 15 bp, Homo sapiens
tcacgcctgtactcc

SEQ ID NO: 737136 - DNA, 15 bp, Homo sapiens
cacgcctgtactccc

SEQ ID NO: 737137 - DNA, 15 bp, Homo sapiens
acgcctgtactccca

SEQ ID NO: 737138 - DNA, 15 bp, Homo sapiens
cgcctgtactcccag

SEQ ID NO: 737139 - DNA, 15 bp, Homo sapiens
gcctgtactcccagt

SEQ ID NO: 737140 - DNA, 15 bp, Homo sapiens
cctgtactcccagta

SEQ ID NO: 737141 - DNA, 15 bp, Homo sapiens
ctgtactcccagtac

SEQ ID NO: 737142 - DNA, 15 bp, Homo sapiens
tgtactcccagtact

SEQ ID NO: 737143 - DNA, 15 bp, Homo sapiens
gtactcccagtactt

SEQ ID NO: 737144 - DNA, 15 bp, Homo sapiens
tactcccagtacttt

SEQ ID NO: 737145 - DNA, 15 bp, Homo sapiens
actcccagtactttg

SEQ ID NO: 737146 - DNA, 15 bp, Homo sapiens
ctcccagtactttga

SEQ ID NO: 737147 - DNA, 15 bp, Homo sapiens
tcccagtactttgag

SEQ ID NO: 737148 - DNA, 15 bp, Homo sapiens
cccagtactttgaga

SEQ ID NO: 737149 - DNA, 15 bp, Homo sapiens
ccagtactttgagag

SEQ ID NO: 737150 - DNA, 15 bp, Homo sapiens
cagtactttgagagg

SEQ ID NO: 737151 - DNA, 15 bp, Homo sapiens
agtactttgagaggc

SEQ ID NO: 737152 - DNA, 15 bp, Homo sapiens
gtactttgagaggct

SEQ ID NO: 737153 - DNA, 15 bp, Homo sapiens
tactttgagaggctg

SEQ ID NO: 737154 - DNA, 15 bp, Homo sapiens
actttgagaggctga

SEQ ID NO: 737155 - DNA, 15 bp, Homo sapiens
ctttgagaggctgag

SEQ ID NO: 737156 - DNA, 15 bp, Homo sapiens
tttgagaggctgagg

SEQ ID NO: 737157 - DNA, 15 bp, Homo sapiens
ttgagaggctgaggc

SEQ ID NO: 737158 - DNA, 15 bp, Homo sapiens
tgagaggctgaggca

SEQ ID NO: 737159 - DNA, 15 bp, Homo sapiens
gagaggctgaggcag

SEQ ID NO: 737160 - DNA, 15 bp, Homo sapiens
agaggctgaggcagg

SEQ ID NO: 737161 - DNA, 15 bp, Homo sapiens
gaggctgaggcaggt

SEQ ID NO: 737162 - DNA, 15 bp, Homo sapiens
aggctgaggcaggta

SEQ ID NO: 737163 - DNA, 15 bp, Homo sapiens
ggctgaggcaggtag

SEQ ID NO: 737164 - DNA, 15 bp, Homo sapiens
gctgaggcaggtaga

SEQ ID NO: 737165 - DNA, 15 bp, Homo sapiens
ctgaggcaggtagat

SEQ ID NO: 737166 - DNA, 15 bp, Homo sapiens
tgaggcaggtagatc

SEQ ID NO: 737167 - DNA, 15 bp, Homo sapiens
gaggcaggtagatca

SEQ ID NO: 737168 - DNA, 15 bp, Homo sapiens
aggcaggtagatcac

SEQ ID NO: 737169 - DNA, 15 bp, Homo sapiens
ggcaggtagatcact

SEQ ID NO: 737170 - DNA, 15 bp, Homo sapiens
gcaggtagatcactt

SEQ ID NO: 737171 - DNA, 15 bp, Homo sapiens
caggtagatcacttg

SEQ ID NO: 737172 - DNA, 15 bp, Homo sapiens
aggtagatcacttga

SEQ ID NO: 737173 - DNA, 15 bp, Homo sapiens
ggtagatcacttgag

SEQ ID NO: 737174 - DNA, 15 bp, Homo sapiens
gtagatcacttgagg

SEQ ID NO: 737175 - DNA, 15 bp, Homo sapiens
tagatcacttgaggt

SEQ ID NO: 737176 - DNA, 15 bp, Homo sapiens
agatcacttgaggtc

SEQ ID NO: 737177 - DNA, 15 bp, Homo sapiens
atcacttgaggtcag

SEQ ID NO: 737178 - DNA, 15 bp, Homo sapiens
tcacttgaggtcagg

SEQ ID NO: 737179 - DNA, 15 bp, Homo sapiens
cacttgaggtcagga

SEQ ID NO: 737180 - DNA, 15 bp, Homo sapiens
acttgaggtcaggag

SEQ ID NO: 737181 - DNA, 15 bp, Homo sapiens
cttgaggtcaggagt

SEQ ID NO: 737182 - DNA, 15 bp, Homo sapiens
ttgaggtcaggagtt

SEQ ID NO: 737183 - DNA, 15 bp, Homo sapiens
tgaggtcaggagttc

SEQ ID NO: 737184 - DNA, 15 bp, Homo sapiens
gaggtcaggagttcc

SEQ ID NO: 737185 - DNA, 15 bp, Homo sapiens
aggtcaggagttcca

SEQ ID NO: 737186 - DNA, 15 bp, Homo sapiens
ggtcaggagttccac

SEQ ID NO: 737187 - DNA, 15 bp, Homo sapiens
gtcaggagttccaca

SEQ ID NO: 737188 - DNA, 15 bp, Homo sapiens
tcaggagttccacat

SEQ ID NO: 737189 - DNA, 15 bp, Homo sapiens
caggagttccacatc

SEQ ID NO: 737190 - DNA, 15 bp, Homo sapiens
aggagttccacatca

SEQ ID NO: 737191 - DNA, 15 bp, Homo sapiens
ggagttccacatcag

SEQ ID NO: 737192 - DNA, 15 bp, Homo sapiens
gagttccacatcagc

SEQ ID NO: 737193 - DNA, 15 bp, Homo sapiens
agttccacatcagcc

SEQ ID NO: 737194 - DNA, 15 bp, Homo sapiens
gttccacatcagcct

SEQ ID NO: 737195 - DNA, 15 bp, Homo sapiens
ttccacatcagcctg

SEQ ID NO: 737196 - DNA, 15 bp, Homo sapiens
tccacatcagcctgg

SEQ ID NO: 737197 - DNA, 15 bp, Homo sapiens
ccacatcagcctggc

SEQ ID NO: 737198 - DNA, 15 bp, Homo sapiens
cacatcagcctggcc

SEQ ID NO: 737199 - DNA, 15 bp, Homo sapiens
acatcagcctggcca

SEQ ID NO: 737200 - DNA, 15 bp, Homo sapiens
catcagcctggccaa

SEQ ID NO: 737201 - DNA, 15 bp, Homo sapiens
atcagcctggccaac

SEQ ID NO: 737202 - DNA, 15 bp, Homo sapiens
tcagcctggccaaca

SEQ ID NO: 737203 - DNA, 15 bp, Homo sapiens
cagcctggccaacat

SEQ ID NO: 737204 - DNA, 15 bp, Homo sapiens
agcctggccaacatg

SEQ ID NO: 737205 - DNA, 15 bp, Homo sapiens
gcctggccaacatgg

SEQ ID NO: 737206 - DNA, 15 bp, Homo sapiens
cctggccaacatggt

SEQ ID NO: 737207 - DNA, 15 bp, Homo sapiens
ctggccaacatggtt

SEQ ID NO: 737208 - DNA, 15 bp, Homo sapiens
tggccaacatggtta

SEQ ID NO: 737209 - DNA, 15 bp, Homo sapiens
ggccaacatggttaa

SEQ ID NO: 737210 - DNA, 15 bp, Homo sapiens
gccaacatggttaaa

SEQ ID NO: 737211 - DNA, 15 bp, Homo sapiens
ccaacatggttaaac

SEQ ID NO: 737212 - DNA, 15 bp, Homo sapiens
caacatggttaaacc

SEQ ID NO: 737213 - DNA, 15 bp, Homo sapiens
aacatggttaaaccg

SEQ ID NO: 737214 - DNA, 15 bp, Homo sapiens
acatggttaaaccgc

SEQ ID NO: 737215 - DNA, 15 bp, Homo sapiens
catggttaaaccgcg

SEQ ID NO: 737216 - DNA, 15 bp, Homo sapiens
atggttaaaccgcgt

SEQ ID NO: 737217 - DNA, 15 bp, Homo sapiens
tggttaaaccgcgtc

SEQ ID NO: 737218 - DNA, 15 bp, Homo sapiens
ggttaaaccgcgtca

SEQ ID NO: 737219 - DNA, 15 bp, Homo sapiens
gttaaaccgcgtcac

SEQ ID NO: 737220 - DNA, 15 bp, Homo sapiens
ttaaaccgcgtcact

SEQ ID NO: 737221 - DNA, 15 bp, Homo sapiens
taaaccgcgtcacta

SEQ ID NO: 737222 - DNA, 15 bp, Homo sapiens
aaaccgcgtcactac

SEQ ID NO: 737223 - DNA, 15 bp, Homo sapiens
aaccgcgtcactacc

SEQ ID NO: 737224 - DNA, 15 bp, Homo sapiens
accgcgtcactacca

SEQ ID NO: 737225 - DNA, 15 bp, Homo sapiens
ccgcgtcactaccaa

SEQ ID NO: 737226 - DNA, 15 bp, Homo sapiens
cgcgtcactaccaaa

SEQ ID NO: 737227 - DNA, 15 bp, Homo sapiens
gcgtcactaccaaaa

SEQ ID NO: 737228 - DNA, 15 bp, Homo sapiens
cgtcactaccaaaaa

SEQ ID NO: 737229 - DNA, 15 bp, Homo sapiens
gtcactaccaaaaaa

SEQ ID NO: 737230 - DNA, 15 bp, Homo sapiens
tcactaccaaaaaat

SEQ ID NO: 737231 - DNA, 15 bp, Homo sapiens
cactaccaaaaaata

SEQ ID NO: 737232 - DNA, 15 bp, Homo sapiens
actaccaaaaaatac

SEQ ID NO: 737233 - DNA, 15 bp, Homo sapiens
ctaccaaaaaataca

SEQ ID NO: 737234 - DNA, 15 bp, Homo sapiens
taccaaaaaatacaa

SEQ ID NO: 737235 - DNA, 15 bp, Homo sapiens
accaaaaaatacaaa

SEQ ID NO: 737236 - DNA, 15 bp, Homo sapiens
ccaaaaaatacaaaa

SEQ ID NO: 737237 - DNA, 15 bp, Homo sapiens
caaaaaatacaaaaa

SEQ ID NO: 737238 - DNA, 15 bp, Homo sapiens
aaaaaatacaaaaat

SEQ ID NO: 737239 - DNA, 15 bp, Homo sapiens
acaaaaattagccag

SEQ ID NO: 737240 - DNA, 15 bp, Homo sapiens
caaaaattagccaga

SEQ ID NO: 737241 - DNA, 15 bp, Homo sapiens
aaaaattagccagat

SEQ ID NO: 737242 - DNA, 15 bp, Homo sapiens
aaaattagccagatg

SEQ ID NO: 737243 - DNA, 15 bp, Homo sapiens
aaattagccagatgt

SEQ ID NO: 737244 - DNA, 15 bp, Homo sapiens
aattagccagatgtg

SEQ ID NO: 737245 - DNA, 15 bp, Homo sapiens
attagccagatgtgg

SEQ ID NO: 737246 - DNA, 15 bp, Homo sapiens
ttagccagatgtggt

SEQ ID NO: 737247 - DNA, 15 bp, Homo sapiens
tagccagatgtggtg

SEQ ID NO: 737248 - DNA, 15 bp, Homo sapiens
agccagatgtggtgg

SEQ ID NO: 737249 - DNA, 15 bp, Homo sapiens
gccagatgtggtggc

SEQ ID NO: 737250 - DNA, 15 bp, Homo sapiens
ccagatgtggtggcg

SEQ ID NO: 737251 - DNA, 15 bp, Homo sapiens
cagatgtggtggcgc

SEQ ID NO: 737252 - DNA, 15 bp, Homo sapiens
agatgtggtggcgcg

SEQ ID NO: 737253 - DNA, 15 bp, Homo sapiens
gatgtggtggcgcgc

SEQ ID NO: 737254 - DNA, 15 bp, Homo sapiens
atgtggtggcgcgcg

SEQ ID NO: 737255 - DNA, 15 bp, Homo sapiens
tgtggtggcgcgcgc

SEQ ID NO: 737256 - DNA, 15 bp, Homo sapiens
gtggtggcgcgcgcc

SEQ ID NO: 737257 - DNA, 15 bp, Homo sapiens
tggtggcgcgcgcct

SEQ ID NO: 737258 - DNA, 15 bp, Homo sapiens
ggtggcgcgcgcctg

SEQ ID NO: 737259 - DNA, 15 bp, Homo sapiens
gtggcgcgcgcctgt

SEQ ID NO: 737260 - DNA, 15 bp, Homo sapiens
tggcgcgcgcctgta

SEQ ID NO: 737261 - DNA, 15 bp, Homo sapiens
ggcgcgcgcctgtag

SEQ ID NO: 737262 - DNA, 15 bp, Homo sapiens
gcgcgcgcctgtagt

SEQ ID NO: 737263 - DNA, 15 bp, Homo sapiens
cgcgcgcctgtagtc

SEQ ID NO: 737264 - DNA, 15 bp, Homo sapiens
gcgcgcctgtagtcc

SEQ ID NO: 737265 - DNA, 15 bp, Homo sapiens
cgcgcctgtagtccc

SEQ ID NO: 737266 - DNA, 15 bp, Homo sapiens
gcgcctgtagtccca

SEQ ID NO: 737267 - DNA, 15 bp, Homo sapiens
cgcctgtagtcccag

SEQ ID NO: 737268 - DNA, 15 bp, Homo sapiens
gcctgtagtcccagc

SEQ ID NO: 737269 - DNA, 15 bp, Homo sapiens
cctgtagtcccagct

SEQ ID NO: 737270 - DNA, 15 bp, Homo sapiens
ctgtagtcccagcta

SEQ ID NO: 737271 - DNA, 15 bp, Homo sapiens
tgtagtcccagctac

SEQ ID NO: 737272 - DNA, 15 bp, Homo sapiens
gtagtcccagctact

SEQ ID NO: 737273 - DNA, 15 bp, Homo sapiens
tagtcccagctactc

SEQ ID NO: 737274 - DNA, 15 bp, Homo sapiens
agtcccagctactcc

SEQ ID NO: 737275 - DNA, 15 bp, Homo sapiens
gtcccagctactccg

SEQ ID NO: 737276 - DNA, 15 bp, Homo sapiens
tcccagctactccgg

SEQ ID NO: 737277 - DNA, 15 bp, Homo sapiens
cccagctactccgga

SEQ ID NO: 737278 - DNA, 15 bp, Homo sapiens
ccagctactccggag

SEQ ID NO: 737279 - DNA, 15 bp, Homo sapiens
cagctactccggagg

SEQ ID NO: 737280 - DNA, 15 bp, Homo sapiens
agctactccggaggc

SEQ ID NO: 737281 - DNA, 15 bp, Homo sapiens
gctactccggaggct

SEQ ID NO: 737282 - DNA, 15 bp, Homo sapiens
ctactccggaggctg

SEQ ID NO: 737283 - DNA, 15 bp, Homo sapiens
tactccggaggctga

SEQ ID NO: 737284 - DNA, 15 bp, Homo sapiens
actccggaggctgag

SEQ ID NO: 737285 - DNA, 15 bp, Homo sapiens
ctccggaggctgagg

SEQ ID NO: 737286 - DNA, 15 bp, Homo sapiens
tccggaggctgaggt

SEQ ID NO: 737287 - DNA, 15 bp, Homo sapiens
ccggaggctgaggtg

SEQ ID NO: 737288 - DNA, 15 bp, Homo sapiens
cggaggctgaggtgg

SEQ ID NO: 737289 - DNA, 15 bp, Homo sapiens
ggaggctgaggtggg

SEQ ID NO: 737290 - DNA, 15 bp, Homo sapiens
gaggctgaggtggga

SEQ ID NO: 737291 - DNA, 15 bp, Homo sapiens
aggctgaggtgggag

SEQ ID NO: 737292 - DNA, 15 bp, Homo sapiens
ggctgaggtgggaga

SEQ ID NO: 737293 - DNA, 15 bp, Homo sapiens
gctgaggtgggagaa

SEQ ID NO: 737294 - DNA, 15 bp, Homo sapiens
ctgaggtgggagaat

SEQ ID NO: 737295 - DNA, 15 bp, Homo sapiens
tgaggtgggagaatc

SEQ ID NO: 737296 - DNA, 15 bp, Homo sapiens
gaggtgggagaatcg

SEQ ID NO: 737297 - DNA, 15 bp, Homo sapiens
aggtgggagaatcgt

SEQ ID NO: 737298 - DNA, 15 bp, Homo sapiens
ggtgggagaatcgtt

SEQ ID NO: 737299 - DNA, 15 bp, Homo sapiens
gtgggagaatcgttt

SEQ ID NO: 737300 - DNA, 15 bp, Homo sapiens
tgggagaatcgtttg

SEQ ID NO: 737301 - DNA, 15 bp, Homo sapiens
gggagaatcgtttga

SEQ ID NO: 737302 - DNA, 15 bp, Homo sapiens
ggagaatcgtttgat

SEQ ID NO: 737303 - DNA, 15 bp, Homo sapiens
gagaatcgtttgatc

SEQ ID NO: 737304 - DNA, 15 bp, Homo sapiens
agaatcgtttgatct

SEQ ID NO: 737305 - DNA, 15 bp, Homo sapiens
gaatcgtttgatctg

SEQ ID NO: 737306 - DNA, 15 bp, Homo sapiens
aatcgtttgatctgg

SEQ ID NO: 737307 - DNA, 15 bp, Homo sapiens
atcgtttgatctggg

SEQ ID NO: 737308 - DNA, 15 bp, Homo sapiens
tcgtttgatctgggg

SEQ ID NO: 737309 - DNA, 15 bp, Homo sapiens
cgtttgatctgggga

SEQ ID NO: 737310 - DNA, 15 bp, Homo sapiens
gtttgatctggggag

SEQ ID NO: 737311 - DNA, 15 bp, Homo sapiens
tttgatctggggagg

SEQ ID NO: 737312 - DNA, 15 bp, Homo sapiens
ttgatctggggaggc

SEQ ID NO: 737313 - DNA, 15 bp, Homo sapiens
tgatctggggaggca

SEQ ID NO: 737314 - DNA, 15 bp, Homo sapiens
gatctggggaggcag

SEQ ID NO: 737315 - DNA, 15 bp, Homo sapiens
atctggggaggcaga

SEQ ID NO: 737316 - DNA, 15 bp, Homo sapiens
tctggggaggcagag

SEQ ID NO: 737317 - DNA, 15 bp, Homo sapiens
ctggggaggcagagg

SEQ ID NO: 737318 - DNA, 15 bp, Homo sapiens
tggggaggcagaggc

SEQ ID NO: 737319 - DNA, 15 bp, Homo sapiens
ggggaggcagaggct

SEQ ID NO: 737320 - DNA, 15 bp, Homo sapiens
gggaggcagaggctg

SEQ ID NO: 737321 - DNA, 15 bp, Homo sapiens
ggaggcagaggctgc

SEQ ID NO: 737322 - DNA, 15 bp, Homo sapiens
gaggcagaggctgca

SEQ ID NO: 737323 - DNA, 15 bp, Homo sapiens
aggcagaggctgcag

SEQ ID NO: 737324 - DNA, 15 bp, Homo sapiens
ggcagaggctgcagt

SEQ ID NO: 737325 - DNA, 15 bp, Homo sapiens
gcagaggctgcagtg

SEQ ID NO: 737326 - DNA, 15 bp, Homo sapiens
cagaggctgcagtga

SEQ ID NO: 737327 - DNA, 15 bp, Homo sapiens
agaggctgcagtgag

SEQ ID NO: 737328 - DNA, 15 bp, Homo sapiens
gaggctgcagtgagc

SEQ ID NO: 737329 - DNA, 15 bp, Homo sapiens
aggctgcagtgagcc

SEQ ID NO: 737330 - DNA, 15 bp, Homo sapiens
ggctgcagtgagccg

SEQ ID NO: 737331 - DNA, 15 bp, Homo sapiens
gctgcagtgagccga

SEQ ID NO: 737332 - DNA, 15 bp, Homo sapiens
ctgcagtgagccgaa

SEQ ID NO: 737333 - DNA, 15 bp, Homo sapiens
tgcagtgagccgaaa

SEQ ID NO: 737334 - DNA, 15 bp, Homo sapiens
gcagtgagccgaaat

SEQ ID NO: 737335 - DNA, 15 bp, Homo sapiens
cagtgagccgaaatc

SEQ ID NO: 737336 - DNA, 15 bp, Homo sapiens
agtgagccgaaatcg

SEQ ID NO: 737337 - DNA, 15 bp, Homo sapiens
gtgagccgaaatcga

SEQ ID NO: 737338 - DNA, 15 bp, Homo sapiens
tgagccgaaatcgag

SEQ ID NO: 737339 - DNA, 15 bp, Homo sapiens
gagccgaaatcgagc

SEQ ID NO: 737340 - DNA, 15 bp, Homo sapiens
agccgaaatcgagcc

SEQ ID NO: 737341 - DNA, 15 bp, Homo sapiens
gccgaaatcgagcca

SEQ ID NO: 737342 - DNA, 15 bp, Homo sapiens
ccgaaatcgagccac

SEQ ID NO: 737343 - DNA, 15 bp, Homo sapiens
cgaaatcgagccact

SEQ ID NO: 737344 - DNA, 15 bp, Homo sapiens
gaaatcgagccactg

SEQ ID NO: 737345 - DNA, 15 bp, Homo sapiens
aaatcgagccactgg

SEQ ID NO: 737346 - DNA, 15 bp, Homo sapiens
aatcgagccactgga

SEQ ID NO: 737347 - DNA, 15 bp, Homo sapiens
atcgagccactggac

SEQ ID NO: 737348 - DNA, 15 bp, Homo sapiens
tcgagccactggact

SEQ ID NO: 737349 - DNA, 15 bp, Homo sapiens
cgagccactggactc

SEQ ID NO: 737350 - DNA, 15 bp, Homo sapiens
gagccactggactct

SEQ ID NO: 737351 - DNA, 15 bp, Homo sapiens
agccactggactcta

SEQ ID NO: 737352 - DNA, 15 bp, Homo sapiens
gccactggactctag

SEQ ID NO: 737353 - DNA, 15 bp, Homo sapiens
ccactggactctagc

SEQ ID NO: 737354 - DNA, 15 bp, Homo sapiens
cactggactctagcc

SEQ ID NO: 737355 - DNA, 15 bp, Homo sapiens
actggactctagccc

SEQ ID NO: 737356 - DNA, 15 bp, Homo sapiens
ctggactctagcccg

SEQ ID NO: 737357 - DNA, 15 bp, Homo sapiens
tggactctagcccgg

SEQ ID NO: 737358 - DNA, 15 bp, Homo sapiens
ggactctagcccggg

SEQ ID NO: 737359 - DNA, 15 bp, Homo sapiens
gactctagcccgggt

SEQ ID NO: 737360 - DNA, 15 bp, Homo sapiens
actctagcccgggtg

SEQ ID NO: 737361 - DNA, 15 bp, Homo sapiens
ctctagcccgggtga

SEQ ID NO: 737362 - DNA, 15 bp, Homo sapiens
tctagcccgggtgaa

SEQ ID NO: 737363 - DNA, 15 bp, Homo sapiens
ctagcccgggtgaag

SEQ ID NO: 737364 - DNA, 15 bp, Homo sapiens
tagcccgggtgaaga

SEQ ID NO: 737365 - DNA, 15 bp, Homo sapiens
agcccgggtgaagag

SEQ ID NO: 737366 - DNA, 15 bp, Homo sapiens
gcccgggtgaagagt

SEQ ID NO: 737367 - DNA, 15 bp, Homo sapiens
cccgggtgaagagtg

SEQ ID NO: 737368 - DNA, 15 bp, Homo sapiens
ccgggtgaagagtga

SEQ ID NO: 737369 - DNA, 15 bp, Homo sapiens
cgggtgaagagtgag

SEQ ID NO: 737370 - DNA, 15 bp, Homo sapiens
gggtgaagagtgaga

SEQ ID NO: 737371 - DNA, 15 bp, Homo sapiens
ggtgaagagtgagac

SEQ ID NO: 737372 - DNA, 15 bp, Homo sapiens
gtgaagagtgagact

SEQ ID NO: 737373 - DNA, 15 bp, Homo sapiens
tgaagagtgagactc

SEQ ID NO: 737374 - DNA, 15 bp, Homo sapiens
ctgctcggcgcacgg

SEQ ID NO: 737375 - DNA, 15 bp, Homo sapiens
tgctcggcgcacgga

SEQ ID NO: 737376 - DNA, 15 bp, Homo sapiens
gctcggcgcacggaa

SEQ ID NO: 737377 - DNA, 15 bp, Homo sapiens
ctcggcgcacggaag

SEQ ID NO: 737378 - DNA, 15 bp, Homo sapiens
tcggcgcacggaaga

SEQ ID NO: 737379 - DNA, 15 bp, Homo sapiens
cggcgcacggaagat

SEQ ID NO: 737380 - DNA, 15 bp, Homo sapiens
ggcgcacggaagatc

SEQ ID NO: 737381 - DNA, 15 bp, Homo sapiens
gcgcacggaagatcc

SEQ ID NO: 737382 - DNA, 15 bp, Homo sapiens
cgcacggaagatcct

SEQ ID NO: 737383 - DNA, 15 bp, Homo sapiens
gcacggaagatcctg

SEQ ID NO: 737384 - DNA, 15 bp, Homo sapiens
cacggaagatcctgt

SEQ ID NO: 737385 - DNA, 15 bp, Homo sapiens
acggaagatcctgtc

SEQ ID NO: 737386 - DNA, 15 bp, Homo sapiens
cggaagatcctgtcc

SEQ ID NO: 737387 - DNA, 15 bp, Homo sapiens
ggaagatcctgtccc

SEQ ID NO: 737388 - DNA, 15 bp, Homo sapiens
gaagatcctgtcccc

SEQ ID NO: 737389 - DNA, 15 bp, Homo sapiens
aagatcctgtccccg

SEQ ID NO: 737390 - DNA, 15 bp, Homo sapiens
agatcctgtccccga

SEQ ID NO: 737391 - DNA, 15 bp, Homo sapiens
gatcctgtccccgag

SEQ ID NO: 737392 - DNA, 15 bp, Homo sapiens
atcctgtccccgagc

SEQ ID NO: 737393 - DNA, 15 bp, Homo sapiens
tcctgtccccgagcc

SEQ ID NO: 737394 - DNA, 15 bp, Homo sapiens
cctgtccccgagccg

SEQ ID NO: 737395 - DNA, 15 bp, Homo sapiens
ctgtccccgagccgc

SEQ ID NO: 737396 - DNA, 15 bp, Homo sapiens
tgtccccgagccgcg

SEQ ID NO: 737397 - DNA, 15 bp, Homo sapiens
gtccccgagccgcgc

SEQ ID NO: 737398 - DNA, 15 bp, Homo sapiens
tccccgagccgcgcc

SEQ ID NO: 737399 - DNA, 15 bp, Homo sapiens
ccccgagccgcgcca

SEQ ID NO: 737400 - DNA, 15 bp, Homo sapiens
cccgagccgcgccag

SEQ ID NO: 737401 - DNA, 15 bp, Homo sapiens
ccgagccgcgccagc

SEQ ID NO: 737402 - DNA, 15 bp, Homo sapiens
cgagccgcgccagcc

SEQ ID NO: 737403 - DNA, 15 bp, Homo sapiens
gagccgcgccagccg

SEQ ID NO: 737404 - DNA, 15 bp, Homo sapiens
agccgcgccagccga

SEQ ID NO: 737405 - DNA, 15 bp, Homo sapiens
gccgcgccagccgag

SEQ ID NO: 737406 - DNA, 15 bp, Homo sapiens
ccgcgccagccgagc

SEQ ID NO: 737407 - DNA, 15 bp, Homo sapiens
cgcgccagccgagcc

SEQ ID NO: 737408 - DNA, 15 bp, Homo sapiens
gcgccagccgagcca

SEQ ID NO: 737409 - DNA, 15 bp, Homo sapiens
cgccagccgagccag

SEQ ID NO: 737410 - DNA, 15 bp, Homo sapiens
gccagccgagccagc

SEQ ID NO: 737411 - DNA, 15 bp, Homo sapiens
ccagccgagccagcc

SEQ ID NO: 737412 - DNA, 15 bp, Homo sapiens
cagccgagccagccg

SEQ ID NO: 737413 - DNA, 15 bp, Homo sapiens
agccgagccagccgg

SEQ ID NO: 737414 - DNA, 15 bp, Homo sapiens
gccgagccagccggg

SEQ ID NO: 737415 - DNA, 15 bp, Homo sapiens
ccgagccagccgggc

SEQ ID NO: 737416 - DNA, 15 bp, Homo sapiens
cgagccagccgggcg

SEQ ID NO: 737417 - DNA, 15 bp, Homo sapiens
gagccagccgggcgc

SEQ ID NO: 737418 - DNA, 15 bp, Homo sapiens
agccagccgggcgcc

SEQ ID NO: 737419 - DNA, 15 bp, Homo sapiens
gccagccgggcgccg

SEQ ID NO: 737420 - DNA, 15 bp, Homo sapiens
ccagccgggcgccgt

SEQ ID NO: 737421 - DNA, 15 bp, Homo sapiens
cagccgggcgccgtg

SEQ ID NO: 737422 - DNA, 15 bp, Homo sapiens
agccgggcgccgtgc

SEQ ID NO: 737423 - DNA, 15 bp, Homo sapiens
gccgggcgccgtgct

SEQ ID NO: 737424 - DNA, 15 bp, Homo sapiens
ccgggcgccgtgctc

SEQ ID NO: 737425 - DNA, 15 bp, Homo sapiens
cgggcgccgtgctcg

SEQ ID NO: 737426 - DNA, 15 bp, Homo sapiens
gggcgccgtgctcgg

SEQ ID NO: 737427 - DNA, 15 bp, Homo sapiens
ggcgccgtgctcggt

SEQ ID NO: 737428 - DNA, 15 bp, Homo sapiens
gcgccgtgctcggtc

SEQ ID NO: 737429 - DNA, 15 bp, Homo sapiens
cgccgtgctcggtcc

SEQ ID NO: 737430 - DNA, 15 bp, Homo sapiens
gccgtgctcggtccg

SEQ ID NO: 737431 - DNA, 15 bp, Homo sapiens
ccgtgctcggtccgc

SEQ ID NO: 737432 - DNA, 15 bp, Homo sapiens
cgtgctcggtccgct

SEQ ID NO: 737433 - DNA, 15 bp, Homo sapiens
gtgctcggtccgctc

SEQ ID NO: 737434 - DNA, 15 bp, Homo sapiens
tgctcggtccgctcg

SEQ ID NO: 737435 - DNA, 15 bp, Homo sapiens
gctcggtccgctcgc

SEQ ID NO: 737436 - DNA, 15 bp, Homo sapiens
ctcggtccgctcgcc

SEQ ID NO: 737437 - DNA, 15 bp, Homo sapiens
tcggtccgctcgccg

SEQ ID NO: 737438 - DNA, 15 bp, Homo sapiens
cggtccgctcgccgc

SEQ ID NO: 737439 - DNA, 15 bp, Homo sapiens
ggtccgctcgccgcg

SEQ ID NO: 737440 - DNA, 15 bp, Homo sapiens
gtccgctcgccgcgc

SEQ ID NO: 737441 - DNA, 15 bp, Homo sapiens
tccgctcgccgcgcg

SEQ ID NO: 737442 - DNA, 15 bp, Homo sapiens
ccgctcgccgcgcgg

SEQ ID NO: 737443 - DNA, 15 bp, Homo sapiens
cgctcgccgcgcggg

SEQ ID NO: 737444 - DNA, 15 bp, Homo sapiens
gctcgccgcgcggga

SEQ ID NO: 737445 - DNA, 15 bp, Homo sapiens
ctcgccgcgcgggag

SEQ ID NO: 737446 - DNA, 15 bp, Homo sapiens
tcgccgcgcgggaga

SEQ ID NO: 737447 - DNA, 15 bp, Homo sapiens
cgccgcgcgggagag

SEQ ID NO: 737448 - DNA, 15 bp, Homo sapiens
gccgcgcgggagaga

SEQ ID NO: 737449 - DNA, 15 bp, Homo sapiens
ccgcgcgggagagag

SEQ ID NO: 737450 - DNA, 15 bp, Homo sapiens
cgcgcgggagagagc

SEQ ID NO: 737451 - DNA, 15 bp, Homo sapiens
gcgcgggagagagct

SEQ ID NO: 737452 - DNA, 15 bp, Homo sapiens
cgcgggagagagctg

SEQ ID NO: 737453 - DNA, 15 bp, Homo sapiens
gcgggagagagctgc

SEQ ID NO: 737454 - DNA, 15 bp, Homo sapiens
cgggagagagctgcc

SEQ ID NO: 737455 - DNA, 15 bp, Homo sapiens
gggagagagctgccc

SEQ ID NO: 737456 - DNA, 15 bp, Homo sapiens
ggagagagctgcccg

SEQ ID NO: 737457 - DNA, 15 bp, Homo sapiens
gagagagctgcccga

SEQ ID NO: 737458 - DNA, 15 bp, Homo sapiens
agagagctgcccgag

SEQ ID NO: 737459 - DNA, 15 bp, Homo sapiens
gagagctgcccgaga

SEQ ID NO: 737460 - DNA, 15 bp, Homo sapiens
agagctgcccgagac

SEQ ID NO: 737461 - DNA, 15 bp, Homo sapiens
gagctgcccgagaca

SEQ ID NO: 737462 - DNA, 15 bp, Homo sapiens
agctgcccgagacag

SEQ ID NO: 737463 - DNA, 15 bp, Homo sapiens
gctgcccgagacaga

SEQ ID NO: 737464 - DNA, 15 bp, Homo sapiens
ctgcccgagacagag

SEQ ID NO: 737465 - DNA, 15 bp, Homo sapiens
tgcccgagacagagc

SEQ ID NO: 737466 - DNA, 15 bp, Homo sapiens
gcccgagacagagcc

SEQ ID NO: 737467 - DNA, 15 bp, Homo sapiens
cccgagacagagcca

SEQ ID NO: 737468 - DNA, 15 bp, Homo sapiens
ccgagacagagccag

SEQ ID NO: 737469 - DNA, 15 bp, Homo sapiens
cgagacagagccagt

SEQ ID NO: 737470 - DNA, 15 bp, Homo sapiens
gagacagagccagtc

SEQ ID NO: 737471 - DNA, 15 bp, Homo sapiens
agacagagccagtcc

SEQ ID NO: 737472 - DNA, 15 bp, Homo sapiens
gacagagccagtccg

SEQ ID NO: 737473 - DNA, 15 bp, Homo sapiens
acagagccagtccgt

SEQ ID NO: 737474 - DNA, 15 bp, Homo sapiens
cagagccagtccgtc

SEQ ID NO: 737475 - DNA, 15 bp, Homo sapiens
agagccagtccgtcg

SEQ ID NO: 737476 - DNA, 15 bp, Homo sapiens
gagccagtccgtcgg

SEQ ID NO: 737477 - DNA, 15 bp, Homo sapiens
agccagtccgtcggc

SEQ ID NO: 737478 - DNA, 15 bp, Homo sapiens
gccagtccgtcggcg

SEQ ID NO: 737479 - DNA, 15 bp, Homo sapiens
ccagtccgtcggcgc

SEQ ID NO: 737480 - DNA, 15 bp, Homo sapiens
cagtccgtcggcgcc

SEQ ID NO: 737481 - DNA, 15 bp, Homo sapiens
agtccgtcggcgccg

SEQ ID NO: 737482 - DNA, 15 bp, Homo sapiens
gtccgtcggcgccga

SEQ ID NO: 737483 - DNA, 15 bp, Homo sapiens
tccgtcggcgccgag

SEQ ID NO: 737484 - DNA, 15 bp, Homo sapiens
ccgtcggcgccgagc

SEQ ID NO: 737485 - DNA, 15 bp, Homo sapiens
cgtcggcgccgagcc

SEQ ID NO: 737486 - DNA, 15 bp, Homo sapiens
gtcggcgccgagccg

SEQ ID NO: 737487 - DNA, 15 bp, Homo sapiens
tcggcgccgagccgc

SEQ ID NO: 737488 - DNA, 15 bp, Homo sapiens
cggcgccgagccgcc

SEQ ID NO: 737489 - DNA, 15 bp, Homo sapiens
ggcgccgagccgccg

SEQ ID NO: 737490 - DNA, 15 bp, Homo sapiens
gcgccgagccgccga

SEQ ID NO: 737491 - DNA, 15 bp, Homo sapiens
cgccgagccgccgag

SEQ ID NO: 737492 - DNA, 15 bp, Homo sapiens
gccgagccgccgagc

SEQ ID NO: 737493 - DNA, 15 bp, Homo sapiens
ccgagccgccgagcg

SEQ ID NO: 737494 - DNA, 15 bp, Homo sapiens
cgagccgccgagcgc

SEQ ID NO: 737495 - DNA, 15 bp, Homo sapiens
gagccgccgagcgcc

SEQ ID NO: 737496 - DNA, 15 bp, Homo sapiens
agccgccgagcgccc

SEQ ID NO: 737497 - DNA, 15 bp, Homo sapiens
gccgccgagcgcccg

SEQ ID NO: 737498 - DNA, 15 bp, Homo sapiens
ccgccgagcgcccgg

SEQ ID NO: 737499 - DNA, 15 bp, Homo sapiens
cgccgagcgcccggc

SEQ ID NO: 737500 - DNA, 15 bp, Homo sapiens
gccgagcgcccggcc

SEQ ID NO: 737501 - DNA, 15 bp, Homo sapiens
ccgagcgcccggccc

SEQ ID NO: 737502 - DNA, 15 bp, Homo sapiens
cgagcgcccggcccc

SEQ ID NO: 737503 - DNA, 15 bp, Homo sapiens
gagcgcccggcccct

SEQ ID NO: 737504 - DNA, 15 bp, Homo sapiens
agcgcccggcccctg

SEQ ID NO: 737505 - DNA, 15 bp, Homo sapiens
gcgcccggcccctga

SEQ ID NO: 737506 - DNA, 15 bp, Homo sapiens
cgcccggcccctgag

SEQ ID NO: 737507 - DNA, 15 bp, Homo sapiens
gcccggcccctgagc

SEQ ID NO: 737508 - DNA, 15 bp, Homo sapiens
cccggcccctgagcc

SEQ ID NO: 737509 - DNA, 15 bp, Homo sapiens
ccggcccctgagccc

SEQ ID NO: 737510 - DNA, 15 bp, Homo sapiens
cggcccctgagcccc

SEQ ID NO: 737511 - DNA, 15 bp, Homo sapiens
ggcccctgagcccct

SEQ ID NO: 737512 - DNA, 15 bp, Homo sapiens
gcccctgagcccctg

SEQ ID NO: 737513 - DNA, 15 bp, Homo sapiens
cccctgagcccctga

SEQ ID NO: 737514 - DNA, 15 bp, Homo sapiens
ccctgagcccctgag

SEQ ID NO: 737515 - DNA, 15 bp, Homo sapiens
cctgagcccctgagt

SEQ ID NO: 737516 - DNA, 15 bp, Homo sapiens
ctgagcccctgagtg

SEQ ID NO: 737517 - DNA, 15 bp, Homo sapiens
tgagcccctgagtgc

SEQ ID NO: 737518 - DNA, 15 bp, Homo sapiens
gagcccctgagtgcg

SEQ ID NO: 737519 - DNA, 15 bp, Homo sapiens
agcccctgagtgcgg

SEQ ID NO: 737520 - DNA, 15 bp, Homo sapiens
gcccctgagtgcggc

SEQ ID NO: 737521 - DNA, 15 bp, Homo sapiens
cccctgagtgcggcg

SEQ ID NO: 737522 - DNA, 15 bp, Homo sapiens
ccctgagtgcggcgc

SEQ ID NO: 737523 - DNA, 15 bp, Homo sapiens
cctgagtgcggcgcg

SEQ ID NO: 737524 - DNA, 15 bp, Homo sapiens
ctgagtgcggcgcgg

SEQ ID NO: 737525 - DNA, 15 bp, Homo sapiens
tgagtgcggcgcggc

SEQ ID NO: 737526 - DNA, 15 bp, Homo sapiens
gagtgcggcgcggcg

SEQ ID NO: 737527 - DNA, 15 bp, Homo sapiens
agtgcggcgcggcga

SEQ ID NO: 737528 - DNA, 15 bp, Homo sapiens
gtgcggcgcggcgag

SEQ ID NO: 737529 - DNA, 15 bp, Homo sapiens
tgcggcgcggcgagc

SEQ ID NO: 737530 - DNA, 15 bp, Homo sapiens
gcggcgcggcgagcc

SEQ ID NO: 737531 - DNA, 15 bp, Homo sapiens
cggcgcggcgagccc

SEQ ID NO: 737532 - DNA, 15 bp, Homo sapiens
ggcgcggcgagcccc

SEQ ID NO: 737533 - DNA, 15 bp, Homo sapiens
gcgcggcgagcccct

SEQ ID NO: 737534 - DNA, 15 bp, Homo sapiens
cgcggcgagcccctg

SEQ ID NO: 737535 - DNA, 15 bp, Homo sapiens
gcggcgagcccctgg

SEQ ID NO: 737536 - DNA, 15 bp, Homo sapiens
cggcgagcccctggc

SEQ ID NO: 737537 - DNA, 15 bp, Homo sapiens
ggcgagcccctggcg

SEQ ID NO: 737538 - DNA, 15 bp, Homo sapiens
gcgagcccctggcgg

SEQ ID NO: 737539 - DNA, 15 bp, Homo sapiens
cgagcccctggcggc

SEQ ID NO: 737540 - DNA, 15 bp, Homo sapiens
gagcccctggcggcg

SEQ ID NO: 737541 - DNA, 15 bp, Homo sapiens
agcccctggcggcgg

SEQ ID NO: 737542 - DNA, 15 bp, Homo sapiens
gcccctggcggcggc

SEQ ID NO: 737543 - DNA, 15 bp, Homo sapiens
cccctggcggcggca

SEQ ID NO: 737544 - DNA, 15 bp, Homo sapiens
ccctggcggcggcag

SEQ ID NO: 737545 - DNA, 15 bp, Homo sapiens
cctggcggcggcaga

SEQ ID NO: 737546 - DNA, 15 bp, Homo sapiens
ctggcggcggcagaa

SEQ ID NO: 737547 - DNA, 15 bp, Homo sapiens
tggcggcggcagaag

SEQ ID NO: 737548 - DNA, 15 bp, Homo sapiens
ggcggcggcagaagg

SEQ ID NO: 737549 - DNA, 15 bp, Homo sapiens
gcggcggcagaagga

SEQ ID NO: 737550 - DNA, 15 bp, Homo sapiens
cggcggcagaaggac

SEQ ID NO: 737551 - DNA, 15 bp, Homo sapiens
ggcggcagaaggacc

SEQ ID NO: 737552 - DNA, 15 bp, Homo sapiens
gcggcagaaggaccg

SEQ ID NO: 737553 - DNA, 15 bp, Homo sapiens
cggcagaaggaccgg

SEQ ID NO: 737554 - DNA, 15 bp, Homo sapiens
ggcagaaggaccgga

SEQ ID NO: 737555 - DNA, 15 bp, Homo sapiens
gcagaaggaccggag

SEQ ID NO: 737556 - DNA, 15 bp, Homo sapiens
cagaaggaccggagc

SEQ ID NO: 737557 - DNA, 15 bp, Homo sapiens
agaaggaccggagcg

SEQ ID NO: 737558 - DNA, 15 bp, Homo sapiens
gaaggaccggagcgc

SEQ ID NO: 737559 - DNA, 15 bp, Homo sapiens
aaggaccggagcgcc

SEQ ID NO: 737560 - DNA, 15 bp, Homo sapiens
aggaccggagcgcca

SEQ ID NO: 737561 - DNA, 15 bp, Homo sapiens
ggaccggagcgccag

SEQ ID NO: 737562 - DNA, 15 bp, Homo sapiens
gaccggagcgccagg

SEQ ID NO: 737563 - DNA, 15 bp, Homo sapiens
accggagcgccagga

SEQ ID NO: 737564 - DNA, 15 bp, Homo sapiens
ccggagcgccaggag

SEQ ID NO: 737565 - DNA, 15 bp, Homo sapiens
cggagcgccaggaga

SEQ ID NO: 737566 - DNA, 15 bp, Homo sapiens
ggagcgccaggagag

SEQ ID NO: 737567 - DNA, 15 bp, Homo sapiens
gagcgccaggagagg

SEQ ID NO: 737568 - DNA, 15 bp, Homo sapiens
agcgccaggagaggg

SEQ ID NO: 737569 - DNA, 15 bp, Homo sapiens
gcgccaggagagggc

SEQ ID NO: 737570 - DNA, 15 bp, Homo sapiens
cgccaggagagggcg

SEQ ID NO: 737571 - DNA, 15 bp, Homo sapiens
gccaggagagggcgg

SEQ ID NO: 737572 - DNA, 15 bp, Homo sapiens
ccaggagagggcgga

SEQ ID NO: 737573 - DNA, 15 bp, Homo sapiens
caggagagggcggac

SEQ ID NO: 737574 - DNA, 15 bp, Homo sapiens
aggagagggcggacc

SEQ ID NO: 737575 - DNA, 15 bp, Homo sapiens
ggagagggcggaccg

SEQ ID NO: 737576 - DNA, 15 bp, Homo sapiens
gagagggcggaccgg

SEQ ID NO: 737577 - DNA, 15 bp, Homo sapiens
agagggcggaccggg

SEQ ID NO: 737578 - DNA, 15 bp, Homo sapiens
gagggcggaccgggg

SEQ ID NO: 737579 - DNA, 15 bp, Homo sapiens
agggcggaccgggga

SEQ ID NO: 737580 - DNA, 15 bp, Homo sapiens
gggcggaccggggac

SEQ ID NO: 737581 - DNA, 15 bp, Homo sapiens
ggcggaccggggaca

SEQ ID NO: 737582 - DNA, 15 bp, Homo sapiens
gcggaccggggacaa

SEQ ID NO: 737583 - DNA, 15 bp, Homo sapiens
cggaccggggacaag

SEQ ID NO: 737584 - DNA, 15 bp, Homo sapiens
ggaccggggacaagg

SEQ ID NO: 737585 - DNA, 15 bp, Homo sapiens
gaccggggacaagga

SEQ ID NO: 737586 - DNA, 15 bp, Homo sapiens
accggggacaaggag

SEQ ID NO: 737587 - DNA, 15 bp, Homo sapiens
ccggggacaaggagg

SEQ ID NO: 737588 - DNA, 15 bp, Homo sapiens
cggggacaaggaggc

SEQ ID NO: 737589 - DNA, 15 bp, Homo sapiens
ggggacaaggaggct

SEQ ID NO: 737590 - DNA, 15 bp, Homo sapiens
gggacaaggaggctc

SEQ ID NO: 737591 - DNA, 15 bp, Homo sapiens
ggacaaggaggctcc

SEQ ID NO: 737592 - DNA, 15 bp, Homo sapiens
gacaaggaggctccc

SEQ ID NO: 737593 - DNA, 15 bp, Homo sapiens
acaaggaggctcccg

SEQ ID NO: 737594 - DNA, 15 bp, Homo sapiens
caaggaggctcccgg

SEQ ID NO: 737595 - DNA, 15 bp, Homo sapiens
aaggaggctcccggg

SEQ ID NO: 737596 - DNA, 15 bp, Homo sapiens
aggaggctcccgggc

SEQ ID NO: 737597 - DNA, 15 bp, Homo sapiens
ggaggctcccgggcg

SEQ ID NO: 737598 - DNA, 15 bp, Homo sapiens
gaggctcccgggcgc

SEQ ID NO: 737599 - DNA, 15 bp, Homo sapiens
aggctcccgggcgcg

SEQ ID NO: 737600 - DNA, 15 bp, Homo sapiens
ggctcccgggcgcga

SEQ ID NO: 737601 - DNA, 15 bp, Homo sapiens
gctcccgggcgcgac

SEQ ID NO: 737602 - DNA, 15 bp, Homo sapiens
ctcccgggcgcgacg

SEQ ID NO: 737603 - DNA, 15 bp, Homo sapiens
tcccgggcgcgacga

SEQ ID NO: 737604 - DNA, 15 bp, Homo sapiens
cccgggcgcgacgag

SEQ ID NO: 737605 - DNA, 15 bp, Homo sapiens
ccgggcgcgacgagg

SEQ ID NO: 737606 - DNA, 15 bp, Homo sapiens
cgggcgcgacgagga

SEQ ID NO: 737607 - DNA, 15 bp, Homo sapiens
gggcgcgacgaggag

SEQ ID NO: 737608 - DNA, 15 bp, Homo sapiens
ggcgcgacgaggaga

SEQ ID NO: 737609 - DNA, 15 bp, Homo sapiens
gcgcgacgaggagag

SEQ ID NO: 737610 - DNA, 15 bp, Homo sapiens
cgcgacgaggagagt

SEQ ID NO: 737611 - DNA, 15 bp, Homo sapiens
gcgacgaggagagtc

SEQ ID NO: 737612 - DNA, 15 bp, Homo sapiens
cgacgaggagagtct

SEQ ID NO: 737613 - DNA, 15 bp, Homo sapiens
gacgaggagagtctc

SEQ ID NO: 737614 - DNA, 15 bp, Homo sapiens
acgaggagagtctcg

SEQ ID NO: 737615 - DNA, 15 bp, Homo sapiens
cgaggagagtctcgg

SEQ ID NO: 737616 - DNA, 15 bp, Homo sapiens
gaggagagtctcgga

SEQ ID NO: 737617 - DNA, 15 bp, Homo sapiens
aggagagtctcggag

SEQ ID NO: 737618 - DNA, 15 bp, Homo sapiens
ggagagtctcggagg

SEQ ID NO: 737619 - DNA, 15 bp, Homo sapiens
gagagtctcggagga

SEQ ID NO: 737620 - DNA, 15 bp, Homo sapiens
agagtctcggaggag

SEQ ID NO: 737621 - DNA, 15 bp, Homo sapiens
gagtctcggaggagg

SEQ ID NO: 737622 - DNA, 15 bp, Homo sapiens
agtctcggaggagga

SEQ ID NO: 737623 - DNA, 15 bp, Homo sapiens
gtctcggaggaggag

SEQ ID NO: 737624 - DNA, 15 bp, Homo sapiens
tctcggaggaggagg

SEQ ID NO: 737625 - DNA, 15 bp, Homo sapiens
ctcggaggaggaggc

SEQ ID NO: 737626 - DNA, 15 bp, Homo sapiens
tcggaggaggaggcg

SEQ ID NO: 737627 - DNA, 15 bp, Homo sapiens
cggaggaggaggcgc

SEQ ID NO: 737628 - DNA, 15 bp, Homo sapiens
ggaggaggaggcgcc

SEQ ID NO: 737629 - DNA, 15 bp, Homo sapiens
gaggaggaggcgccg

SEQ ID NO: 737630 - DNA, 15 bp, Homo sapiens
aggaggaggcgccga

SEQ ID NO: 737631 - DNA, 15 bp, Homo sapiens
ggaggaggcgccgag

SEQ ID NO: 737632 - DNA, 15 bp, Homo sapiens
gaggaggcgccgaga

SEQ ID NO: 737633 - DNA, 15 bp, Homo sapiens
aggaggcgccgagag

SEQ ID NO: 737634 - DNA, 15 bp, Homo sapiens
ggaggcgccgagagg

SEQ ID NO: 737635 - DNA, 15 bp, Homo sapiens
gaggcgccgagagga

SEQ ID NO: 737636 - DNA, 15 bp, Homo sapiens
aggcgccgagaggac

SEQ ID NO: 737637 - DNA, 15 bp, Homo sapiens
ggcgccgagaggaca

SEQ ID NO: 737638 - DNA, 15 bp, Homo sapiens
gcgccgagaggacac

SEQ ID NO: 737639 - DNA, 15 bp, Homo sapiens
cgccgagaggacacc

SEQ ID NO: 737640 - DNA, 15 bp, Homo sapiens
gccgagaggacaccg

SEQ ID NO: 737641 - DNA, 15 bp, Homo sapiens
ccgagaggacaccgg

SEQ ID NO: 737642 - DNA, 15 bp, Homo sapiens
cgagaggacaccggg

SEQ ID NO: 737643 - DNA, 15 bp, Homo sapiens
gagaggacaccgggg

SEQ ID NO: 737644 - DNA, 15 bp, Homo sapiens
agaggacaccggggc

SEQ ID NO: 737645 - DNA, 15 bp, Homo sapiens
gaggacaccggggcc

SEQ ID NO: 737646 - DNA, 15 bp, Homo sapiens
aggacaccggggcct

SEQ ID NO: 737647 - DNA, 15 bp, Homo sapiens
ggacaccggggcctc

SEQ ID NO: 737648 - DNA, 15 bp, Homo sapiens
gacaccggggcctcc

SEQ ID NO: 737649 - DNA, 15 bp, Homo sapiens
acaccggggcctcct

SEQ ID NO: 737650 - DNA, 15 bp, Homo sapiens
caccggggcctcctg

SEQ ID NO: 737651 - DNA, 15 bp, Homo sapiens
accggggcctcctgc

SEQ ID NO: 737652 - DNA, 15 bp, Homo sapiens
ccggggcctcctgcc

SEQ ID NO: 737653 - DNA, 15 bp, Homo sapiens
cggggcctcctgccg

SEQ ID NO: 737654 - DNA, 15 bp, Homo sapiens
ggggcctcctgccgc

SEQ ID NO: 737655 - DNA, 15 bp, Homo sapiens
gggcctcctgccgcc

SEQ ID NO: 737656 - DNA, 15 bp, Homo sapiens
ggcctcctgccgccg

SEQ ID NO: 737657 - DNA, 15 bp, Homo sapiens
gcctcctgccgccgc

SEQ ID NO: 737658 - DNA, 15 bp, Homo sapiens
cctcctgccgccgca

SEQ ID NO: 737659 - DNA, 15 bp, Homo sapiens
ctcctgccgccgcag

SEQ ID NO: 737660 - DNA, 15 bp, Homo sapiens
tcctgccgccgcagc

SEQ ID NO: 737661 - DNA, 15 bp, Homo sapiens
cctgccgccgcagct

SEQ ID NO: 737662 - DNA, 15 bp, Homo sapiens
ctgccgccgcagctg

SEQ ID NO: 737663 - DNA, 15 bp, Homo sapiens
tgccgccgcagctgg

SEQ ID NO: 737664 - DNA, 15 bp, Homo sapiens
gccgccgcagctggg

SEQ ID NO: 737665 - DNA, 15 bp, Homo sapiens
ccgccgcagctgggt

SEQ ID NO: 737666 - DNA, 15 bp, Homo sapiens
cgccgcagctgggtc

SEQ ID NO: 737667 - DNA, 15 bp, Homo sapiens
gccgcagctgggtcg

SEQ ID NO: 737668 - DNA, 15 bp, Homo sapiens
ccgcagctgggtcga

SEQ ID NO: 737669 - DNA, 15 bp, Homo sapiens
cgcagctgggtcgag

SEQ ID NO: 737670 - DNA, 15 bp, Homo sapiens
gcagctgggtcgagg

SEQ ID NO: 737671 - DNA, 15 bp, Homo sapiens
cagctgggtcgaggc

SEQ ID NO: 737672 - DNA, 15 bp, Homo sapiens
agctgggtcgaggcg

SEQ ID NO: 737673 - DNA, 15 bp, Homo sapiens
gctgggtcgaggcga

SEQ ID NO: 737674 - DNA, 15 bp, Homo sapiens
ctgggtcgaggcgag

SEQ ID NO: 737675 - DNA, 15 bp, Homo sapiens
tgggtcgaggcgagc

SEQ ID NO: 737676 - DNA, 15 bp, Homo sapiens
gggtcgaggcgagca

SEQ ID NO: 737677 - DNA, 15 bp, Homo sapiens
ggtcgaggcgagcag

SEQ ID NO: 737678 - DNA, 15 bp, Homo sapiens
gtcgaggcgagcagc

SEQ ID NO: 737679 - DNA, 15 bp, Homo sapiens
tcgaggcgagcagcc

SEQ ID NO: 737680 - DNA, 15 bp, Homo sapiens
cgaggcgagcagccc

SEQ ID NO: 737681 - DNA, 15 bp, Homo sapiens
gaggcgagcagccca

SEQ ID NO: 737682 - DNA, 15 bp, Homo sapiens
aggcgagcagcccat

SEQ ID NO: 737683 - DNA, 15 bp, Homo sapiens
ggcgagcagcccatg

SEQ ID NO: 737684 - DNA, 15 bp, Homo sapiens
gcgagcagcccatgc

SEQ ID NO: 737685 - DNA, 15 bp, Homo sapiens
cgagcagcccatgcg

SEQ ID NO: 737686 - DNA, 15 bp, Homo sapiens
gagcagcccatgcgg

SEQ ID NO: 737687 - DNA, 15 bp, Homo sapiens
agcagcccatgcggg

SEQ ID NO: 737688 - DNA, 15 bp, Homo sapiens
gcagcccatgcgggg

SEQ ID NO: 737689 - DNA, 15 bp, Homo sapiens
cagcccatgcgggga

SEQ ID NO: 737690 - DNA, 15 bp, Homo sapiens
agcccatgcggggag

SEQ ID NO: 737691 - DNA, 15 bp, Homo sapiens
gcccatgcggggagc

SEQ ID NO: 737692 - DNA, 15 bp, Homo sapiens
cccatgcggggagcc

SEQ ID NO: 737693 - DNA, 15 bp, Homo sapiens
ccatgcggggagcct

SEQ ID NO: 737694 - DNA, 15 bp, Homo sapiens
catgcggggagcctc

SEQ ID NO: 737695 - DNA, 15 bp, Homo sapiens
atgcggggagcctcg

SEQ ID NO: 737696 - DNA, 15 bp, Homo sapiens
tgcggggagcctcgg

SEQ ID NO: 737697 - DNA, 15 bp, Homo sapiens
gcggggagcctcggc

SEQ ID NO: 737698 - DNA, 15 bp, Homo sapiens
cggggagcctcggcg

SEQ ID NO: 737699 - DNA, 15 bp, Homo sapiens
ggggagcctcggcgg

SEQ ID NO: 737700 - DNA, 15 bp, Homo sapiens
gggagcctcggcggc

SEQ ID NO: 737701 - DNA, 15 bp, Homo sapiens
ggagcctcggcggcc

SEQ ID NO: 737702 - DNA, 15 bp, Homo sapiens
gagcctcggcggcca

SEQ ID NO: 737703 - DNA, 15 bp, Homo sapiens
agcctcggcggccag

SEQ ID NO: 737704 - DNA, 15 bp, Homo sapiens
gcctcggcggccagc

SEQ ID NO: 737705 - DNA, 15 bp, Homo sapiens
cctcggcggccagcc

SEQ ID NO: 737706 - DNA, 15 bp, Homo sapiens
ctcggcggccagccg

SEQ ID NO: 737707 - DNA, 15 bp, Homo sapiens
tcggcggccagccgc

SEQ ID NO: 737708 - DNA, 15 bp, Homo sapiens
cggcggccagccgcg

SEQ ID NO: 737709 - DNA, 15 bp, Homo sapiens
ggcggccagccgcgg

SEQ ID NO: 737710 - DNA, 15 bp, Homo sapiens
gcggccagccgcggc

SEQ ID NO: 737711 - DNA, 15 bp, Homo sapiens
cggccagccgcggcc

SEQ ID NO: 737712 - DNA, 15 bp, Homo sapiens
ggccagccgcggcca

SEQ ID NO: 737713 - DNA, 15 bp, Homo sapiens
gccagccgcggccag

SEQ ID NO: 737714 - DNA, 15 bp, Homo sapiens
ccagccgcggccagg

SEQ ID NO: 737715 - DNA, 15 bp, Homo sapiens
cagccgcggccaggg

SEQ ID NO: 737716 - DNA, 15 bp, Homo sapiens
agccgcggccagggg

SEQ ID NO: 737717 - DNA, 15 bp, Homo sapiens
gccgcggccagggga

SEQ ID NO: 737718 - DNA, 15 bp, Homo sapiens
ccgcggccaggggaa

SEQ ID NO: 737719 - DNA, 15 bp, Homo sapiens
cgcggccaggggaag

SEQ ID NO: 737720 - DNA, 15 bp, Homo sapiens
gcggccaggggaagg

SEQ ID NO: 737721 - DNA, 15 bp, Homo sapiens
cggccaggggaaggg

SEQ ID NO: 737722 - DNA, 15 bp, Homo sapiens
ggccaggggaaggga

SEQ ID NO: 737723 - DNA, 15 bp, Homo sapiens
gccaggggaagggac

SEQ ID NO: 737724 - DNA, 15 bp, Homo sapiens
ccaggggaagggaca

SEQ ID NO: 737725 - DNA, 15 bp, Homo sapiens
caggggaagggacat

SEQ ID NO: 737726 - DNA, 15 bp, Homo sapiens
aggggaagggacatc

SEQ ID NO: 737727 - DNA, 15 bp, Homo sapiens
ggggaagggacatcg

SEQ ID NO: 737728 - DNA, 15 bp, Homo sapiens
gggaagggacatcgg

SEQ ID NO: 737729 - DNA, 15 bp, Homo sapiens
ggaagggacatcggc

SEQ ID NO: 737730 - DNA, 15 bp, Homo sapiens
gaagggacatcggcg

SEQ ID NO: 737731 - DNA, 15 bp, Homo sapiens
aagggacatcggcgg

SEQ ID NO: 737732 - DNA, 15 bp, Homo sapiens
agggacatcggcggc

SEQ ID NO: 737733 - DNA, 15 bp, Homo sapiens
gggacatcggcggcc

SEQ ID NO: 737734 - DNA, 15 bp, Homo sapiens
ggacatcggcggccc

SEQ ID NO: 737735 - DNA, 15 bp, Homo sapiens
gacatcggcggcccc

SEQ ID NO: 737736 - DNA, 15 bp, Homo sapiens
acatcggcggcccct

SEQ ID NO: 737737 - DNA, 15 bp, Homo sapiens
catcggcggcccctg

SEQ ID NO: 737738 - DNA, 15 bp, Homo sapiens
atcggcggcccctgc

SEQ ID NO: 737739 - DNA, 15 bp, Homo sapiens
tcggcggcccctgca

SEQ ID NO: 737740 - DNA, 15 bp, Homo sapiens
cggcggcccctgcac

SEQ ID NO: 737741 - DNA, 15 bp, Homo sapiens
ggcggcccctgcact

SEQ ID NO: 737742 - DNA, 15 bp, Homo sapiens
gcggcccctgcacta

SEQ ID NO: 737743 - DNA, 15 bp, Homo sapiens
cggcccctgcactag

SEQ ID NO: 737744 - DNA, 15 bp, Homo sapiens
ggcccctgcactagc

SEQ ID NO: 737745 - DNA, 15 bp, Homo sapiens
gcccctgcactagca

SEQ ID NO: 737746 - DNA, 15 bp, Homo sapiens
cccctgcactagcaa

SEQ ID NO: 737747 - DNA, 15 bp, Homo sapiens
ccctgcactagcaag

SEQ ID NO: 737748 - DNA, 15 bp, Homo sapiens
cctgcactagcaagc

SEQ ID NO: 737749 - DNA, 15 bp, Homo sapiens
ctgcactagcaagca

SEQ ID NO: 737750 - DNA, 15 bp, Homo sapiens
tgcactagcaagcag

SEQ ID NO: 737751 - DNA, 15 bp, Homo sapiens
gcactagcaagcagc

SEQ ID NO: 737752 - DNA, 15 bp, Homo sapiens
cactagcaagcagct

SEQ ID NO: 737753 - DNA, 15 bp, Homo sapiens
actagcaagcagctt

SEQ ID NO: 737754 - DNA, 15 bp, Homo sapiens
ctagcaagcagcttg

SEQ ID NO: 737755 - DNA, 15 bp, Homo sapiens
tagcaagcagcttgt

SEQ ID NO: 737756 - DNA, 15 bp, Homo sapiens
agcaagcagcttgtg

SEQ ID NO: 737757 - DNA, 15 bp, Homo sapiens
gcaagcagcttgtgc

SEQ ID NO: 737758 - DNA, 15 bp, Homo sapiens
caagcagcttgtgcc

SEQ ID NO: 737759 - DNA, 15 bp, Homo sapiens
aagcagcttgtgccc

SEQ ID NO: 737760 - DNA, 15 bp, Homo sapiens
agcagcttgtgcccg

SEQ ID NO: 737761 - DNA, 15 bp, Homo sapiens
gcagcttgtgcccgg

SEQ ID NO: 737762 - DNA, 15 bp, Homo sapiens
cagcttgtgcccggg

SEQ ID NO: 737763 - DNA, 15 bp, Homo sapiens
agcttgtgcccgggg

SEQ ID NO: 737764 - DNA, 15 bp, Homo sapiens
gcttgtgcccggggg

SEQ ID NO: 737765 - DNA, 15 bp, Homo sapiens
cttgtgcccgggggg

SEQ ID NO: 737766 - DNA, 15 bp, Homo sapiens
ttgtgcccggggggg

SEQ ID NO: 737767 - DNA, 15 bp, Homo sapiens
tgtgcccgggggggg

SEQ ID NO: 737768 - DNA, 15 bp, Homo sapiens
gtgcccggggggggc

SEQ ID NO: 737769 - DNA, 15 bp, Homo sapiens
tgcccggggggggcg

SEQ ID NO: 737770 - DNA, 15 bp, Homo sapiens
gcccggggggggcga

SEQ ID NO: 737771 - DNA, 15 bp, Homo sapiens
cccggggggggcgag

SEQ ID NO: 737772 - DNA, 15 bp, Homo sapiens
ccggggggggcgaga

SEQ ID NO: 737773 - DNA, 15 bp, Homo sapiens
cggggggggcgagaa

SEQ ID NO: 737774 - DNA, 15 bp, Homo sapiens
ggggggggcgagaac

SEQ ID NO: 737775 - DNA, 15 bp, Homo sapiens
gggggggcgagaacg

SEQ ID NO: 737776 - DNA, 15 bp, Homo sapiens
ggggggcgagaacgc

SEQ ID NO: 737777 - DNA, 15 bp, Homo sapiens
gggggcgagaacgcg

SEQ ID NO: 737778 - DNA, 15 bp, Homo sapiens
ggggcgagaacgcgc

SEQ ID NO: 737779 - DNA, 15 bp, Homo sapiens
gggcgagaacgcgcg

SEQ ID NO: 737780 - DNA, 15 bp, Homo sapiens
ggcgagaacgcgcga

SEQ ID NO: 737781 - DNA, 15 bp, Homo sapiens
gcgagaacgcgcgac

SEQ ID NO: 737782 - DNA, 15 bp, Homo sapiens
cgagaacgcgcgacc

SEQ ID NO: 737783 - DNA, 15 bp, Homo sapiens
gagaacgcgcgaccc

SEQ ID NO: 737784 - DNA, 15 bp, Homo sapiens
agaacgcgcgacccg

SEQ ID NO: 737785 - DNA, 15 bp, Homo sapiens
gaacgcgcgacccgt

SEQ ID NO: 737786 - DNA, 15 bp, Homo sapiens
aacgcgcgacccgtc

SEQ ID NO: 737787 - DNA, 15 bp, Homo sapiens
acgcgcgacccgtct

SEQ ID NO: 737788 - DNA, 15 bp, Homo sapiens
cgcgcgacccgtctg

SEQ ID NO: 737789 - DNA, 15 bp, Homo sapiens
gcgcgacccgtctgg

SEQ ID NO: 737790 - DNA, 15 bp, Homo sapiens
cgcgacccgtctggg

SEQ ID NO: 737791 - DNA, 15 bp, Homo sapiens
gcgacccgtctgggg

SEQ ID NO: 737792 - DNA, 15 bp, Homo sapiens
cgacccgtctggggc

SEQ ID NO: 737793 - DNA, 15 bp, Homo sapiens
gacccgtctggggcc

SEQ ID NO: 737794 - DNA, 15 bp, Homo sapiens
acccgtctggggccc

SEQ ID NO: 737795 - DNA, 15 bp, Homo sapiens
cccgtctggggccct

SEQ ID NO: 737796 - DNA, 15 bp, Homo sapiens
ccgtctggggccctc

SEQ ID NO: 737797 - DNA, 15 bp, Homo sapiens
cgtctggggccctcc

SEQ ID NO: 737798 - DNA, 15 bp, Homo sapiens
gtctggggccctccg

SEQ ID NO: 737799 - DNA, 15 bp, Homo sapiens
tctggggccctccgc

SEQ ID NO: 737800 - DNA, 15 bp, Homo sapiens
ctggggccctccgcc

SEQ ID NO: 737801 - DNA, 15 bp, Homo sapiens
tggggccctccgccg

SEQ ID NO: 737802 - DNA, 15 bp, Homo sapiens
ggggccctccgccgc

SEQ ID NO: 737803 - DNA, 15 bp, Homo sapiens
gggccctccgccgcc

SEQ ID NO: 737804 - DNA, 15 bp, Homo sapiens
ggccctccgccgccg

SEQ ID NO: 737805 - DNA, 15 bp, Homo sapiens
gccctccgccgccgc

SEQ ID NO: 737806 - DNA, 15 bp, Homo sapiens
ccctccgccgccgcc

SEQ ID NO: 737807 - DNA, 15 bp, Homo sapiens
cctccgccgccgccg

SEQ ID NO: 737808 - DNA, 15 bp, Homo sapiens
ctccgccgccgccgc

SEQ ID NO: 737809 - DNA, 15 bp, Homo sapiens
tccgccgccgccgcg

SEQ ID NO: 737810 - DNA, 15 bp, Homo sapiens
ccgccgccgccgcgc

SEQ ID NO: 737811 - DNA, 15 bp, Homo sapiens
cgccgccgccgcgcc

SEQ ID NO: 737812 - DNA, 15 bp, Homo sapiens
gccgccgccgcgcca

SEQ ID NO: 737813 - DNA, 15 bp, Homo sapiens
ccgccgccgcgccac

SEQ ID NO: 737814 - DNA, 15 bp, Homo sapiens
cgccgccgcgccacc

SEQ ID NO: 737815 - DNA, 15 bp, Homo sapiens
gccgccgcgccaccc

SEQ ID NO: 737816 - DNA, 15 bp, Homo sapiens
ccgccgcgccaccct

SEQ ID NO: 737817 - DNA, 15 bp, Homo sapiens
cgccgcgccaccctc

SEQ ID NO: 737818 - DNA, 15 bp, Homo sapiens
gccgcgccaccctcc

SEQ ID NO: 737819 - DNA, 15 bp, Homo sapiens
ccgcgccaccctccc

SEQ ID NO: 737820 - DNA, 15 bp, Homo sapiens
cgcgccaccctcccc

SEQ ID NO: 737821 - DNA, 15 bp, Homo sapiens
gcgccaccctccccc

SEQ ID NO: 737822 - DNA, 15 bp, Homo sapiens
cgccaccctcccccg

SEQ ID NO: 737823 - DNA, 15 bp, Homo sapiens
gccaccctcccccgc

SEQ ID NO: 737824 - DNA, 15 bp, Homo sapiens
ccaccctcccccgcg

SEQ ID NO: 737825 - DNA, 15 bp, Homo sapiens
caccctcccccgcgc

SEQ ID NO: 737826 - DNA, 15 bp, Homo sapiens
accctcccccgcgct

SEQ ID NO: 737827 - DNA, 15 bp, Homo sapiens
ccctcccccgcgctg

SEQ ID NO: 737828 - DNA, 15 bp, Homo sapiens
cctcccccgcgctgt

SEQ ID NO: 737829 - DNA, 15 bp, Homo sapiens
ctcccccgcgctgtc

SEQ ID NO: 737830 - DNA, 15 bp, Homo sapiens
tcccccgcgctgtca

SEQ ID NO: 737831 - DNA, 15 bp, Homo sapiens
cccccgcgctgtcag

SEQ ID NO: 737832 - DNA, 15 bp, Homo sapiens
ccccgcgctgtcagc

SEQ ID NO: 737833 - DNA, 15 bp, Homo sapiens
cccgcgctgtcagcc

SEQ ID NO: 737834 - DNA, 15 bp, Homo sapiens
ccgcgctgtcagccc

SEQ ID NO: 737835 - DNA, 15 bp, Homo sapiens
cgcgctgtcagcccc

SEQ ID NO: 737836 - DNA, 15 bp, Homo sapiens
gcgctgtcagccccg

SEQ ID NO: 737837 - DNA, 15 bp, Homo sapiens
cgctgtcagccccgc

SEQ ID NO: 737838 - DNA, 15 bp, Homo sapiens
gctgtcagccccgcc

SEQ ID NO: 737839 - DNA, 15 bp, Homo sapiens
ctgtcagccccgccg

SEQ ID NO: 737840 - DNA, 15 bp, Homo sapiens
tgtcagccccgccgg

SEQ ID NO: 737841 - DNA, 15 bp, Homo sapiens
gtcagccccgccggg

SEQ ID NO: 737842 - DNA, 15 bp, Homo sapiens
tcagccccgccgggc

SEQ ID NO: 737843 - DNA, 15 bp, Homo sapiens
cagccccgccgggct

SEQ ID NO: 737844 - DNA, 15 bp, Homo sapiens
agccccgccgggctc

SEQ ID NO: 737845 - DNA, 15 bp, Homo sapiens
gccccgccgggctca

SEQ ID NO: 737846 - DNA, 15 bp, Homo sapiens
ccccgccgggctcag

SEQ ID NO: 737847 - DNA, 15 bp, Homo sapiens
cccgccgggctcagc

SEQ ID NO: 737848 - DNA, 15 bp, Homo sapiens
ccgccgggctcagcc

SEQ ID NO: 737849 - DNA, 15 bp, Homo sapiens
cgccgggctcagccg

SEQ ID NO: 737850 - DNA, 15 bp, Homo sapiens
gccgggctcagccgc

SEQ ID NO: 737851 - DNA, 15 bp, Homo sapiens
ccgggctcagccgcc

SEQ ID NO: 737852 - DNA, 15 bp, Homo sapiens
cgggctcagccgccg

SEQ ID NO: 737853 - DNA, 15 bp, Homo sapiens
gggctcagccgccgc

SEQ ID NO: 737854 - DNA, 15 bp, Homo sapiens
ggctcagccgccgcc

SEQ ID NO: 737855 - DNA, 15 bp, Homo sapiens
gctcagccgccgccg

SEQ ID NO: 737856 - DNA, 15 bp, Homo sapiens
ctcagccgccgccgc

SEQ ID NO: 737857 - DNA, 15 bp, Homo sapiens
tcagccgccgccgca

SEQ ID NO: 737858 - DNA, 15 bp, Homo sapiens
cagccgccgccgcag

SEQ ID NO: 737859 - DNA, 15 bp, Homo sapiens
agccgccgccgcagc

SEQ ID NO: 737860 - DNA, 15 bp, Homo sapiens
gccgccgccgcagca

SEQ ID NO: 737861 - DNA, 15 bp, Homo sapiens
ccgccgccgcagcat

SEQ ID NO: 737862 - DNA, 15 bp, Homo sapiens
cgccgccgcagcatc

SEQ ID NO: 737863 - DNA, 15 bp, Homo sapiens
gccgccgcagcatct

SEQ ID NO: 737864 - DNA, 15 bp, Homo sapiens
ccgccgcagcatctt

SEQ ID NO: 737865 - DNA, 15 bp, Homo sapiens
cgccgcagcatcttc

SEQ ID NO: 737866 - DNA, 15 bp, Homo sapiens
gccgcagcatcttct

SEQ ID NO: 737867 - DNA, 15 bp, Homo sapiens
ccgcagcatcttctg

SEQ ID NO: 737868 - DNA, 15 bp, Homo sapiens
cgcagcatcttctgc

SEQ ID NO: 737869 - DNA, 15 bp, Homo sapiens
gcagcatcttctgcc

SEQ ID NO: 737870 - DNA, 15 bp, Homo sapiens
cagcatcttctgccc

SEQ ID NO: 737871 - DNA, 15 bp, Homo sapiens
agcatcttctgcccc

SEQ ID NO: 737872 - DNA, 15 bp, Homo sapiens
gcatcttctgcccct

SEQ ID NO: 737873 - DNA, 15 bp, Homo sapiens
catcttctgcccctg

SEQ ID NO: 737874 - DNA, 15 bp, Homo sapiens
atcttctgcccctgc

SEQ ID NO: 737875 - DNA, 15 bp, Homo sapiens
tcttctgcccctgcg

SEQ ID NO: 737876 - DNA, 15 bp, Homo sapiens
cttctgcccctgcgc

SEQ ID NO: 737877 - DNA, 15 bp, Homo sapiens
ttctgcccctgcgcc

SEQ ID NO: 737878 - DNA, 15 bp, Homo sapiens
tctgcccctgcgccc

SEQ ID NO: 737879 - DNA, 15 bp, Homo sapiens
ctgcccctgcgcccg

SEQ ID NO: 737880 - DNA, 15 bp, Homo sapiens
tgcccctgcgcccgc

SEQ ID NO: 737881 - DNA, 15 bp, Homo sapiens
gcccctgcgcccgcg

SEQ ID NO: 737882 - DNA, 15 bp, Homo sapiens
cccctgcgcccgcgc

SEQ ID NO: 737883 - DNA, 15 bp, Homo sapiens
ccctgcgcccgcgcc

SEQ ID NO: 737884 - DNA, 15 bp, Homo sapiens
cctgcgcccgcgcca

SEQ ID NO: 737885 - DNA, 15 bp, Homo sapiens
ctgcgcccgcgccag

SEQ ID NO: 737886 - DNA, 15 bp, Homo sapiens
tgcgcccgcgccagc

SEQ ID NO: 737887 - DNA, 15 bp, Homo sapiens
gcgcccgcgccagcc

SEQ ID NO: 737888 - DNA, 15 bp, Homo sapiens
cgcccgcgccagcct

SEQ ID NO: 737889 - DNA, 15 bp, Homo sapiens
gcccgcgccagcctc

SEQ ID NO: 737890 - DNA, 15 bp, Homo sapiens
cccgcgccagcctcg

SEQ ID NO: 737891 - DNA, 15 bp, Homo sapiens
ccgcgccagcctcga

SEQ ID NO: 737892 - DNA, 15 bp, Homo sapiens
cgcgccagcctcgag

SEQ ID NO: 737893 - DNA, 15 bp, Homo sapiens
gcgccagcctcgagg

SEQ ID NO: 737894 - DNA, 15 bp, Homo sapiens
cgccagcctcgagga

SEQ ID NO: 737895 - DNA, 15 bp, Homo sapiens
gccagcctcgaggaa

SEQ ID NO: 737896 - DNA, 15 bp, Homo sapiens
ccagcctcgaggaag

SEQ ID NO: 737897 - DNA, 15 bp, Homo sapiens
cagcctcgaggaagt

SEQ ID NO: 737898 - DNA, 15 bp, Homo sapiens
agcctcgaggaagtc

SEQ ID NO: 737899 - DNA, 15 bp, Homo sapiens
gcctcgaggaagtcc

SEQ ID NO: 737900 - DNA, 15 bp, Homo sapiens
cctcgaggaagtccc

SEQ ID NO: 737901 - DNA, 15 bp, Homo sapiens
ctcgaggaagtcccc

SEQ ID NO: 737902 - DNA, 15 bp, Homo sapiens
tcgaggaagtccccg

SEQ ID NO: 737903 - DNA, 15 bp, Homo sapiens
cgaggaagtccccgc

SEQ ID NO: 737904 - DNA, 15 bp, Homo sapiens
gaggaagtccccgcc

SEQ ID NO: 737905 - DNA, 15 bp, Homo sapiens
aggaagtccccgccg

SEQ ID NO: 737906 - DNA, 15 bp, Homo sapiens
ggaagtccccgccga

SEQ ID NO: 737907 - DNA, 15 bp, Homo sapiens
gaagtccccgccgag

SEQ ID NO: 737908 - DNA, 15 bp, Homo sapiens
aagtccccgccgagg

SEQ ID NO: 737909 - DNA, 15 bp, Homo sapiens
agtccccgccgagga

SEQ ID NO: 737910 - DNA, 15 bp, Homo sapiens
gtccccgccgaggac

SEQ ID NO: 737911 - DNA, 15 bp, Homo sapiens
tccccgccgaggacc

SEQ ID NO: 737912 - DNA, 15 bp, Homo sapiens
ccccgccgaggacct

SEQ ID NO: 737913 - DNA, 15 bp, Homo sapiens
cccgccgaggacctg

SEQ ID NO: 737914 - DNA, 15 bp, Homo sapiens
ccgccgaggacctgg

SEQ ID NO: 737915 - DNA, 15 bp, Homo sapiens
cgccgaggacctggg

SEQ ID NO: 737916 - DNA, 15 bp, Homo sapiens
gccgaggacctgggc

SEQ ID NO: 737917 - DNA, 15 bp, Homo sapiens
ccgaggacctgggcc

SEQ ID NO: 737918 - DNA, 15 bp, Homo sapiens
cgaggacctgggccc

SEQ ID NO: 737919 - DNA, 15 bp, Homo sapiens
gaggacctgggcccc

SEQ ID NO: 737920 - DNA, 15 bp, Homo sapiens
aggacctgggccccc

SEQ ID NO: 737921 - DNA, 15 bp, Homo sapiens
ggacctgggccccca

SEQ ID NO: 737922 - DNA, 15 bp, Homo sapiens
gacctgggcccccag

SEQ ID NO: 737923 - DNA, 15 bp, Homo sapiens
acctgggcccccagg

SEQ ID NO: 737924 - DNA, 15 bp, Homo sapiens
cctgggcccccagga

SEQ ID NO: 737925 - DNA, 15 bp, Homo sapiens
ctgggcccccaggag

SEQ ID NO: 737926 - DNA, 15 bp, Homo sapiens
tgggcccccaggagc

SEQ ID NO: 737927 - DNA, 15 bp, Homo sapiens
gggcccccaggagcg

SEQ ID NO: 737928 - DNA, 15 bp, Homo sapiens
ggcccccaggagcgc

SEQ ID NO: 737929 - DNA, 15 bp, Homo sapiens
gcccccaggagcgca

SEQ ID NO: 737930 - DNA, 15 bp, Homo sapiens
cccccaggagcgcag

SEQ ID NO: 737931 - DNA, 15 bp, Homo sapiens
ccccaggagcgcagg

SEQ ID NO: 737932 - DNA, 15 bp, Homo sapiens
cccaggagcgcaggg

SEQ ID NO: 737933 - DNA, 15 bp, Homo sapiens
ccaggagcgcagggg

SEQ ID NO: 737934 - DNA, 15 bp, Homo sapiens
caggagcgcaggggg

SEQ ID NO: 737935 - DNA, 15 bp, Homo sapiens
aggagcgcaggggga

SEQ ID NO: 737936 - DNA, 15 bp, Homo sapiens
ggagcgcagggggaa

SEQ ID NO: 737937 - DNA, 15 bp, Homo sapiens
gagcgcagggggaaa

SEQ ID NO: 737938 - DNA, 15 bp, Homo sapiens
agcgcagggggaaag

SEQ ID NO: 737939 - DNA, 15 bp, Homo sapiens
gcgcagggggaaaga

SEQ ID NO: 737940 - DNA, 15 bp, Homo sapiens
cgcagggggaaagac

SEQ ID NO: 737941 - DNA, 15 bp, Homo sapiens
gcagggggaaagacc

SEQ ID NO: 737942 - DNA, 15 bp, Homo sapiens
cagggggaaagacca

SEQ ID NO: 737943 - DNA, 15 bp, Homo sapiens
tccagccggacgccc

SEQ ID NO: 737944 - DNA, 15 bp, Homo sapiens
ccagccggacgcccc

SEQ ID NO: 737945 - DNA, 15 bp, Homo sapiens
cagccggacgccccc

SEQ ID NO: 737946 - DNA, 15 bp, Homo sapiens
agccggacgccccca

SEQ ID NO: 737947 - DNA, 15 bp, Homo sapiens
gccggacgcccccag

SEQ ID NO: 737948 - DNA, 15 bp, Homo sapiens
ccggacgcccccaga

SEQ ID NO: 737949 - DNA, 15 bp, Homo sapiens
cggacgcccccagac

SEQ ID NO: 737950 - DNA, 15 bp, Homo sapiens
ggacgcccccagacc

SEQ ID NO: 737951 - DNA, 15 bp, Homo sapiens
gacgcccccagacct

SEQ ID NO: 737952 - DNA, 15 bp, Homo sapiens
acgcccccagacctc

SEQ ID NO: 737953 - DNA, 15 bp, Homo sapiens
cgcccccagacctct

SEQ ID NO: 737954 - DNA, 15 bp, Homo sapiens
gcccccagacctctg

SEQ ID NO: 737955 - DNA, 15 bp, Homo sapiens
cccccagacctctga

SEQ ID NO: 737956 - DNA, 15 bp, Homo sapiens
ccccagacctctgag

SEQ ID NO: 737957 - DNA, 15 bp, Homo sapiens
cccagacctctgagg

SEQ ID NO: 737958 - DNA, 15 bp, Homo sapiens
ccagacctctgaggt

SEQ ID NO: 737959 - DNA, 15 bp, Homo sapiens
cagacctctgaggtt

SEQ ID NO: 737960 - DNA, 15 bp, Homo sapiens
agacctctgaggttc

SEQ ID NO: 737961 - DNA, 15 bp, Homo sapiens
gacctctgaggttcg

SEQ ID NO: 737962 - DNA, 15 bp, Homo sapiens
acctctgaggttcga

SEQ ID NO: 737963 - DNA, 15 bp, Homo sapiens
cctctgaggttcgag

SEQ ID NO: 737964 - DNA, 15 bp, Homo sapiens
ctctgaggttcgagg

SEQ ID NO: 737965 - DNA, 15 bp, Homo sapiens
tctgaggttcgagga

SEQ ID NO: 737966 - DNA, 15 bp, Homo sapiens
ctgaggttcgaggag

SEQ ID NO: 737967 - DNA, 15 bp, Homo sapiens
tgaggttcgaggagg

SEQ ID NO: 737968 - DNA, 15 bp, Homo sapiens
gaggttcgaggaggt

SEQ ID NO: 737969 - DNA, 15 bp, Homo sapiens
aggttcgaggaggtg

SEQ ID NO: 737970 - DNA, 15 bp, Homo sapiens
ggttcgaggaggtgg

SEQ ID NO: 737971 - DNA, 15 bp, Homo sapiens
gttcgaggaggtggt

SEQ ID NO: 737972 - DNA, 15 bp, Homo sapiens
ttcgaggaggtggtg

SEQ ID NO: 737973 - DNA, 15 bp, Homo sapiens
tcgaggaggtggtgg

SEQ ID NO: 737974 - DNA, 15 bp, Homo sapiens
cgaggaggtggtggt

SEQ ID NO: 737975 - DNA, 15 bp, Homo sapiens
gaggaggtggtggtt

SEQ ID NO: 737976 - DNA, 15 bp, Homo sapiens
aggaggtggtggttt

SEQ ID NO: 737977 - DNA, 15 bp, Homo sapiens
ggaggtggtggtttt

SEQ ID NO: 737978 - DNA, 15 bp, Homo sapiens
gaggtggtggttttc

SEQ ID NO: 737979 - DNA, 15 bp, Homo sapiens
aggtggtggttttca

SEQ ID NO: 737980 - DNA, 15 bp, Homo sapiens
ggtggtggttttcat

SEQ ID NO: 737981 - DNA, 15 bp, Homo sapiens
gtggtggttttcatt

SEQ ID NO: 737982 - DNA, 15 bp, Homo sapiens
tggtggttttcattt

SEQ ID NO: 737983 - DNA, 15 bp, Homo sapiens
ggtggttttcatttg

SEQ ID NO: 737984 - DNA, 15 bp, Homo sapiens
gtggttttcatttgg

SEQ ID NO: 737985 - DNA, 15 bp, Homo sapiens
tggttttcatttggg

SEQ ID NO: 737986 - DNA, 15 bp, Homo sapiens
ggttttcatttgggg

SEQ ID NO: 737987 - DNA, 15 bp, Homo sapiens
gttttcatttggggc

SEQ ID NO: 737988 - DNA, 15 bp, Homo sapiens
ttttcatttggggct

SEQ ID NO: 737989 - DNA, 15 bp, Homo sapiens
tttcatttggggctt

SEQ ID NO: 737990 - DNA, 15 bp, Homo sapiens
ttcatttggggcttt

SEQ ID NO: 737991 - DNA, 15 bp, Homo sapiens
tcatttggggctttg

SEQ ID NO: 737992 - DNA, 15 bp, Homo sapiens
catttggggctttgc

SEQ ID NO: 737993 - DNA, 15 bp, Homo sapiens
atttggggctttgca

SEQ ID NO: 737994 - DNA, 15 bp, Homo sapiens
tttggggctttgcat

SEQ ID NO: 737995 - DNA, 15 bp, Homo sapiens
ttggggctttgcata

SEQ ID NO: 737996 - DNA, 15 bp, Homo sapiens
tggggctttgcatat

SEQ ID NO: 737997 - DNA, 15 bp, Homo sapiens
ggggctttgcatatt

SEQ ID NO: 737998 - DNA, 15 bp, Homo sapiens
gggctttgcatattt

SEQ ID NO: 737999 - DNA, 15 bp, Homo sapiens
ggctttgcatatttg

SEQ ID NO: 738000 - DNA, 15 bp, Homo sapiens
gctttgcatatttgg

SEQ ID NO: 738001 - DNA, 15 bp, Homo sapiens
ctttgcatatttggt

SEQ ID NO: 738002 - DNA, 15 bp, Homo sapiens
tttgcatatttggtt

SEQ ID NO: 738003 - DNA, 15 bp, Homo sapiens
ttgcatatttggttg

SEQ ID NO: 738004 - DNA, 15 bp, Homo sapiens
tgcatatttggttgt

SEQ ID NO: 738005 - DNA, 15 bp, Homo sapiens
gcatatttggttgtt

SEQ ID NO: 738006 - DNA, 15 bp, Homo sapiens
catatttggttgtta

SEQ ID NO: 738007 - DNA, 15 bp, Homo sapiens
atatttggttgttag

SEQ ID NO: 738008 - DNA, 15 bp, Homo sapiens
tatttggttgttagg

SEQ ID NO: 738009 - DNA, 15 bp, Homo sapiens
atttggttgttaggt

SEQ ID NO: 738010 - DNA, 15 bp, Homo sapiens
tttggttgttaggtt

SEQ ID NO: 738011 - DNA, 15 bp, Homo sapiens
ttggttgttaggttt

SEQ ID NO: 738012 - DNA, 15 bp, Homo sapiens
tggttgttaggtttt

SEQ ID NO: 738013 - DNA, 15 bp, Homo sapiens
ggttgttaggttttg

SEQ ID NO: 738014 - DNA, 15 bp, Homo sapiens
gttgttaggttttgc

SEQ ID NO: 738015 - DNA, 15 bp, Homo sapiens
ttgttaggttttgcg

SEQ ID NO: 738016 - DNA, 15 bp, Homo sapiens
tgttaggttttgcga

SEQ ID NO: 738017 - DNA, 15 bp, Homo sapiens
gttaggttttgcgag

SEQ ID NO: 738018 - DNA, 15 bp, Homo sapiens
ttaggttttgcgaga

SEQ ID NO: 738019 - DNA, 15 bp, Homo sapiens
taggttttgcgagag

SEQ ID NO: 738020 - DNA, 15 bp, Homo sapiens
aggttttgcgagagc

SEQ ID NO: 738021 - DNA, 15 bp, Homo sapiens
ggttttgcgagagcc

SEQ ID NO: 738022 - DNA, 15 bp, Homo sapiens
gttttgcgagagcct

SEQ ID NO: 738023 - DNA, 15 bp, Homo sapiens
caccaccatccccac

SEQ ID NO: 738024 - DNA, 15 bp, Homo sapiens
accaccatccccacc

SEQ ID NO: 738025 - DNA, 15 bp, Homo sapiens
ccaccatccccaccc

SEQ ID NO: 738026 - DNA, 15 bp, Homo sapiens
caccatccccacccg

SEQ ID NO: 738027 - DNA, 15 bp, Homo sapiens
accatccccacccgc

SEQ ID NO: 738028 - DNA, 15 bp, Homo sapiens
ccatccccacccgcc

SEQ ID NO: 738029 - DNA, 15 bp, Homo sapiens
catccccacccgcca

SEQ ID NO: 738030 - DNA, 15 bp, Homo sapiens
atccccacccgccag

SEQ ID NO: 738031 - DNA, 15 bp, Homo sapiens
tccccacccgccagc

SEQ ID NO: 738032 - DNA, 15 bp, Homo sapiens
ccccacccgccagcc

SEQ ID NO: 738033 - DNA, 15 bp, Homo sapiens
cccacccgccagccg

SEQ ID NO: 738034 - DNA, 15 bp, Homo sapiens
ccacccgccagccgc

SEQ ID NO: 738035 - DNA, 15 bp, Homo sapiens
cacccgccagccgcg

SEQ ID NO: 738036 - DNA, 15 bp, Homo sapiens
acccgccagccgcgg

SEQ ID NO: 738037 - DNA, 15 bp, Homo sapiens
cccgccagccgcggg

SEQ ID NO: 738038 - DNA, 15 bp, Homo sapiens
ccgccagccgcgggc

SEQ ID NO: 738039 - DNA, 15 bp, Homo sapiens
cgccagccgcgggcg

SEQ ID NO: 738040 - DNA, 15 bp, Homo sapiens
gccagccgcgggcgc

SEQ ID NO: 738041 - DNA, 15 bp, Homo sapiens
ccagccgcgggcgcc

SEQ ID NO: 738042 - DNA, 15 bp, Homo sapiens
cagccgcgggcgccg

SEQ ID NO: 738043 - DNA, 15 bp, Homo sapiens
agccgcgggcgccgg

SEQ ID NO: 738044 - DNA, 15 bp, Homo sapiens
gccgcgggcgccggc

SEQ ID NO: 738045 - DNA, 15 bp, Homo sapiens
ccgcgggcgccggcg

SEQ ID NO: 738046 - DNA, 15 bp, Homo sapiens
cgcgggcgccggcgc

SEQ ID NO: 738047 - DNA, 15 bp, Homo sapiens
gcgggcgccggcgcg

SEQ ID NO: 738048 - DNA, 15 bp, Homo sapiens
cgggcgccggcgcgg

SEQ ID NO: 738049 - DNA, 15 bp, Homo sapiens
gggcgccggcgcggc

SEQ ID NO: 738050 - DNA, 15 bp, Homo sapiens
ggcgccggcgcggcc

SEQ ID NO: 738051 - DNA, 15 bp, Homo sapiens
gcgccggcgcggccg

SEQ ID NO: 738052 - DNA, 15 bp, Homo sapiens
cgccggcgcggccgg

SEQ ID NO: 738053 - DNA, 15 bp, Homo sapiens
gccggcgcggccggg

SEQ ID NO: 738054 - DNA, 15 bp, Homo sapiens
ccggcgcggccgggg

SEQ ID NO: 738055 - DNA, 15 bp, Homo sapiens
cggcgcggccggggg

SEQ ID NO: 738056 - DNA, 15 bp, Homo sapiens
ggcgcggccgggggc

SEQ ID NO: 738057 - DNA, 15 bp, Homo sapiens
gcgcggccgggggcg

SEQ ID NO: 738058 - DNA, 15 bp, Homo sapiens
cgcggccgggggcgc

SEQ ID NO: 738059 - DNA, 15 bp, Homo sapiens
gcggccgggggcgcc

SEQ ID NO: 738060 - DNA, 15 bp, Homo sapiens
cggccgggggcgccg

SEQ ID NO: 738061 - DNA, 15 bp, Homo sapiens
ggccgggggcgccga

SEQ ID NO: 738062 - DNA, 15 bp, Homo sapiens
gccgggggcgccgag

SEQ ID NO: 738063 - DNA, 15 bp, Homo sapiens
ccgggggcgccgagg

SEQ ID NO: 738064 - DNA, 15 bp, Homo sapiens
cgggggcgccgaggc

SEQ ID NO: 738065 - DNA, 15 bp, Homo sapiens
gggggcgccgaggcg

SEQ ID NO: 738066 - DNA, 15 bp, Homo sapiens
ggggcgccgaggcgg

SEQ ID NO: 738067 - DNA, 15 bp, Homo sapiens
gggcgccgaggcgga

SEQ ID NO: 738068 - DNA, 15 bp, Homo sapiens
ggcgccgaggcggat

SEQ ID NO: 738069 - DNA, 15 bp, Homo sapiens
gcgccgaggcggatc

SEQ ID NO: 738070 - DNA, 15 bp, Homo sapiens
cgccgaggcggatct

SEQ ID NO: 738071 - DNA, 15 bp, Homo sapiens
gccgaggcggatctg

SEQ ID NO: 738072 - DNA, 15 bp, Homo sapiens
ccgaggcggatctga

SEQ ID NO: 738073 - DNA, 15 bp, Homo sapiens
cgaggcggatctgaa

SEQ ID NO: 738074 - DNA, 15 bp, Homo sapiens
gaggcggatctgaag

SEQ ID NO: 738075 - DNA, 15 bp, Homo sapiens
aggcggatctgaagg

SEQ ID NO: 738076 - DNA, 15 bp, Homo sapiens
ggcggatctgaaggc

SEQ ID NO: 738077 - DNA, 15 bp, Homo sapiens
gcggatctgaaggcg

SEQ ID NO: 738078 - DNA, 15 bp, Homo sapiens
cggatctgaaggcgc

SEQ ID NO: 738079 - DNA, 15 bp, Homo sapiens
ggatctgaaggcgct

SEQ ID NO: 738080 - DNA, 15 bp, Homo sapiens
gatctgaaggcgctc

SEQ ID NO: 738081 - DNA, 15 bp, Homo sapiens
atctgaaggcgctca

SEQ ID NO: 738082 - DNA, 15 bp, Homo sapiens
tctgaaggcgctcac

SEQ ID NO: 738083 - DNA, 15 bp, Homo sapiens
ctgaaggcgctcacg

SEQ ID NO: 738084 - DNA, 15 bp, Homo sapiens
tgaaggcgctcacgc

SEQ ID NO: 738085 - DNA, 15 bp, Homo sapiens
gaaggcgctcacgca

SEQ ID NO: 738086 - DNA, 15 bp, Homo sapiens
aaggcgctcacgcac

SEQ ID NO: 738087 - DNA, 15 bp, Homo sapiens
aggcgctcacgcact

SEQ ID NO: 738088 - DNA, 15 bp, Homo sapiens
ggcgctcacgcactc

SEQ ID NO: 738089 - DNA, 15 bp, Homo sapiens
gcgctcacgcactcg

SEQ ID NO: 738090 - DNA, 15 bp, Homo sapiens
cgctcacgcactcgg

SEQ ID NO: 738091 - DNA, 15 bp, Homo sapiens
gctcacgcactcggt

SEQ ID NO: 738092 - DNA, 15 bp, Homo sapiens
ctcacgcactcggtg

SEQ ID NO: 738093 - DNA, 15 bp, Homo sapiens
tcacgcactcggtgc

SEQ ID NO: 738094 - DNA, 15 bp, Homo sapiens
cacgcactcggtgct

SEQ ID NO: 738095 - DNA, 15 bp, Homo sapiens
acgcactcggtgctc

SEQ ID NO: 738096 - DNA, 15 bp, Homo sapiens
cgcactcggtgctca

SEQ ID NO: 738097 - DNA, 15 bp, Homo sapiens
gcactcggtgctcaa

SEQ ID NO: 738098 - DNA, 15 bp, Homo sapiens
cactcggtgctcaag

SEQ ID NO: 738099 - DNA, 15 bp, Homo sapiens
actcggtgctcaaga

SEQ ID NO: 738100 - DNA, 15 bp, Homo sapiens
ctcggtgctcaagaa

SEQ ID NO: 738101 - DNA, 15 bp, Homo sapiens
tcggtgctcaagaaa

SEQ ID NO: 738102 - DNA, 15 bp, Homo sapiens
cggtgctcaagaaac

SEQ ID NO: 738103 - DNA, 15 bp, Homo sapiens
ggtgctcaagaaact

SEQ ID NO: 738104 - DNA, 15 bp, Homo sapiens
gtgctcaagaaactg

SEQ ID NO: 738105 - DNA, 15 bp, Homo sapiens
tgctcaagaaactga

SEQ ID NO: 738106 - DNA, 15 bp, Homo sapiens
gctcaagaaactgaa

SEQ ID NO: 738107 - DNA, 15 bp, Homo sapiens
ctcaagaaactgaag

SEQ ID NO: 738108 - DNA, 15 bp, Homo sapiens
tcaagaaactgaagg

SEQ ID NO: 738109 - DNA, 15 bp, Homo sapiens
caagaaactgaagga

SEQ ID NO: 738110 - DNA, 15 bp, Homo sapiens
aagaaactgaaggag

SEQ ID NO: 738111 - DNA, 15 bp, Homo sapiens
agaaactgaaggagc

SEQ ID NO: 738112 - DNA, 15 bp, Homo sapiens
gaaactgaaggagcg

SEQ ID NO: 738113 - DNA, 15 bp, Homo sapiens
aaactgaaggagcgg

SEQ ID NO: 738114 - DNA, 15 bp, Homo sapiens
aactgaaggagcggc

SEQ ID NO: 738115 - DNA, 15 bp, Homo sapiens
actgaaggagcggca

SEQ ID NO: 738116 - DNA, 15 bp, Homo sapiens
ctgaaggagcggcag

SEQ ID NO: 738117 - DNA, 15 bp, Homo sapiens
tgaaggagcggcagc

SEQ ID NO: 738118 - DNA, 15 bp, Homo sapiens
gaaggagcggcagct

SEQ ID NO: 738119 - DNA, 15 bp, Homo sapiens
aaggagcggcagctg

SEQ ID NO: 738120 - DNA, 15 bp, Homo sapiens
aggagcggcagctgg

SEQ ID NO: 738121 - DNA, 15 bp, Homo sapiens
ggagcggcagctgga

SEQ ID NO: 738122 - DNA, 15 bp, Homo sapiens
gagcggcagctggag

SEQ ID NO: 738123 - DNA, 15 bp, Homo sapiens
agcggcagctggagc

SEQ ID NO: 738124 - DNA, 15 bp, Homo sapiens
gcggcagctggagct

SEQ ID NO: 738125 - DNA, 15 bp, Homo sapiens
cggcagctggagctg

SEQ ID NO: 738126 - DNA, 15 bp, Homo sapiens
ggcagctggagctgc

SEQ ID NO: 738127 - DNA, 15 bp, Homo sapiens
gcagctggagctgct

SEQ ID NO: 738128 - DNA, 15 bp, Homo sapiens
cagctggagctgctg

SEQ ID NO: 738129 - DNA, 15 bp, Homo sapiens
agctggagctgctgc

SEQ ID NO: 738130 - DNA, 15 bp, Homo sapiens
gctggagctgctgct

SEQ ID NO: 738131 - DNA, 15 bp, Homo sapiens
ctggagctgctgctc

SEQ ID NO: 738132 - DNA, 15 bp, Homo sapiens
tggagctgctgctcc

SEQ ID NO: 738133 - DNA, 15 bp, Homo sapiens
ggagctgctgctcca

SEQ ID NO: 738134 - DNA, 15 bp, Homo sapiens
gagctgctgctccag

SEQ ID NO: 738135 - DNA, 15 bp, Homo sapiens
agctgctgctccagg

SEQ ID NO: 738136 - DNA, 15 bp, Homo sapiens
gctgctgctccaggc

SEQ ID NO: 738137 - DNA, 15 bp, Homo sapiens
ctgctgctccaggcc

SEQ ID NO: 738138 - DNA, 15 bp, Homo sapiens
tgctgctccaggccg

SEQ ID NO: 738139 - DNA, 15 bp, Homo sapiens
gctgctccaggccgt

SEQ ID NO: 738140 - DNA, 15 bp, Homo sapiens
ctgctccaggccgtg

SEQ ID NO: 738141 - DNA, 15 bp, Homo sapiens
tgctccaggccgtgg

SEQ ID NO: 738142 - DNA, 15 bp, Homo sapiens
gctccaggccgtgga

SEQ ID NO: 738143 - DNA, 15 bp, Homo sapiens
ctccaggccgtggag

SEQ ID NO: 738144 - DNA, 15 bp, Homo sapiens
tccaggccgtggagt

SEQ ID NO: 738145 - DNA, 15 bp, Homo sapiens
ccaggccgtggagtc

SEQ ID NO: 738146 - DNA, 15 bp, Homo sapiens
caggccgtggagtcc

SEQ ID NO: 738147 - DNA, 15 bp, Homo sapiens
aggccgtggagtccc

SEQ ID NO: 738148 - DNA, 15 bp, Homo sapiens
ggccgtggagtcccg

SEQ ID NO: 738149 - DNA, 15 bp, Homo sapiens
gccgtggagtcccgc

SEQ ID NO: 738150 - DNA, 15 bp, Homo sapiens
ccgtggagtcccgcg

SEQ ID NO: 738151 - DNA, 15 bp, Homo sapiens
cgtggagtcccgcgg

SEQ ID NO: 738152 - DNA, 15 bp, Homo sapiens
gtggagtcccgcggc

SEQ ID NO: 738153 - DNA, 15 bp, Homo sapiens
tggagtcccgcggcg

SEQ ID NO: 738154 - DNA, 15 bp, Homo sapiens
ggagtcccgcggcgg

SEQ ID NO: 738155 - DNA, 15 bp, Homo sapiens
gagtcccgcggcggg

SEQ ID NO: 738156 - DNA, 15 bp, Homo sapiens
agtcccgcggcggga

SEQ ID NO: 738157 - DNA, 15 bp, Homo sapiens
gtcccgcggcgggac

SEQ ID NO: 738158 - DNA, 15 bp, Homo sapiens
tcccgcggcgggacg

SEQ ID NO: 738159 - DNA, 15 bp, Homo sapiens
cccgcggcgggacgc

SEQ ID NO: 738160 - DNA, 15 bp, Homo sapiens
ccgcggcgggacgcg

SEQ ID NO: 738161 - DNA, 15 bp, Homo sapiens
cgcggcgggacgcgc

SEQ ID NO: 738162 - DNA, 15 bp, Homo sapiens
gcggcgggacgcgca

SEQ ID NO: 738163 - DNA, 15 bp, Homo sapiens
cggcgggacgcgcac

SEQ ID NO: 738164 - DNA, 15 bp, Homo sapiens
ggcgggacgcgcacc

SEQ ID NO: 738165 - DNA, 15 bp, Homo sapiens
gcgggacgcgcaccg

SEQ ID NO: 738166 - DNA, 15 bp, Homo sapiens
cgggacgcgcaccgc

SEQ ID NO: 738167 - DNA, 15 bp, Homo sapiens
gggacgcgcaccgcg

SEQ ID NO: 738168 - DNA, 15 bp, Homo sapiens
ggacgcgcaccgcgt

SEQ ID NO: 738169 - DNA, 15 bp, Homo sapiens
gacgcgcaccgcgtg

SEQ ID NO: 738170 - DNA, 15 bp, Homo sapiens
acgcgcaccgcgtgc

SEQ ID NO: 738171 - DNA, 15 bp, Homo sapiens
cgcgcaccgcgtgcc

SEQ ID NO: 738172 - DNA, 15 bp, Homo sapiens
gcgcaccgcgtgcct

SEQ ID NO: 738173 - DNA, 15 bp, Homo sapiens
cgcaccgcgtgcctc

SEQ ID NO: 738174 - DNA, 15 bp, Homo sapiens
gcaccgcgtgcctcc

SEQ ID NO: 738175 - DNA, 15 bp, Homo sapiens
caccgcgtgcctcct

SEQ ID NO: 738176 - DNA, 15 bp, Homo sapiens
accgcgtgcctcctg

SEQ ID NO: 738177 - DNA, 15 bp, Homo sapiens
ccgcgtgcctcctgc

SEQ ID NO: 738178 - DNA, 15 bp, Homo sapiens
cgcgtgcctcctgct

SEQ ID NO: 738179 - DNA, 15 bp, Homo sapiens
gcgtgcctcctgctg

SEQ ID NO: 738180 - DNA, 15 bp, Homo sapiens
cgtgcctcctgctgc

SEQ ID NO: 738181 - DNA, 15 bp, Homo sapiens
gtgcctcctgctgcc

SEQ ID NO: 738182 - DNA, 15 bp, Homo sapiens
tgcctcctgctgccc

SEQ ID NO: 738183 - DNA, 15 bp, Homo sapiens
gcctcctgctgcccg

SEQ ID NO: 738184 - DNA, 15 bp, Homo sapiens
cctcctgctgcccgg

SEQ ID NO: 738185 - DNA, 15 bp, Homo sapiens
ctcctgctgcccggc

SEQ ID NO: 738186 - DNA, 15 bp, Homo sapiens
tcctgctgcccggcc

SEQ ID NO: 738187 - DNA, 15 bp, Homo sapiens
cctgctgcccggccg

SEQ ID NO: 738188 - DNA, 15 bp, Homo sapiens
ctgctgcccggccgc

SEQ ID NO: 738189 - DNA, 15 bp, Homo sapiens
tgctgcccggccgcc

SEQ ID NO: 738190 - DNA, 15 bp, Homo sapiens
gctgcccggccgcct

SEQ ID NO: 738191 - DNA, 15 bp, Homo sapiens
ctgcccggccgcctg

SEQ ID NO: 738192 - DNA, 15 bp, Homo sapiens
tgcccggccgcctgg

SEQ ID NO: 738193 - DNA, 15 bp, Homo sapiens
gcccggccgcctgga

SEQ ID NO: 738194 - DNA, 15 bp, Homo sapiens
cccggccgcctggac

SEQ ID NO: 738195 - DNA, 15 bp, Homo sapiens
ccggccgcctggact

SEQ ID NO: 738196 - DNA, 15 bp, Homo sapiens
cggccgcctggactg

SEQ ID NO: 738197 - DNA, 15 bp, Homo sapiens
ggccgcctggactgc

SEQ ID NO: 738198 - DNA, 15 bp, Homo sapiens
gccgcctggactgca

SEQ ID NO: 738199 - DNA, 15 bp, Homo sapiens
ccgcctggactgcag

SEQ ID NO: 738200 - DNA, 15 bp, Homo sapiens
cgcctggactgcagg

SEQ ID NO: 738201 - DNA, 15 bp, Homo sapiens
gcctggactgcaggc

SEQ ID NO: 738202 - DNA, 15 bp, Homo sapiens
cctggactgcaggct

SEQ ID NO: 738203 - DNA, 15 bp, Homo sapiens
ctggactgcaggctg

SEQ ID NO: 738204 - DNA, 15 bp, Homo sapiens
tggactgcaggctgg

SEQ ID NO: 738205 - DNA, 15 bp, Homo sapiens
ggactgcaggctggg

SEQ ID NO: 738206 - DNA, 15 bp, Homo sapiens
gactgcaggctgggc

SEQ ID NO: 738207 - DNA, 15 bp, Homo sapiens
actgcaggctgggcc

SEQ ID NO: 738208 - DNA, 15 bp, Homo sapiens
ctgcaggctgggccc

SEQ ID NO: 738209 - DNA, 15 bp, Homo sapiens
tgcaggctgggcccg

SEQ ID NO: 738210 - DNA, 15 bp, Homo sapiens
gcaggctgggcccgg

SEQ ID NO: 738211 - DNA, 15 bp, Homo sapiens
caggctgggcccggg

SEQ ID NO: 738212 - DNA, 15 bp, Homo sapiens
aggctgggcccgggg

SEQ ID NO: 738213 - DNA, 15 bp, Homo sapiens
ggctgggcccggggg

SEQ ID NO: 738214 - DNA, 15 bp, Homo sapiens
gctgggcccgggggc

SEQ ID NO: 738215 - DNA, 15 bp, Homo sapiens
ctgggcccgggggcg

SEQ ID NO: 738216 - DNA, 15 bp, Homo sapiens
tgggcccgggggcgc

SEQ ID NO: 738217 - DNA, 15 bp, Homo sapiens
gggcccgggggcgcc

SEQ ID NO: 738218 - DNA, 15 bp, Homo sapiens
ggcccgggggcgccc

SEQ ID NO: 738219 - DNA, 15 bp, Homo sapiens
gcccgggggcgcccg

SEQ ID NO: 738220 - DNA, 15 bp, Homo sapiens
cccgggggcgcccgc

SEQ ID NO: 738221 - DNA, 15 bp, Homo sapiens
ccgggggcgcccgcc

SEQ ID NO: 738222 - DNA, 15 bp, Homo sapiens
cgggggcgcccgccg

SEQ ID NO: 738223 - DNA, 15 bp, Homo sapiens
gggggcgcccgccgg

SEQ ID NO: 738224 - DNA, 15 bp, Homo sapiens
ggggcgcccgccggc

SEQ ID NO: 738225 - DNA, 15 bp, Homo sapiens
gggcgcccgccggcg

SEQ ID NO: 738226 - DNA, 15 bp, Homo sapiens
ggcgcccgccggcgc

SEQ ID NO: 738227 - DNA, 15 bp, Homo sapiens
gcgcccgccggcgcg

SEQ ID NO: 738228 - DNA, 15 bp, Homo sapiens
cgcccgccggcgcgc

SEQ ID NO: 738229 - DNA, 15 bp, Homo sapiens
gcccgccggcgcgca

SEQ ID NO: 738230 - DNA, 15 bp, Homo sapiens
cccgccggcgcgcag

SEQ ID NO: 738231 - DNA, 15 bp, Homo sapiens
ccgccggcgcgcagc

SEQ ID NO: 738232 - DNA, 15 bp, Homo sapiens
cgccggcgcgcagcc

SEQ ID NO: 738233 - DNA, 15 bp, Homo sapiens
gccggcgcgcagcct

SEQ ID NO: 738234 - DNA, 15 bp, Homo sapiens
ccggcgcgcagcctg

SEQ ID NO: 738235 - DNA, 15 bp, Homo sapiens
cggcgcgcagcctgc

SEQ ID NO: 738236 - DNA, 15 bp, Homo sapiens
ggcgcgcagcctgcg

SEQ ID NO: 738237 - DNA, 15 bp, Homo sapiens
gcgcgcagcctgcgc

SEQ ID NO: 738238 - DNA, 15 bp, Homo sapiens
cgcgcagcctgcgca

SEQ ID NO: 738239 - DNA, 15 bp, Homo sapiens
gcgcagcctgcgcag

SEQ ID NO: 738240 - DNA, 15 bp, Homo sapiens
cgcagcctgcgcagc

SEQ ID NO: 738241 - DNA, 15 bp, Homo sapiens
gcagcctgcgcagcc

SEQ ID NO: 738242 - DNA, 15 bp, Homo sapiens
cagcctgcgcagccg

SEQ ID NO: 738243 - DNA, 15 bp, Homo sapiens
agcctgcgcagccgc

SEQ ID NO: 738244 - DNA, 15 bp, Homo sapiens
gcctgcgcagccgcc

SEQ ID NO: 738245 - DNA, 15 bp, Homo sapiens
cctgcgcagccgccc

SEQ ID NO: 738246 - DNA, 15 bp, Homo sapiens
ctgcgcagccgccct

SEQ ID NO: 738247 - DNA, 15 bp, Homo sapiens
tgcgcagccgccctc

SEQ ID NO: 738248 - DNA, 15 bp, Homo sapiens
gcgcagccgccctcg

SEQ ID NO: 738249 - DNA, 15 bp, Homo sapiens
cgcagccgccctcgt

SEQ ID NO: 738250 - DNA, 15 bp, Homo sapiens
gcagccgccctcgtc

SEQ ID NO: 738251 - DNA, 15 bp, Homo sapiens
cagccgccctcgtcc

SEQ ID NO: 738252 - DNA, 15 bp, Homo sapiens
agccgccctcgtcct

SEQ ID NO: 738253 - DNA, 15 bp, Homo sapiens
gccgccctcgtccta

SEQ ID NO: 738254 - DNA, 15 bp, Homo sapiens
ccgccctcgtcctac

SEQ ID NO: 738255 - DNA, 15 bp, Homo sapiens
cgccctcgtcctact

SEQ ID NO: 738256 - DNA, 15 bp, Homo sapiens
gccctcgtcctactc

SEQ ID NO: 738257 - DNA, 15 bp, Homo sapiens
ccctcgtcctactcg

SEQ ID NO: 738258 - DNA, 15 bp, Homo sapiens
cctcgtcctactcgc

SEQ ID NO: 738259 - DNA, 15 bp, Homo sapiens
ctcgtcctactcgct

SEQ ID NO: 738260 - DNA, 15 bp, Homo sapiens
tcgtcctactcgctc

SEQ ID NO: 738261 - DNA, 15 bp, Homo sapiens
cgtcctactcgctcc

SEQ ID NO: 738262 - DNA, 15 bp, Homo sapiens
gtcctactcgctccc

SEQ ID NO: 738263 - DNA, 15 bp, Homo sapiens
tcctactcgctcccc

SEQ ID NO: 738264 - DNA, 15 bp, Homo sapiens
cctactcgctccccc

SEQ ID NO: 738265 - DNA, 15 bp, Homo sapiens
ctactcgctccccct

SEQ ID NO: 738266 - DNA, 15 bp, Homo sapiens
tactcgctccccctc

SEQ ID NO: 738267 - DNA, 15 bp, Homo sapiens
actcgctccccctcc

SEQ ID NO: 738268 - DNA, 15 bp, Homo sapiens
ctcgctccccctcct

SEQ ID NO: 738269 - DNA, 15 bp, Homo sapiens
tcgctccccctcctg

SEQ ID NO: 738270 - DNA, 15 bp, Homo sapiens
cgctccccctcctgc

SEQ ID NO: 738271 - DNA, 15 bp, Homo sapiens
gctccccctcctgct

SEQ ID NO: 738272 - DNA, 15 bp, Homo sapiens
ctccccctcctgctg

SEQ ID NO: 738273 - DNA, 15 bp, Homo sapiens
tccccctcctgctgt

SEQ ID NO: 738274 - DNA, 15 bp, Homo sapiens
ccccctcctgctgtg

SEQ ID NO: 738275 - DNA, 15 bp, Homo sapiens
cccctcctgctgtgc

SEQ ID NO: 738276 - DNA, 15 bp, Homo sapiens
ccctcctgctgtgca

SEQ ID NO: 738277 - DNA, 15 bp, Homo sapiens
cctcctgctgtgcaa

SEQ ID NO: 738278 - DNA, 15 bp, Homo sapiens
ctcctgctgtgcaaa

SEQ ID NO: 738279 - DNA, 15 bp, Homo sapiens
tcctgctgtgcaaag

SEQ ID NO: 738280 - DNA, 15 bp, Homo sapiens
cctgctgtgcaaagt

SEQ ID NO: 738281 - DNA, 15 bp, Homo sapiens
ctgctgtgcaaagtg

SEQ ID NO: 738282 - DNA, 15 bp, Homo sapiens
tgctgtgcaaagtgt

SEQ ID NO: 738283 - DNA, 15 bp, Homo sapiens
gctgtgcaaagtgtt

SEQ ID NO: 738284 - DNA, 15 bp, Homo sapiens
ctgtgcaaagtgttc

SEQ ID NO: 738285 - DNA, 15 bp, Homo sapiens
tgtgcaaagtgttca

SEQ ID NO: 738286 - DNA, 15 bp, Homo sapiens
gtgcaaagtgttcag

SEQ ID NO: 738287 - DNA, 15 bp, Homo sapiens
tgcaaagtgttcagg

SEQ ID NO: 738288 - DNA, 15 bp, Homo sapiens
gcaaagtgttcaggt

SEQ ID NO: 738289 - DNA, 15 bp, Homo sapiens
caaagtgttcaggtg

SEQ ID NO: 738290 - DNA, 15 bp, Homo sapiens
aaagtgttcaggtgg

SEQ ID NO: 738291 - DNA, 15 bp, Homo sapiens
aagtgttcaggtggc

SEQ ID NO: 738292 - DNA, 15 bp, Homo sapiens
agtgttcaggtggcc

SEQ ID NO: 738293 - DNA, 15 bp, Homo sapiens
gtgttcaggtggccg

SEQ ID NO: 738294 - DNA, 15 bp, Homo sapiens
tgttcaggtggccgg

SEQ ID NO: 738295 - DNA, 15 bp, Homo sapiens
gttcaggtggccgga

SEQ ID NO: 738296 - DNA, 15 bp, Homo sapiens
ttcaggtggccggat

SEQ ID NO: 738297 - DNA, 15 bp, Homo sapiens
tcaggtggccggatc

SEQ ID NO: 738298 - DNA, 15 bp, Homo sapiens
caggtggccggatct

SEQ ID NO: 738299 - DNA, 15 bp, Homo sapiens
aggtggccggatctc

SEQ ID NO: 738300 - DNA, 15 bp, Homo sapiens
ggtggccggatctca

SEQ ID NO: 738301 - DNA, 15 bp, Homo sapiens
gtggccggatctcag

SEQ ID NO: 738302 - DNA, 15 bp, Homo sapiens
tggccggatctcagg

SEQ ID NO: 738303 - DNA, 15 bp, Homo sapiens
ggccggatctcaggc

SEQ ID NO: 738304 - DNA, 15 bp, Homo sapiens
gccggatctcaggca

SEQ ID NO: 738305 - DNA, 15 bp, Homo sapiens
ccggatctcaggcat

SEQ ID NO: 738306 - DNA, 15 bp, Homo sapiens
cggatctcaggcatt

SEQ ID NO: 738307 - DNA, 15 bp, Homo sapiens
ggatctcaggcattc

SEQ ID NO: 738308 - DNA, 15 bp, Homo sapiens
gatctcaggcattcc

SEQ ID NO: 738309 - DNA, 15 bp, Homo sapiens
atctcaggcattcct

SEQ ID NO: 738310 - DNA, 15 bp, Homo sapiens
tctcaggcattcctc

SEQ ID NO: 738311 - DNA, 15 bp, Homo sapiens
ctcaggcattcctcg

SEQ ID NO: 738312 - DNA, 15 bp, Homo sapiens
tcaggcattcctcgg

SEQ ID NO: 738313 - DNA, 15 bp, Homo sapiens
caggcattcctcgga

SEQ ID NO: 738314 - DNA, 15 bp, Homo sapiens
aggcattcctcggaa

SEQ ID NO: 738315 - DNA, 15 bp, Homo sapiens
ggcattcctcggaag

SEQ ID NO: 738316 - DNA, 15 bp, Homo sapiens
gcattcctcggaagt

SEQ ID NO: 738317 - DNA, 15 bp, Homo sapiens
cattcctcggaagtc

SEQ ID NO: 738318 - DNA, 15 bp, Homo sapiens
attcctcggaagtca

SEQ ID NO: 738319 - DNA, 15 bp, Homo sapiens
ttcctcggaagtcaa

SEQ ID NO: 738320 - DNA, 15 bp, Homo sapiens
tcctcggaagtcaag

SEQ ID NO: 738321 - DNA, 15 bp, Homo sapiens
cctcggaagtcaaga

SEQ ID NO: 738322 - DNA, 15 bp, Homo sapiens
ctcggaagtcaagag

SEQ ID NO: 738323 - DNA, 15 bp, Homo sapiens
tcggaagtcaagagg

SEQ ID NO: 738324 - DNA, 15 bp, Homo sapiens
cggaagtcaagaggc

SEQ ID NO: 738325 - DNA, 15 bp, Homo sapiens
ggaagtcaagaggct

SEQ ID NO: 738326 - DNA, 15 bp, Homo sapiens
gaagtcaagaggctg

SEQ ID NO: 738327 - DNA, 15 bp, Homo sapiens
aagtcaagaggctgt

SEQ ID NO: 738328 - DNA, 15 bp, Homo sapiens
agtcaagaggctgtg

SEQ ID NO: 738329 - DNA, 15 bp, Homo sapiens
gtcaagaggctgtgt

SEQ ID NO: 738330 - DNA, 15 bp, Homo sapiens
tcaagaggctgtgtt

SEQ ID NO: 738331 - DNA, 15 bp, Homo sapiens
caagaggctgtgttg

SEQ ID NO: 738332 - DNA, 15 bp, Homo sapiens
aagaggctgtgttgc

SEQ ID NO: 738333 - DNA, 15 bp, Homo sapiens
agaggctgtgttgct

SEQ ID NO: 738334 - DNA, 15 bp, Homo sapiens
gaggctgtgttgctg

SEQ ID NO: 738335 - DNA, 15 bp, Homo sapiens
aggctgtgttgctgt

SEQ ID NO: 738336 - DNA, 15 bp, Homo sapiens
ggctgtgttgctgtg

SEQ ID NO: 738337 - DNA, 15 bp, Homo sapiens
gctgtgttgctgtga

SEQ ID NO: 738338 - DNA, 15 bp, Homo sapiens
ctgtgttgctgtgaa

SEQ ID NO: 738339 - DNA, 15 bp, Homo sapiens
tgtgttgctgtgaat

SEQ ID NO: 738340 - DNA, 15 bp, Homo sapiens
gtgttgctgtgaatc

SEQ ID NO: 738341 - DNA, 15 bp, Homo sapiens
tgttgctgtgaatct

SEQ ID NO: 738342 - DNA, 15 bp, Homo sapiens
gttgctgtgaatctt

SEQ ID NO: 738343 - DNA, 15 bp, Homo sapiens
ttgctgtgaatctta

SEQ ID NO: 738344 - DNA, 15 bp, Homo sapiens
tgctgtgaatcttac

SEQ ID NO: 738345 - DNA, 15 bp, Homo sapiens
gctgtgaatcttacg

SEQ ID NO: 738346 - DNA, 15 bp, Homo sapiens
ctgtgaatcttacgg

SEQ ID NO: 738347 - DNA, 15 bp, Homo sapiens
tgtgaatcttacggg

SEQ ID NO: 738348 - DNA, 15 bp, Homo sapiens
gtgaatcttacggga

SEQ ID NO: 738349 - DNA, 15 bp, Homo sapiens
tgaatcttacgggaa

SEQ ID NO: 738350 - DNA, 15 bp, Homo sapiens
gaatcttacgggaag

SEQ ID NO: 738351 - DNA, 15 bp, Homo sapiens
aatcttacgggaaga

SEQ ID NO: 738352 - DNA, 15 bp, Homo sapiens
atcttacgggaagat

SEQ ID NO: 738353 - DNA, 15 bp, Homo sapiens
tcttacgggaagatc

SEQ ID NO: 738354 - DNA, 15 bp, Homo sapiens
cttacgggaagatca

SEQ ID NO: 738355 - DNA, 15 bp, Homo sapiens
ttacgggaagatcaa

SEQ ID NO: 738356 - DNA, 15 bp, Homo sapiens
tacgggaagatcaac

SEQ ID NO: 738357 - DNA, 15 bp, Homo sapiens
acgggaagatcaacc

SEQ ID NO: 738358 - DNA, 15 bp, Homo sapiens
cgggaagatcaaccc

SEQ ID NO: 738359 - DNA, 15 bp, Homo sapiens
gggaagatcaacccc

SEQ ID NO: 738360 - DNA, 15 bp, Homo sapiens
ggaagatcaaccccg

SEQ ID NO: 738361 - DNA, 15 bp, Homo sapiens
gaagatcaaccccga

SEQ ID NO: 738362 - DNA, 15 bp, Homo sapiens
aagatcaaccccgag

SEQ ID NO: 738363 - DNA, 15 bp, Homo sapiens
agatcaaccccgagc

SEQ ID NO: 738364 - DNA, 15 bp, Homo sapiens
gatcaaccccgagct

SEQ ID NO: 738365 - DNA, 15 bp, Homo sapiens
atcaaccccgagctg

SEQ ID NO: 738366 - DNA, 15 bp, Homo sapiens
tcaaccccgagctgg

SEQ ID NO: 738367 - DNA, 15 bp, Homo sapiens
caaccccgagctggt

SEQ ID NO: 738368 - DNA, 15 bp, Homo sapiens
aaccccgagctggtg

SEQ ID NO: 738369 - DNA, 15 bp, Homo sapiens
accccgagctggtgt

SEQ ID NO: 738370 - DNA, 15 bp, Homo sapiens
ccccgagctggtgtg

SEQ ID NO: 738371 - DNA, 15 bp, Homo sapiens
cccgagctggtgtgc

SEQ ID NO: 738372 - DNA, 15 bp, Homo sapiens
ccgagctggtgtgct

SEQ ID NO: 738373 - DNA, 15 bp, Homo sapiens
cgagctggtgtgctg

SEQ ID NO: 738374 - DNA, 15 bp, Homo sapiens
gagctggtgtgctgc

SEQ ID NO: 738375 - DNA, 15 bp, Homo sapiens
agctggtgtgctgca

SEQ ID NO: 738376 - DNA, 15 bp, Homo sapiens
gctggtgtgctgcaa

SEQ ID NO: 738377 - DNA, 15 bp, Homo sapiens
ctggtgtgctgcaac

SEQ ID NO: 738378 - DNA, 15 bp, Homo sapiens
tggtgtgctgcaacc

SEQ ID NO: 738379 - DNA, 15 bp, Homo sapiens
ggtgtgctgcaaccc

SEQ ID NO: 738380 - DNA, 15 bp, Homo sapiens
gtgtgctgcaacccc

SEQ ID NO: 738381 - DNA, 15 bp, Homo sapiens
tgtgctgcaaccccc

SEQ ID NO: 738382 - DNA, 15 bp, Homo sapiens
gtgctgcaaccccca

SEQ ID NO: 738383 - DNA, 15 bp, Homo sapiens
tgctgcaacccccat

SEQ ID NO: 738384 - DNA, 15 bp, Homo sapiens
gctgcaacccccatc

SEQ ID NO: 738385 - DNA, 15 bp, Homo sapiens
ctgcaacccccatca

SEQ ID NO: 738386 - DNA, 15 bp, Homo sapiens
tgcaacccccatcac

SEQ ID NO: 738387 - DNA, 15 bp, Homo sapiens
gcaacccccatcacc

SEQ ID NO: 738388 - DNA, 15 bp, Homo sapiens
caacccccatcacct

SEQ ID NO: 738389 - DNA, 15 bp, Homo sapiens
aacccccatcacctt

SEQ ID NO: 738390 - DNA, 15 bp, Homo sapiens
acccccatcacctta

SEQ ID NO: 738391 - DNA, 15 bp, Homo sapiens
cccccatcaccttag

SEQ ID NO: 738392 - DNA, 15 bp, Homo sapiens
ccccatcaccttagc

SEQ ID NO: 738393 - DNA, 15 bp, Homo sapiens
cccatcaccttagcc

SEQ ID NO: 738394 - DNA, 15 bp, Homo sapiens
ccatcaccttagccg

SEQ ID NO: 738395 - DNA, 15 bp, Homo sapiens
catcaccttagccga

SEQ ID NO: 738396 - DNA, 15 bp, Homo sapiens
atcaccttagccgac

SEQ ID NO: 738397 - DNA, 15 bp, Homo sapiens
tcaccttagccgact

SEQ ID NO: 738398 - DNA, 15 bp, Homo sapiens
caccttagccgactc

SEQ ID NO: 738399 - DNA, 15 bp, Homo sapiens
accttagccgactct

SEQ ID NO: 738400 - DNA, 15 bp, Homo sapiens
ccttagccgactctg

SEQ ID NO: 738401 - DNA, 15 bp, Homo sapiens
cttagccgactctgc

SEQ ID NO: 738402 - DNA, 15 bp, Homo sapiens
ttagccgactctgcg

SEQ ID NO: 738403 - DNA, 15 bp, Homo sapiens
tagccgactctgcga

SEQ ID NO: 738404 - DNA, 15 bp, Homo sapiens
agccgactctgcgaa

SEQ ID NO: 738405 - DNA, 15 bp, Homo sapiens
gccgactctgcgaac

SEQ ID NO: 738406 - DNA, 15 bp, Homo sapiens
ccgactctgcgaact

SEQ ID NO: 738407 - DNA, 15 bp, Homo sapiens
cgactctgcgaacta

SEQ ID NO: 738408 - DNA, 15 bp, Homo sapiens
gactctgcgaactag

SEQ ID NO: 738409 - DNA, 15 bp, Homo sapiens
actctgcgaactagg

SEQ ID NO: 738410 - DNA, 15 bp, Homo sapiens
ctctgcgaactaggt

SEQ ID NO: 738411 - DNA, 15 bp, Homo sapiens
tctgcgaactaggtg

SEQ ID NO: 738412 - DNA, 15 bp, Homo sapiens
ctgcgaactaggtga

SEQ ID NO: 738413 - DNA, 15 bp, Homo sapiens
tgcgaactaggtgag

SEQ ID NO: 738414 - DNA, 15 bp, Homo sapiens
gcgaactaggtgaga

SEQ ID NO: 738415 - DNA, 15 bp, Homo sapiens
cgaactaggtgagaa

SEQ ID NO: 738416 - DNA, 15 bp, Homo sapiens
gaactaggtgagaag

SEQ ID NO: 738417 - DNA, 15 bp, Homo sapiens
aactaggtgagaagt

SEQ ID NO: 738418 - DNA, 15 bp, Homo sapiens
actaggtgagaagtt

SEQ ID NO: 738419 - DNA, 15 bp, Homo sapiens
ctaggtgagaagttg

SEQ ID NO: 738420 - DNA, 15 bp, Homo sapiens
taggtgagaagttgt

SEQ ID NO: 738421 - DNA, 15 bp, Homo sapiens
aggtgagaagttgtc

SEQ ID NO: 738422 - DNA, 15 bp, Homo sapiens
ggtgagaagttgtcc

SEQ ID NO: 738423 - DNA, 15 bp, Homo sapiens
gtgagaagttgtccc

SEQ ID NO: 738424 - DNA, 15 bp, Homo sapiens
tgagaagttgtcccc

SEQ ID NO: 738425 - DNA, 15 bp, Homo sapiens
gagaagttgtccccc

SEQ ID NO: 738426 - DNA, 15 bp, Homo sapiens
agaagttgtccccct

SEQ ID NO: 738427 - DNA, 15 bp, Homo sapiens
gaagttgtcccccta

SEQ ID NO: 738428 - DNA, 15 bp, Homo sapiens
aagttgtccccctac

SEQ ID NO: 738429 - DNA, 15 bp, Homo sapiens
agttgtccccctacc

SEQ ID NO: 738430 - DNA, 15 bp, Homo sapiens
gttgtccccctaccc

SEQ ID NO: 738431 - DNA, 15 bp, Homo sapiens
ttgtccccctacccc

SEQ ID NO: 738432 - DNA, 15 bp, Homo sapiens
tgtccccctaccccc

SEQ ID NO: 738433 - DNA, 15 bp, Homo sapiens
gtccccctaccccca

SEQ ID NO: 738434 - DNA, 15 bp, Homo sapiens
tccccctacccccaa

SEQ ID NO: 738435 - DNA, 15 bp, Homo sapiens
ccccctacccccaac

SEQ ID NO: 738436 - DNA, 15 bp, Homo sapiens
cccctacccccaaca

SEQ ID NO: 738437 - DNA, 15 bp, Homo sapiens
ccctacccccaacat

SEQ ID NO: 738438 - DNA, 15 bp, Homo sapiens
cctacccccaacatt

SEQ ID NO: 738439 - DNA, 15 bp, Homo sapiens
ctacccccaacattt

SEQ ID NO: 738440 - DNA, 15 bp, Homo sapiens
tacccccaacatttt

SEQ ID NO: 738441 - DNA, 15 bp, Homo sapiens
acccccaacattttc

SEQ ID NO: 738442 - DNA, 15 bp, Homo sapiens
cccccaacattttcc

SEQ ID NO: 738443 - DNA, 15 bp, Homo sapiens
ccccaacattttccg

SEQ ID NO: 738444 - DNA, 15 bp, Homo sapiens
cccaacattttccgg

SEQ ID NO: 738445 - DNA, 15 bp, Homo sapiens
ccaacattttccgga

SEQ ID NO: 738446 - DNA, 15 bp, Homo sapiens
caacattttccggag

SEQ ID NO: 738447 - DNA, 15 bp, Homo sapiens
aacattttccggagc

SEQ ID NO: 738448 - DNA, 15 bp, Homo sapiens
acattttccggagcg

SEQ ID NO: 738449 - DNA, 15 bp, Homo sapiens
cattttccggagcgc

SEQ ID NO: 738450 - DNA, 15 bp, Homo sapiens
attttccggagcgcc

SEQ ID NO: 738451 - DNA, 15 bp, Homo sapiens
ttttccggagcgcca

SEQ ID NO: 738452 - DNA, 15 bp, Homo sapiens
tttccggagcgccag

SEQ ID NO: 738453 - DNA, 15 bp, Homo sapiens
ttccggagcgccagt

SEQ ID NO: 738454 - DNA, 15 bp, Homo sapiens
tccggagcgccagtg

SEQ ID NO: 738455 - DNA, 15 bp, Homo sapiens
ccggagcgccagtgc

SEQ ID NO: 738456 - DNA, 15 bp, Homo sapiens
cggagcgccagtgct

SEQ ID NO: 738457 - DNA, 15 bp, Homo sapiens
ggagcgccagtgctg

SEQ ID NO: 738458 - DNA, 15 bp, Homo sapiens
gagcgccagtgctgg

SEQ ID NO: 738459 - DNA, 15 bp, Homo sapiens
agcgccagtgctgga

SEQ ID NO: 738460 - DNA, 15 bp, Homo sapiens
gcgccagtgctggaa

SEQ ID NO: 738461 - DNA, 15 bp, Homo sapiens
cgccagtgctggaag

SEQ ID NO: 738462 - DNA, 15 bp, Homo sapiens
gccagtgctggaaga

SEQ ID NO: 738463 - DNA, 15 bp, Homo sapiens
ccagtgctggaagaa

SEQ ID NO: 738464 - DNA, 15 bp, Homo sapiens
cagtgctggaagaaa

SEQ ID NO: 738465 - DNA, 15 bp, Homo sapiens
agtgctggaagaaaa

SEQ ID NO: 738466 - DNA, 15 bp, Homo sapiens
gtgctggaagaaaag

SEQ ID NO: 738467 - DNA, 15 bp, Homo sapiens
tgctggaagaaaagc

SEQ ID NO: 738468 - DNA, 15 bp, Homo sapiens
gctggaagaaaagcc

SEQ ID NO: 738469 - DNA, 15 bp, Homo sapiens
ctggaagaaaagccc

SEQ ID NO: 738470 - DNA, 15 bp, Homo sapiens
tggaagaaaagcccc

SEQ ID NO: 738471 - DNA, 15 bp, Homo sapiens
ggaagaaaagcccct

SEQ ID NO: 738472 - DNA, 15 bp, Homo sapiens
gaagaaaagccccta

SEQ ID NO: 738473 - DNA, 15 bp, Homo sapiens
aagaaaagcccctag

SEQ ID NO: 738474 - DNA, 15 bp, Homo sapiens
agaaaagcccctagg

SEQ ID NO: 738475 - DNA, 15 bp, Homo sapiens
gaaaagcccctaggg

SEQ ID NO: 738476 - DNA, 15 bp, Homo sapiens
aaaagcccctagggc

SEQ ID NO: 738477 - DNA, 15 bp, Homo sapiens
aaagcccctagggca

SEQ ID NO: 738478 - DNA, 15 bp, Homo sapiens
aagcccctagggcag

SEQ ID NO: 738479 - DNA, 15 bp, Homo sapiens
agcccctagggcagt

SEQ ID NO: 738480 - DNA, 15 bp, Homo sapiens
gcccctagggcagtg

SEQ ID NO: 738481 - DNA, 15 bp, Homo sapiens
cccctagggcagtgc

SEQ ID NO: 738482 - DNA, 15 bp, Homo sapiens
ccctagggcagtgcg

SEQ ID NO: 738483 - DNA, 15 bp, Homo sapiens
cctagggcagtgcgt

SEQ ID NO: 738484 - DNA, 15 bp, Homo sapiens
ctagggcagtgcgtt

SEQ ID NO: 738485 - DNA, 15 bp, Homo sapiens
tagggcagtgcgttt

SEQ ID NO: 738486 - DNA, 15 bp, Homo sapiens
agggcagtgcgtttg

SEQ ID NO: 738487 - DNA, 15 bp, Homo sapiens
gggcagtgcgtttgt

SEQ ID NO: 738488 - DNA, 15 bp, Homo sapiens
ggcagtgcgtttgtg

SEQ ID NO: 738489 - DNA, 15 bp, Homo sapiens
gcagtgcgtttgtgc

SEQ ID NO: 738490 - DNA, 15 bp, Homo sapiens
cagtgcgtttgtgca

SEQ ID NO: 738491 - DNA, 15 bp, Homo sapiens
agtgcgtttgtgcag

SEQ ID NO: 738492 - DNA, 15 bp, Homo sapiens
gtgcgtttgtgcagc

SEQ ID NO: 738493 - DNA, 15 bp, Homo sapiens
tgcgtttgtgcagcc

SEQ ID NO: 738494 - DNA, 15 bp, Homo sapiens
gcgtttgtgcagcca

SEQ ID NO: 738495 - DNA, 15 bp, Homo sapiens
cgtttgtgcagccat

SEQ ID NO: 738496 - DNA, 15 bp, Homo sapiens
gtttgtgcagccatc

SEQ ID NO: 738497 - DNA, 15 bp, Homo sapiens
tttgtgcagccatcc

SEQ ID NO: 738498 - DNA, 15 bp, Homo sapiens
ttgtgcagccatccc

SEQ ID NO: 738499 - DNA, 15 bp, Homo sapiens
tgtgcagccatccct

SEQ ID NO: 738500 - DNA, 15 bp, Homo sapiens
gtgcagccatccctc

SEQ ID NO: 738501 - DNA, 15 bp, Homo sapiens
tgcagccatccctcc

SEQ ID NO: 738502 - DNA, 15 bp, Homo sapiens
gcagccatccctcca

SEQ ID NO: 738503 - DNA, 15 bp, Homo sapiens
cagccatccctccag

SEQ ID NO: 738504 - DNA, 15 bp, Homo sapiens
agccatccctccagg

SEQ ID NO: 738505 - DNA, 15 bp, Homo sapiens
gccatccctccaggg

SEQ ID NO: 738506 - DNA, 15 bp, Homo sapiens
ccatccctccagggg

SEQ ID NO: 738507 - DNA, 15 bp, Homo sapiens
catccctccaggggg

SEQ ID NO: 738508 - DNA, 15 bp, Homo sapiens
atccctccaggggga

SEQ ID NO: 738509 - DNA, 15 bp, Homo sapiens
tccctccagggggag

SEQ ID NO: 738510 - DNA, 15 bp, Homo sapiens
ccctccagggggagt

SEQ ID NO: 738511 - DNA, 15 bp, Homo sapiens
cctccagggggagtg

SEQ ID NO: 738512 - DNA, 15 bp, Homo sapiens
ctccagggggagtgt

SEQ ID NO: 738513 - DNA, 15 bp, Homo sapiens
tccagggggagtgtg

SEQ ID NO: 738514 - DNA, 15 bp, Homo sapiens
ccagggggagtgtgc

SEQ ID NO: 738515 - DNA, 15 bp, Homo sapiens
cagggggagtgtgca

SEQ ID NO: 738516 - DNA, 15 bp, Homo sapiens
agggggagtgtgcat

SEQ ID NO: 738517 - DNA, 15 bp, Homo sapiens
gggggagtgtgcata

SEQ ID NO: 738518 - DNA, 15 bp, Homo sapiens
ggggagtgtgcatac

SEQ ID NO: 738519 - DNA, 15 bp, Homo sapiens
gggagtgtgcatacc

SEQ ID NO: 738520 - DNA, 15 bp, Homo sapiens
ggagtgtgcataccc

SEQ ID NO: 738521 - DNA, 15 bp, Homo sapiens
gagtgtgcataccct

SEQ ID NO: 738522 - DNA, 15 bp, Homo sapiens
agtgtgcataccctc

SEQ ID NO: 738523 - DNA, 15 bp, Homo sapiens
gtgtgcataccctcc

SEQ ID NO: 738524 - DNA, 15 bp, Homo sapiens
tgtgcataccctcct

SEQ ID NO: 738525 - DNA, 15 bp, Homo sapiens
gtgcataccctcctg

SEQ ID NO: 738526 - DNA, 15 bp, Homo sapiens
tgcataccctcctgg

SEQ ID NO: 738527 - DNA, 15 bp, Homo sapiens
gcataccctcctggg

SEQ ID NO: 738528 - DNA, 15 bp, Homo sapiens
cataccctcctggga

SEQ ID NO: 738529 - DNA, 15 bp, Homo sapiens
ataccctcctgggag

SEQ ID NO: 738530 - DNA, 15 bp, Homo sapiens
taccctcctgggaga

SEQ ID NO: 738531 - DNA, 15 bp, Homo sapiens
accctcctgggagag

SEQ ID NO: 738532 - DNA, 15 bp, Homo sapiens
ccctcctgggagagt

SEQ ID NO: 738533 - DNA, 15 bp, Homo sapiens
cctcctgggagagtg

SEQ ID NO: 738534 - DNA, 15 bp, Homo sapiens
ctcctgggagagtgt

SEQ ID NO: 738535 - DNA, 15 bp, Homo sapiens
tcctgggagagtgtg

SEQ ID NO: 738536 - DNA, 15 bp, Homo sapiens
cctgggagagtgtgc

SEQ ID NO: 738537 - DNA, 15 bp, Homo sapiens
ctgggagagtgtgca

SEQ ID NO: 738538 - DNA, 15 bp, Homo sapiens
tgggagagtgtgcat

SEQ ID NO: 738539 - DNA, 15 bp, Homo sapiens
gggagagtgtgcata

SEQ ID NO: 738540 - DNA, 15 bp, Homo sapiens
ggagagtgtgcatac

SEQ ID NO: 738541 - DNA, 15 bp, Homo sapiens
gagagtgtgcatacc

SEQ ID NO: 738542 - DNA, 15 bp, Homo sapiens
agagtgtgcataccc

SEQ ID NO: 738543 - DNA, 15 bp, Homo sapiens
ataccctcctgggaa

SEQ ID NO: 738544 - DNA, 15 bp, Homo sapiens
taccctcctgggaag

SEQ ID NO: 738545 - DNA, 15 bp, Homo sapiens
accctcctgggaaga

SEQ ID NO: 738546 - DNA, 15 bp, Homo sapiens
ccctcctgggaagag

SEQ ID NO: 738547 - DNA, 15 bp, Homo sapiens
cctcctgggaagaga

SEQ ID NO: 738548 - DNA, 15 bp, Homo sapiens
ctcctgggaagagac

SEQ ID NO: 738549 - DNA, 15 bp, Homo sapiens
tcctgggaagagact

SEQ ID NO: 738550 - DNA, 15 bp, Homo sapiens
cctgggaagagactg

SEQ ID NO: 738551 - DNA, 15 bp, Homo sapiens
ctgggaagagactgg

SEQ ID NO: 738552 - DNA, 15 bp, Homo sapiens
tgggaagagactggg

SEQ ID NO: 738553 - DNA, 15 bp, Homo sapiens
gggaagagactgggg

SEQ ID NO: 738554 - DNA, 15 bp, Homo sapiens
ggaagagactggggg

SEQ ID NO: 738555 - DNA, 15 bp, Homo sapiens
gaagagactgggggc

SEQ ID NO: 738556 - DNA, 15 bp, Homo sapiens
aagagactgggggct

SEQ ID NO: 738557 - DNA, 15 bp, Homo sapiens
agagactgggggctg

SEQ ID NO: 738558 - DNA, 15 bp, Homo sapiens
gagactgggggctga

SEQ ID NO: 738559 - DNA, 15 bp, Homo sapiens
agactgggggctgaa

SEQ ID NO: 738560 - DNA, 15 bp, Homo sapiens
gactgggggctgaaa

SEQ ID NO: 738561 - DNA, 15 bp, Homo sapiens
actgggggctgaaag

SEQ ID NO: 738562 - DNA, 15 bp, Homo sapiens
ctgggggctgaaagt

SEQ ID NO: 738563 - DNA, 15 bp, Homo sapiens
tgggggctgaaagta

SEQ ID NO: 738564 - DNA, 15 bp, Homo sapiens
gggggctgaaagtag

SEQ ID NO: 738565 - DNA, 15 bp, Homo sapiens
ggggctgaaagtaga

SEQ ID NO: 738566 - DNA, 15 bp, Homo sapiens
gggctgaaagtagag

SEQ ID NO: 738567 - DNA, 15 bp, Homo sapiens
ggctgaaagtagaga

SEQ ID NO: 738568 - DNA, 15 bp, Homo sapiens
gctgaaagtagagaa

SEQ ID NO: 738569 - DNA, 15 bp, Homo sapiens
ctgaaagtagagaag

SEQ ID NO: 738570 - DNA, 15 bp, Homo sapiens
tgaaagtagagaagg

SEQ ID NO: 738571 - DNA, 15 bp, Homo sapiens
gaaagtagagaaggg

SEQ ID NO: 738572 - DNA, 15 bp, Homo sapiens
aaagtagagaaggga

SEQ ID NO: 738573 - DNA, 15 bp, Homo sapiens
aagtagagaagggac

SEQ ID NO: 738574 - DNA, 15 bp, Homo sapiens
agtagagaagggaca

SEQ ID NO: 738575 - DNA, 15 bp, Homo sapiens
gtagagaagggacaa

SEQ ID NO: 738576 - DNA, 15 bp, Homo sapiens
tagagaagggacaag

SEQ ID NO: 738577 - DNA, 15 bp, Homo sapiens
agagaagggacaagg

SEQ ID NO: 738578 - DNA, 15 bp, Homo sapiens
gagaagggacaaggg

SEQ ID NO: 738579 - DNA, 15 bp, Homo sapiens
agaagggacaagggg

SEQ ID NO: 738580 - DNA, 15 bp, Homo sapiens
gaagggacaagggga

SEQ ID NO: 738581 - DNA, 15 bp, Homo sapiens
aagggacaaggggaa

SEQ ID NO: 738582 - DNA, 15 bp, Homo sapiens
agggacaaggggaaa

SEQ ID NO: 738583 - DNA, 15 bp, Homo sapiens
gggacaaggggaaac

SEQ ID NO: 738584 - DNA, 15 bp, Homo sapiens
ggacaaggggaaact

SEQ ID NO: 738585 - DNA, 15 bp, Homo sapiens
gacaaggggaaactc

SEQ ID NO: 738586 - DNA, 15 bp, Homo sapiens
acaaggggaaactca

SEQ ID NO: 738587 - DNA, 15 bp, Homo sapiens
caaggggaaactcaa

SEQ ID NO: 738588 - DNA, 15 bp, Homo sapiens
aaggggaaactcaaa

SEQ ID NO: 738589 - DNA, 15 bp, Homo sapiens
aggggaaactcaaag

SEQ ID NO: 738590 - DNA, 15 bp, Homo sapiens
ggggaaactcaaagg

SEQ ID NO: 738591 - DNA, 15 bp, Homo sapiens
gggaaactcaaaggg

SEQ ID NO: 738592 - DNA, 15 bp, Homo sapiens
ggaaactcaaagggc

SEQ ID NO: 738593 - DNA, 15 bp, Homo sapiens
gaaactcaaagggca

SEQ ID NO: 738594 - DNA, 15 bp, Homo sapiens
aaactcaaagggcat

SEQ ID NO: 738595 - DNA, 15 bp, Homo sapiens
aactcaaagggcatt

SEQ ID NO: 738596 - DNA, 15 bp, Homo sapiens
actcaaagggcattc

SEQ ID NO: 738597 - DNA, 15 bp, Homo sapiens
ctcaaagggcattcc

SEQ ID NO: 738598 - DNA, 15 bp, Homo sapiens
tcaaagggcattccc

SEQ ID NO: 738599 - DNA, 15 bp, Homo sapiens
caaagggcattccct

SEQ ID NO: 738600 - DNA, 15 bp, Homo sapiens
aaagggcattccctg

SEQ ID NO: 738601 - DNA, 15 bp, Homo sapiens
aagggcattccctgg

SEQ ID NO: 738602 - DNA, 15 bp, Homo sapiens
agggcattccctggg

SEQ ID NO: 738603 - DNA, 15 bp, Homo sapiens
gggcattccctgggg

SEQ ID NO: 738604 - DNA, 15 bp, Homo sapiens
ggcattccctggggg

SEQ ID NO: 738605 - DNA, 15 bp, Homo sapiens
gcattccctgggggt

SEQ ID NO: 738606 - DNA, 15 bp, Homo sapiens
cattccctgggggtt

SEQ ID NO: 738607 - DNA, 15 bp, Homo sapiens
attccctgggggttc

SEQ ID NO: 738608 - DNA, 15 bp, Homo sapiens
ttccctgggggttcc

SEQ ID NO: 738609 - DNA, 15 bp, Homo sapiens
tccctgggggttccc

SEQ ID NO: 738610 - DNA, 15 bp, Homo sapiens
ccctgggggttccct

SEQ ID NO: 738611 - DNA, 15 bp, Homo sapiens
cctgggggttccctt

SEQ ID NO: 738612 - DNA, 15 bp, Homo sapiens
ctgggggttcccttc

SEQ ID NO: 738613 - DNA, 15 bp, Homo sapiens
tgggggttcccttcc

SEQ ID NO: 738614 - DNA, 15 bp, Homo sapiens
gggggttcccttcca

SEQ ID NO: 738615 - DNA, 15 bp, Homo sapiens
ggggttcccttccag

SEQ ID NO: 738616 - DNA, 15 bp, Homo sapiens
gggttcccttccagg

SEQ ID NO: 738617 - DNA, 15 bp, Homo sapiens
ggttcccttccaggt

SEQ ID NO: 738618 - DNA, 15 bp, Homo sapiens
gttcccttccaggtt

SEQ ID NO: 738619 - DNA, 15 bp, Homo sapiens
ttcccttccaggttt

SEQ ID NO: 738620 - DNA, 15 bp, Homo sapiens
tcccttccaggtttt

SEQ ID NO: 738621 - DNA, 15 bp, Homo sapiens
cccttccaggttttc

SEQ ID NO: 738622 - DNA, 15 bp, Homo sapiens
ccttccaggttttct

SEQ ID NO: 738623 - DNA, 15 bp, Homo sapiens
cttccaggttttctc

SEQ ID NO: 738624 - DNA, 15 bp, Homo sapiens
ttccaggttttctcc

SEQ ID NO: 738625 - DNA, 15 bp, Homo sapiens
tccaggttttctcct

SEQ ID NO: 738626 - DNA, 15 bp, Homo sapiens
ccaggttttctcctg

SEQ ID NO: 738627 - DNA, 15 bp, Homo sapiens
caggttttctcctgt

SEQ ID NO: 738628 - DNA, 15 bp, Homo sapiens
aggttttctcctgtg

SEQ ID NO: 738629 - DNA, 15 bp, Homo sapiens
ggttttctcctgtgt

SEQ ID NO: 738630 - DNA, 15 bp, Homo sapiens
gttttctcctgtgtt

SEQ ID NO: 738631 - DNA, 15 bp, Homo sapiens
ttttctcctgtgttg

SEQ ID NO: 738632 - DNA, 15 bp, Homo sapiens
tttctcctgtgttgc

SEQ ID NO: 738633 - DNA, 15 bp, Homo sapiens
ttctcctgtgttgcc

SEQ ID NO: 738634 - DNA, 15 bp, Homo sapiens
tctcctgtgttgccc

SEQ ID NO: 738635 - DNA, 15 bp, Homo sapiens
ctcctgtgttgcccc

SEQ ID NO: 738636 - DNA, 15 bp, Homo sapiens
tcctgtgttgccccg

SEQ ID NO: 738637 - DNA, 15 bp, Homo sapiens
cctgtgttgccccga

SEQ ID NO: 738638 - DNA, 15 bp, Homo sapiens
ctgtgttgccccgaa

SEQ ID NO: 738639 - DNA, 15 bp, Homo sapiens
tgtgttgccccgaag

SEQ ID NO: 738640 - DNA, 15 bp, Homo sapiens
gtgttgccccgaagg

SEQ ID NO: 738641 - DNA, 15 bp, Homo sapiens
tgttgccccgaaggg

SEQ ID NO: 738642 - DNA, 15 bp, Homo sapiens
gttgccccgaagggg

SEQ ID NO: 738643 - DNA, 15 bp, Homo sapiens
ttgccccgaaggggt

SEQ ID NO: 738644 - DNA, 15 bp, Homo sapiens
tgccccgaaggggtc

SEQ ID NO: 738645 - DNA, 15 bp, Homo sapiens
gccccgaaggggtct

SEQ ID NO: 738646 - DNA, 15 bp, Homo sapiens
ccccgaaggggtcta

SEQ ID NO: 738647 - DNA, 15 bp, Homo sapiens
cccgaaggggtctac

SEQ ID NO: 738648 - DNA, 15 bp, Homo sapiens
ccgaaggggtctacg

SEQ ID NO: 738649 - DNA, 15 bp, Homo sapiens
cgaaggggtctacgg

SEQ ID NO: 738650 - DNA, 15 bp, Homo sapiens
gaaggggtctacggg

SEQ ID NO: 738651 - DNA, 15 bp, Homo sapiens
aaggggtctacgggc

SEQ ID NO: 738652 - DNA, 15 bp, Homo sapiens
aggggtctacgggca

SEQ ID NO: 738653 - DNA, 15 bp, Homo sapiens
ggggtctacgggcac

SEQ ID NO: 738654 - DNA, 15 bp, Homo sapiens
gggtctacgggcact

SEQ ID NO: 738655 - DNA, 15 bp, Homo sapiens
ggtctacgggcactg

SEQ ID NO: 738656 - DNA, 15 bp, Homo sapiens
gtctacgggcactgc

SEQ ID NO: 738657 - DNA, 15 bp, Homo sapiens
tctacgggcactgct

SEQ ID NO: 738658 - DNA, 15 bp, Homo sapiens
ctacgggcactgctc

SEQ ID NO: 738659 - DNA, 15 bp, Homo sapiens
tacgggcactgctcc

SEQ ID NO: 738660 - DNA, 15 bp, Homo sapiens
acgggcactgctcct

SEQ ID NO: 738661 - DNA, 15 bp, Homo sapiens
cgggcactgctcctg

SEQ ID NO: 738662 - DNA, 15 bp, Homo sapiens
gggcactgctcctgc

SEQ ID NO: 738663 - DNA, 15 bp, Homo sapiens
ggcactgctcctgca

SEQ ID NO: 738664 - DNA, 15 bp, Homo sapiens
gcactgctcctgcag

SEQ ID NO: 738665 - DNA, 15 bp, Homo sapiens
cactgctcctgcagt

SEQ ID NO: 738666 - DNA, 15 bp, Homo sapiens
actgctcctgcagtc

SEQ ID NO: 738667 - DNA, 15 bp, Homo sapiens
ctgctcctgcagtct

SEQ ID NO: 738668 - DNA, 15 bp, Homo sapiens
tgctcctgcagtctg

SEQ ID NO: 738669 - DNA, 15 bp, Homo sapiens
gctcctgcagtctgc

SEQ ID NO: 738670 - DNA, 15 bp, Homo sapiens
ctcctgcagtctgcg

SEQ ID NO: 738671 - DNA, 15 bp, Homo sapiens
tcctgcagtctgcgg

SEQ ID NO: 738672 - DNA, 15 bp, Homo sapiens
cctgcagtctgcggt

SEQ ID NO: 738673 - DNA, 15 bp, Homo sapiens
ctgcagtctgcggtt

SEQ ID NO: 738674 - DNA, 15 bp, Homo sapiens
tgcagtctgcggtta

SEQ ID NO: 738675 - DNA, 15 bp, Homo sapiens
gcagtctgcggttaa

SEQ ID NO: 738676 - DNA, 15 bp, Homo sapiens
cagtctgcggttaaa

SEQ ID NO: 738677 - DNA, 15 bp, Homo sapiens
agtctgcggttaaaa

SEQ ID NO: 738678 - DNA, 15 bp, Homo sapiens
gtctgcggttaaaaa

SEQ ID NO: 738679 - DNA, 15 bp, Homo sapiens
tctgcggttaaaaat

SEQ ID NO: 738680 - DNA, 15 bp, Homo sapiens
ctgcggttaaaaatt

SEQ ID NO: 738681 - DNA, 15 bp, Homo sapiens
tgcggttaaaaatta

SEQ ID NO: 738682 - DNA, 15 bp, Homo sapiens
gcggttaaaaattag

SEQ ID NO: 738683 - DNA, 15 bp, Homo sapiens
cggttaaaaattaga

SEQ ID NO: 738684 - DNA, 15 bp, Homo sapiens
ggttaaaaattagac

SEQ ID NO: 738685 - DNA, 15 bp, Homo sapiens
gttaaaaattagacg

SEQ ID NO: 738686 - DNA, 15 bp, Homo sapiens
ttaaaaattagacgc

SEQ ID NO: 738687 - DNA, 15 bp, Homo sapiens
taaaaattagacgcc

SEQ ID NO: 738688 - DNA, 15 bp, Homo sapiens
aaaaattagacgcct

SEQ ID NO: 738689 - DNA, 15 bp, Homo sapiens
aaaattagacgcctt

SEQ ID NO: 738690 - DNA, 15 bp, Homo sapiens
aaattagacgccttc

SEQ ID NO: 738691 - DNA, 15 bp, Homo sapiens
aattagacgccttca

SEQ ID NO: 738692 - DNA, 15 bp, Homo sapiens
attagacgccttcat

SEQ ID NO: 738693 - DNA, 15 bp, Homo sapiens
ttagacgccttcatt

SEQ ID NO: 738694 - DNA, 15 bp, Homo sapiens
tagacgccttcattt

SEQ ID NO: 738695 - DNA, 15 bp, Homo sapiens
agacgccttcatttc

SEQ ID NO: 738696 - DNA, 15 bp, Homo sapiens
gacgccttcatttcc

SEQ ID NO: 738697 - DNA, 15 bp, Homo sapiens
acgccttcatttccg

SEQ ID NO: 738698 - DNA, 15 bp, Homo sapiens
cgccttcatttccgg

SEQ ID NO: 738699 - DNA, 15 bp, Homo sapiens
gccttcatttccgga

SEQ ID NO: 738700 - DNA, 15 bp, Homo sapiens
ccttcatttccggat

SEQ ID NO: 738701 - DNA, 15 bp, Homo sapiens
cttcatttccggatc

SEQ ID NO: 738702 - DNA, 15 bp, Homo sapiens
ttcatttccggatca

SEQ ID NO: 738703 - DNA, 15 bp, Homo sapiens
tcatttccggatcaa

SEQ ID NO: 738704 - DNA, 15 bp, Homo sapiens
catttccggatcaac

SEQ ID NO: 738705 - DNA, 15 bp, Homo sapiens
atttccggatcaaca

SEQ ID NO: 738706 - DNA, 15 bp, Homo sapiens
tttccggatcaacaa

SEQ ID NO: 738707 - DNA, 15 bp, Homo sapiens
ttccggatcaacaag

SEQ ID NO: 738708 - DNA, 15 bp, Homo sapiens
tccggatcaacaagg

SEQ ID NO: 738709 - DNA, 15 bp, Homo sapiens
ccggatcaacaaggg

SEQ ID NO: 738710 - DNA, 15 bp, Homo sapiens
cggatcaacaagggg

SEQ ID NO: 738711 - DNA, 15 bp, Homo sapiens
ggatcaacaaggggg

SEQ ID NO: 738712 - DNA, 15 bp, Homo sapiens
gatcaacaagggggt

SEQ ID NO: 738713 - DNA, 15 bp, Homo sapiens
atcaacaagggggtg

SEQ ID NO: 738714 - DNA, 15 bp, Homo sapiens
tcaacaagggggtgc

SEQ ID NO: 738715 - DNA, 15 bp, Homo sapiens
caacaagggggtgca

SEQ ID NO: 738716 - DNA, 15 bp, Homo sapiens
aacaagggggtgcag

SEQ ID NO: 738717 - DNA, 15 bp, Homo sapiens
acaagggggtgcaga

SEQ ID NO: 738718 - DNA, 15 bp, Homo sapiens
caagggggtgcagag

SEQ ID NO: 738719 - DNA, 15 bp, Homo sapiens
aagggggtgcagagg

SEQ ID NO: 738720 - DNA, 15 bp, Homo sapiens
agggggtgcagaggg

SEQ ID NO: 738721 - DNA, 15 bp, Homo sapiens
gggggtgcagaggga

SEQ ID NO: 738722 - DNA, 15 bp, Homo sapiens
ggggtgcagagggag

SEQ ID NO: 738723 - DNA, 15 bp, Homo sapiens
gggtgcagagggagg

SEQ ID NO: 738724 - DNA, 15 bp, Homo sapiens
ggtgcagagggaggt

SEQ ID NO: 738725 - DNA, 15 bp, Homo sapiens
gtgcagagggaggtg

SEQ ID NO: 738726 - DNA, 15 bp, Homo sapiens
tgcagagggaggtgg

SEQ ID NO: 738727 - DNA, 15 bp, Homo sapiens
gcagagggaggtggg

SEQ ID NO: 738728 - DNA, 15 bp, Homo sapiens
cagagggaggtgggg

SEQ ID NO: 738729 - DNA, 15 bp, Homo sapiens
agagggaggtggggg

SEQ ID NO: 738730 - DNA, 15 bp, Homo sapiens
gagggaggtgggggg

SEQ ID NO: 738731 - DNA, 15 bp, Homo sapiens
agggaggtggggggg

SEQ ID NO: 738732 - DNA, 15 bp, Homo sapiens
gggaggtgggggggt

SEQ ID NO: 738733 - DNA, 15 bp, Homo sapiens
ggaggtgggggggtc

SEQ ID NO: 738734 - DNA, 15 bp, Homo sapiens
gaggtgggggggtca

SEQ ID NO: 738735 - DNA, 15 bp, Homo sapiens
aggtgggggggtcac

SEQ ID NO: 738736 - DNA, 15 bp, Homo sapiens
ggtgggggggtcacg

SEQ ID NO: 738737 - DNA, 15 bp, Homo sapiens
gtgggggggtcacgc

SEQ ID NO: 738738 - DNA, 15 bp, Homo sapiens
tgggggggtcacgcc

SEQ ID NO: 738739 - DNA, 15 bp, Homo sapiens
gggggggtcacgcct

SEQ ID NO: 738740 - DNA, 15 bp, Homo sapiens
ggggggtcacgcctc

SEQ ID NO: 738741 - DNA, 15 bp, Homo sapiens
gggggtcacgcctcc

SEQ ID NO: 738742 - DNA, 15 bp, Homo sapiens
ggggtcacgcctccc

SEQ ID NO: 738743 - DNA, 15 bp, Homo sapiens
gggtcacgcctcccc

SEQ ID NO: 738744 - DNA, 15 bp, Homo sapiens
ggtcacgcctccccg

SEQ ID NO: 738745 - DNA, 15 bp, Homo sapiens
gtcacgcctccccgc

SEQ ID NO: 738746 - DNA, 15 bp, Homo sapiens
tcacgcctccccgca

SEQ ID NO: 738747 - DNA, 15 bp, Homo sapiens
cacgcctccccgcac

SEQ ID NO: 738748 - DNA, 15 bp, Homo sapiens
acgcctccccgcacc

SEQ ID NO: 738749 - DNA, 15 bp, Homo sapiens
cgcctccccgcaccc

SEQ ID NO: 738750 - DNA, 15 bp, Homo sapiens
gcctccccgcacccg

SEQ ID NO: 738751 - DNA, 15 bp, Homo sapiens
cctccccgcacccgg

SEQ ID NO: 738752 - DNA, 15 bp, Homo sapiens
ctccccgcacccgga

SEQ ID NO: 738753 - DNA, 15 bp, Homo sapiens
tccccgcacccggaa

SEQ ID NO: 738754 - DNA, 15 bp, Homo sapiens
ccccgcacccggaaa

SEQ ID NO: 738755 - DNA, 15 bp, Homo sapiens
cccgcacccggaaag

SEQ ID NO: 738756 - DNA, 15 bp, Homo sapiens
ccgcacccggaaaga

SEQ ID NO: 738757 - DNA, 15 bp, Homo sapiens
cgcacccggaaagac

SEQ ID NO: 738758 - DNA, 15 bp, Homo sapiens
gcacccggaaagacg

SEQ ID NO: 738759 - DNA, 15 bp, Homo sapiens
cacccggaaagacgt

SEQ ID NO: 738760 - DNA, 15 bp, Homo sapiens
acccggaaagacgtt

SEQ ID NO: 738761 - DNA, 15 bp, Homo sapiens
cccggaaagacgttg

SEQ ID NO: 738762 - DNA, 15 bp, Homo sapiens
ccggaaagacgttga

SEQ ID NO: 738763 - DNA, 15 bp, Homo sapiens
cggaaagacgttgag

SEQ ID NO: 738764 - DNA, 15 bp, Homo sapiens
ggaaagacgttgagg

SEQ ID NO: 738765 - DNA, 15 bp, Homo sapiens
gaaagacgttgaggt

SEQ ID NO: 738766 - DNA, 15 bp, Homo sapiens
aaagacgttgaggtg

SEQ ID NO: 738767 - DNA, 15 bp, Homo sapiens
aagacgttgaggtgt

SEQ ID NO: 738768 - DNA, 15 bp, Homo sapiens
agacgttgaggtgtg

SEQ ID NO: 738769 - DNA, 15 bp, Homo sapiens
gacgttgaggtgtgt

SEQ ID NO: 738770 - DNA, 15 bp, Homo sapiens
acgttgaggtgtgtg

SEQ ID NO: 738771 - DNA, 15 bp, Homo sapiens
cgttgaggtgtgtgg

SEQ ID NO: 738772 - DNA, 15 bp, Homo sapiens
gttgaggtgtgtggc

SEQ ID NO: 738773 - DNA, 15 bp, Homo sapiens
ttgaggtgtgtggcc

SEQ ID NO: 738774 - DNA, 15 bp, Homo sapiens
tgaggtgtgtggccg

SEQ ID NO: 738775 - DNA, 15 bp, Homo sapiens
gaggtgtgtggccga

SEQ ID NO: 738776 - DNA, 15 bp, Homo sapiens
aggtgtgtggccgag

SEQ ID NO: 738777 - DNA, 15 bp, Homo sapiens
ggtgtgtggccgagt

SEQ ID NO: 738778 - DNA, 15 bp, Homo sapiens
gtgtgtggccgagtt

SEQ ID NO: 738779 - DNA, 15 bp, Homo sapiens
tgtgtggccgagttg

SEQ ID NO: 738780 - DNA, 15 bp, Homo sapiens
gtgtggccgagttgg

SEQ ID NO: 738781 - DNA, 15 bp, Homo sapiens
tgtggccgagttgga

SEQ ID NO: 738782 - DNA, 15 bp, Homo sapiens
gtggccgagttggat

SEQ ID NO: 738783 - DNA, 15 bp, Homo sapiens
tggccgagttggatt

SEQ ID NO: 738784 - DNA, 15 bp, Homo sapiens
ggccgagttggattt

SEQ ID NO: 738785 - DNA, 15 bp, Homo sapiens
gccgagttggatttg

SEQ ID NO: 738786 - DNA, 15 bp, Homo sapiens
ccgagttggatttgg

SEQ ID NO: 738787 - DNA, 15 bp, Homo sapiens
cgagttggatttggt

SEQ ID NO: 738788 - DNA, 15 bp, Homo sapiens
gagttggatttggtc

SEQ ID NO: 738789 - DNA, 15 bp, Homo sapiens
agttggatttggtcc

SEQ ID NO: 738790 - DNA, 15 bp, Homo sapiens
gttggatttggtcca

SEQ ID NO: 738791 - DNA, 15 bp, Homo sapiens
ttggatttggtccag

SEQ ID NO: 738792 - DNA, 15 bp, Homo sapiens
tggatttggtccagg

SEQ ID NO: 738793 - DNA, 15 bp, Homo sapiens
ggatttggtccaggc

SEQ ID NO: 738794 - DNA, 15 bp, Homo sapiens
gatttggtccaggcc

SEQ ID NO: 738795 - DNA, 15 bp, Homo sapiens
atttggtccaggccc

SEQ ID NO: 738796 - DNA, 15 bp, Homo sapiens
tttggtccaggcccg

SEQ ID NO: 738797 - DNA, 15 bp, Homo sapiens
ttggtccaggcccgc

SEQ ID NO: 738798 - DNA, 15 bp, Homo sapiens
tggtccaggcccgcc

SEQ ID NO: 738799 - DNA, 15 bp, Homo sapiens
ggtccaggcccgcca

SEQ ID NO: 738800 - DNA, 15 bp, Homo sapiens
gtccaggcccgccaa

SEQ ID NO: 738801 - DNA, 15 bp, Homo sapiens
tccaggcccgccaag

SEQ ID NO: 738802 - DNA, 15 bp, Homo sapiens
ccaggcccgccaagg

SEQ ID NO: 738803 - DNA, 15 bp, Homo sapiens
caggcccgccaagga

SEQ ID NO: 738804 - DNA, 15 bp, Homo sapiens
aggcccgccaaggaa

SEQ ID NO: 738805 - DNA, 15 bp, Homo sapiens
ggcccgccaaggaag

SEQ ID NO: 738806 - DNA, 15 bp, Homo sapiens
gcccgccaaggaagg

SEQ ID NO: 738807 - DNA, 15 bp, Homo sapiens
cccgccaaggaaggc

SEQ ID NO: 738808 - DNA, 15 bp, Homo sapiens
ccgccaaggaaggct

SEQ ID NO: 738809 - DNA, 15 bp, Homo sapiens
cgccaaggaaggctg

SEQ ID NO: 738810 - DNA, 15 bp, Homo sapiens
gccaaggaaggctgg

SEQ ID NO: 738811 - DNA, 15 bp, Homo sapiens
ccaaggaaggctggg

SEQ ID NO: 738812 - DNA, 15 bp, Homo sapiens
caaggaaggctggga

SEQ ID NO: 738813 - DNA, 15 bp, Homo sapiens
aaggaaggctgggag

SEQ ID NO: 738814 - DNA, 15 bp, Homo sapiens
aggaaggctgggaga

SEQ ID NO: 738815 - DNA, 15 bp, Homo sapiens
ggaaggctgggagag

SEQ ID NO: 738816 - DNA, 15 bp, Homo sapiens
gaaggctgggagagg

SEQ ID NO: 738817 - DNA, 15 bp, Homo sapiens
aaggctgggagaggc

SEQ ID NO: 738818 - DNA, 15 bp, Homo sapiens
aggctgggagaggcg

SEQ ID NO: 738819 - DNA, 15 bp, Homo sapiens
ggctgggagaggcgt

SEQ ID NO: 738820 - DNA, 15 bp, Homo sapiens
gctgggagaggcgtg

SEQ ID NO: 738821 - DNA, 15 bp, Homo sapiens
ctgggagaggcgtgc

SEQ ID NO: 738822 - DNA, 15 bp, Homo sapiens
tgggagaggcgtgct

SEQ ID NO: 738823 - DNA, 15 bp, Homo sapiens
gggagaggcgtgcta

SEQ ID NO: 738824 - DNA, 15 bp, Homo sapiens
ggagaggcgtgctat

SEQ ID NO: 738825 - DNA, 15 bp, Homo sapiens
gagaggcgtgctata

SEQ ID NO: 738826 - DNA, 15 bp, Homo sapiens
agaggcgtgctataa

SEQ ID NO: 738827 - DNA, 15 bp, Homo sapiens
gaggcgtgctataaa

SEQ ID NO: 738828 - DNA, 15 bp, Homo sapiens
aggcgtgctataaag

SEQ ID NO: 738829 - DNA, 15 bp, Homo sapiens
ggcgtgctataaagg

SEQ ID NO: 738830 - DNA, 15 bp, Homo sapiens
gcgtgctataaaggc

SEQ ID NO: 738831 - DNA, 15 bp, Homo sapiens
cgtgctataaaggct

SEQ ID NO: 738832 - DNA, 15 bp, Homo sapiens
gtgctataaaggctg

SEQ ID NO: 738833 - DNA, 15 bp, Homo sapiens
tgctataaaggctgg

SEQ ID NO: 738834 - DNA, 15 bp, Homo sapiens
gctataaaggctgga

SEQ ID NO: 738835 - DNA, 15 bp, Homo sapiens
ctataaaggctggaa

SEQ ID NO: 738836 - DNA, 15 bp, Homo sapiens
tataaaggctggaag

SEQ ID NO: 738837 - DNA, 15 bp, Homo sapiens
ataaaggctggaagg

SEQ ID NO: 738838 - DNA, 15 bp, Homo sapiens
taaaggctggaaggt

SEQ ID NO: 738839 - DNA, 15 bp, Homo sapiens
aaaggctggaaggtc

SEQ ID NO: 738840 - DNA, 15 bp, Homo sapiens
aaggctggaaggtct

SEQ ID NO: 738841 - DNA, 15 bp, Homo sapiens
aggctggaaggtctc

SEQ ID NO: 738842 - DNA, 15 bp, Homo sapiens
ggctggaaggtctcc

SEQ ID NO: 738843 - DNA, 15 bp, Homo sapiens
gctggaaggtctccg

SEQ ID NO: 738844 - DNA, 15 bp, Homo sapiens
ctggaaggtctccgt

SEQ ID NO: 738845 - DNA, 15 bp, Homo sapiens
tggaaggtctccgta

SEQ ID NO: 738846 - DNA, 15 bp, Homo sapiens
ggaaggtctccgtat

SEQ ID NO: 738847 - DNA, 15 bp, Homo sapiens
gaaggtctccgtatt

SEQ ID NO: 738848 - DNA, 15 bp, Homo sapiens
aaggtctccgtattt

SEQ ID NO: 738849 - DNA, 15 bp, Homo sapiens
aggtctccgtattta

SEQ ID NO: 738850 - DNA, 15 bp, Homo sapiens
ggtctccgtatttac

SEQ ID NO: 738851 - DNA, 15 bp, Homo sapiens
gtctccgtatttact

SEQ ID NO: 738852 - DNA, 15 bp, Homo sapiens
tctccgtatttactc

SEQ ID NO: 738853 - DNA, 15 bp, Homo sapiens
ctccgtatttactcc

SEQ ID NO: 738854 - DNA, 15 bp, Homo sapiens
tccgtatttactcct

SEQ ID NO: 738855 - DNA, 15 bp, Homo sapiens
ccgtatttactcctt

SEQ ID NO: 738856 - DNA, 15 bp, Homo sapiens
cgtatttactccttt

SEQ ID NO: 738857 - DNA, 15 bp, Homo sapiens
gtatttactccttta

SEQ ID NO: 738858 - DNA, 15 bp, Homo sapiens
tatttactcctttag

SEQ ID NO: 738859 - DNA, 15 bp, Homo sapiens
atttactcctttagt

SEQ ID NO: 738860 - DNA, 15 bp, Homo sapiens
tttactcctttagta

SEQ ID NO: 738861 - DNA, 15 bp, Homo sapiens
ttactcctttagtaa

SEQ ID NO: 738862 - DNA, 15 bp, Homo sapiens
tactcctttagtaaa

SEQ ID NO: 738863 - DNA, 15 bp, Homo sapiens
actcctttagtaaat

SEQ ID NO: 738864 - DNA, 15 bp, Homo sapiens
ctcctttagtaaata

SEQ ID NO: 738865 - DNA, 15 bp, Homo sapiens
tcctttagtaaatac

SEQ ID NO: 738866 - DNA, 15 bp, Homo sapiens
cctttagtaaatacg

SEQ ID NO: 738867 - DNA, 15 bp, Homo sapiens
ctttagtaaatacgg

SEQ ID NO: 738868 - DNA, 15 bp, Homo sapiens
tttagtaaatacgga

SEQ ID NO: 738869 - DNA, 15 bp, Homo sapiens
ttagtaaatacggag

SEQ ID NO: 738870 - DNA, 15 bp, Homo sapiens
tagtaaatacggaga

SEQ ID NO: 738871 - DNA, 15 bp, Homo sapiens
agtaaatacggagaa

SEQ ID NO: 738872 - DNA, 15 bp, Homo sapiens
gtaaatacggagaat

SEQ ID NO: 738873 - DNA, 15 bp, Homo sapiens
taaatacggagaatc

SEQ ID NO: 738874 - DNA, 15 bp, Homo sapiens
aaatacggagaatca

SEQ ID NO: 738875 - DNA, 15 bp, Homo sapiens
aatacggagaatcac

SEQ ID NO: 738876 - DNA, 15 bp, Homo sapiens
atacggagaatcacg

SEQ ID NO: 738877 - DNA, 15 bp, Homo sapiens
tacggagaatcacgt

SEQ ID NO: 738878 - DNA, 15 bp, Homo sapiens
acggagaatcacgtc

SEQ ID NO: 738879 - DNA, 15 bp, Homo sapiens
cggagaatcacgtcg

SEQ ID NO: 738880 - DNA, 15 bp, Homo sapiens
ggagaatcacgtcga

SEQ ID NO: 738881 - DNA, 15 bp, Homo sapiens
gagaatcacgtcgaa

SEQ ID NO: 738882 - DNA, 15 bp, Homo sapiens
agaatcacgtcgaac

SEQ ID NO: 738883 - DNA, 15 bp, Homo sapiens
gaatcacgtcgaaca

SEQ ID NO: 738884 - DNA, 15 bp, Homo sapiens
aatcacgtcgaacac

SEQ ID NO: 738885 - DNA, 15 bp, Homo sapiens
atcacgtcgaacacc

SEQ ID NO: 738886 - DNA, 15 bp, Homo sapiens
tcacgtcgaacacca

SEQ ID NO: 738887 - DNA, 15 bp, Homo sapiens
cacgtcgaacaccag

SEQ ID NO: 738888 - DNA, 15 bp, Homo sapiens
acgtcgaacaccagt

SEQ ID NO: 738889 - DNA, 15 bp, Homo sapiens
cgtcgaacaccagtg

SEQ ID NO: 738890 - DNA, 15 bp, Homo sapiens
gtcgaacaccagtgg

SEQ ID NO: 738891 - DNA, 15 bp, Homo sapiens
tcgaacaccagtggc

SEQ ID NO: 738892 - DNA, 15 bp, Homo sapiens
cgaacaccagtggcc

SEQ ID NO: 738893 - DNA, 15 bp, Homo sapiens
gaacaccagtggccc

SEQ ID NO: 738894 - DNA, 15 bp, Homo sapiens
aacaccagtggccca

SEQ ID NO: 738895 - DNA, 15 bp, Homo sapiens
acaccagtggcccag

SEQ ID NO: 738896 - DNA, 15 bp, Homo sapiens
caccagtggcccaga

SEQ ID NO: 738897 - DNA, 15 bp, Homo sapiens
accagtggcccagat

SEQ ID NO: 738898 - DNA, 15 bp, Homo sapiens
ccagtggcccagata

SEQ ID NO: 738899 - DNA, 15 bp, Homo sapiens
cagtggcccagatac

SEQ ID NO: 738900 - DNA, 15 bp, Homo sapiens
agtggcccagatact

SEQ ID NO: 738901 - DNA, 15 bp, Homo sapiens
gtggcccagatactg

SEQ ID NO: 738902 - DNA, 15 bp, Homo sapiens
tggcccagatactgt

SEQ ID NO: 738903 - DNA, 15 bp, Homo sapiens
ggcccagatactgtc

SEQ ID NO: 738904 - DNA, 15 bp, Homo sapiens
gcccagatactgtcg

SEQ ID NO: 738905 - DNA, 15 bp, Homo sapiens
cccagatactgtcgt

SEQ ID NO: 738906 - DNA, 15 bp, Homo sapiens
ccagatactgtcgtg

SEQ ID NO: 738907 - DNA, 15 bp, Homo sapiens
cagatactgtcgtgg

SEQ ID NO: 738908 - DNA, 15 bp, Homo sapiens
agatactgtcgtggc

SEQ ID NO: 738909 - DNA, 15 bp, Homo sapiens
gatactgtcgtggcc

SEQ ID NO: 738910 - DNA, 15 bp, Homo sapiens
atactgtcgtggccg

SEQ ID NO: 738911 - DNA, 15 bp, Homo sapiens
tactgtcgtggccgc

SEQ ID NO: 738912 - DNA, 15 bp, Homo sapiens
actgtcgtggccgcg

SEQ ID NO: 738913 - DNA, 15 bp, Homo sapiens
ctgtcgtggccgcgc

SEQ ID NO: 738914 - DNA, 15 bp, Homo sapiens
tgtcgtggccgcgca

SEQ ID NO: 738915 - DNA, 15 bp, Homo sapiens
gtcgtggccgcgcac

SEQ ID NO: 738916 - DNA, 15 bp, Homo sapiens
tcgtggccgcgcacc

SEQ ID NO: 738917 - DNA, 15 bp, Homo sapiens
cgtggccgcgcacct

SEQ ID NO: 738918 - DNA, 15 bp, Homo sapiens
gtggccgcgcacctt

SEQ ID NO: 738919 - DNA, 15 bp, Homo sapiens
tggccgcgcaccttt

SEQ ID NO: 738920 - DNA, 15 bp, Homo sapiens
ggccgcgcacctttg

SEQ ID NO: 738921 - DNA, 15 bp, Homo sapiens
gccgcgcacctttgg

SEQ ID NO: 738922 - DNA, 15 bp, Homo sapiens
ccgcgcacctttgga

SEQ ID NO: 738923 - DNA, 15 bp, Homo sapiens
cgcgcacctttggag

SEQ ID NO: 738924 - DNA, 15 bp, Homo sapiens
gcgcacctttggagt

SEQ ID NO: 738925 - DNA, 15 bp, Homo sapiens
cgcacctttggagtt

SEQ ID NO: 738926 - DNA, 15 bp, Homo sapiens
gcacctttggagttt

SEQ ID NO: 738927 - DNA, 15 bp, Homo sapiens
cacctttggagtttt

SEQ ID NO: 738928 - DNA, 15 bp, Homo sapiens
acctttggagttttg

SEQ ID NO: 738929 - DNA, 15 bp, Homo sapiens
cctttggagttttgg

SEQ ID NO: 738930 - DNA, 15 bp, Homo sapiens
ctttggagttttggg

SEQ ID NO: 738931 - DNA, 15 bp, Homo sapiens
tttggagttttgggg

SEQ ID NO: 738932 - DNA, 15 bp, Homo sapiens
ttggagttttggggc

SEQ ID NO: 738933 - DNA, 15 bp, Homo sapiens
tggagttttggggca

SEQ ID NO: 738934 - DNA, 15 bp, Homo sapiens
ggagttttggggcaa

SEQ ID NO: 738935 - DNA, 15 bp, Homo sapiens
gagttttggggcaaa

SEQ ID NO: 738936 - DNA, 15 bp, Homo sapiens
agttttggggcaaag

SEQ ID NO: 738937 - DNA, 15 bp, Homo sapiens
gttttggggcaaaga

SEQ ID NO: 738938 - DNA, 15 bp, Homo sapiens
ttttggggcaaagag

SEQ ID NO: 738939 - DNA, 15 bp, Homo sapiens
tttggggcaaagaga

SEQ ID NO: 738940 - DNA, 15 bp, Homo sapiens
ttggggcaaagagag

SEQ ID NO: 738941 - DNA, 15 bp, Homo sapiens
tggggcaaagagagt

SEQ ID NO: 738942 - DNA, 15 bp, Homo sapiens
ggggcaaagagagtt

SEQ ID NO: 738943 - DNA, 15 bp, Homo sapiens
gggcaaagagagttg

SEQ ID NO: 738944 - DNA, 15 bp, Homo sapiens
ggcaaagagagttgg

SEQ ID NO: 738945 - DNA, 15 bp, Homo sapiens
gcaaagagagttgga

SEQ ID NO: 738946 - DNA, 15 bp, Homo sapiens
caaagagagttggat

SEQ ID NO: 738947 - DNA, 15 bp, Homo sapiens
aaagagagttggatg

SEQ ID NO: 738948 - DNA, 15 bp, Homo sapiens
aagagagttggatgg

SEQ ID NO: 738949 - DNA, 15 bp, Homo sapiens
agagagttggatgga

SEQ ID NO: 738950 - DNA, 15 bp, Homo sapiens
gagagttggatggaa

SEQ ID NO: 738951 - DNA, 15 bp, Homo sapiens
agagttggatggaag

SEQ ID NO: 738952 - DNA, 15 bp, Homo sapiens
gagttggatggaagg

SEQ ID NO: 738953 - DNA, 15 bp, Homo sapiens
agttggatggaaggc

SEQ ID NO: 738954 - DNA, 15 bp, Homo sapiens
gttggatggaaggcc

SEQ ID NO: 738955 - DNA, 15 bp, Homo sapiens
ttggatggaaggccg

SEQ ID NO: 738956 - DNA, 15 bp, Homo sapiens
tggatggaaggccga

SEQ ID NO: 738957 - DNA, 15 bp, Homo sapiens
ggatggaaggccgaa

SEQ ID NO: 738958 - DNA, 15 bp, Homo sapiens
gatggaaggccgaac

SEQ ID NO: 738959 - DNA, 15 bp, Homo sapiens
atggaaggccgaact

SEQ ID NO: 738960 - DNA, 15 bp, Homo sapiens
tggaaggccgaactg

SEQ ID NO: 738961 - DNA, 15 bp, Homo sapiens
ggaaggccgaactgg

SEQ ID NO: 738962 - DNA, 15 bp, Homo sapiens
gaaggccgaactggg

SEQ ID NO: 738963 - DNA, 15 bp, Homo sapiens
aaggccgaactgggt

SEQ ID NO: 738964 - DNA, 15 bp, Homo sapiens
aggccgaactgggta

SEQ ID NO: 738965 - DNA, 15 bp, Homo sapiens
ggccgaactgggtat

SEQ ID NO: 738966 - DNA, 15 bp, Homo sapiens
gccgaactgggtatc

SEQ ID NO: 738967 - DNA, 15 bp, Homo sapiens
ccgaactgggtatct

SEQ ID NO: 738968 - DNA, 15 bp, Homo sapiens
cgaactgggtatctg

SEQ ID NO: 738969 - DNA, 15 bp, Homo sapiens
gaactgggtatctgt

SEQ ID NO: 738970 - DNA, 15 bp, Homo sapiens
aactgggtatctgtc

SEQ ID NO: 738971 - DNA, 15 bp, Homo sapiens
actgggtatctgtct

SEQ ID NO: 738972 - DNA, 15 bp, Homo sapiens
ctgggtatctgtctc

SEQ ID NO: 738973 - DNA, 15 bp, Homo sapiens
tgggtatctgtctcc

SEQ ID NO: 738974 - DNA, 15 bp, Homo sapiens
gggtatctgtctcct

SEQ ID NO: 738975 - DNA, 15 bp, Homo sapiens
ggtatctgtctcctt

SEQ ID NO: 738976 - DNA, 15 bp, Homo sapiens
gtatctgtctccttt

SEQ ID NO: 738977 - DNA, 15 bp, Homo sapiens
tatctgtctcctttc

SEQ ID NO: 738978 - DNA, 15 bp, Homo sapiens
atctgtctcctttca

SEQ ID NO: 738979 - DNA, 15 bp, Homo sapiens
tctgtctcctttcaa

SEQ ID NO: 738980 - DNA, 15 bp, Homo sapiens
ctgtctcctttcaac

SEQ ID NO: 738981 - DNA, 15 bp, Homo sapiens
tgtctcctttcaact

SEQ ID NO: 738982 - DNA, 15 bp, Homo sapiens
gtctcctttcaactc

SEQ ID NO: 738983 - DNA, 15 bp, Homo sapiens
tctcctttcaactct

SEQ ID NO: 738984 - DNA, 15 bp, Homo sapiens
ctcctttcaactctg

SEQ ID NO: 738985 - DNA, 15 bp, Homo sapiens
tcctttcaactctgc

SEQ ID NO: 738986 - DNA, 15 bp, Homo sapiens
cctttcaactctgcc

SEQ ID NO: 738987 - DNA, 15 bp, Homo sapiens
ctttcaactctgcca

SEQ ID NO: 738988 - DNA, 15 bp, Homo sapiens
tttcaactctgccag

SEQ ID NO: 738989 - DNA, 15 bp, Homo sapiens
ttcaactctgccagc

SEQ ID NO: 738990 - DNA, 15 bp, Homo sapiens
tcaactctgccagcc

SEQ ID NO: 738991 - DNA, 15 bp, Homo sapiens
caactctgccagccc

SEQ ID NO: 738992 - DNA, 15 bp, Homo sapiens
aactctgccagcccc

SEQ ID NO: 738993 - DNA, 15 bp, Homo sapiens
actctgccagcccca

SEQ ID NO: 738994 - DNA, 15 bp, Homo sapiens
ctctgccagccccag

SEQ ID NO: 738995 - DNA, 15 bp, Homo sapiens
tctgccagccccagg

SEQ ID NO: 738996 - DNA, 15 bp, Homo sapiens
ctgccagccccaggg

SEQ ID NO: 738997 - DNA, 15 bp, Homo sapiens
tgccagccccagggt

SEQ ID NO: 738998 - DNA, 15 bp, Homo sapiens
gccagccccagggtg

SEQ ID NO: 738999 - DNA, 15 bp, Homo sapiens
ccagccccagggtgc

SEQ ID NO: 739000 - DNA, 15 bp, Homo sapiens
cagccccagggtgca

SEQ ID NO: 739001 - DNA, 15 bp, Homo sapiens
agccccagggtgcag

SEQ ID NO: 739002 - DNA, 15 bp, Homo sapiens
gccccagggtgcaga

SEQ ID NO: 739003 - DNA, 15 bp, Homo sapiens
ccccagggtgcagag

SEQ ID NO: 739004 - DNA, 15 bp, Homo sapiens
cccagggtgcagagg

SEQ ID NO: 739005 - DNA, 15 bp, Homo sapiens
ccagggtgcagagga

SEQ ID NO: 739006 - DNA, 15 bp, Homo sapiens
cagggtgcagaggaa

SEQ ID NO: 739007 - DNA, 15 bp, Homo sapiens
agggtgcagaggaac

SEQ ID NO: 739008 - DNA, 15 bp, Homo sapiens
gggtgcagaggaaca

SEQ ID NO: 739009 - DNA, 15 bp, Homo sapiens
ggtgcagaggaacaa

SEQ ID NO: 739010 - DNA, 15 bp, Homo sapiens
gtgcagaggaacaaa

SEQ ID NO: 739011 - DNA, 15 bp, Homo sapiens
tgcagaggaacaaac

SEQ ID NO: 739012 - DNA, 15 bp, Homo sapiens
gcagaggaacaaaca

SEQ ID NO: 739013 - DNA, 15 bp, Homo sapiens
cagaggaacaaacag

SEQ ID NO: 739014 - DNA, 15 bp, Homo sapiens
agaggaacaaacagg

SEQ ID NO: 739015 - DNA, 15 bp, Homo sapiens
gaggaacaaacaggc

SEQ ID NO: 739016 - DNA, 15 bp, Homo sapiens
aggaacaaacaggca

SEQ ID NO: 739017 - DNA, 15 bp, Homo sapiens
ggaacaaacaggcag

SEQ ID NO: 739018 - DNA, 15 bp, Homo sapiens
gaacaaacaggcagg

SEQ ID NO: 739019 - DNA, 15 bp, Homo sapiens
aacaaacaggcagga

SEQ ID NO: 739020 - DNA, 15 bp, Homo sapiens
acaaacaggcaggag

SEQ ID NO: 739021 - DNA, 15 bp, Homo sapiens
caaacaggcaggaga

SEQ ID NO: 739022 - DNA, 15 bp, Homo sapiens
aaacaggcaggagaa

SEQ ID NO: 739023 - DNA, 15 bp, Homo sapiens
aacaggcaggagaag

SEQ ID NO: 739024 - DNA, 15 bp, Homo sapiens
acaggcaggagaagt

SEQ ID NO: 739025 - DNA, 15 bp, Homo sapiens
caggcaggagaagtt

SEQ ID NO: 739026 - DNA, 15 bp, Homo sapiens
aggcaggagaagttg

SEQ ID NO: 739027 - DNA, 15 bp, Homo sapiens
ggcaggagaagttgg

SEQ ID NO: 739028 - DNA, 15 bp, Homo sapiens
gcaggagaagttggg

SEQ ID NO: 739029 - DNA, 15 bp, Homo sapiens
caggagaagttgggt

SEQ ID NO: 739030 - DNA, 15 bp, Homo sapiens
aggagaagttgggtg

SEQ ID NO: 739031 - DNA, 15 bp, Homo sapiens
ggagaagttgggtgt

SEQ ID NO: 739032 - DNA, 15 bp, Homo sapiens
gagaagttgggtgtc

SEQ ID NO: 739033 - DNA, 15 bp, Homo sapiens
agaagttgggtgtcc

SEQ ID NO: 739034 - DNA, 15 bp, Homo sapiens
gaagttgggtgtccc

SEQ ID NO: 739035 - DNA, 15 bp, Homo sapiens
aagttgggtgtcccc

SEQ ID NO: 739036 - DNA, 15 bp, Homo sapiens
agttgggtgtcccct

SEQ ID NO: 739037 - DNA, 15 bp, Homo sapiens
gttgggtgtccccta

SEQ ID NO: 739038 - DNA, 15 bp, Homo sapiens
ttgggtgtcccctac

SEQ ID NO: 739039 - DNA, 15 bp, Homo sapiens
tgggtgtcccctact

SEQ ID NO: 739040 - DNA, 15 bp, Homo sapiens
gggtgtcccctactt

SEQ ID NO: 739041 - DNA, 15 bp, Homo sapiens
ggtgtcccctacttt

SEQ ID NO: 739042 - DNA, 15 bp, Homo sapiens
gtgtcccctactttt

SEQ ID NO: 739043 - DNA, 15 bp, Homo sapiens
tgtcccctacttttt

SEQ ID NO: 739044 - DNA, 15 bp, Homo sapiens
gtcccctactttttc

SEQ ID NO: 739045 - DNA, 15 bp, Homo sapiens
tcccctactttttcc

SEQ ID NO: 739046 - DNA, 15 bp, Homo sapiens
cccctactttttcct

SEQ ID NO: 739047 - DNA, 15 bp, Homo sapiens
ccctactttttcctt

SEQ ID NO: 739048 - DNA, 15 bp, Homo sapiens
cctactttttccttc

SEQ ID NO: 739049 - DNA, 15 bp, Homo sapiens
ctactttttccttcc

SEQ ID NO: 739050 - DNA, 15 bp, Homo sapiens
tactttttccttcct

SEQ ID NO: 739051 - DNA, 15 bp, Homo sapiens
actttttccttcctt

SEQ ID NO: 739052 - DNA, 15 bp, Homo sapiens
ctttttccttccttc

SEQ ID NO: 739053 - DNA, 15 bp, Homo sapiens
tttttccttccttcc

SEQ ID NO: 739054 - DNA, 15 bp, Homo sapiens
ttttccttccttccg

SEQ ID NO: 739055 - DNA, 15 bp, Homo sapiens
tttccttccttccgc

SEQ ID NO: 739056 - DNA, 15 bp, Homo sapiens
ttccttccttccgca

SEQ ID NO: 739057 - DNA, 15 bp, Homo sapiens
tccttccttccgcac

SEQ ID NO: 739058 - DNA, 15 bp, Homo sapiens
ccttccttccgcaca

SEQ ID NO: 739059 - DNA, 15 bp, Homo sapiens
cttccttccgcacag

SEQ ID NO: 739060 - DNA, 15 bp, Homo sapiens
ttccttccgcacaga

SEQ ID NO: 739061 - DNA, 15 bp, Homo sapiens
tccttccgcacagat

SEQ ID NO: 739062 - DNA, 15 bp, Homo sapiens
ccttccgcacagata

SEQ ID NO: 739063 - DNA, 15 bp, Homo sapiens
cttccgcacagataa

SEQ ID NO: 739064 - DNA, 15 bp, Homo sapiens
ttccgcacagataag

SEQ ID NO: 739065 - DNA, 15 bp, Homo sapiens
tccgcacagataagt

SEQ ID NO: 739066 - DNA, 15 bp, Homo sapiens
ccgcacagataagtc

SEQ ID NO: 739067 - DNA, 15 bp, Homo sapiens
cgcacagataagtct

SEQ ID NO: 739068 - DNA, 15 bp, Homo sapiens
gcacagataagtctg

SEQ ID NO: 739069 - DNA, 15 bp, Homo sapiens
cacagataagtctgt

SEQ ID NO: 739070 - DNA, 15 bp, Homo sapiens
acagataagtctgta

SEQ ID NO: 739071 - DNA, 15 bp, Homo sapiens
cagataagtctgtag

SEQ ID NO: 739072 - DNA, 15 bp, Homo sapiens
agataagtctgtaga

SEQ ID NO: 739073 - DNA, 15 bp, Homo sapiens
gataagtctgtagat

SEQ ID NO: 739074 - DNA, 15 bp, Homo sapiens
ataagtctgtagatt

SEQ ID NO: 739075 - DNA, 15 bp, Homo sapiens
taagtctgtagatta

SEQ ID NO: 739076 - DNA, 15 bp, Homo sapiens
aagtctgtagattag

SEQ ID NO: 739077 - DNA, 15 bp, Homo sapiens
agtctgtagattagt

SEQ ID NO: 739078 - DNA, 15 bp, Homo sapiens
gtctgtagattagtg

SEQ ID NO: 739079 - DNA, 15 bp, Homo sapiens
tctgtagattagtgg

SEQ ID NO: 739080 - DNA, 15 bp, Homo sapiens
ctgtagattagtggg

SEQ ID NO: 739081 - DNA, 15 bp, Homo sapiens
tgtagattagtgggg

SEQ ID NO: 739082 - DNA, 15 bp, Homo sapiens
gtagattagtggggc

SEQ ID NO: 739083 - DNA, 15 bp, Homo sapiens
tagattagtggggcc

SEQ ID NO: 739084 - DNA, 15 bp, Homo sapiens
agattagtggggccc

SEQ ID NO: 739085 - DNA, 15 bp, Homo sapiens
gattagtggggcccc

SEQ ID NO: 739086 - DNA, 15 bp, Homo sapiens
attagtggggccccg

SEQ ID NO: 739087 - DNA, 15 bp, Homo sapiens
ttagtggggccccgg

SEQ ID NO: 739088 - DNA, 15 bp, Homo sapiens
tagtggggccccggc

SEQ ID NO: 739089 - DNA, 15 bp, Homo sapiens
agtggggccccggcg

SEQ ID NO: 739090 - DNA, 15 bp, Homo sapiens
gtggggccccggcgc

SEQ ID NO: 739091 - DNA, 15 bp, Homo sapiens
tggggccccggcgcc

SEQ ID NO: 739092 - DNA, 15 bp, Homo sapiens
ggggccccggcgcct

SEQ ID NO: 739093 - DNA, 15 bp, Homo sapiens
gggccccggcgcctc

SEQ ID NO: 739094 - DNA, 15 bp, Homo sapiens
ggccccggcgcctca

SEQ ID NO: 739095 - DNA, 15 bp, Homo sapiens
gccccggcgcctcag

SEQ ID NO: 739096 - DNA, 15 bp, Homo sapiens
ccccggcgcctcagt

SEQ ID NO: 739097 - DNA, 15 bp, Homo sapiens
cccggcgcctcagtg

SEQ ID NO: 739098 - DNA, 15 bp, Homo sapiens
ccggcgcctcagtga

SEQ ID NO: 739099 - DNA, 15 bp, Homo sapiens
cggcgcctcagtgac

SEQ ID NO: 739100 - DNA, 15 bp, Homo sapiens
ggcgcctcagtgacg

SEQ ID NO: 739101 - DNA, 15 bp, Homo sapiens
gcgcctcagtgacgt

SEQ ID NO: 739102 - DNA, 15 bp, Homo sapiens
cgcctcagtgacgtt

SEQ ID NO: 739103 - DNA, 15 bp, Homo sapiens
gcctcagtgacgttg

SEQ ID NO: 739104 - DNA, 15 bp, Homo sapiens
cctcagtgacgttgt

SEQ ID NO: 739105 - DNA, 15 bp, Homo sapiens
ctcagtgacgttgtc

SEQ ID NO: 739106 - DNA, 15 bp, Homo sapiens
tcagtgacgttgtcg

SEQ ID NO: 739107 - DNA, 15 bp, Homo sapiens
cagtgacgttgtcgc

SEQ ID NO: 739108 - DNA, 15 bp, Homo sapiens
agtgacgttgtcgcc

SEQ ID NO: 739109 - DNA, 15 bp, Homo sapiens
gtgacgttgtcgcct

SEQ ID NO: 739110 - DNA, 15 bp, Homo sapiens
tgacgttgtcgcctc

SEQ ID NO: 739111 - DNA, 15 bp, Homo sapiens
gacgttgtcgcctct

SEQ ID NO: 739112 - DNA, 15 bp, Homo sapiens
acgttgtcgcctctt

SEQ ID NO: 739113 - DNA, 15 bp, Homo sapiens
cgttgtcgcctctta

SEQ ID NO: 739114 - DNA, 15 bp, Homo sapiens
gttgtcgcctcttac

SEQ ID NO: 739115 - DNA, 15 bp, Homo sapiens
ttgtcgcctcttact

SEQ ID NO: 739116 - DNA, 15 bp, Homo sapiens
tgtcgcctcttactg

SEQ ID NO: 739117 - DNA, 15 bp, Homo sapiens
gtcgcctcttactgc

SEQ ID NO: 739118 - DNA, 15 bp, Homo sapiens
tcgcctcttactgcg

SEQ ID NO: 739119 - DNA, 15 bp, Homo sapiens
cgcctcttactgcgc

SEQ ID NO: 739120 - DNA, 15 bp, Homo sapiens
gcctcttactgcgct

SEQ ID NO: 739121 - DNA, 15 bp, Homo sapiens
cctcttactgcgctg

SEQ ID NO: 739122 - DNA, 15 bp, Homo sapiens
ctcttactgcgctgg

SEQ ID NO: 739123 - DNA, 15 bp, Homo sapiens
tcttactgcgctggg

SEQ ID NO: 739124 - DNA, 15 bp, Homo sapiens
cttactgcgctgggg

SEQ ID NO: 739125 - DNA, 15 bp, Homo sapiens
ttactgcgctggggc

SEQ ID NO: 739126 - DNA, 15 bp, Homo sapiens
tactgcgctggggcc

SEQ ID NO: 739127 - DNA, 15 bp, Homo sapiens
actgcgctggggcct

SEQ ID NO: 739128 - DNA, 15 bp, Homo sapiens
ctgcgctggggcctg

SEQ ID NO: 739129 - DNA, 15 bp, Homo sapiens
tgcgctggggcctgg

SEQ ID NO: 739130 - DNA, 15 bp, Homo sapiens
gcgctggggcctggg

SEQ ID NO: 739131 - DNA, 15 bp, Homo sapiens
cgctggggcctgggc

SEQ ID NO: 739132 - DNA, 15 bp, Homo sapiens
gctggggcctgggct

SEQ ID NO: 739133 - DNA, 15 bp, Homo sapiens
ctggggcctgggctt

SEQ ID NO: 739134 - DNA, 15 bp, Homo sapiens
tggggcctgggcttc

SEQ ID NO: 739135 - DNA, 15 bp, Homo sapiens
ggggcctgggcttct

SEQ ID NO: 739136 - DNA, 15 bp, Homo sapiens
gggcctgggcttctc

SEQ ID NO: 739137 - DNA, 15 bp, Homo sapiens
ggcctgggcttctcg

SEQ ID NO: 739138 - DNA, 15 bp, Homo sapiens
gcctgggcttctcgg

SEQ ID NO: 739139 - DNA, 15 bp, Homo sapiens
cctgggcttctcggc

SEQ ID NO: 739140 - DNA, 15 bp, Homo sapiens
ctgggcttctcggct

SEQ ID NO: 739141 - DNA, 15 bp, Homo sapiens
tgggcttctcggctg

SEQ ID NO: 739142 - DNA, 15 bp, Homo sapiens
gggcttctcggctga

SEQ ID NO: 739143 - DNA, 15 bp, Homo sapiens
ggcttctcggctgag

SEQ ID NO: 739144 - DNA, 15 bp, Homo sapiens
gcttctcggctgaga

SEQ ID NO: 739145 - DNA, 15 bp, Homo sapiens
cttctcggctgagac

SEQ ID NO: 739146 - DNA, 15 bp, Homo sapiens
ttctcggctgagacc

SEQ ID NO: 739147 - DNA, 15 bp, Homo sapiens
tctcggctgagaccc

SEQ ID NO: 739148 - DNA, 15 bp, Homo sapiens
ctcggctgagaccct

SEQ ID NO: 739149 - DNA, 15 bp, Homo sapiens
tcggctgagaccctg

SEQ ID NO: 739150 - DNA, 15 bp, Homo sapiens
cggctgagaccctga

SEQ ID NO: 739151 - DNA, 15 bp, Homo sapiens
ggctgagaccctgaa

SEQ ID NO: 739152 - DNA, 15 bp, Homo sapiens
gctgagaccctgaaa

SEQ ID NO: 739153 - DNA, 15 bp, Homo sapiens
ctgagaccctgaaac

SEQ ID NO: 739154 - DNA, 15 bp, Homo sapiens
tgagaccctgaaact

SEQ ID NO: 739155 - DNA, 15 bp, Homo sapiens
gagaccctgaaactc

SEQ ID NO: 739156 - DNA, 15 bp, Homo sapiens
agaccctgaaactcc

SEQ ID NO: 739157 - DNA, 15 bp, Homo sapiens
gaccctgaaactcct

SEQ ID NO: 739158 - DNA, 15 bp, Homo sapiens
accctgaaactcctt

SEQ ID NO: 739159 - DNA, 15 bp, Homo sapiens
ccctgaaactccttt

SEQ ID NO: 739160 - DNA, 15 bp, Homo sapiens
cctgaaactcctttc

SEQ ID NO: 739161 - DNA, 15 bp, Homo sapiens
ctgaaactcctttcc

SEQ ID NO: 739162 - DNA, 15 bp, Homo sapiens
tgaaactcctttcct

SEQ ID NO: 739163 - DNA, 15 bp, Homo sapiens
gaaactcctttcctt

SEQ ID NO: 739164 - DNA, 15 bp, Homo sapiens
aaactcctttccttt

SEQ ID NO: 739165 - DNA, 15 bp, Homo sapiens
aactcctttcctttt

SEQ ID NO: 739166 - DNA, 15 bp, Homo sapiens
actcctttcctttta

SEQ ID NO: 739167 - DNA, 15 bp, Homo sapiens
ctcctttccttttat

SEQ ID NO: 739168 - DNA, 15 bp, Homo sapiens
tcctttccttttatc

SEQ ID NO: 739169 - DNA, 15 bp, Homo sapiens
cctttccttttatcc

SEQ ID NO: 739170 - DNA, 15 bp, Homo sapiens
ctttccttttatcct

SEQ ID NO: 739171 - DNA, 15 bp, Homo sapiens
tttccttttatcctc

SEQ ID NO: 739172 - DNA, 15 bp, Homo sapiens
ttccttttatcctct

SEQ ID NO: 739173 - DNA, 15 bp, Homo sapiens
tccttttatcctctc

SEQ ID NO: 739174 - DNA, 15 bp, Homo sapiens
ccttttatcctctca

SEQ ID NO: 739175 - DNA, 15 bp, Homo sapiens
cttttatcctctcag

SEQ ID NO: 739176 - DNA, 15 bp, Homo sapiens
ttttatcctctcagc

SEQ ID NO: 739177 - DNA, 15 bp, Homo sapiens
tttatcctctcagct

SEQ ID NO: 739178 - DNA, 15 bp, Homo sapiens
ttatcctctcagctt

SEQ ID NO: 739179 - DNA, 15 bp, Homo sapiens
tatcctctcagcttt

SEQ ID NO: 739180 - DNA, 15 bp, Homo sapiens
atcctctcagctttc

SEQ ID NO: 739181 - DNA, 15 bp, Homo sapiens
tcctctcagctttct

SEQ ID NO: 739182 - DNA, 15 bp, Homo sapiens
cctctcagctttctc

SEQ ID NO: 739183 - DNA, 15 bp, Homo sapiens
ctctcagctttctcc

SEQ ID NO: 739184 - DNA, 15 bp, Homo sapiens
tctcagctttctcca

SEQ ID NO: 739185 - DNA, 15 bp, Homo sapiens
ctcagctttctccat

SEQ ID NO: 739186 - DNA, 15 bp, Homo sapiens
tcagctttctccatt

SEQ ID NO: 739187 - DNA, 15 bp, Homo sapiens
cagctttctccattc

SEQ ID NO: 739188 - DNA, 15 bp, Homo sapiens
agctttctccattcc

SEQ ID NO: 739189 - DNA, 15 bp, Homo sapiens
gctttctccattcct

SEQ ID NO: 739190 - DNA, 15 bp, Homo sapiens
ctttctccattcctt

SEQ ID NO: 739191 - DNA, 15 bp, Homo sapiens
tttctccattccttc

SEQ ID NO: 739192 - DNA, 15 bp, Homo sapiens
ttctccattccttcc

SEQ ID NO: 739193 - DNA, 15 bp, Homo sapiens
tctccattccttcct

SEQ ID NO: 739194 - DNA, 15 bp, Homo sapiens
ctccattccttcctt

SEQ ID NO: 739195 - DNA, 15 bp, Homo sapiens
tccattccttccttt

SEQ ID NO: 739196 - DNA, 15 bp, Homo sapiens
ccattccttccttta

SEQ ID NO: 739197 - DNA, 15 bp, Homo sapiens
cattccttcctttac

SEQ ID NO: 739198 - DNA, 15 bp, Homo sapiens
attccttcctttact

SEQ ID NO: 739199 - DNA, 15 bp, Homo sapiens
ttccttcctttactc

SEQ ID NO: 739200 - DNA, 15 bp, Homo sapiens
tccttcctttactct

SEQ ID NO: 739201 - DNA, 15 bp, Homo sapiens
ccttcctttactcta

SEQ ID NO: 739202 - DNA, 15 bp, Homo sapiens
cttcctttactctac

SEQ ID NO: 739203 - DNA, 15 bp, Homo sapiens
ttcctttactctacg

SEQ ID NO: 739204 - DNA, 15 bp, Homo sapiens
tcctttactctacgt

SEQ ID NO: 739205 - DNA, 15 bp, Homo sapiens
cctttactctacgtc

SEQ ID NO: 739206 - DNA, 15 bp, Homo sapiens
ctttactctacgtct

SEQ ID NO: 739207 - DNA, 15 bp, Homo sapiens
tttactctacgtctc

SEQ ID NO: 739208 - DNA, 15 bp, Homo sapiens
ttactctacgtctct

SEQ ID NO: 739209 - DNA, 15 bp, Homo sapiens
tactctacgtctctg

SEQ ID NO: 739210 - DNA, 15 bp, Homo sapiens
actctacgtctctgt

SEQ ID NO: 739211 - DNA, 15 bp, Homo sapiens
ctctacgtctctgta

SEQ ID NO: 739212 - DNA, 15 bp, Homo sapiens
tctacgtctctgtac

SEQ ID NO: 739213 - DNA, 15 bp, Homo sapiens
ctacgtctctgtaca

SEQ ID NO: 739214 - DNA, 15 bp, Homo sapiens
tacgtctctgtacac

SEQ ID NO: 739215 - DNA, 15 bp, Homo sapiens
acgtctctgtacaca

SEQ ID NO: 739216 - DNA, 15 bp, Homo sapiens
cgtctctgtacacag

SEQ ID NO: 739217 - DNA, 15 bp, Homo sapiens
gtctctgtacacaga

SEQ ID NO: 739218 - DNA, 15 bp, Homo sapiens
tctctgtacacagag

SEQ ID NO: 739219 - DNA, 15 bp, Homo sapiens
ctctgtacacagagt

SEQ ID NO: 739220 - DNA, 15 bp, Homo sapiens
tctgtacacagagtg

SEQ ID NO: 739221 - DNA, 15 bp, Homo sapiens
ctgtacacagagtgt

SEQ ID NO: 739222 - DNA, 15 bp, Homo sapiens
tgtacacagagtgtg

SEQ ID NO: 739223 - DNA, 15 bp, Homo sapiens
gtacacagagtgtga

SEQ ID NO: 739224 - DNA, 15 bp, Homo sapiens
tacacagagtgtgat

SEQ ID NO: 739225 - DNA, 15 bp, Homo sapiens
acacagagtgtgatg

SEQ ID NO: 739226 - DNA, 15 bp, Homo sapiens
cacagagtgtgatgt

SEQ ID NO: 739227 - DNA, 15 bp, Homo sapiens
acagagtgtgatgtg

SEQ ID NO: 739228 - DNA, 15 bp, Homo sapiens
cagagtgtgatgtga

SEQ ID NO: 739229 - DNA, 15 bp, Homo sapiens
agagtgtgatgtgag

SEQ ID NO: 739230 - DNA, 15 bp, Homo sapiens
gagtgtgatgtgagg

SEQ ID NO: 739231 - DNA, 15 bp, Homo sapiens
agtgtgatgtgaggg

SEQ ID NO: 739232 - DNA, 15 bp, Homo sapiens
gtgtgatgtgagggt

SEQ ID NO: 739233 - DNA, 15 bp, Homo sapiens
tgtgatgtgagggtt

SEQ ID NO: 739234 - DNA, 15 bp, Homo sapiens
gtgatgtgagggttc

SEQ ID NO: 739235 - DNA, 15 bp, Homo sapiens
tgatgtgagggttca

SEQ ID NO: 739236 - DNA, 15 bp, Homo sapiens
gatgtgagggttcac

SEQ ID NO: 739237 - DNA, 15 bp, Homo sapiens
atgtgagggttcacc

SEQ ID NO: 739238 - DNA, 15 bp, Homo sapiens
tgtgagggttcaccc

SEQ ID NO: 739239 - DNA, 15 bp, Homo sapiens
gtgagggttcacccc

SEQ ID NO: 739240 - DNA, 15 bp, Homo sapiens
tgagggttcaccccg

SEQ ID NO: 739241 - DNA, 15 bp, Homo sapiens
gagggttcaccccgg

SEQ ID NO: 739242 - DNA, 15 bp, Homo sapiens
agggttcaccccggg

SEQ ID NO: 739243 - DNA, 15 bp, Homo sapiens
gggttcaccccgggc

SEQ ID NO: 739244 - DNA, 15 bp, Homo sapiens
ggttcaccccgggcg

SEQ ID NO: 739245 - DNA, 15 bp, Homo sapiens
gttcaccccgggcgc

SEQ ID NO: 739246 - DNA, 15 bp, Homo sapiens
ttcaccccgggcgcc

SEQ ID NO: 739247 - DNA, 15 bp, Homo sapiens
tcaccccgggcgccc

SEQ ID NO: 739248 - DNA, 15 bp, Homo sapiens
caccccgggcgcccg

SEQ ID NO: 739249 - DNA, 15 bp, Homo sapiens
accccgggcgcccgc

SEQ ID NO: 739250 - DNA, 15 bp, Homo sapiens
ccccgggcgcccgca

SEQ ID NO: 739251 - DNA, 15 bp, Homo sapiens
cccgggcgcccgcag

SEQ ID NO: 739252 - DNA, 15 bp, Homo sapiens
ccgggcgcccgcaga

SEQ ID NO: 739253 - DNA, 15 bp, Homo sapiens
cgggcgcccgcagat

SEQ ID NO: 739254 - DNA, 15 bp, Homo sapiens
gggcgcccgcagatc

SEQ ID NO: 739255 - DNA, 15 bp, Homo sapiens
ggcgcccgcagatcc

SEQ ID NO: 739256 - DNA, 15 bp, Homo sapiens
gcgcccgcagatccc

SEQ ID NO: 739257 - DNA, 15 bp, Homo sapiens
cgcccgcagatcccc

SEQ ID NO: 739258 - DNA, 15 bp, Homo sapiens
gcccgcagatccccc

SEQ ID NO: 739259 - DNA, 15 bp, Homo sapiens
cccgcagatccccca

SEQ ID NO: 739260 - DNA, 15 bp, Homo sapiens
ccgcagatcccccac

SEQ ID NO: 739261 - DNA, 15 bp, Homo sapiens
cgcagatcccccacg

SEQ ID NO: 739262 - DNA, 15 bp, Homo sapiens
gcagatcccccacgt

SEQ ID NO: 739263 - DNA, 15 bp, Homo sapiens
cagatcccccacgtt

SEQ ID NO: 739264 - DNA, 15 bp, Homo sapiens
agatcccccacgttc

SEQ ID NO: 739265 - DNA, 15 bp, Homo sapiens
gatcccccacgttcc

SEQ ID NO: 739266 - DNA, 15 bp, Homo sapiens
atcccccacgttccc

SEQ ID NO: 739267 - DNA, 15 bp, Homo sapiens
tcccccacgttcccc

SEQ ID NO: 739268 - DNA, 15 bp, Homo sapiens
cccccacgttcccca

SEQ ID NO: 739269 - DNA, 15 bp, Homo sapiens
ccccacgttccccag

SEQ ID NO: 739270 - DNA, 15 bp, Homo sapiens
cccacgttccccagc

SEQ ID NO: 739271 - DNA, 15 bp, Homo sapiens
ccacgttccccagca

SEQ ID NO: 739272 - DNA, 15 bp, Homo sapiens
cacgttccccagcac

SEQ ID NO: 739273 - DNA, 15 bp, Homo sapiens
acgttccccagcacg

SEQ ID NO: 739274 - DNA, 15 bp, Homo sapiens
cgttccccagcacgc

SEQ ID NO: 739275 - DNA, 15 bp, Homo sapiens
gttccccagcacgct

SEQ ID NO: 739276 - DNA, 15 bp, Homo sapiens
ttccccagcacgctt

SEQ ID NO: 739277 - DNA, 15 bp, Homo sapiens
tccccagcacgcttg

SEQ ID NO: 739278 - DNA, 15 bp, Homo sapiens
ccccagcacgcttgg

SEQ ID NO: 739279 - DNA, 15 bp, Homo sapiens
cccagcacgcttggg

SEQ ID NO: 739280 - DNA, 15 bp, Homo sapiens
ccagcacgcttggga

SEQ ID NO: 739281 - DNA, 15 bp, Homo sapiens
cagcacgcttgggat

SEQ ID NO: 739282 - DNA, 15 bp, Homo sapiens
agcacgcttgggatg

SEQ ID NO: 739283 - DNA, 15 bp, Homo sapiens
gcacgcttgggatgc

SEQ ID NO: 739284 - DNA, 15 bp, Homo sapiens
cacgcttgggatgca

SEQ ID NO: 739285 - DNA, 15 bp, Homo sapiens
acgcttgggatgcat

SEQ ID NO: 739286 - DNA, 15 bp, Homo sapiens
cgcttgggatgcatc

SEQ ID NO: 739287 - DNA, 15 bp, Homo sapiens
gcttgggatgcatct

SEQ ID NO: 739288 - DNA, 15 bp, Homo sapiens
cttgggatgcatctc

SEQ ID NO: 739289 - DNA, 15 bp, Homo sapiens
ttgggatgcatctcc

SEQ ID NO: 739290 - DNA, 15 bp, Homo sapiens
tgggatgcatctccc

SEQ ID NO: 739291 - DNA, 15 bp, Homo sapiens
gggatgcatctcccg

SEQ ID NO: 739292 - DNA, 15 bp, Homo sapiens
ggatgcatctcccga

SEQ ID NO: 739293 - DNA, 15 bp, Homo sapiens
gatgcatctcccgag

SEQ ID NO: 739294 - DNA, 15 bp, Homo sapiens
atgcatctcccgagt

SEQ ID NO: 739295 - DNA, 15 bp, Homo sapiens
tgcatctcccgagtg

SEQ ID NO: 739296 - DNA, 15 bp, Homo sapiens
gcatctcccgagtgc

SEQ ID NO: 739297 - DNA, 15 bp, Homo sapiens
catctcccgagtgcg

SEQ ID NO: 739298 - DNA, 15 bp, Homo sapiens
atctcccgagtgcgc

SEQ ID NO: 739299 - DNA, 15 bp, Homo sapiens
tctcccgagtgcgct

SEQ ID NO: 739300 - DNA, 15 bp, Homo sapiens
ctcccgagtgcgcta

SEQ ID NO: 739301 - DNA, 15 bp, Homo sapiens
tcccgagtgcgctag

SEQ ID NO: 739302 - DNA, 15 bp, Homo sapiens
cccgagtgcgctagg

SEQ ID NO: 739303 - DNA, 15 bp, Homo sapiens
ccgagtgcgctagga

SEQ ID NO: 739304 - DNA, 15 bp, Homo sapiens
cgagtgcgctaggaa

SEQ ID NO: 739305 - DNA, 15 bp, Homo sapiens
gagtgcgctaggaat

SEQ ID NO: 739306 - DNA, 15 bp, Homo sapiens
agtgcgctaggaatg

SEQ ID NO: 739307 - DNA, 15 bp, Homo sapiens
gtgcgctaggaatgg

SEQ ID NO: 739308 - DNA, 15 bp, Homo sapiens
tgcgctaggaatggg

SEQ ID NO: 739309 - DNA, 15 bp, Homo sapiens
gcgctaggaatgggc

SEQ ID NO: 739310 - DNA, 15 bp, Homo sapiens
cgctaggaatgggca

SEQ ID NO: 739311 - DNA, 15 bp, Homo sapiens
gctaggaatgggcag

SEQ ID NO: 739312 - DNA, 15 bp, Homo sapiens
ctaggaatgggcagc

SEQ ID NO: 739313 - DNA, 15 bp, Homo sapiens
taggaatgggcagcc

SEQ ID NO: 739314 - DNA, 15 bp, Homo sapiens
aggaatgggcagccc

SEQ ID NO: 739315 - DNA, 15 bp, Homo sapiens
ggaatgggcagcccc

SEQ ID NO: 739316 - DNA, 15 bp, Homo sapiens
gaatgggcagccccg

SEQ ID NO: 739317 - DNA, 15 bp, Homo sapiens
aatgggcagccccgt

SEQ ID NO: 739318 - DNA, 15 bp, Homo sapiens
atgggcagccccgtg

SEQ ID NO: 739319 - DNA, 15 bp, Homo sapiens
tgggcagccccgtgt

SEQ ID NO: 739320 - DNA, 15 bp, Homo sapiens
gggcagccccgtgtc

SEQ ID NO: 739321 - DNA, 15 bp, Homo sapiens
ggcagccccgtgtcc

SEQ ID NO: 739322 - DNA, 15 bp, Homo sapiens
gcagccccgtgtccc

SEQ ID NO: 739323 - DNA, 15 bp, Homo sapiens
cagccccgtgtcccc

SEQ ID NO: 739324 - DNA, 15 bp, Homo sapiens
agccccgtgtccccc

SEQ ID NO: 739325 - DNA, 15 bp, Homo sapiens
gccccgtgtcccccg

SEQ ID NO: 739326 - DNA, 15 bp, Homo sapiens
ccccgtgtcccccgc

SEQ ID NO: 739327 - DNA, 15 bp, Homo sapiens
cccgtgtcccccgcg

SEQ ID NO: 739328 - DNA, 15 bp, Homo sapiens
ccgtgtcccccgcgc

SEQ ID NO: 739329 - DNA, 15 bp, Homo sapiens
cgtgtcccccgcgcg

SEQ ID NO: 739330 - DNA, 15 bp, Homo sapiens
gtgtcccccgcgcga

SEQ ID NO: 739331 - DNA, 15 bp, Homo sapiens
tgtcccccgcgcgag

SEQ ID NO: 739332 - DNA, 15 bp, Homo sapiens
gtcccccgcgcgagt

SEQ ID NO: 739333 - DNA, 15 bp, Homo sapiens
tcccccgcgcgagtg

SEQ ID NO: 739334 - DNA, 15 bp, Homo sapiens
cccccgcgcgagtgc

SEQ ID NO: 739335 - DNA, 15 bp, Homo sapiens
ccccgcgcgagtgcc

SEQ ID NO: 739336 - DNA, 15 bp, Homo sapiens
cccgcgcgagtgccg

SEQ ID NO: 739337 - DNA, 15 bp, Homo sapiens
ccgcgcgagtgccga

SEQ ID NO: 739338 - DNA, 15 bp, Homo sapiens
cgcgcgagtgccgag

SEQ ID NO: 739339 - DNA, 15 bp, Homo sapiens
gcgcgagtgccgagc

SEQ ID NO: 739340 - DNA, 15 bp, Homo sapiens
cgcgagtgccgagcg

SEQ ID NO: 739341 - DNA, 15 bp, Homo sapiens
gcgagtgccgagcgg

SEQ ID NO: 739342 - DNA, 15 bp, Homo sapiens
cgagtgccgagcgga

SEQ ID NO: 739343 - DNA, 15 bp, Homo sapiens
gagtgccgagcggac

SEQ ID NO: 739344 - DNA, 15 bp, Homo sapiens
agtgccgagcggacc

SEQ ID NO: 739345 - DNA, 15 bp, Homo sapiens
gtgccgagcggaccg

SEQ ID NO: 739346 - DNA, 15 bp, Homo sapiens
tgccgagcggaccgg

SEQ ID NO: 739347 - DNA, 15 bp, Homo sapiens
gccgagcggaccggc

SEQ ID NO: 739348 - DNA, 15 bp, Homo sapiens
ccgagcggaccggcg

SEQ ID NO: 739349 - DNA, 15 bp, Homo sapiens
cgagcggaccggcgg

SEQ ID NO: 739350 - DNA, 15 bp, Homo sapiens
gagcggaccggcggg

SEQ ID NO: 739351 - DNA, 15 bp, Homo sapiens
agcggaccggcgggg

SEQ ID NO: 739352 - DNA, 15 bp, Homo sapiens
gcggaccggcggggg

SEQ ID NO: 739353 - DNA, 15 bp, Homo sapiens
cggaccggcgggggc

SEQ ID NO: 739354 - DNA, 15 bp, Homo sapiens
ggaccggcgggggca

SEQ ID NO: 739355 - DNA, 15 bp, Homo sapiens
gaccggcgggggcag

SEQ ID NO: 739356 - DNA, 15 bp, Homo sapiens
accggcgggggcaga

SEQ ID NO: 739357 - DNA, 15 bp, Homo sapiens
ccggcgggggcagag

SEQ ID NO: 739358 - DNA, 15 bp, Homo sapiens
cggcgggggcagagg

SEQ ID NO: 739359 - DNA, 15 bp, Homo sapiens
ggcgggggcagaggt

SEQ ID NO: 739360 - DNA, 15 bp, Homo sapiens
gcgggggcagaggtg

SEQ ID NO: 739361 - DNA, 15 bp, Homo sapiens
cgggggcagaggtga

SEQ ID NO: 739362 - DNA, 15 bp, Homo sapiens
gggggcagaggtgaa

SEQ ID NO: 739363 - DNA, 15 bp, Homo sapiens
ggggcagaggtgaat

SEQ ID NO: 739364 - DNA, 15 bp, Homo sapiens
gggcagaggtgaatt

SEQ ID NO: 739365 - DNA, 15 bp, Homo sapiens
ggcagaggtgaattg

SEQ ID NO: 739366 - DNA, 15 bp, Homo sapiens
gcagaggtgaattgc

SEQ ID NO: 739367 - DNA, 15 bp, Homo sapiens
cagaggtgaattgca

SEQ ID NO: 739368 - DNA, 15 bp, Homo sapiens
agaggtgaattgcac

SEQ ID NO: 739369 - DNA, 15 bp, Homo sapiens
gaggtgaattgcacg

SEQ ID NO: 739370 - DNA, 15 bp, Homo sapiens
aggtgaattgcacgc

SEQ ID NO: 739371 - DNA, 15 bp, Homo sapiens
ggtgaattgcacgcc

SEQ ID NO: 739372 - DNA, 15 bp, Homo sapiens
gtgaattgcacgcct

SEQ ID NO: 739373 - DNA, 15 bp, Homo sapiens
tgaattgcacgcctg

SEQ ID NO: 739374 - DNA, 15 bp, Homo sapiens
gaattgcacgcctgg

SEQ ID NO: 739375 - DNA, 15 bp, Homo sapiens
aattgcacgcctggg

SEQ ID NO: 739376 - DNA, 15 bp, Homo sapiens
attgcacgcctgggg

SEQ ID NO: 739377 - DNA, 15 bp, Homo sapiens
ttgcacgcctggggg

SEQ ID NO: 739378 - DNA, 15 bp, Homo sapiens
tgcacgcctgggggg

SEQ ID NO: 739379 - DNA, 15 bp, Homo sapiens
gcacgcctggggggc

SEQ ID NO: 739380 - DNA, 15 bp, Homo sapiens
cacgcctggggggcg

SEQ ID NO: 739381 - DNA, 15 bp, Homo sapiens
acgcctggggggcgg

SEQ ID NO: 739382 - DNA, 15 bp, Homo sapiens
cgcctggggggcggg

SEQ ID NO: 739383 - DNA, 15 bp, Homo sapiens
gcctggggggcgggc

SEQ ID NO: 739384 - DNA, 15 bp, Homo sapiens
cctggggggcgggcc

SEQ ID NO: 739385 - DNA, 15 bp, Homo sapiens
ctggggggcgggccg

SEQ ID NO: 739386 - DNA, 15 bp, Homo sapiens
tggggggcgggccgg

SEQ ID NO: 739387 - DNA, 15 bp, Homo sapiens
ggggggcgggccggg

SEQ ID NO: 739388 - DNA, 15 bp, Homo sapiens
gggggcgggccgggg

SEQ ID NO: 739389 - DNA, 15 bp, Homo sapiens
ggggcgggccggggc

SEQ ID NO: 739390 - DNA, 15 bp, Homo sapiens
gggcgggccggggcg

SEQ ID NO: 739391 - DNA, 15 bp, Homo sapiens
ggcgggccggggcgg

SEQ ID NO: 739392 - DNA, 15 bp, Homo sapiens
gcgggccggggcggg

SEQ ID NO: 739393 - DNA, 15 bp, Homo sapiens
cgggccggggcgggg

SEQ ID NO: 739394 - DNA, 15 bp, Homo sapiens
gggccggggcgggga

SEQ ID NO: 739395 - DNA, 15 bp, Homo sapiens
ggccggggcggggag

SEQ ID NO: 739396 - DNA, 15 bp, Homo sapiens
gccggggcggggagc

SEQ ID NO: 739397 - DNA, 15 bp, Homo sapiens
ccggggcggggagcc

SEQ ID NO: 739398 - DNA, 15 bp, Homo sapiens
cggggcggggagccg

SEQ ID NO: 739399 - DNA, 15 bp, Homo sapiens
ggggcggggagccga

SEQ ID NO: 739400 - DNA, 15 bp, Homo sapiens
gggcggggagccgag

SEQ ID NO: 739401 - DNA, 15 bp, Homo sapiens
ggcggggagccgagg

SEQ ID NO: 739402 - DNA, 15 bp, Homo sapiens
gcggggagccgaggt

SEQ ID NO: 739403 - DNA, 15 bp, Homo sapiens
cggggagccgaggtt

SEQ ID NO: 739404 - DNA, 15 bp, Homo sapiens
ggggagccgaggttg

SEQ ID NO: 739405 - DNA, 15 bp, Homo sapiens
gggagccgaggttgc

SEQ ID NO: 739406 - DNA, 15 bp, Homo sapiens
ggagccgaggttgct

SEQ ID NO: 739407 - DNA, 15 bp, Homo sapiens
gagccgaggttgctg

SEQ ID NO: 739408 - DNA, 15 bp, Homo sapiens
agccgaggttgctgg

SEQ ID NO: 739409 - DNA, 15 bp, Homo sapiens
gccgaggttgctggg

SEQ ID NO: 739410 - DNA, 15 bp, Homo sapiens
ccgaggttgctggga

SEQ ID NO: 739411 - DNA, 15 bp, Homo sapiens
cgaggttgctgggag

SEQ ID NO: 739412 - DNA, 15 bp, Homo sapiens
gaggttgctgggagc

SEQ ID NO: 739413 - DNA, 15 bp, Homo sapiens
aggttgctgggagct

SEQ ID NO: 739414 - DNA, 15 bp, Homo sapiens
ggttgctgggagctg

SEQ ID NO: 739415 - DNA, 15 bp, Homo sapiens
gttgctgggagctgg

SEQ ID NO: 739416 - DNA, 15 bp, Homo sapiens
ttgctgggagctggg

SEQ ID NO: 739417 - DNA, 15 bp, Homo sapiens
tgctgggagctgggt

SEQ ID NO: 739418 - DNA, 15 bp, Homo sapiens
gctgggagctgggtc

SEQ ID NO: 739419 - DNA, 15 bp, Homo sapiens
ctgggagctgggtct

SEQ ID NO: 739420 - DNA, 15 bp, Homo sapiens
tgggagctgggtctg

SEQ ID NO: 739421 - DNA, 15 bp, Homo sapiens
gggagctgggtctgg

SEQ ID NO: 739422 - DNA, 15 bp, Homo sapiens
ggagctgggtctgga

SEQ ID NO: 739423 - DNA, 15 bp, Homo sapiens
gagctgggtctggag

SEQ ID NO: 739424 - DNA, 15 bp, Homo sapiens
agctgggtctggagt

SEQ ID NO: 739425 - DNA, 15 bp, Homo sapiens
gctgggtctggagtc

SEQ ID NO: 739426 - DNA, 15 bp, Homo sapiens
ctgggtctggagtcc

SEQ ID NO: 739427 - DNA, 15 bp, Homo sapiens
tgggtctggagtccg

SEQ ID NO: 739428 - DNA, 15 bp, Homo sapiens
gggtctggagtccga

SEQ ID NO: 739429 - DNA, 15 bp, Homo sapiens
ggtctggagtccgag

SEQ ID NO: 739430 - DNA, 15 bp, Homo sapiens
gtctggagtccgagg

SEQ ID NO: 739431 - DNA, 15 bp, Homo sapiens
tctggagtccgagga

SEQ ID NO: 739432 - DNA, 15 bp, Homo sapiens
ctggagtccgaggac

SEQ ID NO: 739433 - DNA, 15 bp, Homo sapiens
tggagtccgaggacg

SEQ ID NO: 739434 - DNA, 15 bp, Homo sapiens
ggagtccgaggacgg

SEQ ID NO: 739435 - DNA, 15 bp, Homo sapiens
gagtccgaggacggg

SEQ ID NO: 739436 - DNA, 15 bp, Homo sapiens
agtccgaggacgggg

SEQ ID NO: 739437 - DNA, 15 bp, Homo sapiens
gtccgaggacgggga

SEQ ID NO: 739438 - DNA, 15 bp, Homo sapiens
tccgaggacggggag

SEQ ID NO: 739439 - DNA, 15 bp, Homo sapiens
ccgaggacggggagg

SEQ ID NO: 739440 - DNA, 15 bp, Homo sapiens
cgaggacggggaggg

SEQ ID NO: 739441 - DNA, 15 bp, Homo sapiens
gaggacggggagggg

SEQ ID NO: 739442 - DNA, 15 bp, Homo sapiens
aggacggggaggggg

SEQ ID NO: 739443 - DNA, 15 bp, Homo sapiens
ggacggggagggggc

SEQ ID NO: 739444 - DNA, 15 bp, Homo sapiens
gacggggagggggca

SEQ ID NO: 739445 - DNA, 15 bp, Homo sapiens
acggggagggggcat

SEQ ID NO: 739446 - DNA, 15 bp, Homo sapiens
cggggagggggcatg

SEQ ID NO: 739447 - DNA, 15 bp, Homo sapiens
ggggagggggcatgg

SEQ ID NO: 739448 - DNA, 15 bp, Homo sapiens
gggagggggcatggt

SEQ ID NO: 739449 - DNA, 15 bp, Homo sapiens
ggagggggcatggtc

SEQ ID NO: 739450 - DNA, 15 bp, Homo sapiens
gagggggcatggtcg

SEQ ID NO: 739451 - DNA, 15 bp, Homo sapiens
agggggcatggtcgc

SEQ ID NO: 739452 - DNA, 15 bp, Homo sapiens
gggggcatggtcgcc

SEQ ID NO: 739453 - DNA, 15 bp, Homo sapiens
ggggcatggtcgccc

SEQ ID NO: 739454 - DNA, 15 bp, Homo sapiens
gggcatggtcgcccc

SEQ ID NO: 739455 - DNA, 15 bp, Homo sapiens
ggcatggtcgccccc

SEQ ID NO: 739456 - DNA, 15 bp, Homo sapiens
gcatggtcgcccccc

SEQ ID NO: 739457 - DNA, 15 bp, Homo sapiens
catggtcgccccccg

SEQ ID NO: 739458 - DNA, 15 bp, Homo sapiens
atggtcgccccccgc

SEQ ID NO: 739459 - DNA, 15 bp, Homo sapiens
tggtcgccccccgcc

SEQ ID NO: 739460 - DNA, 15 bp, Homo sapiens
ggtcgccccccgccc

SEQ ID NO: 739461 - DNA, 15 bp, Homo sapiens
gtcgccccccgccct

SEQ ID NO: 739462 - DNA, 15 bp, Homo sapiens
tcgccccccgccctg

SEQ ID NO: 739463 - DNA, 15 bp, Homo sapiens
cgccccccgccctgt

SEQ ID NO: 739464 - DNA, 15 bp, Homo sapiens
gccccccgccctgtg

SEQ ID NO: 739465 - DNA, 15 bp, Homo sapiens
ccccccgccctgtga

SEQ ID NO: 739466 - DNA, 15 bp, Homo sapiens
cccccgccctgtgaa

SEQ ID NO: 739467 - DNA, 15 bp, Homo sapiens
ccccgccctgtgaac

SEQ ID NO: 739468 - DNA, 15 bp, Homo sapiens
cccgccctgtgaact

SEQ ID NO: 739469 - DNA, 15 bp, Homo sapiens
ccgccctgtgaactg

SEQ ID NO: 739470 - DNA, 15 bp, Homo sapiens
cgccctgtgaactgt

SEQ ID NO: 739471 - DNA, 15 bp, Homo sapiens
gccctgtgaactgtg

SEQ ID NO: 739472 - DNA, 15 bp, Homo sapiens
ccctgtgaactgtga

SEQ ID NO: 739473 - DNA, 15 bp, Homo sapiens
cctgtgaactgtgaa

SEQ ID NO: 739474 - DNA, 15 bp, Homo sapiens
ctgtgaactgtgaag

SEQ ID NO: 739475 - DNA, 15 bp, Homo sapiens
tgtgaactgtgaagt

SEQ ID NO: 739476 - DNA, 15 bp, Homo sapiens
gtgaactgtgaagtg

SEQ ID NO: 739477 - DNA, 15 bp, Homo sapiens
tgaactgtgaagtgc

SEQ ID NO: 739478 - DNA, 15 bp, Homo sapiens
gaactgtgaagtgcg

SEQ ID NO: 739479 - DNA, 15 bp, Homo sapiens
aactgtgaagtgcgc

SEQ ID NO: 739480 - DNA, 15 bp, Homo sapiens
actgtgaagtgcgcg

SEQ ID NO: 739481 - DNA, 15 bp, Homo sapiens
ctgtgaagtgcgcgg

SEQ ID NO: 739482 - DNA, 15 bp, Homo sapiens
tgtgaagtgcgcggc

SEQ ID NO: 739483 - DNA, 15 bp, Homo sapiens
gtgaagtgcgcggct

SEQ ID NO: 739484 - DNA, 15 bp, Homo sapiens
tgaagtgcgcggctc

SEQ ID NO: 739485 - DNA, 15 bp, Homo sapiens
gaagtgcgcggctcc

SEQ ID NO: 739486 - DNA, 15 bp, Homo sapiens
aagtgcgcggctccg

SEQ ID NO: 739487 - DNA, 15 bp, Homo sapiens
agtgcgcggctccgg

SEQ ID NO: 739488 - DNA, 15 bp, Homo sapiens
gtgcgcggctccggc

SEQ ID NO: 739489 - DNA, 15 bp, Homo sapiens
tgcgcggctccggcc

SEQ ID NO: 739490 - DNA, 15 bp, Homo sapiens
gcgcggctccggccg

SEQ ID NO: 739491 - DNA, 15 bp, Homo sapiens
cgcggctccggccga

SEQ ID NO: 739492 - DNA, 15 bp, Homo sapiens
gcggctccggccgag

SEQ ID NO: 739493 - DNA, 15 bp, Homo sapiens
cggctccggccgagc

SEQ ID NO: 739494 - DNA, 15 bp, Homo sapiens
ggctccggccgagcc

SEQ ID NO: 739495 - DNA, 15 bp, Homo sapiens
gctccggccgagccg

SEQ ID NO: 739496 - DNA, 15 bp, Homo sapiens
ctccggccgagccgg

SEQ ID NO: 739497 - DNA, 15 bp, Homo sapiens
tccggccgagccggt

SEQ ID NO: 739498 - DNA, 15 bp, Homo sapiens
ccggccgagccggtg

SEQ ID NO: 739499 - DNA, 15 bp, Homo sapiens
cggccgagccggtgg

SEQ ID NO: 739500 - DNA, 15 bp, Homo sapiens
ggccgagccggtggt

SEQ ID NO: 739501 - DNA, 15 bp, Homo sapiens
gccgagccggtggtt

SEQ ID NO: 739502 - DNA, 15 bp, Homo sapiens
ccgagccggtggttt

SEQ ID NO: 739503 - DNA, 15 bp, Homo sapiens
cgagccggtggtttc

SEQ ID NO: 739504 - DNA, 15 bp, Homo sapiens
gagccggtggtttcc

SEQ ID NO: 739505 - DNA, 15 bp, Homo sapiens
agccggtggtttcca

SEQ ID NO: 739506 - DNA, 15 bp, Homo sapiens
gccggtggtttccag

SEQ ID NO: 739507 - DNA, 15 bp, Homo sapiens
ccggtggtttccagc

SEQ ID NO: 739508 - DNA, 15 bp, Homo sapiens
cggtggtttccagcc

SEQ ID NO: 739509 - DNA, 15 bp, Homo sapiens
ggtggtttccagccg

SEQ ID NO: 739510 - DNA, 15 bp, Homo sapiens
gtggtttccagccgg

SEQ ID NO: 739511 - DNA, 15 bp, Homo sapiens
tggtttccagccggg

SEQ ID NO: 739512 - DNA, 15 bp, Homo sapiens
ggtttccagccgggc

SEQ ID NO: 739513 - DNA, 15 bp, Homo sapiens
gtttccagccgggcc

SEQ ID NO: 739514 - DNA, 15 bp, Homo sapiens
tttccagccgggcca

SEQ ID NO: 739515 - DNA, 15 bp, Homo sapiens
ttccagccgggccag

SEQ ID NO: 739516 - DNA, 15 bp, Homo sapiens
tccagccgggccagc

SEQ ID NO: 739517 - DNA, 15 bp, Homo sapiens
ccagccgggccagcc

SEQ ID NO: 739518 - DNA, 15 bp, Homo sapiens
cagccgggccagccg

SEQ ID NO: 739519 - DNA, 15 bp, Homo sapiens
agccgggccagccga

SEQ ID NO: 739520 - DNA, 15 bp, Homo sapiens
gccgggccagccgag

SEQ ID NO: 739521 - DNA, 15 bp, Homo sapiens
ccgggccagccgagc

SEQ ID NO: 739522 - DNA, 15 bp, Homo sapiens
cgggccagccgagcg

SEQ ID NO: 739523 - DNA, 15 bp, Homo sapiens
gggccagccgagcgc

SEQ ID NO: 739524 - DNA, 15 bp, Homo sapiens
ggccagccgagcgcg

SEQ ID NO: 739525 - DNA, 15 bp, Homo sapiens
gccagccgagcgcgg

SEQ ID NO: 739526 - DNA, 15 bp, Homo sapiens
ccagccgagcgcggc

SEQ ID NO: 739527 - DNA, 15 bp, Homo sapiens
cagccgagcgcggcg

SEQ ID NO: 739528 - DNA, 15 bp, Homo sapiens
agccgagcgcggcgg

SEQ ID NO: 739529 - DNA, 15 bp, Homo sapiens
gccgagcgcggcggc

SEQ ID NO: 739530 - DNA, 15 bp, Homo sapiens
ccgagcgcggcggct

SEQ ID NO: 739531 - DNA, 15 bp, Homo sapiens
cgagcgcggcggctg

SEQ ID NO: 739532 - DNA, 15 bp, Homo sapiens
gagcgcggcggctgc

SEQ ID NO: 739533 - DNA, 15 bp, Homo sapiens
agcgcggcggctgcg

SEQ ID NO: 739534 - DNA, 15 bp, Homo sapiens
gcgcggcggctgcgg

SEQ ID NO: 739535 - DNA, 15 bp, Homo sapiens
cgcggcggctgcggc

SEQ ID NO: 739536 - DNA, 15 bp, Homo sapiens
gcggcggctgcggcc

SEQ ID NO: 739537 - DNA, 15 bp, Homo sapiens
cggcggctgcggccg

SEQ ID NO: 739538 - DNA, 15 bp, Homo sapiens
ggcggctgcggccgc

SEQ ID NO: 739539 - DNA, 15 bp, Homo sapiens
gcggctgcggccgca

SEQ ID NO: 739540 - DNA, 15 bp, Homo sapiens
cggctgcggccgcag

SEQ ID NO: 739541 - DNA, 15 bp, Homo sapiens
ggctgcggccgcaga

SEQ ID NO: 739542 - DNA, 15 bp, Homo sapiens
gctgcggccgcagac

SEQ ID NO: 739543 - DNA, 15 bp, Homo sapiens
ctgcggccgcagacg

SEQ ID NO: 739544 - DNA, 15 bp, Homo sapiens
tgcggccgcagacgt

SEQ ID NO: 739545 - DNA, 15 bp, Homo sapiens
gcggccgcagacgtg

SEQ ID NO: 739546 - DNA, 15 bp, Homo sapiens
cggccgcagacgtgg

SEQ ID NO: 739547 - DNA, 15 bp, Homo sapiens
ggccgcagacgtgga

SEQ ID NO: 739548 - DNA, 15 bp, Homo sapiens
gccgcagacgtggag

SEQ ID NO: 739549 - DNA, 15 bp, Homo sapiens
ccgcagacgtggagg

SEQ ID NO: 739550 - DNA, 15 bp, Homo sapiens
cgcagacgtggagga

SEQ ID NO: 739551 - DNA, 15 bp, Homo sapiens
gcagacgtggaggag

SEQ ID NO: 739552 - DNA, 15 bp, Homo sapiens
cagacgtggaggagc

SEQ ID NO: 739553 - DNA, 15 bp, Homo sapiens
agacgtggaggagcg

SEQ ID NO: 739554 - DNA, 15 bp, Homo sapiens
gacgtggaggagcgg

SEQ ID NO: 739555 - DNA, 15 bp, Homo sapiens
acgtggaggagcgga

SEQ ID NO: 739556 - DNA, 15 bp, Homo sapiens
cgtggaggagcggag

SEQ ID NO: 739557 - DNA, 15 bp, Homo sapiens
gtggaggagcggagc

SEQ ID NO: 739558 - DNA, 15 bp, Homo sapiens
tggaggagcggagcg

SEQ ID NO: 739559 - DNA, 15 bp, Homo sapiens
ggaggagcggagcgc

SEQ ID NO: 739560 - DNA, 15 bp, Homo sapiens
gaggagcggagcgcc

SEQ ID NO: 739561 - DNA, 15 bp, Homo sapiens
aggagcggagcgccg

SEQ ID NO: 739562 - DNA, 15 bp, Homo sapiens
ggagcggagcgccga

SEQ ID NO: 739563 - DNA, 15 bp, Homo sapiens
gagcggagcgccgag

SEQ ID NO: 739564 - DNA, 15 bp, Homo sapiens
agcggagcgccgagg

SEQ ID NO: 739565 - DNA, 15 bp, Homo sapiens
gcggagcgccgaggc

SEQ ID NO: 739566 - DNA, 15 bp, Homo sapiens
cggagcgccgaggct

SEQ ID NO: 739567 - DNA, 15 bp, Homo sapiens
ggagcgccgaggctg

SEQ ID NO: 739568 - DNA, 15 bp, Homo sapiens
gagcgccgaggctgg

SEQ ID NO: 739569 - DNA, 15 bp, Homo sapiens
agcgccgaggctggc

SEQ ID NO: 739570 - DNA, 15 bp, Homo sapiens
gcgccgaggctggcg

SEQ ID NO: 739571 - DNA, 15 bp, Homo sapiens
cgccgaggctggcgc

SEQ ID NO: 739572 - DNA, 15 bp, Homo sapiens
gccgaggctggcgcc

SEQ ID NO: 739573 - DNA, 15 bp, Homo sapiens
ccgaggctggcgcca

SEQ ID NO: 739574 - DNA, 15 bp, Homo sapiens
cgaggctggcgccag

SEQ ID NO: 739575 - DNA, 15 bp, Homo sapiens
gaggctggcgccagg

SEQ ID NO: 739576 - DNA, 15 bp, Homo sapiens
aggctggcgccaggc

SEQ ID NO: 739577 - DNA, 15 bp, Homo sapiens
ggctggcgccaggcg

SEQ ID NO: 739578 - DNA, 15 bp, Homo sapiens
gctggcgccaggcgg

SEQ ID NO: 739579 - DNA, 15 bp, Homo sapiens
ctggcgccaggcggc

SEQ ID NO: 739580 - DNA, 15 bp, Homo sapiens
tggcgccaggcggcc

SEQ ID NO: 739581 - DNA, 15 bp, Homo sapiens
ggcgccaggcggcct

SEQ ID NO: 739582 - DNA, 15 bp, Homo sapiens
gcgccaggcggcctc

SEQ ID NO: 739583 - DNA, 15 bp, Homo sapiens
cgccaggcggcctct

SEQ ID NO: 739584 - DNA, 15 bp, Homo sapiens
gccaggcggcctctt

SEQ ID NO: 739585 - DNA, 15 bp, Homo sapiens
ccaggcggcctcttt

SEQ ID NO: 739586 - DNA, 15 bp, Homo sapiens
caggcggcctctttt

SEQ ID NO: 739587 - DNA, 15 bp, Homo sapiens
aggcggcctcttttg

SEQ ID NO: 739588 - DNA, 15 bp, Homo sapiens
ggcggcctcttttgt

SEQ ID NO: 739589 - DNA, 15 bp, Homo sapiens
gcggcctcttttgtt

SEQ ID NO: 739590 - DNA, 15 bp, Homo sapiens
cggcctcttttgttt

SEQ ID NO: 739591 - DNA, 15 bp, Homo sapiens
ggcctcttttgttta

SEQ ID NO: 739592 - DNA, 15 bp, Homo sapiens
gcctcttttgtttat

SEQ ID NO: 739593 - DNA, 15 bp, Homo sapiens
cctcttttgtttatc

SEQ ID NO: 739594 - DNA, 15 bp, Homo sapiens
ctcttttgtttatct

SEQ ID NO: 739595 - DNA, 15 bp, Homo sapiens
tcttttgtttatctg

SEQ ID NO: 739596 - DNA, 15 bp, Homo sapiens
cttttgtttatctga

SEQ ID NO: 739597 - DNA, 15 bp, Homo sapiens
ttttgtttatctgac

SEQ ID NO: 739598 - DNA, 15 bp, Homo sapiens
tttgtttatctgaca

SEQ ID NO: 739599 - DNA, 15 bp, Homo sapiens
ttgtttatctgacag

SEQ ID NO: 739600 - DNA, 15 bp, Homo sapiens
tgtttatctgacagc

SEQ ID NO: 739601 - DNA, 15 bp, Homo sapiens
gtttatctgacagct

SEQ ID NO: 739602 - DNA, 15 bp, Homo sapiens
tttatctgacagcta

SEQ ID NO: 739603 - DNA, 15 bp, Homo sapiens
ttatctgacagctaa

SEQ ID NO: 739604 - DNA, 15 bp, Homo sapiens
tatctgacagctaaa

SEQ ID NO: 739605 - DNA, 15 bp, Homo sapiens
atctgacagctaaat

SEQ ID NO: 739606 - DNA, 15 bp, Homo sapiens
tctgacagctaaata

SEQ ID NO: 739607 - DNA, 15 bp, Homo sapiens
ctgacagctaaatat

SEQ ID NO: 739608 - DNA, 15 bp, Homo sapiens
tgacagctaaatatc

SEQ ID NO: 739609 - DNA, 15 bp, Homo sapiens
gacagctaaatatca

SEQ ID NO: 739610 - DNA, 15 bp, Homo sapiens
acagctaaatatcaa

SEQ ID NO: 739611 - DNA, 15 bp, Homo sapiens
cagctaaatatcaag

SEQ ID NO: 739612 - DNA, 15 bp, Homo sapiens
agctaaatatcaagg

SEQ ID NO: 739613 - DNA, 15 bp, Homo sapiens
gctaaatatcaaggc

SEQ ID NO: 739614 - DNA, 15 bp, Homo sapiens
ctaaatatcaaggca

SEQ ID NO: 739615 - DNA, 15 bp, Homo sapiens
taaatatcaaggcaa

SEQ ID NO: 739616 - DNA, 15 bp, Homo sapiens
aaatatcaaggcaat

SEQ ID NO: 739617 - DNA, 15 bp, Homo sapiens
aatatcaaggcaatc

SEQ ID NO: 739618 - DNA, 15 bp, Homo sapiens
atatcaaggcaatca

SEQ ID NO: 739619 - DNA, 15 bp, Homo sapiens
tatcaaggcaatcac

SEQ ID NO: 739620 - DNA, 15 bp, Homo sapiens
atcaaggcaatcacc

SEQ ID NO: 739621 - DNA, 15 bp, Homo sapiens
tcaaggcaatcaccg

SEQ ID NO: 739622 - DNA, 15 bp, Homo sapiens
caaggcaatcaccgc

SEQ ID NO: 739623 - DNA, 15 bp, Homo sapiens
aaggcaatcaccgcc

SEQ ID NO: 739624 - DNA, 15 bp, Homo sapiens
aggcaatcaccgcct

SEQ ID NO: 739625 - DNA, 15 bp, Homo sapiens
ggcaatcaccgcctc

SEQ ID NO: 739626 - DNA, 15 bp, Homo sapiens
gcaatcaccgcctcg

SEQ ID NO: 739627 - DNA, 15 bp, Homo sapiens
caatcaccgcctcgc

SEQ ID NO: 739628 - DNA, 15 bp, Homo sapiens
aatcaccgcctcgcg

SEQ ID NO: 739629 - DNA, 15 bp, Homo sapiens
atcaccgcctcgcgg

SEQ ID NO: 739630 - DNA, 15 bp, Homo sapiens
tcaccgcctcgcggc

SEQ ID NO: 739631 - DNA, 15 bp, Homo sapiens
caccgcctcgcggcc

SEQ ID NO: 739632 - DNA, 15 bp, Homo sapiens
accgcctcgcggccc

SEQ ID NO: 739633 - DNA, 15 bp, Homo sapiens
ccgcctcgcggccct

SEQ ID NO: 739634 - DNA, 15 bp, Homo sapiens
cgcctcgcggccctg

SEQ ID NO: 739635 - DNA, 15 bp, Homo sapiens
gcctcgcggccctgc

SEQ ID NO: 739636 - DNA, 15 bp, Homo sapiens
cctcgcggccctgcc

SEQ ID NO: 739637 - DNA, 15 bp, Homo sapiens
ctcgcggccctgcct

SEQ ID NO: 739638 - DNA, 15 bp, Homo sapiens
tcgcggccctgcctc

SEQ ID NO: 739639 - DNA, 15 bp, Homo sapiens
cgcggccctgcctcc

SEQ ID NO: 739640 - DNA, 15 bp, Homo sapiens
gcggccctgcctcca

SEQ ID NO: 739641 - DNA, 15 bp, Homo sapiens
cggccctgcctccaa

SEQ ID NO: 739642 - DNA, 15 bp, Homo sapiens
ggccctgcctccaac

SEQ ID NO: 739643 - DNA, 15 bp, Homo sapiens
gccctgcctccaacc

SEQ ID NO: 739644 - DNA, 15 bp, Homo sapiens
ccctgcctccaaccc

SEQ ID NO: 739645 - DNA, 15 bp, Homo sapiens
cctgcctccaacccc

SEQ ID NO: 739646 - DNA, 15 bp, Homo sapiens
ctgcctccaaccccc

SEQ ID NO: 739647 - DNA, 15 bp, Homo sapiens
tgcctccaaccccca

SEQ ID NO: 739648 - DNA, 15 bp, Homo sapiens
gcctccaacccccac

SEQ ID NO: 739649 - DNA, 15 bp, Homo sapiens
cctccaacccccaca

SEQ ID NO: 739650 - DNA, 15 bp, Homo sapiens
ctccaacccccacag

SEQ ID NO: 739651 - DNA, 15 bp, Homo sapiens
tccaacccccacagc

SEQ ID NO: 739652 - DNA, 15 bp, Homo sapiens
ccaacccccacagct

SEQ ID NO: 739653 - DNA, 15 bp, Homo sapiens
caacccccacagcta

SEQ ID NO: 739654 - DNA, 15 bp, Homo sapiens
aacccccacagctaa

SEQ ID NO: 739655 - DNA, 15 bp, Homo sapiens
acccccacagctaag

SEQ ID NO: 739656 - DNA, 15 bp, Homo sapiens
cccccacagctaaga

SEQ ID NO: 739657 - DNA, 15 bp, Homo sapiens
ccccacagctaagac

SEQ ID NO: 739658 - DNA, 15 bp, Homo sapiens
cccacagctaagaca

SEQ ID NO: 739659 - DNA, 15 bp, Homo sapiens
ccacagctaagacaa

SEQ ID NO: 739660 - DNA, 15 bp, Homo sapiens
cacagctaagacaaa

SEQ ID NO: 739661 - DNA, 15 bp, Homo sapiens
acagctaagacaaac

SEQ ID NO: 739662 - DNA, 15 bp, Homo sapiens
cagctaagacaaaca

SEQ ID NO: 739663 - DNA, 15 bp, Homo sapiens
agctaagacaaacag

SEQ ID NO: 739664 - DNA, 15 bp, Homo sapiens
gctaagacaaacagt

SEQ ID NO: 739665 - DNA, 15 bp, Homo sapiens
ctaagacaaacagtt

SEQ ID NO: 739666 - DNA, 15 bp, Homo sapiens
taagacaaacagttg

SEQ ID NO: 739667 - DNA, 15 bp, Homo sapiens
aagacaaacagttgg

SEQ ID NO: 739668 - DNA, 15 bp, Homo sapiens
agacaaacagttggg

SEQ ID NO: 739669 - DNA, 15 bp, Homo sapiens
gacaaacagttgggc

SEQ ID NO: 739670 - DNA, 15 bp, Homo sapiens
acaaacagttgggct

SEQ ID NO: 739671 - DNA, 15 bp, Homo sapiens
caaacagttgggcta

SEQ ID NO: 739672 - DNA, 15 bp, Homo sapiens
aaacagttgggctaa

SEQ ID NO: 739673 - DNA, 15 bp, Homo sapiens
aacagttgggctaaa

SEQ ID NO: 739674 - DNA, 15 bp, Homo sapiens
acagttgggctaaaa

SEQ ID NO: 739675 - DNA, 15 bp, Homo sapiens
cagttgggctaaaag

SEQ ID NO: 739676 - DNA, 15 bp, Homo sapiens
agttgggctaaaaga

SEQ ID NO: 739677 - DNA, 15 bp, Homo sapiens
gttgggctaaaagaa

SEQ ID NO: 739678 - DNA, 15 bp, Homo sapiens
ttgggctaaaagaat

SEQ ID NO: 739679 - DNA, 15 bp, Homo sapiens
tgggctaaaagaatg

SEQ ID NO: 739680 - DNA, 15 bp, Homo sapiens
gggctaaaagaatgc

SEQ ID NO: 739681 - DNA, 15 bp, Homo sapiens
ggctaaaagaatgcc

SEQ ID NO: 739682 - DNA, 15 bp, Homo sapiens
gctaaaagaatgcct

SEQ ID NO: 739683 - DNA, 15 bp, Homo sapiens
ctaaaagaatgcctc

SEQ ID NO: 739684 - DNA, 15 bp, Homo sapiens
taaaagaatgcctct

SEQ ID NO: 739685 - DNA, 15 bp, Homo sapiens
aaaagaatgcctctg

SEQ ID NO: 739686 - DNA, 15 bp, Homo sapiens
aaagaatgcctctgt

SEQ ID NO: 739687 - DNA, 15 bp, Homo sapiens
aagaatgcctctgtt

SEQ ID NO: 739688 - DNA, 15 bp, Homo sapiens
agaatgcctctgtta

SEQ ID NO: 739689 - DNA, 15 bp, Homo sapiens
gaatgcctctgttat

SEQ ID NO: 739690 - DNA, 15 bp, Homo sapiens
aatgcctctgttatc

SEQ ID NO: 739691 - DNA, 15 bp, Homo sapiens
atgcctctgttatca

SEQ ID NO: 739692 - DNA, 15 bp, Homo sapiens
tgcctctgttatcat

SEQ ID NO: 739693 - DNA, 15 bp, Homo sapiens
gcctctgttatcata

SEQ ID NO: 739694 - DNA, 15 bp, Homo sapiens
cctctgttatcataa

SEQ ID NO: 739695 - DNA, 15 bp, Homo sapiens
ctctgttatcataag

SEQ ID NO: 739696 - DNA, 15 bp, Homo sapiens
tctgttatcataagt

SEQ ID NO: 739697 - DNA, 15 bp, Homo sapiens
ctgttatcataagtt

SEQ ID NO: 739698 - DNA, 15 bp, Homo sapiens
tgttatcataagttt

SEQ ID NO: 739699 - DNA, 15 bp, Homo sapiens
gttatcataagtttc

SEQ ID NO: 739700 - DNA, 15 bp, Homo sapiens
ttatcataagtttct

SEQ ID NO: 739701 - DNA, 15 bp, Homo sapiens
tatcataagtttcta

SEQ ID NO: 739702 - DNA, 15 bp, Homo sapiens
atcataagtttctat

SEQ ID NO: 739703 - DNA, 15 bp, Homo sapiens
tcataagtttctatc

SEQ ID NO: 739704 - DNA, 15 bp, Homo sapiens
cataagtttctatct

SEQ ID NO: 739705 - DNA, 15 bp, Homo sapiens
ataagtttctatctc

SEQ ID NO: 739706 - DNA, 15 bp, Homo sapiens
taagtttctatctct

SEQ ID NO: 739707 - DNA, 15 bp, Homo sapiens
aagtttctatctctc

SEQ ID NO: 739708 - DNA, 15 bp, Homo sapiens
agtttctatctctct

SEQ ID NO: 739709 - DNA, 15 bp, Homo sapiens
gtttctatctctctt

SEQ ID NO: 739710 - DNA, 15 bp, Homo sapiens
tttctatctctcttc

SEQ ID NO: 739711 - DNA, 15 bp, Homo sapiens
ttctatctctcttct

SEQ ID NO: 739712 - DNA, 15 bp, Homo sapiens
tctatctctcttctc

SEQ ID NO: 739713 - DNA, 15 bp, Homo sapiens
ctatctctcttctca

SEQ ID NO: 739714 - DNA, 15 bp, Homo sapiens
tatctctcttctcat

SEQ ID NO: 739715 - DNA, 15 bp, Homo sapiens
atctctcttctcatg

SEQ ID NO: 739716 - DNA, 15 bp, Homo sapiens
tctctcttctcatgg

SEQ ID NO: 739717 - DNA, 15 bp, Homo sapiens
ctctcttctcatggc

SEQ ID NO: 739718 - DNA, 15 bp, Homo sapiens
tctcttctcatggct

SEQ ID NO: 739719 - DNA, 15 bp, Homo sapiens
ctcttctcatggctg

SEQ ID NO: 739720 - DNA, 15 bp, Homo sapiens
tcttctcatggctgg

SEQ ID NO: 739721 - DNA, 15 bp, Homo sapiens
cttctcatggctggg

SEQ ID NO: 739722 - DNA, 15 bp, Homo sapiens
ttctcatggctgggc

SEQ ID NO: 739723 - DNA, 15 bp, Homo sapiens
tctcatggctgggcc

SEQ ID NO: 739724 - DNA, 15 bp, Homo sapiens
ctcatggctgggcct

SEQ ID NO: 739725 - DNA, 15 bp, Homo sapiens
tcatggctgggcctt

SEQ ID NO: 739726 - DNA, 15 bp, Homo sapiens
catggctgggccttt

SEQ ID NO: 739727 - DNA, 15 bp, Homo sapiens
atggctgggccttta

SEQ ID NO: 739728 - DNA, 15 bp, Homo sapiens
tggctgggcctttat

SEQ ID NO: 739729 - DNA, 15 bp, Homo sapiens
ggctgggcctttatt

SEQ ID NO: 739730 - DNA, 15 bp, Homo sapiens
gctgggcctttattt

SEQ ID NO: 739731 - DNA, 15 bp, Homo sapiens
ctgggcctttatttt

SEQ ID NO: 739732 - DNA, 15 bp, Homo sapiens
tgggcctttattttc

SEQ ID NO: 739733 - DNA, 15 bp, Homo sapiens
gggcctttattttct

SEQ ID NO: 739734 - DNA, 15 bp, Homo sapiens
ggcctttattttctc

SEQ ID NO: 739735 - DNA, 15 bp, Homo sapiens
gcctttattttctct

SEQ ID NO: 739736 - DNA, 15 bp, Homo sapiens
cctttattttctctt

SEQ ID NO: 739737 - DNA, 15 bp, Homo sapiens
ctttattttctcttg

SEQ ID NO: 739738 - DNA, 15 bp, Homo sapiens
tttattttctcttgc

SEQ ID NO: 739739 - DNA, 15 bp, Homo sapiens
ttattttctcttgct

SEQ ID NO: 739740 - DNA, 15 bp, Homo sapiens
tattttctcttgctt

SEQ ID NO: 739741 - DNA, 15 bp, Homo sapiens
attttctcttgcttt

SEQ ID NO: 739742 - DNA, 15 bp, Homo sapiens
ttttctcttgctttt

SEQ ID NO: 739743 - DNA, 15 bp, Homo sapiens
tttctcttgcttttt

SEQ ID NO: 739744 - DNA, 15 bp, Homo sapiens
ttctcttgctttttt

SEQ ID NO: 739745 - DNA, 15 bp, Homo sapiens
tctcttgctttttta

SEQ ID NO: 739746 - DNA, 15 bp, Homo sapiens
ctcttgcttttttaa

SEQ ID NO: 739747 - DNA, 15 bp, Homo sapiens
tcttgcttttttaat

SEQ ID NO: 739748 - DNA, 15 bp, Homo sapiens
cttgcttttttaatt

SEQ ID NO: 739749 - DNA, 15 bp, Homo sapiens
ttgcttttttaattt

SEQ ID NO: 739750 - DNA, 15 bp, Homo sapiens
tgcttttttaatttc

SEQ ID NO: 739751 - DNA, 15 bp, Homo sapiens
gcttttttaatttca

SEQ ID NO: 739752 - DNA, 15 bp, Homo sapiens
cttttttaatttcag

SEQ ID NO: 739753 - DNA, 15 bp, Homo sapiens
ttttttaatttcaga

SEQ ID NO: 739754 - DNA, 15 bp, Homo sapiens
tttttaatttcagag

SEQ ID NO: 739755 - DNA, 15 bp, Homo sapiens
ttttaatttcagagt

SEQ ID NO: 739756 - DNA, 15 bp, Homo sapiens
tttaatttcagagtc

SEQ ID NO: 739757 - DNA, 15 bp, Homo sapiens
ttaatttcagagtct

SEQ ID NO: 739758 - DNA, 15 bp, Homo sapiens
taatttcagagtctc

SEQ ID NO: 739759 - DNA, 15 bp, Homo sapiens
aatttcagagtctcc

SEQ ID NO: 739760 - DNA, 15 bp, Homo sapiens
atttcagagtctccc

SEQ ID NO: 739761 - DNA, 15 bp, Homo sapiens
tttcagagtctcccc

SEQ ID NO: 739762 - DNA, 15 bp, Homo sapiens
ttcagagtctccccc

SEQ ID NO: 739763 - DNA, 15 bp, Homo sapiens
tcagagtctcccccc

SEQ ID NO: 739764 - DNA, 15 bp, Homo sapiens
cagagtctccccccc

SEQ ID NO: 739765 - DNA, 15 bp, Homo sapiens
agagtctcccccccc

SEQ ID NO: 739766 - DNA, 15 bp, Homo sapiens
gagtctcccccccct

SEQ ID NO: 739767 - DNA, 15 bp, Homo sapiens
agtctcccccccctc

SEQ ID NO: 739768 - DNA, 15 bp, Homo sapiens
gtctcccccccctcc

SEQ ID NO: 739769 - DNA, 15 bp, Homo sapiens
tctcccccccctcct

SEQ ID NO: 739770 - DNA, 15 bp, Homo sapiens
ctcccccccctcctt

SEQ ID NO: 739771 - DNA, 15 bp, Homo sapiens
tcccccccctcctta

SEQ ID NO: 739772 - DNA, 15 bp, Homo sapiens
cccccccctccttac

SEQ ID NO: 739773 - DNA, 15 bp, Homo sapiens
ccccccctccttact

SEQ ID NO: 739774 - DNA, 15 bp, Homo sapiens
cccccctccttactc

SEQ ID NO: 739775 - DNA, 15 bp, Homo sapiens
ccccctccttactcc

SEQ ID NO: 739776 - DNA, 15 bp, Homo sapiens
cccctccttactcca

SEQ ID NO: 739777 - DNA, 15 bp, Homo sapiens
ccctccttactccag

SEQ ID NO: 739778 - DNA, 15 bp, Homo sapiens
cctccttactccaga

SEQ ID NO: 739779 - DNA, 15 bp, Homo sapiens
ctccttactccagat

SEQ ID NO: 739780 - DNA, 15 bp, Homo sapiens
tccttactccagata

SEQ ID NO: 739781 - DNA, 15 bp, Homo sapiens
ccttactccagatac

SEQ ID NO: 739782 - DNA, 15 bp, Homo sapiens
cttactccagatacc

SEQ ID NO: 739783 - DNA, 15 bp, Homo sapiens
ttactccagataccc

SEQ ID NO: 739784 - DNA, 15 bp, Homo sapiens
tactccagatacccg

SEQ ID NO: 739785 - DNA, 15 bp, Homo sapiens
actccagatacccga

SEQ ID NO: 739786 - DNA, 15 bp, Homo sapiens
ctccagatacccgat

SEQ ID NO: 739787 - DNA, 15 bp, Homo sapiens
tccagatacccgatg

SEQ ID NO: 739788 - DNA, 15 bp, Homo sapiens
ccagatacccgatgg

SEQ ID NO: 739789 - DNA, 15 bp, Homo sapiens
cagatacccgatgga

SEQ ID NO: 739790 - DNA, 15 bp, Homo sapiens
agatacccgatggat

SEQ ID NO: 739791 - DNA, 15 bp, Homo sapiens
gatacccgatggatt

SEQ ID NO: 739792 - DNA, 15 bp, Homo sapiens
atacccgatggattt

SEQ ID NO: 739793 - DNA, 15 bp, Homo sapiens
tacccgatggatttt

SEQ ID NO: 739794 - DNA, 15 bp, Homo sapiens
acccgatggattttc

SEQ ID NO: 739795 - DNA, 15 bp, Homo sapiens
cccgatggattttct

SEQ ID NO: 739796 - DNA, 15 bp, Homo sapiens
ccgatggattttctc

SEQ ID NO: 739797 - DNA, 15 bp, Homo sapiens
cgatggattttctca

SEQ ID NO: 739798 - DNA, 15 bp, Homo sapiens
gatggattttctcaa

SEQ ID NO: 739799 - DNA, 15 bp, Homo sapiens
atggattttctcaaa

SEQ ID NO: 739800 - DNA, 15 bp, Homo sapiens
tggattttctcaaac

SEQ ID NO: 739801 - DNA, 15 bp, Homo sapiens
ggattttctcaaacc

SEQ ID NO: 739802 - DNA, 15 bp, Homo sapiens
gattttctcaaacca

SEQ ID NO: 739803 - DNA, 15 bp, Homo sapiens
attttctcaaaccaa

SEQ ID NO: 739804 - DNA, 15 bp, Homo sapiens
ttttctcaaaccaac

SEQ ID NO: 739805 - DNA, 15 bp, Homo sapiens
tttctcaaaccaact

SEQ ID NO: 739806 - DNA, 15 bp, Homo sapiens
ttctcaaaccaactg

SEQ ID NO: 739807 - DNA, 15 bp, Homo sapiens
tctcaaaccaactgg

SEQ ID NO: 739808 - DNA, 15 bp, Homo sapiens
ctcaaaccaactggt

SEQ ID NO: 739809 - DNA, 15 bp, Homo sapiens
tcaaaccaactggtg

SEQ ID NO: 739810 - DNA, 15 bp, Homo sapiens
caaaccaactggtga

SEQ ID NO: 739811 - DNA, 15 bp, Homo sapiens
aaaccaactggtgag

SEQ ID NO: 739812 - DNA, 15 bp, Homo sapiens
aaccaactggtgagt

SEQ ID NO: 739813 - DNA, 15 bp, Homo sapiens
accaactggtgagta

SEQ ID NO: 739814 - DNA, 15 bp, Homo sapiens
ccaactggtgagtag

SEQ ID NO: 739815 - DNA, 15 bp, Homo sapiens
caactggtgagtaga

SEQ ID NO: 739816 - DNA, 15 bp, Homo sapiens
aactggtgagtagat

SEQ ID NO: 739817 - DNA, 15 bp, Homo sapiens
actggtgagtagatg

SEQ ID NO: 739818 - DNA, 15 bp, Homo sapiens
ctggtgagtagatga

SEQ ID NO: 739819 - DNA, 15 bp, Homo sapiens
tggtgagtagatgat

SEQ ID NO: 739820 - DNA, 15 bp, Homo sapiens
ggtgagtagatgatt

SEQ ID NO: 739821 - DNA, 15 bp, Homo sapiens
gtgagtagatgattt

SEQ ID NO: 739822 - DNA, 15 bp, Homo sapiens
tgagtagatgatttt

SEQ ID NO: 739823 - DNA, 15 bp, Homo sapiens
gagtagatgattttt

SEQ ID NO: 739824 - DNA, 15 bp, Homo sapiens
agtagatgattttta

SEQ ID NO: 739825 - DNA, 15 bp, Homo sapiens
gtagatgatttttaa

SEQ ID NO: 739826 - DNA, 15 bp, Homo sapiens
tagatgatttttaaa

SEQ ID NO: 739827 - DNA, 15 bp, Homo sapiens
agatgatttttaaaa

SEQ ID NO: 739828 - DNA, 15 bp, Homo sapiens
gatgatttttaaaat

SEQ ID NO: 739829 - DNA, 15 bp, Homo sapiens
atgatttttaaaata

SEQ ID NO: 739830 - DNA, 15 bp, Homo sapiens
tgatttttaaaatat

SEQ ID NO: 739831 - DNA, 15 bp, Homo sapiens
gatttttaaaatatc

SEQ ID NO: 739832 - DNA, 15 bp, Homo sapiens
atttttaaaatatcc

SEQ ID NO: 739833 - DNA, 15 bp, Homo sapiens
tttttaaaatatcct

SEQ ID NO: 739834 - DNA, 15 bp, Homo sapiens
ttttaaaatatcctg

SEQ ID NO: 739835 - DNA, 15 bp, Homo sapiens
tttaaaatatcctgc

SEQ ID NO: 739836 - DNA, 15 bp, Homo sapiens
ttaaaatatcctgct

SEQ ID NO: 739837 - DNA, 15 bp, Homo sapiens
taaaatatcctgctt

SEQ ID NO: 739838 - DNA, 15 bp, Homo sapiens
aaaatatcctgctta

SEQ ID NO: 739839 - DNA, 15 bp, Homo sapiens
aaatatcctgcttat

SEQ ID NO: 739840 - DNA, 15 bp, Homo sapiens
aatatcctgcttatc

SEQ ID NO: 739841 - DNA, 15 bp, Homo sapiens
atatcctgcttatct

SEQ ID NO: 739842 - DNA, 15 bp, Homo sapiens
tatcctgcttatctt

SEQ ID NO: 739843 - DNA, 15 bp, Homo sapiens
atcctgcttatctta

SEQ ID NO: 739844 - DNA, 15 bp, Homo sapiens
tcctgcttatcttaa

SEQ ID NO: 739845 - DNA, 15 bp, Homo sapiens
cctgcttatcttaag

SEQ ID NO: 739846 - DNA, 15 bp, Homo sapiens
ctgcttatcttaagt

SEQ ID NO: 739847 - DNA, 15 bp, Homo sapiens
tgcttatcttaagtt

SEQ ID NO: 739848 - DNA, 15 bp, Homo sapiens
gcttatcttaagtta

SEQ ID NO: 739849 - DNA, 15 bp, Homo sapiens
cttatcttaagttag

SEQ ID NO: 739850 - DNA, 15 bp, Homo sapiens
ttatcttaagttaga

SEQ ID NO: 739851 - DNA, 15 bp, Homo sapiens
tatcttaagttagaa

SEQ ID NO: 739852 - DNA, 15 bp, Homo sapiens
atcttaagttagaaa

SEQ ID NO: 739853 - DNA, 15 bp, Homo sapiens
tcttaagttagaaat

SEQ ID NO: 739854 - DNA, 15 bp, Homo sapiens
cttaagttagaaata

SEQ ID NO: 739855 - DNA, 15 bp, Homo sapiens
ttaagttagaaatag

SEQ ID NO: 739856 - DNA, 15 bp, Homo sapiens
taagttagaaataga

SEQ ID NO: 739857 - DNA, 15 bp, Homo sapiens
aagttagaaatagag

SEQ ID NO: 739858 - DNA, 15 bp, Homo sapiens
agttagaaatagagc

SEQ ID NO: 739859 - DNA, 15 bp, Homo sapiens
gttagaaatagagcc

SEQ ID NO: 739860 - DNA, 15 bp, Homo sapiens
ttagaaatagagcct

SEQ ID NO: 739861 - DNA, 15 bp, Homo sapiens
tagaaatagagcctc

SEQ ID NO: 739862 - DNA, 15 bp, Homo sapiens
agaaatagagcctct

SEQ ID NO: 739863 - DNA, 15 bp, Homo sapiens
gaaatagagcctcta

SEQ ID NO: 739864 - DNA, 15 bp, Homo sapiens
aaatagagcctctag

SEQ ID NO: 739865 - DNA, 15 bp, Homo sapiens
aatagagcctctaga

SEQ ID NO: 739866 - DNA, 15 bp, Homo sapiens
atagagcctctagaa

SEQ ID NO: 739867 - DNA, 15 bp, Homo sapiens
tagagcctctagaac

SEQ ID NO: 739868 - DNA, 15 bp, Homo sapiens
agagcctctagaacg

SEQ ID NO: 739869 - DNA, 15 bp, Homo sapiens
gagcctctagaacgt

SEQ ID NO: 739870 - DNA, 15 bp, Homo sapiens
agcctctagaacgtg

SEQ ID NO: 739871 - DNA, 15 bp, Homo sapiens
gcctctagaacgtgg

SEQ ID NO: 739872 - DNA, 15 bp, Homo sapiens
cctctagaacgtggc

SEQ ID NO: 739873 - DNA, 15 bp, Homo sapiens
ctctagaacgtggct

SEQ ID NO: 739874 - DNA, 15 bp, Homo sapiens
tctagaacgtggctt

SEQ ID NO: 739875 - DNA, 15 bp, Homo sapiens
ctagaacgtggcttt

SEQ ID NO: 739876 - DNA, 15 bp, Homo sapiens
tagaacgtggctttt

SEQ ID NO: 739877 - DNA, 15 bp, Homo sapiens
agaacgtggcttttt

SEQ ID NO: 739878 - DNA, 15 bp, Homo sapiens
gaacgtggctttttg

SEQ ID NO: 739879 - DNA, 15 bp, Homo sapiens
aacgtggctttttgt

SEQ ID NO: 739880 - DNA, 15 bp, Homo sapiens
acgtggctttttgtg

SEQ ID NO: 739881 - DNA, 15 bp, Homo sapiens
cgtggctttttgtgt

SEQ ID NO: 739882 - DNA, 15 bp, Homo sapiens
gtggctttttgtgtg

SEQ ID NO: 739883 - DNA, 15 bp, Homo sapiens
tggctttttgtgtgt

SEQ ID NO: 739884 - DNA, 15 bp, Homo sapiens
ggctttttgtgtgta

SEQ ID NO: 739885 - DNA, 15 bp, Homo sapiens
gctttttgtgtgtag

SEQ ID NO: 739886 - DNA, 15 bp, Homo sapiens
ctttttgtgtgtagg

SEQ ID NO: 739887 - DNA, 15 bp, Homo sapiens
tttttgtgtgtaggc

SEQ ID NO: 739888 - DNA, 15 bp, Homo sapiens
ttttgtgtgtaggca

SEQ ID NO: 739889 - DNA, 15 bp, Homo sapiens
tttgtgtgtaggcaa

SEQ ID NO: 739890 - DNA, 15 bp, Homo sapiens
ttgtgtgtaggcaaa

SEQ ID NO: 739891 - DNA, 15 bp, Homo sapiens
tgtgtgtaggcaaag

SEQ ID NO: 739892 - DNA, 15 bp, Homo sapiens
gtgtgtaggcaaagg

SEQ ID NO: 739893 - DNA, 15 bp, Homo sapiens
tgtgtaggcaaaggc

SEQ ID NO: 739894 - DNA, 15 bp, Homo sapiens
gtgtaggcaaaggct

SEQ ID NO: 739895 - DNA, 15 bp, Homo sapiens
tgtaggcaaaggctt

SEQ ID NO: 739896 - DNA, 15 bp, Homo sapiens
gtaggcaaaggcttg

SEQ ID NO: 739897 - DNA, 15 bp, Homo sapiens
taggcaaaggcttgg

SEQ ID NO: 739898 - DNA, 15 bp, Homo sapiens
aggcaaaggcttggg

SEQ ID NO: 739899 - DNA, 15 bp, Homo sapiens
ggcaaaggcttgggg

SEQ ID NO: 739900 - DNA, 15 bp, Homo sapiens
gcaaaggcttgggga

SEQ ID NO: 739901 - DNA, 15 bp, Homo sapiens
caaaggcttggggag

SEQ ID NO: 739902 - DNA, 15 bp, Homo sapiens
aaaggcttggggagg

SEQ ID NO: 739903 - DNA, 15 bp, Homo sapiens
aaggcttggggaggt

SEQ ID NO: 739904 - DNA, 15 bp, Homo sapiens
aggcttggggaggtg

SEQ ID NO: 739905 - DNA, 15 bp, Homo sapiens
ggcttggggaggtgc

SEQ ID NO: 739906 - DNA, 15 bp, Homo sapiens
gcttggggaggtgct

SEQ ID NO: 739907 - DNA, 15 bp, Homo sapiens
cttggggaggtgctg

SEQ ID NO: 739908 - DNA, 15 bp, Homo sapiens
ttggggaggtgctgg

SEQ ID NO: 739909 - DNA, 15 bp, Homo sapiens
tggggaggtgctggg

SEQ ID NO: 739910 - DNA, 15 bp, Homo sapiens
ggggaggtgctgggc

SEQ ID NO: 739911 - DNA, 15 bp, Homo sapiens
gggaggtgctgggct

SEQ ID NO: 739912 - DNA, 15 bp, Homo sapiens
ggaggtgctgggctt

SEQ ID NO: 739913 - DNA, 15 bp, Homo sapiens
gaggtgctgggcttc

SEQ ID NO: 739914 - DNA, 15 bp, Homo sapiens
aggtgctgggcttca

SEQ ID NO: 739915 - DNA, 15 bp, Homo sapiens
ggtgctgggcttcac

SEQ ID NO: 739916 - DNA, 15 bp, Homo sapiens
gtgctgggcttcacg

SEQ ID NO: 739917 - DNA, 15 bp, Homo sapiens
tgctgggcttcacgt

SEQ ID NO: 739918 - DNA, 15 bp, Homo sapiens
gctgggcttcacgtt

SEQ ID NO: 739919 - DNA, 15 bp, Homo sapiens
ctgggcttcacgttg

SEQ ID NO: 739920 - DNA, 15 bp, Homo sapiens
tgggcttcacgttgg

SEQ ID NO: 739921 - DNA, 15 bp, Homo sapiens
gggcttcacgttggt

SEQ ID NO: 739922 - DNA, 15 bp, Homo sapiens
ggcttcacgttggtt

SEQ ID NO: 739923 - DNA, 15 bp, Homo sapiens
gcttcacgttggttc

SEQ ID NO: 739924 - DNA, 15 bp, Homo sapiens
cttcacgttggttct

SEQ ID NO: 739925 - DNA, 15 bp, Homo sapiens
ttcacgttggttcta

SEQ ID NO: 739926 - DNA, 15 bp, Homo sapiens
tcacgttggttctag

SEQ ID NO: 739927 - DNA, 15 bp, Homo sapiens
cacgttggttctagg

SEQ ID NO: 739928 - DNA, 15 bp, Homo sapiens
acgttggttctaggt

SEQ ID NO: 739929 - DNA, 15 bp, Homo sapiens
cgttggttctaggtt

SEQ ID NO: 739930 - DNA, 15 bp, Homo sapiens
gttggttctaggttt

SEQ ID NO: 739931 - DNA, 15 bp, Homo sapiens
ttggttctaggtttc

SEQ ID NO: 739932 - DNA, 15 bp, Homo sapiens
tggttctaggtttcc

SEQ ID NO: 739933 - DNA, 15 bp, Homo sapiens
ggttctaggtttcct

SEQ ID NO: 739934 - DNA, 15 bp, Homo sapiens
gttctaggtttcctc

SEQ ID NO: 739935 - DNA, 15 bp, Homo sapiens
ttctaggtttcctct

SEQ ID NO: 739936 - DNA, 15 bp, Homo sapiens
tctaggtttcctctg

SEQ ID NO: 739937 - DNA, 15 bp, Homo sapiens
ctaggtttcctctgt

SEQ ID NO: 739938 - DNA, 15 bp, Homo sapiens
taggtttcctctgtt

SEQ ID NO: 739939 - DNA, 15 bp, Homo sapiens
aggtttcctctgttg

SEQ ID NO: 739940 - DNA, 15 bp, Homo sapiens
ggtttcctctgttgg

SEQ ID NO: 739941 - DNA, 15 bp, Homo sapiens
gtttcctctgttgga

SEQ ID NO: 739942 - DNA, 15 bp, Homo sapiens
tttcctctgttggaa

SEQ ID NO: 739943 - DNA, 15 bp, Homo sapiens
ttcctctgttggaag

SEQ ID NO: 739944 - DNA, 15 bp, Homo sapiens
tcctctgttggaagt

SEQ ID NO: 739945 - DNA, 15 bp, Homo sapiens
cctctgttggaagtt

SEQ ID NO: 739946 - DNA, 15 bp, Homo sapiens
ctctgttggaagttt

SEQ ID NO: 739947 - DNA, 15 bp, Homo sapiens
tctgttggaagtttg

SEQ ID NO: 739948 - DNA, 15 bp, Homo sapiens
ctgttggaagtttgg

SEQ ID NO: 739949 - DNA, 15 bp, Homo sapiens
tgttggaagtttggt

SEQ ID NO: 739950 - DNA, 15 bp, Homo sapiens
gttggaagtttggtg

SEQ ID NO: 739951 - DNA, 15 bp, Homo sapiens
ttggaagtttggtga

SEQ ID NO: 739952 - DNA, 15 bp, Homo sapiens
tggaagtttggtgaa

SEQ ID NO: 739953 - DNA, 15 bp, Homo sapiens
ggaagtttggtgaat

SEQ ID NO: 739954 - DNA, 15 bp, Homo sapiens
gaagtttggtgaatt

SEQ ID NO: 739955 - DNA, 15 bp, Homo sapiens
aagtttggtgaattt

SEQ ID NO: 739956 - DNA, 15 bp, Homo sapiens
agtttggtgaatttt

SEQ ID NO: 739957 - DNA, 15 bp, Homo sapiens
gtttggtgaattttt

SEQ ID NO: 739958 - DNA, 15 bp, Homo sapiens
tttggtgaatttttc

SEQ ID NO: 739959 - DNA, 15 bp, Homo sapiens
ttggtgaatttttct

SEQ ID NO: 739960 - DNA, 15 bp, Homo sapiens
tggtgaatttttctg

SEQ ID NO: 739961 - DNA, 15 bp, Homo sapiens
ggtgaatttttctgt

SEQ ID NO: 739962 - DNA, 15 bp, Homo sapiens
gtgaatttttctgtt

SEQ ID NO: 739963 - DNA, 15 bp, Homo sapiens
tgaatttttctgttg

SEQ ID NO: 739964 - DNA, 15 bp, Homo sapiens
gaatttttctgttgt

SEQ ID NO: 739965 - DNA, 15 bp, Homo sapiens
aatttttctgttgtg

SEQ ID NO: 739966 - DNA, 15 bp, Homo sapiens
atttttctgttgtgg

SEQ ID NO: 739967 - DNA, 15 bp, Homo sapiens
tttttctgttgtggc

SEQ ID NO: 739968 - DNA, 15 bp, Homo sapiens
ttttctgttgtggct

SEQ ID NO: 739969 - DNA, 15 bp, Homo sapiens
tttctgttgtggctg

SEQ ID NO: 739970 - DNA, 15 bp, Homo sapiens
ttctgttgtggctgg

SEQ ID NO: 739971 - DNA, 15 bp, Homo sapiens
tctgttgtggctggg

SEQ ID NO: 739972 - DNA, 15 bp, Homo sapiens
ggttactcacccaaa

SEQ ID NO: 739973 - DNA, 15 bp, Homo sapiens
gttactcacccaaaa

SEQ ID NO: 739974 - DNA, 15 bp, Homo sapiens
ttactcacccaaaac

SEQ ID NO: 739975 - DNA, 15 bp, Homo sapiens
tactcacccaaaacg

SEQ ID NO: 739976 - DNA, 15 bp, Homo sapiens
actcacccaaaacgt

SEQ ID NO: 739977 - DNA, 15 bp, Homo sapiens
ctcacccaaaacgtt

SEQ ID NO: 739978 - DNA, 15 bp, Homo sapiens
tcacccaaaacgttt

SEQ ID NO: 739979 - DNA, 15 bp, Homo sapiens
cacccaaaacgtttt

SEQ ID NO: 739980 - DNA, 15 bp, Homo sapiens
acccaaaacgttttg

SEQ ID NO: 739981 - DNA, 15 bp, Homo sapiens
cccaaaacgttttgt

SEQ ID NO: 739982 - DNA, 15 bp, Homo sapiens
ccaaaacgttttgtt

SEQ ID NO: 739983 - DNA, 15 bp, Homo sapiens
caaaacgttttgttg

SEQ ID NO: 739984 - DNA, 15 bp, Homo sapiens
aaaacgttttgttga

SEQ ID NO: 739985 - DNA, 15 bp, Homo sapiens
aaacgttttgttgaa

SEQ ID NO: 739986 - DNA, 15 bp, Homo sapiens
aacgttttgttgaaa

SEQ ID NO: 739987 - DNA, 15 bp, Homo sapiens
acgttttgttgaaaa

SEQ ID NO: 739988 - DNA, 15 bp, Homo sapiens
cgttttgttgaaaat

SEQ ID NO: 739989 - DNA, 15 bp, Homo sapiens
gttttgttgaaaata

SEQ ID NO: 739990 - DNA, 15 bp, Homo sapiens
ttttgttgaaaatag

SEQ ID NO: 739991 - DNA, 15 bp, Homo sapiens
tttgttgaaaataga

SEQ ID NO: 739992 - DNA, 15 bp, Homo sapiens
ttgttgaaaatagaa

SEQ ID NO: 739993 - DNA, 15 bp, Homo sapiens
tgttgaaaatagaac

SEQ ID NO: 739994 - DNA, 15 bp, Homo sapiens
gttgaaaatagaaca

SEQ ID NO: 739995 - DNA, 15 bp, Homo sapiens
ttgaaaatagaacaa

SEQ ID NO: 739996 - DNA, 15 bp, Homo sapiens
tgaaaatagaacaaa

SEQ ID NO: 739997 - DNA, 15 bp, Homo sapiens
gaaaatagaacaaaa

SEQ ID NO: 739998 - DNA, 15 bp, Homo sapiens
aaaatagaacaaaaa

SEQ ID NO: 739999 - DNA, 15 bp, Homo sapiens
aaatagaacaaaaaa

SEQ ID NO: 740000 - DNA, 15 bp, Homo sapiens
aatagaacaaaaaaa

SEQ ID NO: 740001 - DNA, 15 bp, Homo sapiens
atagaacaaaaaaag

SEQ ID NO: 740002 - DNA, 15 bp, Homo sapiens
tagaacaaaaaaaga

SEQ ID NO: 740003 - DNA, 15 bp, Homo sapiens
agaacaaaaaaagaa

SEQ ID NO: 740004 - DNA, 15 bp, Homo sapiens
gaacaaaaaaagaaa

SEQ ID NO: 740005 - DNA, 15 bp, Homo sapiens
aacaaaaaaagaaat

SEQ ID NO: 740006 - DNA, 15 bp, Homo sapiens
acaaaaaaagaaatg

SEQ ID NO: 740007 - DNA, 15 bp, Homo sapiens
caaaaaaagaaatga

SEQ ID NO: 740008 - DNA, 15 bp, Homo sapiens
aaaaaaagaaatgag

SEQ ID NO: 740009 - DNA, 15 bp, Homo sapiens
aaaaaagaaatgaga

SEQ ID NO: 740010 - DNA, 15 bp, Homo sapiens
aaaaagaaatgagaa

SEQ ID NO: 740011 - DNA, 15 bp, Homo sapiens
aaaagaaatgagaaa

SEQ ID NO: 740012 - DNA, 15 bp, Homo sapiens
aaagaaatgagaaaa

SEQ ID NO: 740013 - DNA, 15 bp, Homo sapiens
aagaaatgagaaaag

SEQ ID NO: 740014 - DNA, 15 bp, Homo sapiens
agaaatgagaaaagg

SEQ ID NO: 740015 - DNA, 15 bp, Homo sapiens
gaaatgagaaaaggc

SEQ ID NO: 740016 - DNA, 15 bp, Homo sapiens
aaatgagaaaaggcg

SEQ ID NO: 740017 - DNA, 15 bp, Homo sapiens
aatgagaaaaggcgc

SEQ ID NO: 740018 - DNA, 15 bp, Homo sapiens
atgagaaaaggcgct

SEQ ID NO: 740019 - DNA, 15 bp, Homo sapiens
tgagaaaaggcgctg

SEQ ID NO: 740020 - DNA, 15 bp, Homo sapiens
gagaaaaggcgctgc

SEQ ID NO: 740021 - DNA, 15 bp, Homo sapiens
agaaaaggcgctgct

SEQ ID NO: 740022 - DNA, 15 bp, Homo sapiens
gaaaaggcgctgctg

SEQ ID NO: 740023 - DNA, 15 bp, Homo sapiens
aaaaggcgctgctgt

SEQ ID NO: 740024 - DNA, 15 bp, Homo sapiens
aaaggcgctgctgtg

SEQ ID NO: 740025 - DNA, 15 bp, Homo sapiens
aaggcgctgctgtgt

SEQ ID NO: 740026 - DNA, 15 bp, Homo sapiens
aggcgctgctgtgta

SEQ ID NO: 740027 - DNA, 15 bp, Homo sapiens
ggcgctgctgtgtaa

SEQ ID NO: 740028 - DNA, 15 bp, Homo sapiens
gcgctgctgtgtaag

SEQ ID NO: 740029 - DNA, 15 bp, Homo sapiens
cgctgctgtgtaaga

SEQ ID NO: 740030 - DNA, 15 bp, Homo sapiens
gctgctgtgtaagaa

SEQ ID NO: 740031 - DNA, 15 bp, Homo sapiens
ctgctgtgtaagaat

SEQ ID NO: 740032 - DNA, 15 bp, Homo sapiens
tgctgtgtaagaatt

SEQ ID NO: 740033 - DNA, 15 bp, Homo sapiens
gctgtgtaagaattt

SEQ ID NO: 740034 - DNA, 15 bp, Homo sapiens
ctgtgtaagaattta

SEQ ID NO: 740035 - DNA, 15 bp, Homo sapiens
tgtgtaagaatttag

SEQ ID NO: 740036 - DNA, 15 bp, Homo sapiens
gtgtaagaatttagc

SEQ ID NO: 740037 - DNA, 15 bp, Homo sapiens
tgtaagaatttagca

SEQ ID NO: 740038 - DNA, 15 bp, Homo sapiens
gtaagaatttagcat

SEQ ID NO: 740039 - DNA, 15 bp, Homo sapiens
taagaatttagcatc

SEQ ID NO: 740040 - DNA, 15 bp, Homo sapiens
aagaatttagcatca

SEQ ID NO: 740041 - DNA, 15 bp, Homo sapiens
agaatttagcatcag

SEQ ID NO: 740042 - DNA, 15 bp, Homo sapiens
gaatttagcatcagt

SEQ ID NO: 740043 - DNA, 15 bp, Homo sapiens
aatttagcatcagta

SEQ ID NO: 740044 - DNA, 15 bp, Homo sapiens
atttagcatcagtaa

SEQ ID NO: 740045 - DNA, 15 bp, Homo sapiens
tttagcatcagtaat

SEQ ID NO: 740046 - DNA, 15 bp, Homo sapiens
ttagcatcagtaata

SEQ ID NO: 740047 - DNA, 15 bp, Homo sapiens
tagcatcagtaatag

SEQ ID NO: 740048 - DNA, 15 bp, Homo sapiens
agcatcagtaataga

SEQ ID NO: 740049 - DNA, 15 bp, Homo sapiens
gcatcagtaatagac

SEQ ID NO: 740050 - DNA, 15 bp, Homo sapiens
catcagtaatagaca

SEQ ID NO: 740051 - DNA, 15 bp, Homo sapiens
atcagtaatagacaa

SEQ ID NO: 740052 - DNA, 15 bp, Homo sapiens
tcagtaatagacaaa

SEQ ID NO: 740053 - DNA, 15 bp, Homo sapiens
cagtaatagacaaag

SEQ ID NO: 740054 - DNA, 15 bp, Homo sapiens
agtaatagacaaagc

SEQ ID NO: 740055 - DNA, 15 bp, Homo sapiens
gtaatagacaaagcc

SEQ ID NO: 740056 - DNA, 15 bp, Homo sapiens
taatagacaaagccc

SEQ ID NO: 740057 - DNA, 15 bp, Homo sapiens
aatagacaaagcccc

SEQ ID NO: 740058 - DNA, 15 bp, Homo sapiens
atagacaaagccccc

SEQ ID NO: 740059 - DNA, 15 bp, Homo sapiens
tagacaaagccccca

SEQ ID NO: 740060 - DNA, 15 bp, Homo sapiens
agacaaagcccccac

SEQ ID NO: 740061 - DNA, 15 bp, Homo sapiens
gacaaagcccccacg

SEQ ID NO: 740062 - DNA, 15 bp, Homo sapiens
acaaagcccccacga

SEQ ID NO: 740063 - DNA, 15 bp, Homo sapiens
caaagcccccacgaa

SEQ ID NO: 740064 - DNA, 15 bp, Homo sapiens
aaagcccccacgaag

SEQ ID NO: 740065 - DNA, 15 bp, Homo sapiens
aagcccccacgaagg

SEQ ID NO: 740066 - DNA, 15 bp, Homo sapiens
agcccccacgaaggg

SEQ ID NO: 740067 - DNA, 15 bp, Homo sapiens
gcccccacgaaggga

SEQ ID NO: 740068 - DNA, 15 bp, Homo sapiens
cccccacgaagggaa

SEQ ID NO: 740069 - DNA, 15 bp, Homo sapiens
ccccacgaagggaat

SEQ ID NO: 740070 - DNA, 15 bp, Homo sapiens
cccacgaagggaatt

SEQ ID NO: 740071 - DNA, 15 bp, Homo sapiens
ccacgaagggaattg

SEQ ID NO: 740072 - DNA, 15 bp, Homo sapiens
cacgaagggaattgt

SEQ ID NO: 740073 - DNA, 15 bp, Homo sapiens
acgaagggaattgtc

SEQ ID NO: 740074 - DNA, 15 bp, Homo sapiens
cgaagggaattgtcc

SEQ ID NO: 740075 - DNA, 15 bp, Homo sapiens
gaagggaattgtcct

SEQ ID NO: 740076 - DNA, 15 bp, Homo sapiens
aagggaattgtcctg

SEQ ID NO: 740077 - DNA, 15 bp, Homo sapiens
agggaattgtcctgc

SEQ ID NO: 740078 - DNA, 15 bp, Homo sapiens
gggaattgtcctgcc

SEQ ID NO: 740079 - DNA, 15 bp, Homo sapiens
ggaattgtcctgcca

SEQ ID NO: 740080 - DNA, 15 bp, Homo sapiens
gaattgtcctgccac

SEQ ID NO: 740081 - DNA, 15 bp, Homo sapiens
aattgtcctgccaca

SEQ ID NO: 740082 - DNA, 15 bp, Homo sapiens
attgtcctgccacat

SEQ ID NO: 740083 - DNA, 15 bp, Homo sapiens
ttgtcctgccacatt

SEQ ID NO: 740084 - DNA, 15 bp, Homo sapiens
tgtcctgccacattg

SEQ ID NO: 740085 - DNA, 15 bp, Homo sapiens
gtcctgccacattgg

SEQ ID NO: 740086 - DNA, 15 bp, Homo sapiens
tcctgccacattgga

SEQ ID NO: 740087 - DNA, 15 bp, Homo sapiens
cctgccacattggag

SEQ ID NO: 740088 - DNA, 15 bp, Homo sapiens
ctgccacattggagg

SEQ ID NO: 740089 - DNA, 15 bp, Homo sapiens
tgccacattggagga

SEQ ID NO: 740090 - DNA, 15 bp, Homo sapiens
gccacattggaggac

SEQ ID NO: 740091 - DNA, 15 bp, Homo sapiens
ccacattggaggaca

SEQ ID NO: 740092 - DNA, 15 bp, Homo sapiens
cacattggaggacag

SEQ ID NO: 740093 - DNA, 15 bp, Homo sapiens
acattggaggacagc

SEQ ID NO: 740094 - DNA, 15 bp, Homo sapiens
cattggaggacagcc

SEQ ID NO: 740095 - DNA, 15 bp, Homo sapiens
attggaggacagcca

SEQ ID NO: 740096 - DNA, 15 bp, Homo sapiens
ttggaggacagccag

SEQ ID NO: 740097 - DNA, 15 bp, Homo sapiens
tggaggacagccagg

SEQ ID NO: 740098 - DNA, 15 bp, Homo sapiens
ggaggacagccaggt

SEQ ID NO: 740099 - DNA, 15 bp, Homo sapiens
gaggacagccaggtc

SEQ ID NO: 740100 - DNA, 15 bp, Homo sapiens
aggacagccaggtct

SEQ ID NO: 740101 - DNA, 15 bp, Homo sapiens
ggacagccaggtctg

SEQ ID NO: 740102 - DNA, 15 bp, Homo sapiens
gacagccaggtctgg

SEQ ID NO: 740103 - DNA, 15 bp, Homo sapiens
acagccaggtctgga

SEQ ID NO: 740104 - DNA, 15 bp, Homo sapiens
cagccaggtctggag

SEQ ID NO: 740105 - DNA, 15 bp, Homo sapiens
agccaggtctggagc

SEQ ID NO: 740106 - DNA, 15 bp, Homo sapiens
gccaggtctggagct

SEQ ID NO: 740107 - DNA, 15 bp, Homo sapiens
ccaggtctggagctg

SEQ ID NO: 740108 - DNA, 15 bp, Homo sapiens
caggtctggagctgg

SEQ ID NO: 740109 - DNA, 15 bp, Homo sapiens
aggtctggagctgga

SEQ ID NO: 740110 - DNA, 15 bp, Homo sapiens
ggtctggagctggag

SEQ ID NO: 740111 - DNA, 15 bp, Homo sapiens
gtctggagctggagc

SEQ ID NO: 740112 - DNA, 15 bp, Homo sapiens
tctggagctggagca

SEQ ID NO: 740113 - DNA, 15 bp, Homo sapiens
ctggagctggagcac

SEQ ID NO: 740114 - DNA, 15 bp, Homo sapiens
tggagctggagcaca

SEQ ID NO: 740115 - DNA, 15 bp, Homo sapiens
ggagctggagcacac

SEQ ID NO: 740116 - DNA, 15 bp, Homo sapiens
gagctggagcacacc

SEQ ID NO: 740117 - DNA, 15 bp, Homo sapiens
agctggagcacaccc

SEQ ID NO: 740118 - DNA, 15 bp, Homo sapiens
gctggagcacacccc

SEQ ID NO: 740119 - DNA, 15 bp, Homo sapiens
ctggagcacaccccc

SEQ ID NO: 740120 - DNA, 15 bp, Homo sapiens
tggagcacacccccc

SEQ ID NO: 740121 - DNA, 15 bp, Homo sapiens
ggagcacaccccccc

SEQ ID NO: 740122 - DNA, 15 bp, Homo sapiens
gagcacacccccccc

SEQ ID NO: 740123 - DNA, 15 bp, Homo sapiens
agcacaccccccccg

SEQ ID NO: 740124 - DNA, 15 bp, Homo sapiens
gcacaccccccccgc

SEQ ID NO: 740125 - DNA, 15 bp, Homo sapiens
cacaccccccccgcc

SEQ ID NO: 740126 - DNA, 15 bp, Homo sapiens
acaccccccccgccc

SEQ ID NO: 740127 - DNA, 15 bp, Homo sapiens
caccccccccgcccc

SEQ ID NO: 740128 - DNA, 15 bp, Homo sapiens
accccccccgccccc

SEQ ID NO: 740129 - DNA, 15 bp, Homo sapiens
ccccccccgcccccc

SEQ ID NO: 740130 - DNA, 15 bp, Homo sapiens
cccccccgcccccct

SEQ ID NO: 740131 - DNA, 15 bp, Homo sapiens
ccccccgcccccctc

SEQ ID NO: 740132 - DNA, 15 bp, Homo sapiens
cccccgcccccctca

SEQ ID NO: 740133 - DNA, 15 bp, Homo sapiens
ccccgcccccctcac

SEQ ID NO: 740134 - DNA, 15 bp, Homo sapiens
cccgcccccctcaca

SEQ ID NO: 740135 - DNA, 15 bp, Homo sapiens
ccgcccccctcacag

SEQ ID NO: 740136 - DNA, 15 bp, Homo sapiens
cgcccccctcacagg

SEQ ID NO: 740137 - DNA, 15 bp, Homo sapiens
gcccccctcacaggt

SEQ ID NO: 740138 - DNA, 15 bp, Homo sapiens
cccccctcacaggtc

SEQ ID NO: 740139 - DNA, 15 bp, Homo sapiens
ccccctcacaggtct

SEQ ID NO: 740140 - DNA, 15 bp, Homo sapiens
cccctcacaggtctg

SEQ ID NO: 740141 - DNA, 15 bp, Homo sapiens
ccctcacaggtctgg

SEQ ID NO: 740142 - DNA, 15 bp, Homo sapiens
cctcacaggtctggg

SEQ ID NO: 740143 - DNA, 15 bp, Homo sapiens
ctcacaggtctgggg

SEQ ID NO: 740144 - DNA, 15 bp, Homo sapiens
tcacaggtctggggc

SEQ ID NO: 740145 - DNA, 15 bp, Homo sapiens
cacaggtctggggct

SEQ ID NO: 740146 - DNA, 15 bp, Homo sapiens
acaggtctggggctg

SEQ ID NO: 740147 - DNA, 15 bp, Homo sapiens
caggtctggggctgg

SEQ ID NO: 740148 - DNA, 15 bp, Homo sapiens
aggtctggggctggt

SEQ ID NO: 740149 - DNA, 15 bp, Homo sapiens
ggtctggggctggtt

SEQ ID NO: 740150 - DNA, 15 bp, Homo sapiens
gtctggggctggttt

SEQ ID NO: 740151 - DNA, 15 bp, Homo sapiens
tctggggctggtttt

SEQ ID NO: 740152 - DNA, 15 bp, Homo sapiens
ctggggctggttttg

SEQ ID NO: 740153 - DNA, 15 bp, Homo sapiens
tggggctggttttgc

SEQ ID NO: 740154 - DNA, 15 bp, Homo sapiens
ggggctggttttgcc

SEQ ID NO: 740155 - DNA, 15 bp, Homo sapiens
gggctggttttgcca

SEQ ID NO: 740156 - DNA, 15 bp, Homo sapiens
ggctggttttgccag

SEQ ID NO: 740157 - DNA, 15 bp, Homo sapiens
gctggttttgccagc

SEQ ID NO: 740158 - DNA, 15 bp, Homo sapiens
ctggttttgccagct

SEQ ID NO: 740159 - DNA, 15 bp, Homo sapiens
tggttttgccagctg

SEQ ID NO: 740160 - DNA, 15 bp, Homo sapiens
ggttttgccagctgc

SEQ ID NO: 740161 - DNA, 15 bp, Homo sapiens
gttttgccagctgct

SEQ ID NO: 740162 - DNA, 15 bp, Homo sapiens
ttttgccagctgctg

SEQ ID NO: 740163 - DNA, 15 bp, Homo sapiens
tttgccagctgctgt

SEQ ID NO: 740164 - DNA, 15 bp, Homo sapiens
ttgccagctgctgtg

SEQ ID NO: 740165 - DNA, 15 bp, Homo sapiens
tgccagctgctgtgg

SEQ ID NO: 740166 - DNA, 15 bp, Homo sapiens
gccagctgctgtggc

SEQ ID NO: 740167 - DNA, 15 bp, Homo sapiens
ccagctgctgtggcc

SEQ ID NO: 740168 - DNA, 15 bp, Homo sapiens
cagctgctgtggccg

SEQ ID NO: 740169 - DNA, 15 bp, Homo sapiens
agctgctgtggccgg

SEQ ID NO: 740170 - DNA, 15 bp, Homo sapiens
gctgctgtggccggg

SEQ ID NO: 740171 - DNA, 15 bp, Homo sapiens
ctgctgtggccgggg

SEQ ID NO: 740172 - DNA, 15 bp, Homo sapiens
tgctgtggccggggg

SEQ ID NO: 740173 - DNA, 15 bp, Homo sapiens
gctgtggccgggggc

SEQ ID NO: 740174 - DNA, 15 bp, Homo sapiens
ctgtggccgggggca

SEQ ID NO: 740175 - DNA, 15 bp, Homo sapiens
tgtggccgggggcat

SEQ ID NO: 740176 - DNA, 15 bp, Homo sapiens
gtggccgggggcatt

SEQ ID NO: 740177 - DNA, 15 bp, Homo sapiens
tggccgggggcattg

SEQ ID NO: 740178 - DNA, 15 bp, Homo sapiens
ggccgggggcattga

SEQ ID NO: 740179 - DNA, 15 bp, Homo sapiens
gccgggggcattgag

SEQ ID NO: 740180 - DNA, 15 bp, Homo sapiens
ccgggggcattgagg

SEQ ID NO: 740181 - DNA, 15 bp, Homo sapiens
cgggggcattgaggt

SEQ ID NO: 740182 - DNA, 15 bp, Homo sapiens
gggggcattgaggtc

SEQ ID NO: 740183 - DNA, 15 bp, Homo sapiens
ggggcattgaggtca

SEQ ID NO: 740184 - DNA, 15 bp, Homo sapiens
gggcattgaggtcag

SEQ ID NO: 740185 - DNA, 15 bp, Homo sapiens
ggcattgaggtcaga

SEQ ID NO: 740186 - DNA, 15 bp, Homo sapiens
gcattgaggtcagac

SEQ ID NO: 740187 - DNA, 15 bp, Homo sapiens
cattgaggtcagacc

SEQ ID NO: 740188 - DNA, 15 bp, Homo sapiens
attgaggtcagacca

SEQ ID NO: 740189 - DNA, 15 bp, Homo sapiens
ttgaggtcagaccac

SEQ ID NO: 740190 - DNA, 15 bp, Homo sapiens
tgaggtcagaccaca

SEQ ID NO: 740191 - DNA, 15 bp, Homo sapiens
gaggtcagaccacag

SEQ ID NO: 740192 - DNA, 15 bp, Homo sapiens
aggtcagaccacaga

SEQ ID NO: 740193 - DNA, 15 bp, Homo sapiens
ggtcagaccacagat

SEQ ID NO: 740194 - DNA, 15 bp, Homo sapiens
gtcagaccacagatg

SEQ ID NO: 740195 - DNA, 15 bp, Homo sapiens
tcagaccacagatgg

SEQ ID NO: 740196 - DNA, 15 bp, Homo sapiens
cagaccacagatggg

SEQ ID NO: 740197 - DNA, 15 bp, Homo sapiens
agaccacagatgggc

SEQ ID NO: 740198 - DNA, 15 bp, Homo sapiens
gaccacagatgggcg

SEQ ID NO: 740199 - DNA, 15 bp, Homo sapiens
accacagatgggcgc

SEQ ID NO: 740200 - DNA, 15 bp, Homo sapiens
ccacagatgggcgct

SEQ ID NO: 740201 - DNA, 15 bp, Homo sapiens
cacagatgggcgctg

SEQ ID NO: 740202 - DNA, 15 bp, Homo sapiens
acagatgggcgctga

SEQ ID NO: 740203 - DNA, 15 bp, Homo sapiens
cagatgggcgctgac

SEQ ID NO: 740204 - DNA, 15 bp, Homo sapiens
agatgggcgctgacc

SEQ ID NO: 740205 - DNA, 15 bp, Homo sapiens
gatgggcgctgaccc

SEQ ID NO: 740206 - DNA, 15 bp, Homo sapiens
atgggcgctgaccca

SEQ ID NO: 740207 - DNA, 15 bp, Homo sapiens
tgggcgctgacccag

SEQ ID NO: 740208 - DNA, 15 bp, Homo sapiens
gggcgctgacccagg

SEQ ID NO: 740209 - DNA, 15 bp, Homo sapiens
ggcgctgacccaggt

SEQ ID NO: 740210 - DNA, 15 bp, Homo sapiens
gcgctgacccaggtc

SEQ ID NO: 740211 - DNA, 15 bp, Homo sapiens
cgctgacccaggtct

SEQ ID NO: 740212 - DNA, 15 bp, Homo sapiens
gctgacccaggtctt

SEQ ID NO: 740213 - DNA, 15 bp, Homo sapiens
ctgacccaggtcttc

SEQ ID NO: 740214 - DNA, 15 bp, Homo sapiens
tgacccaggtcttca

SEQ ID NO: 740215 - DNA, 15 bp, Homo sapiens
gacccaggtcttcat

SEQ ID NO: 740216 - DNA, 15 bp, Homo sapiens
acccaggtcttcatc

SEQ ID NO: 740217 - DNA, 15 bp, Homo sapiens
cccaggtcttcatcc

SEQ ID NO: 740218 - DNA, 15 bp, Homo sapiens
ccaggtcttcatccc

SEQ ID NO: 740219 - DNA, 15 bp, Homo sapiens
caggtcttcatcccc

SEQ ID NO: 740220 - DNA, 15 bp, Homo sapiens
aggtcttcatcccca

SEQ ID NO: 740221 - DNA, 15 bp, Homo sapiens
ggtcttcatccccat

SEQ ID NO: 740222 - DNA, 15 bp, Homo sapiens
gtcttcatccccatt

SEQ ID NO: 740223 - DNA, 15 bp, Homo sapiens
tcttcatccccattt

SEQ ID NO: 740224 - DNA, 15 bp, Homo sapiens
cttcatccccatttt

SEQ ID NO: 740225 - DNA, 15 bp, Homo sapiens
ttcatccccattttg

SEQ ID NO: 740226 - DNA, 15 bp, Homo sapiens
tcatccccattttgc

SEQ ID NO: 740227 - DNA, 15 bp, Homo sapiens
catccccattttgcg

SEQ ID NO: 740228 - DNA, 15 bp, Homo sapiens
atccccattttgcgt

SEQ ID NO: 740229 - DNA, 15 bp, Homo sapiens
tccccattttgcgta

SEQ ID NO: 740230 - DNA, 15 bp, Homo sapiens
ccccattttgcgtat

SEQ ID NO: 740231 - DNA, 15 bp, Homo sapiens
cccattttgcgtatg

SEQ ID NO: 740232 - DNA, 15 bp, Homo sapiens
ccattttgcgtatgg

SEQ ID NO: 740233 - DNA, 15 bp, Homo sapiens
cattttgcgtatggg

SEQ ID NO: 740234 - DNA, 15 bp, Homo sapiens
attttgcgtatggga

SEQ ID NO: 740235 - DNA, 15 bp, Homo sapiens
ttttgcgtatgggag

SEQ ID NO: 740236 - DNA, 15 bp, Homo sapiens
tttgcgtatgggaga

SEQ ID NO: 740237 - DNA, 15 bp, Homo sapiens
ttgcgtatgggagaa

SEQ ID NO: 740238 - DNA, 15 bp, Homo sapiens
tgcgtatgggagaat

SEQ ID NO: 740239 - DNA, 15 bp, Homo sapiens
gcgtatgggagaatg

SEQ ID NO: 740240 - DNA, 15 bp, Homo sapiens
cgtatgggagaatgt

SEQ ID NO: 740241 - DNA, 15 bp, Homo sapiens
gtatgggagaatgtt

SEQ ID NO: 740242 - DNA, 15 bp, Homo sapiens
tatgggagaatgttt

SEQ ID NO: 740243 - DNA, 15 bp, Homo sapiens
atgggagaatgtttg

SEQ ID NO: 740244 - DNA, 15 bp, Homo sapiens
tgggagaatgtttgg

SEQ ID NO: 740245 - DNA, 15 bp, Homo sapiens
gggagaatgtttggc

SEQ ID NO: 740246 - DNA, 15 bp, Homo sapiens
ggagaatgtttggcc

SEQ ID NO: 740247 - DNA, 15 bp, Homo sapiens
gagaatgtttggccc

SEQ ID NO: 740248 - DNA, 15 bp, Homo sapiens
agaatgtttggcccg

SEQ ID NO: 740249 - DNA, 15 bp, Homo sapiens
gaatgtttggcccgg

SEQ ID NO: 740250 - DNA, 15 bp, Homo sapiens
aatgtttggcccggg

SEQ ID NO: 740251 - DNA, 15 bp, Homo sapiens
atgtttggcccggga

SEQ ID NO: 740252 - DNA, 15 bp, Homo sapiens
tgtttggcccgggaa

SEQ ID NO: 740253 - DNA, 15 bp, Homo sapiens
gtttggcccgggaat

SEQ ID NO: 740254 - DNA, 15 bp, Homo sapiens
tttggcccgggaatc

SEQ ID NO: 740255 - DNA, 15 bp, Homo sapiens
ttggcccgggaatct

SEQ ID NO: 740256 - DNA, 15 bp, Homo sapiens
tggcccgggaatcta

SEQ ID NO: 740257 - DNA, 15 bp, Homo sapiens
ggcccgggaatctac

SEQ ID NO: 740258 - DNA, 15 bp, Homo sapiens
gcccgggaatctaca

SEQ ID NO: 740259 - DNA, 15 bp, Homo sapiens
cccgggaatctacat

SEQ ID NO: 740260 - DNA, 15 bp, Homo sapiens
ccgggaatctacatg

SEQ ID NO: 740261 - DNA, 15 bp, Homo sapiens
cgggaatctacatgg

SEQ ID NO: 740262 - DNA, 15 bp, Homo sapiens
gggaatctacatgga

SEQ ID NO: 740263 - DNA, 15 bp, Homo sapiens
ggaatctacatggac

SEQ ID NO: 740264 - DNA, 15 bp, Homo sapiens
gaatctacatggacc

SEQ ID NO: 740265 - DNA, 15 bp, Homo sapiens
aatctacatggacca

SEQ ID NO: 740266 - DNA, 15 bp, Homo sapiens
atctacatggaccat

SEQ ID NO: 740267 - DNA, 15 bp, Homo sapiens
tctacatggaccatt

SEQ ID NO: 740268 - DNA, 15 bp, Homo sapiens
ctacatggaccattt

SEQ ID NO: 740269 - DNA, 15 bp, Homo sapiens
tacatggaccattta

SEQ ID NO: 740270 - DNA, 15 bp, Homo sapiens
acatggaccatttac

SEQ ID NO: 740271 - DNA, 15 bp, Homo sapiens
catggaccatttaca

SEQ ID NO: 740272 - DNA, 15 bp, Homo sapiens
atggaccatttacat

SEQ ID NO: 740273 - DNA, 15 bp, Homo sapiens
tggaccatttacatt

SEQ ID NO: 740274 - DNA, 15 bp, Homo sapiens
ggaccatttacattc

SEQ ID NO: 740275 - DNA, 15 bp, Homo sapiens
gaccatttacattct

SEQ ID NO: 740276 - DNA, 15 bp, Homo sapiens
accatttacattctt

SEQ ID NO: 740277 - DNA, 15 bp, Homo sapiens
ccatttacattcttc

SEQ ID NO: 740278 - DNA, 15 bp, Homo sapiens
catttacattcttca

SEQ ID NO: 740279 - DNA, 15 bp, Homo sapiens
atttacattcttcag

SEQ ID NO: 740280 - DNA, 15 bp, Homo sapiens
tttacattcttcagt

SEQ ID NO: 740281 - DNA, 15 bp, Homo sapiens
ttacattcttcagtt

SEQ ID NO: 740282 - DNA, 15 bp, Homo sapiens
tacattcttcagttt

SEQ ID NO: 740283 - DNA, 15 bp, Homo sapiens
acattcttcagtttc

SEQ ID NO: 740284 - DNA, 15 bp, Homo sapiens
cattcttcagtttct

SEQ ID NO: 740285 - DNA, 15 bp, Homo sapiens
attcttcagtttcta

SEQ ID NO: 740286 - DNA, 15 bp, Homo sapiens
ttcttcagtttctat

SEQ ID NO: 740287 - DNA, 15 bp, Homo sapiens
tcttcagtttctatg

SEQ ID NO: 740288 - DNA, 15 bp, Homo sapiens
cttcagtttctatgt

SEQ ID NO: 740289 - DNA, 15 bp, Homo sapiens
ttcagtttctatgtc

SEQ ID NO: 740290 - DNA, 15 bp, Homo sapiens
tcagtttctatgtcc

SEQ ID NO: 740291 - DNA, 15 bp, Homo sapiens
cagtttctatgtccc

SEQ ID NO: 740292 - DNA, 15 bp, Homo sapiens
agtttctatgtccct

SEQ ID NO: 740293 - DNA, 15 bp, Homo sapiens
gtttctatgtccctt

SEQ ID NO: 740294 - DNA, 15 bp, Homo sapiens
tttctatgtccctta

SEQ ID NO: 740295 - DNA, 15 bp, Homo sapiens
ttctatgtcccttag

SEQ ID NO: 740296 - DNA, 15 bp, Homo sapiens
tctatgtcccttagg

SEQ ID NO: 740297 - DNA, 15 bp, Homo sapiens
ctatgtcccttaggt

SEQ ID NO: 740298 - DNA, 15 bp, Homo sapiens
tatgtcccttaggtt

SEQ ID NO: 740299 - DNA, 15 bp, Homo sapiens
atgtcccttaggttg

SEQ ID NO: 740300 - DNA, 15 bp, Homo sapiens
tgtcccttaggttga

SEQ ID NO: 740301 - DNA, 15 bp, Homo sapiens
gtcccttaggttgaa

SEQ ID NO: 740302 - DNA, 15 bp, Homo sapiens
tcccttaggttgaat

SEQ ID NO: 740303 - DNA, 15 bp, Homo sapiens
cccttaggttgaatt

SEQ ID NO: 740304 - DNA, 15 bp, Homo sapiens
ccttaggttgaattt

SEQ ID NO: 740305 - DNA, 15 bp, Homo sapiens
cttaggttgaatttt

SEQ ID NO: 740306 - DNA, 15 bp, Homo sapiens
ttaggttgaattttt

SEQ ID NO: 740307 - DNA, 15 bp, Homo sapiens
taggttgaatttttg

SEQ ID NO: 740308 - DNA, 15 bp, Homo sapiens
aggttgaatttttgg

SEQ ID NO: 740309 - DNA, 15 bp, Homo sapiens
ggttgaatttttggt

SEQ ID NO: 740310 - DNA, 15 bp, Homo sapiens
gttgaatttttggtc

SEQ ID NO: 740311 - DNA, 15 bp, Homo sapiens
ttgaatttttggtct

SEQ ID NO: 740312 - DNA, 15 bp, Homo sapiens
tgaatttttggtctt

SEQ ID NO: 740313 - DNA, 15 bp, Homo sapiens
gaatttttggtcttg

SEQ ID NO: 740314 - DNA, 15 bp, Homo sapiens
aatttttggtcttgg

SEQ ID NO: 740315 - DNA, 15 bp, Homo sapiens
atttttggtcttggg

SEQ ID NO: 740316 - DNA, 15 bp, Homo sapiens
tttttggtcttgggt

SEQ ID NO: 740317 - DNA, 15 bp, Homo sapiens
ttttggtcttgggtt

SEQ ID NO: 740318 - DNA, 15 bp, Homo sapiens
tttggtcttgggtta

SEQ ID NO: 740319 - DNA, 15 bp, Homo sapiens
ttggtcttgggttac

SEQ ID NO: 740320 - DNA, 15 bp, Homo sapiens
tggtcttgggttact

SEQ ID NO: 740321 - DNA, 15 bp, Homo sapiens
ggtcttgggttacta

SEQ ID NO: 740322 - DNA, 15 bp, Homo sapiens
gtcttgggttactag

SEQ ID NO: 740323 - DNA, 15 bp, Homo sapiens
tcttgggttactaga

SEQ ID NO: 740324 - DNA, 15 bp, Homo sapiens
cttgggttactagat

SEQ ID NO: 740325 - DNA, 15 bp, Homo sapiens
ttgggttactagatg

SEQ ID NO: 740326 - DNA, 15 bp, Homo sapiens
tgggttactagatga

SEQ ID NO: 740327 - DNA, 15 bp, Homo sapiens
gggttactagatgaa

SEQ ID NO: 740328 - DNA, 15 bp, Homo sapiens
ggttactagatgaaa

SEQ ID NO: 740329 - DNA, 15 bp, Homo sapiens
gttactagatgaaac

SEQ ID NO: 740330 - DNA, 15 bp, Homo sapiens
ttactagatgaaaca

SEQ ID NO: 740331 - DNA, 15 bp, Homo sapiens
tactagatgaaacag

SEQ ID NO: 740332 - DNA, 15 bp, Homo sapiens
actagatgaaacagg

SEQ ID NO: 740333 - DNA, 15 bp, Homo sapiens
ctagatgaaacaggc

SEQ ID NO: 740334 - DNA, 15 bp, Homo sapiens
tagatgaaacaggca

SEQ ID NO: 740335 - DNA, 15 bp, Homo sapiens
agatgaaacaggcac

SEQ ID NO: 740336 - DNA, 15 bp, Homo sapiens
gatgaaacaggcaca

SEQ ID NO: 740337 - DNA, 15 bp, Homo sapiens
atgaaacaggcacaa

SEQ ID NO: 740338 - DNA, 15 bp, Homo sapiens
tgaaacaggcacaaa

SEQ ID NO: 740339 - DNA, 15 bp, Homo sapiens
gaaacaggcacaaag

SEQ ID NO: 740340 - DNA, 15 bp, Homo sapiens
aaacaggcacaaagt

SEQ ID NO: 740341 - DNA, 15 bp, Homo sapiens
aacaggcacaaagtt

SEQ ID NO: 740342 - DNA, 15 bp, Homo sapiens
acaggcacaaagttt

SEQ ID NO: 740343 - DNA, 15 bp, Homo sapiens
caggcacaaagtttt

SEQ ID NO: 740344 - DNA, 15 bp, Homo sapiens
aggcacaaagtttta

SEQ ID NO: 740345 - DNA, 15 bp, Homo sapiens
ggcacaaagttttac

SEQ ID NO: 740346 - DNA, 15 bp, Homo sapiens
gcacaaagttttaca

SEQ ID NO: 740347 - DNA, 15 bp, Homo sapiens
cacaaagttttacag

SEQ ID NO: 740348 - DNA, 15 bp, Homo sapiens
acaaagttttacagt

SEQ ID NO: 740349 - DNA, 15 bp, Homo sapiens
caaagttttacagtg

SEQ ID NO: 740350 - DNA, 15 bp, Homo sapiens
aaagttttacagtgg

SEQ ID NO: 740351 - DNA, 15 bp, Homo sapiens
aagttttacagtgga

SEQ ID NO: 740352 - DNA, 15 bp, Homo sapiens
agttttacagtggac

SEQ ID NO: 740353 - DNA, 15 bp, Homo sapiens
gttttacagtggaca

SEQ ID NO: 740354 - DNA, 15 bp, Homo sapiens
ttttacagtggacaa

SEQ ID NO: 740355 - DNA, 15 bp, Homo sapiens
tttacagtggacaac

SEQ ID NO: 740356 - DNA, 15 bp, Homo sapiens
ttacagtggacaact

SEQ ID NO: 740357 - DNA, 15 bp, Homo sapiens
tacagtggacaactg

SEQ ID NO: 740358 - DNA, 15 bp, Homo sapiens
acagtggacaactgt

SEQ ID NO: 740359 - DNA, 15 bp, Homo sapiens
cagtggacaactgtt

SEQ ID NO: 740360 - DNA, 15 bp, Homo sapiens
agtggacaactgtta

SEQ ID NO: 740361 - DNA, 15 bp, Homo sapiens
gtggacaactgttaa

SEQ ID NO: 740362 - DNA, 15 bp, Homo sapiens
tggacaactgttaaa

SEQ ID NO: 740363 - DNA, 15 bp, Homo sapiens
actggctgcccggag

SEQ ID NO: 740364 - DNA, 15 bp, Homo sapiens
ctggctgcccggagc

SEQ ID NO: 740365 - DNA, 15 bp, Homo sapiens
tggctgcccggagcc

SEQ ID NO: 740366 - DNA, 15 bp, Homo sapiens
ggctgcccggagccc

SEQ ID NO: 740367 - DNA, 15 bp, Homo sapiens
gctgcccggagccca

SEQ ID NO: 740368 - DNA, 15 bp, Homo sapiens
ctgcccggagcccag

SEQ ID NO: 740369 - DNA, 15 bp, Homo sapiens
tgcccggagcccaga

SEQ ID NO: 740370 - DNA, 15 bp, Homo sapiens
gcccggagcccagac

SEQ ID NO: 740371 - DNA, 15 bp, Homo sapiens
cccggagcccagacg

SEQ ID NO: 740372 - DNA, 15 bp, Homo sapiens
ccggagcccagacgg

SEQ ID NO: 740373 - DNA, 15 bp, Homo sapiens
cggagcccagacggg

SEQ ID NO: 740374 - DNA, 15 bp, Homo sapiens
ggagcccagacgggt

SEQ ID NO: 740375 - DNA, 15 bp, Homo sapiens
gagcccagacgggtg

SEQ ID NO: 740376 - DNA, 15 bp, Homo sapiens
agcccagacgggtga

SEQ ID NO: 740377 - DNA, 15 bp, Homo sapiens
gcccagacgggtgac

SEQ ID NO: 740378 - DNA, 15 bp, Homo sapiens
cccagacgggtgaca

SEQ ID NO: 740379 - DNA, 15 bp, Homo sapiens
ccagacgggtgacaa

SEQ ID NO: 740380 - DNA, 15 bp, Homo sapiens
cagacgggtgacaag

SEQ ID NO: 740381 - DNA, 15 bp, Homo sapiens
agacgggtgacaagg

SEQ ID NO: 740382 - DNA, 15 bp, Homo sapiens
gacgggtgacaaggt

SEQ ID NO: 740383 - DNA, 15 bp, Homo sapiens
acgggtgacaaggtg

SEQ ID NO: 740384 - DNA, 15 bp, Homo sapiens
cgggtgacaaggtgc

SEQ ID NO: 740385 - DNA, 15 bp, Homo sapiens
gggtgacaaggtgct

SEQ ID NO: 740386 - DNA, 15 bp, Homo sapiens
ggtgacaaggtgctg

SEQ ID NO: 740387 - DNA, 15 bp, Homo sapiens
gtgacaaggtgctgt

SEQ ID NO: 740388 - DNA, 15 bp, Homo sapiens
tgacaaggtgctgtg

SEQ ID NO: 740389 - DNA, 15 bp, Homo sapiens
gacaaggtgctgtgg

SEQ ID NO: 740390 - DNA, 15 bp, Homo sapiens
acaaggtgctgtggt

SEQ ID NO: 740391 - DNA, 15 bp, Homo sapiens
caaggtgctgtggtc

SEQ ID NO: 740392 - DNA, 15 bp, Homo sapiens
aaggtgctgtggtct

SEQ ID NO: 740393 - DNA, 15 bp, Homo sapiens
aggtgctgtggtctg

SEQ ID NO: 740394 - DNA, 15 bp, Homo sapiens
ggtgctgtggtctgt

SEQ ID NO: 740395 - DNA, 15 bp, Homo sapiens
gtgctgtggtctgtc

SEQ ID NO: 740396 - DNA, 15 bp, Homo sapiens
tgctgtggtctgtct

SEQ ID NO: 740397 - DNA, 15 bp, Homo sapiens
gctgtggtctgtctt

SEQ ID NO: 740398 - DNA, 15 bp, Homo sapiens
ctgtggtctgtctta

SEQ ID NO: 740399 - DNA, 15 bp, Homo sapiens
tgtggtctgtcttac

SEQ ID NO: 740400 - DNA, 15 bp, Homo sapiens
gtggtctgtcttacg

SEQ ID NO: 740401 - DNA, 15 bp, Homo sapiens
tggtctgtcttacga

SEQ ID NO: 740402 - DNA, 15 bp, Homo sapiens
ggtctgtcttacgat

SEQ ID NO: 740403 - DNA, 15 bp, Homo sapiens
gtctgtcttacgatg

SEQ ID NO: 740404 - DNA, 15 bp, Homo sapiens
tctgtcttacgatgg

SEQ ID NO: 740405 - DNA, 15 bp, Homo sapiens
ctgtcttacgatggg

SEQ ID NO: 740406 - DNA, 15 bp, Homo sapiens
tgtcttacgatgggc

SEQ ID NO: 740407 - DNA, 15 bp, Homo sapiens
gtcttacgatgggca

SEQ ID NO: 740408 - DNA, 15 bp, Homo sapiens
tcttacgatgggcag

SEQ ID NO: 740409 - DNA, 15 bp, Homo sapiens
cttacgatgggcagt

SEQ ID NO: 740410 - DNA, 15 bp, Homo sapiens
ttacgatgggcagtg

SEQ ID NO: 740411 - DNA, 15 bp, Homo sapiens
tacgatgggcagtga

SEQ ID NO: 740412 - DNA, 15 bp, Homo sapiens
acgatgggcagtgaa

SEQ ID NO: 740413 - DNA, 15 bp, Homo sapiens
cgatgggcagtgaag

SEQ ID NO: 740414 - DNA, 15 bp, Homo sapiens
gatgggcagtgaagc

SEQ ID NO: 740415 - DNA, 15 bp, Homo sapiens
atgggcagtgaagcc

SEQ ID NO: 740416 - DNA, 15 bp, Homo sapiens
tgggcagtgaagcct

SEQ ID NO: 740417 - DNA, 15 bp, Homo sapiens
gggcagtgaagcctg

SEQ ID NO: 740418 - DNA, 15 bp, Homo sapiens
ggcagtgaagcctga

SEQ ID NO: 740419 - DNA, 15 bp, Homo sapiens
gcagtgaagcctgag

SEQ ID NO: 740420 - DNA, 15 bp, Homo sapiens
cagtgaagcctgagc

SEQ ID NO: 740421 - DNA, 15 bp, Homo sapiens
agtgaagcctgagca

SEQ ID NO: 740422 - DNA, 15 bp, Homo sapiens
gtgaagcctgagcag

SEQ ID NO: 740423 - DNA, 15 bp, Homo sapiens
tgaagcctgagcaga

SEQ ID NO: 740424 - DNA, 15 bp, Homo sapiens
gaagcctgagcagac

SEQ ID NO: 740425 - DNA, 15 bp, Homo sapiens
aagcctgagcagacc

SEQ ID NO: 740426 - DNA, 15 bp, Homo sapiens
agcctgagcagacca

SEQ ID NO: 740427 - DNA, 15 bp, Homo sapiens
gcctgagcagaccat

SEQ ID NO: 740428 - DNA, 15 bp, Homo sapiens
cctgagcagaccatt

SEQ ID NO: 740429 - DNA, 15 bp, Homo sapiens
ctgagcagaccatta

SEQ ID NO: 740430 - DNA, 15 bp, Homo sapiens
tgagcagaccattaa

SEQ ID NO: 740431 - DNA, 15 bp, Homo sapiens
gagcagaccattaat

SEQ ID NO: 740432 - DNA, 15 bp, Homo sapiens
agcagaccattaata

SEQ ID NO: 740433 - DNA, 15 bp, Homo sapiens
gcagaccattaataa

SEQ ID NO: 740434 - DNA, 15 bp, Homo sapiens
cagaccattaataat

SEQ ID NO: 740435 - DNA, 15 bp, Homo sapiens
agaccattaataatc

SEQ ID NO: 740436 - DNA, 15 bp, Homo sapiens
gaccattaataatca

SEQ ID NO: 740437 - DNA, 15 bp, Homo sapiens
accattaataatcag

SEQ ID NO: 740438 - DNA, 15 bp, Homo sapiens
ccattaataatcagc

SEQ ID NO: 740439 - DNA, 15 bp, Homo sapiens
cattaataatcagca

SEQ ID NO: 740440 - DNA, 15 bp, Homo sapiens
attaataatcagcat

SEQ ID NO: 740441 - DNA, 15 bp, Homo sapiens
ttaataatcagcatc

SEQ ID NO: 740442 - DNA, 15 bp, Homo sapiens
taataatcagcatca

SEQ ID NO: 740443 - DNA, 15 bp, Homo sapiens
aataatcagcatcaa

SEQ ID NO: 740444 - DNA, 15 bp, Homo sapiens
ataatcagcatcaag

SEQ ID NO: 740445 - DNA, 15 bp, Homo sapiens
taatcagcatcaagg

SEQ ID NO: 740446 - DNA, 15 bp, Homo sapiens
aatcagcatcaaggc

SEQ ID NO: 740447 - DNA, 15 bp, Homo sapiens
atcagcatcaaggcc

SEQ ID NO: 740448 - DNA, 15 bp, Homo sapiens
tcagcatcaaggccg

SEQ ID NO: 740449 - DNA, 15 bp, Homo sapiens
cagcatcaaggccgc

SEQ ID NO: 740450 - DNA, 15 bp, Homo sapiens
agcatcaaggccgcg

SEQ ID NO: 740451 - DNA, 15 bp, Homo sapiens
gcatcaaggccgcga

SEQ ID NO: 740452 - DNA, 15 bp, Homo sapiens
catcaaggccgcgag

SEQ ID NO: 740453 - DNA, 15 bp, Homo sapiens
atcaaggccgcgagt

SEQ ID NO: 740454 - DNA, 15 bp, Homo sapiens
tcaaggccgcgagtc

SEQ ID NO: 740455 - DNA, 15 bp, Homo sapiens
caaggccgcgagtca

SEQ ID NO: 740456 - DNA, 15 bp, Homo sapiens
aaggccgcgagtcag

SEQ ID NO: 740457 - DNA, 15 bp, Homo sapiens
aggccgcgagtcagc

SEQ ID NO: 740458 - DNA, 15 bp, Homo sapiens
ggccgcgagtcagcc

SEQ ID NO: 740459 - DNA, 15 bp, Homo sapiens
gccgcgagtcagcct

SEQ ID NO: 740460 - DNA, 15 bp, Homo sapiens
ccgcgagtcagcctt

SEQ ID NO: 740461 - DNA, 15 bp, Homo sapiens
cgcgagtcagccttt

SEQ ID NO: 740462 - DNA, 15 bp, Homo sapiens
gcgagtcagcctttt

SEQ ID NO: 740463 - DNA, 15 bp, Homo sapiens
cgagtcagccttttg

SEQ ID NO: 740464 - DNA, 15 bp, Homo sapiens
gagtcagccttttgg

SEQ ID NO: 740465 - DNA, 15 bp, Homo sapiens
agtcagccttttgga

SEQ ID NO: 740466 - DNA, 15 bp, Homo sapiens
gtcagccttttggaa

SEQ ID NO: 740467 - DNA, 15 bp, Homo sapiens
tcagccttttggaat

SEQ ID NO: 740468 - DNA, 15 bp, Homo sapiens
cagccttttggaatg

SEQ ID NO: 740469 - DNA, 15 bp, Homo sapiens
agccttttggaatgt

SEQ ID NO: 740470 - DNA, 15 bp, Homo sapiens
gccttttggaatgtg

SEQ ID NO: 740471 - DNA, 15 bp, Homo sapiens
ccttttggaatgtgt

SEQ ID NO: 740472 - DNA, 15 bp, Homo sapiens
cttttggaatgtgtg

SEQ ID NO: 740473 - DNA, 15 bp, Homo sapiens
ttttggaatgtgtgg

SEQ ID NO: 740474 - DNA, 15 bp, Homo sapiens
tttggaatgtgtggt

SEQ ID NO: 740475 - DNA, 15 bp, Homo sapiens
ttggaatgtgtggtt

SEQ ID NO: 740476 - DNA, 15 bp, Homo sapiens
tggaatgtgtggttt

SEQ ID NO: 740477 - DNA, 15 bp, Homo sapiens
ggaatgtgtggtttg

SEQ ID NO: 740478 - DNA, 15 bp, Homo sapiens
gaatgtgtggtttgt

SEQ ID NO: 740479 - DNA, 15 bp, Homo sapiens
aatgtgtggtttgtc

SEQ ID NO: 740480 - DNA, 15 bp, Homo sapiens
atgtgtggtttgtct

SEQ ID NO: 740481 - DNA, 15 bp, Homo sapiens
tgtgtggtttgtctt

SEQ ID NO: 740482 - DNA, 15 bp, Homo sapiens
gtgtggtttgtcttt

SEQ ID NO: 740483 - DNA, 15 bp, Homo sapiens
tgtggtttgtctttc

SEQ ID NO: 740484 - DNA, 15 bp, Homo sapiens
gtggtttgtctttca

SEQ ID NO: 740485 - DNA, 15 bp, Homo sapiens
tggtttgtctttcat

SEQ ID NO: 740486 - DNA, 15 bp, Homo sapiens
ggtttgtctttcatg

SEQ ID NO: 740487 - DNA, 15 bp, Homo sapiens
gtttgtctttcatgc

SEQ ID NO: 740488 - DNA, 15 bp, Homo sapiens
tttgtctttcatgct

SEQ ID NO: 740489 - DNA, 15 bp, Homo sapiens
ttgtctttcatgctg

SEQ ID NO: 740490 - DNA, 15 bp, Homo sapiens
tgtctttcatgctgt

SEQ ID NO: 740491 - DNA, 15 bp, Homo sapiens
gtctttcatgctgtt

SEQ ID NO: 740492 - DNA, 15 bp, Homo sapiens
tctttcatgctgttt

SEQ ID NO: 740493 - DNA, 15 bp, Homo sapiens
ctttcatgctgttta

SEQ ID NO: 740494 - DNA, 15 bp, Homo sapiens
tttcatgctgtttag

SEQ ID NO: 740495 - DNA, 15 bp, Homo sapiens
ttcatgctgtttaga

SEQ ID NO: 740496 - DNA, 15 bp, Homo sapiens
tcatgctgtttagag

SEQ ID NO: 740497 - DNA, 15 bp, Homo sapiens
catgctgtttagagc

SEQ ID NO: 740498 - DNA, 15 bp, Homo sapiens
atgctgtttagagcg

SEQ ID NO: 740499 - DNA, 15 bp, Homo sapiens
tgctgtttagagcgt

SEQ ID NO: 740500 - DNA, 15 bp, Homo sapiens
gctgtttagagcgtg

SEQ ID NO: 740501 - DNA, 15 bp, Homo sapiens
ctgtttagagcgtgc

SEQ ID NO: 740502 - DNA, 15 bp, Homo sapiens
tgtttagagcgtgct

SEQ ID NO: 740503 - DNA, 15 bp, Homo sapiens
gtttagagcgtgctt

SEQ ID NO: 740504 - DNA, 15 bp, Homo sapiens
tttagagcgtgctta

SEQ ID NO: 740505 - DNA, 15 bp, Homo sapiens
ttagagcgtgcttaa

SEQ ID NO: 740506 - DNA, 15 bp, Homo sapiens
tagagcgtgcttaaa

SEQ ID NO: 740507 - DNA, 15 bp, Homo sapiens
agagcgtgcttaaag

SEQ ID NO: 740508 - DNA, 15 bp, Homo sapiens
gagcgtgcttaaaga

SEQ ID NO: 740509 - DNA, 15 bp, Homo sapiens
agcgtgcttaaagat

SEQ ID NO: 740510 - DNA, 15 bp, Homo sapiens
gcgtgcttaaagatg

SEQ ID NO: 740511 - DNA, 15 bp, Homo sapiens
cgtgcttaaagatgg

SEQ ID NO: 740512 - DNA, 15 bp, Homo sapiens
gtgcttaaagatgga

SEQ ID NO: 740513 - DNA, 15 bp, Homo sapiens
tgcttaaagatggat

SEQ ID NO: 740514 - DNA, 15 bp, Homo sapiens
gcttaaagatggatc

SEQ ID NO: 740515 - DNA, 15 bp, Homo sapiens
cttaaagatggatct

SEQ ID NO: 740516 - DNA, 15 bp, Homo sapiens
ttaaagatggatctt

SEQ ID NO: 740517 - DNA, 15 bp, Homo sapiens
taaagatggatcttg

SEQ ID NO: 740518 - DNA, 15 bp, Homo sapiens
aaagatggatcttgg

SEQ ID NO: 740519 - DNA, 15 bp, Homo sapiens
aagatggatcttggt

SEQ ID NO: 740520 - DNA, 15 bp, Homo sapiens
agatggatcttggtg

SEQ ID NO: 740521 - DNA, 15 bp, Homo sapiens
gatggatcttggtgt

SEQ ID NO: 740522 - DNA, 15 bp, Homo sapiens
atggatcttggtgtt

SEQ ID NO: 740523 - DNA, 15 bp, Homo sapiens
tggatcttggtgttt

SEQ ID NO: 740524 - DNA, 15 bp, Homo sapiens
ggatcttggtgtttt

SEQ ID NO: 740525 - DNA, 15 bp, Homo sapiens
gatcttggtgttttt

SEQ ID NO: 740526 - DNA, 15 bp, Homo sapiens
atcttggtgttttta

SEQ ID NO: 740527 - DNA, 15 bp, Homo sapiens
tcttggtgtttttat

SEQ ID NO: 740528 - DNA, 15 bp, Homo sapiens
cttggtgtttttatt

SEQ ID NO: 740529 - DNA, 15 bp, Homo sapiens
ttggtgtttttattt

SEQ ID NO: 740530 - DNA, 15 bp, Homo sapiens
tggtgtttttatttg

SEQ ID NO: 740531 - DNA, 15 bp, Homo sapiens
ggtgtttttatttgt

SEQ ID NO: 740532 - DNA, 15 bp, Homo sapiens
gtgtttttatttgtg

SEQ ID NO: 740533 - DNA, 15 bp, Homo sapiens
tgtttttatttgtgt

SEQ ID NO: 740534 - DNA, 15 bp, Homo sapiens
gtttttatttgtgta

SEQ ID NO: 740535 - DNA, 15 bp, Homo sapiens
tttttatttgtgtat

SEQ ID NO: 740536 - DNA, 15 bp, Homo sapiens
ttttatttgtgtatt

SEQ ID NO: 740537 - DNA, 15 bp, Homo sapiens
tttatttgtgtattt

SEQ ID NO: 740538 - DNA, 15 bp, Homo sapiens
ttatttgtgtattta

SEQ ID NO: 740539 - DNA, 15 bp, Homo sapiens
tatttgtgtatttat

SEQ ID NO: 740540 - DNA, 15 bp, Homo sapiens
atttgtgtatttatt

SEQ ID NO: 740541 - DNA, 15 bp, Homo sapiens
tttgtgtatttattt

SEQ ID NO: 740542 - DNA, 15 bp, Homo sapiens
ttgtgtatttatttc

SEQ ID NO: 740543 - DNA, 15 bp, Homo sapiens
tgtgtatttatttct

SEQ ID NO: 740544 - DNA, 15 bp, Homo sapiens
gtgtatttatttctt

SEQ ID NO: 740545 - DNA, 15 bp, Homo sapiens
tgtatttatttcttt

SEQ ID NO: 740546 - DNA, 15 bp, Homo sapiens
gtatttatttctttc

SEQ ID NO: 740547 - DNA, 15 bp, Homo sapiens
tatttatttctttct

SEQ ID NO: 740548 - DNA, 15 bp, Homo sapiens
atttatttctttctc

SEQ ID NO: 740549 - DNA, 15 bp, Homo sapiens
tttatttctttctct

SEQ ID NO: 740550 - DNA, 15 bp, Homo sapiens
ttatttctttctctc

SEQ ID NO: 740551 - DNA, 15 bp, Homo sapiens
tatttctttctctcc

SEQ ID NO: 740552 - DNA, 15 bp, Homo sapiens
atttctttctctccc

SEQ ID NO: 740553 - DNA, 15 bp, Homo sapiens
tttctttctctcccc

SEQ ID NO: 740554 - DNA, 15 bp, Homo sapiens
ttctttctctcccct

SEQ ID NO: 740555 - DNA, 15 bp, Homo sapiens
tctttctctcccctt

SEQ ID NO: 740556 - DNA, 15 bp, Homo sapiens
ctttctctccccttt

SEQ ID NO: 740557 - DNA, 15 bp, Homo sapiens
tttctctcccctttt

SEQ ID NO: 740558 - DNA, 15 bp, Homo sapiens
ttctctccccttttc

SEQ ID NO: 740559 - DNA, 15 bp, Homo sapiens
tctctccccttttca

SEQ ID NO: 740560 - DNA, 15 bp, Homo sapiens
ctctccccttttcaa

SEQ ID NO: 740561 - DNA, 15 bp, Homo sapiens
tctccccttttcaaa

SEQ ID NO: 740562 - DNA, 15 bp, Homo sapiens
ctccccttttcaaat

SEQ ID NO: 740563 - DNA, 15 bp, Homo sapiens
tccccttttcaaatc

SEQ ID NO: 740564 - DNA, 15 bp, Homo sapiens
ccccttttcaaatcc

SEQ ID NO: 740565 - DNA, 15 bp, Homo sapiens
cccttttcaaatcca

SEQ ID NO: 740566 - DNA, 15 bp, Homo sapiens
ccttttcaaatccac

SEQ ID NO: 740567 - DNA, 15 bp, Homo sapiens
cttttcaaatccaca

SEQ ID NO: 740568 - DNA, 15 bp, Homo sapiens
ttttcaaatccacag

SEQ ID NO: 740569 - DNA, 15 bp, Homo sapiens
tttcaaatccacagc

SEQ ID NO: 740570 - DNA, 15 bp, Homo sapiens
ttcaaatccacagca

SEQ ID NO: 740571 - DNA, 15 bp, Homo sapiens
tcaaatccacagcag

SEQ ID NO: 740572 - DNA, 15 bp, Homo sapiens
caaatccacagcaga

SEQ ID NO: 740573 - DNA, 15 bp, Homo sapiens
aaatccacagcagac

SEQ ID NO: 740574 - DNA, 15 bp, Homo sapiens
aatccacagcagact

SEQ ID NO: 740575 - DNA, 15 bp, Homo sapiens
atccacagcagactg

SEQ ID NO: 740576 - DNA, 15 bp, Homo sapiens
tccacagcagactgt

SEQ ID NO: 740577 - DNA, 15 bp, Homo sapiens
ccacagcagactgtc

SEQ ID NO: 740578 - DNA, 15 bp, Homo sapiens
cacagcagactgtcc

SEQ ID NO: 740579 - DNA, 15 bp, Homo sapiens
acagcagactgtcca

SEQ ID NO: 740580 - DNA, 15 bp, Homo sapiens
cagcagactgtccag

SEQ ID NO: 740581 - DNA, 15 bp, Homo sapiens
agcagactgtccaga

SEQ ID NO: 740582 - DNA, 15 bp, Homo sapiens
gcagactgtccagat

SEQ ID NO: 740583 - DNA, 15 bp, Homo sapiens
cagactgtccagatg

SEQ ID NO: 740584 - DNA, 15 bp, Homo sapiens
agactgtccagatgc

SEQ ID NO: 740585 - DNA, 15 bp, Homo sapiens
gactgtccagatgct

SEQ ID NO: 740586 - DNA, 15 bp, Homo sapiens
actgtccagatgctg

SEQ ID NO: 740587 - DNA, 15 bp, Homo sapiens
ctgtccagatgctgt

SEQ ID NO: 740588 - DNA, 15 bp, Homo sapiens
tgtccagatgctgtg

SEQ ID NO: 740589 - DNA, 15 bp, Homo sapiens
gtccagatgctgtgc

SEQ ID NO: 740590 - DNA, 15 bp, Homo sapiens
tccagatgctgtgcc

SEQ ID NO: 740591 - DNA, 15 bp, Homo sapiens
ccagatgctgtgcct

SEQ ID NO: 740592 - DNA, 15 bp, Homo sapiens
cagatgctgtgcctt

SEQ ID NO: 740593 - DNA, 15 bp, Homo sapiens
agatgctgtgccttc

SEQ ID NO: 740594 - DNA, 15 bp, Homo sapiens
gatgctgtgccttcc

SEQ ID NO: 740595 - DNA, 15 bp, Homo sapiens
atgctgtgccttcct

SEQ ID NO: 740596 - DNA, 15 bp, Homo sapiens
tgctgtgccttcctc

SEQ ID NO: 740597 - DNA, 15 bp, Homo sapiens
gctgtgccttcctcc

SEQ ID NO: 740598 - DNA, 15 bp, Homo sapiens
ctgtgccttcctccg

SEQ ID NO: 740599 - DNA, 15 bp, Homo sapiens
tgtgccttcctccgc

SEQ ID NO: 740600 - DNA, 15 bp, Homo sapiens
gtgccttcctccgct

SEQ ID NO: 740601 - DNA, 15 bp, Homo sapiens
tgccttcctccgctg

SEQ ID NO: 740602 - DNA, 15 bp, Homo sapiens
gccttcctccgctga

SEQ ID NO: 740603 - DNA, 15 bp, Homo sapiens
ccttcctccgctgaa

SEQ ID NO: 740604 - DNA, 15 bp, Homo sapiens
cttcctccgctgaaa

SEQ ID NO: 740605 - DNA, 15 bp, Homo sapiens
ttcctccgctgaaac

SEQ ID NO: 740606 - DNA, 15 bp, Homo sapiens
tcctccgctgaaaca

SEQ ID NO: 740607 - DNA, 15 bp, Homo sapiens
cctccgctgaaacag

SEQ ID NO: 740608 - DNA, 15 bp, Homo sapiens
ctccgctgaaacagg

SEQ ID NO: 740609 - DNA, 15 bp, Homo sapiens
tccgctgaaacaggg

SEQ ID NO: 740610 - DNA, 15 bp, Homo sapiens
ccgctgaaacagggg

SEQ ID NO: 740611 - DNA, 15 bp, Homo sapiens
cgctgaaacaggggg

SEQ ID NO: 740612 - DNA, 15 bp, Homo sapiens
gctgaaacaggggga

SEQ ID NO: 740613 - DNA, 15 bp, Homo sapiens
ctgaaacagggggaa

SEQ ID NO: 740614 - DNA, 15 bp, Homo sapiens
tgaaacagggggaac

SEQ ID NO: 740615 - DNA, 15 bp, Homo sapiens
gaaacagggggaacg

SEQ ID NO: 740616 - DNA, 15 bp, Homo sapiens
aaacagggggaacga

SEQ ID NO: 740617 - DNA, 15 bp, Homo sapiens
aacagggggaacgaa

SEQ ID NO: 740618 - DNA, 15 bp, Homo sapiens
acagggggaacgaat

SEQ ID NO: 740619 - DNA, 15 bp, Homo sapiens
cagggggaacgaatt

SEQ ID NO: 740620 - DNA, 15 bp, Homo sapiens
agggggaacgaatta

SEQ ID NO: 740621 - DNA, 15 bp, Homo sapiens
gggggaacgaattat

SEQ ID NO: 740622 - DNA, 15 bp, Homo sapiens
ggggaacgaattatc

SEQ ID NO: 740623 - DNA, 15 bp, Homo sapiens
gggaacgaattatct

SEQ ID NO: 740624 - DNA, 15 bp, Homo sapiens
ggaacgaattatctg

SEQ ID NO: 740625 - DNA, 15 bp, Homo sapiens
gaacgaattatctgg

SEQ ID NO: 740626 - DNA, 15 bp, Homo sapiens
aacgaattatctggc

SEQ ID NO: 740627 - DNA, 15 bp, Homo sapiens
acgaattatctggcc

SEQ ID NO: 740628 - DNA, 15 bp, Homo sapiens
cgaattatctggccc

SEQ ID NO: 740629 - DNA, 15 bp, Homo sapiens
gaattatctggcccc

SEQ ID NO: 740630 - DNA, 15 bp, Homo sapiens
aattatctggcccct

SEQ ID NO: 740631 - DNA, 15 bp, Homo sapiens
attatctggcccctg

SEQ ID NO: 740632 - DNA, 15 bp, Homo sapiens
ttatctggcccctgg

SEQ ID NO: 740633 - DNA, 15 bp, Homo sapiens
tatctggcccctggg

SEQ ID NO: 740634 - DNA, 15 bp, Homo sapiens
atctggcccctgggg

SEQ ID NO: 740635 - DNA, 15 bp, Homo sapiens
tctggcccctggggg

SEQ ID NO: 740636 - DNA, 15 bp, Homo sapiens
ctggcccctgggggg

SEQ ID NO: 740637 - DNA, 15 bp, Homo sapiens
tggcccctggggggc

SEQ ID NO: 740638 - DNA, 15 bp, Homo sapiens
ggcccctggggggct

SEQ ID NO: 740639 - DNA, 15 bp, Homo sapiens
gcccctggggggctt

SEQ ID NO: 740640 - DNA, 15 bp, Homo sapiens
cccctggggggcttt

SEQ ID NO: 740641 - DNA, 15 bp, Homo sapiens
ccctggggggctttc

SEQ ID NO: 740642 - DNA, 15 bp, Homo sapiens
cctggggggctttca

SEQ ID NO: 740643 - DNA, 15 bp, Homo sapiens
ctggggggctttcag

SEQ ID NO: 740644 - DNA, 15 bp, Homo sapiens
tggggggctttcagg

SEQ ID NO: 740645 - DNA, 15 bp, Homo sapiens
ggggggctttcaggt

SEQ ID NO: 740646 - DNA, 15 bp, Homo sapiens
gggggctttcaggta

SEQ ID NO: 740647 - DNA, 15 bp, Homo sapiens
ggggctttcaggtaa

SEQ ID NO: 740648 - DNA, 15 bp, Homo sapiens
gggctttcaggtaag

SEQ ID NO: 740649 - DNA, 15 bp, Homo sapiens
ggctttcaggtaaga

SEQ ID NO: 740650 - DNA, 15 bp, Homo sapiens
gctttcaggtaagat

SEQ ID NO: 740651 - DNA, 15 bp, Homo sapiens
ctttcaggtaagatg

SEQ ID NO: 740652 - DNA, 15 bp, Homo sapiens
tttcaggtaagatgc

SEQ ID NO: 740653 - DNA, 15 bp, Homo sapiens
ttcaggtaagatgct

SEQ ID NO: 740654 - DNA, 15 bp, Homo sapiens
tcaggtaagatgctt

SEQ ID NO: 740655 - DNA, 15 bp, Homo sapiens
caggtaagatgcttt

SEQ ID NO: 740656 - DNA, 15 bp, Homo sapiens
aggtaagatgctttc

SEQ ID NO: 740657 - DNA, 15 bp, Homo sapiens
ggtaagatgctttct

SEQ ID NO: 740658 - DNA, 15 bp, Homo sapiens
gtaagatgctttctc

SEQ ID NO: 740659 - DNA, 15 bp, Homo sapiens
taagatgctttctct

SEQ ID NO: 740660 - DNA, 15 bp, Homo sapiens
aagatgctttctctt

SEQ ID NO: 740661 - DNA, 15 bp, Homo sapiens
agatgctttctctta

SEQ ID NO: 740662 - DNA, 15 bp, Homo sapiens
gatgctttctcttat

SEQ ID NO: 740663 - DNA, 15 bp, Homo sapiens
atgctttctcttatt

SEQ ID NO: 740664 - DNA, 15 bp, Homo sapiens
tgctttctcttattt

SEQ ID NO: 740665 - DNA, 15 bp, Homo sapiens
gctttctcttatttt

SEQ ID NO: 740666 - DNA, 15 bp, Homo sapiens
ctttctcttattttc

SEQ ID NO: 740667 - DNA, 15 bp, Homo sapiens
tttctcttattttcc

SEQ ID NO: 740668 - DNA, 15 bp, Homo sapiens
ttctcttattttcct

SEQ ID NO: 740669 - DNA, 15 bp, Homo sapiens
tctcttattttcctg

SEQ ID NO: 740670 - DNA, 15 bp, Homo sapiens
ctcttattttcctgg

SEQ ID NO: 740671 - DNA, 15 bp, Homo sapiens
tcttattttcctggc

SEQ ID NO: 740672 - DNA, 15 bp, Homo sapiens
cttattttcctggca

SEQ ID NO: 740673 - DNA, 15 bp, Homo sapiens
ttattttcctggcaa

SEQ ID NO: 740674 - DNA, 15 bp, Homo sapiens
tattttcctggcaat

SEQ ID NO: 740675 - DNA, 15 bp, Homo sapiens
attttcctggcaatt

SEQ ID NO: 740676 - DNA, 15 bp, Homo sapiens
ttttcctggcaattc

SEQ ID NO: 740677 - DNA, 15 bp, Homo sapiens
tttcctggcaattcc

SEQ ID NO: 740678 - DNA, 15 bp, Homo sapiens
ttcctggcaattcca

SEQ ID NO: 740679 - DNA, 15 bp, Homo sapiens
tcctggcaattccaa

SEQ ID NO: 740680 - DNA, 15 bp, Homo sapiens
cctggcaattccaac

SEQ ID NO: 740681 - DNA, 15 bp, Homo sapiens
ctggcaattccaacc

SEQ ID NO: 740682 - DNA, 15 bp, Homo sapiens
tggcaattccaacct

SEQ ID NO: 740683 - DNA, 15 bp, Homo sapiens
ggcaattccaacctt

SEQ ID NO: 740684 - DNA, 15 bp, Homo sapiens
gcaattccaaccttt

SEQ ID NO: 740685 - DNA, 15 bp, Homo sapiens
caattccaacctttt

SEQ ID NO: 740686 - DNA, 15 bp, Homo sapiens
aattccaaccttttt

SEQ ID NO: 740687 - DNA, 15 bp, Homo sapiens
attccaacctttttt

SEQ ID NO: 740688 - DNA, 15 bp, Homo sapiens
ttccaaccttttttg

SEQ ID NO: 740689 - DNA, 15 bp, Homo sapiens
tccaaccttttttga

SEQ ID NO: 740690 - DNA, 15 bp, Homo sapiens
ccaaccttttttgaa

SEQ ID NO: 740691 - DNA, 15 bp, Homo sapiens
caaccttttttgaaa

SEQ ID NO: 740692 - DNA, 15 bp, Homo sapiens
aaccttttttgaaat

SEQ ID NO: 740693 - DNA, 15 bp, Homo sapiens
accttttttgaaatt

SEQ ID NO: 740694 - DNA, 15 bp, Homo sapiens
ccttttttgaaattg

SEQ ID NO: 740695 - DNA, 15 bp, Homo sapiens
cttttttgaaattgc

SEQ ID NO: 740696 - DNA, 15 bp, Homo sapiens
ttttttgaaattgct

SEQ ID NO: 740697 - DNA, 15 bp, Homo sapiens
tttttgaaattgcta

SEQ ID NO: 740698 - DNA, 15 bp, Homo sapiens
ttttgaaattgctaa

SEQ ID NO: 740699 - DNA, 15 bp, Homo sapiens
tttgaaattgctaaa

SEQ ID NO: 740700 - DNA, 15 bp, Homo sapiens
ttgaaattgctaaag

SEQ ID NO: 740701 - DNA, 15 bp, Homo sapiens
tgaaattgctaaaga

SEQ ID NO: 740702 - DNA, 15 bp, Homo sapiens
gaaattgctaaagac

SEQ ID NO: 740703 - DNA, 15 bp, Homo sapiens
aaattgctaaagact

SEQ ID NO: 740704 - DNA, 15 bp, Homo sapiens
aattgctaaagactg

SEQ ID NO: 740705 - DNA, 15 bp, Homo sapiens
attgctaaagactgg

SEQ ID NO: 740706 - DNA, 15 bp, Homo sapiens
ttgctaaagactgga

SEQ ID NO: 740707 - DNA, 15 bp, Homo sapiens
tgctaaagactggag

SEQ ID NO: 740708 - DNA, 15 bp, Homo sapiens
gctaaagactggagg

SEQ ID NO: 740709 - DNA, 15 bp, Homo sapiens
ctaaagactggagga

SEQ ID NO: 740710 - DNA, 15 bp, Homo sapiens
taaagactggaggaa

SEQ ID NO: 740711 - DNA, 15 bp, Homo sapiens
aaagactggaggaat

SEQ ID NO: 740712 - DNA, 15 bp, Homo sapiens
aagactggaggaatg

SEQ ID NO: 740713 - DNA, 15 bp, Homo sapiens
agactggaggaatgg

SEQ ID NO: 740714 - DNA, 15 bp, Homo sapiens
gactggaggaatggg

SEQ ID NO: 740715 - DNA, 15 bp, Homo sapiens
actggaggaatgggg

SEQ ID NO: 740716 - DNA, 15 bp, Homo sapiens
ctggaggaatggggg

SEQ ID NO: 740717 - DNA, 15 bp, Homo sapiens
tggaggaatgggggt

SEQ ID NO: 740718 - DNA, 15 bp, Homo sapiens
ggaggaatgggggtg

SEQ ID NO: 740719 - DNA, 15 bp, Homo sapiens
gaggaatgggggtgg

SEQ ID NO: 740720 - DNA, 15 bp, Homo sapiens
aggaatgggggtggc

SEQ ID NO: 740721 - DNA, 15 bp, Homo sapiens
ggaatgggggtggcc

SEQ ID NO: 740722 - DNA, 15 bp, Homo sapiens
gaatgggggtggcct

SEQ ID NO: 740723 - DNA, 15 bp, Homo sapiens
aatgggggtggcctt

SEQ ID NO: 740724 - DNA, 15 bp, Homo sapiens
atgggggtggccttc

SEQ ID NO: 740725 - DNA, 15 bp, Homo sapiens
tgggggtggccttct

SEQ ID NO: 740726 - DNA, 15 bp, Homo sapiens
gggggtggccttctg

SEQ ID NO: 740727 - DNA, 15 bp, Homo sapiens
ggggtggccttctgc

SEQ ID NO: 740728 - DNA, 15 bp, Homo sapiens
gggtggccttctgcc

SEQ ID NO: 740729 - DNA, 15 bp, Homo sapiens
ggtggccttctgcca

SEQ ID NO: 740730 - DNA, 15 bp, Homo sapiens
gtggccttctgccac

SEQ ID NO: 740731 - DNA, 15 bp, Homo sapiens
tggccttctgccacc

SEQ ID NO: 740732 - DNA, 15 bp, Homo sapiens
ggccttctgccaccc

SEQ ID NO: 740733 - DNA, 15 bp, Homo sapiens
gccttctgccacccc

SEQ ID NO: 740734 - DNA, 15 bp, Homo sapiens
ccttctgccacccca

SEQ ID NO: 740735 - DNA, 15 bp, Homo sapiens
cttctgccaccccag

SEQ ID NO: 740736 - DNA, 15 bp, Homo sapiens
ttctgccaccccagc

SEQ ID NO: 740737 - DNA, 15 bp, Homo sapiens
tctgccaccccagct

SEQ ID NO: 740738 - DNA, 15 bp, Homo sapiens
ctgccaccccagctg

SEQ ID NO: 740739 - DNA, 15 bp, Homo sapiens
tgccaccccagctgg

SEQ ID NO: 740740 - DNA, 15 bp, Homo sapiens
gccaccccagctggt

SEQ ID NO: 740741 - DNA, 15 bp, Homo sapiens
ccaccccagctggtc

SEQ ID NO: 740742 - DNA, 15 bp, Homo sapiens
caccccagctggtct

SEQ ID NO: 740743 - DNA, 15 bp, Homo sapiens
accccagctggtctg

SEQ ID NO: 740744 - DNA, 15 bp, Homo sapiens
ccccagctggtctgg

SEQ ID NO: 740745 - DNA, 15 bp, Homo sapiens
cccagctggtctgga

SEQ ID NO: 740746 - DNA, 15 bp, Homo sapiens
ccagctggtctggac

SEQ ID NO: 740747 - DNA, 15 bp, Homo sapiens
cagctggtctggact

SEQ ID NO: 740748 - DNA, 15 bp, Homo sapiens
agctggtctggactt

SEQ ID NO: 740749 - DNA, 15 bp, Homo sapiens
gctggtctggacttc

SEQ ID NO: 740750 - DNA, 15 bp, Homo sapiens
ctggtctggacttca

SEQ ID NO: 740751 - DNA, 15 bp, Homo sapiens
tggtctggacttcat

SEQ ID NO: 740752 - DNA, 15 bp, Homo sapiens
ggtctggacttcatt

SEQ ID NO: 740753 - DNA, 15 bp, Homo sapiens
gtctggacttcattc

SEQ ID NO: 740754 - DNA, 15 bp, Homo sapiens
tctggacttcattct

SEQ ID NO: 740755 - DNA, 15 bp, Homo sapiens
ctggacttcattctc

SEQ ID NO: 740756 - DNA, 15 bp, Homo sapiens
tggacttcattctca

SEQ ID NO: 740757 - DNA, 15 bp, Homo sapiens
ggacttcattctcat

SEQ ID NO: 740758 - DNA, 15 bp, Homo sapiens
gacttcattctcatt

SEQ ID NO: 740759 - DNA, 15 bp, Homo sapiens
acttcattctcattt

SEQ ID NO: 740760 - DNA, 15 bp, Homo sapiens
cttcattctcatttt

SEQ ID NO: 740761 - DNA, 15 bp, Homo sapiens
ttcattctcattttt

SEQ ID NO: 740762 - DNA, 15 bp, Homo sapiens
tcattctcattttta

SEQ ID NO: 740763 - DNA, 15 bp, Homo sapiens
cattctcatttttat

SEQ ID NO: 740764 - DNA, 15 bp, Homo sapiens
attctcatttttata

SEQ ID NO: 740765 - DNA, 15 bp, Homo sapiens
ttctcatttttatat

SEQ ID NO: 740766 - DNA, 15 bp, Homo sapiens
tctcatttttatatg

SEQ ID NO: 740767 - DNA, 15 bp, Homo sapiens
ctcatttttatatgc

SEQ ID NO: 740768 - DNA, 15 bp, Homo sapiens
tcatttttatatgcc

SEQ ID NO: 740769 - DNA, 15 bp, Homo sapiens
catttttatatgcct

SEQ ID NO: 740770 - DNA, 15 bp, Homo sapiens
atttttatatgcctt

SEQ ID NO: 740771 - DNA, 15 bp, Homo sapiens
tttttatatgcctta

SEQ ID NO: 740772 - DNA, 15 bp, Homo sapiens
ttttatatgccttaa

SEQ ID NO: 740773 - DNA, 15 bp, Homo sapiens
tttatatgccttaag

SEQ ID NO: 740774 - DNA, 15 bp, Homo sapiens
ttatatgccttaagt

SEQ ID NO: 740775 - DNA, 15 bp, Homo sapiens
tatatgccttaagtt

SEQ ID NO: 740776 - DNA, 15 bp, Homo sapiens
atatgccttaagttg

SEQ ID NO: 740777 - DNA, 15 bp, Homo sapiens
tatgccttaagttgg

SEQ ID NO: 740778 - DNA, 15 bp, Homo sapiens
atgccttaagttgga

SEQ ID NO: 740779 - DNA, 15 bp, Homo sapiens
tgccttaagttggat

SEQ ID NO: 740780 - DNA, 15 bp, Homo sapiens
gccttaagttggatg

SEQ ID NO: 740781 - DNA, 15 bp, Homo sapiens
ccttaagttggatgc

SEQ ID NO: 740782 - DNA, 15 bp, Homo sapiens
cttaagttggatgca

SEQ ID NO: 740783 - DNA, 15 bp, Homo sapiens
ttaagttggatgcat

SEQ ID NO: 740784 - DNA, 15 bp, Homo sapiens
taagttggatgcatc

SEQ ID NO: 740785 - DNA, 15 bp, Homo sapiens
aagttggatgcatcg

SEQ ID NO: 740786 - DNA, 15 bp, Homo sapiens
agttggatgcatcgg

SEQ ID NO: 740787 - DNA, 15 bp, Homo sapiens
gttggatgcatcggt

SEQ ID NO: 740788 - DNA, 15 bp, Homo sapiens
ttggatgcatcggtg

SEQ ID NO: 740789 - DNA, 15 bp, Homo sapiens
tggatgcatcggtgg

SEQ ID NO: 740790 - DNA, 15 bp, Homo sapiens
ggatgcatcggtggt

SEQ ID NO: 740791 - DNA, 15 bp, Homo sapiens
gatgcatcggtggtg

SEQ ID NO: 740792 - DNA, 15 bp, Homo sapiens
atgcatcggtggtga

SEQ ID NO: 740793 - DNA, 15 bp, Homo sapiens
tgcatcggtggtgac

SEQ ID NO: 740794 - DNA, 15 bp, Homo sapiens
gcatcggtggtgaca

SEQ ID NO: 740795 - DNA, 15 bp, Homo sapiens
catcggtggtgacat

SEQ ID NO: 740796 - DNA, 15 bp, Homo sapiens
atcggtggtgacatt

SEQ ID NO: 740797 - DNA, 15 bp, Homo sapiens
tcggtggtgacattg

SEQ ID NO: 740798 - DNA, 15 bp, Homo sapiens
cggtggtgacattgt

SEQ ID NO: 740799 - DNA, 15 bp, Homo sapiens
ggtggtgacattgtg

SEQ ID NO: 740800 - DNA, 15 bp, Homo sapiens
gtggtgacattgtgg

SEQ ID NO: 740801 - DNA, 15 bp, Homo sapiens
tggtgacattgtggt

SEQ ID NO: 740802 - DNA, 15 bp, Homo sapiens
ggtgacattgtggtg

SEQ ID NO: 740803 - DNA, 15 bp, Homo sapiens
gtgacattgtggtgc

SEQ ID NO: 740804 - DNA, 15 bp, Homo sapiens
tgacattgtggtgcc

SEQ ID NO: 740805 - DNA, 15 bp, Homo sapiens
gacattgtggtgccc

SEQ ID NO: 740806 - DNA, 15 bp, Homo sapiens
acattgtggtgccct

SEQ ID NO: 740807 - DNA, 15 bp, Homo sapiens
cattgtggtgccctt

SEQ ID NO: 740808 - DNA, 15 bp, Homo sapiens
attgtggtgcccttc

SEQ ID NO: 740809 - DNA, 15 bp, Homo sapiens
ttgtggtgcccttca

SEQ ID NO: 740810 - DNA, 15 bp, Homo sapiens
tgtggtgcccttcag

SEQ ID NO: 740811 - DNA, 15 bp, Homo sapiens
gtggtgcccttcagc

SEQ ID NO: 740812 - DNA, 15 bp, Homo sapiens
tggtgcccttcagct

SEQ ID NO: 740813 - DNA, 15 bp, Homo sapiens
ggtgcccttcagctc

SEQ ID NO: 740814 - DNA, 15 bp, Homo sapiens
gtgcccttcagctcc

SEQ ID NO: 740815 - DNA, 15 bp, Homo sapiens
tgcccttcagctcct

SEQ ID NO: 740816 - DNA, 15 bp, Homo sapiens
gcccttcagctcctc

SEQ ID NO: 740817 - DNA, 15 bp, Homo sapiens
cccttcagctcctca

SEQ ID NO: 740818 - DNA, 15 bp, Homo sapiens
ccttcagctcctcat

SEQ ID NO: 740819 - DNA, 15 bp, Homo sapiens
cttcagctcctcatc

SEQ ID NO: 740820 - DNA, 15 bp, Homo sapiens
ttcagctcctcatcc

SEQ ID NO: 740821 - DNA, 15 bp, Homo sapiens
tcagctcctcatcct

SEQ ID NO: 740822 - DNA, 15 bp, Homo sapiens
cagctcctcatcctg

SEQ ID NO: 740823 - DNA, 15 bp, Homo sapiens
agctcctcatcctgc

SEQ ID NO: 740824 - DNA, 15 bp, Homo sapiens
gctcctcatcctgca

SEQ ID NO: 740825 - DNA, 15 bp, Homo sapiens
ctcctcatcctgcag

SEQ ID NO: 740826 - DNA, 15 bp, Homo sapiens
tcctcatcctgcagt

SEQ ID NO: 740827 - DNA, 15 bp, Homo sapiens
cctcatcctgcagtc

SEQ ID NO: 740828 - DNA, 15 bp, Homo sapiens
ctcatcctgcagtcc

SEQ ID NO: 740829 - DNA, 15 bp, Homo sapiens
tcatcctgcagtcct

SEQ ID NO: 740830 - DNA, 15 bp, Homo sapiens
catcctgcagtcctt

SEQ ID NO: 740831 - DNA, 15 bp, Homo sapiens
atcctgcagtccttt

SEQ ID NO: 740832 - DNA, 15 bp, Homo sapiens
tcctgcagtccttta

SEQ ID NO: 740833 - DNA, 15 bp, Homo sapiens
cctgcagtcctttac

SEQ ID NO: 740834 - DNA, 15 bp, Homo sapiens
ctgcagtcctttacg

SEQ ID NO: 740835 - DNA, 15 bp, Homo sapiens
tgcagtcctttacgc

SEQ ID NO: 740836 - DNA, 15 bp, Homo sapiens
gcagtcctttacgct

SEQ ID NO: 740837 - DNA, 15 bp, Homo sapiens
cagtcctttacgctc

SEQ ID NO: 740838 - DNA, 15 bp, Homo sapiens
agtcctttacgctct

SEQ ID NO: 740839 - DNA, 15 bp, Homo sapiens
gtcctttacgctctg

SEQ ID NO: 740840 - DNA, 15 bp, Homo sapiens
tcctttacgctctgg

SEQ ID NO: 740841 - DNA, 15 bp, Homo sapiens
cctttacgctctgga

SEQ ID NO: 740842 - DNA, 15 bp, Homo sapiens
ctttacgctctggac

SEQ ID NO: 740843 - DNA, 15 bp, Homo sapiens
tttacgctctggaca

SEQ ID NO: 740844 - DNA, 15 bp, Homo sapiens
ttacgctctggacac

SEQ ID NO: 740845 - DNA, 15 bp, Homo sapiens
tacgctctggacact

SEQ ID NO: 740846 - DNA, 15 bp, Homo sapiens
acgctctggacactg

SEQ ID NO: 740847 - DNA, 15 bp, Homo sapiens
cgctctggacactgg

SEQ ID NO: 740848 - DNA, 15 bp, Homo sapiens
gctctggacactgga

SEQ ID NO: 740849 - DNA, 15 bp, Homo sapiens
ctctggacactggat

SEQ ID NO: 740850 - DNA, 15 bp, Homo sapiens
tctggacactggatc

SEQ ID NO: 740851 - DNA, 15 bp, Homo sapiens
ctggacactggatcc

SEQ ID NO: 740852 - DNA, 15 bp, Homo sapiens
tggacactggatccg

SEQ ID NO: 740853 - DNA, 15 bp, Homo sapiens
ggacactggatccgt

SEQ ID NO: 740854 - DNA, 15 bp, Homo sapiens
gacactggatccgtt

SEQ ID NO: 740855 - DNA, 15 bp, Homo sapiens
acactggatccgttc

SEQ ID NO: 740856 - DNA, 15 bp, Homo sapiens
cactggatccgttcc

SEQ ID NO: 740857 - DNA, 15 bp, Homo sapiens
actggatccgttccg

SEQ ID NO: 740858 - DNA, 15 bp, Homo sapiens
ctggatccgttccgt

SEQ ID NO: 740859 - DNA, 15 bp, Homo sapiens
tggatccgttccgtg

SEQ ID NO: 740860 - DNA, 15 bp, Homo sapiens
ggatccgttccgtgg

SEQ ID NO: 740861 - DNA, 15 bp, Homo sapiens
gatccgttccgtgga

SEQ ID NO: 740862 - DNA, 15 bp, Homo sapiens
atccgttccgtggac

SEQ ID NO: 740863 - DNA, 15 bp, Homo sapiens
tccgttccgtggacg

SEQ ID NO: 740864 - DNA, 15 bp, Homo sapiens
ccgttccgtggacgg

SEQ ID NO: 740865 - DNA, 15 bp, Homo sapiens
cgttccgtggacggg

SEQ ID NO: 740866 - DNA, 15 bp, Homo sapiens
gttccgtggacgggg

SEQ ID NO: 740867 - DNA, 15 bp, Homo sapiens
ttccgtggacgggga

SEQ ID NO: 740868 - DNA, 15 bp, Homo sapiens
tccgtggacggggag

SEQ ID NO: 740869 - DNA, 15 bp, Homo sapiens
ccgtggacggggaga

SEQ ID NO: 740870 - DNA, 15 bp, Homo sapiens
cgtggacggggagac

SEQ ID NO: 740871 - DNA, 15 bp, Homo sapiens
gtggacggggagaca

SEQ ID NO: 740872 - DNA, 15 bp, Homo sapiens
tggacggggagacaa

SEQ ID NO: 740873 - DNA, 15 bp, Homo sapiens
ggacggggagacaag

SEQ ID NO: 740874 - DNA, 15 bp, Homo sapiens
gacggggagacaaga

SEQ ID NO: 740875 - DNA, 15 bp, Homo sapiens
acggggagacaagag

SEQ ID NO: 740876 - DNA, 15 bp, Homo sapiens
cggggagacaagagc

SEQ ID NO: 740877 - DNA, 15 bp, Homo sapiens
ggggagacaagagcg

SEQ ID NO: 740878 - DNA, 15 bp, Homo sapiens
gggagacaagagcga

SEQ ID NO: 740879 - DNA, 15 bp, Homo sapiens
ggagacaagagcgag

SEQ ID NO: 740880 - DNA, 15 bp, Homo sapiens
gagacaagagcgagc

SEQ ID NO: 740881 - DNA, 15 bp, Homo sapiens
agacaagagcgagct

SEQ ID NO: 740882 - DNA, 15 bp, Homo sapiens
gacaagagcgagctg

SEQ ID NO: 740883 - DNA, 15 bp, Homo sapiens
acaagagcgagctgg

SEQ ID NO: 740884 - DNA, 15 bp, Homo sapiens
caagagcgagctggg

SEQ ID NO: 740885 - DNA, 15 bp, Homo sapiens
aagagcgagctgggg

SEQ ID NO: 740886 - DNA, 15 bp, Homo sapiens
agagcgagctgggga

SEQ ID NO: 740887 - DNA, 15 bp, Homo sapiens
gagcgagctggggat

SEQ ID NO: 740888 - DNA, 15 bp, Homo sapiens
agcgagctggggatt

SEQ ID NO: 740889 - DNA, 15 bp, Homo sapiens
gcgagctggggattg

SEQ ID NO: 740890 - DNA, 15 bp, Homo sapiens
cgagctggggattgc

SEQ ID NO: 740891 - DNA, 15 bp, Homo sapiens
gagctggggattgct

SEQ ID NO: 740892 - DNA, 15 bp, Homo sapiens
agctggggattgctt

SEQ ID NO: 740893 - DNA, 15 bp, Homo sapiens
gctggggattgcttt

SEQ ID NO: 740894 - DNA, 15 bp, Homo sapiens
ctggggattgctttg

SEQ ID NO: 740895 - DNA, 15 bp, Homo sapiens
tggggattgctttgg

SEQ ID NO: 740896 - DNA, 15 bp, Homo sapiens
ggggattgctttggt

SEQ ID NO: 740897 - DNA, 15 bp, Homo sapiens
gggattgctttggtg

SEQ ID NO: 740898 - DNA, 15 bp, Homo sapiens
ggattgctttggtgt

SEQ ID NO: 740899 - DNA, 15 bp, Homo sapiens
gattgctttggtgtg

SEQ ID NO: 740900 - DNA, 15 bp, Homo sapiens
attgctttggtgtgt

SEQ ID NO: 740901 - DNA, 15 bp, Homo sapiens
ttgctttggtgtgtg

SEQ ID NO: 740902 - DNA, 15 bp, Homo sapiens
tgctttggtgtgtga

SEQ ID NO: 740903 - DNA, 15 bp, Homo sapiens
gctttggtgtgtgaa

SEQ ID NO: 740904 - DNA, 15 bp, Homo sapiens
ctttggtgtgtgaag

SEQ ID NO: 740905 - DNA, 15 bp, Homo sapiens
tttggtgtgtgaagt

SEQ ID NO: 740906 - DNA, 15 bp, Homo sapiens
ttggtgtgtgaagtg

SEQ ID NO: 740907 - DNA, 15 bp, Homo sapiens
tggtgtgtgaagtgt

SEQ ID NO: 740908 - DNA, 15 bp, Homo sapiens
ggtgtgtgaagtgtt

SEQ ID NO: 740909 - DNA, 15 bp, Homo sapiens
gtgtgtgaagtgttg

SEQ ID NO: 740910 - DNA, 15 bp, Homo sapiens
tgtgtgaagtgttgc

SEQ ID NO: 740911 - DNA, 15 bp, Homo sapiens
gtgtgaagtgttgcc

SEQ ID NO: 740912 - DNA, 15 bp, Homo sapiens
tgtgaagtgttgccc

SEQ ID NO: 740913 - DNA, 15 bp, Homo sapiens
gtgaagtgttgcccg

SEQ ID NO: 740914 - DNA, 15 bp, Homo sapiens
tgaagtgttgcccgg

SEQ ID NO: 740915 - DNA, 15 bp, Homo sapiens
gaagtgttgcccggt

SEQ ID NO: 740916 - DNA, 15 bp, Homo sapiens
aagtgttgcccggtt

SEQ ID NO: 740917 - DNA, 15 bp, Homo sapiens
agtgttgcccggtta

SEQ ID NO: 740918 - DNA, 15 bp, Homo sapiens
gtgttgcccggttat

SEQ ID NO: 740919 - DNA, 15 bp, Homo sapiens
tgttgcccggttatt

SEQ ID NO: 740920 - DNA, 15 bp, Homo sapiens
gttgcccggttattt

SEQ ID NO: 740921 - DNA, 15 bp, Homo sapiens
ttgcccggttatttt

SEQ ID NO: 740922 - DNA, 15 bp, Homo sapiens
tgcccggttattttt

SEQ ID NO: 740923 - DNA, 15 bp, Homo sapiens
gcccggttattttta

SEQ ID NO: 740924 - DNA, 15 bp, Homo sapiens
cccggttatttttaa

SEQ ID NO: 740925 - DNA, 15 bp, Homo sapiens
ccggttatttttaag

SEQ ID NO: 740926 - DNA, 15 bp, Homo sapiens
cggttatttttaagc

SEQ ID NO: 740927 - DNA, 15 bp, Homo sapiens
ggttatttttaagca

SEQ ID NO: 740928 - DNA, 15 bp, Homo sapiens
gttatttttaagcag

SEQ ID NO: 740929 - DNA, 15 bp, Homo sapiens
ttatttttaagcagc

SEQ ID NO: 740930 - DNA, 15 bp, Homo sapiens
tatttttaagcagct

SEQ ID NO: 740931 - DNA, 15 bp, Homo sapiens
atttttaagcagctc

SEQ ID NO: 740932 - DNA, 15 bp, Homo sapiens
tttttaagcagctcc

SEQ ID NO: 740933 - DNA, 15 bp, Homo sapiens
ttttaagcagctcct

SEQ ID NO: 740934 - DNA, 15 bp, Homo sapiens
tttaagcagctcctg

SEQ ID NO: 740935 - DNA, 15 bp, Homo sapiens
ttaagcagctcctgg

SEQ ID NO: 740936 - DNA, 15 bp, Homo sapiens
taagcagctcctggc

SEQ ID NO: 740937 - DNA, 15 bp, Homo sapiens
aagcagctcctggct

SEQ ID NO: 740938 - DNA, 15 bp, Homo sapiens
agcagctcctggctt

SEQ ID NO: 740939 - DNA, 15 bp, Homo sapiens
gcagctcctggcttg

SEQ ID NO: 740940 - DNA, 15 bp, Homo sapiens
cagctcctggcttgg

SEQ ID NO: 740941 - DNA, 15 bp, Homo sapiens
agctcctggcttggg

SEQ ID NO: 740942 - DNA, 15 bp, Homo sapiens
gctcctggcttgggg

SEQ ID NO: 740943 - DNA, 15 bp, Homo sapiens
ctcctggcttggggg

SEQ ID NO: 740944 - DNA, 15 bp, Homo sapiens
tcctggcttgggggg

SEQ ID NO: 740945 - DNA, 15 bp, Homo sapiens
cctggcttggggggc

SEQ ID NO: 740946 - DNA, 15 bp, Homo sapiens
ctggcttggggggct

SEQ ID NO: 740947 - DNA, 15 bp, Homo sapiens
tggcttggggggctt

SEQ ID NO: 740948 - DNA, 15 bp, Homo sapiens
ggcttggggggcttc

SEQ ID NO: 740949 - DNA, 15 bp, Homo sapiens
gcttggggggcttca

SEQ ID NO: 740950 - DNA, 15 bp, Homo sapiens
cttggggggcttcag

SEQ ID NO: 740951 - DNA, 15 bp, Homo sapiens
ttggggggcttcagc

SEQ ID NO: 740952 - DNA, 15 bp, Homo sapiens
tggggggcttcagct

SEQ ID NO: 740953 - DNA, 15 bp, Homo sapiens
ggggggcttcagctt

SEQ ID NO: 740954 - DNA, 15 bp, Homo sapiens
gggggcttcagcttg

SEQ ID NO: 740955 - DNA, 15 bp, Homo sapiens
ggggcttcagcttgg

SEQ ID NO: 740956 - DNA, 15 bp, Homo sapiens
gggcttcagcttggt

SEQ ID NO: 740957 - DNA, 15 bp, Homo sapiens
ggcttcagcttggtg

SEQ ID NO: 740958 - DNA, 15 bp, Homo sapiens
gcttcagcttggtga

SEQ ID NO: 740959 - DNA, 15 bp, Homo sapiens
cttcagcttggtgac

SEQ ID NO: 740960 - DNA, 15 bp, Homo sapiens
ttcagcttggtgact

SEQ ID NO: 740961 - DNA, 15 bp, Homo sapiens
tcagcttggtgactt

SEQ ID NO: 740962 - DNA, 15 bp, Homo sapiens
cagcttggtgacttt

SEQ ID NO: 740963 - DNA, 15 bp, Homo sapiens
agcttggtgactttg

SEQ ID NO: 740964 - DNA, 15 bp, Homo sapiens
gcttggtgactttgg

SEQ ID NO: 740965 - DNA, 15 bp, Homo sapiens
cttggtgactttggt

SEQ ID NO: 740966 - DNA, 15 bp, Homo sapiens
ttggtgactttggtg

SEQ ID NO: 740967 - DNA, 15 bp, Homo sapiens
tggtgactttggtgt

SEQ ID NO: 740968 - DNA, 15 bp, Homo sapiens
ggtgactttggtgtc

SEQ ID NO: 740969 - DNA, 15 bp, Homo sapiens
gtgactttggtgtca

SEQ ID NO: 740970 - DNA, 15 bp, Homo sapiens
tgactttggtgtcat

SEQ ID NO: 740971 - DNA, 15 bp, Homo sapiens
gactttggtgtcatt

SEQ ID NO: 740972 - DNA, 15 bp, Homo sapiens
actttggtgtcatta

SEQ ID NO: 740973 - DNA, 15 bp, Homo sapiens
ctttggtgtcattaa

SEQ ID NO: 740974 - DNA, 15 bp, Homo sapiens
tttggtgtcattaac

SEQ ID NO: 740975 - DNA, 15 bp, Homo sapiens
ttggtgtcattaact

SEQ ID NO: 740976 - DNA, 15 bp, Homo sapiens
tggtgtcattaactc

SEQ ID NO: 740977 - DNA, 15 bp, Homo sapiens
ggtgtcattaactca

SEQ ID NO: 740978 - DNA, 15 bp, Homo sapiens
gtgtcattaactcat

SEQ ID NO: 740979 - DNA, 15 bp, Homo sapiens
tgtcattaactcatg

SEQ ID NO: 740980 - DNA, 15 bp, Homo sapiens
gtcattaactcatgc

SEQ ID NO: 740981 - DNA, 15 bp, Homo sapiens
tcattaactcatgca

SEQ ID NO: 740982 - DNA, 15 bp, Homo sapiens
cattaactcatgcat

SEQ ID NO: 740983 - DNA, 15 bp, Homo sapiens
attaactcatgcatt

SEQ ID NO: 740984 - DNA, 15 bp, Homo sapiens
ttaactcatgcattt

SEQ ID NO: 740985 - DNA, 15 bp, Homo sapiens
taactcatgcatttg

SEQ ID NO: 740986 - DNA, 15 bp, Homo sapiens
aactcatgcatttga

SEQ ID NO: 740987 - DNA, 15 bp, Homo sapiens
actcatgcatttgag

SEQ ID NO: 740988 - DNA, 15 bp, Homo sapiens
ctcatgcatttgagc

SEQ ID NO: 740989 - DNA, 15 bp, Homo sapiens
tcatgcatttgagct

SEQ ID NO: 740990 - DNA, 15 bp, Homo sapiens
catgcatttgagctc

SEQ ID NO: 740991 - DNA, 15 bp, Homo sapiens
atgcatttgagctct

SEQ ID NO: 740992 - DNA, 15 bp, Homo sapiens
tgcatttgagctctt

SEQ ID NO: 740993 - DNA, 15 bp, Homo sapiens
gcatttgagctcttt

SEQ ID NO: 740994 - DNA, 15 bp, Homo sapiens
catttgagctctttt

SEQ ID NO: 740995 - DNA, 15 bp, Homo sapiens
atttgagctcttttt

SEQ ID NO: 740996 - DNA, 15 bp, Homo sapiens
tttgagctctttttt

SEQ ID NO: 740997 - DNA, 15 bp, Homo sapiens
ttgagctcttttttt

SEQ ID NO: 740998 - DNA, 15 bp, Homo sapiens
tgagctctttttttg

SEQ ID NO: 740999 - DNA, 15 bp, Homo sapiens
gagctctttttttgc

SEQ ID NO: 741000 - DNA, 15 bp, Homo sapiens
agctctttttttgct

SEQ ID NO: 741001 - DNA, 15 bp, Homo sapiens
gctctttttttgctt

SEQ ID NO: 741002 - DNA, 15 bp, Homo sapiens
ctctttttttgcttt

SEQ ID NO: 741003 - DNA, 15 bp, Homo sapiens
tctttttttgctttt

SEQ ID NO: 741004 - DNA, 15 bp, Homo sapiens
ctttttttgcttttg

SEQ ID NO: 741005 - DNA, 15 bp, Homo sapiens
tttttttgcttttgc

SEQ ID NO: 741006 - DNA, 15 bp, Homo sapiens
ttttttgcttttgct

SEQ ID NO: 741007 - DNA, 15 bp, Homo sapiens
tttttgcttttgctc

SEQ ID NO: 741008 - DNA, 15 bp, Homo sapiens
ttttgcttttgctct

SEQ ID NO: 741009 - DNA, 15 bp, Homo sapiens
tttgcttttgctctt

SEQ ID NO: 741010 - DNA, 15 bp, Homo sapiens
ttgcttttgctcttt

SEQ ID NO: 741011 - DNA, 15 bp, Homo sapiens
tgcttttgctctttg

SEQ ID NO: 741012 - DNA, 15 bp, Homo sapiens
gcttttgctctttgc

SEQ ID NO: 741013 - DNA, 15 bp, Homo sapiens
cttttgctctttgcg

SEQ ID NO: 741014 - DNA, 15 bp, Homo sapiens
ttttgctctttgcgc

SEQ ID NO: 741015 - DNA, 15 bp, Homo sapiens
tttgctctttgcgca

SEQ ID NO: 741016 - DNA, 15 bp, Homo sapiens
ttgctctttgcgcat

SEQ ID NO: 741017 - DNA, 15 bp, Homo sapiens
tgctctttgcgcatg

SEQ ID NO: 741018 - DNA, 15 bp, Homo sapiens
gctctttgcgcatgg

SEQ ID NO: 741019 - DNA, 15 bp, Homo sapiens
ctctttgcgcatggg

SEQ ID NO: 741020 - DNA, 15 bp, Homo sapiens
tctttgcgcatgggg

SEQ ID NO: 741021 - DNA, 15 bp, Homo sapiens
ctttgcgcatggggg

SEQ ID NO: 741022 - DNA, 15 bp, Homo sapiens
tttgcgcatggggga

SEQ ID NO: 741023 - DNA, 15 bp, Homo sapiens
ttgcgcatgggggat

SEQ ID NO: 741024 - DNA, 15 bp, Homo sapiens
tgcgcatgggggatg

SEQ ID NO: 741025 - DNA, 15 bp, Homo sapiens
gcgcatgggggatgt

SEQ ID NO: 741026 - DNA, 15 bp, Homo sapiens
cgcatgggggatgta

SEQ ID NO: 741027 - DNA, 15 bp, Homo sapiens
gcatgggggatgtaa

SEQ ID NO: 741028 - DNA, 15 bp, Homo sapiens
catgggggatgtaaa

SEQ ID NO: 741029 - DNA, 15 bp, Homo sapiens
atgggggatgtaaag

SEQ ID NO: 741030 - DNA, 15 bp, Homo sapiens
tgggggatgtaaagg

SEQ ID NO: 741031 - DNA, 15 bp, Homo sapiens
gggggatgtaaaggg

SEQ ID NO: 741032 - DNA, 15 bp, Homo sapiens
ggggatgtaaaggga

SEQ ID NO: 741033 - DNA, 15 bp, Homo sapiens
gggatgtaaagggaa

SEQ ID NO: 741034 - DNA, 15 bp, Homo sapiens
ggatgtaaagggaat

SEQ ID NO: 741035 - DNA, 15 bp, Homo sapiens
gatgtaaagggaatg

SEQ ID NO: 741036 - DNA, 15 bp, Homo sapiens
atgtaaagggaatgg

SEQ ID NO: 741037 - DNA, 15 bp, Homo sapiens
tgtaaagggaatgga

SEQ ID NO: 741038 - DNA, 15 bp, Homo sapiens
gtaaagggaatggac

SEQ ID NO: 741039 - DNA, 15 bp, Homo sapiens
taaagggaatggacc

SEQ ID NO: 741040 - DNA, 15 bp, Homo sapiens
aaagggaatggaccc

SEQ ID NO: 741041 - DNA, 15 bp, Homo sapiens
aagggaatggaccca

SEQ ID NO: 741042 - DNA, 15 bp, Homo sapiens
agggaatggacccac

SEQ ID NO: 741043 - DNA, 15 bp, Homo sapiens
gggaatggacccacc

SEQ ID NO: 741044 - DNA, 15 bp, Homo sapiens
ggaatggacccacct

SEQ ID NO: 741045 - DNA, 15 bp, Homo sapiens
gaatggacccacctt

SEQ ID NO: 741046 - DNA, 15 bp, Homo sapiens
aatggacccaccttt

SEQ ID NO: 741047 - DNA, 15 bp, Homo sapiens
atggacccaccttta

SEQ ID NO: 741048 - DNA, 15 bp, Homo sapiens
tggacccacctttag

SEQ ID NO: 741049 - DNA, 15 bp, Homo sapiens
ggacccacctttagg

SEQ ID NO: 741050 - DNA, 15 bp, Homo sapiens
gacccacctttaggg

SEQ ID NO: 741051 - DNA, 15 bp, Homo sapiens
acccacctttaggga

SEQ ID NO: 741052 - DNA, 15 bp, Homo sapiens
cccacctttagggaa

SEQ ID NO: 741053 - DNA, 15 bp, Homo sapiens
ccacctttagggaac

SEQ ID NO: 741054 - DNA, 15 bp, Homo sapiens
cacctttagggaact

SEQ ID NO: 741055 - DNA, 15 bp, Homo sapiens
acctttagggaactt

SEQ ID NO: 741056 - DNA, 15 bp, Homo sapiens
cctttagggaacttg

SEQ ID NO: 741057 - DNA, 15 bp, Homo sapiens
ctttagggaacttgt

SEQ ID NO: 741058 - DNA, 15 bp, Homo sapiens
tttagggaacttgtt

SEQ ID NO: 741059 - DNA, 15 bp, Homo sapiens
ttagggaacttgttg

SEQ ID NO: 741060 - DNA, 15 bp, Homo sapiens
tagggaacttgttga

SEQ ID NO: 741061 - DNA, 15 bp, Homo sapiens
agggaacttgttgaa

SEQ ID NO: 741062 - DNA, 15 bp, Homo sapiens
gggaacttgttgaag

SEQ ID NO: 741063 - DNA, 15 bp, Homo sapiens
ggaacttgttgaaga

SEQ ID NO: 741064 - DNA, 15 bp, Homo sapiens
gaacttgttgaagac

SEQ ID NO: 741065 - DNA, 15 bp, Homo sapiens
aacttgttgaagaca

SEQ ID NO: 741066 - DNA, 15 bp, Homo sapiens
acttgttgaagacag

SEQ ID NO: 741067 - DNA, 15 bp, Homo sapiens
ttccttgcctgtagg

SEQ ID NO: 741068 - DNA, 15 bp, Homo sapiens
tccttgcctgtagga

SEQ ID NO: 741069 - DNA, 15 bp, Homo sapiens
ccttgcctgtaggat

SEQ ID NO: 741070 - DNA, 15 bp, Homo sapiens
cttgcctgtaggatc

SEQ ID NO: 741071 - DNA, 15 bp, Homo sapiens
ttgcctgtaggatca

SEQ ID NO: 741072 - DNA, 15 bp, Homo sapiens
tgcctgtaggatcac

SEQ ID NO: 741073 - DNA, 15 bp, Homo sapiens
gcctgtaggatcacg

SEQ ID NO: 741074 - DNA, 15 bp, Homo sapiens
cctgtaggatcacgt

SEQ ID NO: 741075 - DNA, 15 bp, Homo sapiens
ctgtaggatcacgtg

SEQ ID NO: 741076 - DNA, 15 bp, Homo sapiens
tgtaggatcacgtgg

SEQ ID NO: 741077 - DNA, 15 bp, Homo sapiens
gtaggatcacgtggt

SEQ ID NO: 741078 - DNA, 15 bp, Homo sapiens
taggatcacgtggta

SEQ ID NO: 741079 - DNA, 15 bp, Homo sapiens
aggatcacgtggtag

SEQ ID NO: 741080 - DNA, 15 bp, Homo sapiens
ggatcacgtggtagc

SEQ ID NO: 741081 - DNA, 15 bp, Homo sapiens
gatcacgtggtagca

SEQ ID NO: 741082 - DNA, 15 bp, Homo sapiens
atcacgtggtagcag

SEQ ID NO: 741083 - DNA, 15 bp, Homo sapiens
tcacgtggtagcagc

SEQ ID NO: 741084 - DNA, 15 bp, Homo sapiens
cacgtggtagcagct

SEQ ID NO: 741085 - DNA, 15 bp, Homo sapiens
acgtggtagcagctc

SEQ ID NO: 741086 - DNA, 15 bp, Homo sapiens
cgtggtagcagctcg

SEQ ID NO: 741087 - DNA, 15 bp, Homo sapiens
gtggtagcagctcga

SEQ ID NO: 741088 - DNA, 15 bp, Homo sapiens
tggtagcagctcgaa

SEQ ID NO: 741089 - DNA, 15 bp, Homo sapiens
ggtagcagctcgaat

SEQ ID NO: 741090 - DNA, 15 bp, Homo sapiens
gtagcagctcgaata

SEQ ID NO: 741091 - DNA, 15 bp, Homo sapiens
tagcagctcgaatag

SEQ ID NO: 741092 - DNA, 15 bp, Homo sapiens
agcagctcgaataga

SEQ ID NO: 741093 - DNA, 15 bp, Homo sapiens
gcagctcgaatagaa

SEQ ID NO: 741094 - DNA, 15 bp, Homo sapiens
cagctcgaatagaag

SEQ ID NO: 741095 - DNA, 15 bp, Homo sapiens
agctcgaatagaagc

SEQ ID NO: 741096 - DNA, 15 bp, Homo sapiens
gctcgaatagaagct

SEQ ID NO: 741097 - DNA, 15 bp, Homo sapiens
ctcgaatagaagctg

SEQ ID NO: 741098 - DNA, 15 bp, Homo sapiens
tcgaatagaagctgt

SEQ ID NO: 741099 - DNA, 15 bp, Homo sapiens
cgaatagaagctgtg

SEQ ID NO: 741100 - DNA, 15 bp, Homo sapiens
gaatagaagctgtgc

SEQ ID NO: 741101 - DNA, 15 bp, Homo sapiens
aatagaagctgtgcc

SEQ ID NO: 741102 - DNA, 15 bp, Homo sapiens
atagaagctgtgccc

SEQ ID NO: 741103 - DNA, 15 bp, Homo sapiens
tagaagctgtgccct

SEQ ID NO: 741104 - DNA, 15 bp, Homo sapiens
agaagctgtgccctg

SEQ ID NO: 741105 - DNA, 15 bp, Homo sapiens
gaagctgtgccctgt

SEQ ID NO: 741106 - DNA, 15 bp, Homo sapiens
aagctgtgccctgtt

SEQ ID NO: 741107 - DNA, 15 bp, Homo sapiens
agctgtgccctgttg

SEQ ID NO: 741108 - DNA, 15 bp, Homo sapiens
gctgtgccctgttgt

SEQ ID NO: 741109 - DNA, 15 bp, Homo sapiens
ctgtgccctgttgtg

SEQ ID NO: 741110 - DNA, 15 bp, Homo sapiens
tgtgccctgttgtgg

SEQ ID NO: 741111 - DNA, 15 bp, Homo sapiens
gtgccctgttgtggt

SEQ ID NO: 741112 - DNA, 15 bp, Homo sapiens
tgccctgttgtggtg

SEQ ID NO: 741113 - DNA, 15 bp, Homo sapiens
gccctgttgtggtgt

SEQ ID NO: 741114 - DNA, 15 bp, Homo sapiens
ccctgttgtggtgta

SEQ ID NO: 741115 - DNA, 15 bp, Homo sapiens
cctgttgtggtgtat

SEQ ID NO: 741116 - DNA, 15 bp, Homo sapiens
ctgttgtggtgtatc

SEQ ID NO: 741117 - DNA, 15 bp, Homo sapiens
tgttgtggtgtatcc

SEQ ID NO: 741118 - DNA, 15 bp, Homo sapiens
gttgtggtgtatcct

SEQ ID NO: 741119 - DNA, 15 bp, Homo sapiens
ttgtggtgtatcctc

SEQ ID NO: 741120 - DNA, 15 bp, Homo sapiens
tgtggtgtatcctct

SEQ ID NO: 741121 - DNA, 15 bp, Homo sapiens
gtggtgtatcctctt

SEQ ID NO: 741122 - DNA, 15 bp, Homo sapiens
tggtgtatcctcttg

SEQ ID NO: 741123 - DNA, 15 bp, Homo sapiens
ggtgtatcctcttgt

SEQ ID NO: 741124 - DNA, 15 bp, Homo sapiens
gtgtatcctcttgtg

SEQ ID NO: 741125 - DNA, 15 bp, Homo sapiens
tgtatcctcttgtgt

SEQ ID NO: 741126 - DNA, 15 bp, Homo sapiens
gtatcctcttgtgtg

SEQ ID NO: 741127 - DNA, 15 bp, Homo sapiens
tatcctcttgtgtga

SEQ ID NO: 741128 - DNA, 15 bp, Homo sapiens
atcctcttgtgtgag

SEQ ID NO: 741129 - DNA, 15 bp, Homo sapiens
tcctcttgtgtgagg

SEQ ID NO: 741130 - DNA, 15 bp, Homo sapiens
cctcttgtgtgaggg

SEQ ID NO: 741131 - DNA, 15 bp, Homo sapiens
ctcttgtgtgagggg

SEQ ID NO: 741132 - DNA, 15 bp, Homo sapiens
tcttgtgtgaggggc

SEQ ID NO: 741133 - DNA, 15 bp, Homo sapiens
cttgtgtgaggggca

SEQ ID NO: 741134 - DNA, 15 bp, Homo sapiens
ttgtgtgaggggcac

SEQ ID NO: 741135 - DNA, 15 bp, Homo sapiens
tgtgtgaggggcacc

SEQ ID NO: 741136 - DNA, 15 bp, Homo sapiens
gtgtgaggggcaccc

SEQ ID NO: 741137 - DNA, 15 bp, Homo sapiens
tgtgaggggcaccct

SEQ ID NO: 741138 - DNA, 15 bp, Homo sapiens
gtgaggggcaccctt

SEQ ID NO: 741139 - DNA, 15 bp, Homo sapiens
tgaggggcacccttt

SEQ ID NO: 741140 - DNA, 15 bp, Homo sapiens
gaggggcaccctttt

SEQ ID NO: 741141 - DNA, 15 bp, Homo sapiens
aggggcacccttttt

SEQ ID NO: 741142 - DNA, 15 bp, Homo sapiens
ggggcaccctttttt

SEQ ID NO: 741143 - DNA, 15 bp, Homo sapiens
gggcacccttttttg

SEQ ID NO: 741144 - DNA, 15 bp, Homo sapiens
ggcacccttttttgt

SEQ ID NO: 741145 - DNA, 15 bp, Homo sapiens
gcacccttttttgtg

SEQ ID NO: 741146 - DNA, 15 bp, Homo sapiens
cacccttttttgtgg

SEQ ID NO: 741147 - DNA, 15 bp, Homo sapiens
acccttttttgtggg

SEQ ID NO: 741148 - DNA, 15 bp, Homo sapiens
cccttttttgtgggg

SEQ ID NO: 741149 - DNA, 15 bp, Homo sapiens
ccttttttgtggggt

SEQ ID NO: 741150 - DNA, 15 bp, Homo sapiens
cttttttgtggggta

SEQ ID NO: 741151 - DNA, 15 bp, Homo sapiens
ttttttgtggggtac

SEQ ID NO: 741152 - DNA, 15 bp, Homo sapiens
tttttgtggggtacc

SEQ ID NO: 741153 - DNA, 15 bp, Homo sapiens
ttttgtggggtacct

SEQ ID NO: 741154 - DNA, 15 bp, Homo sapiens
tttgtggggtacctg

SEQ ID NO: 741155 - DNA, 15 bp, Homo sapiens
ttgtggggtacctgc

SEQ ID NO: 741156 - DNA, 15 bp, Homo sapiens
tgtggggtacctgct

SEQ ID NO: 741157 - DNA, 15 bp, Homo sapiens
gtggggtacctgctc

SEQ ID NO: 741158 - DNA, 15 bp, Homo sapiens
tggggtacctgctct

SEQ ID NO: 741159 - DNA, 15 bp, Homo sapiens
ggggtacctgctctg

SEQ ID NO: 741160 - DNA, 15 bp, Homo sapiens
gggtacctgctctga

SEQ ID NO: 741161 - DNA, 15 bp, Homo sapiens
ggtacctgctctgac

SEQ ID NO: 741162 - DNA, 15 bp, Homo sapiens
gtacctgctctgact

SEQ ID NO: 741163 - DNA, 15 bp, Homo sapiens
tacctgctctgacta

SEQ ID NO: 741164 - DNA, 15 bp, Homo sapiens
acctgctctgactac

SEQ ID NO: 741165 - DNA, 15 bp, Homo sapiens
cctgctctgactact

SEQ ID NO: 741166 - DNA, 15 bp, Homo sapiens
ctgctctgactactt

SEQ ID NO: 741167 - DNA, 15 bp, Homo sapiens
tgctctgactacttg

SEQ ID NO: 741168 - DNA, 15 bp, Homo sapiens
gctctgactacttgg

SEQ ID NO: 741169 - DNA, 15 bp, Homo sapiens
ctctgactacttggt

SEQ ID NO: 741170 - DNA, 15 bp, Homo sapiens
tctgactacttggtg

SEQ ID NO: 741171 - DNA, 15 bp, Homo sapiens
ctgactacttggtgg

SEQ ID NO: 741172 - DNA, 15 bp, Homo sapiens
tgactacttggtggt

SEQ ID NO: 741173 - DNA, 15 bp, Homo sapiens
gactacttggtggtg

SEQ ID NO: 741174 - DNA, 15 bp, Homo sapiens
actacttggtggtgt

SEQ ID NO: 741175 - DNA, 15 bp, Homo sapiens
ctacttggtggtgtg

SEQ ID NO: 741176 - DNA, 15 bp, Homo sapiens
tacttggtggtgtgt

SEQ ID NO: 741177 - DNA, 15 bp, Homo sapiens
acttggtggtgtgtc

SEQ ID NO: 741178 - DNA, 15 bp, Homo sapiens
cttggtggtgtgtct

SEQ ID NO: 741179 - DNA, 15 bp, Homo sapiens
ttggtggtgtgtctt

SEQ ID NO: 741180 - DNA, 15 bp, Homo sapiens
tggtggtgtgtcttc

SEQ ID NO: 741181 - DNA, 15 bp, Homo sapiens
ggtggtgtgtcttcc

SEQ ID NO: 741182 - DNA, 15 bp, Homo sapiens
gtggtgtgtcttcca

SEQ ID NO: 741183 - DNA, 15 bp, Homo sapiens
tggtgtgtcttccat

SEQ ID NO: 741184 - DNA, 15 bp, Homo sapiens
ggtgtgtcttccatg

SEQ ID NO: 741185 - DNA, 15 bp, Homo sapiens
gtgtgtcttccatgg

SEQ ID NO: 741186 - DNA, 15 bp, Homo sapiens
tgtgtcttccatggc

SEQ ID NO: 741187 - DNA, 15 bp, Homo sapiens
gtgtcttccatggct

SEQ ID NO: 741188 - DNA, 15 bp, Homo sapiens
tgtcttccatggctg

SEQ ID NO: 741189 - DNA, 15 bp, Homo sapiens
gtcttccatggctgg

SEQ ID NO: 741190 - DNA, 15 bp, Homo sapiens
tcttccatggctggc

SEQ ID NO: 741191 - DNA, 15 bp, Homo sapiens
cttccatggctggct

SEQ ID NO: 741192 - DNA, 15 bp, Homo sapiens
ttccatggctggctc

SEQ ID NO: 741193 - DNA, 15 bp, Homo sapiens
tccatggctggctca

SEQ ID NO: 741194 - DNA, 15 bp, Homo sapiens
ccatggctggctcag

SEQ ID NO: 741195 - DNA, 15 bp, Homo sapiens
catggctggctcagg

SEQ ID NO: 741196 - DNA, 15 bp, Homo sapiens
atggctggctcaggc

SEQ ID NO: 741197 - DNA, 15 bp, Homo sapiens
tggctggctcaggca

SEQ ID NO: 741198 - DNA, 15 bp, Homo sapiens
ggctggctcaggcaa

SEQ ID NO: 741199 - DNA, 15 bp, Homo sapiens
gctggctcaggcaaa

SEQ ID NO: 741200 - DNA, 15 bp, Homo sapiens
ctggctcaggcaaag

SEQ ID NO: 741201 - DNA, 15 bp, Homo sapiens
tggctcaggcaaagt

SEQ ID NO: 741202 - DNA, 15 bp, Homo sapiens
ggctcaggcaaagtt

SEQ ID NO: 741203 - DNA, 15 bp, Homo sapiens
gctcaggcaaagttc

SEQ ID NO: 741204 - DNA, 15 bp, Homo sapiens
ctcaggcaaagttca

SEQ ID NO: 741205 - DNA, 15 bp, Homo sapiens
tcaggcaaagttcat

SEQ ID NO: 741206 - DNA, 15 bp, Homo sapiens
caggcaaagttcatt

SEQ ID NO: 741207 - DNA, 15 bp, Homo sapiens
aggcaaagttcattc

SEQ ID NO: 741208 - DNA, 15 bp, Homo sapiens
ggcaaagttcattcc

SEQ ID NO: 741209 - DNA, 15 bp, Homo sapiens
gcaaagttcattccc

SEQ ID NO: 741210 - DNA, 15 bp, Homo sapiens
caaagttcattcccg

SEQ ID NO: 741211 - DNA, 15 bp, Homo sapiens
aaagttcattcccgg

SEQ ID NO: 741212 - DNA, 15 bp, Homo sapiens
aagttcattcccgga

SEQ ID NO: 741213 - DNA, 15 bp, Homo sapiens
agttcattcccggac

SEQ ID NO: 741214 - DNA, 15 bp, Homo sapiens
gttcattcccggacg

SEQ ID NO: 741215 - DNA, 15 bp, Homo sapiens
ttcattcccggacgg

SEQ ID NO: 741216 - DNA, 15 bp, Homo sapiens
tcattcccggacggc

SEQ ID NO: 741217 - DNA, 15 bp, Homo sapiens
cattcccggacggct

SEQ ID NO: 741218 - DNA, 15 bp, Homo sapiens
attcccggacggctc

SEQ ID NO: 741219 - DNA, 15 bp, Homo sapiens
ttcccggacggctcc

SEQ ID NO: 741220 - DNA, 15 bp, Homo sapiens
tcccggacggctccc

SEQ ID NO: 741221 - DNA, 15 bp, Homo sapiens
cccggacggctccct

SEQ ID NO: 741222 - DNA, 15 bp, Homo sapiens
ccggacggctccctc

SEQ ID NO: 741223 - DNA, 15 bp, Homo sapiens
cggacggctccctcc

SEQ ID NO: 741224 - DNA, 15 bp, Homo sapiens
ggacggctccctccc

SEQ ID NO: 741225 - DNA, 15 bp, Homo sapiens
gacggctccctcccc

SEQ ID NO: 741226 - DNA, 15 bp, Homo sapiens
acggctccctccccg

SEQ ID NO: 741227 - DNA, 15 bp, Homo sapiens
cggctccctccccgg

SEQ ID NO: 741228 - DNA, 15 bp, Homo sapiens
ggctccctccccggc

SEQ ID NO: 741229 - DNA, 15 bp, Homo sapiens
gctccctccccggct

SEQ ID NO: 741230 - DNA, 15 bp, Homo sapiens
ctccctccccggctc

SEQ ID NO: 741231 - DNA, 15 bp, Homo sapiens
tccctccccggctct

SEQ ID NO: 741232 - DNA, 15 bp, Homo sapiens
ccctccccggctctc

SEQ ID NO: 741233 - DNA, 15 bp, Homo sapiens
cctccccggctctcc

SEQ ID NO: 741234 - DNA, 15 bp, Homo sapiens
ctccccggctctcct

SEQ ID NO: 741235 - DNA, 15 bp, Homo sapiens
tccccggctctcctc

SEQ ID NO: 741236 - DNA, 15 bp, Homo sapiens
ccccggctctcctct

SEQ ID NO: 741237 - DNA, 15 bp, Homo sapiens
cccggctctcctctt

SEQ ID NO: 741238 - DNA, 15 bp, Homo sapiens
ccggctctcctcttc

SEQ ID NO: 741239 - DNA, 15 bp, Homo sapiens
cggctctcctcttca

SEQ ID NO: 741240 - DNA, 15 bp, Homo sapiens
ggctctcctcttcag

SEQ ID NO: 741241 - DNA, 15 bp, Homo sapiens
gctctcctcttcagg

SEQ ID NO: 741242 - DNA, 15 bp, Homo sapiens
ctctcctcttcagga

SEQ ID NO: 741243 - DNA, 15 bp, Homo sapiens
tctcctcttcaggaa

SEQ ID NO: 741244 - DNA, 15 bp, Homo sapiens
ctcctcttcaggaac

SEQ ID NO: 741245 - DNA, 15 bp, Homo sapiens
tcctcttcaggaact

SEQ ID NO: 741246 - DNA, 15 bp, Homo sapiens
cctcttcaggaactg

SEQ ID NO: 741247 - DNA, 15 bp, Homo sapiens
ctcttcaggaactga

SEQ ID NO: 741248 - DNA, 15 bp, Homo sapiens
tcttcaggaactgag

SEQ ID NO: 741249 - DNA, 15 bp, Homo sapiens
cttcaggaactgagc

SEQ ID NO: 741250 - DNA, 15 bp, Homo sapiens
ttcaggaactgagct

SEQ ID NO: 741251 - DNA, 15 bp, Homo sapiens
tcaggaactgagctt

SEQ ID NO: 741252 - DNA, 15 bp, Homo sapiens
caggaactgagcttg

SEQ ID NO: 741253 - DNA, 15 bp, Homo sapiens
aggaactgagcttgc

SEQ ID NO: 741254 - DNA, 15 bp, Homo sapiens
ggaactgagcttgct

SEQ ID NO: 741255 - DNA, 15 bp, Homo sapiens
gaactgagcttgctg

SEQ ID NO: 741256 - DNA, 15 bp, Homo sapiens
aactgagcttgctga

SEQ ID NO: 741257 - DNA, 15 bp, Homo sapiens
actgagcttgctgag

SEQ ID NO: 741258 - DNA, 15 bp, Homo sapiens
ctgagcttgctgaga

SEQ ID NO: 741259 - DNA, 15 bp, Homo sapiens
tgagcttgctgagaa

SEQ ID NO: 741260 - DNA, 15 bp, Homo sapiens
gagcttgctgagaac

SEQ ID NO: 741261 - DNA, 15 bp, Homo sapiens
agcttgctgagaacg

SEQ ID NO: 741262 - DNA, 15 bp, Homo sapiens
gcttgctgagaacgt

SEQ ID NO: 741263 - DNA, 15 bp, Homo sapiens
cttgctgagaacgtc

SEQ ID NO: 741264 - DNA, 15 bp, Homo sapiens
ttgctgagaacgtct

SEQ ID NO: 741265 - DNA, 15 bp, Homo sapiens
tgctgagaacgtctt

SEQ ID NO: 741266 - DNA, 15 bp, Homo sapiens
gctgagaacgtcttt

SEQ ID NO: 741267 - DNA, 15 bp, Homo sapiens
ctgagaacgtcttta

SEQ ID NO: 741268 - DNA, 15 bp, Homo sapiens
tgagaacgtctttag

SEQ ID NO: 741269 - DNA, 15 bp, Homo sapiens
gagaacgtctttagg

SEQ ID NO: 741270 - DNA, 15 bp, Homo sapiens
agaacgtctttaggg

SEQ ID NO: 741271 - DNA, 15 bp, Homo sapiens
gaacgtctttaggga

SEQ ID NO: 741272 - DNA, 15 bp, Homo sapiens
aacgtctttagggag

SEQ ID NO: 741273 - DNA, 15 bp, Homo sapiens
acgtctttagggaga

SEQ ID NO: 741274 - DNA, 15 bp, Homo sapiens
cgtctttagggagac

SEQ ID NO: 741275 - DNA, 15 bp, Homo sapiens
gtctttagggagacc

SEQ ID NO: 741276 - DNA, 15 bp, Homo sapiens
tctttagggagaccc

SEQ ID NO: 741277 - DNA, 15 bp, Homo sapiens
ctttagggagaccct

SEQ ID NO: 741278 - DNA, 15 bp, Homo sapiens
tttagggagaccctt

SEQ ID NO: 741279 - DNA, 15 bp, Homo sapiens
ttagggagacccttg

SEQ ID NO: 741280 - DNA, 15 bp, Homo sapiens
tagggagacccttgt

SEQ ID NO: 741281 - DNA, 15 bp, Homo sapiens
agggagacccttgtt

SEQ ID NO: 741282 - DNA, 15 bp, Homo sapiens
gggagacccttgttt

SEQ ID NO: 741283 - DNA, 15 bp, Homo sapiens
ggagacccttgtttg

SEQ ID NO: 741284 - DNA, 15 bp, Homo sapiens
gagacccttgtttgt

SEQ ID NO: 741285 - DNA, 15 bp, Homo sapiens
agacccttgtttgtt

SEQ ID NO: 741286 - DNA, 15 bp, Homo sapiens
gacccttgtttgttt

SEQ ID NO: 741287 - DNA, 15 bp, Homo sapiens
acccttgtttgtttt

SEQ ID NO: 741288 - DNA, 15 bp, Homo sapiens
cccttgtttgttttc

SEQ ID NO: 741289 - DNA, 15 bp, Homo sapiens
ccttgtttgttttca

SEQ ID NO: 741290 - DNA, 15 bp, Homo sapiens
cttgtttgttttcat

SEQ ID NO: 741291 - DNA, 15 bp, Homo sapiens
ttgtttgttttcatt

SEQ ID NO: 741292 - DNA, 15 bp, Homo sapiens
tgtttgttttcattt

SEQ ID NO: 741293 - DNA, 15 bp, Homo sapiens
gtttgttttcatttc

SEQ ID NO: 741294 - DNA, 15 bp, Homo sapiens
tttgttttcatttca

SEQ ID NO: 741295 - DNA, 15 bp, Homo sapiens
ttgttttcatttcaa

SEQ ID NO: 741296 - DNA, 15 bp, Homo sapiens
tgttttcatttcaat

SEQ ID NO: 741297 - DNA, 15 bp, Homo sapiens
gttttcatttcaatg

SEQ ID NO: 741298 - DNA, 15 bp, Homo sapiens
ttttcatttcaatgc

SEQ ID NO: 741299 - DNA, 15 bp, Homo sapiens
tttcatttcaatgca

SEQ ID NO: 741300 - DNA, 15 bp, Homo sapiens
ttcatttcaatgcaa

SEQ ID NO: 741301 - DNA, 15 bp, Homo sapiens
tcatttcaatgcaat

SEQ ID NO: 741302 - DNA, 15 bp, Homo sapiens
catttcaatgcaata

SEQ ID NO: 741303 - DNA, 15 bp, Homo sapiens
atttcaatgcaatat

SEQ ID NO: 741304 - DNA, 15 bp, Homo sapiens
tttcaatgcaatata

SEQ ID NO: 741305 - DNA, 15 bp, Homo sapiens
ttcaatgcaatatat

SEQ ID NO: 741306 - DNA, 15 bp, Homo sapiens
tcaatgcaatatata

SEQ ID NO: 741307 - DNA, 15 bp, Homo sapiens
caatgcaatatatac

SEQ ID NO: 741308 - DNA, 15 bp, Homo sapiens
aatgcaatatatact

SEQ ID NO: 741309 - DNA, 15 bp, Homo sapiens
atgcaatatatactc

SEQ ID NO: 741310 - DNA, 15 bp, Homo sapiens
tgcaatatatactct

SEQ ID NO: 741311 - DNA, 15 bp, Homo sapiens
gcaatatatactctg

SEQ ID NO: 741312 - DNA, 15 bp, Homo sapiens
caatatatactctgt

SEQ ID NO: 741313 - DNA, 15 bp, Homo sapiens
aatatatactctgtt

SEQ ID NO: 741314 - DNA, 15 bp, Homo sapiens
atatatactctgtta

SEQ ID NO: 741315 - DNA, 15 bp, Homo sapiens
tatatactctgttat

SEQ ID NO: 741316 - DNA, 15 bp, Homo sapiens
atatactctgttatc

SEQ ID NO: 741317 - DNA, 15 bp, Homo sapiens
tatactctgttatct

SEQ ID NO: 741318 - DNA, 15 bp, Homo sapiens
atactctgttatctg

SEQ ID NO: 741319 - DNA, 15 bp, Homo sapiens
tactctgttatctga

SEQ ID NO: 741320 - DNA, 15 bp, Homo sapiens
actctgttatctgag

SEQ ID NO: 741321 - DNA, 15 bp, Homo sapiens
ctctgttatctgaga

SEQ ID NO: 741322 - DNA, 15 bp, Homo sapiens
tctgttatctgagac

SEQ ID NO: 741323 - DNA, 15 bp, Homo sapiens
ctgttatctgagact

SEQ ID NO: 741324 - DNA, 15 bp, Homo sapiens
tgttatctgagactg

SEQ ID NO: 741325 - DNA, 15 bp, Homo sapiens
gttatctgagactga

SEQ ID NO: 741326 - DNA, 15 bp, Homo sapiens
ttatctgagactgag

SEQ ID NO: 741327 - DNA, 15 bp, Homo sapiens
tatctgagactgagg

SEQ ID NO: 741328 - DNA, 15 bp, Homo sapiens
atctgagactgaggg

SEQ ID NO: 741329 - DNA, 15 bp, Homo sapiens
tctgagactgagggt

SEQ ID NO: 741330 - DNA, 15 bp, Homo sapiens
ctgagactgagggta

SEQ ID NO: 741331 - DNA, 15 bp, Homo sapiens
tgagactgagggtat

SEQ ID NO: 741332 - DNA, 15 bp, Homo sapiens
gagactgagggtatt

SEQ ID NO: 741333 - DNA, 15 bp, Homo sapiens
agactgagggtattg

SEQ ID NO: 741334 - DNA, 15 bp, Homo sapiens
gactgagggtattgt

SEQ ID NO: 741335 - DNA, 15 bp, Homo sapiens
actgagggtattgtt

SEQ ID NO: 741336 - DNA, 15 bp, Homo sapiens
ctgagggtattgttt

SEQ ID NO: 741337 - DNA, 15 bp, Homo sapiens
tgagggtattgttta

SEQ ID NO: 741338 - DNA, 15 bp, Homo sapiens
gagggtattgtttac

SEQ ID NO: 741339 - DNA, 15 bp, Homo sapiens
agggtattgtttact

SEQ ID NO: 741340 - DNA, 15 bp, Homo sapiens
gggtattgtttactc

SEQ ID NO: 741341 - DNA, 15 bp, Homo sapiens
ggtattgtttactca

SEQ ID NO: 741342 - DNA, 15 bp, Homo sapiens
gtattgtttactcaa

SEQ ID NO: 741343 - DNA, 15 bp, Homo sapiens
tattgtttactcaaa

SEQ ID NO: 741344 - DNA, 15 bp, Homo sapiens
attgtttactcaaag

SEQ ID NO: 741345 - DNA, 15 bp, Homo sapiens
ttgtttactcaaagc

SEQ ID NO: 741346 - DNA, 15 bp, Homo sapiens
tgtttactcaaagct

SEQ ID NO: 741347 - DNA, 15 bp, Homo sapiens
gtttactcaaagctt

SEQ ID NO: 741348 - DNA, 15 bp, Homo sapiens
tttactcaaagcttc

SEQ ID NO: 741349 - DNA, 15 bp, Homo sapiens
ttactcaaagcttct

SEQ ID NO: 741350 - DNA, 15 bp, Homo sapiens
tactcaaagcttcta

SEQ ID NO: 741351 - DNA, 15 bp, Homo sapiens
actcaaagcttctaa

SEQ ID NO: 741352 - DNA, 15 bp, Homo sapiens
ctcaaagcttctaat

SEQ ID NO: 741353 - DNA, 15 bp, Homo sapiens
tcaaagcttctaatg

SEQ ID NO: 741354 - DNA, 15 bp, Homo sapiens
caaagcttctaatga

SEQ ID NO: 741355 - DNA, 15 bp, Homo sapiens
aaagcttctaatgag

SEQ ID NO: 741356 - DNA, 15 bp, Homo sapiens
aagcttctaatgaga

SEQ ID NO: 741357 - DNA, 15 bp, Homo sapiens
agcttctaatgagaa

SEQ ID NO: 741358 - DNA, 15 bp, Homo sapiens
gcttctaatgagaat

SEQ ID NO: 741359 - DNA, 15 bp, Homo sapiens
cttctaatgagaatt

SEQ ID NO: 741360 - DNA, 15 bp, Homo sapiens
ttctaatgagaattg

SEQ ID NO: 741361 - DNA, 15 bp, Homo sapiens
tctaatgagaattga

SEQ ID NO: 741362 - DNA, 15 bp, Homo sapiens
ctaatgagaattgag

SEQ ID NO: 741363 - DNA, 15 bp, Homo sapiens
taatgagaattgagc

SEQ ID NO: 741364 - DNA, 15 bp, Homo sapiens
aatgagaattgagca

SEQ ID NO: 741365 - DNA, 15 bp, Homo sapiens
atgagaattgagcag

SEQ ID NO: 741366 - DNA, 15 bp, Homo sapiens
tgagaattgagcagg

SEQ ID NO: 741367 - DNA, 15 bp, Homo sapiens
gagaattgagcagga

SEQ ID NO: 741368 - DNA, 15 bp, Homo sapiens
agaattgagcaggaa

SEQ ID NO: 741369 - DNA, 15 bp, Homo sapiens
gaattgagcaggaaa

SEQ ID NO: 741370 - DNA, 15 bp, Homo sapiens
aattgagcaggaaaa

SEQ ID NO: 741371 - DNA, 15 bp, Homo sapiens
attgagcaggaaaaa

SEQ ID NO: 741372 - DNA, 15 bp, Homo sapiens
ttgagcaggaaaaag

SEQ ID NO: 741373 - DNA, 15 bp, Homo sapiens
tgagcaggaaaaaga

SEQ ID NO: 741374 - DNA, 15 bp, Homo sapiens
gagcaggaaaaagag

SEQ ID NO: 741375 - DNA, 15 bp, Homo sapiens
agcaggaaaaagagg

SEQ ID NO: 741376 - DNA, 15 bp, Homo sapiens
gcaggaaaaagaggg

SEQ ID NO: 741377 - DNA, 15 bp, Homo sapiens
caggaaaaagaggga

SEQ ID NO: 741378 - DNA, 15 bp, Homo sapiens
aggaaaaagagggac

SEQ ID NO: 741379 - DNA, 15 bp, Homo sapiens
ggaaaaagagggacc

SEQ ID NO: 741380 - DNA, 15 bp, Homo sapiens
gaaaaagagggacct

SEQ ID NO: 741381 - DNA, 15 bp, Homo sapiens
aaaaagagggaccta

SEQ ID NO: 741382 - DNA, 15 bp, Homo sapiens
aaaagagggacctag

SEQ ID NO: 741383 - DNA, 15 bp, Homo sapiens
aaagagggacctaga

SEQ ID NO: 741384 - DNA, 15 bp, Homo sapiens
aagagggacctagag

SEQ ID NO: 741385 - DNA, 15 bp, Homo sapiens
agagggacctagaga

SEQ ID NO: 741386 - DNA, 15 bp, Homo sapiens
gagggacctagagaa

SEQ ID NO: 741387 - DNA, 15 bp, Homo sapiens
agggacctagagaag

SEQ ID NO: 741388 - DNA, 15 bp, Homo sapiens
gggacctagagaagg

SEQ ID NO: 741389 - DNA, 15 bp, Homo sapiens
ggacctagagaaggg

SEQ ID NO: 741390 - DNA, 15 bp, Homo sapiens
gacctagagaaggga

SEQ ID NO: 741391 - DNA, 15 bp, Homo sapiens
acctagagaagggag

SEQ ID NO: 741392 - DNA, 15 bp, Homo sapiens
cctagagaagggagg

SEQ ID NO: 741393 - DNA, 15 bp, Homo sapiens
ctagagaagggaggg

SEQ ID NO: 741394 - DNA, 15 bp, Homo sapiens
tagagaagggagggg

SEQ ID NO: 741395 - DNA, 15 bp, Homo sapiens
agagaagggaggggg

SEQ ID NO: 741396 - DNA, 15 bp, Homo sapiens
gagaagggagggggc

SEQ ID NO: 741397 - DNA, 15 bp, Homo sapiens
agaagggagggggct

SEQ ID NO: 741398 - DNA, 15 bp, Homo sapiens
gaagggagggggctt

SEQ ID NO: 741399 - DNA, 15 bp, Homo sapiens
aagggagggggcttc

SEQ ID NO: 741400 - DNA, 15 bp, Homo sapiens
agggagggggcttca

SEQ ID NO: 741401 - DNA, 15 bp, Homo sapiens
gggagggggcttcag

SEQ ID NO: 741402 - DNA, 15 bp, Homo sapiens
ggagggggcttcagg

SEQ ID NO: 741403 - DNA, 15 bp, Homo sapiens
gagggggcttcaggc

SEQ ID NO: 741404 - DNA, 15 bp, Homo sapiens
agggggcttcaggca

SEQ ID NO: 741405 - DNA, 15 bp, Homo sapiens
gggggcttcaggcag

SEQ ID NO: 741406 - DNA, 15 bp, Homo sapiens
ggggcttcaggcagt

SEQ ID NO: 741407 - DNA, 15 bp, Homo sapiens
gggcttcaggcagta

SEQ ID NO: 741408 - DNA, 15 bp, Homo sapiens
ggcttcaggcagtac

SEQ ID NO: 741409 - DNA, 15 bp, Homo sapiens
gcttcaggcagtacg

SEQ ID NO: 741410 - DNA, 15 bp, Homo sapiens
cttcaggcagtacgg

SEQ ID NO: 741411 - DNA, 15 bp, Homo sapiens
ttcaggcagtacggt

SEQ ID NO: 741412 - DNA, 15 bp, Homo sapiens
tcaggcagtacggtg

SEQ ID NO: 741413 - DNA, 15 bp, Homo sapiens
caggcagtacggtgg

SEQ ID NO: 741414 - DNA, 15 bp, Homo sapiens
aggcagtacggtggg

SEQ ID NO: 741415 - DNA, 15 bp, Homo sapiens
ggcagtacggtggga

SEQ ID NO: 741416 - DNA, 15 bp, Homo sapiens
gcagtacggtgggag

SEQ ID NO: 741417 - DNA, 15 bp, Homo sapiens
cagtacggtgggagt

SEQ ID NO: 741418 - DNA, 15 bp, Homo sapiens
agtacggtgggagtg

SEQ ID NO: 741419 - DNA, 15 bp, Homo sapiens
gtacggtgggagtgg

SEQ ID NO: 741420 - DNA, 15 bp, Homo sapiens
tacggtgggagtgga

SEQ ID NO: 741421 - DNA, 15 bp, Homo sapiens
acggtgggagtggac

SEQ ID NO: 741422 - DNA, 15 bp, Homo sapiens
cggtgggagtggaca

SEQ ID NO: 741423 - DNA, 15 bp, Homo sapiens
ggtgggagtggacag

SEQ ID NO: 741424 - DNA, 15 bp, Homo sapiens
gtgggagtggacaga

SEQ ID NO: 741425 - DNA, 15 bp, Homo sapiens
tgggagtggacagag

SEQ ID NO: 741426 - DNA, 15 bp, Homo sapiens
gggagtggacagagg

SEQ ID NO: 741427 - DNA, 15 bp, Homo sapiens
ggagtggacagagga

SEQ ID NO: 741428 - DNA, 15 bp, Homo sapiens
gagtggacagaggag

SEQ ID NO: 741429 - DNA, 15 bp, Homo sapiens
agtggacagaggagt

SEQ ID NO: 741430 - DNA, 15 bp, Homo sapiens
gtggacagaggagtt

SEQ ID NO: 741431 - DNA, 15 bp, Homo sapiens
tggacagaggagttg

SEQ ID NO: 741432 - DNA, 15 bp, Homo sapiens
ggacagaggagttga

SEQ ID NO: 741433 - DNA, 15 bp, Homo sapiens
agacccggcaccatg

SEQ ID NO: 741434 - DNA, 15 bp, Homo sapiens
gacccggcaccatgc

SEQ ID NO: 741435 - DNA, 15 bp, Homo sapiens
acccggcaccatgcc

SEQ ID NO: 741436 - DNA, 15 bp, Homo sapiens
cccggcaccatgcct

SEQ ID NO: 741437 - DNA, 15 bp, Homo sapiens
ccggcaccatgcctc

SEQ ID NO: 741438 - DNA, 15 bp, Homo sapiens
cggcaccatgcctcc

SEQ ID NO: 741439 - DNA, 15 bp, Homo sapiens
ggcaccatgcctcca

SEQ ID NO: 741440 - DNA, 15 bp, Homo sapiens
gcaccatgcctccaa

SEQ ID NO: 741441 - DNA, 15 bp, Homo sapiens
caccatgcctccaac

SEQ ID NO: 741442 - DNA, 15 bp, Homo sapiens
accatgcctccaacc

SEQ ID NO: 741443 - DNA, 15 bp, Homo sapiens
ccatgcctccaaccc

SEQ ID NO: 741444 - DNA, 15 bp, Homo sapiens
catgcctccaaccca

SEQ ID NO: 741445 - DNA, 15 bp, Homo sapiens
atgcctccaacccaa

SEQ ID NO: 741446 - DNA, 15 bp, Homo sapiens
tgcctccaacccaag

SEQ ID NO: 741447 - DNA, 15 bp, Homo sapiens
gcctccaacccaagg

SEQ ID NO: 741448 - DNA, 15 bp, Homo sapiens
cctccaacccaaggg

SEQ ID NO: 741449 - DNA, 15 bp, Homo sapiens
ctccaacccaagggt

SEQ ID NO: 741450 - DNA, 15 bp, Homo sapiens
tccaacccaagggtg

SEQ ID NO: 741451 - DNA, 15 bp, Homo sapiens
ccaacccaagggtgg

SEQ ID NO: 741452 - DNA, 15 bp, Homo sapiens
caacccaagggtggc

SEQ ID NO: 741453 - DNA, 15 bp, Homo sapiens
aacccaagggtggcc

SEQ ID NO: 741454 - DNA, 15 bp, Homo sapiens
acccaagggtggcca

SEQ ID NO: 741455 - DNA, 15 bp, Homo sapiens
cccaagggtggccaa

SEQ ID NO: 741456 - DNA, 15 bp, Homo sapiens
ccaagggtggccaac

SEQ ID NO: 741457 - DNA, 15 bp, Homo sapiens
caagggtggccaact

SEQ ID NO: 741458 - DNA, 15 bp, Homo sapiens
aagggtggccaactc

SEQ ID NO: 741459 - DNA, 15 bp, Homo sapiens
agggtggccaactct

SEQ ID NO: 741460 - DNA, 15 bp, Homo sapiens
gggtggccaactctt

SEQ ID NO: 741461 - DNA, 15 bp, Homo sapiens
ggtggccaactcttt

SEQ ID NO: 741462 - DNA, 15 bp, Homo sapiens
gtggccaactctttg

SEQ ID NO: 741463 - DNA, 15 bp, Homo sapiens
tggccaactctttgc

SEQ ID NO: 741464 - DNA, 15 bp, Homo sapiens
ggccaactctttgct

SEQ ID NO: 741465 - DNA, 15 bp, Homo sapiens
gccaactctttgctt

SEQ ID NO: 741466 - DNA, 15 bp, Homo sapiens
ccaactctttgcttg

SEQ ID NO: 741467 - DNA, 15 bp, Homo sapiens
caactctttgcttga

SEQ ID NO: 741468 - DNA, 15 bp, Homo sapiens
aactctttgcttgag

SEQ ID NO: 741469 - DNA, 15 bp, Homo sapiens
actctttgcttgaga

SEQ ID NO: 741470 - DNA, 15 bp, Homo sapiens
ctctttgcttgagat

SEQ ID NO: 741471 - DNA, 15 bp, Homo sapiens
tctttgcttgagatt

SEQ ID NO: 741472 - DNA, 15 bp, Homo sapiens
ctttgcttgagattc

SEQ ID NO: 741473 - DNA, 15 bp, Homo sapiens
tttgcttgagattca

SEQ ID NO: 741474 - DNA, 15 bp, Homo sapiens
ttgcttgagattcat

SEQ ID NO: 741475 - DNA, 15 bp, Homo sapiens
tgcttgagattcata

SEQ ID NO: 741476 - DNA, 15 bp, Homo sapiens
gcttgagattcatat

SEQ ID NO: 741477 - DNA, 15 bp, Homo sapiens
cttgagattcatatg

SEQ ID NO: 741478 - DNA, 15 bp, Homo sapiens
ttgagattcatatgt

SEQ ID NO: 741479 - DNA, 15 bp, Homo sapiens
tgagattcatatgtg

SEQ ID NO: 741480 - DNA, 15 bp, Homo sapiens
gagattcatatgtgg

SEQ ID NO: 741481 - DNA, 15 bp, Homo sapiens
agattcatatgtggc

SEQ ID NO: 741482 - DNA, 15 bp, Homo sapiens
gattcatatgtggct

SEQ ID NO: 741483 - DNA, 15 bp, Homo sapiens
attcatatgtggcta

SEQ ID NO: 741484 - DNA, 15 bp, Homo sapiens
ttcatatgtggctac

SEQ ID NO: 741485 - DNA, 15 bp, Homo sapiens
tcatatgtggctact

SEQ ID NO: 741486 - DNA, 15 bp, Homo sapiens
catatgtggctacta

SEQ ID NO: 741487 - DNA, 15 bp, Homo sapiens
atatgtggctactag

SEQ ID NO: 741488 - DNA, 15 bp, Homo sapiens
tatgtggctactagt

SEQ ID NO: 741489 - DNA, 15 bp, Homo sapiens
atgtggctactagtc

SEQ ID NO: 741490 - DNA, 15 bp, Homo sapiens
tgtggctactagtcc

SEQ ID NO: 741491 - DNA, 15 bp, Homo sapiens
gtggctactagtccc

SEQ ID NO: 741492 - DNA, 15 bp, Homo sapiens
tggctactagtcccc

SEQ ID NO: 741493 - DNA, 15 bp, Homo sapiens
ggctactagtcccca

SEQ ID NO: 741494 - DNA, 15 bp, Homo sapiens
gctactagtccccaa

SEQ ID NO: 741495 - DNA, 15 bp, Homo sapiens
ctactagtccccaag

SEQ ID NO: 741496 - DNA, 15 bp, Homo sapiens
tactagtccccaagt

SEQ ID NO: 741497 - DNA, 15 bp, Homo sapiens
actagtccccaagtc

SEQ ID NO: 741498 - DNA, 15 bp, Homo sapiens
ctagtccccaagtct

SEQ ID NO: 741499 - DNA, 15 bp, Homo sapiens
tagtccccaagtctg

SEQ ID NO: 741500 - DNA, 15 bp, Homo sapiens
agtccccaagtctgg

SEQ ID NO: 741501 - DNA, 15 bp, Homo sapiens
gtccccaagtctggg

SEQ ID NO: 741502 - DNA, 15 bp, Homo sapiens
tccccaagtctgggg

SEQ ID NO: 741503 - DNA, 15 bp, Homo sapiens
ccccaagtctggggg

SEQ ID NO: 741504 - DNA, 15 bp, Homo sapiens
cccaagtctggggga

SEQ ID NO: 741505 - DNA, 15 bp, Homo sapiens
ccaagtctgggggat

SEQ ID NO: 741506 - DNA, 15 bp, Homo sapiens
caagtctgggggatg

SEQ ID NO: 741507 - DNA, 15 bp, Homo sapiens
aagtctgggggatgg

SEQ ID NO: 741508 - DNA, 15 bp, Homo sapiens
agtctgggggatggg

SEQ ID NO: 741509 - DNA, 15 bp, Homo sapiens
gtctgggggatggga

SEQ ID NO: 741510 - DNA, 15 bp, Homo sapiens
tctgggggatgggag

SEQ ID NO: 741511 - DNA, 15 bp, Homo sapiens
ctgggggatgggagc

SEQ ID NO: 741512 - DNA, 15 bp, Homo sapiens
tgggggatgggagcg

SEQ ID NO: 741513 - DNA, 15 bp, Homo sapiens
gggggatgggagcgt

SEQ ID NO: 741514 - DNA, 15 bp, Homo sapiens
ggggatgggagcgtc

SEQ ID NO: 741515 - DNA, 15 bp, Homo sapiens
gggatgggagcgtcc

SEQ ID NO: 741516 - DNA, 15 bp, Homo sapiens
ggatgggagcgtcct

SEQ ID NO: 741517 - DNA, 15 bp, Homo sapiens
gatgggagcgtcctt

SEQ ID NO: 741518 - DNA, 15 bp, Homo sapiens
atgggagcgtccttg

SEQ ID NO: 741519 - DNA, 15 bp, Homo sapiens
tgggagcgtccttga

SEQ ID NO: 741520 - DNA, 15 bp, Homo sapiens
gggagcgtccttgag

SEQ ID NO: 741521 - DNA, 15 bp, Homo sapiens
ggagcgtccttgagt

SEQ ID NO: 741522 - DNA, 15 bp, Homo sapiens
gagcgtccttgagtc

SEQ ID NO: 741523 - DNA, 15 bp, Homo sapiens
agcgtccttgagtca

SEQ ID NO: 741524 - DNA, 15 bp, Homo sapiens
gcgtccttgagtcag

SEQ ID NO: 741525 - DNA, 15 bp, Homo sapiens
cgtccttgagtcagt

SEQ ID NO: 741526 - DNA, 15 bp, Homo sapiens
gtccttgagtcagta

SEQ ID NO: 741527 - DNA, 15 bp, Homo sapiens
tccttgagtcagtat

SEQ ID NO: 741528 - DNA, 15 bp, Homo sapiens
ccttgagtcagtatc

SEQ ID NO: 741529 - DNA, 15 bp, Homo sapiens
cttgagtcagtatcc

SEQ ID NO: 741530 - DNA, 15 bp, Homo sapiens
ttgagtcagtatcca

SEQ ID NO: 741531 - DNA, 15 bp, Homo sapiens
tgagtcagtatccat

SEQ ID NO: 741532 - DNA, 15 bp, Homo sapiens
gagtcagtatccatt

SEQ ID NO: 741533 - DNA, 15 bp, Homo sapiens
agtcagtatccattc

SEQ ID NO: 741534 - DNA, 15 bp, Homo sapiens
gtcagtatccattca

SEQ ID NO: 741535 - DNA, 15 bp, Homo sapiens
tcagtatccattcag

SEQ ID NO: 741536 - DNA, 15 bp, Homo sapiens
cagtatccattcagc

SEQ ID NO: 741537 - DNA, 15 bp, Homo sapiens
agtatccattcagca

SEQ ID NO: 741538 - DNA, 15 bp, Homo sapiens
gtatccattcagcat

SEQ ID NO: 741539 - DNA, 15 bp, Homo sapiens
tatccattcagcatc

SEQ ID NO: 741540 - DNA, 15 bp, Homo sapiens
atccattcagcatcc

SEQ ID NO: 741541 - DNA, 15 bp, Homo sapiens
tccattcagcatcca

SEQ ID NO: 741542 - DNA, 15 bp, Homo sapiens
ccattcagcatccaa

SEQ ID NO: 741543 - DNA, 15 bp, Homo sapiens
cattcagcatccaag

SEQ ID NO: 741544 - DNA, 15 bp, Homo sapiens
attcagcatccaagg

SEQ ID NO: 741545 - DNA, 15 bp, Homo sapiens
ttcagcatccaagga

SEQ ID NO: 741546 - DNA, 15 bp, Homo sapiens
tcagcatccaaggat

SEQ ID NO: 741547 - DNA, 15 bp, Homo sapiens
cagcatccaaggatg

SEQ ID NO: 741548 - DNA, 15 bp, Homo sapiens
agcatccaaggatgt

SEQ ID NO: 741549 - DNA, 15 bp, Homo sapiens
gcatccaaggatgtt

SEQ ID NO: 741550 - DNA, 15 bp, Homo sapiens
catccaaggatgttt

SEQ ID NO: 741551 - DNA, 15 bp, Homo sapiens
atccaaggatgtttc

SEQ ID NO: 741552 - DNA, 15 bp, Homo sapiens
tccaaggatgtttct

SEQ ID NO: 741553 - DNA, 15 bp, Homo sapiens
ccaaggatgtttctg

SEQ ID NO: 741554 - DNA, 15 bp, Homo sapiens
caaggatgtttctgt

SEQ ID NO: 741555 - DNA, 15 bp, Homo sapiens
aaggatgtttctgtc

SEQ ID NO: 741556 - DNA, 15 bp, Homo sapiens
aggatgtttctgtct

SEQ ID NO: 741557 - DNA, 15 bp, Homo sapiens
ggatgtttctgtctc

SEQ ID NO: 741558 - DNA, 15 bp, Homo sapiens
gatgtttctgtctcc

SEQ ID NO: 741559 - DNA, 15 bp, Homo sapiens
atgtttctgtctcct

SEQ ID NO: 741560 - DNA, 15 bp, Homo sapiens
tgtttctgtctcctt

SEQ ID NO: 741561 - DNA, 15 bp, Homo sapiens
gtttctgtctccttc

SEQ ID NO: 741562 - DNA, 15 bp, Homo sapiens
tttctgtctccttct

SEQ ID NO: 741563 - DNA, 15 bp, Homo sapiens
ttctgtctccttctc

SEQ ID NO: 741564 - DNA, 15 bp, Homo sapiens
tctgtctccttctct

SEQ ID NO: 741565 - DNA, 15 bp, Homo sapiens
ctgtctccttctctt

SEQ ID NO: 741566 - DNA, 15 bp, Homo sapiens
tgtctccttctcttt

SEQ ID NO: 741567 - DNA, 15 bp, Homo sapiens
gtctccttctctttg

SEQ ID NO: 741568 - DNA, 15 bp, Homo sapiens
tctccttctctttga

SEQ ID NO: 741569 - DNA, 15 bp, Homo sapiens
ctccttctctttgat

SEQ ID NO: 741570 - DNA, 15 bp, Homo sapiens
tccttctctttgatc

SEQ ID NO: 741571 - DNA, 15 bp, Homo sapiens
ccttctctttgatcc

SEQ ID NO: 741572 - DNA, 15 bp, Homo sapiens
cttctctttgatcct

SEQ ID NO: 741573 - DNA, 15 bp, Homo sapiens
ttctctttgatcctt

SEQ ID NO: 741574 - DNA, 15 bp, Homo sapiens
tctctttgatccttg

SEQ ID NO: 741575 - DNA, 15 bp, Homo sapiens
ctctttgatccttgc

SEQ ID NO: 741576 - DNA, 15 bp, Homo sapiens
tctttgatccttgct

SEQ ID NO: 741577 - DNA, 15 bp, Homo sapiens
ctttgatccttgctg

SEQ ID NO: 741578 - DNA, 15 bp, Homo sapiens
tttgatccttgctgg

SEQ ID NO: 741579 - DNA, 15 bp, Homo sapiens
ttgatccttgctggc

SEQ ID NO: 741580 - DNA, 15 bp, Homo sapiens
tgatccttgctggca

SEQ ID NO: 741581 - DNA, 15 bp, Homo sapiens
gatccttgctggcat

SEQ ID NO: 741582 - DNA, 15 bp, Homo sapiens
atccttgctggcatc

SEQ ID NO: 741583 - DNA, 15 bp, Homo sapiens
tccttgctggcatct

SEQ ID NO: 741584 - DNA, 15 bp, Homo sapiens
ccttgctggcatctg

SEQ ID NO: 741585 - DNA, 15 bp, Homo sapiens
cttgctggcatctgt

SEQ ID NO: 741586 - DNA, 15 bp, Homo sapiens
ttgctggcatctgtc

SEQ ID NO: 741587 - DNA, 15 bp, Homo sapiens
tgctggcatctgtca

SEQ ID NO: 741588 - DNA, 15 bp, Homo sapiens
gctggcatctgtcat

SEQ ID NO: 741589 - DNA, 15 bp, Homo sapiens
ctggcatctgtcata

SEQ ID NO: 741590 - DNA, 15 bp, Homo sapiens
tggcatctgtcatag

SEQ ID NO: 741591 - DNA, 15 bp, Homo sapiens
ggcatctgtcatagt

SEQ ID NO: 741592 - DNA, 15 bp, Homo sapiens
gcatctgtcatagtc

SEQ ID NO: 741593 - DNA, 15 bp, Homo sapiens
catctgtcatagtct

SEQ ID NO: 741594 - DNA, 15 bp, Homo sapiens
atctgtcatagtctc

SEQ ID NO: 741595 - DNA, 15 bp, Homo sapiens
tctgtcatagtctca

SEQ ID NO: 741596 - DNA, 15 bp, Homo sapiens
ctgtcatagtctcag

SEQ ID NO: 741597 - DNA, 15 bp, Homo sapiens
tgtcatagtctcaga

SEQ ID NO: 741598 - DNA, 15 bp, Homo sapiens
gtcatagtctcagag

SEQ ID NO: 741599 - DNA, 15 bp, Homo sapiens
tcatagtctcagagg

SEQ ID NO: 741600 - DNA, 15 bp, Homo sapiens
catagtctcagagga

SEQ ID NO: 741601 - DNA, 15 bp, Homo sapiens
atagtctcagaggag

SEQ ID NO: 741602 - DNA, 15 bp, Homo sapiens
tagtctcagaggaga

SEQ ID NO: 741603 - DNA, 15 bp, Homo sapiens
agtctcagaggagag

SEQ ID NO: 741604 - DNA, 15 bp, Homo sapiens
gtctcagaggagagc

SEQ ID NO: 741605 - DNA, 15 bp, Homo sapiens
tctcagaggagagcc

SEQ ID NO: 741606 - DNA, 15 bp, Homo sapiens
ctcagaggagagcct

SEQ ID NO: 741607 - DNA, 15 bp, Homo sapiens
tcagaggagagcctt

SEQ ID NO: 741608 - DNA, 15 bp, Homo sapiens
cagaggagagccttc

SEQ ID NO: 741609 - DNA, 15 bp, Homo sapiens
agaggagagccttca

SEQ ID NO: 741610 - DNA, 15 bp, Homo sapiens
gaggagagccttcaa

SEQ ID NO: 741611 - DNA, 15 bp, Homo sapiens
aggagagccttcaaa

SEQ ID NO: 741612 - DNA, 15 bp, Homo sapiens
ggagagccttcaaaa

SEQ ID NO: 741613 - DNA, 15 bp, Homo sapiens
gagagccttcaaaaa

SEQ ID NO: 741614 - DNA, 15 bp, Homo sapiens
agagccttcaaaaat

SEQ ID NO: 741615 - DNA, 15 bp, Homo sapiens
gagccttcaaaaata

SEQ ID NO: 741616 - DNA, 15 bp, Homo sapiens
agccttcaaaaatac

SEQ ID NO: 741617 - DNA, 15 bp, Homo sapiens
gccttcaaaaatacc

SEQ ID NO: 741618 - DNA, 15 bp, Homo sapiens
ccttcaaaaatacct

SEQ ID NO: 741619 - DNA, 15 bp, Homo sapiens
cttcaaaaataccta

SEQ ID NO: 741620 - DNA, 15 bp, Homo sapiens
ttcaaaaatacctat

SEQ ID NO: 741621 - DNA, 15 bp, Homo sapiens
tcaaaaatacctata

SEQ ID NO: 741622 - DNA, 15 bp, Homo sapiens
caaaaatacctatat

SEQ ID NO: 741623 - DNA, 15 bp, Homo sapiens
aaaaatacctatata

SEQ ID NO: 741624 - DNA, 15 bp, Homo sapiens
aaaatacctatataa

SEQ ID NO: 741625 - DNA, 15 bp, Homo sapiens
aaatacctatataat

SEQ ID NO: 741626 - DNA, 15 bp, Homo sapiens
aatacctatataatc

SEQ ID NO: 741627 - DNA, 15 bp, Homo sapiens
atacctatataatct

SEQ ID NO: 741628 - DNA, 15 bp, Homo sapiens
tacctatataatctg

SEQ ID NO: 741629 - DNA, 15 bp, Homo sapiens
acctatataatctga

SEQ ID NO: 741630 - DNA, 15 bp, Homo sapiens
cctatataatctgaa

SEQ ID NO: 741631 - DNA, 15 bp, Homo sapiens
ctatataatctgaaa

SEQ ID NO: 741632 - DNA, 15 bp, Homo sapiens
tatataatctgaaaa

SEQ ID NO: 741633 - DNA, 15 bp, Homo sapiens
atataatctgaaaat

SEQ ID NO: 741634 - DNA, 15 bp, Homo sapiens
tataatctgaaaatg

SEQ ID NO: 741635 - DNA, 15 bp, Homo sapiens
ataatctgaaaatgc

SEQ ID NO: 741636 - DNA, 15 bp, Homo sapiens
taatctgaaaatgca

SEQ ID NO: 741637 - DNA, 15 bp, Homo sapiens
aatctgaaaatgcac

SEQ ID NO: 741638 - DNA, 15 bp, Homo sapiens
atctgaaaatgcacc

SEQ ID NO: 741639 - DNA, 15 bp, Homo sapiens
tctgaaaatgcaccc

SEQ ID NO: 741640 - DNA, 15 bp, Homo sapiens
ctgaaaatgcacccc

SEQ ID NO: 741641 - DNA, 15 bp, Homo sapiens
tgaaaatgcacccct

SEQ ID NO: 741642 - DNA, 15 bp, Homo sapiens
gaaaatgcacccctg

SEQ ID NO: 741643 - DNA, 15 bp, Homo sapiens
aaaatgcacccctgg

SEQ ID NO: 741644 - DNA, 15 bp, Homo sapiens
aaatgcacccctggc

SEQ ID NO: 741645 - DNA, 15 bp, Homo sapiens
aatgcacccctggct

SEQ ID NO: 741646 - DNA, 15 bp, Homo sapiens
atgcacccctggctc

SEQ ID NO: 741647 - DNA, 15 bp, Homo sapiens
tgcacccctggctca

SEQ ID NO: 741648 - DNA, 15 bp, Homo sapiens
gcacccctggctcag

SEQ ID NO: 741649 - DNA, 15 bp, Homo sapiens
cacccctggctcagt

SEQ ID NO: 741650 - DNA, 15 bp, Homo sapiens
acccctggctcagtc

SEQ ID NO: 741651 - DNA, 15 bp, Homo sapiens
cccctggctcagtcc

SEQ ID NO: 741652 - DNA, 15 bp, Homo sapiens
ccctggctcagtcca

SEQ ID NO: 741653 - DNA, 15 bp, Homo sapiens
cctggctcagtccac

SEQ ID NO: 741654 - DNA, 15 bp, Homo sapiens
ctggctcagtccaca

SEQ ID NO: 741655 - DNA, 15 bp, Homo sapiens
tggctcagtccacag

SEQ ID NO: 741656 - DNA, 15 bp, Homo sapiens
ggctcagtccacagt

SEQ ID NO: 741657 - DNA, 15 bp, Homo sapiens
gctcagtccacagtt

SEQ ID NO: 741658 - DNA, 15 bp, Homo sapiens
ctcagtccacagttg

SEQ ID NO: 741659 - DNA, 15 bp, Homo sapiens
tcagtccacagttga

SEQ ID NO: 741660 - DNA, 15 bp, Homo sapiens
cagtccacagttgac

SEQ ID NO: 741661 - DNA, 15 bp, Homo sapiens
agtccacagttgact

SEQ ID NO: 741662 - DNA, 15 bp, Homo sapiens
gtccacagttgactt

SEQ ID NO: 741663 - DNA, 15 bp, Homo sapiens
tccacagttgacttg

SEQ ID NO: 741664 - DNA, 15 bp, Homo sapiens
ccacagttgacttgg

SEQ ID NO: 741665 - DNA, 15 bp, Homo sapiens
cacagttgacttggg

SEQ ID NO: 741666 - DNA, 15 bp, Homo sapiens
acagttgacttgggc

SEQ ID NO: 741667 - DNA, 15 bp, Homo sapiens
cagttgacttgggct

SEQ ID NO: 741668 - DNA, 15 bp, Homo sapiens
agttgacttgggctc

SEQ ID NO: 741669 - DNA, 15 bp, Homo sapiens
gttgacttgggctca

SEQ ID NO: 741670 - DNA, 15 bp, Homo sapiens
ttgacttgggctcaa

SEQ ID NO: 741671 - DNA, 15 bp, Homo sapiens
tgacttgggctcaaa

SEQ ID NO: 741672 - DNA, 15 bp, Homo sapiens
gacttgggctcaaac

SEQ ID NO: 741673 - DNA, 15 bp, Homo sapiens
acttgggctcaaacc

SEQ ID NO: 741674 - DNA, 15 bp, Homo sapiens
cttgggctcaaacca

SEQ ID NO: 741675 - DNA, 15 bp, Homo sapiens
ttgggctcaaaccaa

SEQ ID NO: 741676 - DNA, 15 bp, Homo sapiens
tgggctcaaaccaag

SEQ ID NO: 741677 - DNA, 15 bp, Homo sapiens
gggctcaaaccaagt

SEQ ID NO: 741678 - DNA, 15 bp, Homo sapiens
ggctcaaaccaagta

SEQ ID NO: 741679 - DNA, 15 bp, Homo sapiens
gctcaaaccaagtag

SEQ ID NO: 741680 - DNA, 15 bp, Homo sapiens
ctcaaaccaagtagc

SEQ ID NO: 741681 - DNA, 15 bp, Homo sapiens
tcaaaccaagtagct

SEQ ID NO: 741682 - DNA, 15 bp, Homo sapiens
caaaccaagtagctt

SEQ ID NO: 741683 - DNA, 15 bp, Homo sapiens
aaaccaagtagctta

SEQ ID NO: 741684 - DNA, 15 bp, Homo sapiens
aaccaagtagcttag

SEQ ID NO: 741685 - DNA, 15 bp, Homo sapiens
accaagtagcttagg

SEQ ID NO: 741686 - DNA, 15 bp, Homo sapiens
ccaagtagcttagga

SEQ ID NO: 741687 - DNA, 15 bp, Homo sapiens
caagtagcttaggaa

SEQ ID NO: 741688 - DNA, 15 bp, Homo sapiens
aagtagcttaggaaa

SEQ ID NO: 741689 - DNA, 15 bp, Homo sapiens
agtagcttaggaaac

SEQ ID NO: 741690 - DNA, 15 bp, Homo sapiens
gtagcttaggaaaca

SEQ ID NO: 741691 - DNA, 15 bp, Homo sapiens
tagcttaggaaacat

SEQ ID NO: 741692 - DNA, 15 bp, Homo sapiens
agcttaggaaacatt

SEQ ID NO: 741693 - DNA, 15 bp, Homo sapiens
gcttaggaaacattg

SEQ ID NO: 741694 - DNA, 15 bp, Homo sapiens
cttaggaaacattgc

SEQ ID NO: 741695 - DNA, 15 bp, Homo sapiens
ttaggaaacattgct

SEQ ID NO: 741696 - DNA, 15 bp, Homo sapiens
taggaaacattgctc

SEQ ID NO: 741697 - DNA, 15 bp, Homo sapiens
aggaaacattgctcc

SEQ ID NO: 741698 - DNA, 15 bp, Homo sapiens
ggaaacattgctcca

SEQ ID NO: 741699 - DNA, 15 bp, Homo sapiens
gaaacattgctccat

SEQ ID NO: 741700 - DNA, 15 bp, Homo sapiens
aaacattgctccatc

SEQ ID NO: 741701 - DNA, 15 bp, Homo sapiens
aacattgctccatcc

SEQ ID NO: 741702 - DNA, 15 bp, Homo sapiens
acattgctccatcct

SEQ ID NO: 741703 - DNA, 15 bp, Homo sapiens
cattgctccatcctg

SEQ ID NO: 741704 - DNA, 15 bp, Homo sapiens
attgctccatcctgt

SEQ ID NO: 741705 - DNA, 15 bp, Homo sapiens
ttgctccatcctgtt

SEQ ID NO: 741706 - DNA, 15 bp, Homo sapiens
tgctccatcctgttt

SEQ ID NO: 741707 - DNA, 15 bp, Homo sapiens
gctccatcctgtttt

SEQ ID NO: 741708 - DNA, 15 bp, Homo sapiens
ctccatcctgtttta

SEQ ID NO: 741709 - DNA, 15 bp, Homo sapiens
tccatcctgttttaa

SEQ ID NO: 741710 - DNA, 15 bp, Homo sapiens
ccatcctgttttaag

SEQ ID NO: 741711 - DNA, 15 bp, Homo sapiens
catcctgttttaagg

SEQ ID NO: 741712 - DNA, 15 bp, Homo sapiens
atcctgttttaagga

SEQ ID NO: 741713 - DNA, 15 bp, Homo sapiens
tcctgttttaaggaa

SEQ ID NO: 741714 - DNA, 15 bp, Homo sapiens
cctgttttaaggaaa

SEQ ID NO: 741715 - DNA, 15 bp, Homo sapiens
ctgttttaaggaaag

SEQ ID NO: 741716 - DNA, 15 bp, Homo sapiens
tgttttaaggaaagt

SEQ ID NO: 741717 - DNA, 15 bp, Homo sapiens
gttttaaggaaagtt

SEQ ID NO: 741718 - DNA, 15 bp, Homo sapiens
ttttaaggaaagtta

SEQ ID NO: 741719 - DNA, 15 bp, Homo sapiens
tttaaggaaagttaa

SEQ ID NO: 741720 - DNA, 15 bp, Homo sapiens
ttaaggaaagttaat

SEQ ID NO: 741721 - DNA, 15 bp, Homo sapiens
taaggaaagttaatc

SEQ ID NO: 741722 - DNA, 15 bp, Homo sapiens
aaggaaagttaatca

SEQ ID NO: 741723 - DNA, 15 bp, Homo sapiens
aggaaagttaatcag

SEQ ID NO: 741724 - DNA, 15 bp, Homo sapiens
ggaaagttaatcagc

SEQ ID NO: 741725 - DNA, 15 bp, Homo sapiens
gaaagttaatcagct

SEQ ID NO: 741726 - DNA, 15 bp, Homo sapiens
aaagttaatcagctg

SEQ ID NO: 741727 - DNA, 15 bp, Homo sapiens
aagttaatcagctgc

SEQ ID NO: 741728 - DNA, 15 bp, Homo sapiens
agttaatcagctgca

SEQ ID NO: 741729 - DNA, 15 bp, Homo sapiens
gttaatcagctgcac

SEQ ID NO: 741730 - DNA, 15 bp, Homo sapiens
ttaatcagctgcacg

SEQ ID NO: 741731 - DNA, 15 bp, Homo sapiens
taatcagctgcacgt

SEQ ID NO: 741732 - DNA, 15 bp, Homo sapiens
aatcagctgcacgtg

SEQ ID NO: 741733 - DNA, 15 bp, Homo sapiens
atcagctgcacgtga

SEQ ID NO: 741734 - DNA, 15 bp, Homo sapiens
tcagctgcacgtgaa

SEQ ID NO: 741735 - DNA, 15 bp, Homo sapiens
cagctgcacgtgaac

SEQ ID NO: 741736 - DNA, 15 bp, Homo sapiens
agctgcacgtgaaca

SEQ ID NO: 741737 - DNA, 15 bp, Homo sapiens
gctgcacgtgaacaa

SEQ ID NO: 741738 - DNA, 15 bp, Homo sapiens
ctgcacgtgaacaat

SEQ ID NO: 741739 - DNA, 15 bp, Homo sapiens
tgcacgtgaacaatt

SEQ ID NO: 741740 - DNA, 15 bp, Homo sapiens
gcacgtgaacaatta

SEQ ID NO: 741741 - DNA, 15 bp, Homo sapiens
cacgtgaacaattat

SEQ ID NO: 741742 - DNA, 15 bp, Homo sapiens
acgtgaacaattatt

SEQ ID NO: 741743 - DNA, 15 bp, Homo sapiens
cgtgaacaattattc

SEQ ID NO: 741744 - DNA, 15 bp, Homo sapiens
gtgaacaattattca

SEQ ID NO: 741745 - DNA, 15 bp, Homo sapiens
tgaacaattattcat

SEQ ID NO: 741746 - DNA, 15 bp, Homo sapiens
gaacaattattcatt

SEQ ID NO: 741747 - DNA, 15 bp, Homo sapiens
aacaattattcattg

SEQ ID NO: 741748 - DNA, 15 bp, Homo sapiens
acaattattcattgt

SEQ ID NO: 741749 - DNA, 15 bp, Homo sapiens
caattattcattgtc

SEQ ID NO: 741750 - DNA, 15 bp, Homo sapiens
aattattcattgtct

SEQ ID NO: 741751 - DNA, 15 bp, Homo sapiens
attattcattgtctg

SEQ ID NO: 741752 - DNA, 15 bp, Homo sapiens
ttattcattgtctgg

SEQ ID NO: 741753 - DNA, 15 bp, Homo sapiens
tattcattgtctggc

SEQ ID NO: 741754 - DNA, 15 bp, Homo sapiens
attcattgtctggct

SEQ ID NO: 741755 - DNA, 15 bp, Homo sapiens
ttcattgtctggctt

SEQ ID NO: 741756 - DNA, 15 bp, Homo sapiens
tcattgtctggcttg

SEQ ID NO: 741757 - DNA, 15 bp, Homo sapiens
cattgtctggcttgg

SEQ ID NO: 741758 - DNA, 15 bp, Homo sapiens
attgtctggcttgga

SEQ ID NO: 741759 - DNA, 15 bp, Homo sapiens
ttgtctggcttggaa

SEQ ID NO: 741760 - DNA, 15 bp, Homo sapiens
tgtctggcttggaat

SEQ ID NO: 741761 - DNA, 15 bp, Homo sapiens
gtctggcttggaatt

SEQ ID NO: 741762 - DNA, 15 bp, Homo sapiens
tctggcttggaattg

SEQ ID NO: 741763 - DNA, 15 bp, Homo sapiens
ctggcttggaattgt

SEQ ID NO: 741764 - DNA, 15 bp, Homo sapiens
tggcttggaattgtg

SEQ ID NO: 741765 - DNA, 15 bp, Homo sapiens
ggcttggaattgtga

SEQ ID NO: 741766 - DNA, 15 bp, Homo sapiens
gcttggaattgtgat

SEQ ID NO: 741767 - DNA, 15 bp, Homo sapiens
cttggaattgtgatc

SEQ ID NO: 741768 - DNA, 15 bp, Homo sapiens
ttggaattgtgatca

SEQ ID NO: 741769 - DNA, 15 bp, Homo sapiens
tggaattgtgatcat

SEQ ID NO: 741770 - DNA, 15 bp, Homo sapiens
ggaattgtgatcatg

SEQ ID NO: 741771 - DNA, 15 bp, Homo sapiens
gaattgtgatcatga

SEQ ID NO: 741772 - DNA, 15 bp, Homo sapiens
aattgtgatcatgaa

SEQ ID NO: 741773 - DNA, 15 bp, Homo sapiens
attgtgatcatgaac

SEQ ID NO: 741774 - DNA, 15 bp, Homo sapiens
ttgtgatcatgaact

SEQ ID NO: 741775 - DNA, 15 bp, Homo sapiens
tgtgatcatgaactg

SEQ ID NO: 741776 - DNA, 15 bp, Homo sapiens
gtgatcatgaactgg

SEQ ID NO: 741777 - DNA, 15 bp, Homo sapiens
tgatcatgaactggg

SEQ ID NO: 741778 - DNA, 15 bp, Homo sapiens
gatcatgaactggga

SEQ ID NO: 741779 - DNA, 15 bp, Homo sapiens
atcatgaactgggaa

SEQ ID NO: 741780 - DNA, 15 bp, Homo sapiens
tcatgaactgggaac

SEQ ID NO: 741781 - DNA, 15 bp, Homo sapiens
catgaactgggaacc

SEQ ID NO: 741782 - DNA, 15 bp, Homo sapiens
atgaactgggaacct

SEQ ID NO: 741783 - DNA, 15 bp, Homo sapiens
tgaactgggaacctg

SEQ ID NO: 741784 - DNA, 15 bp, Homo sapiens
gaactgggaacctgg

SEQ ID NO: 741785 - DNA, 15 bp, Homo sapiens
aactgggaacctggg

SEQ ID NO: 741786 - DNA, 15 bp, Homo sapiens
actgggaacctgggc

SEQ ID NO: 741787 - DNA, 15 bp, Homo sapiens
ctgggaacctgggcc

SEQ ID NO: 741788 - DNA, 15 bp, Homo sapiens
tgggaacctgggcct

SEQ ID NO: 741789 - DNA, 15 bp, Homo sapiens
gggaacctgggcctg

SEQ ID NO: 741790 - DNA, 15 bp, Homo sapiens
ggaacctgggcctgg

SEQ ID NO: 741791 - DNA, 15 bp, Homo sapiens
gaacctgggcctggg

SEQ ID NO: 741792 - DNA, 15 bp, Homo sapiens
aacctgggcctgggc

SEQ ID NO: 741793 - DNA, 15 bp, Homo sapiens
acctgggcctgggcg

SEQ ID NO: 741794 - DNA, 15 bp, Homo sapiens
cctgggcctgggcgc

SEQ ID NO: 741795 - DNA, 15 bp, Homo sapiens
ctgggcctgggcgcc

SEQ ID NO: 741796 - DNA, 15 bp, Homo sapiens
tgggcctgggcgcct

SEQ ID NO: 741797 - DNA, 15 bp, Homo sapiens
gggcctgggcgcctg

SEQ ID NO: 741798 - DNA, 15 bp, Homo sapiens
ggcctgggcgcctgt

SEQ ID NO: 741799 - DNA, 15 bp, Homo sapiens
gcctgggcgcctgtt

SEQ ID NO: 741800 - DNA, 15 bp, Homo sapiens
cctgggcgcctgttg

SEQ ID NO: 741801 - DNA, 15 bp, Homo sapiens
ctgggcgcctgttgc

SEQ ID NO: 741802 - DNA, 15 bp, Homo sapiens
tgggcgcctgttgct

SEQ ID NO: 741803 - DNA, 15 bp, Homo sapiens
gggcgcctgttgctc

SEQ ID NO: 741804 - DNA, 15 bp, Homo sapiens
ggcgcctgttgctct

SEQ ID NO: 741805 - DNA, 15 bp, Homo sapiens
gcgcctgttgctctg

SEQ ID NO: 741806 - DNA, 15 bp, Homo sapiens
cgcctgttgctctgc

SEQ ID NO: 741807 - DNA, 15 bp, Homo sapiens
gcctgttgctctgct

SEQ ID NO: 741808 - DNA, 15 bp, Homo sapiens
cctgttgctctgctt

SEQ ID NO: 741809 - DNA, 15 bp, Homo sapiens
ctgttgctctgcttt

SEQ ID NO: 741810 - DNA, 15 bp, Homo sapiens
tgttgctctgctttt

SEQ ID NO: 741811 - DNA, 15 bp, Homo sapiens
gttgctctgctttta

SEQ ID NO: 741812 - DNA, 15 bp, Homo sapiens
ttgctctgcttttaa

SEQ ID NO: 741813 - DNA, 15 bp, Homo sapiens
tgctctgcttttaaa

SEQ ID NO: 741814 - DNA, 15 bp, Homo sapiens
gctctgcttttaaat

SEQ ID NO: 741815 - DNA, 15 bp, Homo sapiens
ctctgcttttaaatt

SEQ ID NO: 741816 - DNA, 15 bp, Homo sapiens
tctgcttttaaatta

SEQ ID NO: 741817 - DNA, 15 bp, Homo sapiens
ctgcttttaaattaa

SEQ ID NO: 741818 - DNA, 15 bp, Homo sapiens
tgcttttaaattaag

SEQ ID NO: 741819 - DNA, 15 bp, Homo sapiens
gcttttaaattaagt

SEQ ID NO: 741820 - DNA, 15 bp, Homo sapiens
cttttaaattaagtc

SEQ ID NO: 741821 - DNA, 15 bp, Homo sapiens
ttttaaattaagtca

SEQ ID NO: 741822 - DNA, 15 bp, Homo sapiens
tttaaattaagtcac

SEQ ID NO: 741823 - DNA, 15 bp, Homo sapiens
ttaaattaagtcacc

SEQ ID NO: 741824 - DNA, 15 bp, Homo sapiens
taaattaagtcacct

SEQ ID NO: 741825 - DNA, 15 bp, Homo sapiens
aaattaagtcacctc

SEQ ID NO: 741826 - DNA, 15 bp, Homo sapiens
aattaagtcacctcc

SEQ ID NO: 741827 - DNA, 15 bp, Homo sapiens
attaagtcacctccc

SEQ ID NO: 741828 - DNA, 15 bp, Homo sapiens
ttaagtcacctcccc

SEQ ID NO: 741829 - DNA, 15 bp, Homo sapiens
taagtcacctccccc

SEQ ID NO: 741830 - DNA, 15 bp, Homo sapiens
aagtcacctccccct

SEQ ID NO: 741831 - DNA, 15 bp, Homo sapiens
agtcacctccccctg

SEQ ID NO: 741832 - DNA, 15 bp, Homo sapiens
gtcacctccccctgc

SEQ ID NO: 741833 - DNA, 15 bp, Homo sapiens
tcacctccccctgcc

SEQ ID NO: 741834 - DNA, 15 bp, Homo sapiens
cacctccccctgcct

SEQ ID NO: 741835 - DNA, 15 bp, Homo sapiens
acctccccctgcctg

SEQ ID NO: 741836 - DNA, 15 bp, Homo sapiens
cctccccctgcctgg

SEQ ID NO: 741837 - DNA, 15 bp, Homo sapiens
ctccccctgcctggc

SEQ ID NO: 741838 - DNA, 15 bp, Homo sapiens
tccccctgcctggct

SEQ ID NO: 741839 - DNA, 15 bp, Homo sapiens
ccccctgcctggcta

SEQ ID NO: 741840 - DNA, 15 bp, Homo sapiens
cccctgcctggctac

SEQ ID NO: 741841 - DNA, 15 bp, Homo sapiens
ccctgcctggctaca

SEQ ID NO: 741842 - DNA, 15 bp, Homo sapiens
cctgcctggctacaa

SEQ ID NO: 741843 - DNA, 15 bp, Homo sapiens
ctgcctggctacaaa

SEQ ID NO: 741844 - DNA, 15 bp, Homo sapiens
tgcctggctacaaaa

SEQ ID NO: 741845 - DNA, 15 bp, Homo sapiens
gcctggctacaaaac

SEQ ID NO: 741846 - DNA, 15 bp, Homo sapiens
cctggctacaaaaca

SEQ ID NO: 741847 - DNA, 15 bp, Homo sapiens
ctggctacaaaacag

SEQ ID NO: 741848 - DNA, 15 bp, Homo sapiens
tggctacaaaacagc

SEQ ID NO: 741849 - DNA, 15 bp, Homo sapiens
ggctacaaaacagct

SEQ ID NO: 741850 - DNA, 15 bp, Homo sapiens
gctacaaaacagctc

SEQ ID NO: 741851 - DNA, 15 bp, Homo sapiens
ctacaaaacagctca

SEQ ID NO: 741852 - DNA, 15 bp, Homo sapiens
tacaaaacagctcat

SEQ ID NO: 741853 - DNA, 15 bp, Homo sapiens
acaaaacagctcatg

SEQ ID NO: 741854 - DNA, 15 bp, Homo sapiens
caaaacagctcatgg

SEQ ID NO: 741855 - DNA, 15 bp, Homo sapiens
aaaacagctcatggt

SEQ ID NO: 741856 - DNA, 15 bp, Homo sapiens
aaacagctcatggtt

SEQ ID NO: 741857 - DNA, 15 bp, Homo sapiens
aacagctcatggttt

SEQ ID NO: 741858 - DNA, 15 bp, Homo sapiens
acagctcatggtttc

SEQ ID NO: 741859 - DNA, 15 bp, Homo sapiens
cagctcatggtttca

SEQ ID NO: 741860 - DNA, 15 bp, Homo sapiens
agctcatggtttcac

SEQ ID NO: 741861 - DNA, 15 bp, Homo sapiens
gctcatggtttcact

SEQ ID NO: 741862 - DNA, 15 bp, Homo sapiens
ctcatggtttcactg

SEQ ID NO: 741863 - DNA, 15 bp, Homo sapiens
tcatggtttcactga

SEQ ID NO: 741864 - DNA, 15 bp, Homo sapiens
catggtttcactgag

SEQ ID NO: 741865 - DNA, 15 bp, Homo sapiens
atggtttcactgagg

SEQ ID NO: 741866 - DNA, 15 bp, Homo sapiens
tggtttcactgaggt

SEQ ID NO: 741867 - DNA, 15 bp, Homo sapiens
ggtttcactgaggtc

SEQ ID NO: 741868 - DNA, 15 bp, Homo sapiens
gtttcactgaggtct

SEQ ID NO: 741869 - DNA, 15 bp, Homo sapiens
tttcactgaggtctc

SEQ ID NO: 741870 - DNA, 15 bp, Homo sapiens
ttcactgaggtctct

SEQ ID NO: 741871 - DNA, 15 bp, Homo sapiens
tcactgaggtctcta

SEQ ID NO: 741872 - DNA, 15 bp, Homo sapiens
cactgaggtctctaa

SEQ ID NO: 741873 - DNA, 15 bp, Homo sapiens
actgaggtctctaat

SEQ ID NO: 741874 - DNA, 15 bp, Homo sapiens
ctgaggtctctaatg

SEQ ID NO: 741875 - DNA, 15 bp, Homo sapiens
tgaggtctctaatgc

SEQ ID NO: 741876 - DNA, 15 bp, Homo sapiens
gaggtctctaatgcc

SEQ ID NO: 741877 - DNA, 15 bp, Homo sapiens
aggtctctaatgcca

SEQ ID NO: 741878 - DNA, 15 bp, Homo sapiens
ggtctctaatgccat

SEQ ID NO: 741879 - DNA, 15 bp, Homo sapiens
gtctctaatgccatt

SEQ ID NO: 741880 - DNA, 15 bp, Homo sapiens
tctctaatgccattg

SEQ ID NO: 741881 - DNA, 15 bp, Homo sapiens
ctctaatgccattgt

SEQ ID NO: 741882 - DNA, 15 bp, Homo sapiens
tctaatgccattgtg

SEQ ID NO: 741883 - DNA, 15 bp, Homo sapiens
ctaatgccattgtgg

SEQ ID NO: 741884 - DNA, 15 bp, Homo sapiens
taatgccattgtgga

SEQ ID NO: 741885 - DNA, 15 bp, Homo sapiens
aatgccattgtggag

SEQ ID NO: 741886 - DNA, 15 bp, Homo sapiens
atgccattgtggagt

SEQ ID NO: 741887 - DNA, 15 bp, Homo sapiens
tgccattgtggagtg

SEQ ID NO: 741888 - DNA, 15 bp, Homo sapiens
gccattgtggagtga

SEQ ID NO: 741889 - DNA, 15 bp, Homo sapiens
ccattgtggagtgag

SEQ ID NO: 741890 - DNA, 15 bp, Homo sapiens
cattgtggagtgagg

SEQ ID NO: 741891 - DNA, 15 bp, Homo sapiens
attgtggagtgaggg

SEQ ID NO: 741892 - DNA, 15 bp, Homo sapiens
ttgtggagtgagggc

SEQ ID NO: 741893 - DNA, 15 bp, Homo sapiens
tgtggagtgagggca

SEQ ID NO: 741894 - DNA, 15 bp, Homo sapiens
gtggagtgagggcag

SEQ ID NO: 741895 - DNA, 15 bp, Homo sapiens
tggagtgagggcagg

SEQ ID NO: 741896 - DNA, 15 bp, Homo sapiens
ggagtgagggcaggg

SEQ ID NO: 741897 - DNA, 15 bp, Homo sapiens
gagtgagggcagggg

SEQ ID NO: 741898 - DNA, 15 bp, Homo sapiens
agtgagggcaggggg

SEQ ID NO: 741899 - DNA, 15 bp, Homo sapiens
gtgagggcagggggc

SEQ ID NO: 741900 - DNA, 15 bp, Homo sapiens
tgagggcagggggca

SEQ ID NO: 741901 - DNA, 15 bp, Homo sapiens
gagggcagggggcac

SEQ ID NO: 741902 - DNA, 15 bp, Homo sapiens
agggcagggggcaca

SEQ ID NO: 741903 - DNA, 15 bp, Homo sapiens
gggcagggggcacag

SEQ ID NO: 741904 - DNA, 15 bp, Homo sapiens
ggcagggggcacagg

SEQ ID NO: 741905 - DNA, 15 bp, Homo sapiens
gcagggggcacaggt

SEQ ID NO: 741906 - DNA, 15 bp, Homo sapiens
cagggggcacaggtt

SEQ ID NO: 741907 - DNA, 15 bp, Homo sapiens
agggggcacaggttg

SEQ ID NO: 741908 - DNA, 15 bp, Homo sapiens
gggggcacaggttga

SEQ ID NO: 741909 - DNA, 15 bp, Homo sapiens
ggggcacaggttgag

SEQ ID NO: 741910 - DNA, 15 bp, Homo sapiens
gggcacaggttgagc

SEQ ID NO: 741911 - DNA, 15 bp, Homo sapiens
ggcacaggttgagct

SEQ ID NO: 741912 - DNA, 15 bp, Homo sapiens
gcacaggttgagctc

SEQ ID NO: 741913 - DNA, 15 bp, Homo sapiens
cacaggttgagctca

SEQ ID NO: 741914 - DNA, 15 bp, Homo sapiens
acaggttgagctcac

SEQ ID NO: 741915 - DNA, 15 bp, Homo sapiens
caggttgagctcaca

SEQ ID NO: 741916 - DNA, 15 bp, Homo sapiens
aggttgagctcacag

SEQ ID NO: 741917 - DNA, 15 bp, Homo sapiens
ggttgagctcacagg

SEQ ID NO: 741918 - DNA, 15 bp, Homo sapiens
gttgagctcacaggc

SEQ ID NO: 741919 - DNA, 15 bp, Homo sapiens
ttgagctcacaggca

SEQ ID NO: 741920 - DNA, 15 bp, Homo sapiens
tgagctcacaggcat

SEQ ID NO: 741921 - DNA, 15 bp, Homo sapiens
gagctcacaggcatg

SEQ ID NO: 741922 - DNA, 15 bp, Homo sapiens
agctcacaggcatgt

SEQ ID NO: 741923 - DNA, 15 bp, Homo sapiens
gctcacaggcatgtg

SEQ ID NO: 741924 - DNA, 15 bp, Homo sapiens
ctcacaggcatgtgg

SEQ ID NO: 741925 - DNA, 15 bp, Homo sapiens
tcacaggcatgtggg

SEQ ID NO: 741926 - DNA, 15 bp, Homo sapiens
cacaggcatgtgggc

SEQ ID NO: 741927 - DNA, 15 bp, Homo sapiens
acaggcatgtgggcc

SEQ ID NO: 741928 - DNA, 15 bp, Homo sapiens
caggcatgtgggcct

SEQ ID NO: 741929 - DNA, 15 bp, Homo sapiens
aggcatgtgggcctt

SEQ ID NO: 741930 - DNA, 15 bp, Homo sapiens
ggcatgtgggccttt

SEQ ID NO: 741931 - DNA, 15 bp, Homo sapiens
gcatgtgggcctttc

SEQ ID NO: 741932 - DNA, 15 bp, Homo sapiens
catgtgggcctttca

SEQ ID NO: 741933 - DNA, 15 bp, Homo sapiens
atgtgggcctttcat

SEQ ID NO: 741934 - DNA, 15 bp, Homo sapiens
tgtgggcctttcatc

SEQ ID NO: 741935 - DNA, 15 bp, Homo sapiens
gtgggcctttcatcc

SEQ ID NO: 741936 - DNA, 15 bp, Homo sapiens
tgggcctttcatcca

SEQ ID NO: 741937 - DNA, 15 bp, Homo sapiens
gggcctttcatccaa

SEQ ID NO: 741938 - DNA, 15 bp, Homo sapiens
ggcctttcatccaaa

SEQ ID NO: 741939 - DNA, 15 bp, Homo sapiens
gcctttcatccaaat

SEQ ID NO: 741940 - DNA, 15 bp, Homo sapiens
cctttcatccaaatg

SEQ ID NO: 741941 - DNA, 15 bp, Homo sapiens
ctttcatccaaatgc

SEQ ID NO: 741942 - DNA, 15 bp, Homo sapiens
tttcatccaaatgct

SEQ ID NO: 741943 - DNA, 15 bp, Homo sapiens
ttcatccaaatgctc

SEQ ID NO: 741944 - DNA, 15 bp, Homo sapiens
tcatccaaatgctca

SEQ ID NO: 741945 - DNA, 15 bp, Homo sapiens
catccaaatgctcat

SEQ ID NO: 741946 - DNA, 15 bp, Homo sapiens
atccaaatgctcatg

SEQ ID NO: 741947 - DNA, 15 bp, Homo sapiens
tccaaatgctcatga

SEQ ID NO: 741948 - DNA, 15 bp, Homo sapiens
ccaaatgctcatgag

SEQ ID NO: 741949 - DNA, 15 bp, Homo sapiens
caaatgctcatgagc

SEQ ID NO: 741950 - DNA, 15 bp, Homo sapiens
aaatgctcatgagcg

SEQ ID NO: 741951 - DNA, 15 bp, Homo sapiens
aatgctcatgagcgt

SEQ ID NO: 741952 - DNA, 15 bp, Homo sapiens
atgctcatgagcgtg

SEQ ID NO: 741953 - DNA, 15 bp, Homo sapiens
tgctcatgagcgtgg

SEQ ID NO: 741954 - DNA, 15 bp, Homo sapiens
gctcatgagcgtgga

SEQ ID NO: 741955 - DNA, 15 bp, Homo sapiens
ctcatgagcgtggac

SEQ ID NO: 741956 - DNA, 15 bp, Homo sapiens
tcatgagcgtggact

SEQ ID NO: 741957 - DNA, 15 bp, Homo sapiens
catgagcgtggactt

SEQ ID NO: 741958 - DNA, 15 bp, Homo sapiens
atgagcgtggacttt

SEQ ID NO: 741959 - DNA, 15 bp, Homo sapiens
tgagcgtggactttg

SEQ ID NO: 741960 - DNA, 15 bp, Homo sapiens
gagcgtggactttgg

SEQ ID NO: 741961 - DNA, 15 bp, Homo sapiens
agcgtggactttggg

SEQ ID NO: 741962 - DNA, 15 bp, Homo sapiens
gcgtggactttgggg

SEQ ID NO: 741963 - DNA, 15 bp, Homo sapiens
cgtggactttggggg

SEQ ID NO: 741964 - DNA, 15 bp, Homo sapiens
gtggactttggggga

SEQ ID NO: 741965 - DNA, 15 bp, Homo sapiens
tggactttgggggac

SEQ ID NO: 741966 - DNA, 15 bp, Homo sapiens
ggactttgggggact

SEQ ID NO: 741967 - DNA, 15 bp, Homo sapiens
gactttgggggactc

SEQ ID NO: 741968 - DNA, 15 bp, Homo sapiens
actttgggggactca

SEQ ID NO: 741969 - DNA, 15 bp, Homo sapiens
ctttgggggactcag

SEQ ID NO: 741970 - DNA, 15 bp, Homo sapiens
tttgggggactcagg

SEQ ID NO: 741971 - DNA, 15 bp, Homo sapiens
ttgggggactcaggt

SEQ ID NO: 741972 - DNA, 15 bp, Homo sapiens
tgggggactcaggtg

SEQ ID NO: 741973 - DNA, 15 bp, Homo sapiens
gggggactcaggtgg

SEQ ID NO: 741974 - DNA, 15 bp, Homo sapiens
ggggactcaggtgga

SEQ ID NO: 741975 - DNA, 15 bp, Homo sapiens
gggactcaggtggac

SEQ ID NO: 741976 - DNA, 15 bp, Homo sapiens
ggactcaggtggaca

SEQ ID NO: 741977 - DNA, 15 bp, Homo sapiens
gactcaggtggacag

SEQ ID NO: 741978 - DNA, 15 bp, Homo sapiens
actcaggtggacagg

SEQ ID NO: 741979 - DNA, 15 bp, Homo sapiens
ctcaggtggacaggt

SEQ ID NO: 741980 - DNA, 15 bp, Homo sapiens
tcaggtggacaggtg

SEQ ID NO: 741981 - DNA, 15 bp, Homo sapiens
caggtggacaggtgc

SEQ ID NO: 741982 - DNA, 15 bp, Homo sapiens
aggtggacaggtgct

SEQ ID NO: 741983 - DNA, 15 bp, Homo sapiens
ggtggacaggtgctt

SEQ ID NO: 741984 - DNA, 15 bp, Homo sapiens
gtggacaggtgcttg

SEQ ID NO: 741985 - DNA, 15 bp, Homo sapiens
tggacaggtgcttgt

SEQ ID NO: 741986 - DNA, 15 bp, Homo sapiens
ggacaggtgcttgtg

SEQ ID NO: 741987 - DNA, 15 bp, Homo sapiens
gacaggtgcttgtga

SEQ ID NO: 741988 - DNA, 15 bp, Homo sapiens
acaggtgcttgtgac

SEQ ID NO: 741989 - DNA, 15 bp, Homo sapiens
caggtgcttgtgacc

SEQ ID NO: 741990 - DNA, 15 bp, Homo sapiens
aggtgcttgtgacca

SEQ ID NO: 741991 - DNA, 15 bp, Homo sapiens
ggtgcttgtgaccat

SEQ ID NO: 741992 - DNA, 15 bp, Homo sapiens
gtgcttgtgaccatg

SEQ ID NO: 741993 - DNA, 15 bp, Homo sapiens
tgcttgtgaccatga

SEQ ID NO: 741994 - DNA, 15 bp, Homo sapiens
gcttgtgaccatgag

SEQ ID NO: 741995 - DNA, 15 bp, Homo sapiens
cttgtgaccatgagc

SEQ ID NO: 741996 - DNA, 15 bp, Homo sapiens
ttgtgaccatgagca

SEQ ID NO: 741997 - DNA, 15 bp, Homo sapiens
tgtgaccatgagcaa

SEQ ID NO: 741998 - DNA, 15 bp, Homo sapiens
gtgaccatgagcaag

SEQ ID NO: 741999 - DNA, 15 bp, Homo sapiens
tgaccatgagcaagc

SEQ ID NO: 742000 - DNA, 15 bp, Homo sapiens
gaccatgagcaagct

SEQ ID NO: 742001 - DNA, 15 bp, Homo sapiens
accatgagcaagctc

SEQ ID NO: 742002 - DNA, 15 bp, Homo sapiens
ccatgagcaagctcc

SEQ ID NO: 742003 - DNA, 15 bp, Homo sapiens
catgagcaagctcct

SEQ ID NO: 742004 - DNA, 15 bp, Homo sapiens
atgagcaagctcctt

SEQ ID NO: 742005 - DNA, 15 bp, Homo sapiens
tgagcaagctccttc

SEQ ID NO: 742006 - DNA, 15 bp, Homo sapiens
gagcaagctccttcc

SEQ ID NO: 742007 - DNA, 15 bp, Homo sapiens
agcaagctccttcct

SEQ ID NO: 742008 - DNA, 15 bp, Homo sapiens
gcaagctccttcctt

SEQ ID NO: 742009 - DNA, 15 bp, Homo sapiens
caagctccttccttc

SEQ ID NO: 742010 - DNA, 15 bp, Homo sapiens
aagctccttccttcc

SEQ ID NO: 742011 - DNA, 15 bp, Homo sapiens
agctccttccttccc

SEQ ID NO: 742012 - DNA, 15 bp, Homo sapiens
gctccttccttccca

SEQ ID NO: 742013 - DNA, 15 bp, Homo sapiens
ctccttccttcccat

SEQ ID NO: 742014 - DNA, 15 bp, Homo sapiens
tccttccttcccatc

SEQ ID NO: 742015 - DNA, 15 bp, Homo sapiens
ccttccttcccatcc

SEQ ID NO: 742016 - DNA, 15 bp, Homo sapiens
cttccttcccatccc

SEQ ID NO: 742017 - DNA, 15 bp, Homo sapiens
ttccttcccatcccc

SEQ ID NO: 742018 - DNA, 15 bp, Homo sapiens
tccttcccatcccct

SEQ ID NO: 742019 - DNA, 15 bp, Homo sapiens
ccttcccatcccctt

SEQ ID NO: 742020 - DNA, 15 bp, Homo sapiens
cttcccatcccctta

SEQ ID NO: 742021 - DNA, 15 bp, Homo sapiens
ttcccatccccttag

SEQ ID NO: 742022 - DNA, 15 bp, Homo sapiens
tcccatccccttagt

SEQ ID NO: 742023 - DNA, 15 bp, Homo sapiens
cccatccccttagta

SEQ ID NO: 742024 - DNA, 15 bp, Homo sapiens
ccatccccttagtac

SEQ ID NO: 742025 - DNA, 15 bp, Homo sapiens
catccccttagtacc

SEQ ID NO: 742026 - DNA, 15 bp, Homo sapiens
atccccttagtaccc

SEQ ID NO: 742027 - DNA, 15 bp, Homo sapiens
tccccttagtaccct

SEQ ID NO: 742028 - DNA, 15 bp, Homo sapiens
ccccttagtaccctg

SEQ ID NO: 742029 - DNA, 15 bp, Homo sapiens
cccttagtaccctgc

SEQ ID NO: 742030 - DNA, 15 bp, Homo sapiens
ccttagtaccctgca

SEQ ID NO: 742031 - DNA, 15 bp, Homo sapiens
cttagtaccctgcag

SEQ ID NO: 742032 - DNA, 15 bp, Homo sapiens
ttagtaccctgcagg

SEQ ID NO: 742033 - DNA, 15 bp, Homo sapiens
tagtaccctgcaggc

SEQ ID NO: 742034 - DNA, 15 bp, Homo sapiens
agtaccctgcaggcc

SEQ ID NO: 742035 - DNA, 15 bp, Homo sapiens
gtaccctgcaggcca

SEQ ID NO: 742036 - DNA, 15 bp, Homo sapiens
taccctgcaggccac

SEQ ID NO: 742037 - DNA, 15 bp, Homo sapiens
accctgcaggccact

SEQ ID NO: 742038 - DNA, 15 bp, Homo sapiens
ccctgcaggccactg

SEQ ID NO: 742039 - DNA, 15 bp, Homo sapiens
cctgcaggccactgt

SEQ ID NO: 742040 - DNA, 15 bp, Homo sapiens
ctgcaggccactgtg

SEQ ID NO: 742041 - DNA, 15 bp, Homo sapiens
tgcaggccactgtga

SEQ ID NO: 742042 - DNA, 15 bp, Homo sapiens
gcaggccactgtgag

SEQ ID NO: 742043 - DNA, 15 bp, Homo sapiens
caggccactgtgaga

SEQ ID NO: 742044 - DNA, 15 bp, Homo sapiens
aggccactgtgagaa

SEQ ID NO: 742045 - DNA, 15 bp, Homo sapiens
ggccactgtgagaaa

SEQ ID NO: 742046 - DNA, 15 bp, Homo sapiens
gccactgtgagaaat

SEQ ID NO: 742047 - DNA, 15 bp, Homo sapiens
ccactgtgagaaatg

SEQ ID NO: 742048 - DNA, 15 bp, Homo sapiens
cactgtgagaaatga

SEQ ID NO: 742049 - DNA, 15 bp, Homo sapiens
actgtgagaaatgac

SEQ ID NO: 742050 - DNA, 15 bp, Homo sapiens
ctgtgagaaatgacg

SEQ ID NO: 742051 - DNA, 15 bp, Homo sapiens
tgtgagaaatgacgg

SEQ ID NO: 742052 - DNA, 15 bp, Homo sapiens
gtgagaaatgacggc

SEQ ID NO: 742053 - DNA, 15 bp, Homo sapiens
tgagaaatgacggcc

SEQ ID NO: 742054 - DNA, 15 bp, Homo sapiens
gagaaatgacggcct

SEQ ID NO: 742055 - DNA, 15 bp, Homo sapiens
agaaatgacggccta

SEQ ID NO: 742056 - DNA, 15 bp, Homo sapiens
gaaatgacggcctag

SEQ ID NO: 742057 - DNA, 15 bp, Homo sapiens
aaatgacggcctaga

SEQ ID NO: 742058 - DNA, 15 bp, Homo sapiens
aatgacggcctagaa

SEQ ID NO: 742059 - DNA, 15 bp, Homo sapiens
atgacggcctagaac

SEQ ID NO: 742060 - DNA, 15 bp, Homo sapiens
tgacggcctagaact

SEQ ID NO: 742061 - DNA, 15 bp, Homo sapiens
gacggcctagaactc

SEQ ID NO: 742062 - DNA, 15 bp, Homo sapiens
acggcctagaactca

SEQ ID NO: 742063 - DNA, 15 bp, Homo sapiens
cggcctagaactcag

SEQ ID NO: 742064 - DNA, 15 bp, Homo sapiens
ggcctagaactcagg

SEQ ID NO: 742065 - DNA, 15 bp, Homo sapiens
gcctagaactcaggg

SEQ ID NO: 742066 - DNA, 15 bp, Homo sapiens
cctagaactcagggg

SEQ ID NO: 742067 - DNA, 15 bp, Homo sapiens
ctagaactcagggga

SEQ ID NO: 742068 - DNA, 15 bp, Homo sapiens
tagaactcaggggac

SEQ ID NO: 742069 - DNA, 15 bp, Homo sapiens
agaactcaggggaca

SEQ ID NO: 742070 - DNA, 15 bp, Homo sapiens
gaactcaggggacac

SEQ ID NO: 742071 - DNA, 15 bp, Homo sapiens
aactcaggggacacc

SEQ ID NO: 742072 - DNA, 15 bp, Homo sapiens
actcaggggacacct

SEQ ID NO: 742073 - DNA, 15 bp, Homo sapiens
ctcaggggacacctt

SEQ ID NO: 742074 - DNA, 15 bp, Homo sapiens
tcaggggacaccttc

SEQ ID NO: 742075 - DNA, 15 bp, Homo sapiens
caggggacaccttct

SEQ ID NO: 742076 - DNA, 15 bp, Homo sapiens
aggggacaccttctg

SEQ ID NO: 742077 - DNA, 15 bp, Homo sapiens
ggggacaccttctgc

SEQ ID NO: 742078 - DNA, 15 bp, Homo sapiens
gggacaccttctgcc

SEQ ID NO: 742079 - DNA, 15 bp, Homo sapiens
ggacaccttctgcct

SEQ ID NO: 742080 - DNA, 15 bp, Homo sapiens
gacaccttctgcctc

SEQ ID NO: 742081 - DNA, 15 bp, Homo sapiens
acaccttctgcctct

SEQ ID NO: 742082 - DNA, 15 bp, Homo sapiens
caccttctgcctctc

SEQ ID NO: 742083 - DNA, 15 bp, Homo sapiens
accttctgcctctcc

SEQ ID NO: 742084 - DNA, 15 bp, Homo sapiens
ccttctgcctctcct

SEQ ID NO: 742085 - DNA, 15 bp, Homo sapiens
cttctgcctctcctt

SEQ ID NO: 742086 - DNA, 15 bp, Homo sapiens
ttctgcctctcctta

SEQ ID NO: 742087 - DNA, 15 bp, Homo sapiens
tctgcctctccttaa

SEQ ID NO: 742088 - DNA, 15 bp, Homo sapiens
ctgcctctccttaaa

SEQ ID NO: 742089 - DNA, 15 bp, Homo sapiens
tgcctctccttaaac

SEQ ID NO: 742090 - DNA, 15 bp, Homo sapiens
gcctctccttaaaca

SEQ ID NO: 742091 - DNA, 15 bp, Homo sapiens
cctctccttaaacac

SEQ ID NO: 742092 - DNA, 15 bp, Homo sapiens
ctctccttaaacacc

SEQ ID NO: 742093 - DNA, 15 bp, Homo sapiens
tctccttaaacacct

SEQ ID NO: 742094 - DNA, 15 bp, Homo sapiens
ctccttaaacacctg

SEQ ID NO: 742095 - DNA, 15 bp, Homo sapiens
tccttaaacacctgc

SEQ ID NO: 742096 - DNA, 15 bp, Homo sapiens
ccttaaacacctgcc

SEQ ID NO: 742097 - DNA, 15 bp, Homo sapiens
cttaaacacctgcca

SEQ ID NO: 742098 - DNA, 15 bp, Homo sapiens
ttaaacacctgccaa

SEQ ID NO: 742099 - DNA, 15 bp, Homo sapiens
taaacacctgccaac

SEQ ID NO: 742100 - DNA, 15 bp, Homo sapiens
aaacacctgccaaca

SEQ ID NO: 742101 - DNA, 15 bp, Homo sapiens
aacacctgccaacag

SEQ ID NO: 742102 - DNA, 15 bp, Homo sapiens
acacctgccaacagg

SEQ ID NO: 742103 - DNA, 15 bp, Homo sapiens
cacctgccaacagga

SEQ ID NO: 742104 - DNA, 15 bp, Homo sapiens
acctgccaacaggat

SEQ ID NO: 742105 - DNA, 15 bp, Homo sapiens
cctgccaacaggatg

SEQ ID NO: 742106 - DNA, 15 bp, Homo sapiens
ctgccaacaggatga

SEQ ID NO: 742107 - DNA, 15 bp, Homo sapiens
tgccaacaggatgag

SEQ ID NO: 742108 - DNA, 15 bp, Homo sapiens
gccaacaggatgagt

SEQ ID NO: 742109 - DNA, 15 bp, Homo sapiens
ccaacaggatgagtc

SEQ ID NO: 742110 - DNA, 15 bp, Homo sapiens
caacaggatgagtca

SEQ ID NO: 742111 - DNA, 15 bp, Homo sapiens
aacaggatgagtcag

SEQ ID NO: 742112 - DNA, 15 bp, Homo sapiens
acaggatgagtcagg

SEQ ID NO: 742113 - DNA, 15 bp, Homo sapiens
caggatgagtcaggg

SEQ ID NO: 742114 - DNA, 15 bp, Homo sapiens
aggatgagtcagggc

SEQ ID NO: 742115 - DNA, 15 bp, Homo sapiens
ggatgagtcagggct

SEQ ID NO: 742116 - DNA, 15 bp, Homo sapiens
gatgagtcagggctg

SEQ ID NO: 742117 - DNA, 15 bp, Homo sapiens
atgagtcagggctgg

SEQ ID NO: 742118 - DNA, 15 bp, Homo sapiens
tgagtcagggctggg

SEQ ID NO: 742119 - DNA, 15 bp, Homo sapiens
gagtcagggctgggg

SEQ ID NO: 742120 - DNA, 15 bp, Homo sapiens
agtcagggctggggc

SEQ ID NO: 742121 - DNA, 15 bp, Homo sapiens
gtcagggctggggcg

SEQ ID NO: 742122 - DNA, 15 bp, Homo sapiens
tcagggctggggcgg

SEQ ID NO: 742123 - DNA, 15 bp, Homo sapiens
cagggctggggcggg

SEQ ID NO: 742124 - DNA, 15 bp, Homo sapiens
agggctggggcgggc

SEQ ID NO: 742125 - DNA, 15 bp, Homo sapiens
gggctggggcgggct

SEQ ID NO: 742126 - DNA, 15 bp, Homo sapiens
ggctggggcgggctc

SEQ ID NO: 742127 - DNA, 15 bp, Homo sapiens
gctggggcgggctca

SEQ ID NO: 742128 - DNA, 15 bp, Homo sapiens
ctggggcgggctcac

SEQ ID NO: 742129 - DNA, 15 bp, Homo sapiens
tggggcgggctcacc

SEQ ID NO: 742130 - DNA, 15 bp, Homo sapiens
ggggcgggctcacct

SEQ ID NO: 742131 - DNA, 15 bp, Homo sapiens
gggcgggctcacctg

SEQ ID NO: 742132 - DNA, 15 bp, Homo sapiens
ggcgggctcacctgg

SEQ ID NO: 742133 - DNA, 15 bp, Homo sapiens
gcgggctcacctggt

SEQ ID NO: 742134 - DNA, 15 bp, Homo sapiens
cgggctcacctggtg

SEQ ID NO: 742135 - DNA, 15 bp, Homo sapiens
gggctcacctggtgc

SEQ ID NO: 742136 - DNA, 15 bp, Homo sapiens
ggctcacctggtgca

SEQ ID NO: 742137 - DNA, 15 bp, Homo sapiens
gctcacctggtgcac

SEQ ID NO: 742138 - DNA, 15 bp, Homo sapiens
ctcacctggtgcaca

SEQ ID NO: 742139 - DNA, 15 bp, Homo sapiens
tcacctggtgcacac

SEQ ID NO: 742140 - DNA, 15 bp, Homo sapiens
cacctggtgcacacc

SEQ ID NO: 742141 - DNA, 15 bp, Homo sapiens
acctggtgcacaccc

SEQ ID NO: 742142 - DNA, 15 bp, Homo sapiens
cctggtgcacaccca

SEQ ID NO: 742143 - DNA, 15 bp, Homo sapiens
ctggtgcacacccac

SEQ ID NO: 742144 - DNA, 15 bp, Homo sapiens
tggtgcacacccaca

SEQ ID NO: 742145 - DNA, 15 bp, Homo sapiens
ggtgcacacccacac

SEQ ID NO: 742146 - DNA, 15 bp, Homo sapiens
gtgcacacccacacc

SEQ ID NO: 742147 - DNA, 15 bp, Homo sapiens
tgcacacccacaccc

SEQ ID NO: 742148 - DNA, 15 bp, Homo sapiens
gcacacccacaccct

SEQ ID NO: 742149 - DNA, 15 bp, Homo sapiens
cacacccacaccctg

SEQ ID NO: 742150 - DNA, 15 bp, Homo sapiens
acacccacaccctgg

SEQ ID NO: 742151 - DNA, 15 bp, Homo sapiens
cacccacaccctggt

SEQ ID NO: 742152 - DNA, 15 bp, Homo sapiens
acccacaccctggtg

SEQ ID NO: 742153 - DNA, 15 bp, Homo sapiens
cccacaccctggtga

SEQ ID NO: 742154 - DNA, 15 bp, Homo sapiens
ccacaccctggtgaa

SEQ ID NO: 742155 - DNA, 15 bp, Homo sapiens
cacaccctggtgaag

SEQ ID NO: 742156 - DNA, 15 bp, Homo sapiens
acaccctggtgaaga

SEQ ID NO: 742157 - DNA, 15 bp, Homo sapiens
caccctggtgaagac

SEQ ID NO: 742158 - DNA, 15 bp, Homo sapiens
accctggtgaagacc

SEQ ID NO: 742159 - DNA, 15 bp, Homo sapiens
ccctggtgaagacca

SEQ ID NO: 742160 - DNA, 15 bp, Homo sapiens
cctggtgaagaccag

SEQ ID NO: 742161 - DNA, 15 bp, Homo sapiens
ctggtgaagaccagt

SEQ ID NO: 742162 - DNA, 15 bp, Homo sapiens
tggtgaagaccagtc

SEQ ID NO: 742163 - DNA, 15 bp, Homo sapiens
ggtgaagaccagtcc

SEQ ID NO: 742164 - DNA, 15 bp, Homo sapiens
gtgaagaccagtcct

SEQ ID NO: 742165 - DNA, 15 bp, Homo sapiens
tgaagaccagtcctg

SEQ ID NO: 742166 - DNA, 15 bp, Homo sapiens
gaagaccagtcctgg

SEQ ID NO: 742167 - DNA, 15 bp, Homo sapiens
aagaccagtcctgga

SEQ ID NO: 742168 - DNA, 15 bp, Homo sapiens
agaccagtcctggac

SEQ ID NO: 742169 - DNA, 15 bp, Homo sapiens
gaccagtcctggacc

SEQ ID NO: 742170 - DNA, 15 bp, Homo sapiens
accagtcctggaccc

SEQ ID NO: 742171 - DNA, 15 bp, Homo sapiens
ccagtcctggacccc

SEQ ID NO: 742172 - DNA, 15 bp, Homo sapiens
cagtcctggaccccg

SEQ ID NO: 742173 - DNA, 15 bp, Homo sapiens
agtcctggaccccgc

SEQ ID NO: 742174 - DNA, 15 bp, Homo sapiens
gtcctggaccccgcc

SEQ ID NO: 742175 - DNA, 15 bp, Homo sapiens
tcctggaccccgcct

SEQ ID NO: 742176 - DNA, 15 bp, Homo sapiens
cctggaccccgcctc

SEQ ID NO: 742177 - DNA, 15 bp, Homo sapiens
ctggaccccgcctct

SEQ ID NO: 742178 - DNA, 15 bp, Homo sapiens
tggaccccgcctctt

SEQ ID NO: 742179 - DNA, 15 bp, Homo sapiens
ggaccccgcctcttc

SEQ ID NO: 742180 - DNA, 15 bp, Homo sapiens
gaccccgcctcttct

SEQ ID NO: 742181 - DNA, 15 bp, Homo sapiens
accccgcctcttctg

SEQ ID NO: 742182 - DNA, 15 bp, Homo sapiens
ccccgcctcttctgc

SEQ ID NO: 742183 - DNA, 15 bp, Homo sapiens
cccgcctcttctgca

SEQ ID NO: 742184 - DNA, 15 bp, Homo sapiens
ccgcctcttctgcag

SEQ ID NO: 742185 - DNA, 15 bp, Homo sapiens
cgcctcttctgcagt

SEQ ID NO: 742186 - DNA, 15 bp, Homo sapiens
gcctcttctgcagtg

SEQ ID NO: 742187 - DNA, 15 bp, Homo sapiens
cctcttctgcagtgc

SEQ ID NO: 742188 - DNA, 15 bp, Homo sapiens
ctcttctgcagtgcc

SEQ ID NO: 742189 - DNA, 15 bp, Homo sapiens
tcttctgcagtgccc

SEQ ID NO: 742190 - DNA, 15 bp, Homo sapiens
cttctgcagtgcccc

SEQ ID NO: 742191 - DNA, 15 bp, Homo sapiens
ttctgcagtgcccca

SEQ ID NO: 742192 - DNA, 15 bp, Homo sapiens
tctgcagtgccccag

SEQ ID NO: 742193 - DNA, 15 bp, Homo sapiens
ctgcagtgccccagg

SEQ ID NO: 742194 - DNA, 15 bp, Homo sapiens
tgcagtgccccaggt

SEQ ID NO: 742195 - DNA, 15 bp, Homo sapiens
gcagtgccccaggtc

SEQ ID NO: 742196 - DNA, 15 bp, Homo sapiens
cagtgccccaggtca

SEQ ID NO: 742197 - DNA, 15 bp, Homo sapiens
agtgccccaggtcat

SEQ ID NO: 742198 - DNA, 15 bp, Homo sapiens
gtgccccaggtcatg

SEQ ID NO: 742199 - DNA, 15 bp, Homo sapiens
tgccccaggtcatgc

SEQ ID NO: 742200 - DNA, 15 bp, Homo sapiens
gccccaggtcatgca

SEQ ID NO: 742201 - DNA, 15 bp, Homo sapiens
ccccaggtcatgcac

SEQ ID NO: 742202 - DNA, 15 bp, Homo sapiens
cccaggtcatgcact

SEQ ID NO: 742203 - DNA, 15 bp, Homo sapiens
ccaggtcatgcactt

SEQ ID NO: 742204 - DNA, 15 bp, Homo sapiens
caggtcatgcacttc

SEQ ID NO: 742205 - DNA, 15 bp, Homo sapiens
aggtcatgcacttcc

SEQ ID NO: 742206 - DNA, 15 bp, Homo sapiens
ggtcatgcacttccc

SEQ ID NO: 742207 - DNA, 15 bp, Homo sapiens
gtcatgcacttcccc

SEQ ID NO: 742208 - DNA, 15 bp, Homo sapiens
tcatgcacttccccc

SEQ ID NO: 742209 - DNA, 15 bp, Homo sapiens
catgcacttccccct

SEQ ID NO: 742210 - DNA, 15 bp, Homo sapiens
atgcacttccccctg

SEQ ID NO: 742211 - DNA, 15 bp, Homo sapiens
tgcacttccccctgg

SEQ ID NO: 742212 - DNA, 15 bp, Homo sapiens
gcacttccccctgga

SEQ ID NO: 742213 - DNA, 15 bp, Homo sapiens
cacttccccctggag

SEQ ID NO: 742214 - DNA, 15 bp, Homo sapiens
acttccccctggaga

SEQ ID NO: 742215 - DNA, 15 bp, Homo sapiens
cttccccctggagaa

SEQ ID NO: 742216 - DNA, 15 bp, Homo sapiens
ttccccctggagaag

SEQ ID NO: 742217 - DNA, 15 bp, Homo sapiens
tccccctggagaagg

SEQ ID NO: 742218 - DNA, 15 bp, Homo sapiens
ccccctggagaaggg

SEQ ID NO: 742219 - DNA, 15 bp, Homo sapiens
cccctggagaagggc

SEQ ID NO: 742220 - DNA, 15 bp, Homo sapiens
ccctggagaagggct

SEQ ID NO: 742221 - DNA, 15 bp, Homo sapiens
cctggagaagggctt

SEQ ID NO: 742222 - DNA, 15 bp, Homo sapiens
ctggagaagggctta

SEQ ID NO: 742223 - DNA, 15 bp, Homo sapiens
tggagaagggcttac

SEQ ID NO: 742224 - DNA, 15 bp, Homo sapiens
ggagaagggcttact

SEQ ID NO: 742225 - DNA, 15 bp, Homo sapiens
gagaagggcttactg

SEQ ID NO: 742226 - DNA, 15 bp, Homo sapiens
agaagggcttactga

SEQ ID NO: 742227 - DNA, 15 bp, Homo sapiens
gaagggcttactgat

SEQ ID NO: 742228 - DNA, 15 bp, Homo sapiens
aagggcttactgata

SEQ ID NO: 742229 - DNA, 15 bp, Homo sapiens
agggcttactgataa

SEQ ID NO: 742230 - DNA, 15 bp, Homo sapiens
gggcttactgataaa

SEQ ID NO: 742231 - DNA, 15 bp, Homo sapiens
ggcttactgataaaa

SEQ ID NO: 742232 - DNA, 15 bp, Homo sapiens
gcttactgataaaac

SEQ ID NO: 742233 - DNA, 15 bp, Homo sapiens
cttactgataaaacc

SEQ ID NO: 742234 - DNA, 15 bp, Homo sapiens
ttactgataaaaccc

SEQ ID NO: 742235 - DNA, 15 bp, Homo sapiens
tactgataaaacccc

SEQ ID NO: 742236 - DNA, 15 bp, Homo sapiens
actgataaaacccct

SEQ ID NO: 742237 - DNA, 15 bp, Homo sapiens
ctgataaaacccctt

SEQ ID NO: 742238 - DNA, 15 bp, Homo sapiens
tgataaaaccccttt

SEQ ID NO: 742239 - DNA, 15 bp, Homo sapiens
gataaaacccctttt

SEQ ID NO: 742240 - DNA, 15 bp, Homo sapiens
ataaaaccccttttg

SEQ ID NO: 742241 - DNA, 15 bp, Homo sapiens
taaaaccccttttgt

SEQ ID NO: 742242 - DNA, 15 bp, Homo sapiens
aaaaccccttttgtc

SEQ ID NO: 742243 - DNA, 15 bp, Homo sapiens
aaaccccttttgtcc

SEQ ID NO: 742244 - DNA, 15 bp, Homo sapiens
aaccccttttgtcct

SEQ ID NO: 742245 - DNA, 15 bp, Homo sapiens
accccttttgtcctg

SEQ ID NO: 742246 - DNA, 15 bp, Homo sapiens
ccccttttgtcctgg

SEQ ID NO: 742247 - DNA, 15 bp, Homo sapiens
cccttttgtcctgga

SEQ ID NO: 742248 - DNA, 15 bp, Homo sapiens
ccttttgtcctggaa

SEQ ID NO: 742249 - DNA, 15 bp, Homo sapiens
cttttgtcctggaaa

SEQ ID NO: 742250 - DNA, 15 bp, Homo sapiens
ttttgtcctggaaag

SEQ ID NO: 742251 - DNA, 15 bp, Homo sapiens
tttgtcctggaaaga

SEQ ID NO: 742252 - DNA, 15 bp, Homo sapiens
ttgtcctggaaagaa

SEQ ID NO: 742253 - DNA, 15 bp, Homo sapiens
tgtcctggaaagaat

SEQ ID NO: 742254 - DNA, 15 bp, Homo sapiens
gtcctggaaagaatg

SEQ ID NO: 742255 - DNA, 15 bp, Homo sapiens
tcctggaaagaatga

SEQ ID NO: 742256 - DNA, 15 bp, Homo sapiens
cctggaaagaatgag

SEQ ID NO: 742257 - DNA, 15 bp, Homo sapiens
ctggaaagaatgagg

SEQ ID NO: 742258 - DNA, 15 bp, Homo sapiens
tggaaagaatgaggc

SEQ ID NO: 742259 - DNA, 15 bp, Homo sapiens
ggaaagaatgaggca

SEQ ID NO: 742260 - DNA, 15 bp, Homo sapiens
gaaagaatgaggcag

SEQ ID NO: 742261 - DNA, 15 bp, Homo sapiens
aaagaatgaggcagt

SEQ ID NO: 742262 - DNA, 15 bp, Homo sapiens
aagaatgaggcagtc

SEQ ID NO: 742263 - DNA, 15 bp, Homo sapiens
agaatgaggcagtcc

SEQ ID NO: 742264 - DNA, 15 bp, Homo sapiens
gaatgaggcagtccg

SEQ ID NO: 742265 - DNA, 15 bp, Homo sapiens
aatgaggcagtccgg

SEQ ID NO: 742266 - DNA, 15 bp, Homo sapiens
atgaggcagtccggc

SEQ ID NO: 742267 - DNA, 15 bp, Homo sapiens
tgaggcagtccggca

SEQ ID NO: 742268 - DNA, 15 bp, Homo sapiens
gaggcagtccggcag

SEQ ID NO: 742269 - DNA, 15 bp, Homo sapiens
aggcagtccggcagg

SEQ ID NO: 742270 - DNA, 15 bp, Homo sapiens
ggcagtccggcaggg

SEQ ID NO: 742271 - DNA, 15 bp, Homo sapiens
gcagtccggcagggg

SEQ ID NO: 742272 - DNA, 15 bp, Homo sapiens
cagtccggcaggggt

SEQ ID NO: 742273 - DNA, 15 bp, Homo sapiens
agtccggcaggggtt

SEQ ID NO: 742274 - DNA, 15 bp, Homo sapiens
gtccggcaggggtta

SEQ ID NO: 742275 - DNA, 15 bp, Homo sapiens
tccggcaggggttaa

SEQ ID NO: 742276 - DNA, 15 bp, Homo sapiens
ccggcaggggttaaa

SEQ ID NO: 742277 - DNA, 15 bp, Homo sapiens
cggcaggggttaaat

SEQ ID NO: 742278 - DNA, 15 bp, Homo sapiens
ggcaggggttaaata

SEQ ID NO: 742279 - DNA, 15 bp, Homo sapiens
gcaggggttaaatac

SEQ ID NO: 742280 - DNA, 15 bp, Homo sapiens
caggggttaaataca

SEQ ID NO: 742281 - DNA, 15 bp, Homo sapiens
aggggttaaatacag

SEQ ID NO: 742282 - DNA, 15 bp, Homo sapiens
ggggttaaatacagg

SEQ ID NO: 742283 - DNA, 15 bp, Homo sapiens
gggttaaatacaggg

SEQ ID NO: 742284 - DNA, 15 bp, Homo sapiens
ggttaaatacagggt

SEQ ID NO: 742285 - DNA, 15 bp, Homo sapiens
gttaaatacagggtg

SEQ ID NO: 742286 - DNA, 15 bp, Homo sapiens
ttaaatacagggtga

SEQ ID NO: 742287 - DNA, 15 bp, Homo sapiens
taaatacagggtgac

SEQ ID NO: 742288 - DNA, 15 bp, Homo sapiens
aaatacagggtgaca

SEQ ID NO: 742289 - DNA, 15 bp, Homo sapiens
aatacagggtgacag

SEQ ID NO: 742290 - DNA, 15 bp, Homo sapiens
atacagggtgacagc

SEQ ID NO: 742291 - DNA, 15 bp, Homo sapiens
tacagggtgacagca

SEQ ID NO: 742292 - DNA, 15 bp, Homo sapiens
acagggtgacagcat

SEQ ID NO: 742293 - DNA, 15 bp, Homo sapiens
cagggtgacagcatt

SEQ ID NO: 742294 - DNA, 15 bp, Homo sapiens
agggtgacagcattt

SEQ ID NO: 742295 - DNA, 15 bp, Homo sapiens
gggtgacagcattta

SEQ ID NO: 742296 - DNA, 15 bp, Homo sapiens
ggtgacagcatttaa

SEQ ID NO: 742297 - DNA, 15 bp, Homo sapiens
gtgacagcatttaaa

SEQ ID NO: 742298 - DNA, 15 bp, Homo sapiens
tgacagcatttaaaa

SEQ ID NO: 742299 - DNA, 15 bp, Homo sapiens
gacagcatttaaaat

SEQ ID NO: 742300 - DNA, 15 bp, Homo sapiens
acagcatttaaaatc

SEQ ID NO: 742301 - DNA, 15 bp, Homo sapiens
cagcatttaaaatct

SEQ ID NO: 742302 - DNA, 15 bp, Homo sapiens
agcatttaaaatctc

SEQ ID NO: 742303 - DNA, 15 bp, Homo sapiens
gcatttaaaatctct

SEQ ID NO: 742304 - DNA, 15 bp, Homo sapiens
catttaaaatctctg

SEQ ID NO: 742305 - DNA, 15 bp, Homo sapiens
atttaaaatctctgg

SEQ ID NO: 742306 - DNA, 15 bp, Homo sapiens
tttaaaatctctgga

SEQ ID NO: 742307 - DNA, 15 bp, Homo sapiens
ttaaaatctctggag

SEQ ID NO: 742308 - DNA, 15 bp, Homo sapiens
taaaatctctggagc

SEQ ID NO: 742309 - DNA, 15 bp, Homo sapiens
aaaatctctggagca

SEQ ID NO: 742310 - DNA, 15 bp, Homo sapiens
aaatctctggagcaa

SEQ ID NO: 742311 - DNA, 15 bp, Homo sapiens
aatctctggagcaaa

SEQ ID NO: 742312 - DNA, 15 bp, Homo sapiens
atctctggagcaaat

SEQ ID NO: 742313 - DNA, 15 bp, Homo sapiens
tctctggagcaaatt

SEQ ID NO: 742314 - DNA, 15 bp, Homo sapiens
ctctggagcaaattt

SEQ ID NO: 742315 - DNA, 15 bp, Homo sapiens
tctggagcaaatttg

SEQ ID NO: 742316 - DNA, 15 bp, Homo sapiens
ctggagcaaatttgg

SEQ ID NO: 742317 - DNA, 15 bp, Homo sapiens
tggagcaaatttggg

SEQ ID NO: 742318 - DNA, 15 bp, Homo sapiens
ggagcaaatttgggc

SEQ ID NO: 742319 - DNA, 15 bp, Homo sapiens
gagcaaatttgggct

SEQ ID NO: 742320 - DNA, 15 bp, Homo sapiens
agcaaatttgggctg

SEQ ID NO: 742321 - DNA, 15 bp, Homo sapiens
gcaaatttgggctgc

SEQ ID NO: 742322 - DNA, 15 bp, Homo sapiens
caaatttgggctgct

SEQ ID NO: 742323 - DNA, 15 bp, Homo sapiens
aaatttgggctgctc

SEQ ID NO: 742324 - DNA, 15 bp, Homo sapiens
aatttgggctgctct

SEQ ID NO: 742325 - DNA, 15 bp, Homo sapiens
atttgggctgctctg

SEQ ID NO: 742326 - DNA, 15 bp, Homo sapiens
tttgggctgctctgc

SEQ ID NO: 742327 - DNA, 15 bp, Homo sapiens
ttgggctgctctgcc

SEQ ID NO: 742328 - DNA, 15 bp, Homo sapiens
tgggctgctctgccg

SEQ ID NO: 742329 - DNA, 15 bp, Homo sapiens
gggctgctctgccgg

SEQ ID NO: 742330 - DNA, 15 bp, Homo sapiens
ggctgctctgccggc

SEQ ID NO: 742331 - DNA, 15 bp, Homo sapiens
gctgctctgccggcc

SEQ ID NO: 742332 - DNA, 15 bp, Homo sapiens
ctgctctgccggcca

SEQ ID NO: 742333 - DNA, 15 bp, Homo sapiens
tgctctgccggccag

SEQ ID NO: 742334 - DNA, 15 bp, Homo sapiens
gctctgccggccaga

SEQ ID NO: 742335 - DNA, 15 bp, Homo sapiens
ctctgccggccagac

SEQ ID NO: 742336 - DNA, 15 bp, Homo sapiens
tctgccggccagaca

SEQ ID NO: 742337 - DNA, 15 bp, Homo sapiens
ctgccggccagacaa

SEQ ID NO: 742338 - DNA, 15 bp, Homo sapiens
tgccggccagacaag

SEQ ID NO: 742339 - DNA, 15 bp, Homo sapiens
gccggccagacaaga

SEQ ID NO: 742340 - DNA, 15 bp, Homo sapiens
ccggccagacaagat

SEQ ID NO: 742341 - DNA, 15 bp, Homo sapiens
cggccagacaagatg

SEQ ID NO: 742342 - DNA, 15 bp, Homo sapiens
ggccagacaagatgg

SEQ ID NO: 742343 - DNA, 15 bp, Homo sapiens
gccagacaagatggt

SEQ ID NO: 742344 - DNA, 15 bp, Homo sapiens
ccagacaagatggtc

SEQ ID NO: 742345 - DNA, 15 bp, Homo sapiens
cagacaagatggtct

SEQ ID NO: 742346 - DNA, 15 bp, Homo sapiens
agacaagatggtctg

SEQ ID NO: 742347 - DNA, 15 bp, Homo sapiens
gacaagatggtctgc

SEQ ID NO: 742348 - DNA, 15 bp, Homo sapiens
acaagatggtctgct

SEQ ID NO: 742349 - DNA, 15 bp, Homo sapiens
caagatggtctgctg

SEQ ID NO: 742350 - DNA, 15 bp, Homo sapiens
aagatggtctgctgc

SEQ ID NO: 742351 - DNA, 15 bp, Homo sapiens
agatggtctgctgcc

SEQ ID NO: 742352 - DNA, 15 bp, Homo sapiens
gatggtctgctgccg

SEQ ID NO: 742353 - DNA, 15 bp, Homo sapiens
atggtctgctgccgc

SEQ ID NO: 742354 - DNA, 15 bp, Homo sapiens
tggtctgctgccgcc

SEQ ID NO: 742355 - DNA, 15 bp, Homo sapiens
ggtctgctgccgcct

SEQ ID NO: 742356 - DNA, 15 bp, Homo sapiens
gtctgctgccgcctc

SEQ ID NO: 742357 - DNA, 15 bp, Homo sapiens
tctgctgccgcctca

SEQ ID NO: 742358 - DNA, 15 bp, Homo sapiens
ctgctgccgcctcac

SEQ ID NO: 742359 - DNA, 15 bp, Homo sapiens
tgctgccgcctcacg

SEQ ID NO: 742360 - DNA, 15 bp, Homo sapiens
gctgccgcctcacgc

SEQ ID NO: 742361 - DNA, 15 bp, Homo sapiens
ctgccgcctcacgca

SEQ ID NO: 742362 - DNA, 15 bp, Homo sapiens
tgccgcctcacgcat

SEQ ID NO: 742363 - DNA, 15 bp, Homo sapiens
gccgcctcacgcatc

SEQ ID NO: 742364 - DNA, 15 bp, Homo sapiens
ccgcctcacgcatcc

SEQ ID NO: 742365 - DNA, 15 bp, Homo sapiens
cgcctcacgcatcct

SEQ ID NO: 742366 - DNA, 15 bp, Homo sapiens
gcctcacgcatcctg

SEQ ID NO: 742367 - DNA, 15 bp, Homo sapiens
cctcacgcatcctgt

SEQ ID NO: 742368 - DNA, 15 bp, Homo sapiens
ctcacgcatcctgtc

SEQ ID NO: 742369 - DNA, 15 bp, Homo sapiens
tcacgcatcctgtcc

SEQ ID NO: 742370 - DNA, 15 bp, Homo sapiens
cacgcatcctgtccc

SEQ ID NO: 742371 - DNA, 15 bp, Homo sapiens
acgcatcctgtcccc

SEQ ID NO: 742372 - DNA, 15 bp, Homo sapiens
cgcatcctgtcccca

SEQ ID NO: 742373 - DNA, 15 bp, Homo sapiens
gcatcctgtccccag

SEQ ID NO: 742374 - DNA, 15 bp, Homo sapiens
catcctgtccccagg

SEQ ID NO: 742375 - DNA, 15 bp, Homo sapiens
atcctgtccccaggc

SEQ ID NO: 742376 - DNA, 15 bp, Homo sapiens
tcctgtccccaggct

SEQ ID NO: 742377 - DNA, 15 bp, Homo sapiens
cctgtccccaggctg

SEQ ID NO: 742378 - DNA, 15 bp, Homo sapiens
ctgtccccaggctga

SEQ ID NO: 742379 - DNA, 15 bp, Homo sapiens
tgtccccaggctgaa

SEQ ID NO: 742380 - DNA, 15 bp, Homo sapiens
gtccccaggctgaac

SEQ ID NO: 742381 - DNA, 15 bp, Homo sapiens
tccccaggctgaact

SEQ ID NO: 742382 - DNA, 15 bp, Homo sapiens
ccccaggctgaactg

SEQ ID NO: 742383 - DNA, 15 bp, Homo sapiens
cccaggctgaactgg

SEQ ID NO: 742384 - DNA, 15 bp, Homo sapiens
ccaggctgaactggg

SEQ ID NO: 742385 - DNA, 15 bp, Homo sapiens
caggctgaactgggc

SEQ ID NO: 742386 - DNA, 15 bp, Homo sapiens
aggctgaactgggcc

SEQ ID NO: 742387 - DNA, 15 bp, Homo sapiens
ggctgaactgggcca

SEQ ID NO: 742388 - DNA, 15 bp, Homo sapiens
gctgaactgggccag

SEQ ID NO: 742389 - DNA, 15 bp, Homo sapiens
ctgaactgggccagc

SEQ ID NO: 742390 - DNA, 15 bp, Homo sapiens
tgaactgggccagca

SEQ ID NO: 742391 - DNA, 15 bp, Homo sapiens
gaactgggccagcaa

SEQ ID NO: 742392 - DNA, 15 bp, Homo sapiens
aactgggccagcaaa

SEQ ID NO: 742393 - DNA, 15 bp, Homo sapiens
actgggccagcaaag

SEQ ID NO: 742394 - DNA, 15 bp, Homo sapiens
ctgggccagcaaagg

SEQ ID NO: 742395 - DNA, 15 bp, Homo sapiens
tgggccagcaaaggg

SEQ ID NO: 742396 - DNA, 15 bp, Homo sapiens
gggccagcaaaggga

SEQ ID NO: 742397 - DNA, 15 bp, Homo sapiens
ggccagcaaagggag

SEQ ID NO: 742398 - DNA, 15 bp, Homo sapiens
gccagcaaagggaga

SEQ ID NO: 742399 - DNA, 15 bp, Homo sapiens
ccagcaaagggagag

SEQ ID NO: 742400 - DNA, 15 bp, Homo sapiens
cagcaaagggagagg

SEQ ID NO: 742401 - DNA, 15 bp, Homo sapiens
agcaaagggagaggg

SEQ ID NO: 742402 - DNA, 15 bp, Homo sapiens
gcaaagggagagggc

SEQ ID NO: 742403 - DNA, 15 bp, Homo sapiens
caaagggagagggcc

SEQ ID NO: 742404 - DNA, 15 bp, Homo sapiens
aaagggagagggcca

SEQ ID NO: 742405 - DNA, 15 bp, Homo sapiens
aagggagagggccag

SEQ ID NO: 742406 - DNA, 15 bp, Homo sapiens
agggagagggccagg

SEQ ID NO: 742407 - DNA, 15 bp, Homo sapiens
gggagagggccaggt

SEQ ID NO: 742408 - DNA, 15 bp, Homo sapiens
ggagagggccaggtg

SEQ ID NO: 742409 - DNA, 15 bp, Homo sapiens
gagagggccaggtga

SEQ ID NO: 742410 - DNA, 15 bp, Homo sapiens
agagggccaggtgaa

SEQ ID NO: 742411 - DNA, 15 bp, Homo sapiens
gagggccaggtgaag

SEQ ID NO: 742412 - DNA, 15 bp, Homo sapiens
agggccaggtgaagg

SEQ ID NO: 742413 - DNA, 15 bp, Homo sapiens
gggccaggtgaaggc

SEQ ID NO: 742414 - DNA, 15 bp, Homo sapiens
ggccaggtgaaggcc

SEQ ID NO: 742415 - DNA, 15 bp, Homo sapiens
gccaggtgaaggcca

SEQ ID NO: 742416 - DNA, 15 bp, Homo sapiens
ccaggtgaaggccag

SEQ ID NO: 742417 - DNA, 15 bp, Homo sapiens
caggtgaaggccagg

SEQ ID NO: 742418 - DNA, 15 bp, Homo sapiens
aggtgaaggccaggc

SEQ ID NO: 742419 - DNA, 15 bp, Homo sapiens
ggtgaaggccaggct

SEQ ID NO: 742420 - DNA, 15 bp, Homo sapiens
gtgaaggccaggctt

SEQ ID NO: 742421 - DNA, 15 bp, Homo sapiens
tgaaggccaggcttt

SEQ ID NO: 742422 - DNA, 15 bp, Homo sapiens
gaaggccaggctttg

SEQ ID NO: 742423 - DNA, 15 bp, Homo sapiens
aaggccaggctttgg

SEQ ID NO: 742424 - DNA, 15 bp, Homo sapiens
aggccaggctttggg

SEQ ID NO: 742425 - DNA, 15 bp, Homo sapiens
ggccaggctttgggt

SEQ ID NO: 742426 - DNA, 15 bp, Homo sapiens
gccaggctttgggtg

SEQ ID NO: 742427 - DNA, 15 bp, Homo sapiens
ccaggctttgggtgg

SEQ ID NO: 742428 - DNA, 15 bp, Homo sapiens
caggctttgggtggt

SEQ ID NO: 742429 - DNA, 15 bp, Homo sapiens
aggctttgggtggtg

SEQ ID NO: 742430 - DNA, 15 bp, Homo sapiens
ggctttgggtggtgt

SEQ ID NO: 742431 - DNA, 15 bp, Homo sapiens
gctttgggtggtgtc

SEQ ID NO: 742432 - DNA, 15 bp, Homo sapiens
ctttgggtggtgtca

SEQ ID NO: 742433 - DNA, 15 bp, Homo sapiens
tttgggtggtgtcac

SEQ ID NO: 742434 - DNA, 15 bp, Homo sapiens
ttgggtggtgtcact

SEQ ID NO: 742435 - DNA, 15 bp, Homo sapiens
tgggtggtgtcactt

SEQ ID NO: 742436 - DNA, 15 bp, Homo sapiens
gggtggtgtcacttt

SEQ ID NO: 742437 - DNA, 15 bp, Homo sapiens
ggtggtgtcactttt

SEQ ID NO: 742438 - DNA, 15 bp, Homo sapiens
gtggtgtcacttttg

SEQ ID NO: 742439 - DNA, 15 bp, Homo sapiens
tggtgtcacttttgg

SEQ ID NO: 742440 - DNA, 15 bp, Homo sapiens
ggtgtcacttttggt

SEQ ID NO: 742441 - DNA, 15 bp, Homo sapiens
gtgtcacttttggtg

SEQ ID NO: 742442 - DNA, 15 bp, Homo sapiens
tgtcacttttggtga

SEQ ID NO: 742443 - DNA, 15 bp, Homo sapiens
gtcacttttggtgac

SEQ ID NO: 742444 - DNA, 15 bp, Homo sapiens
tcacttttggtgaca

SEQ ID NO: 742445 - DNA, 15 bp, Homo sapiens
cacttttggtgacac

SEQ ID NO: 742446 - DNA, 15 bp, Homo sapiens
acttttggtgacact

SEQ ID NO: 742447 - DNA, 15 bp, Homo sapiens
cttttggtgacactg

SEQ ID NO: 742448 - DNA, 15 bp, Homo sapiens
ttttggtgacactgt

SEQ ID NO: 742449 - DNA, 15 bp, Homo sapiens
tttggtgacactgta

SEQ ID NO: 742450 - DNA, 15 bp, Homo sapiens
ttggtgacactgtag

SEQ ID NO: 742451 - DNA, 15 bp, Homo sapiens
tggtgacactgtagc

SEQ ID NO: 742452 - DNA, 15 bp, Homo sapiens
ggtgacactgtagca

SEQ ID NO: 742453 - DNA, 15 bp, Homo sapiens
gtgacactgtagcat

SEQ ID NO: 742454 - DNA, 15 bp, Homo sapiens
tgacactgtagcatg

SEQ ID NO: 742455 - DNA, 15 bp, Homo sapiens
gacactgtagcatgc

SEQ ID NO: 742456 - DNA, 15 bp, Homo sapiens
acactgtagcatgct

SEQ ID NO: 742457 - DNA, 15 bp, Homo sapiens
cactgtagcatgctg

SEQ ID NO: 742458 - DNA, 15 bp, Homo sapiens
actgtagcatgctga

SEQ ID NO: 742459 - DNA, 15 bp, Homo sapiens
ctgtagcatgctgat

SEQ ID NO: 742460 - DNA, 15 bp, Homo sapiens
tgtagcatgctgatt

SEQ ID NO: 742461 - DNA, 15 bp, Homo sapiens
gtagcatgctgattg

SEQ ID NO: 742462 - DNA, 15 bp, Homo sapiens
tagcatgctgattgc

SEQ ID NO: 742463 - DNA, 15 bp, Homo sapiens
agcatgctgattgcc

SEQ ID NO: 742464 - DNA, 15 bp, Homo sapiens
gcatgctgattgccc

SEQ ID NO: 742465 - DNA, 15 bp, Homo sapiens
catgctgattgcccc

SEQ ID NO: 742466 - DNA, 15 bp, Homo sapiens
atgctgattgcccct

SEQ ID NO: 742467 - DNA, 15 bp, Homo sapiens
tgctgattgcccctc

SEQ ID NO: 742468 - DNA, 15 bp, Homo sapiens
gctgattgcccctca

SEQ ID NO: 742469 - DNA, 15 bp, Homo sapiens
ctgattgcccctcac

SEQ ID NO: 742470 - DNA, 15 bp, Homo sapiens
tgattgcccctcact

SEQ ID NO: 742471 - DNA, 15 bp, Homo sapiens
gattgcccctcactt

SEQ ID NO: 742472 - DNA, 15 bp, Homo sapiens
attgcccctcacttc

SEQ ID NO: 742473 - DNA, 15 bp, Homo sapiens
ttgcccctcacttcc

SEQ ID NO: 742474 - DNA, 15 bp, Homo sapiens
tgcccctcacttcct

SEQ ID NO: 742475 - DNA, 15 bp, Homo sapiens
gcccctcacttccta

SEQ ID NO: 742476 - DNA, 15 bp, Homo sapiens
cccctcacttcctac

SEQ ID NO: 742477 - DNA, 15 bp, Homo sapiens
ccctcacttcctaca

SEQ ID NO: 742478 - DNA, 15 bp, Homo sapiens
cctcacttcctacac

SEQ ID NO: 742479 - DNA, 15 bp, Homo sapiens
ctcacttcctacaca

SEQ ID NO: 742480 - DNA, 15 bp, Homo sapiens
tcacttcctacacac

SEQ ID NO: 742481 - DNA, 15 bp, Homo sapiens
cacttcctacacaca

SEQ ID NO: 742482 - DNA, 15 bp, Homo sapiens
acttcctacacacac

SEQ ID NO: 742483 - DNA, 15 bp, Homo sapiens
cttcctacacacaca

SEQ ID NO: 742484 - DNA, 15 bp, Homo sapiens
ttcctacacacacac

SEQ ID NO: 742485 - DNA, 15 bp, Homo sapiens
tcctacacacacaca

SEQ ID NO: 742486 - DNA, 15 bp, Homo sapiens
cctacacacacacac

SEQ ID NO: 742487 - DNA, 15 bp, Homo sapiens
ctacacacacacaca

SEQ ID NO: 742488 - DNA, 15 bp, Homo sapiens
tacacacacacacac

SEQ ID NO: 742489 - DNA, 15 bp, Homo sapiens
acacacacacacaca

SEQ ID NO: 742490 - DNA, 15 bp, Homo sapiens
cacacacacacacac

SEQ ID NO: 742491 - DNA, 15 bp, Homo sapiens
cacacacacacacat

SEQ ID NO: 742492 - DNA, 15 bp, Homo sapiens
acacacacacacatg

SEQ ID NO: 742493 - DNA, 15 bp, Homo sapiens
cacacacacacatgc

SEQ ID NO: 742494 - DNA, 15 bp, Homo sapiens
acacacacacatgcc

SEQ ID NO: 742495 - DNA, 15 bp, Homo sapiens
cacacacacatgcct

SEQ ID NO: 742496 - DNA, 15 bp, Homo sapiens
acacacacatgcctt

SEQ ID NO: 742497 - DNA, 15 bp, Homo sapiens
cacacacatgccttt

SEQ ID NO: 742498 - DNA, 15 bp, Homo sapiens
acacacatgccttta

SEQ ID NO: 742499 - DNA, 15 bp, Homo sapiens
cacacatgcctttac

SEQ ID NO: 742500 - DNA, 15 bp, Homo sapiens
acacatgcctttact

SEQ ID NO: 742501 - DNA, 15 bp, Homo sapiens
cacatgcctttactt

SEQ ID NO: 742502 - DNA, 15 bp, Homo sapiens
acatgcctttactta

SEQ ID NO: 742503 - DNA, 15 bp, Homo sapiens
catgcctttacttag

SEQ ID NO: 742504 - DNA, 15 bp, Homo sapiens
atgcctttacttagc

SEQ ID NO: 742505 - DNA, 15 bp, Homo sapiens
tgcctttacttagca

SEQ ID NO: 742506 - DNA, 15 bp, Homo sapiens
gcctttacttagcaa

SEQ ID NO: 742507 - DNA, 15 bp, Homo sapiens
cctttacttagcaaa

SEQ ID NO: 742508 - DNA, 15 bp, Homo sapiens
ctttacttagcaaag

SEQ ID NO: 742509 - DNA, 15 bp, Homo sapiens
tttacttagcaaagc

SEQ ID NO: 742510 - DNA, 15 bp, Homo sapiens
ttacttagcaaagcc

SEQ ID NO: 742511 - DNA, 15 bp, Homo sapiens
tacttagcaaagcct

SEQ ID NO: 742512 - DNA, 15 bp, Homo sapiens
acttagcaaagcctg

SEQ ID NO: 742513 - DNA, 15 bp, Homo sapiens
cttagcaaagcctga

SEQ ID NO: 742514 - DNA, 15 bp, Homo sapiens
ttagcaaagcctgac

SEQ ID NO: 742515 - DNA, 15 bp, Homo sapiens
tagcaaagcctgact

SEQ ID NO: 742516 - DNA, 15 bp, Homo sapiens
agcaaagcctgactg

SEQ ID NO: 742517 - DNA, 15 bp, Homo sapiens
gcaaagcctgactgt

SEQ ID NO: 742518 - DNA, 15 bp, Homo sapiens
caaagcctgactgta

SEQ ID NO: 742519 - DNA, 15 bp, Homo sapiens
aaagcctgactgtag

SEQ ID NO: 742520 - DNA, 15 bp, Homo sapiens
aagcctgactgtagc

SEQ ID NO: 742521 - DNA, 15 bp, Homo sapiens
agcctgactgtagct

SEQ ID NO: 742522 - DNA, 15 bp, Homo sapiens
gcctgactgtagctg

SEQ ID NO: 742523 - DNA, 15 bp, Homo sapiens
cctgactgtagctgc

SEQ ID NO: 742524 - DNA, 15 bp, Homo sapiens
ctgactgtagctgcg

SEQ ID NO: 742525 - DNA, 15 bp, Homo sapiens
tgactgtagctgcgt

SEQ ID NO: 742526 - DNA, 15 bp, Homo sapiens
gactgtagctgcgta

SEQ ID NO: 742527 - DNA, 15 bp, Homo sapiens
actgtagctgcgtag

SEQ ID NO: 742528 - DNA, 15 bp, Homo sapiens
ctgtagctgcgtaga

SEQ ID NO: 742529 - DNA, 15 bp, Homo sapiens
tgtagctgcgtagac

SEQ ID NO: 742530 - DNA, 15 bp, Homo sapiens
gtagctgcgtagact

SEQ ID NO: 742531 - DNA, 15 bp, Homo sapiens
tagctgcgtagactt

SEQ ID NO: 742532 - DNA, 15 bp, Homo sapiens
agctgcgtagacttg

SEQ ID NO: 742533 - DNA, 15 bp, Homo sapiens
gctgcgtagacttgt

SEQ ID NO: 742534 - DNA, 15 bp, Homo sapiens
ctgcgtagacttgta

SEQ ID NO: 742535 - DNA, 15 bp, Homo sapiens
tgcgtagacttgtac

SEQ ID NO: 742536 - DNA, 15 bp, Homo sapiens
gcgtagacttgtaca

SEQ ID NO: 742537 - DNA, 15 bp, Homo sapiens
cgtagacttgtacac

SEQ ID NO: 742538 - DNA, 15 bp, Homo sapiens
gtagacttgtacacc

SEQ ID NO: 742539 - DNA, 15 bp, Homo sapiens
tagacttgtacacct

SEQ ID NO: 742540 - DNA, 15 bp, Homo sapiens
agacttgtacaccta

SEQ ID NO: 742541 - DNA, 15 bp, Homo sapiens
gacttgtacacctat

SEQ ID NO: 742542 - DNA, 15 bp, Homo sapiens
acttgtacacctatg

SEQ ID NO: 742543 - DNA, 15 bp, Homo sapiens
cttgtacacctatgg

SEQ ID NO: 742544 - DNA, 15 bp, Homo sapiens
ttgtacacctatggg

SEQ ID NO: 742545 - DNA, 15 bp, Homo sapiens
tgtacacctatggga

SEQ ID NO: 742546 - DNA, 15 bp, Homo sapiens
gtacacctatgggac

SEQ ID NO: 742547 - DNA, 15 bp, Homo sapiens
tacacctatgggacc

SEQ ID NO: 742548 - DNA, 15 bp, Homo sapiens
acacctatgggacct

SEQ ID NO: 742549 - DNA, 15 bp, Homo sapiens
cacctatgggacctc

SEQ ID NO: 742550 - DNA, 15 bp, Homo sapiens
acctatgggacctcc

SEQ ID NO: 742551 - DNA, 15 bp, Homo sapiens
cctatgggacctccg

SEQ ID NO: 742552 - DNA, 15 bp, Homo sapiens
ctatgggacctccgt

SEQ ID NO: 742553 - DNA, 15 bp, Homo sapiens
tatgggacctccgtg

SEQ ID NO: 742554 - DNA, 15 bp, Homo sapiens
atgggacctccgtgg

SEQ ID NO: 742555 - DNA, 15 bp, Homo sapiens
tgggacctccgtggc

SEQ ID NO: 742556 - DNA, 15 bp, Homo sapiens
gggacctccgtggca

SEQ ID NO: 742557 - DNA, 15 bp, Homo sapiens
ggacctccgtggcaa

SEQ ID NO: 742558 - DNA, 15 bp, Homo sapiens
gacctccgtggcaag

SEQ ID NO: 742559 - DNA, 15 bp, Homo sapiens
acctccgtggcaagc

SEQ ID NO: 742560 - DNA, 15 bp, Homo sapiens
cctccgtggcaagct

SEQ ID NO: 742561 - DNA, 15 bp, Homo sapiens
ctccgtggcaagctc

SEQ ID NO: 742562 - DNA, 15 bp, Homo sapiens
tccgtggcaagctca

SEQ ID NO: 742563 - DNA, 15 bp, Homo sapiens
ccgtggcaagctcag

SEQ ID NO: 742564 - DNA, 15 bp, Homo sapiens
cgtggcaagctcaga

SEQ ID NO: 742565 - DNA, 15 bp, Homo sapiens
gtggcaagctcagag

SEQ ID NO: 742566 - DNA, 15 bp, Homo sapiens
tggcaagctcagagc

SEQ ID NO: 742567 - DNA, 15 bp, Homo sapiens
ggcaagctcagagcc

SEQ ID NO: 742568 - DNA, 15 bp, Homo sapiens
gcaagctcagagccg

SEQ ID NO: 742569 - DNA, 15 bp, Homo sapiens
caagctcagagccgg

SEQ ID NO: 742570 - DNA, 15 bp, Homo sapiens
aagctcagagccggt

SEQ ID NO: 742571 - DNA, 15 bp, Homo sapiens
agctcagagccggtg

SEQ ID NO: 742572 - DNA, 15 bp, Homo sapiens
gctcagagccggtgg

SEQ ID NO: 742573 - DNA, 15 bp, Homo sapiens
ctcagagccggtgga

SEQ ID NO: 742574 - DNA, 15 bp, Homo sapiens
tcagagccggtggag

SEQ ID NO: 742575 - DNA, 15 bp, Homo sapiens
cagagccggtggagc

SEQ ID NO: 742576 - DNA, 15 bp, Homo sapiens
agagccggtggagca

SEQ ID NO: 742577 - DNA, 15 bp, Homo sapiens
gagccggtggagcag

SEQ ID NO: 742578 - DNA, 15 bp, Homo sapiens
agccggtggagcagt

SEQ ID NO: 742579 - DNA, 15 bp, Homo sapiens
gccggtggagcagtg

SEQ ID NO: 742580 - DNA, 15 bp, Homo sapiens
ccggtggagcagtga

SEQ ID NO: 742581 - DNA, 15 bp, Homo sapiens
cggtggagcagtgaa

SEQ ID NO: 742582 - DNA, 15 bp, Homo sapiens
ggtggagcagtgaaa

SEQ ID NO: 742583 - DNA, 15 bp, Homo sapiens
gtggagcagtgaaaa

SEQ ID NO: 742584 - DNA, 15 bp, Homo sapiens
tggagcagtgaaaag

SEQ ID NO: 742585 - DNA, 15 bp, Homo sapiens
ggagcagtgaaaagg

SEQ ID NO: 742586 - DNA, 15 bp, Homo sapiens
gagcagtgaaaaggg

SEQ ID NO: 742587 - DNA, 15 bp, Homo sapiens
agcagtgaaaaggga

SEQ ID NO: 742588 - DNA, 15 bp, Homo sapiens
gcagtgaaaagggag

SEQ ID NO: 742589 - DNA, 15 bp, Homo sapiens
cagtgaaaagggagg

SEQ ID NO: 742590 - DNA, 15 bp, Homo sapiens
agtgaaaagggagga

SEQ ID NO: 742591 - DNA, 15 bp, Homo sapiens
gtgaaaagggaggaa

SEQ ID NO: 742592 - DNA, 15 bp, Homo sapiens
tgaaaagggaggaaa

SEQ ID NO: 742593 - DNA, 15 bp, Homo sapiens
gaaaagggaggaaat

SEQ ID NO: 742594 - DNA, 15 bp, Homo sapiens
aaaagggaggaaatg

SEQ ID NO: 742595 - DNA, 15 bp, Homo sapiens
aaagggaggaaatgc

SEQ ID NO: 742596 - DNA, 15 bp, Homo sapiens
aagggaggaaatgcc

SEQ ID NO: 742597 - DNA, 15 bp, Homo sapiens
agggaggaaatgccg

SEQ ID NO: 742598 - DNA, 15 bp, Homo sapiens
gggaggaaatgccga

SEQ ID NO: 742599 - DNA, 15 bp, Homo sapiens
ggaggaaatgccgaa

SEQ ID NO: 742600 - DNA, 15 bp, Homo sapiens
gaggaaatgccgaag

SEQ ID NO: 742601 - DNA, 15 bp, Homo sapiens
aggaaatgccgaaga

SEQ ID NO: 742602 - DNA, 15 bp, Homo sapiens
ggaaatgccgaagaa

SEQ ID NO: 742603 - DNA, 15 bp, Homo sapiens
gaaatgccgaagaat

SEQ ID NO: 742604 - DNA, 15 bp, Homo sapiens
aaatgccgaagaatt

SEQ ID NO: 742605 - DNA, 15 bp, Homo sapiens
aatgccgaagaattc

SEQ ID NO: 742606 - DNA, 15 bp, Homo sapiens
atgccgaagaattca

SEQ ID NO: 742607 - DNA, 15 bp, Homo sapiens
tgccgaagaattcat

SEQ ID NO: 742608 - DNA, 15 bp, Homo sapiens
gccgaagaattcatg

SEQ ID NO: 742609 - DNA, 15 bp, Homo sapiens
ccgaagaattcatga

SEQ ID NO: 742610 - DNA, 15 bp, Homo sapiens
cgaagaattcatgat

SEQ ID NO: 742611 - DNA, 15 bp, Homo sapiens
gaagaattcatgatc

SEQ ID NO: 742612 - DNA, 15 bp, Homo sapiens
aagaattcatgatca

SEQ ID NO: 742613 - DNA, 15 bp, Homo sapiens
agaattcatgatcaa

SEQ ID NO: 742614 - DNA, 15 bp, Homo sapiens
gaattcatgatcaag

SEQ ID NO: 742615 - DNA, 15 bp, Homo sapiens
aattcatgatcaagt

SEQ ID NO: 742616 - DNA, 15 bp, Homo sapiens
attcatgatcaagtt

SEQ ID NO: 742617 - DNA, 15 bp, Homo sapiens
ttcatgatcaagttt

SEQ ID NO: 742618 - DNA, 15 bp, Homo sapiens
tcatgatcaagtttg

SEQ ID NO: 742619 - DNA, 15 bp, Homo sapiens
catgatcaagtttgg

SEQ ID NO: 742620 - DNA, 15 bp, Homo sapiens
atgatcaagtttggc

SEQ ID NO: 742621 - DNA, 15 bp, Homo sapiens
tgatcaagtttggct

SEQ ID NO: 742622 - DNA, 15 bp, Homo sapiens
gatcaagtttggctt

SEQ ID NO: 742623 - DNA, 15 bp, Homo sapiens
atcaagtttggcttc

SEQ ID NO: 742624 - DNA, 15 bp, Homo sapiens
tcaagtttggcttcc

SEQ ID NO: 742625 - DNA, 15 bp, Homo sapiens
caagtttggcttcct

SEQ ID NO: 742626 - DNA, 15 bp, Homo sapiens
aagtttggcttcctt

SEQ ID NO: 742627 - DNA, 15 bp, Homo sapiens
agtttggcttccttt

SEQ ID NO: 742628 - DNA, 15 bp, Homo sapiens
gtttggcttcctttg

SEQ ID NO: 742629 - DNA, 15 bp, Homo sapiens
tttggcttcctttgc

SEQ ID NO: 742630 - DNA, 15 bp, Homo sapiens
ttggcttcctttgct

SEQ ID NO: 742631 - DNA, 15 bp, Homo sapiens
tggcttcctttgctt

SEQ ID NO: 742632 - DNA, 15 bp, Homo sapiens
ggcttcctttgcttc

SEQ ID NO: 742633 - DNA, 15 bp, Homo sapiens
gcttcctttgcttct

SEQ ID NO: 742634 - DNA, 15 bp, Homo sapiens
cttcctttgcttctt

SEQ ID NO: 742635 - DNA, 15 bp, Homo sapiens
ttcctttgcttcttt

SEQ ID NO: 742636 - DNA, 15 bp, Homo sapiens
tcctttgcttctttt

SEQ ID NO: 742637 - DNA, 15 bp, Homo sapiens
cctttgcttcttttt

SEQ ID NO: 742638 - DNA, 15 bp, Homo sapiens
ctttgcttcttttta

SEQ ID NO: 742639 - DNA, 15 bp, Homo sapiens
tttgcttctttttaa

SEQ ID NO: 742640 - DNA, 15 bp, Homo sapiens
ttgcttctttttaaa

SEQ ID NO: 742641 - DNA, 15 bp, Homo sapiens
tgcttctttttaaaa

SEQ ID NO: 742642 - DNA, 15 bp, Homo sapiens
gcttctttttaaaat

SEQ ID NO: 742643 - DNA, 15 bp, Homo sapiens
cttctttttaaaatt

SEQ ID NO: 742644 - DNA, 15 bp, Homo sapiens
ttctttttaaaattt

SEQ ID NO: 742645 - DNA, 15 bp, Homo sapiens
tctttttaaaatttt

SEQ ID NO: 742646 - DNA, 15 bp, Homo sapiens
ctttttaaaattttt

SEQ ID NO: 742647 - DNA, 15 bp, Homo sapiens
tttttaaaatttttt

SEQ ID NO: 742648 - DNA, 15 bp, Homo sapiens
ttttaaaatttttta

SEQ ID NO: 742649 - DNA, 15 bp, Homo sapiens
tttaaaattttttaa

SEQ ID NO: 742650 - DNA, 15 bp, Homo sapiens
ttaaaattttttaat

SEQ ID NO: 742651 - DNA, 15 bp, Homo sapiens
taaaattttttaatg

SEQ ID NO: 742652 - DNA, 15 bp, Homo sapiens
aaaattttttaatgt

SEQ ID NO: 742653 - DNA, 15 bp, Homo sapiens
aaattttttaatgtt

SEQ ID NO: 742654 - DNA, 15 bp, Homo sapiens
aattttttaatgttt

SEQ ID NO: 742655 - DNA, 15 bp, Homo sapiens
attttttaatgtttt

SEQ ID NO: 742656 - DNA, 15 bp, Homo sapiens
ttttttaatgtttta

SEQ ID NO: 742657 - DNA, 15 bp, Homo sapiens
tttttaatgttttaa

SEQ ID NO: 742658 - DNA, 15 bp, Homo sapiens
ttttaatgttttaat

SEQ ID NO: 742659 - DNA, 15 bp, Homo sapiens
tttaatgttttaatt

SEQ ID NO: 742660 - DNA, 15 bp, Homo sapiens
ttaatgttttaattt

SEQ ID NO: 742661 - DNA, 15 bp, Homo sapiens
taatgttttaatttt

SEQ ID NO: 742662 - DNA, 15 bp, Homo sapiens
aatgttttaattttt

SEQ ID NO: 742663 - DNA, 15 bp, Homo sapiens
atgttttaatttttt

SEQ ID NO: 742664 - DNA, 15 bp, Homo sapiens
tgttttaattttttt

SEQ ID NO: 742665 - DNA, 15 bp, Homo sapiens
gttttaatttttttt

SEQ ID NO: 742666 - DNA, 15 bp, Homo sapiens
ttttaattttttttt

SEQ ID NO: 742667 - DNA, 15 bp, Homo sapiens
tttaatttttttttt

SEQ ID NO: 742668 - DNA, 15 bp, Homo sapiens
ttaattttttttttt

SEQ ID NO: 742669 - DNA, 15 bp, Homo sapiens
ttttttttttaattc

SEQ ID NO: 742670 - DNA, 15 bp, Homo sapiens
tttttttttaattcg

SEQ ID NO: 742671 - DNA, 15 bp, Homo sapiens
ttttttttaattcga

SEQ ID NO: 742672 - DNA, 15 bp, Homo sapiens
tttttttaattcgag

SEQ ID NO: 742673 - DNA, 15 bp, Homo sapiens
ttttttaattcgaga

SEQ ID NO: 742674 - DNA, 15 bp, Homo sapiens
tttttaattcgagat

SEQ ID NO: 742675 - DNA, 15 bp, Homo sapiens
ttttaattcgagatg

SEQ ID NO: 742676 - DNA, 15 bp, Homo sapiens
tttaattcgagatgg

SEQ ID NO: 742677 - DNA, 15 bp, Homo sapiens
ttaattcgagatgga

SEQ ID NO: 742678 - DNA, 15 bp, Homo sapiens
taattcgagatggag

SEQ ID NO: 742679 - DNA, 15 bp, Homo sapiens
aattcgagatggagt

SEQ ID NO: 742680 - DNA, 15 bp, Homo sapiens
attcgagatggagtt

SEQ ID NO: 742681 - DNA, 15 bp, Homo sapiens
ttcgagatggagttt

SEQ ID NO: 742682 - DNA, 15 bp, Homo sapiens
tcgagatggagtttt

SEQ ID NO: 742683 - DNA, 15 bp, Homo sapiens
cgagatggagttttg

SEQ ID NO: 742684 - DNA, 15 bp, Homo sapiens
gagatggagttttgc

SEQ ID NO: 742685 - DNA, 15 bp, Homo sapiens
agatggagttttgct

SEQ ID NO: 742686 - DNA, 15 bp, Homo sapiens
gatggagttttgctc

SEQ ID NO: 742687 - DNA, 15 bp, Homo sapiens
atggagttttgctct

SEQ ID NO: 742688 - DNA, 15 bp, Homo sapiens
tggagttttgctctg

SEQ ID NO: 742689 - DNA, 15 bp, Homo sapiens
ggagttttgctctgt

SEQ ID NO: 742690 - DNA, 15 bp, Homo sapiens
gagttttgctctgtc

SEQ ID NO: 742691 - DNA, 15 bp, Homo sapiens
agttttgctctgtcg

SEQ ID NO: 742692 - DNA, 15 bp, Homo sapiens
gttttgctctgtcgc

SEQ ID NO: 742693 - DNA, 15 bp, Homo sapiens
ttttgctctgtcgcc

SEQ ID NO: 742694 - DNA, 15 bp, Homo sapiens
tttgctctgtcgccc

SEQ ID NO: 742695 - DNA, 15 bp, Homo sapiens
ttgctctgtcgccca

SEQ ID NO: 742696 - DNA, 15 bp, Homo sapiens
tgctctgtcgcccag

SEQ ID NO: 742697 - DNA, 15 bp, Homo sapiens
caggctggagtgcaa

SEQ ID NO: 742698 - DNA, 15 bp, Homo sapiens
aggctggagtgcaat

SEQ ID NO: 742699 - DNA, 15 bp, Homo sapiens
ggctggagtgcaatg

SEQ ID NO: 742700 - DNA, 15 bp, Homo sapiens
gctggagtgcaatgg

SEQ ID NO: 742701 - DNA, 15 bp, Homo sapiens
ctggagtgcaatggc

SEQ ID NO: 742702 - DNA, 15 bp, Homo sapiens
tggagtgcaatggca

SEQ ID NO: 742703 - DNA, 15 bp, Homo sapiens
ggagtgcaatggcag

SEQ ID NO: 742704 - DNA, 15 bp, Homo sapiens
gagtgcaatggcagg

SEQ ID NO: 742705 - DNA, 15 bp, Homo sapiens
agtgcaatggcagga

SEQ ID NO: 742706 - DNA, 15 bp, Homo sapiens
gtgcaatggcaggat

SEQ ID NO: 742707 - DNA, 15 bp, Homo sapiens
tgcaatggcaggatc

SEQ ID NO: 742708 - DNA, 15 bp, Homo sapiens
gcaatggcaggatct

SEQ ID NO: 742709 - DNA, 15 bp, Homo sapiens
caatggcaggatctc

SEQ ID NO: 742710 - DNA, 15 bp, Homo sapiens
aatggcaggatctcg

SEQ ID NO: 742711 - DNA, 15 bp, Homo sapiens
atggcaggatctcga

SEQ ID NO: 742712 - DNA, 15 bp, Homo sapiens
tggcaggatctcgag

SEQ ID NO: 742713 - DNA, 15 bp, Homo sapiens
ggcaggatctcgagt

SEQ ID NO: 742714 - DNA, 15 bp, Homo sapiens
gcaggatctcgagtc

SEQ ID NO: 742715 - DNA, 15 bp, Homo sapiens
caggatctcgagtca

SEQ ID NO: 742716 - DNA, 15 bp, Homo sapiens
aggatctcgagtcac

SEQ ID NO: 742717 - DNA, 15 bp, Homo sapiens
ggatctcgagtcact

SEQ ID NO: 742718 - DNA, 15 bp, Homo sapiens
gatctcgagtcactg

SEQ ID NO: 742719 - DNA, 15 bp, Homo sapiens
atctcgagtcactgc

SEQ ID NO: 742720 - DNA, 15 bp, Homo sapiens
tctcgagtcactgca

SEQ ID NO: 742721 - DNA, 15 bp, Homo sapiens
ctcgagtcactgcaa

SEQ ID NO: 742722 - DNA, 15 bp, Homo sapiens
tcgagtcactgcaac

SEQ ID NO: 742723 - DNA, 15 bp, Homo sapiens
cgagtcactgcaacc

SEQ ID NO: 742724 - DNA, 15 bp, Homo sapiens
gagtcactgcaacct

SEQ ID NO: 742725 - DNA, 15 bp, Homo sapiens
agtcactgcaacctc

SEQ ID NO: 742726 - DNA, 15 bp, Homo sapiens
gtcactgcaacctct

SEQ ID NO: 742727 - DNA, 15 bp, Homo sapiens
caacctctgcctcct

SEQ ID NO: 742728 - DNA, 15 bp, Homo sapiens
aacctctgcctcctg

SEQ ID NO: 742729 - DNA, 15 bp, Homo sapiens
acctctgcctcctgg

SEQ ID NO: 742730 - DNA, 15 bp, Homo sapiens
cctctgcctcctgga

SEQ ID NO: 742731 - DNA, 15 bp, Homo sapiens
ctctgcctcctggat

SEQ ID NO: 742732 - DNA, 15 bp, Homo sapiens
tctgcctcctggatt

SEQ ID NO: 742733 - DNA, 15 bp, Homo sapiens
ctgcctcctggattc

SEQ ID NO: 742734 - DNA, 15 bp, Homo sapiens
tgcctcctggattca

SEQ ID NO: 742735 - DNA, 15 bp, Homo sapiens
gcctcctggattcaa

SEQ ID NO: 742736 - DNA, 15 bp, Homo sapiens
cctcctggattcaag

SEQ ID NO: 742737 - DNA, 15 bp, Homo sapiens
ctcctggattcaagg

SEQ ID NO: 742738 - DNA, 15 bp, Homo sapiens
tcctggattcaaggg

SEQ ID NO: 742739 - DNA, 15 bp, Homo sapiens
cctggattcaaggga

SEQ ID NO: 742740 - DNA, 15 bp, Homo sapiens
ctggattcaagggac

SEQ ID NO: 742741 - DNA, 15 bp, Homo sapiens
tggattcaagggact

SEQ ID NO: 742742 - DNA, 15 bp, Homo sapiens
ggattcaagggactc

SEQ ID NO: 742743 - DNA, 15 bp, Homo sapiens
gattcaagggactct

SEQ ID NO: 742744 - DNA, 15 bp, Homo sapiens
attcaagggactctc

SEQ ID NO: 742745 - DNA, 15 bp, Homo sapiens
ttcaagggactctcc

SEQ ID NO: 742746 - DNA, 15 bp, Homo sapiens
tcaagggactctcct

SEQ ID NO: 742747 - DNA, 15 bp, Homo sapiens
caagggactctcctg

SEQ ID NO: 742748 - DNA, 15 bp, Homo sapiens
aagggactctcctgc

SEQ ID NO: 742749 - DNA, 15 bp, Homo sapiens
agggactctcctgcc

SEQ ID NO: 742750 - DNA, 15 bp, Homo sapiens
gggactctcctgcct

SEQ ID NO: 742751 - DNA, 15 bp, Homo sapiens
ggactctcctgcctc

SEQ ID NO: 742752 - DNA, 15 bp, Homo sapiens
gactctcctgcctca

SEQ ID NO: 742753 - DNA, 15 bp, Homo sapiens
actctcctgcctcag

SEQ ID NO: 742754 - DNA, 15 bp, Homo sapiens
ctctcctgcctcagc

SEQ ID NO: 742755 - DNA, 15 bp, Homo sapiens
cctgcctcagcctct

SEQ ID NO: 742756 - DNA, 15 bp, Homo sapiens
ctgcctcagcctctg

SEQ ID NO: 742757 - DNA, 15 bp, Homo sapiens
tgcctcagcctctga

SEQ ID NO: 742758 - DNA, 15 bp, Homo sapiens
gcctcagcctctgag

SEQ ID NO: 742759 - DNA, 15 bp, Homo sapiens
cctcagcctctgagt

SEQ ID NO: 742760 - DNA, 15 bp, Homo sapiens
ctcagcctctgagta

SEQ ID NO: 742761 - DNA, 15 bp, Homo sapiens
tcagcctctgagtag

SEQ ID NO: 742762 - DNA, 15 bp, Homo sapiens
cagcctctgagtagt

SEQ ID NO: 742763 - DNA, 15 bp, Homo sapiens
agcctctgagtagtt

SEQ ID NO: 742764 - DNA, 15 bp, Homo sapiens
gcctctgagtagttg

SEQ ID NO: 742765 - DNA, 15 bp, Homo sapiens
cctctgagtagttgg

SEQ ID NO: 742766 - DNA, 15 bp, Homo sapiens
ctctgagtagttgga

SEQ ID NO: 742767 - DNA, 15 bp, Homo sapiens
tctgagtagttggat

SEQ ID NO: 742768 - DNA, 15 bp, Homo sapiens
ctgagtagttggatt

SEQ ID NO: 742769 - DNA, 15 bp, Homo sapiens
tgagtagttggattg

SEQ ID NO: 742770 - DNA, 15 bp, Homo sapiens
gagtagttggattgc

SEQ ID NO: 742771 - DNA, 15 bp, Homo sapiens
agtagttggattgca

SEQ ID NO: 742772 - DNA, 15 bp, Homo sapiens
gtagttggattgcag

SEQ ID NO: 742773 - DNA, 15 bp, Homo sapiens
tagttggattgcagg

SEQ ID NO: 742774 - DNA, 15 bp, Homo sapiens
agttggattgcaggc

SEQ ID NO: 742775 - DNA, 15 bp, Homo sapiens
gttggattgcaggcg

SEQ ID NO: 742776 - DNA, 15 bp, Homo sapiens
ttggattgcaggcgt

SEQ ID NO: 742777 - DNA, 15 bp, Homo sapiens
tggattgcaggcgtg

SEQ ID NO: 742778 - DNA, 15 bp, Homo sapiens
ggattgcaggcgtgc

SEQ ID NO: 742779 - DNA, 15 bp, Homo sapiens
gattgcaggcgtgca

SEQ ID NO: 742780 - DNA, 15 bp, Homo sapiens
attgcaggcgtgcac

SEQ ID NO: 742781 - DNA, 15 bp, Homo sapiens
ttgcaggcgtgcacc

SEQ ID NO: 742782 - DNA, 15 bp, Homo sapiens
tgcaggcgtgcacca

SEQ ID NO: 742783 - DNA, 15 bp, Homo sapiens
gcaggcgtgcaccac

SEQ ID NO: 742784 - DNA, 15 bp, Homo sapiens
caggcgtgcaccacc

SEQ ID NO: 742785 - DNA, 15 bp, Homo sapiens
aggcgtgcaccacca

SEQ ID NO: 742786 - DNA, 15 bp, Homo sapiens
ggcgtgcaccaccac

SEQ ID NO: 742787 - DNA, 15 bp, Homo sapiens
gcgtgcaccaccacg

SEQ ID NO: 742788 - DNA, 15 bp, Homo sapiens
cgtgcaccaccacgc

SEQ ID NO: 742789 - DNA, 15 bp, Homo sapiens
gtgcaccaccacgcc

SEQ ID NO: 742790 - DNA, 15 bp, Homo sapiens
tgcaccaccacgccc

SEQ ID NO: 742791 - DNA, 15 bp, Homo sapiens
gcaccaccacgcccg

SEQ ID NO: 742792 - DNA, 15 bp, Homo sapiens
caccaccacgcccgg

SEQ ID NO: 742793 - DNA, 15 bp, Homo sapiens
accaccacgcccggc

SEQ ID NO: 742794 - DNA, 15 bp, Homo sapiens
ccaccacgcccggct

SEQ ID NO: 742795 - DNA, 15 bp, Homo sapiens
caccacgcccggcta

SEQ ID NO: 742796 - DNA, 15 bp, Homo sapiens
accacgcccggctaa

SEQ ID NO: 742797 - DNA, 15 bp, Homo sapiens
ccacgcccggctaat

SEQ ID NO: 742798 - DNA, 15 bp, Homo sapiens
cacgcccggctaatt

SEQ ID NO: 742799 - DNA, 15 bp, Homo sapiens
acgcccggctaattt

SEQ ID NO: 742800 - DNA, 15 bp, Homo sapiens
cgcccggctaatttg

SEQ ID NO: 742801 - DNA, 15 bp, Homo sapiens
gcccggctaatttgt

SEQ ID NO: 742802 - DNA, 15 bp, Homo sapiens
cccggctaatttgtg

SEQ ID NO: 742803 - DNA, 15 bp, Homo sapiens
ccggctaatttgtgt

SEQ ID NO: 742804 - DNA, 15 bp, Homo sapiens
cggctaatttgtgta

SEQ ID NO: 742805 - DNA, 15 bp, Homo sapiens
ggctaatttgtgtac

SEQ ID NO: 742806 - DNA, 15 bp, Homo sapiens
gctaatttgtgtact

SEQ ID NO: 742807 - DNA, 15 bp, Homo sapiens
ctaatttgtgtactt

SEQ ID NO: 742808 - DNA, 15 bp, Homo sapiens
taatttgtgtacttt

SEQ ID NO: 742809 - DNA, 15 bp, Homo sapiens
aatttgtgtactttt

SEQ ID NO: 742810 - DNA, 15 bp, Homo sapiens
atttgtgtacttttt

SEQ ID NO: 742811 - DNA, 15 bp, Homo sapiens
tttgtgtactttttt

SEQ ID NO: 742812 - DNA, 15 bp, Homo sapiens
ttgtgtacttttttg

SEQ ID NO: 742813 - DNA, 15 bp, Homo sapiens
tgtgtacttttttgt

SEQ ID NO: 742814 - DNA, 15 bp, Homo sapiens
gtgtacttttttgta

SEQ ID NO: 742815 - DNA, 15 bp, Homo sapiens
tgtacttttttgtag

SEQ ID NO: 742816 - DNA, 15 bp, Homo sapiens
gtacttttttgtaga

SEQ ID NO: 742817 - DNA, 15 bp, Homo sapiens
tacttttttgtagag

SEQ ID NO: 742818 - DNA, 15 bp, Homo sapiens
acttttttgtagaga

SEQ ID NO: 742819 - DNA, 15 bp, Homo sapiens
cttttttgtagagag

SEQ ID NO: 742820 - DNA, 15 bp, Homo sapiens
ttttttgtagagaga

SEQ ID NO: 742821 - DNA, 15 bp, Homo sapiens
tttttgtagagagag

SEQ ID NO: 742822 - DNA, 15 bp, Homo sapiens
ttttgtagagagagg

SEQ ID NO: 742823 - DNA, 15 bp, Homo sapiens
tttgtagagagaggg

SEQ ID NO: 742824 - DNA, 15 bp, Homo sapiens
ttgtagagagagggt

SEQ ID NO: 742825 - DNA, 15 bp, Homo sapiens
tgtagagagagggtt

SEQ ID NO: 742826 - DNA, 15 bp, Homo sapiens
gtagagagagggttt

SEQ ID NO: 742827 - DNA, 15 bp, Homo sapiens
tagagagagggtttt

SEQ ID NO: 742828 - DNA, 15 bp, Homo sapiens
agagagagggttttg

SEQ ID NO: 742829 - DNA, 15 bp, Homo sapiens
gagagagggttttgc

SEQ ID NO: 742830 - DNA, 15 bp, Homo sapiens
agagagggttttgcc

SEQ ID NO: 742831 - DNA, 15 bp, Homo sapiens
gagagggttttgcca

SEQ ID NO: 742832 - DNA, 15 bp, Homo sapiens
agagggttttgccat

SEQ ID NO: 742833 - DNA, 15 bp, Homo sapiens
gagggttttgccatg

SEQ ID NO: 742834 - DNA, 15 bp, Homo sapiens
agggttttgccatgt

SEQ ID NO: 742835 - DNA, 15 bp, Homo sapiens
gggttttgccatgtt

SEQ ID NO: 742836 - DNA, 15 bp, Homo sapiens
ggttttgccatgttg

SEQ ID NO: 742837 - DNA, 15 bp, Homo sapiens
gttttgccatgttgg

SEQ ID NO: 742838 - DNA, 15 bp, Homo sapiens
ttttgccatgttggt

SEQ ID NO: 742839 - DNA, 15 bp, Homo sapiens
tttgccatgttggtc

SEQ ID NO: 742840 - DNA, 15 bp, Homo sapiens
ttgccatgttggtca

SEQ ID NO: 742841 - DNA, 15 bp, Homo sapiens
tgccatgttggtcag

SEQ ID NO: 742842 - DNA, 15 bp, Homo sapiens
gccatgttggtcagg

SEQ ID NO: 742843 - DNA, 15 bp, Homo sapiens
ggtcaggctggtctt

SEQ ID NO: 742844 - DNA, 15 bp, Homo sapiens
gtcaggctggtcttg

SEQ ID NO: 742845 - DNA, 15 bp, Homo sapiens
tcaggctggtcttga

SEQ ID NO: 742846 - DNA, 15 bp, Homo sapiens
gaactcctgacctca

SEQ ID NO: 742847 - DNA, 15 bp, Homo sapiens
aactcctgacctcag

SEQ ID NO: 742848 - DNA, 15 bp, Homo sapiens
actcctgacctcagg

SEQ ID NO: 742849 - DNA, 15 bp, Homo sapiens
ctcctgacctcaggt

SEQ ID NO: 742850 - DNA, 15 bp, Homo sapiens
tcctgacctcaggtg

SEQ ID NO: 742851 - DNA, 15 bp, Homo sapiens
cctgacctcaggtga

SEQ ID NO: 742852 - DNA, 15 bp, Homo sapiens
ctgacctcaggtgat

SEQ ID NO: 742853 - DNA, 15 bp, Homo sapiens
acctcaggtgatccg

SEQ ID NO: 742854 - DNA, 15 bp, Homo sapiens
cctcaggtgatccgc

SEQ ID NO: 742855 - DNA, 15 bp, Homo sapiens
ctcaggtgatccgcc

SEQ ID NO: 742856 - DNA, 15 bp, Homo sapiens
tcaggtgatccgccc

SEQ ID NO: 742857 - DNA, 15 bp, Homo sapiens
caggtgatccgcccg

SEQ ID NO: 742858 - DNA, 15 bp, Homo sapiens
aggtgatccgcccgc

SEQ ID NO: 742859 - DNA, 15 bp, Homo sapiens
tgatccgcccgcctt

SEQ ID NO: 742860 - DNA, 15 bp, Homo sapiens
gatccgcccgccttg

SEQ ID NO: 742861 - DNA, 15 bp, Homo sapiens
atccgcccgccttgg

SEQ ID NO: 742862 - DNA, 15 bp, Homo sapiens
tccgcccgccttggc

SEQ ID NO: 742863 - DNA, 15 bp, Homo sapiens
ccgcccgccttggcc

SEQ ID NO: 742864 - DNA, 15 bp, Homo sapiens
cgcccgccttggcct

SEQ ID NO: 742865 - DNA, 15 bp, Homo sapiens
tggcctcccaaagtg

SEQ ID NO: 742866 - DNA, 15 bp, Homo sapiens
aaagtgctgggattc

SEQ ID NO: 742867 - DNA, 15 bp, Homo sapiens
aagtgctgggattcc

SEQ ID NO: 742868 - DNA, 15 bp, Homo sapiens
agtgctgggattcca

SEQ ID NO: 742869 - DNA, 15 bp, Homo sapiens
gtgctgggattccag

SEQ ID NO: 742870 - DNA, 15 bp, Homo sapiens
tgctgggattccagg

SEQ ID NO: 742871 - DNA, 15 bp, Homo sapiens
gctgggattccaggc

SEQ ID NO: 742872 - DNA, 15 bp, Homo sapiens
ctgggattccaggca

SEQ ID NO: 742873 - DNA, 15 bp, Homo sapiens
tgggattccaggcat

SEQ ID NO: 742874 - DNA, 15 bp, Homo sapiens
gggattccaggcatg

SEQ ID NO: 742875 - DNA, 15 bp, Homo sapiens
ggattccaggcatga

SEQ ID NO: 742876 - DNA, 15 bp, Homo sapiens
gattccaggcatgag

SEQ ID NO: 742877 - DNA, 15 bp, Homo sapiens
attccaggcatgagc

SEQ ID NO: 742878 - DNA, 15 bp, Homo sapiens
ttccaggcatgagcc

SEQ ID NO: 742879 - DNA, 15 bp, Homo sapiens
tccaggcatgagcca

SEQ ID NO: 742880 - DNA, 15 bp, Homo sapiens
ccaggcatgagccac

SEQ ID NO: 742881 - DNA, 15 bp, Homo sapiens
caggcatgagccact

SEQ ID NO: 742882 - DNA, 15 bp, Homo sapiens
aggcatgagccactg

SEQ ID NO: 742883 - DNA, 15 bp, Homo sapiens
ggcatgagccactgc

SEQ ID NO: 742884 - DNA, 15 bp, Homo sapiens
gcatgagccactgcg

SEQ ID NO: 742885 - DNA, 15 bp, Homo sapiens
catgagccactgcgc

SEQ ID NO: 742886 - DNA, 15 bp, Homo sapiens
atgagccactgcgcc

SEQ ID NO: 742887 - DNA, 15 bp, Homo sapiens
gcctttagccttttt

SEQ ID NO: 742888 - DNA, 15 bp, Homo sapiens
cctttagccttttta

SEQ ID NO: 742889 - DNA, 15 bp, Homo sapiens
ctttagcctttttac

SEQ ID NO: 742890 - DNA, 15 bp, Homo sapiens
tttagcctttttacc

SEQ ID NO: 742891 - DNA, 15 bp, Homo sapiens
ttagcctttttaccc

SEQ ID NO: 742892 - DNA, 15 bp, Homo sapiens
tagcctttttaccca

SEQ ID NO: 742893 - DNA, 15 bp, Homo sapiens
agcctttttacccac

SEQ ID NO: 742894 - DNA, 15 bp, Homo sapiens
gcctttttacccacc

SEQ ID NO: 742895 - DNA, 15 bp, Homo sapiens
cctttttacccaccc

SEQ ID NO: 742896 - DNA, 15 bp, Homo sapiens
ctttttacccacccc

SEQ ID NO: 742897 - DNA, 15 bp, Homo sapiens
tttttacccaccccc

SEQ ID NO: 742898 - DNA, 15 bp, Homo sapiens
ttttacccacccccg

SEQ ID NO: 742899 - DNA, 15 bp, Homo sapiens
tttacccacccccgg

SEQ ID NO: 742900 - DNA, 15 bp, Homo sapiens
ttacccacccccggt

SEQ ID NO: 742901 - DNA, 15 bp, Homo sapiens
tacccacccccggta

SEQ ID NO: 742902 - DNA, 15 bp, Homo sapiens
acccacccccggtac

SEQ ID NO: 742903 - DNA, 15 bp, Homo sapiens
cccacccccggtact

SEQ ID NO: 742904 - DNA, 15 bp, Homo sapiens
ccacccccggtactg

SEQ ID NO: 742905 - DNA, 15 bp, Homo sapiens
cacccccggtactgc

SEQ ID NO: 742906 - DNA, 15 bp, Homo sapiens
acccccggtactgcc

SEQ ID NO: 742907 - DNA, 15 bp, Homo sapiens
cccccggtactgcct

SEQ ID NO: 742908 - DNA, 15 bp, Homo sapiens
ccccggtactgcctt

SEQ ID NO: 742909 - DNA, 15 bp, Homo sapiens
cccggtactgccttc

SEQ ID NO: 742910 - DNA, 15 bp, Homo sapiens
ccggtactgccttcc

SEQ ID NO: 742911 - DNA, 15 bp, Homo sapiens
cggtactgccttccc

SEQ ID NO: 742912 - DNA, 15 bp, Homo sapiens
ggtactgccttcccc

SEQ ID NO: 742913 - DNA, 15 bp, Homo sapiens
gtactgccttcccct

SEQ ID NO: 742914 - DNA, 15 bp, Homo sapiens
tactgccttccccta

SEQ ID NO: 742915 - DNA, 15 bp, Homo sapiens
actgccttcccctaa

SEQ ID NO: 742916 - DNA, 15 bp, Homo sapiens
ctgccttcccctaac

SEQ ID NO: 742917 - DNA, 15 bp, Homo sapiens
tgccttcccctaaca

SEQ ID NO: 742918 - DNA, 15 bp, Homo sapiens
gccttcccctaacag

SEQ ID NO: 742919 - DNA, 15 bp, Homo sapiens
ccttcccctaacaga

SEQ ID NO: 742920 - DNA, 15 bp, Homo sapiens
cttcccctaacagag

SEQ ID NO: 742921 - DNA, 15 bp, Homo sapiens
ttcccctaacagagg

SEQ ID NO: 742922 - DNA, 15 bp, Homo sapiens
tcccctaacagaggc

SEQ ID NO: 742923 - DNA, 15 bp, Homo sapiens
cccctaacagaggca

SEQ ID NO: 742924 - DNA, 15 bp, Homo sapiens
ccctaacagaggcac

SEQ ID NO: 742925 - DNA, 15 bp, Homo sapiens
cctaacagaggcacc

SEQ ID NO: 742926 - DNA, 15 bp, Homo sapiens
ctaacagaggcacct

SEQ ID NO: 742927 - DNA, 15 bp, Homo sapiens
taacagaggcacctg

SEQ ID NO: 742928 - DNA, 15 bp, Homo sapiens
aacagaggcacctgg

SEQ ID NO: 742929 - DNA, 15 bp, Homo sapiens
acagaggcacctggc

SEQ ID NO: 742930 - DNA, 15 bp, Homo sapiens
cagaggcacctggca

SEQ ID NO: 742931 - DNA, 15 bp, Homo sapiens
agaggcacctggcac

SEQ ID NO: 742932 - DNA, 15 bp, Homo sapiens
gaggcacctggcact

SEQ ID NO: 742933 - DNA, 15 bp, Homo sapiens
aggcacctggcactt

SEQ ID NO: 742934 - DNA, 15 bp, Homo sapiens
ggcacctggcactta

SEQ ID NO: 742935 - DNA, 15 bp, Homo sapiens
gcacctggcacttag

SEQ ID NO: 742936 - DNA, 15 bp, Homo sapiens
cacctggcacttagc

SEQ ID NO: 742937 - DNA, 15 bp, Homo sapiens
acctggcacttagcc

SEQ ID NO: 742938 - DNA, 15 bp, Homo sapiens
cctggcacttagccg

SEQ ID NO: 742939 - DNA, 15 bp, Homo sapiens
ctggcacttagccgc

SEQ ID NO: 742940 - DNA, 15 bp, Homo sapiens
tggcacttagccgcc

SEQ ID NO: 742941 - DNA, 15 bp, Homo sapiens
ggcacttagccgccg

SEQ ID NO: 742942 - DNA, 15 bp, Homo sapiens
gcacttagccgccgg

SEQ ID NO: 742943 - DNA, 15 bp, Homo sapiens
cacttagccgccggg

SEQ ID NO: 742944 - DNA, 15 bp, Homo sapiens
acttagccgccggga

SEQ ID NO: 742945 - DNA, 15 bp, Homo sapiens
cttagccgccgggaa

SEQ ID NO: 742946 - DNA, 15 bp, Homo sapiens
ttagccgccgggaac

SEQ ID NO: 742947 - DNA, 15 bp, Homo sapiens
tagccgccgggaact

SEQ ID NO: 742948 - DNA, 15 bp, Homo sapiens
agccgccgggaactc

SEQ ID NO: 742949 - DNA, 15 bp, Homo sapiens
gccgccgggaactca

SEQ ID NO: 742950 - DNA, 15 bp, Homo sapiens
ccgccgggaactcag

SEQ ID NO: 742951 - DNA, 15 bp, Homo sapiens
cgccgggaactcagg

SEQ ID NO: 742952 - DNA, 15 bp, Homo sapiens
gccgggaactcaggg

SEQ ID NO: 742953 - DNA, 15 bp, Homo sapiens
ccgggaactcagggc

SEQ ID NO: 742954 - DNA, 15 bp, Homo sapiens
cgggaactcagggct

SEQ ID NO: 742955 - DNA, 15 bp, Homo sapiens
gggaactcagggctg

SEQ ID NO: 742956 - DNA, 15 bp, Homo sapiens
ggaactcagggctgc

SEQ ID NO: 742957 - DNA, 15 bp, Homo sapiens
gaactcagggctgcc

SEQ ID NO: 742958 - DNA, 15 bp, Homo sapiens
aactcagggctgcct

SEQ ID NO: 742959 - DNA, 15 bp, Homo sapiens
actcagggctgcctt

SEQ ID NO: 742960 - DNA, 15 bp, Homo sapiens
ctcagggctgccttc

SEQ ID NO: 742961 - DNA, 15 bp, Homo sapiens
tcagggctgccttcg

SEQ ID NO: 742962 - DNA, 15 bp, Homo sapiens
cagggctgccttcgt

SEQ ID NO: 742963 - DNA, 15 bp, Homo sapiens
agggctgccttcgtg

SEQ ID NO: 742964 - DNA, 15 bp, Homo sapiens
gggctgccttcgtgt

SEQ ID NO: 742965 - DNA, 15 bp, Homo sapiens
ggctgccttcgtgtt

SEQ ID NO: 742966 - DNA, 15 bp, Homo sapiens
gctgccttcgtgttt

SEQ ID NO: 742967 - DNA, 15 bp, Homo sapiens
ctgccttcgtgtttt

SEQ ID NO: 742968 - DNA, 15 bp, Homo sapiens
tgccttcgtgttttc

SEQ ID NO: 742969 - DNA, 15 bp, Homo sapiens
gccttcgtgttttca

SEQ ID NO: 742970 - DNA, 15 bp, Homo sapiens
ccttcgtgttttcaa

SEQ ID NO: 742971 - DNA, 15 bp, Homo sapiens
cttcgtgttttcaag

SEQ ID NO: 742972 - DNA, 15 bp, Homo sapiens
ttcgtgttttcaagc

SEQ ID NO: 742973 - DNA, 15 bp, Homo sapiens
tcgtgttttcaagcc

SEQ ID NO: 742974 - DNA, 15 bp, Homo sapiens
cgtgttttcaagcca

SEQ ID NO: 742975 - DNA, 15 bp, Homo sapiens
gtgttttcaagccac

SEQ ID NO: 742976 - DNA, 15 bp, Homo sapiens
tgttttcaagccacc

SEQ ID NO: 742977 - DNA, 15 bp, Homo sapiens
gttttcaagccaccg

SEQ ID NO: 742978 - DNA, 15 bp, Homo sapiens
ttttcaagccaccgt

SEQ ID NO: 742979 - DNA, 15 bp, Homo sapiens
tttcaagccaccgtg

SEQ ID NO: 742980 - DNA, 15 bp, Homo sapiens
ttcaagccaccgtgt

SEQ ID NO: 742981 - DNA, 15 bp, Homo sapiens
tcaagccaccgtgtc

SEQ ID NO: 742982 - DNA, 15 bp, Homo sapiens
caagccaccgtgtcc

SEQ ID NO: 742983 - DNA, 15 bp, Homo sapiens
aagccaccgtgtccc

SEQ ID NO: 742984 - DNA, 15 bp, Homo sapiens
agccaccgtgtcccc

SEQ ID NO: 742985 - DNA, 15 bp, Homo sapiens
gccaccgtgtccccc

SEQ ID NO: 742986 - DNA, 15 bp, Homo sapiens
ccaccgtgtccccct

SEQ ID NO: 742987 - DNA, 15 bp, Homo sapiens
caccgtgtccccctc

SEQ ID NO: 742988 - DNA, 15 bp, Homo sapiens
accgtgtccccctca

SEQ ID NO: 742989 - DNA, 15 bp, Homo sapiens
ccgtgtccccctcat

SEQ ID NO: 742990 - DNA, 15 bp, Homo sapiens
cgtgtccccctcatc

SEQ ID NO: 742991 - DNA, 15 bp, Homo sapiens
gtgtccccctcatcc

SEQ ID NO: 742992 - DNA, 15 bp, Homo sapiens
tgtccccctcatcct

SEQ ID NO: 742993 - DNA, 15 bp, Homo sapiens
gtccccctcatcctg

SEQ ID NO: 742994 - DNA, 15 bp, Homo sapiens
tccccctcatcctgc

SEQ ID NO: 742995 - DNA, 15 bp, Homo sapiens
ccccctcatcctgca

SEQ ID NO: 742996 - DNA, 15 bp, Homo sapiens
cccctcatcctgcag

SEQ ID NO: 742997 - DNA, 15 bp, Homo sapiens
ccctcatcctgcagg

SEQ ID NO: 742998 - DNA, 15 bp, Homo sapiens
cctcatcctgcagga

SEQ ID NO: 742999 - DNA, 15 bp, Homo sapiens
ctcatcctgcaggag

SEQ ID NO: 743000 - DNA, 15 bp, Homo sapiens
tcatcctgcaggagt

SEQ ID NO: 743001 - DNA, 15 bp, Homo sapiens
catcctgcaggagtt

SEQ ID NO: 743002 - DNA, 15 bp, Homo sapiens
atcctgcaggagttc

SEQ ID NO: 743003 - DNA, 15 bp, Homo sapiens
tcctgcaggagttct

SEQ ID NO: 743004 - DNA, 15 bp, Homo sapiens
cctgcaggagttctg

SEQ ID NO: 743005 - DNA, 15 bp, Homo sapiens
ctgcaggagttctgt

SEQ ID NO: 743006 - DNA, 15 bp, Homo sapiens
tgcaggagttctgta

SEQ ID NO: 743007 - DNA, 15 bp, Homo sapiens
gcaggagttctgtaa

SEQ ID NO: 743008 - DNA, 15 bp, Homo sapiens
caggagttctgtaac

SEQ ID NO: 743009 - DNA, 15 bp, Homo sapiens
aggagttctgtaact

SEQ ID NO: 743010 - DNA, 15 bp, Homo sapiens
ggagttctgtaactt

SEQ ID NO: 743011 - DNA, 15 bp, Homo sapiens
gagttctgtaacttt

SEQ ID NO: 743012 - DNA, 15 bp, Homo sapiens
agttctgtaactttc

SEQ ID NO: 743013 - DNA, 15 bp, Homo sapiens
gttctgtaactttcc

SEQ ID NO: 743014 - DNA, 15 bp, Homo sapiens
ttctgtaactttcct

SEQ ID NO: 743015 - DNA, 15 bp, Homo sapiens
tctgtaactttcctg

SEQ ID NO: 743016 - DNA, 15 bp, Homo sapiens
ctgtaactttcctga

SEQ ID NO: 743017 - DNA, 15 bp, Homo sapiens
tgtaactttcctgag

SEQ ID NO: 743018 - DNA, 15 bp, Homo sapiens
gtaactttcctgaga

SEQ ID NO: 743019 - DNA, 15 bp, Homo sapiens
taactttcctgagac

SEQ ID NO: 743020 - DNA, 15 bp, Homo sapiens
aactttcctgagact

SEQ ID NO: 743021 - DNA, 15 bp, Homo sapiens
actttcctgagacta

SEQ ID NO: 743022 - DNA, 15 bp, Homo sapiens
ctttcctgagactat

SEQ ID NO: 743023 - DNA, 15 bp, Homo sapiens
tttcctgagactatt

SEQ ID NO: 743024 - DNA, 15 bp, Homo sapiens
ttcctgagactattt

SEQ ID NO: 743025 - DNA, 15 bp, Homo sapiens
tcctgagactatttc

SEQ ID NO: 743026 - DNA, 15 bp, Homo sapiens
cctgagactatttct

SEQ ID NO: 743027 - DNA, 15 bp, Homo sapiens
ctgagactatttcta

SEQ ID NO: 743028 - DNA, 15 bp, Homo sapiens
tgagactatttctag

SEQ ID NO: 743029 - DNA, 15 bp, Homo sapiens
gagactatttctagg

SEQ ID NO: 743030 - DNA, 15 bp, Homo sapiens
agactatttctaggg

SEQ ID NO: 743031 - DNA, 15 bp, Homo sapiens
gactatttctagggt

SEQ ID NO: 743032 - DNA, 15 bp, Homo sapiens
actatttctagggtg

SEQ ID NO: 743033 - DNA, 15 bp, Homo sapiens
ctatttctagggtgc

SEQ ID NO: 743034 - DNA, 15 bp, Homo sapiens
tatttctagggtgct

SEQ ID NO: 743035 - DNA, 15 bp, Homo sapiens
atttctagggtgcta

SEQ ID NO: 743036 - DNA, 15 bp, Homo sapiens
tttctagggtgctag

SEQ ID NO: 743037 - DNA, 15 bp, Homo sapiens
ttctagggtgctagt

SEQ ID NO: 743038 - DNA, 15 bp, Homo sapiens
tctagggtgctagtg

SEQ ID NO: 743039 - DNA, 15 bp, Homo sapiens
ctagggtgctagtga

SEQ ID NO: 743040 - DNA, 15 bp, Homo sapiens
tagggtgctagtgag

SEQ ID NO: 743041 - DNA, 15 bp, Homo sapiens
agggtgctagtgagg

SEQ ID NO: 743042 - DNA, 15 bp, Homo sapiens
gggtgctagtgagga

SEQ ID NO: 743043 - DNA, 15 bp, Homo sapiens
ggtgctagtgaggag

SEQ ID NO: 743044 - DNA, 15 bp, Homo sapiens
gtgctagtgaggagt

SEQ ID NO: 743045 - DNA, 15 bp, Homo sapiens
tgctagtgaggagtg

SEQ ID NO: 743046 - DNA, 15 bp, Homo sapiens
gctagtgaggagtgg

SEQ ID NO: 743047 - DNA, 15 bp, Homo sapiens
ctagtgaggagtgga

SEQ ID NO: 743048 - DNA, 15 bp, Homo sapiens
tagtgaggagtggag

SEQ ID NO: 743049 - DNA, 15 bp, Homo sapiens
agtgaggagtggagg

SEQ ID NO: 743050 - DNA, 15 bp, Homo sapiens
gtgaggagtggaggg

SEQ ID NO: 743051 - DNA, 15 bp, Homo sapiens
tgaggagtggagggg

SEQ ID NO: 743052 - DNA, 15 bp, Homo sapiens
gaggagtggagggga

SEQ ID NO: 743053 - DNA, 15 bp, Homo sapiens
aggagtggaggggaa

SEQ ID NO: 743054 - DNA, 15 bp, Homo sapiens
ggagtggaggggaaa

SEQ ID NO: 743055 - DNA, 15 bp, Homo sapiens
gagtggaggggaaat

SEQ ID NO: 743056 - DNA, 15 bp, Homo sapiens
agtggaggggaaatg

SEQ ID NO: 743057 - DNA, 15 bp, Homo sapiens
gtggaggggaaatgg

SEQ ID NO: 743058 - DNA, 15 bp, Homo sapiens
tggaggggaaatggg

SEQ ID NO: 743059 - DNA, 15 bp, Homo sapiens
ggaggggaaatgggt

SEQ ID NO: 743060 - DNA, 15 bp, Homo sapiens
gaggggaaatgggtc

SEQ ID NO: 743061 - DNA, 15 bp, Homo sapiens
aggggaaatgggtct

SEQ ID NO: 743062 - DNA, 15 bp, Homo sapiens
ggggaaatgggtctc

SEQ ID NO: 743063 - DNA, 15 bp, Homo sapiens
gggaaatgggtctcg

SEQ ID NO: 743064 - DNA, 15 bp, Homo sapiens
ggaaatgggtctcgg

SEQ ID NO: 743065 - DNA, 15 bp, Homo sapiens
gaaatgggtctcgga

SEQ ID NO: 743066 - DNA, 15 bp, Homo sapiens
aaatgggtctcggag

SEQ ID NO: 743067 - DNA, 15 bp, Homo sapiens
aatgggtctcggagc

SEQ ID NO: 743068 - DNA, 15 bp, Homo sapiens
atgggtctcggagct

SEQ ID NO: 743069 - DNA, 15 bp, Homo sapiens
tgggtctcggagctg

SEQ ID NO: 743070 - DNA, 15 bp, Homo sapiens
gggtctcggagctgc

SEQ ID NO: 743071 - DNA, 15 bp, Homo sapiens
ggtctcggagctgcc

SEQ ID NO: 743072 - DNA, 15 bp, Homo sapiens
gtctcggagctgccc

SEQ ID NO: 743073 - DNA, 15 bp, Homo sapiens
tctcggagctgccct

SEQ ID NO: 743074 - DNA, 15 bp, Homo sapiens
ctcggagctgccctg

SEQ ID NO: 743075 - DNA, 15 bp, Homo sapiens
tcggagctgccctgg

SEQ ID NO: 743076 - DNA, 15 bp, Homo sapiens
cggagctgccctggt

SEQ ID NO: 743077 - DNA, 15 bp, Homo sapiens
ggagctgccctggta

SEQ ID NO: 743078 - DNA, 15 bp, Homo sapiens
gagctgccctggtac

SEQ ID NO: 743079 - DNA, 15 bp, Homo sapiens
agctgccctggtaca

SEQ ID NO: 743080 - DNA, 15 bp, Homo sapiens
gctgccctggtacag

SEQ ID NO: 743081 - DNA, 15 bp, Homo sapiens
ctgccctggtacagc

SEQ ID NO: 743082 - DNA, 15 bp, Homo sapiens
tgccctggtacagct

SEQ ID NO: 743083 - DNA, 15 bp, Homo sapiens
gccctggtacagctg

SEQ ID NO: 743084 - DNA, 15 bp, Homo sapiens
ccctggtacagctgt

SEQ ID NO: 743085 - DNA, 15 bp, Homo sapiens
cctggtacagctgtg

SEQ ID NO: 743086 - DNA, 15 bp, Homo sapiens
ctggtacagctgtgt

SEQ ID NO: 743087 - DNA, 15 bp, Homo sapiens
tggtacagctgtgtc

SEQ ID NO: 743088 - DNA, 15 bp, Homo sapiens
ggtacagctgtgtcc

SEQ ID NO: 743089 - DNA, 15 bp, Homo sapiens
gtacagctgtgtcca

SEQ ID NO: 743090 - DNA, 15 bp, Homo sapiens
tacagctgtgtccag

SEQ ID NO: 743091 - DNA, 15 bp, Homo sapiens
acagctgtgtccagt

SEQ ID NO: 743092 - DNA, 15 bp, Homo sapiens
cagctgtgtccagta

SEQ ID NO: 743093 - DNA, 15 bp, Homo sapiens
agctgtgtccagtaa

SEQ ID NO: 743094 - DNA, 15 bp, Homo sapiens
gctgtgtccagtaac

SEQ ID NO: 743095 - DNA, 15 bp, Homo sapiens
ctgtgtccagtaacg

SEQ ID NO: 743096 - DNA, 15 bp, Homo sapiens
tgtgtccagtaacgg

SEQ ID NO: 743097 - DNA, 15 bp, Homo sapiens
gtgtccagtaacggt

SEQ ID NO: 743098 - DNA, 15 bp, Homo sapiens
tgtccagtaacggtg

SEQ ID NO: 743099 - DNA, 15 bp, Homo sapiens
gtccagtaacggtgc

SEQ ID NO: 743100 - DNA, 15 bp, Homo sapiens
tccagtaacggtgct

SEQ ID NO: 743101 - DNA, 15 bp, Homo sapiens
ccagtaacggtgctg

SEQ ID NO: 743102 - DNA, 15 bp, Homo sapiens
cagtaacggtgctgt

SEQ ID NO: 743103 - DNA, 15 bp, Homo sapiens
agtaacggtgctgtg

SEQ ID NO: 743104 - DNA, 15 bp, Homo sapiens
gtaacggtgctgtgc

SEQ ID NO: 743105 - DNA, 15 bp, Homo sapiens
taacggtgctgtgct

SEQ ID NO: 743106 - DNA, 15 bp, Homo sapiens
aacggtgctgtgctt

SEQ ID NO: 743107 - DNA, 15 bp, Homo sapiens
acggtgctgtgcttt

SEQ ID NO: 743108 - DNA, 15 bp, Homo sapiens
cggtgctgtgctttg

SEQ ID NO: 743109 - DNA, 15 bp, Homo sapiens
ggtgctgtgctttgg

SEQ ID NO: 743110 - DNA, 15 bp, Homo sapiens
gtgctgtgctttgga

SEQ ID NO: 743111 - DNA, 15 bp, Homo sapiens
tgctgtgctttggag

SEQ ID NO: 743112 - DNA, 15 bp, Homo sapiens
gctgtgctttggagg

SEQ ID NO: 743113 - DNA, 15 bp, Homo sapiens
ctgtgctttggagga

SEQ ID NO: 743114 - DNA, 15 bp, Homo sapiens
tgtgctttggaggaa

SEQ ID NO: 743115 - DNA, 15 bp, Homo sapiens
gtgctttggaggaag

SEQ ID NO: 743116 - DNA, 15 bp, Homo sapiens
tgctttggaggaagg

SEQ ID NO: 743117 - DNA, 15 bp, Homo sapiens
gctttggaggaagga

SEQ ID NO: 743118 - DNA, 15 bp, Homo sapiens
ctttggaggaaggag

SEQ ID NO: 743119 - DNA, 15 bp, Homo sapiens
tttggaggaaggagt

SEQ ID NO: 743120 - DNA, 15 bp, Homo sapiens
ttggaggaaggagtg

SEQ ID NO: 743121 - DNA, 15 bp, Homo sapiens
tggaggaaggagtga

SEQ ID NO: 743122 - DNA, 15 bp, Homo sapiens
ggaggaaggagtgat

SEQ ID NO: 743123 - DNA, 15 bp, Homo sapiens
gaggaaggagtgata

SEQ ID NO: 743124 - DNA, 15 bp, Homo sapiens
aggaaggagtgatat

SEQ ID NO: 743125 - DNA, 15 bp, Homo sapiens
ggaaggagtgatatg

SEQ ID NO: 743126 - DNA, 15 bp, Homo sapiens
gaaggagtgatatgg

SEQ ID NO: 743127 - DNA, 15 bp, Homo sapiens
aaggagtgatatggt

SEQ ID NO: 743128 - DNA, 15 bp, Homo sapiens
aggagtgatatggtt

SEQ ID NO: 743129 - DNA, 15 bp, Homo sapiens
ggagtgatatggttc

SEQ ID NO: 743130 - DNA, 15 bp, Homo sapiens
gagtgatatggttca

SEQ ID NO: 743131 - DNA, 15 bp, Homo sapiens
agtgatatggttcac

SEQ ID NO: 743132 - DNA, 15 bp, Homo sapiens
gtgatatggttcacc

SEQ ID NO: 743133 - DNA, 15 bp, Homo sapiens
tgatatggttcacct

SEQ ID NO: 743134 - DNA, 15 bp, Homo sapiens
gatatggttcaccta

SEQ ID NO: 743135 - DNA, 15 bp, Homo sapiens
atatggttcacctag

SEQ ID NO: 743136 - DNA, 15 bp, Homo sapiens
tatggttcacctaga

SEQ ID NO: 743137 - DNA, 15 bp, Homo sapiens
atggttcacctagaa

SEQ ID NO: 743138 - DNA, 15 bp, Homo sapiens
tggttcacctagaag

SEQ ID NO: 743139 - DNA, 15 bp, Homo sapiens
ggttcacctagaagc

SEQ ID NO: 743140 - DNA, 15 bp, Homo sapiens
gttcacctagaagca

SEQ ID NO: 743141 - DNA, 15 bp, Homo sapiens
ttcacctagaagcat

SEQ ID NO: 743142 - DNA, 15 bp, Homo sapiens
tcacctagaagcatc

SEQ ID NO: 743143 - DNA, 15 bp, Homo sapiens
cacctagaagcatct

SEQ ID NO: 743144 - DNA, 15 bp, Homo sapiens
acctagaagcatctc

SEQ ID NO: 743145 - DNA, 15 bp, Homo sapiens
cctagaagcatctcc

SEQ ID NO: 743146 - DNA, 15 bp, Homo sapiens
ctagaagcatctccc

SEQ ID NO: 743147 - DNA, 15 bp, Homo sapiens
tagaagcatctccca

SEQ ID NO: 743148 - DNA, 15 bp, Homo sapiens
agaagcatctcccag

SEQ ID NO: 743149 - DNA, 15 bp, Homo sapiens
gaagcatctcccaga

SEQ ID NO: 743150 - DNA, 15 bp, Homo sapiens
aagcatctcccagag

SEQ ID NO: 743151 - DNA, 15 bp, Homo sapiens
agcatctcccagaga

SEQ ID NO: 743152 - DNA, 15 bp, Homo sapiens
gcatctcccagagag

SEQ ID NO: 743153 - DNA, 15 bp, Homo sapiens
catctcccagagagg

SEQ ID NO: 743154 - DNA, 15 bp, Homo sapiens
atctcccagagaggg

SEQ ID NO: 743155 - DNA, 15 bp, Homo sapiens
tctcccagagagggg

SEQ ID NO: 743156 - DNA, 15 bp, Homo sapiens
ctcccagagaggggg

SEQ ID NO: 743157 - DNA, 15 bp, Homo sapiens
tcccagagagggggc

SEQ ID NO: 743158 - DNA, 15 bp, Homo sapiens
cccagagagggggct

SEQ ID NO: 743159 - DNA, 15 bp, Homo sapiens
ccagagagggggctt

SEQ ID NO: 743160 - DNA, 15 bp, Homo sapiens
cagagagggggctta

SEQ ID NO: 743161 - DNA, 15 bp, Homo sapiens
agagagggggcttat

SEQ ID NO: 743162 - DNA, 15 bp, Homo sapiens
gagagggggcttatc

SEQ ID NO: 743163 - DNA, 15 bp, Homo sapiens
agagggggcttatca

SEQ ID NO: 743164 - DNA, 15 bp, Homo sapiens
gagggggcttatcac

SEQ ID NO: 743165 - DNA, 15 bp, Homo sapiens
agggggcttatcaca

SEQ ID NO: 743166 - DNA, 15 bp, Homo sapiens
gggggcttatcacag

SEQ ID NO: 743167 - DNA, 15 bp, Homo sapiens
ggggcttatcacagc

SEQ ID NO: 743168 - DNA, 15 bp, Homo sapiens
gggcttatcacagcc

SEQ ID NO: 743169 - DNA, 15 bp, Homo sapiens
ggcttatcacagccc

SEQ ID NO: 743170 - DNA, 15 bp, Homo sapiens
gcttatcacagccct

SEQ ID NO: 743171 - DNA, 15 bp, Homo sapiens
cttatcacagcccta

SEQ ID NO: 743172 - DNA, 15 bp, Homo sapiens
ttatcacagccctac

SEQ ID NO: 743173 - DNA, 15 bp, Homo sapiens
tatcacagccctaca

SEQ ID NO: 743174 - DNA, 15 bp, Homo sapiens
atcacagccctacag

SEQ ID NO: 743175 - DNA, 15 bp, Homo sapiens
tcacagccctacagt

SEQ ID NO: 743176 - DNA, 15 bp, Homo sapiens
cacagccctacagtg

SEQ ID NO: 743177 - DNA, 15 bp, Homo sapiens
acagccctacagtgg

SEQ ID NO: 743178 - DNA, 15 bp, Homo sapiens
cagccctacagtggt

SEQ ID NO: 743179 - DNA, 15 bp, Homo sapiens
agccctacagtggtg

SEQ ID NO: 743180 - DNA, 15 bp, Homo sapiens
gccctacagtggtgc

SEQ ID NO: 743181 - DNA, 15 bp, Homo sapiens
ccctacagtggtgca

SEQ ID NO: 743182 - DNA, 15 bp, Homo sapiens
cctacagtggtgcag

SEQ ID NO: 743183 - DNA, 15 bp, Homo sapiens
ctacagtggtgcaga

SEQ ID NO: 743184 - DNA, 15 bp, Homo sapiens
tacagtggtgcagat

SEQ ID NO: 743185 - DNA, 15 bp, Homo sapiens
acagtggtgcagata

SEQ ID NO: 743186 - DNA, 15 bp, Homo sapiens
cagtggtgcagataa

SEQ ID NO: 743187 - DNA, 15 bp, Homo sapiens
agtggtgcagataag

SEQ ID NO: 743188 - DNA, 15 bp, Homo sapiens
gtggtgcagataagg

SEQ ID NO: 743189 - DNA, 15 bp, Homo sapiens
tggtgcagataaggt

SEQ ID NO: 743190 - DNA, 15 bp, Homo sapiens
ggtgcagataaggtc

SEQ ID NO: 743191 - DNA, 15 bp, Homo sapiens
gtgcagataaggtcc

SEQ ID NO: 743192 - DNA, 15 bp, Homo sapiens
tgcagataaggtcca

SEQ ID NO: 743193 - DNA, 15 bp, Homo sapiens
gcagataaggtccag

SEQ ID NO: 743194 - DNA, 15 bp, Homo sapiens
cagataaggtccagt

SEQ ID NO: 743195 - DNA, 15 bp, Homo sapiens
agataaggtccagtt

SEQ ID NO: 743196 - DNA, 15 bp, Homo sapiens
gataaggtccagttc

SEQ ID NO: 743197 - DNA, 15 bp, Homo sapiens
ataaggtccagttcc

SEQ ID NO: 743198 - DNA, 15 bp, Homo sapiens
taaggtccagttcca

SEQ ID NO: 743199 - DNA, 15 bp, Homo sapiens
aaggtccagttccat

SEQ ID NO: 743200 - DNA, 15 bp, Homo sapiens
aggtccagttccatt

SEQ ID NO: 743201 - DNA, 15 bp, Homo sapiens
ggtccagttccattt

SEQ ID NO: 743202 - DNA, 15 bp, Homo sapiens
gtccagttccatttt

SEQ ID NO: 743203 - DNA, 15 bp, Homo sapiens
tccagttccattttt

SEQ ID NO: 743204 - DNA, 15 bp, Homo sapiens
ccagttccatttttt

SEQ ID NO: 743205 - DNA, 15 bp, Homo sapiens
cagttccattttttg

SEQ ID NO: 743206 - DNA, 15 bp, Homo sapiens
agttccattttttgt

SEQ ID NO: 743207 - DNA, 15 bp, Homo sapiens
gttccattttttgtc

SEQ ID NO: 743208 - DNA, 15 bp, Homo sapiens
ttccattttttgtct

SEQ ID NO: 743209 - DNA, 15 bp, Homo sapiens
tccattttttgtctc

SEQ ID NO: 743210 - DNA, 15 bp, Homo sapiens
ccattttttgtctct

SEQ ID NO: 743211 - DNA, 15 bp, Homo sapiens
cattttttgtctctg

SEQ ID NO: 743212 - DNA, 15 bp, Homo sapiens
attttttgtctctgg

SEQ ID NO: 743213 - DNA, 15 bp, Homo sapiens
ttttttgtctctggg

SEQ ID NO: 743214 - DNA, 15 bp, Homo sapiens
tttttgtctctgggt

SEQ ID NO: 743215 - DNA, 15 bp, Homo sapiens
ttttgtctctgggtt

SEQ ID NO: 743216 - DNA, 15 bp, Homo sapiens
tttgtctctgggttt

SEQ ID NO: 743217 - DNA, 15 bp, Homo sapiens
ttgtctctgggtttc

SEQ ID NO: 743218 - DNA, 15 bp, Homo sapiens
tgtctctgggtttct

SEQ ID NO: 743219 - DNA, 15 bp, Homo sapiens
gtctctgggtttcta

SEQ ID NO: 743220 - DNA, 15 bp, Homo sapiens
tctctgggtttctaa

SEQ ID NO: 743221 - DNA, 15 bp, Homo sapiens
ctctgggtttctaaa

SEQ ID NO: 743222 - DNA, 15 bp, Homo sapiens
tctgggtttctaaat

SEQ ID NO: 743223 - DNA, 15 bp, Homo sapiens
ctgggtttctaaatc

SEQ ID NO: 743224 - DNA, 15 bp, Homo sapiens
tgggtttctaaatcc

SEQ ID NO: 743225 - DNA, 15 bp, Homo sapiens
gggtttctaaatccc

SEQ ID NO: 743226 - DNA, 15 bp, Homo sapiens
ggtttctaaatcccc

SEQ ID NO: 743227 - DNA, 15 bp, Homo sapiens
gtttctaaatcccct

SEQ ID NO: 743228 - DNA, 15 bp, Homo sapiens
tttctaaatcccctc

SEQ ID NO: 743229 - DNA, 15 bp, Homo sapiens
ttctaaatcccctct

SEQ ID NO: 743230 - DNA, 15 bp, Homo sapiens
tctaaatcccctctt

SEQ ID NO: 743231 - DNA, 15 bp, Homo sapiens
ctaaatcccctcttt

SEQ ID NO: 743232 - DNA, 15 bp, Homo sapiens
taaatcccctctttg

SEQ ID NO: 743233 - DNA, 15 bp, Homo sapiens
aaatcccctctttgt

SEQ ID NO: 743234 - DNA, 15 bp, Homo sapiens
aatcccctctttgtt

SEQ ID NO: 743235 - DNA, 15 bp, Homo sapiens
atcccctctttgttg

SEQ ID NO: 743236 - DNA, 15 bp, Homo sapiens
tcccctctttgttga

SEQ ID NO: 743237 - DNA, 15 bp, Homo sapiens
cccctctttgttgat

SEQ ID NO: 743238 - DNA, 15 bp, Homo sapiens
ccctctttgttgatg

SEQ ID NO: 743239 - DNA, 15 bp, Homo sapiens
cctctttgttgatgt

SEQ ID NO: 743240 - DNA, 15 bp, Homo sapiens
ctctttgttgatgtc

SEQ ID NO: 743241 - DNA, 15 bp, Homo sapiens
tctttgttgatgtca

SEQ ID NO: 743242 - DNA, 15 bp, Homo sapiens
ctttgttgatgtcat

SEQ ID NO: 743243 - DNA, 15 bp, Homo sapiens
tttgttgatgtcatt

SEQ ID NO: 743244 - DNA, 15 bp, Homo sapiens
ttgttgatgtcattg

SEQ ID NO: 743245 - DNA, 15 bp, Homo sapiens
tgttgatgtcattgt

SEQ ID NO: 743246 - DNA, 15 bp, Homo sapiens
gttgatgtcattgtt

SEQ ID NO: 743247 - DNA, 15 bp, Homo sapiens
ttgatgtcattgttc

SEQ ID NO: 743248 - DNA, 15 bp, Homo sapiens
tgatgtcattgttct

SEQ ID NO: 743249 - DNA, 15 bp, Homo sapiens
gatgtcattgttcta

SEQ ID NO: 743250 - DNA, 15 bp, Homo sapiens
atgtcattgttctaa

SEQ ID NO: 743251 - DNA, 15 bp, Homo sapiens
tgtcattgttctaat

SEQ ID NO: 743252 - DNA, 15 bp, Homo sapiens
gtcattgttctaatg

SEQ ID NO: 743253 - DNA, 15 bp, Homo sapiens
tcattgttctaatga

SEQ ID NO: 743254 - DNA, 15 bp, Homo sapiens
cattgttctaatgac

SEQ ID NO: 743255 - DNA, 15 bp, Homo sapiens
attgttctaatgaca

SEQ ID NO: 743256 - DNA, 15 bp, Homo sapiens
ttgttctaatgacac

SEQ ID NO: 743257 - DNA, 15 bp, Homo sapiens
tgttctaatgacaca

SEQ ID NO: 743258 - DNA, 15 bp, Homo sapiens
gttctaatgacacag

SEQ ID NO: 743259 - DNA, 15 bp, Homo sapiens
ttctaatgacacagg

SEQ ID NO: 743260 - DNA, 15 bp, Homo sapiens
tctaatgacacaggg

SEQ ID NO: 743261 - DNA, 15 bp, Homo sapiens
ctaatgacacagggc

SEQ ID NO: 743262 - DNA, 15 bp, Homo sapiens
taatgacacagggca

SEQ ID NO: 743263 - DNA, 15 bp, Homo sapiens
aatgacacagggcat

SEQ ID NO: 743264 - DNA, 15 bp, Homo sapiens
atgacacagggcatg

SEQ ID NO: 743265 - DNA, 15 bp, Homo sapiens
tgacacagggcatgg

SEQ ID NO: 743266 - DNA, 15 bp, Homo sapiens
gacacagggcatggg

SEQ ID NO: 743267 - DNA, 15 bp, Homo sapiens
acacagggcatggga

SEQ ID NO: 743268 - DNA, 15 bp, Homo sapiens
cacagggcatgggac

SEQ ID NO: 743269 - DNA, 15 bp, Homo sapiens
acagggcatgggaca

SEQ ID NO: 743270 - DNA, 15 bp, Homo sapiens
cagggcatgggacag

SEQ ID NO: 743271 - DNA, 15 bp, Homo sapiens
agggcatgggacagt

SEQ ID NO: 743272 - DNA, 15 bp, Homo sapiens
gggcatgggacagtg

SEQ ID NO: 743273 - DNA, 15 bp, Homo sapiens
ggcatgggacagtgc

SEQ ID NO: 743274 - DNA, 15 bp, Homo sapiens
gcatgggacagtgcc

SEQ ID NO: 743275 - DNA, 15 bp, Homo sapiens
catgggacagtgccc

SEQ ID NO: 743276 - DNA, 15 bp, Homo sapiens
atgggacagtgcccc

SEQ ID NO: 743277 - DNA, 15 bp, Homo sapiens
tgggacagtgccccg

SEQ ID NO: 743278 - DNA, 15 bp, Homo sapiens
gggacagtgccccgg

SEQ ID NO: 743279 - DNA, 15 bp, Homo sapiens
ggacagtgccccggc

SEQ ID NO: 743280 - DNA, 15 bp, Homo sapiens
gacagtgccccggcc

SEQ ID NO: 743281 - DNA, 15 bp, Homo sapiens
acagtgccccggccc

SEQ ID NO: 743282 - DNA, 15 bp, Homo sapiens
cagtgccccggcccg

SEQ ID NO: 743283 - DNA, 15 bp, Homo sapiens
agtgccccggcccgt

SEQ ID NO: 743284 - DNA, 15 bp, Homo sapiens
gtgccccggcccgtg

SEQ ID NO: 743285 - DNA, 15 bp, Homo sapiens
tgccccggcccgtgc

SEQ ID NO: 743286 - DNA, 15 bp, Homo sapiens
gccccggcccgtgct

SEQ ID NO: 743287 - DNA, 15 bp, Homo sapiens
ccccggcccgtgctg

SEQ ID NO: 743288 - DNA, 15 bp, Homo sapiens
cccggcccgtgctgc

SEQ ID NO: 743289 - DNA, 15 bp, Homo sapiens
ccggcccgtgctgcc

SEQ ID NO: 743290 - DNA, 15 bp, Homo sapiens
cggcccgtgctgcca

SEQ ID NO: 743291 - DNA, 15 bp, Homo sapiens
ggcccgtgctgccaa

SEQ ID NO: 743292 - DNA, 15 bp, Homo sapiens
gcccgtgctgccaag

SEQ ID NO: 743293 - DNA, 15 bp, Homo sapiens
cccgtgctgccaagg

SEQ ID NO: 743294 - DNA, 15 bp, Homo sapiens
ccgtgctgccaagga

SEQ ID NO: 743295 - DNA, 15 bp, Homo sapiens
cgtgctgccaaggag

SEQ ID NO: 743296 - DNA, 15 bp, Homo sapiens
gtgctgccaaggagc

SEQ ID NO: 743297 - DNA, 15 bp, Homo sapiens
tgctgccaaggagcc

SEQ ID NO: 743298 - DNA, 15 bp, Homo sapiens
gctgccaaggagccg

SEQ ID NO: 743299 - DNA, 15 bp, Homo sapiens
ctgccaaggagccgt

SEQ ID NO: 743300 - DNA, 15 bp, Homo sapiens
tgccaaggagccgtc

SEQ ID NO: 743301 - DNA, 15 bp, Homo sapiens
gccaaggagccgtct

SEQ ID NO: 743302 - DNA, 15 bp, Homo sapiens
ccaaggagccgtctt

SEQ ID NO: 743303 - DNA, 15 bp, Homo sapiens
caaggagccgtcttt

SEQ ID NO: 743304 - DNA, 15 bp, Homo sapiens
aaggagccgtcttta

SEQ ID NO: 743305 - DNA, 15 bp, Homo sapiens
aggagccgtctttag

SEQ ID NO: 743306 - DNA, 15 bp, Homo sapiens
ggagccgtctttagg

SEQ ID NO: 743307 - DNA, 15 bp, Homo sapiens
gagccgtctttagga

SEQ ID NO: 743308 - DNA, 15 bp, Homo sapiens
agccgtctttaggac

SEQ ID NO: 743309 - DNA, 15 bp, Homo sapiens
gccgtctttaggaca

SEQ ID NO: 743310 - DNA, 15 bp, Homo sapiens
ccgtctttaggacag

SEQ ID NO: 743311 - DNA, 15 bp, Homo sapiens
cgtctttaggacaga

SEQ ID NO: 743312 - DNA, 15 bp, Homo sapiens
gtctttaggacagag

SEQ ID NO: 743313 - DNA, 15 bp, Homo sapiens
tctttaggacagaga

SEQ ID NO: 743314 - DNA, 15 bp, Homo sapiens
ctttaggacagagac

SEQ ID NO: 743315 - DNA, 15 bp, Homo sapiens
tttaggacagagacc

SEQ ID NO: 743316 - DNA, 15 bp, Homo sapiens
ttaggacagagacca

SEQ ID NO: 743317 - DNA, 15 bp, Homo sapiens
taggacagagaccag

SEQ ID NO: 743318 - DNA, 15 bp, Homo sapiens
aggacagagaccaga

SEQ ID NO: 743319 - DNA, 15 bp, Homo sapiens
ggacagagaccagaa

SEQ ID NO: 743320 - DNA, 15 bp, Homo sapiens
gacagagaccagaaa

SEQ ID NO: 743321 - DNA, 15 bp, Homo sapiens
acagagaccagaaag

SEQ ID NO: 743322 - DNA, 15 bp, Homo sapiens
cagagaccagaaaga

SEQ ID NO: 743323 - DNA, 15 bp, Homo sapiens
agagaccagaaagaa

SEQ ID NO: 743324 - DNA, 15 bp, Homo sapiens
gagaccagaaagaaa

SEQ ID NO: 743325 - DNA, 15 bp, Homo sapiens
agaccagaaagaaag

SEQ ID NO: 743326 - DNA, 15 bp, Homo sapiens
gaccagaaagaaaga

SEQ ID NO: 743327 - DNA, 15 bp, Homo sapiens
accagaaagaaagag

SEQ ID NO: 743328 - DNA, 15 bp, Homo sapiens
ccagaaagaaagaga

SEQ ID NO: 743329 - DNA, 15 bp, Homo sapiens
cagaaagaaagagac

SEQ ID NO: 743330 - DNA, 15 bp, Homo sapiens
agaaagaaagagacc

SEQ ID NO: 743331 - DNA, 15 bp, Homo sapiens
gaaagaaagagacct

SEQ ID NO: 743332 - DNA, 15 bp, Homo sapiens
aaagaaagagacctg

SEQ ID NO: 743333 - DNA, 15 bp, Homo sapiens
aagaaagagacctgt

SEQ ID NO: 743334 - DNA, 15 bp, Homo sapiens
agaaagagacctgtg

SEQ ID NO: 743335 - DNA, 15 bp, Homo sapiens
gaaagagacctgtgt

SEQ ID NO: 743336 - DNA, 15 bp, Homo sapiens
aaagagacctgtgtg

SEQ ID NO: 743337 - DNA, 15 bp, Homo sapiens
aagagacctgtgtgt

SEQ ID NO: 743338 - DNA, 15 bp, Homo sapiens
agagacctgtgtgtg

SEQ ID NO: 743339 - DNA, 15 bp, Homo sapiens
gagacctgtgtgtgt

SEQ ID NO: 743340 - DNA, 15 bp, Homo sapiens
agacctgtgtgtgtg

SEQ ID NO: 743341 - DNA, 15 bp, Homo sapiens
gacctgtgtgtgtgg

SEQ ID NO: 743342 - DNA, 15 bp, Homo sapiens
acctgtgtgtgtggc

SEQ ID NO: 743343 - DNA, 15 bp, Homo sapiens
cctgtgtgtgtggct

SEQ ID NO: 743344 - DNA, 15 bp, Homo sapiens
ctgtgtgtgtggctg

SEQ ID NO: 743345 - DNA, 15 bp, Homo sapiens
tgtgtgtgtggctgg

SEQ ID NO: 743346 - DNA, 15 bp, Homo sapiens
gtgtgtgtggctggc

SEQ ID NO: 743347 - DNA, 15 bp, Homo sapiens
tgtgtgtggctggcc

SEQ ID NO: 743348 - DNA, 15 bp, Homo sapiens
gtgtgtggctggccc

SEQ ID NO: 743349 - DNA, 15 bp, Homo sapiens
tgtgtggctggcccg

SEQ ID NO: 743350 - DNA, 15 bp, Homo sapiens
gtgtggctggcccgc

SEQ ID NO: 743351 - DNA, 15 bp, Homo sapiens
tgtggctggcccgct

SEQ ID NO: 743352 - DNA, 15 bp, Homo sapiens
gtggctggcccgctc

SEQ ID NO: 743353 - DNA, 15 bp, Homo sapiens
tggctggcccgctct

SEQ ID NO: 743354 - DNA, 15 bp, Homo sapiens
ggctggcccgctctc

SEQ ID NO: 743355 - DNA, 15 bp, Homo sapiens
gctggcccgctctcc

SEQ ID NO: 743356 - DNA, 15 bp, Homo sapiens
ctggcccgctctcca

SEQ ID NO: 743357 - DNA, 15 bp, Homo sapiens
tggcccgctctccac

SEQ ID NO: 743358 - DNA, 15 bp, Homo sapiens
ggcccgctctccact

SEQ ID NO: 743359 - DNA, 15 bp, Homo sapiens
gcccgctctccactc

SEQ ID NO: 743360 - DNA, 15 bp, Homo sapiens
cccgctctccactca

SEQ ID NO: 743361 - DNA, 15 bp, Homo sapiens
ccgctctccactcac

SEQ ID NO: 743362 - DNA, 15 bp, Homo sapiens
cgctctccactcacg

SEQ ID NO: 743363 - DNA, 15 bp, Homo sapiens
gctctccactcacgc

SEQ ID NO: 743364 - DNA, 15 bp, Homo sapiens
ctctccactcacgct

SEQ ID NO: 743365 - DNA, 15 bp, Homo sapiens
tctccactcacgctc

SEQ ID NO: 743366 - DNA, 15 bp, Homo sapiens
ctccactcacgctca

SEQ ID NO: 743367 - DNA, 15 bp, Homo sapiens
tccactcacgctcac

SEQ ID NO: 743368 - DNA, 15 bp, Homo sapiens
ccactcacgctcacc

SEQ ID NO: 743369 - DNA, 15 bp, Homo sapiens
cactcacgctcaccc

SEQ ID NO: 743370 - DNA, 15 bp, Homo sapiens
actcacgctcacccc

SEQ ID NO: 743371 - DNA, 15 bp, Homo sapiens
ctcacgctcaccccc

SEQ ID NO: 743372 - DNA, 15 bp, Homo sapiens
tcacgctcaccccca

SEQ ID NO: 743373 - DNA, 15 bp, Homo sapiens
cacgctcacccccac

SEQ ID NO: 743374 - DNA, 15 bp, Homo sapiens
acgctcacccccacc

SEQ ID NO: 743375 - DNA, 15 bp, Homo sapiens
cgctcacccccaccc

SEQ ID NO: 743376 - DNA, 15 bp, Homo sapiens
gctcacccccaccct

SEQ ID NO: 743377 - DNA, 15 bp, Homo sapiens
ctcacccccaccctc

SEQ ID NO: 743378 - DNA, 15 bp, Homo sapiens
tcacccccaccctcc

SEQ ID NO: 743379 - DNA, 15 bp, Homo sapiens
cacccccaccctccc

SEQ ID NO: 743380 - DNA, 15 bp, Homo sapiens
acccccaccctccca

SEQ ID NO: 743381 - DNA, 15 bp, Homo sapiens
cccccaccctcccag

SEQ ID NO: 743382 - DNA, 15 bp, Homo sapiens
ccccaccctcccagc

SEQ ID NO: 743383 - DNA, 15 bp, Homo sapiens
cccaccctcccagct

SEQ ID NO: 743384 - DNA, 15 bp, Homo sapiens
ccaccctcccagctt

SEQ ID NO: 743385 - DNA, 15 bp, Homo sapiens
caccctcccagcttt

SEQ ID NO: 743386 - DNA, 15 bp, Homo sapiens
accctcccagctttt

SEQ ID NO: 743387 - DNA, 15 bp, Homo sapiens
ccctcccagcttttt

SEQ ID NO: 743388 - DNA, 15 bp, Homo sapiens
cctcccagctttttc

SEQ ID NO: 743389 - DNA, 15 bp, Homo sapiens
ctcccagctttttcc

SEQ ID NO: 743390 - DNA, 15 bp, Homo sapiens
tcccagctttttcct

SEQ ID NO: 743391 - DNA, 15 bp, Homo sapiens
cccagctttttcctt

SEQ ID NO: 743392 - DNA, 15 bp, Homo sapiens
ccagctttttcctta

SEQ ID NO: 743393 - DNA, 15 bp, Homo sapiens
cagctttttccttag

SEQ ID NO: 743394 - DNA, 15 bp, Homo sapiens
agctttttccttagc

SEQ ID NO: 743395 - DNA, 15 bp, Homo sapiens
gctttttccttagcg

SEQ ID NO: 743396 - DNA, 15 bp, Homo sapiens
ctttttccttagcgt

SEQ ID NO: 743397 - DNA, 15 bp, Homo sapiens
tttttccttagcgtg

SEQ ID NO: 743398 - DNA, 15 bp, Homo sapiens
ttttccttagcgtgc

SEQ ID NO: 743399 - DNA, 15 bp, Homo sapiens
tttccttagcgtgct

SEQ ID NO: 743400 - DNA, 15 bp, Homo sapiens
ttccttagcgtgctt

SEQ ID NO: 743401 - DNA, 15 bp, Homo sapiens
tccttagcgtgcttt

SEQ ID NO: 743402 - DNA, 15 bp, Homo sapiens
ccttagcgtgctttg

SEQ ID NO: 743403 - DNA, 15 bp, Homo sapiens
cttagcgtgctttgt

SEQ ID NO: 743404 - DNA, 15 bp, Homo sapiens
ttagcgtgctttgtt

SEQ ID NO: 743405 - DNA, 15 bp, Homo sapiens
tagcgtgctttgttt

SEQ ID NO: 743406 - DNA, 15 bp, Homo sapiens
agcgtgctttgtttt

SEQ ID NO: 743407 - DNA, 15 bp, Homo sapiens
gcgtgctttgttttg

SEQ ID NO: 743408 - DNA, 15 bp, Homo sapiens
cgtgctttgttttgt

SEQ ID NO: 743409 - DNA, 15 bp, Homo sapiens
gtgctttgttttgtt

SEQ ID NO: 743410 - DNA, 15 bp, Homo sapiens
tgctttgttttgttt

SEQ ID NO: 743411 - DNA, 15 bp, Homo sapiens
gctttgttttgtttt

SEQ ID NO: 743412 - DNA, 15 bp, Homo sapiens
ctttgttttgttttc

SEQ ID NO: 743413 - DNA, 15 bp, Homo sapiens
tttgttttgttttca

SEQ ID NO: 743414 - DNA, 15 bp, Homo sapiens
ttgttttgttttcat

SEQ ID NO: 743415 - DNA, 15 bp, Homo sapiens
tgttttgttttcata

SEQ ID NO: 743416 - DNA, 15 bp, Homo sapiens
gttttgttttcataa

SEQ ID NO: 743417 - DNA, 15 bp, Homo sapiens
ttttgttttcataac

SEQ ID NO: 743418 - DNA, 15 bp, Homo sapiens
tttgttttcataaca

SEQ ID NO: 743419 - DNA, 15 bp, Homo sapiens
ttgttttcataacac

SEQ ID NO: 743420 - DNA, 15 bp, Homo sapiens
tgttttcataacaca

SEQ ID NO: 743421 - DNA, 15 bp, Homo sapiens
gttttcataacacaa

SEQ ID NO: 743422 - DNA, 15 bp, Homo sapiens
ttttcataacacaac

SEQ ID NO: 743423 - DNA, 15 bp, Homo sapiens
tttcataacacaaca

SEQ ID NO: 743424 - DNA, 15 bp, Homo sapiens
ttcataacacaacaa

SEQ ID NO: 743425 - DNA, 15 bp, Homo sapiens
tcataacacaacaag

SEQ ID NO: 743426 - DNA, 15 bp, Homo sapiens
cataacacaacaagg

SEQ ID NO: 743427 - DNA, 15 bp, Homo sapiens
ataacacaacaaggg

SEQ ID NO: 743428 - DNA, 15 bp, Homo sapiens
taacacaacaagggc

SEQ ID NO: 743429 - DNA, 15 bp, Homo sapiens
aacacaacaagggcc

SEQ ID NO: 743430 - DNA, 15 bp, Homo sapiens
acacaacaagggccc

SEQ ID NO: 743431 - DNA, 15 bp, Homo sapiens
cacaacaagggccct

SEQ ID NO: 743432 - DNA, 15 bp, Homo sapiens
acaacaagggccctg

SEQ ID NO: 743433 - DNA, 15 bp, Homo sapiens
caacaagggccctgg

SEQ ID NO: 743434 - DNA, 15 bp, Homo sapiens
aacaagggccctggg

SEQ ID NO: 743435 - DNA, 15 bp, Homo sapiens
acaagggccctgggg

SEQ ID NO: 743436 - DNA, 15 bp, Homo sapiens
caagggccctggggt

SEQ ID NO: 743437 - DNA, 15 bp, Homo sapiens
aagggccctggggtg

SEQ ID NO: 743438 - DNA, 15 bp, Homo sapiens
agggccctggggtgt

SEQ ID NO: 743439 - DNA, 15 bp, Homo sapiens
gggccctggggtgtg

SEQ ID NO: 743440 - DNA, 15 bp, Homo sapiens
ggccctggggtgtgt

SEQ ID NO: 743441 - DNA, 15 bp, Homo sapiens
gccctggggtgtgta

SEQ ID NO: 743442 - DNA, 15 bp, Homo sapiens
ccctggggtgtgtaa

SEQ ID NO: 743443 - DNA, 15 bp, Homo sapiens
cctggggtgtgtaaa

SEQ ID NO: 743444 - DNA, 15 bp, Homo sapiens
ctggggtgtgtaaaa

SEQ ID NO: 743445 - DNA, 15 bp, Homo sapiens
tggggtgtgtaaaag

SEQ ID NO: 743446 - DNA, 15 bp, Homo sapiens
ggggtgtgtaaaagc

SEQ ID NO: 743447 - DNA, 15 bp, Homo sapiens
gggtgtgtaaaagca

SEQ ID NO: 743448 - DNA, 15 bp, Homo sapiens
ggtgtgtaaaagcat

SEQ ID NO: 743449 - DNA, 15 bp, Homo sapiens
gtgtgtaaaagcatt

SEQ ID NO: 743450 - DNA, 15 bp, Homo sapiens
tgtgtaaaagcattg

SEQ ID NO: 743451 - DNA, 15 bp, Homo sapiens
gtgtaaaagcattgt

SEQ ID NO: 743452 - DNA, 15 bp, Homo sapiens
tgtaaaagcattgtt

SEQ ID NO: 743453 - DNA, 15 bp, Homo sapiens
gtaaaagcattgttg

SEQ ID NO: 743454 - DNA, 15 bp, Homo sapiens
taaaagcattgttga

SEQ ID NO: 743455 - DNA, 15 bp, Homo sapiens
aaaagcattgttgaa

SEQ ID NO: 743456 - DNA, 15 bp, Homo sapiens
aaagcattgttgaac

SEQ ID NO: 743457 - DNA, 15 bp, Homo sapiens
aagcattgttgaaca

SEQ ID NO: 743458 - DNA, 15 bp, Homo sapiens
agcattgttgaacac

SEQ ID NO: 743459 - DNA, 15 bp, Homo sapiens
gcattgttgaacact

SEQ ID NO: 743460 - DNA, 15 bp, Homo sapiens
cattgttgaacactt

SEQ ID NO: 743461 - DNA, 15 bp, Homo sapiens
attgttgaacacttg

SEQ ID NO: 743462 - DNA, 15 bp, Homo sapiens
ttgttgaacacttgg

SEQ ID NO: 743463 - DNA, 15 bp, Homo sapiens
tgttgaacacttggt

SEQ ID NO: 743464 - DNA, 15 bp, Homo sapiens
gttgaacacttggtg

SEQ ID NO: 743465 - DNA, 15 bp, Homo sapiens
ttgaacacttggtga

SEQ ID NO: 743466 - DNA, 15 bp, Homo sapiens
tgaacacttggtgag

SEQ ID NO: 743467 - DNA, 15 bp, Homo sapiens
gaacacttggtgagg

SEQ ID NO: 743468 - DNA, 15 bp, Homo sapiens
aacacttggtgaggg

SEQ ID NO: 743469 - DNA, 15 bp, Homo sapiens
acacttggtgagggc

SEQ ID NO: 743470 - DNA, 15 bp, Homo sapiens
cacttggtgagggca

SEQ ID NO: 743471 - DNA, 15 bp, Homo sapiens
acttggtgagggcaa

SEQ ID NO: 743472 - DNA, 15 bp, Homo sapiens
cttggtgagggcaac

SEQ ID NO: 743473 - DNA, 15 bp, Homo sapiens
ttggtgagggcaact

SEQ ID NO: 743474 - DNA, 15 bp, Homo sapiens
tggtgagggcaactt

SEQ ID NO: 743475 - DNA, 15 bp, Homo sapiens
ggtgagggcaacttg

SEQ ID NO: 743476 - DNA, 15 bp, Homo sapiens
gtgagggcaacttgt

SEQ ID NO: 743477 - DNA, 15 bp, Homo sapiens
tgagggcaacttgtc

SEQ ID NO: 743478 - DNA, 15 bp, Homo sapiens
gagggcaacttgtcc

SEQ ID NO: 743479 - DNA, 15 bp, Homo sapiens
agggcaacttgtcca

SEQ ID NO: 743480 - DNA, 15 bp, Homo sapiens
gggcaacttgtccaa

SEQ ID NO: 743481 - DNA, 15 bp, Homo sapiens
ggcaacttgtccaaa

SEQ ID NO: 743482 - DNA, 15 bp, Homo sapiens
gcaacttgtccaaac

SEQ ID NO: 743483 - DNA, 15 bp, Homo sapiens
caacttgtccaaaca

SEQ ID NO: 743484 - DNA, 15 bp, Homo sapiens
aacttgtccaaacag

SEQ ID NO: 743485 - DNA, 15 bp, Homo sapiens
acttgtccaaacaga

SEQ ID NO: 743486 - DNA, 15 bp, Homo sapiens
cttgtccaaacagag

SEQ ID NO: 743487 - DNA, 15 bp, Homo sapiens
ttgtccaaacagagc

SEQ ID NO: 743488 - DNA, 15 bp, Homo sapiens
tgtccaaacagagca

SEQ ID NO: 743489 - DNA, 15 bp, Homo sapiens
gtccaaacagagcag

SEQ ID NO: 743490 - DNA, 15 bp, Homo sapiens
tccaaacagagcagg

SEQ ID NO: 743491 - DNA, 15 bp, Homo sapiens
ccaaacagagcagga

SEQ ID NO: 743492 - DNA, 15 bp, Homo sapiens
caaacagagcaggac

SEQ ID NO: 743493 - DNA, 15 bp, Homo sapiens
aaacagagcaggacg

SEQ ID NO: 743494 - DNA, 15 bp, Homo sapiens
aacagagcaggacgc

SEQ ID NO: 743495 - DNA, 15 bp, Homo sapiens
acagagcaggacgcc

SEQ ID NO: 743496 - DNA, 15 bp, Homo sapiens
cagagcaggacgcca

SEQ ID NO: 743497 - DNA, 15 bp, Homo sapiens
agagcaggacgccaa

SEQ ID NO: 743498 - DNA, 15 bp, Homo sapiens
gagcaggacgccaaa

SEQ ID NO: 743499 - DNA, 15 bp, Homo sapiens
agcaggacgccaaag

SEQ ID NO: 743500 - DNA, 15 bp, Homo sapiens
gcaggacgccaaagc

SEQ ID NO: 743501 - DNA, 15 bp, Homo sapiens
caggacgccaaagca

SEQ ID NO: 743502 - DNA, 15 bp, Homo sapiens
aggacgccaaagcag

SEQ ID NO: 743503 - DNA, 15 bp, Homo sapiens
ggacgccaaagcaga

SEQ ID NO: 743504 - DNA, 15 bp, Homo sapiens
gacgccaaagcagaa

SEQ ID NO: 743505 - DNA, 15 bp, Homo sapiens
acgccaaagcagaat

SEQ ID NO: 743506 - DNA, 15 bp, Homo sapiens
cgccaaagcagaatg

SEQ ID NO: 743507 - DNA, 15 bp, Homo sapiens
gccaaagcagaatgc

SEQ ID NO: 743508 - DNA, 15 bp, Homo sapiens
ccaaagcagaatgct

SEQ ID NO: 743509 - DNA, 15 bp, Homo sapiens
caaagcagaatgctg

SEQ ID NO: 743510 - DNA, 15 bp, Homo sapiens
aaagcagaatgctgt

SEQ ID NO: 743511 - DNA, 15 bp, Homo sapiens
aagcagaatgctgtg

SEQ ID NO: 743512 - DNA, 15 bp, Homo sapiens
agcagaatgctgtgg

SEQ ID NO: 743513 - DNA, 15 bp, Homo sapiens
gcagaatgctgtggg

SEQ ID NO: 743514 - DNA, 15 bp, Homo sapiens
cagaatgctgtgggc

SEQ ID NO: 743515 - DNA, 15 bp, Homo sapiens
agaatgctgtgggca

SEQ ID NO: 743516 - DNA, 15 bp, Homo sapiens
gaatgctgtgggcag

SEQ ID NO: 743517 - DNA, 15 bp, Homo sapiens
aatgctgtgggcagg

SEQ ID NO: 743518 - DNA, 15 bp, Homo sapiens
atgctgtgggcaggt

SEQ ID NO: 743519 - DNA, 15 bp, Homo sapiens
tgctgtgggcaggtg

SEQ ID NO: 743520 - DNA, 15 bp, Homo sapiens
gctgtgggcaggtgg

SEQ ID NO: 743521 - DNA, 15 bp, Homo sapiens
ctgtgggcaggtggt

SEQ ID NO: 743522 - DNA, 15 bp, Homo sapiens
tgtgggcaggtggtg

SEQ ID NO: 743523 - DNA, 15 bp, Homo sapiens
gtgggcaggtggtgt

SEQ ID NO: 743524 - DNA, 15 bp, Homo sapiens
tgggcaggtggtgtg

SEQ ID NO: 743525 - DNA, 15 bp, Homo sapiens
gggcaggtggtgtgc

SEQ ID NO: 743526 - DNA, 15 bp, Homo sapiens
ggcaggtggtgtgcc

SEQ ID NO: 743527 - DNA, 15 bp, Homo sapiens
gcaggtggtgtgccc

SEQ ID NO: 743528 - DNA, 15 bp, Homo sapiens
caggtggtgtgccca

SEQ ID NO: 743529 - DNA, 15 bp, Homo sapiens
aggtggtgtgcccac

SEQ ID NO: 743530 - DNA, 15 bp, Homo sapiens
ggtggtgtgcccaca

SEQ ID NO: 743531 - DNA, 15 bp, Homo sapiens
gtggtgtgcccacag

SEQ ID NO: 743532 - DNA, 15 bp, Homo sapiens
tggtgtgcccacaga

SEQ ID NO: 743533 - DNA, 15 bp, Homo sapiens
ggtgtgcccacagag

SEQ ID NO: 743534 - DNA, 15 bp, Homo sapiens
gtgtgcccacagagg

SEQ ID NO: 743535 - DNA, 15 bp, Homo sapiens
tgtgcccacagaggt

SEQ ID NO: 743536 - DNA, 15 bp, Homo sapiens
gtgcccacagaggtt

SEQ ID NO: 743537 - DNA, 15 bp, Homo sapiens
tgcccacagaggttg

SEQ ID NO: 743538 - DNA, 15 bp, Homo sapiens
gcccacagaggttgg

SEQ ID NO: 743539 - DNA, 15 bp, Homo sapiens
cccacagaggttggt

SEQ ID NO: 743540 - DNA, 15 bp, Homo sapiens
ccacagaggttggtg

SEQ ID NO: 743541 - DNA, 15 bp, Homo sapiens
cacagaggttggtgg

SEQ ID NO: 743542 - DNA, 15 bp, Homo sapiens
acagaggttggtggg

SEQ ID NO: 743543 - DNA, 15 bp, Homo sapiens
cagaggttggtgggc

SEQ ID NO: 743544 - DNA, 15 bp, Homo sapiens
agaggttggtgggcc

SEQ ID NO: 743545 - DNA, 15 bp, Homo sapiens
gaggttggtgggccg

SEQ ID NO: 743546 - DNA, 15 bp, Homo sapiens
aggttggtgggccgg

SEQ ID NO: 743547 - DNA, 15 bp, Homo sapiens
ggttggtgggccggc

SEQ ID NO: 743548 - DNA, 15 bp, Homo sapiens
gttggtgggccggcg

SEQ ID NO: 743549 - DNA, 15 bp, Homo sapiens
ttggtgggccggcgc

SEQ ID NO: 743550 - DNA, 15 bp, Homo sapiens
tggtgggccggcgcc

SEQ ID NO: 743551 - DNA, 15 bp, Homo sapiens
ggtgggccggcgccg

SEQ ID NO: 743552 - DNA, 15 bp, Homo sapiens
gtgggccggcgccgg

SEQ ID NO: 743553 - DNA, 15 bp, Homo sapiens
tgggccggcgccggc

SEQ ID NO: 743554 - DNA, 15 bp, Homo sapiens
gggccggcgccggcc

SEQ ID NO: 743555 - DNA, 15 bp, Homo sapiens
ggccggcgccggcct

SEQ ID NO: 743556 - DNA, 15 bp, Homo sapiens
gccggcgccggcctt

SEQ ID NO: 743557 - DNA, 15 bp, Homo sapiens
ccggcgccggccttg

SEQ ID NO: 743558 - DNA, 15 bp, Homo sapiens
cggcgccggccttgg

SEQ ID NO: 743559 - DNA, 15 bp, Homo sapiens
ggcgccggccttgga

SEQ ID NO: 743560 - DNA, 15 bp, Homo sapiens
gcgccggccttggaa

SEQ ID NO: 743561 - DNA, 15 bp, Homo sapiens
cgccggccttggaaa

SEQ ID NO: 743562 - DNA, 15 bp, Homo sapiens
gccggccttggaaac

SEQ ID NO: 743563 - DNA, 15 bp, Homo sapiens
ccggccttggaaaca

SEQ ID NO: 743564 - DNA, 15 bp, Homo sapiens
cggccttggaaacac

SEQ ID NO: 743565 - DNA, 15 bp, Homo sapiens
ggccttggaaacacc

SEQ ID NO: 743566 - DNA, 15 bp, Homo sapiens
gccttggaaacacct

SEQ ID NO: 743567 - DNA, 15 bp, Homo sapiens
ccttggaaacacctc

SEQ ID NO: 743568 - DNA, 15 bp, Homo sapiens
cttggaaacacctct

SEQ ID NO: 743569 - DNA, 15 bp, Homo sapiens
ttggaaacacctctc

SEQ ID NO: 743570 - DNA, 15 bp, Homo sapiens
tggaaacacctctca

SEQ ID NO: 743571 - DNA, 15 bp, Homo sapiens
ggaaacacctctcag

SEQ ID NO: 743572 - DNA, 15 bp, Homo sapiens
gaaacacctctcagt

SEQ ID NO: 743573 - DNA, 15 bp, Homo sapiens
aaacacctctcagtg

SEQ ID NO: 743574 - DNA, 15 bp, Homo sapiens
aacacctctcagtgg

SEQ ID NO: 743575 - DNA, 15 bp, Homo sapiens
acacctctcagtggc

SEQ ID NO: 743576 - DNA, 15 bp, Homo sapiens
cacctctcagtggca

SEQ ID NO: 743577 - DNA, 15 bp, Homo sapiens
acctctcagtggcat

SEQ ID NO: 743578 - DNA, 15 bp, Homo sapiens
cctctcagtggcata

SEQ ID NO: 743579 - DNA, 15 bp, Homo sapiens
ctctcagtggcatat

SEQ ID NO: 743580 - DNA, 15 bp, Homo sapiens
tctcagtggcatatg

SEQ ID NO: 743581 - DNA, 15 bp, Homo sapiens
ctcagtggcatatgc

SEQ ID NO: 743582 - DNA, 15 bp, Homo sapiens
tcagtggcatatgcc

SEQ ID NO: 743583 - DNA, 15 bp, Homo sapiens
cagtggcatatgccg

SEQ ID NO: 743584 - DNA, 15 bp, Homo sapiens
agtggcatatgccgc

SEQ ID NO: 743585 - DNA, 15 bp, Homo sapiens
gtggcatatgccgcg

SEQ ID NO: 743586 - DNA, 15 bp, Homo sapiens
tggcatatgccgcgg

SEQ ID NO: 743587 - DNA, 15 bp, Homo sapiens
ggcatatgccgcggc

SEQ ID NO: 743588 - DNA, 15 bp, Homo sapiens
gcatatgccgcggcg

SEQ ID NO: 743589 - DNA, 15 bp, Homo sapiens
catatgccgcggcgg

SEQ ID NO: 743590 - DNA, 15 bp, Homo sapiens
atatgccgcggcggc

SEQ ID NO: 743591 - DNA, 15 bp, Homo sapiens
tatgccgcggcggct

SEQ ID NO: 743592 - DNA, 15 bp, Homo sapiens
atgccgcggcggctg

SEQ ID NO: 743593 - DNA, 15 bp, Homo sapiens
tgccgcggcggctga

SEQ ID NO: 743594 - DNA, 15 bp, Homo sapiens
gccgcggcggctgag

SEQ ID NO: 743595 - DNA, 15 bp, Homo sapiens
ccgcggcggctgagt

SEQ ID NO: 743596 - DNA, 15 bp, Homo sapiens
cgcggcggctgagtg

SEQ ID NO: 743597 - DNA, 15 bp, Homo sapiens
gcggcggctgagtgt

SEQ ID NO: 743598 - DNA, 15 bp, Homo sapiens
cggcggctgagtgtg

SEQ ID NO: 743599 - DNA, 15 bp, Homo sapiens
ggcggctgagtgtga

SEQ ID NO: 743600 - DNA, 15 bp, Homo sapiens
gcggctgagtgtgac

SEQ ID NO: 743601 - DNA, 15 bp, Homo sapiens
cggctgagtgtgacc

SEQ ID NO: 743602 - DNA, 15 bp, Homo sapiens
ggctgagtgtgacct

SEQ ID NO: 743603 - DNA, 15 bp, Homo sapiens
gctgagtgtgaccta

SEQ ID NO: 743604 - DNA, 15 bp, Homo sapiens
ctgagtgtgacctag

SEQ ID NO: 743605 - DNA, 15 bp, Homo sapiens
tgagtgtgacctagc

SEQ ID NO: 743606 - DNA, 15 bp, Homo sapiens
gagtgtgacctagcg

SEQ ID NO: 743607 - DNA, 15 bp, Homo sapiens
agtgtgacctagcgc

SEQ ID NO: 743608 - DNA, 15 bp, Homo sapiens
gtgtgacctagcgca

SEQ ID NO: 743609 - DNA, 15 bp, Homo sapiens
tgtgacctagcgcag

SEQ ID NO: 743610 - DNA, 15 bp, Homo sapiens
gtgacctagcgcaga

SEQ ID NO: 743611 - DNA, 15 bp, Homo sapiens
tgacctagcgcagaa

SEQ ID NO: 743612 - DNA, 15 bp, Homo sapiens
gacctagcgcagaac

SEQ ID NO: 743613 - DNA, 15 bp, Homo sapiens
acctagcgcagaaca

SEQ ID NO: 743614 - DNA, 15 bp, Homo sapiens
cctagcgcagaacag

SEQ ID NO: 743615 - DNA, 15 bp, Homo sapiens
ctagcgcagaacagg

SEQ ID NO: 743616 - DNA, 15 bp, Homo sapiens
tagcgcagaacaggg

SEQ ID NO: 743617 - DNA, 15 bp, Homo sapiens
agcgcagaacagggc

SEQ ID NO: 743618 - DNA, 15 bp, Homo sapiens
gcgcagaacagggct

SEQ ID NO: 743619 - DNA, 15 bp, Homo sapiens
cgcagaacagggctt

SEQ ID NO: 743620 - DNA, 15 bp, Homo sapiens
gcagaacagggcttc

SEQ ID NO: 743621 - DNA, 15 bp, Homo sapiens
cagaacagggcttcc

SEQ ID NO: 743622 - DNA, 15 bp, Homo sapiens
agaacagggcttccc

SEQ ID NO: 743623 - DNA, 15 bp, Homo sapiens
gaacagggcttccct

SEQ ID NO: 743624 - DNA, 15 bp, Homo sapiens
aacagggcttccctc

SEQ ID NO: 743625 - DNA, 15 bp, Homo sapiens
acagggcttccctct

SEQ ID NO: 743626 - DNA, 15 bp, Homo sapiens
cagggcttccctctt

SEQ ID NO: 743627 - DNA, 15 bp, Homo sapiens
agggcttccctcttg

SEQ ID NO: 743628 - DNA, 15 bp, Homo sapiens
gggcttccctcttgt

SEQ ID NO: 743629 - DNA, 15 bp, Homo sapiens
ggcttccctcttgtg

SEQ ID NO: 743630 - DNA, 15 bp, Homo sapiens
gcttccctcttgtgt

SEQ ID NO: 743631 - DNA, 15 bp, Homo sapiens
cttccctcttgtgtc

SEQ ID NO: 743632 - DNA, 15 bp, Homo sapiens
ttccctcttgtgtcc

SEQ ID NO: 743633 - DNA, 15 bp, Homo sapiens
tccctcttgtgtcct

SEQ ID NO: 743634 - DNA, 15 bp, Homo sapiens
ccctcttgtgtcctc

SEQ ID NO: 743635 - DNA, 15 bp, Homo sapiens
cctcttgtgtcctcc

SEQ ID NO: 743636 - DNA, 15 bp, Homo sapiens
ctcttgtgtcctccg

SEQ ID NO: 743637 - DNA, 15 bp, Homo sapiens
tcttgtgtcctccgt

SEQ ID NO: 743638 - DNA, 15 bp, Homo sapiens
cttgtgtcctccgtg

SEQ ID NO: 743639 - DNA, 15 bp, Homo sapiens
ttgtgtcctccgtgg

SEQ ID NO: 743640 - DNA, 15 bp, Homo sapiens
tgtgtcctccgtggg

SEQ ID NO: 743641 - DNA, 15 bp, Homo sapiens
gtgtcctccgtgggg

SEQ ID NO: 743642 - DNA, 15 bp, Homo sapiens
tgtcctccgtgggga

SEQ ID NO: 743643 - DNA, 15 bp, Homo sapiens
gtcctccgtggggag

SEQ ID NO: 743644 - DNA, 15 bp, Homo sapiens
tcctccgtggggagt

SEQ ID NO: 743645 - DNA, 15 bp, Homo sapiens
cctccgtggggagtc

SEQ ID NO: 743646 - DNA, 15 bp, Homo sapiens
ctccgtggggagtcc

SEQ ID NO: 743647 - DNA, 15 bp, Homo sapiens
tccgtggggagtcca

SEQ ID NO: 743648 - DNA, 15 bp, Homo sapiens
ccgtggggagtccag

SEQ ID NO: 743649 - DNA, 15 bp, Homo sapiens
cgtggggagtccagg

SEQ ID NO: 743650 - DNA, 15 bp, Homo sapiens
gtggggagtccagga

SEQ ID NO: 743651 - DNA, 15 bp, Homo sapiens
tggggagtccaggag

SEQ ID NO: 743652 - DNA, 15 bp, Homo sapiens
ggggagtccaggaga

SEQ ID NO: 743653 - DNA, 15 bp, Homo sapiens
gggagtccaggagag

SEQ ID NO: 743654 - DNA, 15 bp, Homo sapiens
ggagtccaggagagg

SEQ ID NO: 743655 - DNA, 15 bp, Homo sapiens
gagtccaggagaggg

SEQ ID NO: 743656 - DNA, 15 bp, Homo sapiens
agtccaggagaggga

SEQ ID NO: 743657 - DNA, 15 bp, Homo sapiens
gtccaggagagggac

SEQ ID NO: 743658 - DNA, 15 bp, Homo sapiens
tccaggagagggact

SEQ ID NO: 743659 - DNA, 15 bp, Homo sapiens
ccaggagagggactt

SEQ ID NO: 743660 - DNA, 15 bp, Homo sapiens
caggagagggacttg

SEQ ID NO: 743661 - DNA, 15 bp, Homo sapiens
aggagagggacttgg

SEQ ID NO: 743662 - DNA, 15 bp, Homo sapiens
ggagagggacttggt

SEQ ID NO: 743663 - DNA, 15 bp, Homo sapiens
gagagggacttggtc

SEQ ID NO: 743664 - DNA, 15 bp, Homo sapiens
agagggacttggtcc

SEQ ID NO: 743665 - DNA, 15 bp, Homo sapiens
gagggacttggtcct

SEQ ID NO: 743666 - DNA, 15 bp, Homo sapiens
agggacttggtcctt

SEQ ID NO: 743667 - DNA, 15 bp, Homo sapiens
gggacttggtccttc

SEQ ID NO: 743668 - DNA, 15 bp, Homo sapiens
ggacttggtccttct

SEQ ID NO: 743669 - DNA, 15 bp, Homo sapiens
gacttggtccttctg

SEQ ID NO: 743670 - DNA, 15 bp, Homo sapiens
acttggtccttctgg

SEQ ID NO: 743671 - DNA, 15 bp, Homo sapiens
cttggtccttctggc

SEQ ID NO: 743672 - DNA, 15 bp, Homo sapiens
ttggtccttctggct

SEQ ID NO: 743673 - DNA, 15 bp, Homo sapiens
tggtccttctggctg

SEQ ID NO: 743674 - DNA, 15 bp, Homo sapiens
ggtccttctggctga

SEQ ID NO: 743675 - DNA, 15 bp, Homo sapiens
gtccttctggctgac

SEQ ID NO: 743676 - DNA, 15 bp, Homo sapiens
tccttctggctgact

SEQ ID NO: 743677 - DNA, 15 bp, Homo sapiens
ccttctggctgactc

SEQ ID NO: 743678 - DNA, 15 bp, Homo sapiens
cttctggctgactcc

SEQ ID NO: 743679 - DNA, 15 bp, Homo sapiens
ttctggctgactccg

SEQ ID NO: 743680 - DNA, 15 bp, Homo sapiens
tctggctgactccgt

SEQ ID NO: 743681 - DNA, 15 bp, Homo sapiens
ctggctgactccgtg

SEQ ID NO: 743682 - DNA, 15 bp, Homo sapiens
tggctgactccgtgc

SEQ ID NO: 743683 - DNA, 15 bp, Homo sapiens
ggctgactccgtgct

SEQ ID NO: 743684 - DNA, 15 bp, Homo sapiens
gctgactccgtgctt

SEQ ID NO: 743685 - DNA, 15 bp, Homo sapiens
ctgactccgtgcttg

SEQ ID NO: 743686 - DNA, 15 bp, Homo sapiens
tgactccgtgcttgg

SEQ ID NO: 743687 - DNA, 15 bp, Homo sapiens
gactccgtgcttgga

SEQ ID NO: 743688 - DNA, 15 bp, Homo sapiens
actccgtgcttggaa

SEQ ID NO: 743689 - DNA, 15 bp, Homo sapiens
ctccgtgcttggaag

SEQ ID NO: 743690 - DNA, 15 bp, Homo sapiens
tccgtgcttggaagg

SEQ ID NO: 743691 - DNA, 15 bp, Homo sapiens
ccgtgcttggaaggt

SEQ ID NO: 743692 - DNA, 15 bp, Homo sapiens
cgtgcttggaaggtg

SEQ ID NO: 743693 - DNA, 15 bp, Homo sapiens
gtgcttggaaggtgt

SEQ ID NO: 743694 - DNA, 15 bp, Homo sapiens
tgcttggaaggtgtg

SEQ ID NO: 743695 - DNA, 15 bp, Homo sapiens
gcttggaaggtgtgc

SEQ ID NO: 743696 - DNA, 15 bp, Homo sapiens
cttggaaggtgtgct

SEQ ID NO: 743697 - DNA, 15 bp, Homo sapiens
ttggaaggtgtgctc

SEQ ID NO: 743698 - DNA, 15 bp, Homo sapiens
tggaaggtgtgctcc

SEQ ID NO: 743699 - DNA, 15 bp, Homo sapiens
ggaaggtgtgctccc

SEQ ID NO: 743700 - DNA, 15 bp, Homo sapiens
gaaggtgtgctcccc

SEQ ID NO: 743701 - DNA, 15 bp, Homo sapiens
aaggtgtgctcccct

SEQ ID NO: 743702 - DNA, 15 bp, Homo sapiens
aggtgtgctcccctc

SEQ ID NO: 743703 - DNA, 15 bp, Homo sapiens
ggtgtgctcccctct

SEQ ID NO: 743704 - DNA, 15 bp, Homo sapiens
gtgtgctcccctctc

SEQ ID NO: 743705 - DNA, 15 bp, Homo sapiens
tgtgctcccctctca

SEQ ID NO: 743706 - DNA, 15 bp, Homo sapiens
gtgctcccctctcag

SEQ ID NO: 743707 - DNA, 15 bp, Homo sapiens
tgctcccctctcagg

SEQ ID NO: 743708 - DNA, 15 bp, Homo sapiens
gctcccctctcaggt

SEQ ID NO: 743709 - DNA, 15 bp, Homo sapiens
ctcccctctcaggtg

SEQ ID NO: 743710 - DNA, 15 bp, Homo sapiens
tcccctctcaggtgg

SEQ ID NO: 743711 - DNA, 15 bp, Homo sapiens
cccctctcaggtggg

SEQ ID NO: 743712 - DNA, 15 bp, Homo sapiens
ccctctcaggtgggt

SEQ ID NO: 743713 - DNA, 15 bp, Homo sapiens
cctctcaggtgggtt

SEQ ID NO: 743714 - DNA, 15 bp, Homo sapiens
ctctcaggtgggttc

SEQ ID NO: 743715 - DNA, 15 bp, Homo sapiens
tctcaggtgggttca

SEQ ID NO: 743716 - DNA, 15 bp, Homo sapiens
ctcaggtgggttcac

SEQ ID NO: 743717 - DNA, 15 bp, Homo sapiens
tcaggtgggttcaca

SEQ ID NO: 743718 - DNA, 15 bp, Homo sapiens
caggtgggttcacat

SEQ ID NO: 743719 - DNA, 15 bp, Homo sapiens
aggtgggttcacatg

SEQ ID NO: 743720 - DNA, 15 bp, Homo sapiens
ggtgggttcacatgt

SEQ ID NO: 743721 - DNA, 15 bp, Homo sapiens
gtgggttcacatgtg

SEQ ID NO: 743722 - DNA, 15 bp, Homo sapiens
tgggttcacatgtgc

SEQ ID NO: 743723 - DNA, 15 bp, Homo sapiens
gggttcacatgtgcc

SEQ ID NO: 743724 - DNA, 15 bp, Homo sapiens
ggttcacatgtgcct

SEQ ID NO: 743725 - DNA, 15 bp, Homo sapiens
gttcacatgtgcctc

SEQ ID NO: 743726 - DNA, 15 bp, Homo sapiens
ttcacatgtgcctcc

SEQ ID NO: 743727 - DNA, 15 bp, Homo sapiens
tcacatgtgcctccc

SEQ ID NO: 743728 - DNA, 15 bp, Homo sapiens
cacatgtgcctccct

SEQ ID NO: 743729 - DNA, 15 bp, Homo sapiens
acatgtgcctccctc

SEQ ID NO: 743730 - DNA, 15 bp, Homo sapiens
catgtgcctccctct

SEQ ID NO: 743731 - DNA, 15 bp, Homo sapiens
atgtgcctccctctg

SEQ ID NO: 743732 - DNA, 15 bp, Homo sapiens
tgtgcctccctctgc

SEQ ID NO: 743733 - DNA, 15 bp, Homo sapiens
gtgcctccctctgcc

SEQ ID NO: 743734 - DNA, 15 bp, Homo sapiens
tgcctccctctgccg

SEQ ID NO: 743735 - DNA, 15 bp, Homo sapiens
gcctccctctgccgg

SEQ ID NO: 743736 - DNA, 15 bp, Homo sapiens
cctccctctgccggg

SEQ ID NO: 743737 - DNA, 15 bp, Homo sapiens
ctccctctgccgggt

SEQ ID NO: 743738 - DNA, 15 bp, Homo sapiens
tccctctgccgggtg

SEQ ID NO: 743739 - DNA, 15 bp, Homo sapiens
ccctctgccgggtgt

SEQ ID NO: 743740 - DNA, 15 bp, Homo sapiens
cctctgccgggtgtg

SEQ ID NO: 743741 - DNA, 15 bp, Homo sapiens
ctctgccgggtgtga

SEQ ID NO: 743742 - DNA, 15 bp, Homo sapiens
tctgccgggtgtgaa

SEQ ID NO: 743743 - DNA, 15 bp, Homo sapiens
ctgccgggtgtgaag

SEQ ID NO: 743744 - DNA, 15 bp, Homo sapiens
tgccgggtgtgaagc

SEQ ID NO: 743745 - DNA, 15 bp, Homo sapiens
gccgggtgtgaagct

SEQ ID NO: 743746 - DNA, 15 bp, Homo sapiens
ccgggtgtgaagcta

SEQ ID NO: 743747 - DNA, 15 bp, Homo sapiens
cgggtgtgaagctag

SEQ ID NO: 743748 - DNA, 15 bp, Homo sapiens
gggtgtgaagctagg

SEQ ID NO: 743749 - DNA, 15 bp, Homo sapiens
ggtgtgaagctaggt

SEQ ID NO: 743750 - DNA, 15 bp, Homo sapiens
gtgtgaagctaggtg

SEQ ID NO: 743751 - DNA, 15 bp, Homo sapiens
tgtgaagctaggtgg

SEQ ID NO: 743752 - DNA, 15 bp, Homo sapiens
gtgaagctaggtggg

SEQ ID NO: 743753 - DNA, 15 bp, Homo sapiens
tgaagctaggtgggc

SEQ ID NO: 743754 - DNA, 15 bp, Homo sapiens
gaagctaggtgggcc

SEQ ID NO: 743755 - DNA, 15 bp, Homo sapiens
aagctaggtgggccc

SEQ ID NO: 743756 - DNA, 15 bp, Homo sapiens
agctaggtgggcccg

SEQ ID NO: 743757 - DNA, 15 bp, Homo sapiens
gctaggtgggcccgc

SEQ ID NO: 743758 - DNA, 15 bp, Homo sapiens
ctaggtgggcccgct

SEQ ID NO: 743759 - DNA, 15 bp, Homo sapiens
taggtgggcccgctg

SEQ ID NO: 743760 - DNA, 15 bp, Homo sapiens
aggtgggcccgctgc

SEQ ID NO: 743761 - DNA, 15 bp, Homo sapiens
ggtgggcccgctgct

SEQ ID NO: 743762 - DNA, 15 bp, Homo sapiens
gtgggcccgctgctt

SEQ ID NO: 743763 - DNA, 15 bp, Homo sapiens
tgggcccgctgcttt

SEQ ID NO: 743764 - DNA, 15 bp, Homo sapiens
gggcccgctgctttg

SEQ ID NO: 743765 - DNA, 15 bp, Homo sapiens
ggcccgctgctttgg

SEQ ID NO: 743766 - DNA, 15 bp, Homo sapiens
gcccgctgctttgga

SEQ ID NO: 743767 - DNA, 15 bp, Homo sapiens
cccgctgctttggaa

SEQ ID NO: 743768 - DNA, 15 bp, Homo sapiens
ccgctgctttggaag

SEQ ID NO: 743769 - DNA, 15 bp, Homo sapiens
cgctgctttggaaga

SEQ ID NO: 743770 - DNA, 15 bp, Homo sapiens
gctgctttggaagaa

SEQ ID NO: 743771 - DNA, 15 bp, Homo sapiens
ctgctttggaagaag

SEQ ID NO: 743772 - DNA, 15 bp, Homo sapiens
tgctttggaagaagc

SEQ ID NO: 743773 - DNA, 15 bp, Homo sapiens
gctttggaagaagcc

SEQ ID NO: 743774 - DNA, 15 bp, Homo sapiens
ctttggaagaagcca

SEQ ID NO: 743775 - DNA, 15 bp, Homo sapiens
tttggaagaagccag

SEQ ID NO: 743776 - DNA, 15 bp, Homo sapiens
ttggaagaagccagt

SEQ ID NO: 743777 - DNA, 15 bp, Homo sapiens
tggaagaagccagtg

SEQ ID NO: 743778 - DNA, 15 bp, Homo sapiens
ggaagaagccagtgt

SEQ ID NO: 743779 - DNA, 15 bp, Homo sapiens
gaagaagccagtgtg

SEQ ID NO: 743780 - DNA, 15 bp, Homo sapiens
aagaagccagtgtgt

SEQ ID NO: 743781 - DNA, 15 bp, Homo sapiens
agaagccagtgtgtc

SEQ ID NO: 743782 - DNA, 15 bp, Homo sapiens
gaagccagtgtgtcc

SEQ ID NO: 743783 - DNA, 15 bp, Homo sapiens
aagccagtgtgtccc

SEQ ID NO: 743784 - DNA, 15 bp, Homo sapiens
agccagtgtgtccct

SEQ ID NO: 743785 - DNA, 15 bp, Homo sapiens
gccagtgtgtccctg

SEQ ID NO: 743786 - DNA, 15 bp, Homo sapiens
ccagtgtgtccctgt

SEQ ID NO: 743787 - DNA, 15 bp, Homo sapiens
cagtgtgtccctgtg

SEQ ID NO: 743788 - DNA, 15 bp, Homo sapiens
agtgtgtccctgtgg

SEQ ID NO: 743789 - DNA, 15 bp, Homo sapiens
gtgtgtccctgtggt

SEQ ID NO: 743790 - DNA, 15 bp, Homo sapiens
tgtgtccctgtggtt

SEQ ID NO: 743791 - DNA, 15 bp, Homo sapiens
gtgtccctgtggttt

SEQ ID NO: 743792 - DNA, 15 bp, Homo sapiens
tgtccctgtggtttg

SEQ ID NO: 743793 - DNA, 15 bp, Homo sapiens
gtccctgtggtttgt

SEQ ID NO: 743794 - DNA, 15 bp, Homo sapiens
tccctgtggtttgtt

SEQ ID NO: 743795 - DNA, 15 bp, Homo sapiens
ccctgtggtttgttt

SEQ ID NO: 743796 - DNA, 15 bp, Homo sapiens
cctgtggtttgttta

SEQ ID NO: 743797 - DNA, 15 bp, Homo sapiens
ctgtggtttgtttat

SEQ ID NO: 743798 - DNA, 15 bp, Homo sapiens
tgtggtttgtttatg

SEQ ID NO: 743799 - DNA, 15 bp, Homo sapiens
gtggtttgtttatgg

SEQ ID NO: 743800 - DNA, 15 bp, Homo sapiens
tggtttgtttatgga

SEQ ID NO: 743801 - DNA, 15 bp, Homo sapiens
ggtttgtttatggag

SEQ ID NO: 743802 - DNA, 15 bp, Homo sapiens
gtttgtttatggagc

SEQ ID NO: 743803 - DNA, 15 bp, Homo sapiens
tttgtttatggagca

SEQ ID NO: 743804 - DNA, 15 bp, Homo sapiens
ttgtttatggagcaa

SEQ ID NO: 743805 - DNA, 15 bp, Homo sapiens
tgtttatggagcaaa

SEQ ID NO: 743806 - DNA, 15 bp, Homo sapiens
gtttatggagcaaat

SEQ ID NO: 743807 - DNA, 15 bp, Homo sapiens
tttatggagcaaata

SEQ ID NO: 743808 - DNA, 15 bp, Homo sapiens
ttatggagcaaatat

SEQ ID NO: 743809 - DNA, 15 bp, Homo sapiens
tatggagcaaatatg

SEQ ID NO: 743810 - DNA, 15 bp, Homo sapiens
atggagcaaatatgt

SEQ ID NO: 743811 - DNA, 15 bp, Homo sapiens
tggagcaaatatgta

SEQ ID NO: 743812 - DNA, 15 bp, Homo sapiens
ggagcaaatatgtat

SEQ ID NO: 743813 - DNA, 15 bp, Homo sapiens
gagcaaatatgtatt

SEQ ID NO: 743814 - DNA, 15 bp, Homo sapiens
agcaaatatgtattg

SEQ ID NO: 743815 - DNA, 15 bp, Homo sapiens
gcaaatatgtattga

SEQ ID NO: 743816 - DNA, 15 bp, Homo sapiens
tgagcagacaatgcc

SEQ ID NO: 743817 - DNA, 15 bp, Homo sapiens
gagcagacaatgcca

SEQ ID NO: 743818 - DNA, 15 bp, Homo sapiens
agcagacaatgccat

SEQ ID NO: 743819 - DNA, 15 bp, Homo sapiens
gcagacaatgccatg

SEQ ID NO: 743820 - DNA, 15 bp, Homo sapiens
cagacaatgccatgc

SEQ ID NO: 743821 - DNA, 15 bp, Homo sapiens
agacaatgccatgca

SEQ ID NO: 743822 - DNA, 15 bp, Homo sapiens
gacaatgccatgcag

SEQ ID NO: 743823 - DNA, 15 bp, Homo sapiens
acaatgccatgcagg

SEQ ID NO: 743824 - DNA, 15 bp, Homo sapiens
caatgccatgcaggg

SEQ ID NO: 743825 - DNA, 15 bp, Homo sapiens
aatgccatgcagggc

SEQ ID NO: 743826 - DNA, 15 bp, Homo sapiens
atgccatgcagggct

SEQ ID NO: 743827 - DNA, 15 bp, Homo sapiens
tgccatgcagggctg

SEQ ID NO: 743828 - DNA, 15 bp, Homo sapiens
gccatgcagggctga

SEQ ID NO: 743829 - DNA, 15 bp, Homo sapiens
ccatgcagggctgag

SEQ ID NO: 743830 - DNA, 15 bp, Homo sapiens
catgcagggctgagg

SEQ ID NO: 743831 - DNA, 15 bp, Homo sapiens
atgcagggctgaggg

SEQ ID NO: 743832 - DNA, 15 bp, Homo sapiens
tgcagggctgagggc

SEQ ID NO: 743833 - DNA, 15 bp, Homo sapiens
gcagggctgagggct

SEQ ID NO: 743834 - DNA, 15 bp, Homo sapiens
cagggctgagggctt

SEQ ID NO: 743835 - DNA, 15 bp, Homo sapiens
agggctgagggcttc

SEQ ID NO: 743836 - DNA, 15 bp, Homo sapiens
gggctgagggcttct

SEQ ID NO: 743837 - DNA, 15 bp, Homo sapiens
ggctgagggcttctg

SEQ ID NO: 743838 - DNA, 15 bp, Homo sapiens
gctgagggcttctgt

SEQ ID NO: 743839 - DNA, 15 bp, Homo sapiens
ctgagggcttctgtg

SEQ ID NO: 743840 - DNA, 15 bp, Homo sapiens
tgagggcttctgtgc

SEQ ID NO: 743841 - DNA, 15 bp, Homo sapiens
gagggcttctgtgcc

SEQ ID NO: 743842 - DNA, 15 bp, Homo sapiens
agggcttctgtgcct

SEQ ID NO: 743843 - DNA, 15 bp, Homo sapiens
gggcttctgtgcctg

SEQ ID NO: 743844 - DNA, 15 bp, Homo sapiens
ggcttctgtgcctgc

SEQ ID NO: 743845 - DNA, 15 bp, Homo sapiens
gcttctgtgcctgct

SEQ ID NO: 743846 - DNA, 15 bp, Homo sapiens
cttctgtgcctgcta

SEQ ID NO: 743847 - DNA, 15 bp, Homo sapiens
ttctgtgcctgctaa

SEQ ID NO: 743848 - DNA, 15 bp, Homo sapiens
tctgtgcctgctaat

SEQ ID NO: 743849 - DNA, 15 bp, Homo sapiens
ctgtgcctgctaata

SEQ ID NO: 743850 - DNA, 15 bp, Homo sapiens
tgtgcctgctaatat

SEQ ID NO: 743851 - DNA, 15 bp, Homo sapiens
gtgcctgctaatatg

SEQ ID NO: 743852 - DNA, 15 bp, Homo sapiens
tgcctgctaatatgt

SEQ ID NO: 743853 - DNA, 15 bp, Homo sapiens
gcctgctaatatgtg

SEQ ID NO: 743854 - DNA, 15 bp, Homo sapiens
cctgctaatatgtga

SEQ ID NO: 743855 - DNA, 15 bp, Homo sapiens
ctgctaatatgtgaa

SEQ ID NO: 743856 - DNA, 15 bp, Homo sapiens
tgctaatatgtgaac

SEQ ID NO: 743857 - DNA, 15 bp, Homo sapiens
gctaatatgtgaacc

SEQ ID NO: 743858 - DNA, 15 bp, Homo sapiens
ctaatatgtgaaccc

SEQ ID NO: 743859 - DNA, 15 bp, Homo sapiens
taatatgtgaacccc

SEQ ID NO: 743860 - DNA, 15 bp, Homo sapiens
aatatgtgaaccccc

SEQ ID NO: 743861 - DNA, 15 bp, Homo sapiens
atatgtgaaccccct

SEQ ID NO: 743862 - DNA, 15 bp, Homo sapiens
tatgtgaaccccctt

SEQ ID NO: 743863 - DNA, 15 bp, Homo sapiens
atgtgaacccccttt

SEQ ID NO: 743864 - DNA, 15 bp, Homo sapiens
tgtgaaccccctttc

SEQ ID NO: 743865 - DNA, 15 bp, Homo sapiens
gtgaaccccctttct

SEQ ID NO: 743866 - DNA, 15 bp, Homo sapiens
tgaaccccctttctg

SEQ ID NO: 743867 - DNA, 15 bp, Homo sapiens
gaaccccctttctga

SEQ ID NO: 743868 - DNA, 15 bp, Homo sapiens
aaccccctttctgaa

SEQ ID NO: 743869 - DNA, 15 bp, Homo sapiens
gggaccagtttgggg

SEQ ID NO: 743870 - DNA, 15 bp, Homo sapiens
ggaccagtttgggga

SEQ ID NO: 743871 - DNA, 15 bp, Homo sapiens
gaccagtttggggag

SEQ ID NO: 743872 - DNA, 15 bp, Homo sapiens
accagtttggggagc

SEQ ID NO: 743873 - DNA, 15 bp, Homo sapiens
ccagtttggggagcc

SEQ ID NO: 743874 - DNA, 15 bp, Homo sapiens
cagtttggggagcca

SEQ ID NO: 743875 - DNA, 15 bp, Homo sapiens
agtttggggagccag

SEQ ID NO: 743876 - DNA, 15 bp, Homo sapiens
gtttggggagccagg

SEQ ID NO: 743877 - DNA, 15 bp, Homo sapiens
tttggggagccaggg

SEQ ID NO: 743878 - DNA, 15 bp, Homo sapiens
ttggggagccaggga

SEQ ID NO: 743879 - DNA, 15 bp, Homo sapiens
tggggagccagggag

SEQ ID NO: 743880 - DNA, 15 bp, Homo sapiens
ggggagccagggagt

SEQ ID NO: 743881 - DNA, 15 bp, Homo sapiens
gggagccagggagta

SEQ ID NO: 743882 - DNA, 15 bp, Homo sapiens
ggagccagggagtac

SEQ ID NO: 743883 - DNA, 15 bp, Homo sapiens
gagccagggagtaca

SEQ ID NO: 743884 - DNA, 15 bp, Homo sapiens
agccagggagtacat

SEQ ID NO: 743885 - DNA, 15 bp, Homo sapiens
gccagggagtacatt

SEQ ID NO: 743886 - DNA, 15 bp, Homo sapiens
ccagggagtacattt

SEQ ID NO: 743887 - DNA, 15 bp, Homo sapiens
cagggagtacatttt

SEQ ID NO: 743888 - DNA, 15 bp, Homo sapiens
agggagtacatttta

SEQ ID NO: 743889 - DNA, 15 bp, Homo sapiens
gggagtacattttag

SEQ ID NO: 743890 - DNA, 15 bp, Homo sapiens
ggagtacattttagt

SEQ ID NO: 743891 - DNA, 15 bp, Homo sapiens
gagtacattttagtt

SEQ ID NO: 743892 - DNA, 15 bp, Homo sapiens
agtacattttagttc

SEQ ID NO: 743893 - DNA, 15 bp, Homo sapiens
gtacattttagttct

SEQ ID NO: 743894 - DNA, 15 bp, Homo sapiens
tacattttagttcta

SEQ ID NO: 743895 - DNA, 15 bp, Homo sapiens
acattttagttctag

SEQ ID NO: 743896 - DNA, 15 bp, Homo sapiens
cattttagttctagg

SEQ ID NO: 743897 - DNA, 15 bp, Homo sapiens
attttagttctagga

SEQ ID NO: 743898 - DNA, 15 bp, Homo sapiens
ttttagttctaggaa

SEQ ID NO: 743899 - DNA, 15 bp, Homo sapiens
tttagttctaggaat

SEQ ID NO: 743900 - DNA, 15 bp, Homo sapiens
ttagttctaggaatt

SEQ ID NO: 743901 - DNA, 15 bp, Homo sapiens
tagttctaggaattg

SEQ ID NO: 743902 - DNA, 15 bp, Homo sapiens
agttctaggaattga

SEQ ID NO: 743903 - DNA, 15 bp, Homo sapiens
gttctaggaattgat

SEQ ID NO: 743904 - DNA, 15 bp, Homo sapiens
ttctaggaattgatt

SEQ ID NO: 743905 - DNA, 15 bp, Homo sapiens
tctaggaattgatta

SEQ ID NO: 743906 - DNA, 15 bp, Homo sapiens
ctaggaattgattat

SEQ ID NO: 743907 - DNA, 15 bp, Homo sapiens
taggaattgattatt

SEQ ID NO: 743908 - DNA, 15 bp, Homo sapiens
aggaattgattattt

SEQ ID NO: 743909 - DNA, 15 bp, Homo sapiens
ggaattgattattta

SEQ ID NO: 743910 - DNA, 15 bp, Homo sapiens
gaattgattatttaa

SEQ ID NO: 743911 - DNA, 15 bp, Homo sapiens
aattgattatttaac

SEQ ID NO: 743912 - DNA, 15 bp, Homo sapiens
attgattatttaaca

SEQ ID NO: 743913 - DNA, 15 bp, Homo sapiens
ttgattatttaacat

SEQ ID NO: 743914 - DNA, 15 bp, Homo sapiens
tgattatttaacata

SEQ ID NO: 743915 - DNA, 15 bp, Homo sapiens
gattatttaacataa

SEQ ID NO: 743916 - DNA, 15 bp, Homo sapiens
attatttaacataat

SEQ ID NO: 743917 - DNA, 15 bp, Homo sapiens
ttatttaacataatt

SEQ ID NO: 743918 - DNA, 15 bp, Homo sapiens
tatttaacataattt

SEQ ID NO: 743919 - DNA, 15 bp, Homo sapiens
atttaacataatttg

SEQ ID NO: 743920 - DNA, 15 bp, Homo sapiens
tttaacataatttgt

SEQ ID NO: 743921 - DNA, 15 bp, Homo sapiens
ttaacataatttgta

SEQ ID NO: 743922 - DNA, 15 bp, Homo sapiens
taacataatttgtaa

SEQ ID NO: 743923 - DNA, 15 bp, Homo sapiens
aacataatttgtaag

SEQ ID NO: 743924 - DNA, 15 bp, Homo sapiens
acataatttgtaagg

SEQ ID NO: 743925 - DNA, 15 bp, Homo sapiens
cataatttgtaagga

SEQ ID NO: 743926 - DNA, 15 bp, Homo sapiens
ataatttgtaaggac

SEQ ID NO: 743927 - DNA, 15 bp, Homo sapiens
taatttgtaaggaca

SEQ ID NO: 743928 - DNA, 15 bp, Homo sapiens
aatttgtaaggacac

SEQ ID NO: 743929 - DNA, 15 bp, Homo sapiens
atttgtaaggacaca

SEQ ID NO: 743930 - DNA, 15 bp, Homo sapiens
tttgtaaggacacag

SEQ ID NO: 743931 - DNA, 15 bp, Homo sapiens
ttgtaaggacacagt

SEQ ID NO: 743932 - DNA, 15 bp, Homo sapiens
tgtaaggacacagtc

SEQ ID NO: 743933 - DNA, 15 bp, Homo sapiens
gtaaggacacagtca

SEQ ID NO: 743934 - DNA, 15 bp, Homo sapiens
taaggacacagtcac

SEQ ID NO: 743935 - DNA, 15 bp, Homo sapiens
aaggacacagtcact

SEQ ID NO: 743936 - DNA, 15 bp, Homo sapiens
aggacacagtcacta

SEQ ID NO: 743937 - DNA, 15 bp, Homo sapiens
ggacacagtcactaa

SEQ ID NO: 743938 - DNA, 15 bp, Homo sapiens
gacacagtcactaat

SEQ ID NO: 743939 - DNA, 15 bp, Homo sapiens
acacagtcactaatt

SEQ ID NO: 743940 - DNA, 15 bp, Homo sapiens
cacagtcactaatta

SEQ ID NO: 743941 - DNA, 15 bp, Homo sapiens
acagtcactaattag

SEQ ID NO: 743942 - DNA, 15 bp, Homo sapiens
cagtcactaattagt

SEQ ID NO: 743943 - DNA, 15 bp, Homo sapiens
agtcactaattagtg

SEQ ID NO: 743944 - DNA, 15 bp, Homo sapiens
gtcactaattagtgt

SEQ ID NO: 743945 - DNA, 15 bp, Homo sapiens
tcactaattagtgtt

SEQ ID NO: 743946 - DNA, 15 bp, Homo sapiens
cactaattagtgttc

SEQ ID NO: 743947 - DNA, 15 bp, Homo sapiens
actaattagtgttct

SEQ ID NO: 743948 - DNA, 15 bp, Homo sapiens
ctaattagtgttcta

SEQ ID NO: 743949 - DNA, 15 bp, Homo sapiens
taattagtgttctag

SEQ ID NO: 743950 - DNA, 15 bp, Homo sapiens
aattagtgttctaga

SEQ ID NO: 743951 - DNA, 15 bp, Homo sapiens
attagtgttctagac

SEQ ID NO: 743952 - DNA, 15 bp, Homo sapiens
ttagtgttctagacc

SEQ ID NO: 743953 - DNA, 15 bp, Homo sapiens
tagtgttctagacca

SEQ ID NO: 743954 - DNA, 15 bp, Homo sapiens
agtgttctagaccag

SEQ ID NO: 743955 - DNA, 15 bp, Homo sapiens
gtgttctagaccagc

SEQ ID NO: 743956 - DNA, 15 bp, Homo sapiens
tgttctagaccagca

SEQ ID NO: 743957 - DNA, 15 bp, Homo sapiens
gttctagaccagcag

SEQ ID NO: 743958 - DNA, 15 bp, Homo sapiens
ttctagaccagcagg

SEQ ID NO: 743959 - DNA, 15 bp, Homo sapiens
tctagaccagcagga

SEQ ID NO: 743960 - DNA, 15 bp, Homo sapiens
ctagaccagcaggat

SEQ ID NO: 743961 - DNA, 15 bp, Homo sapiens
tagaccagcaggatc

SEQ ID NO: 743962 - DNA, 15 bp, Homo sapiens
agaccagcaggatct

SEQ ID NO: 743963 - DNA, 15 bp, Homo sapiens
gaccagcaggatctg

SEQ ID NO: 743964 - DNA, 15 bp, Homo sapiens
accagcaggatctgc

SEQ ID NO: 743965 - DNA, 15 bp, Homo sapiens
ccagcaggatctgcg

SEQ ID NO: 743966 - DNA, 15 bp, Homo sapiens
cagcaggatctgcga

SEQ ID NO: 743967 - DNA, 15 bp, Homo sapiens
agcaggatctgcgaa

SEQ ID NO: 743968 - DNA, 15 bp, Homo sapiens
gcaggatctgcgaaa

SEQ ID NO: 743969 - DNA, 15 bp, Homo sapiens
caggatctgcgaaat

SEQ ID NO: 743970 - DNA, 15 bp, Homo sapiens
aggatctgcgaaata

SEQ ID NO: 743971 - DNA, 15 bp, Homo sapiens
ggatctgcgaaatat

SEQ ID NO: 743972 - DNA, 15 bp, Homo sapiens
gatctgcgaaatatg

SEQ ID NO: 743973 - DNA, 15 bp, Homo sapiens
atctgcgaaatatgt

SEQ ID NO: 743974 - DNA, 15 bp, Homo sapiens
tctgcgaaatatgta

SEQ ID NO: 743975 - DNA, 15 bp, Homo sapiens
ctgcgaaatatgtag

SEQ ID NO: 743976 - DNA, 15 bp, Homo sapiens
tgcgaaatatgtagg

SEQ ID NO: 743977 - DNA, 15 bp, Homo sapiens
gcgaaatatgtaggc

SEQ ID NO: 743978 - DNA, 15 bp, Homo sapiens
cgaaatatgtaggct

SEQ ID NO: 743979 - DNA, 15 bp, Homo sapiens
gaaatatgtaggctt

SEQ ID NO: 743980 - DNA, 15 bp, Homo sapiens
aaatatgtaggcttg

SEQ ID NO: 743981 - DNA, 15 bp, Homo sapiens
aatatgtaggcttgg

SEQ ID NO: 743982 - DNA, 15 bp, Homo sapiens
atatgtaggcttggg

SEQ ID NO: 743983 - DNA, 15 bp, Homo sapiens
tatgtaggcttggga

SEQ ID NO: 743984 - DNA, 15 bp, Homo sapiens
atgtaggcttgggag

SEQ ID NO: 743985 - DNA, 15 bp, Homo sapiens
tgtaggcttgggaga

SEQ ID NO: 743986 - DNA, 15 bp, Homo sapiens
gtaggcttgggagag

SEQ ID NO: 743987 - DNA, 15 bp, Homo sapiens
taggcttgggagagg

SEQ ID NO: 743988 - DNA, 15 bp, Homo sapiens
aggcttgggagaggt

SEQ ID NO: 743989 - DNA, 15 bp, Homo sapiens
ggcttgggagaggtg

SEQ ID NO: 743990 - DNA, 15 bp, Homo sapiens
gcttgggagaggtgg

SEQ ID NO: 743991 - DNA, 15 bp, Homo sapiens
cttgggagaggtggc

SEQ ID NO: 743992 - DNA, 15 bp, Homo sapiens
ttgggagaggtggca

SEQ ID NO: 743993 - DNA, 15 bp, Homo sapiens
tgggagaggtggcaa

SEQ ID NO: 743994 - DNA, 15 bp, Homo sapiens
gggagaggtggcaag

SEQ ID NO: 743995 - DNA, 15 bp, Homo sapiens
ggagaggtggcaagg

SEQ ID NO: 743996 - DNA, 15 bp, Homo sapiens
gagaggtggcaagga

SEQ ID NO: 743997 - DNA, 15 bp, Homo sapiens
agaggtggcaaggag

SEQ ID NO: 743998 - DNA, 15 bp, Homo sapiens
gaggtggcaaggagg

SEQ ID NO: 743999 - DNA, 15 bp, Homo sapiens
aggtggcaaggaggg

SEQ ID NO: 744000 - DNA, 15 bp, Homo sapiens
ggtggcaaggagggc

SEQ ID NO: 744001 - DNA, 15 bp, Homo sapiens
gtggcaaggagggcg

SEQ ID NO: 744002 - DNA, 15 bp, Homo sapiens
tggcaaggagggcgg

SEQ ID NO: 744003 - DNA, 15 bp, Homo sapiens
ggcaaggagggcggt

SEQ ID NO: 744004 - DNA, 15 bp, Homo sapiens
gcaaggagggcggtg

SEQ ID NO: 744005 - DNA, 15 bp, Homo sapiens
caaggagggcggtga

SEQ ID NO: 744006 - DNA, 15 bp, Homo sapiens
aaggagggcggtgat

SEQ ID NO: 744007 - DNA, 15 bp, Homo sapiens
aggagggcggtgatg

SEQ ID NO: 744008 - DNA, 15 bp, Homo sapiens
ggagggcggtgatgg

SEQ ID NO: 744009 - DNA, 15 bp, Homo sapiens
gagggcggtgatggg

SEQ ID NO: 744010 - DNA, 15 bp, Homo sapiens
agggcggtgatggga

SEQ ID NO: 744011 - DNA, 15 bp, Homo sapiens
gggcggtgatgggag

SEQ ID NO: 744012 - DNA, 15 bp, Homo sapiens
ggcggtgatgggagg

SEQ ID NO: 744013 - DNA, 15 bp, Homo sapiens
gcggtgatgggagga

SEQ ID NO: 744014 - DNA, 15 bp, Homo sapiens
cggtgatgggaggag

SEQ ID NO: 744015 - DNA, 15 bp, Homo sapiens
ggtgatgggaggaga

SEQ ID NO: 744016 - DNA, 15 bp, Homo sapiens
gtgatgggaggagaa

SEQ ID NO: 744017 - DNA, 15 bp, Homo sapiens
tgatgggaggagaaa

SEQ ID NO: 744018 - DNA, 15 bp, Homo sapiens
gatgggaggagaaac

SEQ ID NO: 744019 - DNA, 15 bp, Homo sapiens
atgggaggagaaact

SEQ ID NO: 744020 - DNA, 15 bp, Homo sapiens
tgggaggagaaactt

SEQ ID NO: 744021 - DNA, 15 bp, Homo sapiens
gggaggagaaacttc

SEQ ID NO: 744022 - DNA, 15 bp, Homo sapiens
ggaggagaaacttca

SEQ ID NO: 744023 - DNA, 15 bp, Homo sapiens
gaggagaaacttcag

SEQ ID NO: 744024 - DNA, 15 bp, Homo sapiens
aggagaaacttcagg

SEQ ID NO: 744025 - DNA, 15 bp, Homo sapiens
ggagaaacttcaggg

SEQ ID NO: 744026 - DNA, 15 bp, Homo sapiens
gagaaacttcaggga

SEQ ID NO: 744027 - DNA, 15 bp, Homo sapiens
agaaacttcagggaa

SEQ ID NO: 744028 - DNA, 15 bp, Homo sapiens
gaaacttcagggaac

SEQ ID NO: 744029 - DNA, 15 bp, Homo sapiens
aaacttcagggaacc

SEQ ID NO: 744030 - DNA, 15 bp, Homo sapiens
aacttcagggaacca

SEQ ID NO: 744031 - DNA, 15 bp, Homo sapiens
acttcagggaaccaa

SEQ ID NO: 744032 - DNA, 15 bp, Homo sapiens
cttcagggaaccaag

SEQ ID NO: 744033 - DNA, 15 bp, Homo sapiens
ttcagggaaccaagc

SEQ ID NO: 744034 - DNA, 15 bp, Homo sapiens
tcagggaaccaagcc

SEQ ID NO: 744035 - DNA, 15 bp, Homo sapiens
cagggaaccaagcct

SEQ ID NO: 744036 - DNA, 15 bp, Homo sapiens
agggaaccaagcctg

SEQ ID NO: 744037 - DNA, 15 bp, Homo sapiens
gggaaccaagcctgg

SEQ ID NO: 744038 - DNA, 15 bp, Homo sapiens
ggaaccaagcctggg

SEQ ID NO: 744039 - DNA, 15 bp, Homo sapiens
gaaccaagcctgggc

SEQ ID NO: 744040 - DNA, 15 bp, Homo sapiens
aaccaagcctgggca

SEQ ID NO: 744041 - DNA, 15 bp, Homo sapiens
accaagcctgggcag

SEQ ID NO: 744042 - DNA, 15 bp, Homo sapiens
ccaagcctgggcaga

SEQ ID NO: 744043 - DNA, 15 bp, Homo sapiens
caagcctgggcagac

SEQ ID NO: 744044 - DNA, 15 bp, Homo sapiens
aagcctgggcagaca

SEQ ID NO: 744045 - DNA, 15 bp, Homo sapiens
agcctgggcagacag

SEQ ID NO: 744046 - DNA, 15 bp, Homo sapiens
gcctgggcagacagt

SEQ ID NO: 744047 - DNA, 15 bp, Homo sapiens
cctgggcagacagtg

SEQ ID NO: 744048 - DNA, 15 bp, Homo sapiens
ctgggcagacagtgg

SEQ ID NO: 744049 - DNA, 15 bp, Homo sapiens
tgggcagacagtgga

SEQ ID NO: 744050 - DNA, 15 bp, Homo sapiens
gggcagacagtggac

SEQ ID NO: 744051 - DNA, 15 bp, Homo sapiens
ggcagacagtggacg

SEQ ID NO: 744052 - DNA, 15 bp, Homo sapiens
gcagacagtggacgg

SEQ ID NO: 744053 - DNA, 15 bp, Homo sapiens
cagacagtggacgga

SEQ ID NO: 744054 - DNA, 15 bp, Homo sapiens
agacagtggacggat

SEQ ID NO: 744055 - DNA, 15 bp, Homo sapiens
gacagtggacggatg

SEQ ID NO: 744056 - DNA, 15 bp, Homo sapiens
acagtggacggatga

SEQ ID NO: 744057 - DNA, 15 bp, Homo sapiens
cagtggacggatgac

SEQ ID NO: 744058 - DNA, 15 bp, Homo sapiens
agtggacggatgaca

SEQ ID NO: 744059 - DNA, 15 bp, Homo sapiens
gtggacggatgacag

SEQ ID NO: 744060 - DNA, 15 bp, Homo sapiens
tggacggatgacagt

SEQ ID NO: 744061 - DNA, 15 bp, Homo sapiens
ggacggatgacagtg

SEQ ID NO: 744062 - DNA, 15 bp, Homo sapiens
gacggatgacagtga

SEQ ID NO: 744063 - DNA, 15 bp, Homo sapiens
acggatgacagtgat

SEQ ID NO: 744064 - DNA, 15 bp, Homo sapiens
cggatgacagtgata

SEQ ID NO: 744065 - DNA, 15 bp, Homo sapiens
ggatgacagtgataa

SEQ ID NO: 744066 - DNA, 15 bp, Homo sapiens
gatgacagtgataaa

SEQ ID NO: 744067 - DNA, 15 bp, Homo sapiens
atgacagtgataaaa

SEQ ID NO: 744068 - DNA, 15 bp, Homo sapiens
tgacagtgataaaag

SEQ ID NO: 744069 - DNA, 15 bp, Homo sapiens
gacagtgataaaaga

SEQ ID NO: 744070 - DNA, 15 bp, Homo sapiens
acagtgataaaagag

SEQ ID NO: 744071 - DNA, 15 bp, Homo sapiens
cagtgataaaagaga

SEQ ID NO: 744072 - DNA, 15 bp, Homo sapiens
agtgataaaagagat

SEQ ID NO: 744073 - DNA, 15 bp, Homo sapiens
gtgataaaagagatc

SEQ ID NO: 744074 - DNA, 15 bp, Homo sapiens
tgataaaagagatcc

SEQ ID NO: 744075 - DNA, 15 bp, Homo sapiens
gataaaagagatcct

SEQ ID NO: 744076 - DNA, 15 bp, Homo sapiens
ataaaagagatcctc

SEQ ID NO: 744077 - DNA, 15 bp, Homo sapiens
taaaagagatcctct

SEQ ID NO: 744078 - DNA, 15 bp, Homo sapiens
aaaagagatcctctc

SEQ ID NO: 744079 - DNA, 15 bp, Homo sapiens
aaagagatcctctct

SEQ ID NO: 744080 - DNA, 15 bp, Homo sapiens
aagagatcctctctt

SEQ ID NO: 744081 - DNA, 15 bp, Homo sapiens
agagatcctctcttg

SEQ ID NO: 744082 - DNA, 15 bp, Homo sapiens
gagatcctctcttgg

SEQ ID NO: 744083 - DNA, 15 bp, Homo sapiens
agatcctctcttggg

SEQ ID NO: 744084 - DNA, 15 bp, Homo sapiens
gatcctctcttgggg

SEQ ID NO: 744085 - DNA, 15 bp, Homo sapiens
atcctctcttggggg

SEQ ID NO: 744086 - DNA, 15 bp, Homo sapiens
tcctctcttgggggc

SEQ ID NO: 744087 - DNA, 15 bp, Homo sapiens
cctctcttgggggct

SEQ ID NO: 744088 - DNA, 15 bp, Homo sapiens
ctctcttgggggctc

SEQ ID NO: 744089 - DNA, 15 bp, Homo sapiens
tctcttgggggctca

SEQ ID NO: 744090 - DNA, 15 bp, Homo sapiens
ctcttgggggctcac

SEQ ID NO: 744091 - DNA, 15 bp, Homo sapiens
tcttgggggctcacc

SEQ ID NO: 744092 - DNA, 15 bp, Homo sapiens
cttgggggctcaccg

SEQ ID NO: 744093 - DNA, 15 bp, Homo sapiens
ttgggggctcaccgt

SEQ ID NO: 744094 - DNA, 15 bp, Homo sapiens
tgggggctcaccgtc

SEQ ID NO: 744095 - DNA, 15 bp, Homo sapiens
gggggctcaccgtct

SEQ ID NO: 744096 - DNA, 15 bp, Homo sapiens
ggggctcaccgtctc

SEQ ID NO: 744097 - DNA, 15 bp, Homo sapiens
gggctcaccgtctct

SEQ ID NO: 744098 - DNA, 15 bp, Homo sapiens
ggctcaccgtctctt

SEQ ID NO: 744099 - DNA, 15 bp, Homo sapiens
gctcaccgtctcttg

SEQ ID NO: 744100 - DNA, 15 bp, Homo sapiens
ctcaccgtctcttga

SEQ ID NO: 744101 - DNA, 15 bp, Homo sapiens
tcaccgtctcttgag

SEQ ID NO: 744102 - DNA, 15 bp, Homo sapiens
caccgtctcttgagg

SEQ ID NO: 744103 - DNA, 15 bp, Homo sapiens
accgtctcttgaggg

SEQ ID NO: 744104 - DNA, 15 bp, Homo sapiens
ccgtctcttgagggt

SEQ ID NO: 744105 - DNA, 15 bp, Homo sapiens
cgtctcttgagggtg

SEQ ID NO: 744106 - DNA, 15 bp, Homo sapiens
gtctcttgagggtga

SEQ ID NO: 744107 - DNA, 15 bp, Homo sapiens
tctcttgagggtgat

SEQ ID NO: 744108 - DNA, 15 bp, Homo sapiens
ctcttgagggtgatg

SEQ ID NO: 744109 - DNA, 15 bp, Homo sapiens
tcttgagggtgatga

SEQ ID NO: 744110 - DNA, 15 bp, Homo sapiens
cttgagggtgatgaa

SEQ ID NO: 744111 - DNA, 15 bp, Homo sapiens
ttgagggtgatgaat

SEQ ID NO: 744112 - DNA, 15 bp, Homo sapiens
tgagggtgatgaata

SEQ ID NO: 744113 - DNA, 15 bp, Homo sapiens
gagggtgatgaatag

SEQ ID NO: 744114 - DNA, 15 bp, Homo sapiens
agggtgatgaatagt

SEQ ID NO: 744115 - DNA, 15 bp, Homo sapiens
gggtgatgaatagta

SEQ ID NO: 744116 - DNA, 15 bp, Homo sapiens
ggtgatgaatagtaa

SEQ ID NO: 744117 - DNA, 15 bp, Homo sapiens
gtgatgaatagtaag

SEQ ID NO: 744118 - DNA, 15 bp, Homo sapiens
tgatgaatagtaaga

SEQ ID NO: 744119 - DNA, 15 bp, Homo sapiens
gatgaatagtaagac

SEQ ID NO: 744120 - DNA, 15 bp, Homo sapiens
atgaatagtaagaca

SEQ ID NO: 744121 - DNA, 15 bp, Homo sapiens
tgaatagtaagacag

SEQ ID NO: 744122 - DNA, 15 bp, Homo sapiens
gaatagtaagacaga

SEQ ID NO: 744123 - DNA, 15 bp, Homo sapiens
aatagtaagacagag

SEQ ID NO: 744124 - DNA, 15 bp, Homo sapiens
atagtaagacagagt

SEQ ID NO: 744125 - DNA, 15 bp, Homo sapiens
tagtaagacagagta

SEQ ID NO: 744126 - DNA, 15 bp, Homo sapiens
agtaagacagagtaa

SEQ ID NO: 744127 - DNA, 15 bp, Homo sapiens
gtaagacagagtaaa

SEQ ID NO: 744128 - DNA, 15 bp, Homo sapiens
taagacagagtaaaa

SEQ ID NO: 744129 - DNA, 15 bp, Homo sapiens
aagacagagtaaaaa

SEQ ID NO: 744130 - DNA, 15 bp, Homo sapiens
agacagagtaaaaag

SEQ ID NO: 744131 - DNA, 15 bp, Homo sapiens
gacagagtaaaaagt

SEQ ID NO: 744132 - DNA, 15 bp, Homo sapiens
acagagtaaaaagtc

SEQ ID NO: 744133 - DNA, 15 bp, Homo sapiens
cagagtaaaaagtca

SEQ ID NO: 744134 - DNA, 15 bp, Homo sapiens
agagtaaaaagtcat

SEQ ID NO: 744135 - DNA, 15 bp, Homo sapiens
gagtaaaaagtcatt

SEQ ID NO: 744136 - DNA, 15 bp, Homo sapiens
agtaaaaagtcattt

SEQ ID NO: 744137 - DNA, 15 bp, Homo sapiens
gtaaaaagtcatttc

SEQ ID NO: 744138 - DNA, 15 bp, Homo sapiens
taaaaagtcatttct

SEQ ID NO: 744139 - DNA, 15 bp, Homo sapiens
aaaaagtcatttctg

SEQ ID NO: 744140 - DNA, 15 bp, Homo sapiens
aaaagtcatttctga

SEQ ID NO: 744141 - DNA, 15 bp, Homo sapiens
aaagtcatttctgac

SEQ ID NO: 744142 - DNA, 15 bp, Homo sapiens
aagtcatttctgact

SEQ ID NO: 744143 - DNA, 15 bp, Homo sapiens
agtcatttctgactc

SEQ ID NO: 744144 - DNA, 15 bp, Homo sapiens
gtcatttctgactct

SEQ ID NO: 744145 - DNA, 15 bp, Homo sapiens
tcatttctgactctg

SEQ ID NO: 744146 - DNA, 15 bp, Homo sapiens
catttctgactctga

SEQ ID NO: 744147 - DNA, 15 bp, Homo sapiens
atttctgactctgaa

SEQ ID NO: 744148 - DNA, 15 bp, Homo sapiens
tttctgactctgaaa

SEQ ID NO: 744149 - DNA, 15 bp, Homo sapiens
ttctgactctgaaat

SEQ ID NO: 744150 - DNA, 15 bp, Homo sapiens
tctgactctgaaatt

SEQ ID NO: 744151 - DNA, 15 bp, Homo sapiens
ctgactctgaaatta

SEQ ID NO: 744152 - DNA, 15 bp, Homo sapiens
tgactctgaaattaa

SEQ ID NO: 744153 - DNA, 15 bp, Homo sapiens
gactctgaaattaaa

SEQ ID NO: 744154 - DNA, 15 bp, Homo sapiens
actctgaaattaaag

SEQ ID NO: 744155 - DNA, 15 bp, Homo sapiens
ctctgaaattaaaga

SEQ ID NO: 744156 - DNA, 15 bp, Homo sapiens
tctgaaattaaagaa

SEQ ID NO: 744157 - DNA, 15 bp, Homo sapiens
ctgaaattaaagaaa

SEQ ID NO: 744158 - DNA, 15 bp, Homo sapiens
tgaaattaaagaaaa

SEQ ID NO: 744159 - DNA, 15 bp, Homo sapiens
gaaattaaagaaaaa

SEQ ID NO: 744160 - DNA, 15 bp, Homo sapiens
aaattaaagaaaaaa

SEQ ID NO: 744161 - DNA, 15 bp, Homo sapiens
aattaaagaaaaaaa

SEQ ID NO: 744162 - DNA, 15 bp, Homo sapiens
attaaagaaaaaaaa

SEQ ID NO: 744163 - DNA, 15 bp, Homo sapiens
ttaaagaaaaaaaaa

SEQ ID NO: 744164 - DNA, 15 bp, Homo sapiens
taaagaaaaaaaaaa

SEQ ID NO: 744165 - DNA, 15 bp, Homo sapiens
aaagaaaaaaaaaag

SEQ ID NO: 744166 - DNA, 15 bp, Homo sapiens
aagaaaaaaaaaagt

SEQ ID NO: 744167 - DNA, 15 bp, Homo sapiens
agaaaaaaaaaagtt

SEQ ID NO: 744168 - DNA, 15 bp, Homo sapiens
gaaaaaaaaaagttg

SEQ ID NO: 744169 - DNA, 15 bp, Homo sapiens
aaaaaaaaaagttgg

SEQ ID NO: 744170 - DNA, 15 bp, Homo sapiens
aaaaaaaaagttggt

SEQ ID NO: 744171 - DNA, 15 bp, Homo sapiens
aaaaaaaagttggtt

SEQ ID NO: 744172 - DNA, 15 bp, Homo sapiens
aaaaaaagttggttt

SEQ ID NO: 744173 - DNA, 15 bp, Homo sapiens
aaaaaagttggttta

SEQ ID NO: 744174 - DNA, 15 bp, Homo sapiens
aaaaagttggtttag

SEQ ID NO: 744175 - DNA, 15 bp, Homo sapiens
aaaagttggtttaga

SEQ ID NO: 744176 - DNA, 15 bp, Homo sapiens
aaagttggtttagag

SEQ ID NO: 744177 - DNA, 15 bp, Homo sapiens
aagttggtttagaga

SEQ ID NO: 744178 - DNA, 15 bp, Homo sapiens
agttggtttagagat

SEQ ID NO: 744179 - DNA, 15 bp, Homo sapiens
gttggtttagagatg

SEQ ID NO: 744180 - DNA, 15 bp, Homo sapiens
ttggtttagagatgg

SEQ ID NO: 744181 - DNA, 15 bp, Homo sapiens
tggtttagagatgga

SEQ ID NO: 744182 - DNA, 15 bp, Homo sapiens
ggtttagagatggac

SEQ ID NO: 744183 - DNA, 15 bp, Homo sapiens
gtttagagatggaca

SEQ ID NO: 744184 - DNA, 15 bp, Homo sapiens
tttagagatggacac

SEQ ID NO: 744185 - DNA, 15 bp, Homo sapiens
ttagagatggacaca

SEQ ID NO: 744186 - DNA, 15 bp, Homo sapiens
tagagatggacacag

SEQ ID NO: 744187 - DNA, 15 bp, Homo sapiens
agagatggacacagc

SEQ ID NO: 744188 - DNA, 15 bp, Homo sapiens
gagatggacacagca

SEQ ID NO: 744189 - DNA, 15 bp, Homo sapiens
agatggacacagcaa

SEQ ID NO: 744190 - DNA, 15 bp, Homo sapiens
gatggacacagcaaa

SEQ ID NO: 744191 - DNA, 15 bp, Homo sapiens
atggacacagcaaaa

SEQ ID NO: 744192 - DNA, 15 bp, Homo sapiens
tggacacagcaaaac

SEQ ID NO: 744193 - DNA, 15 bp, Homo sapiens
ggacacagcaaaacc

SEQ ID NO: 744194 - DNA, 15 bp, Homo sapiens
gacacagcaaaacct

SEQ ID NO: 744195 - DNA, 15 bp, Homo sapiens
acacagcaaaacctg

SEQ ID NO: 744196 - DNA, 15 bp, Homo sapiens
cacagcaaaacctga

SEQ ID NO: 744197 - DNA, 15 bp, Homo sapiens
acagcaaaacctgac

SEQ ID NO: 744198 - DNA, 15 bp, Homo sapiens
cagcaaaacctgact

SEQ ID NO: 744199 - DNA, 15 bp, Homo sapiens
agcaaaacctgactc

SEQ ID NO: 744200 - DNA, 15 bp, Homo sapiens
gcaaaacctgactca

SEQ ID NO: 744201 - DNA, 15 bp, Homo sapiens
caaaacctgactcaa

SEQ ID NO: 744202 - DNA, 15 bp, Homo sapiens
aaaacctgactcaaa

SEQ ID NO: 744203 - DNA, 15 bp, Homo sapiens
aaacctgactcaaac

SEQ ID NO: 744204 - DNA, 15 bp, Homo sapiens
aacctgactcaaacc

SEQ ID NO: 744205 - DNA, 15 bp, Homo sapiens
acctgactcaaacct

SEQ ID NO: 744206 - DNA, 15 bp, Homo sapiens
cctgactcaaacctc

SEQ ID NO: 744207 - DNA, 15 bp, Homo sapiens
ctgactcaaacctcc

SEQ ID NO: 744208 - DNA, 15 bp, Homo sapiens
tgactcaaacctcct

SEQ ID NO: 744209 - DNA, 15 bp, Homo sapiens
gactcaaacctcctt

SEQ ID NO: 744210 - DNA, 15 bp, Homo sapiens
actcaaacctccttt

SEQ ID NO: 744211 - DNA, 15 bp, Homo sapiens
ctcaaacctcctttc

SEQ ID NO: 744212 - DNA, 15 bp, Homo sapiens
tcaaacctcctttcc

SEQ ID NO: 744213 - DNA, 15 bp, Homo sapiens
caaacctcctttccc

SEQ ID NO: 744214 - DNA, 15 bp, Homo sapiens
aaacctcctttccct

SEQ ID NO: 744215 - DNA, 15 bp, Homo sapiens
aacctcctttccctt

SEQ ID NO: 744216 - DNA, 15 bp, Homo sapiens
acctcctttcccttt

SEQ ID NO: 744217 - DNA, 15 bp, Homo sapiens
cctcctttccctttt

SEQ ID NO: 744218 - DNA, 15 bp, Homo sapiens
ctcctttcccttttg

SEQ ID NO: 744219 - DNA, 15 bp, Homo sapiens
tcctttcccttttga

SEQ ID NO: 744220 - DNA, 15 bp, Homo sapiens
cctttcccttttgat

SEQ ID NO: 744221 - DNA, 15 bp, Homo sapiens
ctttcccttttgatt

SEQ ID NO: 744222 - DNA, 15 bp, Homo sapiens
tttcccttttgattt

SEQ ID NO: 744223 - DNA, 15 bp, Homo sapiens
ttcccttttgatttt

SEQ ID NO: 744224 - DNA, 15 bp, Homo sapiens
tcccttttgatttta

SEQ ID NO: 744225 - DNA, 15 bp, Homo sapiens
cccttttgattttat

SEQ ID NO: 744226 - DNA, 15 bp, Homo sapiens
ccttttgattttatt

SEQ ID NO: 744227 - DNA, 15 bp, Homo sapiens
cttttgattttattt

SEQ ID NO: 744228 - DNA, 15 bp, Homo sapiens
ttttgattttatttt

SEQ ID NO: 744229 - DNA, 15 bp, Homo sapiens
tttgattttattttg

SEQ ID NO: 744230 - DNA, 15 bp, Homo sapiens
ttgattttattttgt

SEQ ID NO: 744231 - DNA, 15 bp, Homo sapiens
tgattttattttgtt

SEQ ID NO: 744232 - DNA, 15 bp, Homo sapiens
gattttattttgttt

SEQ ID NO: 744233 - DNA, 15 bp, Homo sapiens
attttattttgtttt

SEQ ID NO: 744234 - DNA, 15 bp, Homo sapiens
ttttattttgtttta

SEQ ID NO: 744235 - DNA, 15 bp, Homo sapiens
tttattttgttttat

SEQ ID NO: 744236 - DNA, 15 bp, Homo sapiens
ttattttgttttatt

SEQ ID NO: 744237 - DNA, 15 bp, Homo sapiens
tattttgttttattg

SEQ ID NO: 744238 - DNA, 15 bp, Homo sapiens
attttgttttattgt

SEQ ID NO: 744239 - DNA, 15 bp, Homo sapiens
ttttgttttattgtt

SEQ ID NO: 744240 - DNA, 15 bp, Homo sapiens
tttgttttattgttg

SEQ ID NO: 744241 - DNA, 15 bp, Homo sapiens
ttgttttattgttgc

SEQ ID NO: 744242 - DNA, 15 bp, Homo sapiens
tgttttattgttgca

SEQ ID NO: 744243 - DNA, 15 bp, Homo sapiens
gttttattgttgcaa

SEQ ID NO: 744244 - DNA, 15 bp, Homo sapiens
ttttattgttgcaaa

SEQ ID NO: 744245 - DNA, 15 bp, Homo sapiens
tttattgttgcaaat

SEQ ID NO: 744246 - DNA, 15 bp, Homo sapiens
ttattgttgcaaatt

SEQ ID NO: 744247 - DNA, 15 bp, Homo sapiens
tattgttgcaaatta

SEQ ID NO: 744248 - DNA, 15 bp, Homo sapiens
attgttgcaaattaa

SEQ ID NO: 744249 - DNA, 15 bp, Homo sapiens
ttgttgcaaattaaa

SEQ ID NO: 744250 - DNA, 15 bp, Homo sapiens
tgttgcaaattaaat

SEQ ID NO: 744251 - DNA, 15 bp, Homo sapiens
gttgcaaattaaatg

SEQ ID NO: 744252 - DNA, 15 bp, Homo sapiens
ttgcaaattaaatgc

SEQ ID NO: 744253 - DNA, 15 bp, Homo sapiens
tgcaaattaaatgca

SEQ ID NO: 744254 - DNA, 15 bp, Homo sapiens
gcaaattaaatgcaa

SEQ ID NO: 744255 - DNA, 15 bp, Homo sapiens
caaattaaatgcaaa

SEQ ID NO: 744256 - DNA, 15 bp, Homo sapiens
aaattaaatgcaaaa

SEQ ID NO: 744257 - DNA, 15 bp, Homo sapiens
aattaaatgcaaaaa

SEQ ID NO: 744258 - DNA, 15 bp, Homo sapiens
attaaatgcaaaaat

SEQ ID NO: 744259 - DNA, 15 bp, Homo sapiens
ttaaatgcaaaaatg

SEQ ID NO: 744260 - DNA, 15 bp, Homo sapiens
taaatgcaaaaatgt

SEQ ID NO: 744261 - DNA, 15 bp, Homo sapiens
aaatgcaaaaatgta

SEQ ID NO: 744262 - DNA, 15 bp, Homo sapiens
aatgcaaaaatgtac

SEQ ID NO: 744263 - DNA, 15 bp, Homo sapiens
atgcaaaaatgtacc

SEQ ID NO: 744264 - DNA, 15 bp, Homo sapiens
tgcaaaaatgtaccc

SEQ ID NO: 744265 - DNA, 15 bp, Homo sapiens
gcaaaaatgtaccct

SEQ ID NO: 744266 - DNA, 15 bp, Homo sapiens
caaaaatgtaccctg

SEQ ID NO: 744267 - DNA, 15 bp, Homo sapiens
aaaaatgtaccctgc

SEQ ID NO: 744268 - DNA, 15 bp, Homo sapiens
aaaatgtaccctgct

SEQ ID NO: 744269 - DNA, 15 bp, Homo sapiens
aaatgtaccctgctc

SEQ ID NO: 744270 - DNA, 15 bp, Homo sapiens
aatgtaccctgctcc

SEQ ID NO: 744271 - DNA, 15 bp, Homo sapiens
atgtaccctgctcct

SEQ ID NO: 744272 - DNA, 15 bp, Homo sapiens
tgtaccctgctcctc

SEQ ID NO: 744273 - DNA, 15 bp, Homo sapiens
gtaccctgctcctca

SEQ ID NO: 744274 - DNA, 15 bp, Homo sapiens
taccctgctcctcaa

SEQ ID NO: 744275 - DNA, 15 bp, Homo sapiens
accctgctcctcaaa

SEQ ID NO: 744276 - DNA, 15 bp, Homo sapiens
ccctgctcctcaaag

SEQ ID NO: 744277 - DNA, 15 bp, Homo sapiens
cctgctcctcaaagt

SEQ ID NO: 744278 - DNA, 15 bp, Homo sapiens
ctgctcctcaaagtg

SEQ ID NO: 744279 - DNA, 15 bp, Homo sapiens
tgctcctcaaagtgg

SEQ ID NO: 744280 - DNA, 15 bp, Homo sapiens
gctcctcaaagtggt

SEQ ID NO: 744281 - DNA, 15 bp, Homo sapiens
ctcctcaaagtggtt

SEQ ID NO: 744282 - DNA, 15 bp, Homo sapiens
tcctcaaagtggttt

SEQ ID NO: 744283 - DNA, 15 bp, Homo sapiens
cctcaaagtggtttt

SEQ ID NO: 744284 - DNA, 15 bp, Homo sapiens
ctcaaagtggttttc

SEQ ID NO: 744285 - DNA, 15 bp, Homo sapiens
tcaaagtggttttct

SEQ ID NO: 744286 - DNA, 15 bp, Homo sapiens
caaagtggttttctt

SEQ ID NO: 744287 - DNA, 15 bp, Homo sapiens
aaagtggttttctta

SEQ ID NO: 744288 - DNA, 15 bp, Homo sapiens
aagtggttttcttac

SEQ ID NO: 744289 - DNA, 15 bp, Homo sapiens
agtggttttcttact

SEQ ID NO: 744290 - DNA, 15 bp, Homo sapiens
gtggttttcttactc

SEQ ID NO: 744291 - DNA, 15 bp, Homo sapiens
tggttttcttactct

SEQ ID NO: 744292 - DNA, 15 bp, Homo sapiens
ggttttcttactctc

SEQ ID NO: 744293 - DNA, 15 bp, Homo sapiens
gttttcttactctct

SEQ ID NO: 744294 - DNA, 15 bp, Homo sapiens
ttttcttactctctg

SEQ ID NO: 744295 - DNA, 15 bp, Homo sapiens
tttcttactctctgg

SEQ ID NO: 744296 - DNA, 15 bp, Homo sapiens
ttcttactctctgga

SEQ ID NO: 744297 - DNA, 15 bp, Homo sapiens
tcttactctctggaa

SEQ ID NO: 744298 - DNA, 15 bp, Homo sapiens
cttactctctggaag

SEQ ID NO: 744299 - DNA, 15 bp, Homo sapiens
ttactctctggaagg

SEQ ID NO: 744300 - DNA, 15 bp, Homo sapiens
tactctctggaaggt

SEQ ID NO: 744301 - DNA, 15 bp, Homo sapiens
actctctggaaggta

SEQ ID NO: 744302 - DNA, 15 bp, Homo sapiens
ctctctggaaggtag

SEQ ID NO: 744303 - DNA, 15 bp, Homo sapiens
tctctggaaggtagt

SEQ ID NO: 744304 - DNA, 15 bp, Homo sapiens
ctctggaaggtagta

SEQ ID NO: 744305 - DNA, 15 bp, Homo sapiens
tctggaaggtagtaa

SEQ ID NO: 744306 - DNA, 15 bp, Homo sapiens
ctggaaggtagtaaa

SEQ ID NO: 744307 - DNA, 15 bp, Homo sapiens
tggaaggtagtaaaa

SEQ ID NO: 744308 - DNA, 15 bp, Homo sapiens
ggaaggtagtaaaaa

SEQ ID NO: 744309 - DNA, 15 bp, Homo sapiens
gaaggtagtaaaaat

SEQ ID NO: 744310 - DNA, 15 bp, Homo sapiens
aaggtagtaaaaata

SEQ ID NO: 744311 - DNA, 15 bp, Homo sapiens
aggtagtaaaaataa

SEQ ID NO: 744312 - DNA, 15 bp, Homo sapiens
ggtagtaaaaataaa

SEQ ID NO: 744313 - DNA, 15 bp, Homo sapiens
gtagtaaaaataaat

SEQ ID NO: 744314 - DNA, 15 bp, Homo sapiens
tagtaaaaataaatg

SEQ ID NO: 744315 - DNA, 15 bp, Homo sapiens
agtaaaaataaatgg

SEQ ID NO: 744316 - DNA, 15 bp, Homo sapiens
gtaaaaataaatgga

SEQ ID NO: 744317 - DNA, 15 bp, Homo sapiens
taaaaataaatggaa

SEQ ID NO: 744318 - DNA, 15 bp, Homo sapiens
aaaaataaatggaac

SEQ ID NO: 744319 - DNA, 15 bp, Homo sapiens
aaaataaatggaacc

SEQ ID NO: 744320 - DNA, 15 bp, Homo sapiens
aaataaatggaacca

SEQ ID NO: 744321 - DNA, 15 bp, Homo sapiens
aataaatggaaccag

SEQ ID NO: 744322 - DNA, 15 bp, Homo sapiens
ataaatggaaccagt

SEQ ID NO: 744323 - DNA, 15 bp, Homo sapiens
taaatggaaccagtg

SEQ ID NO: 744324 - DNA, 15 bp, Homo sapiens
aaatggaaccagtgt

SEQ ID NO: 744325 - DNA, 15 bp, Homo sapiens
aatggaaccagtgtt

SEQ ID NO: 744326 - DNA, 15 bp, Homo sapiens
atggaaccagtgttg

SEQ ID NO: 744327 - DNA, 15 bp, Homo sapiens
tggaaccagtgttgt

SEQ ID NO: 744328 - DNA, 15 bp, Homo sapiens
ggaaccagtgttgtt

SEQ ID NO: 744329 - DNA, 15 bp, Homo sapiens
gaaccagtgttgttt

SEQ ID NO: 744330 - DNA, 15 bp, Homo sapiens
aaccagtgttgttta

SEQ ID NO: 744331 - DNA, 15 bp, Homo sapiens
accagtgttgtttaa

SEQ ID NO: 744332 - DNA, 15 bp, Homo sapiens
ccagtgttgtttaat

SEQ ID NO: 744333 - DNA, 15 bp, Homo sapiens
cagtgttgtttaata

SEQ ID NO: 744334 - DNA, 15 bp, Homo sapiens
agtgttgtttaatac

SEQ ID NO: 744335 - DNA, 15 bp, Homo sapiens
gtgttgtttaatact

SEQ ID NO: 744336 - DNA, 15 bp, Homo sapiens
tgttgtttaatactg

SEQ ID NO: 744337 - DNA, 15 bp, Homo sapiens
gttgtttaatactga

SEQ ID NO: 744338 - DNA, 15 bp, Homo sapiens
ttgtttaatactgag

SEQ ID NO: 744339 - DNA, 15 bp, Homo sapiens
tgtttaatactgaga

SEQ ID NO: 744340 - DNA, 15 bp, Homo sapiens
gtttaatactgagaa

SEQ ID NO: 744341 - DNA, 15 bp, Homo sapiens
tttaatactgagaat

SEQ ID NO: 744342 - DNA, 15 bp, Homo sapiens
ttaatactgagaatc

SEQ ID NO: 744343 - DNA, 15 bp, Homo sapiens
taatactgagaatca

SEQ ID NO: 744344 - DNA, 15 bp, Homo sapiens
aatactgagaatcag

SEQ ID NO: 744345 - DNA, 15 bp, Homo sapiens
atactgagaatcaga

SEQ ID NO: 744346 - DNA, 15 bp, Homo sapiens
tactgagaatcagag

SEQ ID NO: 744347 - DNA, 15 bp, Homo sapiens
actgagaatcagagt

SEQ ID NO: 744348 - DNA, 15 bp, Homo sapiens
ctgagaatcagagtc

SEQ ID NO: 744349 - DNA, 15 bp, Homo sapiens
tgagaatcagagtcc

SEQ ID NO: 744350 - DNA, 15 bp, Homo sapiens
gagaatcagagtcca

SEQ ID NO: 744351 - DNA, 15 bp, Homo sapiens
agaatcagagtccag

SEQ ID NO: 744352 - DNA, 15 bp, Homo sapiens
gaatcagagtccagc

SEQ ID NO: 744353 - DNA, 15 bp, Homo sapiens
aatcagagtccagcc

SEQ ID NO: 744354 - DNA, 15 bp, Homo sapiens
atcagagtccagcca

SEQ ID NO: 744355 - DNA, 15 bp, Homo sapiens
tcagagtccagccag

SEQ ID NO: 744356 - DNA, 15 bp, Homo sapiens
cagagtccagccaga

SEQ ID NO: 744357 - DNA, 15 bp, Homo sapiens
agagtccagccagag

SEQ ID NO: 744358 - DNA, 15 bp, Homo sapiens
gagtccagccagaga

SEQ ID NO: 744359 - DNA, 15 bp, Homo sapiens
agtccagccagagac

SEQ ID NO: 744360 - DNA, 15 bp, Homo sapiens
gtccagccagagacc

SEQ ID NO: 744361 - DNA, 15 bp, Homo sapiens
tccagccagagacca

SEQ ID NO: 744362 - DNA, 15 bp, Homo sapiens
ccagccagagaccat

SEQ ID NO: 744363 - DNA, 15 bp, Homo sapiens
cagccagagaccatg

SEQ ID NO: 744364 - DNA, 15 bp, Homo sapiens
agccagagaccatga

SEQ ID NO: 744365 - DNA, 15 bp, Homo sapiens
gccagagaccatgaa

SEQ ID NO: 744366 - DNA, 15 bp, Homo sapiens
ccagagaccatgaag

SEQ ID NO: 744367 - DNA, 15 bp, Homo sapiens
cagagaccatgaagg

SEQ ID NO: 744368 - DNA, 15 bp, Homo sapiens
agagaccatgaaggc

SEQ ID NO: 744369 - DNA, 15 bp, Homo sapiens
gagaccatgaaggca

SEQ ID NO: 744370 - DNA, 15 bp, Homo sapiens
agaccatgaaggcag

SEQ ID NO: 744371 - DNA, 15 bp, Homo sapiens
gaccatgaaggcaga

SEQ ID NO: 744372 - DNA, 15 bp, Homo sapiens
accatgaaggcagaa

SEQ ID NO: 744373 - DNA, 15 bp, Homo sapiens
ccatgaaggcagaag

SEQ ID NO: 744374 - DNA, 15 bp, Homo sapiens
catgaaggcagaagg

SEQ ID NO: 744375 - DNA, 15 bp, Homo sapiens
atgaaggcagaaggg

SEQ ID NO: 744376 - DNA, 15 bp, Homo sapiens
tgaaggcagaagggg

SEQ ID NO: 744377 - DNA, 15 bp, Homo sapiens
gaaggcagaaggggg

SEQ ID NO: 744378 - DNA, 15 bp, Homo sapiens
aaggcagaagggggc

SEQ ID NO: 744379 - DNA, 15 bp, Homo sapiens
aggcagaagggggcc

SEQ ID NO: 744380 - DNA, 15 bp, Homo sapiens
ggcagaagggggccc

SEQ ID NO: 744381 - DNA, 15 bp, Homo sapiens
gcagaagggggccca

SEQ ID NO: 744382 - DNA, 15 bp, Homo sapiens
cagaagggggcccat

SEQ ID NO: 744383 - DNA, 15 bp, Homo sapiens
agaagggggcccatg

SEQ ID NO: 744384 - DNA, 15 bp, Homo sapiens
gaagggggcccatgg

SEQ ID NO: 744385 - DNA, 15 bp, Homo sapiens
aagggggcccatggg

SEQ ID NO: 744386 - DNA, 15 bp, Homo sapiens
agggggcccatgggg

SEQ ID NO: 744387 - DNA, 15 bp, Homo sapiens
gggggcccatggggc

SEQ ID NO: 744388 - DNA, 15 bp, Homo sapiens
ggggcccatggggcc

SEQ ID NO: 744389 - DNA, 15 bp, Homo sapiens
gggcccatggggcca

SEQ ID NO: 744390 - DNA, 15 bp, Homo sapiens
ggcccatggggccat

SEQ ID NO: 744391 - DNA, 15 bp, Homo sapiens
gcccatggggccatc

SEQ ID NO: 744392 - DNA, 15 bp, Homo sapiens
cccatggggccatct

SEQ ID NO: 744393 - DNA, 15 bp, Homo sapiens
ccatggggccatctt

SEQ ID NO: 744394 - DNA, 15 bp, Homo sapiens
catggggccatcttc

SEQ ID NO: 744395 - DNA, 15 bp, Homo sapiens
atggggccatcttcc

SEQ ID NO: 744396 - DNA, 15 bp, Homo sapiens
tggggccatcttccc

SEQ ID NO: 744397 - DNA, 15 bp, Homo sapiens
ggggccatcttccct

SEQ ID NO: 744398 - DNA, 15 bp, Homo sapiens
gggccatcttccctt

SEQ ID NO: 744399 - DNA, 15 bp, Homo sapiens
ggccatcttcccttg

SEQ ID NO: 744400 - DNA, 15 bp, Homo sapiens
gccatcttcccttgt

SEQ ID NO: 744401 - DNA, 15 bp, Homo sapiens
ccatcttcccttgtc

SEQ ID NO: 744402 - DNA, 15 bp, Homo sapiens
catcttcccttgtcc

SEQ ID NO: 744403 - DNA, 15 bp, Homo sapiens
atcttcccttgtccc

SEQ ID NO: 744404 - DNA, 15 bp, Homo sapiens
tcttcccttgtcccc

SEQ ID NO: 744405 - DNA, 15 bp, Homo sapiens
cttcccttgtcccct

SEQ ID NO: 744406 - DNA, 15 bp, Homo sapiens
ttcccttgtcccctt

SEQ ID NO: 744407 - DNA, 15 bp, Homo sapiens
tcccttgtccccttt

SEQ ID NO: 744408 - DNA, 15 bp, Homo sapiens
cccttgtccccttta

SEQ ID NO: 744409 - DNA, 15 bp, Homo sapiens
ccttgtcccctttac

SEQ ID NO: 744410 - DNA, 15 bp, Homo sapiens
cttgtcccctttaca

SEQ ID NO: 744411 - DNA, 15 bp, Homo sapiens
ttgtcccctttacat

SEQ ID NO: 744412 - DNA, 15 bp, Homo sapiens
tgtcccctttacatt

SEQ ID NO: 744413 - DNA, 15 bp, Homo sapiens
gtcccctttacatta

SEQ ID NO: 744414 - DNA, 15 bp, Homo sapiens
tcccctttacattat

SEQ ID NO: 744415 - DNA, 15 bp, Homo sapiens
cccctttacattatt

SEQ ID NO: 744416 - DNA, 15 bp, Homo sapiens
ccctttacattattt

SEQ ID NO: 744417 - DNA, 15 bp, Homo sapiens
cctttacattattta

SEQ ID NO: 744418 - DNA, 15 bp, Homo sapiens
ctttacattatttat

SEQ ID NO: 744419 - DNA, 15 bp, Homo sapiens
tttacattatttatg

SEQ ID NO: 744420 - DNA, 15 bp, Homo sapiens
ttacattatttatgg

SEQ ID NO: 744421 - DNA, 15 bp, Homo sapiens
tacattatttatgga

SEQ ID NO: 744422 - DNA, 15 bp, Homo sapiens
acattatttatggac

SEQ ID NO: 744423 - DNA, 15 bp, Homo sapiens
cattatttatggaca

SEQ ID NO: 744424 - DNA, 15 bp, Homo sapiens
attatttatggacag

SEQ ID NO: 744425 - DNA, 15 bp, Homo sapiens
ttatttatggacagg

SEQ ID NO: 744426 - DNA, 15 bp, Homo sapiens
tatttatggacaggt

SEQ ID NO: 744427 - DNA, 15 bp, Homo sapiens
atttatggacaggtc

SEQ ID NO: 744428 - DNA, 15 bp, Homo sapiens
tttatggacaggtca

SEQ ID NO: 744429 - DNA, 15 bp, Homo sapiens
ttatggacaggtcaa

SEQ ID NO: 744430 - DNA, 15 bp, Homo sapiens
tatggacaggtcaaa

SEQ ID NO: 744431 - DNA, 15 bp, Homo sapiens
atggacaggtcaaac

SEQ ID NO: 744432 - DNA, 15 bp, Homo sapiens
tggacaggtcaaact

SEQ ID NO: 744433 - DNA, 15 bp, Homo sapiens
ggacaggtcaaactg

SEQ ID NO: 744434 - DNA, 15 bp, Homo sapiens
gacaggtcaaactga

SEQ ID NO: 744435 - DNA, 15 bp, Homo sapiens
acaggtcaaactgag

SEQ ID NO: 744436 - DNA, 15 bp, Homo sapiens
caggtcaaactgaga

SEQ ID NO: 744437 - DNA, 15 bp, Homo sapiens
aggtcaaactgagac

SEQ ID NO: 744438 - DNA, 15 bp, Homo sapiens
ggtcaaactgagacc

SEQ ID NO: 744439 - DNA, 15 bp, Homo sapiens
gtcaaactgagaccc

SEQ ID NO: 744440 - DNA, 15 bp, Homo sapiens
tcaaactgagaccct

SEQ ID NO: 744441 - DNA, 15 bp, Homo sapiens
caaactgagaccctg

SEQ ID NO: 744442 - DNA, 15 bp, Homo sapiens
aaactgagaccctga

SEQ ID NO: 744443 - DNA, 15 bp, Homo sapiens
aactgagaccctgag

SEQ ID NO: 744444 - DNA, 15 bp, Homo sapiens
actgagaccctgaga

SEQ ID NO: 744445 - DNA, 15 bp, Homo sapiens
ctgagaccctgagag

SEQ ID NO: 744446 - DNA, 15 bp, Homo sapiens
tgagaccctgagagg

SEQ ID NO: 744447 - DNA, 15 bp, Homo sapiens
gagaccctgagaggg

SEQ ID NO: 744448 - DNA, 15 bp, Homo sapiens
agaccctgagagggc

SEQ ID NO: 744449 - DNA, 15 bp, Homo sapiens
gaccctgagagggca

SEQ ID NO: 744450 - DNA, 15 bp, Homo sapiens
accctgagagggcaa

SEQ ID NO: 744451 - DNA, 15 bp, Homo sapiens
ccctgagagggcaag

SEQ ID NO: 744452 - DNA, 15 bp, Homo sapiens
cctgagagggcaagc

SEQ ID NO: 744453 - DNA, 15 bp, Homo sapiens
ctgagagggcaagcc

SEQ ID NO: 744454 - DNA, 15 bp, Homo sapiens
tgagagggcaagcca

SEQ ID NO: 744455 - DNA, 15 bp, Homo sapiens
gagagggcaagccac

SEQ ID NO: 744456 - DNA, 15 bp, Homo sapiens
agagggcaagccact

SEQ ID NO: 744457 - DNA, 15 bp, Homo sapiens
gagggcaagccactt

SEQ ID NO: 744458 - DNA, 15 bp, Homo sapiens
agggcaagccacttg

SEQ ID NO: 744459 - DNA, 15 bp, Homo sapiens
gggcaagccacttgg

SEQ ID NO: 744460 - DNA, 15 bp, Homo sapiens
ggcaagccacttggc

SEQ ID NO: 744461 - DNA, 15 bp, Homo sapiens
gcaagccacttggcc

SEQ ID NO: 744462 - DNA, 15 bp, Homo sapiens
caagccacttggcca

SEQ ID NO: 744463 - DNA, 15 bp, Homo sapiens
aagccacttggccaa

SEQ ID NO: 744464 - DNA, 15 bp, Homo sapiens
agccacttggccaag

SEQ ID NO: 744465 - DNA, 15 bp, Homo sapiens
gccacttggccaagg

SEQ ID NO: 744466 - DNA, 15 bp, Homo sapiens
ccacttggccaaggt

SEQ ID NO: 744467 - DNA, 15 bp, Homo sapiens
cacttggccaaggtc

SEQ ID NO: 744468 - DNA, 15 bp, Homo sapiens
acttggccaaggtca

SEQ ID NO: 744469 - DNA, 15 bp, Homo sapiens
cttggccaaggtcac

SEQ ID NO: 744470 - DNA, 15 bp, Homo sapiens
ttggccaaggtcaca

SEQ ID NO: 744471 - DNA, 15 bp, Homo sapiens
tggccaaggtcacag

SEQ ID NO: 744472 - DNA, 15 bp, Homo sapiens
ggccaaggtcacaga

SEQ ID NO: 744473 - DNA, 15 bp, Homo sapiens
gccaaggtcacagag

SEQ ID NO: 744474 - DNA, 15 bp, Homo sapiens
ccaaggtcacagagc

SEQ ID NO: 744475 - DNA, 15 bp, Homo sapiens
caaggtcacagagca

SEQ ID NO: 744476 - DNA, 15 bp, Homo sapiens
aaggtcacagagcag

SEQ ID NO: 744477 - DNA, 15 bp, Homo sapiens
aggtcacagagcagc

SEQ ID NO: 744478 - DNA, 15 bp, Homo sapiens
ggtcacagagcagct

SEQ ID NO: 744479 - DNA, 15 bp, Homo sapiens
gtcacagagcagctt

SEQ ID NO: 744480 - DNA, 15 bp, Homo sapiens
tcacagagcagcttg

SEQ ID NO: 744481 - DNA, 15 bp, Homo sapiens
cacagagcagcttgc

SEQ ID NO: 744482 - DNA, 15 bp, Homo sapiens
acagagcagcttgct

SEQ ID NO: 744483 - DNA, 15 bp, Homo sapiens
cagagcagcttgctg

SEQ ID NO: 744484 - DNA, 15 bp, Homo sapiens
agagcagcttgctgg

SEQ ID NO: 744485 - DNA, 15 bp, Homo sapiens
gagcagcttgctggc

SEQ ID NO: 744486 - DNA, 15 bp, Homo sapiens
agcagcttgctggca

SEQ ID NO: 744487 - DNA, 15 bp, Homo sapiens
gcagcttgctggcaa

SEQ ID NO: 744488 - DNA, 15 bp, Homo sapiens
cagcttgctggcaaa

SEQ ID NO: 744489 - DNA, 15 bp, Homo sapiens
agcttgctggcaaaa

SEQ ID NO: 744490 - DNA, 15 bp, Homo sapiens
gcttgctggcaaaaa

SEQ ID NO: 744491 - DNA, 15 bp, Homo sapiens
cttgctggcaaaaaa

SEQ ID NO: 744492 - DNA, 15 bp, Homo sapiens
ttgctggcaaaaaag

SEQ ID NO: 744493 - DNA, 15 bp, Homo sapiens
tgctggcaaaaaagc

SEQ ID NO: 744494 - DNA, 15 bp, Homo sapiens
gctggcaaaaaagcc

SEQ ID NO: 744495 - DNA, 15 bp, Homo sapiens
ctggcaaaaaagccg

SEQ ID NO: 744496 - DNA, 15 bp, Homo sapiens
tggcaaaaaagccgt

SEQ ID NO: 744497 - DNA, 15 bp, Homo sapiens
ggcaaaaaagccgta

SEQ ID NO: 744498 - DNA, 15 bp, Homo sapiens
gcaaaaaagccgtat

SEQ ID NO: 744499 - DNA, 15 bp, Homo sapiens
caaaaaagccgtatc

SEQ ID NO: 744500 - DNA, 15 bp, Homo sapiens
aaaaaagccgtatca

SEQ ID NO: 744501 - DNA, 15 bp, Homo sapiens
aaaaagccgtatcac

SEQ ID NO: 744502 - DNA, 15 bp, Homo sapiens
aaaagccgtatcacc

SEQ ID NO: 744503 - DNA, 15 bp, Homo sapiens
aaagccgtatcaccc

SEQ ID NO: 744504 - DNA, 15 bp, Homo sapiens
aagccgtatcacccc

SEQ ID NO: 744505 - DNA, 15 bp, Homo sapiens
agccgtatcaccccc

SEQ ID NO: 744506 - DNA, 15 bp, Homo sapiens
gccgtatcacccccc

SEQ ID NO: 744507 - DNA, 15 bp, Homo sapiens
ccgtatcacccccca

SEQ ID NO: 744508 - DNA, 15 bp, Homo sapiens
cgtatcaccccccac

SEQ ID NO: 744509 - DNA, 15 bp, Homo sapiens
gtatcaccccccact

SEQ ID NO: 744510 - DNA, 15 bp, Homo sapiens
tatcaccccccactt

SEQ ID NO: 744511 - DNA, 15 bp, Homo sapiens
atcaccccccacttc

SEQ ID NO: 744512 - DNA, 15 bp, Homo sapiens
tcaccccccacttct

SEQ ID NO: 744513 - DNA, 15 bp, Homo sapiens
caccccccacttctt

SEQ ID NO: 744514 - DNA, 15 bp, Homo sapiens
accccccacttcttg

SEQ ID NO: 744515 - DNA, 15 bp, Homo sapiens
ccccccacttcttgc

SEQ ID NO: 744516 - DNA, 15 bp, Homo sapiens
cccccacttcttgct

SEQ ID NO: 744517 - DNA, 15 bp, Homo sapiens
ccccacttcttgctg

SEQ ID NO: 744518 - DNA, 15 bp, Homo sapiens
cccacttcttgctgc

SEQ ID NO: 744519 - DNA, 15 bp, Homo sapiens
ccacttcttgctgca

SEQ ID NO: 744520 - DNA, 15 bp, Homo sapiens
cacttcttgctgcag

SEQ ID NO: 744521 - DNA, 15 bp, Homo sapiens
acttcttgctgcagg

SEQ ID NO: 744522 - DNA, 15 bp, Homo sapiens
cttcttgctgcaggg

SEQ ID NO: 744523 - DNA, 15 bp, Homo sapiens
ttcttgctgcagggg

SEQ ID NO: 744524 - DNA, 15 bp, Homo sapiens
tcttgctgcagggga

SEQ ID NO: 744525 - DNA, 15 bp, Homo sapiens
cttgctgcaggggag

SEQ ID NO: 744526 - DNA, 15 bp, Homo sapiens
ttgctgcaggggagt

SEQ ID NO: 744527 - DNA, 15 bp, Homo sapiens
tgctgcaggggagtt

SEQ ID NO: 744528 - DNA, 15 bp, Homo sapiens
gctgcaggggagttg

SEQ ID NO: 744529 - DNA, 15 bp, Homo sapiens
ctgcaggggagttgc

SEQ ID NO: 744530 - DNA, 15 bp, Homo sapiens
tgcaggggagttgca

SEQ ID NO: 744531 - DNA, 15 bp, Homo sapiens
gcaggggagttgcac

SEQ ID NO: 744532 - DNA, 15 bp, Homo sapiens
caggggagttgcacc

SEQ ID NO: 744533 - DNA, 15 bp, Homo sapiens
aggggagttgcaccc

SEQ ID NO: 744534 - DNA, 15 bp, Homo sapiens
ggggagttgcacccc

SEQ ID NO: 744535 - DNA, 15 bp, Homo sapiens
gggagttgcacccca

SEQ ID NO: 744536 - DNA, 15 bp, Homo sapiens
ggagttgcaccccat

SEQ ID NO: 744537 - DNA, 15 bp, Homo sapiens
gagttgcaccccatg

SEQ ID NO: 744538 - DNA, 15 bp, Homo sapiens
agttgcaccccatgc

SEQ ID NO: 744539 - DNA, 15 bp, Homo sapiens
gttgcaccccatgcg

SEQ ID NO: 744540 - DNA, 15 bp, Homo sapiens
ttgcaccccatgcgc

SEQ ID NO: 744541 - DNA, 15 bp, Homo sapiens
tgcaccccatgcgca

SEQ ID NO: 744542 - DNA, 15 bp, Homo sapiens
gcaccccatgcgcag

SEQ ID NO: 744543 - DNA, 15 bp, Homo sapiens
caccccatgcgcagc

SEQ ID NO: 744544 - DNA, 15 bp, Homo sapiens
accccatgcgcagct

SEQ ID NO: 744545 - DNA, 15 bp, Homo sapiens
ccccatgcgcagctc

SEQ ID NO: 744546 - DNA, 15 bp, Homo sapiens
cccatgcgcagctct

SEQ ID NO: 744547 - DNA, 15 bp, Homo sapiens
ccatgcgcagctcta

SEQ ID NO: 744548 - DNA, 15 bp, Homo sapiens
catgcgcagctctaa

SEQ ID NO: 744549 - DNA, 15 bp, Homo sapiens
atgcgcagctctaaa

SEQ ID NO: 744550 - DNA, 15 bp, Homo sapiens
tgcgcagctctaaaa

SEQ ID NO: 744551 - DNA, 15 bp, Homo sapiens
gcgcagctctaaaag

SEQ ID NO: 744552 - DNA, 15 bp, Homo sapiens
cgcagctctaaaagc

SEQ ID NO: 744553 - DNA, 15 bp, Homo sapiens
gcagctctaaaagct

SEQ ID NO: 744554 - DNA, 15 bp, Homo sapiens
cagctctaaaagctg

SEQ ID NO: 744555 - DNA, 15 bp, Homo sapiens
agctctaaaagctgg

SEQ ID NO: 744556 - DNA, 15 bp, Homo sapiens
gctctaaaagctggt

SEQ ID NO: 744557 - DNA, 15 bp, Homo sapiens
ctctaaaagctggtg

SEQ ID NO: 744558 - DNA, 15 bp, Homo sapiens
tctaaaagctggtgc

SEQ ID NO: 744559 - DNA, 15 bp, Homo sapiens
ctaaaagctggtgca

SEQ ID NO: 744560 - DNA, 15 bp, Homo sapiens
taaaagctggtgcag

SEQ ID NO: 744561 - DNA, 15 bp, Homo sapiens
aaaagctggtgcagc

SEQ ID NO: 744562 - DNA, 15 bp, Homo sapiens
aaagctggtgcagca

SEQ ID NO: 744563 - DNA, 15 bp, Homo sapiens
aagctggtgcagcat

SEQ ID NO: 744564 - DNA, 15 bp, Homo sapiens
agctggtgcagcatt

SEQ ID NO: 744565 - DNA, 15 bp, Homo sapiens
gctggtgcagcattt

SEQ ID NO: 744566 - DNA, 15 bp, Homo sapiens
ctggtgcagcatttc

SEQ ID NO: 744567 - DNA, 15 bp, Homo sapiens
tggtgcagcatttcc

SEQ ID NO: 744568 - DNA, 15 bp, Homo sapiens
ggtgcagcatttcca

SEQ ID NO: 744569 - DNA, 15 bp, Homo sapiens
gtgcagcatttccaa

SEQ ID NO: 744570 - DNA, 15 bp, Homo sapiens
tgcagcatttccaaa

SEQ ID NO: 744571 - DNA, 15 bp, Homo sapiens
gcagcatttccaaag

SEQ ID NO: 744572 - DNA, 15 bp, Homo sapiens
cagcatttccaaagt

SEQ ID NO: 744573 - DNA, 15 bp, Homo sapiens
agcatttccaaagtg

SEQ ID NO: 744574 - DNA, 15 bp, Homo sapiens
gcatttccaaagtgt

SEQ ID NO: 744575 - DNA, 15 bp, Homo sapiens
catttccaaagtgtg

SEQ ID NO: 744576 - DNA, 15 bp, Homo sapiens
atttccaaagtgtgt

SEQ ID NO: 744577 - DNA, 15 bp, Homo sapiens
tttccaaagtgtgtt

SEQ ID NO: 744578 - DNA, 15 bp, Homo sapiens
ttccaaagtgtgttc

SEQ ID NO: 744579 - DNA, 15 bp, Homo sapiens
tccaaagtgtgttct

SEQ ID NO: 744580 - DNA, 15 bp, Homo sapiens
ccaaagtgtgttctg

SEQ ID NO: 744581 - DNA, 15 bp, Homo sapiens
caaagtgtgttctga

SEQ ID NO: 744582 - DNA, 15 bp, Homo sapiens
aaagtgtgttctgaa

SEQ ID NO: 744583 - DNA, 15 bp, Homo sapiens
aagtgtgttctgaag

SEQ ID NO: 744584 - DNA, 15 bp, Homo sapiens
agtgtgttctgaagg

SEQ ID NO: 744585 - DNA, 15 bp, Homo sapiens
gtgtgttctgaagga

SEQ ID NO: 744586 - DNA, 15 bp, Homo sapiens
tgtgttctgaaggac

SEQ ID NO: 744587 - DNA, 15 bp, Homo sapiens
gtgttctgaaggaca

SEQ ID NO: 744588 - DNA, 15 bp, Homo sapiens
tgttctgaaggacac

SEQ ID NO: 744589 - DNA, 15 bp, Homo sapiens
gttctgaaggacact

SEQ ID NO: 744590 - DNA, 15 bp, Homo sapiens
ttctgaaggacactt

SEQ ID NO: 744591 - DNA, 15 bp, Homo sapiens
tctgaaggacacttt

SEQ ID NO: 744592 - DNA, 15 bp, Homo sapiens
ctgaaggacactttg

SEQ ID NO: 744593 - DNA, 15 bp, Homo sapiens
tgaaggacactttgg

SEQ ID NO: 744594 - DNA, 15 bp, Homo sapiens
gaaggacactttgga

SEQ ID NO: 744595 - DNA, 15 bp, Homo sapiens
aaggacactttggag

SEQ ID NO: 744596 - DNA, 15 bp, Homo sapiens
aggacactttggaga

SEQ ID NO: 744597 - DNA, 15 bp, Homo sapiens
ggacactttggagag

SEQ ID NO: 744598 - DNA, 15 bp, Homo sapiens
gacactttggagagg

SEQ ID NO: 744599 - DNA, 15 bp, Homo sapiens
acactttggagagga

SEQ ID NO: 744600 - DNA, 15 bp, Homo sapiens
cactttggagaggaa

SEQ ID NO: 744601 - DNA, 15 bp, Homo sapiens
actttggagaggaac

SEQ ID NO: 744602 - DNA, 15 bp, Homo sapiens
ctttggagaggaaca

SEQ ID NO: 744603 - DNA, 15 bp, Homo sapiens
tttggagaggaacag

SEQ ID NO: 744604 - DNA, 15 bp, Homo sapiens
ttggagaggaacagt

SEQ ID NO: 744605 - DNA, 15 bp, Homo sapiens
tggagaggaacagtg

SEQ ID NO: 744606 - DNA, 15 bp, Homo sapiens
ggagaggaacagtgg

SEQ ID NO: 744607 - DNA, 15 bp, Homo sapiens
gagaggaacagtggg

SEQ ID NO: 744608 - DNA, 15 bp, Homo sapiens
agaggaacagtgggc

SEQ ID NO: 744609 - DNA, 15 bp, Homo sapiens
gaggaacagtgggct

SEQ ID NO: 744610 - DNA, 15 bp, Homo sapiens
aggaacagtgggctt

SEQ ID NO: 744611 - DNA, 15 bp, Homo sapiens
ggaacagtgggcttg

SEQ ID NO: 744612 - DNA, 15 bp, Homo sapiens
gaacagtgggcttgg

SEQ ID NO: 744613 - DNA, 15 bp, Homo sapiens
aacagtgggcttggt

SEQ ID NO: 744614 - DNA, 15 bp, Homo sapiens
acagtgggcttggtg

SEQ ID NO: 744615 - DNA, 15 bp, Homo sapiens
cagtgggcttggtgg

SEQ ID NO: 744616 - DNA, 15 bp, Homo sapiens
agtgggcttggtggc

SEQ ID NO: 744617 - DNA, 15 bp, Homo sapiens
gtgggcttggtggct

SEQ ID NO: 744618 - DNA, 15 bp, Homo sapiens
tgggcttggtggctt

SEQ ID NO: 744619 - DNA, 15 bp, Homo sapiens
gggcttggtggcttt

SEQ ID NO: 744620 - DNA, 15 bp, Homo sapiens
ggcttggtggcttta

SEQ ID NO: 744621 - DNA, 15 bp, Homo sapiens
gcttggtggctttag

SEQ ID NO: 744622 - DNA, 15 bp, Homo sapiens
cttggtggctttaga

SEQ ID NO: 744623 - DNA, 15 bp, Homo sapiens
ttggtggctttagag

SEQ ID NO: 744624 - DNA, 15 bp, Homo sapiens
tggtggctttagagg

SEQ ID NO: 744625 - DNA, 15 bp, Homo sapiens
ggtggctttagaggc

SEQ ID NO: 744626 - DNA, 15 bp, Homo sapiens
gtggctttagaggcc

SEQ ID NO: 744627 - DNA, 15 bp, Homo sapiens
tggctttagaggcct

SEQ ID NO: 744628 - DNA, 15 bp, Homo sapiens
ggctttagaggcctg

SEQ ID NO: 744629 - DNA, 15 bp, Homo sapiens
gctttagaggcctgt

SEQ ID NO: 744630 - DNA, 15 bp, Homo sapiens
ctttagaggcctgtg

SEQ ID NO: 744631 - DNA, 15 bp, Homo sapiens
tttagaggcctgtgt

SEQ ID NO: 744632 - DNA, 15 bp, Homo sapiens
ttagaggcctgtgtc

SEQ ID NO: 744633 - DNA, 15 bp, Homo sapiens
tagaggcctgtgtcc

SEQ ID NO: 744634 - DNA, 15 bp, Homo sapiens
agaggcctgtgtcca

SEQ ID NO: 744635 - DNA, 15 bp, Homo sapiens
gaggcctgtgtccac

SEQ ID NO: 744636 - DNA, 15 bp, Homo sapiens
aggcctgtgtccaca

SEQ ID NO: 744637 - DNA, 15 bp, Homo sapiens
ggcctgtgtccacag

SEQ ID NO: 744638 - DNA, 15 bp, Homo sapiens
gcctgtgtccacagc

SEQ ID NO: 744639 - DNA, 15 bp, Homo sapiens
cctgtgtccacagct

SEQ ID NO: 744640 - DNA, 15 bp, Homo sapiens
ctgtgtccacagctc

SEQ ID NO: 744641 - DNA, 15 bp, Homo sapiens
tgtgtccacagctca

SEQ ID NO: 744642 - DNA, 15 bp, Homo sapiens
gtgtccacagctcac

SEQ ID NO: 744643 - DNA, 15 bp, Homo sapiens
tgtccacagctcaca

SEQ ID NO: 744644 - DNA, 15 bp, Homo sapiens
gtccacagctcacac

SEQ ID NO: 744645 - DNA, 15 bp, Homo sapiens
tccacagctcacacc

SEQ ID NO: 744646 - DNA, 15 bp, Homo sapiens
ccacagctcacacca

SEQ ID NO: 744647 - DNA, 15 bp, Homo sapiens
cacagctcacaccag

SEQ ID NO: 744648 - DNA, 15 bp, Homo sapiens
acagctcacaccagg

SEQ ID NO: 744649 - DNA, 15 bp, Homo sapiens
cagctcacaccaggc

SEQ ID NO: 744650 - DNA, 15 bp, Homo sapiens
agctcacaccaggca

SEQ ID NO: 744651 - DNA, 15 bp, Homo sapiens
gctcacaccaggcaa

SEQ ID NO: 744652 - DNA, 15 bp, Homo sapiens
ctcacaccaggcaat

SEQ ID NO: 744653 - DNA, 15 bp, Homo sapiens
tcacaccaggcaata

SEQ ID NO: 744654 - DNA, 15 bp, Homo sapiens
cacaccaggcaatat

SEQ ID NO: 744655 - DNA, 15 bp, Homo sapiens
acaccaggcaatatt

SEQ ID NO: 744656 - DNA, 15 bp, Homo sapiens
caccaggcaatattc

SEQ ID NO: 744657 - DNA, 15 bp, Homo sapiens
accaggcaatattct

SEQ ID NO: 744658 - DNA, 15 bp, Homo sapiens
ccaggcaatattctg

SEQ ID NO: 744659 - DNA, 15 bp, Homo sapiens
caggcaatattctgg

SEQ ID NO: 744660 - DNA, 15 bp, Homo sapiens
aggcaatattctggg

SEQ ID NO: 744661 - DNA, 15 bp, Homo sapiens
ggcaatattctgggc

SEQ ID NO: 744662 - DNA, 15 bp, Homo sapiens
gcaatattctgggct

SEQ ID NO: 744663 - DNA, 15 bp, Homo sapiens
caatattctgggctt

SEQ ID NO: 744664 - DNA, 15 bp, Homo sapiens
aatattctgggcttg

SEQ ID NO: 744665 - DNA, 15 bp, Homo sapiens
atattctgggcttga

SEQ ID NO: 744666 - DNA, 15 bp, Homo sapiens
tattctgggcttgaa

SEQ ID NO: 744667 - DNA, 15 bp, Homo sapiens
attctgggcttgaat

SEQ ID NO: 744668 - DNA, 15 bp, Homo sapiens
ttctgggcttgaatt

SEQ ID NO: 744669 - DNA, 15 bp, Homo sapiens
tctgggcttgaattg

SEQ ID NO: 744670 - DNA, 15 bp, Homo sapiens
ctgggcttgaattgc

SEQ ID NO: 744671 - DNA, 15 bp, Homo sapiens
tgggcttgaattgca

SEQ ID NO: 744672 - DNA, 15 bp, Homo sapiens
gggcttgaattgcag

SEQ ID NO: 744673 - DNA, 15 bp, Homo sapiens
ggcttgaattgcagc

SEQ ID NO: 744674 - DNA, 15 bp, Homo sapiens
gcttgaattgcagct

SEQ ID NO: 744675 - DNA, 15 bp, Homo sapiens
cttgaattgcagctc

SEQ ID NO: 744676 - DNA, 15 bp, Homo sapiens
ttgaattgcagctct

SEQ ID NO: 744677 - DNA, 15 bp, Homo sapiens
tgaattgcagctctg

SEQ ID NO: 744678 - DNA, 15 bp, Homo sapiens
gaattgcagctctgc

SEQ ID NO: 744679 - DNA, 15 bp, Homo sapiens
aattgcagctctgca

SEQ ID NO: 744680 - DNA, 15 bp, Homo sapiens
attgcagctctgcac

SEQ ID NO: 744681 - DNA, 15 bp, Homo sapiens
ttgcagctctgcact

SEQ ID NO: 744682 - DNA, 15 bp, Homo sapiens
tgcagctctgcactt

SEQ ID NO: 744683 - DNA, 15 bp, Homo sapiens
gcagctctgcacttc

SEQ ID NO: 744684 - DNA, 15 bp, Homo sapiens
cagctctgcacttcg

SEQ ID NO: 744685 - DNA, 15 bp, Homo sapiens
agctctgcacttcgg

SEQ ID NO: 744686 - DNA, 15 bp, Homo sapiens
gctctgcacttcggc

SEQ ID NO: 744687 - DNA, 15 bp, Homo sapiens
ctctgcacttcggcc

SEQ ID NO: 744688 - DNA, 15 bp, Homo sapiens
tctgcacttcggcca

SEQ ID NO: 744689 - DNA, 15 bp, Homo sapiens
ctgcacttcggccag

SEQ ID NO: 744690 - DNA, 15 bp, Homo sapiens
tgcacttcggccagt

SEQ ID NO: 744691 - DNA, 15 bp, Homo sapiens
gcacttcggccagtg

SEQ ID NO: 744692 - DNA, 15 bp, Homo sapiens
cacttcggccagtga

SEQ ID NO: 744693 - DNA, 15 bp, Homo sapiens
acttcggccagtgac

SEQ ID NO: 744694 - DNA, 15 bp, Homo sapiens
cttcggccagtgact

SEQ ID NO: 744695 - DNA, 15 bp, Homo sapiens
ttcggccagtgactt

SEQ ID NO: 744696 - DNA, 15 bp, Homo sapiens
tcggccagtgacttg

SEQ ID NO: 744697 - DNA, 15 bp, Homo sapiens
cggccagtgacttgt

SEQ ID NO: 744698 - DNA, 15 bp, Homo sapiens
ggccagtgacttgtg

SEQ ID NO: 744699 - DNA, 15 bp, Homo sapiens
gccagtgacttgtgc

SEQ ID NO: 744700 - DNA, 15 bp, Homo sapiens
ccagtgacttgtgcc

SEQ ID NO: 744701 - DNA, 15 bp, Homo sapiens
cagtgacttgtgcct

SEQ ID NO: 744702 - DNA, 15 bp, Homo sapiens
agtgacttgtgcctc

SEQ ID NO: 744703 - DNA, 15 bp, Homo sapiens
gtgacttgtgcctca

SEQ ID NO: 744704 - DNA, 15 bp, Homo sapiens
tgacttgtgcctcac

SEQ ID NO: 744705 - DNA, 15 bp, Homo sapiens
gacttgtgcctcacc

SEQ ID NO: 744706 - DNA, 15 bp, Homo sapiens
acttgtgcctcaccc

SEQ ID NO: 744707 - DNA, 15 bp, Homo sapiens
cttgtgcctcacccc

SEQ ID NO: 744708 - DNA, 15 bp, Homo sapiens
ttgtgcctcacccct

SEQ ID NO: 744709 - DNA, 15 bp, Homo sapiens
tgtgcctcaccccta

SEQ ID NO: 744710 - DNA, 15 bp, Homo sapiens
gtgcctcacccctac

SEQ ID NO: 744711 - DNA, 15 bp, Homo sapiens
tgcctcacccctact

SEQ ID NO: 744712 - DNA, 15 bp, Homo sapiens
gcctcacccctacta

SEQ ID NO: 744713 - DNA, 15 bp, Homo sapiens
cctcacccctactac

SEQ ID NO: 744714 - DNA, 15 bp, Homo sapiens
ctcacccctactact

SEQ ID NO: 744715 - DNA, 15 bp, Homo sapiens
tcacccctactactc

SEQ ID NO: 744716 - DNA, 15 bp, Homo sapiens
cacccctactactcc

SEQ ID NO: 744717 - DNA, 15 bp, Homo sapiens
acccctactactccc

SEQ ID NO: 744718 - DNA, 15 bp, Homo sapiens
cccctactactccct

SEQ ID NO: 744719 - DNA, 15 bp, Homo sapiens
ccctactactccctt

SEQ ID NO: 744720 - DNA, 15 bp, Homo sapiens
cctactactcccttt

SEQ ID NO: 744721 - DNA, 15 bp, Homo sapiens
ctactactccctttt

SEQ ID NO: 744722 - DNA, 15 bp, Homo sapiens
tactactcccttttt

SEQ ID NO: 744723 - DNA, 15 bp, Homo sapiens
actactccctttttt

SEQ ID NO: 744724 - DNA, 15 bp, Homo sapiens
ctactcccttttttt

SEQ ID NO: 744725 - DNA, 15 bp, Homo sapiens
tactcccttttttta

SEQ ID NO: 744726 - DNA, 15 bp, Homo sapiens
actccctttttttaa

SEQ ID NO: 744727 - DNA, 15 bp, Homo sapiens
ctccctttttttaag

SEQ ID NO: 744728 - DNA, 15 bp, Homo sapiens
tccctttttttaaga

SEQ ID NO: 744729 - DNA, 15 bp, Homo sapiens
ccctttttttaagat

SEQ ID NO: 744730 - DNA, 15 bp, Homo sapiens
cctttttttaagata

SEQ ID NO: 744731 - DNA, 15 bp, Homo sapiens
ctttttttaagatag

SEQ ID NO: 744732 - DNA, 15 bp, Homo sapiens
tttttttaagatagg

SEQ ID NO: 744733 - DNA, 15 bp, Homo sapiens
ttttttaagataggc

SEQ ID NO: 744734 - DNA, 15 bp, Homo sapiens
tttttaagataggct

SEQ ID NO: 744735 - DNA, 15 bp, Homo sapiens
ttttaagataggctg

SEQ ID NO: 744736 - DNA, 15 bp, Homo sapiens
tttaagataggctgg

SEQ ID NO: 744737 - DNA, 15 bp, Homo sapiens
ttaagataggctggt

SEQ ID NO: 744738 - DNA, 15 bp, Homo sapiens
taagataggctggtg

SEQ ID NO: 744739 - DNA, 15 bp, Homo sapiens
aagataggctggtga

SEQ ID NO: 744740 - DNA, 15 bp, Homo sapiens
agataggctggtgat

SEQ ID NO: 744741 - DNA, 15 bp, Homo sapiens
gataggctggtgata

SEQ ID NO: 744742 - DNA, 15 bp, Homo sapiens
ataggctggtgatag

SEQ ID NO: 744743 - DNA, 15 bp, Homo sapiens
taggctggtgatagt

SEQ ID NO: 744744 - DNA, 15 bp, Homo sapiens
aggctggtgatagta

SEQ ID NO: 744745 - DNA, 15 bp, Homo sapiens
ggctggtgatagtat

SEQ ID NO: 744746 - DNA, 15 bp, Homo sapiens
gctggtgatagtatg

SEQ ID NO: 744747 - DNA, 15 bp, Homo sapiens
ctggtgatagtatgc

SEQ ID NO: 744748 - DNA, 15 bp, Homo sapiens
tggtgatagtatgca

SEQ ID NO: 744749 - DNA, 15 bp, Homo sapiens
ggtgatagtatgcag

SEQ ID NO: 744750 - DNA, 15 bp, Homo sapiens
gtgatagtatgcagc

SEQ ID NO: 744751 - DNA, 15 bp, Homo sapiens
tgatagtatgcagcc

SEQ ID NO: 744752 - DNA, 15 bp, Homo sapiens
gatagtatgcagcct

SEQ ID NO: 744753 - DNA, 15 bp, Homo sapiens
atagtatgcagcctc

SEQ ID NO: 744754 - DNA, 15 bp, Homo sapiens
tagtatgcagcctca

SEQ ID NO: 744755 - DNA, 15 bp, Homo sapiens
agtatgcagcctcag

SEQ ID NO: 744756 - DNA, 15 bp, Homo sapiens
gtatgcagcctcaga

SEQ ID NO: 744757 - DNA, 15 bp, Homo sapiens
tatgcagcctcagag

SEQ ID NO: 744758 - DNA, 15 bp, Homo sapiens
atgcagcctcagagg

SEQ ID NO: 744759 - DNA, 15 bp, Homo sapiens
tgcagcctcagaggg

SEQ ID NO: 744760 - DNA, 15 bp, Homo sapiens
gcagcctcagagggt

SEQ ID NO: 744761 - DNA, 15 bp, Homo sapiens
cagcctcagagggtt

SEQ ID NO: 744762 - DNA, 15 bp, Homo sapiens
agcctcagagggttg

SEQ ID NO: 744763 - DNA, 15 bp, Homo sapiens
gcctcagagggttgt

SEQ ID NO: 744764 - DNA, 15 bp, Homo sapiens
cctcagagggttgtc

SEQ ID NO: 744765 - DNA, 15 bp, Homo sapiens
ctcagagggttgtca

SEQ ID NO: 744766 - DNA, 15 bp, Homo sapiens
tcagagggttgtcat

SEQ ID NO: 744767 - DNA, 15 bp, Homo sapiens
cagagggttgtcatg

SEQ ID NO: 744768 - DNA, 15 bp, Homo sapiens
agagggttgtcatga

SEQ ID NO: 744769 - DNA, 15 bp, Homo sapiens
gagggttgtcatgag

SEQ ID NO: 744770 - DNA, 15 bp, Homo sapiens
agggttgtcatgagc

SEQ ID NO: 744771 - DNA, 15 bp, Homo sapiens
gggttgtcatgagcc

SEQ ID NO: 744772 - DNA, 15 bp, Homo sapiens
ggttgtcatgagcca

SEQ ID NO: 744773 - DNA, 15 bp, Homo sapiens
gttgtcatgagccac

SEQ ID NO: 744774 - DNA, 15 bp, Homo sapiens
ttgtcatgagccact

SEQ ID NO: 744775 - DNA, 15 bp, Homo sapiens
tgtcatgagccactt

SEQ ID NO: 744776 - DNA, 15 bp, Homo sapiens
gtcatgagccactta

SEQ ID NO: 744777 - DNA, 15 bp, Homo sapiens
tcatgagccacttag

SEQ ID NO: 744778 - DNA, 15 bp, Homo sapiens
catgagccacttaga

SEQ ID NO: 744779 - DNA, 15 bp, Homo sapiens
atgagccacttagag

SEQ ID NO: 744780 - DNA, 15 bp, Homo sapiens
tgagccacttagaga

SEQ ID NO: 744781 - DNA, 15 bp, Homo sapiens
gagccacttagagaa

SEQ ID NO: 744782 - DNA, 15 bp, Homo sapiens
agccacttagagaac

SEQ ID NO: 744783 - DNA, 15 bp, Homo sapiens
gccacttagagaaca

SEQ ID NO: 744784 - DNA, 15 bp, Homo sapiens
ccacttagagaacac

SEQ ID NO: 744785 - DNA, 15 bp, Homo sapiens
cacttagagaacaca

SEQ ID NO: 744786 - DNA, 15 bp, Homo sapiens
acttagagaacacag

SEQ ID NO: 744787 - DNA, 15 bp, Homo sapiens
cttagagaacacagc

SEQ ID NO: 744788 - DNA, 15 bp, Homo sapiens
ttagagaacacagcc

SEQ ID NO: 744789 - DNA, 15 bp, Homo sapiens
tagagaacacagcct

SEQ ID NO: 744790 - DNA, 15 bp, Homo sapiens
agagaacacagccta

SEQ ID NO: 744791 - DNA, 15 bp, Homo sapiens
gagaacacagcctat

SEQ ID NO: 744792 - DNA, 15 bp, Homo sapiens
agaacacagcctatg

SEQ ID NO: 744793 - DNA, 15 bp, Homo sapiens
gaacacagcctatgc

SEQ ID NO: 744794 - DNA, 15 bp, Homo sapiens
aacacagcctatgca

SEQ ID NO: 744795 - DNA, 15 bp, Homo sapiens
acacagcctatgcaa

SEQ ID NO: 744796 - DNA, 15 bp, Homo sapiens
cacagcctatgcaaa

SEQ ID NO: 744797 - DNA, 15 bp, Homo sapiens
acagcctatgcaaag

SEQ ID NO: 744798 - DNA, 15 bp, Homo sapiens
cagcctatgcaaagt

SEQ ID NO: 744799 - DNA, 15 bp, Homo sapiens
agcctatgcaaagta

SEQ ID NO: 744800 - DNA, 15 bp, Homo sapiens
gcctatgcaaagtaa

SEQ ID NO: 744801 - DNA, 15 bp, Homo sapiens
cctatgcaaagtaaa

SEQ ID NO: 744802 - DNA, 15 bp, Homo sapiens
ctatgcaaagtaaat

SEQ ID NO: 744803 - DNA, 15 bp, Homo sapiens
tatgcaaagtaaatg

SEQ ID NO: 744804 - DNA, 15 bp, Homo sapiens
atgcaaagtaaatgc

SEQ ID NO: 744805 - DNA, 15 bp, Homo sapiens
tgcaaagtaaatgct

SEQ ID NO: 744806 - DNA, 15 bp, Homo sapiens
gcaaagtaaatgctt

SEQ ID NO: 744807 - DNA, 15 bp, Homo sapiens
caaagtaaatgctta

SEQ ID NO: 744808 - DNA, 15 bp, Homo sapiens
aaagtaaatgcttat

SEQ ID NO: 744809 - DNA, 15 bp, Homo sapiens
aagtaaatgcttatt

SEQ ID NO: 744810 - DNA, 15 bp, Homo sapiens
agtaaatgcttatta

SEQ ID NO: 744811 - DNA, 15 bp, Homo sapiens
gtaaatgcttattaa

SEQ ID NO: 744812 - DNA, 15 bp, Homo sapiens
taaatgcttattaag

SEQ ID NO: 744813 - DNA, 15 bp, Homo sapiens
aaatgcttattaagt

SEQ ID NO: 744814 - DNA, 15 bp, Homo sapiens
aatgcttattaagtg

SEQ ID NO: 744815 - DNA, 15 bp, Homo sapiens
atgcttattaagtgt

SEQ ID NO: 744816 - DNA, 15 bp, Homo sapiens
tgcttattaagtgta

SEQ ID NO: 744817 - DNA, 15 bp, Homo sapiens
gcttattaagtgtag

SEQ ID NO: 744818 - DNA, 15 bp, Homo sapiens
cttattaagtgtagg

SEQ ID NO: 744819 - DNA, 15 bp, Homo sapiens
ttattaagtgtaggc

SEQ ID NO: 744820 - DNA, 15 bp, Homo sapiens
tattaagtgtaggca

SEQ ID NO: 744821 - DNA, 15 bp, Homo sapiens
attaagtgtaggcat

SEQ ID NO: 744822 - DNA, 15 bp, Homo sapiens
ttaagtgtaggcatt

SEQ ID NO: 744823 - DNA, 15 bp, Homo sapiens
taagtgtaggcattg

SEQ ID NO: 744824 - DNA, 15 bp, Homo sapiens
aagtgtaggcattgg

SEQ ID NO: 744825 - DNA, 15 bp, Homo sapiens
agtgtaggcattggc

SEQ ID NO: 744826 - DNA, 15 bp, Homo sapiens
gtgtaggcattggcc

SEQ ID NO: 744827 - DNA, 15 bp, Homo sapiens
tgtaggcattggccc

SEQ ID NO: 744828 - DNA, 15 bp, Homo sapiens
gtaggcattggccca

SEQ ID NO: 744829 - DNA, 15 bp, Homo sapiens
taggcattggcccag

SEQ ID NO: 744830 - DNA, 15 bp, Homo sapiens
aggcattggcccaga

SEQ ID NO: 744831 - DNA, 15 bp, Homo sapiens
ggcattggcccagaa

SEQ ID NO: 744832 - DNA, 15 bp, Homo sapiens
gcattggcccagaac

SEQ ID NO: 744833 - DNA, 15 bp, Homo sapiens
cattggcccagaact

SEQ ID NO: 744834 - DNA, 15 bp, Homo sapiens
attggcccagaactg

SEQ ID NO: 744835 - DNA, 15 bp, Homo sapiens
ttggcccagaactgt

SEQ ID NO: 744836 - DNA, 15 bp, Homo sapiens
tggcccagaactgtt

SEQ ID NO: 744837 - DNA, 15 bp, Homo sapiens
ggcccagaactgttc

SEQ ID NO: 744838 - DNA, 15 bp, Homo sapiens
gcccagaactgttct

SEQ ID NO: 744839 - DNA, 15 bp, Homo sapiens
cccagaactgttcta

SEQ ID NO: 744840 - DNA, 15 bp, Homo sapiens
ccagaactgttctac

SEQ ID NO: 744841 - DNA, 15 bp, Homo sapiens
cagaactgttctacc

SEQ ID NO: 744842 - DNA, 15 bp, Homo sapiens
agaactgttctacca

SEQ ID NO: 744843 - DNA, 15 bp, Homo sapiens
gaactgttctaccat

SEQ ID NO: 744844 - DNA, 15 bp, Homo sapiens
aactgttctaccatg

SEQ ID NO: 744845 - DNA, 15 bp, Homo sapiens
actgttctaccatgg

SEQ ID NO: 744846 - DNA, 15 bp, Homo sapiens
ctgttctaccatggg

SEQ ID NO: 744847 - DNA, 15 bp, Homo sapiens
tgttctaccatgggg

SEQ ID NO: 744848 - DNA, 15 bp, Homo sapiens
gttctaccatggggt

SEQ ID NO: 744849 - DNA, 15 bp, Homo sapiens
ttctaccatggggtg

SEQ ID NO: 744850 - DNA, 15 bp, Homo sapiens
tctaccatggggtgt

SEQ ID NO: 744851 - DNA, 15 bp, Homo sapiens
ctaccatggggtgtg

SEQ ID NO: 744852 - DNA, 15 bp, Homo sapiens
taccatggggtgtgg

SEQ ID NO: 744853 - DNA, 15 bp, Homo sapiens
accatggggtgtggg

SEQ ID NO: 744854 - DNA, 15 bp, Homo sapiens
ccatggggtgtgggg

SEQ ID NO: 744855 - DNA, 15 bp, Homo sapiens
catggggtgtgggga

SEQ ID NO: 744856 - DNA, 15 bp, Homo sapiens
atggggtgtggggat

SEQ ID NO: 744857 - DNA, 15 bp, Homo sapiens
tggggtgtggggatg

SEQ ID NO: 744858 - DNA, 15 bp, Homo sapiens
ggggtgtggggatgt

SEQ ID NO: 744859 - DNA, 15 bp, Homo sapiens
gggtgtggggatgtg

SEQ ID NO: 744860 - DNA, 15 bp, Homo sapiens
ggtgtggggatgtgg

SEQ ID NO: 744861 - DNA, 15 bp, Homo sapiens
gtgtggggatgtgga

SEQ ID NO: 744862 - DNA, 15 bp, Homo sapiens
tgtggggatgtggag

SEQ ID NO: 744863 - DNA, 15 bp, Homo sapiens
gtggggatgtggaga

SEQ ID NO: 744864 - DNA, 15 bp, Homo sapiens
tggggatgtggagac

SEQ ID NO: 744865 - DNA, 15 bp, Homo sapiens
ggggatgtggagaca

SEQ ID NO: 744866 - DNA, 15 bp, Homo sapiens
gggatgtggagacaa

SEQ ID NO: 744867 - DNA, 15 bp, Homo sapiens
ggatgtggagacaat

SEQ ID NO: 744868 - DNA, 15 bp, Homo sapiens
gatgtggagacaatc

SEQ ID NO: 744869 - DNA, 15 bp, Homo sapiens
atgtggagacaatca

SEQ ID NO: 744870 - DNA, 15 bp, Homo sapiens
tgtggagacaatcag

SEQ ID NO: 744871 - DNA, 15 bp, Homo sapiens
gtggagacaatcagg

SEQ ID NO: 744872 - DNA, 15 bp, Homo sapiens
tggagacaatcagga

SEQ ID NO: 744873 - DNA, 15 bp, Homo sapiens
ggagacaatcaggaa

SEQ ID NO: 744874 - DNA, 15 bp, Homo sapiens
gagacaatcaggaag

SEQ ID NO: 744875 - DNA, 15 bp, Homo sapiens
agacaatcaggaaga

SEQ ID NO: 744876 - DNA, 15 bp, Homo sapiens
gacaatcaggaagac

SEQ ID NO: 744877 - DNA, 15 bp, Homo sapiens
acaatcaggaagact

SEQ ID NO: 744878 - DNA, 15 bp, Homo sapiens
caatcaggaagactg

SEQ ID NO: 744879 - DNA, 15 bp, Homo sapiens
aatcaggaagactgg

SEQ ID NO: 744880 - DNA, 15 bp, Homo sapiens
atcaggaagactggt

SEQ ID NO: 744881 - DNA, 15 bp, Homo sapiens
tcaggaagactggtg

SEQ ID NO: 744882 - DNA, 15 bp, Homo sapiens
caggaagactggtgg

SEQ ID NO: 744883 - DNA, 15 bp, Homo sapiens
aggaagactggtggg

SEQ ID NO: 744884 - DNA, 15 bp, Homo sapiens
ggaagactggtgggc

SEQ ID NO: 744885 - DNA, 15 bp, Homo sapiens
gaagactggtgggca

SEQ ID NO: 744886 - DNA, 15 bp, Homo sapiens
aagactggtgggcat

SEQ ID NO: 744887 - DNA, 15 bp, Homo sapiens
agactggtgggcatt

SEQ ID NO: 744888 - DNA, 15 bp, Homo sapiens
gactggtgggcattt

SEQ ID NO: 744889 - DNA, 15 bp, Homo sapiens
actggtgggcatttt

SEQ ID NO: 744890 - DNA, 15 bp, Homo sapiens
ctggtgggcattttc

SEQ ID NO: 744891 - DNA, 15 bp, Homo sapiens
tggtgggcattttct

SEQ ID NO: 744892 - DNA, 15 bp, Homo sapiens
ggtgggcattttctg

SEQ ID NO: 744893 - DNA, 15 bp, Homo sapiens
gtgggcattttctga

SEQ ID NO: 744894 - DNA, 15 bp, Homo sapiens
tgggcattttctgag

SEQ ID NO: 744895 - DNA, 15 bp, Homo sapiens
gggcattttctgagc

SEQ ID NO: 744896 - DNA, 15 bp, Homo sapiens
ggcattttctgagcg

SEQ ID NO: 744897 - DNA, 15 bp, Homo sapiens
gcattttctgagcgg

SEQ ID NO: 744898 - DNA, 15 bp, Homo sapiens
cattttctgagcggc

SEQ ID NO: 744899 - DNA, 15 bp, Homo sapiens
attttctgagcggct

SEQ ID NO: 744900 - DNA, 15 bp, Homo sapiens
ttttctgagcggctg

SEQ ID NO: 744901 - DNA, 15 bp, Homo sapiens
tttctgagcggctgg

SEQ ID NO: 744902 - DNA, 15 bp, Homo sapiens
ttctgagcggctgga

SEQ ID NO: 744903 - DNA, 15 bp, Homo sapiens
tctgagcggctggag

SEQ ID NO: 744904 - DNA, 15 bp, Homo sapiens
ctgagcggctggaga

SEQ ID NO: 744905 - DNA, 15 bp, Homo sapiens
tgagcggctggagaa

SEQ ID NO: 744906 - DNA, 15 bp, Homo sapiens
gagcggctggagaac

SEQ ID NO: 744907 - DNA, 15 bp, Homo sapiens
agcggctggagaacc

SEQ ID NO: 744908 - DNA, 15 bp, Homo sapiens
gcggctggagaaccc

SEQ ID NO: 744909 - DNA, 15 bp, Homo sapiens
cggctggagaaccca

SEQ ID NO: 744910 - DNA, 15 bp, Homo sapiens
ggctggagaacccag

SEQ ID NO: 744911 - DNA, 15 bp, Homo sapiens
gctggagaacccagg

SEQ ID NO: 744912 - DNA, 15 bp, Homo sapiens
ctggagaacccagga

SEQ ID NO: 744913 - DNA, 15 bp, Homo sapiens
tggagaacccaggag

SEQ ID NO: 744914 - DNA, 15 bp, Homo sapiens
ggagaacccaggagc

SEQ ID NO: 744915 - DNA, 15 bp, Homo sapiens
gagaacccaggagcc

SEQ ID NO: 744916 - DNA, 15 bp, Homo sapiens
agaacccaggagcct

SEQ ID NO: 744917 - DNA, 15 bp, Homo sapiens
gaacccaggagcctc

SEQ ID NO: 744918 - DNA, 15 bp, Homo sapiens
aacccaggagcctca

SEQ ID NO: 744919 - DNA, 15 bp, Homo sapiens
acccaggagcctcag

SEQ ID NO: 744920 - DNA, 15 bp, Homo sapiens
cccaggagcctcaga

SEQ ID NO: 744921 - DNA, 15 bp, Homo sapiens
ccaggagcctcagag

SEQ ID NO: 744922 - DNA, 15 bp, Homo sapiens
caggagcctcagaga

SEQ ID NO: 744923 - DNA, 15 bp, Homo sapiens
aggagcctcagagat

SEQ ID NO: 744924 - DNA, 15 bp, Homo sapiens
ggagcctcagagatg

SEQ ID NO: 744925 - DNA, 15 bp, Homo sapiens
gagcctcagagatga

SEQ ID NO: 744926 - DNA, 15 bp, Homo sapiens
agcctcagagatgag

SEQ ID NO: 744927 - DNA, 15 bp, Homo sapiens
gcctcagagatgaga

SEQ ID NO: 744928 - DNA, 15 bp, Homo sapiens
cctcagagatgagac

SEQ ID NO: 744929 - DNA, 15 bp, Homo sapiens
ctcagagatgagacc

SEQ ID NO: 744930 - DNA, 15 bp, Homo sapiens
tcagagatgagacca

SEQ ID NO: 744931 - DNA, 15 bp, Homo sapiens
cagagatgagaccaa

SEQ ID NO: 744932 - DNA, 15 bp, Homo sapiens
agagatgagaccaac

SEQ ID NO: 744933 - DNA, 15 bp, Homo sapiens
gagatgagaccaacg

SEQ ID NO: 744934 - DNA, 15 bp, Homo sapiens
agatgagaccaacgt

SEQ ID NO: 744935 - DNA, 15 bp, Homo sapiens
gatgagaccaacgtg

SEQ ID NO: 744936 - DNA, 15 bp, Homo sapiens
atgagaccaacgtgt

SEQ ID NO: 744937 - DNA, 15 bp, Homo sapiens
tgagaccaacgtgtg

SEQ ID NO: 744938 - DNA, 15 bp, Homo sapiens
gagaccaacgtgtgt

SEQ ID NO: 744939 - DNA, 15 bp, Homo sapiens
agaccaacgtgtgtg

SEQ ID NO: 744940 - DNA, 15 bp, Homo sapiens
gaccaacgtgtgtgc

SEQ ID NO: 744941 - DNA, 15 bp, Homo sapiens
accaacgtgtgtgca

SEQ ID NO: 744942 - DNA, 15 bp, Homo sapiens
ccaacgtgtgtgcag

SEQ ID NO: 744943 - DNA, 15 bp, Homo sapiens
caacgtgtgtgcagc

SEQ ID NO: 744944 - DNA, 15 bp, Homo sapiens
aacgtgtgtgcagca

SEQ ID NO: 744945 - DNA, 15 bp, Homo sapiens
acgtgtgtgcagcac

SEQ ID NO: 744946 - DNA, 15 bp, Homo sapiens
cgtgtgtgcagcact

SEQ ID NO: 744947 - DNA, 15 bp, Homo sapiens
gtgtgtgcagcactc

SEQ ID NO: 744948 - DNA, 15 bp, Homo sapiens
tgtgtgcagcactct

SEQ ID NO: 744949 - DNA, 15 bp, Homo sapiens
gtgtgcagcactctc

SEQ ID NO: 744950 - DNA, 15 bp, Homo sapiens
tgtgcagcactctcc

SEQ ID NO: 744951 - DNA, 15 bp, Homo sapiens
gtgcagcactctcca

SEQ ID NO: 744952 - DNA, 15 bp, Homo sapiens
tgcagcactctccac

SEQ ID NO: 744953 - DNA, 15 bp, Homo sapiens
gcagcactctccaca

SEQ ID NO: 744954 - DNA, 15 bp, Homo sapiens
cagcactctccacaa

SEQ ID NO: 744955 - DNA, 15 bp, Homo sapiens
agcactctccacaag

SEQ ID NO: 744956 - DNA, 15 bp, Homo sapiens
gcactctccacaagc

SEQ ID NO: 744957 - DNA, 15 bp, Homo sapiens
cactctccacaagct

SEQ ID NO: 744958 - DNA, 15 bp, Homo sapiens
actctccacaagctg

SEQ ID NO: 744959 - DNA, 15 bp, Homo sapiens
ctctccacaagctgg

SEQ ID NO: 744960 - DNA, 15 bp, Homo sapiens
tctccacaagctggc

SEQ ID NO: 744961 - DNA, 15 bp, Homo sapiens
ctccacaagctggcc

SEQ ID NO: 744962 - DNA, 15 bp, Homo sapiens
tccacaagctggccc

SEQ ID NO: 744963 - DNA, 15 bp, Homo sapiens
ccacaagctggcccc

SEQ ID NO: 744964 - DNA, 15 bp, Homo sapiens
cacaagctggcccca

SEQ ID NO: 744965 - DNA, 15 bp, Homo sapiens
acaagctggccccaa

SEQ ID NO: 744966 - DNA, 15 bp, Homo sapiens
caagctggccccaat

SEQ ID NO: 744967 - DNA, 15 bp, Homo sapiens
aagctggccccaatc

SEQ ID NO: 744968 - DNA, 15 bp, Homo sapiens
agctggccccaatca

SEQ ID NO: 744969 - DNA, 15 bp, Homo sapiens
gctggccccaatcac

SEQ ID NO: 744970 - DNA, 15 bp, Homo sapiens
ctggccccaatcact

SEQ ID NO: 744971 - DNA, 15 bp, Homo sapiens
tggccccaatcactt

SEQ ID NO: 744972 - DNA, 15 bp, Homo sapiens
ggccccaatcacttt

SEQ ID NO: 744973 - DNA, 15 bp, Homo sapiens
gccccaatcactttt

SEQ ID NO: 744974 - DNA, 15 bp, Homo sapiens
ccccaatcacttttg

SEQ ID NO: 744975 - DNA, 15 bp, Homo sapiens
cccaatcacttttgc

SEQ ID NO: 744976 - DNA, 15 bp, Homo sapiens
ccaatcacttttgca

SEQ ID NO: 744977 - DNA, 15 bp, Homo sapiens
caatcacttttgcat

SEQ ID NO: 744978 - DNA, 15 bp, Homo sapiens
aatcacttttgcatc

SEQ ID NO: 744979 - DNA, 15 bp, Homo sapiens
atcacttttgcatca

SEQ ID NO: 744980 - DNA, 15 bp, Homo sapiens
tcacttttgcatcaa

SEQ ID NO: 744981 - DNA, 15 bp, Homo sapiens
cacttttgcatcaaa

SEQ ID NO: 744982 - DNA, 15 bp, Homo sapiens
acttttgcatcaaat

SEQ ID NO: 744983 - DNA, 15 bp, Homo sapiens
cttttgcatcaaatt

SEQ ID NO: 744984 - DNA, 15 bp, Homo sapiens
ttttgcatcaaattg

SEQ ID NO: 744985 - DNA, 15 bp, Homo sapiens
tttgcatcaaattgg

SEQ ID NO: 744986 - DNA, 15 bp, Homo sapiens
ttgcatcaaattggt

SEQ ID NO: 744987 - DNA, 15 bp, Homo sapiens
tgcatcaaattggta

SEQ ID NO: 744988 - DNA, 15 bp, Homo sapiens
gcatcaaattggtac

SEQ ID NO: 744989 - DNA, 15 bp, Homo sapiens
catcaaattggtaca

SEQ ID NO: 744990 - DNA, 15 bp, Homo sapiens
atcaaattggtacag

SEQ ID NO: 744991 - DNA, 15 bp, Homo sapiens
tcaaattggtacagc

SEQ ID NO: 744992 - DNA, 15 bp, Homo sapiens
caaattggtacagca

SEQ ID NO: 744993 - DNA, 15 bp, Homo sapiens
aaattggtacagcaa

SEQ ID NO: 744994 - DNA, 15 bp, Homo sapiens
aattggtacagcaac

SEQ ID NO: 744995 - DNA, 15 bp, Homo sapiens
attggtacagcaacc

SEQ ID NO: 744996 - DNA, 15 bp, Homo sapiens
ttggtacagcaacct

SEQ ID NO: 744997 - DNA, 15 bp, Homo sapiens
tggtacagcaacctt

SEQ ID NO: 744998 - DNA, 15 bp, Homo sapiens
ggtacagcaacctta

SEQ ID NO: 744999 - DNA, 15 bp, Homo sapiens
gtacagcaaccttat

SEQ ID NO: 745000 - DNA, 15 bp, Homo sapiens
tacagcaaccttatg

SEQ ID NO: 745001 - DNA, 15 bp, Homo sapiens
acagcaaccttatga

SEQ ID NO: 745002 - DNA, 15 bp, Homo sapiens
cagcaaccttatgag

SEQ ID NO: 745003 - DNA, 15 bp, Homo sapiens
agcaaccttatgagg

SEQ ID NO: 745004 - DNA, 15 bp, Homo sapiens
gcaaccttatgaggc

SEQ ID NO: 745005 - DNA, 15 bp, Homo sapiens
caaccttatgaggct

SEQ ID NO: 745006 - DNA, 15 bp, Homo sapiens
aaccttatgaggctg

SEQ ID NO: 745007 - DNA, 15 bp, Homo sapiens
accttatgaggctgg

SEQ ID NO: 745008 - DNA, 15 bp, Homo sapiens
ccttatgaggctggc

SEQ ID NO: 745009 - DNA, 15 bp, Homo sapiens
cttatgaggctggcc

SEQ ID NO: 745010 - DNA, 15 bp, Homo sapiens
ttatgaggctggcct

SEQ ID NO: 745011 - DNA, 15 bp, Homo sapiens
tatgaggctggcctt

SEQ ID NO: 745012 - DNA, 15 bp, Homo sapiens
atgaggctggccttg

SEQ ID NO: 745013 - DNA, 15 bp, Homo sapiens
tgaggctggccttgg

SEQ ID NO: 745014 - DNA, 15 bp, Homo sapiens
gaggctggccttggg

SEQ ID NO: 745015 - DNA, 15 bp, Homo sapiens
aggctggccttgggg

SEQ ID NO: 745016 - DNA, 15 bp, Homo sapiens
gctggccttggggga

SEQ ID NO: 745017 - DNA, 15 bp, Homo sapiens
ctggccttgggggaa

SEQ ID NO: 745018 - DNA, 15 bp, Homo sapiens
tggccttgggggaac

SEQ ID NO: 745019 - DNA, 15 bp, Homo sapiens
ggccttgggggaacc

SEQ ID NO: 745020 - DNA, 15 bp, Homo sapiens
gccttgggggaaccc

SEQ ID NO: 745021 - DNA, 15 bp, Homo sapiens
ccttgggggaaccct

SEQ ID NO: 745022 - DNA, 15 bp, Homo sapiens
cttgggggaaccctg

SEQ ID NO: 745023 - DNA, 15 bp, Homo sapiens
ttgggggaaccctgt

SEQ ID NO: 745024 - DNA, 15 bp, Homo sapiens
tgggggaaccctgtt

SEQ ID NO: 745025 - DNA, 15 bp, Homo sapiens
gggggaaccctgttt

SEQ ID NO: 745026 - DNA, 15 bp, Homo sapiens
ggggaaccctgtttt

SEQ ID NO: 745027 - DNA, 15 bp, Homo sapiens
gggaaccctgtttta

SEQ ID NO: 745028 - DNA, 15 bp, Homo sapiens
ggaaccctgttttag

SEQ ID NO: 745029 - DNA, 15 bp, Homo sapiens
gaaccctgttttagg

SEQ ID NO: 745030 - DNA, 15 bp, Homo sapiens
aaccctgttttaggg

SEQ ID NO: 745031 - DNA, 15 bp, Homo sapiens
accctgttttaggga

SEQ ID NO: 745032 - DNA, 15 bp, Homo sapiens
ccctgttttagggat

SEQ ID NO: 745033 - DNA, 15 bp, Homo sapiens
cctgttttagggatg

SEQ ID NO: 745034 - DNA, 15 bp, Homo sapiens
ctgttttagggatga

SEQ ID NO: 745035 - DNA, 15 bp, Homo sapiens
tgttttagggatgag

SEQ ID NO: 745036 - DNA, 15 bp, Homo sapiens
gttttagggatgagc

SEQ ID NO: 745037 - DNA, 15 bp, Homo sapiens
ttttagggatgagct

SEQ ID NO: 745038 - DNA, 15 bp, Homo sapiens
tttagggatgagctg

SEQ ID NO: 745039 - DNA, 15 bp, Homo sapiens
ttagggatgagctga

SEQ ID NO: 745040 - DNA, 15 bp, Homo sapiens
tagggatgagctgaa

SEQ ID NO: 745041 - DNA, 15 bp, Homo sapiens
agggatgagctgaac

SEQ ID NO: 745042 - DNA, 15 bp, Homo sapiens
gggatgagctgaact

SEQ ID NO: 745043 - DNA, 15 bp, Homo sapiens
ggatgagctgaactt

SEQ ID NO: 745044 - DNA, 15 bp, Homo sapiens
gatgagctgaactta

SEQ ID NO: 745045 - DNA, 15 bp, Homo sapiens
atgagctgaacttac

SEQ ID NO: 745046 - DNA, 15 bp, Homo sapiens
tgagctgaacttacc

SEQ ID NO: 745047 - DNA, 15 bp, Homo sapiens
gagctgaacttaccg

SEQ ID NO: 745048 - DNA, 15 bp, Homo sapiens
agctgaacttaccgg

SEQ ID NO: 745049 - DNA, 15 bp, Homo sapiens
gctgaacttaccggg

SEQ ID NO: 745050 - DNA, 15 bp, Homo sapiens
ctgaacttaccggga

SEQ ID NO: 745051 - DNA, 15 bp, Homo sapiens
tgaacttaccgggag

SEQ ID NO: 745052 - DNA, 15 bp, Homo sapiens
gaacttaccgggagg

SEQ ID NO: 745053 - DNA, 15 bp, Homo sapiens
aacttaccgggaggc

SEQ ID NO: 745054 - DNA, 15 bp, Homo sapiens
acttaccgggaggct

SEQ ID NO: 745055 - DNA, 15 bp, Homo sapiens
cttaccgggaggctg

SEQ ID NO: 745056 - DNA, 15 bp, Homo sapiens
ttaccgggaggctgc

SEQ ID NO: 745057 - DNA, 15 bp, Homo sapiens
taccgggaggctgca

SEQ ID NO: 745058 - DNA, 15 bp, Homo sapiens
accgggaggctgcat

SEQ ID NO: 745059 - DNA, 15 bp, Homo sapiens
ccgggaggctgcatg

SEQ ID NO: 745060 - DNA, 15 bp, Homo sapiens
cgggaggctgcatgc

SEQ ID NO: 745061 - DNA, 15 bp, Homo sapiens
gggaggctgcatgcg

SEQ ID NO: 745062 - DNA, 15 bp, Homo sapiens
ggaggctgcatgcga

SEQ ID NO: 745063 - DNA, 15 bp, Homo sapiens
gaggctgcatgcgag

SEQ ID NO: 745064 - DNA, 15 bp, Homo sapiens
aggctgcatgcgagg

SEQ ID NO: 745065 - DNA, 15 bp, Homo sapiens
ggctgcatgcgaggt

SEQ ID NO: 745066 - DNA, 15 bp, Homo sapiens
gctgcatgcgaggtt

SEQ ID NO: 745067 - DNA, 15 bp, Homo sapiens
ctgcatgcgaggttg

SEQ ID NO: 745068 - DNA, 15 bp, Homo sapiens
tgcatgcgaggttgg

SEQ ID NO: 745069 - DNA, 15 bp, Homo sapiens
gcatgcgaggttggt

SEQ ID NO: 745070 - DNA, 15 bp, Homo sapiens
catgcgaggttggtg

SEQ ID NO: 745071 - DNA, 15 bp, Homo sapiens
atgcgaggttggtgt

SEQ ID NO: 745072 - DNA, 15 bp, Homo sapiens
tgcgaggttggtgtg

SEQ ID NO: 745073 - DNA, 15 bp, Homo sapiens
gcgaggttggtgtga

SEQ ID NO: 745074 - DNA, 15 bp, Homo sapiens
cgaggttggtgtgaa

SEQ ID NO: 745075 - DNA, 15 bp, Homo sapiens
gaggttggtgtgaaa

SEQ ID NO: 745076 - DNA, 15 bp, Homo sapiens
aggttggtgtgaaat

SEQ ID NO: 745077 - DNA, 15 bp, Homo sapiens
ggttggtgtgaaatg

SEQ ID NO: 745078 - DNA, 15 bp, Homo sapiens
gttggtgtgaaatgc

SEQ ID NO: 745079 - DNA, 15 bp, Homo sapiens
ttggtgtgaaatgca

SEQ ID NO: 745080 - DNA, 15 bp, Homo sapiens
tggtgtgaaatgcat

SEQ ID NO: 745081 - DNA, 15 bp, Homo sapiens
ggtgtgaaatgcata

SEQ ID NO: 745082 - DNA, 15 bp, Homo sapiens
gtgtgaaatgcatat

SEQ ID NO: 745083 - DNA, 15 bp, Homo sapiens
tgtgaaatgcatatc

SEQ ID NO: 745084 - DNA, 15 bp, Homo sapiens
gtgaaatgcatatct

SEQ ID NO: 745085 - DNA, 15 bp, Homo sapiens
tgaaatgcatatctg

SEQ ID NO: 745086 - DNA, 15 bp, Homo sapiens
gaaatgcatatctgg

SEQ ID NO: 745087 - DNA, 15 bp, Homo sapiens
aaatgcatatctggc

SEQ ID NO: 745088 - DNA, 15 bp, Homo sapiens
aatgcatatctggct

SEQ ID NO: 745089 - DNA, 15 bp, Homo sapiens
atgcatatctggctt

SEQ ID NO: 745090 - DNA, 15 bp, Homo sapiens
tgcatatctggcttt

SEQ ID NO: 745091 - DNA, 15 bp, Homo sapiens
gcatatctggctttg

SEQ ID NO: 745092 - DNA, 15 bp, Homo sapiens
catatctggctttgt

SEQ ID NO: 745093 - DNA, 15 bp, Homo sapiens
atatctggctttgta

SEQ ID NO: 745094 - DNA, 15 bp, Homo sapiens
tatctggctttgtag

SEQ ID NO: 745095 - DNA, 15 bp, Homo sapiens
atctggctttgtagc

SEQ ID NO: 745096 - DNA, 15 bp, Homo sapiens
tctggctttgtagct

SEQ ID NO: 745097 - DNA, 15 bp, Homo sapiens
ctggctttgtagctg

SEQ ID NO: 745098 - DNA, 15 bp, Homo sapiens
tggctttgtagctgg

SEQ ID NO: 745099 - DNA, 15 bp, Homo sapiens
ggctttgtagctggt

SEQ ID NO: 745100 - DNA, 15 bp, Homo sapiens
gctttgtagctggtc

SEQ ID NO: 745101 - DNA, 15 bp, Homo sapiens
ctttgtagctggtcg

SEQ ID NO: 745102 - DNA, 15 bp, Homo sapiens
tttgtagctggtcgg

SEQ ID NO: 745103 - DNA, 15 bp, Homo sapiens
ttgtagctggtcggc

SEQ ID NO: 745104 - DNA, 15 bp, Homo sapiens
tgtagctggtcggct

SEQ ID NO: 745105 - DNA, 15 bp, Homo sapiens
gtagctggtcggctc

SEQ ID NO: 745106 - DNA, 15 bp, Homo sapiens
tagctggtcggctca

SEQ ID NO: 745107 - DNA, 15 bp, Homo sapiens
agctggtcggctcac

SEQ ID NO: 745108 - DNA, 15 bp, Homo sapiens
gctggtcggctcacc

SEQ ID NO: 745109 - DNA, 15 bp, Homo sapiens
ctggtcggctcacct

SEQ ID NO: 745110 - DNA, 15 bp, Homo sapiens
tggtcggctcacctc

SEQ ID NO: 745111 - DNA, 15 bp, Homo sapiens
ggtcggctcacctct

SEQ ID NO: 745112 - DNA, 15 bp, Homo sapiens
gtcggctcacctctg

SEQ ID NO: 745113 - DNA, 15 bp, Homo sapiens
tcggctcacctctgg

SEQ ID NO: 745114 - DNA, 15 bp, Homo sapiens
cggctcacctctggg

SEQ ID NO: 745115 - DNA, 15 bp, Homo sapiens
ggctcacctctgggg

SEQ ID NO: 745116 - DNA, 15 bp, Homo sapiens
gctcacctctggggt

SEQ ID NO: 745117 - DNA, 15 bp, Homo sapiens
ctcacctctggggtt

SEQ ID NO: 745118 - DNA, 15 bp, Homo sapiens
tcacctctggggttg

SEQ ID NO: 745119 - DNA, 15 bp, Homo sapiens
cacctctggggttgg

SEQ ID NO: 745120 - DNA, 15 bp, Homo sapiens
acctctggggttggc

SEQ ID NO: 745121 - DNA, 15 bp, Homo sapiens
cctctggggttggca

SEQ ID NO: 745122 - DNA, 15 bp, Homo sapiens
ctctggggttggcac

SEQ ID NO: 745123 - DNA, 15 bp, Homo sapiens
tctggggttggcaca

SEQ ID NO: 745124 - DNA, 15 bp, Homo sapiens
ctggggttggcacag

SEQ ID NO: 745125 - DNA, 15 bp, Homo sapiens
tggggttggcacagg

SEQ ID NO: 745126 - DNA, 15 bp, Homo sapiens
ggggttggcacaggg

SEQ ID NO: 745127 - DNA, 15 bp, Homo sapiens
gggttggcacagggg

SEQ ID NO: 745128 - DNA, 15 bp, Homo sapiens
ggttggcacaggggc

SEQ ID NO: 745129 - DNA, 15 bp, Homo sapiens
gttggcacaggggcg

SEQ ID NO: 745130 - DNA, 15 bp, Homo sapiens
ttggcacaggggcgg

SEQ ID NO: 745131 - DNA, 15 bp, Homo sapiens
tggcacaggggcggg

SEQ ID NO: 745132 - DNA, 15 bp, Homo sapiens
ggcacaggggcgggg

SEQ ID NO: 745133 - DNA, 15 bp, Homo sapiens
gcacaggggcggggg

SEQ ID NO: 745134 - DNA, 15 bp, Homo sapiens
cacaggggcgggggt

SEQ ID NO: 745135 - DNA, 15 bp, Homo sapiens
acaggggcgggggtt

SEQ ID NO: 745136 - DNA, 15 bp, Homo sapiens
caggggcgggggttc

SEQ ID NO: 745137 - DNA, 15 bp, Homo sapiens
aggggcgggggttct

SEQ ID NO: 745138 - DNA, 15 bp, Homo sapiens
ggggcgggggttctg

SEQ ID NO: 745139 - DNA, 15 bp, Homo sapiens
gggcgggggttctgc

SEQ ID NO: 745140 - DNA, 15 bp, Homo sapiens
ggcgggggttctgcc

SEQ ID NO: 745141 - DNA, 15 bp, Homo sapiens
gcgggggttctgcca

SEQ ID NO: 745142 - DNA, 15 bp, Homo sapiens
cgggggttctgccat

SEQ ID NO: 745143 - DNA, 15 bp, Homo sapiens
gggggttctgccatg

SEQ ID NO: 745144 - DNA, 15 bp, Homo sapiens
ggggttctgccatgg

SEQ ID NO: 745145 - DNA, 15 bp, Homo sapiens
gggttctgccatggc

SEQ ID NO: 745146 - DNA, 15 bp, Homo sapiens
ggttctgccatggct

SEQ ID NO: 745147 - DNA, 15 bp, Homo sapiens
gttctgccatggcta

SEQ ID NO: 745148 - DNA, 15 bp, Homo sapiens
ttctgccatggctag

SEQ ID NO: 745149 - DNA, 15 bp, Homo sapiens
tctgccatggctaga

SEQ ID NO: 745150 - DNA, 15 bp, Homo sapiens
ctgccatggctagaa

SEQ ID NO: 745151 - DNA, 15 bp, Homo sapiens
tgccatggctagaat

SEQ ID NO: 745152 - DNA, 15 bp, Homo sapiens
gccatggctagaatg

SEQ ID NO: 745153 - DNA, 15 bp, Homo sapiens
ccatggctagaatgc

SEQ ID NO: 745154 - DNA, 15 bp, Homo sapiens
catggctagaatgcg

SEQ ID NO: 745155 - DNA, 15 bp, Homo sapiens
atggctagaatgcgc

SEQ ID NO: 745156 - DNA, 15 bp, Homo sapiens
tggctagaatgcgct

SEQ ID NO: 745157 - DNA, 15 bp, Homo sapiens
ggctagaatgcgcta

SEQ ID NO: 745158 - DNA, 15 bp, Homo sapiens
gctagaatgcgctaa

SEQ ID NO: 745159 - DNA, 15 bp, Homo sapiens
ctagaatgcgctaag

SEQ ID NO: 745160 - DNA, 15 bp, Homo sapiens
tagaatgcgctaagg

SEQ ID NO: 745161 - DNA, 15 bp, Homo sapiens
agaatgcgctaaggg

SEQ ID NO: 745162 - DNA, 15 bp, Homo sapiens
gaatgcgctaagggg

SEQ ID NO: 745163 - DNA, 15 bp, Homo sapiens
aatgcgctaaggggt

SEQ ID NO: 745164 - DNA, 15 bp, Homo sapiens
atgcgctaaggggtg

SEQ ID NO: 745165 - DNA, 15 bp, Homo sapiens
tgcgctaaggggtgg

SEQ ID NO: 745166 - DNA, 15 bp, Homo sapiens
gcgctaaggggtgga

SEQ ID NO: 745167 - DNA, 15 bp, Homo sapiens
cgctaaggggtggaa

SEQ ID NO: 745168 - DNA, 15 bp, Homo sapiens
gctaaggggtggaaa

SEQ ID NO: 745169 - DNA, 15 bp, Homo sapiens
ctaaggggtggaaac

SEQ ID NO: 745170 - DNA, 15 bp, Homo sapiens
taaggggtggaaacg

SEQ ID NO: 745171 - DNA, 15 bp, Homo sapiens
aaggggtggaaacga

SEQ ID NO: 745172 - DNA, 15 bp, Homo sapiens
aggggtggaaacgaa

SEQ ID NO: 745173 - DNA, 15 bp, Homo sapiens
ggggtggaaacgaag

SEQ ID NO: 745174 - DNA, 15 bp, Homo sapiens
gggtggaaacgaagc

SEQ ID NO: 745175 - DNA, 15 bp, Homo sapiens
ggtggaaacgaagcc

SEQ ID NO: 745176 - DNA, 15 bp, Homo sapiens
gtggaaacgaagcct

SEQ ID NO: 745177 - DNA, 15 bp, Homo sapiens
tggaaacgaagcctg

SEQ ID NO: 745178 - DNA, 15 bp, Homo sapiens
ggaaacgaagcctgc

SEQ ID NO: 745179 - DNA, 15 bp, Homo sapiens
gaaacgaagcctgct

SEQ ID NO: 745180 - DNA, 15 bp, Homo sapiens
aaacgaagcctgctg

SEQ ID NO: 745181 - DNA, 15 bp, Homo sapiens
aacgaagcctgctgg

SEQ ID NO: 745182 - DNA, 15 bp, Homo sapiens
acgaagcctgctggg

SEQ ID NO: 745183 - DNA, 15 bp, Homo sapiens
cgaagcctgctgggc

SEQ ID NO: 745184 - DNA, 15 bp, Homo sapiens
gaagcctgctgggcc

SEQ ID NO: 745185 - DNA, 15 bp, Homo sapiens
aagcctgctgggccc

SEQ ID NO: 745186 - DNA, 15 bp, Homo sapiens
agcctgctgggcccg

SEQ ID NO: 745187 - DNA, 15 bp, Homo sapiens
gcctgctgggcccgg

SEQ ID NO: 745188 - DNA, 15 bp, Homo sapiens
cctgctgggcccggg

SEQ ID NO: 745189 - DNA, 15 bp, Homo sapiens
ctgctgggcccggga

SEQ ID NO: 745190 - DNA, 15 bp, Homo sapiens
tgctgggcccgggaa

SEQ ID NO: 745191 - DNA, 15 bp, Homo sapiens
gctgggcccgggaac

SEQ ID NO: 745192 - DNA, 15 bp, Homo sapiens
ctgggcccgggaacc

SEQ ID NO: 745193 - DNA, 15 bp, Homo sapiens
tgggcccgggaacca

SEQ ID NO: 745194 - DNA, 15 bp, Homo sapiens
gggcccgggaaccag

SEQ ID NO: 745195 - DNA, 15 bp, Homo sapiens
ggcccgggaaccaga

SEQ ID NO: 745196 - DNA, 15 bp, Homo sapiens
gcccgggaaccagag

SEQ ID NO: 745197 - DNA, 15 bp, Homo sapiens
cccgggaaccagaga

SEQ ID NO: 745198 - DNA, 15 bp, Homo sapiens
ccgggaaccagagag

SEQ ID NO: 745199 - DNA, 15 bp, Homo sapiens
cgggaaccagagagc

SEQ ID NO: 745200 - DNA, 15 bp, Homo sapiens
gggaaccagagagca

SEQ ID NO: 745201 - DNA, 15 bp, Homo sapiens
ggaaccagagagcag

SEQ ID NO: 745202 - DNA, 15 bp, Homo sapiens
gaaccagagagcagc

SEQ ID NO: 745203 - DNA, 15 bp, Homo sapiens
aaccagagagcagcc

SEQ ID NO: 745204 - DNA, 15 bp, Homo sapiens
accagagagcagcct

SEQ ID NO: 745205 - DNA, 15 bp, Homo sapiens
ccagagagcagcctg

SEQ ID NO: 745206 - DNA, 15 bp, Homo sapiens
cagagagcagcctgg

SEQ ID NO: 745207 - DNA, 15 bp, Homo sapiens
agagagcagcctggc

SEQ ID NO: 745208 - DNA, 15 bp, Homo sapiens
gagagcagcctggcc

SEQ ID NO: 745209 - DNA, 15 bp, Homo sapiens
agagcagcctggcct

SEQ ID NO: 745210 - DNA, 15 bp, Homo sapiens
gagcagcctggcctt

SEQ ID NO: 745211 - DNA, 15 bp, Homo sapiens
agcagcctggccttt

SEQ ID NO: 745212 - DNA, 15 bp, Homo sapiens
gcagcctggcctttg

SEQ ID NO: 745213 - DNA, 15 bp, Homo sapiens
cagcctggcctttga

SEQ ID NO: 745214 - DNA, 15 bp, Homo sapiens
agcctggcctttgaa

SEQ ID NO: 745215 - DNA, 15 bp, Homo sapiens
gcctggcctttgaag

SEQ ID NO: 745216 - DNA, 15 bp, Homo sapiens
cctggcctttgaagg

SEQ ID NO: 745217 - DNA, 15 bp, Homo sapiens
ctggcctttgaagga

SEQ ID NO: 745218 - DNA, 15 bp, Homo sapiens
tggcctttgaaggag

SEQ ID NO: 745219 - DNA, 15 bp, Homo sapiens
ggcctttgaaggaga

SEQ ID NO: 745220 - DNA, 15 bp, Homo sapiens
gcctttgaaggagac

SEQ ID NO: 745221 - DNA, 15 bp, Homo sapiens
cctttgaaggagacc

SEQ ID NO: 745222 - DNA, 15 bp, Homo sapiens
ctttgaaggagaccc

SEQ ID NO: 745223 - DNA, 15 bp, Homo sapiens
tttgaaggagaccct

SEQ ID NO: 745224 - DNA, 15 bp, Homo sapiens
ttgaaggagaccctg

SEQ ID NO: 745225 - DNA, 15 bp, Homo sapiens
tgaaggagaccctgt

SEQ ID NO: 745226 - DNA, 15 bp, Homo sapiens
gaaggagaccctgtg

SEQ ID NO: 745227 - DNA, 15 bp, Homo sapiens
aaggagaccctgtgg

SEQ ID NO: 745228 - DNA, 15 bp, Homo sapiens
aggagaccctgtggc

SEQ ID NO: 745229 - DNA, 15 bp, Homo sapiens
ggagaccctgtggca

SEQ ID NO: 745230 - DNA, 15 bp, Homo sapiens
gagaccctgtggcac

SEQ ID NO: 745231 - DNA, 15 bp, Homo sapiens
agaccctgtggcacc

SEQ ID NO: 745232 - DNA, 15 bp, Homo sapiens
gaccctgtggcaccc

SEQ ID NO: 745233 - DNA, 15 bp, Homo sapiens
accctgtggcacccc

SEQ ID NO: 745234 - DNA, 15 bp, Homo sapiens
ccctgtggcaccccc

SEQ ID NO: 745235 - DNA, 15 bp, Homo sapiens
cctgtggcaccccct

SEQ ID NO: 745236 - DNA, 15 bp, Homo sapiens
ctgtggcaccccctg

SEQ ID NO: 745237 - DNA, 15 bp, Homo sapiens
tgtggcaccccctgc

SEQ ID NO: 745238 - DNA, 15 bp, Homo sapiens
gtggcaccccctgcc

SEQ ID NO: 745239 - DNA, 15 bp, Homo sapiens
tggcaccccctgccc

SEQ ID NO: 745240 - DNA, 15 bp, Homo sapiens
ggcaccccctgccca

SEQ ID NO: 745241 - DNA, 15 bp, Homo sapiens
gcaccccctgcccac

SEQ ID NO: 745242 - DNA, 15 bp, Homo sapiens
caccccctgcccacc

SEQ ID NO: 745243 - DNA, 15 bp, Homo sapiens
accccctgcccaccc

SEQ ID NO: 745244 - DNA, 15 bp, Homo sapiens
ccccctgcccacccc

SEQ ID NO: 745245 - DNA, 15 bp, Homo sapiens
cccctgcccaccccc

SEQ ID NO: 745246 - DNA, 15 bp, Homo sapiens
ccctgcccaccccca

SEQ ID NO: 745247 - DNA, 15 bp, Homo sapiens
cctgcccacccccaa

SEQ ID NO: 745248 - DNA, 15 bp, Homo sapiens
ctgcccacccccaag

SEQ ID NO: 745249 - DNA, 15 bp, Homo sapiens
tgcccacccccaagt

SEQ ID NO: 745250 - DNA, 15 bp, Homo sapiens
gcccacccccaagtc

SEQ ID NO: 745251 - DNA, 15 bp, Homo sapiens
cccacccccaagtcc

SEQ ID NO: 745252 - DNA, 15 bp, Homo sapiens
ccacccccaagtcca

SEQ ID NO: 745253 - DNA, 15 bp, Homo sapiens
cacccccaagtccag

SEQ ID NO: 745254 - DNA, 15 bp, Homo sapiens
acccccaagtccagc

SEQ ID NO: 745255 - DNA, 15 bp, Homo sapiens
cccccaagtccagcc

SEQ ID NO: 745256 - DNA, 15 bp, Homo sapiens
ccccaagtccagcca

SEQ ID NO: 745257 - DNA, 15 bp, Homo sapiens
cccaagtccagccat

SEQ ID NO: 745258 - DNA, 15 bp, Homo sapiens
ccaagtccagccatc

SEQ ID NO: 745259 - DNA, 15 bp, Homo sapiens
caagtccagccatct

SEQ ID NO: 745260 - DNA, 15 bp, Homo sapiens
aagtccagccatctc

SEQ ID NO: 745261 - DNA, 15 bp, Homo sapiens
agtccagccatctca

SEQ ID NO: 745262 - DNA, 15 bp, Homo sapiens
gtccagccatctcac

SEQ ID NO: 745263 - DNA, 15 bp, Homo sapiens
tccagccatctcact

SEQ ID NO: 745264 - DNA, 15 bp, Homo sapiens
ccagccatctcactt

SEQ ID NO: 745265 - DNA, 15 bp, Homo sapiens
cagccatctcacttc

SEQ ID NO: 745266 - DNA, 15 bp, Homo sapiens
agccatctcacttca

SEQ ID NO: 745267 - DNA, 15 bp, Homo sapiens
gccatctcacttcac

SEQ ID NO: 745268 - DNA, 15 bp, Homo sapiens
ccatctcacttcact

SEQ ID NO: 745269 - DNA, 15 bp, Homo sapiens
catctcacttcactg

SEQ ID NO: 745270 - DNA, 15 bp, Homo sapiens
atctcacttcactgg

SEQ ID NO: 745271 - DNA, 15 bp, Homo sapiens
tctcacttcactgga

SEQ ID NO: 745272 - DNA, 15 bp, Homo sapiens
ctcacttcactggag

SEQ ID NO: 745273 - DNA, 15 bp, Homo sapiens
tcacttcactggaga

SEQ ID NO: 745274 - DNA, 15 bp, Homo sapiens
cacttcactggagat

SEQ ID NO: 745275 - DNA, 15 bp, Homo sapiens
acttcactggagatg

SEQ ID NO: 745276 - DNA, 15 bp, Homo sapiens
cttcactggagatgc

SEQ ID NO: 745277 - DNA, 15 bp, Homo sapiens
ttcactggagatgct

SEQ ID NO: 745278 - DNA, 15 bp, Homo sapiens
tcactggagatgctg

SEQ ID NO: 745279 - DNA, 15 bp, Homo sapiens
cactggagatgctgc

SEQ ID NO: 745280 - DNA, 15 bp, Homo sapiens
actggagatgctgca

SEQ ID NO: 745281 - DNA, 15 bp, Homo sapiens
ctggagatgctgcaa

SEQ ID NO: 745282 - DNA, 15 bp, Homo sapiens
tggagatgctgcaaa

SEQ ID NO: 745283 - DNA, 15 bp, Homo sapiens
ggagatgctgcaaag

SEQ ID NO: 745284 - DNA, 15 bp, Homo sapiens
gagatgctgcaaagc

SEQ ID NO: 745285 - DNA, 15 bp, Homo sapiens
agatgctgcaaagca

SEQ ID NO: 745286 - DNA, 15 bp, Homo sapiens
gatgctgcaaagcat

SEQ ID NO: 745287 - DNA, 15 bp, Homo sapiens
atgctgcaaagcatg

SEQ ID NO: 745288 - DNA, 15 bp, Homo sapiens
tgctgcaaagcatga

SEQ ID NO: 745289 - DNA, 15 bp, Homo sapiens
gctgcaaagcatgaa

SEQ ID NO: 745290 - DNA, 15 bp, Homo sapiens
ctgcaaagcatgaaa

SEQ ID NO: 745291 - DNA, 15 bp, Homo sapiens
tgcaaagcatgaaaa

SEQ ID NO: 745292 - DNA, 15 bp, Homo sapiens
gcaaagcatgaaaaa

SEQ ID NO: 745293 - DNA, 15 bp, Homo sapiens
caaagcatgaaaaaa

SEQ ID NO: 745294 - DNA, 15 bp, Homo sapiens
aaagcatgaaaaaaa

SEQ ID NO: 745295 - DNA, 15 bp, Homo sapiens
aagcatgaaaaaaaa

SEQ ID NO: 745296 - DNA, 15 bp, Homo sapiens
agcatgaaaaaaaaa

SEQ ID NO: 745297 - DNA, 15 bp, Homo sapiens
gcatgaaaaaaaaaa

SEQ ID NO: 745298 - DNA, 15 bp, Homo sapiens
catgaaaaaaaaaaa

SEQ ID NO: 745299 - DNA, 15 bp, Homo sapiens
atgaaaaaaaaaaaa

SEQ ID NO: 745300 - DNA, 15 bp, Homo sapiens
tgaaaaaaaaaaaat

SEQ ID NO: 745301 - DNA, 15 bp, Homo sapiens
gaaaaaaaaaaaatc

SEQ ID NO: 745302 - DNA, 15 bp, Homo sapiens
aaaaaaaaaaatcca

SEQ ID NO: 745303 - DNA, 15 bp, Homo sapiens
aaaaaaaaaatccag

SEQ ID NO: 745304 - DNA, 15 bp, Homo sapiens
aaaaaaaaatccagt

SEQ ID NO: 745305 - DNA, 15 bp, Homo sapiens
aaaaaaaatccagtg

SEQ ID NO: 745306 - DNA, 15 bp, Homo sapiens
aaaaaaatccagtgt

SEQ ID NO: 745307 - DNA, 15 bp, Homo sapiens
aaaaaatccagtgtt

SEQ ID NO: 745308 - DNA, 15 bp, Homo sapiens
aaaaatccagtgttc

SEQ ID NO: 745309 - DNA, 15 bp, Homo sapiens
aaaatccagtgttct

SEQ ID NO: 745310 - DNA, 15 bp, Homo sapiens
aaatccagtgttctc

SEQ ID NO: 745311 - DNA, 15 bp, Homo sapiens
aatccagtgttctca

SEQ ID NO: 745312 - DNA, 15 bp, Homo sapiens
atccagtgttctcag

SEQ ID NO: 745313 - DNA, 15 bp, Homo sapiens
tccagtgttctcagg

SEQ ID NO: 745314 - DNA, 15 bp, Homo sapiens
ccagtgttctcaggt

SEQ ID NO: 745315 - DNA, 15 bp, Homo sapiens
cagtgttctcaggtc

SEQ ID NO: 745316 - DNA, 15 bp, Homo sapiens
agtgttctcaggtca

SEQ ID NO: 745317 - DNA, 15 bp, Homo sapiens
gtgttctcaggtcag

SEQ ID NO: 745318 - DNA, 15 bp, Homo sapiens
tgttctcaggtcagc

SEQ ID NO: 745319 - DNA, 15 bp, Homo sapiens
gttctcaggtcagcc

SEQ ID NO: 745320 - DNA, 15 bp, Homo sapiens
ttctcaggtcagcct

SEQ ID NO: 745321 - DNA, 15 bp, Homo sapiens
tctcaggtcagcctt

SEQ ID NO: 745322 - DNA, 15 bp, Homo sapiens
ctcaggtcagccttc

SEQ ID NO: 745323 - DNA, 15 bp, Homo sapiens
tcaggtcagccttcc

SEQ ID NO: 745324 - DNA, 15 bp, Homo sapiens
caggtcagccttcca

SEQ ID NO: 745325 - DNA, 15 bp, Homo sapiens
aggtcagccttccac

SEQ ID NO: 745326 - DNA, 15 bp, Homo sapiens
ggtcagccttccacc

SEQ ID NO: 745327 - DNA, 15 bp, Homo sapiens
gtcagccttccacca

SEQ ID NO: 745328 - DNA, 15 bp, Homo sapiens
tcagccttccaccag

SEQ ID NO: 745329 - DNA, 15 bp, Homo sapiens
cagccttccaccagc

SEQ ID NO: 745330 - DNA, 15 bp, Homo sapiens
agccttccaccagcc

SEQ ID NO: 745331 - DNA, 15 bp, Homo sapiens
gccttccaccagcca

SEQ ID NO: 745332 - DNA, 15 bp, Homo sapiens
ccttccaccagccag

SEQ ID NO: 745333 - DNA, 15 bp, Homo sapiens
cttccaccagccagg

SEQ ID NO: 745334 - DNA, 15 bp, Homo sapiens
ttccaccagccagga

SEQ ID NO: 745335 - DNA, 15 bp, Homo sapiens
tccaccagccaggat

SEQ ID NO: 745336 - DNA, 15 bp, Homo sapiens
ccaccagccaggatt

SEQ ID NO: 745337 - DNA, 15 bp, Homo sapiens
caccagccaggattc

SEQ ID NO: 745338 - DNA, 15 bp, Homo sapiens
accagccaggattca

SEQ ID NO: 745339 - DNA, 15 bp, Homo sapiens
ccagccaggattcat

SEQ ID NO: 745340 - DNA, 15 bp, Homo sapiens
cagccaggattcatc

SEQ ID NO: 745341 - DNA, 15 bp, Homo sapiens
agccaggattcatcg

SEQ ID NO: 745342 - DNA, 15 bp, Homo sapiens
gccaggattcatcgt

SEQ ID NO: 745343 - DNA, 15 bp, Homo sapiens
ccaggattcatcgtc

SEQ ID NO: 745344 - DNA, 15 bp, Homo sapiens
caggattcatcgtct

SEQ ID NO: 745345 - DNA, 15 bp, Homo sapiens
aggattcatcgtctg

SEQ ID NO: 745346 - DNA, 15 bp, Homo sapiens
ggattcatcgtctga

SEQ ID NO: 745347 - DNA, 15 bp, Homo sapiens
gattcatcgtctgat

SEQ ID NO: 745348 - DNA, 15 bp, Homo sapiens
attcatcgtctgatc

SEQ ID NO: 745349 - DNA, 15 bp, Homo sapiens
ttcatcgtctgatct

SEQ ID NO: 745350 - DNA, 15 bp, Homo sapiens
tcatcgtctgatctg

SEQ ID NO: 745351 - DNA, 15 bp, Homo sapiens
catcgtctgatctgt

SEQ ID NO: 745352 - DNA, 15 bp, Homo sapiens
atcgtctgatctgtt

SEQ ID NO: 745353 - DNA, 15 bp, Homo sapiens
tcgtctgatctgttt

SEQ ID NO: 745354 - DNA, 15 bp, Homo sapiens
cgtctgatctgtttg

SEQ ID NO: 745355 - DNA, 15 bp, Homo sapiens
gtctgatctgtttgg

SEQ ID NO: 745356 - DNA, 15 bp, Homo sapiens
tctgatctgtttggg

SEQ ID NO: 745357 - DNA, 15 bp, Homo sapiens
ctgatctgtttgggg

SEQ ID NO: 745358 - DNA, 15 bp, Homo sapiens
tgatctgtttgggga

SEQ ID NO: 745359 - DNA, 15 bp, Homo sapiens
gatctgtttggggag

SEQ ID NO: 745360 - DNA, 15 bp, Homo sapiens
atctgtttggggaga

SEQ ID NO: 745361 - DNA, 15 bp, Homo sapiens
tctgtttggggagag

SEQ ID NO: 745362 - DNA, 15 bp, Homo sapiens
ctgtttggggagaga

SEQ ID NO: 745363 - DNA, 15 bp, Homo sapiens
tgtttggggagagag

SEQ ID NO: 745364 - DNA, 15 bp, Homo sapiens
gtttggggagagagc

SEQ ID NO: 745365 - DNA, 15 bp, Homo sapiens
tttggggagagagca

SEQ ID NO: 745366 - DNA, 15 bp, Homo sapiens
ttggggagagagcat

SEQ ID NO: 745367 - DNA, 15 bp, Homo sapiens
tggggagagagcatg

SEQ ID NO: 745368 - DNA, 15 bp, Homo sapiens
ggggagagagcatgg

SEQ ID NO: 745369 - DNA, 15 bp, Homo sapiens
gggagagagcatggg

SEQ ID NO: 745370 - DNA, 15 bp, Homo sapiens
ggagagagcatgggg

SEQ ID NO: 745371 - DNA, 15 bp, Homo sapiens
gagagagcatggggt

SEQ ID NO: 745372 - DNA, 15 bp, Homo sapiens
agagagcatggggtg

SEQ ID NO: 745373 - DNA, 15 bp, Homo sapiens
gagagcatggggtgg

SEQ ID NO: 745374 - DNA, 15 bp, Homo sapiens
agagcatggggtggt

SEQ ID NO: 745375 - DNA, 15 bp, Homo sapiens
gagcatggggtggtg

SEQ ID NO: 745376 - DNA, 15 bp, Homo sapiens
agcatggggtggtgg

SEQ ID NO: 745377 - DNA, 15 bp, Homo sapiens
gcatggggtggtgga

SEQ ID NO: 745378 - DNA, 15 bp, Homo sapiens
catggggtggtggag

SEQ ID NO: 745379 - DNA, 15 bp, Homo sapiens
atggggtggtggaga

SEQ ID NO: 745380 - DNA, 15 bp, Homo sapiens
tggggtggtggagat

SEQ ID NO: 745381 - DNA, 15 bp, Homo sapiens
ggggtggtggagatg

SEQ ID NO: 745382 - DNA, 15 bp, Homo sapiens
gggtggtggagatgg

SEQ ID NO: 745383 - DNA, 15 bp, Homo sapiens
ggtggtggagatggg

SEQ ID NO: 745384 - DNA, 15 bp, Homo sapiens
gtggtggagatgggt

SEQ ID NO: 745385 - DNA, 15 bp, Homo sapiens
tggtggagatgggtt

SEQ ID NO: 745386 - DNA, 15 bp, Homo sapiens
ggtggagatgggttg

SEQ ID NO: 745387 - DNA, 15 bp, Homo sapiens
gtggagatgggttgg

SEQ ID NO: 745388 - DNA, 15 bp, Homo sapiens
tggagatgggttggg

SEQ ID NO: 745389 - DNA, 15 bp, Homo sapiens
ggagatgggttgggc

SEQ ID NO: 745390 - DNA, 15 bp, Homo sapiens
gagatgggttgggcc

SEQ ID NO: 745391 - DNA, 15 bp, Homo sapiens
agatgggttgggccc

SEQ ID NO: 745392 - DNA, 15 bp, Homo sapiens
gatgggttgggcccc

SEQ ID NO: 745393 - DNA, 15 bp, Homo sapiens
atgggttgggcccca

SEQ ID NO: 745394 - DNA, 15 bp, Homo sapiens
tgggttgggccccag

SEQ ID NO: 745395 - DNA, 15 bp, Homo sapiens
gggttgggccccagt

SEQ ID NO: 745396 - DNA, 15 bp, Homo sapiens
ggttgggccccagtg

SEQ ID NO: 745397 - DNA, 15 bp, Homo sapiens
gttgggccccagtgt

SEQ ID NO: 745398 - DNA, 15 bp, Homo sapiens
ttgggccccagtgtt

SEQ ID NO: 745399 - DNA, 15 bp, Homo sapiens
tgggccccagtgttt

SEQ ID NO: 745400 - DNA, 15 bp, Homo sapiens
gggccccagtgtttt

SEQ ID NO: 745401 - DNA, 15 bp, Homo sapiens
ggccccagtgttttc

SEQ ID NO: 745402 - DNA, 15 bp, Homo sapiens
gccccagtgttttct

SEQ ID NO: 745403 - DNA, 15 bp, Homo sapiens
ccccagtgttttctg

SEQ ID NO: 745404 - DNA, 15 bp, Homo sapiens
cccagtgttttctga

SEQ ID NO: 745405 - DNA, 15 bp, Homo sapiens
ccagtgttttctgat

SEQ ID NO: 745406 - DNA, 15 bp, Homo sapiens
cagtgttttctgatt

SEQ ID NO: 745407 - DNA, 15 bp, Homo sapiens
agtgttttctgatta

SEQ ID NO: 745408 - DNA, 15 bp, Homo sapiens
gtgttttctgattaa

SEQ ID NO: 745409 - DNA, 15 bp, Homo sapiens
tgttttctgattaac

SEQ ID NO: 745410 - DNA, 15 bp, Homo sapiens
gttttctgattaact

SEQ ID NO: 745411 - DNA, 15 bp, Homo sapiens
ttttctgattaactc

SEQ ID NO: 745412 - DNA, 15 bp, Homo sapiens
tttctgattaactcg

SEQ ID NO: 745413 - DNA, 15 bp, Homo sapiens
ttctgattaactcgc

SEQ ID NO: 745414 - DNA, 15 bp, Homo sapiens
tctgattaactcgca

SEQ ID NO: 745415 - DNA, 15 bp, Homo sapiens
ctgattaactcgcag

SEQ ID NO: 745416 - DNA, 15 bp, Homo sapiens
tgattaactcgcagt

SEQ ID NO: 745417 - DNA, 15 bp, Homo sapiens
gattaactcgcagtt

SEQ ID NO: 745418 - DNA, 15 bp, Homo sapiens
attaactcgcagttt

SEQ ID NO: 745419 - DNA, 15 bp, Homo sapiens
ttaactcgcagttta

SEQ ID NO: 745420 - DNA, 15 bp, Homo sapiens
taactcgcagtttac

SEQ ID NO: 745421 - DNA, 15 bp, Homo sapiens
aactcgcagtttacc

SEQ ID NO: 745422 - DNA, 15 bp, Homo sapiens
actcgcagtttacct

SEQ ID NO: 745423 - DNA, 15 bp, Homo sapiens
ctcgcagtttacctg

SEQ ID NO: 745424 - DNA, 15 bp, Homo sapiens
tcgcagtttacctga

SEQ ID NO: 745425 - DNA, 15 bp, Homo sapiens
cgcagtttacctgaa

SEQ ID NO: 745426 - DNA, 15 bp, Homo sapiens
gcagtttacctgaaa

SEQ ID NO: 745427 - DNA, 15 bp, Homo sapiens
cagtttacctgaaac

SEQ ID NO: 745428 - DNA, 15 bp, Homo sapiens
agtttacctgaaaca

SEQ ID NO: 745429 - DNA, 15 bp, Homo sapiens
gtttacctgaaacat

SEQ ID NO: 745430 - DNA, 15 bp, Homo sapiens
tttacctgaaacatt

SEQ ID NO: 745431 - DNA, 15 bp, Homo sapiens
ttacctgaaacattt

SEQ ID NO: 745432 - DNA, 15 bp, Homo sapiens
tacctgaaacatttt

SEQ ID NO: 745433 - DNA, 15 bp, Homo sapiens
acctgaaacattttg

SEQ ID NO: 745434 - DNA, 15 bp, Homo sapiens
cctgaaacattttgg

SEQ ID NO: 745435 - DNA, 15 bp, Homo sapiens
ctgaaacattttggt

SEQ ID NO: 745436 - DNA, 15 bp, Homo sapiens
tgaaacattttggtt

SEQ ID NO: 745437 - DNA, 15 bp, Homo sapiens
gaaacattttggttt

SEQ ID NO: 745438 - DNA, 15 bp, Homo sapiens
aaacattttggtttg

SEQ ID NO: 745439 - DNA, 15 bp, Homo sapiens
aacattttggtttgt

SEQ ID NO: 745440 - DNA, 15 bp, Homo sapiens
acattttggtttgtt

SEQ ID NO: 745441 - DNA, 15 bp, Homo sapiens
cattttggtttgttt

SEQ ID NO: 745442 - DNA, 15 bp, Homo sapiens
attttggtttgtttc

SEQ ID NO: 745443 - DNA, 15 bp, Homo sapiens
ttttggtttgtttcc

SEQ ID NO: 745444 - DNA, 15 bp, Homo sapiens
tttggtttgtttcct

SEQ ID NO: 745445 - DNA, 15 bp, Homo sapiens
ttggtttgtttcctc

SEQ ID NO: 745446 - DNA, 15 bp, Homo sapiens
tggtttgtttcctcc

SEQ ID NO: 745447 - DNA, 15 bp, Homo sapiens
ggtttgtttcctcca

SEQ ID NO: 745448 - DNA, 15 bp, Homo sapiens
gtttgtttcctccat

SEQ ID NO: 745449 - DNA, 15 bp, Homo sapiens
tttgtttcctccatg

SEQ ID NO: 745450 - DNA, 15 bp, Homo sapiens
ttgtttcctccatga

SEQ ID NO: 745451 - DNA, 15 bp, Homo sapiens
tgtttcctccatgag

SEQ ID NO: 745452 - DNA, 15 bp, Homo sapiens
gtttcctccatgagg

SEQ ID NO: 745453 - DNA, 15 bp, Homo sapiens
tttcctccatgagga

SEQ ID NO: 745454 - DNA, 15 bp, Homo sapiens
ttcctccatgaggaa

SEQ ID NO: 745455 - DNA, 15 bp, Homo sapiens
tcctccatgaggaac

SEQ ID NO: 745456 - DNA, 15 bp, Homo sapiens
cctccatgaggaact

SEQ ID NO: 745457 - DNA, 15 bp, Homo sapiens
ctccatgaggaactc

SEQ ID NO: 745458 - DNA, 15 bp, Homo sapiens
tccatgaggaactca

SEQ ID NO: 745459 - DNA, 15 bp, Homo sapiens
ccatgaggaactcac

SEQ ID NO: 745460 - DNA, 15 bp, Homo sapiens
catgaggaactcact

SEQ ID NO: 745461 - DNA, 15 bp, Homo sapiens
atgaggaactcactc

SEQ ID NO: 745462 - DNA, 15 bp, Homo sapiens
tgaggaactcactct

SEQ ID NO: 745463 - DNA, 15 bp, Homo sapiens
gaggaactcactcta

SEQ ID NO: 745464 - DNA, 15 bp, Homo sapiens
aggaactcactctaa

SEQ ID NO: 745465 - DNA, 15 bp, Homo sapiens
ggaactcactctaaa

SEQ ID NO: 745466 - DNA, 15 bp, Homo sapiens
gaactcactctaaac

SEQ ID NO: 745467 - DNA, 15 bp, Homo sapiens
aactcactctaaacc

SEQ ID NO: 745468 - DNA, 15 bp, Homo sapiens
actcactctaaaccc

SEQ ID NO: 745469 - DNA, 15 bp, Homo sapiens
ctcactctaaacccc

SEQ ID NO: 745470 - DNA, 15 bp, Homo sapiens
tcactctaaacccca

SEQ ID NO: 745471 - DNA, 15 bp, Homo sapiens
cactctaaaccccag

SEQ ID NO: 745472 - DNA, 15 bp, Homo sapiens
actctaaaccccagc

SEQ ID NO: 745473 - DNA, 15 bp, Homo sapiens
ctctaaaccccagca

SEQ ID NO: 745474 - DNA, 15 bp, Homo sapiens
tctaaaccccagcat

SEQ ID NO: 745475 - DNA, 15 bp, Homo sapiens
ctaaaccccagcatt

SEQ ID NO: 745476 - DNA, 15 bp, Homo sapiens
taaaccccagcattg

SEQ ID NO: 745477 - DNA, 15 bp, Homo sapiens
aaaccccagcattgt

SEQ ID NO: 745478 - DNA, 15 bp, Homo sapiens
aaccccagcattgtc

SEQ ID NO: 745479 - DNA, 15 bp, Homo sapiens
accccagcattgtct

SEQ ID NO: 745480 - DNA, 15 bp, Homo sapiens
ccccagcattgtctg

SEQ ID NO: 745481 - DNA, 15 bp, Homo sapiens
cccagcattgtctgt

SEQ ID NO: 745482 - DNA, 15 bp, Homo sapiens
ccagcattgtctgtg

SEQ ID NO: 745483 - DNA, 15 bp, Homo sapiens
cagcattgtctgtgt

SEQ ID NO: 745484 - DNA, 15 bp, Homo sapiens
agcattgtctgtgtt

SEQ ID NO: 745485 - DNA, 15 bp, Homo sapiens
gcattgtctgtgttt

SEQ ID NO: 745486 - DNA, 15 bp, Homo sapiens
cattgtctgtgtttc

SEQ ID NO: 745487 - DNA, 15 bp, Homo sapiens
attgtctgtgtttcc

SEQ ID NO: 745488 - DNA, 15 bp, Homo sapiens
ttgtctgtgtttcct

SEQ ID NO: 745489 - DNA, 15 bp, Homo sapiens
tgtctgtgtttcctg

SEQ ID NO: 745490 - DNA, 15 bp, Homo sapiens
gtctgtgtttcctga

SEQ ID NO: 745491 - DNA, 15 bp, Homo sapiens
tctgtgtttcctgag

SEQ ID NO: 745492 - DNA, 15 bp, Homo sapiens
ctgtgtttcctgagg

SEQ ID NO: 745493 - DNA, 15 bp, Homo sapiens
tgtgtttcctgagga

SEQ ID NO: 745494 - DNA, 15 bp, Homo sapiens
gtgtttcctgaggag

SEQ ID NO: 745495 - DNA, 15 bp, Homo sapiens
tgtttcctgaggagt

SEQ ID NO: 745496 - DNA, 15 bp, Homo sapiens
gtttcctgaggagtc

SEQ ID NO: 745497 - DNA, 15 bp, Homo sapiens
tttcctgaggagtct

SEQ ID NO: 745498 - DNA, 15 bp, Homo sapiens
ttcctgaggagtctg

SEQ ID NO: 745499 - DNA, 15 bp, Homo sapiens
tcctgaggagtctga

SEQ ID NO: 745500 - DNA, 15 bp, Homo sapiens
cctgaggagtctgag

SEQ ID NO: 745501 - DNA, 15 bp, Homo sapiens
ctgaggagtctgagg

SEQ ID NO: 745502 - DNA, 15 bp, Homo sapiens
tgaggagtctgaggg

SEQ ID NO: 745503 - DNA, 15 bp, Homo sapiens
gaggagtctgaggga

SEQ ID NO: 745504 - DNA, 15 bp, Homo sapiens
aggagtctgagggag

SEQ ID NO: 745505 - DNA, 15 bp, Homo sapiens
ggagtctgagggagc

SEQ ID NO: 745506 - DNA, 15 bp, Homo sapiens
gagtctgagggagct

SEQ ID NO: 745507 - DNA, 15 bp, Homo sapiens
agtctgagggagctc

SEQ ID NO: 745508 - DNA, 15 bp, Homo sapiens
gtctgagggagctct

SEQ ID NO: 745509 - DNA, 15 bp, Homo sapiens
tctgagggagctctg

SEQ ID NO: 745510 - DNA, 15 bp, Homo sapiens
ctgagggagctctgg

SEQ ID NO: 745511 - DNA, 15 bp, Homo sapiens
tgagggagctctggg

SEQ ID NO: 745512 - DNA, 15 bp, Homo sapiens
gagggagctctgggg

SEQ ID NO: 745513 - DNA, 15 bp, Homo sapiens
agggagctctggggt

SEQ ID NO: 745514 - DNA, 15 bp, Homo sapiens
gggagctctggggtc

SEQ ID NO: 745515 - DNA, 15 bp, Homo sapiens
ggagctctggggtcc

SEQ ID NO: 745516 - DNA, 15 bp, Homo sapiens
gagctctggggtcct

SEQ ID NO: 745517 - DNA, 15 bp, Homo sapiens
agctctggggtccta

SEQ ID NO: 745518 - DNA, 15 bp, Homo sapiens
gctctggggtcctat

SEQ ID NO: 745519 - DNA, 15 bp, Homo sapiens
ctctggggtcctatt

SEQ ID NO: 745520 - DNA, 15 bp, Homo sapiens
tctggggtcctattt

SEQ ID NO: 745521 - DNA, 15 bp, Homo sapiens
ctggggtcctatttc

SEQ ID NO: 745522 - DNA, 15 bp, Homo sapiens
tggggtcctatttcc

SEQ ID NO: 745523 - DNA, 15 bp, Homo sapiens
ggggtcctatttcct

SEQ ID NO: 745524 - DNA, 15 bp, Homo sapiens
gggtcctatttcctc

SEQ ID NO: 745525 - DNA, 15 bp, Homo sapiens
ggtcctatttcctct

SEQ ID NO: 745526 - DNA, 15 bp, Homo sapiens
gtcctatttcctctt

SEQ ID NO: 745527 - DNA, 15 bp, Homo sapiens
tcctatttcctcttt

SEQ ID NO: 745528 - DNA, 15 bp, Homo sapiens
cctatttcctctttt

SEQ ID NO: 745529 - DNA, 15 bp, Homo sapiens
ctatttcctcttttg

SEQ ID NO: 745530 - DNA, 15 bp, Homo sapiens
tatttcctcttttgg

SEQ ID NO: 745531 - DNA, 15 bp, Homo sapiens
atttcctcttttgga

SEQ ID NO: 745532 - DNA, 15 bp, Homo sapiens
tttcctcttttggat

SEQ ID NO: 745533 - DNA, 15 bp, Homo sapiens
ttcctcttttggatg

SEQ ID NO: 745534 - DNA, 15 bp, Homo sapiens
tcctcttttggatga

SEQ ID NO: 745535 - DNA, 15 bp, Homo sapiens
cctcttttggatgag

SEQ ID NO: 745536 - DNA, 15 bp, Homo sapiens
ctcttttggatgagg

SEQ ID NO: 745537 - DNA, 15 bp, Homo sapiens
tcttttggatgaggc

SEQ ID NO: 745538 - DNA, 15 bp, Homo sapiens
cttttggatgaggct

SEQ ID NO: 745539 - DNA, 15 bp, Homo sapiens
ttttggatgaggctg

SEQ ID NO: 745540 - DNA, 15 bp, Homo sapiens
tttggatgaggctgt

SEQ ID NO: 745541 - DNA, 15 bp, Homo sapiens
ttggatgaggctgtg

SEQ ID NO: 745542 - DNA, 15 bp, Homo sapiens
tggatgaggctgtga

SEQ ID NO: 745543 - DNA, 15 bp, Homo sapiens
ggatgaggctgtgag

SEQ ID NO: 745544 - DNA, 15 bp, Homo sapiens
gatgaggctgtgagc

SEQ ID NO: 745545 - DNA, 15 bp, Homo sapiens
atgaggctgtgagca

SEQ ID NO: 745546 - DNA, 15 bp, Homo sapiens
tgaggctgtgagcat

SEQ ID NO: 745547 - DNA, 15 bp, Homo sapiens
gaggctgtgagcatg

SEQ ID NO: 745548 - DNA, 15 bp, Homo sapiens
aggctgtgagcatgg

SEQ ID NO: 745549 - DNA, 15 bp, Homo sapiens
ggctgtgagcatggt

SEQ ID NO: 745550 - DNA, 15 bp, Homo sapiens
gctgtgagcatggtg

SEQ ID NO: 745551 - DNA, 15 bp, Homo sapiens
ctgtgagcatggtgg

SEQ ID NO: 745552 - DNA, 15 bp, Homo sapiens
tgtgagcatggtgga

SEQ ID NO: 745553 - DNA, 15 bp, Homo sapiens
gtgagcatggtggat

SEQ ID NO: 745554 - DNA, 15 bp, Homo sapiens
tgagcatggtggatt

SEQ ID NO: 745555 - DNA, 15 bp, Homo sapiens
gagcatggtggatta

SEQ ID NO: 745556 - DNA, 15 bp, Homo sapiens
agcatggtggattag

SEQ ID NO: 745557 - DNA, 15 bp, Homo sapiens
gcatggtggattaga

SEQ ID NO: 745558 - DNA, 15 bp, Homo sapiens
catggtggattagag

SEQ ID NO: 745559 - DNA, 15 bp, Homo sapiens
atggtggattagaga

SEQ ID NO: 745560 - DNA, 15 bp, Homo sapiens
tggtggattagagac

SEQ ID NO: 745561 - DNA, 15 bp, Homo sapiens
ggtggattagagaca

SEQ ID NO: 745562 - DNA, 15 bp, Homo sapiens
gtggattagagacag

SEQ ID NO: 745563 - DNA, 15 bp, Homo sapiens
tggattagagacagc

SEQ ID NO: 745564 - DNA, 15 bp, Homo sapiens
ggattagagacagcc

SEQ ID NO: 745565 - DNA, 15 bp, Homo sapiens
gattagagacagccc

SEQ ID NO: 745566 - DNA, 15 bp, Homo sapiens
attagagacagcccc

SEQ ID NO: 745567 - DNA, 15 bp, Homo sapiens
ttagagacagcccct

SEQ ID NO: 745568 - DNA, 15 bp, Homo sapiens
tagagacagcccctt

SEQ ID NO: 745569 - DNA, 15 bp, Homo sapiens
agagacagcccctta

SEQ ID NO: 745570 - DNA, 15 bp, Homo sapiens
gagacagccccttaa

SEQ ID NO: 745571 - DNA, 15 bp, Homo sapiens
agacagccccttaaa

SEQ ID NO: 745572 - DNA, 15 bp, Homo sapiens
gacagccccttaaag

SEQ ID NO: 745573 - DNA, 15 bp, Homo sapiens
acagccccttaaagt

SEQ ID NO: 745574 - DNA, 15 bp, Homo sapiens
cagccccttaaagtt

SEQ ID NO: 745575 - DNA, 15 bp, Homo sapiens
agccccttaaagtta

SEQ ID NO: 745576 - DNA, 15 bp, Homo sapiens
gccccttaaagttag

SEQ ID NO: 745577 - DNA, 15 bp, Homo sapiens
ccccttaaagttagc

SEQ ID NO: 745578 - DNA, 15 bp, Homo sapiens
cccttaaagttagcc

SEQ ID NO: 745579 - DNA, 15 bp, Homo sapiens
ccttaaagttagccc

SEQ ID NO: 745580 - DNA, 15 bp, Homo sapiens
cttaaagttagccca

SEQ ID NO: 745581 - DNA, 15 bp, Homo sapiens
ttaaagttagcccag

SEQ ID NO: 745582 - DNA, 15 bp, Homo sapiens
taaagttagcccaga

SEQ ID NO: 745583 - DNA, 15 bp, Homo sapiens
aaagttagcccagat

SEQ ID NO: 745584 - DNA, 15 bp, Homo sapiens
aagttagcccagata

SEQ ID NO: 745585 - DNA, 15 bp, Homo sapiens
agttagcccagatat

SEQ ID NO: 745586 - DNA, 15 bp, Homo sapiens
gttagcccagatatc

SEQ ID NO: 745587 - DNA, 15 bp, Homo sapiens
ttagcccagatatct

SEQ ID NO: 745588 - DNA, 15 bp, Homo sapiens
tagcccagatatctc

SEQ ID NO: 745589 - DNA, 15 bp, Homo sapiens
agcccagatatctca

SEQ ID NO: 745590 - DNA, 15 bp, Homo sapiens
gcccagatatctcag

SEQ ID NO: 745591 - DNA, 15 bp, Homo sapiens
cccagatatctcagc

SEQ ID NO: 745592 - DNA, 15 bp, Homo sapiens
ccagatatctcagca

SEQ ID NO: 745593 - DNA, 15 bp, Homo sapiens
cagatatctcagcaa

SEQ ID NO: 745594 - DNA, 15 bp, Homo sapiens
agatatctcagcaag

SEQ ID NO: 745595 - DNA, 15 bp, Homo sapiens
gatatctcagcaagt

SEQ ID NO: 745596 - DNA, 15 bp, Homo sapiens
atatctcagcaagtt

SEQ ID NO: 745597 - DNA, 15 bp, Homo sapiens
tatctcagcaagttt

SEQ ID NO: 745598 - DNA, 15 bp, Homo sapiens
atctcagcaagtttt

SEQ ID NO: 745599 - DNA, 15 bp, Homo sapiens
tctcagcaagtttta

SEQ ID NO: 745600 - DNA, 15 bp, Homo sapiens
ctcagcaagttttac

SEQ ID NO: 745601 - DNA, 15 bp, Homo sapiens
tcagcaagttttacg

SEQ ID NO: 745602 - DNA, 15 bp, Homo sapiens
cagcaagttttacgc

SEQ ID NO: 745603 - DNA, 15 bp, Homo sapiens
agcaagttttacgcg

SEQ ID NO: 745604 - DNA, 15 bp, Homo sapiens
gcaagttttacgcgt

SEQ ID NO: 745605 - DNA, 15 bp, Homo sapiens
caagttttacgcgtc

SEQ ID NO: 745606 - DNA, 15 bp, Homo sapiens
aagttttacgcgtct

SEQ ID NO: 745607 - DNA, 15 bp, Homo sapiens
agttttacgcgtctc

SEQ ID NO: 745608 - DNA, 15 bp, Homo sapiens
gttttacgcgtctct

SEQ ID NO: 745609 - DNA, 15 bp, Homo sapiens
ttttacgcgtctcta

SEQ ID NO: 745610 - DNA, 15 bp, Homo sapiens
tttacgcgtctctat

SEQ ID NO: 745611 - DNA, 15 bp, Homo sapiens
ttacgcgtctctatt

SEQ ID NO: 745612 - DNA, 15 bp, Homo sapiens
tacgcgtctctattt

SEQ ID NO: 745613 - DNA, 15 bp, Homo sapiens
acgcgtctctatttg

SEQ ID NO: 745614 - DNA, 15 bp, Homo sapiens
cgcgtctctatttgg

SEQ ID NO: 745615 - DNA, 15 bp, Homo sapiens
gcgtctctatttggg

SEQ ID NO: 745616 - DNA, 15 bp, Homo sapiens
cgtctctatttgggg

SEQ ID NO: 745617 - DNA, 15 bp, Homo sapiens
gtctctatttggggg

SEQ ID NO: 745618 - DNA, 15 bp, Homo sapiens
tctctatttggggga

SEQ ID NO: 745619 - DNA, 15 bp, Homo sapiens
ctctatttgggggag

SEQ ID NO: 745620 - DNA, 15 bp, Homo sapiens
tctatttgggggagg

SEQ ID NO: 745621 - DNA, 15 bp, Homo sapiens
ctatttgggggaggg

SEQ ID NO: 745622 - DNA, 15 bp, Homo sapiens
tatttgggggaggga

SEQ ID NO: 745623 - DNA, 15 bp, Homo sapiens
atttgggggagggat

SEQ ID NO: 745624 - DNA, 15 bp, Homo sapiens
tttgggggagggatt

SEQ ID NO: 745625 - DNA, 15 bp, Homo sapiens
ttgggggagggattc

SEQ ID NO: 745626 - DNA, 15 bp, Homo sapiens
tgggggagggattcg

SEQ ID NO: 745627 - DNA, 15 bp, Homo sapiens
gggggagggattcgc

SEQ ID NO: 745628 - DNA, 15 bp, Homo sapiens
ggggagggattcgcc

SEQ ID NO: 745629 - DNA, 15 bp, Homo sapiens
gggagggattcgcct

SEQ ID NO: 745630 - DNA, 15 bp, Homo sapiens
ggagggattcgccta

SEQ ID NO: 745631 - DNA, 15 bp, Homo sapiens
gagggattcgcctat

SEQ ID NO: 745632 - DNA, 15 bp, Homo sapiens
agggattcgcctatt

SEQ ID NO: 745633 - DNA, 15 bp, Homo sapiens
gggattcgcctattg

SEQ ID NO: 745634 - DNA, 15 bp, Homo sapiens
ggattcgcctattga

SEQ ID NO: 745635 - DNA, 15 bp, Homo sapiens
gattcgcctattgaa

SEQ ID NO: 745636 - DNA, 15 bp, Homo sapiens
attcgcctattgaaa

SEQ ID NO: 745637 - DNA, 15 bp, Homo sapiens
ttcgcctattgaaaa

SEQ ID NO: 745638 - DNA, 15 bp, Homo sapiens
tcgcctattgaaaac

SEQ ID NO: 745639 - DNA, 15 bp, Homo sapiens
cgcctattgaaaaca

SEQ ID NO: 745640 - DNA, 15 bp, Homo sapiens
gcctattgaaaacaa

SEQ ID NO: 745641 - DNA, 15 bp, Homo sapiens
cctattgaaaacaag

SEQ ID NO: 745642 - DNA, 15 bp, Homo sapiens
ctattgaaaacaaga

SEQ ID NO: 745643 - DNA, 15 bp, Homo sapiens
tattgaaaacaagag

SEQ ID NO: 745644 - DNA, 15 bp, Homo sapiens
attgaaaacaagaga

SEQ ID NO: 745645 - DNA, 15 bp, Homo sapiens
ttgaaaacaagagac

SEQ ID NO: 745646 - DNA, 15 bp, Homo sapiens
tgaaaacaagagacc

SEQ ID NO: 745647 - DNA, 15 bp, Homo sapiens
gaaaacaagagacca

SEQ ID NO: 745648 - DNA, 15 bp, Homo sapiens
aaaacaagagaccag

SEQ ID NO: 745649 - DNA, 15 bp, Homo sapiens
aaacaagagaccagc

SEQ ID NO: 745650 - DNA, 15 bp, Homo sapiens
aacaagagaccagca

SEQ ID NO: 745651 - DNA, 15 bp, Homo sapiens
acaagagaccagcaa

SEQ ID NO: 745652 - DNA, 15 bp, Homo sapiens
caagagaccagcaag

SEQ ID NO: 745653 - DNA, 15 bp, Homo sapiens
aagagaccagcaagg

SEQ ID NO: 745654 - DNA, 15 bp, Homo sapiens
agagaccagcaaggg

SEQ ID NO: 745655 - DNA, 15 bp, Homo sapiens
gagaccagcaagggt

SEQ ID NO: 745656 - DNA, 15 bp, Homo sapiens
agaccagcaagggtc

SEQ ID NO: 745657 - DNA, 15 bp, Homo sapiens
gaccagcaagggtcc

SEQ ID NO: 745658 - DNA, 15 bp, Homo sapiens
accagcaagggtcct

SEQ ID NO: 745659 - DNA, 15 bp, Homo sapiens
ccagcaagggtcctt

SEQ ID NO: 745660 - DNA, 15 bp, Homo sapiens
cagcaagggtccttg

SEQ ID NO: 745661 - DNA, 15 bp, Homo sapiens
agcaagggtccttgt

SEQ ID NO: 745662 - DNA, 15 bp, Homo sapiens
gcaagggtccttgtg

SEQ ID NO: 745663 - DNA, 15 bp, Homo sapiens
caagggtccttgtga

SEQ ID NO: 745664 - DNA, 15 bp, Homo sapiens
aagggtccttgtgaa

SEQ ID NO: 745665 - DNA, 15 bp, Homo sapiens
agggtccttgtgaat

SEQ ID NO: 745666 - DNA, 15 bp, Homo sapiens
gggtccttgtgaatt

SEQ ID NO: 745667 - DNA, 15 bp, Homo sapiens
ggtccttgtgaatta

SEQ ID NO: 745668 - DNA, 15 bp, Homo sapiens
gtccttgtgaattat

SEQ ID NO: 745669 - DNA, 15 bp, Homo sapiens
tccttgtgaattatg

SEQ ID NO: 745670 - DNA, 15 bp, Homo sapiens
ccttgtgaattatga

SEQ ID NO: 745671 - DNA, 15 bp, Homo sapiens
cttgtgaattatgat

SEQ ID NO: 745672 - DNA, 15 bp, Homo sapiens
ttgtgaattatgatg

SEQ ID NO: 745673 - DNA, 15 bp, Homo sapiens
tgtgaattatgatgg

SEQ ID NO: 745674 - DNA, 15 bp, Homo sapiens
gtgaattatgatggt

SEQ ID NO: 745675 - DNA, 15 bp, Homo sapiens
tgaattatgatggtt

SEQ ID NO: 745676 - DNA, 15 bp, Homo sapiens
gaattatgatggttt

SEQ ID NO: 745677 - DNA, 15 bp, Homo sapiens
aattatgatggtttg

SEQ ID NO: 745678 - DNA, 15 bp, Homo sapiens
attatgatggtttgg

SEQ ID NO: 745679 - DNA, 15 bp, Homo sapiens
ttatgatggtttggc

SEQ ID NO: 745680 - DNA, 15 bp, Homo sapiens
tatgatggtttggcg

SEQ ID NO: 745681 - DNA, 15 bp, Homo sapiens
atgatggtttggcgt

SEQ ID NO: 745682 - DNA, 15 bp, Homo sapiens
tgatggtttggcgtg

SEQ ID NO: 745683 - DNA, 15 bp, Homo sapiens
gatggtttggcgtga

SEQ ID NO: 745684 - DNA, 15 bp, Homo sapiens
atggtttggcgtgag

SEQ ID NO: 745685 - DNA, 15 bp, Homo sapiens
tggtttggcgtgaga

SEQ ID NO: 745686 - DNA, 15 bp, Homo sapiens
ggtttggcgtgagaa

SEQ ID NO: 745687 - DNA, 15 bp, Homo sapiens
gtttggcgtgagaat

SEQ ID NO: 745688 - DNA, 15 bp, Homo sapiens
tttggcgtgagaata

SEQ ID NO: 745689 - DNA, 15 bp, Homo sapiens
ttggcgtgagaatag

SEQ ID NO: 745690 - DNA, 15 bp, Homo sapiens
tggcgtgagaataga

SEQ ID NO: 745691 - DNA, 15 bp, Homo sapiens
ggcgtgagaatagat

SEQ ID NO: 745692 - DNA, 15 bp, Homo sapiens
gcgtgagaatagatg

SEQ ID NO: 745693 - DNA, 15 bp, Homo sapiens
cgtgagaatagatgg

SEQ ID NO: 745694 - DNA, 15 bp, Homo sapiens
gtgagaatagatggg

SEQ ID NO: 745695 - DNA, 15 bp, Homo sapiens
tgagaatagatggga

SEQ ID NO: 745696 - DNA, 15 bp, Homo sapiens
gagaatagatgggat

SEQ ID NO: 745697 - DNA, 15 bp, Homo sapiens
agaatagatgggatg

SEQ ID NO: 745698 - DNA, 15 bp, Homo sapiens
gaatagatgggatgg

SEQ ID NO: 745699 - DNA, 15 bp, Homo sapiens
aatagatgggatgga

SEQ ID NO: 745700 - DNA, 15 bp, Homo sapiens
atagatgggatggat

SEQ ID NO: 745701 - DNA, 15 bp, Homo sapiens
tagatgggatggatt

SEQ ID NO: 745702 - DNA, 15 bp, Homo sapiens
agatgggatggattg

SEQ ID NO: 745703 - DNA, 15 bp, Homo sapiens
gatgggatggattgg

SEQ ID NO: 745704 - DNA, 15 bp, Homo sapiens
atgggatggattggc

SEQ ID NO: 745705 - DNA, 15 bp, Homo sapiens
tgggatggattggca

SEQ ID NO: 745706 - DNA, 15 bp, Homo sapiens
gggatggattggcac

SEQ ID NO: 745707 - DNA, 15 bp, Homo sapiens
ggatggattggcact

SEQ ID NO: 745708 - DNA, 15 bp, Homo sapiens
gatggattggcactg

SEQ ID NO: 745709 - DNA, 15 bp, Homo sapiens
atggattggcactgg

SEQ ID NO: 745710 - DNA, 15 bp, Homo sapiens
tggattggcactgga

SEQ ID NO: 745711 - DNA, 15 bp, Homo sapiens
ggattggcactggag

SEQ ID NO: 745712 - DNA, 15 bp, Homo sapiens
gattggcactggagt

SEQ ID NO: 745713 - DNA, 15 bp, Homo sapiens
attggcactggagtc

SEQ ID NO: 745714 - DNA, 15 bp, Homo sapiens
ttggcactggagtcc

SEQ ID NO: 745715 - DNA, 15 bp, Homo sapiens
tggcactggagtccc

SEQ ID NO: 745716 - DNA, 15 bp, Homo sapiens
ggcactggagtcccc

SEQ ID NO: 745717 - DNA, 15 bp, Homo sapiens
gcactggagtcccct

SEQ ID NO: 745718 - DNA, 15 bp, Homo sapiens
cactggagtcccctt

SEQ ID NO: 745719 - DNA, 15 bp, Homo sapiens
actggagtccccttt

SEQ ID NO: 745720 - DNA, 15 bp, Homo sapiens
ctggagtcccctttt

SEQ ID NO: 745721 - DNA, 15 bp, Homo sapiens
tggagtcccctttta

SEQ ID NO: 745722 - DNA, 15 bp, Homo sapiens
ggagtccccttttat

SEQ ID NO: 745723 - DNA, 15 bp, Homo sapiens
gagtccccttttatc

SEQ ID NO: 745724 - DNA, 15 bp, Homo sapiens
agtccccttttatct

SEQ ID NO: 745725 - DNA, 15 bp, Homo sapiens
gtccccttttatctt

SEQ ID NO: 745726 - DNA, 15 bp, Homo sapiens
tccccttttatctta

SEQ ID NO: 745727 - DNA, 15 bp, Homo sapiens
ccccttttatcttag

SEQ ID NO: 745728 - DNA, 15 bp, Homo sapiens
cccttttatcttagg

SEQ ID NO: 745729 - DNA, 15 bp, Homo sapiens
ccttttatcttaggc

SEQ ID NO: 745730 - DNA, 15 bp, Homo sapiens
cttttatcttaggct

SEQ ID NO: 745731 - DNA, 15 bp, Homo sapiens
ttttatcttaggctt

SEQ ID NO: 745732 - DNA, 15 bp, Homo sapiens
tttatcttaggcttg

SEQ ID NO: 745733 - DNA, 15 bp, Homo sapiens
ttatcttaggcttgt

SEQ ID NO: 745734 - DNA, 15 bp, Homo sapiens
tatcttaggcttgtc

SEQ ID NO: 745735 - DNA, 15 bp, Homo sapiens
atcttaggcttgtcc

SEQ ID NO: 745736 - DNA, 15 bp, Homo sapiens
tcttaggcttgtccc

SEQ ID NO: 745737 - DNA, 15 bp, Homo sapiens
cttaggcttgtccct

SEQ ID NO: 745738 - DNA, 15 bp, Homo sapiens
ttaggcttgtccctg

SEQ ID NO: 745739 - DNA, 15 bp, Homo sapiens
taggcttgtccctga

SEQ ID NO: 745740 - DNA, 15 bp, Homo sapiens
aggcttgtccctgaa

SEQ ID NO: 745741 - DNA, 15 bp, Homo sapiens
ggcttgtccctgaag

SEQ ID NO: 745742 - DNA, 15 bp, Homo sapiens
gcttgtccctgaaga

SEQ ID NO: 745743 - DNA, 15 bp, Homo sapiens
cttgtccctgaagag

SEQ ID NO: 745744 - DNA, 15 bp, Homo sapiens
ttgtccctgaagagg

SEQ ID NO: 745745 - DNA, 15 bp, Homo sapiens
tgtccctgaagaggg

SEQ ID NO: 745746 - DNA, 15 bp, Homo sapiens
gtccctgaagagggc

SEQ ID NO: 745747 - DNA, 15 bp, Homo sapiens
tccctgaagagggct

SEQ ID NO: 745748 - DNA, 15 bp, Homo sapiens
ccctgaagagggctt

SEQ ID NO: 745749 - DNA, 15 bp, Homo sapiens
cctgaagagggcttg

SEQ ID NO: 745750 - DNA, 15 bp, Homo sapiens
ctgaagagggcttgt

SEQ ID NO: 745751 - DNA, 15 bp, Homo sapiens
tgaagagggcttgtt

SEQ ID NO: 745752 - DNA, 15 bp, Homo sapiens
gaagagggcttgttg

SEQ ID NO: 745753 - DNA, 15 bp, Homo sapiens
aagagggcttgttga

SEQ ID NO: 745754 - DNA, 15 bp, Homo sapiens
agagggcttgttgat

SEQ ID NO: 745755 - DNA, 15 bp, Homo sapiens
gagggcttgttgata

SEQ ID NO: 745756 - DNA, 15 bp, Homo sapiens
agggcttgttgatat

SEQ ID NO: 745757 - DNA, 15 bp, Homo sapiens
gggcttgttgatatc

SEQ ID NO: 745758 - DNA, 15 bp, Homo sapiens
ggcttgttgatatca

SEQ ID NO: 745759 - DNA, 15 bp, Homo sapiens
gcttgttgatatcag

SEQ ID NO: 745760 - DNA, 15 bp, Homo sapiens
cttgttgatatcaga

SEQ ID NO: 745761 - DNA, 15 bp, Homo sapiens
ttgttgatatcagaa

SEQ ID NO: 745762 - DNA, 15 bp, Homo sapiens
tgttgatatcagaac

SEQ ID NO: 745763 - DNA, 15 bp, Homo sapiens
gttgatatcagaaca

SEQ ID NO: 745764 - DNA, 15 bp, Homo sapiens
ttgatatcagaacag

SEQ ID NO: 745765 - DNA, 15 bp, Homo sapiens
tgatatcagaacagc

SEQ ID NO: 745766 - DNA, 15 bp, Homo sapiens
gatatcagaacagcc

SEQ ID NO: 745767 - DNA, 15 bp, Homo sapiens
atatcagaacagcca

SEQ ID NO: 745768 - DNA, 15 bp, Homo sapiens
tatcagaacagccaa

SEQ ID NO: 745769 - DNA, 15 bp, Homo sapiens
atcagaacagccaat

SEQ ID NO: 745770 - DNA, 15 bp, Homo sapiens
tcagaacagccaatt

SEQ ID NO: 745771 - DNA, 15 bp, Homo sapiens
cagaacagccaattt

SEQ ID NO: 745772 - DNA, 15 bp, Homo sapiens
agaacagccaatttc

SEQ ID NO: 745773 - DNA, 15 bp, Homo sapiens
gaacagccaatttcc

SEQ ID NO: 745774 - DNA, 15 bp, Homo sapiens
aacagccaatttcct

SEQ ID NO: 745775 - DNA, 15 bp, Homo sapiens
acagccaatttcctg

SEQ ID NO: 745776 - DNA, 15 bp, Homo sapiens
cagccaatttcctga

SEQ ID NO: 745777 - DNA, 15 bp, Homo sapiens
agccaatttcctgac

SEQ ID NO: 745778 - DNA, 15 bp, Homo sapiens
gccaatttcctgaca

SEQ ID NO: 745779 - DNA, 15 bp, Homo sapiens
ccaatttcctgacag

SEQ ID NO: 745780 - DNA, 15 bp, Homo sapiens
caatttcctgacagg

SEQ ID NO: 745781 - DNA, 15 bp, Homo sapiens
aatttcctgacaggg

SEQ ID NO: 745782 - DNA, 15 bp, Homo sapiens
atttcctgacagggt

SEQ ID NO: 745783 - DNA, 15 bp, Homo sapiens
tttcctgacagggtt

SEQ ID NO: 745784 - DNA, 15 bp, Homo sapiens
ttcctgacagggttg

SEQ ID NO: 745785 - DNA, 15 bp, Homo sapiens
tcctgacagggttgg

SEQ ID NO: 745786 - DNA, 15 bp, Homo sapiens
cctgacagggttggg

SEQ ID NO: 745787 - DNA, 15 bp, Homo sapiens
ctgacagggttggga

SEQ ID NO: 745788 - DNA, 15 bp, Homo sapiens
tgacagggttgggag

SEQ ID NO: 745789 - DNA, 15 bp, Homo sapiens
gacagggttgggagc

SEQ ID NO: 745790 - DNA, 15 bp, Homo sapiens
acagggttgggagca

SEQ ID NO: 745791 - DNA, 15 bp, Homo sapiens
cagggttgggagcag

SEQ ID NO: 745792 - DNA, 15 bp, Homo sapiens
agggttgggagcagg

SEQ ID NO: 745793 - DNA, 15 bp, Homo sapiens
gggttgggagcaggg

SEQ ID NO: 745794 - DNA, 15 bp, Homo sapiens
ggttgggagcagggg

SEQ ID NO: 745795 - DNA, 15 bp, Homo sapiens
gttgggagcagggga

SEQ ID NO: 745796 - DNA, 15 bp, Homo sapiens
ttgggagcaggggat

SEQ ID NO: 745797 - DNA, 15 bp, Homo sapiens
tgggagcaggggatg

SEQ ID NO: 745798 - DNA, 15 bp, Homo sapiens
gggagcaggggatgg

SEQ ID NO: 745799 - DNA, 15 bp, Homo sapiens
ggagcaggggatggg

SEQ ID NO: 745800 - DNA, 15 bp, Homo sapiens
gagcaggggatgggt

SEQ ID NO: 745801 - DNA, 15 bp, Homo sapiens
agcaggggatgggtg

SEQ ID NO: 745802 - DNA, 15 bp, Homo sapiens
gcaggggatgggtgc

SEQ ID NO: 745803 - DNA, 15 bp, Homo sapiens
caggggatgggtgct

SEQ ID NO: 745804 - DNA, 15 bp, Homo sapiens
aggggatgggtgctg

SEQ ID NO: 745805 - DNA, 15 bp, Homo sapiens
ggggatgggtgctgt

SEQ ID NO: 745806 - DNA, 15 bp, Homo sapiens
gggatgggtgctgtt

SEQ ID NO: 745807 - DNA, 15 bp, Homo sapiens
ggatgggtgctgtta

SEQ ID NO: 745808 - DNA, 15 bp, Homo sapiens
gatgggtgctgttaa

SEQ ID NO: 745809 - DNA, 15 bp, Homo sapiens
atgggtgctgttaac

SEQ ID NO: 745810 - DNA, 15 bp, Homo sapiens
tgggtgctgttaacc

SEQ ID NO: 745811 - DNA, 15 bp, Homo sapiens
gggtgctgttaacct

SEQ ID NO: 745812 - DNA, 15 bp, Homo sapiens
ggtgctgttaacctt

SEQ ID NO: 745813 - DNA, 15 bp, Homo sapiens
gtgctgttaaccttt

SEQ ID NO: 745814 - DNA, 15 bp, Homo sapiens
tgctgttaacctttg

SEQ ID NO: 745815 - DNA, 15 bp, Homo sapiens
gctgttaacctttga

SEQ ID NO: 745816 - DNA, 15 bp, Homo sapiens
ctgttaacctttgag

SEQ ID NO: 745817 - DNA, 15 bp, Homo sapiens
tgttaacctttgaga

SEQ ID NO: 745818 - DNA, 15 bp, Homo sapiens
gttaacctttgagat

SEQ ID NO: 745819 - DNA, 15 bp, Homo sapiens
ttaacctttgagatg

SEQ ID NO: 745820 - DNA, 15 bp, Homo sapiens
taacctttgagatgt

SEQ ID NO: 745821 - DNA, 15 bp, Homo sapiens
aacctttgagatgtc

SEQ ID NO: 745822 - DNA, 15 bp, Homo sapiens
acctttgagatgtcc

SEQ ID NO: 745823 - DNA, 15 bp, Homo sapiens
cctttgagatgtccg

SEQ ID NO: 745824 - DNA, 15 bp, Homo sapiens
ctttgagatgtccgt

SEQ ID NO: 745825 - DNA, 15 bp, Homo sapiens
tttgagatgtccgtt

SEQ ID NO: 745826 - DNA, 15 bp, Homo sapiens
ttgagatgtccgttg

SEQ ID NO: 745827 - DNA, 15 bp, Homo sapiens
tgagatgtccgttgt

SEQ ID NO: 745828 - DNA, 15 bp, Homo sapiens
gagatgtccgttgtg

SEQ ID NO: 745829 - DNA, 15 bp, Homo sapiens
agatgtccgttgtgg

SEQ ID NO: 745830 - DNA, 15 bp, Homo sapiens
gatgtccgttgtgga

SEQ ID NO: 745831 - DNA, 15 bp, Homo sapiens
atgtccgttgtggag

SEQ ID NO: 745832 - DNA, 15 bp, Homo sapiens
tgtccgttgtggagg

SEQ ID NO: 745833 - DNA, 15 bp, Homo sapiens
gtccgttgtggaggg

SEQ ID NO: 745834 - DNA, 15 bp, Homo sapiens
tccgttgtggaggga

SEQ ID NO: 745835 - DNA, 15 bp, Homo sapiens
ccgttgtggagggag

SEQ ID NO: 745836 - DNA, 15 bp, Homo sapiens
cgttgtggagggaga

SEQ ID NO: 745837 - DNA, 15 bp, Homo sapiens
gttgtggagggagag

SEQ ID NO: 745838 - DNA, 15 bp, Homo sapiens
ttgtggagggagaga

SEQ ID NO: 745839 - DNA, 15 bp, Homo sapiens
tgtggagggagagac

SEQ ID NO: 745840 - DNA, 15 bp, Homo sapiens
gtggagggagagaca

SEQ ID NO: 745841 - DNA, 15 bp, Homo sapiens
tggagggagagacag

SEQ ID NO: 745842 - DNA, 15 bp, Homo sapiens
ggagggagagacagg

SEQ ID NO: 745843 - DNA, 15 bp, Homo sapiens
gagggagagacagga

SEQ ID NO: 745844 - DNA, 15 bp, Homo sapiens
agggagagacaggat

SEQ ID NO: 745845 - DNA, 15 bp, Homo sapiens
gggagagacaggatg

SEQ ID NO: 745846 - DNA, 15 bp, Homo sapiens
ggagagacaggatga

SEQ ID NO: 745847 - DNA, 15 bp, Homo sapiens
gagagacaggatgag

SEQ ID NO: 745848 - DNA, 15 bp, Homo sapiens
agagacaggatgagg

SEQ ID NO: 745849 - DNA, 15 bp, Homo sapiens
gagacaggatgaggc

SEQ ID NO: 745850 - DNA, 15 bp, Homo sapiens
agacaggatgaggca

SEQ ID NO: 745851 - DNA, 15 bp, Homo sapiens
gacaggatgaggcaa

SEQ ID NO: 745852 - DNA, 15 bp, Homo sapiens
acaggatgaggcaac

SEQ ID NO: 745853 - DNA, 15 bp, Homo sapiens
caggatgaggcaacc

SEQ ID NO: 745854 - DNA, 15 bp, Homo sapiens
aggatgaggcaaccg

SEQ ID NO: 745855 - DNA, 15 bp, Homo sapiens
ggatgaggcaaccgt

SEQ ID NO: 745856 - DNA, 15 bp, Homo sapiens
gatgaggcaaccgtt

SEQ ID NO: 745857 - DNA, 15 bp, Homo sapiens
atgaggcaaccgttg

SEQ ID NO: 745858 - DNA, 15 bp, Homo sapiens
tgaggcaaccgttgg

SEQ ID NO: 745859 - DNA, 15 bp, Homo sapiens
cccacctgacacttc

SEQ ID NO: 745860 - DNA, 15 bp, Homo sapiens
ccacctgacacttcc

SEQ ID NO: 745861 - DNA, 15 bp, Homo sapiens
cacctgacacttccc

SEQ ID NO: 745862 - DNA, 15 bp, Homo sapiens
acctgacacttcccc

SEQ ID NO: 745863 - DNA, 15 bp, Homo sapiens
cctgacacttccccg

SEQ ID NO: 745864 - DNA, 15 bp, Homo sapiens
ctgacacttccccgt

SEQ ID NO: 745865 - DNA, 15 bp, Homo sapiens
tgacacttccccgtc

SEQ ID NO: 745866 - DNA, 15 bp, Homo sapiens
gacacttccccgtcc

SEQ ID NO: 745867 - DNA, 15 bp, Homo sapiens
acacttccccgtcct

SEQ ID NO: 745868 - DNA, 15 bp, Homo sapiens
cacttccccgtcctg

SEQ ID NO: 745869 - DNA, 15 bp, Homo sapiens
acttccccgtcctgc

SEQ ID NO: 745870 - DNA, 15 bp, Homo sapiens
cttccccgtcctgct

SEQ ID NO: 745871 - DNA, 15 bp, Homo sapiens
ttccccgtcctgcta

SEQ ID NO: 745872 - DNA, 15 bp, Homo sapiens
tccccgtcctgctac

SEQ ID NO: 745873 - DNA, 15 bp, Homo sapiens
ccccgtcctgctaca

SEQ ID NO: 745874 - DNA, 15 bp, Homo sapiens
cccgtcctgctacag

SEQ ID NO: 745875 - DNA, 15 bp, Homo sapiens
ccgtcctgctacaga

SEQ ID NO: 745876 - DNA, 15 bp, Homo sapiens
cgtcctgctacagat

SEQ ID NO: 745877 - DNA, 15 bp, Homo sapiens
gtcctgctacagatc

SEQ ID NO: 745878 - DNA, 15 bp, Homo sapiens
tcctgctacagatct

SEQ ID NO: 745879 - DNA, 15 bp, Homo sapiens
cctgctacagatctc

SEQ ID NO: 745880 - DNA, 15 bp, Homo sapiens
ctgctacagatctca

SEQ ID NO: 745881 - DNA, 15 bp, Homo sapiens
tgctacagatctcag

SEQ ID NO: 745882 - DNA, 15 bp, Homo sapiens
gctacagatctcagg

SEQ ID NO: 745883 - DNA, 15 bp, Homo sapiens
ctacagatctcaggc

SEQ ID NO: 745884 - DNA, 15 bp, Homo sapiens
tacagatctcaggct

SEQ ID NO: 745885 - DNA, 15 bp, Homo sapiens
acagatctcaggctc

SEQ ID NO: 745886 - DNA, 15 bp, Homo sapiens
cagatctcaggctcc

SEQ ID NO: 745887 - DNA, 15 bp, Homo sapiens
agatctcaggctcca

SEQ ID NO: 745888 - DNA, 15 bp, Homo sapiens
gatctcaggctccag

SEQ ID NO: 745889 - DNA, 15 bp, Homo sapiens
atctcaggctccagt

SEQ ID NO: 745890 - DNA, 15 bp, Homo sapiens
tctcaggctccagtc

SEQ ID NO: 745891 - DNA, 15 bp, Homo sapiens
ctcaggctccagtcc

SEQ ID NO: 745892 - DNA, 15 bp, Homo sapiens
tcaggctccagtccc

SEQ ID NO: 745893 - DNA, 15 bp, Homo sapiens
caggctccagtcccc

SEQ ID NO: 745894 - DNA, 15 bp, Homo sapiens
aggctccagtcccca

SEQ ID NO: 745895 - DNA, 15 bp, Homo sapiens
ggctccagtccccac

SEQ ID NO: 745896 - DNA, 15 bp, Homo sapiens
gctccagtccccacc

SEQ ID NO: 745897 - DNA, 15 bp, Homo sapiens
ctccagtccccaccc

SEQ ID NO: 745898 - DNA, 15 bp, Homo sapiens
tccagtccccaccca

SEQ ID NO: 745899 - DNA, 15 bp, Homo sapiens
ccagtccccacccag

SEQ ID NO: 745900 - DNA, 15 bp, Homo sapiens
cagtccccacccagc

SEQ ID NO: 745901 - DNA, 15 bp, Homo sapiens
agtccccacccagct

SEQ ID NO: 745902 - DNA, 15 bp, Homo sapiens
gtccccacccagctt

SEQ ID NO: 745903 - DNA, 15 bp, Homo sapiens
tccccacccagcttc

SEQ ID NO: 745904 - DNA, 15 bp, Homo sapiens
ccccacccagcttcc

SEQ ID NO: 745905 - DNA, 15 bp, Homo sapiens
cccacccagcttcct

SEQ ID NO: 745906 - DNA, 15 bp, Homo sapiens
ccacccagcttcctc

SEQ ID NO: 745907 - DNA, 15 bp, Homo sapiens
cacccagcttcctct

SEQ ID NO: 745908 - DNA, 15 bp, Homo sapiens
acccagcttcctctg

SEQ ID NO: 745909 - DNA, 15 bp, Homo sapiens
cccagcttcctctgc

SEQ ID NO: 745910 - DNA, 15 bp, Homo sapiens
ccagcttcctctgcc

SEQ ID NO: 745911 - DNA, 15 bp, Homo sapiens
cagcttcctctgccc

SEQ ID NO: 745912 - DNA, 15 bp, Homo sapiens
agcttcctctgcccc

SEQ ID NO: 745913 - DNA, 15 bp, Homo sapiens
gcttcctctgccccc

SEQ ID NO: 745914 - DNA, 15 bp, Homo sapiens
cttcctctgccccca

SEQ ID NO: 745915 - DNA, 15 bp, Homo sapiens
ttcctctgcccccag

SEQ ID NO: 745916 - DNA, 15 bp, Homo sapiens
tcctctgcccccaga

SEQ ID NO: 745917 - DNA, 15 bp, Homo sapiens
cctctgcccccagag

SEQ ID NO: 745918 - DNA, 15 bp, Homo sapiens
ctctgcccccagagg

SEQ ID NO: 745919 - DNA, 15 bp, Homo sapiens
tctgcccccagaggc

SEQ ID NO: 745920 - DNA, 15 bp, Homo sapiens
ctgcccccagaggcc

SEQ ID NO: 745921 - DNA, 15 bp, Homo sapiens
tgcccccagaggccc

SEQ ID NO: 745922 - DNA, 15 bp, Homo sapiens
gcccccagaggcccc

SEQ ID NO: 745923 - DNA, 15 bp, Homo sapiens
cccccagaggccccc

SEQ ID NO: 745924 - DNA, 15 bp, Homo sapiens
ccccagaggccccca

SEQ ID NO: 745925 - DNA, 15 bp, Homo sapiens
cccagaggcccccac

SEQ ID NO: 745926 - DNA, 15 bp, Homo sapiens
ccagaggcccccacc

SEQ ID NO: 745927 - DNA, 15 bp, Homo sapiens
cagaggcccccaccc

SEQ ID NO: 745928 - DNA, 15 bp, Homo sapiens
agaggcccccaccct

SEQ ID NO: 745929 - DNA, 15 bp, Homo sapiens
gaggcccccaccctt

SEQ ID NO: 745930 - DNA, 15 bp, Homo sapiens
aggcccccacccttg

SEQ ID NO: 745931 - DNA, 15 bp, Homo sapiens
ggcccccacccttgg

SEQ ID NO: 745932 - DNA, 15 bp, Homo sapiens
gcccccacccttggc

SEQ ID NO: 745933 - DNA, 15 bp, Homo sapiens
cccccacccttggca

SEQ ID NO: 745934 - DNA, 15 bp, Homo sapiens
ccccacccttggcag

SEQ ID NO: 745935 - DNA, 15 bp, Homo sapiens
cccacccttggcaga

SEQ ID NO: 745936 - DNA, 15 bp, Homo sapiens
ccacccttggcagac

SEQ ID NO: 745937 - DNA, 15 bp, Homo sapiens
cacccttggcagaca

SEQ ID NO: 745938 - DNA, 15 bp, Homo sapiens
acccttggcagacaa

SEQ ID NO: 745939 - DNA, 15 bp, Homo sapiens
cccttggcagacaag

SEQ ID NO: 745940 - DNA, 15 bp, Homo sapiens
ccttggcagacaagg

SEQ ID NO: 745941 - DNA, 15 bp, Homo sapiens
cttggcagacaaggc

SEQ ID NO: 745942 - DNA, 15 bp, Homo sapiens
ttggcagacaaggct

SEQ ID NO: 745943 - DNA, 15 bp, Homo sapiens
tggcagacaaggctt

SEQ ID NO: 745944 - DNA, 15 bp, Homo sapiens
ggcagacaaggcttc

SEQ ID NO: 745945 - DNA, 15 bp, Homo sapiens
gcagacaaggcttcc

SEQ ID NO: 745946 - DNA, 15 bp, Homo sapiens
cagacaaggcttcca

SEQ ID NO: 745947 - DNA, 15 bp, Homo sapiens
agacaaggcttccac

SEQ ID NO: 745948 - DNA, 15 bp, Homo sapiens
gacaaggcttccacc

SEQ ID NO: 745949 - DNA, 15 bp, Homo sapiens
acaaggcttccaccc

SEQ ID NO: 745950 - DNA, 15 bp, Homo sapiens
caaggcttccacccc

SEQ ID NO: 745951 - DNA, 15 bp, Homo sapiens
aaggcttccacccct

SEQ ID NO: 745952 - DNA, 15 bp, Homo sapiens
aggcttccacccctt

SEQ ID NO: 745953 - DNA, 15 bp, Homo sapiens
ggcttccaccccttg

SEQ ID NO: 745954 - DNA, 15 bp, Homo sapiens
gcttccaccccttgc

SEQ ID NO: 745955 - DNA, 15 bp, Homo sapiens
cttccaccccttgcc

SEQ ID NO: 745956 - DNA, 15 bp, Homo sapiens
ttccaccccttgcct

SEQ ID NO: 745957 - DNA, 15 bp, Homo sapiens
tccaccccttgccta

SEQ ID NO: 745958 - DNA, 15 bp, Homo sapiens
ccaccccttgcctag

SEQ ID NO: 745959 - DNA, 15 bp, Homo sapiens
caccccttgcctagg

SEQ ID NO: 745960 - DNA, 15 bp, Homo sapiens
accccttgcctaggt

SEQ ID NO: 745961 - DNA, 15 bp, Homo sapiens
ccccttgcctaggtg

SEQ ID NO: 745962 - DNA, 15 bp, Homo sapiens
cccttgcctaggtgg

SEQ ID NO: 745963 - DNA, 15 bp, Homo sapiens
ccttgcctaggtggc

SEQ ID NO: 745964 - DNA, 15 bp, Homo sapiens
cttgcctaggtggct

SEQ ID NO: 745965 - DNA, 15 bp, Homo sapiens
ttgcctaggtggctg

SEQ ID NO: 745966 - DNA, 15 bp, Homo sapiens
tgcctaggtggctga

SEQ ID NO: 745967 - DNA, 15 bp, Homo sapiens
gcctaggtggctgac

SEQ ID NO: 745968 - DNA, 15 bp, Homo sapiens
cctaggtggctgaca

SEQ ID NO: 745969 - DNA, 15 bp, Homo sapiens
ctaggtggctgacag

SEQ ID NO: 745970 - DNA, 15 bp, Homo sapiens
taggtggctgacagg

SEQ ID NO: 745971 - DNA, 15 bp, Homo sapiens
aggtggctgacaggc

SEQ ID NO: 745972 - DNA, 15 bp, Homo sapiens
ggtggctgacaggcc

SEQ ID NO: 745973 - DNA, 15 bp, Homo sapiens
gtggctgacaggcct

SEQ ID NO: 745974 - DNA, 15 bp, Homo sapiens
tggctgacaggcctg

SEQ ID NO: 745975 - DNA, 15 bp, Homo sapiens
ggctgacaggcctgg

SEQ ID NO: 745976 - DNA, 15 bp, Homo sapiens
gctgacaggcctggc

SEQ ID NO: 745977 - DNA, 15 bp, Homo sapiens
ctgacaggcctggca

SEQ ID NO: 745978 - DNA, 15 bp, Homo sapiens
tgacaggcctggcat

SEQ ID NO: 745979 - DNA, 15 bp, Homo sapiens
gacaggcctggcatg

SEQ ID NO: 745980 - DNA, 15 bp, Homo sapiens
acaggcctggcatgg

SEQ ID NO: 745981 - DNA, 15 bp, Homo sapiens
caggcctggcatggg

SEQ ID NO: 745982 - DNA, 15 bp, Homo sapiens
aggcctggcatgggg

SEQ ID NO: 745983 - DNA, 15 bp, Homo sapiens
ggcctggcatggggg

SEQ ID NO: 745984 - DNA, 15 bp, Homo sapiens
gcctggcatgggggc

SEQ ID NO: 745985 - DNA, 15 bp, Homo sapiens
cctggcatgggggca

SEQ ID NO: 745986 - DNA, 15 bp, Homo sapiens
ctggcatgggggcac

SEQ ID NO: 745987 - DNA, 15 bp, Homo sapiens
tggcatgggggcacc

SEQ ID NO: 745988 - DNA, 15 bp, Homo sapiens
ggcatgggggcacct

SEQ ID NO: 745989 - DNA, 15 bp, Homo sapiens
gcatgggggcacctc

SEQ ID NO: 745990 - DNA, 15 bp, Homo sapiens
catgggggcacctcg

SEQ ID NO: 745991 - DNA, 15 bp, Homo sapiens
atgggggcacctcga

SEQ ID NO: 745992 - DNA, 15 bp, Homo sapiens
tgggggcacctcgat

SEQ ID NO: 745993 - DNA, 15 bp, Homo sapiens
gggggcacctcgatc

SEQ ID NO: 745994 - DNA, 15 bp, Homo sapiens
ggggcacctcgatct

SEQ ID NO: 745995 - DNA, 15 bp, Homo sapiens
gggcacctcgatctc

SEQ ID NO: 745996 - DNA, 15 bp, Homo sapiens
ggcacctcgatctca

SEQ ID NO: 745997 - DNA, 15 bp, Homo sapiens
gcacctcgatctcag

SEQ ID NO: 745998 - DNA, 15 bp, Homo sapiens
cacctcgatctcagg

SEQ ID NO: 745999 - DNA, 15 bp, Homo sapiens
acctcgatctcaggt

SEQ ID NO: 746000 - DNA, 15 bp, Homo sapiens
cctcgatctcaggtc

SEQ ID NO: 746001 - DNA, 15 bp, Homo sapiens
ctcgatctcaggtcc

SEQ ID NO: 746002 - DNA, 15 bp, Homo sapiens
tcgatctcaggtcca

SEQ ID NO: 746003 - DNA, 15 bp, Homo sapiens
cgatctcaggtccat

SEQ ID NO: 746004 - DNA, 15 bp, Homo sapiens
gatctcaggtccata

SEQ ID NO: 746005 - DNA, 15 bp, Homo sapiens
atctcaggtccatac

SEQ ID NO: 746006 - DNA, 15 bp, Homo sapiens
tctcaggtccatact

SEQ ID NO: 746007 - DNA, 15 bp, Homo sapiens
ctcaggtccatactc

SEQ ID NO: 746008 - DNA, 15 bp, Homo sapiens
tcaggtccatactcc

SEQ ID NO: 746009 - DNA, 15 bp, Homo sapiens
caggtccatactcca

SEQ ID NO: 746010 - DNA, 15 bp, Homo sapiens
aggtccatactccac

SEQ ID NO: 746011 - DNA, 15 bp, Homo sapiens
ggtccatactccact

SEQ ID NO: 746012 - DNA, 15 bp, Homo sapiens
gtccatactccactc

SEQ ID NO: 746013 - DNA, 15 bp, Homo sapiens
tccatactccactca

SEQ ID NO: 746014 - DNA, 15 bp, Homo sapiens
ccatactccactcac

SEQ ID NO: 746015 - DNA, 15 bp, Homo sapiens
catactccactcact

SEQ ID NO: 746016 - DNA, 15 bp, Homo sapiens
atactccactcactc

SEQ ID NO: 746017 - DNA, 15 bp, Homo sapiens
tactccactcactcc

SEQ ID NO: 746018 - DNA, 15 bp, Homo sapiens
actccactcactccc

SEQ ID NO: 746019 - DNA, 15 bp, Homo sapiens
ctccactcactccct

SEQ ID NO: 746020 - DNA, 15 bp, Homo sapiens
tccactcactccctt

SEQ ID NO: 746021 - DNA, 15 bp, Homo sapiens
ccactcactcccttg

SEQ ID NO: 746022 - DNA, 15 bp, Homo sapiens
cactcactcccttgc

SEQ ID NO: 746023 - DNA, 15 bp, Homo sapiens
actcactcccttgct

SEQ ID NO: 746024 - DNA, 15 bp, Homo sapiens
ctcactcccttgctc

SEQ ID NO: 746025 - DNA, 15 bp, Homo sapiens
tcactcccttgctcc

SEQ ID NO: 746026 - DNA, 15 bp, Homo sapiens
cactcccttgctcct

SEQ ID NO: 746027 - DNA, 15 bp, Homo sapiens
actcccttgctcctc

SEQ ID NO: 746028 - DNA, 15 bp, Homo sapiens
ctcccttgctcctcc

SEQ ID NO: 746029 - DNA, 15 bp, Homo sapiens
tcccttgctcctcct

SEQ ID NO: 746030 - DNA, 15 bp, Homo sapiens
cccttgctcctcctc

SEQ ID NO: 746031 - DNA, 15 bp, Homo sapiens
ccttgctcctcctcc

SEQ ID NO: 746032 - DNA, 15 bp, Homo sapiens
cttgctcctcctcct

SEQ ID NO: 746033 - DNA, 15 bp, Homo sapiens
ttgctcctcctcctc

SEQ ID NO: 746034 - DNA, 15 bp, Homo sapiens
tgctcctcctcctcc

SEQ ID NO: 746035 - DNA, 15 bp, Homo sapiens
gctcctcctcctcct

SEQ ID NO: 746036 - DNA, 15 bp, Homo sapiens
ctcctcctcctcctc

SEQ ID NO: 746037 - DNA, 15 bp, Homo sapiens
tcctcctcctcctcc

SEQ ID NO: 746038 - DNA, 15 bp, Homo sapiens
cctcctcctcctcct

SEQ ID NO: 746039 - DNA, 15 bp, Homo sapiens
ctcctcctcctcctg

SEQ ID NO: 746040 - DNA, 15 bp, Homo sapiens
tcctcctcctcctgt

SEQ ID NO: 746041 - DNA, 15 bp, Homo sapiens
cctcctcctcctgtt

SEQ ID NO: 746042 - DNA, 15 bp, Homo sapiens
ctcctcctcctgttg

SEQ ID NO: 746043 - DNA, 15 bp, Homo sapiens
tcctcctcctgttgg

SEQ ID NO: 746044 - DNA, 15 bp, Homo sapiens
cctcctcctgttggc

SEQ ID NO: 746045 - DNA, 15 bp, Homo sapiens
ctcctcctgttggcc

SEQ ID NO: 746046 - DNA, 15 bp, Homo sapiens
tcctcctgttggccg

SEQ ID NO: 746047 - DNA, 15 bp, Homo sapiens
cctcctgttggccgg

SEQ ID NO: 746048 - DNA, 15 bp, Homo sapiens
ctcctgttggccggt

SEQ ID NO: 746049 - DNA, 15 bp, Homo sapiens
tcctgttggccggtg

SEQ ID NO: 746050 - DNA, 15 bp, Homo sapiens
cctgttggccggtgc

SEQ ID NO: 746051 - DNA, 15 bp, Homo sapiens
ctgttggccggtgcc

SEQ ID NO: 746052 - DNA, 15 bp, Homo sapiens
tgttggccggtgcca

SEQ ID NO: 746053 - DNA, 15 bp, Homo sapiens
gttggccggtgccag

SEQ ID NO: 746054 - DNA, 15 bp, Homo sapiens
ttggccggtgccagg

SEQ ID NO: 746055 - DNA, 15 bp, Homo sapiens
tggccggtgccaggt

SEQ ID NO: 746056 - DNA, 15 bp, Homo sapiens
ggccggtgccaggtt

SEQ ID NO: 746057 - DNA, 15 bp, Homo sapiens
gccggtgccaggttt

SEQ ID NO: 746058 - DNA, 15 bp, Homo sapiens
ccggtgccaggtttc

SEQ ID NO: 746059 - DNA, 15 bp, Homo sapiens
cggtgccaggtttca

SEQ ID NO: 746060 - DNA, 15 bp, Homo sapiens
ggtgccaggtttcag

SEQ ID NO: 746061 - DNA, 15 bp, Homo sapiens
gtgccaggtttcagt

SEQ ID NO: 746062 - DNA, 15 bp, Homo sapiens
tgccaggtttcagtg

SEQ ID NO: 746063 - DNA, 15 bp, Homo sapiens
gccaggtttcagtgg

SEQ ID NO: 746064 - DNA, 15 bp, Homo sapiens
ccaggtttcagtggg

SEQ ID NO: 746065 - DNA, 15 bp, Homo sapiens
caggtttcagtgggt

SEQ ID NO: 746066 - DNA, 15 bp, Homo sapiens
aggtttcagtgggtc

SEQ ID NO: 746067 - DNA, 15 bp, Homo sapiens
ggtttcagtgggtcc

SEQ ID NO: 746068 - DNA, 15 bp, Homo sapiens
gtttcagtgggtcct

SEQ ID NO: 746069 - DNA, 15 bp, Homo sapiens
tttcagtgggtcctg

SEQ ID NO: 746070 - DNA, 15 bp, Homo sapiens
ttcagtgggtcctgg

SEQ ID NO: 746071 - DNA, 15 bp, Homo sapiens
tcagtgggtcctggc

SEQ ID NO: 746072 - DNA, 15 bp, Homo sapiens
cagtgggtcctggct

SEQ ID NO: 746073 - DNA, 15 bp, Homo sapiens
agtgggtcctggctg

SEQ ID NO: 746074 - DNA, 15 bp, Homo sapiens
gtgggtcctggctgc

SEQ ID NO: 746075 - DNA, 15 bp, Homo sapiens
tgggtcctggctgca

SEQ ID NO: 746076 - DNA, 15 bp, Homo sapiens
gggtcctggctgcat

SEQ ID NO: 746077 - DNA, 15 bp, Homo sapiens
ggtcctggctgcatg

SEQ ID NO: 746078 - DNA, 15 bp, Homo sapiens
gtcctggctgcatga

SEQ ID NO: 746079 - DNA, 15 bp, Homo sapiens
tcctggctgcatgaa

SEQ ID NO: 746080 - DNA, 15 bp, Homo sapiens
cctggctgcatgaaa

SEQ ID NO: 746081 - DNA, 15 bp, Homo sapiens
ctggctgcatgaaac

SEQ ID NO: 746082 - DNA, 15 bp, Homo sapiens
tggctgcatgaaaca

SEQ ID NO: 746083 - DNA, 15 bp, Homo sapiens
ggctgcatgaaacaa

SEQ ID NO: 746084 - DNA, 15 bp, Homo sapiens
gctgcatgaaacaaa

SEQ ID NO: 746085 - DNA, 15 bp, Homo sapiens
ctgcatgaaacaaag

SEQ ID NO: 746086 - DNA, 15 bp, Homo sapiens
tgcatgaaacaaagc

SEQ ID NO: 746087 - DNA, 15 bp, Homo sapiens
gcatgaaacaaagca

SEQ ID NO: 746088 - DNA, 15 bp, Homo sapiens
catgaaacaaagcat

SEQ ID NO: 746089 - DNA, 15 bp, Homo sapiens
atgaaacaaagcatt

SEQ ID NO: 746090 - DNA, 15 bp, Homo sapiens
tgaaacaaagcattg

SEQ ID NO: 746091 - DNA, 15 bp, Homo sapiens
gaaacaaagcattgt

SEQ ID NO: 746092 - DNA, 15 bp, Homo sapiens
aaacaaagcattgtg

SEQ ID NO: 746093 - DNA, 15 bp, Homo sapiens
aacaaagcattgtga

SEQ ID NO: 746094 - DNA, 15 bp, Homo sapiens
acaaagcattgtgag

SEQ ID NO: 746095 - DNA, 15 bp, Homo sapiens
caaagcattgtgagg

SEQ ID NO: 746096 - DNA, 15 bp, Homo sapiens
aaagcattgtgaggc

SEQ ID NO: 746097 - DNA, 15 bp, Homo sapiens
aagcattgtgaggct

SEQ ID NO: 746098 - DNA, 15 bp, Homo sapiens
agcattgtgaggctc

SEQ ID NO: 746099 - DNA, 15 bp, Homo sapiens
gcattgtgaggctct

SEQ ID NO: 746100 - DNA, 15 bp, Homo sapiens
cattgtgaggctctg

SEQ ID NO: 746101 - DNA, 15 bp, Homo sapiens
attgtgaggctctgc

SEQ ID NO: 746102 - DNA, 15 bp, Homo sapiens
ttgtgaggctctgct

SEQ ID NO: 746103 - DNA, 15 bp, Homo sapiens
tgtgaggctctgctg

SEQ ID NO: 746104 - DNA, 15 bp, Homo sapiens
gtgaggctctgctga

SEQ ID NO: 746105 - DNA, 15 bp, Homo sapiens
tgaggctctgctgag

SEQ ID NO: 746106 - DNA, 15 bp, Homo sapiens
gaggctctgctgagg

SEQ ID NO: 746107 - DNA, 15 bp, Homo sapiens
aggctctgctgaggg

SEQ ID NO: 746108 - DNA, 15 bp, Homo sapiens
ggctctgctgagggt

SEQ ID NO: 746109 - DNA, 15 bp, Homo sapiens
gctctgctgagggtc

SEQ ID NO: 746110 - DNA, 15 bp, Homo sapiens
ctctgctgagggtct

SEQ ID NO: 746111 - DNA, 15 bp, Homo sapiens
tctgctgagggtctc

SEQ ID NO: 746112 - DNA, 15 bp, Homo sapiens
ctgctgagggtctcc

SEQ ID NO: 746113 - DNA, 15 bp, Homo sapiens
tgctgagggtctccc

SEQ ID NO: 746114 - DNA, 15 bp, Homo sapiens
gctgagggtctccca

SEQ ID NO: 746115 - DNA, 15 bp, Homo sapiens
ctgagggtctcccac

SEQ ID NO: 746116 - DNA, 15 bp, Homo sapiens
tgagggtctcccacc

SEQ ID NO: 746117 - DNA, 15 bp, Homo sapiens
gagggtctcccaccc

SEQ ID NO: 746118 - DNA, 15 bp, Homo sapiens
agggtctcccaccca

SEQ ID NO: 746119 - DNA, 15 bp, Homo sapiens
gggtctcccacccac

SEQ ID NO: 746120 - DNA, 15 bp, Homo sapiens
ggtctcccacccacc

SEQ ID NO: 746121 - DNA, 15 bp, Homo sapiens
gtctcccacccaccc

SEQ ID NO: 746122 - DNA, 15 bp, Homo sapiens
tctcccacccaccct

SEQ ID NO: 746123 - DNA, 15 bp, Homo sapiens
ctcccacccaccctc

SEQ ID NO: 746124 - DNA, 15 bp, Homo sapiens
tcccacccaccctcc

SEQ ID NO: 746125 - DNA, 15 bp, Homo sapiens
cccacccaccctccc

SEQ ID NO: 746126 - DNA, 15 bp, Homo sapiens
ccacccaccctccct

SEQ ID NO: 746127 - DNA, 15 bp, Homo sapiens
cacccaccctccctc

SEQ ID NO: 746128 - DNA, 15 bp, Homo sapiens
acccaccctccctcc

SEQ ID NO: 746129 - DNA, 15 bp, Homo sapiens
cccaccctccctccc

SEQ ID NO: 746130 - DNA, 15 bp, Homo sapiens
ccaccctccctcccg

SEQ ID NO: 746131 - DNA, 15 bp, Homo sapiens
caccctccctcccgc

SEQ ID NO: 746132 - DNA, 15 bp, Homo sapiens
accctccctcccgcc

SEQ ID NO: 746133 - DNA, 15 bp, Homo sapiens
ccctccctcccgcct

SEQ ID NO: 746134 - DNA, 15 bp, Homo sapiens
cctccctcccgcctc

SEQ ID NO: 746135 - DNA, 15 bp, Homo sapiens
ctccctcccgcctcc

SEQ ID NO: 746136 - DNA, 15 bp, Homo sapiens
tccctcccgcctcct

SEQ ID NO: 746137 - DNA, 15 bp, Homo sapiens
ccctcccgcctcctt

SEQ ID NO: 746138 - DNA, 15 bp, Homo sapiens
cctcccgcctccttc

SEQ ID NO: 746139 - DNA, 15 bp, Homo sapiens
ctcccgcctccttcc

SEQ ID NO: 746140 - DNA, 15 bp, Homo sapiens
tcccgcctccttccc

SEQ ID NO: 746141 - DNA, 15 bp, Homo sapiens
cccgcctccttccca

SEQ ID NO: 746142 - DNA, 15 bp, Homo sapiens
ccgcctccttcccag

SEQ ID NO: 746143 - DNA, 15 bp, Homo sapiens
cgcctccttcccagc

SEQ ID NO: 746144 - DNA, 15 bp, Homo sapiens
gcctccttcccagca

SEQ ID NO: 746145 - DNA, 15 bp, Homo sapiens
cctccttcccagcag

SEQ ID NO: 746146 - DNA, 15 bp, Homo sapiens
ctccttcccagcagc

SEQ ID NO: 746147 - DNA, 15 bp, Homo sapiens
tccttcccagcagct

SEQ ID NO: 746148 - DNA, 15 bp, Homo sapiens
ccttcccagcagctc

SEQ ID NO: 746149 - DNA, 15 bp, Homo sapiens
cttcccagcagctcc

SEQ ID NO: 746150 - DNA, 15 bp, Homo sapiens
ttcccagcagctcct

SEQ ID NO: 746151 - DNA, 15 bp, Homo sapiens
tcccagcagctcctc

SEQ ID NO: 746152 - DNA, 15 bp, Homo sapiens
cccagcagctcctcg

SEQ ID NO: 746153 - DNA, 15 bp, Homo sapiens
ccagcagctcctcga

SEQ ID NO: 746154 - DNA, 15 bp, Homo sapiens
cagcagctcctcgag

SEQ ID NO: 746155 - DNA, 15 bp, Homo sapiens
agcagctcctcgagt

SEQ ID NO: 746156 - DNA, 15 bp, Homo sapiens
gcagctcctcgagtc

SEQ ID NO: 746157 - DNA, 15 bp, Homo sapiens
cagctcctcgagtct

SEQ ID NO: 746158 - DNA, 15 bp, Homo sapiens
agctcctcgagtctt

SEQ ID NO: 746159 - DNA, 15 bp, Homo sapiens
gctcctcgagtcttc

SEQ ID NO: 746160 - DNA, 15 bp, Homo sapiens
ctcctcgagtcttcc

SEQ ID NO: 746161 - DNA, 15 bp, Homo sapiens
tcctcgagtcttcct

SEQ ID NO: 746162 - DNA, 15 bp, Homo sapiens
cctcgagtcttcctt

SEQ ID NO: 746163 - DNA, 15 bp, Homo sapiens
ctcgagtcttccttt

SEQ ID NO: 746164 - DNA, 15 bp, Homo sapiens
tcgagtcttcctttc

SEQ ID NO: 746165 - DNA, 15 bp, Homo sapiens
cgagtcttcctttcc

SEQ ID NO: 746166 - DNA, 15 bp, Homo sapiens
gagtcttcctttcca

SEQ ID NO: 746167 - DNA, 15 bp, Homo sapiens
agtcttcctttccag

SEQ ID NO: 746168 - DNA, 15 bp, Homo sapiens
gtcttcctttccagg

SEQ ID NO: 746169 - DNA, 15 bp, Homo sapiens
tcttcctttccaggc

SEQ ID NO: 746170 - DNA, 15 bp, Homo sapiens
cttcctttccaggcc

SEQ ID NO: 746171 - DNA, 15 bp, Homo sapiens
ttcctttccaggcca

SEQ ID NO: 746172 - DNA, 15 bp, Homo sapiens
tcctttccaggccag

SEQ ID NO: 746173 - DNA, 15 bp, Homo sapiens
cctttccaggccagg

SEQ ID NO: 746174 - DNA, 15 bp, Homo sapiens
ctttccaggccaggt

SEQ ID NO: 746175 - DNA, 15 bp, Homo sapiens
tttccaggccaggtt

SEQ ID NO: 746176 - DNA, 15 bp, Homo sapiens
ttccaggccaggttt

SEQ ID NO: 746177 - DNA, 15 bp, Homo sapiens
tccaggccaggtttg

SEQ ID NO: 746178 - DNA, 15 bp, Homo sapiens
ccaggccaggtttgt

SEQ ID NO: 746179 - DNA, 15 bp, Homo sapiens
caggccaggtttgtt

SEQ ID NO: 746180 - DNA, 15 bp, Homo sapiens
aggccaggtttgttg

SEQ ID NO: 746181 - DNA, 15 bp, Homo sapiens
ggccaggtttgttgt

SEQ ID NO: 746182 - DNA, 15 bp, Homo sapiens
gccaggtttgttgtc

SEQ ID NO: 746183 - DNA, 15 bp, Homo sapiens
ccaggtttgttgtcc

SEQ ID NO: 746184 - DNA, 15 bp, Homo sapiens
caggtttgttgtccc

SEQ ID NO: 746185 - DNA, 15 bp, Homo sapiens
aggtttgttgtcccg

SEQ ID NO: 746186 - DNA, 15 bp, Homo sapiens
ggtttgttgtcccga

SEQ ID NO: 746187 - DNA, 15 bp, Homo sapiens
gtttgttgtcccgaa

SEQ ID NO: 746188 - DNA, 15 bp, Homo sapiens
tttgttgtcccgaat

SEQ ID NO: 746189 - DNA, 15 bp, Homo sapiens
ttgttgtcccgaatt

SEQ ID NO: 746190 - DNA, 15 bp, Homo sapiens
tgttgtcccgaattg

SEQ ID NO: 746191 - DNA, 15 bp, Homo sapiens
ctgcagggtgcaacc

SEQ ID NO: 746192 - DNA, 15 bp, Homo sapiens
tgcagggtgcaaccc

SEQ ID NO: 746193 - DNA, 15 bp, Homo sapiens
gcagggtgcaaccca

SEQ ID NO: 746194 - DNA, 15 bp, Homo sapiens
cagggtgcaacccat

SEQ ID NO: 746195 - DNA, 15 bp, Homo sapiens
agggtgcaacccatc

SEQ ID NO: 746196 - DNA, 15 bp, Homo sapiens
gggtgcaacccatca

SEQ ID NO: 746197 - DNA, 15 bp, Homo sapiens
ggtgcaacccatcat

SEQ ID NO: 746198 - DNA, 15 bp, Homo sapiens
gtgcaacccatcatc

SEQ ID NO: 746199 - DNA, 15 bp, Homo sapiens
tgcaacccatcatca

SEQ ID NO: 746200 - DNA, 15 bp, Homo sapiens
gcaacccatcatcat

SEQ ID NO: 746201 - DNA, 15 bp, Homo sapiens
caacccatcatcatt

SEQ ID NO: 746202 - DNA, 15 bp, Homo sapiens
aacccatcatcattg

SEQ ID NO: 746203 - DNA, 15 bp, Homo sapiens
acccatcatcattga

SEQ ID NO: 746204 - DNA, 15 bp, Homo sapiens
cccatcatcattgac

SEQ ID NO: 746205 - DNA, 15 bp, Homo sapiens
ccatcatcattgact

SEQ ID NO: 746206 - DNA, 15 bp, Homo sapiens
catcatcattgactc

SEQ ID NO: 746207 - DNA, 15 bp, Homo sapiens
atcatcattgactct

SEQ ID NO: 746208 - DNA, 15 bp, Homo sapiens
tcatcattgactctg

SEQ ID NO: 746209 - DNA, 15 bp, Homo sapiens
catcattgactctga

SEQ ID NO: 746210 - DNA, 15 bp, Homo sapiens
atcattgactctgaa

SEQ ID NO: 746211 - DNA, 15 bp, Homo sapiens
tcattgactctgaac

SEQ ID NO: 746212 - DNA, 15 bp, Homo sapiens
cattgactctgaacc

SEQ ID NO: 746213 - DNA, 15 bp, Homo sapiens
attgactctgaaccc

SEQ ID NO: 746214 - DNA, 15 bp, Homo sapiens
ttgactctgaaccca

SEQ ID NO: 746215 - DNA, 15 bp, Homo sapiens
tgactctgaacccag

SEQ ID NO: 746216 - DNA, 15 bp, Homo sapiens
gactctgaacccagt

SEQ ID NO: 746217 - DNA, 15 bp, Homo sapiens
actctgaacccagtt

SEQ ID NO: 746218 - DNA, 15 bp, Homo sapiens
ctctgaacccagtta

SEQ ID NO: 746219 - DNA, 15 bp, Homo sapiens
tctgaacccagttac

SEQ ID NO: 746220 - DNA, 15 bp, Homo sapiens
ctgaacccagttact

SEQ ID NO: 746221 - DNA, 15 bp, Homo sapiens
tgaacccagttactc

SEQ ID NO: 746222 - DNA, 15 bp, Homo sapiens
gaacccagttactcc

SEQ ID NO: 746223 - DNA, 15 bp, Homo sapiens
aacccagttactcca

SEQ ID NO: 746224 - DNA, 15 bp, Homo sapiens
acccagttactccag

SEQ ID NO: 746225 - DNA, 15 bp, Homo sapiens
cccagttactccaga

SEQ ID NO: 746226 - DNA, 15 bp, Homo sapiens
ccagttactccagaa

SEQ ID NO: 746227 - DNA, 15 bp, Homo sapiens
cagttactccagaaa

SEQ ID NO: 746228 - DNA, 15 bp, Homo sapiens
agttactccagaaac

SEQ ID NO: 746229 - DNA, 15 bp, Homo sapiens
gttactccagaaaca

SEQ ID NO: 746230 - DNA, 15 bp, Homo sapiens
ttactccagaaacac

SEQ ID NO: 746231 - DNA, 15 bp, Homo sapiens
tactccagaaacaca

SEQ ID NO: 746232 - DNA, 15 bp, Homo sapiens
actccagaaacacaa

SEQ ID NO: 746233 - DNA, 15 bp, Homo sapiens
ctccagaaacacaaa

SEQ ID NO: 746234 - DNA, 15 bp, Homo sapiens
tccagaaacacaaag

SEQ ID NO: 746235 - DNA, 15 bp, Homo sapiens
ccagaaacacaaagg

SEQ ID NO: 746236 - DNA, 15 bp, Homo sapiens
cagaaacacaaaggc

SEQ ID NO: 746237 - DNA, 15 bp, Homo sapiens
agaaacacaaaggcc

SEQ ID NO: 746238 - DNA, 15 bp, Homo sapiens
gaaacacaaaggcca

SEQ ID NO: 746239 - DNA, 15 bp, Homo sapiens
aaacacaaaggccac

SEQ ID NO: 746240 - DNA, 15 bp, Homo sapiens
aacacaaaggccaca

SEQ ID NO: 746241 - DNA, 15 bp, Homo sapiens
acacaaaggccacac

SEQ ID NO: 746242 - DNA, 15 bp, Homo sapiens
cacaaaggccacacc

SEQ ID NO: 746243 - DNA, 15 bp, Homo sapiens
acaaaggccacacca

SEQ ID NO: 746244 - DNA, 15 bp, Homo sapiens
caaaggccacaccaa

SEQ ID NO: 746245 - DNA, 15 bp, Homo sapiens
aaaggccacaccaaa

SEQ ID NO: 746246 - DNA, 15 bp, Homo sapiens
aaggccacaccaaaa

SEQ ID NO: 746247 - DNA, 15 bp, Homo sapiens
aggccacaccaaaac

SEQ ID NO: 746248 - DNA, 15 bp, Homo sapiens
ggccacaccaaaaca

SEQ ID NO: 746249 - DNA, 15 bp, Homo sapiens
gccacaccaaaacac

SEQ ID NO: 746250 - DNA, 15 bp, Homo sapiens
ccacaccaaaacaca

SEQ ID NO: 746251 - DNA, 15 bp, Homo sapiens
cacaccaaaacacat

SEQ ID NO: 746252 - DNA, 15 bp, Homo sapiens
acaccaaaacacatc

SEQ ID NO: 746253 - DNA, 15 bp, Homo sapiens
caccaaaacacatct

SEQ ID NO: 746254 - DNA, 15 bp, Homo sapiens
accaaaacacatctc

SEQ ID NO: 746255 - DNA, 15 bp, Homo sapiens
ccaaaacacatctca

SEQ ID NO: 746256 - DNA, 15 bp, Homo sapiens
caaaacacatctcac

SEQ ID NO: 746257 - DNA, 15 bp, Homo sapiens
aaaacacatctcaca

SEQ ID NO: 746258 - DNA, 15 bp, Homo sapiens
aaacacatctcacac

SEQ ID NO: 746259 - DNA, 15 bp, Homo sapiens
aacacatctcacact

SEQ ID NO: 746260 - DNA, 15 bp, Homo sapiens
acacatctcacactc

SEQ ID NO: 746261 - DNA, 15 bp, Homo sapiens
cacatctcacactca

SEQ ID NO: 746262 - DNA, 15 bp, Homo sapiens
acatctcacactcaa

SEQ ID NO: 746263 - DNA, 15 bp, Homo sapiens
catctcacactcaac

SEQ ID NO: 746264 - DNA, 15 bp, Homo sapiens
atctcacactcaacc

SEQ ID NO: 746265 - DNA, 15 bp, Homo sapiens
tctcacactcaaccc

SEQ ID NO: 746266 - DNA, 15 bp, Homo sapiens
ctcacactcaacccc

SEQ ID NO: 746267 - DNA, 15 bp, Homo sapiens
tcacactcaacccct

SEQ ID NO: 746268 - DNA, 15 bp, Homo sapiens
cacactcaacccctg

SEQ ID NO: 746269 - DNA, 15 bp, Homo sapiens
acactcaacccctgc

SEQ ID NO: 746270 - DNA, 15 bp, Homo sapiens
cactcaacccctgct

SEQ ID NO: 746271 - DNA, 15 bp, Homo sapiens
actcaacccctgctt

SEQ ID NO: 746272 - DNA, 15 bp, Homo sapiens
ctcaacccctgcttt

SEQ ID NO: 746273 - DNA, 15 bp, Homo sapiens
tcaacccctgctttg

SEQ ID NO: 746274 - DNA, 15 bp, Homo sapiens
caacccctgctttgt

SEQ ID NO: 746275 - DNA, 15 bp, Homo sapiens
aacccctgctttgtg

SEQ ID NO: 746276 - DNA, 15 bp, Homo sapiens
acccctgctttgtgc

SEQ ID NO: 746277 - DNA, 15 bp, Homo sapiens
cccctgctttgtgcc

SEQ ID NO: 746278 - DNA, 15 bp, Homo sapiens
ccctgctttgtgccc

SEQ ID NO: 746279 - DNA, 15 bp, Homo sapiens
cctgctttgtgcccc

SEQ ID NO: 746280 - DNA, 15 bp, Homo sapiens
ctgctttgtgccccc

SEQ ID NO: 746281 - DNA, 15 bp, Homo sapiens
tgctttgtgcccccc

SEQ ID NO: 746282 - DNA, 15 bp, Homo sapiens
gctttgtgcccccca

SEQ ID NO: 746283 - DNA, 15 bp, Homo sapiens
ctttgtgccccccag

SEQ ID NO: 746284 - DNA, 15 bp, Homo sapiens
tttgtgccccccagg

SEQ ID NO: 746285 - DNA, 15 bp, Homo sapiens
ttgtgccccccaggt

SEQ ID NO: 746286 - DNA, 15 bp, Homo sapiens
tgtgccccccaggtc

SEQ ID NO: 746287 - DNA, 15 bp, Homo sapiens
gtgccccccaggtcc

SEQ ID NO: 746288 - DNA, 15 bp, Homo sapiens
tgccccccaggtccc

SEQ ID NO: 746289 - DNA, 15 bp, Homo sapiens
gccccccaggtcccc

SEQ ID NO: 746290 - DNA, 15 bp, Homo sapiens
ccccccaggtcccca

SEQ ID NO: 746291 - DNA, 15 bp, Homo sapiens
cccccaggtccccaa

SEQ ID NO: 746292 - DNA, 15 bp, Homo sapiens
ccccaggtccccaag

SEQ ID NO: 746293 - DNA, 15 bp, Homo sapiens
cccaggtccccaaga

SEQ ID NO: 746294 - DNA, 15 bp, Homo sapiens
ccaggtccccaagag

SEQ ID NO: 746295 - DNA, 15 bp, Homo sapiens
caggtccccaagagg

SEQ ID NO: 746296 - DNA, 15 bp, Homo sapiens
aggtccccaagagga

SEQ ID NO: 746297 - DNA, 15 bp, Homo sapiens
ggtccccaagaggag

SEQ ID NO: 746298 - DNA, 15 bp, Homo sapiens
gtccccaagaggagg

SEQ ID NO: 746299 - DNA, 15 bp, Homo sapiens
tccccaagaggagga

SEQ ID NO: 746300 - DNA, 15 bp, Homo sapiens
ccccaagaggaggag

SEQ ID NO: 746301 - DNA, 15 bp, Homo sapiens
cccaagaggaggagc

SEQ ID NO: 746302 - DNA, 15 bp, Homo sapiens
ccaagaggaggagct

SEQ ID NO: 746303 - DNA, 15 bp, Homo sapiens
caagaggaggagctg

SEQ ID NO: 746304 - DNA, 15 bp, Homo sapiens
aagaggaggagctgg

SEQ ID NO: 746305 - DNA, 15 bp, Homo sapiens
agaggaggagctggg

SEQ ID NO: 746306 - DNA, 15 bp, Homo sapiens
gaggaggagctgggg

SEQ ID NO: 746307 - DNA, 15 bp, Homo sapiens
aggaggagctggggc

SEQ ID NO: 746308 - DNA, 15 bp, Homo sapiens
ggaggagctggggct

SEQ ID NO: 746309 - DNA, 15 bp, Homo sapiens
gaggagctggggctg

SEQ ID NO: 746310 - DNA, 15 bp, Homo sapiens
aggagctggggctgc

SEQ ID NO: 746311 - DNA, 15 bp, Homo sapiens
ggagctggggctgca

SEQ ID NO: 746312 - DNA, 15 bp, Homo sapiens
gagctggggctgcag

SEQ ID NO: 746313 - DNA, 15 bp, Homo sapiens
agctggggctgcagg

SEQ ID NO: 746314 - DNA, 15 bp, Homo sapiens
gctggggctgcaggg

SEQ ID NO: 746315 - DNA, 15 bp, Homo sapiens
ctggggctgcaggga

SEQ ID NO: 746316 - DNA, 15 bp, Homo sapiens
tggggctgcagggag

SEQ ID NO: 746317 - DNA, 15 bp, Homo sapiens
ggggctgcagggagc

SEQ ID NO: 746318 - DNA, 15 bp, Homo sapiens
gggctgcagggagcg

SEQ ID NO: 746319 - DNA, 15 bp, Homo sapiens
ggctgcagggagcga

SEQ ID NO: 746320 - DNA, 15 bp, Homo sapiens
gctgcagggagcgag

SEQ ID NO: 746321 - DNA, 15 bp, Homo sapiens
ctgcagggagcgagg

SEQ ID NO: 746322 - DNA, 15 bp, Homo sapiens
tgcagggagcgaggg

SEQ ID NO: 746323 - DNA, 15 bp, Homo sapiens
gcagggagcgagggc

SEQ ID NO: 746324 - DNA, 15 bp, Homo sapiens
cagggagcgagggca

SEQ ID NO: 746325 - DNA, 15 bp, Homo sapiens
agggagcgagggcaa

SEQ ID NO: 746326 - DNA, 15 bp, Homo sapiens
gggagcgagggcaag

SEQ ID NO: 746327 - DNA, 15 bp, Homo sapiens
ggagcgagggcaagg

SEQ ID NO: 746328 - DNA, 15 bp, Homo sapiens
gagcgagggcaaggc

SEQ ID NO: 746329 - DNA, 15 bp, Homo sapiens
agcgagggcaaggcc

SEQ ID NO: 746330 - DNA, 15 bp, Homo sapiens
gcgagggcaaggccc

SEQ ID NO: 746331 - DNA, 15 bp, Homo sapiens
cgagggcaaggccct

SEQ ID NO: 746332 - DNA, 15 bp, Homo sapiens
gagggcaaggccctg

SEQ ID NO: 746333 - DNA, 15 bp, Homo sapiens
agggcaaggccctga

SEQ ID NO: 746334 - DNA, 15 bp, Homo sapiens
gggcaaggccctgac

SEQ ID NO: 746335 - DNA, 15 bp, Homo sapiens
ggcaaggccctgacc

SEQ ID NO: 746336 - DNA, 15 bp, Homo sapiens
gcaaggccctgaccg

SEQ ID NO: 746337 - DNA, 15 bp, Homo sapiens
caaggccctgaccga

SEQ ID NO: 746338 - DNA, 15 bp, Homo sapiens
aaggccctgaccgac

SEQ ID NO: 746339 - DNA, 15 bp, Homo sapiens
aggccctgaccgacg

SEQ ID NO: 746340 - DNA, 15 bp, Homo sapiens
ggccctgaccgacgt

SEQ ID NO: 746341 - DNA, 15 bp, Homo sapiens
gccctgaccgacgtg

SEQ ID NO: 746342 - DNA, 15 bp, Homo sapiens
ccctgaccgacgtgg

SEQ ID NO: 746343 - DNA, 15 bp, Homo sapiens
cctgaccgacgtggg

SEQ ID NO: 746344 - DNA, 15 bp, Homo sapiens
ctgaccgacgtgggg

SEQ ID NO: 746345 - DNA, 15 bp, Homo sapiens
tgaccgacgtggggc

SEQ ID NO: 746346 - DNA, 15 bp, Homo sapiens
gaccgacgtggggcc

SEQ ID NO: 746347 - DNA, 15 bp, Homo sapiens
accgacgtggggccc

SEQ ID NO: 746348 - DNA, 15 bp, Homo sapiens
ccgacgtggggccct

SEQ ID NO: 746349 - DNA, 15 bp, Homo sapiens
cgacgtggggccctt

SEQ ID NO: 746350 - DNA, 15 bp, Homo sapiens
gacgtggggcccttc

SEQ ID NO: 746351 - DNA, 15 bp, Homo sapiens
acgtggggcccttcc

SEQ ID NO: 746352 - DNA, 15 bp, Homo sapiens
cgtggggcccttccc

SEQ ID NO: 746353 - DNA, 15 bp, Homo sapiens
gtggggcccttcccc

SEQ ID NO: 746354 - DNA, 15 bp, Homo sapiens
tggggcccttcccct

SEQ ID NO: 746355 - DNA, 15 bp, Homo sapiens
ggggcccttcccctc

SEQ ID NO: 746356 - DNA, 15 bp, Homo sapiens
gggcccttcccctct

SEQ ID NO: 746357 - DNA, 15 bp, Homo sapiens
ggcccttcccctctg

SEQ ID NO: 746358 - DNA, 15 bp, Homo sapiens
gcccttcccctctgc

SEQ ID NO: 746359 - DNA, 15 bp, Homo sapiens
cccttcccctctgct

SEQ ID NO: 746360 - DNA, 15 bp, Homo sapiens
ccttcccctctgctt

SEQ ID NO: 746361 - DNA, 15 bp, Homo sapiens
cttcccctctgcttt

SEQ ID NO: 746362 - DNA, 15 bp, Homo sapiens
ttcccctctgctttt

SEQ ID NO: 746363 - DNA, 15 bp, Homo sapiens
tcccctctgcttttc

SEQ ID NO: 746364 - DNA, 15 bp, Homo sapiens
cccctctgcttttcc

SEQ ID NO: 746365 - DNA, 15 bp, Homo sapiens
ccctctgcttttccc

SEQ ID NO: 746366 - DNA, 15 bp, Homo sapiens
cctctgcttttcccc

SEQ ID NO: 746367 - DNA, 15 bp, Homo sapiens
ctctgcttttccccc

SEQ ID NO: 746368 - DNA, 15 bp, Homo sapiens
tctgcttttccccct

SEQ ID NO: 746369 - DNA, 15 bp, Homo sapiens
ctgcttttccccctc

SEQ ID NO: 746370 - DNA, 15 bp, Homo sapiens
tgcttttccccctct

SEQ ID NO: 746371 - DNA, 15 bp, Homo sapiens
gcttttccccctctg

SEQ ID NO: 746372 - DNA, 15 bp, Homo sapiens
cttttccccctctgc

SEQ ID NO: 746373 - DNA, 15 bp, Homo sapiens
ttttccccctctgct

SEQ ID NO: 746374 - DNA, 15 bp, Homo sapiens
tttccccctctgctg

SEQ ID NO: 746375 - DNA, 15 bp, Homo sapiens
ttccccctctgctgt

SEQ ID NO: 746376 - DNA, 15 bp, Homo sapiens
tccccctctgctgtc

SEQ ID NO: 746377 - DNA, 15 bp, Homo sapiens
ccccctctgctgtcc

SEQ ID NO: 746378 - DNA, 15 bp, Homo sapiens
cccctctgctgtccc

SEQ ID NO: 746379 - DNA, 15 bp, Homo sapiens
ccctctgctgtcccc

SEQ ID NO: 746380 - DNA, 15 bp, Homo sapiens
cctctgctgtcccca

SEQ ID NO: 746381 - DNA, 15 bp, Homo sapiens
ctctgctgtccccat

SEQ ID NO: 746382 - DNA, 15 bp, Homo sapiens
tctgctgtccccatt

SEQ ID NO: 746383 - DNA, 15 bp, Homo sapiens
ctgctgtccccattt

SEQ ID NO: 746384 - DNA, 15 bp, Homo sapiens
tgctgtccccatttt

SEQ ID NO: 746385 - DNA, 15 bp, Homo sapiens
gctgtccccattttt

SEQ ID NO: 746386 - DNA, 15 bp, Homo sapiens
ctgtccccatttttg

SEQ ID NO: 746387 - DNA, 15 bp, Homo sapiens
tgtccccatttttgt

SEQ ID NO: 746388 - DNA, 15 bp, Homo sapiens
gtccccatttttgtt

SEQ ID NO: 746389 - DNA, 15 bp, Homo sapiens
tccccatttttgtta

SEQ ID NO: 746390 - DNA, 15 bp, Homo sapiens
ccccatttttgttaa

SEQ ID NO: 746391 - DNA, 15 bp, Homo sapiens
cccatttttgttaac

SEQ ID NO: 746392 - DNA, 15 bp, Homo sapiens
ccatttttgttaaca

SEQ ID NO: 746393 - DNA, 15 bp, Homo sapiens
catttttgttaacaa

SEQ ID NO: 746394 - DNA, 15 bp, Homo sapiens
atttttgttaacaaa

SEQ ID NO: 746395 - DNA, 15 bp, Homo sapiens
tttttgttaacaaat

SEQ ID NO: 746396 - DNA, 15 bp, Homo sapiens
ttttgttaacaaata

SEQ ID NO: 746397 - DNA, 15 bp, Homo sapiens
tttgttaacaaatac

SEQ ID NO: 746398 - DNA, 15 bp, Homo sapiens
ttgttaacaaataca

SEQ ID NO: 746399 - DNA, 15 bp, Homo sapiens
tgttaacaaatacaa

SEQ ID NO: 746400 - DNA, 15 bp, Homo sapiens
gttaacaaatacaag

SEQ ID NO: 746401 - DNA, 15 bp, Homo sapiens
ttaacaaatacaaga

SEQ ID NO: 746402 - DNA, 15 bp, Homo sapiens
taacaaatacaagac

SEQ ID NO: 746403 - DNA, 15 bp, Homo sapiens
aacaaatacaagact

SEQ ID NO: 746404 - DNA, 15 bp, Homo sapiens
acaaatacaagactt

SEQ ID NO: 746405 - DNA, 15 bp, Homo sapiens
caaatacaagacttc

SEQ ID NO: 746406 - DNA, 15 bp, Homo sapiens
aaatacaagacttcc

SEQ ID NO: 746407 - DNA, 15 bp, Homo sapiens
aatacaagacttccg

SEQ ID NO: 746408 - DNA, 15 bp, Homo sapiens
atacaagacttccgg

SEQ ID NO: 746409 - DNA, 15 bp, Homo sapiens
tacaagacttccggt

SEQ ID NO: 746410 - DNA, 15 bp, Homo sapiens
acaagacttccggtc

SEQ ID NO: 746411 - DNA, 15 bp, Homo sapiens
caagacttccggtct

SEQ ID NO: 746412 - DNA, 15 bp, Homo sapiens
aagacttccggtctc

SEQ ID NO: 746413 - DNA, 15 bp, Homo sapiens
agacttccggtctcc

SEQ ID NO: 746414 - DNA, 15 bp, Homo sapiens
gacttccggtctcca

SEQ ID NO: 746415 - DNA, 15 bp, Homo sapiens
acttccggtctccac

SEQ ID NO: 746416 - DNA, 15 bp, Homo sapiens
cttccggtctccacc

SEQ ID NO: 746417 - DNA, 15 bp, Homo sapiens
ttccggtctccaccc

SEQ ID NO: 746418 - DNA, 15 bp, Homo sapiens
tccggtctccaccct

SEQ ID NO: 746419 - DNA, 15 bp, Homo sapiens
ccggtctccaccctg

SEQ ID NO: 746420 - DNA, 15 bp, Homo sapiens
cggtctccaccctgc

SEQ ID NO: 746421 - DNA, 15 bp, Homo sapiens
ggtctccaccctgct

SEQ ID NO: 746422 - DNA, 15 bp, Homo sapiens
gtctccaccctgctg

SEQ ID NO: 746423 - DNA, 15 bp, Homo sapiens
tctccaccctgctgc

SEQ ID NO: 746424 - DNA, 15 bp, Homo sapiens
ctccaccctgctgcc

SEQ ID NO: 746425 - DNA, 15 bp, Homo sapiens
tccaccctgctgcca

SEQ ID NO: 746426 - DNA, 15 bp, Homo sapiens
ccaccctgctgccac

SEQ ID NO: 746427 - DNA, 15 bp, Homo sapiens
caccctgctgccaca

SEQ ID NO: 746428 - DNA, 15 bp, Homo sapiens
accctgctgccacaa

SEQ ID NO: 746429 - DNA, 15 bp, Homo sapiens
ccctgctgccacaaa

SEQ ID NO: 746430 - DNA, 15 bp, Homo sapiens
cctgctgccacaaac

SEQ ID NO: 746431 - DNA, 15 bp, Homo sapiens
ctgctgccacaaacc

SEQ ID NO: 746432 - DNA, 15 bp, Homo sapiens
tgctgccacaaacca

SEQ ID NO: 746433 - DNA, 15 bp, Homo sapiens
gctgccacaaaccac

SEQ ID NO: 746434 - DNA, 15 bp, Homo sapiens
ctgccacaaaccaca

SEQ ID NO: 746435 - DNA, 15 bp, Homo sapiens
tgccacaaaccacag

SEQ ID NO: 746436 - DNA, 15 bp, Homo sapiens
gccacaaaccacagc

SEQ ID NO: 746437 - DNA, 15 bp, Homo sapiens
ccacaaaccacagcg

SEQ ID NO: 746438 - DNA, 15 bp, Homo sapiens
cacaaaccacagcgt

SEQ ID NO: 746439 - DNA, 15 bp, Homo sapiens
acaaaccacagcgtt

SEQ ID NO: 746440 - DNA, 15 bp, Homo sapiens
caaaccacagcgttc

SEQ ID NO: 746441 - DNA, 15 bp, Homo sapiens
aaaccacagcgttcc

SEQ ID NO: 746442 - DNA, 15 bp, Homo sapiens
aaccacagcgttcct

SEQ ID NO: 746443 - DNA, 15 bp, Homo sapiens
accacagcgttcctg

SEQ ID NO: 746444 - DNA, 15 bp, Homo sapiens
ccacagcgttcctgc

SEQ ID NO: 746445 - DNA, 15 bp, Homo sapiens
cacagcgttcctgca

SEQ ID NO: 746446 - DNA, 15 bp, Homo sapiens
acagcgttcctgcag

SEQ ID NO: 746447 - DNA, 15 bp, Homo sapiens
cagcgttcctgcagt

SEQ ID NO: 746448 - DNA, 15 bp, Homo sapiens
agcgttcctgcagtc

SEQ ID NO: 746449 - DNA, 15 bp, Homo sapiens
gcgttcctgcagtct

SEQ ID NO: 746450 - DNA, 15 bp, Homo sapiens
cgttcctgcagtctg

SEQ ID NO: 746451 - DNA, 15 bp, Homo sapiens
gttcctgcagtctgg

SEQ ID NO: 746452 - DNA, 15 bp, Homo sapiens
ttcctgcagtctggc

SEQ ID NO: 746453 - DNA, 15 bp, Homo sapiens
tcctgcagtctggct

SEQ ID NO: 746454 - DNA, 15 bp, Homo sapiens
cctgcagtctggctg

SEQ ID NO: 746455 - DNA, 15 bp, Homo sapiens
ctgcagtctggctgg

SEQ ID NO: 746456 - DNA, 15 bp, Homo sapiens
tgcagtctggctggg

SEQ ID NO: 746457 - DNA, 15 bp, Homo sapiens
gcagtctggctgggc

SEQ ID NO: 746458 - DNA, 15 bp, Homo sapiens
cagtctggctgggct

SEQ ID NO: 746459 - DNA, 15 bp, Homo sapiens
agtctggctgggctg

SEQ ID NO: 746460 - DNA, 15 bp, Homo sapiens
gtctggctgggctgg

SEQ ID NO: 746461 - DNA, 15 bp, Homo sapiens
tctggctgggctggg

SEQ ID NO: 746462 - DNA, 15 bp, Homo sapiens
ctggctgggctgggg

SEQ ID NO: 746463 - DNA, 15 bp, Homo sapiens
tggctgggctgggga

SEQ ID NO: 746464 - DNA, 15 bp, Homo sapiens
ggctgggctggggag

SEQ ID NO: 746465 - DNA, 15 bp, Homo sapiens
gctgggctggggaga

SEQ ID NO: 746466 - DNA, 15 bp, Homo sapiens
ctgggctggggagat

SEQ ID NO: 746467 - DNA, 15 bp, Homo sapiens
tgggctggggagatt

SEQ ID NO: 746468 - DNA, 15 bp, Homo sapiens
gggctggggagattt

SEQ ID NO: 746469 - DNA, 15 bp, Homo sapiens
ggctggggagattta

SEQ ID NO: 746470 - DNA, 15 bp, Homo sapiens
gctggggagatttat

SEQ ID NO: 746471 - DNA, 15 bp, Homo sapiens
ctggggagatttatg

SEQ ID NO: 746472 - DNA, 15 bp, Homo sapiens
tggggagatttatgg

SEQ ID NO: 746473 - DNA, 15 bp, Homo sapiens
ggggagatttatggt

SEQ ID NO: 746474 - DNA, 15 bp, Homo sapiens
gggagatttatggtc

SEQ ID NO: 746475 - DNA, 15 bp, Homo sapiens
ggagatttatggtcc

SEQ ID NO: 746476 - DNA, 15 bp, Homo sapiens
gagatttatggtccc

SEQ ID NO: 746477 - DNA, 15 bp, Homo sapiens
agatttatggtccca

SEQ ID NO: 746478 - DNA, 15 bp, Homo sapiens
gatttatggtcccaa

SEQ ID NO: 746479 - DNA, 15 bp, Homo sapiens
atttatggtcccaag

SEQ ID NO: 746480 - DNA, 15 bp, Homo sapiens
tttatggtcccaagt

SEQ ID NO: 746481 - DNA, 15 bp, Homo sapiens
ttatggtcccaagtc

SEQ ID NO: 746482 - DNA, 15 bp, Homo sapiens
tatggtcccaagtct

SEQ ID NO: 746483 - DNA, 15 bp, Homo sapiens
atggtcccaagtctg

SEQ ID NO: 746484 - DNA, 15 bp, Homo sapiens
tggtcccaagtctga

SEQ ID NO: 746485 - DNA, 15 bp, Homo sapiens
ggtcccaagtctgag

SEQ ID NO: 746486 - DNA, 15 bp, Homo sapiens
gtcccaagtctgagg

SEQ ID NO: 746487 - DNA, 15 bp, Homo sapiens
tcccaagtctgaggc

SEQ ID NO: 746488 - DNA, 15 bp, Homo sapiens
cccaagtctgaggcc

SEQ ID NO: 746489 - DNA, 15 bp, Homo sapiens
ccaagtctgaggcct

SEQ ID NO: 746490 - DNA, 15 bp, Homo sapiens
caagtctgaggcctg

SEQ ID NO: 746491 - DNA, 15 bp, Homo sapiens
aagtctgaggcctgc

SEQ ID NO: 746492 - DNA, 15 bp, Homo sapiens
agtctgaggcctgcc

SEQ ID NO: 746493 - DNA, 15 bp, Homo sapiens
gtctgaggcctgccc

SEQ ID NO: 746494 - DNA, 15 bp, Homo sapiens
tctgaggcctgcccg

SEQ ID NO: 746495 - DNA, 15 bp, Homo sapiens
ctgaggcctgcccgc

SEQ ID NO: 746496 - DNA, 15 bp, Homo sapiens
tgaggcctgcccgct

SEQ ID NO: 746497 - DNA, 15 bp, Homo sapiens
gaggcctgcccgctg

SEQ ID NO: 746498 - DNA, 15 bp, Homo sapiens
aggcctgcccgctgg

SEQ ID NO: 746499 - DNA, 15 bp, Homo sapiens
ggcctgcccgctggc

SEQ ID NO: 746500 - DNA, 15 bp, Homo sapiens
gcctgcccgctggct

SEQ ID NO: 746501 - DNA, 15 bp, Homo sapiens
cctgcccgctggctc

SEQ ID NO: 746502 - DNA, 15 bp, Homo sapiens
ctgcccgctggctcc

SEQ ID NO: 746503 - DNA, 15 bp, Homo sapiens
tgcccgctggctcct

SEQ ID NO: 746504 - DNA, 15 bp, Homo sapiens
gcccgctggctccta

SEQ ID NO: 746505 - DNA, 15 bp, Homo sapiens
cccgctggctcctac

SEQ ID NO: 746506 - DNA, 15 bp, Homo sapiens
ccgctggctcctact

SEQ ID NO: 746507 - DNA, 15 bp, Homo sapiens
cgctggctcctactt

SEQ ID NO: 746508 - DNA, 15 bp, Homo sapiens
gctggctcctactta

SEQ ID NO: 746509 - DNA, 15 bp, Homo sapiens
ctggctcctacttaa

SEQ ID NO: 746510 - DNA, 15 bp, Homo sapiens
tggctcctacttaag

SEQ ID NO: 746511 - DNA, 15 bp, Homo sapiens
ggctcctacttaagg

SEQ ID NO: 746512 - DNA, 15 bp, Homo sapiens
gctcctacttaagga

SEQ ID NO: 746513 - DNA, 15 bp, Homo sapiens
ctcctacttaaggag

SEQ ID NO: 746514 - DNA, 15 bp, Homo sapiens
tcctacttaaggagg

SEQ ID NO: 746515 - DNA, 15 bp, Homo sapiens
cctacttaaggagga

SEQ ID NO: 746516 - DNA, 15 bp, Homo sapiens
ctacttaaggaggag

SEQ ID NO: 746517 - DNA, 15 bp, Homo sapiens
tacttaaggaggagt

SEQ ID NO: 746518 - DNA, 15 bp, Homo sapiens
acttaaggaggagtc

SEQ ID NO: 746519 - DNA, 15 bp, Homo sapiens
cttaaggaggagtca

SEQ ID NO: 746520 - DNA, 15 bp, Homo sapiens
ttaaggaggagtcag

SEQ ID NO: 746521 - DNA, 15 bp, Homo sapiens
taaggaggagtcaga

SEQ ID NO: 746522 - DNA, 15 bp, Homo sapiens
aaggaggagtcagaa

SEQ ID NO: 746523 - DNA, 15 bp, Homo sapiens
aggaggagtcagaat

SEQ ID NO: 746524 - DNA, 15 bp, Homo sapiens
ggaggagtcagaatg

SEQ ID NO: 746525 - DNA, 15 bp, Homo sapiens
gaggagtcagaatgc

SEQ ID NO: 746526 - DNA, 15 bp, Homo sapiens
aggagtcagaatgcc

SEQ ID NO: 746527 - DNA, 15 bp, Homo sapiens
ggagtcagaatgccc

SEQ ID NO: 746528 - DNA, 15 bp, Homo sapiens
gagtcagaatgcccg

SEQ ID NO: 746529 - DNA, 15 bp, Homo sapiens
agtcagaatgcccgc

SEQ ID NO: 746530 - DNA, 15 bp, Homo sapiens
gtcagaatgcccgcc

SEQ ID NO: 746531 - DNA, 15 bp, Homo sapiens
tcagaatgcccgccg

SEQ ID NO: 746532 - DNA, 15 bp, Homo sapiens
cagaatgcccgccgc

SEQ ID NO: 746533 - DNA, 15 bp, Homo sapiens
agaatgcccgccgcc

SEQ ID NO: 746534 - DNA, 15 bp, Homo sapiens
gaatgcccgccgccg

SEQ ID NO: 746535 - DNA, 15 bp, Homo sapiens
aatgcccgccgccgg

SEQ ID NO: 746536 - DNA, 15 bp, Homo sapiens
atgcccgccgccggg

SEQ ID NO: 746537 - DNA, 15 bp, Homo sapiens
tgcccgccgccgggg

SEQ ID NO: 746538 - DNA, 15 bp, Homo sapiens
gcccgccgccggggc

SEQ ID NO: 746539 - DNA, 15 bp, Homo sapiens
cccgccgccggggct

SEQ ID NO: 746540 - DNA, 15 bp, Homo sapiens
ccgccgccggggctc

SEQ ID NO: 746541 - DNA, 15 bp, Homo sapiens
cgccgccggggctcc

SEQ ID NO: 746542 - DNA, 15 bp, Homo sapiens
gccgccggggctccc

SEQ ID NO: 746543 - DNA, 15 bp, Homo sapiens
ccgccggggctccct

SEQ ID NO: 746544 - DNA, 15 bp, Homo sapiens
cgccggggctccctt

SEQ ID NO: 746545 - DNA, 15 bp, Homo sapiens
gccggggctcccttt

SEQ ID NO: 746546 - DNA, 15 bp, Homo sapiens
ccggggctccctttc

SEQ ID NO: 746547 - DNA, 15 bp, Homo sapiens
cggggctccctttcc

SEQ ID NO: 746548 - DNA, 15 bp, Homo sapiens
ggggctccctttccc

SEQ ID NO: 746549 - DNA, 15 bp, Homo sapiens
gggctccctttccct

SEQ ID NO: 746550 - DNA, 15 bp, Homo sapiens
ggctccctttccctc

SEQ ID NO: 746551 - DNA, 15 bp, Homo sapiens
gctccctttccctcc

SEQ ID NO: 746552 - DNA, 15 bp, Homo sapiens
ctccctttccctccg

SEQ ID NO: 746553 - DNA, 15 bp, Homo sapiens
tccctttccctccgt

SEQ ID NO: 746554 - DNA, 15 bp, Homo sapiens
ccctttccctccgtg

SEQ ID NO: 746555 - DNA, 15 bp, Homo sapiens
cctttccctccgtgt

SEQ ID NO: 746556 - DNA, 15 bp, Homo sapiens
ctttccctccgtgtg

SEQ ID NO: 746557 - DNA, 15 bp, Homo sapiens
tttccctccgtgtga

SEQ ID NO: 746558 - DNA, 15 bp, Homo sapiens
ttccctccgtgtgac

SEQ ID NO: 746559 - DNA, 15 bp, Homo sapiens
tccctccgtgtgacc

SEQ ID NO: 746560 - DNA, 15 bp, Homo sapiens
ccctccgtgtgaccc

SEQ ID NO: 746561 - DNA, 15 bp, Homo sapiens
cctccgtgtgacccc

SEQ ID NO: 746562 - DNA, 15 bp, Homo sapiens
ctccgtgtgaccccc

SEQ ID NO: 746563 - DNA, 15 bp, Homo sapiens
tccgtgtgacccccc

SEQ ID NO: 746564 - DNA, 15 bp, Homo sapiens
ccgtgtgacccccct

SEQ ID NO: 746565 - DNA, 15 bp, Homo sapiens
cgtgtgacccccctt

SEQ ID NO: 746566 - DNA, 15 bp, Homo sapiens
gtgtgaccccccttt

SEQ ID NO: 746567 - DNA, 15 bp, Homo sapiens
tgtgacccccctttt

SEQ ID NO: 746568 - DNA, 15 bp, Homo sapiens
gtgacccccctttta

SEQ ID NO: 746569 - DNA, 15 bp, Homo sapiens
tgaccccccttttaa

SEQ ID NO: 746570 - DNA, 15 bp, Homo sapiens
gaccccccttttaaa

SEQ ID NO: 746571 - DNA, 15 bp, Homo sapiens
accccccttttaaag

SEQ ID NO: 746572 - DNA, 15 bp, Homo sapiens
ccccccttttaaagt

SEQ ID NO: 746573 - DNA, 15 bp, Homo sapiens
cccccttttaaagtc

SEQ ID NO: 746574 - DNA, 15 bp, Homo sapiens
ccccttttaaagtcc

SEQ ID NO: 746575 - DNA, 15 bp, Homo sapiens
cccttttaaagtcct

SEQ ID NO: 746576 - DNA, 15 bp, Homo sapiens
ccttttaaagtcctc

SEQ ID NO: 746577 - DNA, 15 bp, Homo sapiens
cttttaaagtcctcc

SEQ ID NO: 746578 - DNA, 15 bp, Homo sapiens
ttttaaagtcctcca

SEQ ID NO: 746579 - DNA, 15 bp, Homo sapiens
tttaaagtcctccaa

SEQ ID NO: 746580 - DNA, 15 bp, Homo sapiens
ttaaagtcctccaag

SEQ ID NO: 746581 - DNA, 15 bp, Homo sapiens
taaagtcctccaagt

SEQ ID NO: 746582 - DNA, 15 bp, Homo sapiens
aaagtcctccaagtg

SEQ ID NO: 746583 - DNA, 15 bp, Homo sapiens
aagtcctccaagtgc

SEQ ID NO: 746584 - DNA, 15 bp, Homo sapiens
agtcctccaagtgcc

SEQ ID NO: 746585 - DNA, 15 bp, Homo sapiens
gtcctccaagtgcct

SEQ ID NO: 746586 - DNA, 15 bp, Homo sapiens
tcctccaagtgcctg

SEQ ID NO: 746587 - DNA, 15 bp, Homo sapiens
cctccaagtgcctgt

SEQ ID NO: 746588 - DNA, 15 bp, Homo sapiens
ctccaagtgcctgtt

SEQ ID NO: 746589 - DNA, 15 bp, Homo sapiens
tccaagtgcctgttg

SEQ ID NO: 746590 - DNA, 15 bp, Homo sapiens
ccaagtgcctgttga

SEQ ID NO: 746591 - DNA, 15 bp, Homo sapiens
caagtgcctgttgag

SEQ ID NO: 746592 - DNA, 15 bp, Homo sapiens
aagtgcctgttgagg

SEQ ID NO: 746593 - DNA, 15 bp, Homo sapiens
agtgcctgttgagga

SEQ ID NO: 746594 - DNA, 15 bp, Homo sapiens
gtgcctgttgaggaa

SEQ ID NO: 746595 - DNA, 15 bp, Homo sapiens
tgcctgttgaggaaa

SEQ ID NO: 746596 - DNA, 15 bp, Homo sapiens
gcctgttgaggaaaa

SEQ ID NO: 746597 - DNA, 15 bp, Homo sapiens
cctgttgaggaaaat

SEQ ID NO: 746598 - DNA, 15 bp, Homo sapiens
ctgttgaggaaaatt

SEQ ID NO: 746599 - DNA, 15 bp, Homo sapiens
tgttgaggaaaatta

SEQ ID NO: 746600 - DNA, 15 bp, Homo sapiens
gttgaggaaaattac

SEQ ID NO: 746601 - DNA, 15 bp, Homo sapiens
ttgaggaaaattacc

SEQ ID NO: 746602 - DNA, 15 bp, Homo sapiens
tgaggaaaattacct

SEQ ID NO: 746603 - DNA, 15 bp, Homo sapiens
gaggaaaattacctt

SEQ ID NO: 746604 - DNA, 15 bp, Homo sapiens
aggaaaattacctta

SEQ ID NO: 746605 - DNA, 15 bp, Homo sapiens
ggaaaattaccttac

SEQ ID NO: 746606 - DNA, 15 bp, Homo sapiens
gaaaattaccttacc

SEQ ID NO: 746607 - DNA, 15 bp, Homo sapiens
aaaattaccttacca

SEQ ID NO: 746608 - DNA, 15 bp, Homo sapiens
aaattaccttaccag

SEQ ID NO: 746609 - DNA, 15 bp, Homo sapiens
aattaccttaccaga

SEQ ID NO: 746610 - DNA, 15 bp, Homo sapiens
attaccttaccagaa

SEQ ID NO: 746611 - DNA, 15 bp, Homo sapiens
ttaccttaccagaat

SEQ ID NO: 746612 - DNA, 15 bp, Homo sapiens
taccttaccagaatc

SEQ ID NO: 746613 - DNA, 15 bp, Homo sapiens
accttaccagaatca

SEQ ID NO: 746614 - DNA, 15 bp, Homo sapiens
ccttaccagaatcac

SEQ ID NO: 746615 - DNA, 15 bp, Homo sapiens
cttaccagaatcacc

SEQ ID NO: 746616 - DNA, 15 bp, Homo sapiens
ttaccagaatcaccc

SEQ ID NO: 746617 - DNA, 15 bp, Homo sapiens
taccagaatcacccc

SEQ ID NO: 746618 - DNA, 15 bp, Homo sapiens
accagaatcaccccg

SEQ ID NO: 746619 - DNA, 15 bp, Homo sapiens
ccagaatcaccccgg

SEQ ID NO: 746620 - DNA, 15 bp, Homo sapiens
cagaatcaccccggc

SEQ ID NO: 746621 - DNA, 15 bp, Homo sapiens
agaatcaccccggcc

SEQ ID NO: 746622 - DNA, 15 bp, Homo sapiens
gaatcaccccggccc

SEQ ID NO: 746623 - DNA, 15 bp, Homo sapiens
aatcaccccggcccc

SEQ ID NO: 746624 - DNA, 15 bp, Homo sapiens
atcaccccggccccc

SEQ ID NO: 746625 - DNA, 15 bp, Homo sapiens
tcaccccggccccca

SEQ ID NO: 746626 - DNA, 15 bp, Homo sapiens
caccccggcccccag

SEQ ID NO: 746627 - DNA, 15 bp, Homo sapiens
accccggcccccagg

SEQ ID NO: 746628 - DNA, 15 bp, Homo sapiens
ccccggcccccaggc

SEQ ID NO: 746629 - DNA, 15 bp, Homo sapiens
cccggcccccaggct

SEQ ID NO: 746630 - DNA, 15 bp, Homo sapiens
ccggcccccaggctg

SEQ ID NO: 746631 - DNA, 15 bp, Homo sapiens
cggcccccaggctgc

SEQ ID NO: 746632 - DNA, 15 bp, Homo sapiens
ggcccccaggctgcc

SEQ ID NO: 746633 - DNA, 15 bp, Homo sapiens
gcccccaggctgcct

SEQ ID NO: 746634 - DNA, 15 bp, Homo sapiens
cccccaggctgcctg

SEQ ID NO: 746635 - DNA, 15 bp, Homo sapiens
ccccaggctgcctgt

SEQ ID NO: 746636 - DNA, 15 bp, Homo sapiens
cccaggctgcctgtg

SEQ ID NO: 746637 - DNA, 15 bp, Homo sapiens
ccaggctgcctgtgg

SEQ ID NO: 746638 - DNA, 15 bp, Homo sapiens
caggctgcctgtggg

SEQ ID NO: 746639 - DNA, 15 bp, Homo sapiens
aggctgcctgtggga

SEQ ID NO: 746640 - DNA, 15 bp, Homo sapiens
ggctgcctgtgggaa

SEQ ID NO: 746641 - DNA, 15 bp, Homo sapiens
gctgcctgtgggaag

SEQ ID NO: 746642 - DNA, 15 bp, Homo sapiens
ctgcctgtgggaaga

SEQ ID NO: 746643 - DNA, 15 bp, Homo sapiens
tgcctgtgggaagac

SEQ ID NO: 746644 - DNA, 15 bp, Homo sapiens
gcctgtgggaagact

SEQ ID NO: 746645 - DNA, 15 bp, Homo sapiens
cctgtgggaagactg

SEQ ID NO: 746646 - DNA, 15 bp, Homo sapiens
ctgtgggaagactgt

SEQ ID NO: 746647 - DNA, 15 bp, Homo sapiens
tgtgggaagactgtg

SEQ ID NO: 746648 - DNA, 15 bp, Homo sapiens
gtgggaagactgtgt

SEQ ID NO: 746649 - DNA, 15 bp, Homo sapiens
tgggaagactgtgta

SEQ ID NO: 746650 - DNA, 15 bp, Homo sapiens
gggaagactgtgtag

SEQ ID NO: 746651 - DNA, 15 bp, Homo sapiens
ggaagactgtgtagg

SEQ ID NO: 746652 - DNA, 15 bp, Homo sapiens
gaagactgtgtaggg

SEQ ID NO: 746653 - DNA, 15 bp, Homo sapiens
aagactgtgtaggga

SEQ ID NO: 746654 - DNA, 15 bp, Homo sapiens
agactgtgtagggaa

SEQ ID NO: 746655 - DNA, 15 bp, Homo sapiens
gactgtgtagggaag

SEQ ID NO: 746656 - DNA, 15 bp, Homo sapiens
actgtgtagggaagc

SEQ ID NO: 746657 - DNA, 15 bp, Homo sapiens
ctgtgtagggaagcg

SEQ ID NO: 746658 - DNA, 15 bp, Homo sapiens
tgtgtagggaagcgg

SEQ ID NO: 746659 - DNA, 15 bp, Homo sapiens
gtgtagggaagcggg

SEQ ID NO: 746660 - DNA, 15 bp, Homo sapiens
tgtagggaagcgggg

SEQ ID NO: 746661 - DNA, 15 bp, Homo sapiens
gtagggaagcggggc

SEQ ID NO: 746662 - DNA, 15 bp, Homo sapiens
tagggaagcggggcg

SEQ ID NO: 746663 - DNA, 15 bp, Homo sapiens
agggaagcggggcgg

SEQ ID NO: 746664 - DNA, 15 bp, Homo sapiens
gggaagcggggcggg

SEQ ID NO: 746665 - DNA, 15 bp, Homo sapiens
ggaagcggggcgggg

SEQ ID NO: 746666 - DNA, 15 bp, Homo sapiens
gaagcggggcggggc

SEQ ID NO: 746667 - DNA, 15 bp, Homo sapiens
aagcggggcggggcc

SEQ ID NO: 746668 - DNA, 15 bp, Homo sapiens
agcggggcggggcct

SEQ ID NO: 746669 - DNA, 15 bp, Homo sapiens
gcggggcggggcctg

SEQ ID NO: 746670 - DNA, 15 bp, Homo sapiens
cggggcggggcctgc

SEQ ID NO: 746671 - DNA, 15 bp, Homo sapiens
ggggcggggcctgca

SEQ ID NO: 746672 - DNA, 15 bp, Homo sapiens
gggcggggcctgcag

SEQ ID NO: 746673 - DNA, 15 bp, Homo sapiens
ggcggggcctgcagg

SEQ ID NO: 746674 - DNA, 15 bp, Homo sapiens
gcggggcctgcaggg

SEQ ID NO: 746675 - DNA, 15 bp, Homo sapiens
cggggcctgcagggg

SEQ ID NO: 746676 - DNA, 15 bp, Homo sapiens
ggggcctgcagggga

SEQ ID NO: 746677 - DNA, 15 bp, Homo sapiens
gggcctgcaggggag

SEQ ID NO: 746678 - DNA, 15 bp, Homo sapiens
ggcctgcaggggagg

SEQ ID NO: 746679 - DNA, 15 bp, Homo sapiens
gcctgcaggggaggg

SEQ ID NO: 746680 - DNA, 15 bp, Homo sapiens
cctgcaggggaggga

SEQ ID NO: 746681 - DNA, 15 bp, Homo sapiens
ctgcaggggagggat

SEQ ID NO: 746682 - DNA, 15 bp, Homo sapiens
tgcaggggagggatg

SEQ ID NO: 746683 - DNA, 15 bp, Homo sapiens
gcaggggagggatga

SEQ ID NO: 746684 - DNA, 15 bp, Homo sapiens
caggggagggatgag

SEQ ID NO: 746685 - DNA, 15 bp, Homo sapiens
aggggagggatgagg

SEQ ID NO: 746686 - DNA, 15 bp, Homo sapiens
ggggagggatgaggg

SEQ ID NO: 746687 - DNA, 15 bp, Homo sapiens
gggagggatgagggc

SEQ ID NO: 746688 - DNA, 15 bp, Homo sapiens
ggagggatgagggcg

SEQ ID NO: 746689 - DNA, 15 bp, Homo sapiens
gagggatgagggcgg

SEQ ID NO: 746690 - DNA, 15 bp, Homo sapiens
agggatgagggcgga

SEQ ID NO: 746691 - DNA, 15 bp, Homo sapiens
gggatgagggcggag

SEQ ID NO: 746692 - DNA, 15 bp, Homo sapiens
ggatgagggcggagc

SEQ ID NO: 746693 - DNA, 15 bp, Homo sapiens
gatgagggcggagca

SEQ ID NO: 746694 - DNA, 15 bp, Homo sapiens
atgagggcggagcag

SEQ ID NO: 746695 - DNA, 15 bp, Homo sapiens
tgagggcggagcagg

SEQ ID NO: 746696 - DNA, 15 bp, Homo sapiens
gagggcggagcaggg

SEQ ID NO: 746697 - DNA, 15 bp, Homo sapiens
agggcggagcagggc

SEQ ID NO: 746698 - DNA, 15 bp, Homo sapiens
gggcggagcagggcg

SEQ ID NO: 746699 - DNA, 15 bp, Homo sapiens
ggcggagcagggcgc

SEQ ID NO: 746700 - DNA, 15 bp, Homo sapiens
gcggagcagggcgcc

SEQ ID NO: 746701 - DNA, 15 bp, Homo sapiens
cggagcagggcgccc

SEQ ID NO: 746702 - DNA, 15 bp, Homo sapiens
ggagcagggcgccct

SEQ ID NO: 746703 - DNA, 15 bp, Homo sapiens
gagcagggcgccctg

SEQ ID NO: 746704 - DNA, 15 bp, Homo sapiens
agcagggcgccctgc

SEQ ID NO: 746705 - DNA, 15 bp, Homo sapiens
gcagggcgccctgca

SEQ ID NO: 746706 - DNA, 15 bp, Homo sapiens
cagggcgccctgcag

SEQ ID NO: 746707 - DNA, 15 bp, Homo sapiens
agggcgccctgcagg

SEQ ID NO: 746708 - DNA, 15 bp, Homo sapiens
gggcgccctgcaggc

SEQ ID NO: 746709 - DNA, 15 bp, Homo sapiens
ggcgccctgcaggct

SEQ ID NO: 746710 - DNA, 15 bp, Homo sapiens
gcgccctgcaggctc

SEQ ID NO: 746711 - DNA, 15 bp, Homo sapiens
cgccctgcaggctcc

SEQ ID NO: 746712 - DNA, 15 bp, Homo sapiens
gccctgcaggctcca

SEQ ID NO: 746713 - DNA, 15 bp, Homo sapiens
ccctgcaggctccag

SEQ ID NO: 746714 - DNA, 15 bp, Homo sapiens
cctgcaggctccaga

SEQ ID NO: 746715 - DNA, 15 bp, Homo sapiens
ctgcaggctccagat

SEQ ID NO: 746716 - DNA, 15 bp, Homo sapiens
tgcaggctccagatg

SEQ ID NO: 746717 - DNA, 15 bp, Homo sapiens
gcaggctccagatgc

SEQ ID NO: 746718 - DNA, 15 bp, Homo sapiens
caggctccagatgct

SEQ ID NO: 746719 - DNA, 15 bp, Homo sapiens
aggctccagatgctt

SEQ ID NO: 746720 - DNA, 15 bp, Homo sapiens
ggctccagatgcttc

SEQ ID NO: 746721 - DNA, 15 bp, Homo sapiens
gctccagatgcttct

SEQ ID NO: 746722 - DNA, 15 bp, Homo sapiens
ctccagatgcttctg

SEQ ID NO: 746723 - DNA, 15 bp, Homo sapiens
tccagatgcttctgt

SEQ ID NO: 746724 - DNA, 15 bp, Homo sapiens
ccagatgcttctgtg

SEQ ID NO: 746725 - DNA, 15 bp, Homo sapiens
cagatgcttctgtgg

SEQ ID NO: 746726 - DNA, 15 bp, Homo sapiens
agatgcttctgtgga

SEQ ID NO: 746727 - DNA, 15 bp, Homo sapiens
gatgcttctgtggaa

SEQ ID NO: 746728 - DNA, 15 bp, Homo sapiens
atgcttctgtggaag

SEQ ID NO: 746729 - DNA, 15 bp, Homo sapiens
tgcttctgtggaagg

SEQ ID NO: 746730 - DNA, 15 bp, Homo sapiens
gcttctgtggaagga

SEQ ID NO: 746731 - DNA, 15 bp, Homo sapiens
cttctgtggaaggag

SEQ ID NO: 746732 - DNA, 15 bp, Homo sapiens
ttctgtggaaggagg

SEQ ID NO: 746733 - DNA, 15 bp, Homo sapiens
tctgtggaaggaggg

SEQ ID NO: 746734 - DNA, 15 bp, Homo sapiens
ctgtggaaggagggg

SEQ ID NO: 746735 - DNA, 15 bp, Homo sapiens
tgtggaaggagggga

SEQ ID NO: 746736 - DNA, 15 bp, Homo sapiens
gtggaaggaggggag

SEQ ID NO: 746737 - DNA, 15 bp, Homo sapiens
tggaaggaggggaga

SEQ ID NO: 746738 - DNA, 15 bp, Homo sapiens
ggaaggaggggagag

SEQ ID NO: 746739 - DNA, 15 bp, Homo sapiens
gaaggaggggagaga

SEQ ID NO: 746740 - DNA, 15 bp, Homo sapiens
aaggaggggagagag

SEQ ID NO: 746741 - DNA, 15 bp, Homo sapiens
aggaggggagagagg

SEQ ID NO: 746742 - DNA, 15 bp, Homo sapiens
ggaggggagagaggg

SEQ ID NO: 746743 - DNA, 15 bp, Homo sapiens
gaggggagagagggg

SEQ ID NO: 746744 - DNA, 15 bp, Homo sapiens
aggggagagaggggg

SEQ ID NO: 746745 - DNA, 15 bp, Homo sapiens
ggggagagagggggc

SEQ ID NO: 746746 - DNA, 15 bp, Homo sapiens
gggagagagggggca

SEQ ID NO: 746747 - DNA, 15 bp, Homo sapiens
ggagagagggggcac

SEQ ID NO: 746748 - DNA, 15 bp, Homo sapiens
gagagagggggcacc

SEQ ID NO: 746749 - DNA, 15 bp, Homo sapiens
agagagggggcaccc

SEQ ID NO: 746750 - DNA, 15 bp, Homo sapiens
gagagggggcacccc

SEQ ID NO: 746751 - DNA, 15 bp, Homo sapiens
agagggggcacccct

SEQ ID NO: 746752 - DNA, 15 bp, Homo sapiens
gagggggcacccctg

SEQ ID NO: 746753 - DNA, 15 bp, Homo sapiens
agggggcacccctgg

SEQ ID NO: 746754 - DNA, 15 bp, Homo sapiens
gggggcacccctggg

SEQ ID NO: 746755 - DNA, 15 bp, Homo sapiens
ggggcacccctgggg

SEQ ID NO: 746756 - DNA, 15 bp, Homo sapiens
gggcacccctgggga

SEQ ID NO: 746757 - DNA, 15 bp, Homo sapiens
ggcacccctggggat

SEQ ID NO: 746758 - DNA, 15 bp, Homo sapiens
gcacccctggggatg

SEQ ID NO: 746759 - DNA, 15 bp, Homo sapiens
cacccctggggatgg

SEQ ID NO: 746760 - DNA, 15 bp, Homo sapiens
acccctggggatggg

SEQ ID NO: 746761 - DNA, 15 bp, Homo sapiens
cccctggggatgggg

SEQ ID NO: 746762 - DNA, 15 bp, Homo sapiens
ccctggggatggggg

SEQ ID NO: 746763 - DNA, 15 bp, Homo sapiens
cctggggatgggggt

SEQ ID NO: 746764 - DNA, 15 bp, Homo sapiens
ctggggatgggggtg

SEQ ID NO: 746765 - DNA, 15 bp, Homo sapiens
tggggatgggggtgc

SEQ ID NO: 746766 - DNA, 15 bp, Homo sapiens
ggggatgggggtgcc

SEQ ID NO: 746767 - DNA, 15 bp, Homo sapiens
gggatgggggtgccg

SEQ ID NO: 746768 - DNA, 15 bp, Homo sapiens
ggatgggggtgccgg

SEQ ID NO: 746769 - DNA, 15 bp, Homo sapiens
gatgggggtgccggc

SEQ ID NO: 746770 - DNA, 15 bp, Homo sapiens
atgggggtgccggca

SEQ ID NO: 746771 - DNA, 15 bp, Homo sapiens
tgggggtgccggcag

SEQ ID NO: 746772 - DNA, 15 bp, Homo sapiens
gggggtgccggcaga

SEQ ID NO: 746773 - DNA, 15 bp, Homo sapiens
ggggtgccggcagag

SEQ ID NO: 746774 - DNA, 15 bp, Homo sapiens
gggtgccggcagaga

SEQ ID NO: 746775 - DNA, 15 bp, Homo sapiens
ggtgccggcagagaa

SEQ ID NO: 746776 - DNA, 15 bp, Homo sapiens
gtgccggcagagaag

SEQ ID NO: 746777 - DNA, 15 bp, Homo sapiens
tgccggcagagaagg

SEQ ID NO: 746778 - DNA, 15 bp, Homo sapiens
gccggcagagaaggg

SEQ ID NO: 746779 - DNA, 15 bp, Homo sapiens
ccggcagagaagggg

SEQ ID NO: 746780 - DNA, 15 bp, Homo sapiens
cggcagagaagggga

SEQ ID NO: 746781 - DNA, 15 bp, Homo sapiens
ggcagagaaggggag

SEQ ID NO: 746782 - DNA, 15 bp, Homo sapiens
gcagagaaggggaga

SEQ ID NO: 746783 - DNA, 15 bp, Homo sapiens
cagagaaggggagaa

SEQ ID NO: 746784 - DNA, 15 bp, Homo sapiens
agagaaggggagaag

SEQ ID NO: 746785 - DNA, 15 bp, Homo sapiens
gagaaggggagaagg

SEQ ID NO: 746786 - DNA, 15 bp, Homo sapiens
agaaggggagaaggg

SEQ ID NO: 746787 - DNA, 15 bp, Homo sapiens
gaaggggagaagggg

SEQ ID NO: 746788 - DNA, 15 bp, Homo sapiens
aaggggagaaggggg

SEQ ID NO: 746789 - DNA, 15 bp, Homo sapiens
aggggagaaggggga

SEQ ID NO: 746790 - DNA, 15 bp, Homo sapiens
ggggagaagggggac

SEQ ID NO: 746791 - DNA, 15 bp, Homo sapiens
gggagaagggggacg

SEQ ID NO: 746792 - DNA, 15 bp, Homo sapiens
ggagaagggggacgc

SEQ ID NO: 746793 - DNA, 15 bp, Homo sapiens
gagaagggggacgca

SEQ ID NO: 746794 - DNA, 15 bp, Homo sapiens
agaagggggacgcat

SEQ ID NO: 746795 - DNA, 15 bp, Homo sapiens
gaagggggacgcatc

SEQ ID NO: 746796 - DNA, 15 bp, Homo sapiens
aagggggacgcatct

SEQ ID NO: 746797 - DNA, 15 bp, Homo sapiens
agggggacgcatcta

SEQ ID NO: 746798 - DNA, 15 bp, Homo sapiens
gggggacgcatctat

SEQ ID NO: 746799 - DNA, 15 bp, Homo sapiens
ggggacgcatctatt

SEQ ID NO: 746800 - DNA, 15 bp, Homo sapiens
gggacgcatctattt

SEQ ID NO: 746801 - DNA, 15 bp, Homo sapiens
ggacgcatctatttg

SEQ ID NO: 746802 - DNA, 15 bp, Homo sapiens
gacgcatctatttga

SEQ ID NO: 746803 - DNA, 15 bp, Homo sapiens
acgcatctatttgag

SEQ ID NO: 746804 - DNA, 15 bp, Homo sapiens
cgcatctatttgaga

SEQ ID NO: 746805 - DNA, 15 bp, Homo sapiens
gcatctatttgagac

SEQ ID NO: 746806 - DNA, 15 bp, Homo sapiens
catctatttgagaca

SEQ ID NO: 746807 - DNA, 15 bp, Homo sapiens
atctatttgagacac

SEQ ID NO: 746808 - DNA, 15 bp, Homo sapiens
tctatttgagacaca

SEQ ID NO: 746809 - DNA, 15 bp, Homo sapiens
ctatttgagacacat

SEQ ID NO: 746810 - DNA, 15 bp, Homo sapiens
tatttgagacacata

SEQ ID NO: 746811 - DNA, 15 bp, Homo sapiens
atttgagacacataa

SEQ ID NO: 746812 - DNA, 15 bp, Homo sapiens
tttgagacacataat

SEQ ID NO: 746813 - DNA, 15 bp, Homo sapiens
ttgagacacataatc

SEQ ID NO: 746814 - DNA, 15 bp, Homo sapiens
tgagacacataatct

SEQ ID NO: 746815 - DNA, 15 bp, Homo sapiens
gagacacataatctt

SEQ ID NO: 746816 - DNA, 15 bp, Homo sapiens
agacacataatcttc

SEQ ID NO: 746817 - DNA, 15 bp, Homo sapiens
gacacataatcttct

SEQ ID NO: 746818 - DNA, 15 bp, Homo sapiens
acacataatcttctg

SEQ ID NO: 746819 - DNA, 15 bp, Homo sapiens
cacataatcttctgt

SEQ ID NO: 746820 - DNA, 15 bp, Homo sapiens
acataatcttctgtc

SEQ ID NO: 746821 - DNA, 15 bp, Homo sapiens
cataatcttctgtct

SEQ ID NO: 746822 - DNA, 15 bp, Homo sapiens
ataatcttctgtctg

SEQ ID NO: 746823 - DNA, 15 bp, Homo sapiens
taatcttctgtctgg

SEQ ID NO: 746824 - DNA, 15 bp, Homo sapiens
aatcttctgtctggg

SEQ ID NO: 746825 - DNA, 15 bp, Homo sapiens
atcttctgtctgggc

SEQ ID NO: 746826 - DNA, 15 bp, Homo sapiens
tcttctgtctgggct

SEQ ID NO: 746827 - DNA, 15 bp, Homo sapiens
cttctgtctgggctg

SEQ ID NO: 746828 - DNA, 15 bp, Homo sapiens
ttctgtctgggctgg

SEQ ID NO: 746829 - DNA, 15 bp, Homo sapiens
tctgtctgggctgga

SEQ ID NO: 746830 - DNA, 15 bp, Homo sapiens
ctgtctgggctggag

SEQ ID NO: 746831 - DNA, 15 bp, Homo sapiens
tgtctgggctggagg

SEQ ID NO: 746832 - DNA, 15 bp, Homo sapiens
gtctgggctggagga

SEQ ID NO: 746833 - DNA, 15 bp, Homo sapiens
tctgggctggaggaa

SEQ ID NO: 746834 - DNA, 15 bp, Homo sapiens
ctgggctggaggaag

SEQ ID NO: 746835 - DNA, 15 bp, Homo sapiens
tgggctggaggaagc

SEQ ID NO: 746836 - DNA, 15 bp, Homo sapiens
gggctggaggaagct

SEQ ID NO: 746837 - DNA, 15 bp, Homo sapiens
ggctggaggaagctt

SEQ ID NO: 746838 - DNA, 15 bp, Homo sapiens
gctggaggaagcttt

SEQ ID NO: 746839 - DNA, 15 bp, Homo sapiens
ctggaggaagctttg

SEQ ID NO: 746840 - DNA, 15 bp, Homo sapiens
tggaggaagctttgt

SEQ ID NO: 746841 - DNA, 15 bp, Homo sapiens
ggaggaagctttgtt

SEQ ID NO: 746842 - DNA, 15 bp, Homo sapiens
gaggaagctttgtta

SEQ ID NO: 746843 - DNA, 15 bp, Homo sapiens
aggaagctttgttaa

SEQ ID NO: 746844 - DNA, 15 bp, Homo sapiens
ggaagctttgttaag

SEQ ID NO: 746845 - DNA, 15 bp, Homo sapiens
gaagctttgttaagg

SEQ ID NO: 746846 - DNA, 15 bp, Homo sapiens
aagctttgttaaggt

SEQ ID NO: 746847 - DNA, 15 bp, Homo sapiens
agctttgttaaggta

SEQ ID NO: 746848 - DNA, 15 bp, Homo sapiens
gctttgttaaggtag

SEQ ID NO: 746849 - DNA, 15 bp, Homo sapiens
ctttgttaaggtagc

SEQ ID NO: 746850 - DNA, 15 bp, Homo sapiens
tttgttaaggtagcc

SEQ ID NO: 746851 - DNA, 15 bp, Homo sapiens
ttgttaaggtagccc

SEQ ID NO: 746852 - DNA, 15 bp, Homo sapiens
tgttaaggtagcccg

SEQ ID NO: 746853 - DNA, 15 bp, Homo sapiens
gttaaggtagcccgg

SEQ ID NO: 746854 - DNA, 15 bp, Homo sapiens
ttaaggtagcccggg

SEQ ID NO: 746855 - DNA, 15 bp, Homo sapiens
taaggtagcccgggt

SEQ ID NO: 746856 - DNA, 15 bp, Homo sapiens
aaggtagcccgggtt

SEQ ID NO: 746857 - DNA, 15 bp, Homo sapiens
aggtagcccgggtta

SEQ ID NO: 746858 - DNA, 15 bp, Homo sapiens
ggtagcccgggttaa

SEQ ID NO: 746859 - DNA, 15 bp, Homo sapiens
gtagcccgggttaat

SEQ ID NO: 746860 - DNA, 15 bp, Homo sapiens
tagcccgggttaata

SEQ ID NO: 746861 - DNA, 15 bp, Homo sapiens
agcccgggttaatac

SEQ ID NO: 746862 - DNA, 15 bp, Homo sapiens
gcccgggttaatacc

SEQ ID NO: 746863 - DNA, 15 bp, Homo sapiens
cccgggttaataccg

SEQ ID NO: 746864 - DNA, 15 bp, Homo sapiens
ccgggttaataccgg

SEQ ID NO: 746865 - DNA, 15 bp, Homo sapiens
cgggttaataccggt

SEQ ID NO: 746866 - DNA, 15 bp, Homo sapiens
gggttaataccggtc

SEQ ID NO: 746867 - DNA, 15 bp, Homo sapiens
ggttaataccggtct

SEQ ID NO: 746868 - DNA, 15 bp, Homo sapiens
gttaataccggtctg

SEQ ID NO: 746869 - DNA, 15 bp, Homo sapiens
ttaataccggtctgc

SEQ ID NO: 746870 - DNA, 15 bp, Homo sapiens
taataccggtctgca

SEQ ID NO: 746871 - DNA, 15 bp, Homo sapiens
aataccggtctgcat

SEQ ID NO: 746872 - DNA, 15 bp, Homo sapiens
ataccggtctgcatg

SEQ ID NO: 746873 - DNA, 15 bp, Homo sapiens
taccggtctgcatgt

SEQ ID NO: 746874 - DNA, 15 bp, Homo sapiens
accggtctgcatgtt

SEQ ID NO: 746875 - DNA, 15 bp, Homo sapiens
ccggtctgcatgttg

SEQ ID NO: 746876 - DNA, 15 bp, Homo sapiens
cggtctgcatgttgt

SEQ ID NO: 746877 - DNA, 15 bp, Homo sapiens
ggtctgcatgttgtg

SEQ ID NO: 746878 - DNA, 15 bp, Homo sapiens
gtctgcatgttgtga

SEQ ID NO: 746879 - DNA, 15 bp, Homo sapiens
tctgcatgttgtgat

SEQ ID NO: 746880 - DNA, 15 bp, Homo sapiens
ctgcatgttgtgatt

SEQ ID NO: 746881 - DNA, 15 bp, Homo sapiens
tgcatgttgtgattt

SEQ ID NO: 746882 - DNA, 15 bp, Homo sapiens
gcatgttgtgatttg

SEQ ID NO: 746883 - DNA, 15 bp, Homo sapiens
catgttgtgatttgg

SEQ ID NO: 746884 - DNA, 15 bp, Homo sapiens
atgttgtgatttggc

SEQ ID NO: 746885 - DNA, 15 bp, Homo sapiens
tgttgtgatttggca

SEQ ID NO: 746886 - DNA, 15 bp, Homo sapiens
gttgtgatttggcat

SEQ ID NO: 746887 - DNA, 15 bp, Homo sapiens
ttgtgatttggcatt

SEQ ID NO: 746888 - DNA, 15 bp, Homo sapiens
tgtgatttggcattt

SEQ ID NO: 746889 - DNA, 15 bp, Homo sapiens
gtgatttggcatttt

SEQ ID NO: 746890 - DNA, 15 bp, Homo sapiens
tgatttggcattttg

SEQ ID NO: 746891 - DNA, 15 bp, Homo sapiens
gatttggcattttga

SEQ ID NO: 746892 - DNA, 15 bp, Homo sapiens
atttggcattttgac

SEQ ID NO: 746893 - DNA, 15 bp, Homo sapiens
tttggcattttgaca

SEQ ID NO: 746894 - DNA, 15 bp, Homo sapiens
ttggcattttgacat

SEQ ID NO: 746895 - DNA, 15 bp, Homo sapiens
tggcattttgacatg

SEQ ID NO: 746896 - DNA, 15 bp, Homo sapiens
ggcattttgacatga

SEQ ID NO: 746897 - DNA, 15 bp, Homo sapiens
gcattttgacatgaa

SEQ ID NO: 746898 - DNA, 15 bp, Homo sapiens
cattttgacatgaat

SEQ ID NO: 746899 - DNA, 15 bp, Homo sapiens
attttgacatgaatt

SEQ ID NO: 746900 - DNA, 15 bp, Homo sapiens
ttttgacatgaattc

SEQ ID NO: 746901 - DNA, 15 bp, Homo sapiens
tttgacatgaattca

SEQ ID NO: 746902 - DNA, 15 bp, Homo sapiens
ttgacatgaattcac

SEQ ID NO: 746903 - DNA, 15 bp, Homo sapiens
tgacatgaattcacc

SEQ ID NO: 746904 - DNA, 15 bp, Homo sapiens
gacatgaattcaccc

SEQ ID NO: 746905 - DNA, 15 bp, Homo sapiens
acatgaattcaccct

SEQ ID NO: 746906 - DNA, 15 bp, Homo sapiens
catgaattcaccctt

SEQ ID NO: 746907 - DNA, 15 bp, Homo sapiens
atgaattcacccttt

SEQ ID NO: 746908 - DNA, 15 bp, Homo sapiens
tgaattcaccctttg

SEQ ID NO: 746909 - DNA, 15 bp, Homo sapiens
gaattcaccctttgt

SEQ ID NO: 746910 - DNA, 15 bp, Homo sapiens
aattcaccctttgtg

SEQ ID NO: 746911 - DNA, 15 bp, Homo sapiens
attcaccctttgtgt

SEQ ID NO: 746912 - DNA, 15 bp, Homo sapiens
ttcaccctttgtgta

SEQ ID NO: 746913 - DNA, 15 bp, Homo sapiens
tcaccctttgtgtac

SEQ ID NO: 746914 - DNA, 15 bp, Homo sapiens
caccctttgtgtaca

SEQ ID NO: 746915 - DNA, 15 bp, Homo sapiens
accctttgtgtacag

SEQ ID NO: 746916 - DNA, 15 bp, Homo sapiens
ccctttgtgtacagg

SEQ ID NO: 746917 - DNA, 15 bp, Homo sapiens
cctttgtgtacaggg

SEQ ID NO: 746918 - DNA, 15 bp, Homo sapiens
ctttgtgtacagggc

SEQ ID NO: 746919 - DNA, 15 bp, Homo sapiens
tttgtgtacagggct

SEQ ID NO: 746920 - DNA, 15 bp, Homo sapiens
ttgtgtacagggctg

SEQ ID NO: 746921 - DNA, 15 bp, Homo sapiens
tgtgtacagggctgc

SEQ ID NO: 746922 - DNA, 15 bp, Homo sapiens
gtgtacagggctgct

SEQ ID NO: 746923 - DNA, 15 bp, Homo sapiens
tgtacagggctgctg

SEQ ID NO: 746924 - DNA, 15 bp, Homo sapiens
gtacagggctgctgc

SEQ ID NO: 746925 - DNA, 15 bp, Homo sapiens
tacagggctgctgct

SEQ ID NO: 746926 - DNA, 15 bp, Homo sapiens
acagggctgctgctg

SEQ ID NO: 746927 - DNA, 15 bp, Homo sapiens
cagggctgctgctga

SEQ ID NO: 746928 - DNA, 15 bp, Homo sapiens
agggctgctgctgac

SEQ ID NO: 746929 - DNA, 15 bp, Homo sapiens
gggctgctgctgaca

SEQ ID NO: 746930 - DNA, 15 bp, Homo sapiens
ggctgctgctgacac

SEQ ID NO: 746931 - DNA, 15 bp, Homo sapiens
gctgctgctgacaca

SEQ ID NO: 746932 - DNA, 15 bp, Homo sapiens
ctgctgctgacacac

SEQ ID NO: 746933 - DNA, 15 bp, Homo sapiens
tgctgctgacacact

SEQ ID NO: 746934 - DNA, 15 bp, Homo sapiens
gctgctgacacactg

SEQ ID NO: 746935 - DNA, 15 bp, Homo sapiens
ctgctgacacactga

SEQ ID NO: 746936 - DNA, 15 bp, Homo sapiens
tgctgacacactgag

SEQ ID NO: 746937 - DNA, 15 bp, Homo sapiens
gctgacacactgaga

SEQ ID NO: 746938 - DNA, 15 bp, Homo sapiens
ctgacacactgagac

SEQ ID NO: 746939 - DNA, 15 bp, Homo sapiens
tgacacactgagact

SEQ ID NO: 746940 - DNA, 15 bp, Homo sapiens
gacacactgagactg

SEQ ID NO: 746941 - DNA, 15 bp, Homo sapiens
acacactgagactgt

SEQ ID NO: 746942 - DNA, 15 bp, Homo sapiens
cacactgagactgtt

SEQ ID NO: 746943 - DNA, 15 bp, Homo sapiens
acactgagactgttt

SEQ ID NO: 746944 - DNA, 15 bp, Homo sapiens
cactgagactgtttt

SEQ ID NO: 746945 - DNA, 15 bp, Homo sapiens
actgagactgttttc

SEQ ID NO: 746946 - DNA, 15 bp, Homo sapiens
ctgagactgttttcc

SEQ ID NO: 746947 - DNA, 15 bp, Homo sapiens
tgagactgttttcct

SEQ ID NO: 746948 - DNA, 15 bp, Homo sapiens
gagactgttttccta

SEQ ID NO: 746949 - DNA, 15 bp, Homo sapiens
agactgttttcctat

SEQ ID NO: 746950 - DNA, 15 bp, Homo sapiens
gactgttttcctatt

SEQ ID NO: 746951 - DNA, 15 bp, Homo sapiens
actgttttcctatta

SEQ ID NO: 746952 - DNA, 15 bp, Homo sapiens
ctgttttcctattag

SEQ ID NO: 746953 - DNA, 15 bp, Homo sapiens
tgttttcctattagg

SEQ ID NO: 746954 - DNA, 15 bp, Homo sapiens
gttttcctattagga

SEQ ID NO: 746955 - DNA, 15 bp, Homo sapiens
ttttcctattaggaa

SEQ ID NO: 746956 - DNA, 15 bp, Homo sapiens
tttcctattaggaat

SEQ ID NO: 746957 - DNA, 15 bp, Homo sapiens
ttcctattaggaata

SEQ ID NO: 746958 - DNA, 15 bp, Homo sapiens
tcctattaggaatat

SEQ ID NO: 746959 - DNA, 15 bp, Homo sapiens
cctattaggaatata

SEQ ID NO: 746960 - DNA, 15 bp, Homo sapiens
ctattaggaatatag

SEQ ID NO: 746961 - DNA, 15 bp, Homo sapiens
tattaggaatataga

SEQ ID NO: 746962 - DNA, 15 bp, Homo sapiens
attaggaatatagat

SEQ ID NO: 746963 - DNA, 15 bp, Homo sapiens
ttaggaatatagatg

SEQ ID NO: 746964 - DNA, 15 bp, Homo sapiens
taggaatatagatgt

SEQ ID NO: 746965 - DNA, 15 bp, Homo sapiens
aggaatatagatgtt

SEQ ID NO: 746966 - DNA, 15 bp, Homo sapiens
ggaatatagatgttt

SEQ ID NO: 746967 - DNA, 15 bp, Homo sapiens
gaatatagatgtttt

SEQ ID NO: 746968 - DNA, 15 bp, Homo sapiens
aatatagatgttttt

SEQ ID NO: 746969 - DNA, 15 bp, Homo sapiens
atatagatgtttttg

SEQ ID NO: 746970 - DNA, 15 bp, Homo sapiens
tatagatgtttttgt

SEQ ID NO: 746971 - DNA, 15 bp, Homo sapiens
atagatgtttttgtc

SEQ ID NO: 746972 - DNA, 15 bp, Homo sapiens
tagatgtttttgtcc

SEQ ID NO: 746973 - DNA, 15 bp, Homo sapiens
agatgtttttgtccc

SEQ ID NO: 746974 - DNA, 15 bp, Homo sapiens
gatgtttttgtccca

SEQ ID NO: 746975 - DNA, 15 bp, Homo sapiens
atgtttttgtcccaa

SEQ ID NO: 746976 - DNA, 15 bp, Homo sapiens
tgtttttgtcccaag

SEQ ID NO: 746977 - DNA, 15 bp, Homo sapiens
gtttttgtcccaagc

SEQ ID NO: 746978 - DNA, 15 bp, Homo sapiens
tttttgtcccaagcc

SEQ ID NO: 746979 - DNA, 15 bp, Homo sapiens
ttttgtcccaagcca

SEQ ID NO: 746980 - DNA, 15 bp, Homo sapiens
tttgtcccaagccac

SEQ ID NO: 746981 - DNA, 15 bp, Homo sapiens
ttgtcccaagccacc

SEQ ID NO: 746982 - DNA, 15 bp, Homo sapiens
tgtcccaagccaccc

SEQ ID NO: 746983 - DNA, 15 bp, Homo sapiens
gtcccaagccaccct

SEQ ID NO: 746984 - DNA, 15 bp, Homo sapiens
tcccaagccaccctc

SEQ ID NO: 746985 - DNA, 15 bp, Homo sapiens
cccaagccaccctca

SEQ ID NO: 746986 - DNA, 15 bp, Homo sapiens
ccaagccaccctcat

SEQ ID NO: 746987 - DNA, 15 bp, Homo sapiens
caagccaccctcatt

SEQ ID NO: 746988 - DNA, 15 bp, Homo sapiens
aagccaccctcattt

SEQ ID NO: 746989 - DNA, 15 bp, Homo sapiens
agccaccctcatttt

SEQ ID NO: 746990 - DNA, 15 bp, Homo sapiens
gccaccctcattttt

SEQ ID NO: 746991 - DNA, 15 bp, Homo sapiens
ccaccctcattttta

SEQ ID NO: 746992 - DNA, 15 bp, Homo sapiens
caccctcatttttat

SEQ ID NO: 746993 - DNA, 15 bp, Homo sapiens
accctcatttttatt

SEQ ID NO: 746994 - DNA, 15 bp, Homo sapiens
ccctcatttttattt

SEQ ID NO: 746995 - DNA, 15 bp, Homo sapiens
cctcatttttatttt

SEQ ID NO: 746996 - DNA, 15 bp, Homo sapiens
ctcatttttattttt

SEQ ID NO: 746997 - DNA, 15 bp, Homo sapiens
tcatttttattttta

SEQ ID NO: 746998 - DNA, 15 bp, Homo sapiens
catttttatttttac

SEQ ID NO: 746999 - DNA, 15 bp, Homo sapiens
atttttatttttacc

SEQ ID NO: 747000 - DNA, 15 bp, Homo sapiens
tttttatttttacca

SEQ ID NO: 747001 - DNA, 15 bp, Homo sapiens
ttttatttttaccag

SEQ ID NO: 747002 - DNA, 15 bp, Homo sapiens
tttatttttaccaga

SEQ ID NO: 747003 - DNA, 15 bp, Homo sapiens
ttatttttaccagat

SEQ ID NO: 747004 - DNA, 15 bp, Homo sapiens
tatttttaccagata

SEQ ID NO: 747005 - DNA, 15 bp, Homo sapiens
atttttaccagatag

SEQ ID NO: 747006 - DNA, 15 bp, Homo sapiens
tttttaccagatagg

SEQ ID NO: 747007 - DNA, 15 bp, Homo sapiens
ttttaccagataggt

SEQ ID NO: 747008 - DNA, 15 bp, Homo sapiens
tttaccagataggtt

SEQ ID NO: 747009 - DNA, 15 bp, Homo sapiens
ttaccagataggttc

SEQ ID NO: 747010 - DNA, 15 bp, Homo sapiens
taccagataggttcc

SEQ ID NO: 747011 - DNA, 15 bp, Homo sapiens
accagataggttcct

SEQ ID NO: 747012 - DNA, 15 bp, Homo sapiens
ccagataggttcctc

SEQ ID NO: 747013 - DNA, 15 bp, Homo sapiens
cagataggttcctca

SEQ ID NO: 747014 - DNA, 15 bp, Homo sapiens
agataggttcctcat

SEQ ID NO: 747015 - DNA, 15 bp, Homo sapiens
gataggttcctcatg

SEQ ID NO: 747016 - DNA, 15 bp, Homo sapiens
ataggttcctcatga

SEQ ID NO: 747017 - DNA, 15 bp, Homo sapiens
taggttcctcatgac

SEQ ID NO: 747018 - DNA, 15 bp, Homo sapiens
aggttcctcatgacc

SEQ ID NO: 747019 - DNA, 15 bp, Homo sapiens
ggttcctcatgacca

SEQ ID NO: 747020 - DNA, 15 bp, Homo sapiens
gttcctcatgaccac

SEQ ID NO: 747021 - DNA, 15 bp, Homo sapiens
ttcctcatgaccacg

SEQ ID NO: 747022 - DNA, 15 bp, Homo sapiens
tcctcatgaccacgg

SEQ ID NO: 747023 - DNA, 15 bp, Homo sapiens
cctcatgaccacggc

SEQ ID NO: 747024 - DNA, 15 bp, Homo sapiens
ctcatgaccacggca

SEQ ID NO: 747025 - DNA, 15 bp, Homo sapiens
tcatgaccacggcac

SEQ ID NO: 747026 - DNA, 15 bp, Homo sapiens
catgaccacggcact

SEQ ID NO: 747027 - DNA, 15 bp, Homo sapiens
atgaccacggcactg

SEQ ID NO: 747028 - DNA, 15 bp, Homo sapiens
tgaccacggcactga

SEQ ID NO: 747029 - DNA, 15 bp, Homo sapiens
gaccacggcactgat

SEQ ID NO: 747030 - DNA, 15 bp, Homo sapiens
accacggcactgatt

SEQ ID NO: 747031 - DNA, 15 bp, Homo sapiens
ccacggcactgattt

SEQ ID NO: 747032 - DNA, 15 bp, Homo sapiens
cacggcactgatttg

SEQ ID NO: 747033 - DNA, 15 bp, Homo sapiens
acggcactgatttga

SEQ ID NO: 747034 - DNA, 15 bp, Homo sapiens
cggcactgatttgag

SEQ ID NO: 747035 - DNA, 15 bp, Homo sapiens
ggcactgatttgaga

SEQ ID NO: 747036 - DNA, 15 bp, Homo sapiens
gcactgatttgagag

SEQ ID NO: 747037 - DNA, 15 bp, Homo sapiens
cactgatttgagagc

SEQ ID NO: 747038 - DNA, 15 bp, Homo sapiens
actgatttgagagct

SEQ ID NO: 747039 - DNA, 15 bp, Homo sapiens
ctgatttgagagctg

SEQ ID NO: 747040 - DNA, 15 bp, Homo sapiens
tgatttgagagctgg

SEQ ID NO: 747041 - DNA, 15 bp, Homo sapiens
gatttgagagctggg

SEQ ID NO: 747042 - DNA, 15 bp, Homo sapiens
atttgagagctgggt

SEQ ID NO: 747043 - DNA, 15 bp, Homo sapiens
tttgagagctgggtg

SEQ ID NO: 747044 - DNA, 15 bp, Homo sapiens
ttgagagctgggtga

SEQ ID NO: 747045 - DNA, 15 bp, Homo sapiens
tgagagctgggtgac

SEQ ID NO: 747046 - DNA, 15 bp, Homo sapiens
gagagctgggtgaca

SEQ ID NO: 747047 - DNA, 15 bp, Homo sapiens
agagctgggtgacag

SEQ ID NO: 747048 - DNA, 15 bp, Homo sapiens
gagctgggtgacagg

SEQ ID NO: 747049 - DNA, 15 bp, Homo sapiens
agctgggtgacaggc

SEQ ID NO: 747050 - DNA, 15 bp, Homo sapiens
gctgggtgacaggca

SEQ ID NO: 747051 - DNA, 15 bp, Homo sapiens
ctgggtgacaggcac

SEQ ID NO: 747052 - DNA, 15 bp, Homo sapiens
tgggtgacaggcacc

SEQ ID NO: 747053 - DNA, 15 bp, Homo sapiens
gggtgacaggcaccc

SEQ ID NO: 747054 - DNA, 15 bp, Homo sapiens
ggtgacaggcaccca

SEQ ID NO: 747055 - DNA, 15 bp, Homo sapiens
gtgacaggcacccag

SEQ ID NO: 747056 - DNA, 15 bp, Homo sapiens
tgacaggcacccaga

SEQ ID NO: 747057 - DNA, 15 bp, Homo sapiens
gacaggcacccagag

SEQ ID NO: 747058 - DNA, 15 bp, Homo sapiens
acaggcacccagaga

SEQ ID NO: 747059 - DNA, 15 bp, Homo sapiens
caggcacccagagac

SEQ ID NO: 747060 - DNA, 15 bp, Homo sapiens
aggcacccagagacc

SEQ ID NO: 747061 - DNA, 15 bp, Homo sapiens
ggcacccagagacca

SEQ ID NO: 747062 - DNA, 15 bp, Homo sapiens
gcacccagagaccat

SEQ ID NO: 747063 - DNA, 15 bp, Homo sapiens
cacccagagaccatc

SEQ ID NO: 747064 - DNA, 15 bp, Homo sapiens
acccagagaccatcg

SEQ ID NO: 747065 - DNA, 15 bp, Homo sapiens
cccagagaccatcgc

SEQ ID NO: 747066 - DNA, 15 bp, Homo sapiens
ccagagaccatcgca

SEQ ID NO: 747067 - DNA, 15 bp, Homo sapiens
cagagaccatcgcat

SEQ ID NO: 747068 - DNA, 15 bp, Homo sapiens
agagaccatcgcata

SEQ ID NO: 747069 - DNA, 15 bp, Homo sapiens
gagaccatcgcatag

SEQ ID NO: 747070 - DNA, 15 bp, Homo sapiens
agaccatcgcatagg

SEQ ID NO: 747071 - DNA, 15 bp, Homo sapiens
gaccatcgcataggt

SEQ ID NO: 747072 - DNA, 15 bp, Homo sapiens
accatcgcataggtg

SEQ ID NO: 747073 - DNA, 15 bp, Homo sapiens
ccatcgcataggtgg

SEQ ID NO: 747074 - DNA, 15 bp, Homo sapiens
catcgcataggtggt

SEQ ID NO: 747075 - DNA, 15 bp, Homo sapiens
atcgcataggtggtc

SEQ ID NO: 747076 - DNA, 15 bp, Homo sapiens
tcgcataggtggtcc

SEQ ID NO: 747077 - DNA, 15 bp, Homo sapiens
cgcataggtggtccc

SEQ ID NO: 747078 - DNA, 15 bp, Homo sapiens
gcataggtggtccca

SEQ ID NO: 747079 - DNA, 15 bp, Homo sapiens
cataggtggtcccag

SEQ ID NO: 747080 - DNA, 15 bp, Homo sapiens
ataggtggtcccaga

SEQ ID NO: 747081 - DNA, 15 bp, Homo sapiens
taggtggtcccagag

SEQ ID NO: 747082 - DNA, 15 bp, Homo sapiens
aggtggtcccagagt

SEQ ID NO: 747083 - DNA, 15 bp, Homo sapiens
ggtggtcccagagtc

SEQ ID NO: 747084 - DNA, 15 bp, Homo sapiens
gtggtcccagagtct

SEQ ID NO: 747085 - DNA, 15 bp, Homo sapiens
tggtcccagagtcta

SEQ ID NO: 747086 - DNA, 15 bp, Homo sapiens
ggtcccagagtctag

SEQ ID NO: 747087 - DNA, 15 bp, Homo sapiens
gtcccagagtctaga

SEQ ID NO: 747088 - DNA, 15 bp, Homo sapiens
tcccagagtctagac

SEQ ID NO: 747089 - DNA, 15 bp, Homo sapiens
cccagagtctagaca

SEQ ID NO: 747090 - DNA, 15 bp, Homo sapiens
ccagagtctagacac

SEQ ID NO: 747091 - DNA, 15 bp, Homo sapiens
cagagtctagacacc

SEQ ID NO: 747092 - DNA, 15 bp, Homo sapiens
agagtctagacacct

SEQ ID NO: 747093 - DNA, 15 bp, Homo sapiens
gagtctagacacctg

SEQ ID NO: 747094 - DNA, 15 bp, Homo sapiens
agtctagacacctgg

SEQ ID NO: 747095 - DNA, 15 bp, Homo sapiens
gtctagacacctggg

SEQ ID NO: 747096 - DNA, 15 bp, Homo sapiens
tctagacacctgggt

SEQ ID NO: 747097 - DNA, 15 bp, Homo sapiens
ctagacacctgggtt

SEQ ID NO: 747098 - DNA, 15 bp, Homo sapiens
tagacacctgggttc

SEQ ID NO: 747099 - DNA, 15 bp, Homo sapiens
agacacctgggttct

SEQ ID NO: 747100 - DNA, 15 bp, Homo sapiens
gacacctgggttcta

SEQ ID NO: 747101 - DNA, 15 bp, Homo sapiens
acacctgggttctag

SEQ ID NO: 747102 - DNA, 15 bp, Homo sapiens
cacctgggttctagc

SEQ ID NO: 747103 - DNA, 15 bp, Homo sapiens
acctgggttctagct

SEQ ID NO: 747104 - DNA, 15 bp, Homo sapiens
cctgggttctagctc

SEQ ID NO: 747105 - DNA, 15 bp, Homo sapiens
ctgggttctagctct

SEQ ID NO: 747106 - DNA, 15 bp, Homo sapiens
tgggttctagctctg

SEQ ID NO: 747107 - DNA, 15 bp, Homo sapiens
gggttctagctctgg

SEQ ID NO: 747108 - DNA, 15 bp, Homo sapiens
ggttctagctctggc

SEQ ID NO: 747109 - DNA, 15 bp, Homo sapiens
gttctagctctggct

SEQ ID NO: 747110 - DNA, 15 bp, Homo sapiens
ttctagctctggctg

SEQ ID NO: 747111 - DNA, 15 bp, Homo sapiens
tctagctctggctgt

SEQ ID NO: 747112 - DNA, 15 bp, Homo sapiens
ctagctctggctgtg

SEQ ID NO: 747113 - DNA, 15 bp, Homo sapiens
tagctctggctgtgt

SEQ ID NO: 747114 - DNA, 15 bp, Homo sapiens
agctctggctgtgtc

SEQ ID NO: 747115 - DNA, 15 bp, Homo sapiens
gctctggctgtgtca

SEQ ID NO: 747116 - DNA, 15 bp, Homo sapiens
ctctggctgtgtcat

SEQ ID NO: 747117 - DNA, 15 bp, Homo sapiens
tctggctgtgtcatc

SEQ ID NO: 747118 - DNA, 15 bp, Homo sapiens
ctggctgtgtcatcc

SEQ ID NO: 747119 - DNA, 15 bp, Homo sapiens
tggctgtgtcatccc

SEQ ID NO: 747120 - DNA, 15 bp, Homo sapiens
ggctgtgtcatcccc

SEQ ID NO: 747121 - DNA, 15 bp, Homo sapiens
gctgtgtcatcccct

SEQ ID NO: 747122 - DNA, 15 bp, Homo sapiens
ctgtgtcatcccctg

SEQ ID NO: 747123 - DNA, 15 bp, Homo sapiens
tgtgtcatcccctgg

SEQ ID NO: 747124 - DNA, 15 bp, Homo sapiens
gtgtcatcccctggt

SEQ ID NO: 747125 - DNA, 15 bp, Homo sapiens
tgtcatcccctggta

SEQ ID NO: 747126 - DNA, 15 bp, Homo sapiens
gtcatcccctggtac

SEQ ID NO: 747127 - DNA, 15 bp, Homo sapiens
tcatcccctggtact

SEQ ID NO: 747128 - DNA, 15 bp, Homo sapiens
catcccctggtactc

SEQ ID NO: 747129 - DNA, 15 bp, Homo sapiens
atcccctggtactcc

SEQ ID NO: 747130 - DNA, 15 bp, Homo sapiens
tcccctggtactcca

SEQ ID NO: 747131 - DNA, 15 bp, Homo sapiens
cccctggtactccag

SEQ ID NO: 747132 - DNA, 15 bp, Homo sapiens
ccctggtactccagc

SEQ ID NO: 747133 - DNA, 15 bp, Homo sapiens
cctggtactccagca

SEQ ID NO: 747134 - DNA, 15 bp, Homo sapiens
ctggtactccagcag

SEQ ID NO: 747135 - DNA, 15 bp, Homo sapiens
tggtactccagcagc

SEQ ID NO: 747136 - DNA, 15 bp, Homo sapiens
ggtactccagcagca

SEQ ID NO: 747137 - DNA, 15 bp, Homo sapiens
gtactccagcagcag

SEQ ID NO: 747138 - DNA, 15 bp, Homo sapiens
tactccagcagcagg

SEQ ID NO: 747139 - DNA, 15 bp, Homo sapiens
actccagcagcaggc

SEQ ID NO: 747140 - DNA, 15 bp, Homo sapiens
ctccagcagcaggct

SEQ ID NO: 747141 - DNA, 15 bp, Homo sapiens
tccagcagcaggctt

SEQ ID NO: 747142 - DNA, 15 bp, Homo sapiens
ccagcagcaggcttt

SEQ ID NO: 747143 - DNA, 15 bp, Homo sapiens
cagcagcaggctttc

SEQ ID NO: 747144 - DNA, 15 bp, Homo sapiens
agcagcaggctttct

SEQ ID NO: 747145 - DNA, 15 bp, Homo sapiens
gcagcaggctttctg

SEQ ID NO: 747146 - DNA, 15 bp, Homo sapiens
cagcaggctttctgg

SEQ ID NO: 747147 - DNA, 15 bp, Homo sapiens
agcaggctttctggg

SEQ ID NO: 747148 - DNA, 15 bp, Homo sapiens
gcaggctttctgggt

SEQ ID NO: 747149 - DNA, 15 bp, Homo sapiens
ttcctgccagcccct

SEQ ID NO: 747150 - DNA, 15 bp, Homo sapiens
tcctgccagcccctg

SEQ ID NO: 747151 - DNA, 15 bp, Homo sapiens
cctgccagcccctgc

SEQ ID NO: 747152 - DNA, 15 bp, Homo sapiens
ctgccagcccctgcc

SEQ ID NO: 747153 - DNA, 15 bp, Homo sapiens
tgccagcccctgcca

SEQ ID NO: 747154 - DNA, 15 bp, Homo sapiens
gccagcccctgccat

SEQ ID NO: 747155 - DNA, 15 bp, Homo sapiens
ccagcccctgccatt

SEQ ID NO: 747156 - DNA, 15 bp, Homo sapiens
cagcccctgccattg

SEQ ID NO: 747157 - DNA, 15 bp, Homo sapiens
agcccctgccattgt

SEQ ID NO: 747158 - DNA, 15 bp, Homo sapiens
gcccctgccattgta

SEQ ID NO: 747159 - DNA, 15 bp, Homo sapiens
cccctgccattgtag

SEQ ID NO: 747160 - DNA, 15 bp, Homo sapiens
ccctgccattgtagc

SEQ ID NO: 747161 - DNA, 15 bp, Homo sapiens
cctgccattgtagcg

SEQ ID NO: 747162 - DNA, 15 bp, Homo sapiens
ctgccattgtagcgt

SEQ ID NO: 747163 - DNA, 15 bp, Homo sapiens
tgccattgtagcgtc

SEQ ID NO: 747164 - DNA, 15 bp, Homo sapiens
gccattgtagcgtct

SEQ ID NO: 747165 - DNA, 15 bp, Homo sapiens
ccattgtagcgtctt

SEQ ID NO: 747166 - DNA, 15 bp, Homo sapiens
cattgtagcgtcttt

SEQ ID NO: 747167 - DNA, 15 bp, Homo sapiens
attgtagcgtctttc

SEQ ID NO: 747168 - DNA, 15 bp, Homo sapiens
ttgtagcgtctttct

SEQ ID NO: 747169 - DNA, 15 bp, Homo sapiens
tgtagcgtctttctt

SEQ ID NO: 747170 - DNA, 15 bp, Homo sapiens
gtagcgtctttcttt

SEQ ID NO: 747171 - DNA, 15 bp, Homo sapiens
tagcgtctttctttt

SEQ ID NO: 747172 - DNA, 15 bp, Homo sapiens
agcgtctttcttttt

SEQ ID NO: 747173 - DNA, 15 bp, Homo sapiens
gcgtctttctttttt

SEQ ID NO: 747174 - DNA, 15 bp, Homo sapiens
cgtctttcttttttg

SEQ ID NO: 747175 - DNA, 15 bp, Homo sapiens
gtctttcttttttgg

SEQ ID NO: 747176 - DNA, 15 bp, Homo sapiens
tctttcttttttggc

SEQ ID NO: 747177 - DNA, 15 bp, Homo sapiens
ctttcttttttggcc

SEQ ID NO: 747178 - DNA, 15 bp, Homo sapiens
tttcttttttggcca

SEQ ID NO: 747179 - DNA, 15 bp, Homo sapiens
ttcttttttggccat

SEQ ID NO: 747180 - DNA, 15 bp, Homo sapiens
tcttttttggccatc

SEQ ID NO: 747181 - DNA, 15 bp, Homo sapiens
cttttttggccatct

SEQ ID NO: 747182 - DNA, 15 bp, Homo sapiens
ttttttggccatctg

SEQ ID NO: 747183 - DNA, 15 bp, Homo sapiens
tttttggccatctgc

SEQ ID NO: 747184 - DNA, 15 bp, Homo sapiens
ttttggccatctgct

SEQ ID NO: 747185 - DNA, 15 bp, Homo sapiens
tttggccatctgctc

SEQ ID NO: 747186 - DNA, 15 bp, Homo sapiens
ttggccatctgctcc

SEQ ID NO: 747187 - DNA, 15 bp, Homo sapiens
tggccatctgctcct

SEQ ID NO: 747188 - DNA, 15 bp, Homo sapiens
ggccatctgctcctg

SEQ ID NO: 747189 - DNA, 15 bp, Homo sapiens
gccatctgctcctgg

SEQ ID NO: 747190 - DNA, 15 bp, Homo sapiens
ccatctgctcctgga

SEQ ID NO: 747191 - DNA, 15 bp, Homo sapiens
catctgctcctggat

SEQ ID NO: 747192 - DNA, 15 bp, Homo sapiens
atctgctcctggatc

SEQ ID NO: 747193 - DNA, 15 bp, Homo sapiens
tctgctcctggatct

SEQ ID NO: 747194 - DNA, 15 bp, Homo sapiens
ctgctcctggatctc

SEQ ID NO: 747195 - DNA, 15 bp, Homo sapiens
tgctcctggatctcc

SEQ ID NO: 747196 - DNA, 15 bp, Homo sapiens
gctcctggatctccc

SEQ ID NO: 747197 - DNA, 15 bp, Homo sapiens
ctcctggatctccct

SEQ ID NO: 747198 - DNA, 15 bp, Homo sapiens
tcctggatctccctg

SEQ ID NO: 747199 - DNA, 15 bp, Homo sapiens
cctggatctccctga

SEQ ID NO: 747200 - DNA, 15 bp, Homo sapiens
ctggatctccctgag

SEQ ID NO: 747201 - DNA, 15 bp, Homo sapiens
tggatctccctgaga

SEQ ID NO: 747202 - DNA, 15 bp, Homo sapiens
ggatctccctgagat

SEQ ID NO: 747203 - DNA, 15 bp, Homo sapiens
gatctccctgagatg

SEQ ID NO: 747204 - DNA, 15 bp, Homo sapiens
atctccctgagatgg

SEQ ID NO: 747205 - DNA, 15 bp, Homo sapiens
tctccctgagatggg

SEQ ID NO: 747206 - DNA, 15 bp, Homo sapiens
ctccctgagatgggc

SEQ ID NO: 747207 - DNA, 15 bp, Homo sapiens
tccctgagatgggct

SEQ ID NO: 747208 - DNA, 15 bp, Homo sapiens
ccctgagatgggctt

SEQ ID NO: 747209 - DNA, 15 bp, Homo sapiens
cctgagatgggcttc

SEQ ID NO: 747210 - DNA, 15 bp, Homo sapiens
ctgagatgggcttcc

SEQ ID NO: 747211 - DNA, 15 bp, Homo sapiens
tgagatgggcttccc

SEQ ID NO: 747212 - DNA, 15 bp, Homo sapiens
gagatgggcttccca

SEQ ID NO: 747213 - DNA, 15 bp, Homo sapiens
agatgggcttcccaa

SEQ ID NO: 747214 - DNA, 15 bp, Homo sapiens
gatgggcttcccaag

SEQ ID NO: 747215 - DNA, 15 bp, Homo sapiens
atgggcttcccaagg

SEQ ID NO: 747216 - DNA, 15 bp, Homo sapiens
tgggcttcccaaggg

SEQ ID NO: 747217 - DNA, 15 bp, Homo sapiens
gggcttcccaagggc

SEQ ID NO: 747218 - DNA, 15 bp, Homo sapiens
ggcttcccaagggct

SEQ ID NO: 747219 - DNA, 15 bp, Homo sapiens
gcttcccaagggctg

SEQ ID NO: 747220 - DNA, 15 bp, Homo sapiens
cttcccaagggctgc

SEQ ID NO: 747221 - DNA, 15 bp, Homo sapiens
ttcccaagggctgcc

SEQ ID NO: 747222 - DNA, 15 bp, Homo sapiens
tcccaagggctgccg

SEQ ID NO: 747223 - DNA, 15 bp, Homo sapiens
cccaagggctgccgg

SEQ ID NO: 747224 - DNA, 15 bp, Homo sapiens
ccaagggctgccggg

SEQ ID NO: 747225 - DNA, 15 bp, Homo sapiens
caagggctgccgggg

SEQ ID NO: 747226 - DNA, 15 bp, Homo sapiens
aagggctgccggggc

SEQ ID NO: 747227 - DNA, 15 bp, Homo sapiens
agggctgccggggca

SEQ ID NO: 747228 - DNA, 15 bp, Homo sapiens
gggctgccggggcag

SEQ ID NO: 747229 - DNA, 15 bp, Homo sapiens
ggctgccggggcagc

SEQ ID NO: 747230 - DNA, 15 bp, Homo sapiens
gctgccggggcagcc

SEQ ID NO: 747231 - DNA, 15 bp, Homo sapiens
ctgccggggcagccc

SEQ ID NO: 747232 - DNA, 15 bp, Homo sapiens
tgccggggcagcccc

SEQ ID NO: 747233 - DNA, 15 bp, Homo sapiens
gccggggcagccccc

SEQ ID NO: 747234 - DNA, 15 bp, Homo sapiens
ccggggcagccccct

SEQ ID NO: 747235 - DNA, 15 bp, Homo sapiens
cggggcagccccctc

SEQ ID NO: 747236 - DNA, 15 bp, Homo sapiens
ggggcagccccctca

SEQ ID NO: 747237 - DNA, 15 bp, Homo sapiens
gggcagccccctcac

SEQ ID NO: 747238 - DNA, 15 bp, Homo sapiens
ggcagccccctcaca

SEQ ID NO: 747239 - DNA, 15 bp, Homo sapiens
gcagccccctcacag

SEQ ID NO: 747240 - DNA, 15 bp, Homo sapiens
cagccccctcacagt

SEQ ID NO: 747241 - DNA, 15 bp, Homo sapiens
agccccctcacagta

SEQ ID NO: 747242 - DNA, 15 bp, Homo sapiens
gccccctcacagtat

SEQ ID NO: 747243 - DNA, 15 bp, Homo sapiens
ccccctcacagtatt

SEQ ID NO: 747244 - DNA, 15 bp, Homo sapiens
cccctcacagtattg

SEQ ID NO: 747245 - DNA, 15 bp, Homo sapiens
ccctcacagtattgc

SEQ ID NO: 747246 - DNA, 15 bp, Homo sapiens
cctcacagtattgct

SEQ ID NO: 747247 - DNA, 15 bp, Homo sapiens
ctcacagtattgctc

SEQ ID NO: 747248 - DNA, 15 bp, Homo sapiens
tcacagtattgctca

SEQ ID NO: 747249 - DNA, 15 bp, Homo sapiens
cacagtattgctcac

SEQ ID NO: 747250 - DNA, 15 bp, Homo sapiens
acagtattgctcacc

SEQ ID NO: 747251 - DNA, 15 bp, Homo sapiens
cagtattgctcaccc

SEQ ID NO: 747252 - DNA, 15 bp, Homo sapiens
agtattgctcaccca

SEQ ID NO: 747253 - DNA, 15 bp, Homo sapiens
gtattgctcacccag

SEQ ID NO: 747254 - DNA, 15 bp, Homo sapiens
tattgctcacccagt

SEQ ID NO: 747255 - DNA, 15 bp, Homo sapiens
attgctcacccagtg

SEQ ID NO: 747256 - DNA, 15 bp, Homo sapiens
ttgctcacccagtgc

SEQ ID NO: 747257 - DNA, 15 bp, Homo sapiens
tgctcacccagtgcc

SEQ ID NO: 747258 - DNA, 15 bp, Homo sapiens
gctcacccagtgccc

SEQ ID NO: 747259 - DNA, 15 bp, Homo sapiens
ctcacccagtgccct

SEQ ID NO: 747260 - DNA, 15 bp, Homo sapiens
tcacccagtgccctc

SEQ ID NO: 747261 - DNA, 15 bp, Homo sapiens
cacccagtgccctct

SEQ ID NO: 747262 - DNA, 15 bp, Homo sapiens
acccagtgccctctc

SEQ ID NO: 747263 - DNA, 15 bp, Homo sapiens
cccagtgccctctcc

SEQ ID NO: 747264 - DNA, 15 bp, Homo sapiens
ccagtgccctctccc

SEQ ID NO: 747265 - DNA, 15 bp, Homo sapiens
cagtgccctctcccc

SEQ ID NO: 747266 - DNA, 15 bp, Homo sapiens
agtgccctctcccct

SEQ ID NO: 747267 - DNA, 15 bp, Homo sapiens
gtgccctctcccctc

SEQ ID NO: 747268 - DNA, 15 bp, Homo sapiens
tgccctctcccctca

SEQ ID NO: 747269 - DNA, 15 bp, Homo sapiens
gccctctcccctcag

SEQ ID NO: 747270 - DNA, 15 bp, Homo sapiens
ccctctcccctcagc

SEQ ID NO: 747271 - DNA, 15 bp, Homo sapiens
cctctcccctcagcc

SEQ ID NO: 747272 - DNA, 15 bp, Homo sapiens
ctctcccctcagcct

SEQ ID NO: 747273 - DNA, 15 bp, Homo sapiens
tctcccctcagcctc

SEQ ID NO: 747274 - DNA, 15 bp, Homo sapiens
ctcccctcagcctct

SEQ ID NO: 747275 - DNA, 15 bp, Homo sapiens
tcccctcagcctctc

SEQ ID NO: 747276 - DNA, 15 bp, Homo sapiens
cccctcagcctctcc

SEQ ID NO: 747277 - DNA, 15 bp, Homo sapiens
ccctcagcctctccc

SEQ ID NO: 747278 - DNA, 15 bp, Homo sapiens
cctcagcctctcccc

SEQ ID NO: 747279 - DNA, 15 bp, Homo sapiens
ctcagcctctcccct

SEQ ID NO: 747280 - DNA, 15 bp, Homo sapiens
tcagcctctcccctg

SEQ ID NO: 747281 - DNA, 15 bp, Homo sapiens
cagcctctcccctgc

SEQ ID NO: 747282 - DNA, 15 bp, Homo sapiens
agcctctcccctgcc

SEQ ID NO: 747283 - DNA, 15 bp, Homo sapiens
gcctctcccctgcct

SEQ ID NO: 747284 - DNA, 15 bp, Homo sapiens
cctctcccctgcctg

SEQ ID NO: 747285 - DNA, 15 bp, Homo sapiens
ctctcccctgcctgc

SEQ ID NO: 747286 - DNA, 15 bp, Homo sapiens
tctcccctgcctgcc

SEQ ID NO: 747287 - DNA, 15 bp, Homo sapiens
ctcccctgcctgccc

SEQ ID NO: 747288 - DNA, 15 bp, Homo sapiens
tcccctgcctgccct

SEQ ID NO: 747289 - DNA, 15 bp, Homo sapiens
cccctgcctgccctg

SEQ ID NO: 747290 - DNA, 15 bp, Homo sapiens
ccctgcctgccctgg

SEQ ID NO: 747291 - DNA, 15 bp, Homo sapiens
cctgcctgccctggt

SEQ ID NO: 747292 - DNA, 15 bp, Homo sapiens
ctgcctgccctggtg

SEQ ID NO: 747293 - DNA, 15 bp, Homo sapiens
tgcctgccctggtga

SEQ ID NO: 747294 - DNA, 15 bp, Homo sapiens
gcctgccctggtgac

SEQ ID NO: 747295 - DNA, 15 bp, Homo sapiens
cctgccctggtgaca

SEQ ID NO: 747296 - DNA, 15 bp, Homo sapiens
ctgccctggtgacat

SEQ ID NO: 747297 - DNA, 15 bp, Homo sapiens
tgccctggtgacatc

SEQ ID NO: 747298 - DNA, 15 bp, Homo sapiens
gccctggtgacatca

SEQ ID NO: 747299 - DNA, 15 bp, Homo sapiens
ccctggtgacatcag

SEQ ID NO: 747300 - DNA, 15 bp, Homo sapiens
cctggtgacatcagg

SEQ ID NO: 747301 - DNA, 15 bp, Homo sapiens
ctggtgacatcaggt

SEQ ID NO: 747302 - DNA, 15 bp, Homo sapiens
tggtgacatcaggtt

SEQ ID NO: 747303 - DNA, 15 bp, Homo sapiens
ggtgacatcaggttt

SEQ ID NO: 747304 - DNA, 15 bp, Homo sapiens
gtgacatcaggtttt

SEQ ID NO: 747305 - DNA, 15 bp, Homo sapiens
tgacatcaggttttt

SEQ ID NO: 747306 - DNA, 15 bp, Homo sapiens
gacatcaggtttttc

SEQ ID NO: 747307 - DNA, 15 bp, Homo sapiens
acatcaggtttttcc

SEQ ID NO: 747308 - DNA, 15 bp, Homo sapiens
catcaggtttttccc

SEQ ID NO: 747309 - DNA, 15 bp, Homo sapiens
atcaggtttttcccg

SEQ ID NO: 747310 - DNA, 15 bp, Homo sapiens
tcaggtttttcccgg

SEQ ID NO: 747311 - DNA, 15 bp, Homo sapiens
caggtttttcccgga

SEQ ID NO: 747312 - DNA, 15 bp, Homo sapiens
aggtttttcccggac

SEQ ID NO: 747313 - DNA, 15 bp, Homo sapiens
ggtttttcccggact

SEQ ID NO: 747314 - DNA, 15 bp, Homo sapiens
gtttttcccggactt

SEQ ID NO: 747315 - DNA, 15 bp, Homo sapiens
tttttcccggactta

SEQ ID NO: 747316 - DNA, 15 bp, Homo sapiens
ttttcccggacttag

SEQ ID NO: 747317 - DNA, 15 bp, Homo sapiens
tttcccggacttaga

SEQ ID NO: 747318 - DNA, 15 bp, Homo sapiens
ttcccggacttagaa

SEQ ID NO: 747319 - DNA, 15 bp, Homo sapiens
tcccggacttagaaa

SEQ ID NO: 747320 - DNA, 15 bp, Homo sapiens
cccggacttagaaaa

SEQ ID NO: 747321 - DNA, 15 bp, Homo sapiens
ccggacttagaaaac

SEQ ID NO: 747322 - DNA, 15 bp, Homo sapiens
cggacttagaaaacc

SEQ ID NO: 747323 - DNA, 15 bp, Homo sapiens
ggacttagaaaacca

SEQ ID NO: 747324 - DNA, 15 bp, Homo sapiens
gacttagaaaaccag

SEQ ID NO: 747325 - DNA, 15 bp, Homo sapiens
acttagaaaaccagc

SEQ ID NO: 747326 - DNA, 15 bp, Homo sapiens
cttagaaaaccagct

SEQ ID NO: 747327 - DNA, 15 bp, Homo sapiens
ttagaaaaccagctc

SEQ ID NO: 747328 - DNA, 15 bp, Homo sapiens
tagaaaaccagctca

SEQ ID NO: 747329 - DNA, 15 bp, Homo sapiens
agaaaaccagctcag

SEQ ID NO: 747330 - DNA, 15 bp, Homo sapiens
gaaaaccagctcagc

SEQ ID NO: 747331 - DNA, 15 bp, Homo sapiens
aaaaccagctcagca

SEQ ID NO: 747332 - DNA, 15 bp, Homo sapiens
aaaccagctcagcac

SEQ ID NO: 747333 - DNA, 15 bp, Homo sapiens
aaccagctcagcact

SEQ ID NO: 747334 - DNA, 15 bp, Homo sapiens
accagctcagcactg

SEQ ID NO: 747335 - DNA, 15 bp, Homo sapiens
ccagctcagcactgc

SEQ ID NO: 747336 - DNA, 15 bp, Homo sapiens
cagctcagcactgcc

SEQ ID NO: 747337 - DNA, 15 bp, Homo sapiens
agctcagcactgcct

SEQ ID NO: 747338 - DNA, 15 bp, Homo sapiens
gctcagcactgcctg

SEQ ID NO: 747339 - DNA, 15 bp, Homo sapiens
ctcagcactgcctgc

SEQ ID NO: 747340 - DNA, 15 bp, Homo sapiens
tcagcactgcctgct

SEQ ID NO: 747341 - DNA, 15 bp, Homo sapiens
cagcactgcctgctc

SEQ ID NO: 747342 - DNA, 15 bp, Homo sapiens
agcactgcctgctcc

SEQ ID NO: 747343 - DNA, 15 bp, Homo sapiens
gcactgcctgctccc

SEQ ID NO: 747344 - DNA, 15 bp, Homo sapiens
cactgcctgctccca

SEQ ID NO: 747345 - DNA, 15 bp, Homo sapiens
actgcctgctcccat

SEQ ID NO: 747346 - DNA, 15 bp, Homo sapiens
ctgcctgctcccatc

SEQ ID NO: 747347 - DNA, 15 bp, Homo sapiens
tgcctgctcccatcc

SEQ ID NO: 747348 - DNA, 15 bp, Homo sapiens
gcctgctcccatcct

SEQ ID NO: 747349 - DNA, 15 bp, Homo sapiens
cctgctcccatcctg

SEQ ID NO: 747350 - DNA, 15 bp, Homo sapiens
ctgctcccatcctgt

SEQ ID NO: 747351 - DNA, 15 bp, Homo sapiens
tgctcccatcctgtg

SEQ ID NO: 747352 - DNA, 15 bp, Homo sapiens
gctcccatcctgtgt

SEQ ID NO: 747353 - DNA, 15 bp, Homo sapiens
ctcccatcctgtgtg

SEQ ID NO: 747354 - DNA, 15 bp, Homo sapiens
tcccatcctgtgtgt

SEQ ID NO: 747355 - DNA, 15 bp, Homo sapiens
cccatcctgtgtgtt

SEQ ID NO: 747356 - DNA, 15 bp, Homo sapiens
ccatcctgtgtgtta

SEQ ID NO: 747357 - DNA, 15 bp, Homo sapiens
catcctgtgtgttaa

SEQ ID NO: 747358 - DNA, 15 bp, Homo sapiens
atcctgtgtgttaag

SEQ ID NO: 747359 - DNA, 15 bp, Homo sapiens
tcctgtgtgttaagc

SEQ ID NO: 747360 - DNA, 15 bp, Homo sapiens
cctgtgtgttaagct

SEQ ID NO: 747361 - DNA, 15 bp, Homo sapiens
ctgtgtgttaagctc

SEQ ID NO: 747362 - DNA, 15 bp, Homo sapiens
tgtgtgttaagctct

SEQ ID NO: 747363 - DNA, 15 bp, Homo sapiens
gtgtgttaagctctg

SEQ ID NO: 747364 - DNA, 15 bp, Homo sapiens
tgtgttaagctctgc

SEQ ID NO: 747365 - DNA, 15 bp, Homo sapiens
gtgttaagctctgct

SEQ ID NO: 747366 - DNA, 15 bp, Homo sapiens
tgttaagctctgcta

SEQ ID NO: 747367 - DNA, 15 bp, Homo sapiens
gttaagctctgctat

SEQ ID NO: 747368 - DNA, 15 bp, Homo sapiens
ttaagctctgctatt

SEQ ID NO: 747369 - DNA, 15 bp, Homo sapiens
taagctctgctatta

SEQ ID NO: 747370 - DNA, 15 bp, Homo sapiens
aagctctgctattag

SEQ ID NO: 747371 - DNA, 15 bp, Homo sapiens
agctctgctattagg

SEQ ID NO: 747372 - DNA, 15 bp, Homo sapiens
gctctgctattaggc

SEQ ID NO: 747373 - DNA, 15 bp, Homo sapiens
ctctgctattaggcc

SEQ ID NO: 747374 - DNA, 15 bp, Homo sapiens
tctgctattaggcca

SEQ ID NO: 747375 - DNA, 15 bp, Homo sapiens
ctgctattaggccag

SEQ ID NO: 747376 - DNA, 15 bp, Homo sapiens
tgctattaggccagc

SEQ ID NO: 747377 - DNA, 15 bp, Homo sapiens
gctattaggccagca

SEQ ID NO: 747378 - DNA, 15 bp, Homo sapiens
ctattaggccagcaa

SEQ ID NO: 747379 - DNA, 15 bp, Homo sapiens
tattaggccagcaag

SEQ ID NO: 747380 - DNA, 15 bp, Homo sapiens
attaggccagcaagc

SEQ ID NO: 747381 - DNA, 15 bp, Homo sapiens
ttaggccagcaagcg

SEQ ID NO: 747382 - DNA, 15 bp, Homo sapiens
taggccagcaagcgg

SEQ ID NO: 747383 - DNA, 15 bp, Homo sapiens
aggccagcaagcggg

SEQ ID NO: 747384 - DNA, 15 bp, Homo sapiens
ggccagcaagcgggg

SEQ ID NO: 747385 - DNA, 15 bp, Homo sapiens
gccagcaagcgggga

SEQ ID NO: 747386 - DNA, 15 bp, Homo sapiens
ccagcaagcggggat

SEQ ID NO: 747387 - DNA, 15 bp, Homo sapiens
cagcaagcggggatg

SEQ ID NO: 747388 - DNA, 15 bp, Homo sapiens
agcaagcggggatgt

SEQ ID NO: 747389 - DNA, 15 bp, Homo sapiens
gcaagcggggatgtc

SEQ ID NO: 747390 - DNA, 15 bp, Homo sapiens
caagcggggatgtcc

SEQ ID NO: 747391 - DNA, 15 bp, Homo sapiens
aagcggggatgtccc

SEQ ID NO: 747392 - DNA, 15 bp, Homo sapiens
agcggggatgtccct

SEQ ID NO: 747393 - DNA, 15 bp, Homo sapiens
gcggggatgtccctg

SEQ ID NO: 747394 - DNA, 15 bp, Homo sapiens
cggggatgtccctgg

SEQ ID NO: 747395 - DNA, 15 bp, Homo sapiens
ggggatgtccctggg

SEQ ID NO: 747396 - DNA, 15 bp, Homo sapiens
gggatgtccctggga

SEQ ID NO: 747397 - DNA, 15 bp, Homo sapiens
ggatgtccctgggag

SEQ ID NO: 747398 - DNA, 15 bp, Homo sapiens
gatgtccctgggagg

SEQ ID NO: 747399 - DNA, 15 bp, Homo sapiens
atgtccctgggaggg

SEQ ID NO: 747400 - DNA, 15 bp, Homo sapiens
tgtccctgggaggga

SEQ ID NO: 747401 - DNA, 15 bp, Homo sapiens
gtccctgggagggac

SEQ ID NO: 747402 - DNA, 15 bp, Homo sapiens
cattgaaaggaaaac

SEQ ID NO: 747403 - DNA, 15 bp, Homo sapiens
attgaaaggaaaacc

SEQ ID NO: 747404 - DNA, 15 bp, Homo sapiens
ttgaaaggaaaaccc

SEQ ID NO: 747405 - DNA, 15 bp, Homo sapiens
tgaaaggaaaaccct

SEQ ID NO: 747406 - DNA, 15 bp, Homo sapiens
gaaaggaaaacccta

SEQ ID NO: 747407 - DNA, 15 bp, Homo sapiens
aaaggaaaaccctaa

SEQ ID NO: 747408 - DNA, 15 bp, Homo sapiens
aaggaaaaccctaac

SEQ ID NO: 747409 - DNA, 15 bp, Homo sapiens
aggaaaaccctaact

SEQ ID NO: 747410 - DNA, 15 bp, Homo sapiens
ggaaaaccctaactt

SEQ ID NO: 747411 - DNA, 15 bp, Homo sapiens
gaaaaccctaacttt

SEQ ID NO: 747412 - DNA, 15 bp, Homo sapiens
aaaaccctaactttc

SEQ ID NO: 747413 - DNA, 15 bp, Homo sapiens
aaaccctaactttcc

SEQ ID NO: 747414 - DNA, 15 bp, Homo sapiens
aaccctaactttcca

SEQ ID NO: 747415 - DNA, 15 bp, Homo sapiens
accctaactttccac

SEQ ID NO: 747416 - DNA, 15 bp, Homo sapiens
ccctaactttccacg

SEQ ID NO: 747417 - DNA, 15 bp, Homo sapiens
cctaactttccacgc

SEQ ID NO: 747418 - DNA, 15 bp, Homo sapiens
ctaactttccacgcc

SEQ ID NO: 747419 - DNA, 15 bp, Homo sapiens
taactttccacgcct

SEQ ID NO: 747420 - DNA, 15 bp, Homo sapiens
aactttccacgccta

SEQ ID NO: 747421 - DNA, 15 bp, Homo sapiens
actttccacgcctaa

SEQ ID NO: 747422 - DNA, 15 bp, Homo sapiens
ctttccacgcctaag

SEQ ID NO: 747423 - DNA, 15 bp, Homo sapiens
tttccacgcctaagt

SEQ ID NO: 747424 - DNA, 15 bp, Homo sapiens
ttccacgcctaagta

SEQ ID NO: 747425 - DNA, 15 bp, Homo sapiens
tccacgcctaagtaa

SEQ ID NO: 747426 - DNA, 15 bp, Homo sapiens
ccacgcctaagtaac

SEQ ID NO: 747427 - DNA, 15 bp, Homo sapiens
cacgcctaagtaaca

SEQ ID NO: 747428 - DNA, 15 bp, Homo sapiens
acgcctaagtaacaa

SEQ ID NO: 747429 - DNA, 15 bp, Homo sapiens
cgcctaagtaacaaa

SEQ ID NO: 747430 - DNA, 15 bp, Homo sapiens
gcctaagtaacaaaa

SEQ ID NO: 747431 - DNA, 15 bp, Homo sapiens
cctaagtaacaaaag

SEQ ID NO: 747432 - DNA, 15 bp, Homo sapiens
ctaagtaacaaaagg

SEQ ID NO: 747433 - DNA, 15 bp, Homo sapiens
taagtaacaaaagga

SEQ ID NO: 747434 - DNA, 15 bp, Homo sapiens
aagtaacaaaaggac

SEQ ID NO: 747435 - DNA, 15 bp, Homo sapiens
agtaacaaaaggacc

SEQ ID NO: 747436 - DNA, 15 bp, Homo sapiens
gtaacaaaaggacca

SEQ ID NO: 747437 - DNA, 15 bp, Homo sapiens
taacaaaaggaccag

SEQ ID NO: 747438 - DNA, 15 bp, Homo sapiens
aacaaaaggaccaga

SEQ ID NO: 747439 - DNA, 15 bp, Homo sapiens
acaaaaggaccagag

SEQ ID NO: 747440 - DNA, 15 bp, Homo sapiens
caaaaggaccagagg

SEQ ID NO: 747441 - DNA, 15 bp, Homo sapiens
aaaaggaccagaggc

SEQ ID NO: 747442 - DNA, 15 bp, Homo sapiens
aaaggaccagaggct

SEQ ID NO: 747443 - DNA, 15 bp, Homo sapiens
aaggaccagaggcta

SEQ ID NO: 747444 - DNA, 15 bp, Homo sapiens
aggaccagaggctac

SEQ ID NO: 747445 - DNA, 15 bp, Homo sapiens
ggaccagaggctacc

SEQ ID NO: 747446 - DNA, 15 bp, Homo sapiens
gaccagaggctacct

SEQ ID NO: 747447 - DNA, 15 bp, Homo sapiens
accagaggctacctt

SEQ ID NO: 747448 - DNA, 15 bp, Homo sapiens
ccagaggctaccttt

SEQ ID NO: 747449 - DNA, 15 bp, Homo sapiens
cagaggctacctttg

SEQ ID NO: 747450 - DNA, 15 bp, Homo sapiens
agaggctacctttga

SEQ ID NO: 747451 - DNA, 15 bp, Homo sapiens
gaggctacctttgac

SEQ ID NO: 747452 - DNA, 15 bp, Homo sapiens
aggctacctttgacc

SEQ ID NO: 747453 - DNA, 15 bp, Homo sapiens
ggctacctttgacct

SEQ ID NO: 747454 - DNA, 15 bp, Homo sapiens
gctacctttgacctt

SEQ ID NO: 747455 - DNA, 15 bp, Homo sapiens
ctacctttgaccttt

SEQ ID NO: 747456 - DNA, 15 bp, Homo sapiens
tacctttgacctttt

SEQ ID NO: 747457 - DNA, 15 bp, Homo sapiens
acctttgaccttttc

SEQ ID NO: 747458 - DNA, 15 bp, Homo sapiens
cctttgaccttttct

SEQ ID NO: 747459 - DNA, 15 bp, Homo sapiens
ctttgaccttttctg

SEQ ID NO: 747460 - DNA, 15 bp, Homo sapiens
tttgaccttttctgc

SEQ ID NO: 747461 - DNA, 15 bp, Homo sapiens
ttgaccttttctgcc

SEQ ID NO: 747462 - DNA, 15 bp, Homo sapiens
tgaccttttctgcct

SEQ ID NO: 747463 - DNA, 15 bp, Homo sapiens
gaccttttctgccta

SEQ ID NO: 747464 - DNA, 15 bp, Homo sapiens
accttttctgcctag

SEQ ID NO: 747465 - DNA, 15 bp, Homo sapiens
ccttttctgcctagt

SEQ ID NO: 747466 - DNA, 15 bp, Homo sapiens
cttttctgcctagta

SEQ ID NO: 747467 - DNA, 15 bp, Homo sapiens
ttttctgcctagtag

SEQ ID NO: 747468 - DNA, 15 bp, Homo sapiens
tttctgcctagtaga

SEQ ID NO: 747469 - DNA, 15 bp, Homo sapiens
ttctgcctagtagat

SEQ ID NO: 747470 - DNA, 15 bp, Homo sapiens
tctgcctagtagatg

SEQ ID NO: 747471 - DNA, 15 bp, Homo sapiens
ctgcctagtagatgg

SEQ ID NO: 747472 - DNA, 15 bp, Homo sapiens
tgcctagtagatggg

SEQ ID NO: 747473 - DNA, 15 bp, Homo sapiens
gcctagtagatggga

SEQ ID NO: 747474 - DNA, 15 bp, Homo sapiens
cctagtagatgggaa

SEQ ID NO: 747475 - DNA, 15 bp, Homo sapiens
ctagtagatgggaaa

SEQ ID NO: 747476 - DNA, 15 bp, Homo sapiens
tagtagatgggaaat

SEQ ID NO: 747477 - DNA, 15 bp, Homo sapiens
agtagatgggaaatt

SEQ ID NO: 747478 - DNA, 15 bp, Homo sapiens
gtagatgggaaattg

SEQ ID NO: 747479 - DNA, 15 bp, Homo sapiens
tagatgggaaattgg

SEQ ID NO: 747480 - DNA, 15 bp, Homo sapiens
agatgggaaattggc

SEQ ID NO: 747481 - DNA, 15 bp, Homo sapiens
gatgggaaattggct

SEQ ID NO: 747482 - DNA, 15 bp, Homo sapiens
atgggaaattggctg

SEQ ID NO: 747483 - DNA, 15 bp, Homo sapiens
tgggaaattggctgt

SEQ ID NO: 747484 - DNA, 15 bp, Homo sapiens
gggaaattggctgtc

SEQ ID NO: 747485 - DNA, 15 bp, Homo sapiens
ggaaattggctgtct

SEQ ID NO: 747486 - DNA, 15 bp, Homo sapiens
gaaattggctgtctg

SEQ ID NO: 747487 - DNA, 15 bp, Homo sapiens
aaattggctgtctgt

SEQ ID NO: 747488 - DNA, 15 bp, Homo sapiens
aattggctgtctgta

SEQ ID NO: 747489 - DNA, 15 bp, Homo sapiens
attggctgtctgtaa

SEQ ID NO: 747490 - DNA, 15 bp, Homo sapiens
ttggctgtctgtaac

SEQ ID NO: 747491 - DNA, 15 bp, Homo sapiens
tggctgtctgtaacc

SEQ ID NO: 747492 - DNA, 15 bp, Homo sapiens
ggctgtctgtaacca

SEQ ID NO: 747493 - DNA, 15 bp, Homo sapiens
gctgtctgtaaccaa

SEQ ID NO: 747494 - DNA, 15 bp, Homo sapiens
ctgtctgtaaccaat

SEQ ID NO: 747495 - DNA, 15 bp, Homo sapiens
tgtctgtaaccaatc

SEQ ID NO: 747496 - DNA, 15 bp, Homo sapiens
gtctgtaaccaatca

SEQ ID NO: 747497 - DNA, 15 bp, Homo sapiens
tctgtaaccaatcag

SEQ ID NO: 747498 - DNA, 15 bp, Homo sapiens
ctgtaaccaatcaga

SEQ ID NO: 747499 - DNA, 15 bp, Homo sapiens
tgtaaccaatcagac

SEQ ID NO: 747500 - DNA, 15 bp, Homo sapiens
gtaaccaatcagact

SEQ ID NO: 747501 - DNA, 15 bp, Homo sapiens
taaccaatcagactg

SEQ ID NO: 747502 - DNA, 15 bp, Homo sapiens
aaccaatcagactga

SEQ ID NO: 747503 - DNA, 15 bp, Homo sapiens
accaatcagactgac

SEQ ID NO: 747504 - DNA, 15 bp, Homo sapiens
ccaatcagactgact

SEQ ID NO: 747505 - DNA, 15 bp, Homo sapiens
caatcagactgactg

SEQ ID NO: 747506 - DNA, 15 bp, Homo sapiens
aatcagactgactgc

SEQ ID NO: 747507 - DNA, 15 bp, Homo sapiens
atcagactgactgcg

SEQ ID NO: 747508 - DNA, 15 bp, Homo sapiens
tcagactgactgcgg

SEQ ID NO: 747509 - DNA, 15 bp, Homo sapiens
cagactgactgcggg

SEQ ID NO: 747510 - DNA, 15 bp, Homo sapiens
agactgactgcgggt

SEQ ID NO: 747511 - DNA, 15 bp, Homo sapiens
gactgactgcgggtc

SEQ ID NO: 747512 - DNA, 15 bp, Homo sapiens
actgactgcgggtcc

SEQ ID NO: 747513 - DNA, 15 bp, Homo sapiens
ctgactgcgggtcca

SEQ ID NO: 747514 - DNA, 15 bp, Homo sapiens
tgactgcgggtccaa

SEQ ID NO: 747515 - DNA, 15 bp, Homo sapiens
gactgcgggtccaat

SEQ ID NO: 747516 - DNA, 15 bp, Homo sapiens
actgcgggtccaatc

SEQ ID NO: 747517 - DNA, 15 bp, Homo sapiens
ctgcgggtccaatct

SEQ ID NO: 747518 - DNA, 15 bp, Homo sapiens
tgcgggtccaatctt

SEQ ID NO: 747519 - DNA, 15 bp, Homo sapiens
gcgggtccaatcttc

SEQ ID NO: 747520 - DNA, 15 bp, Homo sapiens
cgggtccaatcttca

SEQ ID NO: 747521 - DNA, 15 bp, Homo sapiens
gggtccaatcttcat

SEQ ID NO: 747522 - DNA, 15 bp, Homo sapiens
ggtccaatcttcatt

SEQ ID NO: 747523 - DNA, 15 bp, Homo sapiens
gtccaatcttcattt

SEQ ID NO: 747524 - DNA, 15 bp, Homo sapiens
tccaatcttcatttg

SEQ ID NO: 747525 - DNA, 15 bp, Homo sapiens
ccaatcttcatttgc

SEQ ID NO: 747526 - DNA, 15 bp, Homo sapiens
caatcttcatttgca

SEQ ID NO: 747527 - DNA, 15 bp, Homo sapiens
aatcttcatttgcaa

SEQ ID NO: 747528 - DNA, 15 bp, Homo sapiens
atcttcatttgcaac

SEQ ID NO: 747529 - DNA, 15 bp, Homo sapiens
tcttcatttgcaact

SEQ ID NO: 747530 - DNA, 15 bp, Homo sapiens
cttcatttgcaactt

SEQ ID NO: 747531 - DNA, 15 bp, Homo sapiens
ttcatttgcaacttt

SEQ ID NO: 747532 - DNA, 15 bp, Homo sapiens
tcatttgcaactttg

SEQ ID NO: 747533 - DNA, 15 bp, Homo sapiens
catttgcaactttgt

SEQ ID NO: 747534 - DNA, 15 bp, Homo sapiens
atttgcaactttgta

SEQ ID NO: 747535 - DNA, 15 bp, Homo sapiens
tttgcaactttgtaa

SEQ ID NO: 747536 - DNA, 15 bp, Homo sapiens
ttgcaactttgtaac

SEQ ID NO: 747537 - DNA, 15 bp, Homo sapiens
tgcaactttgtaact

SEQ ID NO: 747538 - DNA, 15 bp, Homo sapiens
gcaactttgtaactt

SEQ ID NO: 747539 - DNA, 15 bp, Homo sapiens
caactttgtaacttc

SEQ ID NO: 747540 - DNA, 15 bp, Homo sapiens
aactttgtaacttca

SEQ ID NO: 747541 - DNA, 15 bp, Homo sapiens
actttgtaacttcac

SEQ ID NO: 747542 - DNA, 15 bp, Homo sapiens
ctttgtaacttcact

SEQ ID NO: 747543 - DNA, 15 bp, Homo sapiens
tttgtaacttcactc

SEQ ID NO: 747544 - DNA, 15 bp, Homo sapiens
ttgtaacttcactcc

SEQ ID NO: 747545 - DNA, 15 bp, Homo sapiens
tgtaacttcactcca

SEQ ID NO: 747546 - DNA, 15 bp, Homo sapiens
gtaacttcactccag

SEQ ID NO: 747547 - DNA, 15 bp, Homo sapiens
taacttcactccagc

SEQ ID NO: 747548 - DNA, 15 bp, Homo sapiens
aacttcactccagcc

SEQ ID NO: 747549 - DNA, 15 bp, Homo sapiens
acttcactccagcct

SEQ ID NO: 747550 - DNA, 15 bp, Homo sapiens
cttcactccagcctc

SEQ ID NO: 747551 - DNA, 15 bp, Homo sapiens
ttcactccagcctct

SEQ ID NO: 747552 - DNA, 15 bp, Homo sapiens
tcactccagcctctg

SEQ ID NO: 747553 - DNA, 15 bp, Homo sapiens
cactccagcctctga

SEQ ID NO: 747554 - DNA, 15 bp, Homo sapiens
actccagcctctgaa

SEQ ID NO: 747555 - DNA, 15 bp, Homo sapiens
ctccagcctctgaat

SEQ ID NO: 747556 - DNA, 15 bp, Homo sapiens
tccagcctctgaatg

SEQ ID NO: 747557 - DNA, 15 bp, Homo sapiens
ccagcctctgaatgg

SEQ ID NO: 747558 - DNA, 15 bp, Homo sapiens
cagcctctgaatggt

SEQ ID NO: 747559 - DNA, 15 bp, Homo sapiens
agcctctgaatggtt

SEQ ID NO: 747560 - DNA, 15 bp, Homo sapiens
gcctctgaatggttg

SEQ ID NO: 747561 - DNA, 15 bp, Homo sapiens
cctctgaatggttgt

SEQ ID NO: 747562 - DNA, 15 bp, Homo sapiens
ctctgaatggttgtt

SEQ ID NO: 747563 - DNA, 15 bp, Homo sapiens
tctgaatggttgttg

SEQ ID NO: 747564 - DNA, 15 bp, Homo sapiens
ctgaatggttgttgt

SEQ ID NO: 747565 - DNA, 15 bp, Homo sapiens
tgaatggttgttgtc

SEQ ID NO: 747566 - DNA, 15 bp, Homo sapiens
gaatggttgttgtcc

SEQ ID NO: 747567 - DNA, 15 bp, Homo sapiens
aatggttgttgtcca

SEQ ID NO: 747568 - DNA, 15 bp, Homo sapiens
atggttgttgtccac

SEQ ID NO: 747569 - DNA, 15 bp, Homo sapiens
tggttgttgtccaca

SEQ ID NO: 747570 - DNA, 15 bp, Homo sapiens
ggttgttgtccacaa

SEQ ID NO: 747571 - DNA, 15 bp, Homo sapiens
gttgttgtccacaac

SEQ ID NO: 747572 - DNA, 15 bp, Homo sapiens
ttgttgtccacaact

SEQ ID NO: 747573 - DNA, 15 bp, Homo sapiens
tgttgtccacaacta

SEQ ID NO: 747574 - DNA, 15 bp, Homo sapiens
gttgtccacaactaa

SEQ ID NO: 747575 - DNA, 15 bp, Homo sapiens
ttgtccacaactaat

SEQ ID NO: 747576 - DNA, 15 bp, Homo sapiens
tgtccacaactaatc

SEQ ID NO: 747577 - DNA, 15 bp, Homo sapiens
gtccacaactaatca

SEQ ID NO: 747578 - DNA, 15 bp, Homo sapiens
tccacaactaatcag

SEQ ID NO: 747579 - DNA, 15 bp, Homo sapiens
ccacaactaatcaga

SEQ ID NO: 747580 - DNA, 15 bp, Homo sapiens
cacaactaatcagac

SEQ ID NO: 747581 - DNA, 15 bp, Homo sapiens
acaactaatcagact

SEQ ID NO: 747582 - DNA, 15 bp, Homo sapiens
caactaatcagactg

SEQ ID NO: 747583 - DNA, 15 bp, Homo sapiens
aactaatcagactgt

SEQ ID NO: 747584 - DNA, 15 bp, Homo sapiens
actaatcagactgtg

SEQ ID NO: 747585 - DNA, 15 bp, Homo sapiens
ctaatcagactgtgg

SEQ ID NO: 747586 - DNA, 15 bp, Homo sapiens
taatcagactgtggg

SEQ ID NO: 747587 - DNA, 15 bp, Homo sapiens
aatcagactgtgggc

SEQ ID NO: 747588 - DNA, 15 bp, Homo sapiens
atcagactgtgggcg

SEQ ID NO: 747589 - DNA, 15 bp, Homo sapiens
tcagactgtgggcga

SEQ ID NO: 747590 - DNA, 15 bp, Homo sapiens
cagactgtgggcgag

SEQ ID NO: 747591 - DNA, 15 bp, Homo sapiens
agactgtgggcgagt

SEQ ID NO: 747592 - DNA, 15 bp, Homo sapiens
gactgtgggcgagtc

SEQ ID NO: 747593 - DNA, 15 bp, Homo sapiens
actgtgggcgagtct

SEQ ID NO: 747594 - DNA, 15 bp, Homo sapiens
ctgtgggcgagtctt

SEQ ID NO: 747595 - DNA, 15 bp, Homo sapiens
tgtgggcgagtcttc

SEQ ID NO: 747596 - DNA, 15 bp, Homo sapiens
gtgggcgagtcttcg

SEQ ID NO: 747597 - DNA, 15 bp, Homo sapiens
tgggcgagtcttcgt

SEQ ID NO: 747598 - DNA, 15 bp, Homo sapiens
gggcgagtcttcgtt

SEQ ID NO: 747599 - DNA, 15 bp, Homo sapiens
ggcgagtcttcgttt

SEQ ID NO: 747600 - DNA, 15 bp, Homo sapiens
gcgagtcttcgtttg

SEQ ID NO: 747601 - DNA, 15 bp, Homo sapiens
cgagtcttcgtttgc

SEQ ID NO: 747602 - DNA, 15 bp, Homo sapiens
gagtcttcgtttgca

SEQ ID NO: 747603 - DNA, 15 bp, Homo sapiens
agtcttcgtttgcat

SEQ ID NO: 747604 - DNA, 15 bp, Homo sapiens
gtcttcgtttgcata

SEQ ID NO: 747605 - DNA, 15 bp, Homo sapiens
tcttcgtttgcatag

SEQ ID NO: 747606 - DNA, 15 bp, Homo sapiens
cttcgtttgcataga

SEQ ID NO: 747607 - DNA, 15 bp, Homo sapiens
ttcgtttgcatagaa

SEQ ID NO: 747608 - DNA, 15 bp, Homo sapiens
tcgtttgcatagaag

SEQ ID NO: 747609 - DNA, 15 bp, Homo sapiens
cgtttgcatagaagc

SEQ ID NO: 747610 - DNA, 15 bp, Homo sapiens
gtttgcatagaagca

SEQ ID NO: 747611 - DNA, 15 bp, Homo sapiens
tttgcatagaagcat

SEQ ID NO: 747612 - DNA, 15 bp, Homo sapiens
ttgcatagaagcata

SEQ ID NO: 747613 - DNA, 15 bp, Homo sapiens
tgcatagaagcataa

SEQ ID NO: 747614 - DNA, 15 bp, Homo sapiens
gcatagaagcataac

SEQ ID NO: 747615 - DNA, 15 bp, Homo sapiens
catagaagcataact

SEQ ID NO: 747616 - DNA, 15 bp, Homo sapiens
atagaagcataactt

SEQ ID NO: 747617 - DNA, 15 bp, Homo sapiens
tagaagcataacttc

SEQ ID NO: 747618 - DNA, 15 bp, Homo sapiens
agaagcataacttca

SEQ ID NO: 747619 - DNA, 15 bp, Homo sapiens
gaagcataacttcat

SEQ ID NO: 747620 - DNA, 15 bp, Homo sapiens
aagcataacttcatt

SEQ ID NO: 747621 - DNA, 15 bp, Homo sapiens
agcataacttcatta

SEQ ID NO: 747622 - DNA, 15 bp, Homo sapiens
gcataacttcattaa

SEQ ID NO: 747623 - DNA, 15 bp, Homo sapiens
cataacttcattaag

SEQ ID NO: 747624 - DNA, 15 bp, Homo sapiens
ataacttcattaagt

SEQ ID NO: 747625 - DNA, 15 bp, Homo sapiens
taacttcattaagta

SEQ ID NO: 747626 - DNA, 15 bp, Homo sapiens
aacttcattaagtac

SEQ ID NO: 747627 - DNA, 15 bp, Homo sapiens
acttcattaagtaca

SEQ ID NO: 747628 - DNA, 15 bp, Homo sapiens
cttcattaagtacat

SEQ ID NO: 747629 - DNA, 15 bp, Homo sapiens
ttcattaagtacatc

SEQ ID NO: 747630 - DNA, 15 bp, Homo sapiens
tcattaagtacatcc

SEQ ID NO: 747631 - DNA, 15 bp, Homo sapiens
cattaagtacatccc

SEQ ID NO: 747632 - DNA, 15 bp, Homo sapiens
attaagtacatccca

SEQ ID NO: 747633 - DNA, 15 bp, Homo sapiens
ttaagtacatcccag

SEQ ID NO: 747634 - DNA, 15 bp, Homo sapiens
taagtacatcccagc

SEQ ID NO: 747635 - DNA, 15 bp, Homo sapiens
aagtacatcccagcc

SEQ ID NO: 747636 - DNA, 15 bp, Homo sapiens
agtacatcccagcct

SEQ ID NO: 747637 - DNA, 15 bp, Homo sapiens
gtacatcccagcctc

SEQ ID NO: 747638 - DNA, 15 bp, Homo sapiens
tacatcccagcctct

SEQ ID NO: 747639 - DNA, 15 bp, Homo sapiens
acatcccagcctctg

SEQ ID NO: 747640 - DNA, 15 bp, Homo sapiens
catcccagcctctga

SEQ ID NO: 747641 - DNA, 15 bp, Homo sapiens
atcccagcctctgat

SEQ ID NO: 747642 - DNA, 15 bp, Homo sapiens
tcccagcctctgatt

SEQ ID NO: 747643 - DNA, 15 bp, Homo sapiens
cccagcctctgattg

SEQ ID NO: 747644 - DNA, 15 bp, Homo sapiens
ccagcctctgattgg

SEQ ID NO: 747645 - DNA, 15 bp, Homo sapiens
cagcctctgattggt

SEQ ID NO: 747646 - DNA, 15 bp, Homo sapiens
agcctctgattggtt

SEQ ID NO: 747647 - DNA, 15 bp, Homo sapiens
gcctctgattggttg

SEQ ID NO: 747648 - DNA, 15 bp, Homo sapiens
cctctgattggttgt

SEQ ID NO: 747649 - DNA, 15 bp, Homo sapiens
ctctgattggttgtt

SEQ ID NO: 747650 - DNA, 15 bp, Homo sapiens
tctgattggttgttt

SEQ ID NO: 747651 - DNA, 15 bp, Homo sapiens
ctgattggttgtttt

SEQ ID NO: 747652 - DNA, 15 bp, Homo sapiens
tgattggttgttttt

SEQ ID NO: 747653 - DNA, 15 bp, Homo sapiens
gattggttgtttttt

SEQ ID NO: 747654 - DNA, 15 bp, Homo sapiens
attggttgttttttg

SEQ ID NO: 747655 - DNA, 15 bp, Homo sapiens
ttggttgttttttgc

SEQ ID NO: 747656 - DNA, 15 bp, Homo sapiens
tggttgttttttgca

SEQ ID NO: 747657 - DNA, 15 bp, Homo sapiens
ggttgttttttgcaa

SEQ ID NO: 747658 - DNA, 15 bp, Homo sapiens
gttgttttttgcaac

SEQ ID NO: 747659 - DNA, 15 bp, Homo sapiens
ttgttttttgcaacc

SEQ ID NO: 747660 - DNA, 15 bp, Homo sapiens
tgttttttgcaacca

SEQ ID NO: 747661 - DNA, 15 bp, Homo sapiens
gttttttgcaaccaa

SEQ ID NO: 747662 - DNA, 15 bp, Homo sapiens
ttttttgcaaccaat

SEQ ID NO: 747663 - DNA, 15 bp, Homo sapiens
tttttgcaaccaatc

SEQ ID NO: 747664 - DNA, 15 bp, Homo sapiens
ttttgcaaccaatca

SEQ ID NO: 747665 - DNA, 15 bp, Homo sapiens
tttgcaaccaatcag

SEQ ID NO: 747666 - DNA, 15 bp, Homo sapiens
ttgcaaccaatcaga

SEQ ID NO: 747667 - DNA, 15 bp, Homo sapiens
tgcaaccaatcagat

SEQ ID NO: 747668 - DNA, 15 bp, Homo sapiens
gcaaccaatcagatg

SEQ ID NO: 747669 - DNA, 15 bp, Homo sapiens
caaccaatcagatgt

SEQ ID NO: 747670 - DNA, 15 bp, Homo sapiens
aaccaatcagatgtt

SEQ ID NO: 747671 - DNA, 15 bp, Homo sapiens
accaatcagatgttt

SEQ ID NO: 747672 - DNA, 15 bp, Homo sapiens
ccaatcagatgtttg

SEQ ID NO: 747673 - DNA, 15 bp, Homo sapiens
caatcagatgtttgc

SEQ ID NO: 747674 - DNA, 15 bp, Homo sapiens
aatcagatgtttgca

SEQ ID NO: 747675 - DNA, 15 bp, Homo sapiens
atcagatgtttgcac

SEQ ID NO: 747676 - DNA, 15 bp, Homo sapiens
tcagatgtttgcaca

SEQ ID NO: 747677 - DNA, 15 bp, Homo sapiens
cagatgtttgcacag

SEQ ID NO: 747678 - DNA, 15 bp, Homo sapiens
agatgtttgcacagg

SEQ ID NO: 747679 - DNA, 15 bp, Homo sapiens
gatgtttgcacagga

SEQ ID NO: 747680 - DNA, 15 bp, Homo sapiens
atgtttgcacaggag

SEQ ID NO: 747681 - DNA, 15 bp, Homo sapiens
tgtttgcacaggagt

SEQ ID NO: 747682 - DNA, 15 bp, Homo sapiens
gtttgcacaggagtg

SEQ ID NO: 747683 - DNA, 15 bp, Homo sapiens
tttgcacaggagtgt

SEQ ID NO: 747684 - DNA, 15 bp, Homo sapiens
ttgcacaggagtgtt

SEQ ID NO: 747685 - DNA, 15 bp, Homo sapiens
tgcacaggagtgtta

SEQ ID NO: 747686 - DNA, 15 bp, Homo sapiens
gcacaggagtgttac

SEQ ID NO: 747687 - DNA, 15 bp, Homo sapiens
cacaggagtgttacc

SEQ ID NO: 747688 - DNA, 15 bp, Homo sapiens
acaggagtgttacct

SEQ ID NO: 747689 - DNA, 15 bp, Homo sapiens
caggagtgttacctt

SEQ ID NO: 747690 - DNA, 15 bp, Homo sapiens
aggagtgttaccttt

SEQ ID NO: 747691 - DNA, 15 bp, Homo sapiens
ggagtgttacctttg

SEQ ID NO: 747692 - DNA, 15 bp, Homo sapiens
gagtgttacctttgt

SEQ ID NO: 747693 - DNA, 15 bp, Homo sapiens
agtgttacctttgta

SEQ ID NO: 747694 - DNA, 15 bp, Homo sapiens
gtgttacctttgtat

SEQ ID NO: 747695 - DNA, 15 bp, Homo sapiens
tgttacctttgtatc

SEQ ID NO: 747696 - DNA, 15 bp, Homo sapiens
gttacctttgtatct

SEQ ID NO: 747697 - DNA, 15 bp, Homo sapiens
ttacctttgtatctt

SEQ ID NO: 747698 - DNA, 15 bp, Homo sapiens
tacctttgtatcttc

SEQ ID NO: 747699 - DNA, 15 bp, Homo sapiens
acctttgtatcttca

SEQ ID NO: 747700 - DNA, 15 bp, Homo sapiens
cctttgtatcttcat

SEQ ID NO: 747701 - DNA, 15 bp, Homo sapiens
ctttgtatcttcatt

SEQ ID NO: 747702 - DNA, 15 bp, Homo sapiens
tttgtatcttcattt

SEQ ID NO: 747703 - DNA, 15 bp, Homo sapiens
ttgtatcttcatttc

SEQ ID NO: 747704 - DNA, 15 bp, Homo sapiens
tgtatcttcatttca

SEQ ID NO: 747705 - DNA, 15 bp, Homo sapiens
gtatcttcatttcag

SEQ ID NO: 747706 - DNA, 15 bp, Homo sapiens
tatcttcatttcagc

SEQ ID NO: 747707 - DNA, 15 bp, Homo sapiens
atcttcatttcagcc

SEQ ID NO: 747708 - DNA, 15 bp, Homo sapiens
tcttcatttcagcct

SEQ ID NO: 747709 - DNA, 15 bp, Homo sapiens
cttcatttcagcctc

SEQ ID NO: 747710 - DNA, 15 bp, Homo sapiens
ttcatttcagcctct

SEQ ID NO: 747711 - DNA, 15 bp, Homo sapiens
tcatttcagcctctg

SEQ ID NO: 747712 - DNA, 15 bp, Homo sapiens
catttcagcctctgg

SEQ ID NO: 747713 - DNA, 15 bp, Homo sapiens
atttcagcctctggt

SEQ ID NO: 747714 - DNA, 15 bp, Homo sapiens
tttcagcctctggtt

SEQ ID NO: 747715 - DNA, 15 bp, Homo sapiens
ttcagcctctggttg

SEQ ID NO: 747716 - DNA, 15 bp, Homo sapiens
tcagcctctggttgg

SEQ ID NO: 747717 - DNA, 15 bp, Homo sapiens
cagcctctggttggc

SEQ ID NO: 747718 - DNA, 15 bp, Homo sapiens
agcctctggttggct

SEQ ID NO: 747719 - DNA, 15 bp, Homo sapiens
gcctctggttggctg

SEQ ID NO: 747720 - DNA, 15 bp, Homo sapiens
cctctggttggctgc

SEQ ID NO: 747721 - DNA, 15 bp, Homo sapiens
ctctggttggctgct

SEQ ID NO: 747722 - DNA, 15 bp, Homo sapiens
tctggttggctgctt

SEQ ID NO: 747723 - DNA, 15 bp, Homo sapiens
ctggttggctgcttt

SEQ ID NO: 747724 - DNA, 15 bp, Homo sapiens
tggttggctgctttc

SEQ ID NO: 747725 - DNA, 15 bp, Homo sapiens
ggttggctgctttct

SEQ ID NO: 747726 - DNA, 15 bp, Homo sapiens
gttggctgctttctg

SEQ ID NO: 747727 - DNA, 15 bp, Homo sapiens
ttggctgctttctgc

SEQ ID NO: 747728 - DNA, 15 bp, Homo sapiens
tggctgctttctgca

SEQ ID NO: 747729 - DNA, 15 bp, Homo sapiens
ggctgctttctgcaa

SEQ ID NO: 747730 - DNA, 15 bp, Homo sapiens
gctgctttctgcaac

SEQ ID NO: 747731 - DNA, 15 bp, Homo sapiens
ctgctttctgcaacc

SEQ ID NO: 747732 - DNA, 15 bp, Homo sapiens
tgctttctgcaacca

SEQ ID NO: 747733 - DNA, 15 bp, Homo sapiens
gctttctgcaaccag

SEQ ID NO: 747734 - DNA, 15 bp, Homo sapiens
ctttctgcaaccagt

SEQ ID NO: 747735 - DNA, 15 bp, Homo sapiens
tttctgcaaccagtc

SEQ ID NO: 747736 - DNA, 15 bp, Homo sapiens
ttctgcaaccagtca

SEQ ID NO: 747737 - DNA, 15 bp, Homo sapiens
tctgcaaccagtcag

SEQ ID NO: 747738 - DNA, 15 bp, Homo sapiens
ctgcaaccagtcaga

SEQ ID NO: 747739 - DNA, 15 bp, Homo sapiens
tgcaaccagtcagac

SEQ ID NO: 747740 - DNA, 15 bp, Homo sapiens
gcaaccagtcagact

SEQ ID NO: 747741 - DNA, 15 bp, Homo sapiens
caaccagtcagactg

SEQ ID NO: 747742 - DNA, 15 bp, Homo sapiens
aaccagtcagactga

SEQ ID NO: 747743 - DNA, 15 bp, Homo sapiens
accagtcagactgat

SEQ ID NO: 747744 - DNA, 15 bp, Homo sapiens
ccagtcagactgatt

SEQ ID NO: 747745 - DNA, 15 bp, Homo sapiens
cagtcagactgattg

SEQ ID NO: 747746 - DNA, 15 bp, Homo sapiens
agtcagactgattgc

SEQ ID NO: 747747 - DNA, 15 bp, Homo sapiens
gtcagactgattgcg

SEQ ID NO: 747748 - DNA, 15 bp, Homo sapiens
tcagactgattgcgg

SEQ ID NO: 747749 - DNA, 15 bp, Homo sapiens
cagactgattgcggg

SEQ ID NO: 747750 - DNA, 15 bp, Homo sapiens
agactgattgcgggc

SEQ ID NO: 747751 - DNA, 15 bp, Homo sapiens
gactgattgcgggct

SEQ ID NO: 747752 - DNA, 15 bp, Homo sapiens
actgattgcgggcta

SEQ ID NO: 747753 - DNA, 15 bp, Homo sapiens
ctgattgcgggctac

SEQ ID NO: 747754 - DNA, 15 bp, Homo sapiens
tgattgcgggctacc

SEQ ID NO: 747755 - DNA, 15 bp, Homo sapiens
gattgcgggctacca

SEQ ID NO: 747756 - DNA, 15 bp, Homo sapiens
attgcgggctaccac

SEQ ID NO: 747757 - DNA, 15 bp, Homo sapiens
ttgcgggctaccact

SEQ ID NO: 747758 - DNA, 15 bp, Homo sapiens
tgcgggctaccactt

SEQ ID NO: 747759 - DNA, 15 bp, Homo sapiens
gcgggctaccacttc

SEQ ID NO: 747760 - DNA, 15 bp, Homo sapiens
cgggctaccacttca

SEQ ID NO: 747761 - DNA, 15 bp, Homo sapiens
gggctaccacttcat

SEQ ID NO: 747762 - DNA, 15 bp, Homo sapiens
ggctaccacttcatt

SEQ ID NO: 747763 - DNA, 15 bp, Homo sapiens
gctaccacttcattt

SEQ ID NO: 747764 - DNA, 15 bp, Homo sapiens
ctaccacttcattta

SEQ ID NO: 747765 - DNA, 15 bp, Homo sapiens
taccacttcatttac

SEQ ID NO: 747766 - DNA, 15 bp, Homo sapiens
accacttcatttacg

SEQ ID NO: 747767 - DNA, 15 bp, Homo sapiens
ccacttcatttacgt

SEQ ID NO: 747768 - DNA, 15 bp, Homo sapiens
cacttcatttacgtg

SEQ ID NO: 747769 - DNA, 15 bp, Homo sapiens
acttcatttacgtga

SEQ ID NO: 747770 - DNA, 15 bp, Homo sapiens
cttcatttacgtgag

SEQ ID NO: 747771 - DNA, 15 bp, Homo sapiens
ttcatttacgtgaga

SEQ ID NO: 747772 - DNA, 15 bp, Homo sapiens
tcatttacgtgagat

SEQ ID NO: 747773 - DNA, 15 bp, Homo sapiens
catttacgtgagatg

SEQ ID NO: 747774 - DNA, 15 bp, Homo sapiens
atttacgtgagatga

SEQ ID NO: 747775 - DNA, 15 bp, Homo sapiens
tttacgtgagatgag

SEQ ID NO: 747776 - DNA, 15 bp, Homo sapiens
ttacgtgagatgagc

SEQ ID NO: 747777 - DNA, 15 bp, Homo sapiens
tacgtgagatgagca

SEQ ID NO: 747778 - DNA, 15 bp, Homo sapiens
acgtgagatgagcat

SEQ ID NO: 747779 - DNA, 15 bp, Homo sapiens
cgtgagatgagcatg

SEQ ID NO: 747780 - DNA, 15 bp, Homo sapiens
gtgagatgagcatga

SEQ ID NO: 747781 - DNA, 15 bp, Homo sapiens
tgagatgagcatgag

SEQ ID NO: 747782 - DNA, 15 bp, Homo sapiens
gagatgagcatgagt

SEQ ID NO: 747783 - DNA, 15 bp, Homo sapiens
agatgagcatgagtt

SEQ ID NO: 747784 - DNA, 15 bp, Homo sapiens
gatgagcatgagttg

SEQ ID NO: 747785 - DNA, 15 bp, Homo sapiens
atgagcatgagttgc

SEQ ID NO: 747786 - DNA, 15 bp, Homo sapiens
tgagcatgagttgcc

SEQ ID NO: 747787 - DNA, 15 bp, Homo sapiens
gagcatgagttgcca

SEQ ID NO: 747788 - DNA, 15 bp, Homo sapiens
agcatgagttgccaa

SEQ ID NO: 747789 - DNA, 15 bp, Homo sapiens
gcatgagttgccaaa

SEQ ID NO: 747790 - DNA, 15 bp, Homo sapiens
catgagttgccaaag

SEQ ID NO: 747791 - DNA, 15 bp, Homo sapiens
atgagttgccaaagg

SEQ ID NO: 747792 - DNA, 15 bp, Homo sapiens
tgagttgccaaaggg

SEQ ID NO: 747793 - DNA, 15 bp, Homo sapiens
gagttgccaaaggga

SEQ ID NO: 747794 - DNA, 15 bp, Homo sapiens
agttgccaaagggaa

SEQ ID NO: 747795 - DNA, 15 bp, Homo sapiens
gttgccaaagggaaa

SEQ ID NO: 747796 - DNA, 15 bp, Homo sapiens
ttgccaaagggaaac

SEQ ID NO: 747797 - DNA, 15 bp, Homo sapiens
tgccaaagggaaact

SEQ ID NO: 747798 - DNA, 15 bp, Homo sapiens
gccaaagggaaactt

SEQ ID NO: 747799 - DNA, 15 bp, Homo sapiens
ccaaagggaaacttc

SEQ ID NO: 747800 - DNA, 15 bp, Homo sapiens
caaagggaaacttct

SEQ ID NO: 747801 - DNA, 15 bp, Homo sapiens
aaagggaaacttctt

SEQ ID NO: 747802 - DNA, 15 bp, Homo sapiens
aagggaaacttcttg

SEQ ID NO: 747803 - DNA, 15 bp, Homo sapiens
agggaaacttcttgg

SEQ ID NO: 747804 - DNA, 15 bp, Homo sapiens
gggaaacttcttggg

SEQ ID NO: 747805 - DNA, 15 bp, Homo sapiens
ggaaacttcttgggg

SEQ ID NO: 747806 - DNA, 15 bp, Homo sapiens
gaaacttcttggggg

SEQ ID NO: 747807 - DNA, 15 bp, Homo sapiens
aaacttcttgggggt

SEQ ID NO: 747808 - DNA, 15 bp, Homo sapiens
aacttcttgggggta

SEQ ID NO: 747809 - DNA, 15 bp, Homo sapiens
acttcttgggggtat

SEQ ID NO: 747810 - DNA, 15 bp, Homo sapiens
cttcttgggggtatt

SEQ ID NO: 747811 - DNA, 15 bp, Homo sapiens
ttcttgggggtattt

SEQ ID NO: 747812 - DNA, 15 bp, Homo sapiens
tcttgggggtatttg

SEQ ID NO: 747813 - DNA, 15 bp, Homo sapiens
cttgggggtatttgg

SEQ ID NO: 747814 - DNA, 15 bp, Homo sapiens
ttgggggtatttgga

SEQ ID NO: 747815 - DNA, 15 bp, Homo sapiens
tgggggtatttggac

SEQ ID NO: 747816 - DNA, 15 bp, Homo sapiens
gggggtatttggacc

SEQ ID NO: 747817 - DNA, 15 bp, Homo sapiens
ggggtatttggaccc

SEQ ID NO: 747818 - DNA, 15 bp, Homo sapiens
gggtatttggaccca

SEQ ID NO: 747819 - DNA, 15 bp, Homo sapiens
ggtatttggacccaa

SEQ ID NO: 747820 - DNA, 15 bp, Homo sapiens
gtatttggacccaag

SEQ ID NO: 747821 - DNA, 15 bp, Homo sapiens
tatttggacccaaga

SEQ ID NO: 747822 - DNA, 15 bp, Homo sapiens
atttggacccaagaa

SEQ ID NO: 747823 - DNA, 15 bp, Homo sapiens
tttggacccaagaag

SEQ ID NO: 747824 - DNA, 15 bp, Homo sapiens
ttggacccaagaaga

SEQ ID NO: 747825 - DNA, 15 bp, Homo sapiens
tggacccaagaagat

SEQ ID NO: 747826 - DNA, 15 bp, Homo sapiens
ggacccaagaagatt

SEQ ID NO: 747827 - DNA, 15 bp, Homo sapiens
gacccaagaagattc

SEQ ID NO: 747828 - DNA, 15 bp, Homo sapiens
acccaagaagattct

SEQ ID NO: 747829 - DNA, 15 bp, Homo sapiens
cccaagaagattctg

SEQ ID NO: 747830 - DNA, 15 bp, Homo sapiens
ccaagaagattctgt

SEQ ID NO: 747831 - DNA, 15 bp, Homo sapiens
caagaagattctgta

SEQ ID NO: 747832 - DNA, 15 bp, Homo sapiens
aagaagattctgtat

SEQ ID NO: 747833 - DNA, 15 bp, Homo sapiens
agaagattctgtatt

SEQ ID NO: 747834 - DNA, 15 bp, Homo sapiens
gaagattctgtattc

SEQ ID NO: 747835 - DNA, 15 bp, Homo sapiens
aagattctgtattcg

SEQ ID NO: 747836 - DNA, 15 bp, Homo sapiens
agattctgtattcgg

SEQ ID NO: 747837 - DNA, 15 bp, Homo sapiens
gattctgtattcggc

SEQ ID NO: 747838 - DNA, 15 bp, Homo sapiens
attctgtattcggcc

SEQ ID NO: 747839 - DNA, 15 bp, Homo sapiens
ttctgtattcggcct

SEQ ID NO: 747840 - DNA, 15 bp, Homo sapiens
tctgtattcggcctt

SEQ ID NO: 747841 - DNA, 15 bp, Homo sapiens
ctgtattcggccttt

SEQ ID NO: 747842 - DNA, 15 bp, Homo sapiens
tgtattcggcctttg

SEQ ID NO: 747843 - DNA, 15 bp, Homo sapiens
gtattcggcctttga

SEQ ID NO: 747844 - DNA, 15 bp, Homo sapiens
tattcggcctttgag

SEQ ID NO: 747845 - DNA, 15 bp, Homo sapiens
attcggcctttgagc

SEQ ID NO: 747846 - DNA, 15 bp, Homo sapiens
ttcggcctttgagcc

SEQ ID NO: 747847 - DNA, 15 bp, Homo sapiens
tcggcctttgagccg

SEQ ID NO: 747848 - DNA, 15 bp, Homo sapiens
cggcctttgagccgc

SEQ ID NO: 747849 - DNA, 15 bp, Homo sapiens
ggcctttgagccgct

SEQ ID NO: 747850 - DNA, 15 bp, Homo sapiens
gcctttgagccgctg

SEQ ID NO: 747851 - DNA, 15 bp, Homo sapiens
cctttgagccgctgc

SEQ ID NO: 747852 - DNA, 15 bp, Homo sapiens
ctttgagccgctgct

SEQ ID NO: 747853 - DNA, 15 bp, Homo sapiens
tttgagccgctgctc

SEQ ID NO: 747854 - DNA, 15 bp, Homo sapiens
ttgagccgctgctcc

SEQ ID NO: 747855 - DNA, 15 bp, Homo sapiens
tgagccgctgctccg

SEQ ID NO: 747856 - DNA, 15 bp, Homo sapiens
gagccgctgctccgc

SEQ ID NO: 747857 - DNA, 15 bp, Homo sapiens
agccgctgctccgcc

SEQ ID NO: 747858 - DNA, 15 bp, Homo sapiens
gccgctgctccgccc

SEQ ID NO: 747859 - DNA, 15 bp, Homo sapiens
ccgctgctccgcccg

SEQ ID NO: 747860 - DNA, 15 bp, Homo sapiens
cgctgctccgcccgc

SEQ ID NO: 747861 - DNA, 15 bp, Homo sapiens
gctgctccgcccgct

SEQ ID NO: 747862 - DNA, 15 bp, Homo sapiens
ctgctccgcccgctc

SEQ ID NO: 747863 - DNA, 15 bp, Homo sapiens
tgctccgcccgctcc

SEQ ID NO: 747864 - DNA, 15 bp, Homo sapiens
gctccgcccgctccc

SEQ ID NO: 747865 - DNA, 15 bp, Homo sapiens
ctccgcccgctccca

SEQ ID NO: 747866 - DNA, 15 bp, Homo sapiens
tccgcccgctcccac

SEQ ID NO: 747867 - DNA, 15 bp, Homo sapiens
ccgcccgctcccaca

SEQ ID NO: 747868 - DNA, 15 bp, Homo sapiens
cgcccgctcccacaa

SEQ ID NO: 747869 - DNA, 15 bp, Homo sapiens
gcccgctcccacaat

SEQ ID NO: 747870 - DNA, 15 bp, Homo sapiens
cccgctcccacaatg

SEQ ID NO: 747871 - DNA, 15 bp, Homo sapiens
ccgctcccacaatgt

SEQ ID NO: 747872 - DNA, 15 bp, Homo sapiens
cgctcccacaatgta

SEQ ID NO: 747873 - DNA, 15 bp, Homo sapiens
gctcccacaatgtag

SEQ ID NO: 747874 - DNA, 15 bp, Homo sapiens
ctcccacaatgtaga

SEQ ID NO: 747875 - DNA, 15 bp, Homo sapiens
tcccacaatgtagag

SEQ ID NO: 747876 - DNA, 15 bp, Homo sapiens
cccacaatgtagagt

SEQ ID NO: 747877 - DNA, 15 bp, Homo sapiens
ccacaatgtagagtg

SEQ ID NO: 747878 - DNA, 15 bp, Homo sapiens
cacaatgtagagtgt

SEQ ID NO: 747879 - DNA, 15 bp, Homo sapiens
acaatgtagagtgta

SEQ ID NO: 747880 - DNA, 15 bp, Homo sapiens
caatgtagagtgtac

SEQ ID NO: 747881 - DNA, 15 bp, Homo sapiens
aatgtagagtgtact

SEQ ID NO: 747882 - DNA, 15 bp, Homo sapiens
atgtagagtgtactt

SEQ ID NO: 747883 - DNA, 15 bp, Homo sapiens
tgtagagtgtacttt

SEQ ID NO: 747884 - DNA, 15 bp, Homo sapiens
gtagagtgtactttc

SEQ ID NO: 747885 - DNA, 15 bp, Homo sapiens
tagagtgtactttcg

SEQ ID NO: 747886 - DNA, 15 bp, Homo sapiens
agagtgtactttcgt

SEQ ID NO: 747887 - DNA, 15 bp, Homo sapiens
gagtgtactttcgtt

SEQ ID NO: 747888 - DNA, 15 bp, Homo sapiens
agtgtactttcgttt

SEQ ID NO: 747889 - DNA, 15 bp, Homo sapiens
gtgtactttcgtttt

SEQ ID NO: 747890 - DNA, 15 bp, Homo sapiens
tgtactttcgttttc

SEQ ID NO: 747891 - DNA, 15 bp, Homo sapiens
gtactttcgttttca

SEQ ID NO: 747892 - DNA, 15 bp, Homo sapiens
tactttcgttttcaa

SEQ ID NO: 747893 - DNA, 15 bp, Homo sapiens
actttcgttttcaat

SEQ ID NO: 747894 - DNA, 15 bp, Homo sapiens
ctttcgttttcaata

SEQ ID NO: 747895 - DNA, 15 bp, Homo sapiens
tttcgttttcaataa

SEQ ID NO: 747896 - DNA, 15 bp, Homo sapiens
ttcgttttcaataaa

SEQ ID NO: 747897 - DNA, 15 bp, Homo sapiens
tcgttttcaataaat

SEQ ID NO: 747898 - DNA, 15 bp, Homo sapiens
cgttttcaataaatc

SEQ ID NO: 747899 - DNA, 15 bp, Homo sapiens
gttttcaataaatcc

SEQ ID NO: 747900 - DNA, 15 bp, Homo sapiens
ttttcaataaatccc

SEQ ID NO: 747901 - DNA, 15 bp, Homo sapiens
tttcaataaatccct

SEQ ID NO: 747902 - DNA, 15 bp, Homo sapiens
ttcaataaatccctg

SEQ ID NO: 747903 - DNA, 15 bp, Homo sapiens
tcaataaatccctgc

SEQ ID NO: 747904 - DNA, 15 bp, Homo sapiens
caataaatccctgct

SEQ ID NO: 747905 - DNA, 15 bp, Homo sapiens
aataaatccctgctt

SEQ ID NO: 747906 - DNA, 15 bp, Homo sapiens
ataaatccctgcttt

SEQ ID NO: 747907 - DNA, 15 bp, Homo sapiens
taaatccctgctttc

SEQ ID NO: 747908 - DNA, 15 bp, Homo sapiens
aaatccctgctttcg

SEQ ID NO: 747909 - DNA, 15 bp, Homo sapiens
aatccctgctttcgt

SEQ ID NO: 747910 - DNA, 15 bp, Homo sapiens
atccctgctttcgtt

SEQ ID NO: 747911 - DNA, 15 bp, Homo sapiens
tccctgctttcgttc

SEQ ID NO: 747912 - DNA, 15 bp, Homo sapiens
ccctgctttcgttct

SEQ ID NO: 747913 - DNA, 15 bp, Homo sapiens
cctgctttcgttctt

SEQ ID NO: 747914 - DNA, 15 bp, Homo sapiens
ctgctttcgttcttt

SEQ ID NO: 747915 - DNA, 15 bp, Homo sapiens
tgctttcgttctttt

SEQ ID NO: 747916 - DNA, 15 bp, Homo sapiens
gctttcgttcttttg

SEQ ID NO: 747917 - DNA, 15 bp, Homo sapiens
ctttcgttcttttgt

SEQ ID NO: 747918 - DNA, 15 bp, Homo sapiens
tttcgttcttttgtc

SEQ ID NO: 747919 - DNA, 15 bp, Homo sapiens
ttcgttcttttgtcg

SEQ ID NO: 747920 - DNA, 15 bp, Homo sapiens
tcgttcttttgtcgc

SEQ ID NO: 747921 - DNA, 15 bp, Homo sapiens
cgttcttttgtcgct

SEQ ID NO: 747922 - DNA, 15 bp, Homo sapiens
gttcttttgtcgctt

SEQ ID NO: 747923 - DNA, 15 bp, Homo sapiens
ttcttttgtcgcttc

SEQ ID NO: 747924 - DNA, 15 bp, Homo sapiens
tcttttgtcgcttct

SEQ ID NO: 747925 - DNA, 15 bp, Homo sapiens
cttttgtcgcttctc

SEQ ID NO: 747926 - DNA, 15 bp, Homo sapiens
ttttgtcgcttctct

SEQ ID NO: 747927 - DNA, 15 bp, Homo sapiens
tttgtcgcttctctg

SEQ ID NO: 747928 - DNA, 15 bp, Homo sapiens
ttgtcgcttctctgg

SEQ ID NO: 747929 - DNA, 15 bp, Homo sapiens
tgtcgcttctctggg

SEQ ID NO: 747930 - DNA, 15 bp, Homo sapiens
gtcgcttctctgggt

SEQ ID NO: 747931 - DNA, 15 bp, Homo sapiens
tcgcttctctgggtg

SEQ ID NO: 747932 - DNA, 15 bp, Homo sapiens
cgcttctctgggtgt

SEQ ID NO: 747933 - DNA, 15 bp, Homo sapiens
gcttctctgggtgtt

SEQ ID NO: 747934 - DNA, 15 bp, Homo sapiens
cttctctgggtgttt

SEQ ID NO: 747935 - DNA, 15 bp, Homo sapiens
ttctctgggtgtttt

SEQ ID NO: 747936 - DNA, 15 bp, Homo sapiens
tctctgggtgttttg

SEQ ID NO: 747937 - DNA, 15 bp, Homo sapiens
ctctgggtgttttgt

SEQ ID NO: 747938 - DNA, 15 bp, Homo sapiens
tctgggtgttttgtc

SEQ ID NO: 747939 - DNA, 15 bp, Homo sapiens
ctgggtgttttgtcc

SEQ ID NO: 747940 - DNA, 15 bp, Homo sapiens
tgggtgttttgtcca

SEQ ID NO: 747941 - DNA, 15 bp, Homo sapiens
gggtgttttgtccaa

SEQ ID NO: 747942 - DNA, 15 bp, Homo sapiens
ggtgttttgtccaat

SEQ ID NO: 747943 - DNA, 15 bp, Homo sapiens
gtgttttgtccaatt

SEQ ID NO: 747944 - DNA, 15 bp, Homo sapiens
tgttttgtccaattc

SEQ ID NO: 747945 - DNA, 15 bp, Homo sapiens
gttttgtccaattct

SEQ ID NO: 747946 - DNA, 15 bp, Homo sapiens
ttttgtccaattctt

SEQ ID NO: 747947 - DNA, 15 bp, Homo sapiens
tttgtccaattcttt

SEQ ID NO: 747948 - DNA, 15 bp, Homo sapiens
ttgtccaattctttg

SEQ ID NO: 747949 - DNA, 15 bp, Homo sapiens
tgtccaattctttgt

SEQ ID NO: 747950 - DNA, 15 bp, Homo sapiens
gtccaattctttgtt

SEQ ID NO: 747951 - DNA, 15 bp, Homo sapiens
tccaattctttgttc

SEQ ID NO: 747952 - DNA, 15 bp, Homo sapiens
ccaattctttgttca

SEQ ID NO: 747953 - DNA, 15 bp, Homo sapiens
caattctttgttcaa

SEQ ID NO: 747954 - DNA, 15 bp, Homo sapiens
aattctttgttcaaa

SEQ ID NO: 747955 - DNA, 15 bp, Homo sapiens
attctttgttcaaaa

SEQ ID NO: 747956 - DNA, 15 bp, Homo sapiens
ttctttgttcaaaac

SEQ ID NO: 747957 - DNA, 15 bp, Homo sapiens
tctttgttcaaaacg

SEQ ID NO: 747958 - DNA, 15 bp, Homo sapiens
ctttgttcaaaacgc

SEQ ID NO: 747959 - DNA, 15 bp, Homo sapiens
tttgttcaaaacgcc

SEQ ID NO: 747960 - DNA, 15 bp, Homo sapiens
ttgttcaaaacgcca

SEQ ID NO: 747961 - DNA, 15 bp, Homo sapiens
tgttcaaaacgccaa

SEQ ID NO: 747962 - DNA, 15 bp, Homo sapiens
gttcaaaacgccaag

SEQ ID NO: 747963 - DNA, 15 bp, Homo sapiens
ttcaaaacgccaaga

SEQ ID NO: 747964 - DNA, 15 bp, Homo sapiens
tcaaaacgccaagaa

SEQ ID NO: 747965 - DNA, 15 bp, Homo sapiens
caaaacgccaagaac

SEQ ID NO: 747966 - DNA, 15 bp, Homo sapiens
aaaacgccaagaacc

SEQ ID NO: 747967 - DNA, 15 bp, Homo sapiens
aaacgccaagaacct

SEQ ID NO: 747968 - DNA, 15 bp, Homo sapiens
aacgccaagaacctg

SEQ ID NO: 747969 - DNA, 15 bp, Homo sapiens
acgccaagaacctgg

SEQ ID NO: 747970 - DNA, 15 bp, Homo sapiens
cgccaagaacctgga

SEQ ID NO: 747971 - DNA, 15 bp, Homo sapiens
gccaagaacctggac

SEQ ID NO: 747972 - DNA, 15 bp, Homo sapiens
ccaagaacctggaca

SEQ ID NO: 747973 - DNA, 15 bp, Homo sapiens
caagaacctggacaa

SEQ ID NO: 747974 - DNA, 15 bp, Homo sapiens
aagaacctggacaac

SEQ ID NO: 747975 - DNA, 15 bp, Homo sapiens
agaacctggacaacc

SEQ ID NO: 747976 - DNA, 15 bp, Homo sapiens
gaacctggacaacct

SEQ ID NO: 747977 - DNA, 15 bp, Homo sapiens
aacctggacaacctg

SEQ ID NO: 747978 - DNA, 15 bp, Homo sapiens
acctggacaacctgc

SEQ ID NO: 747979 - DNA, 15 bp, Homo sapiens
cctggacaacctgca

SEQ ID NO: 747980 - DNA, 15 bp, Homo sapiens
ctggacaacctgcag

SEQ ID NO: 747981 - DNA, 15 bp, Homo sapiens
tggacaacctgcagt

SEQ ID NO: 747982 - DNA, 15 bp, Homo sapiens
ggacaacctgcagtc

SEQ ID NO: 747983 - DNA, 15 bp, Homo sapiens
gacaacctgcagtca

SEQ ID NO: 747984 - DNA, 15 bp, Homo sapiens
acaacctgcagtcac

SEQ ID NO: 747985 - DNA, 15 bp, Homo sapiens
caacctgcagtcacg

SEQ ID NO: 747986 - DNA, 15 bp, Homo sapiens
aacctgcagtcacga

SEQ ID NO: 747987 - DNA, 15 bp, Homo sapiens
acctgcagtcacgat

SEQ ID NO: 747988 - DNA, 15 bp, Homo sapiens
cctgcagtcacgatc

SEQ ID NO: 747989 - DNA, 15 bp, Homo sapiens
ctgcagtcacgatcc

SEQ ID NO: 747990 - DNA, 15 bp, Homo sapiens
tgcagtcacgatcct

SEQ ID NO: 747991 - DNA, 15 bp, Homo sapiens
gcagtcacgatcctt

SEQ ID NO: 747992 - DNA, 15 bp, Homo sapiens
cagtcacgatccttt

SEQ ID NO: 747993 - DNA, 15 bp, Homo sapiens
agtcacgatccttta

SEQ ID NO: 747994 - DNA, 15 bp, Homo sapiens
gtcacgatcctttac

SEQ ID NO: 747995 - DNA, 15 bp, Homo sapiens
tcacgatcctttact

SEQ ID NO: 747996 - DNA, 15 bp, Homo sapiens
cacgatcctttactg

SEQ ID NO: 747997 - DNA, 15 bp, Homo sapiens
acgatcctttactgg

SEQ ID NO: 747998 - DNA, 15 bp, Homo sapiens
cgatcctttactggt

SEQ ID NO: 747999 - DNA, 15 bp, Homo sapiens
gatcctttactggtg

SEQ ID NO: 748000 - DNA, 15 bp, Homo sapiens
atcctttactggtga

SEQ ID NO: 748001 - DNA, 15 bp, Homo sapiens
tcctttactggtgac

SEQ ID NO: 748002 - DNA, 15 bp, Homo sapiens
cctttactggtgaca

SEQ ID NO: 748003 - DNA, 15 bp, Homo sapiens
ctttactggtgacaa

SEQ ID NO: 748004 - DNA, 15 bp, Homo sapiens
tttactggtgacaat

SEQ ID NO: 748005 - DNA, 15 bp, Homo sapiens
ttactggtgacaata

SEQ ID NO: 748006 - DNA, 15 bp, Homo sapiens
tactggtgacaatat

SEQ ID NO: 748007 - DNA, 15 bp, Homo sapiens
actggtgacaatatt

SEQ ID NO: 748008 - DNA, 15 bp, Homo sapiens
ctggtgacaatattg

SEQ ID NO: 748009 - DNA, 15 bp, Homo sapiens
tggtgacaatattgt

SEQ ID NO: 748010 - DNA, 15 bp, Homo sapiens
ggtgacaatattgtt

SEQ ID NO: 748011 - DNA, 15 bp, Homo sapiens
gtgacaatattgttt

SEQ ID NO: 748012 - DNA, 15 bp, Homo sapiens
tgacaatattgtttt

SEQ ID NO: 748013 - DNA, 15 bp, Homo sapiens
gacaatattgtttta

SEQ ID NO: 748014 - DNA, 15 bp, Homo sapiens
acaatattgttttat

SEQ ID NO: 748015 - DNA, 15 bp, Homo sapiens
caatattgttttatt

SEQ ID NO: 748016 - DNA, 15 bp, Homo sapiens
aatattgttttattt

SEQ ID NO: 748017 - DNA, 15 bp, Homo sapiens
atattgttttatttt

SEQ ID NO: 748018 - DNA, 15 bp, Homo sapiens
tattgttttatttta

SEQ ID NO: 748019 - DNA, 15 bp, Homo sapiens
attgttttattttac

SEQ ID NO: 748020 - DNA, 15 bp, Homo sapiens
ttgttttattttact

SEQ ID NO: 748021 - DNA, 15 bp, Homo sapiens
tgttttattttactg

SEQ ID NO: 748022 - DNA, 15 bp, Homo sapiens
gttttattttactga

SEQ ID NO: 748023 - DNA, 15 bp, Homo sapiens
ttttattttactgag

SEQ ID NO: 748024 - DNA, 15 bp, Homo sapiens
tttattttactgaga

SEQ ID NO: 748025 - DNA, 15 bp, Homo sapiens
ttattttactgagat

SEQ ID NO: 748026 - DNA, 15 bp, Homo sapiens
tattttactgagatt

SEQ ID NO: 748027 - DNA, 15 bp, Homo sapiens
attttactgagattc

SEQ ID NO: 748028 - DNA, 15 bp, Homo sapiens
ttttactgagattcc

SEQ ID NO: 748029 - DNA, 15 bp, Homo sapiens
tttactgagattcca

SEQ ID NO: 748030 - DNA, 15 bp, Homo sapiens
ttactgagattccat

SEQ ID NO: 748031 - DNA, 15 bp, Homo sapiens
tactgagattccatg

SEQ ID NO: 748032 - DNA, 15 bp, Homo sapiens
actgagattccatgt

SEQ ID NO: 748033 - DNA, 15 bp, Homo sapiens
ctgagattccatgta

SEQ ID NO: 748034 - DNA, 15 bp, Homo sapiens
tgagattccatgtat

SEQ ID NO: 748035 - DNA, 15 bp, Homo sapiens
gagattccatgtatc

SEQ ID NO: 748036 - DNA, 15 bp, Homo sapiens
agattccatgtatca

SEQ ID NO: 748037 - DNA, 15 bp, Homo sapiens
gattccatgtatcag

SEQ ID NO: 748038 - DNA, 15 bp, Homo sapiens
attccatgtatcagt

SEQ ID NO: 748039 - DNA, 15 bp, Homo sapiens
ttccatgtatcagtg

SEQ ID NO: 748040 - DNA, 15 bp, Homo sapiens
tccatgtatcagtgt

SEQ ID NO: 748041 - DNA, 15 bp, Homo sapiens
ccatgtatcagtgtt

SEQ ID NO: 748042 - DNA, 15 bp, Homo sapiens
catgtatcagtgtta

SEQ ID NO: 748043 - DNA, 15 bp, Homo sapiens
atgtatcagtgttag

SEQ ID NO: 748044 - DNA, 15 bp, Homo sapiens
tgtatcagtgttaga

SEQ ID NO: 748045 - DNA, 15 bp, Homo sapiens
gtatcagtgttagac

SEQ ID NO: 748046 - DNA, 15 bp, Homo sapiens
tatcagtgttagaca

SEQ ID NO: 748047 - DNA, 15 bp, Homo sapiens
atcagtgttagacac

SEQ ID NO: 748048 - DNA, 15 bp, Homo sapiens
tcagtgttagacaca

SEQ ID NO: 748049 - DNA, 15 bp, Homo sapiens
cagtgttagacacaa

SEQ ID NO: 748050 - DNA, 15 bp, Homo sapiens
agtgttagacacaaa

SEQ ID NO: 748051 - DNA, 15 bp, Homo sapiens
gtgttagacacaaaa

SEQ ID NO: 748052 - DNA, 15 bp, Homo sapiens
tgttagacacaaaaa

SEQ ID NO: 748053 - DNA, 15 bp, Homo sapiens
gttagacacaaaaat

SEQ ID NO: 748054 - DNA, 15 bp, Homo sapiens
ttagacacaaaaatc

SEQ ID NO: 748055 - DNA, 15 bp, Homo sapiens
tagacacaaaaatca

SEQ ID NO: 748056 - DNA, 15 bp, Homo sapiens
agacacaaaaatcat

SEQ ID NO: 748057 - DNA, 15 bp, Homo sapiens
gacacaaaaatcatt

SEQ ID NO: 748058 - DNA, 15 bp, Homo sapiens
acacaaaaatcattt

SEQ ID NO: 748059 - DNA, 15 bp, Homo sapiens
cacaaaaatcatttg

SEQ ID NO: 748060 - DNA, 15 bp, Homo sapiens
acaaaaatcatttgg

SEQ ID NO: 748061 - DNA, 15 bp, Homo sapiens
caaaaatcatttggt

SEQ ID NO: 748062 - DNA, 15 bp, Homo sapiens
aaaaatcatttggtc

SEQ ID NO: 748063 - DNA, 15 bp, Homo sapiens
aaaatcatttggtca

SEQ ID NO: 748064 - DNA, 15 bp, Homo sapiens
aaatcatttggtcat

SEQ ID NO: 748065 - DNA, 15 bp, Homo sapiens
aatcatttggtcatg

SEQ ID NO: 748066 - DNA, 15 bp, Homo sapiens
atcatttggtcatgt

SEQ ID NO: 748067 - DNA, 15 bp, Homo sapiens
tcatttggtcatgtg

SEQ ID NO: 748068 - DNA, 15 bp, Homo sapiens
catttggtcatgtgc

SEQ ID NO: 748069 - DNA, 15 bp, Homo sapiens
atttggtcatgtgct

SEQ ID NO: 748070 - DNA, 15 bp, Homo sapiens
tttggtcatgtgctg

SEQ ID NO: 748071 - DNA, 15 bp, Homo sapiens
ttggtcatgtgctgc

SEQ ID NO: 748072 - DNA, 15 bp, Homo sapiens
tggtcatgtgctgcc

SEQ ID NO: 748073 - DNA, 15 bp, Homo sapiens
ggtcatgtgctgcca

SEQ ID NO: 748074 - DNA, 15 bp, Homo sapiens
gtcatgtgctgccat

SEQ ID NO: 748075 - DNA, 15 bp, Homo sapiens
tcatgtgctgccata

SEQ ID NO: 748076 - DNA, 15 bp, Homo sapiens
catgtgctgccataa

SEQ ID NO: 748077 - DNA, 15 bp, Homo sapiens
atgtgctgccataaa

SEQ ID NO: 748078 - DNA, 15 bp, Homo sapiens
tgtgctgccataaat

SEQ ID NO: 748079 - DNA, 15 bp, Homo sapiens
gtgctgccataaata

SEQ ID NO: 748080 - DNA, 15 bp, Homo sapiens
tgctgccataaataa

SEQ ID NO: 748081 - DNA, 15 bp, Homo sapiens
gctgccataaataac

SEQ ID NO: 748082 - DNA, 15 bp, Homo sapiens
ctgccataaataact

SEQ ID NO: 748083 - DNA, 15 bp, Homo sapiens
tgccataaataacta

SEQ ID NO: 748084 - DNA, 15 bp, Homo sapiens
gccataaataactat

SEQ ID NO: 748085 - DNA, 15 bp, Homo sapiens
ccataaataactata

SEQ ID NO: 748086 - DNA, 15 bp, Homo sapiens
cataaataactataa

SEQ ID NO: 748087 - DNA, 15 bp, Homo sapiens
ataaataactataaa

SEQ ID NO: 748088 - DNA, 15 bp, Homo sapiens
taaataactataaag

SEQ ID NO: 748089 - DNA, 15 bp, Homo sapiens
aaataactataaaga

SEQ ID NO: 748090 - DNA, 15 bp, Homo sapiens
aataactataaagaa

SEQ ID NO: 748091 - DNA, 15 bp, Homo sapiens
ataactataaagaaa

SEQ ID NO: 748092 - DNA, 15 bp, Homo sapiens
taactataaagaaag

SEQ ID NO: 748093 - DNA, 15 bp, Homo sapiens
aactataaagaaagt

SEQ ID NO: 748094 - DNA, 15 bp, Homo sapiens
actataaagaaagtc

SEQ ID NO: 748095 - DNA, 15 bp, Homo sapiens
ctataaagaaagtct

SEQ ID NO: 748096 - DNA, 15 bp, Homo sapiens
tataaagaaagtcta

SEQ ID NO: 748097 - DNA, 15 bp, Homo sapiens
ataaagaaagtctat

SEQ ID NO: 748098 - DNA, 15 bp, Homo sapiens
taaagaaagtctatg

SEQ ID NO: 748099 - DNA, 15 bp, Homo sapiens
aaagaaagtctatgt

SEQ ID NO: 748100 - DNA, 15 bp, Homo sapiens
aagaaagtctatgtg

SEQ ID NO: 748101 - DNA, 15 bp, Homo sapiens
agaaagtctatgtgt

SEQ ID NO: 748102 - DNA, 15 bp, Homo sapiens
gaaagtctatgtgtg

SEQ ID NO: 748103 - DNA, 15 bp, Homo sapiens
aaagtctatgtgtgc

SEQ ID NO: 748104 - DNA, 15 bp, Homo sapiens
aagtctatgtgtgcc

SEQ ID NO: 748105 - DNA, 15 bp, Homo sapiens
agtctatgtgtgcca

SEQ ID NO: 748106 - DNA, 15 bp, Homo sapiens
gtctatgtgtgccaa

SEQ ID NO: 748107 - DNA, 15 bp, Homo sapiens
tctatgtgtgccaat

SEQ ID NO: 748108 - DNA, 15 bp, Homo sapiens
ctatgtgtgccaatt

SEQ ID NO: 748109 - DNA, 15 bp, Homo sapiens
tatgtgtgccaattt

SEQ ID NO: 748110 - DNA, 15 bp, Homo sapiens
atgtgtgccaatttc

SEQ ID NO: 748111 - DNA, 15 bp, Homo sapiens
tgtgtgccaatttca

SEQ ID NO: 748112 - DNA, 15 bp, Homo sapiens
gtgtgccaatttcac

SEQ ID NO: 748113 - DNA, 15 bp, Homo sapiens
tgtgccaatttcact

SEQ ID NO: 748114 - DNA, 15 bp, Homo sapiens
gtgccaatttcactt

SEQ ID NO: 748115 - DNA, 15 bp, Homo sapiens
tgccaatttcactta

SEQ ID NO: 748116 - DNA, 15 bp, Homo sapiens
gccaatttcacttat

SEQ ID NO: 748117 - DNA, 15 bp, Homo sapiens
ccaatttcacttatt

SEQ ID NO: 748118 - DNA, 15 bp, Homo sapiens
caatttcacttattc

SEQ ID NO: 748119 - DNA, 15 bp, Homo sapiens
aatttcacttattct

SEQ ID NO: 748120 - DNA, 15 bp, Homo sapiens
atttcacttattctg

SEQ ID NO: 748121 - DNA, 15 bp, Homo sapiens
tttcacttattctgg

SEQ ID NO: 748122 - DNA, 15 bp, Homo sapiens
ttcacttattctggc

SEQ ID NO: 748123 - DNA, 15 bp, Homo sapiens
tcacttattctggcc

SEQ ID NO: 748124 - DNA, 15 bp, Homo sapiens
cacttattctggcct

SEQ ID NO: 748125 - DNA, 15 bp, Homo sapiens
acttattctggcctg

SEQ ID NO: 748126 - DNA, 15 bp, Homo sapiens
cttattctggcctgg

SEQ ID NO: 748127 - DNA, 15 bp, Homo sapiens
ttattctggcctgga

SEQ ID NO: 748128 - DNA, 15 bp, Homo sapiens
tattctggcctggat

SEQ ID NO: 748129 - DNA, 15 bp, Homo sapiens
attctggcctggatc

SEQ ID NO: 748130 - DNA, 15 bp, Homo sapiens
ttctggcctggatct

SEQ ID NO: 748131 - DNA, 15 bp, Homo sapiens
tctggcctggatctc

SEQ ID NO: 748132 - DNA, 15 bp, Homo sapiens
ctggcctggatctca

SEQ ID NO: 748133 - DNA, 15 bp, Homo sapiens
tggcctggatctcac

SEQ ID NO: 748134 - DNA, 15 bp, Homo sapiens
ggcctggatctcact

SEQ ID NO: 748135 - DNA, 15 bp, Homo sapiens
gcctggatctcactg

SEQ ID NO: 748136 - DNA, 15 bp, Homo sapiens
cctggatctcactgt

SEQ ID NO: 748137 - DNA, 15 bp, Homo sapiens
ctggatctcactgta

SEQ ID NO: 748138 - DNA, 15 bp, Homo sapiens
tggatctcactgtag

SEQ ID NO: 748139 - DNA, 15 bp, Homo sapiens
ggatctcactgtagt

SEQ ID NO: 748140 - DNA, 15 bp, Homo sapiens
gatctcactgtagta

SEQ ID NO: 748141 - DNA, 15 bp, Homo sapiens
atctcactgtagtag

SEQ ID NO: 748142 - DNA, 15 bp, Homo sapiens
tctcactgtagtaga

SEQ ID NO: 748143 - DNA, 15 bp, Homo sapiens
ctcactgtagtagat

SEQ ID NO: 748144 - DNA, 15 bp, Homo sapiens
tcactgtagtagatc

SEQ ID NO: 748145 - DNA, 15 bp, Homo sapiens
cactgtagtagatca

SEQ ID NO: 748146 - DNA, 15 bp, Homo sapiens
actgtagtagatcaa

SEQ ID NO: 748147 - DNA, 15 bp, Homo sapiens
ctgtagtagatcaaa

SEQ ID NO: 748148 - DNA, 15 bp, Homo sapiens
tgtagtagatcaaat

SEQ ID NO: 748149 - DNA, 15 bp, Homo sapiens
gtagtagatcaaatg

SEQ ID NO: 748150 - DNA, 15 bp, Homo sapiens
tagtagatcaaatgt

SEQ ID NO: 748151 - DNA, 15 bp, Homo sapiens
agtagatcaaatgtg

SEQ ID NO: 748152 - DNA, 15 bp, Homo sapiens
gtagatcaaatgtga

SEQ ID NO: 748153 - DNA, 15 bp, Homo sapiens
tagatcaaatgtgag

SEQ ID NO: 748154 - DNA, 15 bp, Homo sapiens
agatcaaatgtgagg

SEQ ID NO: 748155 - DNA, 15 bp, Homo sapiens
gatcaaatgtgagga

SEQ ID NO: 748156 - DNA, 15 bp, Homo sapiens
atcaaatgtgaggaa

SEQ ID NO: 748157 - DNA, 15 bp, Homo sapiens
tcaaatgtgaggaag

SEQ ID NO: 748158 - DNA, 15 bp, Homo sapiens
caaatgtgaggaaga

SEQ ID NO: 748159 - DNA, 15 bp, Homo sapiens
aaatgtgaggaagaa

SEQ ID NO: 748160 - DNA, 15 bp, Homo sapiens
aatgtgaggaagaaa

SEQ ID NO: 748161 - DNA, 15 bp, Homo sapiens
atgtgaggaagaaac

SEQ ID NO: 748162 - DNA, 15 bp, Homo sapiens
tgtgaggaagaaaca

SEQ ID NO: 748163 - DNA, 15 bp, Homo sapiens
gtgaggaagaaacag

SEQ ID NO: 748164 - DNA, 15 bp, Homo sapiens
tgaggaagaaacagt

SEQ ID NO: 748165 - DNA, 15 bp, Homo sapiens
gaggaagaaacagta

SEQ ID NO: 748166 - DNA, 15 bp, Homo sapiens
aggaagaaacagtag

SEQ ID NO: 748167 - DNA, 15 bp, Homo sapiens
ggaagaaacagtagc

SEQ ID NO: 748168 - DNA, 15 bp, Homo sapiens
gaagaaacagtagcc

SEQ ID NO: 748169 - DNA, 15 bp, Homo sapiens
aagaaacagtagccg

SEQ ID NO: 748170 - DNA, 15 bp, Homo sapiens
agaaacagtagccga

SEQ ID NO: 748171 - DNA, 15 bp, Homo sapiens
gaaacagtagccgag

SEQ ID NO: 748172 - DNA, 15 bp, Homo sapiens
aaacagtagccgaga

SEQ ID NO: 748173 - DNA, 15 bp, Homo sapiens
aacagtagccgagag

SEQ ID NO: 748174 - DNA, 15 bp, Homo sapiens
acagtagccgagaga

SEQ ID NO: 748175 - DNA, 15 bp, Homo sapiens
cagtagccgagagag

SEQ ID NO: 748176 - DNA, 15 bp, Homo sapiens
agtagccgagagagg

SEQ ID NO: 748177 - DNA, 15 bp, Homo sapiens
gtagccgagagaggc

SEQ ID NO: 748178 - DNA, 15 bp, Homo sapiens
tagccgagagaggct

SEQ ID NO: 748179 - DNA, 15 bp, Homo sapiens
agccgagagaggctg

SEQ ID NO: 748180 - DNA, 15 bp, Homo sapiens
gccgagagaggctgg

SEQ ID NO: 748181 - DNA, 15 bp, Homo sapiens
ccgagagaggctgga

SEQ ID NO: 748182 - DNA, 15 bp, Homo sapiens
cgagagaggctggaa

SEQ ID NO: 748183 - DNA, 15 bp, Homo sapiens
gagagaggctggaat

SEQ ID NO: 748184 - DNA, 15 bp, Homo sapiens
agagaggctggaatt

SEQ ID NO: 748185 - DNA, 15 bp, Homo sapiens
gagaggctggaatta

SEQ ID NO: 748186 - DNA, 15 bp, Homo sapiens
agaggctggaattag

SEQ ID NO: 748187 - DNA, 15 bp, Homo sapiens
gaggctggaattagt

SEQ ID NO: 748188 - DNA, 15 bp, Homo sapiens
aggctggaattagta

SEQ ID NO: 748189 - DNA, 15 bp, Homo sapiens
ggctggaattagtaa

SEQ ID NO: 748190 - DNA, 15 bp, Homo sapiens
gctggaattagtaaa

SEQ ID NO: 748191 - DNA, 15 bp, Homo sapiens
ctggaattagtaaaa

SEQ ID NO: 748192 - DNA, 15 bp, Homo sapiens
tggaattagtaaaaa

SEQ ID NO: 748193 - DNA, 15 bp, Homo sapiens
ggaattagtaaaaat

SEQ ID NO: 748194 - DNA, 15 bp, Homo sapiens
gaattagtaaaaatt

SEQ ID NO: 748195 - DNA, 15 bp, Homo sapiens
aattagtaaaaattt

SEQ ID NO: 748196 - DNA, 15 bp, Homo sapiens
attagtaaaaattta

SEQ ID NO: 748197 - DNA, 15 bp, Homo sapiens
ttagtaaaaatttaa

SEQ ID NO: 748198 - DNA, 15 bp, Homo sapiens
tagtaaaaatttaag

SEQ ID NO: 748199 - DNA, 15 bp, Homo sapiens
agtaaaaatttaaga

SEQ ID NO: 748200 - DNA, 15 bp, Homo sapiens
gtaaaaatttaagag

SEQ ID NO: 748201 - DNA, 15 bp, Homo sapiens
taaaaatttaagagt

SEQ ID NO: 748202 - DNA, 15 bp, Homo sapiens
aaaaatttaagagta

SEQ ID NO: 748203 - DNA, 15 bp, Homo sapiens
aaaatttaagagtag

SEQ ID NO: 748204 - DNA, 15 bp, Homo sapiens
aaatttaagagtagt

SEQ ID NO: 748205 - DNA, 15 bp, Homo sapiens
aatttaagagtagtt

SEQ ID NO: 748206 - DNA, 15 bp, Homo sapiens
atttaagagtagttc

SEQ ID NO: 748207 - DNA, 15 bp, Homo sapiens
tttaagagtagttcc

SEQ ID NO: 748208 - DNA, 15 bp, Homo sapiens
ttaagagtagttcca

SEQ ID NO: 748209 - DNA, 15 bp, Homo sapiens
taagagtagttccat

SEQ ID NO: 748210 - DNA, 15 bp, Homo sapiens
aagagtagttccatc

SEQ ID NO: 748211 - DNA, 15 bp, Homo sapiens
agagtagttccatcc

SEQ ID NO: 748212 - DNA, 15 bp, Homo sapiens
gagtagttccatcca

SEQ ID NO: 748213 - DNA, 15 bp, Homo sapiens
agtagttccatccat

SEQ ID NO: 748214 - DNA, 15 bp, Homo sapiens
gtagttccatccatt

SEQ ID NO: 748215 - DNA, 15 bp, Homo sapiens
tagttccatccatta

SEQ ID NO: 748216 - DNA, 15 bp, Homo sapiens
agttccatccattat

SEQ ID NO: 748217 - DNA, 15 bp, Homo sapiens
gttccatccattatg

SEQ ID NO: 748218 - DNA, 15 bp, Homo sapiens
ttccatccattatgt

SEQ ID NO: 748219 - DNA, 15 bp, Homo sapiens
tccatccattatgta

SEQ ID NO: 748220 - DNA, 15 bp, Homo sapiens
ccatccattatgtat

SEQ ID NO: 748221 - DNA, 15 bp, Homo sapiens
catccattatgtatg

SEQ ID NO: 748222 - DNA, 15 bp, Homo sapiens
atccattatgtatgc

SEQ ID NO: 748223 - DNA, 15 bp, Homo sapiens
tccattatgtatgcc

SEQ ID NO: 748224 - DNA, 15 bp, Homo sapiens
ccattatgtatgccg

SEQ ID NO: 748225 - DNA, 15 bp, Homo sapiens
cattatgtatgccgt

SEQ ID NO: 748226 - DNA, 15 bp, Homo sapiens
attatgtatgccgta

SEQ ID NO: 748227 - DNA, 15 bp, Homo sapiens
ttatgtatgccgtaa

SEQ ID NO: 748228 - DNA, 15 bp, Homo sapiens
tatgtatgccgtaat

SEQ ID NO: 748229 - DNA, 15 bp, Homo sapiens
atgtatgccgtaata

SEQ ID NO: 748230 - DNA, 15 bp, Homo sapiens
tgtatgccgtaatag

SEQ ID NO: 748231 - DNA, 15 bp, Homo sapiens
gtatgccgtaatagg

SEQ ID NO: 748232 - DNA, 15 bp, Homo sapiens
tatgccgtaataggc

SEQ ID NO: 748233 - DNA, 15 bp, Homo sapiens
atgccgtaataggcc

SEQ ID NO: 748234 - DNA, 15 bp, Homo sapiens
tgccgtaataggccc

SEQ ID NO: 748235 - DNA, 15 bp, Homo sapiens
gccgtaataggccct

SEQ ID NO: 748236 - DNA, 15 bp, Homo sapiens
ccgtaataggcccta

SEQ ID NO: 748237 - DNA, 15 bp, Homo sapiens
cgtaataggccctat

SEQ ID NO: 748238 - DNA, 15 bp, Homo sapiens
gtaataggccctata

SEQ ID NO: 748239 - DNA, 15 bp, Homo sapiens
taataggccctatat

SEQ ID NO: 748240 - DNA, 15 bp, Homo sapiens
aataggccctatatg

SEQ ID NO: 748241 - DNA, 15 bp, Homo sapiens
ataggccctatatgt

SEQ ID NO: 748242 - DNA, 15 bp, Homo sapiens
taggccctatatgtg

SEQ ID NO: 748243 - DNA, 15 bp, Homo sapiens
aggccctatatgtga

SEQ ID NO: 748244 - DNA, 15 bp, Homo sapiens
ggccctatatgtgaa

SEQ ID NO: 748245 - DNA, 15 bp, Homo sapiens
gccctatatgtgaaa

SEQ ID NO: 748246 - DNA, 15 bp, Homo sapiens
ccctatatgtgaaaa

SEQ ID NO: 748247 - DNA, 15 bp, Homo sapiens
cctatatgtgaaaag

SEQ ID NO: 748248 - DNA, 15 bp, Homo sapiens
ctatatgtgaaaagt

SEQ ID NO: 748249 - DNA, 15 bp, Homo sapiens
tatatgtgaaaagtt

SEQ ID NO: 748250 - DNA, 15 bp, Homo sapiens
atatgtgaaaagtta

SEQ ID NO: 748251 - DNA, 15 bp, Homo sapiens
tatgtgaaaagttaa

SEQ ID NO: 748252 - DNA, 15 bp, Homo sapiens
atgtgaaaagttaaa

SEQ ID NO: 748253 - DNA, 15 bp, Homo sapiens
tgtgaaaagttaaag

SEQ ID NO: 748254 - DNA, 15 bp, Homo sapiens
gtgaaaagttaaagg

SEQ ID NO: 748255 - DNA, 15 bp, Homo sapiens
tgaaaagttaaagga

SEQ ID NO: 748256 - DNA, 15 bp, Homo sapiens
gaaaagttaaaggag

SEQ ID NO: 748257 - DNA, 15 bp, Homo sapiens
aaaagttaaaggagc

SEQ ID NO: 748258 - DNA, 15 bp, Homo sapiens
aaagttaaaggagct

SEQ ID NO: 748259 - DNA, 15 bp, Homo sapiens
aagttaaaggagctt

SEQ ID NO: 748260 - DNA, 15 bp, Homo sapiens
agttaaaggagctta

SEQ ID NO: 748261 - DNA, 15 bp, Homo sapiens
gttaaaggagcttat

SEQ ID NO: 748262 - DNA, 15 bp, Homo sapiens
ttaaaggagcttatt

SEQ ID NO: 748263 - DNA, 15 bp, Homo sapiens
taaaggagcttattt

SEQ ID NO: 748264 - DNA, 15 bp, Homo sapiens
aaaggagcttattta

SEQ ID NO: 748265 - DNA, 15 bp, Homo sapiens
aaggagcttatttaa

SEQ ID NO: 748266 - DNA, 15 bp, Homo sapiens
aggagcttatttaat

SEQ ID NO: 748267 - DNA, 15 bp, Homo sapiens
ggagcttatttaatt

SEQ ID NO: 748268 - DNA, 15 bp, Homo sapiens
gagcttatttaatta

SEQ ID NO: 748269 - DNA, 15 bp, Homo sapiens
agcttatttaattat

SEQ ID NO: 748270 - DNA, 15 bp, Homo sapiens
gcttatttaattatg

SEQ ID NO: 748271 - DNA, 15 bp, Homo sapiens
cttatttaattatga

SEQ ID NO: 748272 - DNA, 15 bp, Homo sapiens
ttatttaattatgaa

SEQ ID NO: 748273 - DNA, 15 bp, Homo sapiens
tatttaattatgaag

SEQ ID NO: 748274 - DNA, 15 bp, Homo sapiens
atttaattatgaagg

SEQ ID NO: 748275 - DNA, 15 bp, Homo sapiens
tttaattatgaagga

SEQ ID NO: 748276 - DNA, 15 bp, Homo sapiens
ttaattatgaaggaa

SEQ ID NO: 748277 - DNA, 15 bp, Homo sapiens
taattatgaaggaaa

SEQ ID NO: 748278 - DNA, 15 bp, Homo sapiens
aattatgaaggaaac

SEQ ID NO: 748279 - DNA, 15 bp, Homo sapiens
attatgaaggaaact

SEQ ID NO: 748280 - DNA, 15 bp, Homo sapiens
ttatgaaggaaacta

SEQ ID NO: 748281 - DNA, 15 bp, Homo sapiens
tatgaaggaaactat

SEQ ID NO: 748282 - DNA, 15 bp, Homo sapiens
atgaaggaaactatt

SEQ ID NO: 748283 - DNA, 15 bp, Homo sapiens
tgaaggaaactatta

SEQ ID NO: 748284 - DNA, 15 bp, Homo sapiens
gaaggaaactattat

SEQ ID NO: 748285 - DNA, 15 bp, Homo sapiens
aaggaaactattata

SEQ ID NO: 748286 - DNA, 15 bp, Homo sapiens
aggaaactattatac

SEQ ID NO: 748287 - DNA, 15 bp, Homo sapiens
ggaaactattataca

SEQ ID NO: 748288 - DNA, 15 bp, Homo sapiens
gaaactattatacaa

SEQ ID NO: 748289 - DNA, 15 bp, Homo sapiens
aaactattatacaag

SEQ ID NO: 748290 - DNA, 15 bp, Homo sapiens
aactattatacaagt

SEQ ID NO: 748291 - DNA, 15 bp, Homo sapiens
actattatacaagta

SEQ ID NO: 748292 - DNA, 15 bp, Homo sapiens
ctattatacaagtaa

SEQ ID NO: 748293 - DNA, 15 bp, Homo sapiens
tattatacaagtaag

SEQ ID NO: 748294 - DNA, 15 bp, Homo sapiens
attatacaagtaagc

SEQ ID NO: 748295 - DNA, 15 bp, Homo sapiens
ttatacaagtaagca

SEQ ID NO: 748296 - DNA, 15 bp, Homo sapiens
tatacaagtaagcaa

SEQ ID NO: 748297 - DNA, 15 bp, Homo sapiens
atacaagtaagcaaa

SEQ ID NO: 748298 - DNA, 15 bp, Homo sapiens
tacaagtaagcaaaa

SEQ ID NO: 748299 - DNA, 15 bp, Homo sapiens
acaagtaagcaaaac

SEQ ID NO: 748300 - DNA, 15 bp, Homo sapiens
caagtaagcaaaaca

SEQ ID NO: 748301 - DNA, 15 bp, Homo sapiens
aagtaagcaaaacaa

SEQ ID NO: 748302 - DNA, 15 bp, Homo sapiens
agtaagcaaaacaat

SEQ ID NO: 748303 - DNA, 15 bp, Homo sapiens
gtaagcaaaacaatt

SEQ ID NO: 748304 - DNA, 15 bp, Homo sapiens
taagcaaaacaattt

SEQ ID NO: 748305 - DNA, 15 bp, Homo sapiens
aagcaaaacaattta

SEQ ID NO: 748306 - DNA, 15 bp, Homo sapiens
agcaaaacaatttat

SEQ ID NO: 748307 - DNA, 15 bp, Homo sapiens
gcaaaacaatttata

SEQ ID NO: 748308 - DNA, 15 bp, Homo sapiens
caaaacaatttataa

SEQ ID NO: 748309 - DNA, 15 bp, Homo sapiens
aaaacaatttataat

SEQ ID NO: 748310 - DNA, 15 bp, Homo sapiens
aaacaatttataata

SEQ ID NO: 748311 - DNA, 15 bp, Homo sapiens
aacaatttataataa

SEQ ID NO: 748312 - DNA, 15 bp, Homo sapiens
acaatttataataaa

SEQ ID NO: 748313 - DNA, 15 bp, Homo sapiens
caatttataataaaa

SEQ ID NO: 748314 - DNA, 15 bp, Homo sapiens
aatttataataaaat

SEQ ID NO: 748315 - DNA, 15 bp, Homo sapiens
atttataataaaata

SEQ ID NO: 748316 - DNA, 15 bp, Homo sapiens
tttataataaaatat

SEQ ID NO: 748317 - DNA, 15 bp, Homo sapiens
ttataataaaatatt

SEQ ID NO: 748318 - DNA, 15 bp, Homo sapiens
tataataaaatattc

SEQ ID NO: 748319 - DNA, 15 bp, Homo sapiens
ataataaaatattct

SEQ ID NO: 748320 - DNA, 15 bp, Homo sapiens
taataaaatattctt

SEQ ID NO: 748321 - DNA, 15 bp, Homo sapiens
aataaaatattcttt

SEQ ID NO: 748322 - DNA, 15 bp, Homo sapiens
ataaaatattcttta

SEQ ID NO: 748323 - DNA, 15 bp, Homo sapiens
taaaatattctttat

SEQ ID NO: 748324 - DNA, 15 bp, Homo sapiens
aaaatattctttatg

SEQ ID NO: 748325 - DNA, 15 bp, Homo sapiens
aaatattctttatgc

SEQ ID NO: 748326 - DNA, 15 bp, Homo sapiens
aatattctttatgct

SEQ ID NO: 748327 - DNA, 15 bp, Homo sapiens
atattctttatgctc

SEQ ID NO: 748328 - DNA, 15 bp, Homo sapiens
tattctttatgctca

SEQ ID NO: 748329 - DNA, 15 bp, Homo sapiens
attctttatgctcag

SEQ ID NO: 748330 - DNA, 15 bp, Homo sapiens
ttctttatgctcaga

SEQ ID NO: 748331 - DNA, 15 bp, Homo sapiens
tctttatgctcagaa

SEQ ID NO: 748332 - DNA, 15 bp, Homo sapiens
ctttatgctcagaat

SEQ ID NO: 748333 - DNA, 15 bp, Homo sapiens
tttatgctcagaatt

SEQ ID NO: 748334 - DNA, 15 bp, Homo sapiens
ttatgctcagaattt

SEQ ID NO: 748335 - DNA, 15 bp, Homo sapiens
tatgctcagaatttt

SEQ ID NO: 748336 - DNA, 15 bp, Homo sapiens
atgctcagaatttta

SEQ ID NO: 748337 - DNA, 15 bp, Homo sapiens
tgctcagaattttaa

SEQ ID NO: 748338 - DNA, 15 bp, Homo sapiens
gctcagaattttaaa

SEQ ID NO: 748339 - DNA, 15 bp, Homo sapiens
ctcagaattttaaaa

SEQ ID NO: 748340 - DNA, 15 bp, Homo sapiens
tcagaattttaaaaa

SEQ ID NO: 748341 - DNA, 15 bp, Homo sapiens
cagaattttaaaaat

SEQ ID NO: 748342 - DNA, 15 bp, Homo sapiens
agaattttaaaaata

SEQ ID NO: 748343 - DNA, 15 bp, Homo sapiens
gaattttaaaaatag

SEQ ID NO: 748344 - DNA, 15 bp, Homo sapiens
aattttaaaaataga

SEQ ID NO: 748345 - DNA, 15 bp, Homo sapiens
attttaaaaatagat

SEQ ID NO: 748346 - DNA, 15 bp, Homo sapiens
ttttaaaaatagatg

SEQ ID NO: 748347 - DNA, 15 bp, Homo sapiens
tttaaaaatagatgt

SEQ ID NO: 748348 - DNA, 15 bp, Homo sapiens
ttaaaaatagatgta

SEQ ID NO: 748349 - DNA, 15 bp, Homo sapiens
taaaaatagatgtag

SEQ ID NO: 748350 - DNA, 15 bp, Homo sapiens
aaaaatagatgtaga

SEQ ID NO: 748351 - DNA, 15 bp, Homo sapiens
aaaatagatgtagac

SEQ ID NO: 748352 - DNA, 15 bp, Homo sapiens
aaatagatgtagact

SEQ ID NO: 748353 - DNA, 15 bp, Homo sapiens
aatagatgtagactg

SEQ ID NO: 748354 - DNA, 15 bp, Homo sapiens
atagatgtagactgg

SEQ ID NO: 748355 - DNA, 15 bp, Homo sapiens
tagatgtagactgga

SEQ ID NO: 748356 - DNA, 15 bp, Homo sapiens
agatgtagactggaa

SEQ ID NO: 748357 - DNA, 15 bp, Homo sapiens
gatgtagactggaaa

SEQ ID NO: 748358 - DNA, 15 bp, Homo sapiens
atgtagactggaaaa

SEQ ID NO: 748359 - DNA, 15 bp, Homo sapiens
tgtagactggaaaac

SEQ ID NO: 748360 - DNA, 15 bp, Homo sapiens
gtagactggaaaacc

SEQ ID NO: 748361 - DNA, 15 bp, Homo sapiens
tagactggaaaacct

SEQ ID NO: 748362 - DNA, 15 bp, Homo sapiens
agactggaaaacctg

SEQ ID NO: 748363 - DNA, 15 bp, Homo sapiens
gactggaaaacctgc

SEQ ID NO: 748364 - DNA, 15 bp, Homo sapiens
actggaaaacctgca

SEQ ID NO: 748365 - DNA, 15 bp, Homo sapiens
ctggaaaacctgcaa

SEQ ID NO: 748366 - DNA, 15 bp, Homo sapiens
tggaaaacctgcaat

SEQ ID NO: 748367 - DNA, 15 bp, Homo sapiens
ggaaaacctgcaatt

SEQ ID NO: 748368 - DNA, 15 bp, Homo sapiens
gaaaacctgcaattt

SEQ ID NO: 748369 - DNA, 15 bp, Homo sapiens
aaaacctgcaatttc

SEQ ID NO: 748370 - DNA, 15 bp, Homo sapiens
aaacctgcaatttcc

SEQ ID NO: 748371 - DNA, 15 bp, Homo sapiens
aacctgcaatttcct

SEQ ID NO: 748372 - DNA, 15 bp, Homo sapiens
acctgcaatttcctc

SEQ ID NO: 748373 - DNA, 15 bp, Homo sapiens
cctgcaatttcctca

SEQ ID NO: 748374 - DNA, 15 bp, Homo sapiens
ctgcaatttcctcat

SEQ ID NO: 748375 - DNA, 15 bp, Homo sapiens
tgcaatttcctcatt

SEQ ID NO: 748376 - DNA, 15 bp, Homo sapiens
gcaatttcctcatta

SEQ ID NO: 748377 - DNA, 15 bp, Homo sapiens
caatttcctcattac

SEQ ID NO: 748378 - DNA, 15 bp, Homo sapiens
aatttcctcattacc

SEQ ID NO: 748379 - DNA, 15 bp, Homo sapiens
atttcctcattacca

SEQ ID NO: 748380 - DNA, 15 bp, Homo sapiens
tttcctcattaccat

SEQ ID NO: 748381 - DNA, 15 bp, Homo sapiens
ttcctcattaccatc

SEQ ID NO: 748382 - DNA, 15 bp, Homo sapiens
tcctcattaccatct

SEQ ID NO: 748383 - DNA, 15 bp, Homo sapiens
cctcattaccatcta

SEQ ID NO: 748384 - DNA, 15 bp, Homo sapiens
ctcattaccatctaa

SEQ ID NO: 748385 - DNA, 15 bp, Homo sapiens
tcattaccatctaat

SEQ ID NO: 748386 - DNA, 15 bp, Homo sapiens
cattaccatctaata

SEQ ID NO: 748387 - DNA, 15 bp, Homo sapiens
attaccatctaatac

SEQ ID NO: 748388 - DNA, 15 bp, Homo sapiens
ttaccatctaataca

SEQ ID NO: 748389 - DNA, 15 bp, Homo sapiens
taccatctaatacat

SEQ ID NO: 748390 - DNA, 15 bp, Homo sapiens
accatctaatacata

SEQ ID NO: 748391 - DNA, 15 bp, Homo sapiens
ccatctaatacatag

SEQ ID NO: 748392 - DNA, 15 bp, Homo sapiens
catctaatacataga

SEQ ID NO: 748393 - DNA, 15 bp, Homo sapiens
atctaatacatagaa

SEQ ID NO: 748394 - DNA, 15 bp, Homo sapiens
tctaatacatagaaa

SEQ ID NO: 748395 - DNA, 15 bp, Homo sapiens
ctaatacatagaaag

SEQ ID NO: 748396 - DNA, 15 bp, Homo sapiens
taatacatagaaagt

SEQ ID NO: 748397 - DNA, 15 bp, Homo sapiens
aatacatagaaagtc

SEQ ID NO: 748398 - DNA, 15 bp, Homo sapiens
atacatagaaagtca

SEQ ID NO: 748399 - DNA, 15 bp, Homo sapiens
tacatagaaagtcaa

SEQ ID NO: 748400 - DNA, 15 bp, Homo sapiens
acatagaaagtcaaa

SEQ ID NO: 748401 - DNA, 15 bp, Homo sapiens
catagaaagtcaaat

SEQ ID NO: 748402 - DNA, 15 bp, Homo sapiens
atagaaagtcaaatc

SEQ ID NO: 748403 - DNA, 15 bp, Homo sapiens
tagaaagtcaaatca

SEQ ID NO: 748404 - DNA, 15 bp, Homo sapiens
agaaagtcaaatcac

SEQ ID NO: 748405 - DNA, 15 bp, Homo sapiens
gaaagtcaaatcact

SEQ ID NO: 748406 - DNA, 15 bp, Homo sapiens
aaagtcaaatcactt

SEQ ID NO: 748407 - DNA, 15 bp, Homo sapiens
aagtcaaatcactta

SEQ ID NO: 748408 - DNA, 15 bp, Homo sapiens
agtcaaatcacttac

SEQ ID NO: 748409 - DNA, 15 bp, Homo sapiens
gtcaaatcacttacg

SEQ ID NO: 748410 - DNA, 15 bp, Homo sapiens
tcaaatcacttacgg

SEQ ID NO: 748411 - DNA, 15 bp, Homo sapiens
caaatcacttacgga

SEQ ID NO: 748412 - DNA, 15 bp, Homo sapiens
aaatcacttacggac

SEQ ID NO: 748413 - DNA, 15 bp, Homo sapiens
aatcacttacggaca

SEQ ID NO: 748414 - DNA, 15 bp, Homo sapiens
atcacttacggacag

SEQ ID NO: 748415 - DNA, 15 bp, Homo sapiens
tcacttacggacaga

SEQ ID NO: 748416 - DNA, 15 bp, Homo sapiens
cacttacggacagaa

SEQ ID NO: 748417 - DNA, 15 bp, Homo sapiens
acttacggacagaaa

SEQ ID NO: 748418 - DNA, 15 bp, Homo sapiens
cttacggacagaaac

SEQ ID NO: 748419 - DNA, 15 bp, Homo sapiens
ttacggacagaaaca

SEQ ID NO: 748420 - DNA, 15 bp, Homo sapiens
tacggacagaaacag

SEQ ID NO: 748421 - DNA, 15 bp, Homo sapiens
acggacagaaacaga

SEQ ID NO: 748422 - DNA, 15 bp, Homo sapiens
cggacagaaacagac

SEQ ID NO: 748423 - DNA, 15 bp, Homo sapiens
ggacagaaacagact

SEQ ID NO: 748424 - DNA, 15 bp, Homo sapiens
gacagaaacagactt

SEQ ID NO: 748425 - DNA, 15 bp, Homo sapiens
acagaaacagacttg

SEQ ID NO: 748426 - DNA, 15 bp, Homo sapiens
cagaaacagacttga

SEQ ID NO: 748427 - DNA, 15 bp, Homo sapiens
agaaacagacttgaa

SEQ ID NO: 748428 - DNA, 15 bp, Homo sapiens
gaaacagacttgaaa

SEQ ID NO: 748429 - DNA, 15 bp, Homo sapiens
aaacagacttgaaaa

SEQ ID NO: 748430 - DNA, 15 bp, Homo sapiens
aacagacttgaaaat

SEQ ID NO: 748431 - DNA, 15 bp, Homo sapiens
acagacttgaaaatt

SEQ ID NO: 748432 - DNA, 15 bp, Homo sapiens
cagacttgaaaattt

SEQ ID NO: 748433 - DNA, 15 bp, Homo sapiens
agacttgaaaatttc

SEQ ID NO: 748434 - DNA, 15 bp, Homo sapiens
gacttgaaaatttca

SEQ ID NO: 748435 - DNA, 15 bp, Homo sapiens
acttgaaaatttcag

SEQ ID NO: 748436 - DNA, 15 bp, Homo sapiens
cttgaaaatttcagc

SEQ ID NO: 748437 - DNA, 15 bp, Homo sapiens
ttgaaaatttcagct

SEQ ID NO: 748438 - DNA, 15 bp, Homo sapiens
tgaaaatttcagctg

SEQ ID NO: 748439 - DNA, 15 bp, Homo sapiens
gaaaatttcagctga

SEQ ID NO: 748440 - DNA, 15 bp, Homo sapiens
aaaatttcagctgag

SEQ ID NO: 748441 - DNA, 15 bp, Homo sapiens
aaatttcagctgaga

SEQ ID NO: 748442 - DNA, 15 bp, Homo sapiens
aatttcagctgagaa

SEQ ID NO: 748443 - DNA, 15 bp, Homo sapiens
atttcagctgagaaa

SEQ ID NO: 748444 - DNA, 15 bp, Homo sapiens
tttcagctgagaaaa

SEQ ID NO: 748445 - DNA, 15 bp, Homo sapiens
ttcagctgagaaaac

SEQ ID NO: 748446 - DNA, 15 bp, Homo sapiens
tcagctgagaaaaca

SEQ ID NO: 748447 - DNA, 15 bp, Homo sapiens
cagctgagaaaacat

SEQ ID NO: 748448 - DNA, 15 bp, Homo sapiens
agctgagaaaacatt

SEQ ID NO: 748449 - DNA, 15 bp, Homo sapiens
gctgagaaaacattt

SEQ ID NO: 748450 - DNA, 15 bp, Homo sapiens
ctgagaaaacatttt

SEQ ID NO: 748451 - DNA, 15 bp, Homo sapiens
tgagaaaacatttta

SEQ ID NO: 748452 - DNA, 15 bp, Homo sapiens
gagaaaacattttag

SEQ ID NO: 748453 - DNA, 15 bp, Homo sapiens
agaaaacattttaga

SEQ ID NO: 748454 - DNA, 15 bp, Homo sapiens
gaaaacattttagaa

SEQ ID NO: 748455 - DNA, 15 bp, Homo sapiens
aaaacattttagaat

SEQ ID NO: 748456 - DNA, 15 bp, Homo sapiens
aaacattttagaata

SEQ ID NO: 748457 - DNA, 15 bp, Homo sapiens
aacattttagaataa

SEQ ID NO: 748458 - DNA, 15 bp, Homo sapiens
acattttagaataaa

SEQ ID NO: 748459 - DNA, 15 bp, Homo sapiens
cattttagaataaaa

SEQ ID NO: 748460 - DNA, 15 bp, Homo sapiens
attttagaataaaag

SEQ ID NO: 748461 - DNA, 15 bp, Homo sapiens
ttttagaataaaaga

SEQ ID NO: 748462 - DNA, 15 bp, Homo sapiens
tttagaataaaagaa

SEQ ID NO: 748463 - DNA, 15 bp, Homo sapiens
ttagaataaaagaaa

SEQ ID NO: 748464 - DNA, 15 bp, Homo sapiens
tagaataaaagaaac

SEQ ID NO: 748465 - DNA, 15 bp, Homo sapiens
agaataaaagaaaca

SEQ ID NO: 748466 - DNA, 15 bp, Homo sapiens
gaataaaagaaacat

SEQ ID NO: 748467 - DNA, 15 bp, Homo sapiens
aataaaagaaacatt

SEQ ID NO: 748468 - DNA, 15 bp, Homo sapiens
ataaaagaaacattt

SEQ ID NO: 748469 - DNA, 15 bp, Homo sapiens
taaaagaaacatttt

SEQ ID NO: 748470 - DNA, 15 bp, Homo sapiens
aaaagaaacatttta

SEQ ID NO: 748471 - DNA, 15 bp, Homo sapiens
aaagaaacattttat

SEQ ID NO: 748472 - DNA, 15 bp, Homo sapiens
aagaaacattttatt

SEQ ID NO: 748473 - DNA, 15 bp, Homo sapiens
agaaacattttattc

SEQ ID NO: 748474 - DNA, 15 bp, Homo sapiens
gaaacattttattca

SEQ ID NO: 748475 - DNA, 15 bp, Homo sapiens
aaacattttattcag

SEQ ID NO: 748476 - DNA, 15 bp, Homo sapiens
aacattttattcagc

SEQ ID NO: 748477 - DNA, 15 bp, Homo sapiens
acattttattcagca

SEQ ID NO: 748478 - DNA, 15 bp, Homo sapiens
cattttattcagcac

SEQ ID NO: 748479 - DNA, 15 bp, Homo sapiens
attttattcagcaca

SEQ ID NO: 748480 - DNA, 15 bp, Homo sapiens
ttttattcagcacag

SEQ ID NO: 748481 - DNA, 15 bp, Homo sapiens
tttattcagcacagt

SEQ ID NO: 748482 - DNA, 15 bp, Homo sapiens
ttattcagcacagtc

SEQ ID NO: 748483 - DNA, 15 bp, Homo sapiens
tattcagcacagtca

SEQ ID NO: 748484 - DNA, 15 bp, Homo sapiens
attcagcacagtcaa

SEQ ID NO: 748485 - DNA, 15 bp, Homo sapiens
ttcagcacagtcaaa

SEQ ID NO: 748486 - DNA, 15 bp, Homo sapiens
tcagcacagtcaaaa

SEQ ID NO: 748487 - DNA, 15 bp, Homo sapiens
cagcacagtcaaaac

SEQ ID NO: 748488 - DNA, 15 bp, Homo sapiens
agcacagtcaaaaca

SEQ ID NO: 748489 - DNA, 15 bp, Homo sapiens
gcacagtcaaaacaa

SEQ ID NO: 748490 - DNA, 15 bp, Homo sapiens
cacagtcaaaacaaa

SEQ ID NO: 748491 - DNA, 15 bp, Homo sapiens
acagtcaaaacaaaa

SEQ ID NO: 748492 - DNA, 15 bp, Homo sapiens
cagtcaaaacaaaac

SEQ ID NO: 748493 - DNA, 15 bp, Homo sapiens
agtcaaaacaaaaca

SEQ ID NO: 748494 - DNA, 15 bp, Homo sapiens
gtcaaaacaaaacaa

SEQ ID NO: 748495 - DNA, 15 bp, Homo sapiens
tcaaaacaaaacaaa

SEQ ID NO: 748496 - DNA, 15 bp, Homo sapiens
caaaacaaaacaaaa

SEQ ID NO: 748497 - DNA, 15 bp, Homo sapiens
aaaacaaaacaaaaa

SEQ ID NO: 748498 - DNA, 15 bp, Homo sapiens
aaacaaaacaaaaac

SEQ ID NO: 748499 - DNA, 15 bp, Homo sapiens
aacaaaacaaaaaca

SEQ ID NO: 748500 - DNA, 15 bp, Homo sapiens
acaaaacaaaaacaa

SEQ ID NO: 748501 - DNA, 15 bp, Homo sapiens
caaaacaaaaacaac

SEQ ID NO: 748502 - DNA, 15 bp, Homo sapiens
aaaacaaaaacaaca

SEQ ID NO: 748503 - DNA, 15 bp, Homo sapiens
aaacaaaaacaacaa

SEQ ID NO: 748504 - DNA, 15 bp, Homo sapiens
aacaaaaacaacaaa

SEQ ID NO: 748505 - DNA, 15 bp, Homo sapiens
acaaaaacaacaaaa

SEQ ID NO: 748506 - DNA, 15 bp, Homo sapiens
caaaaacaacaaaac

SEQ ID NO: 748507 - DNA, 15 bp, Homo sapiens
aaaaacaacaaaaca

SEQ ID NO: 748508 - DNA, 15 bp, Homo sapiens
aaaacaacaaaacaa

SEQ ID NO: 748509 - DNA, 15 bp, Homo sapiens
aaacaacaaaacaat

SEQ ID NO: 748510 - DNA, 15 bp, Homo sapiens
aacaacaaaacaatg

SEQ ID NO: 748511 - DNA, 15 bp, Homo sapiens
acaacaaaacaatgt

SEQ ID NO: 748512 - DNA, 15 bp, Homo sapiens
caacaaaacaatgtt

SEQ ID NO: 748513 - DNA, 15 bp, Homo sapiens
aacaaaacaatgttt

SEQ ID NO: 748514 - DNA, 15 bp, Homo sapiens
acaaaacaatgttta

SEQ ID NO: 748515 - DNA, 15 bp, Homo sapiens
caaaacaatgtttaa

SEQ ID NO: 748516 - DNA, 15 bp, Homo sapiens
aaaacaatgtttaaa

SEQ ID NO: 748517 - DNA, 15 bp, Homo sapiens
aaacaatgtttaaaa

SEQ ID NO: 748518 - DNA, 15 bp, Homo sapiens
aacaatgtttaaaat

SEQ ID NO: 748519 - DNA, 15 bp, Homo sapiens
acaatgtttaaaatg

SEQ ID NO: 748520 - DNA, 15 bp, Homo sapiens
caatgtttaaaatgg

SEQ ID NO: 748521 - DNA, 15 bp, Homo sapiens
aatgtttaaaatgga

SEQ ID NO: 748522 - DNA, 15 bp, Homo sapiens
atgtttaaaatggac

SEQ ID NO: 748523 - DNA, 15 bp, Homo sapiens
tgtttaaaatggact

SEQ ID NO: 748524 - DNA, 15 bp, Homo sapiens
gtttaaaatggactt

SEQ ID NO: 748525 - DNA, 15 bp, Homo sapiens
tttaaaatggacttt

SEQ ID NO: 748526 - DNA, 15 bp, Homo sapiens
ttaaaatggactttc

SEQ ID NO: 748527 - DNA, 15 bp, Homo sapiens
taaaatggactttct

SEQ ID NO: 748528 - DNA, 15 bp, Homo sapiens
aaaatggactttctg

SEQ ID NO: 748529 - DNA, 15 bp, Homo sapiens
aaatggactttctgt

SEQ ID NO: 748530 - DNA, 15 bp, Homo sapiens
aatggactttctgtt

SEQ ID NO: 748531 - DNA, 15 bp, Homo sapiens
atggactttctgtta

SEQ ID NO: 748532 - DNA, 15 bp, Homo sapiens
tggactttctgttag

SEQ ID NO: 748533 - DNA, 15 bp, Homo sapiens
ggactttctgttaga

SEQ ID NO: 748534 - DNA, 15 bp, Homo sapiens
gactttctgttagag

SEQ ID NO: 748535 - DNA, 15 bp, Homo sapiens
actttctgttagagg

SEQ ID NO: 748536 - DNA, 15 bp, Homo sapiens
ctttctgttagaggt

SEQ ID NO: 748537 - DNA, 15 bp, Homo sapiens
tttctgttagaggtg

SEQ ID NO: 748538 - DNA, 15 bp, Homo sapiens
ttctgttagaggtgg

SEQ ID NO: 748539 - DNA, 15 bp, Homo sapiens
tctgttagaggtggc

SEQ ID NO: 748540 - DNA, 15 bp, Homo sapiens
ctgttagaggtggcc

SEQ ID NO: 748541 - DNA, 15 bp, Homo sapiens
tgttagaggtggccg

SEQ ID NO: 748542 - DNA, 15 bp, Homo sapiens
gttagaggtggccgt

SEQ ID NO: 748543 - DNA, 15 bp, Homo sapiens
ttagaggtggccgtt

SEQ ID NO: 748544 - DNA, 15 bp, Homo sapiens
tagaggtggccgttt

SEQ ID NO: 748545 - DNA, 15 bp, Homo sapiens
agaggtggccgtttc

SEQ ID NO: 748546 - DNA, 15 bp, Homo sapiens
gaggtggccgtttca

SEQ ID NO: 748547 - DNA, 15 bp, Homo sapiens
aggtggccgtttcac

SEQ ID NO: 748548 - DNA, 15 bp, Homo sapiens
ggtggccgtttcaca

SEQ ID NO: 748549 - DNA, 15 bp, Homo sapiens
gtggccgtttcacag

SEQ ID NO: 748550 - DNA, 15 bp, Homo sapiens
tggccgtttcacagt

SEQ ID NO: 748551 - DNA, 15 bp, Homo sapiens
ggccgtttcacagtc

SEQ ID NO: 748552 - DNA, 15 bp, Homo sapiens
gccgtttcacagtca

SEQ ID NO: 748553 - DNA, 15 bp, Homo sapiens
ccgtttcacagtcaa

SEQ ID NO: 748554 - DNA, 15 bp, Homo sapiens
cgtttcacagtcaaa

SEQ ID NO: 748555 - DNA, 15 bp, Homo sapiens
gtttcacagtcaaaa

SEQ ID NO: 748556 - DNA, 15 bp, Homo sapiens
tttcacagtcaaaat

SEQ ID NO: 748557 - DNA, 15 bp, Homo sapiens
ttcacagtcaaaatt

SEQ ID NO: 748558 - DNA, 15 bp, Homo sapiens
tcacagtcaaaatta

SEQ ID NO: 748559 - DNA, 15 bp, Homo sapiens
cacagtcaaaattat

SEQ ID NO: 748560 - DNA, 15 bp, Homo sapiens
acagtcaaaattatc

SEQ ID NO: 748561 - DNA, 15 bp, Homo sapiens
cagtcaaaattatcc

SEQ ID NO: 748562 - DNA, 15 bp, Homo sapiens
agtcaaaattatccc

SEQ ID NO: 748563 - DNA, 15 bp, Homo sapiens
gtcaaaattatccca

SEQ ID NO: 748564 - DNA, 15 bp, Homo sapiens
tcaaaattatcccag

SEQ ID NO: 748565 - DNA, 15 bp, Homo sapiens
caaaattatcccaga

SEQ ID NO: 748566 - DNA, 15 bp, Homo sapiens
aaaattatcccagag

SEQ ID NO: 748567 - DNA, 15 bp, Homo sapiens
aaattatcccagaga

SEQ ID NO: 748568 - DNA, 15 bp, Homo sapiens
aattatcccagagaa

SEQ ID NO: 748569 - DNA, 15 bp, Homo sapiens
attatcccagagaat

SEQ ID NO: 748570 - DNA, 15 bp, Homo sapiens
ttatcccagagaatt

SEQ ID NO: 748571 - DNA, 15 bp, Homo sapiens
tatcccagagaattg

SEQ ID NO: 748572 - DNA, 15 bp, Homo sapiens
atcccagagaattgt

SEQ ID NO: 748573 - DNA, 15 bp, Homo sapiens
tcccagagaattgtt

SEQ ID NO: 748574 - DNA, 15 bp, Homo sapiens
cccagagaattgttt

SEQ ID NO: 748575 - DNA, 15 bp, Homo sapiens
ccagagaattgttta

SEQ ID NO: 748576 - DNA, 15 bp, Homo sapiens
cagagaattgtttat

SEQ ID NO: 748577 - DNA, 15 bp, Homo sapiens
agagaattgtttata

SEQ ID NO: 748578 - DNA, 15 bp, Homo sapiens
gagaattgtttatat

SEQ ID NO: 748579 - DNA, 15 bp, Homo sapiens
agaattgtttatatt

SEQ ID NO: 748580 - DNA, 15 bp, Homo sapiens
gaattgtttatatta

SEQ ID NO: 748581 - DNA, 15 bp, Homo sapiens
aattgtttatattaa

SEQ ID NO: 748582 - DNA, 15 bp, Homo sapiens
attgtttatattaaa

SEQ ID NO: 748583 - DNA, 15 bp, Homo sapiens
ttgtttatattaaaa

SEQ ID NO: 748584 - DNA, 15 bp, Homo sapiens
tgtttatattaaaaa

SEQ ID NO: 748585 - DNA, 15 bp, Homo sapiens
gtttatattaaaaac

SEQ ID NO: 748586 - DNA, 15 bp, Homo sapiens
tttatattaaaaaca

SEQ ID NO: 748587 - DNA, 15 bp, Homo sapiens
ttatattaaaaacag

SEQ ID NO: 748588 - DNA, 15 bp, Homo sapiens
tatattaaaaacagg

SEQ ID NO: 748589 - DNA, 15 bp, Homo sapiens
atattaaaaacaggc

SEQ ID NO: 748590 - DNA, 15 bp, Homo sapiens
tattaaaaacaggct

SEQ ID NO: 748591 - DNA, 15 bp, Homo sapiens
attaaaaacaggctg

SEQ ID NO: 748592 - DNA, 15 bp, Homo sapiens
ttaaaaacaggctga

SEQ ID NO: 748593 - DNA, 15 bp, Homo sapiens
taaaaacaggctgag

SEQ ID NO: 748594 - DNA, 15 bp, Homo sapiens
aaaaacaggctgaga

SEQ ID NO: 748595 - DNA, 15 bp, Homo sapiens
aaaacaggctgagaa

SEQ ID NO: 748596 - DNA, 15 bp, Homo sapiens
aaacaggctgagaat

SEQ ID NO: 748597 - DNA, 15 bp, Homo sapiens
aacaggctgagaata

SEQ ID NO: 748598 - DNA, 15 bp, Homo sapiens
acaggctgagaatag

SEQ ID NO: 748599 - DNA, 15 bp, Homo sapiens
caggctgagaatagt

SEQ ID NO: 748600 - DNA, 15 bp, Homo sapiens
aggctgagaatagtt

SEQ ID NO: 748601 - DNA, 15 bp, Homo sapiens
ggctgagaatagttt

SEQ ID NO: 748602 - DNA, 15 bp, Homo sapiens
gctgagaatagtttg

SEQ ID NO: 748603 - DNA, 15 bp, Homo sapiens
ctgagaatagtttga

SEQ ID NO: 748604 - DNA, 15 bp, Homo sapiens
tgagaatagtttgac

SEQ ID NO: 748605 - DNA, 15 bp, Homo sapiens
gagaatagtttgacc

SEQ ID NO: 748606 - DNA, 15 bp, Homo sapiens
agaatagtttgacct

SEQ ID NO: 748607 - DNA, 15 bp, Homo sapiens
gaatagtttgacctc

SEQ ID NO: 748608 - DNA, 15 bp, Homo sapiens
aatagtttgacctct

SEQ ID NO: 748609 - DNA, 15 bp, Homo sapiens
atagtttgacctctg

SEQ ID NO: 748610 - DNA, 15 bp, Homo sapiens
tagtttgacctctga

SEQ ID NO: 748611 - DNA, 15 bp, Homo sapiens
agtttgacctctgat

SEQ ID NO: 748612 - DNA, 15 bp, Homo sapiens
gtttgacctctgatc

SEQ ID NO: 748613 - DNA, 15 bp, Homo sapiens
tttgacctctgatca

SEQ ID NO: 748614 - DNA, 15 bp, Homo sapiens
ttgacctctgatcac

SEQ ID NO: 748615 - DNA, 15 bp, Homo sapiens
tgacctctgatcacc

SEQ ID NO: 748616 - DNA, 15 bp, Homo sapiens
gacctctgatcacca

SEQ ID NO: 748617 - DNA, 15 bp, Homo sapiens
acctctgatcaccaa

SEQ ID NO: 748618 - DNA, 15 bp, Homo sapiens
cctctgatcaccaaa

SEQ ID NO: 748619 - DNA, 15 bp, Homo sapiens
ctctgatcaccaaaa

SEQ ID NO: 748620 - DNA, 15 bp, Homo sapiens
tctgatcaccaaaaa

SEQ ID NO: 748621 - DNA, 15 bp, Homo sapiens
ctgatcaccaaaaaa

SEQ ID NO: 748622 - DNA, 15 bp, Homo sapiens
tgatcaccaaaaaac

SEQ ID NO: 748623 - DNA, 15 bp, Homo sapiens
gatcaccaaaaaacc

SEQ ID NO: 748624 - DNA, 15 bp, Homo sapiens
atcaccaaaaaacct

SEQ ID NO: 748625 - DNA, 15 bp, Homo sapiens
tcaccaaaaaacctg

SEQ ID NO: 748626 - DNA, 15 bp, Homo sapiens
caccaaaaaacctgg

SEQ ID NO: 748627 - DNA, 15 bp, Homo sapiens
accaaaaaacctgga

SEQ ID NO: 748628 - DNA, 15 bp, Homo sapiens
ccaaaaaacctggag

SEQ ID NO: 748629 - DNA, 15 bp, Homo sapiens
caaaaaacctggagg

SEQ ID NO: 748630 - DNA, 15 bp, Homo sapiens
aaaaaacctggagga

SEQ ID NO: 748631 - DNA, 15 bp, Homo sapiens
aaaaacctggaggat

SEQ ID NO: 748632 - DNA, 15 bp, Homo sapiens
aaaacctggaggata

SEQ ID NO: 748633 - DNA, 15 bp, Homo sapiens
aaacctggaggataa

SEQ ID NO: 748634 - DNA, 15 bp, Homo sapiens
aacctggaggataaa

SEQ ID NO: 748635 - DNA, 15 bp, Homo sapiens
acctggaggataaac

SEQ ID NO: 748636 - DNA, 15 bp, Homo sapiens
cctggaggataaaca

SEQ ID NO: 748637 - DNA, 15 bp, Homo sapiens
ctggaggataaacat

SEQ ID NO: 748638 - DNA, 15 bp, Homo sapiens
tggaggataaacatt

SEQ ID NO: 748639 - DNA, 15 bp, Homo sapiens
ggaggataaacattc

SEQ ID NO: 748640 - DNA, 15 bp, Homo sapiens
gaggataaacattca

SEQ ID NO: 748641 - DNA, 15 bp, Homo sapiens
aggataaacattcat

SEQ ID NO: 748642 - DNA, 15 bp, Homo sapiens
ggataaacattcatc

SEQ ID NO: 748643 - DNA, 15 bp, Homo sapiens
gataaacattcatct

SEQ ID NO: 748644 - DNA, 15 bp, Homo sapiens
ataaacattcatctg

SEQ ID NO: 748645 - DNA, 15 bp, Homo sapiens
taaacattcatctgt

SEQ ID NO: 748646 - DNA, 15 bp, Homo sapiens
aaacattcatctgtc

SEQ ID NO: 748647 - DNA, 15 bp, Homo sapiens
aacattcatctgtca

SEQ ID NO: 748648 - DNA, 15 bp, Homo sapiens
acattcatctgtcaa

SEQ ID NO: 748649 - DNA, 15 bp, Homo sapiens
cattcatctgtcaag

SEQ ID NO: 748650 - DNA, 15 bp, Homo sapiens
attcatctgtcaaga

SEQ ID NO: 748651 - DNA, 15 bp, Homo sapiens
ttcatctgtcaagat

SEQ ID NO: 748652 - DNA, 15 bp, Homo sapiens
tcatctgtcaagatt

SEQ ID NO: 748653 - DNA, 15 bp, Homo sapiens
catctgtcaagattt

SEQ ID NO: 748654 - DNA, 15 bp, Homo sapiens
atctgtcaagatttc

SEQ ID NO: 748655 - DNA, 15 bp, Homo sapiens
tctgtcaagatttct

SEQ ID NO: 748656 - DNA, 15 bp, Homo sapiens
ctgtcaagatttctc

SEQ ID NO: 748657 - DNA, 15 bp, Homo sapiens
tgtcaagatttctct

SEQ ID NO: 748658 - DNA, 15 bp, Homo sapiens
gtcaagatttctctg

SEQ ID NO: 748659 - DNA, 15 bp, Homo sapiens
tcaagatttctctgg

SEQ ID NO: 748660 - DNA, 15 bp, Homo sapiens
caagatttctctgga

SEQ ID NO: 748661 - DNA, 15 bp, Homo sapiens
aagatttctctggaa

SEQ ID NO: 748662 - DNA, 15 bp, Homo sapiens
agatttctctggaaa

SEQ ID NO: 748663 - DNA, 15 bp, Homo sapiens
gatttctctggaaaa

SEQ ID NO: 748664 - DNA, 15 bp, Homo sapiens
atttctctggaaaat

SEQ ID NO: 748665 - DNA, 15 bp, Homo sapiens
tttctctggaaaatc

SEQ ID NO: 748666 - DNA, 15 bp, Homo sapiens
ttctctggaaaatcc

SEQ ID NO: 748667 - DNA, 15 bp, Homo sapiens
tctctggaaaatccc

SEQ ID NO: 748668 - DNA, 15 bp, Homo sapiens
ctctggaaaatccct

SEQ ID NO: 748669 - DNA, 15 bp, Homo sapiens
tctggaaaatccctg

SEQ ID NO: 748670 - DNA, 15 bp, Homo sapiens
ctggaaaatccctgc

SEQ ID NO: 748671 - DNA, 15 bp, Homo sapiens
tggaaaatccctgcg

SEQ ID NO: 748672 - DNA, 15 bp, Homo sapiens
ggaaaatccctgcgc

SEQ ID NO: 748673 - DNA, 15 bp, Homo sapiens
gaaaatccctgcgct

SEQ ID NO: 748674 - DNA, 15 bp, Homo sapiens
aaaatccctgcgctg

SEQ ID NO: 748675 - DNA, 15 bp, Homo sapiens
aaatccctgcgctgc

SEQ ID NO: 748676 - DNA, 15 bp, Homo sapiens
aatccctgcgctgct

SEQ ID NO: 748677 - DNA, 15 bp, Homo sapiens
atccctgcgctgctt

SEQ ID NO: 748678 - DNA, 15 bp, Homo sapiens
tccctgcgctgcttc

SEQ ID NO: 748679 - DNA, 15 bp, Homo sapiens
ccctgcgctgcttca

SEQ ID NO: 748680 - DNA, 15 bp, Homo sapiens
cctgcgctgcttcaa

SEQ ID NO: 748681 - DNA, 15 bp, Homo sapiens
ctgcgctgcttcaaa

SEQ ID NO: 748682 - DNA, 15 bp, Homo sapiens
tgcgctgcttcaaag

SEQ ID NO: 748683 - DNA, 15 bp, Homo sapiens
gcgctgcttcaaaga

SEQ ID NO: 748684 - DNA, 15 bp, Homo sapiens
cgctgcttcaaagag

SEQ ID NO: 748685 - DNA, 15 bp, Homo sapiens
gctgcttcaaagaga

SEQ ID NO: 748686 - DNA, 15 bp, Homo sapiens
ctgcttcaaagagac

SEQ ID NO: 748687 - DNA, 15 bp, Homo sapiens
tgcttcaaagagaca

SEQ ID NO: 748688 - DNA, 15 bp, Homo sapiens
gcttcaaagagacag

SEQ ID NO: 748689 - DNA, 15 bp, Homo sapiens
cttcaaagagacaga

SEQ ID NO: 748690 - DNA, 15 bp, Homo sapiens
ttcaaagagacagaa

SEQ ID NO: 748691 - DNA, 15 bp, Homo sapiens
tcaaagagacagaac

SEQ ID NO: 748692 - DNA, 15 bp, Homo sapiens
caaagagacagaaca

SEQ ID NO: 748693 - DNA, 15 bp, Homo sapiens
aaagagacagaacaa

SEQ ID NO: 748694 - DNA, 15 bp, Homo sapiens
aagagacagaacaaa

SEQ ID NO: 748695 - DNA, 15 bp, Homo sapiens
agagacagaacaaag

SEQ ID NO: 748696 - DNA, 15 bp, Homo sapiens
gagacagaacaaagg

SEQ ID NO: 748697 - DNA, 15 bp, Homo sapiens
agacagaacaaaggt

SEQ ID NO: 748698 - DNA, 15 bp, Homo sapiens
gacagaacaaaggta

SEQ ID NO: 748699 - DNA, 15 bp, Homo sapiens
acagaacaaaggtaa

SEQ ID NO: 748700 - DNA, 15 bp, Homo sapiens
cagaacaaaggtaaa

SEQ ID NO: 748701 - DNA, 15 bp, Homo sapiens
agaacaaaggtaaat

SEQ ID NO: 748702 - DNA, 15 bp, Homo sapiens
gaacaaaggtaaata

SEQ ID NO: 748703 - DNA, 15 bp, Homo sapiens
aacaaaggtaaatag

SEQ ID NO: 748704 - DNA, 15 bp, Homo sapiens
acaaaggtaaatagc

SEQ ID NO: 748705 - DNA, 15 bp, Homo sapiens
caaaggtaaatagca

SEQ ID NO: 748706 - DNA, 15 bp, Homo sapiens
aaaggtaaatagcat

SEQ ID NO: 748707 - DNA, 15 bp, Homo sapiens
aaggtaaatagcatc

SEQ ID NO: 748708 - DNA, 15 bp, Homo sapiens
aggtaaatagcatct

SEQ ID NO: 748709 - DNA, 15 bp, Homo sapiens
ggtaaatagcatctg

SEQ ID NO: 748710 - DNA, 15 bp, Homo sapiens
gtaaatagcatctgc

SEQ ID NO: 748711 - DNA, 15 bp, Homo sapiens
taaatagcatctgcc

SEQ ID NO: 748712 - DNA, 15 bp, Homo sapiens
aaatagcatctgcca

SEQ ID NO: 748713 - DNA, 15 bp, Homo sapiens
aatagcatctgccac

SEQ ID NO: 748714 - DNA, 15 bp, Homo sapiens
atagcatctgccacc

SEQ ID NO: 748715 - DNA, 15 bp, Homo sapiens
tagcatctgccaccc

SEQ ID NO: 748716 - DNA, 15 bp, Homo sapiens
agcatctgccaccca

SEQ ID NO: 748717 - DNA, 15 bp, Homo sapiens
gcatctgccacccaa

SEQ ID NO: 748718 - DNA, 15 bp, Homo sapiens
catctgccacccaaa

SEQ ID NO: 748719 - DNA, 15 bp, Homo sapiens
atctgccacccaaat

SEQ ID NO: 748720 - DNA, 15 bp, Homo sapiens
tctgccacccaaatc

SEQ ID NO: 748721 - DNA, 15 bp, Homo sapiens
ctgccacccaaatct

SEQ ID NO: 748722 - DNA, 15 bp, Homo sapiens
tgccacccaaatctt

SEQ ID NO: 748723 - DNA, 15 bp, Homo sapiens
gccacccaaatcttg

SEQ ID NO: 748724 - DNA, 15 bp, Homo sapiens
ccacccaaatcttgc

SEQ ID NO: 748725 - DNA, 15 bp, Homo sapiens
cacccaaatcttgct

SEQ ID NO: 748726 - DNA, 15 bp, Homo sapiens
acccaaatcttgctg

SEQ ID NO: 748727 - DNA, 15 bp, Homo sapiens
cccaaatcttgctga

SEQ ID NO: 748728 - DNA, 15 bp, Homo sapiens
ccaaatcttgctgaa

SEQ ID NO: 748729 - DNA, 15 bp, Homo sapiens
caaatcttgctgaat

SEQ ID NO: 748730 - DNA, 15 bp, Homo sapiens
aaatcttgctgaata

SEQ ID NO: 748731 - DNA, 15 bp, Homo sapiens
aatcttgctgaatag

SEQ ID NO: 748732 - DNA, 15 bp, Homo sapiens
atcttgctgaataga

SEQ ID NO: 748733 - DNA, 15 bp, Homo sapiens
tcttgctgaatagag

SEQ ID NO: 748734 - DNA, 15 bp, Homo sapiens
cttgctgaatagagt

SEQ ID NO: 748735 - DNA, 15 bp, Homo sapiens
ttgctgaatagagtg

SEQ ID NO: 748736 - DNA, 15 bp, Homo sapiens
tgctgaatagagtga

SEQ ID NO: 748737 - DNA, 15 bp, Homo sapiens
gctgaatagagtgat

SEQ ID NO: 748738 - DNA, 15 bp, Homo sapiens
ctgaatagagtgatt

SEQ ID NO: 748739 - DNA, 15 bp, Homo sapiens
tgaatagagtgattt

SEQ ID NO: 748740 - DNA, 15 bp, Homo sapiens
gaatagagtgattta

SEQ ID NO: 748741 - DNA, 15 bp, Homo sapiens
aatagagtgatttat

SEQ ID NO: 748742 - DNA, 15 bp, Homo sapiens
atagagtgatttatc

SEQ ID NO: 748743 - DNA, 15 bp, Homo sapiens
tagagtgatttatct

SEQ ID NO: 748744 - DNA, 15 bp, Homo sapiens
agagtgatttatctt

SEQ ID NO: 748745 - DNA, 15 bp, Homo sapiens
gagtgatttatcttc

SEQ ID NO: 748746 - DNA, 15 bp, Homo sapiens
agtgatttatcttca

SEQ ID NO: 748747 - DNA, 15 bp, Homo sapiens
gtgatttatcttcag

SEQ ID NO: 748748 - DNA, 15 bp, Homo sapiens
tgatttatcttcagg

SEQ ID NO: 748749 - DNA, 15 bp, Homo sapiens
gatttatcttcaggc

SEQ ID NO: 748750 - DNA, 15 bp, Homo sapiens
atttatcttcaggcc

SEQ ID NO: 748751 - DNA, 15 bp, Homo sapiens
tttatcttcaggcct

SEQ ID NO: 748752 - DNA, 15 bp, Homo sapiens
ttatcttcaggccta

SEQ ID NO: 748753 - DNA, 15 bp, Homo sapiens
tatcttcaggcctac

SEQ ID NO: 748754 - DNA, 15 bp, Homo sapiens
atcttcaggcctact

SEQ ID NO: 748755 - DNA, 15 bp, Homo sapiens
tcttcaggcctacta

SEQ ID NO: 748756 - DNA, 15 bp, Homo sapiens
cttcaggcctactag

SEQ ID NO: 748757 - DNA, 15 bp, Homo sapiens
ttcaggcctactagc

SEQ ID NO: 748758 - DNA, 15 bp, Homo sapiens
tcaggcctactagcc

SEQ ID NO: 748759 - DNA, 15 bp, Homo sapiens
caggcctactagccg

SEQ ID NO: 748760 - DNA, 15 bp, Homo sapiens
aggcctactagccgg

SEQ ID NO: 748761 - DNA, 15 bp, Homo sapiens
ggcctactagccggc

SEQ ID NO: 748762 - DNA, 15 bp, Homo sapiens
gcctactagccggcg

SEQ ID NO: 748763 - DNA, 15 bp, Homo sapiens
cctactagccggcga

SEQ ID NO: 748764 - DNA, 15 bp, Homo sapiens
ctactagccggcgac

SEQ ID NO: 748765 - DNA, 15 bp, Homo sapiens
tactagccggcgaca

SEQ ID NO: 748766 - DNA, 15 bp, Homo sapiens
actagccggcgacag

SEQ ID NO: 748767 - DNA, 15 bp, Homo sapiens
ctagccggcgacagg

SEQ ID NO: 748768 - DNA, 15 bp, Homo sapiens
tagccggcgacagga

SEQ ID NO: 748769 - DNA, 15 bp, Homo sapiens
agccggcgacaggag

SEQ ID NO: 748770 - DNA, 15 bp, Homo sapiens
gccggcgacaggagc

SEQ ID NO: 748771 - DNA, 15 bp, Homo sapiens
ccggcgacaggagcg

SEQ ID NO: 748772 - DNA, 15 bp, Homo sapiens
cggcgacaggagcgc

SEQ ID NO: 748773 - DNA, 15 bp, Homo sapiens
ggcgacaggagcgca

SEQ ID NO: 748774 - DNA, 15 bp, Homo sapiens
gcgacaggagcgcac

SEQ ID NO: 748775 - DNA, 15 bp, Homo sapiens
cgacaggagcgcacc

SEQ ID NO: 748776 - DNA, 15 bp, Homo sapiens
gacaggagcgcacct

SEQ ID NO: 748777 - DNA, 15 bp, Homo sapiens
acaggagcgcacctc

SEQ ID NO: 748778 - DNA, 15 bp, Homo sapiens
caggagcgcacctcc

SEQ ID NO: 748779 - DNA, 15 bp, Homo sapiens
aggagcgcacctcct

SEQ ID NO: 748780 - DNA, 15 bp, Homo sapiens
ggagcgcacctcctc

SEQ ID NO: 748781 - DNA, 15 bp, Homo sapiens
gagcgcacctcctcc

SEQ ID NO: 748782 - DNA, 15 bp, Homo sapiens
agcgcacctcctccc

SEQ ID NO: 748783 - DNA, 15 bp, Homo sapiens
gcgcacctcctccct

SEQ ID NO: 748784 - DNA, 15 bp, Homo sapiens
cgcacctcctccctt

SEQ ID NO: 748785 - DNA, 15 bp, Homo sapiens
gcacctcctcccttc

SEQ ID NO: 748786 - DNA, 15 bp, Homo sapiens
cacctcctcccttct

SEQ ID NO: 748787 - DNA, 15 bp, Homo sapiens
acctcctcccttctc

SEQ ID NO: 748788 - DNA, 15 bp, Homo sapiens
cctcctcccttctcc

SEQ ID NO: 748789 - DNA, 15 bp, Homo sapiens
ctcctcccttctcct

SEQ ID NO: 748790 - DNA, 15 bp, Homo sapiens
tcctcccttctccta

SEQ ID NO: 748791 - DNA, 15 bp, Homo sapiens
cctcccttctcctag

SEQ ID NO: 748792 - DNA, 15 bp, Homo sapiens
ctcccttctcctagc

SEQ ID NO: 748793 - DNA, 15 bp, Homo sapiens
tcccttctcctagct

SEQ ID NO: 748794 - DNA, 15 bp, Homo sapiens
cccttctcctagctg

SEQ ID NO: 748795 - DNA, 15 bp, Homo sapiens
ccttctcctagctgt

SEQ ID NO: 748796 - DNA, 15 bp, Homo sapiens
cttctcctagctgtc

SEQ ID NO: 748797 - DNA, 15 bp, Homo sapiens
ttctcctagctgtcc

SEQ ID NO: 748798 - DNA, 15 bp, Homo sapiens
tctcctagctgtccc

SEQ ID NO: 748799 - DNA, 15 bp, Homo sapiens
ctcctagctgtcccg

SEQ ID NO: 748800 - DNA, 15 bp, Homo sapiens
tcctagctgtcccgg

SEQ ID NO: 748801 - DNA, 15 bp, Homo sapiens
cctagctgtcccggg

SEQ ID NO: 748802 - DNA, 15 bp, Homo sapiens
ctagctgtcccgggt

SEQ ID NO: 748803 - DNA, 15 bp, Homo sapiens
tagctgtcccgggtt

SEQ ID NO: 748804 - DNA, 15 bp, Homo sapiens
agctgtcccgggttt

SEQ ID NO: 748805 - DNA, 15 bp, Homo sapiens
gctgtcccgggttta

SEQ ID NO: 748806 - DNA, 15 bp, Homo sapiens
ctgtcccgggtttat

SEQ ID NO: 748807 - DNA, 15 bp, Homo sapiens
tgtcccgggtttatt

SEQ ID NO: 748808 - DNA, 15 bp, Homo sapiens
gtcccgggtttattc

SEQ ID NO: 748809 - DNA, 15 bp, Homo sapiens
tcccgggtttattca

SEQ ID NO: 748810 - DNA, 15 bp, Homo sapiens
cccgggtttattcat

SEQ ID NO: 748811 - DNA, 15 bp, Homo sapiens
ccgggtttattcatt

SEQ ID NO: 748812 - DNA, 15 bp, Homo sapiens
cgggtttattcattc

SEQ ID NO: 748813 - DNA, 15 bp, Homo sapiens
gggtttattcattcc

SEQ ID NO: 748814 - DNA, 15 bp, Homo sapiens
ggtttattcattccc

SEQ ID NO: 748815 - DNA, 15 bp, Homo sapiens
gtttattcattccct

SEQ ID NO: 748816 - DNA, 15 bp, Homo sapiens
tttattcattccctg

SEQ ID NO: 748817 - DNA, 15 bp, Homo sapiens
ttattcattccctga

SEQ ID NO: 748818 - DNA, 15 bp, Homo sapiens
tattcattccctgag

SEQ ID NO: 748819 - DNA, 15 bp, Homo sapiens
attcattccctgagc

SEQ ID NO: 748820 - DNA, 15 bp, Homo sapiens
ttcattccctgagcc

SEQ ID NO: 748821 - DNA, 15 bp, Homo sapiens
tcattccctgagcct

SEQ ID NO: 748822 - DNA, 15 bp, Homo sapiens
cattccctgagcctg

SEQ ID NO: 748823 - DNA, 15 bp, Homo sapiens
attccctgagcctga

SEQ ID NO: 748824 - DNA, 15 bp, Homo sapiens
ttccctgagcctgaa

SEQ ID NO: 748825 - DNA, 15 bp, Homo sapiens
tccctgagcctgaat

SEQ ID NO: 748826 - DNA, 15 bp, Homo sapiens
ccctgagcctgaatc

SEQ ID NO: 748827 - DNA, 15 bp, Homo sapiens
cctgagcctgaatcc

SEQ ID NO: 748828 - DNA, 15 bp, Homo sapiens
ctgagcctgaatcct

SEQ ID NO: 748829 - DNA, 15 bp, Homo sapiens
tgagcctgaatcctg

SEQ ID NO: 748830 - DNA, 15 bp, Homo sapiens
gagcctgaatcctga

SEQ ID NO: 748831 - DNA, 15 bp, Homo sapiens
agcctgaatcctgat

SEQ ID NO: 748832 - DNA, 15 bp, Homo sapiens
gcctgaatcctgata

SEQ ID NO: 748833 - DNA, 15 bp, Homo sapiens
cctgaatcctgataa

SEQ ID NO: 748834 - DNA, 15 bp, Homo sapiens
ctgaatcctgataag

SEQ ID NO: 748835 - DNA, 15 bp, Homo sapiens
tgaatcctgataagg

SEQ ID NO: 748836 - DNA, 15 bp, Homo sapiens
gaatcctgataaggg

SEQ ID NO: 748837 - DNA, 15 bp, Homo sapiens
aatcctgataaggga

SEQ ID NO: 748838 - DNA, 15 bp, Homo sapiens
atcctgataagggag

SEQ ID NO: 748839 - DNA, 15 bp, Homo sapiens
tcctgataagggagc

SEQ ID NO: 748840 - DNA, 15 bp, Homo sapiens
cctgataagggagca

SEQ ID NO: 748841 - DNA, 15 bp, Homo sapiens
ctgataagggagcag

SEQ ID NO: 748842 - DNA, 15 bp, Homo sapiens
tgataagggagcaga

SEQ ID NO: 748843 - DNA, 15 bp, Homo sapiens
gataagggagcagag

SEQ ID NO: 748844 - DNA, 15 bp, Homo sapiens
ataagggagcagagt

SEQ ID NO: 748845 - DNA, 15 bp, Homo sapiens
taagggagcagagta

SEQ ID NO: 748846 - DNA, 15 bp, Homo sapiens
aagggagcagagtag

SEQ ID NO: 748847 - DNA, 15 bp, Homo sapiens
agggagcagagtagg

SEQ ID NO: 748848 - DNA, 15 bp, Homo sapiens
gggagcagagtaggg

SEQ ID NO: 748849 - DNA, 15 bp, Homo sapiens
ggagcagagtagggt

SEQ ID NO: 748850 - DNA, 15 bp, Homo sapiens
gagcagagtagggtt

SEQ ID NO: 748851 - DNA, 15 bp, Homo sapiens
agcagagtagggttt

SEQ ID NO: 748852 - DNA, 15 bp, Homo sapiens
gcagagtagggttta

SEQ ID NO: 748853 - DNA, 15 bp, Homo sapiens
cagagtagggtttaa

SEQ ID NO: 748854 - DNA, 15 bp, Homo sapiens
agagtagggtttaag

SEQ ID NO: 748855 - DNA, 15 bp, Homo sapiens
gagtagggtttaaga

SEQ ID NO: 748856 - DNA, 15 bp, Homo sapiens
agtagggtttaagac

SEQ ID NO: 748857 - DNA, 15 bp, Homo sapiens
gtagggtttaagacc

SEQ ID NO: 748858 - DNA, 15 bp, Homo sapiens
tagggtttaagacct

SEQ ID NO: 748859 - DNA, 15 bp, Homo sapiens
agggtttaagacctc

SEQ ID NO: 748860 - DNA, 15 bp, Homo sapiens
gggtttaagacctcg

SEQ ID NO: 748861 - DNA, 15 bp, Homo sapiens
ggtttaagacctcgg

SEQ ID NO: 748862 - DNA, 15 bp, Homo sapiens
gtttaagacctcgga

SEQ ID NO: 748863 - DNA, 15 bp, Homo sapiens
tttaagacctcggac

SEQ ID NO: 748864 - DNA, 15 bp, Homo sapiens
ttaagacctcggacc

SEQ ID NO: 748865 - DNA, 15 bp, Homo sapiens
taagacctcggaccc

SEQ ID NO: 748866 - DNA, 15 bp, Homo sapiens
aagacctcggacccc

SEQ ID NO: 748867 - DNA, 15 bp, Homo sapiens
agacctcggacccca

SEQ ID NO: 748868 - DNA, 15 bp, Homo sapiens
gacctcggaccccag

SEQ ID NO: 748869 - DNA, 15 bp, Homo sapiens
acctcggaccccaga

SEQ ID NO: 748870 - DNA, 15 bp, Homo sapiens
cctcggaccccagaa

SEQ ID NO: 748871 - DNA, 15 bp, Homo sapiens
ctcggaccccagaat

SEQ ID NO: 748872 - DNA, 15 bp, Homo sapiens
tcggaccccagaata

SEQ ID NO: 748873 - DNA, 15 bp, Homo sapiens
cggaccccagaatac

SEQ ID NO: 748874 - DNA, 15 bp, Homo sapiens
ggaccccagaataca

SEQ ID NO: 748875 - DNA, 15 bp, Homo sapiens
gaccccagaatacac

SEQ ID NO: 748876 - DNA, 15 bp, Homo sapiens
accccagaatacacc

SEQ ID NO: 748877 - DNA, 15 bp, Homo sapiens
ccccagaatacacca

SEQ ID NO: 748878 - DNA, 15 bp, Homo sapiens
cccagaatacaccac

SEQ ID NO: 748879 - DNA, 15 bp, Homo sapiens
ccagaatacaccact

SEQ ID NO: 748880 - DNA, 15 bp, Homo sapiens
cagaatacaccactg

SEQ ID NO: 748881 - DNA, 15 bp, Homo sapiens
agaatacaccactgc

SEQ ID NO: 748882 - DNA, 15 bp, Homo sapiens
gaatacaccactgca

SEQ ID NO: 748883 - DNA, 15 bp, Homo sapiens
aatacaccactgcaa

SEQ ID NO: 748884 - DNA, 15 bp, Homo sapiens
atacaccactgcaat

SEQ ID NO: 748885 - DNA, 15 bp, Homo sapiens
tacaccactgcaatt

SEQ ID NO: 748886 - DNA, 15 bp, Homo sapiens
acaccactgcaattg

SEQ ID NO: 748887 - DNA, 15 bp, Homo sapiens
caccactgcaattga

SEQ ID NO: 748888 - DNA, 15 bp, Homo sapiens
accactgcaattgaa

SEQ ID NO: 748889 - DNA, 15 bp, Homo sapiens
ccactgcaattgaat

SEQ ID NO: 748890 - DNA, 15 bp, Homo sapiens
cactgcaattgaatt

SEQ ID NO: 748891 - DNA, 15 bp, Homo sapiens
actgcaattgaattt

SEQ ID NO: 748892 - DNA, 15 bp, Homo sapiens
ctgcaattgaatttt

SEQ ID NO: 748893 - DNA, 15 bp, Homo sapiens
tgcaattgaattttg

SEQ ID NO: 748894 - DNA, 15 bp, Homo sapiens
gcaattgaattttgg

SEQ ID NO: 748895 - DNA, 15 bp, Homo sapiens
caattgaattttggt

SEQ ID NO: 748896 - DNA, 15 bp, Homo sapiens
aattgaattttggtt

SEQ ID NO: 748897 - DNA, 15 bp, Homo sapiens
attgaattttggttc

SEQ ID NO: 748898 - DNA, 15 bp, Homo sapiens
ttgaattttggttcc

SEQ ID NO: 748899 - DNA, 15 bp, Homo sapiens
tgaattttggttcca

SEQ ID NO: 748900 - DNA, 15 bp, Homo sapiens
gaattttggttccac

SEQ ID NO: 748901 - DNA, 15 bp, Homo sapiens
aattttggttccacc

SEQ ID NO: 748902 - DNA, 15 bp, Homo sapiens
attttggttccacct

SEQ ID NO: 748903 - DNA, 15 bp, Homo sapiens
ttttggttccacctt

SEQ ID NO: 748904 - DNA, 15 bp, Homo sapiens
tttggttccacctta

SEQ ID NO: 748905 - DNA, 15 bp, Homo sapiens
ttggttccaccttaa

SEQ ID NO: 748906 - DNA, 15 bp, Homo sapiens
tggttccaccttaag

SEQ ID NO: 748907 - DNA, 15 bp, Homo sapiens
ggttccaccttaagg

SEQ ID NO: 748908 - DNA, 15 bp, Homo sapiens
gttccaccttaaggt

SEQ ID NO: 748909 - DNA, 15 bp, Homo sapiens
ttccaccttaaggta

SEQ ID NO: 748910 - DNA, 15 bp, Homo sapiens
tccaccttaaggtaa

SEQ ID NO: 748911 - DNA, 15 bp, Homo sapiens
ccaccttaaggtaaa

SEQ ID NO: 748912 - DNA, 15 bp, Homo sapiens
caccttaaggtaaac

SEQ ID NO: 748913 - DNA, 15 bp, Homo sapiens
accttaaggtaaact

SEQ ID NO: 748914 - DNA, 15 bp, Homo sapiens
ccttaaggtaaacta

SEQ ID NO: 748915 - DNA, 15 bp, Homo sapiens
cttaaggtaaactac

SEQ ID NO: 748916 - DNA, 15 bp, Homo sapiens
ttaaggtaaactacg

SEQ ID NO: 748917 - DNA, 15 bp, Homo sapiens
taaggtaaactacgc

SEQ ID NO: 748918 - DNA, 15 bp, Homo sapiens
aaggtaaactacgca

SEQ ID NO: 748919 - DNA, 15 bp, Homo sapiens
aggtaaactacgcag

SEQ ID NO: 748920 - DNA, 15 bp, Homo sapiens
ggtaaactacgcagc

SEQ ID NO: 748921 - DNA, 15 bp, Homo sapiens
gtaaactacgcagct

SEQ ID NO: 748922 - DNA, 15 bp, Homo sapiens
taaactacgcagctg

SEQ ID NO: 748923 - DNA, 15 bp, Homo sapiens
aaactacgcagctgc

SEQ ID NO: 748924 - DNA, 15 bp, Homo sapiens
aactacgcagctgct

SEQ ID NO: 748925 - DNA, 15 bp, Homo sapiens
actacgcagctgctg

SEQ ID NO: 748926 - DNA, 15 bp, Homo sapiens
ctacgcagctgctgt

SEQ ID NO: 748927 - DNA, 15 bp, Homo sapiens
tacgcagctgctgtg

SEQ ID NO: 748928 - DNA, 15 bp, Homo sapiens
acgcagctgctgtga

SEQ ID NO: 748929 - DNA, 15 bp, Homo sapiens
cgcagctgctgtgag

SEQ ID NO: 748930 - DNA, 15 bp, Homo sapiens
gcagctgctgtgagc

SEQ ID NO: 748931 - DNA, 15 bp, Homo sapiens
cagctgctgtgagcc

SEQ ID NO: 748932 - DNA, 15 bp, Homo sapiens
agctgctgtgagcct

SEQ ID NO: 748933 - DNA, 15 bp, Homo sapiens
gctgctgtgagcctc

SEQ ID NO: 748934 - DNA, 15 bp, Homo sapiens
ctgctgtgagcctca

SEQ ID NO: 748935 - DNA, 15 bp, Homo sapiens
tgctgtgagcctcag

SEQ ID NO: 748936 - DNA, 15 bp, Homo sapiens
gctgtgagcctcagt

SEQ ID NO: 748937 - DNA, 15 bp, Homo sapiens
ctgtgagcctcagtt

SEQ ID NO: 748938 - DNA, 15 bp, Homo sapiens
tgtgagcctcagttt

SEQ ID NO: 748939 - DNA, 15 bp, Homo sapiens
gtgagcctcagtttc

SEQ ID NO: 748940 - DNA, 15 bp, Homo sapiens
tgagcctcagtttcc

SEQ ID NO: 748941 - DNA, 15 bp, Homo sapiens
gagcctcagtttccc

SEQ ID NO: 748942 - DNA, 15 bp, Homo sapiens
agcctcagtttccct

SEQ ID NO: 748943 - DNA, 15 bp, Homo sapiens
gcctcagtttcccta

SEQ ID NO: 748944 - DNA, 15 bp, Homo sapiens
cctcagtttccctac

SEQ ID NO: 748945 - DNA, 15 bp, Homo sapiens
ctcagtttccctacc

SEQ ID NO: 748946 - DNA, 15 bp, Homo sapiens
tcagtttccctacct

SEQ ID NO: 748947 - DNA, 15 bp, Homo sapiens
cagtttccctaccta

SEQ ID NO: 748948 - DNA, 15 bp, Homo sapiens
agtttccctacctat

SEQ ID NO: 748949 - DNA, 15 bp, Homo sapiens
gtttccctacctata

SEQ ID NO: 748950 - DNA, 15 bp, Homo sapiens
tttccctacctatag

SEQ ID NO: 748951 - DNA, 15 bp, Homo sapiens
ttccctacctataga

SEQ ID NO: 748952 - DNA, 15 bp, Homo sapiens
tccctacctatagaa

SEQ ID NO: 748953 - DNA, 15 bp, Homo sapiens
ccctacctatagaaa

SEQ ID NO: 748954 - DNA, 15 bp, Homo sapiens
cctacctatagaaag

SEQ ID NO: 748955 - DNA, 15 bp, Homo sapiens
ctacctatagaaaga

SEQ ID NO: 748956 - DNA, 15 bp, Homo sapiens
tacctatagaaagag

SEQ ID NO: 748957 - DNA, 15 bp, Homo sapiens
acctatagaaagagg

SEQ ID NO: 748958 - DNA, 15 bp, Homo sapiens
cctatagaaagagga

SEQ ID NO: 748959 - DNA, 15 bp, Homo sapiens
ctatagaaagaggat

SEQ ID NO: 748960 - DNA, 15 bp, Homo sapiens
tatagaaagaggatc

SEQ ID NO: 748961 - DNA, 15 bp, Homo sapiens
atagaaagaggatcg

SEQ ID NO: 748962 - DNA, 15 bp, Homo sapiens
tagaaagaggatcgt

SEQ ID NO: 748963 - DNA, 15 bp, Homo sapiens
agaaagaggatcgta

SEQ ID NO: 748964 - DNA, 15 bp, Homo sapiens
gaaagaggatcgtag

SEQ ID NO: 748965 - DNA, 15 bp, Homo sapiens
aaagaggatcgtagt

SEQ ID NO: 748966 - DNA, 15 bp, Homo sapiens
aagaggatcgtagtg

SEQ ID NO: 748967 - DNA, 15 bp, Homo sapiens
agaggatcgtagtgg

SEQ ID NO: 748968 - DNA, 15 bp, Homo sapiens
gaggatcgtagtggg

SEQ ID NO: 748969 - DNA, 15 bp, Homo sapiens
aggatcgtagtgggg

SEQ ID NO: 748970 - DNA, 15 bp, Homo sapiens
ggatcgtagtgggga

SEQ ID NO: 748971 - DNA, 15 bp, Homo sapiens
gatcgtagtggggaa

SEQ ID NO: 748972 - DNA, 15 bp, Homo sapiens
atcgtagtggggaat

SEQ ID NO: 748973 - DNA, 15 bp, Homo sapiens
tcgtagtggggaatt

SEQ ID NO: 748974 - DNA, 15 bp, Homo sapiens
cgtagtggggaattg

SEQ ID NO: 748975 - DNA, 15 bp, Homo sapiens
gtagtggggaattgt

SEQ ID NO: 748976 - DNA, 15 bp, Homo sapiens
tagtggggaattgtt

SEQ ID NO: 748977 - DNA, 15 bp, Homo sapiens
agtggggaattgttg

SEQ ID NO: 748978 - DNA, 15 bp, Homo sapiens
gtggggaattgttgc

SEQ ID NO: 748979 - DNA, 15 bp, Homo sapiens
tggggaattgttgca

SEQ ID NO: 748980 - DNA, 15 bp, Homo sapiens
ggggaattgttgcag

SEQ ID NO: 748981 - DNA, 15 bp, Homo sapiens
gggaattgttgcagg

SEQ ID NO: 748982 - DNA, 15 bp, Homo sapiens
ggaattgttgcaggg

SEQ ID NO: 748983 - DNA, 15 bp, Homo sapiens
gaattgttgcagggg

SEQ ID NO: 748984 - DNA, 15 bp, Homo sapiens
aattgttgcaggggt

SEQ ID NO: 748985 - DNA, 15 bp, Homo sapiens
attgttgcaggggtt

SEQ ID NO: 748986 - DNA, 15 bp, Homo sapiens
ttgttgcaggggtta

SEQ ID NO: 748987 - DNA, 15 bp, Homo sapiens
tgttgcaggggttaa

SEQ ID NO: 748988 - DNA, 15 bp, Homo sapiens
gttgcaggggttaaa

SEQ ID NO: 748989 - DNA, 15 bp, Homo sapiens
ttgcaggggttaaat

SEQ ID NO: 748990 - DNA, 15 bp, Homo sapiens
tgcaggggttaaatg

SEQ ID NO: 748991 - DNA, 15 bp, Homo sapiens
gcaggggttaaatga

SEQ ID NO: 748992 - DNA, 15 bp, Homo sapiens
caggggttaaatgag

SEQ ID NO: 748993 - DNA, 15 bp, Homo sapiens
aggggttaaatgaga

SEQ ID NO: 748994 - DNA, 15 bp, Homo sapiens
ggggttaaatgagat

SEQ ID NO: 748995 - DNA, 15 bp, Homo sapiens
gggttaaatgagatt

SEQ ID NO: 748996 - DNA, 15 bp, Homo sapiens
ggttaaatgagattg

SEQ ID NO: 748997 - DNA, 15 bp, Homo sapiens
gttaaatgagattgt

SEQ ID NO: 748998 - DNA, 15 bp, Homo sapiens
ttaaatgagattgta

SEQ ID NO: 748999 - DNA, 15 bp, Homo sapiens
taaatgagattgtac

SEQ ID NO: 749000 - DNA, 15 bp, Homo sapiens
aaatgagattgtacg

SEQ ID NO: 749001 - DNA, 15 bp, Homo sapiens
aatgagattgtacgg

SEQ ID NO: 749002 - DNA, 15 bp, Homo sapiens
atgagattgtacgga

SEQ ID NO: 749003 - DNA, 15 bp, Homo sapiens
tgagattgtacggat

SEQ ID NO: 749004 - DNA, 15 bp, Homo sapiens
gagattgtacggatc

SEQ ID NO: 749005 - DNA, 15 bp, Homo sapiens
agattgtacggatcg

SEQ ID NO: 749006 - DNA, 15 bp, Homo sapiens
gattgtacggatcgt

SEQ ID NO: 749007 - DNA, 15 bp, Homo sapiens
attgtacggatcgtg

SEQ ID NO: 749008 - DNA, 15 bp, Homo sapiens
ttgtacggatcgtgg

SEQ ID NO: 749009 - DNA, 15 bp, Homo sapiens
tgtacggatcgtgga

SEQ ID NO: 749010 - DNA, 15 bp, Homo sapiens
gtacggatcgtggag

SEQ ID NO: 749011 - DNA, 15 bp, Homo sapiens
tacggatcgtggagc

SEQ ID NO: 749012 - DNA, 15 bp, Homo sapiens
acggatcgtggagca

SEQ ID NO: 749013 - DNA, 15 bp, Homo sapiens
cggatcgtggagcag

SEQ ID NO: 749014 - DNA, 15 bp, Homo sapiens
ggatcgtggagcagc

SEQ ID NO: 749015 - DNA, 15 bp, Homo sapiens
gatcgtggagcagcg

SEQ ID NO: 749016 - DNA, 15 bp, Homo sapiens
atcgtggagcagcgc

SEQ ID NO: 749017 - DNA, 15 bp, Homo sapiens
tcgtggagcagcgcc

SEQ ID NO: 749018 - DNA, 15 bp, Homo sapiens
cgtggagcagcgcct

SEQ ID NO: 749019 - DNA, 15 bp, Homo sapiens
gtggagcagcgcctg

SEQ ID NO: 749020 - DNA, 15 bp, Homo sapiens
tggagcagcgcctgg

SEQ ID NO: 749021 - DNA, 15 bp, Homo sapiens
ggagcagcgcctggc

SEQ ID NO: 749022 - DNA, 15 bp, Homo sapiens
gagcagcgcctggcg

SEQ ID NO: 749023 - DNA, 15 bp, Homo sapiens
agcagcgcctggcgt

SEQ ID NO: 749024 - DNA, 15 bp, Homo sapiens
gcagcgcctggcgtg

SEQ ID NO: 749025 - DNA, 15 bp, Homo sapiens
cagcgcctggcgtgt

SEQ ID NO: 749026 - DNA, 15 bp, Homo sapiens
agcgcctggcgtgtg

SEQ ID NO: 749027 - DNA, 15 bp, Homo sapiens
gcgcctggcgtgtgg

SEQ ID NO: 749028 - DNA, 15 bp, Homo sapiens
cgcctggcgtgtggt

SEQ ID NO: 749029 - DNA, 15 bp, Homo sapiens
gcctggcgtgtggta

SEQ ID NO: 749030 - DNA, 15 bp, Homo sapiens
cctggcgtgtggtaa

SEQ ID NO: 749031 - DNA, 15 bp, Homo sapiens
ctggcgtgtggtaaa

SEQ ID NO: 749032 - DNA, 15 bp, Homo sapiens
tggcgtgtggtaaac

SEQ ID NO: 749033 - DNA, 15 bp, Homo sapiens
ggcgtgtggtaaacg

SEQ ID NO: 749034 - DNA, 15 bp, Homo sapiens
gcgtgtggtaaacgc

SEQ ID NO: 749035 - DNA, 15 bp, Homo sapiens
cgtgtggtaaacgct

SEQ ID NO: 749036 - DNA, 15 bp, Homo sapiens
gtgtggtaaacgctc

SEQ ID NO: 749037 - DNA, 15 bp, Homo sapiens
tgtggtaaacgctca

SEQ ID NO: 749038 - DNA, 15 bp, Homo sapiens
gtggtaaacgctcaa

SEQ ID NO: 749039 - DNA, 15 bp, Homo sapiens
tggtaaacgctcaac

SEQ ID NO: 749040 - DNA, 15 bp, Homo sapiens
ggtaaacgctcaact

SEQ ID NO: 749041 - DNA, 15 bp, Homo sapiens
gtaaacgctcaactt

SEQ ID NO: 749042 - DNA, 15 bp, Homo sapiens
taaacgctcaactta

SEQ ID NO: 749043 - DNA, 15 bp, Homo sapiens
aaacgctcaacttat

SEQ ID NO: 749044 - DNA, 15 bp, Homo sapiens
aacgctcaacttatg

SEQ ID NO: 749045 - DNA, 15 bp, Homo sapiens
acgctcaacttatgc

SEQ ID NO: 749046 - DNA, 15 bp, Homo sapiens
cgctcaacttatgcg

SEQ ID NO: 749047 - DNA, 15 bp, Homo sapiens
gctcaacttatgcgg

SEQ ID NO: 749048 - DNA, 15 bp, Homo sapiens
ctcaacttatgcggg

SEQ ID NO: 749049 - DNA, 15 bp, Homo sapiens
tcaacttatgcgggt

SEQ ID NO: 749050 - DNA, 15 bp, Homo sapiens
caacttatgcgggtt

SEQ ID NO: 749051 - DNA, 15 bp, Homo sapiens
aacttatgcgggttg

SEQ ID NO: 749052 - DNA, 15 bp, Homo sapiens
acttatgcgggttgt

SEQ ID NO: 749053 - DNA, 15 bp, Homo sapiens
cttatgcgggttgta

SEQ ID NO: 749054 - DNA, 15 bp, Homo sapiens
ttatgcgggttgtaa

SEQ ID NO: 749055 - DNA, 15 bp, Homo sapiens
tatgcgggttgtaac

SEQ ID NO: 749056 - DNA, 15 bp, Homo sapiens
atgcgggttgtaact

SEQ ID NO: 749057 - DNA, 15 bp, Homo sapiens
tgcgggttgtaactg

SEQ ID NO: 749058 - DNA, 15 bp, Homo sapiens
gcgggttgtaactgc

SEQ ID NO: 749059 - DNA, 15 bp, Homo sapiens
cgggttgtaactgcc

SEQ ID NO: 749060 - DNA, 15 bp, Homo sapiens
gggttgtaactgcct

SEQ ID NO: 749061 - DNA, 15 bp, Homo sapiens
ggttgtaactgcctg

SEQ ID NO: 749062 - DNA, 15 bp, Homo sapiens
gttgtaactgcctga

SEQ ID NO: 749063 - DNA, 15 bp, Homo sapiens
ttgtaactgcctgag

SEQ ID NO: 749064 - DNA, 15 bp, Homo sapiens
tgtaactgcctgagg

SEQ ID NO: 749065 - DNA, 15 bp, Homo sapiens
gtaactgcctgaggc

SEQ ID NO: 749066 - DNA, 15 bp, Homo sapiens
taactgcctgaggcg

SEQ ID NO: 749067 - DNA, 15 bp, Homo sapiens
aactgcctgaggcgt

SEQ ID NO: 749068 - DNA, 15 bp, Homo sapiens
actgcctgaggcgtt

SEQ ID NO: 749069 - DNA, 15 bp, Homo sapiens
ctgcctgaggcgttt

SEQ ID NO: 749070 - DNA, 15 bp, Homo sapiens
tgcctgaggcgtttc

SEQ ID NO: 749071 - DNA, 15 bp, Homo sapiens
gcctgaggcgtttcc

SEQ ID NO: 749072 - DNA, 15 bp, Homo sapiens
cctgaggcgtttcct

SEQ ID NO: 749073 - DNA, 15 bp, Homo sapiens
ctgaggcgtttcctt

SEQ ID NO: 749074 - DNA, 15 bp, Homo sapiens
tgaggcgtttccttc

SEQ ID NO: 749075 - DNA, 15 bp, Homo sapiens
gaggcgtttccttcg

SEQ ID NO: 749076 - DNA, 15 bp, Homo sapiens
aggcgtttccttcgg

SEQ ID NO: 749077 - DNA, 15 bp, Homo sapiens
ggcgtttccttcggc

SEQ ID NO: 749078 - DNA, 15 bp, Homo sapiens
gcgtttccttcggcg

SEQ ID NO: 749079 - DNA, 15 bp, Homo sapiens
cgtttccttcggcgc

SEQ ID NO: 749080 - DNA, 15 bp, Homo sapiens
gtttccttcggcgcg

SEQ ID NO: 749081 - DNA, 15 bp, Homo sapiens
tttccttcggcgcgc

SEQ ID NO: 749082 - DNA, 15 bp, Homo sapiens
ttccttcggcgcgcc

SEQ ID NO: 749083 - DNA, 15 bp, Homo sapiens
tccttcggcgcgcca

SEQ ID NO: 749084 - DNA, 15 bp, Homo sapiens
ccttcggcgcgccac

SEQ ID NO: 749085 - DNA, 15 bp, Homo sapiens
cttcggcgcgccact

SEQ ID NO: 749086 - DNA, 15 bp, Homo sapiens
ttcggcgcgccactt

SEQ ID NO: 749087 - DNA, 15 bp, Homo sapiens
tcggcgcgccacttg

SEQ ID NO: 749088 - DNA, 15 bp, Homo sapiens
cggcgcgccacttgg

SEQ ID NO: 749089 - DNA, 15 bp, Homo sapiens
ggcgcgccacttggc

SEQ ID NO: 749090 - DNA, 15 bp, Homo sapiens
gcgcgccacttggcc

SEQ ID NO: 749091 - DNA, 15 bp, Homo sapiens
cgcgccacttggcct

SEQ ID NO: 749092 - DNA, 15 bp, Homo sapiens
gcgccacttggcctt

SEQ ID NO: 749093 - DNA, 15 bp, Homo sapiens
cgccacttggccttc

SEQ ID NO: 749094 - DNA, 15 bp, Homo sapiens
gccacttggccttct

SEQ ID NO: 749095 - DNA, 15 bp, Homo sapiens
ccacttggccttctc

SEQ ID NO: 749096 - DNA, 15 bp, Homo sapiens
cacttggccttctct

SEQ ID NO: 749097 - DNA, 15 bp, Homo sapiens
acttggccttctctt

SEQ ID NO: 749098 - DNA, 15 bp, Homo sapiens
cttggccttctcttt

SEQ ID NO: 749099 - DNA, 15 bp, Homo sapiens
ttggccttctctttc

SEQ ID NO: 749100 - DNA, 15 bp, Homo sapiens
tggccttctctttct

SEQ ID NO: 749101 - DNA, 15 bp, Homo sapiens
ggccttctctttcta

SEQ ID NO: 749102 - DNA, 15 bp, Homo sapiens
gccttctctttctaa

SEQ ID NO: 749103 - DNA, 15 bp, Homo sapiens
ccttctctttctaaa

SEQ ID NO: 749104 - DNA, 15 bp, Homo sapiens
cttctctttctaaat

SEQ ID NO: 749105 - DNA, 15 bp, Homo sapiens
ttctctttctaaata

SEQ ID NO: 749106 - DNA, 15 bp, Homo sapiens
tctctttctaaatat

SEQ ID NO: 749107 - DNA, 15 bp, Homo sapiens
ctctttctaaatatt

SEQ ID NO: 749108 - DNA, 15 bp, Homo sapiens
tctttctaaatatta

SEQ ID NO: 749109 - DNA, 15 bp, Homo sapiens
ctttctaaatattag

SEQ ID NO: 749110 - DNA, 15 bp, Homo sapiens
tttctaaatattagc

SEQ ID NO: 749111 - DNA, 15 bp, Homo sapiens
ttctaaatattagca

SEQ ID NO: 749112 - DNA, 15 bp, Homo sapiens
tctaaatattagcat

SEQ ID NO: 749113 - DNA, 15 bp, Homo sapiens
ctaaatattagcata

SEQ ID NO: 749114 - DNA, 15 bp, Homo sapiens
taaatattagcataa

SEQ ID NO: 749115 - DNA, 15 bp, Homo sapiens
aaatattagcataat

SEQ ID NO: 749116 - DNA, 15 bp, Homo sapiens
aatattagcataata

SEQ ID NO: 749117 - DNA, 15 bp, Homo sapiens
atattagcataataa

SEQ ID NO: 749118 - DNA, 15 bp, Homo sapiens
tattagcataataaa

SEQ ID NO: 749119 - DNA, 15 bp, Homo sapiens
attagcataataaat

SEQ ID NO: 749120 - DNA, 15 bp, Homo sapiens
ttagcataataaata

SEQ ID NO: 749121 - DNA, 15 bp, Homo sapiens
tagcataataaatat

SEQ ID NO: 749122 - DNA, 15 bp, Homo sapiens
agcataataaatata

SEQ ID NO: 749123 - DNA, 15 bp, Homo sapiens
gcataataaatataa

SEQ ID NO: 749124 - DNA, 15 bp, Homo sapiens
cataataaatataaa

SEQ ID NO: 749125 - DNA, 15 bp, Homo sapiens
ataataaatataaat

SEQ ID NO: 749126 - DNA, 15 bp, Homo sapiens
taataaatataaatg

SEQ ID NO: 749127 - DNA, 15 bp, Homo sapiens
aataaatataaatgg

SEQ ID NO: 749128 - DNA, 15 bp, Homo sapiens
ataaatataaatgga

SEQ ID NO: 749129 - DNA, 15 bp, Homo sapiens
taaatataaatggac

SEQ ID NO: 749130 - DNA, 15 bp, Homo sapiens
aaatataaatggacc

SEQ ID NO: 749131 - DNA, 15 bp, Homo sapiens
aatataaatggaccc

SEQ ID NO: 749132 - DNA, 15 bp, Homo sapiens
atataaatggaccca

SEQ ID NO: 749133 - DNA, 15 bp, Homo sapiens
tataaatggacccag

SEQ ID NO: 749134 - DNA, 15 bp, Homo sapiens
ataaatggacccaga

SEQ ID NO: 749135 - DNA, 15 bp, Homo sapiens
taaatggacccagaa

SEQ ID NO: 749136 - DNA, 15 bp, Homo sapiens
aaatggacccagaac

SEQ ID NO: 749137 - DNA, 15 bp, Homo sapiens
aatggacccagaacg

SEQ ID NO: 749138 - DNA, 15 bp, Homo sapiens
atggacccagaacgc

SEQ ID NO: 749139 - DNA, 15 bp, Homo sapiens
tggacccagaacgcg

SEQ ID NO: 749140 - DNA, 15 bp, Homo sapiens
ggacccagaacgcga

SEQ ID NO: 749141 - DNA, 15 bp, Homo sapiens
gacccagaacgcgag

SEQ ID NO: 749142 - DNA, 15 bp, Homo sapiens
acccagaacgcgagg

SEQ ID NO: 749143 - DNA, 15 bp, Homo sapiens
cccagaacgcgaggg

SEQ ID NO: 749144 - DNA, 15 bp, Homo sapiens
ccagaacgcgagggg

SEQ ID NO: 749145 - DNA, 15 bp, Homo sapiens
cagaacgcgaggggg

SEQ ID NO: 749146 - DNA, 15 bp, Homo sapiens
agaacgcgagggggc

SEQ ID NO: 749147 - DNA, 15 bp, Homo sapiens
gaacgcgagggggca

SEQ ID NO: 749148 - DNA, 15 bp, Homo sapiens
aacgcgagggggcag

SEQ ID NO: 749149 - DNA, 15 bp, Homo sapiens
acgcgagggggcagg

SEQ ID NO: 749150 - DNA, 15 bp, Homo sapiens
cgcgagggggcaggg

SEQ ID NO: 749151 - DNA, 15 bp, Homo sapiens
gcgagggggcagggg

SEQ ID NO: 749152 - DNA, 15 bp, Homo sapiens
cgagggggcaggggc

SEQ ID NO: 749153 - DNA, 15 bp, Homo sapiens
gagggggcaggggcc

SEQ ID NO: 749154 - DNA, 15 bp, Homo sapiens
agggggcaggggcca

SEQ ID NO: 749155 - DNA, 15 bp, Homo sapiens
gggggcaggggccac

SEQ ID NO: 749156 - DNA, 15 bp, Homo sapiens
ggggcaggggccacg

SEQ ID NO: 749157 - DNA, 15 bp, Homo sapiens
gggcaggggccacgt

SEQ ID NO: 749158 - DNA, 15 bp, Homo sapiens
ggcaggggccacgtg

SEQ ID NO: 749159 - DNA, 15 bp, Homo sapiens
gcaggggccacgtga

SEQ ID NO: 749160 - DNA, 15 bp, Homo sapiens
caggggccacgtgat

SEQ ID NO: 749161 - DNA, 15 bp, Homo sapiens
aggggccacgtgatc

SEQ ID NO: 749162 - DNA, 15 bp, Homo sapiens
ggggccacgtgatcg

SEQ ID NO: 749163 - DNA, 15 bp, Homo sapiens
gggccacgtgatcgc

SEQ ID NO: 749164 - DNA, 15 bp, Homo sapiens
ggccacgtgatcgct

SEQ ID NO: 749165 - DNA, 15 bp, Homo sapiens
gccacgtgatcgctc

SEQ ID NO: 749166 - DNA, 15 bp, Homo sapiens
ccacgtgatcgctcc

SEQ ID NO: 749167 - DNA, 15 bp, Homo sapiens
cacgtgatcgctcca

SEQ ID NO: 749168 - DNA, 15 bp, Homo sapiens
acgtgatcgctccac

SEQ ID NO: 749169 - DNA, 15 bp, Homo sapiens
cgtgatcgctccacg

SEQ ID NO: 749170 - DNA, 15 bp, Homo sapiens
gtgatcgctccacga

SEQ ID NO: 749171 - DNA, 15 bp, Homo sapiens
tgatcgctccacgaa

SEQ ID NO: 749172 - DNA, 15 bp, Homo sapiens
gatcgctccacgaaa

SEQ ID NO: 749173 - DNA, 15 bp, Homo sapiens
atcgctccacgaaag

SEQ ID NO: 749174 - DNA, 15 bp, Homo sapiens
tcgctccacgaaagc

SEQ ID NO: 749175 - DNA, 15 bp, Homo sapiens
cgctccacgaaagcc

SEQ ID NO: 749176 - DNA, 15 bp, Homo sapiens
gctccacgaaagcca

SEQ ID NO: 749177 - DNA, 15 bp, Homo sapiens
ctccacgaaagccac

SEQ ID NO: 749178 - DNA, 15 bp, Homo sapiens
tccacgaaagccact

SEQ ID NO: 749179 - DNA, 15 bp, Homo sapiens
ccacgaaagccactt

SEQ ID NO: 749180 - DNA, 15 bp, Homo sapiens
cacgaaagccacttg

SEQ ID NO: 749181 - DNA, 15 bp, Homo sapiens
acgaaagccacttgt

SEQ ID NO: 749182 - DNA, 15 bp, Homo sapiens
cgaaagccacttgta

SEQ ID NO: 749183 - DNA, 15 bp, Homo sapiens
gaaagccacttgtag

SEQ ID NO: 749184 - DNA, 15 bp, Homo sapiens
aaagccacttgtagg

SEQ ID NO: 749185 - DNA, 15 bp, Homo sapiens
aagccacttgtaggg

SEQ ID NO: 749186 - DNA, 15 bp, Homo sapiens
agccacttgtaggga

SEQ ID NO: 749187 - DNA, 15 bp, Homo sapiens
gccacttgtagggac

SEQ ID NO: 749188 - DNA, 15 bp, Homo sapiens
ccacttgtagggacc

SEQ ID NO: 749189 - DNA, 15 bp, Homo sapiens
cacttgtagggacct

SEQ ID NO: 749190 - DNA, 15 bp, Homo sapiens
acttgtagggacctt

SEQ ID NO: 749191 - DNA, 15 bp, Homo sapiens
cttgtagggaccttt

SEQ ID NO: 749192 - DNA, 15 bp, Homo sapiens
ttgtagggaccttta

SEQ ID NO: 749193 - DNA, 15 bp, Homo sapiens
tgtagggacctttag

SEQ ID NO: 749194 - DNA, 15 bp, Homo sapiens
gtagggacctttaga

SEQ ID NO: 749195 - DNA, 15 bp, Homo sapiens
tagggacctttagag

SEQ ID NO: 749196 - DNA, 15 bp, Homo sapiens
agggacctttagaga

SEQ ID NO: 749197 - DNA, 15 bp, Homo sapiens
gggacctttagagag

SEQ ID NO: 749198 - DNA, 15 bp, Homo sapiens
ggacctttagagagt

SEQ ID NO: 749199 - DNA, 15 bp, Homo sapiens
gacctttagagagtt

SEQ ID NO: 749200 - DNA, 15 bp, Homo sapiens
acctttagagagtta

SEQ ID NO: 749201 - DNA, 15 bp, Homo sapiens
cctttagagagttag

SEQ ID NO: 749202 - DNA, 15 bp, Homo sapiens
ctttagagagttagc

SEQ ID NO: 749203 - DNA, 15 bp, Homo sapiens
tttagagagttagca

SEQ ID NO: 749204 - DNA, 15 bp, Homo sapiens
ttagagagttagcaa

SEQ ID NO: 749205 - DNA, 15 bp, Homo sapiens
tagagagttagcaat

SEQ ID NO: 749206 - DNA, 15 bp, Homo sapiens
agagagttagcaata

SEQ ID NO: 749207 - DNA, 15 bp, Homo sapiens
gagagttagcaataa

SEQ ID NO: 749208 - DNA, 15 bp, Homo sapiens
agagttagcaataag

SEQ ID NO: 749209 - DNA, 15 bp, Homo sapiens
gagttagcaataagg

SEQ ID NO: 749210 - DNA, 15 bp, Homo sapiens
agttagcaataaggc

SEQ ID NO: 749211 - DNA, 15 bp, Homo sapiens
gttagcaataaggct

SEQ ID NO: 749212 - DNA, 15 bp, Homo sapiens
ttagcaataaggctg

SEQ ID NO: 749213 - DNA, 15 bp, Homo sapiens
tagcaataaggctgg

SEQ ID NO: 749214 - DNA, 15 bp, Homo sapiens
agcaataaggctgga

SEQ ID NO: 749215 - DNA, 15 bp, Homo sapiens
gcaataaggctggag

SEQ ID NO: 749216 - DNA, 15 bp, Homo sapiens
caataaggctggaga

SEQ ID NO: 749217 - DNA, 15 bp, Homo sapiens
aataaggctggagaa

SEQ ID NO: 749218 - DNA, 15 bp, Homo sapiens
ataaggctggagaag

SEQ ID NO: 749219 - DNA, 15 bp, Homo sapiens
taaggctggagaagg

SEQ ID NO: 749220 - DNA, 15 bp, Homo sapiens
aaggctggagaagga

SEQ ID NO: 749221 - DNA, 15 bp, Homo sapiens
aggctggagaaggaa

SEQ ID NO: 749222 - DNA, 15 bp, Homo sapiens
ggctggagaaggaaa

SEQ ID NO: 749223 - DNA, 15 bp, Homo sapiens
gctggagaaggaaaa

SEQ ID NO: 749224 - DNA, 15 bp, Homo sapiens
ctggagaaggaaaag

SEQ ID NO: 749225 - DNA, 15 bp, Homo sapiens
tggagaaggaaaagc

SEQ ID NO: 749226 - DNA, 15 bp, Homo sapiens
ggagaaggaaaagcc

SEQ ID NO: 749227 - DNA, 15 bp, Homo sapiens
gagaaggaaaagccg

SEQ ID NO: 749228 - DNA, 15 bp, Homo sapiens
agaaggaaaagccgg

SEQ ID NO: 749229 - DNA, 15 bp, Homo sapiens
gaaggaaaagccggc

SEQ ID NO: 749230 - DNA, 15 bp, Homo sapiens
aaggaaaagccggcg

SEQ ID NO: 749231 - DNA, 15 bp, Homo sapiens
aggaaaagccggcgc

SEQ ID NO: 749232 - DNA, 15 bp, Homo sapiens
ggaaaagccggcgcg

SEQ ID NO: 749233 - DNA, 15 bp, Homo sapiens
gaaaagccggcgcgc

SEQ ID NO: 749234 - DNA, 15 bp, Homo sapiens
aaaagccggcgcgcc

SEQ ID NO: 749235 - DNA, 15 bp, Homo sapiens
aaagccggcgcgccc

SEQ ID NO: 749236 - DNA, 15 bp, Homo sapiens
aagccggcgcgcccg

SEQ ID NO: 749237 - DNA, 15 bp, Homo sapiens
agccggcgcgcccgc

SEQ ID NO: 749238 - DNA, 15 bp, Homo sapiens
gccggcgcgcccgcg

SEQ ID NO: 749239 - DNA, 15 bp, Homo sapiens
ccggcgcgcccgcgg

SEQ ID NO: 749240 - DNA, 15 bp, Homo sapiens
cggcgcgcccgcggc

SEQ ID NO: 749241 - DNA, 15 bp, Homo sapiens
ggcgcgcccgcggcc

SEQ ID NO: 749242 - DNA, 15 bp, Homo sapiens
gcgcgcccgcggccc

SEQ ID NO: 749243 - DNA, 15 bp, Homo sapiens
cgcgcccgcggcccg

SEQ ID NO: 749244 - DNA, 15 bp, Homo sapiens
gcgcccgcggcccgc

SEQ ID NO: 749245 - DNA, 15 bp, Homo sapiens
cgcccgcggcccgcg

SEQ ID NO: 749246 - DNA, 15 bp, Homo sapiens
gcccgcggcccgcgc

SEQ ID NO: 749247 - DNA, 15 bp, Homo sapiens
cccgcggcccgcgcg

SEQ ID NO: 749248 - DNA, 15 bp, Homo sapiens
ccgcggcccgcgcga

SEQ ID NO: 749249 - DNA, 15 bp, Homo sapiens
cgcggcccgcgcgat

SEQ ID NO: 749250 - DNA, 15 bp, Homo sapiens
gcggcccgcgcgatt

SEQ ID NO: 749251 - DNA, 15 bp, Homo sapiens
cggcccgcgcgattt

SEQ ID NO: 749252 - DNA, 15 bp, Homo sapiens
ggcccgcgcgatttc

SEQ ID NO: 749253 - DNA, 15 bp, Homo sapiens
gcccgcgcgatttcc

SEQ ID NO: 749254 - DNA, 15 bp, Homo sapiens
cccgcgcgatttccc

SEQ ID NO: 749255 - DNA, 15 bp, Homo sapiens
ccgcgcgatttcccg

SEQ ID NO: 749256 - DNA, 15 bp, Homo sapiens
cgcgcgatttcccgc

SEQ ID NO: 749257 - DNA, 15 bp, Homo sapiens
gcgcgatttcccgcc

SEQ ID NO: 749258 - DNA, 15 bp, Homo sapiens
cgcgatttcccgccg

SEQ ID NO: 749259 - DNA, 15 bp, Homo sapiens
gcgatttcccgccga

SEQ ID NO: 749260 - DNA, 15 bp, Homo sapiens
cgatttcccgccgag

SEQ ID NO: 749261 - DNA, 15 bp, Homo sapiens
gatttcccgccgagc

SEQ ID NO: 749262 - DNA, 15 bp, Homo sapiens
atttcccgccgagcc

SEQ ID NO: 749263 - DNA, 15 bp, Homo sapiens
tttcccgccgagccc

SEQ ID NO: 749264 - DNA, 15 bp, Homo sapiens
ttcccgccgagcccg

SEQ ID NO: 749265 - DNA, 15 bp, Homo sapiens
tcccgccgagcccgc

SEQ ID NO: 749266 - DNA, 15 bp, Homo sapiens
cccgccgagcccgcg

SEQ ID NO: 749267 - DNA, 15 bp, Homo sapiens
ccgccgagcccgcgt

SEQ ID NO: 749268 - DNA, 15 bp, Homo sapiens
cgccgagcccgcgtc

SEQ ID NO: 749269 - DNA, 15 bp, Homo sapiens
gccgagcccgcgtcc

SEQ ID NO: 749270 - DNA, 15 bp, Homo sapiens
ccgagcccgcgtccc

SEQ ID NO: 749271 - DNA, 15 bp, Homo sapiens
cgagcccgcgtcccc

SEQ ID NO: 749272 - DNA, 15 bp, Homo sapiens
gagcccgcgtccccg

SEQ ID NO: 749273 - DNA, 15 bp, Homo sapiens
agcccgcgtccccgg

SEQ ID NO: 749274 - DNA, 15 bp, Homo sapiens
gcccgcgtccccggc

SEQ ID NO: 749275 - DNA, 15 bp, Homo sapiens
cccgcgtccccggcg

SEQ ID NO: 749276 - DNA, 15 bp, Homo sapiens
ccgcgtccccggcgg

SEQ ID NO: 749277 - DNA, 15 bp, Homo sapiens
cgcgtccccggcggc

SEQ ID NO: 749278 - DNA, 15 bp, Homo sapiens
gcgtccccggcggcg

SEQ ID NO: 749279 - DNA, 15 bp, Homo sapiens
cgtccccggcggcgg

SEQ ID NO: 749280 - DNA, 15 bp, Homo sapiens
gtccccggcggcggg

SEQ ID NO: 749281 - DNA, 15 bp, Homo sapiens
tccccggcggcgggc

SEQ ID NO: 749282 - DNA, 15 bp, Homo sapiens
ccccggcggcgggcg

SEQ ID NO: 749283 - DNA, 15 bp, Homo sapiens
cccggcggcgggcgg

SEQ ID NO: 749284 - DNA, 15 bp, Homo sapiens
ccggcggcgggcggg

SEQ ID NO: 749285 - DNA, 15 bp, Homo sapiens
cggcggcgggcgggc

SEQ ID NO: 749286 - DNA, 15 bp, Homo sapiens
ggcggcgggcgggct

SEQ ID NO: 749287 - DNA, 15 bp, Homo sapiens
gcggcgggcgggctc

SEQ ID NO: 749288 - DNA, 15 bp, Homo sapiens
cggcgggcgggctcc

SEQ ID NO: 749289 - DNA, 15 bp, Homo sapiens
ggcgggcgggctccg

SEQ ID NO: 749290 - DNA, 15 bp, Homo sapiens
gcgggcgggctccgg

SEQ ID NO: 749291 - DNA, 15 bp, Homo sapiens
cgggcgggctccggg

SEQ ID NO: 749292 - DNA, 15 bp, Homo sapiens
gggcgggctccgggg

SEQ ID NO: 749293 - DNA, 15 bp, Homo sapiens
ggcgggctccggggg

SEQ ID NO: 749294 - DNA, 15 bp, Homo sapiens
gcgggctccgggggc

SEQ ID NO: 749295 - DNA, 15 bp, Homo sapiens
cgggctccgggggcg

SEQ ID NO: 749296 - DNA, 15 bp, Homo sapiens
gggctccgggggcgc

SEQ ID NO: 749297 - DNA, 15 bp, Homo sapiens
ggctccgggggcgcc

SEQ ID NO: 749298 - DNA, 15 bp, Homo sapiens
gctccgggggcgccc

SEQ ID NO: 749299 - DNA, 15 bp, Homo sapiens
ctccgggggcgcccg

SEQ ID NO: 749300 - DNA, 15 bp, Homo sapiens
tccgggggcgcccgg

SEQ ID NO: 749301 - DNA, 15 bp, Homo sapiens
ccgggggcgcccggg

SEQ ID NO: 749302 - DNA, 15 bp, Homo sapiens
cgggggcgcccgggc

SEQ ID NO: 749303 - DNA, 15 bp, Homo sapiens
gggggcgcccgggcc

SEQ ID NO: 749304 - DNA, 15 bp, Homo sapiens
ggggcgcccgggccg

SEQ ID NO: 749305 - DNA, 15 bp, Homo sapiens
gggcgcccgggccgc

SEQ ID NO: 749306 - DNA, 15 bp, Homo sapiens
ggcgcccgggccgcg

SEQ ID NO: 749307 - DNA, 15 bp, Homo sapiens
gcgcccgggccgcgg

SEQ ID NO: 749308 - DNA, 15 bp, Homo sapiens
cgcccgggccgcggc

SEQ ID NO: 749309 - DNA, 15 bp, Homo sapiens
gcccgggccgcggcg

SEQ ID NO: 749310 - DNA, 15 bp, Homo sapiens
cccgggccgcggcgg

SEQ ID NO: 749311 - DNA, 15 bp, Homo sapiens
ccgggccgcggcggc

SEQ ID NO: 749312 - DNA, 15 bp, Homo sapiens
cgggccgcggcggcg

SEQ ID NO: 749313 - DNA, 15 bp, Homo sapiens
gggccgcggcggcgg

SEQ ID NO: 749314 - DNA, 15 bp, Homo sapiens
ggccgcggcggcggc

SEQ ID NO: 749315 - DNA, 15 bp, Homo sapiens
gccgcggcggcggcg

SEQ ID NO: 749316 - DNA, 15 bp, Homo sapiens
ccgcggcggcggcgg

SEQ ID NO: 749317 - DNA, 15 bp, Homo sapiens
cgcggcggcggcggc

SEQ ID NO: 749318 - DNA, 15 bp, Homo sapiens
gcggcggcggcggcg

SEQ ID NO: 749319 - DNA, 15 bp, Homo sapiens
cggcggcggcggcgg

SEQ ID NO: 749320 - DNA, 15 bp, Homo sapiens
ggcggcggcggcggc

SEQ ID NO: 749321 - DNA, 15 bp, Homo sapiens
cggcggcggcggcgc

SEQ ID NO: 749322 - DNA, 15 bp, Homo sapiens
ggcggcggcggcgcg

SEQ ID NO: 749323 - DNA, 15 bp, Homo sapiens
gcggcggcggcgcga

SEQ ID NO: 749324 - DNA, 15 bp, Homo sapiens
cggcggcggcgcgag

SEQ ID NO: 749325 - DNA, 15 bp, Homo sapiens
ggcggcggcgcgagc

SEQ ID NO: 749326 - DNA, 15 bp, Homo sapiens
gcggcggcgcgagct

SEQ ID NO: 749327 - DNA, 15 bp, Homo sapiens
cggcggcgcgagctg

SEQ ID NO: 749328 - DNA, 15 bp, Homo sapiens
ggcggcgcgagctgc

SEQ ID NO: 749329 - DNA, 15 bp, Homo sapiens
gcggcgcgagctgcg

SEQ ID NO: 749330 - DNA, 15 bp, Homo sapiens
cggcgcgagctgcgc

SEQ ID NO: 749331 - DNA, 15 bp, Homo sapiens
ggcgcgagctgcgcc

SEQ ID NO: 749332 - DNA, 15 bp, Homo sapiens
gcgcgagctgcgcct

SEQ ID NO: 749333 - DNA, 15 bp, Homo sapiens
cgcgagctgcgcctc

SEQ ID NO: 749334 - DNA, 15 bp, Homo sapiens
gcgagctgcgcctcc

SEQ ID NO: 749335 - DNA, 15 bp, Homo sapiens
cgagctgcgcctccg

SEQ ID NO: 749336 - DNA, 15 bp, Homo sapiens
gagctgcgcctccgg

SEQ ID NO: 749337 - DNA, 15 bp, Homo sapiens
agctgcgcctccggg

SEQ ID NO: 749338 - DNA, 15 bp, Homo sapiens
gctgcgcctccgggc

SEQ ID NO: 749339 - DNA, 15 bp, Homo sapiens
ctgcgcctccgggcc

SEQ ID NO: 749340 - DNA, 15 bp, Homo sapiens
tgcgcctccgggccg

SEQ ID NO: 749341 - DNA, 15 bp, Homo sapiens
gcgcctccgggccgg

SEQ ID NO: 749342 - DNA, 15 bp, Homo sapiens
cgcctccgggccggt

SEQ ID NO: 749343 - DNA, 15 bp, Homo sapiens
gcctccgggccggtg

SEQ ID NO: 749344 - DNA, 15 bp, Homo sapiens
cctccgggccggtga

SEQ ID NO: 749345 - DNA, 15 bp, Homo sapiens
ctccgggccggtgaa

SEQ ID NO: 749346 - DNA, 15 bp, Homo sapiens
tccgggccggtgaat

SEQ ID NO: 749347 - DNA, 15 bp, Homo sapiens
ccgggccggtgaatc

SEQ ID NO: 749348 - DNA, 15 bp, Homo sapiens
cgggccggtgaatca

SEQ ID NO: 749349 - DNA, 15 bp, Homo sapiens
gggccggtgaatcat

SEQ ID NO: 749350 - DNA, 15 bp, Homo sapiens
ggccggtgaatcatc

SEQ ID NO: 749351 - DNA, 15 bp, Homo sapiens
gccggtgaatcatcc

SEQ ID NO: 749352 - DNA, 15 bp, Homo sapiens
ccggtgaatcatccc

SEQ ID NO: 749353 - DNA, 15 bp, Homo sapiens
cggtgaatcatcccg

SEQ ID NO: 749354 - DNA, 15 bp, Homo sapiens
ggtgaatcatcccgg

SEQ ID NO: 749355 - DNA, 15 bp, Homo sapiens
gtgaatcatcccggc

SEQ ID NO: 749356 - DNA, 15 bp, Homo sapiens
tgaatcatcccggca

SEQ ID NO: 749357 - DNA, 15 bp, Homo sapiens
gaatcatcccggcag

SEQ ID NO: 749358 - DNA, 15 bp, Homo sapiens
aatcatcccggcaga

SEQ ID NO: 749359 - DNA, 15 bp, Homo sapiens
atcatcccggcagac

SEQ ID NO: 749360 - DNA, 15 bp, Homo sapiens
tcatcccggcagaca

SEQ ID NO: 749361 - DNA, 15 bp, Homo sapiens
catcccggcagacac

SEQ ID NO: 749362 - DNA, 15 bp, Homo sapiens
atcccggcagacacc

SEQ ID NO: 749363 - DNA, 15 bp, Homo sapiens
tcccggcagacacca

SEQ ID NO: 749364 - DNA, 15 bp, Homo sapiens
cccggcagacaccaa

SEQ ID NO: 749365 - DNA, 15 bp, Homo sapiens
ccggcagacaccaag

SEQ ID NO: 749366 - DNA, 15 bp, Homo sapiens
cggcagacaccaaga

SEQ ID NO: 749367 - DNA, 15 bp, Homo sapiens
ggcagacaccaagag

SEQ ID NO: 749368 - DNA, 15 bp, Homo sapiens
gcagacaccaagagc

SEQ ID NO: 749369 - DNA, 15 bp, Homo sapiens
cagacaccaagagcc

SEQ ID NO: 749370 - DNA, 15 bp, Homo sapiens
agacaccaagagccg

SEQ ID NO: 749371 - DNA, 15 bp, Homo sapiens
gacaccaagagccgc

SEQ ID NO: 749372 - DNA, 15 bp, Homo sapiens
acaccaagagccgcg

SEQ ID NO: 749373 - DNA, 15 bp, Homo sapiens
caccaagagccgcgg

SEQ ID NO: 749374 - DNA, 15 bp, Homo sapiens
accaagagccgcggc

SEQ ID NO: 749375 - DNA, 15 bp, Homo sapiens
ccaagagccgcggca

SEQ ID NO: 749376 - DNA, 15 bp, Homo sapiens
caagagccgcggcag

SEQ ID NO: 749377 - DNA, 15 bp, Homo sapiens
aagagccgcggcagc

SEQ ID NO: 749378 - DNA, 15 bp, Homo sapiens
agagccgcggcagca

SEQ ID NO: 749379 - DNA, 15 bp, Homo sapiens
gagccgcggcagcag

SEQ ID NO: 749380 - DNA, 15 bp, Homo sapiens
agccgcggcagcaga

SEQ ID NO: 749381 - DNA, 15 bp, Homo sapiens
gccgcggcagcagag

SEQ ID NO: 749382 - DNA, 15 bp, Homo sapiens
ccgcggcagcagaga

SEQ ID NO: 749383 - DNA, 15 bp, Homo sapiens
cgcggcagcagagag

SEQ ID NO: 749384 - DNA, 15 bp, Homo sapiens
gcggcagcagagagg

SEQ ID NO: 749385 - DNA, 15 bp, Homo sapiens
cggcagcagagagga

SEQ ID NO: 749386 - DNA, 15 bp, Homo sapiens
ggcagcagagaggag

SEQ ID NO: 749387 - DNA, 15 bp, Homo sapiens
gcagcagagaggagc

SEQ ID NO: 749388 - DNA, 15 bp, Homo sapiens
cagcagagaggagcg

SEQ ID NO: 749389 - DNA, 15 bp, Homo sapiens
agcagagaggagcgc

SEQ ID NO: 749390 - DNA, 15 bp, Homo sapiens
gcagagaggagcgct

SEQ ID NO: 749391 - DNA, 15 bp, Homo sapiens
cagagaggagcgctg

SEQ ID NO: 749392 - DNA, 15 bp, Homo sapiens
agagaggagcgctga

SEQ ID NO: 749393 - DNA, 15 bp, Homo sapiens
gagaggagcgctgaa

SEQ ID NO: 749394 - DNA, 15 bp, Homo sapiens
agaggagcgctgaaa

SEQ ID NO: 749395 - DNA, 15 bp, Homo sapiens
gaggagcgctgaaac

SEQ ID NO: 749396 - DNA, 15 bp, Homo sapiens
aggagcgctgaaaca

SEQ ID NO: 749397 - DNA, 15 bp, Homo sapiens
ggagcgctgaaacat

SEQ ID NO: 749398 - DNA, 15 bp, Homo sapiens
gagcgctgaaacatg

SEQ ID NO: 749399 - DNA, 15 bp, Homo sapiens
agcgctgaaacatgg

SEQ ID NO: 749400 - DNA, 15 bp, Homo sapiens
gcgctgaaacatggc

SEQ ID NO: 749401 - DNA, 15 bp, Homo sapiens
cgctgaaacatggct

SEQ ID NO: 749402 - DNA, 15 bp, Homo sapiens
gctgaaacatggctg

SEQ ID NO: 749403 - DNA, 15 bp, Homo sapiens
ctgaaacatggctga

SEQ ID NO: 749404 - DNA, 15 bp, Homo sapiens
tgaaacatggctgaa

SEQ ID NO: 749405 - DNA, 15 bp, Homo sapiens
gaaacatggctgaag

SEQ ID NO: 749406 - DNA, 15 bp, Homo sapiens
aaacatggctgaagc

SEQ ID NO: 749407 - DNA, 15 bp, Homo sapiens
aacatggctgaagcg

SEQ ID NO: 749408 - DNA, 15 bp, Homo sapiens
acatggctgaagcgg

SEQ ID NO: 749409 - DNA, 15 bp, Homo sapiens
catggctgaagcggc

SEQ ID NO: 749410 - DNA, 15 bp, Homo sapiens
atggctgaagcggcc

SEQ ID NO: 749411 - DNA, 15 bp, Homo sapiens
tggctgaagcggcca

SEQ ID NO: 749412 - DNA, 15 bp, Homo sapiens
ggctgaagcggccac

SEQ ID NO: 749413 - DNA, 15 bp, Homo sapiens
gctgaagcggccacg

SEQ ID NO: 749414 - DNA, 15 bp, Homo sapiens
ctgaagcggccacgg

SEQ ID NO: 749415 - DNA, 15 bp, Homo sapiens
tgaagcggccacggg

SEQ ID NO: 749416 - DNA, 15 bp, Homo sapiens
gaagcggccacgggc

SEQ ID NO: 749417 - DNA, 15 bp, Homo sapiens
aagcggccacgggct

SEQ ID NO: 749418 - DNA, 15 bp, Homo sapiens
agcggccacgggctt

SEQ ID NO: 749419 - DNA, 15 bp, Homo sapiens
gcggccacgggcttt

SEQ ID NO: 749420 - DNA, 15 bp, Homo sapiens
cggccacgggctttc

SEQ ID NO: 749421 - DNA, 15 bp, Homo sapiens
ggccacgggctttct

SEQ ID NO: 749422 - DNA, 15 bp, Homo sapiens
gccacgggctttctg

SEQ ID NO: 749423 - DNA, 15 bp, Homo sapiens
ccacgggctttctgg

SEQ ID NO: 749424 - DNA, 15 bp, Homo sapiens
cacgggctttctgga

SEQ ID NO: 749425 - DNA, 15 bp, Homo sapiens
acgggctttctggag

SEQ ID NO: 749426 - DNA, 15 bp, Homo sapiens
cgggctttctggagc

SEQ ID NO: 749427 - DNA, 15 bp, Homo sapiens
gggctttctggagca

SEQ ID NO: 749428 - DNA, 15 bp, Homo sapiens
ggctttctggagcag

SEQ ID NO: 749429 - DNA, 15 bp, Homo sapiens
gctttctggagcagc

SEQ ID NO: 749430 - DNA, 15 bp, Homo sapiens
ctttctggagcagct

SEQ ID NO: 749431 - DNA, 15 bp, Homo sapiens
tttctggagcagctc

SEQ ID NO: 749432 - DNA, 15 bp, Homo sapiens
ttctggagcagctca

SEQ ID NO: 749433 - DNA, 15 bp, Homo sapiens
tctggagcagctcaa

SEQ ID NO: 749434 - DNA, 15 bp, Homo sapiens
ctggagcagctcaag

SEQ ID NO: 749435 - DNA, 15 bp, Homo sapiens
tggagcagctcaagt

SEQ ID NO: 749436 - DNA, 15 bp, Homo sapiens
ggagcagctcaagtc

SEQ ID NO: 749437 - DNA, 15 bp, Homo sapiens
gagcagctcaagtcc

SEQ ID NO: 749438 - DNA, 15 bp, Homo sapiens
agcagctcaagtcct

SEQ ID NO: 749439 - DNA, 15 bp, Homo sapiens
gcagctcaagtcctg

SEQ ID NO: 749440 - DNA, 15 bp, Homo sapiens
cagctcaagtcctgc

SEQ ID NO: 749441 - DNA, 15 bp, Homo sapiens
agctcaagtcctgca

SEQ ID NO: 749442 - DNA, 15 bp, Homo sapiens
gctcaagtcctgcat

SEQ ID NO: 749443 - DNA, 15 bp, Homo sapiens
ctcaagtcctgcata

SEQ ID NO: 749444 - DNA, 15 bp, Homo sapiens
tcaagtcctgcatag

SEQ ID NO: 749445 - DNA, 15 bp, Homo sapiens
caagtcctgcatagt

SEQ ID NO: 749446 - DNA, 15 bp, Homo sapiens
aagtcctgcatagtt

SEQ ID NO: 749447 - DNA, 15 bp, Homo sapiens
agtcctgcatagttt

SEQ ID NO: 749448 - DNA, 15 bp, Homo sapiens
gtcctgcatagtttg

SEQ ID NO: 749449 - DNA, 15 bp, Homo sapiens
tcctgcatagtttgg

SEQ ID NO: 749450 - DNA, 15 bp, Homo sapiens
cctgcatagtttggt

SEQ ID NO: 749451 - DNA, 15 bp, Homo sapiens
ctgcatagtttggtc

SEQ ID NO: 749452 - DNA, 15 bp, Homo sapiens
tgcatagtttggtct

SEQ ID NO: 749453 - DNA, 15 bp, Homo sapiens
gcatagtttggtctt

SEQ ID NO: 749454 - DNA, 15 bp, Homo sapiens
catagtttggtcttg

SEQ ID NO: 749455 - DNA, 15 bp, Homo sapiens
atagtttggtcttgg

SEQ ID NO: 749456 - DNA, 15 bp, Homo sapiens
tagtttggtcttgga

SEQ ID NO: 749457 - DNA, 15 bp, Homo sapiens
agtttggtcttggac

SEQ ID NO: 749458 - DNA, 15 bp, Homo sapiens
gtttggtcttggacg

SEQ ID NO: 749459 - DNA, 15 bp, Homo sapiens
tttggtcttggacgt

SEQ ID NO: 749460 - DNA, 15 bp, Homo sapiens
ttggtcttggacgta

SEQ ID NO: 749461 - DNA, 15 bp, Homo sapiens
tggtcttggacgtat

SEQ ID NO: 749462 - DNA, 15 bp, Homo sapiens
ggtcttggacgtatc

SEQ ID NO: 749463 - DNA, 15 bp, Homo sapiens
gtcttggacgtatct

SEQ ID NO: 749464 - DNA, 15 bp, Homo sapiens
tcttggacgtatctg

SEQ ID NO: 749465 - DNA, 15 bp, Homo sapiens
cttggacgtatctgt

SEQ ID NO: 749466 - DNA, 15 bp, Homo sapiens
ttggacgtatctgtg

SEQ ID NO: 749467 - DNA, 15 bp, Homo sapiens
tggacgtatctgtgg

SEQ ID NO: 749468 - DNA, 15 bp, Homo sapiens
ggacgtatctgtgga

SEQ ID NO: 749469 - DNA, 15 bp, Homo sapiens
gacgtatctgtggac

SEQ ID NO: 749470 - DNA, 15 bp, Homo sapiens
acgtatctgtggacc

SEQ ID NO: 749471 - DNA, 15 bp, Homo sapiens
cgtatctgtggaccg

SEQ ID NO: 749472 - DNA, 15 bp, Homo sapiens
gtatctgtggaccgt

SEQ ID NO: 749473 - DNA, 15 bp, Homo sapiens
tatctgtggaccgtg

SEQ ID NO: 749474 - DNA, 15 bp, Homo sapiens
atctgtggaccgtgt

SEQ ID NO: 749475 - DNA, 15 bp, Homo sapiens
tctgtggaccgtgtg

SEQ ID NO: 749476 - DNA, 15 bp, Homo sapiens
ctgtggaccgtgtgg

SEQ ID NO: 749477 - DNA, 15 bp, Homo sapiens
tgtggaccgtgtggt

SEQ ID NO: 749478 - DNA, 15 bp, Homo sapiens
gtggaccgtgtggtt

SEQ ID NO: 749479 - DNA, 15 bp, Homo sapiens
tggaccgtgtggttc

SEQ ID NO: 749480 - DNA, 15 bp, Homo sapiens
ggaccgtgtggttct

SEQ ID NO: 749481 - DNA, 15 bp, Homo sapiens
gaccgtgtggttctt

SEQ ID NO: 749482 - DNA, 15 bp, Homo sapiens
accgtgtggttcttc

SEQ ID NO: 749483 - DNA, 15 bp, Homo sapiens
ccgtgtggttcttca

SEQ ID NO: 749484 - DNA, 15 bp, Homo sapiens
cgtgtggttcttcat

SEQ ID NO: 749485 - DNA, 15 bp, Homo sapiens
gtgtggttcttcatc

SEQ ID NO: 749486 - DNA, 15 bp, Homo sapiens
tgtggttcttcatcg

SEQ ID NO: 749487 - DNA, 15 bp, Homo sapiens
gtggttcttcatcgt

SEQ ID NO: 749488 - DNA, 15 bp, Homo sapiens
tggttcttcatcgtg

SEQ ID NO: 749489 - DNA, 15 bp, Homo sapiens
ggttcttcatcgtgc

SEQ ID NO: 749490 - DNA, 15 bp, Homo sapiens
gttcttcatcgtgct

SEQ ID NO: 749491 - DNA, 15 bp, Homo sapiens
ttcttcatcgtgcta

SEQ ID NO: 749492 - DNA, 15 bp, Homo sapiens
tcttcatcgtgctat

SEQ ID NO: 749493 - DNA, 15 bp, Homo sapiens
cttcatcgtgctatt

SEQ ID NO: 749494 - DNA, 15 bp, Homo sapiens
ttcatcgtgctattc

SEQ ID NO: 749495 - DNA, 15 bp, Homo sapiens
tcatcgtgctattcc

SEQ ID NO: 749496 - DNA, 15 bp, Homo sapiens
catcgtgctattcct

SEQ ID NO: 749497 - DNA, 15 bp, Homo sapiens
atcgtgctattcctg

SEQ ID NO: 749498 - DNA, 15 bp, Homo sapiens
tcgtgctattcctgg

SEQ ID NO: 749499 - DNA, 15 bp, Homo sapiens
cgtgctattcctggt

SEQ ID NO: 749500 - DNA, 15 bp, Homo sapiens
gtgctattcctggtc

SEQ ID NO: 749501 - DNA, 15 bp, Homo sapiens
tgctattcctggtct

SEQ ID NO: 749502 - DNA, 15 bp, Homo sapiens
gctattcctggtcta

SEQ ID NO: 749503 - DNA, 15 bp, Homo sapiens
ctattcctggtctac

SEQ ID NO: 749504 - DNA, 15 bp, Homo sapiens
tattcctggtctaca

SEQ ID NO: 749505 - DNA, 15 bp, Homo sapiens
attcctggtctacat

SEQ ID NO: 749506 - DNA, 15 bp, Homo sapiens
ttcctggtctacatc

SEQ ID NO: 749507 - DNA, 15 bp, Homo sapiens
tcctggtctacatcc

SEQ ID NO: 749508 - DNA, 15 bp, Homo sapiens
cctggtctacatcct

SEQ ID NO: 749509 - DNA, 15 bp, Homo sapiens
ctggtctacatcctg

SEQ ID NO: 749510 - DNA, 15 bp, Homo sapiens
tggtctacatcctgc

SEQ ID NO: 749511 - DNA, 15 bp, Homo sapiens
ggtctacatcctgcg

SEQ ID NO: 749512 - DNA, 15 bp, Homo sapiens
gtctacatcctgcgg

SEQ ID NO: 749513 - DNA, 15 bp, Homo sapiens
tctacatcctgcggg

SEQ ID NO: 749514 - DNA, 15 bp, Homo sapiens
ctacatcctgcgggt

SEQ ID NO: 749515 - DNA, 15 bp, Homo sapiens
tacatcctgcgggtg

SEQ ID NO: 749516 - DNA, 15 bp, Homo sapiens
acatcctgcgggtgc

SEQ ID NO: 749517 - DNA, 15 bp, Homo sapiens
catcctgcgggtgcc

SEQ ID NO: 749518 - DNA, 15 bp, Homo sapiens
atcctgcgggtgcct

SEQ ID NO: 749519 - DNA, 15 bp, Homo sapiens
tcctgcgggtgcctt

SEQ ID NO: 749520 - DNA, 15 bp, Homo sapiens
cctgcgggtgccttt

SEQ ID NO: 749521 - DNA, 15 bp, Homo sapiens
ctgcgggtgcctttg

SEQ ID NO: 749522 - DNA, 15 bp, Homo sapiens
tgcgggtgcctttga

SEQ ID NO: 749523 - DNA, 15 bp, Homo sapiens
gcgggtgcctttgaa

SEQ ID NO: 749524 - DNA, 15 bp, Homo sapiens
cgggtgcctttgaaa

SEQ ID NO: 749525 - DNA, 15 bp, Homo sapiens
gggtgcctttgaaaa

SEQ ID NO: 749526 - DNA, 15 bp, Homo sapiens
ggtgcctttgaaaat

SEQ ID NO: 749527 - DNA, 15 bp, Homo sapiens
gtgcctttgaaaatc

SEQ ID NO: 749528 - DNA, 15 bp, Homo sapiens
tgcctttgaaaatca

SEQ ID NO: 749529 - DNA, 15 bp, Homo sapiens
gcctttgaaaatcaa

SEQ ID NO: 749530 - DNA, 15 bp, Homo sapiens
cctttgaaaatcaac

SEQ ID NO: 749531 - DNA, 15 bp, Homo sapiens
ctttgaaaatcaacg

SEQ ID NO: 749532 - DNA, 15 bp, Homo sapiens
tttgaaaatcaacga

SEQ ID NO: 749533 - DNA, 15 bp, Homo sapiens
ttgaaaatcaacgac

SEQ ID NO: 749534 - DNA, 15 bp, Homo sapiens
tgaaaatcaacgaca

SEQ ID NO: 749535 - DNA, 15 bp, Homo sapiens
gaaaatcaacgacaa

SEQ ID NO: 749536 - DNA, 15 bp, Homo sapiens
aaaatcaacgacaac

SEQ ID NO: 749537 - DNA, 15 bp, Homo sapiens
aaatcaacgacaact

SEQ ID NO: 749538 - DNA, 15 bp, Homo sapiens
aatcaacgacaactt

SEQ ID NO: 749539 - DNA, 15 bp, Homo sapiens
atcaacgacaacttg

SEQ ID NO: 749540 - DNA, 15 bp, Homo sapiens
tcaacgacaacttga

SEQ ID NO: 749541 - DNA, 15 bp, Homo sapiens
caacgacaacttgag

SEQ ID NO: 749542 - DNA, 15 bp, Homo sapiens
aacgacaacttgagc

SEQ ID NO: 749543 - DNA, 15 bp, Homo sapiens
acgacaacttgagca

SEQ ID NO: 749544 - DNA, 15 bp, Homo sapiens
cgacaacttgagcac

SEQ ID NO: 749545 - DNA, 15 bp, Homo sapiens
gacaacttgagcaca

SEQ ID NO: 749546 - DNA, 15 bp, Homo sapiens
acaacttgagcacag

SEQ ID NO: 749547 - DNA, 15 bp, Homo sapiens
caacttgagcacagg

SEQ ID NO: 749548 - DNA, 15 bp, Homo sapiens
aacttgagcacaggt

SEQ ID NO: 749549 - DNA, 15 bp, Homo sapiens
acttgagcacaggta

SEQ ID NO: 749550 - DNA, 15 bp, Homo sapiens
cttgagcacaggtaa

SEQ ID NO: 749551 - DNA, 15 bp, Homo sapiens
ttgagcacaggtaag

SEQ ID NO: 749552 - DNA, 15 bp, Homo sapiens
tgagcacaggtaagg

SEQ ID NO: 749553 - DNA, 15 bp, Homo sapiens
gagcacaggtaaggc

SEQ ID NO: 749554 - DNA, 15 bp, Homo sapiens
agcacaggtaaggcc

SEQ ID NO: 749555 - DNA, 15 bp, Homo sapiens
gcacaggtaaggcct

SEQ ID NO: 749556 - DNA, 15 bp, Homo sapiens
cacaggtaaggcctg

SEQ ID NO: 749557 - DNA, 15 bp, Homo sapiens
acaggtaaggcctgg

SEQ ID NO: 749558 - DNA, 15 bp, Homo sapiens
caggtaaggcctggg

SEQ ID NO: 749559 - DNA, 15 bp, Homo sapiens
aggtaaggcctggga

SEQ ID NO: 749560 - DNA, 15 bp, Homo sapiens
ggtaaggcctgggag

SEQ ID NO: 749561 - DNA, 15 bp, Homo sapiens
gtaaggcctgggagc

SEQ ID NO: 749562 - DNA, 15 bp, Homo sapiens
taaggcctgggagcc

SEQ ID NO: 749563 - DNA, 15 bp, Homo sapiens
aaggcctgggagccg

SEQ ID NO: 749564 - DNA, 15 bp, Homo sapiens
aggcctgggagccgg

SEQ ID NO: 749565 - DNA, 15 bp, Homo sapiens
ggcctgggagccggg

SEQ ID NO: 749566 - DNA, 15 bp, Homo sapiens
gcctgggagccgggc

SEQ ID NO: 749567 - DNA, 15 bp, Homo sapiens
cctgggagccgggcc

SEQ ID NO: 749568 - DNA, 15 bp, Homo sapiens
ctgggagccgggccc

SEQ ID NO: 749569 - DNA, 15 bp, Homo sapiens
tgggagccgggcccg

SEQ ID NO: 749570 - DNA, 15 bp, Homo sapiens
gggagccgggcccgc

SEQ ID NO: 749571 - DNA, 15 bp, Homo sapiens
ggagccgggcccgcg

SEQ ID NO: 749572 - DNA, 15 bp, Homo sapiens
gagccgggcccgcgg

SEQ ID NO: 749573 - DNA, 15 bp, Homo sapiens
agccgggcccgcggc

SEQ ID NO: 749574 - DNA, 15 bp, Homo sapiens
gccgggcccgcggcg

SEQ ID NO: 749575 - DNA, 15 bp, Homo sapiens
ccgggcccgcggcgc

SEQ ID NO: 749576 - DNA, 15 bp, Homo sapiens
cgggcccgcggcgcc

SEQ ID NO: 749577 - DNA, 15 bp, Homo sapiens
gggcccgcggcgccc

SEQ ID NO: 749578 - DNA, 15 bp, Homo sapiens
ggcccgcggcgccca

SEQ ID NO: 749579 - DNA, 15 bp, Homo sapiens
gcccgcggcgcccac

SEQ ID NO: 749580 - DNA, 15 bp, Homo sapiens
cccgcggcgcccacc

SEQ ID NO: 749581 - DNA, 15 bp, Homo sapiens
ccgcggcgcccaccc

SEQ ID NO: 749582 - DNA, 15 bp, Homo sapiens
cgcggcgcccacccc

SEQ ID NO: 749583 - DNA, 15 bp, Homo sapiens
gcggcgcccacccct

SEQ ID NO: 749584 - DNA, 15 bp, Homo sapiens
cggcgcccacccctc

SEQ ID NO: 749585 - DNA, 15 bp, Homo sapiens
ggcgcccacccctcc

SEQ ID NO: 749586 - DNA, 15 bp, Homo sapiens
gcgcccacccctccc

SEQ ID NO: 749587 - DNA, 15 bp, Homo sapiens
cgcccacccctcccc

SEQ ID NO: 749588 - DNA, 15 bp, Homo sapiens
gcccacccctccccc

SEQ ID NO: 749589 - DNA, 15 bp, Homo sapiens
cccacccctcccccg

SEQ ID NO: 749590 - DNA, 15 bp, Homo sapiens
ccacccctcccccgc

SEQ ID NO: 749591 - DNA, 15 bp, Homo sapiens
cacccctcccccgcc

SEQ ID NO: 749592 - DNA, 15 bp, Homo sapiens
acccctcccccgccc

SEQ ID NO: 749593 - DNA, 15 bp, Homo sapiens
cccctcccccgcccc

SEQ ID NO: 749594 - DNA, 15 bp, Homo sapiens
ccctcccccgccccg

SEQ ID NO: 749595 - DNA, 15 bp, Homo sapiens
cctcccccgccccgg

SEQ ID NO: 749596 - DNA, 15 bp, Homo sapiens
ctcccccgccccgga

SEQ ID NO: 749597 - DNA, 15 bp, Homo sapiens
tcccccgccccggaa

SEQ ID NO: 749598 - DNA, 15 bp, Homo sapiens
cccccgccccggaaa

SEQ ID NO: 749599 - DNA, 15 bp, Homo sapiens
ccccgccccggaaag

SEQ ID NO: 749600 - DNA, 15 bp, Homo sapiens
cccgccccggaaagt

SEQ ID NO: 749601 - DNA, 15 bp, Homo sapiens
ccgccccggaaagtt

SEQ ID NO: 749602 - DNA, 15 bp, Homo sapiens
cgccccggaaagtta

SEQ ID NO: 749603 - DNA, 15 bp, Homo sapiens
gccccggaaagttag

SEQ ID NO: 749604 - DNA, 15 bp, Homo sapiens
ccccggaaagttagt

SEQ ID NO: 749605 - DNA, 15 bp, Homo sapiens
cccggaaagttagtg

SEQ ID NO: 749606 - DNA, 15 bp, Homo sapiens
ccggaaagttagtgc

SEQ ID NO: 749607 - DNA, 15 bp, Homo sapiens
cggaaagttagtgca

SEQ ID NO: 749608 - DNA, 15 bp, Homo sapiens
ggaaagttagtgcaa

SEQ ID NO: 749609 - DNA, 15 bp, Homo sapiens
gaaagttagtgcaac

SEQ ID NO: 749610 - DNA, 15 bp, Homo sapiens
aaagttagtgcaact

SEQ ID NO: 749611 - DNA, 15 bp, Homo sapiens
aagttagtgcaactc

SEQ ID NO: 749612 - DNA, 15 bp, Homo sapiens
agttagtgcaactcg

SEQ ID NO: 749613 - DNA, 15 bp, Homo sapiens
gttagtgcaactcgc

SEQ ID NO: 749614 - DNA, 15 bp, Homo sapiens
ttagtgcaactcgcg

SEQ ID NO: 749615 - DNA, 15 bp, Homo sapiens
tagtgcaactcgcgc

SEQ ID NO: 749616 - DNA, 15 bp, Homo sapiens
agtgcaactcgcgcg

SEQ ID NO: 749617 - DNA, 15 bp, Homo sapiens
gtgcaactcgcgcgg

SEQ ID NO: 749618 - DNA, 15 bp, Homo sapiens
tgcaactcgcgcggg

SEQ ID NO: 749619 - DNA, 15 bp, Homo sapiens
gcaactcgcgcgggg

SEQ ID NO: 749620 - DNA, 15 bp, Homo sapiens
caactcgcgcggggc

SEQ ID NO: 749621 - DNA, 15 bp, Homo sapiens
aactcgcgcggggcc

SEQ ID NO: 749622 - DNA, 15 bp, Homo sapiens
actcgcgcggggccg

SEQ ID NO: 749623 - DNA, 15 bp, Homo sapiens
ctcgcgcggggccgc

SEQ ID NO: 749624 - DNA, 15 bp, Homo sapiens
tcgcgcggggccgcg

SEQ ID NO: 749625 - DNA, 15 bp, Homo sapiens
cgcgcggggccgcgg

SEQ ID NO: 749626 - DNA, 15 bp, Homo sapiens
gcgcggggccgcggc

SEQ ID NO: 749627 - DNA, 15 bp, Homo sapiens
cgcggggccgcggcc

SEQ ID NO: 749628 - DNA, 15 bp, Homo sapiens
gcggggccgcggcca

SEQ ID NO: 749629 - DNA, 15 bp, Homo sapiens
cggggccgcggccag

SEQ ID NO: 749630 - DNA, 15 bp, Homo sapiens
ggggccgcggccagg

SEQ ID NO: 749631 - DNA, 15 bp, Homo sapiens
gggccgcggccaggc

SEQ ID NO: 749632 - DNA, 15 bp, Homo sapiens
ggccgcggccaggcg

SEQ ID NO: 749633 - DNA, 15 bp, Homo sapiens
gccgcggccaggcgc

SEQ ID NO: 749634 - DNA, 15 bp, Homo sapiens
ccgcggccaggcgcg

SEQ ID NO: 749635 - DNA, 15 bp, Homo sapiens
cgcggccaggcgcgc

SEQ ID NO: 749636 - DNA, 15 bp, Homo sapiens
gcggccaggcgcgcg

SEQ ID NO: 749637 - DNA, 15 bp, Homo sapiens
cggccaggcgcgcgc

SEQ ID NO: 749638 - DNA, 15 bp, Homo sapiens
ggccaggcgcgcgct

SEQ ID NO: 749639 - DNA, 15 bp, Homo sapiens
gccaggcgcgcgctc

SEQ ID NO: 749640 - DNA, 15 bp, Homo sapiens
ccaggcgcgcgctcg

SEQ ID NO: 749641 - DNA, 15 bp, Homo sapiens
caggcgcgcgctcgg

SEQ ID NO: 749642 - DNA, 15 bp, Homo sapiens
aggcgcgcgctcggg

SEQ ID NO: 749643 - DNA, 15 bp, Homo sapiens
ggcgcgcgctcgggg

SEQ ID NO: 749644 - DNA, 15 bp, Homo sapiens
gcgcgcgctcgggga

SEQ ID NO: 749645 - DNA, 15 bp, Homo sapiens
cgcgcgctcggggac

SEQ ID NO: 749646 - DNA, 15 bp, Homo sapiens
gcgcgctcggggacg

SEQ ID NO: 749647 - DNA, 15 bp, Homo sapiens
cgcgctcggggacgc

SEQ ID NO: 749648 - DNA, 15 bp, Homo sapiens
gcgctcggggacgcg

SEQ ID NO: 749649 - DNA, 15 bp, Homo sapiens
cgctcggggacgcgc

SEQ ID NO: 749650 - DNA, 15 bp, Homo sapiens
gctcggggacgcgcc

SEQ ID NO: 749651 - DNA, 15 bp, Homo sapiens
ctcggggacgcgccg

SEQ ID NO: 749652 - DNA, 15 bp, Homo sapiens
tcggggacgcgccgg

SEQ ID NO: 749653 - DNA, 15 bp, Homo sapiens
cggggacgcgccggg

SEQ ID NO: 749654 - DNA, 15 bp, Homo sapiens
ggggacgcgccgggg

SEQ ID NO: 749655 - DNA, 15 bp, Homo sapiens
gggacgcgccggggc

SEQ ID NO: 749656 - DNA, 15 bp, Homo sapiens
ggacgcgccggggcc

SEQ ID NO: 749657 - DNA, 15 bp, Homo sapiens
gacgcgccggggccc

SEQ ID NO: 749658 - DNA, 15 bp, Homo sapiens
acgcgccggggcccg

SEQ ID NO: 749659 - DNA, 15 bp, Homo sapiens
cgcgccggggcccgc

SEQ ID NO: 749660 - DNA, 15 bp, Homo sapiens
gcgccggggcccgcg

SEQ ID NO: 749661 - DNA, 15 bp, Homo sapiens
cgccggggcccgcgc

SEQ ID NO: 749662 - DNA, 15 bp, Homo sapiens
gccggggcccgcgca

SEQ ID NO: 749663 - DNA, 15 bp, Homo sapiens
ccggggcccgcgcac

SEQ ID NO: 749664 - DNA, 15 bp, Homo sapiens
cggggcccgcgcacc

SEQ ID NO: 749665 - DNA, 15 bp, Homo sapiens
ggggcccgcgcaccg

SEQ ID NO: 749666 - DNA, 15 bp, Homo sapiens
gggcccgcgcaccgg

SEQ ID NO: 749667 - DNA, 15 bp, Homo sapiens
ggcccgcgcaccgga

SEQ ID NO: 749668 - DNA, 15 bp, Homo sapiens
gcccgcgcaccggag

SEQ ID NO: 749669 - DNA, 15 bp, Homo sapiens
cccgcgcaccggagg

SEQ ID NO: 749670 - DNA, 15 bp, Homo sapiens
ccgcgcaccggaggc

SEQ ID NO: 749671 - DNA, 15 bp, Homo sapiens
cgcgcaccggaggcc

SEQ ID NO: 749672 - DNA, 15 bp, Homo sapiens
gcgcaccggaggccc

SEQ ID NO: 749673 - DNA, 15 bp, Homo sapiens
cgcaccggaggcccg

SEQ ID NO: 749674 - DNA, 15 bp, Homo sapiens
gcaccggaggcccgc

SEQ ID NO: 749675 - DNA, 15 bp, Homo sapiens
caccggaggcccgcg

SEQ ID NO: 749676 - DNA, 15 bp, Homo sapiens
accggaggcccgcgg

SEQ ID NO: 749677 - DNA, 15 bp, Homo sapiens
ccggaggcccgcggc

SEQ ID NO: 749678 - DNA, 15 bp, Homo sapiens
cggaggcccgcggct

SEQ ID NO: 749679 - DNA, 15 bp, Homo sapiens
ggaggcccgcggcta

SEQ ID NO: 749680 - DNA, 15 bp, Homo sapiens
gaggcccgcggctac

SEQ ID NO: 749681 - DNA, 15 bp, Homo sapiens
aggcccgcggctacc

SEQ ID NO: 749682 - DNA, 15 bp, Homo sapiens
ggcccgcggctaccc

SEQ ID NO: 749683 - DNA, 15 bp, Homo sapiens
gcccgcggctacccg

SEQ ID NO: 749684 - DNA, 15 bp, Homo sapiens
cccgcggctacccgc

SEQ ID NO: 749685 - DNA, 15 bp, Homo sapiens
ccgcggctacccgcc

SEQ ID NO: 749686 - DNA, 15 bp, Homo sapiens
cgcggctacccgcca

SEQ ID NO: 749687 - DNA, 15 bp, Homo sapiens
gcggctacccgccag

SEQ ID NO: 749688 - DNA, 15 bp, Homo sapiens
cggctacccgccagc

SEQ ID NO: 749689 - DNA, 15 bp, Homo sapiens
ggctacccgccagca

SEQ ID NO: 749690 - DNA, 15 bp, Homo sapiens
gctacccgccagcaa

SEQ ID NO: 749691 - DNA, 15 bp, Homo sapiens
ctacccgccagcaac

SEQ ID NO: 749692 - DNA, 15 bp, Homo sapiens
tacccgccagcaacg

SEQ ID NO: 749693 - DNA, 15 bp, Homo sapiens
acccgccagcaacgc

SEQ ID NO: 749694 - DNA, 15 bp, Homo sapiens
cccgccagcaacgcg

SEQ ID NO: 749695 - DNA, 15 bp, Homo sapiens
ccgccagcaacgcgg

SEQ ID NO: 749696 - DNA, 15 bp, Homo sapiens
cgccagcaacgcggc

SEQ ID NO: 749697 - DNA, 15 bp, Homo sapiens
gccagcaacgcggcg

SEQ ID NO: 749698 - DNA, 15 bp, Homo sapiens
ccagcaacgcggcgg

SEQ ID NO: 749699 - DNA, 15 bp, Homo sapiens
cagcaacgcggcggc

SEQ ID NO: 749700 - DNA, 15 bp, Homo sapiens
agcaacgcggcggct

SEQ ID NO: 749701 - DNA, 15 bp, Homo sapiens
gcaacgcggcggctt

SEQ ID NO: 749702 - DNA, 15 bp, Homo sapiens
caacgcggcggctta

SEQ ID NO: 749703 - DNA, 15 bp, Homo sapiens
aacgcggcggcttag

SEQ ID NO: 749704 - DNA, 15 bp, Homo sapiens
acgcggcggcttagg

SEQ ID NO: 749705 - DNA, 15 bp, Homo sapiens
cgcggcggcttaggc

SEQ ID NO: 749706 - DNA, 15 bp, Homo sapiens
gcggcggcttaggcg

SEQ ID NO: 749707 - DNA, 15 bp, Homo sapiens
cggcggcttaggcgg

SEQ ID NO: 749708 - DNA, 15 bp, Homo sapiens
ggcggcttaggcggc

SEQ ID NO: 749709 - DNA, 15 bp, Homo sapiens
gcggcttaggcggcg

SEQ ID NO: 749710 - DNA, 15 bp, Homo sapiens
cggcttaggcggcgg

SEQ ID NO: 749711 - DNA, 15 bp, Homo sapiens
ggcttaggcggcggg

SEQ ID NO: 749712 - DNA, 15 bp, Homo sapiens
gcttaggcggcgggg

SEQ ID NO: 749713 - DNA, 15 bp, Homo sapiens
cttaggcggcggggc

SEQ ID NO: 749714 - DNA, 15 bp, Homo sapiens
ttaggcggcggggcc

SEQ ID NO: 749715 - DNA, 15 bp, Homo sapiens
taggcggcggggccg

SEQ ID NO: 749716 - DNA, 15 bp, Homo sapiens
aggcggcggggccgg

SEQ ID NO: 749717 - DNA, 15 bp, Homo sapiens
ggcggcggggccggg

SEQ ID NO: 749718 - DNA, 15 bp, Homo sapiens
gcggcggggccgggc

SEQ ID NO: 749719 - DNA, 15 bp, Homo sapiens
cggcggggccgggca

SEQ ID NO: 749720 - DNA, 15 bp, Homo sapiens
ggcggggccgggcag

SEQ ID NO: 749721 - DNA, 15 bp, Homo sapiens
gcggggccgggcagc

SEQ ID NO: 749722 - DNA, 15 bp, Homo sapiens
cggggccgggcagct

SEQ ID NO: 749723 - DNA, 15 bp, Homo sapiens
ggggccgggcagctg

SEQ ID NO: 749724 - DNA, 15 bp, Homo sapiens
gggccgggcagctgg

SEQ ID NO: 749725 - DNA, 15 bp, Homo sapiens
ggccgggcagctggg

SEQ ID NO: 749726 - DNA, 15 bp, Homo sapiens
gccgggcagctgggc

SEQ ID NO: 749727 - DNA, 15 bp, Homo sapiens
ccgggcagctgggcg

SEQ ID NO: 749728 - DNA, 15 bp, Homo sapiens
cgggcagctgggcgc

SEQ ID NO: 749729 - DNA, 15 bp, Homo sapiens
gggcagctgggcgcg

SEQ ID NO: 749730 - DNA, 15 bp, Homo sapiens
ggcagctgggcgcgc

SEQ ID NO: 749731 - DNA, 15 bp, Homo sapiens
gcagctgggcgcgcg

SEQ ID NO: 749732 - DNA, 15 bp, Homo sapiens
cagctgggcgcgcgg

SEQ ID NO: 749733 - DNA, 15 bp, Homo sapiens
agctgggcgcgcggg

SEQ ID NO: 749734 - DNA, 15 bp, Homo sapiens
gctgggcgcgcgggg

SEQ ID NO: 749735 - DNA, 15 bp, Homo sapiens
ctgggcgcgcggggg

SEQ ID NO: 749736 - DNA, 15 bp, Homo sapiens
tgggcgcgcgggggc

SEQ ID NO: 749737 - DNA, 15 bp, Homo sapiens
gggcgcgcgggggcg

SEQ ID NO: 749738 - DNA, 15 bp, Homo sapiens
ggcgcgcgggggcgg

SEQ ID NO: 749739 - DNA, 15 bp, Homo sapiens
gcgcgcgggggcggc

SEQ ID NO: 749740 - DNA, 15 bp, Homo sapiens
cgcgcgggggcggcc

SEQ ID NO: 749741 - DNA, 15 bp, Homo sapiens
gcgcgggggcggccg

SEQ ID NO: 749742 - DNA, 15 bp, Homo sapiens
cgcgggggcggccgg

SEQ ID NO: 749743 - DNA, 15 bp, Homo sapiens
gcgggggcggccggt

SEQ ID NO: 749744 - DNA, 15 bp, Homo sapiens
cgggggcggccggtg

SEQ ID NO: 749745 - DNA, 15 bp, Homo sapiens
gggggcggccggtgg

SEQ ID NO: 749746 - DNA, 15 bp, Homo sapiens
ggggcggccggtggc

SEQ ID NO: 749747 - DNA, 15 bp, Homo sapiens
gggcggccggtggcc

SEQ ID NO: 749748 - DNA, 15 bp, Homo sapiens
ggcggccggtggcct

SEQ ID NO: 749749 - DNA, 15 bp, Homo sapiens
gcggccggtggcctt

SEQ ID NO: 749750 - DNA, 15 bp, Homo sapiens
cggccggtggccttc

SEQ ID NO: 749751 - DNA, 15 bp, Homo sapiens
ggccggtggccttca

SEQ ID NO: 749752 - DNA, 15 bp, Homo sapiens
gccggtggccttcac

SEQ ID NO: 749753 - DNA, 15 bp, Homo sapiens
ccggtggccttcacg

SEQ ID NO: 749754 - DNA, 15 bp, Homo sapiens
cggtggccttcacgg

SEQ ID NO: 749755 - DNA, 15 bp, Homo sapiens
ggtggccttcacggc

SEQ ID NO: 749756 - DNA, 15 bp, Homo sapiens
gtggccttcacggcc

SEQ ID NO: 749757 - DNA, 15 bp, Homo sapiens
tggccttcacggccc

SEQ ID NO: 749758 - DNA, 15 bp, Homo sapiens
ggccttcacggcccc

SEQ ID NO: 749759 - DNA, 15 bp, Homo sapiens
gccttcacggccccg

SEQ ID NO: 749760 - DNA, 15 bp, Homo sapiens
ccttcacggccccgc

SEQ ID NO: 749761 - DNA, 15 bp, Homo sapiens
cttcacggccccgcg

SEQ ID NO: 749762 - DNA, 15 bp, Homo sapiens
ttcacggccccgcgg

SEQ ID NO: 749763 - DNA, 15 bp, Homo sapiens
tcacggccccgcgga

SEQ ID NO: 749764 - DNA, 15 bp, Homo sapiens
cacggccccgcggag

SEQ ID NO: 749765 - DNA, 15 bp, Homo sapiens
acggccccgcggagg

SEQ ID NO: 749766 - DNA, 15 bp, Homo sapiens
cggccccgcggagga

SEQ ID NO: 749767 - DNA, 15 bp, Homo sapiens
ggccccgcggaggaa

SEQ ID NO: 749768 - DNA, 15 bp, Homo sapiens
gccccgcggaggaag

SEQ ID NO: 749769 - DNA, 15 bp, Homo sapiens
ccccgcggaggaaga

SEQ ID NO: 749770 - DNA, 15 bp, Homo sapiens
cccgcggaggaagag

SEQ ID NO: 749771 - DNA, 15 bp, Homo sapiens
ccgcggaggaagagc

SEQ ID NO: 749772 - DNA, 15 bp, Homo sapiens
cgcggaggaagagct

SEQ ID NO: 749773 - DNA, 15 bp, Homo sapiens
gcggaggaagagctg

SEQ ID NO: 749774 - DNA, 15 bp, Homo sapiens
cggaggaagagctgc

SEQ ID NO: 749775 - DNA, 15 bp, Homo sapiens
ggaggaagagctgcg

SEQ ID NO: 749776 - DNA, 15 bp, Homo sapiens
gaggaagagctgcgc

SEQ ID NO: 749777 - DNA, 15 bp, Homo sapiens
aggaagagctgcgcc

SEQ ID NO: 749778 - DNA, 15 bp, Homo sapiens
ggaagagctgcgccg

SEQ ID NO: 749779 - DNA, 15 bp, Homo sapiens
gaagagctgcgccgc

SEQ ID NO: 749780 - DNA, 15 bp, Homo sapiens
aagagctgcgccgcg

SEQ ID NO: 749781 - DNA, 15 bp, Homo sapiens
agagctgcgccgcgc

SEQ ID NO: 749782 - DNA, 15 bp, Homo sapiens
gagctgcgccgcgca

SEQ ID NO: 749783 - DNA, 15 bp, Homo sapiens
agctgcgccgcgcac

SEQ ID NO: 749784 - DNA, 15 bp, Homo sapiens
gctgcgccgcgcaca

SEQ ID NO: 749785 - DNA, 15 bp, Homo sapiens
ctgcgccgcgcacag

SEQ ID NO: 749786 - DNA, 15 bp, Homo sapiens
tgcgccgcgcacagc

SEQ ID NO: 749787 - DNA, 15 bp, Homo sapiens
gcgccgcgcacagcc

SEQ ID NO: 749788 - DNA, 15 bp, Homo sapiens
cgccgcgcacagccc

SEQ ID NO: 749789 - DNA, 15 bp, Homo sapiens
gccgcgcacagcccg

SEQ ID NO: 749790 - DNA, 15 bp, Homo sapiens
ccgcgcacagcccgc

SEQ ID NO: 749791 - DNA, 15 bp, Homo sapiens
cgcgcacagcccgca

SEQ ID NO: 749792 - DNA, 15 bp, Homo sapiens
gcgcacagcccgcaa

SEQ ID NO: 749793 - DNA, 15 bp, Homo sapiens
cgcacagcccgcaag

SEQ ID NO: 749794 - DNA, 15 bp, Homo sapiens
gcacagcccgcaagg

SEQ ID NO: 749795 - DNA, 15 bp, Homo sapiens
cacagcccgcaaggc

SEQ ID NO: 749796 - DNA, 15 bp, Homo sapiens
acagcccgcaaggcg

SEQ ID NO: 749797 - DNA, 15 bp, Homo sapiens
cagcccgcaaggcgg

SEQ ID NO: 749798 - DNA, 15 bp, Homo sapiens
agcccgcaaggcggg

SEQ ID NO: 749799 - DNA, 15 bp, Homo sapiens
gcccgcaaggcgggc

SEQ ID NO: 749800 - DNA, 15 bp, Homo sapiens
cccgcaaggcgggcc

SEQ ID NO: 749801 - DNA, 15 bp, Homo sapiens
ccgcaaggcgggccg

SEQ ID NO: 749802 - DNA, 15 bp, Homo sapiens
cgcaaggcgggccgg

SEQ ID NO: 749803 - DNA, 15 bp, Homo sapiens
gcaaggcgggccggg

SEQ ID NO: 749804 - DNA, 15 bp, Homo sapiens
caaggcgggccgggc

SEQ ID NO: 749805 - DNA, 15 bp, Homo sapiens
aaggcgggccgggcc

SEQ ID NO: 749806 - DNA, 15 bp, Homo sapiens
aggcgggccgggccg

SEQ ID NO: 749807 - DNA, 15 bp, Homo sapiens
ggcgggccgggccgg

SEQ ID NO: 749808 - DNA, 15 bp, Homo sapiens
gcgggccgggccggg

SEQ ID NO: 749809 - DNA, 15 bp, Homo sapiens
cgggccgggccgggc

SEQ ID NO: 749810 - DNA, 15 bp, Homo sapiens
gggccgggccgggcc

SEQ ID NO: 749811 - DNA, 15 bp, Homo sapiens
ggccgggccgggccg

SEQ ID NO: 749812 - DNA, 15 bp, Homo sapiens
gccgggccgggccgg

SEQ ID NO: 749813 - DNA, 15 bp, Homo sapiens
ccgggccgggccggc

SEQ ID NO: 749814 - DNA, 15 bp, Homo sapiens
cgggccgggccggca

SEQ ID NO: 749815 - DNA, 15 bp, Homo sapiens
gggccgggccggcag

SEQ ID NO: 749816 - DNA, 15 bp, Homo sapiens
ggccgggccggcagc

SEQ ID NO: 749817 - DNA, 15 bp, Homo sapiens
gccgggccggcagcc

SEQ ID NO: 749818 - DNA, 15 bp, Homo sapiens
ccgggccggcagccg

SEQ ID NO: 749819 - DNA, 15 bp, Homo sapiens
cgggccggcagccgc

SEQ ID NO: 749820 - DNA, 15 bp, Homo sapiens
gggccggcagccgcc

SEQ ID NO: 749821 - DNA, 15 bp, Homo sapiens
ggccggcagccgccc

SEQ ID NO: 749822 - DNA, 15 bp, Homo sapiens
gccggcagccgccct

SEQ ID NO: 749823 - DNA, 15 bp, Homo sapiens
ccggcagccgccctg

SEQ ID NO: 749824 - DNA, 15 bp, Homo sapiens
cggcagccgccctgc

SEQ ID NO: 749825 - DNA, 15 bp, Homo sapiens
ggcagccgccctgct

SEQ ID NO: 749826 - DNA, 15 bp, Homo sapiens
gcagccgccctgctg

SEQ ID NO: 749827 - DNA, 15 bp, Homo sapiens
cagccgccctgctgc

SEQ ID NO: 749828 - DNA, 15 bp, Homo sapiens
agccgccctgctgcg

SEQ ID NO: 749829 - DNA, 15 bp, Homo sapiens
gccgccctgctgcgt

SEQ ID NO: 749830 - DNA, 15 bp, Homo sapiens
ccgccctgctgcgtc

SEQ ID NO: 749831 - DNA, 15 bp, Homo sapiens
cgccctgctgcgtcg

SEQ ID NO: 749832 - DNA, 15 bp, Homo sapiens
gccctgctgcgtcgc

SEQ ID NO: 749833 - DNA, 15 bp, Homo sapiens
ccctgctgcgtcgct

SEQ ID NO: 749834 - DNA, 15 bp, Homo sapiens
cctgctgcgtcgctg

SEQ ID NO: 749835 - DNA, 15 bp, Homo sapiens
ctgctgcgtcgctgg

SEQ ID NO: 749836 - DNA, 15 bp, Homo sapiens
tgctgcgtcgctggt

SEQ ID NO: 749837 - DNA, 15 bp, Homo sapiens
gctgcgtcgctggtg

SEQ ID NO: 749838 - DNA, 15 bp, Homo sapiens
ctgcgtcgctggtgg

SEQ ID NO: 749839 - DNA, 15 bp, Homo sapiens
tgcgtcgctggtggt

SEQ ID NO: 749840 - DNA, 15 bp, Homo sapiens
gcgtcgctggtggtc

SEQ ID NO: 749841 - DNA, 15 bp, Homo sapiens
cgtcgctggtggtcg

SEQ ID NO: 749842 - DNA, 15 bp, Homo sapiens
gtcgctggtggtcgg

SEQ ID NO: 749843 - DNA, 15 bp, Homo sapiens
tcgctggtggtcggg

SEQ ID NO: 749844 - DNA, 15 bp, Homo sapiens
cgctggtggtcggga

SEQ ID NO: 749845 - DNA, 15 bp, Homo sapiens
gctggtggtcgggag

SEQ ID NO: 749846 - DNA, 15 bp, Homo sapiens
ctggtggtcgggaga

SEQ ID NO: 749847 - DNA, 15 bp, Homo sapiens
tggtggtcgggagac

SEQ ID NO: 749848 - DNA, 15 bp, Homo sapiens
ggtggtcgggagacg

SEQ ID NO: 749849 - DNA, 15 bp, Homo sapiens
gtggtcgggagacgg

SEQ ID NO: 749850 - DNA, 15 bp, Homo sapiens
tggtcgggagacgga

SEQ ID NO: 749851 - DNA, 15 bp, Homo sapiens
ggtcgggagacggag

SEQ ID NO: 749852 - DNA, 15 bp, Homo sapiens
gtcgggagacggaga

SEQ ID NO: 749853 - DNA, 15 bp, Homo sapiens
tcgggagacggagaa

SEQ ID NO: 749854 - DNA, 15 bp, Homo sapiens
cgggagacggagaag

SEQ ID NO: 749855 - DNA, 15 bp, Homo sapiens
gggagacggagaaga

SEQ ID NO: 749856 - DNA, 15 bp, Homo sapiens
ggagacggagaagaa

SEQ ID NO: 749857 - DNA, 15 bp, Homo sapiens
gagacggagaagaac

SEQ ID NO: 749858 - DNA, 15 bp, Homo sapiens
agacggagaagaacg

SEQ ID NO: 749859 - DNA, 15 bp, Homo sapiens
gacggagaagaacgg

SEQ ID NO: 749860 - DNA, 15 bp, Homo sapiens
acggagaagaacggg

SEQ ID NO: 749861 - DNA, 15 bp, Homo sapiens
cggagaagaacgggt

SEQ ID NO: 749862 - DNA, 15 bp, Homo sapiens
ggagaagaacgggtg

SEQ ID NO: 749863 - DNA, 15 bp, Homo sapiens
gagaagaacgggtgt

SEQ ID NO: 749864 - DNA, 15 bp, Homo sapiens
agaagaacgggtgtc

SEQ ID NO: 749865 - DNA, 15 bp, Homo sapiens
gaagaacgggtgtcg

SEQ ID NO: 749866 - DNA, 15 bp, Homo sapiens
aagaacgggtgtcgc

SEQ ID NO: 749867 - DNA, 15 bp, Homo sapiens
agaacgggtgtcgcg

SEQ ID NO: 749868 - DNA, 15 bp, Homo sapiens
gaacgggtgtcgcgg

SEQ ID NO: 749869 - DNA, 15 bp, Homo sapiens
aacgggtgtcgcggg

SEQ ID NO: 749870 - DNA, 15 bp, Homo sapiens
acgggtgtcgcgggc

SEQ ID NO: 749871 - DNA, 15 bp, Homo sapiens
cgggtgtcgcgggcg

SEQ ID NO: 749872 - DNA, 15 bp, Homo sapiens
gggtgtcgcgggcga

SEQ ID NO: 749873 - DNA, 15 bp, Homo sapiens
ggtgtcgcgggcgaa

SEQ ID NO: 749874 - DNA, 15 bp, Homo sapiens
gtgtcgcgggcgaag

SEQ ID NO: 749875 - DNA, 15 bp, Homo sapiens
tgtcgcgggcgaagg

SEQ ID NO: 749876 - DNA, 15 bp, Homo sapiens
gtcgcgggcgaagga

SEQ ID NO: 749877 - DNA, 15 bp, Homo sapiens
tcgcgggcgaaggag

SEQ ID NO: 749878 - DNA, 15 bp, Homo sapiens
cgcgggcgaaggagt

SEQ ID NO: 749879 - DNA, 15 bp, Homo sapiens
gcgggcgaaggagtt

SEQ ID NO: 749880 - DNA, 15 bp, Homo sapiens
cgggcgaaggagttc

SEQ ID NO: 749881 - DNA, 15 bp, Homo sapiens
gggcgaaggagttcc

SEQ ID NO: 749882 - DNA, 15 bp, Homo sapiens
ggcgaaggagttccc

SEQ ID NO: 749883 - DNA, 15 bp, Homo sapiens
gcgaaggagttccca

SEQ ID NO: 749884 - DNA, 15 bp, Homo sapiens
cgaaggagttcccag

SEQ ID NO: 749885 - DNA, 15 bp, Homo sapiens
gaaggagttcccagg

SEQ ID NO: 749886 - DNA, 15 bp, Homo sapiens
aaggagttcccagga

SEQ ID NO: 749887 - DNA, 15 bp, Homo sapiens
aggagttcccaggac

SEQ ID NO: 749888 - DNA, 15 bp, Homo sapiens
ggagttcccaggaca

SEQ ID NO: 749889 - DNA, 15 bp, Homo sapiens
gagttcccaggacac

SEQ ID NO: 749890 - DNA, 15 bp, Homo sapiens
agttcccaggacacc

SEQ ID NO: 749891 - DNA, 15 bp, Homo sapiens
gttcccaggacaccc

SEQ ID NO: 749892 - DNA, 15 bp, Homo sapiens
ttcccaggacacccc

SEQ ID NO: 749893 - DNA, 15 bp, Homo sapiens
tcccaggacaccccc

SEQ ID NO: 749894 - DNA, 15 bp, Homo sapiens
cccaggacaccccct

SEQ ID NO: 749895 - DNA, 15 bp, Homo sapiens
ccaggacaccccctc

SEQ ID NO: 749896 - DNA, 15 bp, Homo sapiens
caggacaccccctcg

SEQ ID NO: 749897 - DNA, 15 bp, Homo sapiens
aggacaccccctcgg

SEQ ID NO: 749898 - DNA, 15 bp, Homo sapiens
ggacaccccctcggg

SEQ ID NO: 749899 - DNA, 15 bp, Homo sapiens
gacaccccctcgggt

SEQ ID NO: 749900 - DNA, 15 bp, Homo sapiens
acaccccctcgggtg

SEQ ID NO: 749901 - DNA, 15 bp, Homo sapiens
caccccctcgggtgt

SEQ ID NO: 749902 - DNA, 15 bp, Homo sapiens
accccctcgggtgtc

SEQ ID NO: 749903 - DNA, 15 bp, Homo sapiens
ccccctcgggtgtct

SEQ ID NO: 749904 - DNA, 15 bp, Homo sapiens
cccctcgggtgtctg

SEQ ID NO: 749905 - DNA, 15 bp, Homo sapiens
ccctcgggtgtctgc

SEQ ID NO: 749906 - DNA, 15 bp, Homo sapiens
cctcgggtgtctgcg

SEQ ID NO: 749907 - DNA, 15 bp, Homo sapiens
ctcgggtgtctgcgc

SEQ ID NO: 749908 - DNA, 15 bp, Homo sapiens
tcgggtgtctgcgcc

SEQ ID NO: 749909 - DNA, 15 bp, Homo sapiens
cgggtgtctgcgccg

SEQ ID NO: 749910 - DNA, 15 bp, Homo sapiens
gggtgtctgcgccgg

SEQ ID NO: 749911 - DNA, 15 bp, Homo sapiens
ggtgtctgcgccgga

SEQ ID NO: 749912 - DNA, 15 bp, Homo sapiens
gtgtctgcgccggaa

SEQ ID NO: 749913 - DNA, 15 bp, Homo sapiens
tgtctgcgccggaac

SEQ ID NO: 749914 - DNA, 15 bp, Homo sapiens
gtctgcgccggaact

SEQ ID NO: 749915 - DNA, 15 bp, Homo sapiens
tctgcgccggaactc

SEQ ID NO: 749916 - DNA, 15 bp, Homo sapiens
ctgcgccggaactcc

SEQ ID NO: 749917 - DNA, 15 bp, Homo sapiens
tgcgccggaactccg

SEQ ID NO: 749918 - DNA, 15 bp, Homo sapiens
gcgccggaactccga

SEQ ID NO: 749919 - DNA, 15 bp, Homo sapiens
cgccggaactccgag

SEQ ID NO: 749920 - DNA, 15 bp, Homo sapiens
gccggaactccgagg

SEQ ID NO: 749921 - DNA, 15 bp, Homo sapiens
ccggaactccgaggg

SEQ ID NO: 749922 - DNA, 15 bp, Homo sapiens
cggaactccgagggt

SEQ ID NO: 749923 - DNA, 15 bp, Homo sapiens
ggaactccgagggtt

SEQ ID NO: 749924 - DNA, 15 bp, Homo sapiens
gaactccgagggttc

SEQ ID NO: 749925 - DNA, 15 bp, Homo sapiens
aactccgagggttcc

SEQ ID NO: 749926 - DNA, 15 bp, Homo sapiens
actccgagggttccc

SEQ ID NO: 749927 - DNA, 15 bp, Homo sapiens
ctccgagggttcccc

SEQ ID NO: 749928 - DNA, 15 bp, Homo sapiens
tccgagggttccccg

SEQ ID NO: 749929 - DNA, 15 bp, Homo sapiens
ccgagggttccccgg

SEQ ID NO: 749930 - DNA, 15 bp, Homo sapiens
cgagggttccccgga

SEQ ID NO: 749931 - DNA, 15 bp, Homo sapiens
gagggttccccggag

SEQ ID NO: 749932 - DNA, 15 bp, Homo sapiens
agggttccccggagt

SEQ ID NO: 749933 - DNA, 15 bp, Homo sapiens
gggttccccggagtt

SEQ ID NO: 749934 - DNA, 15 bp, Homo sapiens
ggttccccggagtta

SEQ ID NO: 749935 - DNA, 15 bp, Homo sapiens
gttccccggagttag

SEQ ID NO: 749936 - DNA, 15 bp, Homo sapiens
ttccccggagttaga

SEQ ID NO: 749937 - DNA, 15 bp, Homo sapiens
tccccggagttagac

SEQ ID NO: 749938 - DNA, 15 bp, Homo sapiens
ccccggagttagacc

SEQ ID NO: 749939 - DNA, 15 bp, Homo sapiens
cccggagttagaccg

SEQ ID NO: 749940 - DNA, 15 bp, Homo sapiens
ccggagttagaccga

SEQ ID NO: 749941 - DNA, 15 bp, Homo sapiens
cggagttagaccgag

SEQ ID NO: 749942 - DNA, 15 bp, Homo sapiens
ggagttagaccgagt

SEQ ID NO: 749943 - DNA, 15 bp, Homo sapiens
gagttagaccgagtc

SEQ ID NO: 749944 - DNA, 15 bp, Homo sapiens
agttagaccgagtcc

SEQ ID NO: 749945 - DNA, 15 bp, Homo sapiens
gttagaccgagtcct

SEQ ID NO: 749946 - DNA, 15 bp, Homo sapiens
ttagaccgagtcctt

SEQ ID NO: 749947 - DNA, 15 bp, Homo sapiens
tagaccgagtccttc

SEQ ID NO: 749948 - DNA, 15 bp, Homo sapiens
agaccgagtccttcc

SEQ ID NO: 749949 - DNA, 15 bp, Homo sapiens
gaccgagtccttcct

SEQ ID NO: 749950 - DNA, 15 bp, Homo sapiens
accgagtccttcctc

SEQ ID NO: 749951 - DNA, 15 bp, Homo sapiens
ccgagtccttcctca

SEQ ID NO: 749952 - DNA, 15 bp, Homo sapiens
cgagtccttcctcac

SEQ ID NO: 749953 - DNA, 15 bp, Homo sapiens
gagtccttcctcacg

SEQ ID NO: 749954 - DNA, 15 bp, Homo sapiens
agtccttcctcacgc

SEQ ID NO: 749955 - DNA, 15 bp, Homo sapiens
gtccttcctcacgcc

SEQ ID NO: 749956 - DNA, 15 bp, Homo sapiens
tccttcctcacgccc

SEQ ID NO: 749957 - DNA, 15 bp, Homo sapiens
ccttcctcacgccct

SEQ ID NO: 749958 - DNA, 15 bp, Homo sapiens
cttcctcacgccctc

SEQ ID NO: 749959 - DNA, 15 bp, Homo sapiens
ttcctcacgccctcc

SEQ ID NO: 749960 - DNA, 15 bp, Homo sapiens
tcctcacgccctccc

SEQ ID NO: 749961 - DNA, 15 bp, Homo sapiens
cctcacgccctcccg

SEQ ID NO: 749962 - DNA, 15 bp, Homo sapiens
ctcacgccctcccgg

SEQ ID NO: 749963 - DNA, 15 bp, Homo sapiens
tcacgccctcccggc

SEQ ID NO: 749964 - DNA, 15 bp, Homo sapiens
cacgccctcccggct

SEQ ID NO: 749965 - DNA, 15 bp, Homo sapiens
acgccctcccggctg

SEQ ID NO: 749966 - DNA, 15 bp, Homo sapiens
cgccctcccggctgt

SEQ ID NO: 749967 - DNA, 15 bp, Homo sapiens
gccctcccggctgtg

SEQ ID NO: 749968 - DNA, 15 bp, Homo sapiens
ccctcccggctgtgg

SEQ ID NO: 749969 - DNA, 15 bp, Homo sapiens
cctcccggctgtggg

SEQ ID NO: 749970 - DNA, 15 bp, Homo sapiens
ctcccggctgtgggt

SEQ ID NO: 749971 - DNA, 15 bp, Homo sapiens
tcccggctgtgggtg

SEQ ID NO: 749972 - DNA, 15 bp, Homo sapiens
cccggctgtgggtgc

SEQ ID NO: 749973 - DNA, 15 bp, Homo sapiens
ccggctgtgggtgcc

SEQ ID NO: 749974 - DNA, 15 bp, Homo sapiens
cggctgtgggtgcca

SEQ ID NO: 749975 - DNA, 15 bp, Homo sapiens
ggctgtgggtgccaa

SEQ ID NO: 749976 - DNA, 15 bp, Homo sapiens
gctgtgggtgccaag

SEQ ID NO: 749977 - DNA, 15 bp, Homo sapiens
ctgtgggtgccaagc

SEQ ID NO: 749978 - DNA, 15 bp, Homo sapiens
tgtgggtgccaagcg

SEQ ID NO: 749979 - DNA, 15 bp, Homo sapiens
gtgggtgccaagcgg

SEQ ID NO: 749980 - DNA, 15 bp, Homo sapiens
tgggtgccaagcggc

SEQ ID NO: 749981 - DNA, 15 bp, Homo sapiens
gggtgccaagcggcc

SEQ ID NO: 749982 - DNA, 15 bp, Homo sapiens
ggtgccaagcggccg

SEQ ID NO: 749983 - DNA, 15 bp, Homo sapiens
gtgccaagcggccga

SEQ ID NO: 749984 - DNA, 15 bp, Homo sapiens
tgccaagcggccgaa

SEQ ID NO: 749985 - DNA, 15 bp, Homo sapiens
gccaagcggccgaag

SEQ ID NO: 749986 - DNA, 15 bp, Homo sapiens
ccaagcggccgaagt

SEQ ID NO: 749987 - DNA, 15 bp, Homo sapiens
caagcggccgaagtg

SEQ ID NO: 749988 - DNA, 15 bp, Homo sapiens
aagcggccgaagtgt

SEQ ID NO: 749989 - DNA, 15 bp, Homo sapiens
agcggccgaagtgtg

SEQ ID NO: 749990 - DNA, 15 bp, Homo sapiens
gcggccgaagtgtgg

SEQ ID NO: 749991 - DNA, 15 bp, Homo sapiens
cggccgaagtgtggt

SEQ ID NO: 749992 - DNA, 15 bp, Homo sapiens
ggccgaagtgtggtc

SEQ ID NO: 749993 - DNA, 15 bp, Homo sapiens
gccgaagtgtggtcg

SEQ ID NO: 749994 - DNA, 15 bp, Homo sapiens
ccgaagtgtggtcgg

SEQ ID NO: 749995 - DNA, 15 bp, Homo sapiens
cgaagtgtggtcggg

SEQ ID NO: 749996 - DNA, 15 bp, Homo sapiens
gaagtgtggtcgggg

SEQ ID NO: 749997 - DNA, 15 bp, Homo sapiens
aagtgtggtcgggga

SEQ ID NO: 749998 - DNA, 15 bp, Homo sapiens
agtgtggtcggggag

SEQ ID NO: 749999 - DNA, 15 bp, Homo sapiens
gtgtggtcggggagg

SEQ ID NO: 750000 - DNA, 15 bp, Homo sapiens
tgtggtcggggaggc

SEQ ID NO: 750001 - DNA, 15 bp, Homo sapiens
gtggtcggggaggcg

SEQ ID NO: 750002 - DNA, 15 bp, Homo sapiens
tggtcggggaggcgc

SEQ ID NO: 750003 - DNA, 15 bp, Homo sapiens
ggtcggggaggcgcc

SEQ ID NO: 750004 - DNA, 15 bp, Homo sapiens
gtcggggaggcgccc

SEQ ID NO: 750005 - DNA, 15 bp, Homo sapiens
tcggggaggcgccct

SEQ ID NO: 750006 - DNA, 15 bp, Homo sapiens
cggggaggcgccctc

SEQ ID NO: 750007 - DNA, 15 bp, Homo sapiens
ggggaggcgccctcc

SEQ ID NO: 750008 - DNA, 15 bp, Homo sapiens
gggaggcgccctccc

SEQ ID NO: 750009 - DNA, 15 bp, Homo sapiens
ggaggcgccctcccg

SEQ ID NO: 750010 - DNA, 15 bp, Homo sapiens
gaggcgccctcccgc

SEQ ID NO: 750011 - DNA, 15 bp, Homo sapiens
aggcgccctcccgcc

SEQ ID NO: 750012 - DNA, 15 bp, Homo sapiens
ggcgccctcccgccc

SEQ ID NO: 750013 - DNA, 15 bp, Homo sapiens
gcgccctcccgcccg

SEQ ID NO: 750014 - DNA, 15 bp, Homo sapiens
cgccctcccgcccgg

SEQ ID NO: 750015 - DNA, 15 bp, Homo sapiens
gccctcccgcccggc

SEQ ID NO: 750016 - DNA, 15 bp, Homo sapiens
ccctcccgcccggcc

SEQ ID NO: 750017 - DNA, 15 bp, Homo sapiens
cctcccgcccggccg

SEQ ID NO: 750018 - DNA, 15 bp, Homo sapiens
ctcccgcccggccgc

SEQ ID NO: 750019 - DNA, 15 bp, Homo sapiens
tcccgcccggccgcg

SEQ ID NO: 750020 - DNA, 15 bp, Homo sapiens
cccgcccggccgcgg

SEQ ID NO: 750021 - DNA, 15 bp, Homo sapiens
ccgcccggccgcgga

SEQ ID NO: 750022 - DNA, 15 bp, Homo sapiens
cgcccggccgcggag

SEQ ID NO: 750023 - DNA, 15 bp, Homo sapiens
gcccggccgcggagg

SEQ ID NO: 750024 - DNA, 15 bp, Homo sapiens
cccggccgcggaggc

SEQ ID NO: 750025 - DNA, 15 bp, Homo sapiens
ccggccgcggaggcc

SEQ ID NO: 750026 - DNA, 15 bp, Homo sapiens
cggccgcggaggccc

SEQ ID NO: 750027 - DNA, 15 bp, Homo sapiens
ggccgcggaggcccg

SEQ ID NO: 750028 - DNA, 15 bp, Homo sapiens
gccgcggaggcccga

SEQ ID NO: 750029 - DNA, 15 bp, Homo sapiens
ccgcggaggcccgag

SEQ ID NO: 750030 - DNA, 15 bp, Homo sapiens
cgcggaggcccgagg

SEQ ID NO: 750031 - DNA, 15 bp, Homo sapiens
gcggaggcccgaggg

SEQ ID NO: 750032 - DNA, 15 bp, Homo sapiens
cggaggcccgagggc

SEQ ID NO: 750033 - DNA, 15 bp, Homo sapiens
ggaggcccgagggcg

SEQ ID NO: 750034 - DNA, 15 bp, Homo sapiens
gaggcccgagggcgg

SEQ ID NO: 750035 - DNA, 15 bp, Homo sapiens
aggcccgagggcggc

SEQ ID NO: 750036 - DNA, 15 bp, Homo sapiens
ggcccgagggcggct

SEQ ID NO: 750037 - DNA, 15 bp, Homo sapiens
gcccgagggcggctg

SEQ ID NO: 750038 - DNA, 15 bp, Homo sapiens
cccgagggcggctgc

SEQ ID NO: 750039 - DNA, 15 bp, Homo sapiens
ccgagggcggctgcc

SEQ ID NO: 750040 - DNA, 15 bp, Homo sapiens
cgagggcggctgccg

SEQ ID NO: 750041 - DNA, 15 bp, Homo sapiens
gagggcggctgccgg

SEQ ID NO: 750042 - DNA, 15 bp, Homo sapiens
agggcggctgccgga

SEQ ID NO: 750043 - DNA, 15 bp, Homo sapiens
gggcggctgccggag

SEQ ID NO: 750044 - DNA, 15 bp, Homo sapiens
ggcggctgccggagg

SEQ ID NO: 750045 - DNA, 15 bp, Homo sapiens
gcggctgccggaggg

SEQ ID NO: 750046 - DNA, 15 bp, Homo sapiens
cggctgccggagggt

SEQ ID NO: 750047 - DNA, 15 bp, Homo sapiens
ggctgccggagggtg

SEQ ID NO: 750048 - DNA, 15 bp, Homo sapiens
gctgccggagggtgc

SEQ ID NO: 750049 - DNA, 15 bp, Homo sapiens
ctgccggagggtgct

SEQ ID NO: 750050 - DNA, 15 bp, Homo sapiens
tgccggagggtgctc

SEQ ID NO: 750051 - DNA, 15 bp, Homo sapiens
gccggagggtgctcg

SEQ ID NO: 750052 - DNA, 15 bp, Homo sapiens
ccggagggtgctcgg

SEQ ID NO: 750053 - DNA, 15 bp, Homo sapiens
cggagggtgctcggc

SEQ ID NO: 750054 - DNA, 15 bp, Homo sapiens
ggagggtgctcggcg

SEQ ID NO: 750055 - DNA, 15 bp, Homo sapiens
gagggtgctcggcgg

SEQ ID NO: 750056 - DNA, 15 bp, Homo sapiens
agggtgctcggcggc

SEQ ID NO: 750057 - DNA, 15 bp, Homo sapiens
gggtgctcggcggcg

SEQ ID NO: 750058 - DNA, 15 bp, Homo sapiens
ggtgctcggcggcga

SEQ ID NO: 750059 - DNA, 15 bp, Homo sapiens
gtgctcggcggcgaa

SEQ ID NO: 750060 - DNA, 15 bp, Homo sapiens
tgctcggcggcgaag

SEQ ID NO: 750061 - DNA, 15 bp, Homo sapiens
gctcggcggcgaagc

SEQ ID NO: 750062 - DNA, 15 bp, Homo sapiens
ctcggcggcgaagcc

SEQ ID NO: 750063 - DNA, 15 bp, Homo sapiens
tcggcggcgaagccc

SEQ ID NO: 750064 - DNA, 15 bp, Homo sapiens
cggcggcgaagcccc

SEQ ID NO: 750065 - DNA, 15 bp, Homo sapiens
ggcggcgaagccccc

SEQ ID NO: 750066 - DNA, 15 bp, Homo sapiens
gcggcgaagccccct

SEQ ID NO: 750067 - DNA, 15 bp, Homo sapiens
cggcgaagccccctg

SEQ ID NO: 750068 - DNA, 15 bp, Homo sapiens
ggcgaagccccctga

SEQ ID NO: 750069 - DNA, 15 bp, Homo sapiens
gcgaagccccctgac

SEQ ID NO: 750070 - DNA, 15 bp, Homo sapiens
cgaagccccctgacc

SEQ ID NO: 750071 - DNA, 15 bp, Homo sapiens
gaagccccctgaccc

SEQ ID NO: 750072 - DNA, 15 bp, Homo sapiens
aagccccctgacccg

SEQ ID NO: 750073 - DNA, 15 bp, Homo sapiens
agccccctgacccgg

SEQ ID NO: 750074 - DNA, 15 bp, Homo sapiens
gccccctgacccggc

SEQ ID NO: 750075 - DNA, 15 bp, Homo sapiens
ccccctgacccggcc

SEQ ID NO: 750076 - DNA, 15 bp, Homo sapiens
cccctgacccggccg

SEQ ID NO: 750077 - DNA, 15 bp, Homo sapiens
ccctgacccggccgg

SEQ ID NO: 750078 - DNA, 15 bp, Homo sapiens
cctgacccggccggg

SEQ ID NO: 750079 - DNA, 15 bp, Homo sapiens
ctgacccggccgggc

SEQ ID NO: 750080 - DNA, 15 bp, Homo sapiens
tgacccggccgggct

SEQ ID NO: 750081 - DNA, 15 bp, Homo sapiens
gacccggccgggctg

SEQ ID NO: 750082 - DNA, 15 bp, Homo sapiens
acccggccgggctgt

SEQ ID NO: 750083 - DNA, 15 bp, Homo sapiens
cccggccgggctgtc

SEQ ID NO: 750084 - DNA, 15 bp, Homo sapiens
ccggccgggctgtcc

SEQ ID NO: 750085 - DNA, 15 bp, Homo sapiens
cggccgggctgtccg

SEQ ID NO: 750086 - DNA, 15 bp, Homo sapiens
ggccgggctgtccgg

SEQ ID NO: 750087 - DNA, 15 bp, Homo sapiens
gccgggctgtccggg

SEQ ID NO: 750088 - DNA, 15 bp, Homo sapiens
ccgggctgtccgggc

SEQ ID NO: 750089 - DNA, 15 bp, Homo sapiens
cgggctgtccgggcg

SEQ ID NO: 750090 - DNA, 15 bp, Homo sapiens
gggctgtccgggcgg

SEQ ID NO: 750091 - DNA, 15 bp, Homo sapiens
ggctgtccgggcggc

SEQ ID NO: 750092 - DNA, 15 bp, Homo sapiens
gctgtccgggcggcg

SEQ ID NO: 750093 - DNA, 15 bp, Homo sapiens
ctgtccgggcggcgc

SEQ ID NO: 750094 - DNA, 15 bp, Homo sapiens
tgtccgggcggcgcc

SEQ ID NO: 750095 - DNA, 15 bp, Homo sapiens
gtccgggcggcgccc

SEQ ID NO: 750096 - DNA, 15 bp, Homo sapiens
tccgggcggcgccct

SEQ ID NO: 750097 - DNA, 15 bp, Homo sapiens
ccgggcggcgccctc

SEQ ID NO: 750098 - DNA, 15 bp, Homo sapiens
cgggcggcgccctcc

SEQ ID NO: 750099 - DNA, 15 bp, Homo sapiens
gggcggcgccctccg

SEQ ID NO: 750100 - DNA, 15 bp, Homo sapiens
ggcggcgccctccgt

SEQ ID NO: 750101 - DNA, 15 bp, Homo sapiens
gcggcgccctccgtg

SEQ ID NO: 750102 - DNA, 15 bp, Homo sapiens
cggcgccctccgtgg

SEQ ID NO: 750103 - DNA, 15 bp, Homo sapiens
ggcgccctccgtggc

SEQ ID NO: 750104 - DNA, 15 bp, Homo sapiens
gcgccctccgtggcc

SEQ ID NO: 750105 - DNA, 15 bp, Homo sapiens
cgccctccgtggccc

SEQ ID NO: 750106 - DNA, 15 bp, Homo sapiens
gccctccgtggcccg

SEQ ID NO: 750107 - DNA, 15 bp, Homo sapiens
ccctccgtggcccgg

SEQ ID NO: 750108 - DNA, 15 bp, Homo sapiens
cctccgtggcccgga

SEQ ID NO: 750109 - DNA, 15 bp, Homo sapiens
ctccgtggcccggag

SEQ ID NO: 750110 - DNA, 15 bp, Homo sapiens
tccgtggcccggagt

SEQ ID NO: 750111 - DNA, 15 bp, Homo sapiens
ccgtggcccggagtt

SEQ ID NO: 750112 - DNA, 15 bp, Homo sapiens
cgtggcccggagttg

SEQ ID NO: 750113 - DNA, 15 bp, Homo sapiens
gtggcccggagttgc

SEQ ID NO: 750114 - DNA, 15 bp, Homo sapiens
tggcccggagttgcg

SEQ ID NO: 750115 - DNA, 15 bp, Homo sapiens
ggcccggagttgcgt

SEQ ID NO: 750116 - DNA, 15 bp, Homo sapiens
gcccggagttgcgtc

SEQ ID NO: 750117 - DNA, 15 bp, Homo sapiens
cccggagttgcgtct

SEQ ID NO: 750118 - DNA, 15 bp, Homo sapiens
ccggagttgcgtctt

SEQ ID NO: 750119 - DNA, 15 bp, Homo sapiens
cggagttgcgtcttg

SEQ ID NO: 750120 - DNA, 15 bp, Homo sapiens
ggagttgcgtcttgc

SEQ ID NO: 750121 - DNA, 15 bp, Homo sapiens
gagttgcgtcttgcc

SEQ ID NO: 750122 - DNA, 15 bp, Homo sapiens
agttgcgtcttgccg

SEQ ID NO: 750123 - DNA, 15 bp, Homo sapiens
gttgcgtcttgccgg

SEQ ID NO: 750124 - DNA, 15 bp, Homo sapiens
ttgcgtcttgccggg

SEQ ID NO: 750125 - DNA, 15 bp, Homo sapiens
tgcgtcttgccgggc

SEQ ID NO: 750126 - DNA, 15 bp, Homo sapiens
gcgtcttgccgggcg

SEQ ID NO: 750127 - DNA, 15 bp, Homo sapiens
cgtcttgccgggcgt

SEQ ID NO: 750128 - DNA, 15 bp, Homo sapiens
gtcttgccgggcgtg

SEQ ID NO: 750129 - DNA, 15 bp, Homo sapiens
tcttgccgggcgtgg

SEQ ID NO: 750130 - DNA, 15 bp, Homo sapiens
cttgccgggcgtggg

SEQ ID NO: 750131 - DNA, 15 bp, Homo sapiens
ttgccgggcgtgggg

SEQ ID NO: 750132 - DNA, 15 bp, Homo sapiens
tgccgggcgtggggc

SEQ ID NO: 750133 - DNA, 15 bp, Homo sapiens
gccgggcgtggggct

SEQ ID NO: 750134 - DNA, 15 bp, Homo sapiens
ccgggcgtggggctg

SEQ ID NO: 750135 - DNA, 15 bp, Homo sapiens
cgggcgtggggctgt

SEQ ID NO: 750136 - DNA, 15 bp, Homo sapiens
gggcgtggggctgtc

SEQ ID NO: 750137 - DNA, 15 bp, Homo sapiens
ggcgtggggctgtct

SEQ ID NO: 750138 - DNA, 15 bp, Homo sapiens
gcgtggggctgtctc

SEQ ID NO: 750139 - DNA, 15 bp, Homo sapiens
cgtggggctgtctct

SEQ ID NO: 750140 - DNA, 15 bp, Homo sapiens
gtggggctgtctctc

SEQ ID NO: 750141 - DNA, 15 bp, Homo sapiens
tggggctgtctctct

SEQ ID NO: 750142 - DNA, 15 bp, Homo sapiens
ggggctgtctctctg

SEQ ID NO: 750143 - DNA, 15 bp, Homo sapiens
gggctgtctctctgg

SEQ ID NO: 750144 - DNA, 15 bp, Homo sapiens
ggctgtctctctggt

SEQ ID NO: 750145 - DNA, 15 bp, Homo sapiens
gctgtctctctggtt

SEQ ID NO: 750146 - DNA, 15 bp, Homo sapiens
ctgtctctctggttg

SEQ ID NO: 750147 - DNA, 15 bp, Homo sapiens
tgtctctctggttgg

SEQ ID NO: 750148 - DNA, 15 bp, Homo sapiens
gtctctctggttggg

SEQ ID NO: 750149 - DNA, 15 bp, Homo sapiens
tctctctggttgggt

SEQ ID NO: 750150 - DNA, 15 bp, Homo sapiens
ctctctggttgggta

SEQ ID NO: 750151 - DNA, 15 bp, Homo sapiens
tctctggttgggtag

SEQ ID NO: 750152 - DNA, 15 bp, Homo sapiens
ctctggttgggtagt

SEQ ID NO: 750153 - DNA, 15 bp, Homo sapiens
tctggttgggtagtg

SEQ ID NO: 750154 - DNA, 15 bp, Homo sapiens
ctggttgggtagtgg

SEQ ID NO: 750155 - DNA, 15 bp, Homo sapiens
tggttgggtagtggg

SEQ ID NO: 750156 - DNA, 15 bp, Homo sapiens
ggttgggtagtgggg

SEQ ID NO: 750157 - DNA, 15 bp, Homo sapiens
gttgggtagtgggga

SEQ ID NO: 750158 - DNA, 15 bp, Homo sapiens
ttgggtagtggggag

SEQ ID NO: 750159 - DNA, 15 bp, Homo sapiens
tgggtagtggggaga

SEQ ID NO: 750160 - DNA, 15 bp, Homo sapiens
gggtagtggggagag

SEQ ID NO: 750161 - DNA, 15 bp, Homo sapiens
ggtagtggggagagg

SEQ ID NO: 750162 - DNA, 15 bp, Homo sapiens
gtagtggggagaggg

SEQ ID NO: 750163 - DNA, 15 bp, Homo sapiens
tagtggggagagggg

SEQ ID NO: 750164 - DNA, 15 bp, Homo sapiens
agtggggagaggggt

SEQ ID NO: 750165 - DNA, 15 bp, Homo sapiens
gtggggagaggggtt

SEQ ID NO: 750166 - DNA, 15 bp, Homo sapiens
tggggagaggggttc

SEQ ID NO: 750167 - DNA, 15 bp, Homo sapiens
ggggagaggggttcc

SEQ ID NO: 750168 - DNA, 15 bp, Homo sapiens
gggagaggggttccc

SEQ ID NO: 750169 - DNA, 15 bp, Homo sapiens
ggagaggggttcccg

SEQ ID NO: 750170 - DNA, 15 bp, Homo sapiens
gagaggggttcccga

SEQ ID NO: 750171 - DNA, 15 bp, Homo sapiens
agaggggttcccgaa

SEQ ID NO: 750172 - DNA, 15 bp, Homo sapiens
gaggggttcccgaag

SEQ ID NO: 750173 - DNA, 15 bp, Homo sapiens
aggggttcccgaagg

SEQ ID NO: 750174 - DNA, 15 bp, Homo sapiens
ggggttcccgaaggc

SEQ ID NO: 750175 - DNA, 15 bp, Homo sapiens
gggttcccgaaggca

SEQ ID NO: 750176 - DNA, 15 bp, Homo sapiens
ggttcccgaaggcac

SEQ ID NO: 750177 - DNA, 15 bp, Homo sapiens
gttcccgaaggcact

SEQ ID NO: 750178 - DNA, 15 bp, Homo sapiens
ttcccgaaggcactc

SEQ ID NO: 750179 - DNA, 15 bp, Homo sapiens
tcccgaaggcactct

SEQ ID NO: 750180 - DNA, 15 bp, Homo sapiens
cccgaaggcactctt

SEQ ID NO: 750181 - DNA, 15 bp, Homo sapiens
ccgaaggcactcttg

SEQ ID NO: 750182 - DNA, 15 bp, Homo sapiens
cgaaggcactcttgg

SEQ ID NO: 750183 - DNA, 15 bp, Homo sapiens
gaaggcactcttggg

SEQ ID NO: 750184 - DNA, 15 bp, Homo sapiens
aaggcactcttggga

SEQ ID NO: 750185 - DNA, 15 bp, Homo sapiens
aggcactcttgggag

SEQ ID NO: 750186 - DNA, 15 bp, Homo sapiens
ggcactcttgggagt

SEQ ID NO: 750187 - DNA, 15 bp, Homo sapiens
gcactcttgggagtg

SEQ ID NO: 750188 - DNA, 15 bp, Homo sapiens
cactcttgggagtgt

SEQ ID NO: 750189 - DNA, 15 bp, Homo sapiens
actcttgggagtgta

SEQ ID NO: 750190 - DNA, 15 bp, Homo sapiens
ctcttgggagtgtat

SEQ ID NO: 750191 - DNA, 15 bp, Homo sapiens
tcttgggagtgtatg

SEQ ID NO: 750192 - DNA, 15 bp, Homo sapiens
cttgggagtgtatgg

SEQ ID NO: 750193 - DNA, 15 bp, Homo sapiens
ttgggagtgtatgga

SEQ ID NO: 750194 - DNA, 15 bp, Homo sapiens
tgggagtgtatggat

SEQ ID NO: 750195 - DNA, 15 bp, Homo sapiens
gggagtgtatggatg

SEQ ID NO: 750196 - DNA, 15 bp, Homo sapiens
ggagtgtatggatga

SEQ ID NO: 750197 - DNA, 15 bp, Homo sapiens
gagtgtatggatgac

SEQ ID NO: 750198 - DNA, 15 bp, Homo sapiens
agtgtatggatgacg

SEQ ID NO: 750199 - DNA, 15 bp, Homo sapiens
gtgtatggatgacgt

SEQ ID NO: 750200 - DNA, 15 bp, Homo sapiens
tgtatggatgacgtg

SEQ ID NO: 750201 - DNA, 15 bp, Homo sapiens
gtatggatgacgtgt

SEQ ID NO: 750202 - DNA, 15 bp, Homo sapiens
tatggatgacgtgtc

SEQ ID NO: 750203 - DNA, 15 bp, Homo sapiens
atggatgacgtgtca

SEQ ID NO: 750204 - DNA, 15 bp, Homo sapiens
tggatgacgtgtcag

SEQ ID NO: 750205 - DNA, 15 bp, Homo sapiens
ggatgacgtgtcagg

SEQ ID NO: 750206 - DNA, 15 bp, Homo sapiens
gatgacgtgtcaggt

SEQ ID NO: 750207 - DNA, 15 bp, Homo sapiens
atgacgtgtcaggtc

SEQ ID NO: 750208 - DNA, 15 bp, Homo sapiens
tgacgtgtcaggtca

SEQ ID NO: 750209 - DNA, 15 bp, Homo sapiens
gacgtgtcaggtcac

SEQ ID NO: 750210 - DNA, 15 bp, Homo sapiens
acgtgtcaggtcacc

SEQ ID NO: 750211 - DNA, 15 bp, Homo sapiens
cgtgtcaggtcacca

SEQ ID NO: 750212 - DNA, 15 bp, Homo sapiens
gtgtcaggtcaccaa

SEQ ID NO: 750213 - DNA, 15 bp, Homo sapiens
tgtcaggtcaccaaa

SEQ ID NO: 750214 - DNA, 15 bp, Homo sapiens
gtcaggtcaccaaat

SEQ ID NO: 750215 - DNA, 15 bp, Homo sapiens
tcaggtcaccaaatg

SEQ ID NO: 750216 - DNA, 15 bp, Homo sapiens
caggtcaccaaatgg

SEQ ID NO: 750217 - DNA, 15 bp, Homo sapiens
aggtcaccaaatgga

SEQ ID NO: 750218 - DNA, 15 bp, Homo sapiens
ggtcaccaaatggat

SEQ ID NO: 750219 - DNA, 15 bp, Homo sapiens
gtcaccaaatggatt

SEQ ID NO: 750220 - DNA, 15 bp, Homo sapiens
tcaccaaatggattg

SEQ ID NO: 750221 - DNA, 15 bp, Homo sapiens
caccaaatggattgt

SEQ ID NO: 750222 - DNA, 15 bp, Homo sapiens
accaaatggattgtc

SEQ ID NO: 750223 - DNA, 15 bp, Homo sapiens
ccaaatggattgtcg

SEQ ID NO: 750224 - DNA, 15 bp, Homo sapiens
caaatggattgtcga

SEQ ID NO: 750225 - DNA, 15 bp, Homo sapiens
aaatggattgtcgaa

SEQ ID NO: 750226 - DNA, 15 bp, Homo sapiens
aatggattgtcgaag

SEQ ID NO: 750227 - DNA, 15 bp, Homo sapiens
atggattgtcgaagg

SEQ ID NO: 750228 - DNA, 15 bp, Homo sapiens
tggattgtcgaaggg

SEQ ID NO: 750229 - DNA, 15 bp, Homo sapiens
ggattgtcgaaggga

SEQ ID NO: 750230 - DNA, 15 bp, Homo sapiens
gattgtcgaagggac

SEQ ID NO: 750231 - DNA, 15 bp, Homo sapiens
attgtcgaagggacc

SEQ ID NO: 750232 - DNA, 15 bp, Homo sapiens
ttgtcgaagggaccg

SEQ ID NO: 750233 - DNA, 15 bp, Homo sapiens
tgtcgaagggaccgg

SEQ ID NO: 750234 - DNA, 15 bp, Homo sapiens
gtcgaagggaccgga

SEQ ID NO: 750235 - DNA, 15 bp, Homo sapiens
tcgaagggaccggag

SEQ ID NO: 750236 - DNA, 15 bp, Homo sapiens
cgaagggaccggagg

SEQ ID NO: 750237 - DNA, 15 bp, Homo sapiens
gaagggaccggaggg

SEQ ID NO: 750238 - DNA, 15 bp, Homo sapiens
aagggaccggaggga

SEQ ID NO: 750239 - DNA, 15 bp, Homo sapiens
agggaccggagggaa

SEQ ID NO: 750240 - DNA, 15 bp, Homo sapiens
gggaccggagggaag

SEQ ID NO: 750241 - DNA, 15 bp, Homo sapiens
ggaccggagggaaga

SEQ ID NO: 750242 - DNA, 15 bp, Homo sapiens
gaccggagggaagag

SEQ ID NO: 750243 - DNA, 15 bp, Homo sapiens
accggagggaagagg

SEQ ID NO: 750244 - DNA, 15 bp, Homo sapiens
ccggagggaagaggg

SEQ ID NO: 750245 - DNA, 15 bp, Homo sapiens
cggagggaagagggg

SEQ ID NO: 750246 - DNA, 15 bp, Homo sapiens
ggagggaagagggga

SEQ ID NO: 750247 - DNA, 15 bp, Homo sapiens
gagggaagaggggag

SEQ ID NO: 750248 - DNA, 15 bp, Homo sapiens
agggaagaggggaga

SEQ ID NO: 750249 - DNA, 15 bp, Homo sapiens
gggaagaggggagag

SEQ ID NO: 750250 - DNA, 15 bp, Homo sapiens
ggaagaggggagagc

SEQ ID NO: 750251 - DNA, 15 bp, Homo sapiens
gaagaggggagagct

SEQ ID NO: 750252 - DNA, 15 bp, Homo sapiens
aagaggggagagctg

SEQ ID NO: 750253 - DNA, 15 bp, Homo sapiens
agaggggagagctgg

SEQ ID NO: 750254 - DNA, 15 bp, Homo sapiens
gaggggagagctgga

SEQ ID NO: 750255 - DNA, 15 bp, Homo sapiens
aggggagagctggaa

SEQ ID NO: 750256 - DNA, 15 bp, Homo sapiens
ggggagagctggaat

SEQ ID NO: 750257 - DNA, 15 bp, Homo sapiens
gggagagctggaatt

SEQ ID NO: 750258 - DNA, 15 bp, Homo sapiens
ggagagctggaattt

SEQ ID NO: 750259 - DNA, 15 bp, Homo sapiens
gagagctggaatttc

SEQ ID NO: 750260 - DNA, 15 bp, Homo sapiens
agagctggaatttct

SEQ ID NO: 750261 - DNA, 15 bp, Homo sapiens
gagctggaatttctg

SEQ ID NO: 750262 - DNA, 15 bp, Homo sapiens
agctggaatttctga

SEQ ID NO: 750263 - DNA, 15 bp, Homo sapiens
gctggaatttctgag

SEQ ID NO: 750264 - DNA, 15 bp, Homo sapiens
ctggaatttctgagg

SEQ ID NO: 750265 - DNA, 15 bp, Homo sapiens
tggaatttctgaggg

SEQ ID NO: 750266 - DNA, 15 bp, Homo sapiens
ggaatttctgagggt

SEQ ID NO: 750267 - DNA, 15 bp, Homo sapiens
gaatttctgagggtt

SEQ ID NO: 750268 - DNA, 15 bp, Homo sapiens
aatttctgagggttt

SEQ ID NO: 750269 - DNA, 15 bp, Homo sapiens
atttctgagggtttc

SEQ ID NO: 750270 - DNA, 15 bp, Homo sapiens
tttctgagggtttcg

SEQ ID NO: 750271 - DNA, 15 bp, Homo sapiens
ttctgagggtttcgg

SEQ ID NO: 750272 - DNA, 15 bp, Homo sapiens
tctgagggtttcggt

SEQ ID NO: 750273 - DNA, 15 bp, Homo sapiens
ctgagggtttcggtt

SEQ ID NO: 750274 - DNA, 15 bp, Homo sapiens
tgagggtttcggttg

SEQ ID NO: 750275 - DNA, 15 bp, Homo sapiens
gagggtttcggttgc

SEQ ID NO: 750276 - DNA, 15 bp, Homo sapiens
agggtttcggttgca

SEQ ID NO: 750277 - DNA, 15 bp, Homo sapiens
gggtttcggttgcag

SEQ ID NO: 750278 - DNA, 15 bp, Homo sapiens
ggtttcggttgcagt

SEQ ID NO: 750279 - DNA, 15 bp, Homo sapiens
gtttcggttgcagtt

SEQ ID NO: 750280 - DNA, 15 bp, Homo sapiens
tttcggttgcagttt

SEQ ID NO: 750281 - DNA, 15 bp, Homo sapiens
ttcggttgcagtttt

SEQ ID NO: 750282 - DNA, 15 bp, Homo sapiens
tcggttgcagttttc

SEQ ID NO: 750283 - DNA, 15 bp, Homo sapiens
cggttgcagttttca

SEQ ID NO: 750284 - DNA, 15 bp, Homo sapiens
ggttgcagttttcag

SEQ ID NO: 750285 - DNA, 15 bp, Homo sapiens
gttgcagttttcagt

SEQ ID NO: 750286 - DNA, 15 bp, Homo sapiens
ttgcagttttcagtg

SEQ ID NO: 750287 - DNA, 15 bp, Homo sapiens
tgcagttttcagtga

SEQ ID NO: 750288 - DNA, 15 bp, Homo sapiens
gcagttttcagtgat

SEQ ID NO: 750289 - DNA, 15 bp, Homo sapiens
cagttttcagtgatc

SEQ ID NO: 750290 - DNA, 15 bp, Homo sapiens
agttttcagtgatct

SEQ ID NO: 750291 - DNA, 15 bp, Homo sapiens
gttttcagtgatctt

SEQ ID NO: 750292 - DNA, 15 bp, Homo sapiens
ttttcagtgatcttt

SEQ ID NO: 750293 - DNA, 15 bp, Homo sapiens
tttcagtgatctttg

SEQ ID NO: 750294 - DNA, 15 bp, Homo sapiens
ttcagtgatctttgc

SEQ ID NO: 750295 - DNA, 15 bp, Homo sapiens
tcagtgatctttgct

SEQ ID NO: 750296 - DNA, 15 bp, Homo sapiens
cagtgatctttgctc

SEQ ID NO: 750297 - DNA, 15 bp, Homo sapiens
agtgatctttgctcg

SEQ ID NO: 750298 - DNA, 15 bp, Homo sapiens
gtgatctttgctcgt

SEQ ID NO: 750299 - DNA, 15 bp, Homo sapiens
tgatctttgctcgtc

SEQ ID NO: 750300 - DNA, 15 bp, Homo sapiens
gatctttgctcgtct

SEQ ID NO: 750301 - DNA, 15 bp, Homo sapiens
atctttgctcgtctc

SEQ ID NO: 750302 - DNA, 15 bp, Homo sapiens
tctttgctcgtctcc

SEQ ID NO: 750303 - DNA, 15 bp, Homo sapiens
ctttgctcgtctccc

SEQ ID NO: 750304 - DNA, 15 bp, Homo sapiens
tttgctcgtctccct

SEQ ID NO: 750305 - DNA, 15 bp, Homo sapiens
ttgctcgtctccctt

SEQ ID NO: 750306 - DNA, 15 bp, Homo sapiens
tgctcgtctcccttc

SEQ ID NO: 750307 - DNA, 15 bp, Homo sapiens
gctcgtctcccttcc

SEQ ID NO: 750308 - DNA, 15 bp, Homo sapiens
ctcgtctcccttccc

SEQ ID NO: 750309 - DNA, 15 bp, Homo sapiens
tcgtctcccttccct

SEQ ID NO: 750310 - DNA, 15 bp, Homo sapiens
cgtctcccttccctg

SEQ ID NO: 750311 - DNA, 15 bp, Homo sapiens
gtctcccttccctgt

SEQ ID NO: 750312 - DNA, 15 bp, Homo sapiens
tctcccttccctgta

SEQ ID NO: 750313 - DNA, 15 bp, Homo sapiens
ctcccttccctgtaa

SEQ ID NO: 750314 - DNA, 15 bp, Homo sapiens
tcccttccctgtaaa

SEQ ID NO: 750315 - DNA, 15 bp, Homo sapiens
cccttccctgtaaag

SEQ ID NO: 750316 - DNA, 15 bp, Homo sapiens
ccttccctgtaaagc

SEQ ID NO: 750317 - DNA, 15 bp, Homo sapiens
cttccctgtaaagct

SEQ ID NO: 750318 - DNA, 15 bp, Homo sapiens
ttccctgtaaagcta

SEQ ID NO: 750319 - DNA, 15 bp, Homo sapiens
tccctgtaaagctac

SEQ ID NO: 750320 - DNA, 15 bp, Homo sapiens
ccctgtaaagctaca

SEQ ID NO: 750321 - DNA, 15 bp, Homo sapiens
cctgtaaagctacat

SEQ ID NO: 750322 - DNA, 15 bp, Homo sapiens
ctgtaaagctacata

SEQ ID NO: 750323 - DNA, 15 bp, Homo sapiens
tgtaaagctacatat

SEQ ID NO: 750324 - DNA, 15 bp, Homo sapiens
gtaaagctacatatg

SEQ ID NO: 750325 - DNA, 15 bp, Homo sapiens
taaagctacatatgc

SEQ ID NO: 750326 - DNA, 15 bp, Homo sapiens
aaagctacatatgct

SEQ ID NO: 750327 - DNA, 15 bp, Homo sapiens
aagctacatatgctc

SEQ ID NO: 750328 - DNA, 15 bp, Homo sapiens
agctacatatgctca

SEQ ID NO: 750329 - DNA, 15 bp, Homo sapiens
gctacatatgctcag

SEQ ID NO: 750330 - DNA, 15 bp, Homo sapiens
ctacatatgctcagc

SEQ ID NO: 750331 - DNA, 15 bp, Homo sapiens
tacatatgctcagca

SEQ ID NO: 750332 - DNA, 15 bp, Homo sapiens
acatatgctcagcaa

SEQ ID NO: 750333 - DNA, 15 bp, Homo sapiens
catatgctcagcaag

SEQ ID NO: 750334 - DNA, 15 bp, Homo sapiens
atatgctcagcaagt

SEQ ID NO: 750335 - DNA, 15 bp, Homo sapiens
tatgctcagcaagtg

SEQ ID NO: 750336 - DNA, 15 bp, Homo sapiens
atgctcagcaagtgc

SEQ ID NO: 750337 - DNA, 15 bp, Homo sapiens
tgctcagcaagtgcc

SEQ ID NO: 750338 - DNA, 15 bp, Homo sapiens
gctcagcaagtgccg

SEQ ID NO: 750339 - DNA, 15 bp, Homo sapiens
ctcagcaagtgccgc

SEQ ID NO: 750340 - DNA, 15 bp, Homo sapiens
tcagcaagtgccgcg

SEQ ID NO: 750341 - DNA, 15 bp, Homo sapiens
cagcaagtgccgcgt

SEQ ID NO: 750342 - DNA, 15 bp, Homo sapiens
agcaagtgccgcgtg

SEQ ID NO: 750343 - DNA, 15 bp, Homo sapiens
gcaagtgccgcgtgc

SEQ ID NO: 750344 - DNA, 15 bp, Homo sapiens
caagtgccgcgtgcc

SEQ ID NO: 750345 - DNA, 15 bp, Homo sapiens
aagtgccgcgtgcct

SEQ ID NO: 750346 - DNA, 15 bp, Homo sapiens
agtgccgcgtgcctc

SEQ ID NO: 750347 - DNA, 15 bp, Homo sapiens
gtgccgcgtgcctcc

SEQ ID NO: 750348 - DNA, 15 bp, Homo sapiens
tgccgcgtgcctccc

SEQ ID NO: 750349 - DNA, 15 bp, Homo sapiens
gccgcgtgcctccca

SEQ ID NO: 750350 - DNA, 15 bp, Homo sapiens
ccgcgtgcctcccat

SEQ ID NO: 750351 - DNA, 15 bp, Homo sapiens
cgcgtgcctcccatc

SEQ ID NO: 750352 - DNA, 15 bp, Homo sapiens
gcgtgcctcccatcc

SEQ ID NO: 750353 - DNA, 15 bp, Homo sapiens
cgtgcctcccatcct

SEQ ID NO: 750354 - DNA, 15 bp, Homo sapiens
gtgcctcccatcctt

SEQ ID NO: 750355 - DNA, 15 bp, Homo sapiens
tgcctcccatccttg

SEQ ID NO: 750356 - DNA, 15 bp, Homo sapiens
gcctcccatccttgg

SEQ ID NO: 750357 - DNA, 15 bp, Homo sapiens
cctcccatccttggt

SEQ ID NO: 750358 - DNA, 15 bp, Homo sapiens
ctcccatccttggtc

SEQ ID NO: 750359 - DNA, 15 bp, Homo sapiens
tcccatccttggtcg

SEQ ID NO: 750360 - DNA, 15 bp, Homo sapiens
cccatccttggtcgg

SEQ ID NO: 750361 - DNA, 15 bp, Homo sapiens
ccatccttggtcggt

SEQ ID NO: 750362 - DNA, 15 bp, Homo sapiens
catccttggtcggtg

SEQ ID NO: 750363 - DNA, 15 bp, Homo sapiens
atccttggtcggtgg

SEQ ID NO: 750364 - DNA, 15 bp, Homo sapiens
tccttggtcggtggt

SEQ ID NO: 750365 - DNA, 15 bp, Homo sapiens
ccttggtcggtggta

SEQ ID NO: 750366 - DNA, 15 bp, Homo sapiens
cttggtcggtggtaa

SEQ ID NO: 750367 - DNA, 15 bp, Homo sapiens
ttggtcggtggtaaa

SEQ ID NO: 750368 - DNA, 15 bp, Homo sapiens
tggtcggtggtaaat

SEQ ID NO: 750369 - DNA, 15 bp, Homo sapiens
ggtcggtggtaaatg

SEQ ID NO: 750370 - DNA, 15 bp, Homo sapiens
gtcggtggtaaatgc

SEQ ID NO: 750371 - DNA, 15 bp, Homo sapiens
tcggtggtaaatgca

SEQ ID NO: 750372 - DNA, 15 bp, Homo sapiens
cggtggtaaatgcag

SEQ ID NO: 750373 - DNA, 15 bp, Homo sapiens
ggtggtaaatgcagg

SEQ ID NO: 750374 - DNA, 15 bp, Homo sapiens
gtggtaaatgcagga

SEQ ID NO: 750375 - DNA, 15 bp, Homo sapiens
tggtaaatgcaggag

SEQ ID NO: 750376 - DNA, 15 bp, Homo sapiens
ggtaaatgcaggagg

SEQ ID NO: 750377 - DNA, 15 bp, Homo sapiens
gtaaatgcaggaggt

SEQ ID NO: 750378 - DNA, 15 bp, Homo sapiens
taaatgcaggaggta

SEQ ID NO: 750379 - DNA, 15 bp, Homo sapiens
aaatgcaggaggtaa

SEQ ID NO: 750380 - DNA, 15 bp, Homo sapiens
aatgcaggaggtaat

SEQ ID NO: 750381 - DNA, 15 bp, Homo sapiens
atgcaggaggtaatt

SEQ ID NO: 750382 - DNA, 15 bp, Homo sapiens
tgcaggaggtaatta

SEQ ID NO: 750383 - DNA, 15 bp, Homo sapiens
gcaggaggtaattaa

SEQ ID NO: 750384 - DNA, 15 bp, Homo sapiens
caggaggtaattaac

SEQ ID NO: 750385 - DNA, 15 bp, Homo sapiens
aggaggtaattaaca

SEQ ID NO: 750386 - DNA, 15 bp, Homo sapiens
ggaggtaattaacag

SEQ ID NO: 750387 - DNA, 15 bp, Homo sapiens
gaggtaattaacagg

SEQ ID NO: 750388 - DNA, 15 bp, Homo sapiens
aggtaattaacagga

SEQ ID NO: 750389 - DNA, 15 bp, Homo sapiens
ggtaattaacaggat

SEQ ID NO: 750390 - DNA, 15 bp, Homo sapiens
gtaattaacaggatc

SEQ ID NO: 750391 - DNA, 15 bp, Homo sapiens
taattaacaggatct

SEQ ID NO: 750392 - DNA, 15 bp, Homo sapiens
aattaacaggatctt

SEQ ID NO: 750393 - DNA, 15 bp, Homo sapiens
attaacaggatcttc

SEQ ID NO: 750394 - DNA, 15 bp, Homo sapiens
ttaacaggatcttca

SEQ ID NO: 750395 - DNA, 15 bp, Homo sapiens
taacaggatcttcac

SEQ ID NO: 750396 - DNA, 15 bp, Homo sapiens
aacaggatcttcaca

SEQ ID NO: 750397 - DNA, 15 bp, Homo sapiens
acaggatcttcacaa

SEQ ID NO: 750398 - DNA, 15 bp, Homo sapiens
caggatcttcacaaa

SEQ ID NO: 750399 - DNA, 15 bp, Homo sapiens
aggatcttcacaaac

SEQ ID NO: 750400 - DNA, 15 bp, Homo sapiens
ggatcttcacaaact

SEQ ID NO: 750401 - DNA, 15 bp, Homo sapiens
gatcttcacaaactt

SEQ ID NO: 750402 - DNA, 15 bp, Homo sapiens
atcttcacaaacttg

SEQ ID NO: 750403 - DNA, 15 bp, Homo sapiens
tcttcacaaacttgg

SEQ ID NO: 750404 - DNA, 15 bp, Homo sapiens
cttcacaaacttgga

SEQ ID NO: 750405 - DNA, 15 bp, Homo sapiens
ttcacaaacttggag

SEQ ID NO: 750406 - DNA, 15 bp, Homo sapiens
tcacaaacttggagc

SEQ ID NO: 750407 - DNA, 15 bp, Homo sapiens
cacaaacttggagcc

SEQ ID NO: 750408 - DNA, 15 bp, Homo sapiens
acaaacttggagcca

SEQ ID NO: 750409 - DNA, 15 bp, Homo sapiens
caaacttggagccag

SEQ ID NO: 750410 - DNA, 15 bp, Homo sapiens
aaacttggagccagc

SEQ ID NO: 750411 - DNA, 15 bp, Homo sapiens
aacttggagccagcc

SEQ ID NO: 750412 - DNA, 15 bp, Homo sapiens
acttggagccagccc

SEQ ID NO: 750413 - DNA, 15 bp, Homo sapiens
cttggagccagccca

SEQ ID NO: 750414 - DNA, 15 bp, Homo sapiens
ttggagccagcccac

SEQ ID NO: 750415 - DNA, 15 bp, Homo sapiens
tggagccagcccact

SEQ ID NO: 750416 - DNA, 15 bp, Homo sapiens
ggagccagcccactg

SEQ ID NO: 750417 - DNA, 15 bp, Homo sapiens
gagccagcccactga

SEQ ID NO: 750418 - DNA, 15 bp, Homo sapiens
agccagcccactgag

SEQ ID NO: 750419 - DNA, 15 bp, Homo sapiens
gccagcccactgagt

SEQ ID NO: 750420 - DNA, 15 bp, Homo sapiens
ccagcccactgagtc

SEQ ID NO: 750421 - DNA, 15 bp, Homo sapiens
cagcccactgagtcg

SEQ ID NO: 750422 - DNA, 15 bp, Homo sapiens
agcccactgagtcgt

SEQ ID NO: 750423 - DNA, 15 bp, Homo sapiens
gcccactgagtcgtt

SEQ ID NO: 750424 - DNA, 15 bp, Homo sapiens
cccactgagtcgtta

SEQ ID NO: 750425 - DNA, 15 bp, Homo sapiens
ccactgagtcgttaa

SEQ ID NO: 750426 - DNA, 15 bp, Homo sapiens
cactgagtcgttaaa

SEQ ID NO: 750427 - DNA, 15 bp, Homo sapiens
actgagtcgttaaaa

SEQ ID NO: 750428 - DNA, 15 bp, Homo sapiens
ctgagtcgttaaaaa

SEQ ID NO: 750429 - DNA, 15 bp, Homo sapiens
tgagtcgttaaaaaa

SEQ ID NO: 750430 - DNA, 15 bp, Homo sapiens
gagtcgttaaaaaaa

SEQ ID NO: 750431 - DNA, 15 bp, Homo sapiens
agtcgttaaaaaaac

SEQ ID NO: 750432 - DNA, 15 bp, Homo sapiens
gtcgttaaaaaaaca

SEQ ID NO: 750433 - DNA, 15 bp, Homo sapiens
tcgttaaaaaaacac

SEQ ID NO: 750434 - DNA, 15 bp, Homo sapiens
cgttaaaaaaacacc

SEQ ID NO: 750435 - DNA, 15 bp, Homo sapiens
gttaaaaaaacaccc

SEQ ID NO: 750436 - DNA, 15 bp, Homo sapiens
ttaaaaaaacacccg

SEQ ID NO: 750437 - DNA, 15 bp, Homo sapiens
taaaaaaacacccgc

SEQ ID NO: 750438 - DNA, 15 bp, Homo sapiens
aaaaaaacacccgca

SEQ ID NO: 750439 - DNA, 15 bp, Homo sapiens
aaaaaacacccgcaa

SEQ ID NO: 750440 - DNA, 15 bp, Homo sapiens
aaaaacacccgcaaa

SEQ ID NO: 750441 - DNA, 15 bp, Homo sapiens
aaaacacccgcaaag

SEQ ID NO: 750442 - DNA, 15 bp, Homo sapiens
aaacacccgcaaaga

SEQ ID NO: 750443 - DNA, 15 bp, Homo sapiens
aacacccgcaaagaa

SEQ ID NO: 750444 - DNA, 15 bp, Homo sapiens
acacccgcaaagaaa

SEQ ID NO: 750445 - DNA, 15 bp, Homo sapiens
cacccgcaaagaaaa

SEQ ID NO: 750446 - DNA, 15 bp, Homo sapiens
acccgcaaagaaaac

SEQ ID NO: 750447 - DNA, 15 bp, Homo sapiens
cccgcaaagaaaaca

SEQ ID NO: 750448 - DNA, 15 bp, Homo sapiens
ccgcaaagaaaacac

SEQ ID NO: 750449 - DNA, 15 bp, Homo sapiens
cgcaaagaaaacaca

SEQ ID NO: 750450 - DNA, 15 bp, Homo sapiens
gcaaagaaaacacac

SEQ ID NO: 750451 - DNA, 15 bp, Homo sapiens
caaagaaaacacacg

SEQ ID NO: 750452 - DNA, 15 bp, Homo sapiens
aaagaaaacacacga

SEQ ID NO: 750453 - DNA, 15 bp, Homo sapiens
aagaaaacacacgag

SEQ ID NO: 750454 - DNA, 15 bp, Homo sapiens
agaaaacacacgagc

SEQ ID NO: 750455 - DNA, 15 bp, Homo sapiens
gaaaacacacgagcc

SEQ ID NO: 750456 - DNA, 15 bp, Homo sapiens
aaaacacacgagcct

SEQ ID NO: 750457 - DNA, 15 bp, Homo sapiens
aaacacacgagcctt

SEQ ID NO: 750458 - DNA, 15 bp, Homo sapiens
aacacacgagcctta

SEQ ID NO: 750459 - DNA, 15 bp, Homo sapiens
acacacgagccttaa

SEQ ID NO: 750460 - DNA, 15 bp, Homo sapiens
cacacgagccttaac

SEQ ID NO: 750461 - DNA, 15 bp, Homo sapiens
acacgagccttaaca

SEQ ID NO: 750462 - DNA, 15 bp, Homo sapiens
cacgagccttaacac

SEQ ID NO: 750463 - DNA, 15 bp, Homo sapiens
acgagccttaacact

SEQ ID NO: 750464 - DNA, 15 bp, Homo sapiens
cgagccttaacactc

SEQ ID NO: 750465 - DNA, 15 bp, Homo sapiens
gagccttaacactcc

SEQ ID NO: 750466 - DNA, 15 bp, Homo sapiens
agccttaacactcca

SEQ ID NO: 750467 - DNA, 15 bp, Homo sapiens
gccttaacactccag

SEQ ID NO: 750468 - DNA, 15 bp, Homo sapiens
ccttaacactccaga

SEQ ID NO: 750469 - DNA, 15 bp, Homo sapiens
cttaacactccagag

SEQ ID NO: 750470 - DNA, 15 bp, Homo sapiens
ttaacactccagaga

SEQ ID NO: 750471 - DNA, 15 bp, Homo sapiens
taacactccagagag

SEQ ID NO: 750472 - DNA, 15 bp, Homo sapiens
aacactccagagagt

SEQ ID NO: 750473 - DNA, 15 bp, Homo sapiens
acactccagagagtt

SEQ ID NO: 750474 - DNA, 15 bp, Homo sapiens
cactccagagagttc

SEQ ID NO: 750475 - DNA, 15 bp, Homo sapiens
actccagagagttcc

SEQ ID NO: 750476 - DNA, 15 bp, Homo sapiens
ctccagagagttccg

SEQ ID NO: 750477 - DNA, 15 bp, Homo sapiens
tccagagagttccga

SEQ ID NO: 750478 - DNA, 15 bp, Homo sapiens
ccagagagttccgaa

SEQ ID NO: 750479 - DNA, 15 bp, Homo sapiens
cagagagttccgaaa

SEQ ID NO: 750480 - DNA, 15 bp, Homo sapiens
agagagttccgaaac

SEQ ID NO: 750481 - DNA, 15 bp, Homo sapiens
gagagttccgaaaca

SEQ ID NO: 750482 - DNA, 15 bp, Homo sapiens
agagttccgaaacac

SEQ ID NO: 750483 - DNA, 15 bp, Homo sapiens
gagttccgaaacaca

SEQ ID NO: 750484 - DNA, 15 bp, Homo sapiens
agttccgaaacacaa

SEQ ID NO: 750485 - DNA, 15 bp, Homo sapiens
gttccgaaacacaaa

SEQ ID NO: 750486 - DNA, 15 bp, Homo sapiens
ttccgaaacacaaag

SEQ ID NO: 750487 - DNA, 15 bp, Homo sapiens
tccgaaacacaaagt

SEQ ID NO: 750488 - DNA, 15 bp, Homo sapiens
ccgaaacacaaagta

SEQ ID NO: 750489 - DNA, 15 bp, Homo sapiens
cgaaacacaaagtaa

SEQ ID NO: 750490 - DNA, 15 bp, Homo sapiens
gaaacacaaagtaaa

SEQ ID NO: 750491 - DNA, 15 bp, Homo sapiens
aaacacaaagtaaat

SEQ ID NO: 750492 - DNA, 15 bp, Homo sapiens
aacacaaagtaaatt

SEQ ID NO: 750493 - DNA, 15 bp, Homo sapiens
acacaaagtaaattt

SEQ ID NO: 750494 - DNA, 15 bp, Homo sapiens
cacaaagtaaatttc

SEQ ID NO: 750495 - DNA, 15 bp, Homo sapiens
acaaagtaaatttcg

SEQ ID NO: 750496 - DNA, 15 bp, Homo sapiens
caaagtaaatttcga

SEQ ID NO: 750497 - DNA, 15 bp, Homo sapiens
aaagtaaatttcgag

SEQ ID NO: 750498 - DNA, 15 bp, Homo sapiens
aagtaaatttcgagc

SEQ ID NO: 750499 - DNA, 15 bp, Homo sapiens
agtaaatttcgagct

SEQ ID NO: 750500 - DNA, 15 bp, Homo sapiens
gtaaatttcgagcta

SEQ ID NO: 750501 - DNA, 15 bp, Homo sapiens
taaatttcgagctaa

SEQ ID NO: 750502 - DNA, 15 bp, Homo sapiens
aaatttcgagctaag

SEQ ID NO: 750503 - DNA, 15 bp, Homo sapiens
aatttcgagctaagg

SEQ ID NO: 750504 - DNA, 15 bp, Homo sapiens
atttcgagctaaggg

SEQ ID NO: 750505 - DNA, 15 bp, Homo sapiens
tttcgagctaagggt

SEQ ID NO: 750506 - DNA, 15 bp, Homo sapiens
ttcgagctaagggtt

SEQ ID NO: 750507 - DNA, 15 bp, Homo sapiens
tcgagctaagggtta

SEQ ID NO: 750508 - DNA, 15 bp, Homo sapiens
cgagctaagggttac

SEQ ID NO: 750509 - DNA, 15 bp, Homo sapiens
gagctaagggttaca

SEQ ID NO: 750510 - DNA, 15 bp, Homo sapiens
agctaagggttacag

SEQ ID NO: 750511 - DNA, 15 bp, Homo sapiens
gctaagggttacagt

SEQ ID NO: 750512 - DNA, 15 bp, Homo sapiens
ctaagggttacagtc

SEQ ID NO: 750513 - DNA, 15 bp, Homo sapiens
taagggttacagtcc

SEQ ID NO: 750514 - DNA, 15 bp, Homo sapiens
aagggttacagtcct

SEQ ID NO: 750515 - DNA, 15 bp, Homo sapiens
agggttacagtcctt

SEQ ID NO: 750516 - DNA, 15 bp, Homo sapiens
gggttacagtccttt

SEQ ID NO: 750517 - DNA, 15 bp, Homo sapiens
ggttacagtccttta

SEQ ID NO: 750518 - DNA, 15 bp, Homo sapiens
gttacagtcctttaa

SEQ ID NO: 750519 - DNA, 15 bp, Homo sapiens
ttacagtcctttaaa

SEQ ID NO: 750520 - DNA, 15 bp, Homo sapiens
tacagtcctttaaat

SEQ ID NO: 750521 - DNA, 15 bp, Homo sapiens
acagtcctttaaatc

SEQ ID NO: 750522 - DNA, 15 bp, Homo sapiens
cagtcctttaaatct

SEQ ID NO: 750523 - DNA, 15 bp, Homo sapiens
agtcctttaaatctg

SEQ ID NO: 750524 - DNA, 15 bp, Homo sapiens
gtcctttaaatctgg

SEQ ID NO: 750525 - DNA, 15 bp, Homo sapiens
tcctttaaatctgga

SEQ ID NO: 750526 - DNA, 15 bp, Homo sapiens
cctttaaatctggaa

SEQ ID NO: 750527 - DNA, 15 bp, Homo sapiens
ctttaaatctggaaa

SEQ ID NO: 750528 - DNA, 15 bp, Homo sapiens
tttaaatctggaaat

SEQ ID NO: 750529 - DNA, 15 bp, Homo sapiens
ttaaatctggaaatt

SEQ ID NO: 750530 - DNA, 15 bp, Homo sapiens
taaatctggaaattt

SEQ ID NO: 750531 - DNA, 15 bp, Homo sapiens
aaatctggaaatttc

SEQ ID NO: 750532 - DNA, 15 bp, Homo sapiens
aatctggaaatttca

SEQ ID NO: 750533 - DNA, 15 bp, Homo sapiens
atctggaaatttcaa

SEQ ID NO: 750534 - DNA, 15 bp, Homo sapiens
tctggaaatttcaag

SEQ ID NO: 750535 - DNA, 15 bp, Homo sapiens
ctggaaatttcaagg

SEQ ID NO: 750536 - DNA, 15 bp, Homo sapiens
tggaaatttcaaggt

SEQ ID NO: 750537 - DNA, 15 bp, Homo sapiens
ggaaatttcaaggta

SEQ ID NO: 750538 - DNA, 15 bp, Homo sapiens
gaaatttcaaggtag

SEQ ID NO: 750539 - DNA, 15 bp, Homo sapiens
aaatttcaaggtaga

SEQ ID NO: 750540 - DNA, 15 bp, Homo sapiens
aatttcaaggtagag

SEQ ID NO: 750541 - DNA, 15 bp, Homo sapiens
atttcaaggtagagt

SEQ ID NO: 750542 - DNA, 15 bp, Homo sapiens
tttcaaggtagagtg

SEQ ID NO: 750543 - DNA, 15 bp, Homo sapiens
ttcaaggtagagtgt

SEQ ID NO: 750544 - DNA, 15 bp, Homo sapiens
tcaaggtagagtgtt

SEQ ID NO: 750545 - DNA, 15 bp, Homo sapiens
caaggtagagtgttt

SEQ ID NO: 750546 - DNA, 15 bp, Homo sapiens
aaggtagagtgtttt

SEQ ID NO: 750547 - DNA, 15 bp, Homo sapiens
aggtagagtgttttt

SEQ ID NO: 750548 - DNA, 15 bp, Homo sapiens
ggtagagtgtttttg

SEQ ID NO: 750549 - DNA, 15 bp, Homo sapiens
gtagagtgtttttgt

SEQ ID NO: 750550 - DNA, 15 bp, Homo sapiens
tagagtgtttttgtt

SEQ ID NO: 750551 - DNA, 15 bp, Homo sapiens
agagtgtttttgttt

SEQ ID NO: 750552 - DNA, 15 bp, Homo sapiens
gagtgtttttgtttt

SEQ ID NO: 750553 - DNA, 15 bp, Homo sapiens
agtgtttttgttttt

SEQ ID NO: 750554 - DNA, 15 bp, Homo sapiens
gtgtttttgtttttg

SEQ ID NO: 750555 - DNA, 15 bp, Homo sapiens
tgtttttgtttttgt

SEQ ID NO: 750556 - DNA, 15 bp, Homo sapiens
gtttttgtttttgtt

SEQ ID NO: 750557 - DNA, 15 bp, Homo sapiens
tttttgtttttgttt

SEQ ID NO: 750558 - DNA, 15 bp, Homo sapiens
ttttgtttttgtttt

SEQ ID NO: 750559 - DNA, 15 bp, Homo sapiens
tttgtttttgtttta

SEQ ID NO: 750560 - DNA, 15 bp, Homo sapiens
ttgtttttgttttaa

SEQ ID NO: 750561 - DNA, 15 bp, Homo sapiens
tgtttttgttttaaa

SEQ ID NO: 750562 - DNA, 15 bp, Homo sapiens
gtttttgttttaaat

SEQ ID NO: 750563 - DNA, 15 bp, Homo sapiens
tttttgttttaaatt

SEQ ID NO: 750564 - DNA, 15 bp, Homo sapiens
ttttgttttaaattt

SEQ ID NO: 750565 - DNA, 15 bp, Homo sapiens
tttgttttaaatttt

SEQ ID NO: 750566 - DNA, 15 bp, Homo sapiens
ttgttttaaatttta

SEQ ID NO: 750567 - DNA, 15 bp, Homo sapiens
tgttttaaattttaa

SEQ ID NO: 750568 - DNA, 15 bp, Homo sapiens
gttttaaattttaat

SEQ ID NO: 750569 - DNA, 15 bp, Homo sapiens
ttttaaattttaatt

SEQ ID NO: 750570 - DNA, 15 bp, Homo sapiens
tttaaattttaattt

SEQ ID NO: 750571 - DNA, 15 bp, Homo sapiens
ttaaattttaatttc

SEQ ID NO: 750572 - DNA, 15 bp, Homo sapiens
taaattttaatttca

SEQ ID NO: 750573 - DNA, 15 bp, Homo sapiens
aaattttaatttcac

SEQ ID NO: 750574 - DNA, 15 bp, Homo sapiens
aattttaatttcaca

SEQ ID NO: 750575 - DNA, 15 bp, Homo sapiens
attttaatttcacag

SEQ ID NO: 750576 - DNA, 15 bp, Homo sapiens
ttttaatttcacagt

SEQ ID NO: 750577 - DNA, 15 bp, Homo sapiens
tttaatttcacagta

SEQ ID NO: 750578 - DNA, 15 bp, Homo sapiens
ttaatttcacagtac

SEQ ID NO: 750579 - DNA, 15 bp, Homo sapiens
taatttcacagtact

SEQ ID NO: 750580 - DNA, 15 bp, Homo sapiens
aatttcacagtactg

SEQ ID NO: 750581 - DNA, 15 bp, Homo sapiens
atttcacagtactgg

SEQ ID NO: 750582 - DNA, 15 bp, Homo sapiens
tttcacagtactggg

SEQ ID NO: 750583 - DNA, 15 bp, Homo sapiens
ttcacagtactggga

SEQ ID NO: 750584 - DNA, 15 bp, Homo sapiens
tcacagtactgggaa

SEQ ID NO: 750585 - DNA, 15 bp, Homo sapiens
cacagtactgggaaa

SEQ ID NO: 750586 - DNA, 15 bp, Homo sapiens
acagtactgggaaat

SEQ ID NO: 750587 - DNA, 15 bp, Homo sapiens
cagtactgggaaatt

SEQ ID NO: 750588 - DNA, 15 bp, Homo sapiens
agtactgggaaattc

SEQ ID NO: 750589 - DNA, 15 bp, Homo sapiens
gtactgggaaattct

SEQ ID NO: 750590 - DNA, 15 bp, Homo sapiens
tactgggaaattctt

SEQ ID NO: 750591 - DNA, 15 bp, Homo sapiens
actgggaaattctta

SEQ ID NO: 750592 - DNA, 15 bp, Homo sapiens
ctgggaaattcttac

SEQ ID NO: 750593 - DNA, 15 bp, Homo sapiens
tgggaaattcttaca

SEQ ID NO: 750594 - DNA, 15 bp, Homo sapiens
gggaaattcttacag

SEQ ID NO: 750595 - DNA, 15 bp, Homo sapiens
ggaaattcttacagt

SEQ ID NO: 750596 - DNA, 15 bp, Homo sapiens
gaaattcttacagtc

SEQ ID NO: 750597 - DNA, 15 bp, Homo sapiens
aaattcttacagtcc

SEQ ID NO: 750598 - DNA, 15 bp, Homo sapiens
aattcttacagtcct

SEQ ID NO: 750599 - DNA, 15 bp, Homo sapiens
attcttacagtcctg

SEQ ID NO: 750600 - DNA, 15 bp, Homo sapiens
ttcttacagtcctga

SEQ ID NO: 750601 - DNA, 15 bp, Homo sapiens
tcttacagtcctgaa

SEQ ID NO: 750602 - DNA, 15 bp, Homo sapiens
cttacagtcctgaag

SEQ ID NO: 750603 - DNA, 15 bp, Homo sapiens
ttacagtcctgaaga

SEQ ID NO: 750604 - DNA, 15 bp, Homo sapiens
tacagtcctgaagat

SEQ ID NO: 750605 - DNA, 15 bp, Homo sapiens
acagtcctgaagata

SEQ ID NO: 750606 - DNA, 15 bp, Homo sapiens
cagtcctgaagatat

SEQ ID NO: 750607 - DNA, 15 bp, Homo sapiens
agtcctgaagatata

SEQ ID NO: 750608 - DNA, 15 bp, Homo sapiens
gtcctgaagatatat

SEQ ID NO: 750609 - DNA, 15 bp, Homo sapiens
tcctgaagatatata

SEQ ID NO: 750610 - DNA, 15 bp, Homo sapiens
cctgaagatatatac

SEQ ID NO: 750611 - DNA, 15 bp, Homo sapiens
ctgaagatatataca

SEQ ID NO: 750612 - DNA, 15 bp, Homo sapiens
tgaagatatatacat

SEQ ID NO: 750613 - DNA, 15 bp, Homo sapiens
gaagatatatacata

SEQ ID NO: 750614 - DNA, 15 bp, Homo sapiens
aagatatatacatat

SEQ ID NO: 750615 - DNA, 15 bp, Homo sapiens
agatatatacatatg

SEQ ID NO: 750616 - DNA, 15 bp, Homo sapiens
gatatatacatatgt

SEQ ID NO: 750617 - DNA, 15 bp, Homo sapiens
atatatacatatgta

SEQ ID NO: 750618 - DNA, 15 bp, Homo sapiens
tatatacatatgtac

SEQ ID NO: 750619 - DNA, 15 bp, Homo sapiens
atatacatatgtaca

SEQ ID NO: 750620 - DNA, 15 bp, Homo sapiens
tatacatatgtacac

SEQ ID NO: 750621 - DNA, 15 bp, Homo sapiens
atacatatgtacaca

SEQ ID NO: 750622 - DNA, 15 bp, Homo sapiens
tacatatgtacacat

SEQ ID NO: 750623 - DNA, 15 bp, Homo sapiens
acatatgtacacata

SEQ ID NO: 750624 - DNA, 15 bp, Homo sapiens
catatgtacacatat

SEQ ID NO: 750625 - DNA, 15 bp, Homo sapiens
atatgtacacatata

SEQ ID NO: 750626 - DNA, 15 bp, Homo sapiens
tatgtacacatatat

SEQ ID NO: 750627 - DNA, 15 bp, Homo sapiens
atgtacacatatata

SEQ ID NO: 750628 - DNA, 15 bp, Homo sapiens
tgtacacatatatat

SEQ ID NO: 750629 - DNA, 15 bp, Homo sapiens
gtacacatatatatc

SEQ ID NO: 750630 - DNA, 15 bp, Homo sapiens
tacacatatatatct

SEQ ID NO: 750631 - DNA, 15 bp, Homo sapiens
ttcaaaactcagtgg

SEQ ID NO: 750632 - DNA, 15 bp, Homo sapiens
tcaaaactcagtggc

SEQ ID NO: 750633 - DNA, 15 bp, Homo sapiens
caaaactcagtggct

SEQ ID NO: 750634 - DNA, 15 bp, Homo sapiens
aaaactcagtggctt

SEQ ID NO: 750635 - DNA, 15 bp, Homo sapiens
aaactcagtggcttc

SEQ ID NO: 750636 - DNA, 15 bp, Homo sapiens
aactcagtggcttca

SEQ ID NO: 750637 - DNA, 15 bp, Homo sapiens
actcagtggcttcat

SEQ ID NO: 750638 - DNA, 15 bp, Homo sapiens
ctcagtggcttcata

SEQ ID NO: 750639 - DNA, 15 bp, Homo sapiens
tcagtggcttcatat

SEQ ID NO: 750640 - DNA, 15 bp, Homo sapiens
cagtggcttcatata

SEQ ID NO: 750641 - DNA, 15 bp, Homo sapiens
agtggcttcatatag

SEQ ID NO: 750642 - DNA, 15 bp, Homo sapiens
gtggcttcatatagt

SEQ ID NO: 750643 - DNA, 15 bp, Homo sapiens
tggcttcatatagta

SEQ ID NO: 750644 - DNA, 15 bp, Homo sapiens
ggcttcatatagtaa

SEQ ID NO: 750645 - DNA, 15 bp, Homo sapiens
gcttcatatagtaag

SEQ ID NO: 750646 - DNA, 15 bp, Homo sapiens
cttcatatagtaagt

SEQ ID NO: 750647 - DNA, 15 bp, Homo sapiens
ttcatatagtaagta

SEQ ID NO: 750648 - DNA, 15 bp, Homo sapiens
tcatatagtaagtat

SEQ ID NO: 750649 - DNA, 15 bp, Homo sapiens
catatagtaagtatt

SEQ ID NO: 750650 - DNA, 15 bp, Homo sapiens
atatagtaagtattt

SEQ ID NO: 750651 - DNA, 15 bp, Homo sapiens
tatagtaagtattta

SEQ ID NO: 750652 - DNA, 15 bp, Homo sapiens
atagtaagtatttat

SEQ ID NO: 750653 - DNA, 15 bp, Homo sapiens
tagtaagtatttatt

SEQ ID NO: 750654 - DNA, 15 bp, Homo sapiens
agtaagtatttattt

SEQ ID NO: 750655 - DNA, 15 bp, Homo sapiens
gtaagtatttatttt

SEQ ID NO: 750656 - DNA, 15 bp, Homo sapiens
taagtatttattttt

SEQ ID NO: 750657 - DNA, 15 bp, Homo sapiens
aagtatttatttttc

SEQ ID NO: 750658 - DNA, 15 bp, Homo sapiens
agtatttatttttcc

SEQ ID NO: 750659 - DNA, 15 bp, Homo sapiens
gtatttatttttccc

SEQ ID NO: 750660 - DNA, 15 bp, Homo sapiens
tatttatttttccct

SEQ ID NO: 750661 - DNA, 15 bp, Homo sapiens
atttatttttccctg

SEQ ID NO: 750662 - DNA, 15 bp, Homo sapiens
tttatttttccctgt

SEQ ID NO: 750663 - DNA, 15 bp, Homo sapiens
ttatttttccctgtc

SEQ ID NO: 750664 - DNA, 15 bp, Homo sapiens
tatttttccctgtca

SEQ ID NO: 750665 - DNA, 15 bp, Homo sapiens
atttttccctgtcaa

SEQ ID NO: 750666 - DNA, 15 bp, Homo sapiens
tttttccctgtcaac

SEQ ID NO: 750667 - DNA, 15 bp, Homo sapiens
ttttccctgtcaacc

SEQ ID NO: 750668 - DNA, 15 bp, Homo sapiens
tttccctgtcaacct

SEQ ID NO: 750669 - DNA, 15 bp, Homo sapiens
ttccctgtcaacctg

SEQ ID NO: 750670 - DNA, 15 bp, Homo sapiens
tccctgtcaacctgt

SEQ ID NO: 750671 - DNA, 15 bp, Homo sapiens
ccctgtcaacctgtg

SEQ ID NO: 750672 - DNA, 15 bp, Homo sapiens
cctgtcaacctgtgg

SEQ ID NO: 750673 - DNA, 15 bp, Homo sapiens
ctgtcaacctgtggg

SEQ ID NO: 750674 - DNA, 15 bp, Homo sapiens
tgtcaacctgtgggt

SEQ ID NO: 750675 - DNA, 15 bp, Homo sapiens
gtcaacctgtgggta

SEQ ID NO: 750676 - DNA, 15 bp, Homo sapiens
tcaacctgtgggtag

SEQ ID NO: 750677 - DNA, 15 bp, Homo sapiens
caacctgtgggtaga

SEQ ID NO: 750678 - DNA, 15 bp, Homo sapiens
aacctgtgggtagat

SEQ ID NO: 750679 - DNA, 15 bp, Homo sapiens
acctgtgggtagatt

SEQ ID NO: 750680 - DNA, 15 bp, Homo sapiens
cctgtgggtagattg

SEQ ID NO: 750681 - DNA, 15 bp, Homo sapiens
ctgtgggtagattgc

SEQ ID NO: 750682 - DNA, 15 bp, Homo sapiens
tgtgggtagattgca

SEQ ID NO: 750683 - DNA, 15 bp, Homo sapiens
gtgggtagattgcaa

SEQ ID NO: 750684 - DNA, 15 bp, Homo sapiens
tgggtagattgcaac

SEQ ID NO: 750685 - DNA, 15 bp, Homo sapiens
gggtagattgcaaca

SEQ ID NO: 750686 - DNA, 15 bp, Homo sapiens
ggtagattgcaacaa

SEQ ID NO: 750687 - DNA, 15 bp, Homo sapiens
gtagattgcaacaaa

SEQ ID NO: 750688 - DNA, 15 bp, Homo sapiens
tagattgcaacaaaa

SEQ ID NO: 750689 - DNA, 15 bp, Homo sapiens
agattgcaacaaaaa

SEQ ID NO: 750690 - DNA, 15 bp, Homo sapiens
gattgcaacaaaaat

SEQ ID NO: 750691 - DNA, 15 bp, Homo sapiens
attgcaacaaaaatt

SEQ ID NO: 750692 - DNA, 15 bp, Homo sapiens
ttgcaacaaaaatta

SEQ ID NO: 750693 - DNA, 15 bp, Homo sapiens
tgcaacaaaaattag

SEQ ID NO: 750694 - DNA, 15 bp, Homo sapiens
gcaacaaaaattagc

SEQ ID NO: 750695 - DNA, 15 bp, Homo sapiens
caacaaaaattagct

SEQ ID NO: 750696 - DNA, 15 bp, Homo sapiens
aacaaaaattagctg

SEQ ID NO: 750697 - DNA, 15 bp, Homo sapiens
aaaattagctgggca

SEQ ID NO: 750698 - DNA, 15 bp, Homo sapiens
aaattagctgggcag

SEQ ID NO: 750699 - DNA, 15 bp, Homo sapiens
aattagctgggcagg

SEQ ID NO: 750700 - DNA, 15 bp, Homo sapiens
attagctgggcagga

SEQ ID NO: 750701 - DNA, 15 bp, Homo sapiens
ttagctgggcaggat

SEQ ID NO: 750702 - DNA, 15 bp, Homo sapiens
tagctgggcaggatt

SEQ ID NO: 750703 - DNA, 15 bp, Homo sapiens
agctgggcaggattc

SEQ ID NO: 750704 - DNA, 15 bp, Homo sapiens
gctgggcaggattct

SEQ ID NO: 750705 - DNA, 15 bp, Homo sapiens
ctgggcaggattctg

SEQ ID NO: 750706 - DNA, 15 bp, Homo sapiens
tgggcaggattctgg

SEQ ID NO: 750707 - DNA, 15 bp, Homo sapiens
gggcaggattctgga

SEQ ID NO: 750708 - DNA, 15 bp, Homo sapiens
ggcaggattctggac

SEQ ID NO: 750709 - DNA, 15 bp, Homo sapiens
gcaggattctggact

SEQ ID NO: 750710 - DNA, 15 bp, Homo sapiens
caggattctggactt

SEQ ID NO: 750711 - DNA, 15 bp, Homo sapiens
aggattctggacttc

SEQ ID NO: 750712 - DNA, 15 bp, Homo sapiens
ggattctggacttca

SEQ ID NO: 750713 - DNA, 15 bp, Homo sapiens
gattctggacttcag

SEQ ID NO: 750714 - DNA, 15 bp, Homo sapiens
attctggacttcagg

SEQ ID NO: 750715 - DNA, 15 bp, Homo sapiens
ttctggacttcaggc

SEQ ID NO: 750716 - DNA, 15 bp, Homo sapiens
tctggacttcaggca

SEQ ID NO: 750717 - DNA, 15 bp, Homo sapiens
ctggacttcaggcac

SEQ ID NO: 750718 - DNA, 15 bp, Homo sapiens
tggacttcaggcact

SEQ ID NO: 750719 - DNA, 15 bp, Homo sapiens
ggacttcaggcactg

SEQ ID NO: 750720 - DNA, 15 bp, Homo sapiens
gacttcaggcactga

SEQ ID NO: 750721 - DNA, 15 bp, Homo sapiens
acttcaggcactgag

SEQ ID NO: 750722 - DNA, 15 bp, Homo sapiens
cttcaggcactgagc

SEQ ID NO: 750723 - DNA, 15 bp, Homo sapiens
ttcaggcactgagct

SEQ ID NO: 750724 - DNA, 15 bp, Homo sapiens
tcaggcactgagctc

SEQ ID NO: 750725 - DNA, 15 bp, Homo sapiens
caggcactgagctcc

SEQ ID NO: 750726 - DNA, 15 bp, Homo sapiens
aggcactgagctcca

SEQ ID NO: 750727 - DNA, 15 bp, Homo sapiens
ggcactgagctccag

SEQ ID NO: 750728 - DNA, 15 bp, Homo sapiens
gcactgagctccagt

SEQ ID NO: 750729 - DNA, 15 bp, Homo sapiens
cactgagctccagtc

SEQ ID NO: 750730 - DNA, 15 bp, Homo sapiens
actgagctccagtct

SEQ ID NO: 750731 - DNA, 15 bp, Homo sapiens
ctgagctccagtctg

SEQ ID NO: 750732 - DNA, 15 bp, Homo sapiens
tgagctccagtctgc

SEQ ID NO: 750733 - DNA, 15 bp, Homo sapiens
gagctccagtctgca

SEQ ID NO: 750734 - DNA, 15 bp, Homo sapiens
agctccagtctgcag

SEQ ID NO: 750735 - DNA, 15 bp, Homo sapiens
gctccagtctgcagg

SEQ ID NO: 750736 - DNA, 15 bp, Homo sapiens
ctccagtctgcaggt

SEQ ID NO: 750737 - DNA, 15 bp, Homo sapiens
tccagtctgcaggtt

SEQ ID NO: 750738 - DNA, 15 bp, Homo sapiens
ccagtctgcaggttg

SEQ ID NO: 750739 - DNA, 15 bp, Homo sapiens
cagtctgcaggttgg

SEQ ID NO: 750740 - DNA, 15 bp, Homo sapiens
agtctgcaggttgga

SEQ ID NO: 750741 - DNA, 15 bp, Homo sapiens
gtctgcaggttggat

SEQ ID NO: 750742 - DNA, 15 bp, Homo sapiens
tctgcaggttggatt

SEQ ID NO: 750743 - DNA, 15 bp, Homo sapiens
ctgcaggttggattg

SEQ ID NO: 750744 - DNA, 15 bp, Homo sapiens
tgcaggttggattga

SEQ ID NO: 750745 - DNA, 15 bp, Homo sapiens
gcaggttggattgag

SEQ ID NO: 750746 - DNA, 15 bp, Homo sapiens
caggttggattgagg

SEQ ID NO: 750747 - DNA, 15 bp, Homo sapiens
aggttggattgaggt

SEQ ID NO: 750748 - DNA, 15 bp, Homo sapiens
ggttggattgaggtt

SEQ ID NO: 750749 - DNA, 15 bp, Homo sapiens
gttggattgaggttg

SEQ ID NO: 750750 - DNA, 15 bp, Homo sapiens
ttggattgaggttgg

SEQ ID NO: 750751 - DNA, 15 bp, Homo sapiens
tggattgaggttggg

SEQ ID NO: 750752 - DNA, 15 bp, Homo sapiens
ggattgaggttgggt

SEQ ID NO: 750753 - DNA, 15 bp, Homo sapiens
gattgaggttgggtt

SEQ ID NO: 750754 - DNA, 15 bp, Homo sapiens
attgaggttgggttc

SEQ ID NO: 750755 - DNA, 15 bp, Homo sapiens
ttgaggttgggttca

SEQ ID NO: 750756 - DNA, 15 bp, Homo sapiens
tgaggttgggttcag

SEQ ID NO: 750757 - DNA, 15 bp, Homo sapiens
gaggttgggttcagg

SEQ ID NO: 750758 - DNA, 15 bp, Homo sapiens
aggttgggttcaggt

SEQ ID NO: 750759 - DNA, 15 bp, Homo sapiens
ggttgggttcaggtc

SEQ ID NO: 750760 - DNA, 15 bp, Homo sapiens
gttgggttcaggtct

SEQ ID NO: 750761 - DNA, 15 bp, Homo sapiens
ttgggttcaggtctg

SEQ ID NO: 750762 - DNA, 15 bp, Homo sapiens
tgggttcaggtctgc

SEQ ID NO: 750763 - DNA, 15 bp, Homo sapiens
gggttcaggtctgct

SEQ ID NO: 750764 - DNA, 15 bp, Homo sapiens
ggttcaggtctgctc

SEQ ID NO: 750765 - DNA, 15 bp, Homo sapiens
gttcaggtctgctcc

SEQ ID NO: 750766 - DNA, 15 bp, Homo sapiens
ttcaggtctgctcca

SEQ ID NO: 750767 - DNA, 15 bp, Homo sapiens
tcaggtctgctccat

SEQ ID NO: 750768 - DNA, 15 bp, Homo sapiens
caggtctgctccatg

SEQ ID NO: 750769 - DNA, 15 bp, Homo sapiens
aggtctgctccatgt

SEQ ID NO: 750770 - DNA, 15 bp, Homo sapiens
ggtctgctccatgtc

SEQ ID NO: 750771 - DNA, 15 bp, Homo sapiens
gtctgctccatgtct

SEQ ID NO: 750772 - DNA, 15 bp, Homo sapiens
tctgctccatgtctc

SEQ ID NO: 750773 - DNA, 15 bp, Homo sapiens
ctgctccatgtctct

SEQ ID NO: 750774 - DNA, 15 bp, Homo sapiens
tgctccatgtctctc

SEQ ID NO: 750775 - DNA, 15 bp, Homo sapiens
gctccatgtctctca

SEQ ID NO: 750776 - DNA, 15 bp, Homo sapiens
ctccatgtctctcat

SEQ ID NO: 750777 - DNA, 15 bp, Homo sapiens
tccatgtctctcatt

SEQ ID NO: 750778 - DNA, 15 bp, Homo sapiens
ccatgtctctcattc

SEQ ID NO: 750779 - DNA, 15 bp, Homo sapiens
catgtctctcattct

SEQ ID NO: 750780 - DNA, 15 bp, Homo sapiens
atgtctctcattctc

SEQ ID NO: 750781 - DNA, 15 bp, Homo sapiens
tgtctctcattctct

SEQ ID NO: 750782 - DNA, 15 bp, Homo sapiens
gtctctcattctctt

SEQ ID NO: 750783 - DNA, 15 bp, Homo sapiens
tctctcattctcttg

SEQ ID NO: 750784 - DNA, 15 bp, Homo sapiens
ctctcattctcttgg

SEQ ID NO: 750785 - DNA, 15 bp, Homo sapiens
tctcattctcttgga

SEQ ID NO: 750786 - DNA, 15 bp, Homo sapiens
ctcattctcttggac

SEQ ID NO: 750787 - DNA, 15 bp, Homo sapiens
tcattctcttggact

SEQ ID NO: 750788 - DNA, 15 bp, Homo sapiens
cattctcttggacta

SEQ ID NO: 750789 - DNA, 15 bp, Homo sapiens
attctcttggactaa

SEQ ID NO: 750790 - DNA, 15 bp, Homo sapiens
ttctcttggactaac

SEQ ID NO: 750791 - DNA, 15 bp, Homo sapiens
tctcttggactaaca

SEQ ID NO: 750792 - DNA, 15 bp, Homo sapiens
ctcttggactaacag

SEQ ID NO: 750793 - DNA, 15 bp, Homo sapiens
tcttggactaacagt

SEQ ID NO: 750794 - DNA, 15 bp, Homo sapiens
cttggactaacagtt

SEQ ID NO: 750795 - DNA, 15 bp, Homo sapiens
ttggactaacagtta

SEQ ID NO: 750796 - DNA, 15 bp, Homo sapiens
tggactaacagttac

SEQ ID NO: 750797 - DNA, 15 bp, Homo sapiens
ggactaacagttacc

SEQ ID NO: 750798 - DNA, 15 bp, Homo sapiens
gactaacagttacct

SEQ ID NO: 750799 - DNA, 15 bp, Homo sapiens
actaacagttaccta

SEQ ID NO: 750800 - DNA, 15 bp, Homo sapiens
ctaacagttacctag

SEQ ID NO: 750801 - DNA, 15 bp, Homo sapiens
taacagttacctagg

SEQ ID NO: 750802 - DNA, 15 bp, Homo sapiens
aacagttacctagga

SEQ ID NO: 750803 - DNA, 15 bp, Homo sapiens
acagttacctaggac

SEQ ID NO: 750804 - DNA, 15 bp, Homo sapiens
cagttacctaggaca

SEQ ID NO: 750805 - DNA, 15 bp, Homo sapiens
agttacctaggacat

SEQ ID NO: 750806 - DNA, 15 bp, Homo sapiens
gttacctaggacatg

SEQ ID NO: 750807 - DNA, 15 bp, Homo sapiens
ttacctaggacatgt

SEQ ID NO: 750808 - DNA, 15 bp, Homo sapiens
tacctaggacatgtt

SEQ ID NO: 750809 - DNA, 15 bp, Homo sapiens
acctaggacatgttt

SEQ ID NO: 750810 - DNA, 15 bp, Homo sapiens
cctaggacatgtttt

SEQ ID NO: 750811 - DNA, 15 bp, Homo sapiens
ctaggacatgttttc

SEQ ID NO: 750812 - DNA, 15 bp, Homo sapiens
taggacatgttttcc

SEQ ID NO: 750813 - DNA, 15 bp, Homo sapiens
aggacatgttttcct

SEQ ID NO: 750814 - DNA, 15 bp, Homo sapiens
ggacatgttttcctc

SEQ ID NO: 750815 - DNA, 15 bp, Homo sapiens
gacatgttttcctca

SEQ ID NO: 750816 - DNA, 15 bp, Homo sapiens
acatgttttcctcat

SEQ ID NO: 750817 - DNA, 15 bp, Homo sapiens
catgttttcctcatg

SEQ ID NO: 750818 - DNA, 15 bp, Homo sapiens
atgttttcctcatgg

SEQ ID NO: 750819 - DNA, 15 bp, Homo sapiens
tgttttcctcatgga

SEQ ID NO: 750820 - DNA, 15 bp, Homo sapiens
gttttcctcatggaa

SEQ ID NO: 750821 - DNA, 15 bp, Homo sapiens
ttttcctcatggaaa

SEQ ID NO: 750822 - DNA, 15 bp, Homo sapiens
tttcctcatggaaag

SEQ ID NO: 750823 - DNA, 15 bp, Homo sapiens
ttcctcatggaaagt

SEQ ID NO: 750824 - DNA, 15 bp, Homo sapiens
tcctcatggaaagtg

SEQ ID NO: 750825 - DNA, 15 bp, Homo sapiens
cctcatggaaagtgg

SEQ ID NO: 750826 - DNA, 15 bp, Homo sapiens
ctcatggaaagtggc

SEQ ID NO: 750827 - DNA, 15 bp, Homo sapiens
tcatggaaagtggca

SEQ ID NO: 750828 - DNA, 15 bp, Homo sapiens
catggaaagtggcag

SEQ ID NO: 750829 - DNA, 15 bp, Homo sapiens
atggaaagtggcaga

SEQ ID NO: 750830 - DNA, 15 bp, Homo sapiens
tggaaagtggcagaa

SEQ ID NO: 750831 - DNA, 15 bp, Homo sapiens
ggaaagtggcagaag

SEQ ID NO: 750832 - DNA, 15 bp, Homo sapiens
gaaagtggcagaagc

SEQ ID NO: 750833 - DNA, 15 bp, Homo sapiens
aaagtggcagaagca

SEQ ID NO: 750834 - DNA, 15 bp, Homo sapiens
aagtggcagaagcaa

SEQ ID NO: 750835 - DNA, 15 bp, Homo sapiens
agtggcagaagcaaa

SEQ ID NO: 750836 - DNA, 15 bp, Homo sapiens
gtggcagaagcaaaa

SEQ ID NO: 750837 - DNA, 15 bp, Homo sapiens
tggcagaagcaaaag

SEQ ID NO: 750838 - DNA, 15 bp, Homo sapiens
ggcagaagcaaaaga

SEQ ID NO: 750839 - DNA, 15 bp, Homo sapiens
gcagaagcaaaagaa

SEQ ID NO: 750840 - DNA, 15 bp, Homo sapiens
cagaagcaaaagaag

SEQ ID NO: 750841 - DNA, 15 bp, Homo sapiens
agaagcaaaagaagc

SEQ ID NO: 750842 - DNA, 15 bp, Homo sapiens
gaagcaaaagaagcc

SEQ ID NO: 750843 - DNA, 15 bp, Homo sapiens
aagcaaaagaagcca

SEQ ID NO: 750844 - DNA, 15 bp, Homo sapiens
agcaaaagaagccaa

SEQ ID NO: 750845 - DNA, 15 bp, Homo sapiens
gcaaaagaagccaag

SEQ ID NO: 750846 - DNA, 15 bp, Homo sapiens
caaaagaagccaagt

SEQ ID NO: 750847 - DNA, 15 bp, Homo sapiens
aaaagaagccaagtg

SEQ ID NO: 750848 - DNA, 15 bp, Homo sapiens
aaagaagccaagtgg

SEQ ID NO: 750849 - DNA, 15 bp, Homo sapiens
aagaagccaagtgga

SEQ ID NO: 750850 - DNA, 15 bp, Homo sapiens
agaagccaagtggaa

SEQ ID NO: 750851 - DNA, 15 bp, Homo sapiens
gaagccaagtggaaa

SEQ ID NO: 750852 - DNA, 15 bp, Homo sapiens
aagccaagtggaaat

SEQ ID NO: 750853 - DNA, 15 bp, Homo sapiens
agccaagtggaaata

SEQ ID NO: 750854 - DNA, 15 bp, Homo sapiens
gccaagtggaaatat

SEQ ID NO: 750855 - DNA, 15 bp, Homo sapiens
ccaagtggaaatatg

SEQ ID NO: 750856 - DNA, 15 bp, Homo sapiens
caagtggaaatatgt

SEQ ID NO: 750857 - DNA, 15 bp, Homo sapiens
aagtggaaatatgta

SEQ ID NO: 750858 - DNA, 15 bp, Homo sapiens
agtggaaatatgtaa

SEQ ID NO: 750859 - DNA, 15 bp, Homo sapiens
gtggaaatatgtaaa

SEQ ID NO: 750860 - DNA, 15 bp, Homo sapiens
tggaaatatgtaaaa

SEQ ID NO: 750861 - DNA, 15 bp, Homo sapiens
ggaaatatgtaaaac

SEQ ID NO: 750862 - DNA, 15 bp, Homo sapiens
gaaatatgtaaaacc

SEQ ID NO: 750863 - DNA, 15 bp, Homo sapiens
aaatatgtaaaacct

SEQ ID NO: 750864 - DNA, 15 bp, Homo sapiens
aatatgtaaaacctc

SEQ ID NO: 750865 - DNA, 15 bp, Homo sapiens
atatgtaaaacctca

SEQ ID NO: 750866 - DNA, 15 bp, Homo sapiens
tatgtaaaacctcat

SEQ ID NO: 750867 - DNA, 15 bp, Homo sapiens
atgtaaaacctcatg

SEQ ID NO: 750868 - DNA, 15 bp, Homo sapiens
tgtaaaacctcatgt

SEQ ID NO: 750869 - DNA, 15 bp, Homo sapiens
gtaaaacctcatgtg

SEQ ID NO: 750870 - DNA, 15 bp, Homo sapiens
taaaacctcatgtgg

SEQ ID NO: 750871 - DNA, 15 bp, Homo sapiens
aaaacctcatgtggg

SEQ ID NO: 750872 - DNA, 15 bp, Homo sapiens
aaacctcatgtgggc

SEQ ID NO: 750873 - DNA, 15 bp, Homo sapiens
aacctcatgtgggcc

SEQ ID NO: 750874 - DNA, 15 bp, Homo sapiens
acctcatgtgggcca

SEQ ID NO: 750875 - DNA, 15 bp, Homo sapiens
cctcatgtgggccat

SEQ ID NO: 750876 - DNA, 15 bp, Homo sapiens
ctcatgtgggccata

SEQ ID NO: 750877 - DNA, 15 bp, Homo sapiens
tcatgtgggccatac

SEQ ID NO: 750878 - DNA, 15 bp, Homo sapiens
catgtgggccataca

SEQ ID NO: 750879 - DNA, 15 bp, Homo sapiens
atgtgggccatacat

SEQ ID NO: 750880 - DNA, 15 bp, Homo sapiens
tgtgggccatacata

SEQ ID NO: 750881 - DNA, 15 bp, Homo sapiens
gtgggccatacatag

SEQ ID NO: 750882 - DNA, 15 bp, Homo sapiens
tgggccatacataga

SEQ ID NO: 750883 - DNA, 15 bp, Homo sapiens
gggccatacatagaa

SEQ ID NO: 750884 - DNA, 15 bp, Homo sapiens
ggccatacatagaac

SEQ ID NO: 750885 - DNA, 15 bp, Homo sapiens
gccatacatagaact

SEQ ID NO: 750886 - DNA, 15 bp, Homo sapiens
ccatacatagaactg

SEQ ID NO: 750887 - DNA, 15 bp, Homo sapiens
catacatagaactga

SEQ ID NO: 750888 - DNA, 15 bp, Homo sapiens
atacatagaactgac

SEQ ID NO: 750889 - DNA, 15 bp, Homo sapiens
tacatagaactgact

SEQ ID NO: 750890 - DNA, 15 bp, Homo sapiens
acatagaactgactt

SEQ ID NO: 750891 - DNA, 15 bp, Homo sapiens
catagaactgacttg

SEQ ID NO: 750892 - DNA, 15 bp, Homo sapiens
atagaactgacttgc

SEQ ID NO: 750893 - DNA, 15 bp, Homo sapiens
tagaactgacttgct

SEQ ID NO: 750894 - DNA, 15 bp, Homo sapiens
agaactgacttgctg

SEQ ID NO: 750895 - DNA, 15 bp, Homo sapiens
gaactgacttgctgt

SEQ ID NO: 750896 - DNA, 15 bp, Homo sapiens
aactgacttgctgtc

SEQ ID NO: 750897 - DNA, 15 bp, Homo sapiens
actgacttgctgtca

SEQ ID NO: 750898 - DNA, 15 bp, Homo sapiens
ctgacttgctgtcat

SEQ ID NO: 750899 - DNA, 15 bp, Homo sapiens
tgacttgctgtcatt

SEQ ID NO: 750900 - DNA, 15 bp, Homo sapiens
gacttgctgtcattt

SEQ ID NO: 750901 - DNA, 15 bp, Homo sapiens
acttgctgtcatttt

SEQ ID NO: 750902 - DNA, 15 bp, Homo sapiens
cttgctgtcattttt

SEQ ID NO: 750903 - DNA, 15 bp, Homo sapiens
ttgctgtcatttttg

SEQ ID NO: 750904 - DNA, 15 bp, Homo sapiens
tgctgtcatttttgc

SEQ ID NO: 750905 - DNA, 15 bp, Homo sapiens
gctgtcatttttgct

SEQ ID NO: 750906 - DNA, 15 bp, Homo sapiens
ctgtcatttttgctc

SEQ ID NO: 750907 - DNA, 15 bp, Homo sapiens
tgtcatttttgctca

SEQ ID NO: 750908 - DNA, 15 bp, Homo sapiens
gtcatttttgctcac

SEQ ID NO: 750909 - DNA, 15 bp, Homo sapiens
tcatttttgctcaca

SEQ ID NO: 750910 - DNA, 15 bp, Homo sapiens
catttttgctcacat

SEQ ID NO: 750911 - DNA, 15 bp, Homo sapiens
atttttgctcacatt

SEQ ID NO: 750912 - DNA, 15 bp, Homo sapiens
tttttgctcacattt

SEQ ID NO: 750913 - DNA, 15 bp, Homo sapiens
ttttgctcacatttc

SEQ ID NO: 750914 - DNA, 15 bp, Homo sapiens
tttgctcacatttca

SEQ ID NO: 750915 - DNA, 15 bp, Homo sapiens
ttgctcacatttcat

SEQ ID NO: 750916 - DNA, 15 bp, Homo sapiens
tgctcacatttcatg

SEQ ID NO: 750917 - DNA, 15 bp, Homo sapiens
gctcacatttcatgg

SEQ ID NO: 750918 - DNA, 15 bp, Homo sapiens
ctcacatttcatgga

SEQ ID NO: 750919 - DNA, 15 bp, Homo sapiens
tcacatttcatggac

SEQ ID NO: 750920 - DNA, 15 bp, Homo sapiens
cacatttcatggacc

SEQ ID NO: 750921 - DNA, 15 bp, Homo sapiens
acatttcatggaccc

SEQ ID NO: 750922 - DNA, 15 bp, Homo sapiens
catttcatggacccc

SEQ ID NO: 750923 - DNA, 15 bp, Homo sapiens
atttcatggacccca

SEQ ID NO: 750924 - DNA, 15 bp, Homo sapiens
tttcatggaccccag

SEQ ID NO: 750925 - DNA, 15 bp, Homo sapiens
ttcatggaccccagc

SEQ ID NO: 750926 - DNA, 15 bp, Homo sapiens
tcatggaccccagct

SEQ ID NO: 750927 - DNA, 15 bp, Homo sapiens
catggaccccagctt

SEQ ID NO: 750928 - DNA, 15 bp, Homo sapiens
atggaccccagcttg

SEQ ID NO: 750929 - DNA, 15 bp, Homo sapiens
tggaccccagcttgt

SEQ ID NO: 750930 - DNA, 15 bp, Homo sapiens
ggaccccagcttgtc

SEQ ID NO: 750931 - DNA, 15 bp, Homo sapiens
gaccccagcttgtca

SEQ ID NO: 750932 - DNA, 15 bp, Homo sapiens
accccagcttgtcac

SEQ ID NO: 750933 - DNA, 15 bp, Homo sapiens
ccccagcttgtcaca

SEQ ID NO: 750934 - DNA, 15 bp, Homo sapiens
cccagcttgtcacaa

SEQ ID NO: 750935 - DNA, 15 bp, Homo sapiens
ccagcttgtcacaag

SEQ ID NO: 750936 - DNA, 15 bp, Homo sapiens
cagcttgtcacaagg

SEQ ID NO: 750937 - DNA, 15 bp, Homo sapiens
agcttgtcacaaggc

SEQ ID NO: 750938 - DNA, 15 bp, Homo sapiens
gcttgtcacaaggcc

SEQ ID NO: 750939 - DNA, 15 bp, Homo sapiens
cttgtcacaaggcca

SEQ ID NO: 750940 - DNA, 15 bp, Homo sapiens
ttgtcacaaggccaa

SEQ ID NO: 750941 - DNA, 15 bp, Homo sapiens
tgtcacaaggccaag

SEQ ID NO: 750942 - DNA, 15 bp, Homo sapiens
gtcacaaggccaagc

SEQ ID NO: 750943 - DNA, 15 bp, Homo sapiens
tcacaaggccaagcc

SEQ ID NO: 750944 - DNA, 15 bp, Homo sapiens
cacaaggccaagccc

SEQ ID NO: 750945 - DNA, 15 bp, Homo sapiens
acaaggccaagccca

SEQ ID NO: 750946 - DNA, 15 bp, Homo sapiens
caaggccaagcccaa

SEQ ID NO: 750947 - DNA, 15 bp, Homo sapiens
aaggccaagcccaac

SEQ ID NO: 750948 - DNA, 15 bp, Homo sapiens
aggccaagcccaaca

SEQ ID NO: 750949 - DNA, 15 bp, Homo sapiens
ggccaagcccaacat

SEQ ID NO: 750950 - DNA, 15 bp, Homo sapiens
gccaagcccaacatc

SEQ ID NO: 750951 - DNA, 15 bp, Homo sapiens
ccaagcccaacatcc

SEQ ID NO: 750952 - DNA, 15 bp, Homo sapiens
caagcccaacatccg

SEQ ID NO: 750953 - DNA, 15 bp, Homo sapiens
aagcccaacatccgt

SEQ ID NO: 750954 - DNA, 15 bp, Homo sapiens
agcccaacatccgtg

SEQ ID NO: 750955 - DNA, 15 bp, Homo sapiens
gcccaacatccgtga

SEQ ID NO: 750956 - DNA, 15 bp, Homo sapiens
cccaacatccgtgag

SEQ ID NO: 750957 - DNA, 15 bp, Homo sapiens
ccaacatccgtgagg

SEQ ID NO: 750958 - DNA, 15 bp, Homo sapiens
caacatccgtgaggt

SEQ ID NO: 750959 - DNA, 15 bp, Homo sapiens
aacatccgtgaggta

SEQ ID NO: 750960 - DNA, 15 bp, Homo sapiens
acatccgtgaggtag

SEQ ID NO: 750961 - DNA, 15 bp, Homo sapiens
catccgtgaggtagg

SEQ ID NO: 750962 - DNA, 15 bp, Homo sapiens
atccgtgaggtaggg

SEQ ID NO: 750963 - DNA, 15 bp, Homo sapiens
tccgtgaggtagggc

SEQ ID NO: 750964 - DNA, 15 bp, Homo sapiens
ccgtgaggtagggct

SEQ ID NO: 750965 - DNA, 15 bp, Homo sapiens
cgtgaggtagggcta

SEQ ID NO: 750966 - DNA, 15 bp, Homo sapiens
gtgaggtagggctat

SEQ ID NO: 750967 - DNA, 15 bp, Homo sapiens
tgaggtagggctata

SEQ ID NO: 750968 - DNA, 15 bp, Homo sapiens
gaggtagggctatat

SEQ ID NO: 750969 - DNA, 15 bp, Homo sapiens
aggtagggctatata

SEQ ID NO: 750970 - DNA, 15 bp, Homo sapiens
ggtagggctatatat

SEQ ID NO: 750971 - DNA, 15 bp, Homo sapiens
gtagggctatatatt

SEQ ID NO: 750972 - DNA, 15 bp, Homo sapiens
tagggctatatattc

SEQ ID NO: 750973 - DNA, 15 bp, Homo sapiens
agggctatatattct

SEQ ID NO: 750974 - DNA, 15 bp, Homo sapiens
gggctatatattctg

SEQ ID NO: 750975 - DNA, 15 bp, Homo sapiens
ggctatatattctgt

SEQ ID NO: 750976 - DNA, 15 bp, Homo sapiens
gctatatattctgta

SEQ ID NO: 750977 - DNA, 15 bp, Homo sapiens
ctatatattctgtat

SEQ ID NO: 750978 - DNA, 15 bp, Homo sapiens
tatatattctgtata

SEQ ID NO: 750979 - DNA, 15 bp, Homo sapiens
atatattctgtatat

SEQ ID NO: 750980 - DNA, 15 bp, Homo sapiens
tatattctgtatatt

SEQ ID NO: 750981 - DNA, 15 bp, Homo sapiens
atattctgtatattc

SEQ ID NO: 750982 - DNA, 15 bp, Homo sapiens
tattctgtatattct

SEQ ID NO: 750983 - DNA, 15 bp, Homo sapiens
attctgtatattcta

SEQ ID NO: 750984 - DNA, 15 bp, Homo sapiens
ttctgtatattctag

SEQ ID NO: 750985 - DNA, 15 bp, Homo sapiens
tctgtatattctagt

SEQ ID NO: 750986 - DNA, 15 bp, Homo sapiens
ctgtatattctagtg

SEQ ID NO: 750987 - DNA, 15 bp, Homo sapiens
tgtatattctagtga

SEQ ID NO: 750988 - DNA, 15 bp, Homo sapiens
gtatattctagtgaa

SEQ ID NO: 750989 - DNA, 15 bp, Homo sapiens
tatattctagtgaat

SEQ ID NO: 750990 - DNA, 15 bp, Homo sapiens
atattctagtgaatg

SEQ ID NO: 750991 - DNA, 15 bp, Homo sapiens
tattctagtgaatgg

SEQ ID NO: 750992 - DNA, 15 bp, Homo sapiens
attctagtgaatggt

SEQ ID NO: 750993 - DNA, 15 bp, Homo sapiens
ttctagtgaatggta

SEQ ID NO: 750994 - DNA, 15 bp, Homo sapiens
tctagtgaatggtac

SEQ ID NO: 750995 - DNA, 15 bp, Homo sapiens
ctagtgaatggtact

SEQ ID NO: 750996 - DNA, 15 bp, Homo sapiens
tagtgaatggtactg

SEQ ID NO: 750997 - DNA, 15 bp, Homo sapiens
agtgaatggtactgc

SEQ ID NO: 750998 - DNA, 15 bp, Homo sapiens
gtgaatggtactgca

SEQ ID NO: 750999 - DNA, 15 bp, Homo sapiens
tgaatggtactgcaa

SEQ ID NO: 751000 - DNA, 15 bp, Homo sapiens
gaatggtactgcaaa

SEQ ID NO: 751001 - DNA, 15 bp, Homo sapiens
aatggtactgcaaag

SEQ ID NO: 751002 - DNA, 15 bp, Homo sapiens
atggtactgcaaagt

SEQ ID NO: 751003 - DNA, 15 bp, Homo sapiens
tggtactgcaaagtt

SEQ ID NO: 751004 - DNA, 15 bp, Homo sapiens
ggtactgcaaagtta

SEQ ID NO: 751005 - DNA, 15 bp, Homo sapiens
gtactgcaaagttat

SEQ ID NO: 751006 - DNA, 15 bp, Homo sapiens
tactgcaaagttatc

SEQ ID NO: 751007 - DNA, 15 bp, Homo sapiens
actgcaaagttatct

SEQ ID NO: 751008 - DNA, 15 bp, Homo sapiens
ctgcaaagttatctg

SEQ ID NO: 751009 - DNA, 15 bp, Homo sapiens
tgcaaagttatctgg

SEQ ID NO: 751010 - DNA, 15 bp, Homo sapiens
gcaaagttatctggc

SEQ ID NO: 751011 - DNA, 15 bp, Homo sapiens
caaagttatctggca

SEQ ID NO: 751012 - DNA, 15 bp, Homo sapiens
aaagttatctggcaa

SEQ ID NO: 751013 - DNA, 15 bp, Homo sapiens
aagttatctggcaat

SEQ ID NO: 751014 - DNA, 15 bp, Homo sapiens
agttatctggcaatg

SEQ ID NO: 751015 - DNA, 15 bp, Homo sapiens
gttatctggcaatga

SEQ ID NO: 751016 - DNA, 15 bp, Homo sapiens
ttatctggcaatgat

SEQ ID NO: 751017 - DNA, 15 bp, Homo sapiens
tatctggcaatgatg

SEQ ID NO: 751018 - DNA, 15 bp, Homo sapiens
atctggcaatgatgt

SEQ ID NO: 751019 - DNA, 15 bp, Homo sapiens
tctggcaatgatgtg

SEQ ID NO: 751020 - DNA, 15 bp, Homo sapiens
ctggcaatgatgtgg

SEQ ID NO: 751021 - DNA, 15 bp, Homo sapiens
tggcaatgatgtgga

SEQ ID NO: 751022 - DNA, 15 bp, Homo sapiens
ggcaatgatgtggat

SEQ ID NO: 751023 - DNA, 15 bp, Homo sapiens
gcaatgatgtggatt

SEQ ID NO: 751024 - DNA, 15 bp, Homo sapiens
caatgatgtggatta

SEQ ID NO: 751025 - DNA, 15 bp, Homo sapiens
aatgatgtggattag

SEQ ID NO: 751026 - DNA, 15 bp, Homo sapiens
atgatgtggattaga

SEQ ID NO: 751027 - DNA, 15 bp, Homo sapiens
tgatgtggattagaa

SEQ ID NO: 751028 - DNA, 15 bp, Homo sapiens
gatgtggattagaat

SEQ ID NO: 751029 - DNA, 15 bp, Homo sapiens
atgtggattagaatt

SEQ ID NO: 751030 - DNA, 15 bp, Homo sapiens
tgtggattagaattc

SEQ ID NO: 751031 - DNA, 15 bp, Homo sapiens
gtggattagaattct

SEQ ID NO: 751032 - DNA, 15 bp, Homo sapiens
tggattagaattcta

SEQ ID NO: 751033 - DNA, 15 bp, Homo sapiens
ggattagaattctag

SEQ ID NO: 751034 - DNA, 15 bp, Homo sapiens
gattagaattctagt

SEQ ID NO: 751035 - DNA, 15 bp, Homo sapiens
attagaattctagta

SEQ ID NO: 751036 - DNA, 15 bp, Homo sapiens
ttagaattctagtac

SEQ ID NO: 751037 - DNA, 15 bp, Homo sapiens
tagaattctagtaca

SEQ ID NO: 751038 - DNA, 15 bp, Homo sapiens
agaattctagtacag

SEQ ID NO: 751039 - DNA, 15 bp, Homo sapiens
gaattctagtacagg

SEQ ID NO: 751040 - DNA, 15 bp, Homo sapiens
aattctagtacaggg

SEQ ID NO: 751041 - DNA, 15 bp, Homo sapiens
attctagtacaggga

SEQ ID NO: 751042 - DNA, 15 bp, Homo sapiens
ttctagtacagggag

SEQ ID NO: 751043 - DNA, 15 bp, Homo sapiens
tctagtacagggagg

SEQ ID NO: 751044 - DNA, 15 bp, Homo sapiens
ctagtacagggaggg

SEQ ID NO: 751045 - DNA, 15 bp, Homo sapiens
tagtacagggagggt

SEQ ID NO: 751046 - DNA, 15 bp, Homo sapiens
agtacagggagggtg

SEQ ID NO: 751047 - DNA, 15 bp, Homo sapiens
gtacagggagggtgt

SEQ ID NO: 751048 - DNA, 15 bp, Homo sapiens
tacagggagggtgtg

SEQ ID NO: 751049 - DNA, 15 bp, Homo sapiens
acagggagggtgtga

SEQ ID NO: 751050 - DNA, 15 bp, Homo sapiens
cagggagggtgtgaa

SEQ ID NO: 751051 - DNA, 15 bp, Homo sapiens
agggagggtgtgaag

SEQ ID NO: 751052 - DNA, 15 bp, Homo sapiens
gggagggtgtgaaga

SEQ ID NO: 751053 - DNA, 15 bp, Homo sapiens
ggagggtgtgaagaa

SEQ ID NO: 751054 - DNA, 15 bp, Homo sapiens
gagggtgtgaagaat

SEQ ID NO: 751055 - DNA, 15 bp, Homo sapiens
agggtgtgaagaatt

SEQ ID NO: 751056 - DNA, 15 bp, Homo sapiens
gggtgtgaagaatta

SEQ ID NO: 751057 - DNA, 15 bp, Homo sapiens
ggtgtgaagaattat

SEQ ID NO: 751058 - DNA, 15 bp, Homo sapiens
gtgtgaagaattatg

SEQ ID NO: 751059 - DNA, 15 bp, Homo sapiens
tgtgaagaattatga

SEQ ID NO: 751060 - DNA, 15 bp, Homo sapiens
gtgaagaattatgaa

SEQ ID NO: 751061 - DNA, 15 bp, Homo sapiens
tgaagaattatgaat

SEQ ID NO: 751062 - DNA, 15 bp, Homo sapiens
gaagaattatgaata

SEQ ID NO: 751063 - DNA, 15 bp, Homo sapiens
aagaattatgaataa

SEQ ID NO: 751064 - DNA, 15 bp, Homo sapiens
agaattatgaataat

SEQ ID NO: 751065 - DNA, 15 bp, Homo sapiens
gaattatgaataatg

SEQ ID NO: 751066 - DNA, 15 bp, Homo sapiens
aattatgaataatga

SEQ ID NO: 751067 - DNA, 15 bp, Homo sapiens
attatgaataatgat

SEQ ID NO: 751068 - DNA, 15 bp, Homo sapiens
ttatgaataatgatt

SEQ ID NO: 751069 - DNA, 15 bp, Homo sapiens
tatgaataatgattc

SEQ ID NO: 751070 - DNA, 15 bp, Homo sapiens
atgaataatgattca

SEQ ID NO: 751071 - DNA, 15 bp, Homo sapiens
tgaataatgattcag

SEQ ID NO: 751072 - DNA, 15 bp, Homo sapiens
gaataatgattcagt

SEQ ID NO: 751073 - DNA, 15 bp, Homo sapiens
aataatgattcagtt

SEQ ID NO: 751074 - DNA, 15 bp, Homo sapiens
ataatgattcagttt

SEQ ID NO: 751075 - DNA, 15 bp, Homo sapiens
taatgattcagttta

SEQ ID NO: 751076 - DNA, 15 bp, Homo sapiens
aatgattcagtttac

SEQ ID NO: 751077 - DNA, 15 bp, Homo sapiens
atgattcagtttacc

SEQ ID NO: 751078 - DNA, 15 bp, Homo sapiens
tgattcagtttacca

SEQ ID NO: 751079 - DNA, 15 bp, Homo sapiens
gattcagtttaccac

SEQ ID NO: 751080 - DNA, 15 bp, Homo sapiens
attcagtttaccaca

SEQ ID NO: 751081 - DNA, 15 bp, Homo sapiens
ttcagtttaccacat

SEQ ID NO: 751082 - DNA, 15 bp, Homo sapiens
tcagtttaccacatg

SEQ ID NO: 751083 - DNA, 15 bp, Homo sapiens
cagtttaccacatgg

SEQ ID NO: 751084 - DNA, 15 bp, Homo sapiens
agtttaccacatggt

SEQ ID NO: 751085 - DNA, 15 bp, Homo sapiens
gtttaccacatggtt

SEQ ID NO: 751086 - DNA, 15 bp, Homo sapiens
tttaccacatggttg

SEQ ID NO: 751087 - DNA, 15 bp, Homo sapiens
ttaccacatggttgt

SEQ ID NO: 751088 - DNA, 15 bp, Homo sapiens
taccacatggttgta

SEQ ID NO: 751089 - DNA, 15 bp, Homo sapiens
accacatggttgtac

SEQ ID NO: 751090 - DNA, 15 bp, Homo sapiens
ccacatggttgtacc

SEQ ID NO: 751091 - DNA, 15 bp, Homo sapiens
cacatggttgtacca

SEQ ID NO: 751092 - DNA, 15 bp, Homo sapiens
acatggttgtaccat

SEQ ID NO: 751093 - DNA, 15 bp, Homo sapiens
catggttgtaccatt

SEQ ID NO: 751094 - DNA, 15 bp, Homo sapiens
atggttgtaccatta

SEQ ID NO: 751095 - DNA, 15 bp, Homo sapiens
tggttgtaccattat

SEQ ID NO: 751096 - DNA, 15 bp, Homo sapiens
ggttgtaccattata

SEQ ID NO: 751097 - DNA, 15 bp, Homo sapiens
gttgtaccattatat

SEQ ID NO: 751098 - DNA, 15 bp, Homo sapiens
ttgtaccattatata

SEQ ID NO: 751099 - DNA, 15 bp, Homo sapiens
tgtaccattatatac

SEQ ID NO: 751100 - DNA, 15 bp, Homo sapiens
gtaccattatatacc

SEQ ID NO: 751101 - DNA, 15 bp, Homo sapiens
taccattatatacct

SEQ ID NO: 751102 - DNA, 15 bp, Homo sapiens
accattatatacctc

SEQ ID NO: 751103 - DNA, 15 bp, Homo sapiens
ccattatatacctca

SEQ ID NO: 751104 - DNA, 15 bp, Homo sapiens
cattatatacctcac

SEQ ID NO: 751105 - DNA, 15 bp, Homo sapiens
attatatacctcacc

SEQ ID NO: 751106 - DNA, 15 bp, Homo sapiens
ttatatacctcacca

SEQ ID NO: 751107 - DNA, 15 bp, Homo sapiens
tatatacctcaccag

SEQ ID NO: 751108 - DNA, 15 bp, Homo sapiens
atatacctcaccagt

SEQ ID NO: 751109 - DNA, 15 bp, Homo sapiens
tatacctcaccagta

SEQ ID NO: 751110 - DNA, 15 bp, Homo sapiens
atacctcaccagtaa

SEQ ID NO: 751111 - DNA, 15 bp, Homo sapiens
tacctcaccagtaat

SEQ ID NO: 751112 - DNA, 15 bp, Homo sapiens
acctcaccagtaata

SEQ ID NO: 751113 - DNA, 15 bp, Homo sapiens
cctcaccagtaatag

SEQ ID NO: 751114 - DNA, 15 bp, Homo sapiens
ctcaccagtaataga

SEQ ID NO: 751115 - DNA, 15 bp, Homo sapiens
tcaccagtaatagat

SEQ ID NO: 751116 - DNA, 15 bp, Homo sapiens
caccagtaatagatg

SEQ ID NO: 751117 - DNA, 15 bp, Homo sapiens
accagtaatagatgc

SEQ ID NO: 751118 - DNA, 15 bp, Homo sapiens
ccagtaatagatgca

SEQ ID NO: 751119 - DNA, 15 bp, Homo sapiens
cagtaatagatgcaa

SEQ ID NO: 751120 - DNA, 15 bp, Homo sapiens
agtaatagatgcaaa

SEQ ID NO: 751121 - DNA, 15 bp, Homo sapiens
gtaatagatgcaaac

SEQ ID NO: 751122 - DNA, 15 bp, Homo sapiens
taatagatgcaaact

SEQ ID NO: 751123 - DNA, 15 bp, Homo sapiens
aatagatgcaaactc

SEQ ID NO: 751124 - DNA, 15 bp, Homo sapiens
atagatgcaaactcc

SEQ ID NO: 751125 - DNA, 15 bp, Homo sapiens
tagatgcaaactcct

SEQ ID NO: 751126 - DNA, 15 bp, Homo sapiens
agatgcaaactcctg

SEQ ID NO: 751127 - DNA, 15 bp, Homo sapiens
gatgcaaactcctgt

SEQ ID NO: 751128 - DNA, 15 bp, Homo sapiens
atgcaaactcctgtt

SEQ ID NO: 751129 - DNA, 15 bp, Homo sapiens
tgcaaactcctgttt

SEQ ID NO: 751130 - DNA, 15 bp, Homo sapiens
gcaaactcctgtttc

SEQ ID NO: 751131 - DNA, 15 bp, Homo sapiens
caaactcctgtttct

SEQ ID NO: 751132 - DNA, 15 bp, Homo sapiens
aaactcctgtttctc

SEQ ID NO: 751133 - DNA, 15 bp, Homo sapiens
aactcctgtttctca

SEQ ID NO: 751134 - DNA, 15 bp, Homo sapiens
actcctgtttctcaa

SEQ ID NO: 751135 - DNA, 15 bp, Homo sapiens
ctcctgtttctcaac

SEQ ID NO: 751136 - DNA, 15 bp, Homo sapiens
tcctgtttctcaaca

SEQ ID NO: 751137 - DNA, 15 bp, Homo sapiens
cctgtttctcaacat

SEQ ID NO: 751138 - DNA, 15 bp, Homo sapiens
ctgtttctcaacatc

SEQ ID NO: 751139 - DNA, 15 bp, Homo sapiens
tgtttctcaacatct

SEQ ID NO: 751140 - DNA, 15 bp, Homo sapiens
gtttctcaacatctt

SEQ ID NO: 751141 - DNA, 15 bp, Homo sapiens
tttctcaacatcttc

SEQ ID NO: 751142 - DNA, 15 bp, Homo sapiens
ttctcaacatcttca

SEQ ID NO: 751143 - DNA, 15 bp, Homo sapiens
tctcaacatcttcac

SEQ ID NO: 751144 - DNA, 15 bp, Homo sapiens
ctcaacatcttcact

SEQ ID NO: 751145 - DNA, 15 bp, Homo sapiens
tcaacatcttcacta

SEQ ID NO: 751146 - DNA, 15 bp, Homo sapiens
caacatcttcactag

SEQ ID NO: 751147 - DNA, 15 bp, Homo sapiens
aacatcttcactagt

SEQ ID NO: 751148 - DNA, 15 bp, Homo sapiens
acatcttcactagtc

SEQ ID NO: 751149 - DNA, 15 bp, Homo sapiens
catcttcactagtct

SEQ ID NO: 751150 - DNA, 15 bp, Homo sapiens
atcttcactagtctt

SEQ ID NO: 751151 - DNA, 15 bp, Homo sapiens
tcttcactagtcttg

SEQ ID NO: 751152 - DNA, 15 bp, Homo sapiens
cttcactagtcttga

SEQ ID NO: 751153 - DNA, 15 bp, Homo sapiens
ttcactagtcttgat

SEQ ID NO: 751154 - DNA, 15 bp, Homo sapiens
tcactagtcttgatg

SEQ ID NO: 751155 - DNA, 15 bp, Homo sapiens
cactagtcttgatgt

SEQ ID NO: 751156 - DNA, 15 bp, Homo sapiens
actagtcttgatgtt

SEQ ID NO: 751157 - DNA, 15 bp, Homo sapiens
ctagtcttgatgtta

SEQ ID NO: 751158 - DNA, 15 bp, Homo sapiens
tagtcttgatgttac

SEQ ID NO: 751159 - DNA, 15 bp, Homo sapiens
agtcttgatgttacc

SEQ ID NO: 751160 - DNA, 15 bp, Homo sapiens
gtcttgatgttaccc

SEQ ID NO: 751161 - DNA, 15 bp, Homo sapiens
tcttgatgttaccca

SEQ ID NO: 751162 - DNA, 15 bp, Homo sapiens
cttgatgttacccaa

SEQ ID NO: 751163 - DNA, 15 bp, Homo sapiens
ttgatgttacccaac

SEQ ID NO: 751164 - DNA, 15 bp, Homo sapiens
tgatgttacccaact

SEQ ID NO: 751165 - DNA, 15 bp, Homo sapiens
gatgttacccaactt

SEQ ID NO: 751166 - DNA, 15 bp, Homo sapiens
atgttacccaacttc

SEQ ID NO: 751167 - DNA, 15 bp, Homo sapiens
tgttacccaacttca

SEQ ID NO: 751168 - DNA, 15 bp, Homo sapiens
gttacccaacttcaa

SEQ ID NO: 751169 - DNA, 15 bp, Homo sapiens
ttacccaacttcaac

SEQ ID NO: 751170 - DNA, 15 bp, Homo sapiens
tacccaacttcaaca

SEQ ID NO: 751171 - DNA, 15 bp, Homo sapiens
acccaacttcaacat

SEQ ID NO: 751172 - DNA, 15 bp, Homo sapiens
cccaacttcaacatt

SEQ ID NO: 751173 - DNA, 15 bp, Homo sapiens
ccaacttcaacattc

SEQ ID NO: 751174 - DNA, 15 bp, Homo sapiens
caacttcaacattct

SEQ ID NO: 751175 - DNA, 15 bp, Homo sapiens
aacttcaacattctt

SEQ ID NO: 751176 - DNA, 15 bp, Homo sapiens
acttcaacattcttg

SEQ ID NO: 751177 - DNA, 15 bp, Homo sapiens
cttcaacattcttgc

SEQ ID NO: 751178 - DNA, 15 bp, Homo sapiens
ttcaacattcttgct

SEQ ID NO: 751179 - DNA, 15 bp, Homo sapiens
tcaacattcttgcta

SEQ ID NO: 751180 - DNA, 15 bp, Homo sapiens
caacattcttgctag

SEQ ID NO: 751181 - DNA, 15 bp, Homo sapiens
aacattcttgctagt

SEQ ID NO: 751182 - DNA, 15 bp, Homo sapiens
acattcttgctagtt

SEQ ID NO: 751183 - DNA, 15 bp, Homo sapiens
cattcttgctagttt

SEQ ID NO: 751184 - DNA, 15 bp, Homo sapiens
attcttgctagtttg

SEQ ID NO: 751185 - DNA, 15 bp, Homo sapiens
ttcttgctagtttga

SEQ ID NO: 751186 - DNA, 15 bp, Homo sapiens
tcttgctagtttgat

SEQ ID NO: 751187 - DNA, 15 bp, Homo sapiens
cttgctagtttgatg

SEQ ID NO: 751188 - DNA, 15 bp, Homo sapiens
ttgctagtttgatga

SEQ ID NO: 751189 - DNA, 15 bp, Homo sapiens
tgctagtttgatgag

SEQ ID NO: 751190 - DNA, 15 bp, Homo sapiens
gctagtttgatgagt

SEQ ID NO: 751191 - DNA, 15 bp, Homo sapiens
ctagtttgatgagtg

SEQ ID NO: 751192 - DNA, 15 bp, Homo sapiens
tagtttgatgagtgt

SEQ ID NO: 751193 - DNA, 15 bp, Homo sapiens
agtttgatgagtgtt

SEQ ID NO: 751194 - DNA, 15 bp, Homo sapiens
gtttgatgagtgtta

SEQ ID NO: 751195 - DNA, 15 bp, Homo sapiens
tttgatgagtgttaa

SEQ ID NO: 751196 - DNA, 15 bp, Homo sapiens
ttgatgagtgttaaa

SEQ ID NO: 751197 - DNA, 15 bp, Homo sapiens
tgatgagtgttaaat

SEQ ID NO: 751198 - DNA, 15 bp, Homo sapiens
gatgagtgttaaatg

SEQ ID NO: 751199 - DNA, 15 bp, Homo sapiens
atgagtgttaaatga

SEQ ID NO: 751200 - DNA, 15 bp, Homo sapiens
tgagtgttaaatgac

SEQ ID NO: 751201 - DNA, 15 bp, Homo sapiens
gagtgttaaatgaca

SEQ ID NO: 751202 - DNA, 15 bp, Homo sapiens
agtgttaaatgacat

SEQ ID NO: 751203 - DNA, 15 bp, Homo sapiens
gtgttaaatgacatt

SEQ ID NO: 751204 - DNA, 15 bp, Homo sapiens
tgttaaatgacattg

SEQ ID NO: 751205 - DNA, 15 bp, Homo sapiens
gttaaatgacattgt

SEQ ID NO: 751206 - DNA, 15 bp, Homo sapiens
ttaaatgacattgtt

SEQ ID NO: 751207 - DNA, 15 bp, Homo sapiens
taaatgacattgtta

SEQ ID NO: 751208 - DNA, 15 bp, Homo sapiens
aaatgacattgttat

SEQ ID NO: 751209 - DNA, 15 bp, Homo sapiens
aatgacattgttatt

SEQ ID NO: 751210 - DNA, 15 bp, Homo sapiens
atgacattgttattt

SEQ ID NO: 751211 - DNA, 15 bp, Homo sapiens
tgacattgttatttt

SEQ ID NO: 751212 - DNA, 15 bp, Homo sapiens
gacattgttatttta

SEQ ID NO: 751213 - DNA, 15 bp, Homo sapiens
acattgttattttaa

SEQ ID NO: 751214 - DNA, 15 bp, Homo sapiens
cattgttattttaat

SEQ ID NO: 751215 - DNA, 15 bp, Homo sapiens
attgttattttaatt

SEQ ID NO: 751216 - DNA, 15 bp, Homo sapiens
ttgttattttaattt

SEQ ID NO: 751217 - DNA, 15 bp, Homo sapiens
tgttattttaatttt

SEQ ID NO: 751218 - DNA, 15 bp, Homo sapiens
gttattttaattttc

SEQ ID NO: 751219 - DNA, 15 bp, Homo sapiens
ttattttaattttca

SEQ ID NO: 751220 - DNA, 15 bp, Homo sapiens
tattttaattttcat

SEQ ID NO: 751221 - DNA, 15 bp, Homo sapiens
attttaattttcatt

SEQ ID NO: 751222 - DNA, 15 bp, Homo sapiens
ttttaattttcattt

SEQ ID NO: 751223 - DNA, 15 bp, Homo sapiens
tttaattttcatttc

SEQ ID NO: 751224 - DNA, 15 bp, Homo sapiens
ttaattttcatttcc

SEQ ID NO: 751225 - DNA, 15 bp, Homo sapiens
taattttcatttcca

SEQ ID NO: 751226 - DNA, 15 bp, Homo sapiens
aattttcatttccaa

SEQ ID NO: 751227 - DNA, 15 bp, Homo sapiens
attttcatttccaat

SEQ ID NO: 751228 - DNA, 15 bp, Homo sapiens
ttttcatttccaatt

SEQ ID NO: 751229 - DNA, 15 bp, Homo sapiens
tttcatttccaatta

SEQ ID NO: 751230 - DNA, 15 bp, Homo sapiens
ttcatttccaattat

SEQ ID NO: 751231 - DNA, 15 bp, Homo sapiens
tcatttccaattata

SEQ ID NO: 751232 - DNA, 15 bp, Homo sapiens
catttccaattatat

SEQ ID NO: 751233 - DNA, 15 bp, Homo sapiens
atttccaattatata

SEQ ID NO: 751234 - DNA, 15 bp, Homo sapiens
tttccaattatatag

SEQ ID NO: 751235 - DNA, 15 bp, Homo sapiens
ttccaattatatagg

SEQ ID NO: 751236 - DNA, 15 bp, Homo sapiens
tccaattatataggt

SEQ ID NO: 751237 - DNA, 15 bp, Homo sapiens
ccaattatataggtc

SEQ ID NO: 751238 - DNA, 15 bp, Homo sapiens
caattatataggtct

SEQ ID NO: 751239 - DNA, 15 bp, Homo sapiens
aattatataggtctt

SEQ ID NO: 751240 - DNA, 15 bp, Homo sapiens
attatataggtcttt

SEQ ID NO: 751241 - DNA, 15 bp, Homo sapiens
ttatataggtctttc

SEQ ID NO: 751242 - DNA, 15 bp, Homo sapiens
tatataggtctttca

SEQ ID NO: 751243 - DNA, 15 bp, Homo sapiens
atataggtctttcaa

SEQ ID NO: 751244 - DNA, 15 bp, Homo sapiens
tataggtctttcaaa

SEQ ID NO: 751245 - DNA, 15 bp, Homo sapiens
ataggtctttcaaaa

SEQ ID NO: 751246 - DNA, 15 bp, Homo sapiens
taggtctttcaaaat

SEQ ID NO: 751247 - DNA, 15 bp, Homo sapiens
aggtctttcaaaata

SEQ ID NO: 751248 - DNA, 15 bp, Homo sapiens
ggtctttcaaaatac

SEQ ID NO: 751249 - DNA, 15 bp, Homo sapiens
gtctttcaaaatact

SEQ ID NO: 751250 - DNA, 15 bp, Homo sapiens
tctttcaaaatacta

SEQ ID NO: 751251 - DNA, 15 bp, Homo sapiens
ctttcaaaatactat

SEQ ID NO: 751252 - DNA, 15 bp, Homo sapiens
tttcaaaatactatc

SEQ ID NO: 751253 - DNA, 15 bp, Homo sapiens
ttcaaaatactatct

SEQ ID NO: 751254 - DNA, 15 bp, Homo sapiens
tcaaaatactatcta

SEQ ID NO: 751255 - DNA, 15 bp, Homo sapiens
caaaatactatctat

SEQ ID NO: 751256 - DNA, 15 bp, Homo sapiens
aaaatactatctatt

SEQ ID NO: 751257 - DNA, 15 bp, Homo sapiens
aaatactatctattc

SEQ ID NO: 751258 - DNA, 15 bp, Homo sapiens
aatactatctattca

SEQ ID NO: 751259 - DNA, 15 bp, Homo sapiens
atactatctattcat

SEQ ID NO: 751260 - DNA, 15 bp, Homo sapiens
tactatctattcatt

SEQ ID NO: 751261 - DNA, 15 bp, Homo sapiens
actatctattcattt

SEQ ID NO: 751262 - DNA, 15 bp, Homo sapiens
ctatctattcatttt

SEQ ID NO: 751263 - DNA, 15 bp, Homo sapiens
tatctattcatttta

SEQ ID NO: 751264 - DNA, 15 bp, Homo sapiens
atctattcattttaa

SEQ ID NO: 751265 - DNA, 15 bp, Homo sapiens
tctattcattttaaa

SEQ ID NO: 751266 - DNA, 15 bp, Homo sapiens
ctattcattttaaaa

SEQ ID NO: 751267 - DNA, 15 bp, Homo sapiens
tattcattttaaaag

SEQ ID NO: 751268 - DNA, 15 bp, Homo sapiens
attcattttaaaaga

SEQ ID NO: 751269 - DNA, 15 bp, Homo sapiens
ttcattttaaaagat

SEQ ID NO: 751270 - DNA, 15 bp, Homo sapiens
tcattttaaaagatt

SEQ ID NO: 751271 - DNA, 15 bp, Homo sapiens
cattttaaaagatta

SEQ ID NO: 751272 - DNA, 15 bp, Homo sapiens
attttaaaagattag

SEQ ID NO: 751273 - DNA, 15 bp, Homo sapiens
ttttaaaagattagt

SEQ ID NO: 751274 - DNA, 15 bp, Homo sapiens
tttaaaagattagtt

SEQ ID NO: 751275 - DNA, 15 bp, Homo sapiens
ttaaaagattagttt

SEQ ID NO: 751276 - DNA, 15 bp, Homo sapiens
taaaagattagtttt

SEQ ID NO: 751277 - DNA, 15 bp, Homo sapiens
aaaagattagtttta

SEQ ID NO: 751278 - DNA, 15 bp, Homo sapiens
aaagattagttttag

SEQ ID NO: 751279 - DNA, 15 bp, Homo sapiens
aagattagttttagc

SEQ ID NO: 751280 - DNA, 15 bp, Homo sapiens
agattagttttagcc

SEQ ID NO: 751281 - DNA, 15 bp, Homo sapiens
gattagttttagcct

SEQ ID NO: 751282 - DNA, 15 bp, Homo sapiens
attagttttagcctc

SEQ ID NO: 751283 - DNA, 15 bp, Homo sapiens
ttagttttagcctcc

SEQ ID NO: 751284 - DNA, 15 bp, Homo sapiens
tagttttagcctcca

SEQ ID NO: 751285 - DNA, 15 bp, Homo sapiens
agttttagcctccac

SEQ ID NO: 751286 - DNA, 15 bp, Homo sapiens
gttttagcctccact

SEQ ID NO: 751287 - DNA, 15 bp, Homo sapiens
ttttagcctccactc

SEQ ID NO: 751288 - DNA, 15 bp, Homo sapiens
tttagcctccactct

SEQ ID NO: 751289 - DNA, 15 bp, Homo sapiens
ttagcctccactcta

SEQ ID NO: 751290 - DNA, 15 bp, Homo sapiens
tagcctccactctaa

SEQ ID NO: 751291 - DNA, 15 bp, Homo sapiens
agcctccactctaaa

SEQ ID NO: 751292 - DNA, 15 bp, Homo sapiens
gcctccactctaaag

SEQ ID NO: 751293 - DNA, 15 bp, Homo sapiens
cctccactctaaagt

SEQ ID NO: 751294 - DNA, 15 bp, Homo sapiens
ctccactctaaagtc

SEQ ID NO: 751295 - DNA, 15 bp, Homo sapiens
tccactctaaagtca

SEQ ID NO: 751296 - DNA, 15 bp, Homo sapiens
ccactctaaagtcag

SEQ ID NO: 751297 - DNA, 15 bp, Homo sapiens
cactctaaagtcagt

SEQ ID NO: 751298 - DNA, 15 bp, Homo sapiens
actctaaagtcagtt

SEQ ID NO: 751299 - DNA, 15 bp, Homo sapiens
ctctaaagtcagtta

SEQ ID NO: 751300 - DNA, 15 bp, Homo sapiens
tctaaagtcagttag

SEQ ID NO: 751301 - DNA, 15 bp, Homo sapiens
ctaaagtcagttaga

SEQ ID NO: 751302 - DNA, 15 bp, Homo sapiens
taaagtcagttagaa

SEQ ID NO: 751303 - DNA, 15 bp, Homo sapiens
aaagtcagttagaat

SEQ ID NO: 751304 - DNA, 15 bp, Homo sapiens
aagtcagttagaata

SEQ ID NO: 751305 - DNA, 15 bp, Homo sapiens
agtcagttagaataa

SEQ ID NO: 751306 - DNA, 15 bp, Homo sapiens
gtcagttagaataag

SEQ ID NO: 751307 - DNA, 15 bp, Homo sapiens
tcagttagaataagg

SEQ ID NO: 751308 - DNA, 15 bp, Homo sapiens
cagttagaataagga

SEQ ID NO: 751309 - DNA, 15 bp, Homo sapiens
agttagaataaggag

SEQ ID NO: 751310 - DNA, 15 bp, Homo sapiens
gttagaataaggagg

SEQ ID NO: 751311 - DNA, 15 bp, Homo sapiens
ttagaataaggaggc

SEQ ID NO: 751312 - DNA, 15 bp, Homo sapiens
tagaataaggaggct

SEQ ID NO: 751313 - DNA, 15 bp, Homo sapiens
agaataaggaggctt

SEQ ID NO: 751314 - DNA, 15 bp, Homo sapiens
gaataaggaggcttt

SEQ ID NO: 751315 - DNA, 15 bp, Homo sapiens
aataaggaggctttt

SEQ ID NO: 751316 - DNA, 15 bp, Homo sapiens
ataaggaggcttttt

SEQ ID NO: 751317 - DNA, 15 bp, Homo sapiens
taaggaggctttttg

SEQ ID NO: 751318 - DNA, 15 bp, Homo sapiens
aaggaggctttttgt

SEQ ID NO: 751319 - DNA, 15 bp, Homo sapiens
aggaggctttttgtg

SEQ ID NO: 751320 - DNA, 15 bp, Homo sapiens
ggaggctttttgtga

SEQ ID NO: 751321 - DNA, 15 bp, Homo sapiens
gaggctttttgtgat

SEQ ID NO: 751322 - DNA, 15 bp, Homo sapiens
aggctttttgtgatg

SEQ ID NO: 751323 - DNA, 15 bp, Homo sapiens
ggctttttgtgatga

SEQ ID NO: 751324 - DNA, 15 bp, Homo sapiens
gctttttgtgatgaa

SEQ ID NO: 751325 - DNA, 15 bp, Homo sapiens
ctttttgtgatgaaa

SEQ ID NO: 751326 - DNA, 15 bp, Homo sapiens
tttttgtgatgaaaa

SEQ ID NO: 751327 - DNA, 15 bp, Homo sapiens
ttttgtgatgaaaat

SEQ ID NO: 751328 - DNA, 15 bp, Homo sapiens
tttgtgatgaaaata

SEQ ID NO: 751329 - DNA, 15 bp, Homo sapiens
ttgtgatgaaaataa

SEQ ID NO: 751330 - DNA, 15 bp, Homo sapiens
tgtgatgaaaataaa

SEQ ID NO: 751331 - DNA, 15 bp, Homo sapiens
gtgatgaaaataaaa

SEQ ID NO: 751332 - DNA, 15 bp, Homo sapiens
tgatgaaaataaaaa

SEQ ID NO: 751333 - DNA, 15 bp, Homo sapiens
gatgaaaataaaaat

SEQ ID NO: 751334 - DNA, 15 bp, Homo sapiens
atgaaaataaaaatt

SEQ ID NO: 751335 - DNA, 15 bp, Homo sapiens
tgaaaataaaaattt

SEQ ID NO: 751336 - DNA, 15 bp, Homo sapiens
gaaaataaaaatttg

SEQ ID NO: 751337 - DNA, 15 bp, Homo sapiens
aaaataaaaatttgg

SEQ ID NO: 751338 - DNA, 15 bp, Homo sapiens
aaataaaaatttgga

SEQ ID NO: 751339 - DNA, 15 bp, Homo sapiens
aataaaaatttggaa

SEQ ID NO: 751340 - DNA, 15 bp, Homo sapiens
ataaaaatttggaat

SEQ ID NO: 751341 - DNA, 15 bp, Homo sapiens
taaaaatttggaatc

SEQ ID NO: 751342 - DNA, 15 bp, Homo sapiens
aaaaatttggaatct

SEQ ID NO: 751343 - DNA, 15 bp, Homo sapiens
aaaatttggaatctg

SEQ ID NO: 751344 - DNA, 15 bp, Homo sapiens
aaatttggaatctga

SEQ ID NO: 751345 - DNA, 15 bp, Homo sapiens
aatttggaatctgag

SEQ ID NO: 751346 - DNA, 15 bp, Homo sapiens
atttggaatctgaga

SEQ ID NO: 751347 - DNA, 15 bp, Homo sapiens
tttggaatctgagat

SEQ ID NO: 751348 - DNA, 15 bp, Homo sapiens
ttggaatctgagatt

SEQ ID NO: 751349 - DNA, 15 bp, Homo sapiens
tggaatctgagatta

SEQ ID NO: 751350 - DNA, 15 bp, Homo sapiens
ggaatctgagattat

SEQ ID NO: 751351 - DNA, 15 bp, Homo sapiens
gaatctgagattatg

SEQ ID NO: 751352 - DNA, 15 bp, Homo sapiens
aatctgagattatga

SEQ ID NO: 751353 - DNA, 15 bp, Homo sapiens
atctgagattatgat

SEQ ID NO: 751354 - DNA, 15 bp, Homo sapiens
tctgagattatgata

SEQ ID NO: 751355 - DNA, 15 bp, Homo sapiens
ctgagattatgatag

SEQ ID NO: 751356 - DNA, 15 bp, Homo sapiens
tgagattatgatagt

SEQ ID NO: 751357 - DNA, 15 bp, Homo sapiens
gagattatgatagtt

SEQ ID NO: 751358 - DNA, 15 bp, Homo sapiens
agattatgatagtta

SEQ ID NO: 751359 - DNA, 15 bp, Homo sapiens
gattatgatagttat

SEQ ID NO: 751360 - DNA, 15 bp, Homo sapiens
attatgatagttata

SEQ ID NO: 751361 - DNA, 15 bp, Homo sapiens
ttatgatagttataa

SEQ ID NO: 751362 - DNA, 15 bp, Homo sapiens
tatgatagttataat

SEQ ID NO: 751363 - DNA, 15 bp, Homo sapiens
atgatagttataatc

SEQ ID NO: 751364 - DNA, 15 bp, Homo sapiens
tgatagttataatca

SEQ ID NO: 751365 - DNA, 15 bp, Homo sapiens
gatagttataatcag

SEQ ID NO: 751366 - DNA, 15 bp, Homo sapiens
atagttataatcagt

SEQ ID NO: 751367 - DNA, 15 bp, Homo sapiens
tagttataatcagtt

SEQ ID NO: 751368 - DNA, 15 bp, Homo sapiens
agttataatcagttg

SEQ ID NO: 751369 - DNA, 15 bp, Homo sapiens
gttataatcagttgc

SEQ ID NO: 751370 - DNA, 15 bp, Homo sapiens
ttataatcagttgct

SEQ ID NO: 751371 - DNA, 15 bp, Homo sapiens
tataatcagttgctc

SEQ ID NO: 751372 - DNA, 15 bp, Homo sapiens
ataatcagttgctca

SEQ ID NO: 751373 - DNA, 15 bp, Homo sapiens
taatcagttgctcac

SEQ ID NO: 751374 - DNA, 15 bp, Homo sapiens
aatcagttgctcact

SEQ ID NO: 751375 - DNA, 15 bp, Homo sapiens
atcagttgctcactt

SEQ ID NO: 751376 - DNA, 15 bp, Homo sapiens
tcagttgctcacttt

SEQ ID NO: 751377 - DNA, 15 bp, Homo sapiens
cagttgctcactttg

SEQ ID NO: 751378 - DNA, 15 bp, Homo sapiens
agttgctcactttgg

SEQ ID NO: 751379 - DNA, 15 bp, Homo sapiens
gttgctcactttggc

SEQ ID NO: 751380 - DNA, 15 bp, Homo sapiens
ttgctcactttggct

SEQ ID NO: 751381 - DNA, 15 bp, Homo sapiens
tgctcactttggcta

SEQ ID NO: 751382 - DNA, 15 bp, Homo sapiens
gctcactttggctac

SEQ ID NO: 751383 - DNA, 15 bp, Homo sapiens
ctcactttggctacc

SEQ ID NO: 751384 - DNA, 15 bp, Homo sapiens
tcactttggctacca

SEQ ID NO: 751385 - DNA, 15 bp, Homo sapiens
cactttggctaccaa

SEQ ID NO: 751386 - DNA, 15 bp, Homo sapiens
actttggctaccaat

SEQ ID NO: 751387 - DNA, 15 bp, Homo sapiens
ctttggctaccaatt

SEQ ID NO: 751388 - DNA, 15 bp, Homo sapiens
tttggctaccaatta

SEQ ID NO: 751389 - DNA, 15 bp, Homo sapiens
ttggctaccaattaa

SEQ ID NO: 751390 - DNA, 15 bp, Homo sapiens
tggctaccaattaat

SEQ ID NO: 751391 - DNA, 15 bp, Homo sapiens
ggctaccaattaatt

SEQ ID NO: 751392 - DNA, 15 bp, Homo sapiens
gctaccaattaatta

SEQ ID NO: 751393 - DNA, 15 bp, Homo sapiens
ctaccaattaattaa

SEQ ID NO: 751394 - DNA, 15 bp, Homo sapiens
taccaattaattaat

SEQ ID NO: 751395 - DNA, 15 bp, Homo sapiens
accaattaattaatt

SEQ ID NO: 751396 - DNA, 15 bp, Homo sapiens
ccaattaattaattt

SEQ ID NO: 751397 - DNA, 15 bp, Homo sapiens
caattaattaatttg

SEQ ID NO: 751398 - DNA, 15 bp, Homo sapiens
aattaattaatttgt

SEQ ID NO: 751399 - DNA, 15 bp, Homo sapiens
attaattaatttgtt

SEQ ID NO: 751400 - DNA, 15 bp, Homo sapiens
ttaattaatttgttt

SEQ ID NO: 751401 - DNA, 15 bp, Homo sapiens
taattaatttgtttt

SEQ ID NO: 751402 - DNA, 15 bp, Homo sapiens
aattaatttgttttt

SEQ ID NO: 751403 - DNA, 15 bp, Homo sapiens
attaatttgtttttc

SEQ ID NO: 751404 - DNA, 15 bp, Homo sapiens
ttaatttgtttttct

SEQ ID NO: 751405 - DNA, 15 bp, Homo sapiens
taatttgtttttctt

SEQ ID NO: 751406 - DNA, 15 bp, Homo sapiens
aatttgtttttcttt

SEQ ID NO: 751407 - DNA, 15 bp, Homo sapiens
atttgtttttctttt

SEQ ID NO: 751408 - DNA, 15 bp, Homo sapiens
tttgtttttcttttg

SEQ ID NO: 751409 - DNA, 15 bp, Homo sapiens
ttgtttttcttttgc

SEQ ID NO: 751410 - DNA, 15 bp, Homo sapiens
tgtttttcttttgct

SEQ ID NO: 751411 - DNA, 15 bp, Homo sapiens
gtttttcttttgctt

SEQ ID NO: 751412 - DNA, 15 bp, Homo sapiens
tttttcttttgctta

SEQ ID NO: 751413 - DNA, 15 bp, Homo sapiens
ttttcttttgcttaa

SEQ ID NO: 751414 - DNA, 15 bp, Homo sapiens
tttcttttgcttaag

SEQ ID NO: 751415 - DNA, 15 bp, Homo sapiens
ttcttttgcttaagt

SEQ ID NO: 751416 - DNA, 15 bp, Homo sapiens
tcttttgcttaagta

SEQ ID NO: 751417 - DNA, 15 bp, Homo sapiens
cttttgcttaagtaa

SEQ ID NO: 751418 - DNA, 15 bp, Homo sapiens
ttttgcttaagtaat

SEQ ID NO: 751419 - DNA, 15 bp, Homo sapiens
tttgcttaagtaatg

SEQ ID NO: 751420 - DNA, 15 bp, Homo sapiens
ttgcttaagtaatgt

SEQ ID NO: 751421 - DNA, 15 bp, Homo sapiens
tgcttaagtaatgtc

SEQ ID NO: 751422 - DNA, 15 bp, Homo sapiens
gcttaagtaatgtca

SEQ ID NO: 751423 - DNA, 15 bp, Homo sapiens
cttaagtaatgtcag

SEQ ID NO: 751424 - DNA, 15 bp, Homo sapiens
ttaagtaatgtcaga

SEQ ID NO: 751425 - DNA, 15 bp, Homo sapiens
taagtaatgtcagat

SEQ ID NO: 751426 - DNA, 15 bp, Homo sapiens
aagtaatgtcagata

SEQ ID NO: 751427 - DNA, 15 bp, Homo sapiens
agtaatgtcagatat

SEQ ID NO: 751428 - DNA, 15 bp, Homo sapiens
gtaatgtcagatatt

SEQ ID NO: 751429 - DNA, 15 bp, Homo sapiens
taatgtcagatattc

SEQ ID NO: 751430 - DNA, 15 bp, Homo sapiens
aatgtcagatattct

SEQ ID NO: 751431 - DNA, 15 bp, Homo sapiens
atgtcagatattctg

SEQ ID NO: 751432 - DNA, 15 bp, Homo sapiens
tgtcagatattctga

SEQ ID NO: 751433 - DNA, 15 bp, Homo sapiens
gtcagatattctgag

SEQ ID NO: 751434 - DNA, 15 bp, Homo sapiens
tcagatattctgagg

SEQ ID NO: 751435 - DNA, 15 bp, Homo sapiens
cagatattctgagga

SEQ ID NO: 751436 - DNA, 15 bp, Homo sapiens
agatattctgaggac

SEQ ID NO: 751437 - DNA, 15 bp, Homo sapiens
gatattctgaggacc

SEQ ID NO: 751438 - DNA, 15 bp, Homo sapiens
atattctgaggacca

SEQ ID NO: 751439 - DNA, 15 bp, Homo sapiens
tattctgaggaccat

SEQ ID NO: 751440 - DNA, 15 bp, Homo sapiens
attctgaggaccatt

SEQ ID NO: 751441 - DNA, 15 bp, Homo sapiens
ttctgaggaccatta

SEQ ID NO: 751442 - DNA, 15 bp, Homo sapiens
tctgaggaccattaa

SEQ ID NO: 751443 - DNA, 15 bp, Homo sapiens
ctgaggaccattaaa

SEQ ID NO: 751444 - DNA, 15 bp, Homo sapiens
tgaggaccattaaaa

SEQ ID NO: 751445 - DNA, 15 bp, Homo sapiens
gaggaccattaaaat

SEQ ID NO: 751446 - DNA, 15 bp, Homo sapiens
aggaccattaaaatg

SEQ ID NO: 751447 - DNA, 15 bp, Homo sapiens
ggaccattaaaatgt

SEQ ID NO: 751448 - DNA, 15 bp, Homo sapiens
gaccattaaaatgtc

SEQ ID NO: 751449 - DNA, 15 bp, Homo sapiens
accattaaaatgtct

SEQ ID NO: 751450 - DNA, 15 bp, Homo sapiens
ccattaaaatgtcta

SEQ ID NO: 751451 - DNA, 15 bp, Homo sapiens
cattaaaatgtctag

SEQ ID NO: 751452 - DNA, 15 bp, Homo sapiens
attaaaatgtctaga

SEQ ID NO: 751453 - DNA, 15 bp, Homo sapiens
ttaaaatgtctagac

SEQ ID NO: 751454 - DNA, 15 bp, Homo sapiens
taaaatgtctagact

SEQ ID NO: 751455 - DNA, 15 bp, Homo sapiens
aaaatgtctagactc

SEQ ID NO: 751456 - DNA, 15 bp, Homo sapiens
aaatgtctagactct

SEQ ID NO: 751457 - DNA, 15 bp, Homo sapiens
aatgtctagactctg

SEQ ID NO: 751458 - DNA, 15 bp, Homo sapiens
atgtctagactctgt

SEQ ID NO: 751459 - DNA, 15 bp, Homo sapiens
tgtctagactctgtt

SEQ ID NO: 751460 - DNA, 15 bp, Homo sapiens
gtctagactctgttc

SEQ ID NO: 751461 - DNA, 15 bp, Homo sapiens
tctagactctgttct

SEQ ID NO: 751462 - DNA, 15 bp, Homo sapiens
ctagactctgttctc

SEQ ID NO: 751463 - DNA, 15 bp, Homo sapiens
tagactctgttctcc

SEQ ID NO: 751464 - DNA, 15 bp, Homo sapiens
agactctgttctcca

SEQ ID NO: 751465 - DNA, 15 bp, Homo sapiens
gactctgttctccaa

SEQ ID NO: 751466 - DNA, 15 bp, Homo sapiens
actctgttctccaag

SEQ ID NO: 751467 - DNA, 15 bp, Homo sapiens
ctctgttctccaagg

SEQ ID NO: 751468 - DNA, 15 bp, Homo sapiens
tctgttctccaaggg

SEQ ID NO: 751469 - DNA, 15 bp, Homo sapiens
ctgttctccaagggc

SEQ ID NO: 751470 - DNA, 15 bp, Homo sapiens
tgttctccaagggcc

SEQ ID NO: 751471 - DNA, 15 bp, Homo sapiens
gttctccaagggccc

SEQ ID NO: 751472 - DNA, 15 bp, Homo sapiens
ttctccaagggccct

SEQ ID NO: 751473 - DNA, 15 bp, Homo sapiens
tctccaagggccctg

SEQ ID NO: 751474 - DNA, 15 bp, Homo sapiens
ctccaagggccctgt

SEQ ID NO: 751475 - DNA, 15 bp, Homo sapiens
tccaagggccctgtt

SEQ ID NO: 751476 - DNA, 15 bp, Homo sapiens
ccaagggccctgttc

SEQ ID NO: 751477 - DNA, 15 bp, Homo sapiens
caagggccctgttct

SEQ ID NO: 751478 - DNA, 15 bp, Homo sapiens
aagggccctgttcta

SEQ ID NO: 751479 - DNA, 15 bp, Homo sapiens
agggccctgttctaa

SEQ ID NO: 751480 - DNA, 15 bp, Homo sapiens
gggccctgttctaac

SEQ ID NO: 751481 - DNA, 15 bp, Homo sapiens
ggccctgttctaaca

SEQ ID NO: 751482 - DNA, 15 bp, Homo sapiens
gccctgttctaacat

SEQ ID NO: 751483 - DNA, 15 bp, Homo sapiens
ccctgttctaacatt

SEQ ID NO: 751484 - DNA, 15 bp, Homo sapiens
cctgttctaacattc

SEQ ID NO: 751485 - DNA, 15 bp, Homo sapiens
ctgttctaacattct

SEQ ID NO: 751486 - DNA, 15 bp, Homo sapiens
tgttctaacattctg

SEQ ID NO: 751487 - DNA, 15 bp, Homo sapiens
gttctaacattctga

SEQ ID NO: 751488 - DNA, 15 bp, Homo sapiens
ttctaacattctgat

SEQ ID NO: 751489 - DNA, 15 bp, Homo sapiens
tctaacattctgatt

SEQ ID NO: 751490 - DNA, 15 bp, Homo sapiens
ctaacattctgattc

SEQ ID NO: 751491 - DNA, 15 bp, Homo sapiens
taacattctgattct

SEQ ID NO: 751492 - DNA, 15 bp, Homo sapiens
aacattctgattctg

SEQ ID NO: 751493 - DNA, 15 bp, Homo sapiens
acattctgattctgt

SEQ ID NO: 751494 - DNA, 15 bp, Homo sapiens
cattctgattctgtg

SEQ ID NO: 751495 - DNA, 15 bp, Homo sapiens
attctgattctgtgt

SEQ ID NO: 751496 - DNA, 15 bp, Homo sapiens
ttctgattctgtgta

SEQ ID NO: 751497 - DNA, 15 bp, Homo sapiens
tctgattctgtgtat

SEQ ID NO: 751498 - DNA, 15 bp, Homo sapiens
ctgattctgtgtata

SEQ ID NO: 751499 - DNA, 15 bp, Homo sapiens
tgattctgtgtatat

SEQ ID NO: 751500 - DNA, 15 bp, Homo sapiens
gattctgtgtatatg

SEQ ID NO: 751501 - DNA, 15 bp, Homo sapiens
attctgtgtatatga

SEQ ID NO: 751502 - DNA, 15 bp, Homo sapiens
ttctgtgtatatgat

SEQ ID NO: 751503 - DNA, 15 bp, Homo sapiens
tctgtgtatatgatg

SEQ ID NO: 751504 - DNA, 15 bp, Homo sapiens
ctgtgtatatgatgc

SEQ ID NO: 751505 - DNA, 15 bp, Homo sapiens
tgtgtatatgatgca

SEQ ID NO: 751506 - DNA, 15 bp, Homo sapiens
gtgtatatgatgcat

SEQ ID NO: 751507 - DNA, 15 bp, Homo sapiens
tgtatatgatgcatt

SEQ ID NO: 751508 - DNA, 15 bp, Homo sapiens
gtatatgatgcattc

SEQ ID NO: 751509 - DNA, 15 bp, Homo sapiens
tatatgatgcattcg

SEQ ID NO: 751510 - DNA, 15 bp, Homo sapiens
atatgatgcattcgt

SEQ ID NO: 751511 - DNA, 15 bp, Homo sapiens
tatgatgcattcgta

SEQ ID NO: 751512 - DNA, 15 bp, Homo sapiens
atgatgcattcgtaa

SEQ ID NO: 751513 - DNA, 15 bp, Homo sapiens
tgatgcattcgtaat

SEQ ID NO: 751514 - DNA, 15 bp, Homo sapiens
gatgcattcgtaatt

SEQ ID NO: 751515 - DNA, 15 bp, Homo sapiens
atgcattcgtaattt

SEQ ID NO: 751516 - DNA, 15 bp, Homo sapiens
tgcattcgtaatttt

SEQ ID NO: 751517 - DNA, 15 bp, Homo sapiens
gcattcgtaattttc

SEQ ID NO: 751518 - DNA, 15 bp, Homo sapiens
cattcgtaattttct

SEQ ID NO: 751519 - DNA, 15 bp, Homo sapiens
attcgtaattttctt

SEQ ID NO: 751520 - DNA, 15 bp, Homo sapiens
ttcgtaattttcttt

SEQ ID NO: 751521 - DNA, 15 bp, Homo sapiens
tcgtaattttctttc

SEQ ID NO: 751522 - DNA, 15 bp, Homo sapiens
cgtaattttctttcc

SEQ ID NO: 751523 - DNA, 15 bp, Homo sapiens
gtaattttctttcca

SEQ ID NO: 751524 - DNA, 15 bp, Homo sapiens
taattttctttccat

SEQ ID NO: 751525 - DNA, 15 bp, Homo sapiens
aattttctttccatg

SEQ ID NO: 751526 - DNA, 15 bp, Homo sapiens
attttctttccatgt

SEQ ID NO: 751527 - DNA, 15 bp, Homo sapiens
ttttctttccatgta

SEQ ID NO: 751528 - DNA, 15 bp, Homo sapiens
tttctttccatgtaa

SEQ ID NO: 751529 - DNA, 15 bp, Homo sapiens
ttctttccatgtaat

SEQ ID NO: 751530 - DNA, 15 bp, Homo sapiens
tctttccatgtaata

SEQ ID NO: 751531 - DNA, 15 bp, Homo sapiens
ctttccatgtaataa

SEQ ID NO: 751532 - DNA, 15 bp, Homo sapiens
tttccatgtaataat

SEQ ID NO: 751533 - DNA, 15 bp, Homo sapiens
ttccatgtaataatc

SEQ ID NO: 751534 - DNA, 15 bp, Homo sapiens
tccatgtaataatct

SEQ ID NO: 751535 - DNA, 15 bp, Homo sapiens
ccatgtaataatcta

SEQ ID NO: 751536 - DNA, 15 bp, Homo sapiens
catgtaataatctaa

SEQ ID NO: 751537 - DNA, 15 bp, Homo sapiens
atgtaataatctaat

SEQ ID NO: 751538 - DNA, 15 bp, Homo sapiens
tgtaataatctaatt

SEQ ID NO: 751539 - DNA, 15 bp, Homo sapiens
gtaataatctaattt

SEQ ID NO: 751540 - DNA, 15 bp, Homo sapiens
taataatctaatttt

SEQ ID NO: 751541 - DNA, 15 bp, Homo sapiens
aataatctaatttta

SEQ ID NO: 751542 - DNA, 15 bp, Homo sapiens
ataatctaattttat

SEQ ID NO: 751543 - DNA, 15 bp, Homo sapiens
taatctaattttatt

SEQ ID NO: 751544 - DNA, 15 bp, Homo sapiens
aatctaattttattg

SEQ ID NO: 751545 - DNA, 15 bp, Homo sapiens
atctaattttattga

SEQ ID NO: 751546 - DNA, 15 bp, Homo sapiens
tctaattttattgac

SEQ ID NO: 751547 - DNA, 15 bp, Homo sapiens
ctaattttattgacc

SEQ ID NO: 751548 - DNA, 15 bp, Homo sapiens
taattttattgaccc

SEQ ID NO: 751549 - DNA, 15 bp, Homo sapiens
aattttattgacccc

SEQ ID NO: 751550 - DNA, 15 bp, Homo sapiens
attttattgacccca

SEQ ID NO: 751551 - DNA, 15 bp, Homo sapiens
ttttattgaccccac

SEQ ID NO: 751552 - DNA, 15 bp, Homo sapiens
tttattgaccccact

SEQ ID NO: 751553 - DNA, 15 bp, Homo sapiens
ttattgaccccacta

SEQ ID NO: 751554 - DNA, 15 bp, Homo sapiens
tattgaccccactaa

SEQ ID NO: 751555 - DNA, 15 bp, Homo sapiens
attgaccccactaag

SEQ ID NO: 751556 - DNA, 15 bp, Homo sapiens
ttgaccccactaagt

SEQ ID NO: 751557 - DNA, 15 bp, Homo sapiens
tgaccccactaagta

SEQ ID NO: 751558 - DNA, 15 bp, Homo sapiens
gaccccactaagtaa

SEQ ID NO: 751559 - DNA, 15 bp, Homo sapiens
accccactaagtaag

SEQ ID NO: 751560 - DNA, 15 bp, Homo sapiens
ccccactaagtaagt

SEQ ID NO: 751561 - DNA, 15 bp, Homo sapiens
cccactaagtaagta

SEQ ID NO: 751562 - DNA, 15 bp, Homo sapiens
ccactaagtaagtaa

SEQ ID NO: 751563 - DNA, 15 bp, Homo sapiens
cactaagtaagtaag

SEQ ID NO: 751564 - DNA, 15 bp, Homo sapiens
actaagtaagtaagg

SEQ ID NO: 751565 - DNA, 15 bp, Homo sapiens
ctaagtaagtaaggt

SEQ ID NO: 751566 - DNA, 15 bp, Homo sapiens
taagtaagtaaggtg

SEQ ID NO: 751567 - DNA, 15 bp, Homo sapiens
aagtaagtaaggtgt

SEQ ID NO: 751568 - DNA, 15 bp, Homo sapiens
agtaagtaaggtgta

SEQ ID NO: 751569 - DNA, 15 bp, Homo sapiens
gtaagtaaggtgtag

SEQ ID NO: 751570 - DNA, 15 bp, Homo sapiens
taagtaaggtgtagg

SEQ ID NO: 751571 - DNA, 15 bp, Homo sapiens
aagtaaggtgtaggc

SEQ ID NO: 751572 - DNA, 15 bp, Homo sapiens
agtaaggtgtaggca

SEQ ID NO: 751573 - DNA, 15 bp, Homo sapiens
gtaaggtgtaggcat

SEQ ID NO: 751574 - DNA, 15 bp, Homo sapiens
taaggtgtaggcatt

SEQ ID NO: 751575 - DNA, 15 bp, Homo sapiens
aaggtgtaggcatta

SEQ ID NO: 751576 - DNA, 15 bp, Homo sapiens
aggtgtaggcattat

SEQ ID NO: 751577 - DNA, 15 bp, Homo sapiens
ggtgtaggcattata

SEQ ID NO: 751578 - DNA, 15 bp, Homo sapiens
gtgtaggcattatat

SEQ ID NO: 751579 - DNA, 15 bp, Homo sapiens
tgtaggcattatatt

SEQ ID NO: 751580 - DNA, 15 bp, Homo sapiens
gtaggcattatattc

SEQ ID NO: 751581 - DNA, 15 bp, Homo sapiens
taggcattatattcc

SEQ ID NO: 751582 - DNA, 15 bp, Homo sapiens
aggcattatattcca

SEQ ID NO: 751583 - DNA, 15 bp, Homo sapiens
ggcattatattccaa

SEQ ID NO: 751584 - DNA, 15 bp, Homo sapiens
gcattatattccaaa

SEQ ID NO: 751585 - DNA, 15 bp, Homo sapiens
cattatattccaaac

SEQ ID NO: 751586 - DNA, 15 bp, Homo sapiens
attatattccaaact

SEQ ID NO: 751587 - DNA, 15 bp, Homo sapiens
ttatattccaaacta

SEQ ID NO: 751588 - DNA, 15 bp, Homo sapiens
tatattccaaactac

SEQ ID NO: 751589 - DNA, 15 bp, Homo sapiens
atattccaaactact

SEQ ID NO: 751590 - DNA, 15 bp, Homo sapiens
tattccaaactactc

SEQ ID NO: 751591 - DNA, 15 bp, Homo sapiens
attccaaactactct

SEQ ID NO: 751592 - DNA, 15 bp, Homo sapiens
ttccaaactactctt

SEQ ID NO: 751593 - DNA, 15 bp, Homo sapiens
tccaaactactcttt

SEQ ID NO: 751594 - DNA, 15 bp, Homo sapiens
ccaaactactctttc

SEQ ID NO: 751595 - DNA, 15 bp, Homo sapiens
caaactactctttca

SEQ ID NO: 751596 - DNA, 15 bp, Homo sapiens
aaactactctttcaa

SEQ ID NO: 751597 - DNA, 15 bp, Homo sapiens
aactactctttcaaa

SEQ ID NO: 751598 - DNA, 15 bp, Homo sapiens
actactctttcaaaa

SEQ ID NO: 751599 - DNA, 15 bp, Homo sapiens
ctactctttcaaaag

SEQ ID NO: 751600 - DNA, 15 bp, Homo sapiens
tactctttcaaaagt

SEQ ID NO: 751601 - DNA, 15 bp, Homo sapiens
actctttcaaaagtg

SEQ ID NO: 751602 - DNA, 15 bp, Homo sapiens
ctctttcaaaagtgt

SEQ ID NO: 751603 - DNA, 15 bp, Homo sapiens
tctttcaaaagtgtg

SEQ ID NO: 751604 - DNA, 15 bp, Homo sapiens
ctttcaaaagtgtga

SEQ ID NO: 751605 - DNA, 15 bp, Homo sapiens
tttcaaaagtgtgac

SEQ ID NO: 751606 - DNA, 15 bp, Homo sapiens
ttcaaaagtgtgact

SEQ ID NO: 751607 - DNA, 15 bp, Homo sapiens
tcaaaagtgtgactg

SEQ ID NO: 751608 - DNA, 15 bp, Homo sapiens
caaaagtgtgactgt

SEQ ID NO: 751609 - DNA, 15 bp, Homo sapiens
aaaagtgtgactgta

SEQ ID NO: 751610 - DNA, 15 bp, Homo sapiens
aaagtgtgactgtac

SEQ ID NO: 751611 - DNA, 15 bp, Homo sapiens
aagtgtgactgtact

SEQ ID NO: 751612 - DNA, 15 bp, Homo sapiens
agtgtgactgtactg

SEQ ID NO: 751613 - DNA, 15 bp, Homo sapiens
gtgtgactgtactgc

SEQ ID NO: 751614 - DNA, 15 bp, Homo sapiens
tgtgactgtactgca

SEQ ID NO: 751615 - DNA, 15 bp, Homo sapiens
gtgactgtactgcaa

SEQ ID NO: 751616 - DNA, 15 bp, Homo sapiens
tgactgtactgcaaa

SEQ ID NO: 751617 - DNA, 15 bp, Homo sapiens
gactgtactgcaaaa

SEQ ID NO: 751618 - DNA, 15 bp, Homo sapiens
actgtactgcaaaaa

SEQ ID NO: 751619 - DNA, 15 bp, Homo sapiens
ctgtactgcaaaaaa

SEQ ID NO: 751620 - DNA, 15 bp, Homo sapiens
tgtactgcaaaaaat

SEQ ID NO: 751621 - DNA, 15 bp, Homo sapiens
gtactgcaaaaaatg

SEQ ID NO: 751622 - DNA, 15 bp, Homo sapiens
tactgcaaaaaatgc

SEQ ID NO: 751623 - DNA, 15 bp, Homo sapiens
actgcaaaaaatgca

SEQ ID NO: 751624 - DNA, 15 bp, Homo sapiens
ctgcaaaaaatgcag

SEQ ID NO: 751625 - DNA, 15 bp, Homo sapiens
tgcaaaaaatgcaga

SEQ ID NO: 751626 - DNA, 15 bp, Homo sapiens
gcaaaaaatgcagat

SEQ ID NO: 751627 - DNA, 15 bp, Homo sapiens
caaaaaatgcagatg

SEQ ID NO: 751628 - DNA, 15 bp, Homo sapiens
aaaaaatgcagatgt

SEQ ID NO: 751629 - DNA, 15 bp, Homo sapiens
aaaaatgcagatgtt

SEQ ID NO: 751630 - DNA, 15 bp, Homo sapiens
aaaatgcagatgttg

SEQ ID NO: 751631 - DNA, 15 bp, Homo sapiens
aaatgcagatgttgt

SEQ ID NO: 751632 - DNA, 15 bp, Homo sapiens
aatgcagatgttgtg

SEQ ID NO: 751633 - DNA, 15 bp, Homo sapiens
atgcagatgttgtgg

SEQ ID NO: 751634 - DNA, 15 bp, Homo sapiens
tgcagatgttgtggg

SEQ ID NO: 751635 - DNA, 15 bp, Homo sapiens
gcagatgttgtgggt

SEQ ID NO: 751636 - DNA, 15 bp, Homo sapiens
cagatgttgtgggtt

SEQ ID NO: 751637 - DNA, 15 bp, Homo sapiens
agatgttgtgggttt

SEQ ID NO: 751638 - DNA, 15 bp, Homo sapiens
gatgttgtgggtttc

SEQ ID NO: 751639 - DNA, 15 bp, Homo sapiens
atgttgtgggtttca

SEQ ID NO: 751640 - DNA, 15 bp, Homo sapiens
tgttgtgggtttcaa

SEQ ID NO: 751641 - DNA, 15 bp, Homo sapiens
gttgtgggtttcaat

SEQ ID NO: 751642 - DNA, 15 bp, Homo sapiens
ttgtgggtttcaata

SEQ ID NO: 751643 - DNA, 15 bp, Homo sapiens
tgtgggtttcaataa

SEQ ID NO: 751644 - DNA, 15 bp, Homo sapiens
gtgggtttcaataaa

SEQ ID NO: 751645 - DNA, 15 bp, Homo sapiens
tgggtttcaataaat

SEQ ID NO: 751646 - DNA, 15 bp, Homo sapiens
gggtttcaataaatg

SEQ ID NO: 751647 - DNA, 15 bp, Homo sapiens
ggtttcaataaatgg

SEQ ID NO: 751648 - DNA, 15 bp, Homo sapiens
gtttcaataaatgga

SEQ ID NO: 751649 - DNA, 15 bp, Homo sapiens
tttcaataaatggat

SEQ ID NO: 751650 - DNA, 15 bp, Homo sapiens
ttcaataaatggatt

SEQ ID NO: 751651 - DNA, 15 bp, Homo sapiens
tcaataaatggattt

SEQ ID NO: 751652 - DNA, 15 bp, Homo sapiens
caataaatggatttc

SEQ ID NO: 751653 - DNA, 15 bp, Homo sapiens
aataaatggatttct

SEQ ID NO: 751654 - DNA, 15 bp, Homo sapiens
ataaatggatttctg

SEQ ID NO: 751655 - DNA, 15 bp, Homo sapiens
taaatggatttctgg

SEQ ID NO: 751656 - DNA, 15 bp, Homo sapiens
aaatggatttctggt

SEQ ID NO: 751657 - DNA, 15 bp, Homo sapiens
aatggatttctggta

SEQ ID NO: 751658 - DNA, 15 bp, Homo sapiens
atggatttctggtat

SEQ ID NO: 751659 - DNA, 15 bp, Homo sapiens
tggatttctggtatg

SEQ ID NO: 751660 - DNA, 15 bp, Homo sapiens
ggatttctggtatgt

SEQ ID NO: 751661 - DNA, 15 bp, Homo sapiens
gatttctggtatgtt

SEQ ID NO: 751662 - DNA, 15 bp, Homo sapiens
atttctggtatgttt

SEQ ID NO: 751663 - DNA, 15 bp, Homo sapiens
tttctggtatgtttc

SEQ ID NO: 751664 - DNA, 15 bp, Homo sapiens
ttctggtatgtttct

SEQ ID NO: 751665 - DNA, 15 bp, Homo sapiens
tctggtatgtttctc

SEQ ID NO: 751666 - DNA, 15 bp, Homo sapiens
ctggtatgtttctct

SEQ ID NO: 751667 - DNA, 15 bp, Homo sapiens
tggtatgtttctctg

SEQ ID NO: 751668 - DNA, 15 bp, Homo sapiens
ggtatgtttctctgg

SEQ ID NO: 751669 - DNA, 15 bp, Homo sapiens
gtatgtttctctggg

SEQ ID NO: 751670 - DNA, 15 bp, Homo sapiens
tatgtttctctggga

SEQ ID NO: 751671 - DNA, 15 bp, Homo sapiens
atgtttctctgggaa

SEQ ID NO: 751672 - DNA, 15 bp, Homo sapiens
tgtttctctgggaag

SEQ ID NO: 751673 - DNA, 15 bp, Homo sapiens
gtttctctgggaaga

SEQ ID NO: 751674 - DNA, 15 bp, Homo sapiens
tttctctgggaagaa

SEQ ID NO: 751675 - DNA, 15 bp, Homo sapiens
ttctctgggaagaat

SEQ ID NO: 751676 - DNA, 15 bp, Homo sapiens
tctctgggaagaatg

SEQ ID NO: 751677 - DNA, 15 bp, Homo sapiens
ctctgggaagaatgc

SEQ ID NO: 751678 - DNA, 15 bp, Homo sapiens
tctgggaagaatgct

SEQ ID NO: 751679 - DNA, 15 bp, Homo sapiens
ctgggaagaatgctt

SEQ ID NO: 751680 - DNA, 15 bp, Homo sapiens
tgggaagaatgcttc

SEQ ID NO: 751681 - DNA, 15 bp, Homo sapiens
gggaagaatgcttcc

SEQ ID NO: 751682 - DNA, 15 bp, Homo sapiens
ggaagaatgcttcct

SEQ ID NO: 751683 - DNA, 15 bp, Homo sapiens
gaagaatgcttcctg

SEQ ID NO: 751684 - DNA, 15 bp, Homo sapiens
aagaatgcttcctgt

SEQ ID NO: 751685 - DNA, 15 bp, Homo sapiens
agaatgcttcctgtt

SEQ ID NO: 751686 - DNA, 15 bp, Homo sapiens
gaatgcttcctgttt

SEQ ID NO: 751687 - DNA, 15 bp, Homo sapiens
aatgcttcctgttta

SEQ ID NO: 751688 - DNA, 15 bp, Homo sapiens
atgcttcctgtttat

SEQ ID NO: 751689 - DNA, 15 bp, Homo sapiens
tgcttcctgtttatt

SEQ ID NO: 751690 - DNA, 15 bp, Homo sapiens
gcttcctgtttattg

SEQ ID NO: 751691 - DNA, 15 bp, Homo sapiens
cttcctgtttattgg

SEQ ID NO: 751692 - DNA, 15 bp, Homo sapiens
ttcctgtttattggc

SEQ ID NO: 751693 - DNA, 15 bp, Homo sapiens
tcctgtttattggca

SEQ ID NO: 751694 - DNA, 15 bp, Homo sapiens
cctgtttattggcac

SEQ ID NO: 751695 - DNA, 15 bp, Homo sapiens
ctgtttattggcact

SEQ ID NO: 751696 - DNA, 15 bp, Homo sapiens
tgtttattggcactc

SEQ ID NO: 751697 - DNA, 15 bp, Homo sapiens
gtttattggcactcc

SEQ ID NO: 751698 - DNA, 15 bp, Homo sapiens
tttattggcactcct

SEQ ID NO: 751699 - DNA, 15 bp, Homo sapiens
ttattggcactcctc

SEQ ID NO: 751700 - DNA, 15 bp, Homo sapiens
tattggcactcctct

SEQ ID NO: 751701 - DNA, 15 bp, Homo sapiens
attggcactcctcta

SEQ ID NO: 751702 - DNA, 15 bp, Homo sapiens
ttggcactcctctaa

SEQ ID NO: 751703 - DNA, 15 bp, Homo sapiens
tggcactcctctaat

SEQ ID NO: 751704 - DNA, 15 bp, Homo sapiens
ggcactcctctaatg

SEQ ID NO: 751705 - DNA, 15 bp, Homo sapiens
gcactcctctaatgt

SEQ ID NO: 751706 - DNA, 15 bp, Homo sapiens
cactcctctaatgtg

SEQ ID NO: 751707 - DNA, 15 bp, Homo sapiens
actcctctaatgtgg

SEQ ID NO: 751708 - DNA, 15 bp, Homo sapiens
ctcctctaatgtgga

SEQ ID NO: 751709 - DNA, 15 bp, Homo sapiens
tcctctaatgtggag

SEQ ID NO: 751710 - DNA, 15 bp, Homo sapiens
cctctaatgtggagg

SEQ ID NO: 751711 - DNA, 15 bp, Homo sapiens
ctctaatgtggaggc

SEQ ID NO: 751712 - DNA, 15 bp, Homo sapiens
tctaatgtggaggca

SEQ ID NO: 751713 - DNA, 15 bp, Homo sapiens
ctaatgtggaggcag

SEQ ID NO: 751714 - DNA, 15 bp, Homo sapiens
taatgtggaggcagg

SEQ ID NO: 751715 - DNA, 15 bp, Homo sapiens
aatgtggaggcaggt

SEQ ID NO: 751716 - DNA, 15 bp, Homo sapiens
atgtggaggcaggtc

SEQ ID NO: 751717 - DNA, 15 bp, Homo sapiens
tgtggaggcaggtct

SEQ ID NO: 751718 - DNA, 15 bp, Homo sapiens
gtggaggcaggtctt

SEQ ID NO: 751719 - DNA, 15 bp, Homo sapiens
tggaggcaggtcttg

SEQ ID NO: 751720 - DNA, 15 bp, Homo sapiens
ggaggcaggtcttgc

SEQ ID NO: 751721 - DNA, 15 bp, Homo sapiens
gaggcaggtcttgct

SEQ ID NO: 751722 - DNA, 15 bp, Homo sapiens
aggcaggtcttgctg

SEQ ID NO: 751723 - DNA, 15 bp, Homo sapiens
ggcaggtcttgctgg

SEQ ID NO: 751724 - DNA, 15 bp, Homo sapiens
gcaggtcttgctgga

SEQ ID NO: 751725 - DNA, 15 bp, Homo sapiens
caggtcttgctggag

SEQ ID NO: 751726 - DNA, 15 bp, Homo sapiens
aggtcttgctggaga

SEQ ID NO: 751727 - DNA, 15 bp, Homo sapiens
ggtcttgctggagag

SEQ ID NO: 751728 - DNA, 15 bp, Homo sapiens
gtcttgctggagagc

SEQ ID NO: 751729 - DNA, 15 bp, Homo sapiens
tcttgctggagagct

SEQ ID NO: 751730 - DNA, 15 bp, Homo sapiens
cttgctggagagctg

SEQ ID NO: 751731 - DNA, 15 bp, Homo sapiens
ttgctggagagctgc

SEQ ID NO: 751732 - DNA, 15 bp, Homo sapiens
tgctggagagctgca

SEQ ID NO: 751733 - DNA, 15 bp, Homo sapiens
gctggagagctgcat

SEQ ID NO: 751734 - DNA, 15 bp, Homo sapiens
ctggagagctgcatt

SEQ ID NO: 751735 - DNA, 15 bp, Homo sapiens
tggagagctgcattc

SEQ ID NO: 751736 - DNA, 15 bp, Homo sapiens
ggagagctgcattca

SEQ ID NO: 751737 - DNA, 15 bp, Homo sapiens
gagagctgcattcaa

SEQ ID NO: 751738 - DNA, 15 bp, Homo sapiens
agagctgcattcaag

SEQ ID NO: 751739 - DNA, 15 bp, Homo sapiens
gagctgcattcaagt

SEQ ID NO: 751740 - DNA, 15 bp, Homo sapiens
agctgcattcaagtg

SEQ ID NO: 751741 - DNA, 15 bp, Homo sapiens
gctgcattcaagtga

SEQ ID NO: 751742 - DNA, 15 bp, Homo sapiens
ctgcattcaagtgag

SEQ ID NO: 751743 - DNA, 15 bp, Homo sapiens
tgcattcaagtgagg

SEQ ID NO: 751744 - DNA, 15 bp, Homo sapiens
gcattcaagtgaggg

SEQ ID NO: 751745 - DNA, 15 bp, Homo sapiens
cattcaagtgaggga

SEQ ID NO: 751746 - DNA, 15 bp, Homo sapiens
attcaagtgagggag

SEQ ID NO: 751747 - DNA, 15 bp, Homo sapiens
ttcaagtgagggagg

SEQ ID NO: 751748 - DNA, 15 bp, Homo sapiens
tcaagtgagggaggg

SEQ ID NO: 751749 - DNA, 15 bp, Homo sapiens
caagtgagggagggg

SEQ ID NO: 751750 - DNA, 15 bp, Homo sapiens
aagtgagggaggggt

SEQ ID NO: 751751 - DNA, 15 bp, Homo sapiens
agtgagggaggggtg

SEQ ID NO: 751752 - DNA, 15 bp, Homo sapiens
gtgagggaggggtgg

SEQ ID NO: 751753 - DNA, 15 bp, Homo sapiens
tgagggaggggtggg

SEQ ID NO: 751754 - DNA, 15 bp, Homo sapiens
gagggaggggtggga

SEQ ID NO: 751755 - DNA, 15 bp, Homo sapiens
agggaggggtgggaa

SEQ ID NO: 751756 - DNA, 15 bp, Homo sapiens
gggaggggtgggaag

SEQ ID NO: 751757 - DNA, 15 bp, Homo sapiens
ggaggggtgggaagg

SEQ ID NO: 751758 - DNA, 15 bp, Homo sapiens
gaggggtgggaagga

SEQ ID NO: 751759 - DNA, 15 bp, Homo sapiens
aggggtgggaaggaa

SEQ ID NO: 751760 - DNA, 15 bp, Homo sapiens
ggggtgggaaggaag

SEQ ID NO: 751761 - DNA, 15 bp, Homo sapiens
gggtgggaaggaaga

SEQ ID NO: 751762 - DNA, 15 bp, Homo sapiens
ggtgggaaggaagaa

SEQ ID NO: 751763 - DNA, 15 bp, Homo sapiens
gtgggaaggaagaaa

SEQ ID NO: 751764 - DNA, 15 bp, Homo sapiens
tgggaaggaagaaag

SEQ ID NO: 751765 - DNA, 15 bp, Homo sapiens
gggaaggaagaaagg

SEQ ID NO: 751766 - DNA, 15 bp, Homo sapiens
ggaaggaagaaaggc

SEQ ID NO: 751767 - DNA, 15 bp, Homo sapiens
gaaggaagaaaggca

SEQ ID NO: 751768 - DNA, 15 bp, Homo sapiens
aaggaagaaaggcac

SEQ ID NO: 751769 - DNA, 15 bp, Homo sapiens
aggaagaaaggcacc

SEQ ID NO: 751770 - DNA, 15 bp, Homo sapiens
ggaagaaaggcaccc

SEQ ID NO: 751771 - DNA, 15 bp, Homo sapiens
gaagaaaggcaccca

SEQ ID NO: 751772 - DNA, 15 bp, Homo sapiens
aagaaaggcacccac

SEQ ID NO: 751773 - DNA, 15 bp, Homo sapiens
agaaaggcacccaca

SEQ ID NO: 751774 - DNA, 15 bp, Homo sapiens
gaaaggcacccacag

SEQ ID NO: 751775 - DNA, 15 bp, Homo sapiens
aaaggcacccacaga

SEQ ID NO: 751776 - DNA, 15 bp, Homo sapiens
aaggcacccacagag

SEQ ID NO: 751777 - DNA, 15 bp, Homo sapiens
aggcacccacagagc

SEQ ID NO: 751778 - DNA, 15 bp, Homo sapiens
ggcacccacagagct

SEQ ID NO: 751779 - DNA, 15 bp, Homo sapiens
gcacccacagagctt

SEQ ID NO: 751780 - DNA, 15 bp, Homo sapiens
cacccacagagcttc

SEQ ID NO: 751781 - DNA, 15 bp, Homo sapiens
acccacagagcttct

SEQ ID NO: 751782 - DNA, 15 bp, Homo sapiens
cccacagagcttctg

SEQ ID NO: 751783 - DNA, 15 bp, Homo sapiens
ccacagagcttctgc

SEQ ID NO: 751784 - DNA, 15 bp, Homo sapiens
cacagagcttctgcc

SEQ ID NO: 751785 - DNA, 15 bp, Homo sapiens
acagagcttctgcct

SEQ ID NO: 751786 - DNA, 15 bp, Homo sapiens
cagagcttctgcctt

SEQ ID NO: 751787 - DNA, 15 bp, Homo sapiens
agagcttctgccttg

SEQ ID NO: 751788 - DNA, 15 bp, Homo sapiens
gagcttctgccttgt

SEQ ID NO: 751789 - DNA, 15 bp, Homo sapiens
agcttctgccttgta

SEQ ID NO: 751790 - DNA, 15 bp, Homo sapiens
gcttctgccttgtaa

SEQ ID NO: 751791 - DNA, 15 bp, Homo sapiens
cttctgccttgtaaa

SEQ ID NO: 751792 - DNA, 15 bp, Homo sapiens
ttctgccttgtaaat

SEQ ID NO: 751793 - DNA, 15 bp, Homo sapiens
tctgccttgtaaata

SEQ ID NO: 751794 - DNA, 15 bp, Homo sapiens
ctgccttgtaaatat

SEQ ID NO: 751795 - DNA, 15 bp, Homo sapiens
tgccttgtaaatata

SEQ ID NO: 751796 - DNA, 15 bp, Homo sapiens
gccttgtaaatataa

SEQ ID NO: 751797 - DNA, 15 bp, Homo sapiens
ccttgtaaatataat

SEQ ID NO: 751798 - DNA, 15 bp, Homo sapiens
cttgtaaatataatc

SEQ ID NO: 751799 - DNA, 15 bp, Homo sapiens
ttgtaaatataatct

SEQ ID NO: 751800 - DNA, 15 bp, Homo sapiens
tgtaaatataatcta

SEQ ID NO: 751801 - DNA, 15 bp, Homo sapiens
gtaaatataatctaa

SEQ ID NO: 751802 - DNA, 15 bp, Homo sapiens
taaatataatctaat

SEQ ID NO: 751803 - DNA, 15 bp, Homo sapiens
aaatataatctaatt

SEQ ID NO: 751804 - DNA, 15 bp, Homo sapiens
aatataatctaattt

SEQ ID NO: 751805 - DNA, 15 bp, Homo sapiens
atataatctaatttg

SEQ ID NO: 751806 - DNA, 15 bp, Homo sapiens
tataatctaatttgt

SEQ ID NO: 751807 - DNA, 15 bp, Homo sapiens
ataatctaatttgtg

SEQ ID NO: 751808 - DNA, 15 bp, Homo sapiens
taatctaatttgtgc

SEQ ID NO: 751809 - DNA, 15 bp, Homo sapiens
aatctaatttgtgct

SEQ ID NO: 751810 - DNA, 15 bp, Homo sapiens
atctaatttgtgctg

SEQ ID NO: 751811 - DNA, 15 bp, Homo sapiens
tctaatttgtgctgg

SEQ ID NO: 751812 - DNA, 15 bp, Homo sapiens
ctaatttgtgctggg

SEQ ID NO: 751813 - DNA, 15 bp, Homo sapiens
taatttgtgctggga

SEQ ID NO: 751814 - DNA, 15 bp, Homo sapiens
aatttgtgctgggat

SEQ ID NO: 751815 - DNA, 15 bp, Homo sapiens
atttgtgctgggatc

SEQ ID NO: 751816 - DNA, 15 bp, Homo sapiens
tttgtgctgggatca

SEQ ID NO: 751817 - DNA, 15 bp, Homo sapiens
ttgtgctgggatcag

SEQ ID NO: 751818 - DNA, 15 bp, Homo sapiens
tgtgctgggatcaga

SEQ ID NO: 751819 - DNA, 15 bp, Homo sapiens
gtgctgggatcagac

SEQ ID NO: 751820 - DNA, 15 bp, Homo sapiens
tgctgggatcagaca

SEQ ID NO: 751821 - DNA, 15 bp, Homo sapiens
gctgggatcagacag

SEQ ID NO: 751822 - DNA, 15 bp, Homo sapiens
ctgggatcagacaga

SEQ ID NO: 751823 - DNA, 15 bp, Homo sapiens
tgggatcagacagat

SEQ ID NO: 751824 - DNA, 15 bp, Homo sapiens
gggatcagacagatc

SEQ ID NO: 751825 - DNA, 15 bp, Homo sapiens
ggatcagacagatca

SEQ ID NO: 751826 - DNA, 15 bp, Homo sapiens
gatcagacagatcag

SEQ ID NO: 751827 - DNA, 15 bp, Homo sapiens
atcagacagatcagt

SEQ ID NO: 751828 - DNA, 15 bp, Homo sapiens
tcagacagatcagtc

SEQ ID NO: 751829 - DNA, 15 bp, Homo sapiens
cagacagatcagtcc

SEQ ID NO: 751830 - DNA, 15 bp, Homo sapiens
agacagatcagtcca

SEQ ID NO: 751831 - DNA, 15 bp, Homo sapiens
gacagatcagtccaa

SEQ ID NO: 751832 - DNA, 15 bp, Homo sapiens
acagatcagtccaag

SEQ ID NO: 751833 - DNA, 15 bp, Homo sapiens
cagatcagtccaaga

SEQ ID NO: 751834 - DNA, 15 bp, Homo sapiens
agatcagtccaagag

SEQ ID NO: 751835 - DNA, 15 bp, Homo sapiens
gatcagtccaagagt

SEQ ID NO: 751836 - DNA, 15 bp, Homo sapiens
atcagtccaagagtg

SEQ ID NO: 751837 - DNA, 15 bp, Homo sapiens
tcagtccaagagtgg

SEQ ID NO: 751838 - DNA, 15 bp, Homo sapiens
cagtccaagagtggt

SEQ ID NO: 751839 - DNA, 15 bp, Homo sapiens
agtccaagagtggta

SEQ ID NO: 751840 - DNA, 15 bp, Homo sapiens
gtccaagagtggtag

SEQ ID NO: 751841 - DNA, 15 bp, Homo sapiens
tccaagagtggtagt

SEQ ID NO: 751842 - DNA, 15 bp, Homo sapiens
ccaagagtggtagta

SEQ ID NO: 751843 - DNA, 15 bp, Homo sapiens
caagagtggtagtat

SEQ ID NO: 751844 - DNA, 15 bp, Homo sapiens
aagagtggtagtatt

SEQ ID NO: 751845 - DNA, 15 bp, Homo sapiens
agagtggtagtattt

SEQ ID NO: 751846 - DNA, 15 bp, Homo sapiens
gagtggtagtatttt

SEQ ID NO: 751847 - DNA, 15 bp, Homo sapiens
agtggtagtattttt

SEQ ID NO: 751848 - DNA, 15 bp, Homo sapiens
gtggtagtatttttt

SEQ ID NO: 751849 - DNA, 15 bp, Homo sapiens
tggtagtattttttt

SEQ ID NO: 751850 - DNA, 15 bp, Homo sapiens
ggtagtattttttta

SEQ ID NO: 751851 - DNA, 15 bp, Homo sapiens
gtagtatttttttat

SEQ ID NO: 751852 - DNA, 15 bp, Homo sapiens
tagtatttttttatg

SEQ ID NO: 751853 - DNA, 15 bp, Homo sapiens
agtatttttttatgt

SEQ ID NO: 751854 - DNA, 15 bp, Homo sapiens
gtatttttttatgtt

SEQ ID NO: 751855 - DNA, 15 bp, Homo sapiens
tatttttttatgttt

SEQ ID NO: 751856 - DNA, 15 bp, Homo sapiens
atttttttatgtttt

SEQ ID NO: 751857 - DNA, 15 bp, Homo sapiens
tttttttatgttttt

SEQ ID NO: 751858 - DNA, 15 bp, Homo sapiens
ttttttatgttttta

SEQ ID NO: 751859 - DNA, 15 bp, Homo sapiens
tttttatgtttttat

SEQ ID NO: 751860 - DNA, 15 bp, Homo sapiens
ttttatgtttttata

SEQ ID NO: 751861 - DNA, 15 bp, Homo sapiens
tttatgtttttatat

SEQ ID NO: 751862 - DNA, 15 bp, Homo sapiens
ttatgtttttatata

SEQ ID NO: 751863 - DNA, 15 bp, Homo sapiens
tatgtttttatatat

SEQ ID NO: 751864 - DNA, 15 bp, Homo sapiens
atgtttttatatatt

SEQ ID NO: 751865 - DNA, 15 bp, Homo sapiens
tgtttttatatattt

SEQ ID NO: 751866 - DNA, 15 bp, Homo sapiens
gtttttatatatttt

SEQ ID NO: 751867 - DNA, 15 bp, Homo sapiens
tttttatatattttt

SEQ ID NO: 751868 - DNA, 15 bp, Homo sapiens
ttttatatatttttt

SEQ ID NO: 751869 - DNA, 15 bp, Homo sapiens
tttatatattttttt

SEQ ID NO: 751870 - DNA, 15 bp, Homo sapiens
ttatatattttttta

SEQ ID NO: 751871 - DNA, 15 bp, Homo sapiens
tatatatttttttat

SEQ ID NO: 751872 - DNA, 15 bp, Homo sapiens
atatatttttttatt

SEQ ID NO: 751873 - DNA, 15 bp, Homo sapiens
tatatttttttattt

SEQ ID NO: 751874 - DNA, 15 bp, Homo sapiens
atatttttttatttt

SEQ ID NO: 751875 - DNA, 15 bp, Homo sapiens
tatttttttattttg

SEQ ID NO: 751876 - DNA, 15 bp, Homo sapiens
atttttttattttga

SEQ ID NO: 751877 - DNA, 15 bp, Homo sapiens
tttttttattttgag

SEQ ID NO: 751878 - DNA, 15 bp, Homo sapiens
ttttttattttgaga

SEQ ID NO: 751879 - DNA, 15 bp, Homo sapiens
tttttattttgagac

SEQ ID NO: 751880 - DNA, 15 bp, Homo sapiens
ttttattttgagaca

SEQ ID NO: 751881 - DNA, 15 bp, Homo sapiens
tttattttgagacaa

SEQ ID NO: 751882 - DNA, 15 bp, Homo sapiens
ttattttgagacaag

SEQ ID NO: 751883 - DNA, 15 bp, Homo sapiens
tattttgagacaagg

SEQ ID NO: 751884 - DNA, 15 bp, Homo sapiens
attttgagacaaggt

SEQ ID NO: 751885 - DNA, 15 bp, Homo sapiens
ttttgagacaaggtt

SEQ ID NO: 751886 - DNA, 15 bp, Homo sapiens
gacaaggtttcactg

SEQ ID NO: 751887 - DNA, 15 bp, Homo sapiens
acaaggtttcactgt

SEQ ID NO: 751888 - DNA, 15 bp, Homo sapiens
caaggtttcactgtt

SEQ ID NO: 751889 - DNA, 15 bp, Homo sapiens
aaggtttcactgttt

SEQ ID NO: 751890 - DNA, 15 bp, Homo sapiens
aggtttcactgtttt

SEQ ID NO: 751891 - DNA, 15 bp, Homo sapiens
ggtttcactgttttg

SEQ ID NO: 751892 - DNA, 15 bp, Homo sapiens
gtttcactgttttgc

SEQ ID NO: 751893 - DNA, 15 bp, Homo sapiens
tttcactgttttgcc

SEQ ID NO: 751894 - DNA, 15 bp, Homo sapiens
ttcactgttttgcca

SEQ ID NO: 751895 - DNA, 15 bp, Homo sapiens
tcactgttttgccag

SEQ ID NO: 751896 - DNA, 15 bp, Homo sapiens
cactgttttgccagg

SEQ ID NO: 751897 - DNA, 15 bp, Homo sapiens
actgttttgccaggc

SEQ ID NO: 751898 - DNA, 15 bp, Homo sapiens
ctgttttgccaggct

SEQ ID NO: 751899 - DNA, 15 bp, Homo sapiens
tgttttgccaggctg

SEQ ID NO: 751900 - DNA, 15 bp, Homo sapiens
gttttgccaggctgg

SEQ ID NO: 751901 - DNA, 15 bp, Homo sapiens
ttttgccaggctgga

SEQ ID NO: 751902 - DNA, 15 bp, Homo sapiens
tttgccaggctggag

SEQ ID NO: 751903 - DNA, 15 bp, Homo sapiens
ttgccaggctggagt

SEQ ID NO: 751904 - DNA, 15 bp, Homo sapiens
tgccaggctggagtg

SEQ ID NO: 751905 - DNA, 15 bp, Homo sapiens
gccaggctggagtgc

SEQ ID NO: 751906 - DNA, 15 bp, Homo sapiens
gagtgcagtggcacg

SEQ ID NO: 751907 - DNA, 15 bp, Homo sapiens
agtgcagtggcacga

SEQ ID NO: 751908 - DNA, 15 bp, Homo sapiens
gtgcagtggcacgat

SEQ ID NO: 751909 - DNA, 15 bp, Homo sapiens
tgcagtggcacgatc

SEQ ID NO: 751910 - DNA, 15 bp, Homo sapiens
gcagtggcacgatct

SEQ ID NO: 751911 - DNA, 15 bp, Homo sapiens
cagtggcacgatctt

SEQ ID NO: 751912 - DNA, 15 bp, Homo sapiens
agtggcacgatcttg

SEQ ID NO: 751913 - DNA, 15 bp, Homo sapiens
gtggcacgatcttgg

SEQ ID NO: 751914 - DNA, 15 bp, Homo sapiens
tggcacgatcttggc

SEQ ID NO: 751915 - DNA, 15 bp, Homo sapiens
ggcacgatcttggct

SEQ ID NO: 751916 - DNA, 15 bp, Homo sapiens
gcacgatcttggctc

SEQ ID NO: 751917 - DNA, 15 bp, Homo sapiens
cacgatcttggctca

SEQ ID NO: 751918 - DNA, 15 bp, Homo sapiens
acgatcttggctcat

SEQ ID NO: 751919 - DNA, 15 bp, Homo sapiens
cgatcttggctcatt

SEQ ID NO: 751920 - DNA, 15 bp, Homo sapiens
gatcttggctcattg

SEQ ID NO: 751921 - DNA, 15 bp, Homo sapiens
atcttggctcattgc

SEQ ID NO: 751922 - DNA, 15 bp, Homo sapiens
tcttggctcattgca

SEQ ID NO: 751923 - DNA, 15 bp, Homo sapiens
cttggctcattgcac

SEQ ID NO: 751924 - DNA, 15 bp, Homo sapiens
ttggctcattgcacc

SEQ ID NO: 751925 - DNA, 15 bp, Homo sapiens
tggctcattgcaccc

SEQ ID NO: 751926 - DNA, 15 bp, Homo sapiens
ggctcattgcaccct

SEQ ID NO: 751927 - DNA, 15 bp, Homo sapiens
gctcattgcaccctc

SEQ ID NO: 751928 - DNA, 15 bp, Homo sapiens
ctcattgcaccctct

SEQ ID NO: 751929 - DNA, 15 bp, Homo sapiens
tcattgcaccctctg

SEQ ID NO: 751930 - DNA, 15 bp, Homo sapiens
cattgcaccctctgc

SEQ ID NO: 751931 - DNA, 15 bp, Homo sapiens
attgcaccctctgcc

SEQ ID NO: 751932 - DNA, 15 bp, Homo sapiens
ttgcaccctctgcct

SEQ ID NO: 751933 - DNA, 15 bp, Homo sapiens
tgcaccctctgcctc

SEQ ID NO: 751934 - DNA, 15 bp, Homo sapiens
gcaccctctgcctcc

SEQ ID NO: 751935 - DNA, 15 bp, Homo sapiens
caccctctgcctccc

SEQ ID NO: 751936 - DNA, 15 bp, Homo sapiens
accctctgcctccca

SEQ ID NO: 751937 - DNA, 15 bp, Homo sapiens
ccctctgcctcccag

SEQ ID NO: 751938 - DNA, 15 bp, Homo sapiens
cctctgcctcccagg

SEQ ID NO: 751939 - DNA, 15 bp, Homo sapiens
ctctgcctcccaggt

SEQ ID NO: 751940 - DNA, 15 bp, Homo sapiens
tctgcctcccaggtt

SEQ ID NO: 751941 - DNA, 15 bp, Homo sapiens
ctgcctcccaggttc

SEQ ID NO: 751942 - DNA, 15 bp, Homo sapiens
tgcctcccaggttca

SEQ ID NO: 751943 - DNA, 15 bp, Homo sapiens
gcctcccaggttcaa

SEQ ID NO: 751944 - DNA, 15 bp, Homo sapiens
cctcccaggttcaag

SEQ ID NO: 751945 - DNA, 15 bp, Homo sapiens
ctcccaggttcaagc

SEQ ID NO: 751946 - DNA, 15 bp, Homo sapiens
tcccaggttcaagca

SEQ ID NO: 751947 - DNA, 15 bp, Homo sapiens
cccaggttcaagcaa

SEQ ID NO: 751948 - DNA, 15 bp, Homo sapiens
ccaggttcaagcaat

SEQ ID NO: 751949 - DNA, 15 bp, Homo sapiens
agcaattctcctgcc

SEQ ID NO: 751950 - DNA, 15 bp, Homo sapiens
gcaattctcctgcct

SEQ ID NO: 751951 - DNA, 15 bp, Homo sapiens
caattctcctgcctc

SEQ ID NO: 751952 - DNA, 15 bp, Homo sapiens
aattctcctgcctca

SEQ ID NO: 751953 - DNA, 15 bp, Homo sapiens
agcctcccaagtagg

SEQ ID NO: 751954 - DNA, 15 bp, Homo sapiens
gcctcccaagtaggt

SEQ ID NO: 751955 - DNA, 15 bp, Homo sapiens
cctcccaagtaggtg

SEQ ID NO: 751956 - DNA, 15 bp, Homo sapiens
ctcccaagtaggtgg

SEQ ID NO: 751957 - DNA, 15 bp, Homo sapiens
tcccaagtaggtggg

SEQ ID NO: 751958 - DNA, 15 bp, Homo sapiens
cccaagtaggtggga

SEQ ID NO: 751959 - DNA, 15 bp, Homo sapiens
ccaagtaggtgggac

SEQ ID NO: 751960 - DNA, 15 bp, Homo sapiens
caagtaggtgggact

SEQ ID NO: 751961 - DNA, 15 bp, Homo sapiens
aagtaggtgggacta

SEQ ID NO: 751962 - DNA, 15 bp, Homo sapiens
agtaggtgggactac

SEQ ID NO: 751963 - DNA, 15 bp, Homo sapiens
gtaggtgggactaca

SEQ ID NO: 751964 - DNA, 15 bp, Homo sapiens
taggtgggactacag

SEQ ID NO: 751965 - DNA, 15 bp, Homo sapiens
aggtgggactacagg

SEQ ID NO: 751966 - DNA, 15 bp, Homo sapiens
ggtgggactacaggc

SEQ ID NO: 751967 - DNA, 15 bp, Homo sapiens
gtgggactacaggca

SEQ ID NO: 751968 - DNA, 15 bp, Homo sapiens
gggactacaggcatg

SEQ ID NO: 751969 - DNA, 15 bp, Homo sapiens
ggactacaggcatgt

SEQ ID NO: 751970 - DNA, 15 bp, Homo sapiens
gactacaggcatgtg

SEQ ID NO: 751971 - DNA, 15 bp, Homo sapiens
actacaggcatgtgc

SEQ ID NO: 751972 - DNA, 15 bp, Homo sapiens
ctacaggcatgtgcc

SEQ ID NO: 751973 - DNA, 15 bp, Homo sapiens
acaggcatgtgccac

SEQ ID NO: 751974 - DNA, 15 bp, Homo sapiens
caggcatgtgccacc

SEQ ID NO: 751975 - DNA, 15 bp, Homo sapiens
aggcatgtgccacca

SEQ ID NO: 751976 - DNA, 15 bp, Homo sapiens
ggcatgtgccaccac

SEQ ID NO: 751977 - DNA, 15 bp, Homo sapiens
gcatgtgccaccacg

SEQ ID NO: 751978 - DNA, 15 bp, Homo sapiens
catgtgccaccacgc

SEQ ID NO: 751979 - DNA, 15 bp, Homo sapiens
atgtgccaccacgcc

SEQ ID NO: 751980 - DNA, 15 bp, Homo sapiens
tgtgccaccacgccc

SEQ ID NO: 751981 - DNA, 15 bp, Homo sapiens
gtgccaccacgccca

SEQ ID NO: 751982 - DNA, 15 bp, Homo sapiens
ccagctaattttttt

SEQ ID NO: 751983 - DNA, 15 bp, Homo sapiens
cagctaatttttttg

SEQ ID NO: 751984 - DNA, 15 bp, Homo sapiens
agctaatttttttgt

SEQ ID NO: 751985 - DNA, 15 bp, Homo sapiens
gctaatttttttgta

SEQ ID NO: 751986 - DNA, 15 bp, Homo sapiens
ctaatttttttgtat

SEQ ID NO: 751987 - DNA, 15 bp, Homo sapiens
taatttttttgtatc

SEQ ID NO: 751988 - DNA, 15 bp, Homo sapiens
aatttttttgtatct

SEQ ID NO: 751989 - DNA, 15 bp, Homo sapiens
atttttttgtatctt

SEQ ID NO: 751990 - DNA, 15 bp, Homo sapiens
tttttttgtatcttt

SEQ ID NO: 751991 - DNA, 15 bp, Homo sapiens
ttttttgtatcttta

SEQ ID NO: 751992 - DNA, 15 bp, Homo sapiens
tttttgtatctttag

SEQ ID NO: 751993 - DNA, 15 bp, Homo sapiens
ttttgtatctttagt

SEQ ID NO: 751994 - DNA, 15 bp, Homo sapiens
tttgtatctttagta

SEQ ID NO: 751995 - DNA, 15 bp, Homo sapiens
ttgtatctttagtag

SEQ ID NO: 751996 - DNA, 15 bp, Homo sapiens
tgtatctttagtaga

SEQ ID NO: 751997 - DNA, 15 bp, Homo sapiens
gtatctttagtagag

SEQ ID NO: 751998 - DNA, 15 bp, Homo sapiens
tatctttagtagaga

SEQ ID NO: 751999 - DNA, 15 bp, Homo sapiens
atctttagtagagac

SEQ ID NO: 752000 - DNA, 15 bp, Homo sapiens
tctttagtagagaca

SEQ ID NO: 752001 - DNA, 15 bp, Homo sapiens
ctttagtagagacag

SEQ ID NO: 752002 - DNA, 15 bp, Homo sapiens
gtagagacagagttt

SEQ ID NO: 752003 - DNA, 15 bp, Homo sapiens
gagacagagtttcac

SEQ ID NO: 752004 - DNA, 15 bp, Homo sapiens
agacagagtttcacc

SEQ ID NO: 752005 - DNA, 15 bp, Homo sapiens
gacagagtttcacca

SEQ ID NO: 752006 - DNA, 15 bp, Homo sapiens
acagagtttcaccat

SEQ ID NO: 752007 - DNA, 15 bp, Homo sapiens
cagagtttcaccatg

SEQ ID NO: 752008 - DNA, 15 bp, Homo sapiens
agagtttcaccatgt

SEQ ID NO: 752009 - DNA, 15 bp, Homo sapiens
gagtttcaccatgtt

SEQ ID NO: 752010 - DNA, 15 bp, Homo sapiens
agtttcaccatgttg

SEQ ID NO: 752011 - DNA, 15 bp, Homo sapiens
tttcaccatgttggt

SEQ ID NO: 752012 - DNA, 15 bp, Homo sapiens
ttcaccatgttggtc

SEQ ID NO: 752013 - DNA, 15 bp, Homo sapiens
tcaccatgttggtca

SEQ ID NO: 752014 - DNA, 15 bp, Homo sapiens
caccatgttggtcag

SEQ ID NO: 752015 - DNA, 15 bp, Homo sapiens
accatgttggtcagg

SEQ ID NO: 752016 - DNA, 15 bp, Homo sapiens
ccatgttggtcagga

SEQ ID NO: 752017 - DNA, 15 bp, Homo sapiens
catgttggtcaggat

SEQ ID NO: 752018 - DNA, 15 bp, Homo sapiens
atgttggtcaggatg

SEQ ID NO: 752019 - DNA, 15 bp, Homo sapiens
tgttggtcaggatgg

SEQ ID NO: 752020 - DNA, 15 bp, Homo sapiens
gttggtcaggatggt

SEQ ID NO: 752021 - DNA, 15 bp, Homo sapiens
ttggtcaggatggtc

SEQ ID NO: 752022 - DNA, 15 bp, Homo sapiens
tggtcaggatggtct

SEQ ID NO: 752023 - DNA, 15 bp, Homo sapiens
ggtcaggatggtctc

SEQ ID NO: 752024 - DNA, 15 bp, Homo sapiens
gtcaggatggtctcg

SEQ ID NO: 752025 - DNA, 15 bp, Homo sapiens
tcaggatggtctcga

SEQ ID NO: 752026 - DNA, 15 bp, Homo sapiens
atggtctcgatctct

SEQ ID NO: 752027 - DNA, 15 bp, Homo sapiens
tggtctcgatctctt

SEQ ID NO: 752028 - DNA, 15 bp, Homo sapiens
ggtctcgatctcttg

SEQ ID NO: 752029 - DNA, 15 bp, Homo sapiens
gtctcgatctcttga

SEQ ID NO: 752030 - DNA, 15 bp, Homo sapiens
tctcgatctcttgac

SEQ ID NO: 752031 - DNA, 15 bp, Homo sapiens
ctcgatctcttgacc

SEQ ID NO: 752032 - DNA, 15 bp, Homo sapiens
tcgatctcttgacct

SEQ ID NO: 752033 - DNA, 15 bp, Homo sapiens
cgatctcttgacctc

SEQ ID NO: 752034 - DNA, 15 bp, Homo sapiens
gatctcttgacctca

SEQ ID NO: 752035 - DNA, 15 bp, Homo sapiens
atctcttgacctcat

SEQ ID NO: 752036 - DNA, 15 bp, Homo sapiens
tctcttgacctcatg

SEQ ID NO: 752037 - DNA, 15 bp, Homo sapiens
ctcttgacctcatga

SEQ ID NO: 752038 - DNA, 15 bp, Homo sapiens
tcttgacctcatgat

SEQ ID NO: 752039 - DNA, 15 bp, Homo sapiens
cttgacctcatgatt

SEQ ID NO: 752040 - DNA, 15 bp, Homo sapiens
ttgacctcatgattc

SEQ ID NO: 752041 - DNA, 15 bp, Homo sapiens
tgacctcatgattcg

SEQ ID NO: 752042 - DNA, 15 bp, Homo sapiens
gacctcatgattcgt

SEQ ID NO: 752043 - DNA, 15 bp, Homo sapiens
acctcatgattcgtc

SEQ ID NO: 752044 - DNA, 15 bp, Homo sapiens
cctcatgattcgtcc

SEQ ID NO: 752045 - DNA, 15 bp, Homo sapiens
ctcatgattcgtccg

SEQ ID NO: 752046 - DNA, 15 bp, Homo sapiens
tcatgattcgtccgg

SEQ ID NO: 752047 - DNA, 15 bp, Homo sapiens
catgattcgtccggc

SEQ ID NO: 752048 - DNA, 15 bp, Homo sapiens
atgattcgtccggcc

SEQ ID NO: 752049 - DNA, 15 bp, Homo sapiens
tgattcgtccggcct

SEQ ID NO: 752050 - DNA, 15 bp, Homo sapiens
gattcgtccggcctt

SEQ ID NO: 752051 - DNA, 15 bp, Homo sapiens
attcgtccggccttg

SEQ ID NO: 752052 - DNA, 15 bp, Homo sapiens
ttcgtccggccttgg

SEQ ID NO: 752053 - DNA, 15 bp, Homo sapiens
tcgtccggccttggc

SEQ ID NO: 752054 - DNA, 15 bp, Homo sapiens
cgtccggccttggcc

SEQ ID NO: 752055 - DNA, 15 bp, Homo sapiens
gtccggccttggcct

SEQ ID NO: 752056 - DNA, 15 bp, Homo sapiens
tccggccttggcctc

SEQ ID NO: 752057 - DNA, 15 bp, Homo sapiens
ccggccttggcctcc

SEQ ID NO: 752058 - DNA, 15 bp, Homo sapiens
cggccttggcctccc

SEQ ID NO: 752059 - DNA, 15 bp, Homo sapiens
ggccttggcctccca

SEQ ID NO: 752060 - DNA, 15 bp, Homo sapiens
tggcctcccaaagtt

SEQ ID NO: 752061 - DNA, 15 bp, Homo sapiens
ggcctcccaaagttc

SEQ ID NO: 752062 - DNA, 15 bp, Homo sapiens
gcctcccaaagttct

SEQ ID NO: 752063 - DNA, 15 bp, Homo sapiens
cctcccaaagttctg

SEQ ID NO: 752064 - DNA, 15 bp, Homo sapiens
ctcccaaagttctgg

SEQ ID NO: 752065 - DNA, 15 bp, Homo sapiens
tcccaaagttctggg

SEQ ID NO: 752066 - DNA, 15 bp, Homo sapiens
cccaaagttctggga

SEQ ID NO: 752067 - DNA, 15 bp, Homo sapiens
ccaaagttctgggat

SEQ ID NO: 752068 - DNA, 15 bp, Homo sapiens
caaagttctgggatt

SEQ ID NO: 752069 - DNA, 15 bp, Homo sapiens
aaagttctgggatta

SEQ ID NO: 752070 - DNA, 15 bp, Homo sapiens
aagttctgggattac

SEQ ID NO: 752071 - DNA, 15 bp, Homo sapiens
agttctgggattaca

SEQ ID NO: 752072 - DNA, 15 bp, Homo sapiens
gttctgggattacag

SEQ ID NO: 752073 - DNA, 15 bp, Homo sapiens
ttctgggattacagg

SEQ ID NO: 752074 - DNA, 15 bp, Homo sapiens
tctgggattacaggc

SEQ ID NO: 752075 - DNA, 15 bp, Homo sapiens
aggcgtgagccaccg

SEQ ID NO: 752076 - DNA, 15 bp, Homo sapiens
ggcgtgagccaccgc

SEQ ID NO: 752077 - DNA, 15 bp, Homo sapiens
gcgtgagccaccgcg

SEQ ID NO: 752078 - DNA, 15 bp, Homo sapiens
cgtgagccaccgcgc

SEQ ID NO: 752079 - DNA, 15 bp, Homo sapiens
gtgagccaccgcgcc

SEQ ID NO: 752080 - DNA, 15 bp, Homo sapiens
tgagccaccgcgccc

SEQ ID NO: 752081 - DNA, 15 bp, Homo sapiens
gagccaccgcgcccg

SEQ ID NO: 752082 - DNA, 15 bp, Homo sapiens
agccaccgcgcccgg

SEQ ID NO: 752083 - DNA, 15 bp, Homo sapiens
gccaccgcgcccggc

SEQ ID NO: 752084 - DNA, 15 bp, Homo sapiens
ccaccgcgcccggcc

SEQ ID NO: 752085 - DNA, 15 bp, Homo sapiens
caccgcgcccggccg

SEQ ID NO: 752086 - DNA, 15 bp, Homo sapiens
accgcgcccggccga

SEQ ID NO: 752087 - DNA, 15 bp, Homo sapiens
ccgcgcccggccgag

SEQ ID NO: 752088 - DNA, 15 bp, Homo sapiens
cgcgcccggccgagt

SEQ ID NO: 752089 - DNA, 15 bp, Homo sapiens
gcgcccggccgagtg

SEQ ID NO: 752090 - DNA, 15 bp, Homo sapiens
cgcccggccgagtgg

SEQ ID NO: 752091 - DNA, 15 bp, Homo sapiens
gcccggccgagtggt

SEQ ID NO: 752092 - DNA, 15 bp, Homo sapiens
cccggccgagtggtg

SEQ ID NO: 752093 - DNA, 15 bp, Homo sapiens
ccggccgagtggtgg

SEQ ID NO: 752094 - DNA, 15 bp, Homo sapiens
cggccgagtggtggt

SEQ ID NO: 752095 - DNA, 15 bp, Homo sapiens
ggccgagtggtggta

SEQ ID NO: 752096 - DNA, 15 bp, Homo sapiens
gccgagtggtggtat

SEQ ID NO: 752097 - DNA, 15 bp, Homo sapiens
ccgagtggtggtatt

SEQ ID NO: 752098 - DNA, 15 bp, Homo sapiens
cgagtggtggtattt

SEQ ID NO: 752099 - DNA, 15 bp, Homo sapiens
gagtggtggtatttt

SEQ ID NO: 752100 - DNA, 15 bp, Homo sapiens
agtggtggtattttt

SEQ ID NO: 752101 - DNA, 15 bp, Homo sapiens
gtggtggtattttta

SEQ ID NO: 752102 - DNA, 15 bp, Homo sapiens
tggtggtatttttaa

SEQ ID NO: 752103 - DNA, 15 bp, Homo sapiens
ggtggtatttttaaa

SEQ ID NO: 752104 - DNA, 15 bp, Homo sapiens
gtggtatttttaaag

SEQ ID NO: 752105 - DNA, 15 bp, Homo sapiens
tggtatttttaaaga

SEQ ID NO: 752106 - DNA, 15 bp, Homo sapiens
ggtatttttaaagaa

SEQ ID NO: 752107 - DNA, 15 bp, Homo sapiens
gtatttttaaagaag

SEQ ID NO: 752108 - DNA, 15 bp, Homo sapiens
tatttttaaagaagc

SEQ ID NO: 752109 - DNA, 15 bp, Homo sapiens
atttttaaagaagca

SEQ ID NO: 752110 - DNA, 15 bp, Homo sapiens
tttttaaagaagcac

SEQ ID NO: 752111 - DNA, 15 bp, Homo sapiens
ttttaaagaagcaca

SEQ ID NO: 752112 - DNA, 15 bp, Homo sapiens
tttaaagaagcacag

SEQ ID NO: 752113 - DNA, 15 bp, Homo sapiens
ttaaagaagcacagg

SEQ ID NO: 752114 - DNA, 15 bp, Homo sapiens
taaagaagcacaggc

SEQ ID NO: 752115 - DNA, 15 bp, Homo sapiens
aaagaagcacaggcc

SEQ ID NO: 752116 - DNA, 15 bp, Homo sapiens
aagaagcacaggcca

SEQ ID NO: 752117 - DNA, 15 bp, Homo sapiens
agaagcacaggccat

SEQ ID NO: 752118 - DNA, 15 bp, Homo sapiens
gaagcacaggccata

SEQ ID NO: 752119 - DNA, 15 bp, Homo sapiens
aagcacaggccatac

SEQ ID NO: 752120 - DNA, 15 bp, Homo sapiens
agcacaggccatacc

SEQ ID NO: 752121 - DNA, 15 bp, Homo sapiens
gcacaggccatacct

SEQ ID NO: 752122 - DNA, 15 bp, Homo sapiens
cacaggccatacctg

SEQ ID NO: 752123 - DNA, 15 bp, Homo sapiens
acaggccatacctga

SEQ ID NO: 752124 - DNA, 15 bp, Homo sapiens
caggccatacctgaa

SEQ ID NO: 752125 - DNA, 15 bp, Homo sapiens
aggccatacctgaaa

SEQ ID NO: 752126 - DNA, 15 bp, Homo sapiens
ggccatacctgaaaa

SEQ ID NO: 752127 - DNA, 15 bp, Homo sapiens
gccatacctgaaaaa

SEQ ID NO: 752128 - DNA, 15 bp, Homo sapiens
ccatacctgaaaaaa

SEQ ID NO: 752129 - DNA, 15 bp, Homo sapiens
catacctgaaaaaac

SEQ ID NO: 752130 - DNA, 15 bp, Homo sapiens
atacctgaaaaaaca

SEQ ID NO: 752131 - DNA, 15 bp, Homo sapiens
tacctgaaaaaacaa

SEQ ID NO: 752132 - DNA, 15 bp, Homo sapiens
acctgaaaaaacaat

SEQ ID NO: 752133 - DNA, 15 bp, Homo sapiens
cctgaaaaaacaata

SEQ ID NO: 752134 - DNA, 15 bp, Homo sapiens
ctgaaaaaacaataa

SEQ ID NO: 752135 - DNA, 15 bp, Homo sapiens
tgaaaaaacaataaa

SEQ ID NO: 752136 - DNA, 15 bp, Homo sapiens
gaaaaaacaataaaa

SEQ ID NO: 752137 - DNA, 15 bp, Homo sapiens
aaaaaacaataaaaa

SEQ ID NO: 752138 - DNA, 15 bp, Homo sapiens
aaaaacaataaaaat

SEQ ID NO: 752139 - DNA, 15 bp, Homo sapiens
aaaacaataaaaatt

SEQ ID NO: 752140 - DNA, 15 bp, Homo sapiens
aaacaataaaaattg

SEQ ID NO: 752141 - DNA, 15 bp, Homo sapiens
aacaataaaaattga

SEQ ID NO: 752142 - DNA, 15 bp, Homo sapiens
acaataaaaattgaa

SEQ ID NO: 752143 - DNA, 15 bp, Homo sapiens
caataaaaattgaaa

SEQ ID NO: 752144 - DNA, 15 bp, Homo sapiens
aataaaaattgaaaa

SEQ ID NO: 752145 - DNA, 15 bp, Homo sapiens
ataaaaattgaaaag

SEQ ID NO: 752146 - DNA, 15 bp, Homo sapiens
taaaaattgaaaagg

SEQ ID NO: 752147 - DNA, 15 bp, Homo sapiens
aaaaattgaaaagga

SEQ ID NO: 752148 - DNA, 15 bp, Homo sapiens
aaaattgaaaaggaa

SEQ ID NO: 752149 - DNA, 15 bp, Homo sapiens
aaattgaaaaggaat

SEQ ID NO: 752150 - DNA, 15 bp, Homo sapiens
aattgaaaaggaatt

SEQ ID NO: 752151 - DNA, 15 bp, Homo sapiens
attgaaaaggaattt

SEQ ID NO: 752152 - DNA, 15 bp, Homo sapiens
ttgaaaaggaatttc

SEQ ID NO: 752153 - DNA, 15 bp, Homo sapiens
tgaaaaggaatttct

SEQ ID NO: 752154 - DNA, 15 bp, Homo sapiens
gaaaaggaatttctt

SEQ ID NO: 752155 - DNA, 15 bp, Homo sapiens
aaaaggaatttcttt

SEQ ID NO: 752156 - DNA, 15 bp, Homo sapiens
aaaggaatttctttc

SEQ ID NO: 752157 - DNA, 15 bp, Homo sapiens
aaggaatttctttct

SEQ ID NO: 752158 - DNA, 15 bp, Homo sapiens
aggaatttctttcta

SEQ ID NO: 752159 - DNA, 15 bp, Homo sapiens
ggaatttctttctat

SEQ ID NO: 752160 - DNA, 15 bp, Homo sapiens
gaatttctttctata

SEQ ID NO: 752161 - DNA, 15 bp, Homo sapiens
aatttctttctatac

SEQ ID NO: 752162 - DNA, 15 bp, Homo sapiens
atttctttctatact

SEQ ID NO: 752163 - DNA, 15 bp, Homo sapiens
tttctttctatactg

SEQ ID NO: 752164 - DNA, 15 bp, Homo sapiens
ttctttctatactgt

SEQ ID NO: 752165 - DNA, 15 bp, Homo sapiens
tctttctatactgtt

SEQ ID NO: 752166 - DNA, 15 bp, Homo sapiens
ctttctatactgtta

SEQ ID NO: 752167 - DNA, 15 bp, Homo sapiens
tttctatactgttat

SEQ ID NO: 752168 - DNA, 15 bp, Homo sapiens
ttctatactgttatt

SEQ ID NO: 752169 - DNA, 15 bp, Homo sapiens
tctatactgttattt

SEQ ID NO: 752170 - DNA, 15 bp, Homo sapiens
ctatactgttatttc

SEQ ID NO: 752171 - DNA, 15 bp, Homo sapiens
tatactgttatttct

SEQ ID NO: 752172 - DNA, 15 bp, Homo sapiens
atactgttatttctt

SEQ ID NO: 752173 - DNA, 15 bp, Homo sapiens
tactgttatttctta

SEQ ID NO: 752174 - DNA, 15 bp, Homo sapiens
actgttatttcttaa

SEQ ID NO: 752175 - DNA, 15 bp, Homo sapiens
ctgttatttcttaaa

SEQ ID NO: 752176 - DNA, 15 bp, Homo sapiens
tgttatttcttaaag

SEQ ID NO: 752177 - DNA, 15 bp, Homo sapiens
gttatttcttaaagg

SEQ ID NO: 752178 - DNA, 15 bp, Homo sapiens
ttatttcttaaagga

SEQ ID NO: 752179 - DNA, 15 bp, Homo sapiens
tatttcttaaaggag

SEQ ID NO: 752180 - DNA, 15 bp, Homo sapiens
atttcttaaaggaga

SEQ ID NO: 752181 - DNA, 15 bp, Homo sapiens
tttcttaaaggagat

SEQ ID NO: 752182 - DNA, 15 bp, Homo sapiens
ttcttaaaggagata

SEQ ID NO: 752183 - DNA, 15 bp, Homo sapiens
tcttaaaggagatac

SEQ ID NO: 752184 - DNA, 15 bp, Homo sapiens
cttaaaggagataca

SEQ ID NO: 752185 - DNA, 15 bp, Homo sapiens
ttaaaggagatacaa

SEQ ID NO: 752186 - DNA, 15 bp, Homo sapiens
taaaggagatacaat

SEQ ID NO: 752187 - DNA, 15 bp, Homo sapiens
aaaggagatacaatt

SEQ ID NO: 752188 - DNA, 15 bp, Homo sapiens
aaggagatacaattc

SEQ ID NO: 752189 - DNA, 15 bp, Homo sapiens
aggagatacaattca

SEQ ID NO: 752190 - DNA, 15 bp, Homo sapiens
ggagatacaattcat

SEQ ID NO: 752191 - DNA, 15 bp, Homo sapiens
gagatacaattcata

SEQ ID NO: 752192 - DNA, 15 bp, Homo sapiens
agatacaattcataa

SEQ ID NO: 752193 - DNA, 15 bp, Homo sapiens
gatacaattcataac

SEQ ID NO: 752194 - DNA, 15 bp, Homo sapiens
atacaattcataacc

SEQ ID NO: 752195 - DNA, 15 bp, Homo sapiens
tacaattcataaccc

SEQ ID NO: 752196 - DNA, 15 bp, Homo sapiens
acaattcataacccc

SEQ ID NO: 752197 - DNA, 15 bp, Homo sapiens
caattcataacccca

SEQ ID NO: 752198 - DNA, 15 bp, Homo sapiens
aattcataaccccag

SEQ ID NO: 752199 - DNA, 15 bp, Homo sapiens
attcataaccccagt

SEQ ID NO: 752200 - DNA, 15 bp, Homo sapiens
ttcataaccccagta

SEQ ID NO: 752201 - DNA, 15 bp, Homo sapiens
tcataaccccagtaa

SEQ ID NO: 752202 - DNA, 15 bp, Homo sapiens
cataaccccagtaac

SEQ ID NO: 752203 - DNA, 15 bp, Homo sapiens
ataaccccagtaaca

SEQ ID NO: 752204 - DNA, 15 bp, Homo sapiens
taaccccagtaacat

SEQ ID NO: 752205 - DNA, 15 bp, Homo sapiens
aaccccagtaacatt

SEQ ID NO: 752206 - DNA, 15 bp, Homo sapiens
accccagtaacattt

SEQ ID NO: 752207 - DNA, 15 bp, Homo sapiens
ccccagtaacatttc

SEQ ID NO: 752208 - DNA, 15 bp, Homo sapiens
cccagtaacatttcc

SEQ ID NO: 752209 - DNA, 15 bp, Homo sapiens
ccagtaacatttcca

SEQ ID NO: 752210 - DNA, 15 bp, Homo sapiens
cagtaacatttccag

SEQ ID NO: 752211 - DNA, 15 bp, Homo sapiens
agtaacatttccaga

SEQ ID NO: 752212 - DNA, 15 bp, Homo sapiens
gtaacatttccagag

SEQ ID NO: 752213 - DNA, 15 bp, Homo sapiens
taacatttccagagc

SEQ ID NO: 752214 - DNA, 15 bp, Homo sapiens
aacatttccagagcc

SEQ ID NO: 752215 - DNA, 15 bp, Homo sapiens
acatttccagagccc

SEQ ID NO: 752216 - DNA, 15 bp, Homo sapiens
catttccagagccct

SEQ ID NO: 752217 - DNA, 15 bp, Homo sapiens
atttccagagccctc

SEQ ID NO: 752218 - DNA, 15 bp, Homo sapiens
tttccagagccctcc

SEQ ID NO: 752219 - DNA, 15 bp, Homo sapiens
ttccagagccctcct

SEQ ID NO: 752220 - DNA, 15 bp, Homo sapiens
tccagagccctcctc

SEQ ID NO: 752221 - DNA, 15 bp, Homo sapiens
ccagagccctcctct

SEQ ID NO: 752222 - DNA, 15 bp, Homo sapiens
cagagccctcctctg

SEQ ID NO: 752223 - DNA, 15 bp, Homo sapiens
agagccctcctctgg

SEQ ID NO: 752224 - DNA, 15 bp, Homo sapiens
gagccctcctctggc

SEQ ID NO: 752225 - DNA, 15 bp, Homo sapiens
agccctcctctggct

SEQ ID NO: 752226 - DNA, 15 bp, Homo sapiens
gccctcctctggctt

SEQ ID NO: 752227 - DNA, 15 bp, Homo sapiens
ccctcctctggcttc

SEQ ID NO: 752228 - DNA, 15 bp, Homo sapiens
cctcctctggcttct

SEQ ID NO: 752229 - DNA, 15 bp, Homo sapiens
ctcctctggcttcta

SEQ ID NO: 752230 - DNA, 15 bp, Homo sapiens
tcctctggcttctac

SEQ ID NO: 752231 - DNA, 15 bp, Homo sapiens
cctctggcttctact

SEQ ID NO: 752232 - DNA, 15 bp, Homo sapiens
ctctggcttctactt

SEQ ID NO: 752233 - DNA, 15 bp, Homo sapiens
tctggcttctacttc

SEQ ID NO: 752234 - DNA, 15 bp, Homo sapiens
ctggcttctacttct

SEQ ID NO: 752235 - DNA, 15 bp, Homo sapiens
tggcttctacttctc

SEQ ID NO: 752236 - DNA, 15 bp, Homo sapiens
ggcttctacttctca

SEQ ID NO: 752237 - DNA, 15 bp, Homo sapiens
gcttctacttctcat

SEQ ID NO: 752238 - DNA, 15 bp, Homo sapiens
cttctacttctcatt

SEQ ID NO: 752239 - DNA, 15 bp, Homo sapiens
ttctacttctcattt

SEQ ID NO: 752240 - DNA, 15 bp, Homo sapiens
tctacttctcatttc

SEQ ID NO: 752241 - DNA, 15 bp, Homo sapiens
ctacttctcatttct

SEQ ID NO: 752242 - DNA, 15 bp, Homo sapiens
tacttctcatttctc

SEQ ID NO: 752243 - DNA, 15 bp, Homo sapiens
acttctcatttctca

SEQ ID NO: 752244 - DNA, 15 bp, Homo sapiens
cttctcatttctcac

SEQ ID NO: 752245 - DNA, 15 bp, Homo sapiens
ttctcatttctcact

SEQ ID NO: 752246 - DNA, 15 bp, Homo sapiens
tctcatttctcactt

SEQ ID NO: 752247 - DNA, 15 bp, Homo sapiens
ctcatttctcacttc

SEQ ID NO: 752248 - DNA, 15 bp, Homo sapiens
tcatttctcacttct

SEQ ID NO: 752249 - DNA, 15 bp, Homo sapiens
catttctcacttctc

SEQ ID NO: 752250 - DNA, 15 bp, Homo sapiens
atttctcacttctct

SEQ ID NO: 752251 - DNA, 15 bp, Homo sapiens
tttctcacttctctc

SEQ ID NO: 752252 - DNA, 15 bp, Homo sapiens
ttctcacttctctcc

SEQ ID NO: 752253 - DNA, 15 bp, Homo sapiens
tctcacttctctcct

SEQ ID NO: 752254 - DNA, 15 bp, Homo sapiens
ctcacttctctcctc

SEQ ID NO: 752255 - DNA, 15 bp, Homo sapiens
tcacttctctcctca

SEQ ID NO: 752256 - DNA, 15 bp, Homo sapiens
cacttctctcctcag

SEQ ID NO: 752257 - DNA, 15 bp, Homo sapiens
acttctctcctcagt

SEQ ID NO: 752258 - DNA, 15 bp, Homo sapiens
cttctctcctcagtt

SEQ ID NO: 752259 - DNA, 15 bp, Homo sapiens
ttctctcctcagttc

SEQ ID NO: 752260 - DNA, 15 bp, Homo sapiens
tctctcctcagttct

SEQ ID NO: 752261 - DNA, 15 bp, Homo sapiens
ctctcctcagttctc

SEQ ID NO: 752262 - DNA, 15 bp, Homo sapiens
tctcctcagttctct

SEQ ID NO: 752263 - DNA, 15 bp, Homo sapiens
ctcctcagttctctc

SEQ ID NO: 752264 - DNA, 15 bp, Homo sapiens
tcctcagttctctct

SEQ ID NO: 752265 - DNA, 15 bp, Homo sapiens
cctcagttctctctc

SEQ ID NO: 752266 - DNA, 15 bp, Homo sapiens
ctcagttctctctcc

SEQ ID NO: 752267 - DNA, 15 bp, Homo sapiens
tcagttctctctcct

SEQ ID NO: 752268 - DNA, 15 bp, Homo sapiens
cagttctctctcctg

SEQ ID NO: 752269 - DNA, 15 bp, Homo sapiens
agttctctctcctgt

SEQ ID NO: 752270 - DNA, 15 bp, Homo sapiens
gttctctctcctgtg

SEQ ID NO: 752271 - DNA, 15 bp, Homo sapiens
ttctctctcctgtgc

SEQ ID NO: 752272 - DNA, 15 bp, Homo sapiens
tctctctcctgtgcc

SEQ ID NO: 752273 - DNA, 15 bp, Homo sapiens
ctctctcctgtgcct

SEQ ID NO: 752274 - DNA, 15 bp, Homo sapiens
tctctcctgtgcctg

SEQ ID NO: 752275 - DNA, 15 bp, Homo sapiens
ctctcctgtgcctgg

SEQ ID NO: 752276 - DNA, 15 bp, Homo sapiens
tctcctgtgcctggt

SEQ ID NO: 752277 - DNA, 15 bp, Homo sapiens
ctcctgtgcctggtc

SEQ ID NO: 752278 - DNA, 15 bp, Homo sapiens
tcctgtgcctggtca

SEQ ID NO: 752279 - DNA, 15 bp, Homo sapiens
cctgtgcctggtcag

SEQ ID NO: 752280 - DNA, 15 bp, Homo sapiens
ctgtgcctggtcagt

SEQ ID NO: 752281 - DNA, 15 bp, Homo sapiens
tgtgcctggtcagtg

SEQ ID NO: 752282 - DNA, 15 bp, Homo sapiens
gtgcctggtcagtgg

SEQ ID NO: 752283 - DNA, 15 bp, Homo sapiens
tgcctggtcagtgga

SEQ ID NO: 752284 - DNA, 15 bp, Homo sapiens
gcctggtcagtggag

SEQ ID NO: 752285 - DNA, 15 bp, Homo sapiens
cctggtcagtggagc

SEQ ID NO: 752286 - DNA, 15 bp, Homo sapiens
ctggtcagtggagct

SEQ ID NO: 752287 - DNA, 15 bp, Homo sapiens
tggtcagtggagctt

SEQ ID NO: 752288 - DNA, 15 bp, Homo sapiens
ggtcagtggagcttt

SEQ ID NO: 752289 - DNA, 15 bp, Homo sapiens
gtcagtggagctttt

SEQ ID NO: 752290 - DNA, 15 bp, Homo sapiens
tcagtggagctttta

SEQ ID NO: 752291 - DNA, 15 bp, Homo sapiens
cagtggagcttttac

SEQ ID NO: 752292 - DNA, 15 bp, Homo sapiens
agtggagcttttacc

SEQ ID NO: 752293 - DNA, 15 bp, Homo sapiens
gtggagcttttacca

SEQ ID NO: 752294 - DNA, 15 bp, Homo sapiens
tggagcttttaccat

SEQ ID NO: 752295 - DNA, 15 bp, Homo sapiens
ggagcttttaccatt

SEQ ID NO: 752296 - DNA, 15 bp, Homo sapiens
gagcttttaccattc

SEQ ID NO: 752297 - DNA, 15 bp, Homo sapiens
agcttttaccattct

SEQ ID NO: 752298 - DNA, 15 bp, Homo sapiens
gcttttaccattctc

SEQ ID NO: 752299 - DNA, 15 bp, Homo sapiens
cttttaccattctca

SEQ ID NO: 752300 - DNA, 15 bp, Homo sapiens
ttttaccattctcat

SEQ ID NO: 752301 - DNA, 15 bp, Homo sapiens
tttaccattctcatt

SEQ ID NO: 752302 - DNA, 15 bp, Homo sapiens
ttaccattctcattc

SEQ ID NO: 752303 - DNA, 15 bp, Homo sapiens
taccattctcattct

SEQ ID NO: 752304 - DNA, 15 bp, Homo sapiens
accattctcattctc

SEQ ID NO: 752305 - DNA, 15 bp, Homo sapiens
ccattctcattctca

SEQ ID NO: 752306 - DNA, 15 bp, Homo sapiens
cattctcattctcat

SEQ ID NO: 752307 - DNA, 15 bp, Homo sapiens
attctcattctcatc

SEQ ID NO: 752308 - DNA, 15 bp, Homo sapiens
ttctcattctcatct

SEQ ID NO: 752309 - DNA, 15 bp, Homo sapiens
tctcattctcatctg

SEQ ID NO: 752310 - DNA, 15 bp, Homo sapiens
ctcattctcatctgc

SEQ ID NO: 752311 - DNA, 15 bp, Homo sapiens
tcattctcatctgct

SEQ ID NO: 752312 - DNA, 15 bp, Homo sapiens
cattctcatctgctc

SEQ ID NO: 752313 - DNA, 15 bp, Homo sapiens
attctcatctgctca

SEQ ID NO: 752314 - DNA, 15 bp, Homo sapiens
ttctcatctgctcag

SEQ ID NO: 752315 - DNA, 15 bp, Homo sapiens
tctcatctgctcagc

SEQ ID NO: 752316 - DNA, 15 bp, Homo sapiens
ctcatctgctcagct

SEQ ID NO: 752317 - DNA, 15 bp, Homo sapiens
tcatctgctcagctg

SEQ ID NO: 752318 - DNA, 15 bp, Homo sapiens
catctgctcagctga

SEQ ID NO: 752319 - DNA, 15 bp, Homo sapiens
atctgctcagctgag

SEQ ID NO: 752320 - DNA, 15 bp, Homo sapiens
tctgctcagctgagc

SEQ ID NO: 752321 - DNA, 15 bp, Homo sapiens
ctgctcagctgagct

SEQ ID NO: 752322 - DNA, 15 bp, Homo sapiens
tgctcagctgagctt

SEQ ID NO: 752323 - DNA, 15 bp, Homo sapiens
gctcagctgagcttg

SEQ ID NO: 752324 - DNA, 15 bp, Homo sapiens
ctcagctgagcttgg

SEQ ID NO: 752325 - DNA, 15 bp, Homo sapiens
tcagctgagcttggc

SEQ ID NO: 752326 - DNA, 15 bp, Homo sapiens
cagctgagcttggct

SEQ ID NO: 752327 - DNA, 15 bp, Homo sapiens
agctgagcttggctg

SEQ ID NO: 752328 - DNA, 15 bp, Homo sapiens
gctgagcttggctga

SEQ ID NO: 752329 - DNA, 15 bp, Homo sapiens
ctgagcttggctgaa

SEQ ID NO: 752330 - DNA, 15 bp, Homo sapiens
tgagcttggctgaat

SEQ ID NO: 752331 - DNA, 15 bp, Homo sapiens
gagcttggctgaatc

SEQ ID NO: 752332 - DNA, 15 bp, Homo sapiens
agcttggctgaatca

SEQ ID NO: 752333 - DNA, 15 bp, Homo sapiens
gcttggctgaatcat

SEQ ID NO: 752334 - DNA, 15 bp, Homo sapiens
cttggctgaatcatt

SEQ ID NO: 752335 - DNA, 15 bp, Homo sapiens
ttggctgaatcattc

SEQ ID NO: 752336 - DNA, 15 bp, Homo sapiens
tggctgaatcattcc

SEQ ID NO: 752337 - DNA, 15 bp, Homo sapiens
ggctgaatcattcca

SEQ ID NO: 752338 - DNA, 15 bp, Homo sapiens
gctgaatcattccat

SEQ ID NO: 752339 - DNA, 15 bp, Homo sapiens
ctgaatcattccatg

SEQ ID NO: 752340 - DNA, 15 bp, Homo sapiens
tgaatcattccatgg

SEQ ID NO: 752341 - DNA, 15 bp, Homo sapiens
gaatcattccatggg

SEQ ID NO: 752342 - DNA, 15 bp, Homo sapiens
aatcattccatgggc

SEQ ID NO: 752343 - DNA, 15 bp, Homo sapiens
atcattccatgggcc

SEQ ID NO: 752344 - DNA, 15 bp, Homo sapiens
tcattccatgggcca

SEQ ID NO: 752345 - DNA, 15 bp, Homo sapiens
cattccatgggccag

SEQ ID NO: 752346 - DNA, 15 bp, Homo sapiens
attccatgggccagc

SEQ ID NO: 752347 - DNA, 15 bp, Homo sapiens
ttccatgggccagcc

SEQ ID NO: 752348 - DNA, 15 bp, Homo sapiens
tccatgggccagcct

SEQ ID NO: 752349 - DNA, 15 bp, Homo sapiens
ccatgggccagcctc

SEQ ID NO: 752350 - DNA, 15 bp, Homo sapiens
catgggccagcctca

SEQ ID NO: 752351 - DNA, 15 bp, Homo sapiens
atgggccagcctcat

SEQ ID NO: 752352 - DNA, 15 bp, Homo sapiens
tgggccagcctcata

SEQ ID NO: 752353 - DNA, 15 bp, Homo sapiens
gggccagcctcatat

SEQ ID NO: 752354 - DNA, 15 bp, Homo sapiens
ggccagcctcatatc

SEQ ID NO: 752355 - DNA, 15 bp, Homo sapiens
gccagcctcatatcc

SEQ ID NO: 752356 - DNA, 15 bp, Homo sapiens
ccagcctcatatcct

SEQ ID NO: 752357 - DNA, 15 bp, Homo sapiens
cagcctcatatcctt

SEQ ID NO: 752358 - DNA, 15 bp, Homo sapiens
agcctcatatccttc

SEQ ID NO: 752359 - DNA, 15 bp, Homo sapiens
gcctcatatccttct

SEQ ID NO: 752360 - DNA, 15 bp, Homo sapiens
cctcatatccttctg

SEQ ID NO: 752361 - DNA, 15 bp, Homo sapiens
ctcatatccttctgg

SEQ ID NO: 752362 - DNA, 15 bp, Homo sapiens
tcatatccttctggc

SEQ ID NO: 752363 - DNA, 15 bp, Homo sapiens
catatccttctggcc

SEQ ID NO: 752364 - DNA, 15 bp, Homo sapiens
atatccttctggcca

SEQ ID NO: 752365 - DNA, 15 bp, Homo sapiens
tatccttctggccag

SEQ ID NO: 752366 - DNA, 15 bp, Homo sapiens
atccttctggccagc

SEQ ID NO: 752367 - DNA, 15 bp, Homo sapiens
tccttctggccagcc

SEQ ID NO: 752368 - DNA, 15 bp, Homo sapiens
ccttctggccagcct

SEQ ID NO: 752369 - DNA, 15 bp, Homo sapiens
cttctggccagcctc

SEQ ID NO: 752370 - DNA, 15 bp, Homo sapiens
ttctggccagcctca

SEQ ID NO: 752371 - DNA, 15 bp, Homo sapiens
tctggccagcctcat

SEQ ID NO: 752372 - DNA, 15 bp, Homo sapiens
ctggccagcctcata

SEQ ID NO: 752373 - DNA, 15 bp, Homo sapiens
tggccagcctcatat

SEQ ID NO: 752374 - DNA, 15 bp, Homo sapiens
gccagcctcatatct

SEQ ID NO: 752375 - DNA, 15 bp, Homo sapiens
ccagcctcatatctt

SEQ ID NO: 752376 - DNA, 15 bp, Homo sapiens
cagcctcatatcttt

SEQ ID NO: 752377 - DNA, 15 bp, Homo sapiens
agcctcatatctttt

SEQ ID NO: 752378 - DNA, 15 bp, Homo sapiens
gcctcatatcttttg

SEQ ID NO: 752379 - DNA, 15 bp, Homo sapiens
cctcatatcttttgg

SEQ ID NO: 752380 - DNA, 15 bp, Homo sapiens
ctcatatcttttggt

SEQ ID NO: 752381 - DNA, 15 bp, Homo sapiens
tcatatcttttggta

SEQ ID NO: 752382 - DNA, 15 bp, Homo sapiens
catatcttttggtaa

SEQ ID NO: 752383 - DNA, 15 bp, Homo sapiens
atatcttttggtaaa

SEQ ID NO: 752384 - DNA, 15 bp, Homo sapiens
tatcttttggtaaaa

SEQ ID NO: 752385 - DNA, 15 bp, Homo sapiens
atcttttggtaaaac

SEQ ID NO: 752386 - DNA, 15 bp, Homo sapiens
tcttttggtaaaaca

SEQ ID NO: 752387 - DNA, 15 bp, Homo sapiens
cttttggtaaaacat

SEQ ID NO: 752388 - DNA, 15 bp, Homo sapiens
ttttggtaaaacatg

SEQ ID NO: 752389 - DNA, 15 bp, Homo sapiens
tttggtaaaacatgg

SEQ ID NO: 752390 - DNA, 15 bp, Homo sapiens
ttggtaaaacatgga

SEQ ID NO: 752391 - DNA, 15 bp, Homo sapiens
tggtaaaacatggag

SEQ ID NO: 752392 - DNA, 15 bp, Homo sapiens
ggtaaaacatggaga

SEQ ID NO: 752393 - DNA, 15 bp, Homo sapiens
gtaaaacatggagac

SEQ ID NO: 752394 - DNA, 15 bp, Homo sapiens
taaaacatggagact

SEQ ID NO: 752395 - DNA, 15 bp, Homo sapiens
aaaacatggagactt

SEQ ID NO: 752396 - DNA, 15 bp, Homo sapiens
aaacatggagactta

SEQ ID NO: 752397 - DNA, 15 bp, Homo sapiens
aacatggagacttac

SEQ ID NO: 752398 - DNA, 15 bp, Homo sapiens
acatggagacttaca

SEQ ID NO: 752399 - DNA, 15 bp, Homo sapiens
catggagacttacat

SEQ ID NO: 752400 - DNA, 15 bp, Homo sapiens
atggagacttacatg

SEQ ID NO: 752401 - DNA, 15 bp, Homo sapiens
tggagacttacatga

SEQ ID NO: 752402 - DNA, 15 bp, Homo sapiens
ggagacttacatgac

SEQ ID NO: 752403 - DNA, 15 bp, Homo sapiens
gagacttacatgaca

SEQ ID NO: 752404 - DNA, 15 bp, Homo sapiens
agacttacatgacat

SEQ ID NO: 752405 - DNA, 15 bp, Homo sapiens
gacttacatgacatt

SEQ ID NO: 752406 - DNA, 15 bp, Homo sapiens
acttacatgacattt

SEQ ID NO: 752407 - DNA, 15 bp, Homo sapiens
cttacatgacatttt

SEQ ID NO: 752408 - DNA, 15 bp, Homo sapiens
ttacatgacattttc

SEQ ID NO: 752409 - DNA, 15 bp, Homo sapiens
tacatgacattttca

SEQ ID NO: 752410 - DNA, 15 bp, Homo sapiens
acatgacattttcag

SEQ ID NO: 752411 - DNA, 15 bp, Homo sapiens
catgacattttcaga

SEQ ID NO: 752412 - DNA, 15 bp, Homo sapiens
atgacattttcagag

SEQ ID NO: 752413 - DNA, 15 bp, Homo sapiens
tgacattttcagaga

SEQ ID NO: 752414 - DNA, 15 bp, Homo sapiens
gacattttcagagaa

SEQ ID NO: 752415 - DNA, 15 bp, Homo sapiens
acattttcagagaag

SEQ ID NO: 752416 - DNA, 15 bp, Homo sapiens
cattttcagagaaga

SEQ ID NO: 752417 - DNA, 15 bp, Homo sapiens
attttcagagaagaa

SEQ ID NO: 752418 - DNA, 15 bp, Homo sapiens
ttttcagagaagaac

SEQ ID NO: 752419 - DNA, 15 bp, Homo sapiens
tttcagagaagaacc

SEQ ID NO: 752420 - DNA, 15 bp, Homo sapiens
ttcagagaagaacca

SEQ ID NO: 752421 - DNA, 15 bp, Homo sapiens
tcagagaagaaccat

SEQ ID NO: 752422 - DNA, 15 bp, Homo sapiens
cagagaagaaccata

SEQ ID NO: 752423 - DNA, 15 bp, Homo sapiens
agagaagaaccatag

SEQ ID NO: 752424 - DNA, 15 bp, Homo sapiens
gagaagaaccatagt

SEQ ID NO: 752425 - DNA, 15 bp, Homo sapiens
agaagaaccatagtt

SEQ ID NO: 752426 - DNA, 15 bp, Homo sapiens
gaagaaccatagttg

SEQ ID NO: 752427 - DNA, 15 bp, Homo sapiens
aagaaccatagttga

SEQ ID NO: 752428 - DNA, 15 bp, Homo sapiens
agaaccatagttgag

SEQ ID NO: 752429 - DNA, 15 bp, Homo sapiens
gaaccatagttgagg

SEQ ID NO: 752430 - DNA, 15 bp, Homo sapiens
aaccatagttgagga

SEQ ID NO: 752431 - DNA, 15 bp, Homo sapiens
accatagttgaggaa

SEQ ID NO: 752432 - DNA, 15 bp, Homo sapiens
ccatagttgaggaag

SEQ ID NO: 752433 - DNA, 15 bp, Homo sapiens
catagttgaggaagg

SEQ ID NO: 752434 - DNA, 15 bp, Homo sapiens
atagttgaggaaggc

SEQ ID NO: 752435 - DNA, 15 bp, Homo sapiens
tagttgaggaaggcc

SEQ ID NO: 752436 - DNA, 15 bp, Homo sapiens
agttgaggaaggcca

SEQ ID NO: 752437 - DNA, 15 bp, Homo sapiens
gttgaggaaggccag

SEQ ID NO: 752438 - DNA, 15 bp, Homo sapiens
ttgaggaaggccagg

SEQ ID NO: 752439 - DNA, 15 bp, Homo sapiens
tgaggaaggccaggc

SEQ ID NO: 752440 - DNA, 15 bp, Homo sapiens
gaggaaggccaggcc

SEQ ID NO: 752441 - DNA, 15 bp, Homo sapiens
aggaaggccaggcca

SEQ ID NO: 752442 - DNA, 15 bp, Homo sapiens
ggaaggccaggccag

SEQ ID NO: 752443 - DNA, 15 bp, Homo sapiens
gaaggccaggccagt

SEQ ID NO: 752444 - DNA, 15 bp, Homo sapiens
aaggccaggccagtg

SEQ ID NO: 752445 - DNA, 15 bp, Homo sapiens
aggccaggccagtgt

SEQ ID NO: 752446 - DNA, 15 bp, Homo sapiens
ggccaggccagtgtc

SEQ ID NO: 752447 - DNA, 15 bp, Homo sapiens
gccaggccagtgtct

SEQ ID NO: 752448 - DNA, 15 bp, Homo sapiens
ccaggccagtgtctg

SEQ ID NO: 752449 - DNA, 15 bp, Homo sapiens
caggccagtgtctgt

SEQ ID NO: 752450 - DNA, 15 bp, Homo sapiens
aggccagtgtctgtg

SEQ ID NO: 752451 - DNA, 15 bp, Homo sapiens
ggccagtgtctgtgg

SEQ ID NO: 752452 - DNA, 15 bp, Homo sapiens
gccagtgtctgtgga

SEQ ID NO: 752453 - DNA, 15 bp, Homo sapiens
ccagtgtctgtggaa

SEQ ID NO: 752454 - DNA, 15 bp, Homo sapiens
cagtgtctgtggaac

SEQ ID NO: 752455 - DNA, 15 bp, Homo sapiens
agtgtctgtggaaca

SEQ ID NO: 752456 - DNA, 15 bp, Homo sapiens
gtgtctgtggaacaa

SEQ ID NO: 752457 - DNA, 15 bp, Homo sapiens
tgtctgtggaacaat

SEQ ID NO: 752458 - DNA, 15 bp, Homo sapiens
gtctgtggaacaatg

SEQ ID NO: 752459 - DNA, 15 bp, Homo sapiens
tctgtggaacaatgt

SEQ ID NO: 752460 - DNA, 15 bp, Homo sapiens
ctgtggaacaatgtc

SEQ ID NO: 752461 - DNA, 15 bp, Homo sapiens
tgtggaacaatgtct

SEQ ID NO: 752462 - DNA, 15 bp, Homo sapiens
gtggaacaatgtctc

SEQ ID NO: 752463 - DNA, 15 bp, Homo sapiens
tggaacaatgtctct

SEQ ID NO: 752464 - DNA, 15 bp, Homo sapiens
ggaacaatgtctctc

SEQ ID NO: 752465 - DNA, 15 bp, Homo sapiens
gaacaatgtctctct

SEQ ID NO: 752466 - DNA, 15 bp, Homo sapiens
aacaatgtctctctt

SEQ ID NO: 752467 - DNA, 15 bp, Homo sapiens
acaatgtctctctta

SEQ ID NO: 752468 - DNA, 15 bp, Homo sapiens
caatgtctctcttac

SEQ ID NO: 752469 - DNA, 15 bp, Homo sapiens
aatgtctctcttacc

SEQ ID NO: 752470 - DNA, 15 bp, Homo sapiens
atgtctctcttacca

SEQ ID NO: 752471 - DNA, 15 bp, Homo sapiens
tgtctctcttaccag

SEQ ID NO: 752472 - DNA, 15 bp, Homo sapiens
gtctctcttaccaga

SEQ ID NO: 752473 - DNA, 15 bp, Homo sapiens
tctctcttaccagat

SEQ ID NO: 752474 - DNA, 15 bp, Homo sapiens
ctctcttaccagata

SEQ ID NO: 752475 - DNA, 15 bp, Homo sapiens
tctcttaccagataa

SEQ ID NO: 752476 - DNA, 15 bp, Homo sapiens
ctcttaccagataag

SEQ ID NO: 752477 - DNA, 15 bp, Homo sapiens
tcttaccagataaga

SEQ ID NO: 752478 - DNA, 15 bp, Homo sapiens
cttaccagataagaa

SEQ ID NO: 752479 - DNA, 15 bp, Homo sapiens
ttaccagataagaaa

SEQ ID NO: 752480 - DNA, 15 bp, Homo sapiens
taccagataagaaag

SEQ ID NO: 752481 - DNA, 15 bp, Homo sapiens
accagataagaaaga

SEQ ID NO: 752482 - DNA, 15 bp, Homo sapiens
ccagataagaaagaa

SEQ ID NO: 752483 - DNA, 15 bp, Homo sapiens
cagataagaaagaag

SEQ ID NO: 752484 - DNA, 15 bp, Homo sapiens
agataagaaagaagt

SEQ ID NO: 752485 - DNA, 15 bp, Homo sapiens
gataagaaagaagtt

SEQ ID NO: 752486 - DNA, 15 bp, Homo sapiens
ataagaaagaagttg

SEQ ID NO: 752487 - DNA, 15 bp, Homo sapiens
taagaaagaagttgc

SEQ ID NO: 752488 - DNA, 15 bp, Homo sapiens
aagaaagaagttgct

SEQ ID NO: 752489 - DNA, 15 bp, Homo sapiens
agaaagaagttgctt

SEQ ID NO: 752490 - DNA, 15 bp, Homo sapiens
gaaagaagttgcttc

SEQ ID NO: 752491 - DNA, 15 bp, Homo sapiens
aaagaagttgcttcc

SEQ ID NO: 752492 - DNA, 15 bp, Homo sapiens
aagaagttgcttcct

SEQ ID NO: 752493 - DNA, 15 bp, Homo sapiens
agaagttgcttcctg

SEQ ID NO: 752494 - DNA, 15 bp, Homo sapiens
gaagttgcttcctga

SEQ ID NO: 752495 - DNA, 15 bp, Homo sapiens
aagttgcttcctgac

SEQ ID NO: 752496 - DNA, 15 bp, Homo sapiens
agttgcttcctgact

SEQ ID NO: 752497 - DNA, 15 bp, Homo sapiens
gttgcttcctgactt

SEQ ID NO: 752498 - DNA, 15 bp, Homo sapiens
ttgcttcctgacttg

SEQ ID NO: 752499 - DNA, 15 bp, Homo sapiens
tgcttcctgacttgc

SEQ ID NO: 752500 - DNA, 15 bp, Homo sapiens
gcttcctgacttgca

SEQ ID NO: 752501 - DNA, 15 bp, Homo sapiens
cttcctgacttgcag

SEQ ID NO: 752502 - DNA, 15 bp, Homo sapiens
ttcctgacttgcagg

SEQ ID NO: 752503 - DNA, 15 bp, Homo sapiens
tcctgacttgcaggt

SEQ ID NO: 752504 - DNA, 15 bp, Homo sapiens
cctgacttgcaggtg

SEQ ID NO: 752505 - DNA, 15 bp, Homo sapiens
ctgacttgcaggtgt

SEQ ID NO: 752506 - DNA, 15 bp, Homo sapiens
tgacttgcaggtgtg

SEQ ID NO: 752507 - DNA, 15 bp, Homo sapiens
gacttgcaggtgtga

SEQ ID NO: 752508 - DNA, 15 bp, Homo sapiens
acttgcaggtgtgaa

SEQ ID NO: 752509 - DNA, 15 bp, Homo sapiens
cttgcaggtgtgaag

SEQ ID NO: 752510 - DNA, 15 bp, Homo sapiens
ttgcaggtgtgaagt

SEQ ID NO: 752511 - DNA, 15 bp, Homo sapiens
tgcaggtgtgaagtt

SEQ ID NO: 752512 - DNA, 15 bp, Homo sapiens
gcaggtgtgaagttt

SEQ ID NO: 752513 - DNA, 15 bp, Homo sapiens
caggtgtgaagtttt

SEQ ID NO: 752514 - DNA, 15 bp, Homo sapiens
aggtgtgaagttttc

SEQ ID NO: 752515 - DNA, 15 bp, Homo sapiens
ggtgtgaagttttct

SEQ ID NO: 752516 - DNA, 15 bp, Homo sapiens
gtgtgaagttttctg

SEQ ID NO: 752517 - DNA, 15 bp, Homo sapiens
tgtgaagttttctga

SEQ ID NO: 752518 - DNA, 15 bp, Homo sapiens
gtgaagttttctgat

SEQ ID NO: 752519 - DNA, 15 bp, Homo sapiens
tgaagttttctgata

SEQ ID NO: 752520 - DNA, 15 bp, Homo sapiens
gaagttttctgatat

SEQ ID NO: 752521 - DNA, 15 bp, Homo sapiens
aagttttctgatatc

SEQ ID NO: 752522 - DNA, 15 bp, Homo sapiens
agttttctgatatcc

SEQ ID NO: 752523 - DNA, 15 bp, Homo sapiens
gttttctgatatccc

SEQ ID NO: 752524 - DNA, 15 bp, Homo sapiens
ttttctgatatcccc

SEQ ID NO: 752525 - DNA, 15 bp, Homo sapiens
tttctgatatccccc

SEQ ID NO: 752526 - DNA, 15 bp, Homo sapiens
ttctgatatcccccg

SEQ ID NO: 752527 - DNA, 15 bp, Homo sapiens
tctgatatcccccga

SEQ ID NO: 752528 - DNA, 15 bp, Homo sapiens
ctgatatcccccgat

SEQ ID NO: 752529 - DNA, 15 bp, Homo sapiens
tgatatcccccgatt

SEQ ID NO: 752530 - DNA, 15 bp, Homo sapiens
gatatcccccgattt

SEQ ID NO: 752531 - DNA, 15 bp, Homo sapiens
atatcccccgatttc

SEQ ID NO: 752532 - DNA, 15 bp, Homo sapiens
tatcccccgatttcc

SEQ ID NO: 752533 - DNA, 15 bp, Homo sapiens
atcccccgatttcct

SEQ ID NO: 752534 - DNA, 15 bp, Homo sapiens
tcccccgatttcctt

SEQ ID NO: 752535 - DNA, 15 bp, Homo sapiens
cccccgatttccttt

SEQ ID NO: 752536 - DNA, 15 bp, Homo sapiens
ccccgatttcctttt

SEQ ID NO: 752537 - DNA, 15 bp, Homo sapiens
cccgatttccttttc

SEQ ID NO: 752538 - DNA, 15 bp, Homo sapiens
ccgatttccttttcc

SEQ ID NO: 752539 - DNA, 15 bp, Homo sapiens
cgatttccttttccc

SEQ ID NO: 752540 - DNA, 15 bp, Homo sapiens
gatttccttttccca

SEQ ID NO: 752541 - DNA, 15 bp, Homo sapiens
atttccttttcccag

SEQ ID NO: 752542 - DNA, 15 bp, Homo sapiens
tttccttttcccagg

SEQ ID NO: 752543 - DNA, 15 bp, Homo sapiens
ttccttttcccagga

SEQ ID NO: 752544 - DNA, 15 bp, Homo sapiens
tccttttcccaggag

SEQ ID NO: 752545 - DNA, 15 bp, Homo sapiens
ccttttcccaggagg

SEQ ID NO: 752546 - DNA, 15 bp, Homo sapiens
cttttcccaggaggc

SEQ ID NO: 752547 - DNA, 15 bp, Homo sapiens
ttttcccaggaggca

SEQ ID NO: 752548 - DNA, 15 bp, Homo sapiens
tttcccaggaggcac

SEQ ID NO: 752549 - DNA, 15 bp, Homo sapiens
ttcccaggaggcacc

SEQ ID NO: 752550 - DNA, 15 bp, Homo sapiens
tcccaggaggcacca

SEQ ID NO: 752551 - DNA, 15 bp, Homo sapiens
cccaggaggcaccag

SEQ ID NO: 752552 - DNA, 15 bp, Homo sapiens
ccaggaggcaccagc

SEQ ID NO: 752553 - DNA, 15 bp, Homo sapiens
caggaggcaccagct

SEQ ID NO: 752554 - DNA, 15 bp, Homo sapiens
aggaggcaccagctt

SEQ ID NO: 752555 - DNA, 15 bp, Homo sapiens
ggaggcaccagcttc

SEQ ID NO: 752556 - DNA, 15 bp, Homo sapiens
gaggcaccagcttcc

SEQ ID NO: 752557 - DNA, 15 bp, Homo sapiens
aggcaccagcttcca

SEQ ID NO: 752558 - DNA, 15 bp, Homo sapiens
ggcaccagcttccac

SEQ ID NO: 752559 - DNA, 15 bp, Homo sapiens
gcaccagcttccaca

SEQ ID NO: 752560 - DNA, 15 bp, Homo sapiens
caccagcttccacag

SEQ ID NO: 752561 - DNA, 15 bp, Homo sapiens
accagcttccacagg

SEQ ID NO: 752562 - DNA, 15 bp, Homo sapiens
ccagcttccacagga

SEQ ID NO: 752563 - DNA, 15 bp, Homo sapiens
cagcttccacaggat

SEQ ID NO: 752564 - DNA, 15 bp, Homo sapiens
agcttccacaggatt

SEQ ID NO: 752565 - DNA, 15 bp, Homo sapiens
gcttccacaggattt

SEQ ID NO: 752566 - DNA, 15 bp, Homo sapiens
cttccacaggatttg

SEQ ID NO: 752567 - DNA, 15 bp, Homo sapiens
ttccacaggatttgg

SEQ ID NO: 752568 - DNA, 15 bp, Homo sapiens
tccacaggatttgga

SEQ ID NO: 752569 - DNA, 15 bp, Homo sapiens
ccacaggatttggag

SEQ ID NO: 752570 - DNA, 15 bp, Homo sapiens
cacaggatttggaga

SEQ ID NO: 752571 - DNA, 15 bp, Homo sapiens
acaggatttggagag

SEQ ID NO: 752572 - DNA, 15 bp, Homo sapiens
caggatttggagagg

SEQ ID NO: 752573 - DNA, 15 bp, Homo sapiens
aggatttggagagga

SEQ ID NO: 752574 - DNA, 15 bp, Homo sapiens
ggatttggagaggat

SEQ ID NO: 752575 - DNA, 15 bp, Homo sapiens
gatttggagaggatg

SEQ ID NO: 752576 - DNA, 15 bp, Homo sapiens
atttggagaggatgt

SEQ ID NO: 752577 - DNA, 15 bp, Homo sapiens
tttggagaggatgta

SEQ ID NO: 752578 - DNA, 15 bp, Homo sapiens
ttggagaggatgtat

SEQ ID NO: 752579 - DNA, 15 bp, Homo sapiens
tggagaggatgtatt

SEQ ID NO: 752580 - DNA, 15 bp, Homo sapiens
ggagaggatgtattc

SEQ ID NO: 752581 - DNA, 15 bp, Homo sapiens
gagaggatgtattct

SEQ ID NO: 752582 - DNA, 15 bp, Homo sapiens
agaggatgtattcta

SEQ ID NO: 752583 - DNA, 15 bp, Homo sapiens
gaggatgtattctac

SEQ ID NO: 752584 - DNA, 15 bp, Homo sapiens
aggatgtattctact

SEQ ID NO: 752585 - DNA, 15 bp, Homo sapiens
ggatgtattctactt

SEQ ID NO: 752586 - DNA, 15 bp, Homo sapiens
gatgtattctacttc

SEQ ID NO: 752587 - DNA, 15 bp, Homo sapiens
atgtattctacttct

SEQ ID NO: 752588 - DNA, 15 bp, Homo sapiens
tgtattctacttctg

SEQ ID NO: 752589 - DNA, 15 bp, Homo sapiens
gtattctacttctgg

SEQ ID NO: 752590 - DNA, 15 bp, Homo sapiens
tattctacttctggt

SEQ ID NO: 752591 - DNA, 15 bp, Homo sapiens
attctacttctggta

SEQ ID NO: 752592 - DNA, 15 bp, Homo sapiens
ttctacttctggtat

SEQ ID NO: 752593 - DNA, 15 bp, Homo sapiens
tctacttctggtatc

SEQ ID NO: 752594 - DNA, 15 bp, Homo sapiens
ctacttctggtatct

SEQ ID NO: 752595 - DNA, 15 bp, Homo sapiens
tacttctggtatctt

SEQ ID NO: 752596 - DNA, 15 bp, Homo sapiens
acttctggtatctta

SEQ ID NO: 752597 - DNA, 15 bp, Homo sapiens
cttctggtatcttag

SEQ ID NO: 752598 - DNA, 15 bp, Homo sapiens
ttctggtatcttaga

SEQ ID NO: 752599 - DNA, 15 bp, Homo sapiens
tctggtatcttagaa

SEQ ID NO: 752600 - DNA, 15 bp, Homo sapiens
ctggtatcttagaat

SEQ ID NO: 752601 - DNA, 15 bp, Homo sapiens
tggtatcttagaatc

SEQ ID NO: 752602 - DNA, 15 bp, Homo sapiens
ggtatcttagaatcc

SEQ ID NO: 752603 - DNA, 15 bp, Homo sapiens
gtatcttagaatcca

SEQ ID NO: 752604 - DNA, 15 bp, Homo sapiens
tatcttagaatccag

SEQ ID NO: 752605 - DNA, 15 bp, Homo sapiens
atcttagaatccaga

SEQ ID NO: 752606 - DNA, 15 bp, Homo sapiens
tcttagaatccagaa

SEQ ID NO: 752607 - DNA, 15 bp, Homo sapiens
cttagaatccagaat

SEQ ID NO: 752608 - DNA, 15 bp, Homo sapiens
ttagaatccagaatc

SEQ ID NO: 752609 - DNA, 15 bp, Homo sapiens
tagaatccagaatct

SEQ ID NO: 752610 - DNA, 15 bp, Homo sapiens
agaatccagaatctt

SEQ ID NO: 752611 - DNA, 15 bp, Homo sapiens
gaatccagaatcttg

SEQ ID NO: 752612 - DNA, 15 bp, Homo sapiens
aatccagaatcttga

SEQ ID NO: 752613 - DNA, 15 bp, Homo sapiens
atccagaatcttgaa

SEQ ID NO: 752614 - DNA, 15 bp, Homo sapiens
tccagaatcttgaaa

SEQ ID NO: 752615 - DNA, 15 bp, Homo sapiens
ccagaatcttgaaag

SEQ ID NO: 752616 - DNA, 15 bp, Homo sapiens
cagaatcttgaaaga

SEQ ID NO: 752617 - DNA, 15 bp, Homo sapiens
agaatcttgaaagac

SEQ ID NO: 752618 - DNA, 15 bp, Homo sapiens
gaatcttgaaagaca

SEQ ID NO: 752619 - DNA, 15 bp, Homo sapiens
aatcttgaaagacaa

SEQ ID NO: 752620 - DNA, 15 bp, Homo sapiens
atcttgaaagacaac

SEQ ID NO: 752621 - DNA, 15 bp, Homo sapiens
tcttgaaagacaaca

SEQ ID NO: 752622 - DNA, 15 bp, Homo sapiens
cttgaaagacaacag

SEQ ID NO: 752623 - DNA, 15 bp, Homo sapiens
ttgaaagacaacaga

SEQ ID NO: 752624 - DNA, 15 bp, Homo sapiens
tgaaagacaacagag

SEQ ID NO: 752625 - DNA, 15 bp, Homo sapiens
gaaagacaacagagg

SEQ ID NO: 752626 - DNA, 15 bp, Homo sapiens
aaagacaacagagga

SEQ ID NO: 752627 - DNA, 15 bp, Homo sapiens
aagacaacagaggag

SEQ ID NO: 752628 - DNA, 15 bp, Homo sapiens
agacaacagaggaga

SEQ ID NO: 752629 - DNA, 15 bp, Homo sapiens
gacaacagaggagat

SEQ ID NO: 752630 - DNA, 15 bp, Homo sapiens
acaacagaggagatc

SEQ ID NO: 752631 - DNA, 15 bp, Homo sapiens
caacagaggagatca

SEQ ID NO: 752632 - DNA, 15 bp, Homo sapiens
aacagaggagatcaa

SEQ ID NO: 752633 - DNA, 15 bp, Homo sapiens
acagaggagatcaaa

SEQ ID NO: 752634 - DNA, 15 bp, Homo sapiens
cagaggagatcaaag

SEQ ID NO: 752635 - DNA, 15 bp, Homo sapiens
agaggagatcaaaga

SEQ ID NO: 752636 - DNA, 15 bp, Homo sapiens
gaggagatcaaagat

SEQ ID NO: 752637 - DNA, 15 bp, Homo sapiens
aggagatcaaagata

SEQ ID NO: 752638 - DNA, 15 bp, Homo sapiens
ggagatcaaagatag

SEQ ID NO: 752639 - DNA, 15 bp, Homo sapiens
gagatcaaagataga

SEQ ID NO: 752640 - DNA, 15 bp, Homo sapiens
agatcaaagatagaa

SEQ ID NO: 752641 - DNA, 15 bp, Homo sapiens
gatcaaagatagaat

SEQ ID NO: 752642 - DNA, 15 bp, Homo sapiens
atcaaagatagaatg

SEQ ID NO: 752643 - DNA, 15 bp, Homo sapiens
tcaaagatagaatgg

SEQ ID NO: 752644 - DNA, 15 bp, Homo sapiens
caaagatagaatgga

SEQ ID NO: 752645 - DNA, 15 bp, Homo sapiens
aaagatagaatggac

SEQ ID NO: 752646 - DNA, 15 bp, Homo sapiens
aagatagaatggacc

SEQ ID NO: 752647 - DNA, 15 bp, Homo sapiens
agatagaatggacca

SEQ ID NO: 752648 - DNA, 15 bp, Homo sapiens
gatagaatggaccaa

SEQ ID NO: 752649 - DNA, 15 bp, Homo sapiens
atagaatggaccaat

SEQ ID NO: 752650 - DNA, 15 bp, Homo sapiens
tagaatggaccaatt

SEQ ID NO: 752651 - DNA, 15 bp, Homo sapiens
agaatggaccaatta

SEQ ID NO: 752652 - DNA, 15 bp, Homo sapiens
gaatggaccaattac

SEQ ID NO: 752653 - DNA, 15 bp, Homo sapiens
aatggaccaattaca

SEQ ID NO: 752654 - DNA, 15 bp, Homo sapiens
atggaccaattacat

SEQ ID NO: 752655 - DNA, 15 bp, Homo sapiens
tggaccaattacatt

SEQ ID NO: 752656 - DNA, 15 bp, Homo sapiens
ggaccaattacattc

SEQ ID NO: 752657 - DNA, 15 bp, Homo sapiens
gaccaattacattct

SEQ ID NO: 752658 - DNA, 15 bp, Homo sapiens
accaattacattcta

SEQ ID NO: 752659 - DNA, 15 bp, Homo sapiens
ccaattacattctag

SEQ ID NO: 752660 - DNA, 15 bp, Homo sapiens
caattacattctaga

SEQ ID NO: 752661 - DNA, 15 bp, Homo sapiens
aattacattctagaa

SEQ ID NO: 752662 - DNA, 15 bp, Homo sapiens
attacattctagaaa

SEQ ID NO: 752663 - DNA, 15 bp, Homo sapiens
ttacattctagaaaa

SEQ ID NO: 752664 - DNA, 15 bp, Homo sapiens
tacattctagaaaag

SEQ ID NO: 752665 - DNA, 15 bp, Homo sapiens
acattctagaaaagg

SEQ ID NO: 752666 - DNA, 15 bp, Homo sapiens
cattctagaaaaggc

SEQ ID NO: 752667 - DNA, 15 bp, Homo sapiens
attctagaaaaggct

SEQ ID NO: 752668 - DNA, 15 bp, Homo sapiens
ttctagaaaaggctg

SEQ ID NO: 752669 - DNA, 15 bp, Homo sapiens
tctagaaaaggctgt

SEQ ID NO: 752670 - DNA, 15 bp, Homo sapiens
ctagaaaaggctgtt

SEQ ID NO: 752671 - DNA, 15 bp, Homo sapiens
tagaaaaggctgttg

SEQ ID NO: 752672 - DNA, 15 bp, Homo sapiens
agaaaaggctgttga

SEQ ID NO: 752673 - DNA, 15 bp, Homo sapiens
gaaaaggctgttgac

SEQ ID NO: 752674 - DNA, 15 bp, Homo sapiens
aaaaggctgttgact

SEQ ID NO: 752675 - DNA, 15 bp, Homo sapiens
aaaggctgttgacta

SEQ ID NO: 752676 - DNA, 15 bp, Homo sapiens
aaggctgttgactag

SEQ ID NO: 752677 - DNA, 15 bp, Homo sapiens
aggctgttgactaga

SEQ ID NO: 752678 - DNA, 15 bp, Homo sapiens
ggctgttgactagaa

SEQ ID NO: 752679 - DNA, 15 bp, Homo sapiens
gctgttgactagaac

SEQ ID NO: 752680 - DNA, 15 bp, Homo sapiens
ctgttgactagaact

SEQ ID NO: 752681 - DNA, 15 bp, Homo sapiens
tgttgactagaactt

SEQ ID NO: 752682 - DNA, 15 bp, Homo sapiens
gttgactagaacttt

SEQ ID NO: 752683 - DNA, 15 bp, Homo sapiens
ttgactagaactttg

SEQ ID NO: 752684 - DNA, 15 bp, Homo sapiens
tgactagaactttgt

SEQ ID NO: 752685 - DNA, 15 bp, Homo sapiens
gactagaactttgtt

SEQ ID NO: 752686 - DNA, 15 bp, Homo sapiens
actagaactttgttt

SEQ ID NO: 752687 - DNA, 15 bp, Homo sapiens
ctagaactttgttta

SEQ ID NO: 752688 - DNA, 15 bp, Homo sapiens
tagaactttgtttag

SEQ ID NO: 752689 - DNA, 15 bp, Homo sapiens
agaactttgtttagg

SEQ ID NO: 752690 - DNA, 15 bp, Homo sapiens
gaactttgtttaggg

SEQ ID NO: 752691 - DNA, 15 bp, Homo sapiens
aactttgtttaggga

SEQ ID NO: 752692 - DNA, 15 bp, Homo sapiens
actttgtttagggat

SEQ ID NO: 752693 - DNA, 15 bp, Homo sapiens
ctttgtttagggata

SEQ ID NO: 752694 - DNA, 15 bp, Homo sapiens
tttgtttagggatag

SEQ ID NO: 752695 - DNA, 15 bp, Homo sapiens
ttgtttagggatagt

SEQ ID NO: 752696 - DNA, 15 bp, Homo sapiens
tgtttagggatagtg

SEQ ID NO: 752697 - DNA, 15 bp, Homo sapiens
gtttagggatagtgg

SEQ ID NO: 752698 - DNA, 15 bp, Homo sapiens
tttagggatagtggg

SEQ ID NO: 752699 - DNA, 15 bp, Homo sapiens
ttagggatagtggga

SEQ ID NO: 752700 - DNA, 15 bp, Homo sapiens
tagggatagtgggat

SEQ ID NO: 752701 - DNA, 15 bp, Homo sapiens
agggatagtgggata

SEQ ID NO: 752702 - DNA, 15 bp, Homo sapiens
gggatagtgggataa

SEQ ID NO: 752703 - DNA, 15 bp, Homo sapiens
ggatagtgggataaa

SEQ ID NO: 752704 - DNA, 15 bp, Homo sapiens
gatagtgggataaat

SEQ ID NO: 752705 - DNA, 15 bp, Homo sapiens
atagtgggataaatt

SEQ ID NO: 752706 - DNA, 15 bp, Homo sapiens
tagtgggataaatta

SEQ ID NO: 752707 - DNA, 15 bp, Homo sapiens
agtgggataaattaa

SEQ ID NO: 752708 - DNA, 15 bp, Homo sapiens
gtgggataaattaaa

SEQ ID NO: 752709 - DNA, 15 bp, Homo sapiens
tgggataaattaaat

SEQ ID NO: 752710 - DNA, 15 bp, Homo sapiens
gggataaattaaatg

SEQ ID NO: 752711 - DNA, 15 bp, Homo sapiens
ggataaattaaatgc

SEQ ID NO: 752712 - DNA, 15 bp, Homo sapiens
gataaattaaatgct

SEQ ID NO: 752713 - DNA, 15 bp, Homo sapiens
ataaattaaatgctt

SEQ ID NO: 752714 - DNA, 15 bp, Homo sapiens
taaattaaatgcttc

SEQ ID NO: 752715 - DNA, 15 bp, Homo sapiens
aaattaaatgcttca

SEQ ID NO: 752716 - DNA, 15 bp, Homo sapiens
aattaaatgcttcaa

SEQ ID NO: 752717 - DNA, 15 bp, Homo sapiens
attaaatgcttcaat

SEQ ID NO: 752718 - DNA, 15 bp, Homo sapiens
ttaaatgcttcaata

SEQ ID NO: 752719 - DNA, 15 bp, Homo sapiens
taaatgcttcaatat

SEQ ID NO: 752720 - DNA, 15 bp, Homo sapiens
aaatgcttcaatata

SEQ ID NO: 752721 - DNA, 15 bp, Homo sapiens
aatgcttcaatatac

SEQ ID NO: 752722 - DNA, 15 bp, Homo sapiens
atgcttcaatataca

SEQ ID NO: 752723 - DNA, 15 bp, Homo sapiens
tgcttcaatatacat

SEQ ID NO: 752724 - DNA, 15 bp, Homo sapiens
gcttcaatatacatt

SEQ ID NO: 752725 - DNA, 15 bp, Homo sapiens
cttcaatatacatta

SEQ ID NO: 752726 - DNA, 15 bp, Homo sapiens
ttcaatatacattat

SEQ ID NO: 752727 - DNA, 15 bp, Homo sapiens
tcaatatacattatg

SEQ ID NO: 752728 - DNA, 15 bp, Homo sapiens
caatatacattatgg

SEQ ID NO: 752729 - DNA, 15 bp, Homo sapiens
aatatacattatgga

SEQ ID NO: 752730 - DNA, 15 bp, Homo sapiens
atatacattatggag

SEQ ID NO: 752731 - DNA, 15 bp, Homo sapiens
tatacattatggaga

SEQ ID NO: 752732 - DNA, 15 bp, Homo sapiens
atacattatggagat

SEQ ID NO: 752733 - DNA, 15 bp, Homo sapiens
tacattatggagatt

SEQ ID NO: 752734 - DNA, 15 bp, Homo sapiens
acattatggagatta

SEQ ID NO: 752735 - DNA, 15 bp, Homo sapiens
cattatggagattat

SEQ ID NO: 752736 - DNA, 15 bp, Homo sapiens
attatggagattatt

SEQ ID NO: 752737 - DNA, 15 bp, Homo sapiens
ttatggagattatta

SEQ ID NO: 752738 - DNA, 15 bp, Homo sapiens
tatggagattattat

SEQ ID NO: 752739 - DNA, 15 bp, Homo sapiens
atggagattattatg

SEQ ID NO: 752740 - DNA, 15 bp, Homo sapiens
tggagattattatga

SEQ ID NO: 752741 - DNA, 15 bp, Homo sapiens
ggagattattatgac

SEQ ID NO: 752742 - DNA, 15 bp, Homo sapiens
gagattattatgact

SEQ ID NO: 752743 - DNA, 15 bp, Homo sapiens
agattattatgactg

SEQ ID NO: 752744 - DNA, 15 bp, Homo sapiens
gattattatgactga

SEQ ID NO: 752745 - DNA, 15 bp, Homo sapiens
attattatgactgac

SEQ ID NO: 752746 - DNA, 15 bp, Homo sapiens
ttattatgactgaca

SEQ ID NO: 752747 - DNA, 15 bp, Homo sapiens
tattatgactgacaa

SEQ ID NO: 752748 - DNA, 15 bp, Homo sapiens
attatgactgacaaa

SEQ ID NO: 752749 - DNA, 15 bp, Homo sapiens
ttatgactgacaaag

SEQ ID NO: 752750 - DNA, 15 bp, Homo sapiens
tatgactgacaaaga

SEQ ID NO: 752751 - DNA, 15 bp, Homo sapiens
atgactgacaaagat

SEQ ID NO: 752752 - DNA, 15 bp, Homo sapiens
tgactgacaaagata

SEQ ID NO: 752753 - DNA, 15 bp, Homo sapiens
gactgacaaagatag

SEQ ID NO: 752754 - DNA, 15 bp, Homo sapiens
actgacaaagatagg

SEQ ID NO: 752755 - DNA, 15 bp, Homo sapiens
ctgacaaagataggg

SEQ ID NO: 752756 - DNA, 15 bp, Homo sapiens
tgacaaagatagggc

SEQ ID NO: 752757 - DNA, 15 bp, Homo sapiens
gacaaagatagggca

SEQ ID NO: 752758 - DNA, 15 bp, Homo sapiens
acaaagatagggcac

SEQ ID NO: 752759 - DNA, 15 bp, Homo sapiens
caaagatagggcact

SEQ ID NO: 752760 - DNA, 15 bp, Homo sapiens
aaagatagggcacta

SEQ ID NO: 752761 - DNA, 15 bp, Homo sapiens
aagatagggcactat

SEQ ID NO: 752762 - DNA, 15 bp, Homo sapiens
agatagggcactata

SEQ ID NO: 752763 - DNA, 15 bp, Homo sapiens
gatagggcactatat

SEQ ID NO: 752764 - DNA, 15 bp, Homo sapiens
atagggcactatatt

SEQ ID NO: 752765 - DNA, 15 bp, Homo sapiens
tagggcactatattc

SEQ ID NO: 752766 - DNA, 15 bp, Homo sapiens
agggcactatattca

SEQ ID NO: 752767 - DNA, 15 bp, Homo sapiens
gggcactatattcaa

SEQ ID NO: 752768 - DNA, 15 bp, Homo sapiens
ggcactatattcaaa

SEQ ID NO: 752769 - DNA, 15 bp, Homo sapiens
gcactatattcaaat

SEQ ID NO: 752770 - DNA, 15 bp, Homo sapiens
cactatattcaaatg

SEQ ID NO: 752771 - DNA, 15 bp, Homo sapiens
actatattcaaatga

SEQ ID NO: 752772 - DNA, 15 bp, Homo sapiens
ctatattcaaatgaa

SEQ ID NO: 752773 - DNA, 15 bp, Homo sapiens
tatattcaaatgaag

SEQ ID NO: 752774 - DNA, 15 bp, Homo sapiens
atattcaaatgaagg

SEQ ID NO: 752775 - DNA, 15 bp, Homo sapiens
tattcaaatgaaggt

SEQ ID NO: 752776 - DNA, 15 bp, Homo sapiens
attcaaatgaaggtc

SEQ ID NO: 752777 - DNA, 15 bp, Homo sapiens
ttcaaatgaaggtcg

SEQ ID NO: 752778 - DNA, 15 bp, Homo sapiens
tcaaatgaaggtcgt

SEQ ID NO: 752779 - DNA, 15 bp, Homo sapiens
caaatgaaggtcgta

SEQ ID NO: 752780 - DNA, 15 bp, Homo sapiens
aaatgaaggtcgtag

SEQ ID NO: 752781 - DNA, 15 bp, Homo sapiens
aatgaaggtcgtagc

SEQ ID NO: 752782 - DNA, 15 bp, Homo sapiens
atgaaggtcgtagca

SEQ ID NO: 752783 - DNA, 15 bp, Homo sapiens
tgaaggtcgtagcag

SEQ ID NO: 752784 - DNA, 15 bp, Homo sapiens
gaaggtcgtagcagg

SEQ ID NO: 752785 - DNA, 15 bp, Homo sapiens
aaggtcgtagcagga

SEQ ID NO: 752786 - DNA, 15 bp, Homo sapiens
aggtcgtagcaggaa

SEQ ID NO: 752787 - DNA, 15 bp, Homo sapiens
ggtcgtagcaggaaa

SEQ ID NO: 752788 - DNA, 15 bp, Homo sapiens
gtcgtagcaggaaac

SEQ ID NO: 752789 - DNA, 15 bp, Homo sapiens
tcgtagcaggaaaca

SEQ ID NO: 752790 - DNA, 15 bp, Homo sapiens
cgtagcaggaaacat

SEQ ID NO: 752791 - DNA, 15 bp, Homo sapiens
gtagcaggaaacata

SEQ ID NO: 752792 - DNA, 15 bp, Homo sapiens
tagcaggaaacatat

SEQ ID NO: 752793 - DNA, 15 bp, Homo sapiens
agcaggaaacatatc

SEQ ID NO: 752794 - DNA, 15 bp, Homo sapiens
gcaggaaacatatca

SEQ ID NO: 752795 - DNA, 15 bp, Homo sapiens
caggaaacatatcat

SEQ ID NO: 752796 - DNA, 15 bp, Homo sapiens
aggaaacatatcata

SEQ ID NO: 752797 - DNA, 15 bp, Homo sapiens
ggaaacatatcatac

SEQ ID NO: 752798 - DNA, 15 bp, Homo sapiens
gaaacatatcataca

SEQ ID NO: 752799 - DNA, 15 bp, Homo sapiens
aaacatatcatacat

SEQ ID NO: 752800 - DNA, 15 bp, Homo sapiens
aacatatcatacatt

SEQ ID NO: 752801 - DNA, 15 bp, Homo sapiens
acatatcatacattc

SEQ ID NO: 752802 - DNA, 15 bp, Homo sapiens
catatcatacattct

SEQ ID NO: 752803 - DNA, 15 bp, Homo sapiens
atatcatacattcta

SEQ ID NO: 752804 - DNA, 15 bp, Homo sapiens
tatcatacattctat

SEQ ID NO: 752805 - DNA, 15 bp, Homo sapiens
atcatacattctatc

SEQ ID NO: 752806 - DNA, 15 bp, Homo sapiens
tcatacattctatct

SEQ ID NO: 752807 - DNA, 15 bp, Homo sapiens
catacattctatcta

SEQ ID NO: 752808 - DNA, 15 bp, Homo sapiens
atacattctatctat

SEQ ID NO: 752809 - DNA, 15 bp, Homo sapiens
tacattctatctatc

SEQ ID NO: 752810 - DNA, 15 bp, Homo sapiens
acattctatctatct

SEQ ID NO: 752811 - DNA, 15 bp, Homo sapiens
cattctatctatcta

SEQ ID NO: 752812 - DNA, 15 bp, Homo sapiens
attctatctatctat

SEQ ID NO: 752813 - DNA, 15 bp, Homo sapiens
ttctatctatctatc

SEQ ID NO: 752814 - DNA, 15 bp, Homo sapiens
tctatctatctatct

SEQ ID NO: 752815 - DNA, 15 bp, Homo sapiens
ctatctatctatcta

SEQ ID NO: 752816 - DNA, 15 bp, Homo sapiens
tatctatctatctat

SEQ ID NO: 752817 - DNA, 15 bp, Homo sapiens
atctatctatctatc

SEQ ID NO: 752818 - DNA, 15 bp, Homo sapiens
tatctatctatctaa

SEQ ID NO: 752819 - DNA, 15 bp, Homo sapiens
atctatctatctaat

SEQ ID NO: 752820 - DNA, 15 bp, Homo sapiens
tctatctatctaatc

SEQ ID NO: 752821 - DNA, 15 bp, Homo sapiens
ctatctatctaatct

SEQ ID NO: 752822 - DNA, 15 bp, Homo sapiens
tatctatctaatcta

SEQ ID NO: 752823 - DNA, 15 bp, Homo sapiens
atctatctaatctat

SEQ ID NO: 752824 - DNA, 15 bp, Homo sapiens
tctatctaatctatc

SEQ ID NO: 752825 - DNA, 15 bp, Homo sapiens
ctatctaatctatct

SEQ ID NO: 752826 - DNA, 15 bp, Homo sapiens
tatctaatctatcta

SEQ ID NO: 752827 - DNA, 15 bp, Homo sapiens
atctaatctatctat

SEQ ID NO: 752828 - DNA, 15 bp, Homo sapiens
tctaatctatctatc

SEQ ID NO: 752829 - DNA, 15 bp, Homo sapiens
ctaatctatctatct

SEQ ID NO: 752830 - DNA, 15 bp, Homo sapiens
taatctatctatcta

SEQ ID NO: 752831 - DNA, 15 bp, Homo sapiens
aatctatctatctag

SEQ ID NO: 752832 - DNA, 15 bp, Homo sapiens
atctatctatctaga

SEQ ID NO: 752833 - DNA, 15 bp, Homo sapiens
tctatctatctagag

SEQ ID NO: 752834 - DNA, 15 bp, Homo sapiens
ctatctatctagaga

SEQ ID NO: 752835 - DNA, 15 bp, Homo sapiens
tatctatctagagac

SEQ ID NO: 752836 - DNA, 15 bp, Homo sapiens
atctatctagagaca

SEQ ID NO: 752837 - DNA, 15 bp, Homo sapiens
tctatctagagacag

SEQ ID NO: 752838 - DNA, 15 bp, Homo sapiens
ctatctagagacagt

SEQ ID NO: 752839 - DNA, 15 bp, Homo sapiens
tatctagagacagtc

SEQ ID NO: 752840 - DNA, 15 bp, Homo sapiens
atctagagacagtct

SEQ ID NO: 752841 - DNA, 15 bp, Homo sapiens
tctagagacagtctt

SEQ ID NO: 752842 - DNA, 15 bp, Homo sapiens
ctagagacagtcttt

SEQ ID NO: 752843 - DNA, 15 bp, Homo sapiens
tagagacagtctttc

SEQ ID NO: 752844 - DNA, 15 bp, Homo sapiens
agagacagtctttct

SEQ ID NO: 752845 - DNA, 15 bp, Homo sapiens
gagacagtctttctc

SEQ ID NO: 752846 - DNA, 15 bp, Homo sapiens
agacagtctttctct

SEQ ID NO: 752847 - DNA, 15 bp, Homo sapiens
gacagtctttctctg

SEQ ID NO: 752848 - DNA, 15 bp, Homo sapiens
acagtctttctctgt

SEQ ID NO: 752849 - DNA, 15 bp, Homo sapiens
cagtctttctctgtt

SEQ ID NO: 752850 - DNA, 15 bp, Homo sapiens
agtctttctctgttg

SEQ ID NO: 752851 - DNA, 15 bp, Homo sapiens
gtctttctctgttgc

SEQ ID NO: 752852 - DNA, 15 bp, Homo sapiens
tctttctctgttgcc

SEQ ID NO: 752853 - DNA, 15 bp, Homo sapiens
ctttctctgttgccc

SEQ ID NO: 752854 - DNA, 15 bp, Homo sapiens
tttctctgttgccca

SEQ ID NO: 752855 - DNA, 15 bp, Homo sapiens
ttctctgttgcccag

SEQ ID NO: 752856 - DNA, 15 bp, Homo sapiens
tctctgttgcccaga

SEQ ID NO: 752857 - DNA, 15 bp, Homo sapiens
ctctgttgcccagac

SEQ ID NO: 752858 - DNA, 15 bp, Homo sapiens
tctgttgcccagact

SEQ ID NO: 752859 - DNA, 15 bp, Homo sapiens
ctgttgcccagactg

SEQ ID NO: 752860 - DNA, 15 bp, Homo sapiens
tgttgcccagactgg

SEQ ID NO: 752861 - DNA, 15 bp, Homo sapiens
gttgcccagactgga

SEQ ID NO: 752862 - DNA, 15 bp, Homo sapiens
ttgcccagactggag

SEQ ID NO: 752863 - DNA, 15 bp, Homo sapiens
tgcccagactggagt

SEQ ID NO: 752864 - DNA, 15 bp, Homo sapiens
gcccagactggagtg

SEQ ID NO: 752865 - DNA, 15 bp, Homo sapiens
cccagactggagtgc

SEQ ID NO: 752866 - DNA, 15 bp, Homo sapiens
ccagactggagtgca

SEQ ID NO: 752867 - DNA, 15 bp, Homo sapiens
cagactggagtgcag

SEQ ID NO: 752868 - DNA, 15 bp, Homo sapiens
agactggagtgcagt

SEQ ID NO: 752869 - DNA, 15 bp, Homo sapiens
gactggagtgcagtg

SEQ ID NO: 752870 - DNA, 15 bp, Homo sapiens
actggagtgcagtgg

SEQ ID NO: 752871 - DNA, 15 bp, Homo sapiens
gagtgcagtggcata

SEQ ID NO: 752872 - DNA, 15 bp, Homo sapiens
agtgcagtggcataa

SEQ ID NO: 752873 - DNA, 15 bp, Homo sapiens
gtgcagtggcataat

SEQ ID NO: 752874 - DNA, 15 bp, Homo sapiens
tgcagtggcataatc

SEQ ID NO: 752875 - DNA, 15 bp, Homo sapiens
gcagtggcataatct

SEQ ID NO: 752876 - DNA, 15 bp, Homo sapiens
cagtggcataatctt

SEQ ID NO: 752877 - DNA, 15 bp, Homo sapiens
agtggcataatcttg

SEQ ID NO: 752878 - DNA, 15 bp, Homo sapiens
gtggcataatcttgg

SEQ ID NO: 752879 - DNA, 15 bp, Homo sapiens
tggcataatcttggc

SEQ ID NO: 752880 - DNA, 15 bp, Homo sapiens
ggcataatcttggct

SEQ ID NO: 752881 - DNA, 15 bp, Homo sapiens
gcataatcttggctc

SEQ ID NO: 752882 - DNA, 15 bp, Homo sapiens
cataatcttggctca

SEQ ID NO: 752883 - DNA, 15 bp, Homo sapiens
ataatcttggctcac

SEQ ID NO: 752884 - DNA, 15 bp, Homo sapiens
taatcttggctcact

SEQ ID NO: 752885 - DNA, 15 bp, Homo sapiens
aatcttggctcactg

SEQ ID NO: 752886 - DNA, 15 bp, Homo sapiens
ttggctcactgcaaa

SEQ ID NO: 752887 - DNA, 15 bp, Homo sapiens
tggctcactgcaaac

SEQ ID NO: 752888 - DNA, 15 bp, Homo sapiens
ggctcactgcaaacc

SEQ ID NO: 752889 - DNA, 15 bp, Homo sapiens
gctcactgcaaacct

SEQ ID NO: 752890 - DNA, 15 bp, Homo sapiens
ctcactgcaaaccta

SEQ ID NO: 752891 - DNA, 15 bp, Homo sapiens
tcactgcaaacctac

SEQ ID NO: 752892 - DNA, 15 bp, Homo sapiens
cactgcaaacctaca

SEQ ID NO: 752893 - DNA, 15 bp, Homo sapiens
actgcaaacctacag

SEQ ID NO: 752894 - DNA, 15 bp, Homo sapiens
ctgcaaacctacagc

SEQ ID NO: 752895 - DNA, 15 bp, Homo sapiens
tgcaaacctacagct

SEQ ID NO: 752896 - DNA, 15 bp, Homo sapiens
gcaaacctacagctc

SEQ ID NO: 752897 - DNA, 15 bp, Homo sapiens
caaacctacagctcc

SEQ ID NO: 752898 - DNA, 15 bp, Homo sapiens
aaacctacagctccc

SEQ ID NO: 752899 - DNA, 15 bp, Homo sapiens
aacctacagctccca

SEQ ID NO: 752900 - DNA, 15 bp, Homo sapiens
acctacagctcccag

SEQ ID NO: 752901 - DNA, 15 bp, Homo sapiens
cctacagctcccagg

SEQ ID NO: 752902 - DNA, 15 bp, Homo sapiens
ctacagctcccaggt

SEQ ID NO: 752903 - DNA, 15 bp, Homo sapiens
tacagctcccaggtt

SEQ ID NO: 752904 - DNA, 15 bp, Homo sapiens
acagctcccaggttc

SEQ ID NO: 752905 - DNA, 15 bp, Homo sapiens
cagctcccaggttca

SEQ ID NO: 752906 - DNA, 15 bp, Homo sapiens
agctcccaggttcaa

SEQ ID NO: 752907 - DNA, 15 bp, Homo sapiens
gctcccaggttcaag

SEQ ID NO: 752908 - DNA, 15 bp, Homo sapiens
tcccaggttcaagcg

SEQ ID NO: 752909 - DNA, 15 bp, Homo sapiens
cccaggttcaagcga

SEQ ID NO: 752910 - DNA, 15 bp, Homo sapiens
ccaggttcaagcgat

SEQ ID NO: 752911 - DNA, 15 bp, Homo sapiens
caggttcaagcgatt

SEQ ID NO: 752912 - DNA, 15 bp, Homo sapiens
aggttcaagcgattc

SEQ ID NO: 752913 - DNA, 15 bp, Homo sapiens
gttcaagcgattctc

SEQ ID NO: 752914 - DNA, 15 bp, Homo sapiens
ttcaagcgattctcg

SEQ ID NO: 752915 - DNA, 15 bp, Homo sapiens
tcaagcgattctcgt

SEQ ID NO: 752916 - DNA, 15 bp, Homo sapiens
caagcgattctcgtg

SEQ ID NO: 752917 - DNA, 15 bp, Homo sapiens
aagcgattctcgtgc

SEQ ID NO: 752918 - DNA, 15 bp, Homo sapiens
agcgattctcgtgcc

SEQ ID NO: 752919 - DNA, 15 bp, Homo sapiens
gcgattctcgtgcct

SEQ ID NO: 752920 - DNA, 15 bp, Homo sapiens
cgattctcgtgcctc

SEQ ID NO: 752921 - DNA, 15 bp, Homo sapiens
gattctcgtgcctca

SEQ ID NO: 752922 - DNA, 15 bp, Homo sapiens
attctcgtgcctcag

SEQ ID NO: 752923 - DNA, 15 bp, Homo sapiens
ttctcgtgcctcagc

SEQ ID NO: 752924 - DNA, 15 bp, Homo sapiens
tctcgtgcctcagcc

SEQ ID NO: 752925 - DNA, 15 bp, Homo sapiens
ctcgtgcctcagcct

SEQ ID NO: 752926 - DNA, 15 bp, Homo sapiens
tcgtgcctcagcctc

SEQ ID NO: 752927 - DNA, 15 bp, Homo sapiens
cgtgcctcagcctcc

SEQ ID NO: 752928 - DNA, 15 bp, Homo sapiens
gtgcctcagcctccg

SEQ ID NO: 752929 - DNA, 15 bp, Homo sapiens
tgcctcagcctccga

SEQ ID NO: 752930 - DNA, 15 bp, Homo sapiens
gcctcagcctccgag

SEQ ID NO: 752931 - DNA, 15 bp, Homo sapiens
cctcagcctccgagt

SEQ ID NO: 752932 - DNA, 15 bp, Homo sapiens
ctcagcctccgagta

SEQ ID NO: 752933 - DNA, 15 bp, Homo sapiens
tcagcctccgagtag

SEQ ID NO: 752934 - DNA, 15 bp, Homo sapiens
cagcctccgagtagc

SEQ ID NO: 752935 - DNA, 15 bp, Homo sapiens
agcctccgagtagct

SEQ ID NO: 752936 - DNA, 15 bp, Homo sapiens
gcctccgagtagctg

SEQ ID NO: 752937 - DNA, 15 bp, Homo sapiens
cctccgagtagctgg

SEQ ID NO: 752938 - DNA, 15 bp, Homo sapiens
ctccgagtagctggg

SEQ ID NO: 752939 - DNA, 15 bp, Homo sapiens
tccgagtagctggga

SEQ ID NO: 752940 - DNA, 15 bp, Homo sapiens
ggactacaggcatgc

SEQ ID NO: 752941 - DNA, 15 bp, Homo sapiens
gactacaggcatgca

SEQ ID NO: 752942 - DNA, 15 bp, Homo sapiens
actacaggcatgcac

SEQ ID NO: 752943 - DNA, 15 bp, Homo sapiens
ctacaggcatgcacc

SEQ ID NO: 752944 - DNA, 15 bp, Homo sapiens
tacaggcatgcacca

SEQ ID NO: 752945 - DNA, 15 bp, Homo sapiens
acaggcatgcaccac

SEQ ID NO: 752946 - DNA, 15 bp, Homo sapiens
caggcatgcaccacc

SEQ ID NO: 752947 - DNA, 15 bp, Homo sapiens
aggcatgcaccacca

SEQ ID NO: 752948 - DNA, 15 bp, Homo sapiens
ggcatgcaccaccag

SEQ ID NO: 752949 - DNA, 15 bp, Homo sapiens
gcatgcaccaccagg

SEQ ID NO: 752950 - DNA, 15 bp, Homo sapiens
catgcaccaccaggt

SEQ ID NO: 752951 - DNA, 15 bp, Homo sapiens
atgcaccaccaggtc

SEQ ID NO: 752952 - DNA, 15 bp, Homo sapiens
tgcaccaccaggtcc

SEQ ID NO: 752953 - DNA, 15 bp, Homo sapiens
gcaccaccaggtcca

SEQ ID NO: 752954 - DNA, 15 bp, Homo sapiens
caccaccaggtccag

SEQ ID NO: 752955 - DNA, 15 bp, Homo sapiens
accaccaggtccagc

SEQ ID NO: 752956 - DNA, 15 bp, Homo sapiens
ccaccaggtccagct

SEQ ID NO: 752957 - DNA, 15 bp, Homo sapiens
caccaggtccagcta

SEQ ID NO: 752958 - DNA, 15 bp, Homo sapiens
accaggtccagctaa

SEQ ID NO: 752959 - DNA, 15 bp, Homo sapiens
ccaggtccagctaat

SEQ ID NO: 752960 - DNA, 15 bp, Homo sapiens
caggtccagctaatt

SEQ ID NO: 752961 - DNA, 15 bp, Homo sapiens
aggtccagctaattt

SEQ ID NO: 752962 - DNA, 15 bp, Homo sapiens
ggtccagctaatttt

SEQ ID NO: 752963 - DNA, 15 bp, Homo sapiens
gtccagctaattttt

SEQ ID NO: 752964 - DNA, 15 bp, Homo sapiens
tccagctaatttttt

SEQ ID NO: 752965 - DNA, 15 bp, Homo sapiens
tagagacagagtttt

SEQ ID NO: 752966 - DNA, 15 bp, Homo sapiens
agagacagagttttg

SEQ ID NO: 752967 - DNA, 15 bp, Homo sapiens
gagacagagttttgc

SEQ ID NO: 752968 - DNA, 15 bp, Homo sapiens
agacagagttttgct

SEQ ID NO: 752969 - DNA, 15 bp, Homo sapiens
gacagagttttgcta

SEQ ID NO: 752970 - DNA, 15 bp, Homo sapiens
acagagttttgctat

SEQ ID NO: 752971 - DNA, 15 bp, Homo sapiens
cagagttttgctatg

SEQ ID NO: 752972 - DNA, 15 bp, Homo sapiens
agagttttgctatgt

SEQ ID NO: 752973 - DNA, 15 bp, Homo sapiens
gagttttgctatgtt

SEQ ID NO: 752974 - DNA, 15 bp, Homo sapiens
agttttgctatgttg

SEQ ID NO: 752975 - DNA, 15 bp, Homo sapiens
gttttgctatgttgc

SEQ ID NO: 752976 - DNA, 15 bp, Homo sapiens
ttttgctatgttgcc

SEQ ID NO: 752977 - DNA, 15 bp, Homo sapiens
tttgctatgttgccc

SEQ ID NO: 752978 - DNA, 15 bp, Homo sapiens
ttgctatgttgccca

SEQ ID NO: 752979 - DNA, 15 bp, Homo sapiens
tgctatgttgcccag

SEQ ID NO: 752980 - DNA, 15 bp, Homo sapiens
gctatgttgcccagg

SEQ ID NO: 752981 - DNA, 15 bp, Homo sapiens
ctatgttgcccaggc

SEQ ID NO: 752982 - DNA, 15 bp, Homo sapiens
tatgttgcccaggct

SEQ ID NO: 752983 - DNA, 15 bp, Homo sapiens
atgttgcccaggcta

SEQ ID NO: 752984 - DNA, 15 bp, Homo sapiens
tgttgcccaggctag

SEQ ID NO: 752985 - DNA, 15 bp, Homo sapiens
gttgcccaggctagt

SEQ ID NO: 752986 - DNA, 15 bp, Homo sapiens
ttgcccaggctagtc

SEQ ID NO: 752987 - DNA, 15 bp, Homo sapiens
tgcccaggctagtct

SEQ ID NO: 752988 - DNA, 15 bp, Homo sapiens
gcccaggctagtctc

SEQ ID NO: 752989 - DNA, 15 bp, Homo sapiens
cccaggctagtctca

SEQ ID NO: 752990 - DNA, 15 bp, Homo sapiens
ccaggctagtctcaa

SEQ ID NO: 752991 - DNA, 15 bp, Homo sapiens
caggctagtctcaaa

SEQ ID NO: 752992 - DNA, 15 bp, Homo sapiens
aggctagtctcaaac

SEQ ID NO: 752993 - DNA, 15 bp, Homo sapiens
ggctagtctcaaact

SEQ ID NO: 752994 - DNA, 15 bp, Homo sapiens
gctagtctcaaactc

SEQ ID NO: 752995 - DNA, 15 bp, Homo sapiens
ctagtctcaaactcc

SEQ ID NO: 752996 - DNA, 15 bp, Homo sapiens
tagtctcaaactcct

SEQ ID NO: 752997 - DNA, 15 bp, Homo sapiens
agtctcaaactcctg

SEQ ID NO: 752998 - DNA, 15 bp, Homo sapiens
tctcaaactcctgag

SEQ ID NO: 752999 - DNA, 15 bp, Homo sapiens
ctcaaactcctgagc

SEQ ID NO: 753000 - DNA, 15 bp, Homo sapiens
tcaaactcctgagct

SEQ ID NO: 753001 - DNA, 15 bp, Homo sapiens
caaactcctgagctc

SEQ ID NO: 753002 - DNA, 15 bp, Homo sapiens
aaactcctgagctca

SEQ ID NO: 753003 - DNA, 15 bp, Homo sapiens
aactcctgagctcag

SEQ ID NO: 753004 - DNA, 15 bp, Homo sapiens
actcctgagctcagg

SEQ ID NO: 753005 - DNA, 15 bp, Homo sapiens
ctcctgagctcaggt

SEQ ID NO: 753006 - DNA, 15 bp, Homo sapiens
tcctgagctcaggtg

SEQ ID NO: 753007 - DNA, 15 bp, Homo sapiens
cctgagctcaggtga

SEQ ID NO: 753008 - DNA, 15 bp, Homo sapiens
ctgagctcaggtgat

SEQ ID NO: 753009 - DNA, 15 bp, Homo sapiens
tgagctcaggtgatc

SEQ ID NO: 753010 - DNA, 15 bp, Homo sapiens
gagctcaggtgatct

SEQ ID NO: 753011 - DNA, 15 bp, Homo sapiens
agctcaggtgatctg

SEQ ID NO: 753012 - DNA, 15 bp, Homo sapiens
gctcaggtgatctgc

SEQ ID NO: 753013 - DNA, 15 bp, Homo sapiens
cctcccaaagtgcta

SEQ ID NO: 753014 - DNA, 15 bp, Homo sapiens
ctcccaaagtgctaa

SEQ ID NO: 753015 - DNA, 15 bp, Homo sapiens
tcccaaagtgctaag

SEQ ID NO: 753016 - DNA, 15 bp, Homo sapiens
cccaaagtgctaaga

SEQ ID NO: 753017 - DNA, 15 bp, Homo sapiens
ccaaagtgctaagat

SEQ ID NO: 753018 - DNA, 15 bp, Homo sapiens
caaagtgctaagatt

SEQ ID NO: 753019 - DNA, 15 bp, Homo sapiens
aaagtgctaagatta

SEQ ID NO: 753020 - DNA, 15 bp, Homo sapiens
aagtgctaagattac

SEQ ID NO: 753021 - DNA, 15 bp, Homo sapiens
agtgctaagattaca

SEQ ID NO: 753022 - DNA, 15 bp, Homo sapiens
gtgctaagattacag

SEQ ID NO: 753023 - DNA, 15 bp, Homo sapiens
tgctaagattacagg

SEQ ID NO: 753024 - DNA, 15 bp, Homo sapiens
gctaagattacaggt

SEQ ID NO: 753025 - DNA, 15 bp, Homo sapiens
ctaagattacaggtg

SEQ ID NO: 753026 - DNA, 15 bp, Homo sapiens
taagattacaggtgt

SEQ ID NO: 753027 - DNA, 15 bp, Homo sapiens
aagattacaggtgtg

SEQ ID NO: 753028 - DNA, 15 bp, Homo sapiens
agattacaggtgtga

SEQ ID NO: 753029 - DNA, 15 bp, Homo sapiens
caggtgtgagccact

SEQ ID NO: 753030 - DNA, 15 bp, Homo sapiens
aggtgtgagccactg

SEQ ID NO: 753031 - DNA, 15 bp, Homo sapiens
ggtgtgagccactgc

SEQ ID NO: 753032 - DNA, 15 bp, Homo sapiens
gtgtgagccactgcg

SEQ ID NO: 753033 - DNA, 15 bp, Homo sapiens
tgtgagccactgcgc

SEQ ID NO: 753034 - DNA, 15 bp, Homo sapiens
tgagccactgcgcct

SEQ ID NO: 753035 - DNA, 15 bp, Homo sapiens
gagccactgcgcctg

SEQ ID NO: 753036 - DNA, 15 bp, Homo sapiens
agccactgcgcctgg

SEQ ID NO: 753037 - DNA, 15 bp, Homo sapiens
gccactgcgcctggc

SEQ ID NO: 753038 - DNA, 15 bp, Homo sapiens
ccactgcgcctggcc

SEQ ID NO: 753039 - DNA, 15 bp, Homo sapiens
cactgcgcctggccc

SEQ ID NO: 753040 - DNA, 15 bp, Homo sapiens
actgcgcctggccca

SEQ ID NO: 753041 - DNA, 15 bp, Homo sapiens
ctgcgcctggcccaa

SEQ ID NO: 753042 - DNA, 15 bp, Homo sapiens
tgcgcctggcccaaa

SEQ ID NO: 753043 - DNA, 15 bp, Homo sapiens
gcgcctggcccaaat

SEQ ID NO: 753044 - DNA, 15 bp, Homo sapiens
cgcctggcccaaatc

SEQ ID NO: 753045 - DNA, 15 bp, Homo sapiens
gcctggcccaaatca

SEQ ID NO: 753046 - DNA, 15 bp, Homo sapiens
cctggcccaaatcat

SEQ ID NO: 753047 - DNA, 15 bp, Homo sapiens
ctggcccaaatcatg

SEQ ID NO: 753048 - DNA, 15 bp, Homo sapiens
tggcccaaatcatgc

SEQ ID NO: 753049 - DNA, 15 bp, Homo sapiens
ggcccaaatcatgca

SEQ ID NO: 753050 - DNA, 15 bp, Homo sapiens
gcccaaatcatgcat

SEQ ID NO: 753051 - DNA, 15 bp, Homo sapiens
cccaaatcatgcatt

SEQ ID NO: 753052 - DNA, 15 bp, Homo sapiens
ccaaatcatgcattc

SEQ ID NO: 753053 - DNA, 15 bp, Homo sapiens
caaatcatgcattca

SEQ ID NO: 753054 - DNA, 15 bp, Homo sapiens
aaatcatgcattcaa

SEQ ID NO: 753055 - DNA, 15 bp, Homo sapiens
aatcatgcattcaaa

SEQ ID NO: 753056 - DNA, 15 bp, Homo sapiens
atcatgcattcaaat

SEQ ID NO: 753057 - DNA, 15 bp, Homo sapiens
tcatgcattcaaatt

SEQ ID NO: 753058 - DNA, 15 bp, Homo sapiens
catgcattcaaattg

SEQ ID NO: 753059 - DNA, 15 bp, Homo sapiens
atgcattcaaattgg

SEQ ID NO: 753060 - DNA, 15 bp, Homo sapiens
tgcattcaaattggc

SEQ ID NO: 753061 - DNA, 15 bp, Homo sapiens
gcattcaaattggca

SEQ ID NO: 753062 - DNA, 15 bp, Homo sapiens
cattcaaattggcaa

SEQ ID NO: 753063 - DNA, 15 bp, Homo sapiens
attcaaattggcaac

SEQ ID NO: 753064 - DNA, 15 bp, Homo sapiens
ttcaaattggcaact

SEQ ID NO: 753065 - DNA, 15 bp, Homo sapiens
tcaaattggcaactg

SEQ ID NO: 753066 - DNA, 15 bp, Homo sapiens
caaattggcaactga

SEQ ID NO: 753067 - DNA, 15 bp, Homo sapiens
aaattggcaactgaa

SEQ ID NO: 753068 - DNA, 15 bp, Homo sapiens
aattggcaactgaag

SEQ ID NO: 753069 - DNA, 15 bp, Homo sapiens
attggcaactgaaga

SEQ ID NO: 753070 - DNA, 15 bp, Homo sapiens
ttggcaactgaagaa

SEQ ID NO: 753071 - DNA, 15 bp, Homo sapiens
tggcaactgaagaaa

SEQ ID NO: 753072 - DNA, 15 bp, Homo sapiens
ggcaactgaagaaaa

SEQ ID NO: 753073 - DNA, 15 bp, Homo sapiens
gcaactgaagaaaat

SEQ ID NO: 753074 - DNA, 15 bp, Homo sapiens
caactgaagaaaatt

SEQ ID NO: 753075 - DNA, 15 bp, Homo sapiens
aactgaagaaaattt

SEQ ID NO: 753076 - DNA, 15 bp, Homo sapiens
actgaagaaaattta

SEQ ID NO: 753077 - DNA, 15 bp, Homo sapiens
ctgaagaaaatttaa

SEQ ID NO: 753078 - DNA, 15 bp, Homo sapiens
tgaagaaaatttaat

SEQ ID NO: 753079 - DNA, 15 bp, Homo sapiens
gaagaaaatttaata

SEQ ID NO: 753080 - DNA, 15 bp, Homo sapiens
aagaaaatttaataa

SEQ ID NO: 753081 - DNA, 15 bp, Homo sapiens
agaaaatttaataaa

SEQ ID NO: 753082 - DNA, 15 bp, Homo sapiens
gaaaatttaataaaa

SEQ ID NO: 753083 - DNA, 15 bp, Homo sapiens
aaaatttaataaaag

SEQ ID NO: 753084 - DNA, 15 bp, Homo sapiens
aaatttaataaaagg

SEQ ID NO: 753085 - DNA, 15 bp, Homo sapiens
aatttaataaaaggc

SEQ ID NO: 753086 - DNA, 15 bp, Homo sapiens
atttaataaaaggct

SEQ ID NO: 753087 - DNA, 15 bp, Homo sapiens
tttaataaaaggcta

SEQ ID NO: 753088 - DNA, 15 bp, Homo sapiens
ttaataaaaggctat

SEQ ID NO: 753089 - DNA, 15 bp, Homo sapiens
taataaaaggctatt

SEQ ID NO: 753090 - DNA, 15 bp, Homo sapiens
aataaaaggctattt

SEQ ID NO: 753091 - DNA, 15 bp, Homo sapiens
ataaaaggctattta

SEQ ID NO: 753092 - DNA, 15 bp, Homo sapiens
taaaaggctatttac

SEQ ID NO: 753093 - DNA, 15 bp, Homo sapiens
aaaaggctatttaca

SEQ ID NO: 753094 - DNA, 15 bp, Homo sapiens
aaaggctatttacag

SEQ ID NO: 753095 - DNA, 15 bp, Homo sapiens
aaggctatttacaga

SEQ ID NO: 753096 - DNA, 15 bp, Homo sapiens
aggctatttacagag

SEQ ID NO: 753097 - DNA, 15 bp, Homo sapiens
ggctatttacagagg

SEQ ID NO: 753098 - DNA, 15 bp, Homo sapiens
gctatttacagaggt

SEQ ID NO: 753099 - DNA, 15 bp, Homo sapiens
ctatttacagaggta

SEQ ID NO: 753100 - DNA, 15 bp, Homo sapiens
tatttacagaggtat

SEQ ID NO: 753101 - DNA, 15 bp, Homo sapiens
atttacagaggtatt

SEQ ID NO: 753102 - DNA, 15 bp, Homo sapiens
tttacagaggtattg

SEQ ID NO: 753103 - DNA, 15 bp, Homo sapiens
ttacagaggtattgg

SEQ ID NO: 753104 - DNA, 15 bp, Homo sapiens
tacagaggtattggc

SEQ ID NO: 753105 - DNA, 15 bp, Homo sapiens
acagaggtattggca

SEQ ID NO: 753106 - DNA, 15 bp, Homo sapiens
cagaggtattggcag

SEQ ID NO: 753107 - DNA, 15 bp, Homo sapiens
agaggtattggcagg

SEQ ID NO: 753108 - DNA, 15 bp, Homo sapiens
gaggtattggcagga

SEQ ID NO: 753109 - DNA, 15 bp, Homo sapiens
aggtattggcaggat

SEQ ID NO: 753110 - DNA, 15 bp, Homo sapiens
ggtattggcaggata

SEQ ID NO: 753111 - DNA, 15 bp, Homo sapiens
gtattggcaggataa

SEQ ID NO: 753112 - DNA, 15 bp, Homo sapiens
tattggcaggataat

SEQ ID NO: 753113 - DNA, 15 bp, Homo sapiens
attggcaggataata

SEQ ID NO: 753114 - DNA, 15 bp, Homo sapiens
ttggcaggataataa

SEQ ID NO: 753115 - DNA, 15 bp, Homo sapiens
tggcaggataataat

SEQ ID NO: 753116 - DNA, 15 bp, Homo sapiens
ggcaggataataata

SEQ ID NO: 753117 - DNA, 15 bp, Homo sapiens
gcaggataataataa

SEQ ID NO: 753118 - DNA, 15 bp, Homo sapiens
caggataataataaa

SEQ ID NO: 753119 - DNA, 15 bp, Homo sapiens
aggataataataaag

SEQ ID NO: 753120 - DNA, 15 bp, Homo sapiens
ggataataataaaga

SEQ ID NO: 753121 - DNA, 15 bp, Homo sapiens
gataataataaagaa

SEQ ID NO: 753122 - DNA, 15 bp, Homo sapiens
ataataataaagaat

SEQ ID NO: 753123 - DNA, 15 bp, Homo sapiens
taataataaagaatg

SEQ ID NO: 753124 - DNA, 15 bp, Homo sapiens
aataataaagaatgt

SEQ ID NO: 753125 - DNA, 15 bp, Homo sapiens
ataataaagaatgtt

SEQ ID NO: 753126 - DNA, 15 bp, Homo sapiens
taataaagaatgttt

SEQ ID NO: 753127 - DNA, 15 bp, Homo sapiens
aataaagaatgtttt

SEQ ID NO: 753128 - DNA, 15 bp, Homo sapiens
ataaagaatgtttta

SEQ ID NO: 753129 - DNA, 15 bp, Homo sapiens
taaagaatgttttat

SEQ ID NO: 753130 - DNA, 15 bp, Homo sapiens
aaagaatgttttatt

SEQ ID NO: 753131 - DNA, 15 bp, Homo sapiens
aagaatgttttattg

SEQ ID NO: 753132 - DNA, 15 bp, Homo sapiens
agaatgttttattgg

SEQ ID NO: 753133 - DNA, 15 bp, Homo sapiens
gaatgttttattggt

SEQ ID NO: 753134 - DNA, 15 bp, Homo sapiens
aatgttttattggta

SEQ ID NO: 753135 - DNA, 15 bp, Homo sapiens
atgttttattggtaa

SEQ ID NO: 753136 - DNA, 15 bp, Homo sapiens
tgttttattggtaac

SEQ ID NO: 753137 - DNA, 15 bp, Homo sapiens
gttttattggtaaca

SEQ ID NO: 753138 - DNA, 15 bp, Homo sapiens
ttttattggtaacaa

SEQ ID NO: 753139 - DNA, 15 bp, Homo sapiens
tttattggtaacaaa

SEQ ID NO: 753140 - DNA, 15 bp, Homo sapiens
ttattggtaacaaag

SEQ ID NO: 753141 - DNA, 15 bp, Homo sapiens
tattggtaacaaagg

SEQ ID NO: 753142 - DNA, 15 bp, Homo sapiens
attggtaacaaagga

SEQ ID NO: 753143 - DNA, 15 bp, Homo sapiens
ttggtaacaaaggat

SEQ ID NO: 753144 - DNA, 15 bp, Homo sapiens
tggtaacaaaggata

SEQ ID NO: 753145 - DNA, 15 bp, Homo sapiens
ggtaacaaaggatag

SEQ ID NO: 753146 - DNA, 15 bp, Homo sapiens
gtaacaaaggatagc

SEQ ID NO: 753147 - DNA, 15 bp, Homo sapiens
taacaaaggatagca

SEQ ID NO: 753148 - DNA, 15 bp, Homo sapiens
aacaaaggatagcac

SEQ ID NO: 753149 - DNA, 15 bp, Homo sapiens
acaaaggatagcaca

SEQ ID NO: 753150 - DNA, 15 bp, Homo sapiens
caaaggatagcacag

SEQ ID NO: 753151 - DNA, 15 bp, Homo sapiens
aaaggatagcacagt

SEQ ID NO: 753152 - DNA, 15 bp, Homo sapiens
aaggatagcacagta

SEQ ID NO: 753153 - DNA, 15 bp, Homo sapiens
aggatagcacagtac

SEQ ID NO: 753154 - DNA, 15 bp, Homo sapiens
ggatagcacagtacc

SEQ ID NO: 753155 - DNA, 15 bp, Homo sapiens
gatagcacagtaccc

SEQ ID NO: 753156 - DNA, 15 bp, Homo sapiens
atagcacagtaccct

SEQ ID NO: 753157 - DNA, 15 bp, Homo sapiens
tagcacagtaccctg

SEQ ID NO: 753158 - DNA, 15 bp, Homo sapiens
agcacagtaccctgg

SEQ ID NO: 753159 - DNA, 15 bp, Homo sapiens
gcacagtaccctgga

SEQ ID NO: 753160 - DNA, 15 bp, Homo sapiens
cacagtaccctggag

SEQ ID NO: 753161 - DNA, 15 bp, Homo sapiens
acagtaccctggagt

SEQ ID NO: 753162 - DNA, 15 bp, Homo sapiens
cagtaccctggagta

SEQ ID NO: 753163 - DNA, 15 bp, Homo sapiens
agtaccctggagtaa

SEQ ID NO: 753164 - DNA, 15 bp, Homo sapiens
gtaccctggagtaag

SEQ ID NO: 753165 - DNA, 15 bp, Homo sapiens
taccctggagtaagc

SEQ ID NO: 753166 - DNA, 15 bp, Homo sapiens
accctggagtaagca

SEQ ID NO: 753167 - DNA, 15 bp, Homo sapiens
ccctggagtaagcag

SEQ ID NO: 753168 - DNA, 15 bp, Homo sapiens
cctggagtaagcagc

SEQ ID NO: 753169 - DNA, 15 bp, Homo sapiens
ctggagtaagcagca

SEQ ID NO: 753170 - DNA, 15 bp, Homo sapiens
tggagtaagcagcag

SEQ ID NO: 753171 - DNA, 15 bp, Homo sapiens
ggagtaagcagcaga

SEQ ID NO: 753172 - DNA, 15 bp, Homo sapiens
gagtaagcagcagaa

SEQ ID NO: 753173 - DNA, 15 bp, Homo sapiens
agtaagcagcagaag

SEQ ID NO: 753174 - DNA, 15 bp, Homo sapiens
gtaagcagcagaagg

SEQ ID NO: 753175 - DNA, 15 bp, Homo sapiens
taagcagcagaaggg

SEQ ID NO: 753176 - DNA, 15 bp, Homo sapiens
aagcagcagaaggga

SEQ ID NO: 753177 - DNA, 15 bp, Homo sapiens
agcagcagaagggag

SEQ ID NO: 753178 - DNA, 15 bp, Homo sapiens
gcagcagaagggagc

SEQ ID NO: 753179 - DNA, 15 bp, Homo sapiens
cagcagaagggagcc

SEQ ID NO: 753180 - DNA, 15 bp, Homo sapiens
agcagaagggagcca

SEQ ID NO: 753181 - DNA, 15 bp, Homo sapiens
gcagaagggagccat

SEQ ID NO: 753182 - DNA, 15 bp, Homo sapiens
cagaagggagccatg

SEQ ID NO: 753183 - DNA, 15 bp, Homo sapiens
agaagggagccatga

SEQ ID NO: 753184 - DNA, 15 bp, Homo sapiens
gaagggagccatgac

SEQ ID NO: 753185 - DNA, 15 bp, Homo sapiens
aagggagccatgacc

SEQ ID NO: 753186 - DNA, 15 bp, Homo sapiens
agggagccatgacca

SEQ ID NO: 753187 - DNA, 15 bp, Homo sapiens
gggagccatgaccat

SEQ ID NO: 753188 - DNA, 15 bp, Homo sapiens
ggagccatgaccatc

SEQ ID NO: 753189 - DNA, 15 bp, Homo sapiens
gagccatgaccatcc

SEQ ID NO: 753190 - DNA, 15 bp, Homo sapiens
agccatgaccatcct

SEQ ID NO: 753191 - DNA, 15 bp, Homo sapiens
gccatgaccatcctt

SEQ ID NO: 753192 - DNA, 15 bp, Homo sapiens
ccatgaccatccttg

SEQ ID NO: 753193 - DNA, 15 bp, Homo sapiens
catgaccatccttgg

SEQ ID NO: 753194 - DNA, 15 bp, Homo sapiens
atgaccatccttggg

SEQ ID NO: 753195 - DNA, 15 bp, Homo sapiens
tgaccatccttgggc

SEQ ID NO: 753196 - DNA, 15 bp, Homo sapiens
gaccatccttgggca

SEQ ID NO: 753197 - DNA, 15 bp, Homo sapiens
accatccttgggcac

SEQ ID NO: 753198 - DNA, 15 bp, Homo sapiens
ccatccttgggcaca

SEQ ID NO: 753199 - DNA, 15 bp, Homo sapiens
catccttgggcacag

SEQ ID NO: 753200 - DNA, 15 bp, Homo sapiens
atccttgggcacagc

SEQ ID NO: 753201 - DNA, 15 bp, Homo sapiens
tccttgggcacagct

SEQ ID NO: 753202 - DNA, 15 bp, Homo sapiens
ccttgggcacagctc

SEQ ID NO: 753203 - DNA, 15 bp, Homo sapiens
cttgggcacagctct

SEQ ID NO: 753204 - DNA, 15 bp, Homo sapiens
ttgggcacagctcta

SEQ ID NO: 753205 - DNA, 15 bp, Homo sapiens
tgggcacagctctaa

SEQ ID NO: 753206 - DNA, 15 bp, Homo sapiens
gggcacagctctaaa

SEQ ID NO: 753207 - DNA, 15 bp, Homo sapiens
ggcacagctctaaaa

SEQ ID NO: 753208 - DNA, 15 bp, Homo sapiens
gcacagctctaaaac

SEQ ID NO: 753209 - DNA, 15 bp, Homo sapiens
cacagctctaaaacc

SEQ ID NO: 753210 - DNA, 15 bp, Homo sapiens
acagctctaaaacct

SEQ ID NO: 753211 - DNA, 15 bp, Homo sapiens
cagctctaaaacctg

SEQ ID NO: 753212 - DNA, 15 bp, Homo sapiens
agctctaaaacctgg

SEQ ID NO: 753213 - DNA, 15 bp, Homo sapiens
gctctaaaacctggg

SEQ ID NO: 753214 - DNA, 15 bp, Homo sapiens
ctctaaaacctgggg

SEQ ID NO: 753215 - DNA, 15 bp, Homo sapiens
tctaaaacctgggga

SEQ ID NO: 753216 - DNA, 15 bp, Homo sapiens
ctaaaacctggggag

SEQ ID NO: 753217 - DNA, 15 bp, Homo sapiens
taaaacctggggagg

SEQ ID NO: 753218 - DNA, 15 bp, Homo sapiens
aaaacctggggaggc

SEQ ID NO: 753219 - DNA, 15 bp, Homo sapiens
aaacctggggaggca

SEQ ID NO: 753220 - DNA, 15 bp, Homo sapiens
aacctggggaggcag

SEQ ID NO: 753221 - DNA, 15 bp, Homo sapiens
acctggggaggcagc

SEQ ID NO: 753222 - DNA, 15 bp, Homo sapiens
cctggggaggcagcc

SEQ ID NO: 753223 - DNA, 15 bp, Homo sapiens
ctggggaggcagcca

SEQ ID NO: 753224 - DNA, 15 bp, Homo sapiens
tggggaggcagccat

SEQ ID NO: 753225 - DNA, 15 bp, Homo sapiens
ggggaggcagccatg

SEQ ID NO: 753226 - DNA, 15 bp, Homo sapiens
gggaggcagccatgt

SEQ ID NO: 753227 - DNA, 15 bp, Homo sapiens
ggaggcagccatgtg

SEQ ID NO: 753228 - DNA, 15 bp, Homo sapiens
gaggcagccatgtgg

SEQ ID NO: 753229 - DNA, 15 bp, Homo sapiens
aggcagccatgtgga

SEQ ID NO: 753230 - DNA, 15 bp, Homo sapiens
ggcagccatgtggaa

SEQ ID NO: 753231 - DNA, 15 bp, Homo sapiens
gcagccatgtggaaa

SEQ ID NO: 753232 - DNA, 15 bp, Homo sapiens
cagccatgtggaaag

SEQ ID NO: 753233 - DNA, 15 bp, Homo sapiens
agccatgtggaaagg

SEQ ID NO: 753234 - DNA, 15 bp, Homo sapiens
gccatgtggaaaggc

SEQ ID NO: 753235 - DNA, 15 bp, Homo sapiens
ccatgtggaaaggct

SEQ ID NO: 753236 - DNA, 15 bp, Homo sapiens
catgtggaaaggctg

SEQ ID NO: 753237 - DNA, 15 bp, Homo sapiens
atgtggaaaggctgt

SEQ ID NO: 753238 - DNA, 15 bp, Homo sapiens
tgtggaaaggctgtg

SEQ ID NO: 753239 - DNA, 15 bp, Homo sapiens
gtggaaaggctgtgg

SEQ ID NO: 753240 - DNA, 15 bp, Homo sapiens
tggaaaggctgtggc

SEQ ID NO: 753241 - DNA, 15 bp, Homo sapiens
ggaaaggctgtggcc

SEQ ID NO: 753242 - DNA, 15 bp, Homo sapiens
gaaaggctgtggcct

SEQ ID NO: 753243 - DNA, 15 bp, Homo sapiens
aaaggctgtggcctt

SEQ ID NO: 753244 - DNA, 15 bp, Homo sapiens
aaggctgtggccttc

SEQ ID NO: 753245 - DNA, 15 bp, Homo sapiens
aggctgtggccttca

SEQ ID NO: 753246 - DNA, 15 bp, Homo sapiens
ggctgtggccttcag

SEQ ID NO: 753247 - DNA, 15 bp, Homo sapiens
gctgtggccttcagt

SEQ ID NO: 753248 - DNA, 15 bp, Homo sapiens
ctgtggccttcagtg

SEQ ID NO: 753249 - DNA, 15 bp, Homo sapiens
tgtggccttcagtgg

SEQ ID NO: 753250 - DNA, 15 bp, Homo sapiens
gtggccttcagtgga

SEQ ID NO: 753251 - DNA, 15 bp, Homo sapiens
tggccttcagtggag

SEQ ID NO: 753252 - DNA, 15 bp, Homo sapiens
ggccttcagtggaga

SEQ ID NO: 753253 - DNA, 15 bp, Homo sapiens
gccttcagtggagag

SEQ ID NO: 753254 - DNA, 15 bp, Homo sapiens
ccttcagtggagaga

SEQ ID NO: 753255 - DNA, 15 bp, Homo sapiens
cttcagtggagagac

SEQ ID NO: 753256 - DNA, 15 bp, Homo sapiens
ttcagtggagagaca

SEQ ID NO: 753257 - DNA, 15 bp, Homo sapiens
tcagtggagagacat

SEQ ID NO: 753258 - DNA, 15 bp, Homo sapiens
cagtggagagacata

SEQ ID NO: 753259 - DNA, 15 bp, Homo sapiens
agtggagagacatag

SEQ ID NO: 753260 - DNA, 15 bp, Homo sapiens
gtggagagacatagc

SEQ ID NO: 753261 - DNA, 15 bp, Homo sapiens
tggagagacatagcc

SEQ ID NO: 753262 - DNA, 15 bp, Homo sapiens
ggagagacatagcca

SEQ ID NO: 753263 - DNA, 15 bp, Homo sapiens
gagagacatagccaa

SEQ ID NO: 753264 - DNA, 15 bp, Homo sapiens
agagacatagccaat

SEQ ID NO: 753265 - DNA, 15 bp, Homo sapiens
gagacatagccaatc

SEQ ID NO: 753266 - DNA, 15 bp, Homo sapiens
agacatagccaatct

SEQ ID NO: 753267 - DNA, 15 bp, Homo sapiens
gacatagccaatctg

SEQ ID NO: 753268 - DNA, 15 bp, Homo sapiens
acatagccaatctgt

SEQ ID NO: 753269 - DNA, 15 bp, Homo sapiens
catagccaatctgtg

SEQ ID NO: 753270 - DNA, 15 bp, Homo sapiens
atagccaatctgtgc

SEQ ID NO: 753271 - DNA, 15 bp, Homo sapiens
tagccaatctgtgca

SEQ ID NO: 753272 - DNA, 15 bp, Homo sapiens
agccaatctgtgcat

SEQ ID NO: 753273 - DNA, 15 bp, Homo sapiens
gccaatctgtgcatt

SEQ ID NO: 753274 - DNA, 15 bp, Homo sapiens
ccaatctgtgcattg

SEQ ID NO: 753275 - DNA, 15 bp, Homo sapiens
caatctgtgcattgg

SEQ ID NO: 753276 - DNA, 15 bp, Homo sapiens
aatctgtgcattggg

SEQ ID NO: 753277 - DNA, 15 bp, Homo sapiens
atctgtgcattggga

SEQ ID NO: 753278 - DNA, 15 bp, Homo sapiens
tctgtgcattgggag

SEQ ID NO: 753279 - DNA, 15 bp, Homo sapiens
ctgtgcattgggagc

SEQ ID NO: 753280 - DNA, 15 bp, Homo sapiens
tgtgcattgggagcc

SEQ ID NO: 753281 - DNA, 15 bp, Homo sapiens
gtgcattgggagcct

SEQ ID NO: 753282 - DNA, 15 bp, Homo sapiens
tgcattgggagcctg

SEQ ID NO: 753283 - DNA, 15 bp, Homo sapiens
gcattgggagcctgg

SEQ ID NO: 753284 - DNA, 15 bp, Homo sapiens
cattgggagcctgga

SEQ ID NO: 753285 - DNA, 15 bp, Homo sapiens
attgggagcctggag

SEQ ID NO: 753286 - DNA, 15 bp, Homo sapiens
ttgggagcctggaga

SEQ ID NO: 753287 - DNA, 15 bp, Homo sapiens
tgggagcctggagaa

SEQ ID NO: 753288 - DNA, 15 bp, Homo sapiens
gggagcctggagaaa

SEQ ID NO: 753289 - DNA, 15 bp, Homo sapiens
ggagcctggagaaaa

SEQ ID NO: 753290 - DNA, 15 bp, Homo sapiens
gagcctggagaaaac

SEQ ID NO: 753291 - DNA, 15 bp, Homo sapiens
agcctggagaaaacg

SEQ ID NO: 753292 - DNA, 15 bp, Homo sapiens
gcctggagaaaacgc

SEQ ID NO: 753293 - DNA, 15 bp, Homo sapiens
cctggagaaaacgct

SEQ ID NO: 753294 - DNA, 15 bp, Homo sapiens
ctggagaaaacgctc

SEQ ID NO: 753295 - DNA, 15 bp, Homo sapiens
tggagaaaacgctct

SEQ ID NO: 753296 - DNA, 15 bp, Homo sapiens
ggagaaaacgctctg

SEQ ID NO: 753297 - DNA, 15 bp, Homo sapiens
gagaaaacgctctgt

SEQ ID NO: 753298 - DNA, 15 bp, Homo sapiens
agaaaacgctctgtg

SEQ ID NO: 753299 - DNA, 15 bp, Homo sapiens
gaaaacgctctgtgc

SEQ ID NO: 753300 - DNA, 15 bp, Homo sapiens
aaaacgctctgtgcc

SEQ ID NO: 753301 - DNA, 15 bp, Homo sapiens
aaacgctctgtgcct

SEQ ID NO: 753302 - DNA, 15 bp, Homo sapiens
aacgctctgtgccta

SEQ ID NO: 753303 - DNA, 15 bp, Homo sapiens
acgctctgtgcctat

SEQ ID NO: 753304 - DNA, 15 bp, Homo sapiens
cgctctgtgcctatt

SEQ ID NO: 753305 - DNA, 15 bp, Homo sapiens
gctctgtgcctattt

SEQ ID NO: 753306 - DNA, 15 bp, Homo sapiens
ctctgtgcctatttt

SEQ ID NO: 753307 - DNA, 15 bp, Homo sapiens
tctgtgcctattttt

SEQ ID NO: 753308 - DNA, 15 bp, Homo sapiens
ctgtgcctatttttc

SEQ ID NO: 753309 - DNA, 15 bp, Homo sapiens
tgtgcctatttttct

SEQ ID NO: 753310 - DNA, 15 bp, Homo sapiens
gtgcctatttttctc

SEQ ID NO: 753311 - DNA, 15 bp, Homo sapiens
tgcctatttttctcc

SEQ ID NO: 753312 - DNA, 15 bp, Homo sapiens
gcctatttttctccc

SEQ ID NO: 753313 - DNA, 15 bp, Homo sapiens
cctatttttctccca

SEQ ID NO: 753314 - DNA, 15 bp, Homo sapiens
ctatttttctcccac

SEQ ID NO: 753315 - DNA, 15 bp, Homo sapiens
tatttttctcccacc

SEQ ID NO: 753316 - DNA, 15 bp, Homo sapiens
atttttctcccaccc

SEQ ID NO: 753317 - DNA, 15 bp, Homo sapiens
tttttctcccaccct

SEQ ID NO: 753318 - DNA, 15 bp, Homo sapiens
ttttctcccacccta

SEQ ID NO: 753319 - DNA, 15 bp, Homo sapiens
tttctcccaccctat

SEQ ID NO: 753320 - DNA, 15 bp, Homo sapiens
ttctcccaccctatt

SEQ ID NO: 753321 - DNA, 15 bp, Homo sapiens
tctcccaccctatta

SEQ ID NO: 753322 - DNA, 15 bp, Homo sapiens
ctcccaccctattaa

SEQ ID NO: 753323 - DNA, 15 bp, Homo sapiens
tcccaccctattaat

SEQ ID NO: 753324 - DNA, 15 bp, Homo sapiens
cccaccctattaatc

SEQ ID NO: 753325 - DNA, 15 bp, Homo sapiens
ccaccctattaatcc

SEQ ID NO: 753326 - DNA, 15 bp, Homo sapiens
caccctattaatccc

SEQ ID NO: 753327 - DNA, 15 bp, Homo sapiens
accctattaatcccc

SEQ ID NO: 753328 - DNA, 15 bp, Homo sapiens
ccctattaatcccct

SEQ ID NO: 753329 - DNA, 15 bp, Homo sapiens
cctattaatcccctg

SEQ ID NO: 753330 - DNA, 15 bp, Homo sapiens
ctattaatcccctgt

SEQ ID NO: 753331 - DNA, 15 bp, Homo sapiens
tattaatcccctgtt

SEQ ID NO: 753332 - DNA, 15 bp, Homo sapiens
attaatcccctgttg

SEQ ID NO: 753333 - DNA, 15 bp, Homo sapiens
ttaatcccctgttgg

SEQ ID NO: 753334 - DNA, 15 bp, Homo sapiens
taatcccctgttggg

SEQ ID NO: 753335 - DNA, 15 bp, Homo sapiens
aatcccctgttgggg

SEQ ID NO: 753336 - DNA, 15 bp, Homo sapiens
atcccctgttggggt

SEQ ID NO: 753337 - DNA, 15 bp, Homo sapiens
tcccctgttggggtc

SEQ ID NO: 753338 - DNA, 15 bp, Homo sapiens
cccctgttggggtct

SEQ ID NO: 753339 - DNA, 15 bp, Homo sapiens
ccctgttggggtctt

SEQ ID NO: 753340 - DNA, 15 bp, Homo sapiens
cctgttggggtcttt

SEQ ID NO: 753341 - DNA, 15 bp, Homo sapiens
ctgttggggtctttc

SEQ ID NO: 753342 - DNA, 15 bp, Homo sapiens
tgttggggtctttca

SEQ ID NO: 753343 - DNA, 15 bp, Homo sapiens
gttggggtctttcat

SEQ ID NO: 753344 - DNA, 15 bp, Homo sapiens
ttggggtctttcatt

SEQ ID NO: 753345 - DNA, 15 bp, Homo sapiens
tggggtctttcattg

SEQ ID NO: 753346 - DNA, 15 bp, Homo sapiens
ggggtctttcattgg

SEQ ID NO: 753347 - DNA, 15 bp, Homo sapiens
gggtctttcattggc

SEQ ID NO: 753348 - DNA, 15 bp, Homo sapiens
ggtctttcattggct

SEQ ID NO: 753349 - DNA, 15 bp, Homo sapiens
gtctttcattggctg

SEQ ID NO: 753350 - DNA, 15 bp, Homo sapiens
tctttcattggctga

SEQ ID NO: 753351 - DNA, 15 bp, Homo sapiens
ctttcattggctgaa

SEQ ID NO: 753352 - DNA, 15 bp, Homo sapiens
tttcattggctgaac

SEQ ID NO: 753353 - DNA, 15 bp, Homo sapiens
ttcattggctgaacc

SEQ ID NO: 753354 - DNA, 15 bp, Homo sapiens
tcattggctgaaccc

SEQ ID NO: 753355 - DNA, 15 bp, Homo sapiens
cattggctgaaccca

SEQ ID NO: 753356 - DNA, 15 bp, Homo sapiens
attggctgaacccaa

SEQ ID NO: 753357 - DNA, 15 bp, Homo sapiens
ttggctgaacccaac

SEQ ID NO: 753358 - DNA, 15 bp, Homo sapiens
tggctgaacccaacc

SEQ ID NO: 753359 - DNA, 15 bp, Homo sapiens
ggctgaacccaacca

SEQ ID NO: 753360 - DNA, 15 bp, Homo sapiens
gctgaacccaaccag

SEQ ID NO: 753361 - DNA, 15 bp, Homo sapiens
ctgaacccaaccaga

SEQ ID NO: 753362 - DNA, 15 bp, Homo sapiens
tgaacccaaccagaa

SEQ ID NO: 753363 - DNA, 15 bp, Homo sapiens
gaacccaaccagaag

SEQ ID NO: 753364 - DNA, 15 bp, Homo sapiens
aacccaaccagaagc

SEQ ID NO: 753365 - DNA, 15 bp, Homo sapiens
acccaaccagaagcc

SEQ ID NO: 753366 - DNA, 15 bp, Homo sapiens
cccaaccagaagcct

SEQ ID NO: 753367 - DNA, 15 bp, Homo sapiens
ccaaccagaagccta

SEQ ID NO: 753368 - DNA, 15 bp, Homo sapiens
caaccagaagcctag

SEQ ID NO: 753369 - DNA, 15 bp, Homo sapiens
aaccagaagcctagg

SEQ ID NO: 753370 - DNA, 15 bp, Homo sapiens
accagaagcctaggg

SEQ ID NO: 753371 - DNA, 15 bp, Homo sapiens
ccagaagcctagggc

SEQ ID NO: 753372 - DNA, 15 bp, Homo sapiens
cagaagcctagggca

SEQ ID NO: 753373 - DNA, 15 bp, Homo sapiens
agaagcctagggcaa

SEQ ID NO: 753374 - DNA, 15 bp, Homo sapiens
gaagcctagggcaag

SEQ ID NO: 753375 - DNA, 15 bp, Homo sapiens
aagcctagggcaagc

SEQ ID NO: 753376 - DNA, 15 bp, Homo sapiens
agcctagggcaagca

SEQ ID NO: 753377 - DNA, 15 bp, Homo sapiens
gcctagggcaagcag

SEQ ID NO: 753378 - DNA, 15 bp, Homo sapiens
cctagggcaagcagc

SEQ ID NO: 753379 - DNA, 15 bp, Homo sapiens
ctagggcaagcagca

SEQ ID NO: 753380 - DNA, 15 bp, Homo sapiens
tagggcaagcagcag

SEQ ID NO: 753381 - DNA, 15 bp, Homo sapiens
agggcaagcagcagg

SEQ ID NO: 753382 - DNA, 15 bp, Homo sapiens
gggcaagcagcaggg

SEQ ID NO: 753383 - DNA, 15 bp, Homo sapiens
ggcaagcagcaggga

SEQ ID NO: 753384 - DNA, 15 bp, Homo sapiens
gcaagcagcagggaa

SEQ ID NO: 753385 - DNA, 15 bp, Homo sapiens
caagcagcagggaaa

SEQ ID NO: 753386 - DNA, 15 bp, Homo sapiens
aagcagcagggaaag

SEQ ID NO: 753387 - DNA, 15 bp, Homo sapiens
agcagcagggaaagt

SEQ ID NO: 753388 - DNA, 15 bp, Homo sapiens
gcagcagggaaagtg

SEQ ID NO: 753389 - DNA, 15 bp, Homo sapiens
cagcagggaaagtgg

SEQ ID NO: 753390 - DNA, 15 bp, Homo sapiens
agcagggaaagtgga

SEQ ID NO: 753391 - DNA, 15 bp, Homo sapiens
gcagggaaagtggaa

SEQ ID NO: 753392 - DNA, 15 bp, Homo sapiens
cagggaaagtggaag

SEQ ID NO: 753393 - DNA, 15 bp, Homo sapiens
agggaaagtggaagg

SEQ ID NO: 753394 - DNA, 15 bp, Homo sapiens
gggaaagtggaaggg

SEQ ID NO: 753395 - DNA, 15 bp, Homo sapiens
ggaaagtggaagggg

SEQ ID NO: 753396 - DNA, 15 bp, Homo sapiens
gaaagtggaagggga

SEQ ID NO: 753397 - DNA, 15 bp, Homo sapiens
aaagtggaaggggag

SEQ ID NO: 753398 - DNA, 15 bp, Homo sapiens
aagtggaaggggagg

SEQ ID NO: 753399 - DNA, 15 bp, Homo sapiens
agtggaaggggaggg

SEQ ID NO: 753400 - DNA, 15 bp, Homo sapiens
gtggaaggggaggga

SEQ ID NO: 753401 - DNA, 15 bp, Homo sapiens
tggaaggggagggac

SEQ ID NO: 753402 - DNA, 15 bp, Homo sapiens
ggaaggggagggaca

SEQ ID NO: 753403 - DNA, 15 bp, Homo sapiens
gaaggggagggacaa

SEQ ID NO: 753404 - DNA, 15 bp, Homo sapiens
aaggggagggacaaa

SEQ ID NO: 753405 - DNA, 15 bp, Homo sapiens
aggggagggacaaat

SEQ ID NO: 753406 - DNA, 15 bp, Homo sapiens
ggggagggacaaatg

SEQ ID NO: 753407 - DNA, 15 bp, Homo sapiens
gggagggacaaatgg

SEQ ID NO: 753408 - DNA, 15 bp, Homo sapiens
ggagggacaaatgga

SEQ ID NO: 753409 - DNA, 15 bp, Homo sapiens
gagggacaaatggaa

SEQ ID NO: 753410 - DNA, 15 bp, Homo sapiens
agggacaaatggaaa

SEQ ID NO: 753411 - DNA, 15 bp, Homo sapiens
gggacaaatggaaaa

SEQ ID NO: 753412 - DNA, 15 bp, Homo sapiens
ggacaaatggaaaaa

SEQ ID NO: 753413 - DNA, 15 bp, Homo sapiens
gacaaatggaaaaat

SEQ ID NO: 753414 - DNA, 15 bp, Homo sapiens
acaaatggaaaaata

SEQ ID NO: 753415 - DNA, 15 bp, Homo sapiens
caaatggaaaaataa

SEQ ID NO: 753416 - DNA, 15 bp, Homo sapiens
aaatggaaaaataac

SEQ ID NO: 753417 - DNA, 15 bp, Homo sapiens
aatggaaaaataact

SEQ ID NO: 753418 - DNA, 15 bp, Homo sapiens
atggaaaaataacta

SEQ ID NO: 753419 - DNA, 15 bp, Homo sapiens
tggaaaaataactag

SEQ ID NO: 753420 - DNA, 15 bp, Homo sapiens
ggaaaaataactagc

SEQ ID NO: 753421 - DNA, 15 bp, Homo sapiens
gaaaaataactagca

SEQ ID NO: 753422 - DNA, 15 bp, Homo sapiens
aaaaataactagcag

SEQ ID NO: 753423 - DNA, 15 bp, Homo sapiens
aaaataactagcaga

SEQ ID NO: 753424 - DNA, 15 bp, Homo sapiens
aaataactagcagaa

SEQ ID NO: 753425 - DNA, 15 bp, Homo sapiens
aataactagcagaag

SEQ ID NO: 753426 - DNA, 15 bp, Homo sapiens
ataactagcagaaga

SEQ ID NO: 753427 - DNA, 15 bp, Homo sapiens
taactagcagaagac

SEQ ID NO: 753428 - DNA, 15 bp, Homo sapiens
aactagcagaagaca

SEQ ID NO: 753429 - DNA, 15 bp, Homo sapiens
actagcagaagacat

SEQ ID NO: 753430 - DNA, 15 bp, Homo sapiens
ctagcagaagacatt

SEQ ID NO: 753431 - DNA, 15 bp, Homo sapiens
tagcagaagacattt

SEQ ID NO: 753432 - DNA, 15 bp, Homo sapiens
agcagaagacatttt

SEQ ID NO: 753433 - DNA, 15 bp, Homo sapiens
gcagaagacattttc

SEQ ID NO: 753434 - DNA, 15 bp, Homo sapiens
cagaagacattttct

SEQ ID NO: 753435 - DNA, 15 bp, Homo sapiens
agaagacattttctc

SEQ ID NO: 753436 - DNA, 15 bp, Homo sapiens
gaagacattttctct

SEQ ID NO: 753437 - DNA, 15 bp, Homo sapiens
aagacattttctctg

SEQ ID NO: 753438 - DNA, 15 bp, Homo sapiens
agacattttctctga

SEQ ID NO: 753439 - DNA, 15 bp, Homo sapiens
gacattttctctgac

SEQ ID NO: 753440 - DNA, 15 bp, Homo sapiens
acattttctctgact

SEQ ID NO: 753441 - DNA, 15 bp, Homo sapiens
cattttctctgactc

SEQ ID NO: 753442 - DNA, 15 bp, Homo sapiens
attttctctgactca

SEQ ID NO: 753443 - DNA, 15 bp, Homo sapiens
ttttctctgactcat

SEQ ID NO: 753444 - DNA, 15 bp, Homo sapiens
tttctctgactcatt

SEQ ID NO: 753445 - DNA, 15 bp, Homo sapiens
ttctctgactcattg

SEQ ID NO: 753446 - DNA, 15 bp, Homo sapiens
tctctgactcattga

SEQ ID NO: 753447 - DNA, 15 bp, Homo sapiens
ctctgactcattgaa

SEQ ID NO: 753448 - DNA, 15 bp, Homo sapiens
tctgactcattgaaa

SEQ ID NO: 753449 - DNA, 15 bp, Homo sapiens
ctgactcattgaaat

SEQ ID NO: 753450 - DNA, 15 bp, Homo sapiens
tgactcattgaaata

SEQ ID NO: 753451 - DNA, 15 bp, Homo sapiens
gactcattgaaatat

SEQ ID NO: 753452 - DNA, 15 bp, Homo sapiens
actcattgaaatatt

SEQ ID NO: 753453 - DNA, 15 bp, Homo sapiens
ctcattgaaatattt

SEQ ID NO: 753454 - DNA, 15 bp, Homo sapiens
tcattgaaatatttt

SEQ ID NO: 753455 - DNA, 15 bp, Homo sapiens
cattgaaatattttt

SEQ ID NO: 753456 - DNA, 15 bp, Homo sapiens
attgaaatatttttt

SEQ ID NO: 753457 - DNA, 15 bp, Homo sapiens
ttgaaatattttttt

SEQ ID NO: 753458 - DNA, 15 bp, Homo sapiens
tgaaatatttttttg

SEQ ID NO: 753459 - DNA, 15 bp, Homo sapiens
gaaatatttttttgt

SEQ ID NO: 753460 - DNA, 15 bp, Homo sapiens
aaatatttttttgtt

SEQ ID NO: 753461 - DNA, 15 bp, Homo sapiens
aatatttttttgttt

SEQ ID NO: 753462 - DNA, 15 bp, Homo sapiens
atatttttttgtttc

SEQ ID NO: 753463 - DNA, 15 bp, Homo sapiens
tatttttttgtttca

SEQ ID NO: 753464 - DNA, 15 bp, Homo sapiens
atttttttgtttcac

SEQ ID NO: 753465 - DNA, 15 bp, Homo sapiens
tttttttgtttcact

SEQ ID NO: 753466 - DNA, 15 bp, Homo sapiens
ttttttgtttcactg

SEQ ID NO: 753467 - DNA, 15 bp, Homo sapiens
tttttgtttcactgt

SEQ ID NO: 753468 - DNA, 15 bp, Homo sapiens
ttttgtttcactgtc

SEQ ID NO: 753469 - DNA, 15 bp, Homo sapiens
tttgtttcactgtct

SEQ ID NO: 753470 - DNA, 15 bp, Homo sapiens
ttgtttcactgtctc

SEQ ID NO: 753471 - DNA, 15 bp, Homo sapiens
tgtttcactgtctct

SEQ ID NO: 753472 - DNA, 15 bp, Homo sapiens
gtttcactgtctctt

SEQ ID NO: 753473 - DNA, 15 bp, Homo sapiens
tttcactgtctcttt

SEQ ID NO: 753474 - DNA, 15 bp, Homo sapiens
ttcactgtctctttt

SEQ ID NO: 753475 - DNA, 15 bp, Homo sapiens
tcactgtctcttttc

SEQ ID NO: 753476 - DNA, 15 bp, Homo sapiens
cactgtctcttttcc

SEQ ID NO: 753477 - DNA, 15 bp, Homo sapiens
actgtctcttttcct

SEQ ID NO: 753478 - DNA, 15 bp, Homo sapiens
ctgtctcttttccta

SEQ ID NO: 753479 - DNA, 15 bp, Homo sapiens
tgtctcttttcctaa

SEQ ID NO: 753480 - DNA, 15 bp, Homo sapiens
gtctcttttcctaac

SEQ ID NO: 753481 - DNA, 15 bp, Homo sapiens
tctcttttcctaaca

SEQ ID NO: 753482 - DNA, 15 bp, Homo sapiens
ctcttttcctaacaa

SEQ ID NO: 753483 - DNA, 15 bp, Homo sapiens
tcttttcctaacaag

SEQ ID NO: 753484 - DNA, 15 bp, Homo sapiens
cttttcctaacaaga

SEQ ID NO: 753485 - DNA, 15 bp, Homo sapiens
ttttcctaacaagag

SEQ ID NO: 753486 - DNA, 15 bp, Homo sapiens
tttcctaacaagagg

SEQ ID NO: 753487 - DNA, 15 bp, Homo sapiens
ttcctaacaagaggc

SEQ ID NO: 753488 - DNA, 15 bp, Homo sapiens
tcctaacaagaggca

SEQ ID NO: 753489 - DNA, 15 bp, Homo sapiens
cctaacaagaggcat

SEQ ID NO: 753490 - DNA, 15 bp, Homo sapiens
ctaacaagaggcatt

SEQ ID NO: 753491 - DNA, 15 bp, Homo sapiens
taacaagaggcattt

SEQ ID NO: 753492 - DNA, 15 bp, Homo sapiens
aacaagaggcatttc

SEQ ID NO: 753493 - DNA, 15 bp, Homo sapiens
acaagaggcatttct

SEQ ID NO: 753494 - DNA, 15 bp, Homo sapiens
caagaggcatttctc

SEQ ID NO: 753495 - DNA, 15 bp, Homo sapiens
aagaggcatttctca

SEQ ID NO: 753496 - DNA, 15 bp, Homo sapiens
agaggcatttctcaa

SEQ ID NO: 753497 - DNA, 15 bp, Homo sapiens
gaggcatttctcaag

SEQ ID NO: 753498 - DNA, 15 bp, Homo sapiens
aggcatttctcaaga

SEQ ID NO: 753499 - DNA, 15 bp, Homo sapiens
ggcatttctcaagat

SEQ ID NO: 753500 - DNA, 15 bp, Homo sapiens
gcatttctcaagatt

SEQ ID NO: 753501 - DNA, 15 bp, Homo sapiens
catttctcaagattc

SEQ ID NO: 753502 - DNA, 15 bp, Homo sapiens
atttctcaagattcc

SEQ ID NO: 753503 - DNA, 15 bp, Homo sapiens
tttctcaagattcca

SEQ ID NO: 753504 - DNA, 15 bp, Homo sapiens
ttctcaagattccat

SEQ ID NO: 753505 - DNA, 15 bp, Homo sapiens
tctcaagattccatt

SEQ ID NO: 753506 - DNA, 15 bp, Homo sapiens
ctcaagattccattt

SEQ ID NO: 753507 - DNA, 15 bp, Homo sapiens
tcaagattccattta

SEQ ID NO: 753508 - DNA, 15 bp, Homo sapiens
caagattccatttac

SEQ ID NO: 753509 - DNA, 15 bp, Homo sapiens
aagattccatttaca

SEQ ID NO: 753510 - DNA, 15 bp, Homo sapiens
agattccatttacag

SEQ ID NO: 753511 - DNA, 15 bp, Homo sapiens
gattccatttacagc

SEQ ID NO: 753512 - DNA, 15 bp, Homo sapiens
attccatttacagca

SEQ ID NO: 753513 - DNA, 15 bp, Homo sapiens
ttccatttacagcag

SEQ ID NO: 753514 - DNA, 15 bp, Homo sapiens
tccatttacagcagt

SEQ ID NO: 753515 - DNA, 15 bp, Homo sapiens
ccatttacagcagtc

SEQ ID NO: 753516 - DNA, 15 bp, Homo sapiens
catttacagcagtct

SEQ ID NO: 753517 - DNA, 15 bp, Homo sapiens
atttacagcagtctt

SEQ ID NO: 753518 - DNA, 15 bp, Homo sapiens
tttacagcagtcttc

SEQ ID NO: 753519 - DNA, 15 bp, Homo sapiens
ttacagcagtcttct

SEQ ID NO: 753520 - DNA, 15 bp, Homo sapiens
tacagcagtcttctt

SEQ ID NO: 753521 - DNA, 15 bp, Homo sapiens
acagcagtcttcttg

SEQ ID NO: 753522 - DNA, 15 bp, Homo sapiens
cagcagtcttcttgt

SEQ ID NO: 753523 - DNA, 15 bp, Homo sapiens
agcagtcttcttgtc

SEQ ID NO: 753524 - DNA, 15 bp, Homo sapiens
gcagtcttcttgtct

SEQ ID NO: 753525 - DNA, 15 bp, Homo sapiens
cagtcttcttgtctt

SEQ ID NO: 753526 - DNA, 15 bp, Homo sapiens
agtcttcttgtctta

SEQ ID NO: 753527 - DNA, 15 bp, Homo sapiens
gtcttcttgtcttat

SEQ ID NO: 753528 - DNA, 15 bp, Homo sapiens
tcttcttgtcttatg

SEQ ID NO: 753529 - DNA, 15 bp, Homo sapiens
cttcttgtcttatgc

SEQ ID NO: 753530 - DNA, 15 bp, Homo sapiens
ttcttgtcttatgct

SEQ ID NO: 753531 - DNA, 15 bp, Homo sapiens
tcttgtcttatgctg

SEQ ID NO: 753532 - DNA, 15 bp, Homo sapiens
cttgtcttatgctgt

SEQ ID NO: 753533 - DNA, 15 bp, Homo sapiens
ttgtcttatgctgta

SEQ ID NO: 753534 - DNA, 15 bp, Homo sapiens
tgtcttatgctgtat

SEQ ID NO: 753535 - DNA, 15 bp, Homo sapiens
gtcttatgctgtatc

SEQ ID NO: 753536 - DNA, 15 bp, Homo sapiens
tcttatgctgtatct

SEQ ID NO: 753537 - DNA, 15 bp, Homo sapiens
cttatgctgtatctt

SEQ ID NO: 753538 - DNA, 15 bp, Homo sapiens
ttatgctgtatcttt

SEQ ID NO: 753539 - DNA, 15 bp, Homo sapiens
tatgctgtatctttc

SEQ ID NO: 753540 - DNA, 15 bp, Homo sapiens
atgctgtatctttca

SEQ ID NO: 753541 - DNA, 15 bp, Homo sapiens
tgctgtatctttcaa

SEQ ID NO: 753542 - DNA, 15 bp, Homo sapiens
gctgtatctttcaat

SEQ ID NO: 753543 - DNA, 15 bp, Homo sapiens
ctgtatctttcaata

SEQ ID NO: 753544 - DNA, 15 bp, Homo sapiens
tgtatctttcaataa

SEQ ID NO: 753545 - DNA, 15 bp, Homo sapiens
gtatctttcaataag

SEQ ID NO: 753546 - DNA, 15 bp, Homo sapiens
tatctttcaataagc

SEQ ID NO: 753547 - DNA, 15 bp, Homo sapiens
atctttcaataagct

SEQ ID NO: 753548 - DNA, 15 bp, Homo sapiens
tctttcaataagctt

SEQ ID NO: 753549 - DNA, 15 bp, Homo sapiens
ctttcaataagcttg

SEQ ID NO: 753550 - DNA, 15 bp, Homo sapiens
tttcaataagcttgt

SEQ ID NO: 753551 - DNA, 15 bp, Homo sapiens
ttcaataagcttgtg

SEQ ID NO: 753552 - DNA, 15 bp, Homo sapiens
tcaataagcttgtgt

SEQ ID NO: 753553 - DNA, 15 bp, Homo sapiens
caataagcttgtgta

SEQ ID NO: 753554 - DNA, 15 bp, Homo sapiens
aataagcttgtgtaa

SEQ ID NO: 753555 - DNA, 15 bp, Homo sapiens
ataagcttgtgtaaa

SEQ ID NO: 753556 - DNA, 15 bp, Homo sapiens
taagcttgtgtaaat

SEQ ID NO: 753557 - DNA, 15 bp, Homo sapiens
aagcttgtgtaaatg

SEQ ID NO: 753558 - DNA, 15 bp, Homo sapiens
agcttgtgtaaatga

SEQ ID NO: 753559 - DNA, 15 bp, Homo sapiens
gcttgtgtaaatgaa

SEQ ID NO: 753560 - DNA, 15 bp, Homo sapiens
cttgtgtaaatgaaa

SEQ ID NO: 753561 - DNA, 15 bp, Homo sapiens
ttgtgtaaatgaaag

SEQ ID NO: 753562 - DNA, 15 bp, Homo sapiens
tgtgtaaatgaaagt

SEQ ID NO: 753563 - DNA, 15 bp, Homo sapiens
gtgtaaatgaaagtg

SEQ ID NO: 753564 - DNA, 15 bp, Homo sapiens
tgtaaatgaaagtga

SEQ ID NO: 753565 - DNA, 15 bp, Homo sapiens
gtaaatgaaagtgag

SEQ ID NO: 753566 - DNA, 15 bp, Homo sapiens
taaatgaaagtgaga

SEQ ID NO: 753567 - DNA, 15 bp, Homo sapiens
aaatgaaagtgagat

SEQ ID NO: 753568 - DNA, 15 bp, Homo sapiens
aatgaaagtgagatc

SEQ ID NO: 753569 - DNA, 15 bp, Homo sapiens
atgaaagtgagatct

SEQ ID NO: 753570 - DNA, 15 bp, Homo sapiens
tgaaagtgagatctt

SEQ ID NO: 753571 - DNA, 15 bp, Homo sapiens
gaaagtgagatcttt

SEQ ID NO: 753572 - DNA, 15 bp, Homo sapiens
aaagtgagatctttc

SEQ ID NO: 753573 - DNA, 15 bp, Homo sapiens
aagtgagatctttct

SEQ ID NO: 753574 - DNA, 15 bp, Homo sapiens
agtgagatctttctc

SEQ ID NO: 753575 - DNA, 15 bp, Homo sapiens
gtgagatctttctcc

SEQ ID NO: 753576 - DNA, 15 bp, Homo sapiens
tgagatctttctcct

SEQ ID NO: 753577 - DNA, 15 bp, Homo sapiens
gagatctttctcctt

SEQ ID NO: 753578 - DNA, 15 bp, Homo sapiens
agatctttctccttt

SEQ ID NO: 753579 - DNA, 15 bp, Homo sapiens
gatctttctcctttc

SEQ ID NO: 753580 - DNA, 15 bp, Homo sapiens
atctttctcctttct

SEQ ID NO: 753581 - DNA, 15 bp, Homo sapiens
tctttctcctttctg

SEQ ID NO: 753582 - DNA, 15 bp, Homo sapiens
ctttctcctttctgt

SEQ ID NO: 753583 - DNA, 15 bp, Homo sapiens
tttctcctttctgtc

SEQ ID NO: 753584 - DNA, 15 bp, Homo sapiens
ttctcctttctgtcc

SEQ ID NO: 753585 - DNA, 15 bp, Homo sapiens
tctcctttctgtcct

SEQ ID NO: 753586 - DNA, 15 bp, Homo sapiens
ctcctttctgtcctc

SEQ ID NO: 753587 - DNA, 15 bp, Homo sapiens
tcctttctgtcctct

SEQ ID NO: 753588 - DNA, 15 bp, Homo sapiens
cctttctgtcctctc

SEQ ID NO: 753589 - DNA, 15 bp, Homo sapiens
ctttctgtcctctcc

SEQ ID NO: 753590 - DNA, 15 bp, Homo sapiens
tttctgtcctctccc

SEQ ID NO: 753591 - DNA, 15 bp, Homo sapiens
ttctgtcctctccca

SEQ ID NO: 753592 - DNA, 15 bp, Homo sapiens
tctgtcctctcccaa

SEQ ID NO: 753593 - DNA, 15 bp, Homo sapiens
ctgtcctctcccaac

SEQ ID NO: 753594 - DNA, 15 bp, Homo sapiens
tgtcctctcccaact

SEQ ID NO: 753595 - DNA, 15 bp, Homo sapiens
gtcctctcccaactt

SEQ ID NO: 753596 - DNA, 15 bp, Homo sapiens
tcctctcccaacttc

SEQ ID NO: 753597 - DNA, 15 bp, Homo sapiens
cctctcccaacttcc

SEQ ID NO: 753598 - DNA, 15 bp, Homo sapiens
ctctcccaacttcca

SEQ ID NO: 753599 - DNA, 15 bp, Homo sapiens
tctcccaacttccag

SEQ ID NO: 753600 - DNA, 15 bp, Homo sapiens
ctcccaacttccagg

SEQ ID NO: 753601 - DNA, 15 bp, Homo sapiens
tcccaacttccaggt

SEQ ID NO: 753602 - DNA, 15 bp, Homo sapiens
cccaacttccaggtt

SEQ ID NO: 753603 - DNA, 15 bp, Homo sapiens
ccaacttccaggttt

SEQ ID NO: 753604 - DNA, 15 bp, Homo sapiens
caacttccaggtttg

SEQ ID NO: 753605 - DNA, 15 bp, Homo sapiens
aacttccaggtttgc

SEQ ID NO: 753606 - DNA, 15 bp, Homo sapiens
acttccaggtttgca

SEQ ID NO: 753607 - DNA, 15 bp, Homo sapiens
cttccaggtttgcat

SEQ ID NO: 753608 - DNA, 15 bp, Homo sapiens
ttccaggtttgcatt

SEQ ID NO: 753609 - DNA, 15 bp, Homo sapiens
tccaggtttgcattt

SEQ ID NO: 753610 - DNA, 15 bp, Homo sapiens
ccaggtttgcatttt

SEQ ID NO: 753611 - DNA, 15 bp, Homo sapiens
caggtttgcattttc

SEQ ID NO: 753612 - DNA, 15 bp, Homo sapiens
aggtttgcattttca

SEQ ID NO: 753613 - DNA, 15 bp, Homo sapiens
ggtttgcattttcaa

SEQ ID NO: 753614 - DNA, 15 bp, Homo sapiens
gtttgcattttcaat

SEQ ID NO: 753615 - DNA, 15 bp, Homo sapiens
tttgcattttcaatt

SEQ ID NO: 753616 - DNA, 15 bp, Homo sapiens
ttgcattttcaattg

SEQ ID NO: 753617 - DNA, 15 bp, Homo sapiens
tgcattttcaattgc

SEQ ID NO: 753618 - DNA, 15 bp, Homo sapiens
gcattttcaattgcc

SEQ ID NO: 753619 - DNA, 15 bp, Homo sapiens
cattttcaattgcct

SEQ ID NO: 753620 - DNA, 15 bp, Homo sapiens
attttcaattgcctg

SEQ ID NO: 753621 - DNA, 15 bp, Homo sapiens
ttttcaattgcctgt

SEQ ID NO: 753622 - DNA, 15 bp, Homo sapiens
tttcaattgcctgtt

SEQ ID NO: 753623 - DNA, 15 bp, Homo sapiens
ttcaattgcctgttg

SEQ ID NO: 753624 - DNA, 15 bp, Homo sapiens
tcaattgcctgttgt

SEQ ID NO: 753625 - DNA, 15 bp, Homo sapiens
caattgcctgttgta

SEQ ID NO: 753626 - DNA, 15 bp, Homo sapiens
aattgcctgttgtat

SEQ ID NO: 753627 - DNA, 15 bp, Homo sapiens
attgcctgttgtata

SEQ ID NO: 753628 - DNA, 15 bp, Homo sapiens
ttgcctgttgtatat

SEQ ID NO: 753629 - DNA, 15 bp, Homo sapiens
tgcctgttgtatatt

SEQ ID NO: 753630 - DNA, 15 bp, Homo sapiens
gcctgttgtatattt

SEQ ID NO: 753631 - DNA, 15 bp, Homo sapiens
cctgttgtatatttt

SEQ ID NO: 753632 - DNA, 15 bp, Homo sapiens
ctgttgtatattttc

SEQ ID NO: 753633 - DNA, 15 bp, Homo sapiens
tgttgtatattttca

SEQ ID NO: 753634 - DNA, 15 bp, Homo sapiens
gttgtatattttcac

SEQ ID NO: 753635 - DNA, 15 bp, Homo sapiens
ttgtatattttcact

SEQ ID NO: 753636 - DNA, 15 bp, Homo sapiens
tgtatattttcacta

SEQ ID NO: 753637 - DNA, 15 bp, Homo sapiens
gtatattttcactaa

SEQ ID NO: 753638 - DNA, 15 bp, Homo sapiens
tatattttcactaag

SEQ ID NO: 753639 - DNA, 15 bp, Homo sapiens
atattttcactaagg

SEQ ID NO: 753640 - DNA, 15 bp, Homo sapiens
tattttcactaaggc

SEQ ID NO: 753641 - DNA, 15 bp, Homo sapiens
attttcactaaggca

SEQ ID NO: 753642 - DNA, 15 bp, Homo sapiens
ttttcactaaggcat

SEQ ID NO: 753643 - DNA, 15 bp, Homo sapiens
tttcactaaggcata

SEQ ID NO: 753644 - DNA, 15 bp, Homo sapiens
ttcactaaggcatag

SEQ ID NO: 753645 - DNA, 15 bp, Homo sapiens
tcactaaggcatagg

SEQ ID NO: 753646 - DNA, 15 bp, Homo sapiens
cactaaggcataggt

SEQ ID NO: 753647 - DNA, 15 bp, Homo sapiens
actaaggcataggtt

SEQ ID NO: 753648 - DNA, 15 bp, Homo sapiens
ctaaggcataggtta

SEQ ID NO: 753649 - DNA, 15 bp, Homo sapiens
taaggcataggttac

SEQ ID NO: 753650 - DNA, 15 bp, Homo sapiens
aaggcataggttact

SEQ ID NO: 753651 - DNA, 15 bp, Homo sapiens
aggcataggttacta

SEQ ID NO: 753652 - DNA, 15 bp, Homo sapiens
ggcataggttactag

SEQ ID NO: 753653 - DNA, 15 bp, Homo sapiens
gcataggttactagc

SEQ ID NO: 753654 - DNA, 15 bp, Homo sapiens
cataggttactagct

SEQ ID NO: 753655 - DNA, 15 bp, Homo sapiens
ataggttactagctc

SEQ ID NO: 753656 - DNA, 15 bp, Homo sapiens
taggttactagctct

SEQ ID NO: 753657 - DNA, 15 bp, Homo sapiens
aggttactagctcta

SEQ ID NO: 753658 - DNA, 15 bp, Homo sapiens
ggttactagctctat

SEQ ID NO: 753659 - DNA, 15 bp, Homo sapiens
gttactagctctatc

SEQ ID NO: 753660 - DNA, 15 bp, Homo sapiens
ttactagctctatct

SEQ ID NO: 753661 - DNA, 15 bp, Homo sapiens
tactagctctatctc

SEQ ID NO: 753662 - DNA, 15 bp, Homo sapiens
actagctctatctct

SEQ ID NO: 753663 - DNA, 15 bp, Homo sapiens
ctagctctatctctt

SEQ ID NO: 753664 - DNA, 15 bp, Homo sapiens
tagctctatctcttc

SEQ ID NO: 753665 - DNA, 15 bp, Homo sapiens
agctctatctcttcc

SEQ ID NO: 753666 - DNA, 15 bp, Homo sapiens
gctctatctcttcct

SEQ ID NO: 753667 - DNA, 15 bp, Homo sapiens
ctctatctcttcctt

SEQ ID NO: 753668 - DNA, 15 bp, Homo sapiens
tctatctcttccttt

SEQ ID NO: 753669 - DNA, 15 bp, Homo sapiens
ctatctcttcctttt

SEQ ID NO: 753670 - DNA, 15 bp, Homo sapiens
tatctcttcctttta

SEQ ID NO: 753671 - DNA, 15 bp, Homo sapiens
atctcttccttttaa

SEQ ID NO: 753672 - DNA, 15 bp, Homo sapiens
tctcttccttttaac

SEQ ID NO: 753673 - DNA, 15 bp, Homo sapiens
ctcttccttttaaca

SEQ ID NO: 753674 - DNA, 15 bp, Homo sapiens
tcttccttttaacag

SEQ ID NO: 753675 - DNA, 15 bp, Homo sapiens
cttccttttaacaga

SEQ ID NO: 753676 - DNA, 15 bp, Homo sapiens
ttccttttaacagag

SEQ ID NO: 753677 - DNA, 15 bp, Homo sapiens
tccttttaacagagt

SEQ ID NO: 753678 - DNA, 15 bp, Homo sapiens
ccttttaacagagtg

SEQ ID NO: 753679 - DNA, 15 bp, Homo sapiens
cttttaacagagtgc

SEQ ID NO: 753680 - DNA, 15 bp, Homo sapiens
ttttaacagagtgca

SEQ ID NO: 753681 - DNA, 15 bp, Homo sapiens
tttaacagagtgcaa

SEQ ID NO: 753682 - DNA, 15 bp, Homo sapiens
ttaacagagtgcaat

SEQ ID NO: 753683 - DNA, 15 bp, Homo sapiens
taacagagtgcaatt

SEQ ID NO: 753684 - DNA, 15 bp, Homo sapiens
aacagagtgcaattt

SEQ ID NO: 753685 - DNA, 15 bp, Homo sapiens
acagagtgcaatttc

SEQ ID NO: 753686 - DNA, 15 bp, Homo sapiens
cagagtgcaatttct

SEQ ID NO: 753687 - DNA, 15 bp, Homo sapiens
agagtgcaatttctc

SEQ ID NO: 753688 - DNA, 15 bp, Homo sapiens
gagtgcaatttctct

SEQ ID NO: 753689 - DNA, 15 bp, Homo sapiens
agtgcaatttctctt

SEQ ID NO: 753690 - DNA, 15 bp, Homo sapiens
gtgcaatttctcttc

SEQ ID NO: 753691 - DNA, 15 bp, Homo sapiens
tgcaatttctcttca

SEQ ID NO: 753692 - DNA, 15 bp, Homo sapiens
gcaatttctcttcaa

SEQ ID NO: 753693 - DNA, 15 bp, Homo sapiens
caatttctcttcaag

SEQ ID NO: 753694 - DNA, 15 bp, Homo sapiens
aatttctcttcaagg

SEQ ID NO: 753695 - DNA, 15 bp, Homo sapiens
atttctcttcaaggc

SEQ ID NO: 753696 - DNA, 15 bp, Homo sapiens
tttctcttcaaggct

SEQ ID NO: 753697 - DNA, 15 bp, Homo sapiens
ttctcttcaaggctc

SEQ ID NO: 753698 - DNA, 15 bp, Homo sapiens
tctcttcaaggctct

SEQ ID NO: 753699 - DNA, 15 bp, Homo sapiens
ctcttcaaggctctt

SEQ ID NO: 753700 - DNA, 15 bp, Homo sapiens
tcttcaaggctctta

SEQ ID NO: 753701 - DNA, 15 bp, Homo sapiens
cttcaaggctcttaa

SEQ ID NO: 753702 - DNA, 15 bp, Homo sapiens
ttcaaggctcttaat

SEQ ID NO: 753703 - DNA, 15 bp, Homo sapiens
tcaaggctcttaata

SEQ ID NO: 753704 - DNA, 15 bp, Homo sapiens
caaggctcttaatag

SEQ ID NO: 753705 - DNA, 15 bp, Homo sapiens
aaggctcttaatagt

SEQ ID NO: 753706 - DNA, 15 bp, Homo sapiens
aggctcttaatagtc

SEQ ID NO: 753707 - DNA, 15 bp, Homo sapiens
ggctcttaatagtct

SEQ ID NO: 753708 - DNA, 15 bp, Homo sapiens
gctcttaatagtctt

SEQ ID NO: 753709 - DNA, 15 bp, Homo sapiens
ctcttaatagtcttc

SEQ ID NO: 753710 - DNA, 15 bp, Homo sapiens
tcttaatagtcttca

SEQ ID NO: 753711 - DNA, 15 bp, Homo sapiens
cttaatagtcttcat

SEQ ID NO: 753712 - DNA, 15 bp, Homo sapiens
ttaatagtcttcatc

SEQ ID NO: 753713 - DNA, 15 bp, Homo sapiens
taatagtcttcatct

SEQ ID NO: 753714 - DNA, 15 bp, Homo sapiens
aatagtcttcatctt

SEQ ID NO: 753715 - DNA, 15 bp, Homo sapiens
atagtcttcatcttt

SEQ ID NO: 753716 - DNA, 15 bp, Homo sapiens
tagtcttcatctttt

SEQ ID NO: 753717 - DNA, 15 bp, Homo sapiens
agtcttcatcttttc

SEQ ID NO: 753718 - DNA, 15 bp, Homo sapiens
gtcttcatcttttct

SEQ ID NO: 753719 - DNA, 15 bp, Homo sapiens
tcttcatcttttctt

SEQ ID NO: 753720 - DNA, 15 bp, Homo sapiens
cttcatcttttcttt

SEQ ID NO: 753721 - DNA, 15 bp, Homo sapiens
ttcatcttttctttc

SEQ ID NO: 753722 - DNA, 15 bp, Homo sapiens
tcatcttttctttcc

SEQ ID NO: 753723 - DNA, 15 bp, Homo sapiens
catcttttctttcct

SEQ ID NO: 753724 - DNA, 15 bp, Homo sapiens
atcttttctttcctt

SEQ ID NO: 753725 - DNA, 15 bp, Homo sapiens
tcttttctttccttt

SEQ ID NO: 753726 - DNA, 15 bp, Homo sapiens
cttttctttccttta

SEQ ID NO: 753727 - DNA, 15 bp, Homo sapiens
ttttctttcctttat

SEQ ID NO: 753728 - DNA, 15 bp, Homo sapiens
tttctttcctttata

SEQ ID NO: 753729 - DNA, 15 bp, Homo sapiens
ttctttcctttatat

SEQ ID NO: 753730 - DNA, 15 bp, Homo sapiens
tctttcctttatata

SEQ ID NO: 753731 - DNA, 15 bp, Homo sapiens
ctttcctttatatac

SEQ ID NO: 753732 - DNA, 15 bp, Homo sapiens
tttcctttatatacg

SEQ ID NO: 753733 - DNA, 15 bp, Homo sapiens
ttcctttatatacgt

SEQ ID NO: 753734 - DNA, 15 bp, Homo sapiens
tcctttatatacgtt

SEQ ID NO: 753735 - DNA, 15 bp, Homo sapiens
cctttatatacgtta

SEQ ID NO: 753736 - DNA, 15 bp, Homo sapiens
ctttatatacgttaa

SEQ ID NO: 753737 - DNA, 15 bp, Homo sapiens
tttatatacgttaag

SEQ ID NO: 753738 - DNA, 15 bp, Homo sapiens
ttatatacgttaagt

SEQ ID NO: 753739 - DNA, 15 bp, Homo sapiens
tatatacgttaagtt

SEQ ID NO: 753740 - DNA, 15 bp, Homo sapiens
atatacgttaagtta

SEQ ID NO: 753741 - DNA, 15 bp, Homo sapiens
tatacgttaagttac

SEQ ID NO: 753742 - DNA, 15 bp, Homo sapiens
atacgttaagttact

SEQ ID NO: 753743 - DNA, 15 bp, Homo sapiens
tacgttaagttacta

SEQ ID NO: 753744 - DNA, 15 bp, Homo sapiens
acgttaagttactaa

SEQ ID NO: 753745 - DNA, 15 bp, Homo sapiens
cgttaagttactaaa

SEQ ID NO: 753746 - DNA, 15 bp, Homo sapiens
gttaagttactaaat

SEQ ID NO: 753747 - DNA, 15 bp, Homo sapiens
ttaagttactaaatc

SEQ ID NO: 753748 - DNA, 15 bp, Homo sapiens
taagttactaaatcc

SEQ ID NO: 753749 - DNA, 15 bp, Homo sapiens
aagttactaaatccc

SEQ ID NO: 753750 - DNA, 15 bp, Homo sapiens
agttactaaatccca

SEQ ID NO: 753751 - DNA, 15 bp, Homo sapiens
gttactaaatcccat

SEQ ID NO: 753752 - DNA, 15 bp, Homo sapiens
ttactaaatcccatt

SEQ ID NO: 753753 - DNA, 15 bp, Homo sapiens
tactaaatcccatta

SEQ ID NO: 753754 - DNA, 15 bp, Homo sapiens
actaaatcccattaa

SEQ ID NO: 753755 - DNA, 15 bp, Homo sapiens
ctaaatcccattaac

SEQ ID NO: 753756 - DNA, 15 bp, Homo sapiens
taaatcccattaact

SEQ ID NO: 753757 - DNA, 15 bp, Homo sapiens
aaatcccattaactt

SEQ ID NO: 753758 - DNA, 15 bp, Homo sapiens
aatcccattaacttt

SEQ ID NO: 753759 - DNA, 15 bp, Homo sapiens
atcccattaactttg

SEQ ID NO: 753760 - DNA, 15 bp, Homo sapiens
tcccattaactttgt

SEQ ID NO: 753761 - DNA, 15 bp, Homo sapiens
cccattaactttgta

SEQ ID NO: 753762 - DNA, 15 bp, Homo sapiens
ccattaactttgtat

SEQ ID NO: 753763 - DNA, 15 bp, Homo sapiens
cattaactttgtatt

SEQ ID NO: 753764 - DNA, 15 bp, Homo sapiens
attaactttgtattg

SEQ ID NO: 753765 - DNA, 15 bp, Homo sapiens
ttaactttgtattgc

SEQ ID NO: 753766 - DNA, 15 bp, Homo sapiens
taactttgtattgcc

SEQ ID NO: 753767 - DNA, 15 bp, Homo sapiens
aactttgtattgcct

SEQ ID NO: 753768 - DNA, 15 bp, Homo sapiens
actttgtattgcctt

SEQ ID NO: 753769 - DNA, 15 bp, Homo sapiens
ctttgtattgcctta

SEQ ID NO: 753770 - DNA, 15 bp, Homo sapiens
tttgtattgccttaa

SEQ ID NO: 753771 - DNA, 15 bp, Homo sapiens
ttgtattgccttaat

SEQ ID NO: 753772 - DNA, 15 bp, Homo sapiens
tgtattgccttaatc

SEQ ID NO: 753773 - DNA, 15 bp, Homo sapiens
gtattgccttaatct

SEQ ID NO: 753774 - DNA, 15 bp, Homo sapiens
tattgccttaatctc

SEQ ID NO: 753775 - DNA, 15 bp, Homo sapiens
attgccttaatctct

SEQ ID NO: 753776 - DNA, 15 bp, Homo sapiens
ttgccttaatctctc

SEQ ID NO: 753777 - DNA, 15 bp, Homo sapiens
tgccttaatctctct

SEQ ID NO: 753778 - DNA, 15 bp, Homo sapiens
gccttaatctctctt

SEQ ID NO: 753779 - DNA, 15 bp, Homo sapiens
ccttaatctctcttt

SEQ ID NO: 753780 - DNA, 15 bp, Homo sapiens
cttaatctctctttg

SEQ ID NO: 753781 - DNA, 15 bp, Homo sapiens
ttaatctctctttgc

SEQ ID NO: 753782 - DNA, 15 bp, Homo sapiens
taatctctctttgct

SEQ ID NO: 753783 - DNA, 15 bp, Homo sapiens
aatctctctttgctt

SEQ ID NO: 753784 - DNA, 15 bp, Homo sapiens
atctctctttgcttc

SEQ ID NO: 753785 - DNA, 15 bp, Homo sapiens
tctctctttgcttcc

SEQ ID NO: 753786 - DNA, 15 bp, Homo sapiens
ctctctttgcttcct

SEQ ID NO: 753787 - DNA, 15 bp, Homo sapiens
tctctttgcttccta

SEQ ID NO: 753788 - DNA, 15 bp, Homo sapiens
ctctttgcttcctac

SEQ ID NO: 753789 - DNA, 15 bp, Homo sapiens
tctttgcttcctact

SEQ ID NO: 753790 - DNA, 15 bp, Homo sapiens
ctttgcttcctactt

SEQ ID NO: 753791 - DNA, 15 bp, Homo sapiens
tttgcttcctacttc

SEQ ID NO: 753792 - DNA, 15 bp, Homo sapiens
ttgcttcctacttct

SEQ ID NO: 753793 - DNA, 15 bp, Homo sapiens
tgcttcctacttctg

SEQ ID NO: 753794 - DNA, 15 bp, Homo sapiens
gcttcctacttctgc

SEQ ID NO: 753795 - DNA, 15 bp, Homo sapiens
cttcctacttctgcc

SEQ ID NO: 753796 - DNA, 15 bp, Homo sapiens
ttcctacttctgcct

SEQ ID NO: 753797 - DNA, 15 bp, Homo sapiens
tcctacttctgcctt

SEQ ID NO: 753798 - DNA, 15 bp, Homo sapiens
cctacttctgccttt

SEQ ID NO: 753799 - DNA, 15 bp, Homo sapiens
ctacttctgccttta

SEQ ID NO: 753800 - DNA, 15 bp, Homo sapiens
tacttctgcctttat

SEQ ID NO: 753801 - DNA, 15 bp, Homo sapiens
acttctgcctttatt

SEQ ID NO: 753802 - DNA, 15 bp, Homo sapiens
cttctgcctttattt

SEQ ID NO: 753803 - DNA, 15 bp, Homo sapiens
ttctgcctttatttc

SEQ ID NO: 753804 - DNA, 15 bp, Homo sapiens
tctgcctttatttca

SEQ ID NO: 753805 - DNA, 15 bp, Homo sapiens
ctgcctttatttcaa

SEQ ID NO: 753806 - DNA, 15 bp, Homo sapiens
tgcctttatttcaac

SEQ ID NO: 753807 - DNA, 15 bp, Homo sapiens
gcctttatttcaaca

SEQ ID NO: 753808 - DNA, 15 bp, Homo sapiens
cctttatttcaacac

SEQ ID NO: 753809 - DNA, 15 bp, Homo sapiens
ctttatttcaacact

SEQ ID NO: 753810 - DNA, 15 bp, Homo sapiens
tttatttcaacactt

SEQ ID NO: 753811 - DNA, 15 bp, Homo sapiens
ttatttcaacactta

SEQ ID NO: 753812 - DNA, 15 bp, Homo sapiens
tatttcaacacttat

SEQ ID NO: 753813 - DNA, 15 bp, Homo sapiens
atttcaacacttata

SEQ ID NO: 753814 - DNA, 15 bp, Homo sapiens
tttcaacacttataa

SEQ ID NO: 753815 - DNA, 15 bp, Homo sapiens
ttcaacacttataat

SEQ ID NO: 753816 - DNA, 15 bp, Homo sapiens
tcaacacttataatc

SEQ ID NO: 753817 - DNA, 15 bp, Homo sapiens
caacacttataatct

SEQ ID NO: 753818 - DNA, 15 bp, Homo sapiens
aacacttataatctt

SEQ ID NO: 753819 - DNA, 15 bp, Homo sapiens
acacttataatctta

SEQ ID NO: 753820 - DNA, 15 bp, Homo sapiens
cacttataatcttat

SEQ ID NO: 753821 - DNA, 15 bp, Homo sapiens
acttataatcttatt

SEQ ID NO: 753822 - DNA, 15 bp, Homo sapiens
cttataatcttatta

SEQ ID NO: 753823 - DNA, 15 bp, Homo sapiens
ttataatcttattac

SEQ ID NO: 753824 - DNA, 15 bp, Homo sapiens
tataatcttattaca

SEQ ID NO: 753825 - DNA, 15 bp, Homo sapiens
ataatcttattacag

SEQ ID NO: 753826 - DNA, 15 bp, Homo sapiens
taatcttattacagt

SEQ ID NO: 753827 - DNA, 15 bp, Homo sapiens
aatcttattacagta

SEQ ID NO: 753828 - DNA, 15 bp, Homo sapiens
atcttattacagtaa

SEQ ID NO: 753829 - DNA, 15 bp, Homo sapiens
tcttattacagtaat

SEQ ID NO: 753830 - DNA, 15 bp, Homo sapiens
cttattacagtaatc

SEQ ID NO: 753831 - DNA, 15 bp, Homo sapiens
ttattacagtaatct

SEQ ID NO: 753832 - DNA, 15 bp, Homo sapiens
tattacagtaatctc

SEQ ID NO: 753833 - DNA, 15 bp, Homo sapiens
attacagtaatctcc

SEQ ID NO: 753834 - DNA, 15 bp, Homo sapiens
ttacagtaatctccc

SEQ ID NO: 753835 - DNA, 15 bp, Homo sapiens
tacagtaatctccca

SEQ ID NO: 753836 - DNA, 15 bp, Homo sapiens
acagtaatctcccaa

SEQ ID NO: 753837 - DNA, 15 bp, Homo sapiens
cagtaatctcccaac

SEQ ID NO: 753838 - DNA, 15 bp, Homo sapiens
agtaatctcccaact

SEQ ID NO: 753839 - DNA, 15 bp, Homo sapiens
gtaatctcccaactg

SEQ ID NO: 753840 - DNA, 15 bp, Homo sapiens
taatctcccaactgg

SEQ ID NO: 753841 - DNA, 15 bp, Homo sapiens
aatctcccaactggt

SEQ ID NO: 753842 - DNA, 15 bp, Homo sapiens
atctcccaactggtc

SEQ ID NO: 753843 - DNA, 15 bp, Homo sapiens
tctcccaactggtct

SEQ ID NO: 753844 - DNA, 15 bp, Homo sapiens
ctcccaactggtctt

SEQ ID NO: 753845 - DNA, 15 bp, Homo sapiens
tcccaactggtcttc

SEQ ID NO: 753846 - DNA, 15 bp, Homo sapiens
cccaactggtcttcc

SEQ ID NO: 753847 - DNA, 15 bp, Homo sapiens
ccaactggtcttcct

SEQ ID NO: 753848 - DNA, 15 bp, Homo sapiens
caactggtcttcctg

SEQ ID NO: 753849 - DNA, 15 bp, Homo sapiens
aactggtcttcctgc

SEQ ID NO: 753850 - DNA, 15 bp, Homo sapiens
actggtcttcctgcc

SEQ ID NO: 753851 - DNA, 15 bp, Homo sapiens
ctggtcttcctgcct

SEQ ID NO: 753852 - DNA, 15 bp, Homo sapiens
tggtcttcctgcctc

SEQ ID NO: 753853 - DNA, 15 bp, Homo sapiens
ggtcttcctgcctct

SEQ ID NO: 753854 - DNA, 15 bp, Homo sapiens
gtcttcctgcctcta

SEQ ID NO: 753855 - DNA, 15 bp, Homo sapiens
tcttcctgcctctaa

SEQ ID NO: 753856 - DNA, 15 bp, Homo sapiens
cttcctgcctctaat

SEQ ID NO: 753857 - DNA, 15 bp, Homo sapiens
ttcctgcctctaatc

SEQ ID NO: 753858 - DNA, 15 bp, Homo sapiens
tcctgcctctaatct

SEQ ID NO: 753859 - DNA, 15 bp, Homo sapiens
cctgcctctaatctc

SEQ ID NO: 753860 - DNA, 15 bp, Homo sapiens
ctgcctctaatctct

SEQ ID NO: 753861 - DNA, 15 bp, Homo sapiens
tgcctctaatctctc

SEQ ID NO: 753862 - DNA, 15 bp, Homo sapiens
gcctctaatctctcc

SEQ ID NO: 753863 - DNA, 15 bp, Homo sapiens
cctctaatctctcct

SEQ ID NO: 753864 - DNA, 15 bp, Homo sapiens
ctctaatctctccta

SEQ ID NO: 753865 - DNA, 15 bp, Homo sapiens
tctaatctctcctaa

SEQ ID NO: 753866 - DNA, 15 bp, Homo sapiens
ctaatctctcctaat

SEQ ID NO: 753867 - DNA, 15 bp, Homo sapiens
taatctctcctaatc

SEQ ID NO: 753868 - DNA, 15 bp, Homo sapiens
aatctctcctaatct

SEQ ID NO: 753869 - DNA, 15 bp, Homo sapiens
atctctcctaatcta

SEQ ID NO: 753870 - DNA, 15 bp, Homo sapiens
tctctcctaatctat

SEQ ID NO: 753871 - DNA, 15 bp, Homo sapiens
ctctcctaatctatc

SEQ ID NO: 753872 - DNA, 15 bp, Homo sapiens
tctcctaatctatcc

SEQ ID NO: 753873 - DNA, 15 bp, Homo sapiens
ctcctaatctatcct

SEQ ID NO: 753874 - DNA, 15 bp, Homo sapiens
tcctaatctatccta

SEQ ID NO: 753875 - DNA, 15 bp, Homo sapiens
cctaatctatcctat

SEQ ID NO: 753876 - DNA, 15 bp, Homo sapiens
ctaatctatcctata

SEQ ID NO: 753877 - DNA, 15 bp, Homo sapiens
taatctatcctatat

SEQ ID NO: 753878 - DNA, 15 bp, Homo sapiens
aatctatcctatatg

SEQ ID NO: 753879 - DNA, 15 bp, Homo sapiens
atctatcctatatgc

SEQ ID NO: 753880 - DNA, 15 bp, Homo sapiens
tctatcctatatgct

SEQ ID NO: 753881 - DNA, 15 bp, Homo sapiens
ctatcctatatgctg

SEQ ID NO: 753882 - DNA, 15 bp, Homo sapiens
tatcctatatgctgg

SEQ ID NO: 753883 - DNA, 15 bp, Homo sapiens
atcctatatgctggg

SEQ ID NO: 753884 - DNA, 15 bp, Homo sapiens
tcctatatgctggga

SEQ ID NO: 753885 - DNA, 15 bp, Homo sapiens
cctatatgctgggat

SEQ ID NO: 753886 - DNA, 15 bp, Homo sapiens
ctatatgctgggata

SEQ ID NO: 753887 - DNA, 15 bp, Homo sapiens
tatatgctgggatat

SEQ ID NO: 753888 - DNA, 15 bp, Homo sapiens
atatgctgggatatt

SEQ ID NO: 753889 - DNA, 15 bp, Homo sapiens
tatgctgggatattg

SEQ ID NO: 753890 - DNA, 15 bp, Homo sapiens
atgctgggatattgc

SEQ ID NO: 753891 - DNA, 15 bp, Homo sapiens
tgctgggatattgct

SEQ ID NO: 753892 - DNA, 15 bp, Homo sapiens
gctgggatattgctt

SEQ ID NO: 753893 - DNA, 15 bp, Homo sapiens
ctgggatattgcttg

SEQ ID NO: 753894 - DNA, 15 bp, Homo sapiens
tgggatattgcttgc

SEQ ID NO: 753895 - DNA, 15 bp, Homo sapiens
gggatattgcttgca

SEQ ID NO: 753896 - DNA, 15 bp, Homo sapiens
ggatattgcttgcaa

SEQ ID NO: 753897 - DNA, 15 bp, Homo sapiens
gatattgcttgcaaa

SEQ ID NO: 753898 - DNA, 15 bp, Homo sapiens
atattgcttgcaaat

SEQ ID NO: 753899 - DNA, 15 bp, Homo sapiens
tattgcttgcaaatt

SEQ ID NO: 753900 - DNA, 15 bp, Homo sapiens
attgcttgcaaattc

SEQ ID NO: 753901 - DNA, 15 bp, Homo sapiens
ttgcttgcaaattct

SEQ ID NO: 753902 - DNA, 15 bp, Homo sapiens
tgcttgcaaattctt

SEQ ID NO: 753903 - DNA, 15 bp, Homo sapiens
gcttgcaaattcttt

SEQ ID NO: 753904 - DNA, 15 bp, Homo sapiens
cttgcaaattcttta

SEQ ID NO: 753905 - DNA, 15 bp, Homo sapiens
ttgcaaattctttaa

SEQ ID NO: 753906 - DNA, 15 bp, Homo sapiens
tgcaaattctttaat

SEQ ID NO: 753907 - DNA, 15 bp, Homo sapiens
gcaaattctttaatg

SEQ ID NO: 753908 - DNA, 15 bp, Homo sapiens
caaattctttaatgt

SEQ ID NO: 753909 - DNA, 15 bp, Homo sapiens
aaattctttaatgtc

SEQ ID NO: 753910 - DNA, 15 bp, Homo sapiens
aattctttaatgtct

SEQ ID NO: 753911 - DNA, 15 bp, Homo sapiens
attctttaatgtctt

SEQ ID NO: 753912 - DNA, 15 bp, Homo sapiens
ttctttaatgtcttt

SEQ ID NO: 753913 - DNA, 15 bp, Homo sapiens
tctttaatgtctttc

SEQ ID NO: 753914 - DNA, 15 bp, Homo sapiens
ctttaatgtctttct

SEQ ID NO: 753915 - DNA, 15 bp, Homo sapiens
tttaatgtctttcta

SEQ ID NO: 753916 - DNA, 15 bp, Homo sapiens
ttaatgtctttctat

SEQ ID NO: 753917 - DNA, 15 bp, Homo sapiens
taatgtctttctatt

SEQ ID NO: 753918 - DNA, 15 bp, Homo sapiens
aatgtctttctattg

SEQ ID NO: 753919 - DNA, 15 bp, Homo sapiens
atgtctttctattgc

SEQ ID NO: 753920 - DNA, 15 bp, Homo sapiens
tgtctttctattgcc

SEQ ID NO: 753921 - DNA, 15 bp, Homo sapiens
gtctttctattgcct

SEQ ID NO: 753922 - DNA, 15 bp, Homo sapiens
tctttctattgccta

SEQ ID NO: 753923 - DNA, 15 bp, Homo sapiens
ctttctattgcctag

SEQ ID NO: 753924 - DNA, 15 bp, Homo sapiens
tttctattgcctagc

SEQ ID NO: 753925 - DNA, 15 bp, Homo sapiens
ttctattgcctagca

SEQ ID NO: 753926 - DNA, 15 bp, Homo sapiens
tctattgcctagcaa

SEQ ID NO: 753927 - DNA, 15 bp, Homo sapiens
ctattgcctagcaaa

SEQ ID NO: 753928 - DNA, 15 bp, Homo sapiens
tattgcctagcaaat

SEQ ID NO: 753929 - DNA, 15 bp, Homo sapiens
attgcctagcaaatg

SEQ ID NO: 753930 - DNA, 15 bp, Homo sapiens
ttgcctagcaaatga

SEQ ID NO: 753931 - DNA, 15 bp, Homo sapiens
tgcctagcaaatgaa

SEQ ID NO: 753932 - DNA, 15 bp, Homo sapiens
gcctagcaaatgaaa

SEQ ID NO: 753933 - DNA, 15 bp, Homo sapiens
cctagcaaatgaaat

SEQ ID NO: 753934 - DNA, 15 bp, Homo sapiens
ctagcaaatgaaata

SEQ ID NO: 753935 - DNA, 15 bp, Homo sapiens
tagcaaatgaaatag

SEQ ID NO: 753936 - DNA, 15 bp, Homo sapiens
agcaaatgaaataga

SEQ ID NO: 753937 - DNA, 15 bp, Homo sapiens
gcaaatgaaatagag

SEQ ID NO: 753938 - DNA, 15 bp, Homo sapiens
caaatgaaatagaga

SEQ ID NO: 753939 - DNA, 15 bp, Homo sapiens
aaatgaaatagagac

SEQ ID NO: 753940 - DNA, 15 bp, Homo sapiens
aatgaaatagagaca

SEQ ID NO: 753941 - DNA, 15 bp, Homo sapiens
atgaaatagagacac

SEQ ID NO: 753942 - DNA, 15 bp, Homo sapiens
tgaaatagagacacc

SEQ ID NO: 753943 - DNA, 15 bp, Homo sapiens
gaaatagagacacct

SEQ ID NO: 753944 - DNA, 15 bp, Homo sapiens
aaatagagacaccta

SEQ ID NO: 753945 - DNA, 15 bp, Homo sapiens
aatagagacacctaa

SEQ ID NO: 753946 - DNA, 15 bp, Homo sapiens
atagagacacctaaa

SEQ ID NO: 753947 - DNA, 15 bp, Homo sapiens
tagagacacctaaac

SEQ ID NO: 753948 - DNA, 15 bp, Homo sapiens
agagacacctaaacc

SEQ ID NO: 753949 - DNA, 15 bp, Homo sapiens
gagacacctaaacct

SEQ ID NO: 753950 - DNA, 15 bp, Homo sapiens
agacacctaaaccta

SEQ ID NO: 753951 - DNA, 15 bp, Homo sapiens
gacacctaaacctaa

SEQ ID NO: 753952 - DNA, 15 bp, Homo sapiens
acacctaaacctaat

SEQ ID NO: 753953 - DNA, 15 bp, Homo sapiens
cacctaaacctaata

SEQ ID NO: 753954 - DNA, 15 bp, Homo sapiens
acctaaacctaatat

SEQ ID NO: 753955 - DNA, 15 bp, Homo sapiens
cctaaacctaatatc

SEQ ID NO: 753956 - DNA, 15 bp, Homo sapiens
ctaaacctaatatcc

SEQ ID NO: 753957 - DNA, 15 bp, Homo sapiens
taaacctaatatcct

SEQ ID NO: 753958 - DNA, 15 bp, Homo sapiens
aaacctaatatccta

SEQ ID NO: 753959 - DNA, 15 bp, Homo sapiens
aacctaatatcctag

SEQ ID NO: 753960 - DNA, 15 bp, Homo sapiens
acctaatatcctagg

SEQ ID NO: 753961 - DNA, 15 bp, Homo sapiens
cctaatatcctaggc

SEQ ID NO: 753962 - DNA, 15 bp, Homo sapiens
ctaatatcctaggcc

SEQ ID NO: 753963 - DNA, 15 bp, Homo sapiens
taatatcctaggcct

SEQ ID NO: 753964 - DNA, 15 bp, Homo sapiens
aatatcctaggcctt

SEQ ID NO: 753965 - DNA, 15 bp, Homo sapiens
atatcctaggccttc

SEQ ID NO: 753966 - DNA, 15 bp, Homo sapiens
tatcctaggccttct

SEQ ID NO: 753967 - DNA, 15 bp, Homo sapiens
atcctaggccttcta

SEQ ID NO: 753968 - DNA, 15 bp, Homo sapiens
tcctaggccttctac

SEQ ID NO: 753969 - DNA, 15 bp, Homo sapiens
cctaggccttctacc

SEQ ID NO: 753970 - DNA, 15 bp, Homo sapiens
ctaggccttctaccg

SEQ ID NO: 753971 - DNA, 15 bp, Homo sapiens
taggccttctaccgt

SEQ ID NO: 753972 - DNA, 15 bp, Homo sapiens
aggccttctaccgtg

SEQ ID NO: 753973 - DNA, 15 bp, Homo sapiens
ggccttctaccgtga

SEQ ID NO: 753974 - DNA, 15 bp, Homo sapiens
gccttctaccgtgag

SEQ ID NO: 753975 - DNA, 15 bp, Homo sapiens
ccttctaccgtgagc

SEQ ID NO: 753976 - DNA, 15 bp, Homo sapiens
cttctaccgtgagcg

SEQ ID NO: 753977 - DNA, 15 bp, Homo sapiens
ttctaccgtgagcgc

SEQ ID NO: 753978 - DNA, 15 bp, Homo sapiens
tctaccgtgagcgcc

SEQ ID NO: 753979 - DNA, 15 bp, Homo sapiens
ctaccgtgagcgcca

SEQ ID NO: 753980 - DNA, 15 bp, Homo sapiens
taccgtgagcgccac

SEQ ID NO: 753981 - DNA, 15 bp, Homo sapiens
accgtgagcgccact

SEQ ID NO: 753982 - DNA, 15 bp, Homo sapiens
ccgtgagcgccactg

SEQ ID NO: 753983 - DNA, 15 bp, Homo sapiens
cgtgagcgccactgc

SEQ ID NO: 753984 - DNA, 15 bp, Homo sapiens
gtgagcgccactgca

SEQ ID NO: 753985 - DNA, 15 bp, Homo sapiens
tgagcgccactgcat

SEQ ID NO: 753986 - DNA, 15 bp, Homo sapiens
gagcgccactgcatg

SEQ ID NO: 753987 - DNA, 15 bp, Homo sapiens
agcgccactgcatgt

SEQ ID NO: 753988 - DNA, 15 bp, Homo sapiens
gcgccactgcatgtt

SEQ ID NO: 753989 - DNA, 15 bp, Homo sapiens
cgccactgcatgttt

SEQ ID NO: 753990 - DNA, 15 bp, Homo sapiens
gccactgcatgtttc

SEQ ID NO: 753991 - DNA, 15 bp, Homo sapiens
ccactgcatgtttct

SEQ ID NO: 753992 - DNA, 15 bp, Homo sapiens
cactgcatgtttctg

SEQ ID NO: 753993 - DNA, 15 bp, Homo sapiens
actgcatgtttctgg

SEQ ID NO: 753994 - DNA, 15 bp, Homo sapiens
ctgcatgtttctggc

SEQ ID NO: 753995 - DNA, 15 bp, Homo sapiens
tgcatgtttctggct

SEQ ID NO: 753996 - DNA, 15 bp, Homo sapiens
gcatgtttctggctt

SEQ ID NO: 753997 - DNA, 15 bp, Homo sapiens
catgtttctggcttg

SEQ ID NO: 753998 - DNA, 15 bp, Homo sapiens
atgtttctggcttga

SEQ ID NO: 753999 - DNA, 15 bp, Homo sapiens
tgtttctggcttgat

SEQ ID NO: 754000 - DNA, 15 bp, Homo sapiens
gtttctggcttgata

SEQ ID NO: 754001 - DNA, 15 bp, Homo sapiens
tttctggcttgatac

SEQ ID NO: 754002 - DNA, 15 bp, Homo sapiens
ttctggcttgatact

SEQ ID NO: 754003 - DNA, 15 bp, Homo sapiens
tctggcttgatactc

SEQ ID NO: 754004 - DNA, 15 bp, Homo sapiens
ctggcttgatactca

SEQ ID NO: 754005 - DNA, 15 bp, Homo sapiens
tggcttgatactcac

SEQ ID NO: 754006 - DNA, 15 bp, Homo sapiens
ggcttgatactcact

SEQ ID NO: 754007 - DNA, 15 bp, Homo sapiens
gcttgatactcactg

SEQ ID NO: 754008 - DNA, 15 bp, Homo sapiens
cttgatactcactgc

SEQ ID NO: 754009 - DNA, 15 bp, Homo sapiens
ttgatactcactgct

SEQ ID NO: 754010 - DNA, 15 bp, Homo sapiens
tgatactcactgctt

SEQ ID NO: 754011 - DNA, 15 bp, Homo sapiens
gatactcactgcttt

SEQ ID NO: 754012 - DNA, 15 bp, Homo sapiens
atactcactgctttt

SEQ ID NO: 754013 - DNA, 15 bp, Homo sapiens
tactcactgcttttc

SEQ ID NO: 754014 - DNA, 15 bp, Homo sapiens
actcactgcttttct

SEQ ID NO: 754015 - DNA, 15 bp, Homo sapiens
ctcactgcttttctt

SEQ ID NO: 754016 - DNA, 15 bp, Homo sapiens
tcactgcttttcttc

SEQ ID NO: 754017 - DNA, 15 bp, Homo sapiens
cactgcttttcttca

SEQ ID NO: 754018 - DNA, 15 bp, Homo sapiens
actgcttttcttcat

SEQ ID NO: 754019 - DNA, 15 bp, Homo sapiens
ctgcttttcttcata

SEQ ID NO: 754020 - DNA, 15 bp, Homo sapiens
tgcttttcttcatac

SEQ ID NO: 754021 - DNA, 15 bp, Homo sapiens
gcttttcttcataca

SEQ ID NO: 754022 - DNA, 15 bp, Homo sapiens
cttttcttcatacac

SEQ ID NO: 754023 - DNA, 15 bp, Homo sapiens
ttttcttcatacacc

SEQ ID NO: 754024 - DNA, 15 bp, Homo sapiens
tttcttcatacacca

SEQ ID NO: 754025 - DNA, 15 bp, Homo sapiens
ttcttcatacaccat

SEQ ID NO: 754026 - DNA, 15 bp, Homo sapiens
tcttcatacaccatg

SEQ ID NO: 754027 - DNA, 15 bp, Homo sapiens
cttcatacaccatgc

SEQ ID NO: 754028 - DNA, 15 bp, Homo sapiens
ttcatacaccatgct

SEQ ID NO: 754029 - DNA, 15 bp, Homo sapiens
tcatacaccatgctc

SEQ ID NO: 754030 - DNA, 15 bp, Homo sapiens
catacaccatgctcc

SEQ ID NO: 754031 - DNA, 15 bp, Homo sapiens
atacaccatgctcca

SEQ ID NO: 754032 - DNA, 15 bp, Homo sapiens
tacaccatgctccat

SEQ ID NO: 754033 - DNA, 15 bp, Homo sapiens
acaccatgctccatt

SEQ ID NO: 754034 - DNA, 15 bp, Homo sapiens
caccatgctccattc

SEQ ID NO: 754035 - DNA, 15 bp, Homo sapiens
accatgctccattca

SEQ ID NO: 754036 - DNA, 15 bp, Homo sapiens
ccatgctccattcaa

SEQ ID NO: 754037 - DNA, 15 bp, Homo sapiens
catgctccattcaaa

SEQ ID NO: 754038 - DNA, 15 bp, Homo sapiens
atgctccattcaaag

SEQ ID NO: 754039 - DNA, 15 bp, Homo sapiens
tgctccattcaaagt

SEQ ID NO: 754040 - DNA, 15 bp, Homo sapiens
gctccattcaaagta

SEQ ID NO: 754041 - DNA, 15 bp, Homo sapiens
ctccattcaaagtat

SEQ ID NO: 754042 - DNA, 15 bp, Homo sapiens
tccattcaaagtatg

SEQ ID NO: 754043 - DNA, 15 bp, Homo sapiens
ccattcaaagtatgc

SEQ ID NO: 754044 - DNA, 15 bp, Homo sapiens
cattcaaagtatgct

SEQ ID NO: 754045 - DNA, 15 bp, Homo sapiens
attcaaagtatgctt

SEQ ID NO: 754046 - DNA, 15 bp, Homo sapiens
ttcaaagtatgcttt

SEQ ID NO: 754047 - DNA, 15 bp, Homo sapiens
tcaaagtatgcttta

SEQ ID NO: 754048 - DNA, 15 bp, Homo sapiens
caaagtatgctttac

SEQ ID NO: 754049 - DNA, 15 bp, Homo sapiens
aaagtatgctttact

SEQ ID NO: 754050 - DNA, 15 bp, Homo sapiens
aagtatgctttacta

SEQ ID NO: 754051 - DNA, 15 bp, Homo sapiens
agtatgctttactaa

SEQ ID NO: 754052 - DNA, 15 bp, Homo sapiens
gtatgctttactaaa

SEQ ID NO: 754053 - DNA, 15 bp, Homo sapiens
tatgctttactaaat

SEQ ID NO: 754054 - DNA, 15 bp, Homo sapiens
atgctttactaaatg

SEQ ID NO: 754055 - DNA, 15 bp, Homo sapiens
tgctttactaaatgt

SEQ ID NO: 754056 - DNA, 15 bp, Homo sapiens
gctttactaaatgta

SEQ ID NO: 754057 - DNA, 15 bp, Homo sapiens
ctttactaaatgtaa

SEQ ID NO: 754058 - DNA, 15 bp, Homo sapiens
tttactaaatgtaac

SEQ ID NO: 754059 - DNA, 15 bp, Homo sapiens
ttactaaatgtaact

SEQ ID NO: 754060 - DNA, 15 bp, Homo sapiens
tactaaatgtaactt

SEQ ID NO: 754061 - DNA, 15 bp, Homo sapiens
actaaatgtaacttt

SEQ ID NO: 754062 - DNA, 15 bp, Homo sapiens
ctaaatgtaacttta

SEQ ID NO: 754063 - DNA, 15 bp, Homo sapiens
taaatgtaactttat

SEQ ID NO: 754064 - DNA, 15 bp, Homo sapiens
aaatgtaactttatt

SEQ ID NO: 754065 - DNA, 15 bp, Homo sapiens
aatgtaactttatta

SEQ ID NO: 754066 - DNA, 15 bp, Homo sapiens
atgtaactttattat

SEQ ID NO: 754067 - DNA, 15 bp, Homo sapiens
tgtaactttattata

SEQ ID NO: 754068 - DNA, 15 bp, Homo sapiens
gtaactttattatat

SEQ ID NO: 754069 - DNA, 15 bp, Homo sapiens
taactttattatatt

SEQ ID NO: 754070 - DNA, 15 bp, Homo sapiens
aactttattatattt

SEQ ID NO: 754071 - DNA, 15 bp, Homo sapiens
actttattatattta

SEQ ID NO: 754072 - DNA, 15 bp, Homo sapiens
ctttattatatttat

SEQ ID NO: 754073 - DNA, 15 bp, Homo sapiens
tttattatatttatc

SEQ ID NO: 754074 - DNA, 15 bp, Homo sapiens
ttattatatttatca

SEQ ID NO: 754075 - DNA, 15 bp, Homo sapiens
tattatatttatcat

SEQ ID NO: 754076 - DNA, 15 bp, Homo sapiens
attatatttatcatg

SEQ ID NO: 754077 - DNA, 15 bp, Homo sapiens
ttatatttatcatgc

SEQ ID NO: 754078 - DNA, 15 bp, Homo sapiens
tatatttatcatgct

SEQ ID NO: 754079 - DNA, 15 bp, Homo sapiens
atatttatcatgctc

SEQ ID NO: 754080 - DNA, 15 bp, Homo sapiens
tatttatcatgctca

SEQ ID NO: 754081 - DNA, 15 bp, Homo sapiens
atttatcatgctcat

SEQ ID NO: 754082 - DNA, 15 bp, Homo sapiens
tttatcatgctcata

SEQ ID NO: 754083 - DNA, 15 bp, Homo sapiens
ttatcatgctcatat

SEQ ID NO: 754084 - DNA, 15 bp, Homo sapiens
tatcatgctcatatt

SEQ ID NO: 754085 - DNA, 15 bp, Homo sapiens
atcatgctcatattc

SEQ ID NO: 754086 - DNA, 15 bp, Homo sapiens
tcatgctcatattcc

SEQ ID NO: 754087 - DNA, 15 bp, Homo sapiens
catgctcatattcct

SEQ ID NO: 754088 - DNA, 15 bp, Homo sapiens
atgctcatattcctt

SEQ ID NO: 754089 - DNA, 15 bp, Homo sapiens
tgctcatattccttt

SEQ ID NO: 754090 - DNA, 15 bp, Homo sapiens
gctcatattcctttt

SEQ ID NO: 754091 - DNA, 15 bp, Homo sapiens
ctcatattccttttt

SEQ ID NO: 754092 - DNA, 15 bp, Homo sapiens
tcatattcctttttt

SEQ ID NO: 754093 - DNA, 15 bp, Homo sapiens
catattccttttttc

SEQ ID NO: 754094 - DNA, 15 bp, Homo sapiens
atattccttttttct

SEQ ID NO: 754095 - DNA, 15 bp, Homo sapiens
tattccttttttctt

SEQ ID NO: 754096 - DNA, 15 bp, Homo sapiens
attccttttttcttt

SEQ ID NO: 754097 - DNA, 15 bp, Homo sapiens
ttccttttttctttt

SEQ ID NO: 754098 - DNA, 15 bp, Homo sapiens
tccttttttcttttt

SEQ ID NO: 754099 - DNA, 15 bp, Homo sapiens
ccttttttctttttc

SEQ ID NO: 754100 - DNA, 15 bp, Homo sapiens
ttttctttttctttt

SEQ ID NO: 754101 - DNA, 15 bp, Homo sapiens
tttctttttcttttg

SEQ ID NO: 754102 - DNA, 15 bp, Homo sapiens
ttctttttcttttgt

SEQ ID NO: 754103 - DNA, 15 bp, Homo sapiens
tctttttcttttgtt

SEQ ID NO: 754104 - DNA, 15 bp, Homo sapiens
ctttttcttttgttt

SEQ ID NO: 754105 - DNA, 15 bp, Homo sapiens
tttttcttttgtttc

SEQ ID NO: 754106 - DNA, 15 bp, Homo sapiens
ttttcttttgtttct

SEQ ID NO: 754107 - DNA, 15 bp, Homo sapiens
tttcttttgtttctc

SEQ ID NO: 754108 - DNA, 15 bp, Homo sapiens
ttcttttgtttctct

SEQ ID NO: 754109 - DNA, 15 bp, Homo sapiens
tcttttgtttctctt

SEQ ID NO: 754110 - DNA, 15 bp, Homo sapiens
cttttgtttctcttt

SEQ ID NO: 754111 - DNA, 15 bp, Homo sapiens
ttttgtttctctttt

SEQ ID NO: 754112 - DNA, 15 bp, Homo sapiens
tttgtttctcttttt

SEQ ID NO: 754113 - DNA, 15 bp, Homo sapiens
ttgtttctctttttt

SEQ ID NO: 754114 - DNA, 15 bp, Homo sapiens
tgtttctcttttttt

SEQ ID NO: 754115 - DNA, 15 bp, Homo sapiens
gtttctctttttttt

SEQ ID NO: 754116 - DNA, 15 bp, Homo sapiens
tttctcttttttttt

SEQ ID NO: 754117 - DNA, 15 bp, Homo sapiens
ttctctttttttttt

SEQ ID NO: 754118 - DNA, 15 bp, Homo sapiens
tctcttttttttttt

SEQ ID NO: 754119 - DNA, 15 bp, Homo sapiens
ttttttttggagaca

SEQ ID NO: 754120 - DNA, 15 bp, Homo sapiens
tttttttggagacag

SEQ ID NO: 754121 - DNA, 15 bp, Homo sapiens
ttttttggagacaga

SEQ ID NO: 754122 - DNA, 15 bp, Homo sapiens
tttttggagacagag

SEQ ID NO: 754123 - DNA, 15 bp, Homo sapiens
gagtctcactctgtc

SEQ ID NO: 754124 - DNA, 15 bp, Homo sapiens
agtctcactctgtcg

SEQ ID NO: 754125 - DNA, 15 bp, Homo sapiens
gtctcactctgtcgc

SEQ ID NO: 754126 - DNA, 15 bp, Homo sapiens
tctcactctgtcgca

SEQ ID NO: 754127 - DNA, 15 bp, Homo sapiens
ctcactctgtcgcat

SEQ ID NO: 754128 - DNA, 15 bp, Homo sapiens
tcactctgtcgcatg

SEQ ID NO: 754129 - DNA, 15 bp, Homo sapiens
cactctgtcgcatgg

SEQ ID NO: 754130 - DNA, 15 bp, Homo sapiens
actctgtcgcatggg

SEQ ID NO: 754131 - DNA, 15 bp, Homo sapiens
ctctgtcgcatgggc

SEQ ID NO: 754132 - DNA, 15 bp, Homo sapiens
tctgtcgcatgggct

SEQ ID NO: 754133 - DNA, 15 bp, Homo sapiens
ctgtcgcatgggctg

SEQ ID NO: 754134 - DNA, 15 bp, Homo sapiens
tgtcgcatgggctgg

SEQ ID NO: 754135 - DNA, 15 bp, Homo sapiens
gtcgcatgggctgga

SEQ ID NO: 754136 - DNA, 15 bp, Homo sapiens
tcgcatgggctggag

SEQ ID NO: 754137 - DNA, 15 bp, Homo sapiens
cgcatgggctggagt

SEQ ID NO: 754138 - DNA, 15 bp, Homo sapiens
gcatgggctggagtg

SEQ ID NO: 754139 - DNA, 15 bp, Homo sapiens
catgggctggagtgc

SEQ ID NO: 754140 - DNA, 15 bp, Homo sapiens
atgggctggagtgca

SEQ ID NO: 754141 - DNA, 15 bp, Homo sapiens
tgggctggagtgcag

SEQ ID NO: 754142 - DNA, 15 bp, Homo sapiens
gctggagtgcagtgc

SEQ ID NO: 754143 - DNA, 15 bp, Homo sapiens
ctggagtgcagtgct

SEQ ID NO: 754144 - DNA, 15 bp, Homo sapiens
tggagtgcagtgctg

SEQ ID NO: 754145 - DNA, 15 bp, Homo sapiens
ggagtgcagtgctgc

SEQ ID NO: 754146 - DNA, 15 bp, Homo sapiens
gagtgcagtgctgcg

SEQ ID NO: 754147 - DNA, 15 bp, Homo sapiens
agtgcagtgctgcga

SEQ ID NO: 754148 - DNA, 15 bp, Homo sapiens
gtgcagtgctgcgat

SEQ ID NO: 754149 - DNA, 15 bp, Homo sapiens
tgcagtgctgcgatc

SEQ ID NO: 754150 - DNA, 15 bp, Homo sapiens
gcagtgctgcgatct

SEQ ID NO: 754151 - DNA, 15 bp, Homo sapiens
cagtgctgcgatctc

SEQ ID NO: 754152 - DNA, 15 bp, Homo sapiens
agtgctgcgatctcg

SEQ ID NO: 754153 - DNA, 15 bp, Homo sapiens
gtgctgcgatctcgg

SEQ ID NO: 754154 - DNA, 15 bp, Homo sapiens
tgctgcgatctcggc

SEQ ID NO: 754155 - DNA, 15 bp, Homo sapiens
gctgcgatctcggct

SEQ ID NO: 754156 - DNA, 15 bp, Homo sapiens
ctgcgatctcggctc

SEQ ID NO: 754157 - DNA, 15 bp, Homo sapiens
tgcgatctcggctca

SEQ ID NO: 754158 - DNA, 15 bp, Homo sapiens
gcgatctcggctcac

SEQ ID NO: 754159 - DNA, 15 bp, Homo sapiens
cgatctcggctcact

SEQ ID NO: 754160 - DNA, 15 bp, Homo sapiens
cactgcaacctccgg

SEQ ID NO: 754161 - DNA, 15 bp, Homo sapiens
actgcaacctccggc

SEQ ID NO: 754162 - DNA, 15 bp, Homo sapiens
ctgcaacctccggct

SEQ ID NO: 754163 - DNA, 15 bp, Homo sapiens
tgcaacctccggctc

SEQ ID NO: 754164 - DNA, 15 bp, Homo sapiens
gcaacctccggctcc

SEQ ID NO: 754165 - DNA, 15 bp, Homo sapiens
caacctccggctcct

SEQ ID NO: 754166 - DNA, 15 bp, Homo sapiens
aacctccggctcctg

SEQ ID NO: 754167 - DNA, 15 bp, Homo sapiens
acctccggctcctgg

SEQ ID NO: 754168 - DNA, 15 bp, Homo sapiens
cctccggctcctgga

SEQ ID NO: 754169 - DNA, 15 bp, Homo sapiens
ctccggctcctggat

SEQ ID NO: 754170 - DNA, 15 bp, Homo sapiens
tccggctcctggatt

SEQ ID NO: 754171 - DNA, 15 bp, Homo sapiens
ccggctcctggattc

SEQ ID NO: 754172 - DNA, 15 bp, Homo sapiens
cggctcctggattca

SEQ ID NO: 754173 - DNA, 15 bp, Homo sapiens
ggctcctggattcaa

SEQ ID NO: 754174 - DNA, 15 bp, Homo sapiens
gctcctggattcaag

SEQ ID NO: 754175 - DNA, 15 bp, Homo sapiens
ctcctggattcaagc

SEQ ID NO: 754176 - DNA, 15 bp, Homo sapiens
tcctggattcaagca

SEQ ID NO: 754177 - DNA, 15 bp, Homo sapiens
cctggattcaagcaa

SEQ ID NO: 754178 - DNA, 15 bp, Homo sapiens
ctggattcaagcaat

SEQ ID NO: 754179 - DNA, 15 bp, Homo sapiens
tggattcaagcaatt

SEQ ID NO: 754180 - DNA, 15 bp, Homo sapiens
ggattcaagcaattc

SEQ ID NO: 754181 - DNA, 15 bp, Homo sapiens
gattcaagcaattcc

SEQ ID NO: 754182 - DNA, 15 bp, Homo sapiens
attcaagcaattccc

SEQ ID NO: 754183 - DNA, 15 bp, Homo sapiens
ttcaagcaattcccc

SEQ ID NO: 754184 - DNA, 15 bp, Homo sapiens
tcaagcaattcccct

SEQ ID NO: 754185 - DNA, 15 bp, Homo sapiens
caagcaattcccctg

SEQ ID NO: 754186 - DNA, 15 bp, Homo sapiens
aagcaattcccctgc

SEQ ID NO: 754187 - DNA, 15 bp, Homo sapiens
agcaattcccctgcc

SEQ ID NO: 754188 - DNA, 15 bp, Homo sapiens
gcaattcccctgcct

SEQ ID NO: 754189 - DNA, 15 bp, Homo sapiens
caattcccctgcctc

SEQ ID NO: 754190 - DNA, 15 bp, Homo sapiens
aattcccctgcctca

SEQ ID NO: 754191 - DNA, 15 bp, Homo sapiens
attcccctgcctcag

SEQ ID NO: 754192 - DNA, 15 bp, Homo sapiens
ttcccctgcctcagc

SEQ ID NO: 754193 - DNA, 15 bp, Homo sapiens
tcccctgcctcagcc

SEQ ID NO: 754194 - DNA, 15 bp, Homo sapiens
cccctgcctcagcct

SEQ ID NO: 754195 - DNA, 15 bp, Homo sapiens
ccctgcctcagcctc

SEQ ID NO: 754196 - DNA, 15 bp, Homo sapiens
cagcctcccgagtaa

SEQ ID NO: 754197 - DNA, 15 bp, Homo sapiens
agcctcccgagtaac

SEQ ID NO: 754198 - DNA, 15 bp, Homo sapiens
gcctcccgagtaact

SEQ ID NO: 754199 - DNA, 15 bp, Homo sapiens
cctcccgagtaactg

SEQ ID NO: 754200 - DNA, 15 bp, Homo sapiens
ctcccgagtaactgg

SEQ ID NO: 754201 - DNA, 15 bp, Homo sapiens
tcccgagtaactggg

SEQ ID NO: 754202 - DNA, 15 bp, Homo sapiens
cccgagtaactggga

SEQ ID NO: 754203 - DNA, 15 bp, Homo sapiens
ccgagtaactgggat

SEQ ID NO: 754204 - DNA, 15 bp, Homo sapiens
cgagtaactgggatt

SEQ ID NO: 754205 - DNA, 15 bp, Homo sapiens
gagtaactgggatta

SEQ ID NO: 754206 - DNA, 15 bp, Homo sapiens
agtaactgggattac

SEQ ID NO: 754207 - DNA, 15 bp, Homo sapiens
gtaactgggattaca

SEQ ID NO: 754208 - DNA, 15 bp, Homo sapiens
taactgggattacag

SEQ ID NO: 754209 - DNA, 15 bp, Homo sapiens
aactgggattacagg

SEQ ID NO: 754210 - DNA, 15 bp, Homo sapiens
actgggattacaggt

SEQ ID NO: 754211 - DNA, 15 bp, Homo sapiens
ctgggattacaggta

SEQ ID NO: 754212 - DNA, 15 bp, Homo sapiens
tgggattacaggtac

SEQ ID NO: 754213 - DNA, 15 bp, Homo sapiens
gggattacaggtacc

SEQ ID NO: 754214 - DNA, 15 bp, Homo sapiens
ggattacaggtaccc

SEQ ID NO: 754215 - DNA, 15 bp, Homo sapiens
gattacaggtaccca

SEQ ID NO: 754216 - DNA, 15 bp, Homo sapiens
attacaggtacccat

SEQ ID NO: 754217 - DNA, 15 bp, Homo sapiens
ttacaggtacccatc

SEQ ID NO: 754218 - DNA, 15 bp, Homo sapiens
tacaggtacccatca

SEQ ID NO: 754219 - DNA, 15 bp, Homo sapiens
acaggtacccatcac

SEQ ID NO: 754220 - DNA, 15 bp, Homo sapiens
caggtacccatcaca

SEQ ID NO: 754221 - DNA, 15 bp, Homo sapiens
aggtacccatcacaa

SEQ ID NO: 754222 - DNA, 15 bp, Homo sapiens
ggtacccatcacaac

SEQ ID NO: 754223 - DNA, 15 bp, Homo sapiens
gtacccatcacaact

SEQ ID NO: 754224 - DNA, 15 bp, Homo sapiens
tacccatcacaactc

SEQ ID NO: 754225 - DNA, 15 bp, Homo sapiens
acccatcacaactcc

SEQ ID NO: 754226 - DNA, 15 bp, Homo sapiens
cccatcacaactccc

SEQ ID NO: 754227 - DNA, 15 bp, Homo sapiens
ccatcacaactcccg

SEQ ID NO: 754228 - DNA, 15 bp, Homo sapiens
catcacaactcccgg

SEQ ID NO: 754229 - DNA, 15 bp, Homo sapiens
atcacaactcccggc

SEQ ID NO: 754230 - DNA, 15 bp, Homo sapiens
tcacaactcccggcg

SEQ ID NO: 754231 - DNA, 15 bp, Homo sapiens
cacaactcccggcga

SEQ ID NO: 754232 - DNA, 15 bp, Homo sapiens
acaactcccggcgaa

SEQ ID NO: 754233 - DNA, 15 bp, Homo sapiens
caactcccggcgaat

SEQ ID NO: 754234 - DNA, 15 bp, Homo sapiens
aactcccggcgaatt

SEQ ID NO: 754235 - DNA, 15 bp, Homo sapiens
actcccggcgaattt

SEQ ID NO: 754236 - DNA, 15 bp, Homo sapiens
ctcccggcgaatttt

SEQ ID NO: 754237 - DNA, 15 bp, Homo sapiens
tcccggcgaattttt

SEQ ID NO: 754238 - DNA, 15 bp, Homo sapiens
cccggcgaatttttg

SEQ ID NO: 754239 - DNA, 15 bp, Homo sapiens
ccggcgaatttttgc

SEQ ID NO: 754240 - DNA, 15 bp, Homo sapiens
cggcgaatttttgca

SEQ ID NO: 754241 - DNA, 15 bp, Homo sapiens
ggcgaatttttgcat

SEQ ID NO: 754242 - DNA, 15 bp, Homo sapiens
gcgaatttttgcatt

SEQ ID NO: 754243 - DNA, 15 bp, Homo sapiens
cgaatttttgcattt

SEQ ID NO: 754244 - DNA, 15 bp, Homo sapiens
gaatttttgcatttt

SEQ ID NO: 754245 - DNA, 15 bp, Homo sapiens
aatttttgcattttt

SEQ ID NO: 754246 - DNA, 15 bp, Homo sapiens
atttttgcattttta

SEQ ID NO: 754247 - DNA, 15 bp, Homo sapiens
tttttgcatttttag

SEQ ID NO: 754248 - DNA, 15 bp, Homo sapiens
ttttgcatttttagt

SEQ ID NO: 754249 - DNA, 15 bp, Homo sapiens
tttgcatttttagta

SEQ ID NO: 754250 - DNA, 15 bp, Homo sapiens
ttgcatttttagtag

SEQ ID NO: 754251 - DNA, 15 bp, Homo sapiens
tgcatttttagtaga

SEQ ID NO: 754252 - DNA, 15 bp, Homo sapiens
gcatttttagtagag

SEQ ID NO: 754253 - DNA, 15 bp, Homo sapiens
catttttagtagaga

SEQ ID NO: 754254 - DNA, 15 bp, Homo sapiens
tttagtagagacgga

SEQ ID NO: 754255 - DNA, 15 bp, Homo sapiens
ttagtagagacggag

SEQ ID NO: 754256 - DNA, 15 bp, Homo sapiens
tagtagagacggagt

SEQ ID NO: 754257 - DNA, 15 bp, Homo sapiens
agtagagacggagtt

SEQ ID NO: 754258 - DNA, 15 bp, Homo sapiens
gtagagacggagttt

SEQ ID NO: 754259 - DNA, 15 bp, Homo sapiens
tagagacggagtttc

SEQ ID NO: 754260 - DNA, 15 bp, Homo sapiens
agagacggagtttcg

SEQ ID NO: 754261 - DNA, 15 bp, Homo sapiens
gagacggagtttcgc

SEQ ID NO: 754262 - DNA, 15 bp, Homo sapiens
agacggagtttcgcc

SEQ ID NO: 754263 - DNA, 15 bp, Homo sapiens
gacggagtttcgcca

SEQ ID NO: 754264 - DNA, 15 bp, Homo sapiens
acggagtttcgccat

SEQ ID NO: 754265 - DNA, 15 bp, Homo sapiens
cggagtttcgccatg

SEQ ID NO: 754266 - DNA, 15 bp, Homo sapiens
ggagtttcgccatgt

SEQ ID NO: 754267 - DNA, 15 bp, Homo sapiens
gagtttcgccatgtt

SEQ ID NO: 754268 - DNA, 15 bp, Homo sapiens
agtttcgccatgttg

SEQ ID NO: 754269 - DNA, 15 bp, Homo sapiens
gtttcgccatgttgg

SEQ ID NO: 754270 - DNA, 15 bp, Homo sapiens
tttcgccatgttggc

SEQ ID NO: 754271 - DNA, 15 bp, Homo sapiens
ttcgccatgttggcc

SEQ ID NO: 754272 - DNA, 15 bp, Homo sapiens
tcgccatgttggcca

SEQ ID NO: 754273 - DNA, 15 bp, Homo sapiens
cgccatgttggccag

SEQ ID NO: 754274 - DNA, 15 bp, Homo sapiens
gccatgttggccagg

SEQ ID NO: 754275 - DNA, 15 bp, Homo sapiens
atgttggccaggctc

SEQ ID NO: 754276 - DNA, 15 bp, Homo sapiens
tgttggccaggctcg

SEQ ID NO: 754277 - DNA, 15 bp, Homo sapiens
gttggccaggctcgt

SEQ ID NO: 754278 - DNA, 15 bp, Homo sapiens
ttggccaggctcgtc

SEQ ID NO: 754279 - DNA, 15 bp, Homo sapiens
tggccaggctcgtct

SEQ ID NO: 754280 - DNA, 15 bp, Homo sapiens
ggccaggctcgtctc

SEQ ID NO: 754281 - DNA, 15 bp, Homo sapiens
gccaggctcgtctcc

SEQ ID NO: 754282 - DNA, 15 bp, Homo sapiens
ccaggctcgtctcca

SEQ ID NO: 754283 - DNA, 15 bp, Homo sapiens
caggctcgtctccaa

SEQ ID NO: 754284 - DNA, 15 bp, Homo sapiens
aggctcgtctccaat

SEQ ID NO: 754285 - DNA, 15 bp, Homo sapiens
ggctcgtctccaatt

SEQ ID NO: 754286 - DNA, 15 bp, Homo sapiens
gctcgtctccaattc

SEQ ID NO: 754287 - DNA, 15 bp, Homo sapiens
ctcgtctccaattcc

SEQ ID NO: 754288 - DNA, 15 bp, Homo sapiens
tcgtctccaattcct

SEQ ID NO: 754289 - DNA, 15 bp, Homo sapiens
cgtctccaattcctg

SEQ ID NO: 754290 - DNA, 15 bp, Homo sapiens
gtctccaattcctgg

SEQ ID NO: 754291 - DNA, 15 bp, Homo sapiens
tctccaattcctggc

SEQ ID NO: 754292 - DNA, 15 bp, Homo sapiens
ctccaattcctggcc

SEQ ID NO: 754293 - DNA, 15 bp, Homo sapiens
tccaattcctggcct

SEQ ID NO: 754294 - DNA, 15 bp, Homo sapiens
ccaattcctggcctc

SEQ ID NO: 754295 - DNA, 15 bp, Homo sapiens
caattcctggcctca

SEQ ID NO: 754296 - DNA, 15 bp, Homo sapiens
aattcctggcctcaa

SEQ ID NO: 754297 - DNA, 15 bp, Homo sapiens
attcctggcctcaaa

SEQ ID NO: 754298 - DNA, 15 bp, Homo sapiens
ttcctggcctcaaat

SEQ ID NO: 754299 - DNA, 15 bp, Homo sapiens
tcctggcctcaaatg

SEQ ID NO: 754300 - DNA, 15 bp, Homo sapiens
cctggcctcaaatga

SEQ ID NO: 754301 - DNA, 15 bp, Homo sapiens
ctggcctcaaatgat

SEQ ID NO: 754302 - DNA, 15 bp, Homo sapiens
tggcctcaaatgata

SEQ ID NO: 754303 - DNA, 15 bp, Homo sapiens
ggcctcaaatgatat

SEQ ID NO: 754304 - DNA, 15 bp, Homo sapiens
gcctcaaatgatatg

SEQ ID NO: 754305 - DNA, 15 bp, Homo sapiens
cctcaaatgatatgc

SEQ ID NO: 754306 - DNA, 15 bp, Homo sapiens
ctcaaatgatatgcc

SEQ ID NO: 754307 - DNA, 15 bp, Homo sapiens
tcaaatgatatgccc

SEQ ID NO: 754308 - DNA, 15 bp, Homo sapiens
caaatgatatgcccg

SEQ ID NO: 754309 - DNA, 15 bp, Homo sapiens
aaatgatatgcccgc

SEQ ID NO: 754310 - DNA, 15 bp, Homo sapiens
aatgatatgcccgcc

SEQ ID NO: 754311 - DNA, 15 bp, Homo sapiens
atgatatgcccgcct

SEQ ID NO: 754312 - DNA, 15 bp, Homo sapiens
tgatatgcccgcctc

SEQ ID NO: 754313 - DNA, 15 bp, Homo sapiens
gatatgcccgcctcg

SEQ ID NO: 754314 - DNA, 15 bp, Homo sapiens
atatgcccgcctcgc

SEQ ID NO: 754315 - DNA, 15 bp, Homo sapiens
tatgcccgcctcgcc

SEQ ID NO: 754316 - DNA, 15 bp, Homo sapiens
atgcccgcctcgcct

SEQ ID NO: 754317 - DNA, 15 bp, Homo sapiens
tgcccgcctcgcctc

SEQ ID NO: 754318 - DNA, 15 bp, Homo sapiens
gcccgcctcgcctcc

SEQ ID NO: 754319 - DNA, 15 bp, Homo sapiens
cccgcctcgcctccc

SEQ ID NO: 754320 - DNA, 15 bp, Homo sapiens
ccgcctcgcctccca

SEQ ID NO: 754321 - DNA, 15 bp, Homo sapiens
cgcctcgcctcccaa

SEQ ID NO: 754322 - DNA, 15 bp, Homo sapiens
gcctcgcctcccaaa

SEQ ID NO: 754323 - DNA, 15 bp, Homo sapiens
cctcgcctcccaaag

SEQ ID NO: 754324 - DNA, 15 bp, Homo sapiens
ctcgcctcccaaagt

SEQ ID NO: 754325 - DNA, 15 bp, Homo sapiens
tcgcctcccaaagtg

SEQ ID NO: 754326 - DNA, 15 bp, Homo sapiens
cgcctcccaaagtgc

SEQ ID NO: 754327 - DNA, 15 bp, Homo sapiens
aagtgctgggattat

SEQ ID NO: 754328 - DNA, 15 bp, Homo sapiens
agtgctgggattata

SEQ ID NO: 754329 - DNA, 15 bp, Homo sapiens
gtgctgggattatag

SEQ ID NO: 754330 - DNA, 15 bp, Homo sapiens
tgctgggattatagc

SEQ ID NO: 754331 - DNA, 15 bp, Homo sapiens
gctgggattatagcc

SEQ ID NO: 754332 - DNA, 15 bp, Homo sapiens
ctgggattatagcca

SEQ ID NO: 754333 - DNA, 15 bp, Homo sapiens
tgggattatagccat

SEQ ID NO: 754334 - DNA, 15 bp, Homo sapiens
gggattatagccatg

SEQ ID NO: 754335 - DNA, 15 bp, Homo sapiens
ggattatagccatga

SEQ ID NO: 754336 - DNA, 15 bp, Homo sapiens
gattatagccatgag

SEQ ID NO: 754337 - DNA, 15 bp, Homo sapiens
attatagccatgagc

SEQ ID NO: 754338 - DNA, 15 bp, Homo sapiens
ttatagccatgagcc

SEQ ID NO: 754339 - DNA, 15 bp, Homo sapiens
tatagccatgagcca

SEQ ID NO: 754340 - DNA, 15 bp, Homo sapiens
atagccatgagccac

SEQ ID NO: 754341 - DNA, 15 bp, Homo sapiens
tagccatgagccacc

SEQ ID NO: 754342 - DNA, 15 bp, Homo sapiens
agccatgagccacca

SEQ ID NO: 754343 - DNA, 15 bp, Homo sapiens
gccatgagccaccac

SEQ ID NO: 754344 - DNA, 15 bp, Homo sapiens
ccatgagccaccacg

SEQ ID NO: 754345 - DNA, 15 bp, Homo sapiens
catgagccaccacgc

SEQ ID NO: 754346 - DNA, 15 bp, Homo sapiens
atgagccaccacgcc

SEQ ID NO: 754347 - DNA, 15 bp, Homo sapiens
gagccaccacgccca

SEQ ID NO: 754348 - DNA, 15 bp, Homo sapiens
agccaccacgcccag

SEQ ID NO: 754349 - DNA, 15 bp, Homo sapiens
ccaccacgcccagca

SEQ ID NO: 754350 - DNA, 15 bp, Homo sapiens
caccacgcccagcat

SEQ ID NO: 754351 - DNA, 15 bp, Homo sapiens
accacgcccagcatt

SEQ ID NO: 754352 - DNA, 15 bp, Homo sapiens
ccacgcccagcattc

SEQ ID NO: 754353 - DNA, 15 bp, Homo sapiens
cacgcccagcattca

SEQ ID NO: 754354 - DNA, 15 bp, Homo sapiens
acgcccagcattcat

SEQ ID NO: 754355 - DNA, 15 bp, Homo sapiens
cgcccagcattcata

SEQ ID NO: 754356 - DNA, 15 bp, Homo sapiens
gcccagcattcatat

SEQ ID NO: 754357 - DNA, 15 bp, Homo sapiens
cccagcattcatatt

SEQ ID NO: 754358 - DNA, 15 bp, Homo sapiens
ccagcattcatattc

SEQ ID NO: 754359 - DNA, 15 bp, Homo sapiens
cagcattcatattcc

SEQ ID NO: 754360 - DNA, 15 bp, Homo sapiens
agcattcatattcct

SEQ ID NO: 754361 - DNA, 15 bp, Homo sapiens
gcattcatattcctg

SEQ ID NO: 754362 - DNA, 15 bp, Homo sapiens
cattcatattcctga

SEQ ID NO: 754363 - DNA, 15 bp, Homo sapiens
attcatattcctgat

SEQ ID NO: 754364 - DNA, 15 bp, Homo sapiens
ttcatattcctgatc

SEQ ID NO: 754365 - DNA, 15 bp, Homo sapiens
tcatattcctgatca

SEQ ID NO: 754366 - DNA, 15 bp, Homo sapiens
catattcctgatcac

SEQ ID NO: 754367 - DNA, 15 bp, Homo sapiens
atattcctgatcacc

SEQ ID NO: 754368 - DNA, 15 bp, Homo sapiens
tattcctgatcacct

SEQ ID NO: 754369 - DNA, 15 bp, Homo sapiens
attcctgatcacctt

SEQ ID NO: 754370 - DNA, 15 bp, Homo sapiens
ttcctgatcacctta

SEQ ID NO: 754371 - DNA, 15 bp, Homo sapiens
tcctgatcaccttaa

SEQ ID NO: 754372 - DNA, 15 bp, Homo sapiens
cctgatcaccttaaa

SEQ ID NO: 754373 - DNA, 15 bp, Homo sapiens
ctgatcaccttaaaa

SEQ ID NO: 754374 - DNA, 15 bp, Homo sapiens
tgatcaccttaaaaa

SEQ ID NO: 754375 - DNA, 15 bp, Homo sapiens
gatcaccttaaaaat

SEQ ID NO: 754376 - DNA, 15 bp, Homo sapiens
atcaccttaaaaatt

SEQ ID NO: 754377 - DNA, 15 bp, Homo sapiens
tcaccttaaaaattc

SEQ ID NO: 754378 - DNA, 15 bp, Homo sapiens
caccttaaaaattct

SEQ ID NO: 754379 - DNA, 15 bp, Homo sapiens
accttaaaaattctt

SEQ ID NO: 754380 - DNA, 15 bp, Homo sapiens
ccttaaaaattcttc

SEQ ID NO: 754381 - DNA, 15 bp, Homo sapiens
cttaaaaattcttca

SEQ ID NO: 754382 - DNA, 15 bp, Homo sapiens
ttaaaaattcttcac

SEQ ID NO: 754383 - DNA, 15 bp, Homo sapiens
taaaaattcttcact

SEQ ID NO: 754384 - DNA, 15 bp, Homo sapiens
aaaaattcttcactt

SEQ ID NO: 754385 - DNA, 15 bp, Homo sapiens
aaaattcttcacttt

SEQ ID NO: 754386 - DNA, 15 bp, Homo sapiens
aaattcttcactttt

SEQ ID NO: 754387 - DNA, 15 bp, Homo sapiens
aattcttcacttttg

SEQ ID NO: 754388 - DNA, 15 bp, Homo sapiens
attcttcacttttgt

SEQ ID NO: 754389 - DNA, 15 bp, Homo sapiens
ttcttcacttttgtt

SEQ ID NO: 754390 - DNA, 15 bp, Homo sapiens
tcttcacttttgttg

SEQ ID NO: 754391 - DNA, 15 bp, Homo sapiens
cttcacttttgttgt

SEQ ID NO: 754392 - DNA, 15 bp, Homo sapiens
ttcacttttgttgtc

SEQ ID NO: 754393 - DNA, 15 bp, Homo sapiens
tcacttttgttgtca

SEQ ID NO: 754394 - DNA, 15 bp, Homo sapiens
cacttttgttgtcat

SEQ ID NO: 754395 - DNA, 15 bp, Homo sapiens
acttttgttgtcatg

SEQ ID NO: 754396 - DNA, 15 bp, Homo sapiens
cttttgttgtcatgg

SEQ ID NO: 754397 - DNA, 15 bp, Homo sapiens
ttttgttgtcatgga

SEQ ID NO: 754398 - DNA, 15 bp, Homo sapiens
tttgttgtcatggag

SEQ ID NO: 754399 - DNA, 15 bp, Homo sapiens
ttgttgtcatggagg

SEQ ID NO: 754400 - DNA, 15 bp, Homo sapiens
tgttgtcatggaggc

SEQ ID NO: 754401 - DNA, 15 bp, Homo sapiens
gttgtcatggaggcc

SEQ ID NO: 754402 - DNA, 15 bp, Homo sapiens
ttgtcatggaggcca

SEQ ID NO: 754403 - DNA, 15 bp, Homo sapiens
tgtcatggaggccag

SEQ ID NO: 754404 - DNA, 15 bp, Homo sapiens
gtcatggaggccaga

SEQ ID NO: 754405 - DNA, 15 bp, Homo sapiens
tcatggaggccagat

SEQ ID NO: 754406 - DNA, 15 bp, Homo sapiens
catggaggccagatg

SEQ ID NO: 754407 - DNA, 15 bp, Homo sapiens
atggaggccagatga

SEQ ID NO: 754408 - DNA, 15 bp, Homo sapiens
tggaggccagatgag

SEQ ID NO: 754409 - DNA, 15 bp, Homo sapiens
ggaggccagatgagt

SEQ ID NO: 754410 - DNA, 15 bp, Homo sapiens
gaggccagatgagtc

SEQ ID NO: 754411 - DNA, 15 bp, Homo sapiens
aggccagatgagtca

SEQ ID NO: 754412 - DNA, 15 bp, Homo sapiens
ggccagatgagtcat

SEQ ID NO: 754413 - DNA, 15 bp, Homo sapiens
gccagatgagtcatc

SEQ ID NO: 754414 - DNA, 15 bp, Homo sapiens
ccagatgagtcatct

SEQ ID NO: 754415 - DNA, 15 bp, Homo sapiens
cagatgagtcatctg

SEQ ID NO: 754416 - DNA, 15 bp, Homo sapiens
agatgagtcatctgc

SEQ ID NO: 754417 - DNA, 15 bp, Homo sapiens
gatgagtcatctgca

SEQ ID NO: 754418 - DNA, 15 bp, Homo sapiens
atgagtcatctgcaa

SEQ ID NO: 754419 - DNA, 15 bp, Homo sapiens
tgagtcatctgcaag

SEQ ID NO: 754420 - DNA, 15 bp, Homo sapiens
gagtcatctgcaagt

SEQ ID NO: 754421 - DNA, 15 bp, Homo sapiens
agtcatctgcaagtt

SEQ ID NO: 754422 - DNA, 15 bp, Homo sapiens
gtcatctgcaagtta

SEQ ID NO: 754423 - DNA, 15 bp, Homo sapiens
tcatctgcaagttag

SEQ ID NO: 754424 - DNA, 15 bp, Homo sapiens
catctgcaagttaga

SEQ ID NO: 754425 - DNA, 15 bp, Homo sapiens
atctgcaagttagac

SEQ ID NO: 754426 - DNA, 15 bp, Homo sapiens
tctgcaagttagaca

SEQ ID NO: 754427 - DNA, 15 bp, Homo sapiens
ctgcaagttagacac

SEQ ID NO: 754428 - DNA, 15 bp, Homo sapiens
tgcaagttagacacc

SEQ ID NO: 754429 - DNA, 15 bp, Homo sapiens
gcaagttagacacct

SEQ ID NO: 754430 - DNA, 15 bp, Homo sapiens
caagttagacacctg

SEQ ID NO: 754431 - DNA, 15 bp, Homo sapiens
aagttagacacctgt

SEQ ID NO: 754432 - DNA, 15 bp, Homo sapiens
agttagacacctgta

SEQ ID NO: 754433 - DNA, 15 bp, Homo sapiens
gttagacacctgtag

SEQ ID NO: 754434 - DNA, 15 bp, Homo sapiens
ttagacacctgtagt

SEQ ID NO: 754435 - DNA, 15 bp, Homo sapiens
tagacacctgtagtt

SEQ ID NO: 754436 - DNA, 15 bp, Homo sapiens
agacacctgtagttt

SEQ ID NO: 754437 - DNA, 15 bp, Homo sapiens
gacacctgtagttta

SEQ ID NO: 754438 - DNA, 15 bp, Homo sapiens
acacctgtagtttat

SEQ ID NO: 754439 - DNA, 15 bp, Homo sapiens
cacctgtagtttatc

SEQ ID NO: 754440 - DNA, 15 bp, Homo sapiens
acctgtagtttatct

SEQ ID NO: 754441 - DNA, 15 bp, Homo sapiens
cctgtagtttatctg

SEQ ID NO: 754442 - DNA, 15 bp, Homo sapiens
ctgtagtttatctga

SEQ ID NO: 754443 - DNA, 15 bp, Homo sapiens
tgtagtttatctgag

SEQ ID NO: 754444 - DNA, 15 bp, Homo sapiens
gtagtttatctgagt

SEQ ID NO: 754445 - DNA, 15 bp, Homo sapiens
tagtttatctgagtc

SEQ ID NO: 754446 - DNA, 15 bp, Homo sapiens
agtttatctgagtcc

SEQ ID NO: 754447 - DNA, 15 bp, Homo sapiens
gtttatctgagtccg

SEQ ID NO: 754448 - DNA, 15 bp, Homo sapiens
tttatctgagtccga

SEQ ID NO: 754449 - DNA, 15 bp, Homo sapiens
ttatctgagtccgaa

SEQ ID NO: 754450 - DNA, 15 bp, Homo sapiens
tatctgagtccgaac

SEQ ID NO: 754451 - DNA, 15 bp, Homo sapiens
atctgagtccgaaca

SEQ ID NO: 754452 - DNA, 15 bp, Homo sapiens
tctgagtccgaacac

SEQ ID NO: 754453 - DNA, 15 bp, Homo sapiens
ctgagtccgaacact

SEQ ID NO: 754454 - DNA, 15 bp, Homo sapiens
tgagtccgaacactt

SEQ ID NO: 754455 - DNA, 15 bp, Homo sapiens
gagtccgaacacttc

SEQ ID NO: 754456 - DNA, 15 bp, Homo sapiens
agtccgaacacttcc

SEQ ID NO: 754457 - DNA, 15 bp, Homo sapiens
gtccgaacacttcct

SEQ ID NO: 754458 - DNA, 15 bp, Homo sapiens
tccgaacacttccta

SEQ ID NO: 754459 - DNA, 15 bp, Homo sapiens
ccgaacacttcctaa

SEQ ID NO: 754460 - DNA, 15 bp, Homo sapiens
cgaacacttcctaat

SEQ ID NO: 754461 - DNA, 15 bp, Homo sapiens
gaacacttcctaata

SEQ ID NO: 754462 - DNA, 15 bp, Homo sapiens
aacacttcctaatat

SEQ ID NO: 754463 - DNA, 15 bp, Homo sapiens
acacttcctaatatc

SEQ ID NO: 754464 - DNA, 15 bp, Homo sapiens
cacttcctaatatcc

SEQ ID NO: 754465 - DNA, 15 bp, Homo sapiens
acttcctaatatccc

SEQ ID NO: 754466 - DNA, 15 bp, Homo sapiens
cttcctaatatccca

SEQ ID NO: 754467 - DNA, 15 bp, Homo sapiens
ttcctaatatcccac

SEQ ID NO: 754468 - DNA, 15 bp, Homo sapiens
tcctaatatcccaca

SEQ ID NO: 754469 - DNA, 15 bp, Homo sapiens
cctaatatcccacat

SEQ ID NO: 754470 - DNA, 15 bp, Homo sapiens
ctaatatcccacatt

SEQ ID NO: 754471 - DNA, 15 bp, Homo sapiens
taatatcccacattc

SEQ ID NO: 754472 - DNA, 15 bp, Homo sapiens
aatatcccacattcg

SEQ ID NO: 754473 - DNA, 15 bp, Homo sapiens
aaacactttgaaact

SEQ ID NO: 754474 - DNA, 15 bp, Homo sapiens
aacactttgaaactg

SEQ ID NO: 754475 - DNA, 15 bp, Homo sapiens
acactttgaaactgt

SEQ ID NO: 754476 - DNA, 15 bp, Homo sapiens
cactttgaaactgta

SEQ ID NO: 754477 - DNA, 15 bp, Homo sapiens
actttgaaactgtaa

SEQ ID NO: 754478 - DNA, 15 bp, Homo sapiens
ctttgaaactgtaaa

SEQ ID NO: 754479 - DNA, 15 bp, Homo sapiens
tttgaaactgtaaat

SEQ ID NO: 754480 - DNA, 15 bp, Homo sapiens
ttgaaactgtaaatt

SEQ ID NO: 754481 - DNA, 15 bp, Homo sapiens
tgaaactgtaaattc

SEQ ID NO: 754482 - DNA, 15 bp, Homo sapiens
gaaactgtaaattct

SEQ ID NO: 754483 - DNA, 15 bp, Homo sapiens
aaactgtaaattctt

SEQ ID NO: 754484 - DNA, 15 bp, Homo sapiens
aactgtaaattcttt

SEQ ID NO: 754485 - DNA, 15 bp, Homo sapiens
actgtaaattcttta

SEQ ID NO: 754486 - DNA, 15 bp, Homo sapiens
ctgtaaattctttat

SEQ ID NO: 754487 - DNA, 15 bp, Homo sapiens
tgtaaattctttatc

SEQ ID NO: 754488 - DNA, 15 bp, Homo sapiens
gtaaattctttatca

SEQ ID NO: 754489 - DNA, 15 bp, Homo sapiens
taaattctttatcag

SEQ ID NO: 754490 - DNA, 15 bp, Homo sapiens
aaattctttatcaga

SEQ ID NO: 754491 - DNA, 15 bp, Homo sapiens
aattctttatcagac

SEQ ID NO: 754492 - DNA, 15 bp, Homo sapiens
attctttatcagacg

SEQ ID NO: 754493 - DNA, 15 bp, Homo sapiens
ttctttatcagacgc

SEQ ID NO: 754494 - DNA, 15 bp, Homo sapiens
tctttatcagacgct

SEQ ID NO: 754495 - DNA, 15 bp, Homo sapiens
ctttatcagacgctt

SEQ ID NO: 754496 - DNA, 15 bp, Homo sapiens
tttatcagacgctta

SEQ ID NO: 754497 - DNA, 15 bp, Homo sapiens
ttatcagacgcttaa

SEQ ID NO: 754498 - DNA, 15 bp, Homo sapiens
tatcagacgcttaat

SEQ ID NO: 754499 - DNA, 15 bp, Homo sapiens
atcagacgcttaatg

SEQ ID NO: 754500 - DNA, 15 bp, Homo sapiens
tcagacgcttaatgt

SEQ ID NO: 754501 - DNA, 15 bp, Homo sapiens
cagacgcttaatgta

SEQ ID NO: 754502 - DNA, 15 bp, Homo sapiens
agacgcttaatgtac

SEQ ID NO: 754503 - DNA, 15 bp, Homo sapiens
gacgcttaatgtaca

SEQ ID NO: 754504 - DNA, 15 bp, Homo sapiens
acgcttaatgtacag

SEQ ID NO: 754505 - DNA, 15 bp, Homo sapiens
cgcttaatgtacagt

SEQ ID NO: 754506 - DNA, 15 bp, Homo sapiens
gcttaatgtacagtc

SEQ ID NO: 754507 - DNA, 15 bp, Homo sapiens
cttaatgtacagtca

SEQ ID NO: 754508 - DNA, 15 bp, Homo sapiens
ttaatgtacagtcat

SEQ ID NO: 754509 - DNA, 15 bp, Homo sapiens
taatgtacagtcatg

SEQ ID NO: 754510 - DNA, 15 bp, Homo sapiens
aatgtacagtcatgt

SEQ ID NO: 754511 - DNA, 15 bp, Homo sapiens
atgtacagtcatgtg

SEQ ID NO: 754512 - DNA, 15 bp, Homo sapiens
tgtacagtcatgtgt

SEQ ID NO: 754513 - DNA, 15 bp, Homo sapiens
gtacagtcatgtgtt

SEQ ID NO: 754514 - DNA, 15 bp, Homo sapiens
tacagtcatgtgttg

SEQ ID NO: 754515 - DNA, 15 bp, Homo sapiens
acagtcatgtgttgc

SEQ ID NO: 754516 - DNA, 15 bp, Homo sapiens
cagtcatgtgttgct

SEQ ID NO: 754517 - DNA, 15 bp, Homo sapiens
agtcatgtgttgctt

SEQ ID NO: 754518 - DNA, 15 bp, Homo sapiens
gtcatgtgttgctta

SEQ ID NO: 754519 - DNA, 15 bp, Homo sapiens
tcatgtgttgcttaa

SEQ ID NO: 754520 - DNA, 15 bp, Homo sapiens
catgtgttgcttaat

SEQ ID NO: 754521 - DNA, 15 bp, Homo sapiens
atgtgttgcttaatg

SEQ ID NO: 754522 - DNA, 15 bp, Homo sapiens
tgtgttgcttaatga

SEQ ID NO: 754523 - DNA, 15 bp, Homo sapiens
gtgttgcttaatgac

SEQ ID NO: 754524 - DNA, 15 bp, Homo sapiens
tgttgcttaatgaca

SEQ ID NO: 754525 - DNA, 15 bp, Homo sapiens
gttgcttaatgacaa

SEQ ID NO: 754526 - DNA, 15 bp, Homo sapiens
ttgcttaatgacaat

SEQ ID NO: 754527 - DNA, 15 bp, Homo sapiens
tgcttaatgacaatc

SEQ ID NO: 754528 - DNA, 15 bp, Homo sapiens
gcttaatgacaatcc

SEQ ID NO: 754529 - DNA, 15 bp, Homo sapiens
cttaatgacaatccc

SEQ ID NO: 754530 - DNA, 15 bp, Homo sapiens
ttaatgacaatccct

SEQ ID NO: 754531 - DNA, 15 bp, Homo sapiens
taatgacaatccctc

SEQ ID NO: 754532 - DNA, 15 bp, Homo sapiens
aatgacaatccctcc

SEQ ID NO: 754533 - DNA, 15 bp, Homo sapiens
atgacaatccctcct

SEQ ID NO: 754534 - DNA, 15 bp, Homo sapiens
tgacaatccctcctt

SEQ ID NO: 754535 - DNA, 15 bp, Homo sapiens
gacaatccctccttt

SEQ ID NO: 754536 - DNA, 15 bp, Homo sapiens
acaatccctcctttc

SEQ ID NO: 754537 - DNA, 15 bp, Homo sapiens
caatccctcctttct

SEQ ID NO: 754538 - DNA, 15 bp, Homo sapiens
aatccctcctttctg

SEQ ID NO: 754539 - DNA, 15 bp, Homo sapiens
atccctcctttctgg

SEQ ID NO: 754540 - DNA, 15 bp, Homo sapiens
tccctcctttctgga

SEQ ID NO: 754541 - DNA, 15 bp, Homo sapiens
ccctcctttctggaa

SEQ ID NO: 754542 - DNA, 15 bp, Homo sapiens
cctcctttctggaat

SEQ ID NO: 754543 - DNA, 15 bp, Homo sapiens
ctcctttctggaata

SEQ ID NO: 754544 - DNA, 15 bp, Homo sapiens
tcctttctggaatac

SEQ ID NO: 754545 - DNA, 15 bp, Homo sapiens
cctttctggaatacc

SEQ ID NO: 754546 - DNA, 15 bp, Homo sapiens
ctttctggaatacct

SEQ ID NO: 754547 - DNA, 15 bp, Homo sapiens
tttctggaatacctc

SEQ ID NO: 754548 - DNA, 15 bp, Homo sapiens
ttctggaatacctcc

SEQ ID NO: 754549 - DNA, 15 bp, Homo sapiens
tctggaatacctcct

SEQ ID NO: 754550 - DNA, 15 bp, Homo sapiens
ctggaatacctcctg

SEQ ID NO: 754551 - DNA, 15 bp, Homo sapiens
tggaatacctcctga

SEQ ID NO: 754552 - DNA, 15 bp, Homo sapiens
ggaatacctcctgaa

SEQ ID NO: 754553 - DNA, 15 bp, Homo sapiens
gaatacctcctgaag

SEQ ID NO: 754554 - DNA, 15 bp, Homo sapiens
aatacctcctgaagg

SEQ ID NO: 754555 - DNA, 15 bp, Homo sapiens
atacctcctgaagga

SEQ ID NO: 754556 - DNA, 15 bp, Homo sapiens
tacctcctgaaggac

SEQ ID NO: 754557 - DNA, 15 bp, Homo sapiens
acctcctgaaggacc

SEQ ID NO: 754558 - DNA, 15 bp, Homo sapiens
cctcctgaaggacct

SEQ ID NO: 754559 - DNA, 15 bp, Homo sapiens
ctcctgaaggacctg

SEQ ID NO: 754560 - DNA, 15 bp, Homo sapiens
tcctgaaggacctgc

SEQ ID NO: 754561 - DNA, 15 bp, Homo sapiens
cctgaaggacctgct

SEQ ID NO: 754562 - DNA, 15 bp, Homo sapiens
ctgaaggacctgctt

SEQ ID NO: 754563 - DNA, 15 bp, Homo sapiens
tgaaggacctgcttg

SEQ ID NO: 754564 - DNA, 15 bp, Homo sapiens
gaaggacctgcttga

SEQ ID NO: 754565 - DNA, 15 bp, Homo sapiens
aaggacctgcttgaa

SEQ ID NO: 754566 - DNA, 15 bp, Homo sapiens
aggacctgcttgaag

SEQ ID NO: 754567 - DNA, 15 bp, Homo sapiens
ggacctgcttgaagc

SEQ ID NO: 754568 - DNA, 15 bp, Homo sapiens
gacctgcttgaagct

SEQ ID NO: 754569 - DNA, 15 bp, Homo sapiens
acctgcttgaagctg

SEQ ID NO: 754570 - DNA, 15 bp, Homo sapiens
cctgcttgaagctgt

SEQ ID NO: 754571 - DNA, 15 bp, Homo sapiens
ctgcttgaagctgtt

SEQ ID NO: 754572 - DNA, 15 bp, Homo sapiens
tgcttgaagctgttt

SEQ ID NO: 754573 - DNA, 15 bp, Homo sapiens
gcttgaagctgtttt

SEQ ID NO: 754574 - DNA, 15 bp, Homo sapiens
cttgaagctgtttta

SEQ ID NO: 754575 - DNA, 15 bp, Homo sapiens
ttgaagctgttttac

SEQ ID NO: 754576 - DNA, 15 bp, Homo sapiens
tgaagctgttttaca

SEQ ID NO: 754577 - DNA, 15 bp, Homo sapiens
gaagctgttttacag

SEQ ID NO: 754578 - DNA, 15 bp, Homo sapiens
aagctgttttacagt

SEQ ID NO: 754579 - DNA, 15 bp, Homo sapiens
agctgttttacagtg

SEQ ID NO: 754580 - DNA, 15 bp, Homo sapiens
gctgttttacagtga

SEQ ID NO: 754581 - DNA, 15 bp, Homo sapiens
ctgttttacagtgag

SEQ ID NO: 754582 - DNA, 15 bp, Homo sapiens
tgttttacagtgagc

SEQ ID NO: 754583 - DNA, 15 bp, Homo sapiens
gttttacagtgagct

SEQ ID NO: 754584 - DNA, 15 bp, Homo sapiens
ttttacagtgagcta

SEQ ID NO: 754585 - DNA, 15 bp, Homo sapiens
tttacagtgagctaa

SEQ ID NO: 754586 - DNA, 15 bp, Homo sapiens
ttacagtgagctaag

SEQ ID NO: 754587 - DNA, 15 bp, Homo sapiens
tacagtgagctaagt

SEQ ID NO: 754588 - DNA, 15 bp, Homo sapiens
acagtgagctaagta

SEQ ID NO: 754589 - DNA, 15 bp, Homo sapiens
cagtgagctaagtag

SEQ ID NO: 754590 - DNA, 15 bp, Homo sapiens
agtgagctaagtagg

SEQ ID NO: 754591 - DNA, 15 bp, Homo sapiens
gtgagctaagtagga

SEQ ID NO: 754592 - DNA, 15 bp, Homo sapiens
tgagctaagtaggag

SEQ ID NO: 754593 - DNA, 15 bp, Homo sapiens
gagctaagtaggagt

SEQ ID NO: 754594 - DNA, 15 bp, Homo sapiens
agctaagtaggagta

SEQ ID NO: 754595 - DNA, 15 bp, Homo sapiens
gctaagtaggagtac

SEQ ID NO: 754596 - DNA, 15 bp, Homo sapiens
ctaagtaggagtaca

SEQ ID NO: 754597 - DNA, 15 bp, Homo sapiens
taagtaggagtacac

SEQ ID NO: 754598 - DNA, 15 bp, Homo sapiens
aagtaggagtacact

SEQ ID NO: 754599 - DNA, 15 bp, Homo sapiens
agtaggagtacactc

SEQ ID NO: 754600 - DNA, 15 bp, Homo sapiens
gtaggagtacactct

SEQ ID NO: 754601 - DNA, 15 bp, Homo sapiens
taggagtacactcta

SEQ ID NO: 754602 - DNA, 15 bp, Homo sapiens
aggagtacactctaa

SEQ ID NO: 754603 - DNA, 15 bp, Homo sapiens
ggagtacactctaaa

SEQ ID NO: 754604 - DNA, 15 bp, Homo sapiens
gagtacactctaaaa

SEQ ID NO: 754605 - DNA, 15 bp, Homo sapiens
agtacactctaaaat

SEQ ID NO: 754606 - DNA, 15 bp, Homo sapiens
gtacactctaaaata

SEQ ID NO: 754607 - DNA, 15 bp, Homo sapiens
tacactctaaaataa

SEQ ID NO: 754608 - DNA, 15 bp, Homo sapiens
acactctaaaataat

SEQ ID NO: 754609 - DNA, 15 bp, Homo sapiens
cactctaaaataatg

SEQ ID NO: 754610 - DNA, 15 bp, Homo sapiens
actctaaaataatga

SEQ ID NO: 754611 - DNA, 15 bp, Homo sapiens
ctctaaaataatgat

SEQ ID NO: 754612 - DNA, 15 bp, Homo sapiens
tctaaaataatgata

SEQ ID NO: 754613 - DNA, 15 bp, Homo sapiens
ctaaaataatgataa

SEQ ID NO: 754614 - DNA, 15 bp, Homo sapiens
taaaataatgataaa

SEQ ID NO: 754615 - DNA, 15 bp, Homo sapiens
aaaataatgataaaa

SEQ ID NO: 754616 - DNA, 15 bp, Homo sapiens
aaataatgataaaag

SEQ ID NO: 754617 - DNA, 15 bp, Homo sapiens
aataatgataaaagt

SEQ ID NO: 754618 - DNA, 15 bp, Homo sapiens
ataatgataaaagtg

SEQ ID NO: 754619 - DNA, 15 bp, Homo sapiens
taatgataaaagtgt

SEQ ID NO: 754620 - DNA, 15 bp, Homo sapiens
aatgataaaagtgta

SEQ ID NO: 754621 - DNA, 15 bp, Homo sapiens
atgataaaagtgtag

SEQ ID NO: 754622 - DNA, 15 bp, Homo sapiens
tgataaaagtgtagt

SEQ ID NO: 754623 - DNA, 15 bp, Homo sapiens
gataaaagtgtagta

SEQ ID NO: 754624 - DNA, 15 bp, Homo sapiens
ataaaagtgtagtaa

SEQ ID NO: 754625 - DNA, 15 bp, Homo sapiens
taaaagtgtagtaaa

SEQ ID NO: 754626 - DNA, 15 bp, Homo sapiens
aaaagtgtagtaaat

SEQ ID NO: 754627 - DNA, 15 bp, Homo sapiens
aaagtgtagtaaata

SEQ ID NO: 754628 - DNA, 15 bp, Homo sapiens
aagtgtagtaaatac

SEQ ID NO: 754629 - DNA, 15 bp, Homo sapiens
agtgtagtaaataca

SEQ ID NO: 754630 - DNA, 15 bp, Homo sapiens
gtgtagtaaatacat

SEQ ID NO: 754631 - DNA, 15 bp, Homo sapiens
tgtagtaaatacata

SEQ ID NO: 754632 - DNA, 15 bp, Homo sapiens
gtagtaaatacataa

SEQ ID NO: 754633 - DNA, 15 bp, Homo sapiens
tagtaaatacataaa

SEQ ID NO: 754634 - DNA, 15 bp, Homo sapiens
agtaaatacataaac

SEQ ID NO: 754635 - DNA, 15 bp, Homo sapiens
gtaaatacataaacc

SEQ ID NO: 754636 - DNA, 15 bp, Homo sapiens
taaatacataaacca

SEQ ID NO: 754637 - DNA, 15 bp, Homo sapiens
aaatacataaaccag

SEQ ID NO: 754638 - DNA, 15 bp, Homo sapiens
aatacataaaccagg

SEQ ID NO: 754639 - DNA, 15 bp, Homo sapiens
atacataaaccagga

SEQ ID NO: 754640 - DNA, 15 bp, Homo sapiens
tacataaaccaggaa

SEQ ID NO: 754641 - DNA, 15 bp, Homo sapiens
acataaaccaggaat

SEQ ID NO: 754642 - DNA, 15 bp, Homo sapiens
cataaaccaggaata

SEQ ID NO: 754643 - DNA, 15 bp, Homo sapiens
ataaaccaggaatat

SEQ ID NO: 754644 - DNA, 15 bp, Homo sapiens
taaaccaggaatata

SEQ ID NO: 754645 - DNA, 15 bp, Homo sapiens
aaaccaggaatatag

SEQ ID NO: 754646 - DNA, 15 bp, Homo sapiens
aaccaggaatatagt

SEQ ID NO: 754647 - DNA, 15 bp, Homo sapiens
accaggaatatagtc

SEQ ID NO: 754648 - DNA, 15 bp, Homo sapiens
ccaggaatatagtca

SEQ ID NO: 754649 - DNA, 15 bp, Homo sapiens
caggaatatagtcat

SEQ ID NO: 754650 - DNA, 15 bp, Homo sapiens
aggaatatagtcatt

SEQ ID NO: 754651 - DNA, 15 bp, Homo sapiens
ggaatatagtcattt

SEQ ID NO: 754652 - DNA, 15 bp, Homo sapiens
gaatatagtcattta

SEQ ID NO: 754653 - DNA, 15 bp, Homo sapiens
aatatagtcatttat

SEQ ID NO: 754654 - DNA, 15 bp, Homo sapiens
atatagtcatttatt

SEQ ID NO: 754655 - DNA, 15 bp, Homo sapiens
tatagtcatttatta

SEQ ID NO: 754656 - DNA, 15 bp, Homo sapiens
atagtcatttattat

SEQ ID NO: 754657 - DNA, 15 bp, Homo sapiens
tagtcatttattatc

SEQ ID NO: 754658 - DNA, 15 bp, Homo sapiens
agtcatttattatcc

SEQ ID NO: 754659 - DNA, 15 bp, Homo sapiens
gtcatttattatcct

SEQ ID NO: 754660 - DNA, 15 bp, Homo sapiens
tcatttattatcctt

SEQ ID NO: 754661 - DNA, 15 bp, Homo sapiens
catttattatccttt

SEQ ID NO: 754662 - DNA, 15 bp, Homo sapiens
atttattatcctttt

SEQ ID NO: 754663 - DNA, 15 bp, Homo sapiens
tttattatccttttc

SEQ ID NO: 754664 - DNA, 15 bp, Homo sapiens
ttattatccttttca

SEQ ID NO: 754665 - DNA, 15 bp, Homo sapiens
tattatccttttcaa

SEQ ID NO: 754666 - DNA, 15 bp, Homo sapiens
attatccttttcaag

SEQ ID NO: 754667 - DNA, 15 bp, Homo sapiens
ttatccttttcaagt

SEQ ID NO: 754668 - DNA, 15 bp, Homo sapiens
tatccttttcaagtg

SEQ ID NO: 754669 - DNA, 15 bp, Homo sapiens
atccttttcaagtgt

SEQ ID NO: 754670 - DNA, 15 bp, Homo sapiens
tccttttcaagtgta

SEQ ID NO: 754671 - DNA, 15 bp, Homo sapiens
ccttttcaagtgtac

SEQ ID NO: 754672 - DNA, 15 bp, Homo sapiens
cttttcaagtgtact

SEQ ID NO: 754673 - DNA, 15 bp, Homo sapiens
ttttcaagtgtactg

SEQ ID NO: 754674 - DNA, 15 bp, Homo sapiens
tttcaagtgtactgt

SEQ ID NO: 754675 - DNA, 15 bp, Homo sapiens
ttcaagtgtactgta

SEQ ID NO: 754676 - DNA, 15 bp, Homo sapiens
tcaagtgtactgtac

SEQ ID NO: 754677 - DNA, 15 bp, Homo sapiens
caagtgtactgtact

SEQ ID NO: 754678 - DNA, 15 bp, Homo sapiens
aagtgtactgtactg

SEQ ID NO: 754679 - DNA, 15 bp, Homo sapiens
agtgtactgtactgt

SEQ ID NO: 754680 - DNA, 15 bp, Homo sapiens
gtgtactgtactgta

SEQ ID NO: 754681 - DNA, 15 bp, Homo sapiens
tgtactgtactgtac

SEQ ID NO: 754682 - DNA, 15 bp, Homo sapiens
gtactgtactgtaca

SEQ ID NO: 754683 - DNA, 15 bp, Homo sapiens
tactgtactgtacat

SEQ ID NO: 754684 - DNA, 15 bp, Homo sapiens
actgtactgtacata

SEQ ID NO: 754685 - DNA, 15 bp, Homo sapiens
ctgtactgtacataa

SEQ ID NO: 754686 - DNA, 15 bp, Homo sapiens
tgtactgtacataat

SEQ ID NO: 754687 - DNA, 15 bp, Homo sapiens
gtactgtacataatt

SEQ ID NO: 754688 - DNA, 15 bp, Homo sapiens
tactgtacataatta

SEQ ID NO: 754689 - DNA, 15 bp, Homo sapiens
actgtacataattat

SEQ ID NO: 754690 - DNA, 15 bp, Homo sapiens
ctgtacataattata

SEQ ID NO: 754691 - DNA, 15 bp, Homo sapiens
tgtacataattatat

SEQ ID NO: 754692 - DNA, 15 bp, Homo sapiens
gtacataattatatg

SEQ ID NO: 754693 - DNA, 15 bp, Homo sapiens
tacataattatatgt

SEQ ID NO: 754694 - DNA, 15 bp, Homo sapiens
acataattatatgtg

SEQ ID NO: 754695 - DNA, 15 bp, Homo sapiens
cataattatatgtgc

SEQ ID NO: 754696 - DNA, 15 bp, Homo sapiens
ataattatatgtgct

SEQ ID NO: 754697 - DNA, 15 bp, Homo sapiens
taattatatgtgcta

SEQ ID NO: 754698 - DNA, 15 bp, Homo sapiens
aattatatgtgctat

SEQ ID NO: 754699 - DNA, 15 bp, Homo sapiens
attatatgtgctata

SEQ ID NO: 754700 - DNA, 15 bp, Homo sapiens
ttatatgtgctatac

SEQ ID NO: 754701 - DNA, 15 bp, Homo sapiens
tatatgtgctatact

SEQ ID NO: 754702 - DNA, 15 bp, Homo sapiens
atatgtgctatactt

SEQ ID NO: 754703 - DNA, 15 bp, Homo sapiens
tatgtgctatacttt

SEQ ID NO: 754704 - DNA, 15 bp, Homo sapiens
atgtgctatacttta

SEQ ID NO: 754705 - DNA, 15 bp, Homo sapiens
tgtgctatactttat

SEQ ID NO: 754706 - DNA, 15 bp, Homo sapiens
gtgctatactttatt

SEQ ID NO: 754707 - DNA, 15 bp, Homo sapiens
tgctatactttattt

SEQ ID NO: 754708 - DNA, 15 bp, Homo sapiens
gctatactttattta

SEQ ID NO: 754709 - DNA, 15 bp, Homo sapiens
ctatactttatttaa

SEQ ID NO: 754710 - DNA, 15 bp, Homo sapiens
tatactttatttaat

SEQ ID NO: 754711 - DNA, 15 bp, Homo sapiens
atactttatttaatt

SEQ ID NO: 754712 - DNA, 15 bp, Homo sapiens
tactttatttaattg

SEQ ID NO: 754713 - DNA, 15 bp, Homo sapiens
actttatttaattgg

SEQ ID NO: 754714 - DNA, 15 bp, Homo sapiens
ctttatttaattgga

SEQ ID NO: 754715 - DNA, 15 bp, Homo sapiens
tttatttaattggaa

SEQ ID NO: 754716 - DNA, 15 bp, Homo sapiens
ttatttaattggaag

SEQ ID NO: 754717 - DNA, 15 bp, Homo sapiens
tatttaattggaagc

SEQ ID NO: 754718 - DNA, 15 bp, Homo sapiens
atttaattggaagct

SEQ ID NO: 754719 - DNA, 15 bp, Homo sapiens
tttaattggaagctg

SEQ ID NO: 754720 - DNA, 15 bp, Homo sapiens
ttaattggaagctgc

SEQ ID NO: 754721 - DNA, 15 bp, Homo sapiens
taattggaagctgca

SEQ ID NO: 754722 - DNA, 15 bp, Homo sapiens
aattggaagctgcag

SEQ ID NO: 754723 - DNA, 15 bp, Homo sapiens
attggaagctgcagt

SEQ ID NO: 754724 - DNA, 15 bp, Homo sapiens
ttggaagctgcagta

SEQ ID NO: 754725 - DNA, 15 bp, Homo sapiens
tggaagctgcagtag

SEQ ID NO: 754726 - DNA, 15 bp, Homo sapiens
ggaagctgcagtagg

SEQ ID NO: 754727 - DNA, 15 bp, Homo sapiens
gaagctgcagtaggt

SEQ ID NO: 754728 - DNA, 15 bp, Homo sapiens
aagctgcagtaggtt

SEQ ID NO: 754729 - DNA, 15 bp, Homo sapiens
agctgcagtaggtta

SEQ ID NO: 754730 - DNA, 15 bp, Homo sapiens
gctgcagtaggttac

SEQ ID NO: 754731 - DNA, 15 bp, Homo sapiens
ctgcagtaggttaca

SEQ ID NO: 754732 - DNA, 15 bp, Homo sapiens
tgcagtaggttacaa

SEQ ID NO: 754733 - DNA, 15 bp, Homo sapiens
gcagtaggttacaaa

SEQ ID NO: 754734 - DNA, 15 bp, Homo sapiens
cagtaggttacaaaa

SEQ ID NO: 754735 - DNA, 15 bp, Homo sapiens
agtaggttacaaaag

SEQ ID NO: 754736 - DNA, 15 bp, Homo sapiens
gtaggttacaaaagt

SEQ ID NO: 754737 - DNA, 15 bp, Homo sapiens
taggttacaaaagtg

SEQ ID NO: 754738 - DNA, 15 bp, Homo sapiens
aggttacaaaagtga

SEQ ID NO: 754739 - DNA, 15 bp, Homo sapiens
ggttacaaaagtgag

SEQ ID NO: 754740 - DNA, 15 bp, Homo sapiens
gttacaaaagtgagt

SEQ ID NO: 754741 - DNA, 15 bp, Homo sapiens
ttacaaaagtgagta

SEQ ID NO: 754742 - DNA, 15 bp, Homo sapiens
tacaaaagtgagtaa

SEQ ID NO: 754743 - DNA, 15 bp, Homo sapiens
acaaaagtgagtaat

SEQ ID NO: 754744 - DNA, 15 bp, Homo sapiens
caaaagtgagtaatt

SEQ ID NO: 754745 - DNA, 15 bp, Homo sapiens
aaaagtgagtaatta

SEQ ID NO: 754746 - DNA, 15 bp, Homo sapiens
aaagtgagtaattat

SEQ ID NO: 754747 - DNA, 15 bp, Homo sapiens
aagtgagtaattatt

SEQ ID NO: 754748 - DNA, 15 bp, Homo sapiens
agtgagtaattattt

SEQ ID NO: 754749 - DNA, 15 bp, Homo sapiens
gtgagtaattatttg

SEQ ID NO: 754750 - DNA, 15 bp, Homo sapiens
tgagtaattatttgt

SEQ ID NO: 754751 - DNA, 15 bp, Homo sapiens
gagtaattatttgtg

SEQ ID NO: 754752 - DNA, 15 bp, Homo sapiens
agtaattatttgtgc

SEQ ID NO: 754753 - DNA, 15 bp, Homo sapiens
gtaattatttgtgct

SEQ ID NO: 754754 - DNA, 15 bp, Homo sapiens
taattatttgtgcta

SEQ ID NO: 754755 - DNA, 15 bp, Homo sapiens
aattatttgtgctac

SEQ ID NO: 754756 - DNA, 15 bp, Homo sapiens
attatttgtgctaca

SEQ ID NO: 754757 - DNA, 15 bp, Homo sapiens
ttatttgtgctacag

SEQ ID NO: 754758 - DNA, 15 bp, Homo sapiens
tatttgtgctacagt

SEQ ID NO: 754759 - DNA, 15 bp, Homo sapiens
atttgtgctacagtg

SEQ ID NO: 754760 - DNA, 15 bp, Homo sapiens
tttgtgctacagtgt

SEQ ID NO: 754761 - DNA, 15 bp, Homo sapiens
ttgtgctacagtgtt

SEQ ID NO: 754762 - DNA, 15 bp, Homo sapiens
tgtgctacagtgtta

SEQ ID NO: 754763 - DNA, 15 bp, Homo sapiens
gtgctacagtgttat

SEQ ID NO: 754764 - DNA, 15 bp, Homo sapiens
tgctacagtgttata

SEQ ID NO: 754765 - DNA, 15 bp, Homo sapiens
gctacagtgttataa

SEQ ID NO: 754766 - DNA, 15 bp, Homo sapiens
ctacagtgttataat

SEQ ID NO: 754767 - DNA, 15 bp, Homo sapiens
tacagtgttataatg

SEQ ID NO: 754768 - DNA, 15 bp, Homo sapiens
acagtgttataatgg

SEQ ID NO: 754769 - DNA, 15 bp, Homo sapiens
cagtgttataatggc

SEQ ID NO: 754770 - DNA, 15 bp, Homo sapiens
agtgttataatggct

SEQ ID NO: 754771 - DNA, 15 bp, Homo sapiens
gtgttataatggctg

SEQ ID NO: 754772 - DNA, 15 bp, Homo sapiens
tgttataatggctgc

SEQ ID NO: 754773 - DNA, 15 bp, Homo sapiens
gttataatggctgca

SEQ ID NO: 754774 - DNA, 15 bp, Homo sapiens
ttataatggctgcaa

SEQ ID NO: 754775 - DNA, 15 bp, Homo sapiens
tataatggctgcaaa

SEQ ID NO: 754776 - DNA, 15 bp, Homo sapiens
ataatggctgcaaaa

SEQ ID NO: 754777 - DNA, 15 bp, Homo sapiens
taatggctgcaaaat

SEQ ID NO: 754778 - DNA, 15 bp, Homo sapiens
aatggctgcaaaatc

SEQ ID NO: 754779 - DNA, 15 bp, Homo sapiens
atggctgcaaaatca

SEQ ID NO: 754780 - DNA, 15 bp, Homo sapiens
tggctgcaaaatcat

SEQ ID NO: 754781 - DNA, 15 bp, Homo sapiens
ggctgcaaaatcatt

SEQ ID NO: 754782 - DNA, 15 bp, Homo sapiens
gctgcaaaatcatta

SEQ ID NO: 754783 - DNA, 15 bp, Homo sapiens
ctgcaaaatcattag

SEQ ID NO: 754784 - DNA, 15 bp, Homo sapiens
tgcaaaatcattagg

SEQ ID NO: 754785 - DNA, 15 bp, Homo sapiens
gcaaaatcattaggt

SEQ ID NO: 754786 - DNA, 15 bp, Homo sapiens
caaaatcattaggtg

SEQ ID NO: 754787 - DNA, 15 bp, Homo sapiens
aaaatcattaggtga

SEQ ID NO: 754788 - DNA, 15 bp, Homo sapiens
aaatcattaggtgat

SEQ ID NO: 754789 - DNA, 15 bp, Homo sapiens
aatcattaggtgata

SEQ ID NO: 754790 - DNA, 15 bp, Homo sapiens
atcattaggtgatag

SEQ ID NO: 754791 - DNA, 15 bp, Homo sapiens
tcattaggtgatagg

SEQ ID NO: 754792 - DNA, 15 bp, Homo sapiens
cattaggtgatagga

SEQ ID NO: 754793 - DNA, 15 bp, Homo sapiens
attaggtgataggaa

SEQ ID NO: 754794 - DNA, 15 bp, Homo sapiens
ttaggtgataggaat

SEQ ID NO: 754795 - DNA, 15 bp, Homo sapiens
taggtgataggaatc

SEQ ID NO: 754796 - DNA, 15 bp, Homo sapiens
aggtgataggaatct

SEQ ID NO: 754797 - DNA, 15 bp, Homo sapiens
ggtgataggaatctt

SEQ ID NO: 754798 - DNA, 15 bp, Homo sapiens
gtgataggaatcttt

SEQ ID NO: 754799 - DNA, 15 bp, Homo sapiens
tgataggaatctttc

SEQ ID NO: 754800 - DNA, 15 bp, Homo sapiens
gataggaatctttca

SEQ ID NO: 754801 - DNA, 15 bp, Homo sapiens
ataggaatctttcag

SEQ ID NO: 754802 - DNA, 15 bp, Homo sapiens
taggaatctttcagt

SEQ ID NO: 754803 - DNA, 15 bp, Homo sapiens
aggaatctttcagtt

SEQ ID NO: 754804 - DNA, 15 bp, Homo sapiens
ggaatctttcagttc

SEQ ID NO: 754805 - DNA, 15 bp, Homo sapiens
gaatctttcagttcc

SEQ ID NO: 754806 - DNA, 15 bp, Homo sapiens
aatctttcagttcca

SEQ ID NO: 754807 - DNA, 15 bp, Homo sapiens
atctttcagttccat

SEQ ID NO: 754808 - DNA, 15 bp, Homo sapiens
tctttcagttccatt

SEQ ID NO: 754809 - DNA, 15 bp, Homo sapiens
ctttcagttccattt

SEQ ID NO: 754810 - DNA, 15 bp, Homo sapiens
tttcagttccatttt

SEQ ID NO: 754811 - DNA, 15 bp, Homo sapiens
ttcagttccatttta

SEQ ID NO: 754812 - DNA, 15 bp, Homo sapiens
tcagttccattttaa

SEQ ID NO: 754813 - DNA, 15 bp, Homo sapiens
cagttccattttaat

SEQ ID NO: 754814 - DNA, 15 bp, Homo sapiens
agttccattttaatc

SEQ ID NO: 754815 - DNA, 15 bp, Homo sapiens
gttccattttaatct

SEQ ID NO: 754816 - DNA, 15 bp, Homo sapiens
ttccattttaatctt

SEQ ID NO: 754817 - DNA, 15 bp, Homo sapiens
tccattttaatcttt

SEQ ID NO: 754818 - DNA, 15 bp, Homo sapiens
ccattttaatctttt

SEQ ID NO: 754819 - DNA, 15 bp, Homo sapiens
cattttaatcttttg

SEQ ID NO: 754820 - DNA, 15 bp, Homo sapiens
attttaatcttttgg

SEQ ID NO: 754821 - DNA, 15 bp, Homo sapiens
ttttaatcttttggt

SEQ ID NO: 754822 - DNA, 15 bp, Homo sapiens
tttaatcttttggta

SEQ ID NO: 754823 - DNA, 15 bp, Homo sapiens
ttaatcttttggtat

SEQ ID NO: 754824 - DNA, 15 bp, Homo sapiens
taatcttttggtata

SEQ ID NO: 754825 - DNA, 15 bp, Homo sapiens
aatcttttggtatat

SEQ ID NO: 754826 - DNA, 15 bp, Homo sapiens
atcttttggtatata

SEQ ID NO: 754827 - DNA, 15 bp, Homo sapiens
tcttttggtatataa

SEQ ID NO: 754828 - DNA, 15 bp, Homo sapiens
cttttggtatataat

SEQ ID NO: 754829 - DNA, 15 bp, Homo sapiens
ttttggtatataatc

SEQ ID NO: 754830 - DNA, 15 bp, Homo sapiens
tttggtatataatct

SEQ ID NO: 754831 - DNA, 15 bp, Homo sapiens
ttggtatataatctt

SEQ ID NO: 754832 - DNA, 15 bp, Homo sapiens
tggtatataatcttg

SEQ ID NO: 754833 - DNA, 15 bp, Homo sapiens
ggtatataatcttgg

SEQ ID NO: 754834 - DNA, 15 bp, Homo sapiens
gtatataatcttggc

SEQ ID NO: 754835 - DNA, 15 bp, Homo sapiens
tatataatcttggca

SEQ ID NO: 754836 - DNA, 15 bp, Homo sapiens
atataatcttggcag

SEQ ID NO: 754837 - DNA, 15 bp, Homo sapiens
tataatcttggcagt

SEQ ID NO: 754838 - DNA, 15 bp, Homo sapiens
ataatcttggcagta

SEQ ID NO: 754839 - DNA, 15 bp, Homo sapiens
taatcttggcagtag

SEQ ID NO: 754840 - DNA, 15 bp, Homo sapiens
aatcttggcagtagg

SEQ ID NO: 754841 - DNA, 15 bp, Homo sapiens
atcttggcagtaggt

SEQ ID NO: 754842 - DNA, 15 bp, Homo sapiens
tcttggcagtaggtt

SEQ ID NO: 754843 - DNA, 15 bp, Homo sapiens
cttggcagtaggtta

SEQ ID NO: 754844 - DNA, 15 bp, Homo sapiens
ttggcagtaggttac

SEQ ID NO: 754845 - DNA, 15 bp, Homo sapiens
tggcagtaggttaca

SEQ ID NO: 754846 - DNA, 15 bp, Homo sapiens
ggcagtaggttacaa

SEQ ID NO: 754847 - DNA, 15 bp, Homo sapiens
cagtaggttacaaag

SEQ ID NO: 754848 - DNA, 15 bp, Homo sapiens
agtaggttacaaagt

SEQ ID NO: 754849 - DNA, 15 bp, Homo sapiens
gtaggttacaaagtg

SEQ ID NO: 754850 - DNA, 15 bp, Homo sapiens
taggttacaaagtga

SEQ ID NO: 754851 - DNA, 15 bp, Homo sapiens
aggttacaaagtgag

SEQ ID NO: 754852 - DNA, 15 bp, Homo sapiens
ggttacaaagtgagt

SEQ ID NO: 754853 - DNA, 15 bp, Homo sapiens
gttacaaagtgagta

SEQ ID NO: 754854 - DNA, 15 bp, Homo sapiens
ttacaaagtgagtaa

SEQ ID NO: 754855 - DNA, 15 bp, Homo sapiens
tacaaagtgagtaat

SEQ ID NO: 754856 - DNA, 15 bp, Homo sapiens
acaaagtgagtaatt

SEQ ID NO: 754857 - DNA, 15 bp, Homo sapiens
caaagtgagtaatta

SEQ ID NO: 754858 - DNA, 15 bp, Homo sapiens
aaagtgagtaattag

SEQ ID NO: 754859 - DNA, 15 bp, Homo sapiens
aagtgagtaattagt

SEQ ID NO: 754860 - DNA, 15 bp, Homo sapiens
agtgagtaattagtt

SEQ ID NO: 754861 - DNA, 15 bp, Homo sapiens
gtgagtaattagttg

SEQ ID NO: 754862 - DNA, 15 bp, Homo sapiens
tgagtaattagttgt

SEQ ID NO: 754863 - DNA, 15 bp, Homo sapiens
gagtaattagttgtg

SEQ ID NO: 754864 - DNA, 15 bp, Homo sapiens
agtaattagttgtgc

SEQ ID NO: 754865 - DNA, 15 bp, Homo sapiens
gtaattagttgtgct

SEQ ID NO: 754866 - DNA, 15 bp, Homo sapiens
taattagttgtgcta

SEQ ID NO: 754867 - DNA, 15 bp, Homo sapiens
aattagttgtgctac

SEQ ID NO: 754868 - DNA, 15 bp, Homo sapiens
attagttgtgctaca

SEQ ID NO: 754869 - DNA, 15 bp, Homo sapiens
ttagttgtgctacag

SEQ ID NO: 754870 - DNA, 15 bp, Homo sapiens
tagttgtgctacagt

SEQ ID NO: 754871 - DNA, 15 bp, Homo sapiens
agttgtgctacagtg

SEQ ID NO: 754872 - DNA, 15 bp, Homo sapiens
gttgtgctacagtgt

SEQ ID NO: 754873 - DNA, 15 bp, Homo sapiens
gtgctacagtgttac

SEQ ID NO: 754874 - DNA, 15 bp, Homo sapiens
tgctacagtgttaca

SEQ ID NO: 754875 - DNA, 15 bp, Homo sapiens
gctacagtgttacaa

SEQ ID NO: 754876 - DNA, 15 bp, Homo sapiens
ctacagtgttacaat

SEQ ID NO: 754877 - DNA, 15 bp, Homo sapiens
tacagtgttacaatg

SEQ ID NO: 754878 - DNA, 15 bp, Homo sapiens
acagtgttacaatgg

SEQ ID NO: 754879 - DNA, 15 bp, Homo sapiens
cagtgttacaatggc

SEQ ID NO: 754880 - DNA, 15 bp, Homo sapiens
agtgttacaatggct

SEQ ID NO: 754881 - DNA, 15 bp, Homo sapiens
gtgttacaatggctg

SEQ ID NO: 754882 - DNA, 15 bp, Homo sapiens
tgttacaatggctgc

SEQ ID NO: 754883 - DNA, 15 bp, Homo sapiens
gttacaatggctgca

SEQ ID NO: 754884 - DNA, 15 bp, Homo sapiens
ttacaatggctgcaa

SEQ ID NO: 754885 - DNA, 15 bp, Homo sapiens
tacaatggctgcaac

SEQ ID NO: 754886 - DNA, 15 bp, Homo sapiens
acaatggctgcaaca

SEQ ID NO: 754887 - DNA, 15 bp, Homo sapiens
caatggctgcaacat

SEQ ID NO: 754888 - DNA, 15 bp, Homo sapiens
aatggctgcaacatc

SEQ ID NO: 754889 - DNA, 15 bp, Homo sapiens
atggctgcaacatca

SEQ ID NO: 754890 - DNA, 15 bp, Homo sapiens
tggctgcaacatcat

SEQ ID NO: 754891 - DNA, 15 bp, Homo sapiens
ggctgcaacatcatt

SEQ ID NO: 754892 - DNA, 15 bp, Homo sapiens
gctgcaacatcatta

SEQ ID NO: 754893 - DNA, 15 bp, Homo sapiens
ctgcaacatcattag

SEQ ID NO: 754894 - DNA, 15 bp, Homo sapiens
tgcaacatcattagg

SEQ ID NO: 754895 - DNA, 15 bp, Homo sapiens
gcaacatcattaggt

SEQ ID NO: 754896 - DNA, 15 bp, Homo sapiens
caacatcattaggtg

SEQ ID NO: 754897 - DNA, 15 bp, Homo sapiens
aacatcattaggtga

SEQ ID NO: 754898 - DNA, 15 bp, Homo sapiens
acatcattaggtgat

SEQ ID NO: 754899 - DNA, 15 bp, Homo sapiens
catcattaggtgata

SEQ ID NO: 754900 - DNA, 15 bp, Homo sapiens
ttaggtgataggaac

SEQ ID NO: 754901 - DNA, 15 bp, Homo sapiens
taggtgataggaacc

SEQ ID NO: 754902 - DNA, 15 bp, Homo sapiens
aggtgataggaacct

SEQ ID NO: 754903 - DNA, 15 bp, Homo sapiens
ggtgataggaacctt

SEQ ID NO: 754904 - DNA, 15 bp, Homo sapiens
gtgataggaaccttt

SEQ ID NO: 754905 - DNA, 15 bp, Homo sapiens
tgataggaacctttc

SEQ ID NO: 754906 - DNA, 15 bp, Homo sapiens
gataggaacctttca

SEQ ID NO: 754907 - DNA, 15 bp, Homo sapiens
ataggaacctttcag

SEQ ID NO: 754908 - DNA, 15 bp, Homo sapiens
taggaacctttcagt

SEQ ID NO: 754909 - DNA, 15 bp, Homo sapiens
aggaacctttcagtt

SEQ ID NO: 754910 - DNA, 15 bp, Homo sapiens
ggaacctttcagttc

SEQ ID NO: 754911 - DNA, 15 bp, Homo sapiens
gaacctttcagttcc

SEQ ID NO: 754912 - DNA, 15 bp, Homo sapiens
aacctttcagttcca

SEQ ID NO: 754913 - DNA, 15 bp, Homo sapiens
acctttcagttccac

SEQ ID NO: 754914 - DNA, 15 bp, Homo sapiens
cctttcagttccact

SEQ ID NO: 754915 - DNA, 15 bp, Homo sapiens
ctttcagttccactt

SEQ ID NO: 754916 - DNA, 15 bp, Homo sapiens
tttcagttccacttt

SEQ ID NO: 754917 - DNA, 15 bp, Homo sapiens
ttcagttccacttta

SEQ ID NO: 754918 - DNA, 15 bp, Homo sapiens
tcagttccactttaa

SEQ ID NO: 754919 - DNA, 15 bp, Homo sapiens
cagttccactttaat

SEQ ID NO: 754920 - DNA, 15 bp, Homo sapiens
agttccactttaatc

SEQ ID NO: 754921 - DNA, 15 bp, Homo sapiens
gttccactttaatct

SEQ ID NO: 754922 - DNA, 15 bp, Homo sapiens
ttccactttaatctt

SEQ ID NO: 754923 - DNA, 15 bp, Homo sapiens
tccactttaatcttt

SEQ ID NO: 754924 - DNA, 15 bp, Homo sapiens
ccactttaatctttt

SEQ ID NO: 754925 - DNA, 15 bp, Homo sapiens
cactttaatcttttg

SEQ ID NO: 754926 - DNA, 15 bp, Homo sapiens
actttaatcttttgg

SEQ ID NO: 754927 - DNA, 15 bp, Homo sapiens
ctttaatcttttggt

SEQ ID NO: 754928 - DNA, 15 bp, Homo sapiens
ggtatataatcttgc

SEQ ID NO: 754929 - DNA, 15 bp, Homo sapiens
gtatataatcttgca

SEQ ID NO: 754930 - DNA, 15 bp, Homo sapiens
tatataatcttgcac

SEQ ID NO: 754931 - DNA, 15 bp, Homo sapiens
atataatcttgcact

SEQ ID NO: 754932 - DNA, 15 bp, Homo sapiens
tataatcttgcactg

SEQ ID NO: 754933 - DNA, 15 bp, Homo sapiens
ataatcttgcactgt

SEQ ID NO: 754934 - DNA, 15 bp, Homo sapiens
taatcttgcactgtt

SEQ ID NO: 754935 - DNA, 15 bp, Homo sapiens
aatcttgcactgttt

SEQ ID NO: 754936 - DNA, 15 bp, Homo sapiens
atcttgcactgttta

SEQ ID NO: 754937 - DNA, 15 bp, Homo sapiens
tcttgcactgtttaa

SEQ ID NO: 754938 - DNA, 15 bp, Homo sapiens
cttgcactgtttaac

SEQ ID NO: 754939 - DNA, 15 bp, Homo sapiens
ttgcactgtttaacg

SEQ ID NO: 754940 - DNA, 15 bp, Homo sapiens
tgcactgtttaacgt

SEQ ID NO: 754941 - DNA, 15 bp, Homo sapiens
gcactgtttaacgtg

SEQ ID NO: 754942 - DNA, 15 bp, Homo sapiens
cactgtttaacgtgg

SEQ ID NO: 754943 - DNA, 15 bp, Homo sapiens
actgtttaacgtggt

SEQ ID NO: 754944 - DNA, 15 bp, Homo sapiens
ctgtttaacgtggtc

SEQ ID NO: 754945 - DNA, 15 bp, Homo sapiens
tgtttaacgtggtct

SEQ ID NO: 754946 - DNA, 15 bp, Homo sapiens
gtttaacgtggtctg

SEQ ID NO: 754947 - DNA, 15 bp, Homo sapiens
tttaacgtggtctgt

SEQ ID NO: 754948 - DNA, 15 bp, Homo sapiens
ttaacgtggtctgtc

SEQ ID NO: 754949 - DNA, 15 bp, Homo sapiens
taacgtggtctgtca

SEQ ID NO: 754950 - DNA, 15 bp, Homo sapiens
aacgtggtctgtcat

SEQ ID NO: 754951 - DNA, 15 bp, Homo sapiens
acgtggtctgtcatt

SEQ ID NO: 754952 - DNA, 15 bp, Homo sapiens
cgtggtctgtcattg

SEQ ID NO: 754953 - DNA, 15 bp, Homo sapiens
gtggtctgtcattga

SEQ ID NO: 754954 - DNA, 15 bp, Homo sapiens
tggtctgtcattgac

SEQ ID NO: 754955 - DNA, 15 bp, Homo sapiens
ggtctgtcattgaca

SEQ ID NO: 754956 - DNA, 15 bp, Homo sapiens
gtctgtcattgacag

SEQ ID NO: 754957 - DNA, 15 bp, Homo sapiens
tctgtcattgacaga

SEQ ID NO: 754958 - DNA, 15 bp, Homo sapiens
ctgtcattgacagat

SEQ ID NO: 754959 - DNA, 15 bp, Homo sapiens
tgtcattgacagata

SEQ ID NO: 754960 - DNA, 15 bp, Homo sapiens
gtcattgacagatat

SEQ ID NO: 754961 - DNA, 15 bp, Homo sapiens
tcattgacagatatg

SEQ ID NO: 754962 - DNA, 15 bp, Homo sapiens
cattgacagatatgt

SEQ ID NO: 754963 - DNA, 15 bp, Homo sapiens
attgacagatatgtt

SEQ ID NO: 754964 - DNA, 15 bp, Homo sapiens
ttgacagatatgttg

SEQ ID NO: 754965 - DNA, 15 bp, Homo sapiens
tgacagatatgttgt

SEQ ID NO: 754966 - DNA, 15 bp, Homo sapiens
gacagatatgttgtt

SEQ ID NO: 754967 - DNA, 15 bp, Homo sapiens
acagatatgttgtta

SEQ ID NO: 754968 - DNA, 15 bp, Homo sapiens
cagatatgttgttat

SEQ ID NO: 754969 - DNA, 15 bp, Homo sapiens
agatatgttgttatg

SEQ ID NO: 754970 - DNA, 15 bp, Homo sapiens
gatatgttgttatgt

SEQ ID NO: 754971 - DNA, 15 bp, Homo sapiens
atatgttgttatgtg

SEQ ID NO: 754972 - DNA, 15 bp, Homo sapiens
tatgttgttatgtgg

SEQ ID NO: 754973 - DNA, 15 bp, Homo sapiens
atgttgttatgtggt

SEQ ID NO: 754974 - DNA, 15 bp, Homo sapiens
tgttgttatgtggtg

SEQ ID NO: 754975 - DNA, 15 bp, Homo sapiens
gttgttatgtggtgc

SEQ ID NO: 754976 - DNA, 15 bp, Homo sapiens
ttgttatgtggtgca

SEQ ID NO: 754977 - DNA, 15 bp, Homo sapiens
tgttatgtggtgcat

SEQ ID NO: 754978 - DNA, 15 bp, Homo sapiens
gttatgtggtgcatg

SEQ ID NO: 754979 - DNA, 15 bp, Homo sapiens
ttatgtggtgcatga

SEQ ID NO: 754980 - DNA, 15 bp, Homo sapiens
tatgtggtgcatgac

SEQ ID NO: 754981 - DNA, 15 bp, Homo sapiens
atgtggtgcatgact

SEQ ID NO: 754982 - DNA, 15 bp, Homo sapiens
tgtggtgcatgactg

SEQ ID NO: 754983 - DNA, 15 bp, Homo sapiens
gtggtgcatgactgt

SEQ ID NO: 754984 - DNA, 15 bp, Homo sapiens
tggtgcatgactgta

SEQ ID NO: 754985 - DNA, 15 bp, Homo sapiens
ggtgcatgactgtat

SEQ ID NO: 754986 - DNA, 15 bp, Homo sapiens
gtgcatgactgtatt

SEQ ID NO: 754987 - DNA, 15 bp, Homo sapiens
tgcatgactgtattc

SEQ ID NO: 754988 - DNA, 15 bp, Homo sapiens
gcatgactgtattca

SEQ ID NO: 754989 - DNA, 15 bp, Homo sapiens
catgactgtattcat

SEQ ID NO: 754990 - DNA, 15 bp, Homo sapiens
atgactgtattcatt

SEQ ID NO: 754991 - DNA, 15 bp, Homo sapiens
tgactgtattcattt

SEQ ID NO: 754992 - DNA, 15 bp, Homo sapiens
gactgtattcattta

SEQ ID NO: 754993 - DNA, 15 bp, Homo sapiens
actgtattcatttac

SEQ ID NO: 754994 - DNA, 15 bp, Homo sapiens
ctgtattcatttact

SEQ ID NO: 754995 - DNA, 15 bp, Homo sapiens
tgtattcatttactt

SEQ ID NO: 754996 - DNA, 15 bp, Homo sapiens
gtattcatttacttc

SEQ ID NO: 754997 - DNA, 15 bp, Homo sapiens
tattcatttacttct

SEQ ID NO: 754998 - DNA, 15 bp, Homo sapiens
attcatttacttctg

SEQ ID NO: 754999 - DNA, 15 bp, Homo sapiens
ttcatttacttctgc

SEQ ID NO: 755000 - DNA, 15 bp, Homo sapiens
tcatttacttctgct

SEQ ID NO: 755001 - DNA, 15 bp, Homo sapiens
catttacttctgctg

SEQ ID NO: 755002 - DNA, 15 bp, Homo sapiens
atttacttctgctgc

SEQ ID NO: 755003 - DNA, 15 bp, Homo sapiens
tttacttctgctgct

SEQ ID NO: 755004 - DNA, 15 bp, Homo sapiens
ttacttctgctgctg

SEQ ID NO: 755005 - DNA, 15 bp, Homo sapiens
tacttctgctgctgc

SEQ ID NO: 755006 - DNA, 15 bp, Homo sapiens
acttctgctgctgct

SEQ ID NO: 755007 - DNA, 15 bp, Homo sapiens
cttctgctgctgctg

SEQ ID NO: 755008 - DNA, 15 bp, Homo sapiens
ttctgctgctgctgc

SEQ ID NO: 755009 - DNA, 15 bp, Homo sapiens
tctgctgctgctgct

SEQ ID NO: 755010 - DNA, 15 bp, Homo sapiens
ctgctgctgctgctg

SEQ ID NO: 755011 - DNA, 15 bp, Homo sapiens
tgctgctgctgctgc

SEQ ID NO: 755012 - DNA, 15 bp, Homo sapiens
gctgctgctgctgct

SEQ ID NO: 755013 - DNA, 15 bp, Homo sapiens
ctgctgctgctgctt

SEQ ID NO: 755014 - DNA, 15 bp, Homo sapiens
tgctgctgctgcttc

SEQ ID NO: 755015 - DNA, 15 bp, Homo sapiens
gctgctgctgcttct

SEQ ID NO: 755016 - DNA, 15 bp, Homo sapiens
ctgctgctgcttctt

SEQ ID NO: 755017 - DNA, 15 bp, Homo sapiens
tgctgctgcttcttc

SEQ ID NO: 755018 - DNA, 15 bp, Homo sapiens
gctgctgcttcttct

SEQ ID NO: 755019 - DNA, 15 bp, Homo sapiens
ctgctgcttcttctt

SEQ ID NO: 755020 - DNA, 15 bp, Homo sapiens
tgctgcttcttcttt

SEQ ID NO: 755021 - DNA, 15 bp, Homo sapiens
gctgcttcttctttt

SEQ ID NO: 755022 - DNA, 15 bp, Homo sapiens
ctgcttcttcttttt

SEQ ID NO: 755023 - DNA, 15 bp, Homo sapiens
tgcttcttcttttta

SEQ ID NO: 755024 - DNA, 15 bp, Homo sapiens
gcttcttctttttac

SEQ ID NO: 755025 - DNA, 15 bp, Homo sapiens
cttcttctttttact

SEQ ID NO: 755026 - DNA, 15 bp, Homo sapiens
ttcttctttttactt

SEQ ID NO: 755027 - DNA, 15 bp, Homo sapiens
tcttctttttacttc

SEQ ID NO: 755028 - DNA, 15 bp, Homo sapiens
cttctttttacttct

SEQ ID NO: 755029 - DNA, 15 bp, Homo sapiens
ttctttttacttctt

SEQ ID NO: 755030 - DNA, 15 bp, Homo sapiens
tctttttacttcttt

SEQ ID NO: 755031 - DNA, 15 bp, Homo sapiens
ctttttacttctttt

SEQ ID NO: 755032 - DNA, 15 bp, Homo sapiens
tttttacttcttttt

SEQ ID NO: 755033 - DNA, 15 bp, Homo sapiens
ttttacttctttttt

SEQ ID NO: 755034 - DNA, 15 bp, Homo sapiens
tttacttcttttttg

SEQ ID NO: 755035 - DNA, 15 bp, Homo sapiens
ttacttcttttttgt

SEQ ID NO: 755036 - DNA, 15 bp, Homo sapiens
tacttcttttttgtt

SEQ ID NO: 755037 - DNA, 15 bp, Homo sapiens
acttcttttttgttt

SEQ ID NO: 755038 - DNA, 15 bp, Homo sapiens
cttcttttttgtttt

SEQ ID NO: 755039 - DNA, 15 bp, Homo sapiens
ttcttttttgttttg

SEQ ID NO: 755040 - DNA, 15 bp, Homo sapiens
tcttttttgttttgt

SEQ ID NO: 755041 - DNA, 15 bp, Homo sapiens
cttttttgttttgtt

SEQ ID NO: 755042 - DNA, 15 bp, Homo sapiens
ttttgttttgttttg

SEQ ID NO: 755043 - DNA, 15 bp, Homo sapiens
tttgttttgttttgt

SEQ ID NO: 755044 - DNA, 15 bp, Homo sapiens
ttgttttgttttgtt

SEQ ID NO: 755045 - DNA, 15 bp, Homo sapiens
tgttttgttttgttt

SEQ ID NO: 755046 - DNA, 15 bp, Homo sapiens
gttttgttttgtttt

SEQ ID NO: 755047 - DNA, 15 bp, Homo sapiens
ttgttttgttttttg

SEQ ID NO: 755048 - DNA, 15 bp, Homo sapiens
tgttttgttttttga

SEQ ID NO: 755049 - DNA, 15 bp, Homo sapiens
gttttgttttttgag

SEQ ID NO: 755050 - DNA, 15 bp, Homo sapiens
ttttgttttttgaga

SEQ ID NO: 755051 - DNA, 15 bp, Homo sapiens
tttgttttttgagat

SEQ ID NO: 755052 - DNA, 15 bp, Homo sapiens
ttgttttttgagata

SEQ ID NO: 755053 - DNA, 15 bp, Homo sapiens
tgttttttgagatag

SEQ ID NO: 755054 - DNA, 15 bp, Homo sapiens
gttttttgagataga

SEQ ID NO: 755055 - DNA, 15 bp, Homo sapiens
ttttttgagatagac

SEQ ID NO: 755056 - DNA, 15 bp, Homo sapiens
tttttgagatagact

SEQ ID NO: 755057 - DNA, 15 bp, Homo sapiens
ttttgagatagactt

SEQ ID NO: 755058 - DNA, 15 bp, Homo sapiens
tttgagatagacttt

SEQ ID NO: 755059 - DNA, 15 bp, Homo sapiens
ttgagatagactttt

SEQ ID NO: 755060 - DNA, 15 bp, Homo sapiens
tgagatagacttttg

SEQ ID NO: 755061 - DNA, 15 bp, Homo sapiens
gagatagacttttgc

SEQ ID NO: 755062 - DNA, 15 bp, Homo sapiens
agatagacttttgct

SEQ ID NO: 755063 - DNA, 15 bp, Homo sapiens
gatagacttttgctc

SEQ ID NO: 755064 - DNA, 15 bp, Homo sapiens
atagacttttgctct

SEQ ID NO: 755065 - DNA, 15 bp, Homo sapiens
tagacttttgctctt

SEQ ID NO: 755066 - DNA, 15 bp, Homo sapiens
agacttttgctcttg

SEQ ID NO: 755067 - DNA, 15 bp, Homo sapiens
gacttttgctcttgt

SEQ ID NO: 755068 - DNA, 15 bp, Homo sapiens
acttttgctcttgtt

SEQ ID NO: 755069 - DNA, 15 bp, Homo sapiens
cttttgctcttgttg

SEQ ID NO: 755070 - DNA, 15 bp, Homo sapiens
ttttgctcttgttgc

SEQ ID NO: 755071 - DNA, 15 bp, Homo sapiens
tttgctcttgttgcc

SEQ ID NO: 755072 - DNA, 15 bp, Homo sapiens
ttgctcttgttgcct

SEQ ID NO: 755073 - DNA, 15 bp, Homo sapiens
tgctcttgttgccta

SEQ ID NO: 755074 - DNA, 15 bp, Homo sapiens
gctcttgttgcctag

SEQ ID NO: 755075 - DNA, 15 bp, Homo sapiens
ctcttgttgcctagg

SEQ ID NO: 755076 - DNA, 15 bp, Homo sapiens
tcttgttgcctaggc

SEQ ID NO: 755077 - DNA, 15 bp, Homo sapiens
cttgttgcctaggct

SEQ ID NO: 755078 - DNA, 15 bp, Homo sapiens
ttgttgcctaggctg

SEQ ID NO: 755079 - DNA, 15 bp, Homo sapiens
tgttgcctaggctgg

SEQ ID NO: 755080 - DNA, 15 bp, Homo sapiens
gttgcctaggctgga

SEQ ID NO: 755081 - DNA, 15 bp, Homo sapiens
ttgcctaggctggag

SEQ ID NO: 755082 - DNA, 15 bp, Homo sapiens
tgcctaggctggagt

SEQ ID NO: 755083 - DNA, 15 bp, Homo sapiens
gcctaggctggagtt

SEQ ID NO: 755084 - DNA, 15 bp, Homo sapiens
cctaggctggagttc

SEQ ID NO: 755085 - DNA, 15 bp, Homo sapiens
ctaggctggagttct

SEQ ID NO: 755086 - DNA, 15 bp, Homo sapiens
taggctggagttcta

SEQ ID NO: 755087 - DNA, 15 bp, Homo sapiens
aggctggagttctat

SEQ ID NO: 755088 - DNA, 15 bp, Homo sapiens
ggctggagttctatg

SEQ ID NO: 755089 - DNA, 15 bp, Homo sapiens
gctggagttctatgg

SEQ ID NO: 755090 - DNA, 15 bp, Homo sapiens
ctggagttctatggt

SEQ ID NO: 755091 - DNA, 15 bp, Homo sapiens
tggagttctatggtg

SEQ ID NO: 755092 - DNA, 15 bp, Homo sapiens
ggagttctatggtgc

SEQ ID NO: 755093 - DNA, 15 bp, Homo sapiens
gagttctatggtgca

SEQ ID NO: 755094 - DNA, 15 bp, Homo sapiens
agttctatggtgcaa

SEQ ID NO: 755095 - DNA, 15 bp, Homo sapiens
gttctatggtgcaat

SEQ ID NO: 755096 - DNA, 15 bp, Homo sapiens
ttctatggtgcaatc

SEQ ID NO: 755097 - DNA, 15 bp, Homo sapiens
tctatggtgcaatct

SEQ ID NO: 755098 - DNA, 15 bp, Homo sapiens
ctatggtgcaatctt

SEQ ID NO: 755099 - DNA, 15 bp, Homo sapiens
tatggtgcaatcttg

SEQ ID NO: 755100 - DNA, 15 bp, Homo sapiens
atggtgcaatcttgg

SEQ ID NO: 755101 - DNA, 15 bp, Homo sapiens
tggtgcaatcttggc

SEQ ID NO: 755102 - DNA, 15 bp, Homo sapiens
ggtgcaatcttggct

SEQ ID NO: 755103 - DNA, 15 bp, Homo sapiens
gtgcaatcttggctc

SEQ ID NO: 755104 - DNA, 15 bp, Homo sapiens
tgcaatcttggctca

SEQ ID NO: 755105 - DNA, 15 bp, Homo sapiens
gcaatcttggctcac

SEQ ID NO: 755106 - DNA, 15 bp, Homo sapiens
caatcttggctcact

SEQ ID NO: 755107 - DNA, 15 bp, Homo sapiens
cttggctcactgcac

SEQ ID NO: 755108 - DNA, 15 bp, Homo sapiens
ttggctcactgcacc

SEQ ID NO: 755109 - DNA, 15 bp, Homo sapiens
tggctcactgcaccc

SEQ ID NO: 755110 - DNA, 15 bp, Homo sapiens
ggctcactgcaccct

SEQ ID NO: 755111 - DNA, 15 bp, Homo sapiens
gctcactgcaccctc

SEQ ID NO: 755112 - DNA, 15 bp, Homo sapiens
ctcactgcaccctcc

SEQ ID NO: 755113 - DNA, 15 bp, Homo sapiens
tcactgcaccctccg

SEQ ID NO: 755114 - DNA, 15 bp, Homo sapiens
cactgcaccctccgc

SEQ ID NO: 755115 - DNA, 15 bp, Homo sapiens
actgcaccctccgcc

SEQ ID NO: 755116 - DNA, 15 bp, Homo sapiens
ctgcaccctccgcct

SEQ ID NO: 755117 - DNA, 15 bp, Homo sapiens
tgcaccctccgcctc

SEQ ID NO: 755118 - DNA, 15 bp, Homo sapiens
gcaccctccgcctcc

SEQ ID NO: 755119 - DNA, 15 bp, Homo sapiens
caccctccgcctccc

SEQ ID NO: 755120 - DNA, 15 bp, Homo sapiens
accctccgcctccca

SEQ ID NO: 755121 - DNA, 15 bp, Homo sapiens
ccctccgcctcccag

SEQ ID NO: 755122 - DNA, 15 bp, Homo sapiens
cctccgcctcccagg

SEQ ID NO: 755123 - DNA, 15 bp, Homo sapiens
ctccgcctcccaggt

SEQ ID NO: 755124 - DNA, 15 bp, Homo sapiens
tccgcctcccaggtt

SEQ ID NO: 755125 - DNA, 15 bp, Homo sapiens
ccgcctcccaggttc

SEQ ID NO: 755126 - DNA, 15 bp, Homo sapiens
cgcctcccaggttca

SEQ ID NO: 755127 - DNA, 15 bp, Homo sapiens
ctcccaggttcaagt

SEQ ID NO: 755128 - DNA, 15 bp, Homo sapiens
tcccaggttcaagtg

SEQ ID NO: 755129 - DNA, 15 bp, Homo sapiens
cccaggttcaagtga

SEQ ID NO: 755130 - DNA, 15 bp, Homo sapiens
ccaggttcaagtgat

SEQ ID NO: 755131 - DNA, 15 bp, Homo sapiens
caggttcaagtgatt

SEQ ID NO: 755132 - DNA, 15 bp, Homo sapiens
aggttcaagtgattc

SEQ ID NO: 755133 - DNA, 15 bp, Homo sapiens
ggttcaagtgattct

SEQ ID NO: 755134 - DNA, 15 bp, Homo sapiens
gttcaagtgattctc

SEQ ID NO: 755135 - DNA, 15 bp, Homo sapiens
tctcctgcctcagct

SEQ ID NO: 755136 - DNA, 15 bp, Homo sapiens
ctcctgcctcagctt

SEQ ID NO: 755137 - DNA, 15 bp, Homo sapiens
tcctgcctcagcttc

SEQ ID NO: 755138 - DNA, 15 bp, Homo sapiens
cctgcctcagcttcc

SEQ ID NO: 755139 - DNA, 15 bp, Homo sapiens
ctgcctcagcttcct

SEQ ID NO: 755140 - DNA, 15 bp, Homo sapiens
tgcctcagcttcctg

SEQ ID NO: 755141 - DNA, 15 bp, Homo sapiens
gcctcagcttcctga

SEQ ID NO: 755142 - DNA, 15 bp, Homo sapiens
cctcagcttcctgag

SEQ ID NO: 755143 - DNA, 15 bp, Homo sapiens
ctcagcttcctgagt

SEQ ID NO: 755144 - DNA, 15 bp, Homo sapiens
tcagcttcctgagta

SEQ ID NO: 755145 - DNA, 15 bp, Homo sapiens
cagcttcctgagtag

SEQ ID NO: 755146 - DNA, 15 bp, Homo sapiens
agcttcctgagtagc

SEQ ID NO: 755147 - DNA, 15 bp, Homo sapiens
gcttcctgagtagct

SEQ ID NO: 755148 - DNA, 15 bp, Homo sapiens
cttcctgagtagcta

SEQ ID NO: 755149 - DNA, 15 bp, Homo sapiens
ttcctgagtagctag

SEQ ID NO: 755150 - DNA, 15 bp, Homo sapiens
tcctgagtagctagg

SEQ ID NO: 755151 - DNA, 15 bp, Homo sapiens
cctgagtagctagga

SEQ ID NO: 755152 - DNA, 15 bp, Homo sapiens
ctgagtagctaggat

SEQ ID NO: 755153 - DNA, 15 bp, Homo sapiens
tgagtagctaggatt

SEQ ID NO: 755154 - DNA, 15 bp, Homo sapiens
gagtagctaggatta

SEQ ID NO: 755155 - DNA, 15 bp, Homo sapiens
agtagctaggattac

SEQ ID NO: 755156 - DNA, 15 bp, Homo sapiens
gtagctaggattacg

SEQ ID NO: 755157 - DNA, 15 bp, Homo sapiens
tagctaggattacgg

SEQ ID NO: 755158 - DNA, 15 bp, Homo sapiens
agctaggattacggg

SEQ ID NO: 755159 - DNA, 15 bp, Homo sapiens
gctaggattacgggc

SEQ ID NO: 755160 - DNA, 15 bp, Homo sapiens
ctaggattacgggca

SEQ ID NO: 755161 - DNA, 15 bp, Homo sapiens
taggattacgggcat

SEQ ID NO: 755162 - DNA, 15 bp, Homo sapiens
aggattacgggcatg

SEQ ID NO: 755163 - DNA, 15 bp, Homo sapiens
ggattacgggcatgc

SEQ ID NO: 755164 - DNA, 15 bp, Homo sapiens
gattacgggcatgca

SEQ ID NO: 755165 - DNA, 15 bp, Homo sapiens
attacgggcatgcac

SEQ ID NO: 755166 - DNA, 15 bp, Homo sapiens
ttacgggcatgcacc

SEQ ID NO: 755167 - DNA, 15 bp, Homo sapiens
tacgggcatgcacca

SEQ ID NO: 755168 - DNA, 15 bp, Homo sapiens
acgggcatgcaccat

SEQ ID NO: 755169 - DNA, 15 bp, Homo sapiens
cgggcatgcaccatc

SEQ ID NO: 755170 - DNA, 15 bp, Homo sapiens
gggcatgcaccatca

SEQ ID NO: 755171 - DNA, 15 bp, Homo sapiens
ggcatgcaccatcac

SEQ ID NO: 755172 - DNA, 15 bp, Homo sapiens
gcatgcaccatcacg

SEQ ID NO: 755173 - DNA, 15 bp, Homo sapiens
catgcaccatcacgc

SEQ ID NO: 755174 - DNA, 15 bp, Homo sapiens
atgcaccatcacgcc

SEQ ID NO: 755175 - DNA, 15 bp, Homo sapiens
tgcaccatcacgccc

SEQ ID NO: 755176 - DNA, 15 bp, Homo sapiens
gcaccatcacgcccg

SEQ ID NO: 755177 - DNA, 15 bp, Homo sapiens
caccatcacgcccgg

SEQ ID NO: 755178 - DNA, 15 bp, Homo sapiens
accatcacgcccggc

SEQ ID NO: 755179 - DNA, 15 bp, Homo sapiens
ccatcacgcccggct

SEQ ID NO: 755180 - DNA, 15 bp, Homo sapiens
catcacgcccggcta

SEQ ID NO: 755181 - DNA, 15 bp, Homo sapiens
atcacgcccggctaa

SEQ ID NO: 755182 - DNA, 15 bp, Homo sapiens
tcacgcccggctaat

SEQ ID NO: 755183 - DNA, 15 bp, Homo sapiens
cacgcccggctaatt

SEQ ID NO: 755184 - DNA, 15 bp, Homo sapiens
acgcccggctaattt

SEQ ID NO: 755185 - DNA, 15 bp, Homo sapiens
cgcccggctaatttt

SEQ ID NO: 755186 - DNA, 15 bp, Homo sapiens
gcccggctaattttg

SEQ ID NO: 755187 - DNA, 15 bp, Homo sapiens
cccggctaattttgt

SEQ ID NO: 755188 - DNA, 15 bp, Homo sapiens
ccggctaattttgta

SEQ ID NO: 755189 - DNA, 15 bp, Homo sapiens
cggctaattttgtat

SEQ ID NO: 755190 - DNA, 15 bp, Homo sapiens
ggctaattttgtatt

SEQ ID NO: 755191 - DNA, 15 bp, Homo sapiens
gctaattttgtattt

SEQ ID NO: 755192 - DNA, 15 bp, Homo sapiens
ctaattttgtatttt

SEQ ID NO: 755193 - DNA, 15 bp, Homo sapiens
taattttgtattttt

SEQ ID NO: 755194 - DNA, 15 bp, Homo sapiens
aattttgtattttta

SEQ ID NO: 755195 - DNA, 15 bp, Homo sapiens
attttgtatttttag

SEQ ID NO: 755196 - DNA, 15 bp, Homo sapiens
tttgtatttttagtg

SEQ ID NO: 755197 - DNA, 15 bp, Homo sapiens
ttgtatttttagtgg

SEQ ID NO: 755198 - DNA, 15 bp, Homo sapiens
tgtatttttagtgga

SEQ ID NO: 755199 - DNA, 15 bp, Homo sapiens
gtatttttagtggag

SEQ ID NO: 755200 - DNA, 15 bp, Homo sapiens
tatttttagtggaga

SEQ ID NO: 755201 - DNA, 15 bp, Homo sapiens
atttttagtggagat

SEQ ID NO: 755202 - DNA, 15 bp, Homo sapiens
tttttagtggagatg

SEQ ID NO: 755203 - DNA, 15 bp, Homo sapiens
ttttagtggagatgg

SEQ ID NO: 755204 - DNA, 15 bp, Homo sapiens
tttagtggagatggg

SEQ ID NO: 755205 - DNA, 15 bp, Homo sapiens
ttagtggagatgggg

SEQ ID NO: 755206 - DNA, 15 bp, Homo sapiens
tagtggagatggggt

SEQ ID NO: 755207 - DNA, 15 bp, Homo sapiens
agtggagatggggtt

SEQ ID NO: 755208 - DNA, 15 bp, Homo sapiens
gtggagatggggttt

SEQ ID NO: 755209 - DNA, 15 bp, Homo sapiens
tggagatggggtttc

SEQ ID NO: 755210 - DNA, 15 bp, Homo sapiens
ggagatggggtttct

SEQ ID NO: 755211 - DNA, 15 bp, Homo sapiens
gagatggggtttctc

SEQ ID NO: 755212 - DNA, 15 bp, Homo sapiens
agatggggtttctcc

SEQ ID NO: 755213 - DNA, 15 bp, Homo sapiens
gatggggtttctcca

SEQ ID NO: 755214 - DNA, 15 bp, Homo sapiens
atggggtttctccat

SEQ ID NO: 755215 - DNA, 15 bp, Homo sapiens
tggggtttctccatg

SEQ ID NO: 755216 - DNA, 15 bp, Homo sapiens
ggggtttctccatgt

SEQ ID NO: 755217 - DNA, 15 bp, Homo sapiens
gggtttctccatgtc

SEQ ID NO: 755218 - DNA, 15 bp, Homo sapiens
ggtttctccatgtcg

SEQ ID NO: 755219 - DNA, 15 bp, Homo sapiens
gtttctccatgtcgg

SEQ ID NO: 755220 - DNA, 15 bp, Homo sapiens
tttctccatgtcggt

SEQ ID NO: 755221 - DNA, 15 bp, Homo sapiens
ttctccatgtcggtc

SEQ ID NO: 755222 - DNA, 15 bp, Homo sapiens
tctccatgtcggtca

SEQ ID NO: 755223 - DNA, 15 bp, Homo sapiens
ctccatgtcggtcag

SEQ ID NO: 755224 - DNA, 15 bp, Homo sapiens
tccatgtcggtcagg

SEQ ID NO: 755225 - DNA, 15 bp, Homo sapiens
ccatgtcggtcaggc

SEQ ID NO: 755226 - DNA, 15 bp, Homo sapiens
catgtcggtcaggct

SEQ ID NO: 755227 - DNA, 15 bp, Homo sapiens
atgtcggtcaggctg

SEQ ID NO: 755228 - DNA, 15 bp, Homo sapiens
tgtcggtcaggctgg

SEQ ID NO: 755229 - DNA, 15 bp, Homo sapiens
gtcggtcaggctggt

SEQ ID NO: 755230 - DNA, 15 bp, Homo sapiens
tcggtcaggctggtc

SEQ ID NO: 755231 - DNA, 15 bp, Homo sapiens
cggtcaggctggtct

SEQ ID NO: 755232 - DNA, 15 bp, Homo sapiens
ggtcaggctggtctc

SEQ ID NO: 755233 - DNA, 15 bp, Homo sapiens
gtcaggctggtctcg

SEQ ID NO: 755234 - DNA, 15 bp, Homo sapiens
tcaggctggtctcga

SEQ ID NO: 755235 - DNA, 15 bp, Homo sapiens
caggctggtctcgaa

SEQ ID NO: 755236 - DNA, 15 bp, Homo sapiens
aggctggtctcgaac

SEQ ID NO: 755237 - DNA, 15 bp, Homo sapiens
ggctggtctcgaact

SEQ ID NO: 755238 - DNA, 15 bp, Homo sapiens
gctggtctcgaactc

SEQ ID NO: 755239 - DNA, 15 bp, Homo sapiens
ctggtctcgaactcc

SEQ ID NO: 755240 - DNA, 15 bp, Homo sapiens
tggtctcgaactccc

SEQ ID NO: 755241 - DNA, 15 bp, Homo sapiens
ggtctcgaactccca

SEQ ID NO: 755242 - DNA, 15 bp, Homo sapiens
gtctcgaactcccaa

SEQ ID NO: 755243 - DNA, 15 bp, Homo sapiens
tctcgaactcccaac

SEQ ID NO: 755244 - DNA, 15 bp, Homo sapiens
ctcgaactcccaact

SEQ ID NO: 755245 - DNA, 15 bp, Homo sapiens
tcgaactcccaactt

SEQ ID NO: 755246 - DNA, 15 bp, Homo sapiens
cgaactcccaacttc

SEQ ID NO: 755247 - DNA, 15 bp, Homo sapiens
gaactcccaacttca

SEQ ID NO: 755248 - DNA, 15 bp, Homo sapiens
aactcccaacttcag

SEQ ID NO: 755249 - DNA, 15 bp, Homo sapiens
actcccaacttcagg

SEQ ID NO: 755250 - DNA, 15 bp, Homo sapiens
ctcccaacttcaggt

SEQ ID NO: 755251 - DNA, 15 bp, Homo sapiens
tcccaacttcaggtg

SEQ ID NO: 755252 - DNA, 15 bp, Homo sapiens
cccaacttcaggtga

SEQ ID NO: 755253 - DNA, 15 bp, Homo sapiens
ccaacttcaggtgat

SEQ ID NO: 755254 - DNA, 15 bp, Homo sapiens
caacttcaggtgatc

SEQ ID NO: 755255 - DNA, 15 bp, Homo sapiens
aacttcaggtgatcc

SEQ ID NO: 755256 - DNA, 15 bp, Homo sapiens
acttcaggtgatccg

SEQ ID NO: 755257 - DNA, 15 bp, Homo sapiens
cttcaggtgatccgc

SEQ ID NO: 755258 - DNA, 15 bp, Homo sapiens
ttcaggtgatccgcc

SEQ ID NO: 755259 - DNA, 15 bp, Homo sapiens
tcaggtgatccgcct

SEQ ID NO: 755260 - DNA, 15 bp, Homo sapiens
caggtgatccgcctg

SEQ ID NO: 755261 - DNA, 15 bp, Homo sapiens
aggtgatccgcctgc

SEQ ID NO: 755262 - DNA, 15 bp, Homo sapiens
ggtgatccgcctgcc

SEQ ID NO: 755263 - DNA, 15 bp, Homo sapiens
gtgatccgcctgcct

SEQ ID NO: 755264 - DNA, 15 bp, Homo sapiens
tgatccgcctgcctc

SEQ ID NO: 755265 - DNA, 15 bp, Homo sapiens
gatccgcctgcctcg

SEQ ID NO: 755266 - DNA, 15 bp, Homo sapiens
atccgcctgcctcgg

SEQ ID NO: 755267 - DNA, 15 bp, Homo sapiens
tccgcctgcctcggc

SEQ ID NO: 755268 - DNA, 15 bp, Homo sapiens
ccgcctgcctcggcc

SEQ ID NO: 755269 - DNA, 15 bp, Homo sapiens
cgcctgcctcggcct

SEQ ID NO: 755270 - DNA, 15 bp, Homo sapiens
gcctgcctcggcctc

SEQ ID NO: 755271 - DNA, 15 bp, Homo sapiens
cctgcctcggcctcc

SEQ ID NO: 755272 - DNA, 15 bp, Homo sapiens
ctgcctcggcctccc

SEQ ID NO: 755273 - DNA, 15 bp, Homo sapiens
tgcctcggcctcccc

SEQ ID NO: 755274 - DNA, 15 bp, Homo sapiens
gcctcggcctcccca

SEQ ID NO: 755275 - DNA, 15 bp, Homo sapiens
cctcggcctccccat

SEQ ID NO: 755276 - DNA, 15 bp, Homo sapiens
ctcggcctccccatt

SEQ ID NO: 755277 - DNA, 15 bp, Homo sapiens
tcggcctccccattt

SEQ ID NO: 755278 - DNA, 15 bp, Homo sapiens
cggcctccccattta

SEQ ID NO: 755279 - DNA, 15 bp, Homo sapiens
ggcctccccatttac

SEQ ID NO: 755280 - DNA, 15 bp, Homo sapiens
gcctccccatttact

SEQ ID NO: 755281 - DNA, 15 bp, Homo sapiens
cctccccatttactt

SEQ ID NO: 755282 - DNA, 15 bp, Homo sapiens
ctccccatttacttc

SEQ ID NO: 755283 - DNA, 15 bp, Homo sapiens
tccccatttacttct

SEQ ID NO: 755284 - DNA, 15 bp, Homo sapiens
ccccatttacttctt

SEQ ID NO: 755285 - DNA, 15 bp, Homo sapiens
cccatttacttcttt

SEQ ID NO: 755286 - DNA, 15 bp, Homo sapiens
ccatttacttcttta

SEQ ID NO: 755287 - DNA, 15 bp, Homo sapiens
catttacttctttaa

SEQ ID NO: 755288 - DNA, 15 bp, Homo sapiens
atttacttctttaaa

SEQ ID NO: 755289 - DNA, 15 bp, Homo sapiens
tttacttctttaaac

SEQ ID NO: 755290 - DNA, 15 bp, Homo sapiens
ttacttctttaaacc

SEQ ID NO: 755291 - DNA, 15 bp, Homo sapiens
tacttctttaaacca

SEQ ID NO: 755292 - DNA, 15 bp, Homo sapiens
acttctttaaaccag

SEQ ID NO: 755293 - DNA, 15 bp, Homo sapiens
cttctttaaaccagt

SEQ ID NO: 755294 - DNA, 15 bp, Homo sapiens
ttctttaaaccagtg

SEQ ID NO: 755295 - DNA, 15 bp, Homo sapiens
tctttaaaccagtgt

SEQ ID NO: 755296 - DNA, 15 bp, Homo sapiens
ctttaaaccagtgta

SEQ ID NO: 755297 - DNA, 15 bp, Homo sapiens
tttaaaccagtgtag

SEQ ID NO: 755298 - DNA, 15 bp, Homo sapiens
ttaaaccagtgtaga

SEQ ID NO: 755299 - DNA, 15 bp, Homo sapiens
taaaccagtgtagac

SEQ ID NO: 755300 - DNA, 15 bp, Homo sapiens
aaaccagtgtagact

SEQ ID NO: 755301 - DNA, 15 bp, Homo sapiens
aaccagtgtagactc

SEQ ID NO: 755302 - DNA, 15 bp, Homo sapiens
accagtgtagactcc

SEQ ID NO: 755303 - DNA, 15 bp, Homo sapiens
ccagtgtagactcct

SEQ ID NO: 755304 - DNA, 15 bp, Homo sapiens
cagtgtagactcctg

SEQ ID NO: 755305 - DNA, 15 bp, Homo sapiens
agtgtagactcctgc

SEQ ID NO: 755306 - DNA, 15 bp, Homo sapiens
gtgtagactcctgct

SEQ ID NO: 755307 - DNA, 15 bp, Homo sapiens
tgtagactcctgctt

SEQ ID NO: 755308 - DNA, 15 bp, Homo sapiens
gtagactcctgcttt

SEQ ID NO: 755309 - DNA, 15 bp, Homo sapiens
tagactcctgctttt

SEQ ID NO: 755310 - DNA, 15 bp, Homo sapiens
agactcctgcttttc

SEQ ID NO: 755311 - DNA, 15 bp, Homo sapiens
gactcctgcttttct

SEQ ID NO: 755312 - DNA, 15 bp, Homo sapiens
actcctgcttttctg

SEQ ID NO: 755313 - DNA, 15 bp, Homo sapiens
ctcctgcttttctgt

SEQ ID NO: 755314 - DNA, 15 bp, Homo sapiens
tcctgcttttctgtt

SEQ ID NO: 755315 - DNA, 15 bp, Homo sapiens
cctgcttttctgttg

SEQ ID NO: 755316 - DNA, 15 bp, Homo sapiens
ctgcttttctgttgt

SEQ ID NO: 755317 - DNA, 15 bp, Homo sapiens
tgcttttctgttgta

SEQ ID NO: 755318 - DNA, 15 bp, Homo sapiens
gcttttctgttgtat

SEQ ID NO: 755319 - DNA, 15 bp, Homo sapiens
cttttctgttgtatt

SEQ ID NO: 755320 - DNA, 15 bp, Homo sapiens
ttttctgttgtattc

SEQ ID NO: 755321 - DNA, 15 bp, Homo sapiens
tttctgttgtattca

SEQ ID NO: 755322 - DNA, 15 bp, Homo sapiens
ttctgttgtattcag

SEQ ID NO: 755323 - DNA, 15 bp, Homo sapiens
tctgttgtattcagt

SEQ ID NO: 755324 - DNA, 15 bp, Homo sapiens
ctgttgtattcagtg

SEQ ID NO: 755325 - DNA, 15 bp, Homo sapiens
tgttgtattcagtgg

SEQ ID NO: 755326 - DNA, 15 bp, Homo sapiens
gttgtattcagtggg

SEQ ID NO: 755327 - DNA, 15 bp, Homo sapiens
ttgtattcagtggga

SEQ ID NO: 755328 - DNA, 15 bp, Homo sapiens
tgtattcagtgggat

SEQ ID NO: 755329 - DNA, 15 bp, Homo sapiens
gtattcagtgggata

SEQ ID NO: 755330 - DNA, 15 bp, Homo sapiens
tattcagtgggatat

SEQ ID NO: 755331 - DNA, 15 bp, Homo sapiens
attcagtgggatata

SEQ ID NO: 755332 - DNA, 15 bp, Homo sapiens
ttcagtgggatatag

SEQ ID NO: 755333 - DNA, 15 bp, Homo sapiens
tcagtgggatatagc

SEQ ID NO: 755334 - DNA, 15 bp, Homo sapiens
cagtgggatatagcc

SEQ ID NO: 755335 - DNA, 15 bp, Homo sapiens
agtgggatatagcct

SEQ ID NO: 755336 - DNA, 15 bp, Homo sapiens
gtgggatatagccta

SEQ ID NO: 755337 - DNA, 15 bp, Homo sapiens
tgggatatagcctat

SEQ ID NO: 755338 - DNA, 15 bp, Homo sapiens
gggatatagcctatt

SEQ ID NO: 755339 - DNA, 15 bp, Homo sapiens
ggatatagcctattt

SEQ ID NO: 755340 - DNA, 15 bp, Homo sapiens
gatatagcctatttt

SEQ ID NO: 755341 - DNA, 15 bp, Homo sapiens
atatagcctattttt

SEQ ID NO: 755342 - DNA, 15 bp, Homo sapiens
tatagcctattttta

SEQ ID NO: 755343 - DNA, 15 bp, Homo sapiens
atagcctatttttac

SEQ ID NO: 755344 - DNA, 15 bp, Homo sapiens
tagcctatttttact

SEQ ID NO: 755345 - DNA, 15 bp, Homo sapiens
agcctatttttacta

SEQ ID NO: 755346 - DNA, 15 bp, Homo sapiens
gcctatttttactaa

SEQ ID NO: 755347 - DNA, 15 bp, Homo sapiens
cctatttttactaac

SEQ ID NO: 755348 - DNA, 15 bp, Homo sapiens
ctatttttactaaca

SEQ ID NO: 755349 - DNA, 15 bp, Homo sapiens
tatttttactaacat

SEQ ID NO: 755350 - DNA, 15 bp, Homo sapiens
atttttactaacatt

SEQ ID NO: 755351 - DNA, 15 bp, Homo sapiens
tttttactaacatta

SEQ ID NO: 755352 - DNA, 15 bp, Homo sapiens
ttttactaacattat

SEQ ID NO: 755353 - DNA, 15 bp, Homo sapiens
tttactaacattatt

SEQ ID NO: 755354 - DNA, 15 bp, Homo sapiens
ttactaacattattt

SEQ ID NO: 755355 - DNA, 15 bp, Homo sapiens
tactaacattatttt

SEQ ID NO: 755356 - DNA, 15 bp, Homo sapiens
actaacattatttta

SEQ ID NO: 755357 - DNA, 15 bp, Homo sapiens
ctaacattattttaa

SEQ ID NO: 755358 - DNA, 15 bp, Homo sapiens
taacattattttaat

SEQ ID NO: 755359 - DNA, 15 bp, Homo sapiens
aacattattttaata

SEQ ID NO: 755360 - DNA, 15 bp, Homo sapiens
acattattttaatac

SEQ ID NO: 755361 - DNA, 15 bp, Homo sapiens
cattattttaatact

SEQ ID NO: 755362 - DNA, 15 bp, Homo sapiens
attattttaatactc

SEQ ID NO: 755363 - DNA, 15 bp, Homo sapiens
ttattttaatactca

SEQ ID NO: 755364 - DNA, 15 bp, Homo sapiens
tattttaatactcaa

SEQ ID NO: 755365 - DNA, 15 bp, Homo sapiens
attttaatactcaaa

SEQ ID NO: 755366 - DNA, 15 bp, Homo sapiens
ttttaatactcaaat

SEQ ID NO: 755367 - DNA, 15 bp, Homo sapiens
tttaatactcaaatt

SEQ ID NO: 755368 - DNA, 15 bp, Homo sapiens
ttaatactcaaattg

SEQ ID NO: 755369 - DNA, 15 bp, Homo sapiens
taatactcaaattgt

SEQ ID NO: 755370 - DNA, 15 bp, Homo sapiens
aatactcaaattgtc

SEQ ID NO: 755371 - DNA, 15 bp, Homo sapiens
atactcaaattgtcc

SEQ ID NO: 755372 - DNA, 15 bp, Homo sapiens
tactcaaattgtcct

SEQ ID NO: 755373 - DNA, 15 bp, Homo sapiens
actcaaattgtccta

SEQ ID NO: 755374 - DNA, 15 bp, Homo sapiens
ctcaaattgtcctag

SEQ ID NO: 755375 - DNA, 15 bp, Homo sapiens
tcaaattgtcctaga

SEQ ID NO: 755376 - DNA, 15 bp, Homo sapiens
caaattgtcctagat

SEQ ID NO: 755377 - DNA, 15 bp, Homo sapiens
aaattgtcctagatt

SEQ ID NO: 755378 - DNA, 15 bp, Homo sapiens
aattgtcctagattt

SEQ ID NO: 755379 - DNA, 15 bp, Homo sapiens
attgtcctagatttg

SEQ ID NO: 755380 - DNA, 15 bp, Homo sapiens
ttgtcctagatttgg

SEQ ID NO: 755381 - DNA, 15 bp, Homo sapiens
tgtcctagatttggc

SEQ ID NO: 755382 - DNA, 15 bp, Homo sapiens
gtcctagatttggcc

SEQ ID NO: 755383 - DNA, 15 bp, Homo sapiens
tcctagatttggccc

SEQ ID NO: 755384 - DNA, 15 bp, Homo sapiens
cctagatttggccca

SEQ ID NO: 755385 - DNA, 15 bp, Homo sapiens
ctagatttggcccat

SEQ ID NO: 755386 - DNA, 15 bp, Homo sapiens
tagatttggcccatg

SEQ ID NO: 755387 - DNA, 15 bp, Homo sapiens
agatttggcccatgg

SEQ ID NO: 755388 - DNA, 15 bp, Homo sapiens
gatttggcccatggg

SEQ ID NO: 755389 - DNA, 15 bp, Homo sapiens
atttggcccatggga

SEQ ID NO: 755390 - DNA, 15 bp, Homo sapiens
tttggcccatgggag

SEQ ID NO: 755391 - DNA, 15 bp, Homo sapiens
ttggcccatgggagc

SEQ ID NO: 755392 - DNA, 15 bp, Homo sapiens
tggcccatgggagcc

SEQ ID NO: 755393 - DNA, 15 bp, Homo sapiens
ggcccatgggagccc

SEQ ID NO: 755394 - DNA, 15 bp, Homo sapiens
gcccatgggagcccc

SEQ ID NO: 755395 - DNA, 15 bp, Homo sapiens
cccatgggagcccct

SEQ ID NO: 755396 - DNA, 15 bp, Homo sapiens
ccatgggagcccctt

SEQ ID NO: 755397 - DNA, 15 bp, Homo sapiens
catgggagccccttc

SEQ ID NO: 755398 - DNA, 15 bp, Homo sapiens
atgggagccccttca

SEQ ID NO: 755399 - DNA, 15 bp, Homo sapiens
tgggagccccttcaa

SEQ ID NO: 755400 - DNA, 15 bp, Homo sapiens
gggagccccttcaag

SEQ ID NO: 755401 - DNA, 15 bp, Homo sapiens
ggagccccttcaagc

SEQ ID NO: 755402 - DNA, 15 bp, Homo sapiens
gagccccttcaagct

SEQ ID NO: 755403 - DNA, 15 bp, Homo sapiens
agccccttcaagcta

SEQ ID NO: 755404 - DNA, 15 bp, Homo sapiens
gccccttcaagctaa

SEQ ID NO: 755405 - DNA, 15 bp, Homo sapiens
ccccttcaagctaac

SEQ ID NO: 755406 - DNA, 15 bp, Homo sapiens
cccttcaagctaact

SEQ ID NO: 755407 - DNA, 15 bp, Homo sapiens
ccttcaagctaactt

SEQ ID NO: 755408 - DNA, 15 bp, Homo sapiens
cttcaagctaacttc

SEQ ID NO: 755409 - DNA, 15 bp, Homo sapiens
ttcaagctaacttct

SEQ ID NO: 755410 - DNA, 15 bp, Homo sapiens
tcaagctaacttctc

SEQ ID NO: 755411 - DNA, 15 bp, Homo sapiens
caagctaacttctct

SEQ ID NO: 755412 - DNA, 15 bp, Homo sapiens
aagctaacttctcta

SEQ ID NO: 755413 - DNA, 15 bp, Homo sapiens
agctaacttctctat

SEQ ID NO: 755414 - DNA, 15 bp, Homo sapiens
gctaacttctctatc

SEQ ID NO: 755415 - DNA, 15 bp, Homo sapiens
ctaacttctctatcc

SEQ ID NO: 755416 - DNA, 15 bp, Homo sapiens
taacttctctatcct

SEQ ID NO: 755417 - DNA, 15 bp, Homo sapiens
aacttctctatcctt

SEQ ID NO: 755418 - DNA, 15 bp, Homo sapiens
acttctctatccttt

SEQ ID NO: 755419 - DNA, 15 bp, Homo sapiens
cttctctatcctttt

SEQ ID NO: 755420 - DNA, 15 bp, Homo sapiens
ttctctatccttttg

SEQ ID NO: 755421 - DNA, 15 bp, Homo sapiens
tctctatccttttga

SEQ ID NO: 755422 - DNA, 15 bp, Homo sapiens
ctctatccttttgac

SEQ ID NO: 755423 - DNA, 15 bp, Homo sapiens
tctatccttttgaca

SEQ ID NO: 755424 - DNA, 15 bp, Homo sapiens
ctatccttttgacat

SEQ ID NO: 755425 - DNA, 15 bp, Homo sapiens
tatccttttgacatg

SEQ ID NO: 755426 - DNA, 15 bp, Homo sapiens
atccttttgacatgt

SEQ ID NO: 755427 - DNA, 15 bp, Homo sapiens
tccttttgacatgtc

SEQ ID NO: 755428 - DNA, 15 bp, Homo sapiens
ccttttgacatgtcc

SEQ ID NO: 755429 - DNA, 15 bp, Homo sapiens
cttttgacatgtccc

SEQ ID NO: 755430 - DNA, 15 bp, Homo sapiens
ttttgacatgtccct

SEQ ID NO: 755431 - DNA, 15 bp, Homo sapiens
tttgacatgtcccta

SEQ ID NO: 755432 - DNA, 15 bp, Homo sapiens
ttgacatgtccctat

SEQ ID NO: 755433 - DNA, 15 bp, Homo sapiens
tgacatgtccctatt

SEQ ID NO: 755434 - DNA, 15 bp, Homo sapiens
gacatgtccctatta

SEQ ID NO: 755435 - DNA, 15 bp, Homo sapiens
acatgtccctattat

SEQ ID NO: 755436 - DNA, 15 bp, Homo sapiens
catgtccctattatt

SEQ ID NO: 755437 - DNA, 15 bp, Homo sapiens
atgtccctattattc

SEQ ID NO: 755438 - DNA, 15 bp, Homo sapiens
tgtccctattattct

SEQ ID NO: 755439 - DNA, 15 bp, Homo sapiens
gtccctattattctt

SEQ ID NO: 755440 - DNA, 15 bp, Homo sapiens
tccctattattcttg

SEQ ID NO: 755441 - DNA, 15 bp, Homo sapiens
ccctattattcttgg

SEQ ID NO: 755442 - DNA, 15 bp, Homo sapiens
cctattattcttgga

SEQ ID NO: 755443 - DNA, 15 bp, Homo sapiens
ctattattcttggag

SEQ ID NO: 755444 - DNA, 15 bp, Homo sapiens
tattattcttggagg

SEQ ID NO: 755445 - DNA, 15 bp, Homo sapiens
attattcttggagga

SEQ ID NO: 755446 - DNA, 15 bp, Homo sapiens
ttattcttggaggac

SEQ ID NO: 755447 - DNA, 15 bp, Homo sapiens
tattcttggaggact

SEQ ID NO: 755448 - DNA, 15 bp, Homo sapiens
attcttggaggactt

SEQ ID NO: 755449 - DNA, 15 bp, Homo sapiens
ttcttggaggacttg

SEQ ID NO: 755450 - DNA, 15 bp, Homo sapiens
tcttggaggacttga

SEQ ID NO: 755451 - DNA, 15 bp, Homo sapiens
cttggaggacttgat

SEQ ID NO: 755452 - DNA, 15 bp, Homo sapiens
ttggaggacttgatt

SEQ ID NO: 755453 - DNA, 15 bp, Homo sapiens
tggaggacttgatta

SEQ ID NO: 755454 - DNA, 15 bp, Homo sapiens
ggaggacttgattac

SEQ ID NO: 755455 - DNA, 15 bp, Homo sapiens
gaggacttgattact

SEQ ID NO: 755456 - DNA, 15 bp, Homo sapiens
aggacttgattactt

SEQ ID NO: 755457 - DNA, 15 bp, Homo sapiens
ggacttgattacttt

SEQ ID NO: 755458 - DNA, 15 bp, Homo sapiens
gacttgattactttc

SEQ ID NO: 755459 - DNA, 15 bp, Homo sapiens
acttgattactttct

SEQ ID NO: 755460 - DNA, 15 bp, Homo sapiens
cttgattactttcta

SEQ ID NO: 755461 - DNA, 15 bp, Homo sapiens
ttgattactttctaa

SEQ ID NO: 755462 - DNA, 15 bp, Homo sapiens
tgattactttctaag

SEQ ID NO: 755463 - DNA, 15 bp, Homo sapiens
gattactttctaaga

SEQ ID NO: 755464 - DNA, 15 bp, Homo sapiens
attactttctaagat

SEQ ID NO: 755465 - DNA, 15 bp, Homo sapiens
ttactttctaagatg

SEQ ID NO: 755466 - DNA, 15 bp, Homo sapiens
tactttctaagatgt

SEQ ID NO: 755467 - DNA, 15 bp, Homo sapiens
actttctaagatgtc

SEQ ID NO: 755468 - DNA, 15 bp, Homo sapiens
ctttctaagatgtcc

SEQ ID NO: 755469 - DNA, 15 bp, Homo sapiens
tttctaagatgtccc

SEQ ID NO: 755470 - DNA, 15 bp, Homo sapiens
ttctaagatgtccca

SEQ ID NO: 755471 - DNA, 15 bp, Homo sapiens
tctaagatgtcccag

SEQ ID NO: 755472 - DNA, 15 bp, Homo sapiens
ctaagatgtcccagt

SEQ ID NO: 755473 - DNA, 15 bp, Homo sapiens
taagatgtcccagtc

SEQ ID NO: 755474 - DNA, 15 bp, Homo sapiens
aagatgtcccagtct

SEQ ID NO: 755475 - DNA, 15 bp, Homo sapiens
agatgtcccagtctc

SEQ ID NO: 755476 - DNA, 15 bp, Homo sapiens
gatgtcccagtctca

SEQ ID NO: 755477 - DNA, 15 bp, Homo sapiens
atgtcccagtctcat

SEQ ID NO: 755478 - DNA, 15 bp, Homo sapiens
tgtcccagtctcatc

SEQ ID NO: 755479 - DNA, 15 bp, Homo sapiens
gtcccagtctcatct

SEQ ID NO: 755480 - DNA, 15 bp, Homo sapiens
tcccagtctcatctt

SEQ ID NO: 755481 - DNA, 15 bp, Homo sapiens
cccagtctcatcttg

SEQ ID NO: 755482 - DNA, 15 bp, Homo sapiens
ccagtctcatcttgc

SEQ ID NO: 755483 - DNA, 15 bp, Homo sapiens
cagtctcatcttgca

SEQ ID NO: 755484 - DNA, 15 bp, Homo sapiens
agtctcatcttgcac

SEQ ID NO: 755485 - DNA, 15 bp, Homo sapiens
gtctcatcttgcact

SEQ ID NO: 755486 - DNA, 15 bp, Homo sapiens
tctcatcttgcactt

SEQ ID NO: 755487 - DNA, 15 bp, Homo sapiens
ctcatcttgcacttt

SEQ ID NO: 755488 - DNA, 15 bp, Homo sapiens
tcatcttgcactttt

SEQ ID NO: 755489 - DNA, 15 bp, Homo sapiens
catcttgcacttttc

SEQ ID NO: 755490 - DNA, 15 bp, Homo sapiens
atcttgcacttttcc

SEQ ID NO: 755491 - DNA, 15 bp, Homo sapiens
tcttgcacttttcct

SEQ ID NO: 755492 - DNA, 15 bp, Homo sapiens
cttgcacttttcctg

SEQ ID NO: 755493 - DNA, 15 bp, Homo sapiens
ttgcacttttcctgt

SEQ ID NO: 755494 - DNA, 15 bp, Homo sapiens
tgcacttttcctgtt

SEQ ID NO: 755495 - DNA, 15 bp, Homo sapiens
gcacttttcctgttc

SEQ ID NO: 755496 - DNA, 15 bp, Homo sapiens
cacttttcctgttcc

SEQ ID NO: 755497 - DNA, 15 bp, Homo sapiens
acttttcctgttcca

SEQ ID NO: 755498 - DNA, 15 bp, Homo sapiens
cttttcctgttccat

SEQ ID NO: 755499 - DNA, 15 bp, Homo sapiens
ttttcctgttccatt

SEQ ID NO: 755500 - DNA, 15 bp, Homo sapiens
tttcctgttccattc

SEQ ID NO: 755501 - DNA, 15 bp, Homo sapiens
ttcctgttccattct

SEQ ID NO: 755502 - DNA, 15 bp, Homo sapiens
tcctgttccattctt

SEQ ID NO: 755503 - DNA, 15 bp, Homo sapiens
cctgttccattcttg

SEQ ID NO: 755504 - DNA, 15 bp, Homo sapiens
ctgttccattcttgg

SEQ ID NO: 755505 - DNA, 15 bp, Homo sapiens
tgttccattcttgga

SEQ ID NO: 755506 - DNA, 15 bp, Homo sapiens
gttccattcttggaa

SEQ ID NO: 755507 - DNA, 15 bp, Homo sapiens
ttccattcttggaat

SEQ ID NO: 755508 - DNA, 15 bp, Homo sapiens
tccattcttggaatc

SEQ ID NO: 755509 - DNA, 15 bp, Homo sapiens
ccattcttggaatca

SEQ ID NO: 755510 - DNA, 15 bp, Homo sapiens
cattcttggaatcag

SEQ ID NO: 755511 - DNA, 15 bp, Homo sapiens
attcttggaatcagc

SEQ ID NO: 755512 - DNA, 15 bp, Homo sapiens
ttcttggaatcagca

SEQ ID NO: 755513 - DNA, 15 bp, Homo sapiens
tcttggaatcagcag

SEQ ID NO: 755514 - DNA, 15 bp, Homo sapiens
cttggaatcagcagt

SEQ ID NO: 755515 - DNA, 15 bp, Homo sapiens
ttggaatcagcagtt

SEQ ID NO: 755516 - DNA, 15 bp, Homo sapiens
tggaatcagcagttt

SEQ ID NO: 755517 - DNA, 15 bp, Homo sapiens
ggaatcagcagtttc

SEQ ID NO: 755518 - DNA, 15 bp, Homo sapiens
gaatcagcagtttct

SEQ ID NO: 755519 - DNA, 15 bp, Homo sapiens
aatcagcagtttctc

SEQ ID NO: 755520 - DNA, 15 bp, Homo sapiens
atcagcagtttctct

SEQ ID NO: 755521 - DNA, 15 bp, Homo sapiens
tcagcagtttctctg

SEQ ID NO: 755522 - DNA, 15 bp, Homo sapiens
cagcagtttctctga

SEQ ID NO: 755523 - DNA, 15 bp, Homo sapiens
agcagtttctctgag

SEQ ID NO: 755524 - DNA, 15 bp, Homo sapiens
gcagtttctctgagg

SEQ ID NO: 755525 - DNA, 15 bp, Homo sapiens
cagtttctctgagga

SEQ ID NO: 755526 - DNA, 15 bp, Homo sapiens
agtttctctgaggat

SEQ ID NO: 755527 - DNA, 15 bp, Homo sapiens
gtttctctgaggatc

SEQ ID NO: 755528 - DNA, 15 bp, Homo sapiens
tttctctgaggatcc

SEQ ID NO: 755529 - DNA, 15 bp, Homo sapiens
ttctctgaggatccc

SEQ ID NO: 755530 - DNA, 15 bp, Homo sapiens
tctctgaggatccct

SEQ ID NO: 755531 - DNA, 15 bp, Homo sapiens
ctctgaggatccctt

SEQ ID NO: 755532 - DNA, 15 bp, Homo sapiens
tctgaggatcccttt

SEQ ID NO: 755533 - DNA, 15 bp, Homo sapiens
ctgaggatccctttt

SEQ ID NO: 755534 - DNA, 15 bp, Homo sapiens
tgaggatcccttttt

SEQ ID NO: 755535 - DNA, 15 bp, Homo sapiens
gaggatccctttttc

SEQ ID NO: 755536 - DNA, 15 bp, Homo sapiens
aggatccctttttca

SEQ ID NO: 755537 - DNA, 15 bp, Homo sapiens
ggatccctttttcat

SEQ ID NO: 755538 - DNA, 15 bp, Homo sapiens
gatccctttttcatt

SEQ ID NO: 755539 - DNA, 15 bp, Homo sapiens
atccctttttcattt

SEQ ID NO: 755540 - DNA, 15 bp, Homo sapiens
tccctttttcatttt

SEQ ID NO: 755541 - DNA, 15 bp, Homo sapiens
ccctttttcatttta

SEQ ID NO: 755542 - DNA, 15 bp, Homo sapiens
cctttttcattttag

SEQ ID NO: 755543 - DNA, 15 bp, Homo sapiens
ctttttcattttagt

SEQ ID NO: 755544 - DNA, 15 bp, Homo sapiens
tttttcattttagtg

SEQ ID NO: 755545 - DNA, 15 bp, Homo sapiens
ttttcattttagtgg

SEQ ID NO: 755546 - DNA, 15 bp, Homo sapiens
tttcattttagtgga

SEQ ID NO: 755547 - DNA, 15 bp, Homo sapiens
ttcattttagtggag

SEQ ID NO: 755548 - DNA, 15 bp, Homo sapiens
tcattttagtggaga

SEQ ID NO: 755549 - DNA, 15 bp, Homo sapiens
cattttagtggagaa

SEQ ID NO: 755550 - DNA, 15 bp, Homo sapiens
attttagtggagaaa

SEQ ID NO: 755551 - DNA, 15 bp, Homo sapiens
ttttagtggagaaaa

SEQ ID NO: 755552 - DNA, 15 bp, Homo sapiens
tttagtggagaaaaa

SEQ ID NO: 755553 - DNA, 15 bp, Homo sapiens
ttagtggagaaaaat

SEQ ID NO: 755554 - DNA, 15 bp, Homo sapiens
tagtggagaaaaata

SEQ ID NO: 755555 - DNA, 15 bp, Homo sapiens
agtggagaaaaatat

SEQ ID NO: 755556 - DNA, 15 bp, Homo sapiens
gtggagaaaaatatt

SEQ ID NO: 755557 - DNA, 15 bp, Homo sapiens
tggagaaaaatattt

SEQ ID NO: 755558 - DNA, 15 bp, Homo sapiens
ggagaaaaatattta

SEQ ID NO: 755559 - DNA, 15 bp, Homo sapiens
gagaaaaatatttag

SEQ ID NO: 755560 - DNA, 15 bp, Homo sapiens
agaaaaatatttaga

SEQ ID NO: 755561 - DNA, 15 bp, Homo sapiens
gaaaaatatttagaa

SEQ ID NO: 755562 - DNA, 15 bp, Homo sapiens
aaaaatatttagaag

SEQ ID NO: 755563 - DNA, 15 bp, Homo sapiens
aaaatatttagaagc

SEQ ID NO: 755564 - DNA, 15 bp, Homo sapiens
aaatatttagaagcc

SEQ ID NO: 755565 - DNA, 15 bp, Homo sapiens
aatatttagaagcca

SEQ ID NO: 755566 - DNA, 15 bp, Homo sapiens
atatttagaagccaa

SEQ ID NO: 755567 - DNA, 15 bp, Homo sapiens
tatttagaagccaag

SEQ ID NO: 755568 - DNA, 15 bp, Homo sapiens
atttagaagccaaga

SEQ ID NO: 755569 - DNA, 15 bp, Homo sapiens
tttagaagccaagat

SEQ ID NO: 755570 - DNA, 15 bp, Homo sapiens
ttagaagccaagatc

SEQ ID NO: 755571 - DNA, 15 bp, Homo sapiens
tagaagccaagatct

SEQ ID NO: 755572 - DNA, 15 bp, Homo sapiens
agaagccaagatctg

SEQ ID NO: 755573 - DNA, 15 bp, Homo sapiens
gaagccaagatctgg

SEQ ID NO: 755574 - DNA, 15 bp, Homo sapiens
aagccaagatctggg

SEQ ID NO: 755575 - DNA, 15 bp, Homo sapiens
agccaagatctgggc

SEQ ID NO: 755576 - DNA, 15 bp, Homo sapiens
gccaagatctgggca

SEQ ID NO: 755577 - DNA, 15 bp, Homo sapiens
ccaagatctgggcac

SEQ ID NO: 755578 - DNA, 15 bp, Homo sapiens
caagatctgggcaca

SEQ ID NO: 755579 - DNA, 15 bp, Homo sapiens
aagatctgggcacaa

SEQ ID NO: 755580 - DNA, 15 bp, Homo sapiens
agatctgggcacaag

SEQ ID NO: 755581 - DNA, 15 bp, Homo sapiens
gatctgggcacaagg

SEQ ID NO: 755582 - DNA, 15 bp, Homo sapiens
atctgggcacaaggt

SEQ ID NO: 755583 - DNA, 15 bp, Homo sapiens
tctgggcacaaggta

SEQ ID NO: 755584 - DNA, 15 bp, Homo sapiens
ctgggcacaaggtat

SEQ ID NO: 755585 - DNA, 15 bp, Homo sapiens
tgggcacaaggtata

SEQ ID NO: 755586 - DNA, 15 bp, Homo sapiens
gggcacaaggtatac

SEQ ID NO: 755587 - DNA, 15 bp, Homo sapiens
ggcacaaggtatact

SEQ ID NO: 755588 - DNA, 15 bp, Homo sapiens
gcacaaggtatactt

SEQ ID NO: 755589 - DNA, 15 bp, Homo sapiens
cacaaggtatacttg

SEQ ID NO: 755590 - DNA, 15 bp, Homo sapiens
acaaggtatacttgt

SEQ ID NO: 755591 - DNA, 15 bp, Homo sapiens
caaggtatacttgtt

SEQ ID NO: 755592 - DNA, 15 bp, Homo sapiens
aaggtatacttgttg

SEQ ID NO: 755593 - DNA, 15 bp, Homo sapiens
aggtatacttgttgc

SEQ ID NO: 755594 - DNA, 15 bp, Homo sapiens
ggtatacttgttgcc

SEQ ID NO: 755595 - DNA, 15 bp, Homo sapiens
gtatacttgttgcca

SEQ ID NO: 755596 - DNA, 15 bp, Homo sapiens
tatacttgttgccat

SEQ ID NO: 755597 - DNA, 15 bp, Homo sapiens
atacttgttgccatt

SEQ ID NO: 755598 - DNA, 15 bp, Homo sapiens
tacttgttgccattg

SEQ ID NO: 755599 - DNA, 15 bp, Homo sapiens
acttgttgccattga

SEQ ID NO: 755600 - DNA, 15 bp, Homo sapiens
cttgttgccattgag

SEQ ID NO: 755601 - DNA, 15 bp, Homo sapiens
ttgttgccattgagg

SEQ ID NO: 755602 - DNA, 15 bp, Homo sapiens
tgttgccattgagga

SEQ ID NO: 755603 - DNA, 15 bp, Homo sapiens
gttgccattgaggag

SEQ ID NO: 755604 - DNA, 15 bp, Homo sapiens
ttgccattgaggagt

SEQ ID NO: 755605 - DNA, 15 bp, Homo sapiens
tgccattgaggagtt

SEQ ID NO: 755606 - DNA, 15 bp, Homo sapiens
gccattgaggagttg

SEQ ID NO: 755607 - DNA, 15 bp, Homo sapiens
ccattgaggagttgc

SEQ ID NO: 755608 - DNA, 15 bp, Homo sapiens
cattgaggagttgct

SEQ ID NO: 755609 - DNA, 15 bp, Homo sapiens
attgaggagttgctg

SEQ ID NO: 755610 - DNA, 15 bp, Homo sapiens
ttgaggagttgctgt

SEQ ID NO: 755611 - DNA, 15 bp, Homo sapiens
tgaggagttgctgtt

SEQ ID NO: 755612 - DNA, 15 bp, Homo sapiens
gaggagttgctgttc

SEQ ID NO: 755613 - DNA, 15 bp, Homo sapiens
aggagttgctgttcc

SEQ ID NO: 755614 - DNA, 15 bp, Homo sapiens
ggagttgctgttccc

SEQ ID NO: 755615 - DNA, 15 bp, Homo sapiens
gagttgctgttccca

SEQ ID NO: 755616 - DNA, 15 bp, Homo sapiens
agttgctgttcccag

SEQ ID NO: 755617 - DNA, 15 bp, Homo sapiens
gttgctgttcccagt

SEQ ID NO: 755618 - DNA, 15 bp, Homo sapiens
ttgctgttcccagtc

SEQ ID NO: 755619 - DNA, 15 bp, Homo sapiens
tgctgttcccagtcc

SEQ ID NO: 755620 - DNA, 15 bp, Homo sapiens
gctgttcccagtcct

SEQ ID NO: 755621 - DNA, 15 bp, Homo sapiens
ctgttcccagtcctc

SEQ ID NO: 755622 - DNA, 15 bp, Homo sapiens
tgttcccagtcctct

SEQ ID NO: 755623 - DNA, 15 bp, Homo sapiens
gttcccagtcctctc

SEQ ID NO: 755624 - DNA, 15 bp, Homo sapiens
ttcccagtcctctca

SEQ ID NO: 755625 - DNA, 15 bp, Homo sapiens
tcccagtcctctcag

SEQ ID NO: 755626 - DNA, 15 bp, Homo sapiens
cccagtcctctcagg

SEQ ID NO: 755627 - DNA, 15 bp, Homo sapiens
ccagtcctctcaggg

SEQ ID NO: 755628 - DNA, 15 bp, Homo sapiens
cagtcctctcagggg

SEQ ID NO: 755629 - DNA, 15 bp, Homo sapiens
agtcctctcagggga

SEQ ID NO: 755630 - DNA, 15 bp, Homo sapiens
gtcctctcaggggag

SEQ ID NO: 755631 - DNA, 15 bp, Homo sapiens
tcctctcaggggaga

SEQ ID NO: 755632 - DNA, 15 bp, Homo sapiens
cctctcaggggagag

SEQ ID NO: 755633 - DNA, 15 bp, Homo sapiens
ctctcaggggagagt

SEQ ID NO: 755634 - DNA, 15 bp, Homo sapiens
tctcaggggagagta

SEQ ID NO: 755635 - DNA, 15 bp, Homo sapiens
ctcaggggagagtaa

SEQ ID NO: 755636 - DNA, 15 bp, Homo sapiens
tcaggggagagtaag

SEQ ID NO: 755637 - DNA, 15 bp, Homo sapiens
caggggagagtaagg

SEQ ID NO: 755638 - DNA, 15 bp, Homo sapiens
aggggagagtaaggg

SEQ ID NO: 755639 - DNA, 15 bp, Homo sapiens
ggggagagtaaggga

SEQ ID NO: 755640 - DNA, 15 bp, Homo sapiens
gggagagtaagggaa

SEQ ID NO: 755641 - DNA, 15 bp, Homo sapiens
ggagagtaagggaat

SEQ ID NO: 755642 - DNA, 15 bp, Homo sapiens
gagagtaagggaata

SEQ ID NO: 755643 - DNA, 15 bp, Homo sapiens
agagtaagggaatat

SEQ ID NO: 755644 - DNA, 15 bp, Homo sapiens
gagtaagggaatata

SEQ ID NO: 755645 - DNA, 15 bp, Homo sapiens
agtaagggaatatat

SEQ ID NO: 755646 - DNA, 15 bp, Homo sapiens
gtaagggaatatatg

SEQ ID NO: 755647 - DNA, 15 bp, Homo sapiens
taagggaatatatgt

SEQ ID NO: 755648 - DNA, 15 bp, Homo sapiens
aagggaatatatgta

SEQ ID NO: 755649 - DNA, 15 bp, Homo sapiens
agggaatatatgtat

SEQ ID NO: 755650 - DNA, 15 bp, Homo sapiens
gggaatatatgtata

SEQ ID NO: 755651 - DNA, 15 bp, Homo sapiens
ggaatatatgtatat

SEQ ID NO: 755652 - DNA, 15 bp, Homo sapiens
gaatatatgtatata

SEQ ID NO: 755653 - DNA, 15 bp, Homo sapiens
aatatatgtatatat

SEQ ID NO: 755654 - DNA, 15 bp, Homo sapiens
atatatgtatatatt

SEQ ID NO: 755655 - DNA, 15 bp, Homo sapiens
tatatgtatatattc

SEQ ID NO: 755656 - DNA, 15 bp, Homo sapiens
atatgtatatattca

SEQ ID NO: 755657 - DNA, 15 bp, Homo sapiens
tatgtatatattcat

SEQ ID NO: 755658 - DNA, 15 bp, Homo sapiens
atgtatatattcata

SEQ ID NO: 755659 - DNA, 15 bp, Homo sapiens
tgtatatattcatat

SEQ ID NO: 755660 - DNA, 15 bp, Homo sapiens
gtatatattcatata

SEQ ID NO: 755661 - DNA, 15 bp, Homo sapiens
tatatattcatatat

SEQ ID NO: 755662 - DNA, 15 bp, Homo sapiens
atatattcatatata

SEQ ID NO: 755663 - DNA, 15 bp, Homo sapiens
tatattcatatatag

SEQ ID NO: 755664 - DNA, 15 bp, Homo sapiens
atattcatatataga

SEQ ID NO: 755665 - DNA, 15 bp, Homo sapiens
tattcatatatagat

SEQ ID NO: 755666 - DNA, 15 bp, Homo sapiens
attcatatatagatc

SEQ ID NO: 755667 - DNA, 15 bp, Homo sapiens
ttcatatatagatct

SEQ ID NO: 755668 - DNA, 15 bp, Homo sapiens
tcatatatagatcta

SEQ ID NO: 755669 - DNA, 15 bp, Homo sapiens
catatatagatctat

SEQ ID NO: 755670 - DNA, 15 bp, Homo sapiens
atatatagatctatg

SEQ ID NO: 755671 - DNA, 15 bp, Homo sapiens
tatatagatctatgc

SEQ ID NO: 755672 - DNA, 15 bp, Homo sapiens
atatagatctatgca

SEQ ID NO: 755673 - DNA, 15 bp, Homo sapiens
tatagatctatgcac

SEQ ID NO: 755674 - DNA, 15 bp, Homo sapiens
atagatctatgcact

SEQ ID NO: 755675 - DNA, 15 bp, Homo sapiens
tagatctatgcactt

SEQ ID NO: 755676 - DNA, 15 bp, Homo sapiens
agatctatgcacttt

SEQ ID NO: 755677 - DNA, 15 bp, Homo sapiens
gatctatgcactttt

SEQ ID NO: 755678 - DNA, 15 bp, Homo sapiens
atctatgcactttta

SEQ ID NO: 755679 - DNA, 15 bp, Homo sapiens
tctatgcacttttac

SEQ ID NO: 755680 - DNA, 15 bp, Homo sapiens
ctatgcacttttaca

SEQ ID NO: 755681 - DNA, 15 bp, Homo sapiens
tatgcacttttacat

SEQ ID NO: 755682 - DNA, 15 bp, Homo sapiens
atgcacttttacatg

SEQ ID NO: 755683 - DNA, 15 bp, Homo sapiens
tgcacttttacatgt

SEQ ID NO: 755684 - DNA, 15 bp, Homo sapiens
gcacttttacatgta

SEQ ID NO: 755685 - DNA, 15 bp, Homo sapiens
cacttttacatgtat

SEQ ID NO: 755686 - DNA, 15 bp, Homo sapiens
acttttacatgtata

SEQ ID NO: 755687 - DNA, 15 bp, Homo sapiens
cttttacatgtatat

SEQ ID NO: 755688 - DNA, 15 bp, Homo sapiens
ttttacatgtatata

SEQ ID NO: 755689 - DNA, 15 bp, Homo sapiens
tttacatgtatatat

SEQ ID NO: 755690 - DNA, 15 bp, Homo sapiens
ttacatgtatatata

SEQ ID NO: 755691 - DNA, 15 bp, Homo sapiens
tacatgtatatatat

SEQ ID NO: 755692 - DNA, 15 bp, Homo sapiens
acatgtatatatata

SEQ ID NO: 755693 - DNA, 15 bp, Homo sapiens
catgtatatatatat

SEQ ID NO: 755694 - DNA, 15 bp, Homo sapiens
atgtatatatatatt

SEQ ID NO: 755695 - DNA, 15 bp, Homo sapiens
tgtatatatatattt

SEQ ID NO: 755696 - DNA, 15 bp, Homo sapiens
gtatatatatatttt

SEQ ID NO: 755697 - DNA, 15 bp, Homo sapiens
tatatatatattttt

SEQ ID NO: 755698 - DNA, 15 bp, Homo sapiens
atatatatatttttt

SEQ ID NO: 755699 - DNA, 15 bp, Homo sapiens
tatatatattttttg

SEQ ID NO: 755700 - DNA, 15 bp, Homo sapiens
atatatattttttgt

SEQ ID NO: 755701 - DNA, 15 bp, Homo sapiens
tatatattttttgtt

SEQ ID NO: 755702 - DNA, 15 bp, Homo sapiens
atatattttttgttt

SEQ ID NO: 755703 - DNA, 15 bp, Homo sapiens
tatattttttgtttt

SEQ ID NO: 755704 - DNA, 15 bp, Homo sapiens
atattttttgttttt

SEQ ID NO: 755705 - DNA, 15 bp, Homo sapiens
tattttttgtttttg

SEQ ID NO: 755706 - DNA, 15 bp, Homo sapiens
attttttgtttttga

SEQ ID NO: 755707 - DNA, 15 bp, Homo sapiens
ttttttgtttttgag

SEQ ID NO: 755708 - DNA, 15 bp, Homo sapiens
tttttgtttttgaga

SEQ ID NO: 755709 - DNA, 15 bp, Homo sapiens
ttttgtttttgagat

SEQ ID NO: 755710 - DNA, 15 bp, Homo sapiens
tttgtttttgagatg

SEQ ID NO: 755711 - DNA, 15 bp, Homo sapiens
ttgtttttgagatgg

SEQ ID NO: 755712 - DNA, 15 bp, Homo sapiens
tgtttttgagatgga

SEQ ID NO: 755713 - DNA, 15 bp, Homo sapiens
gtttttgagatggag

SEQ ID NO: 755714 - DNA, 15 bp, Homo sapiens
tttttgagatggagt

SEQ ID NO: 755715 - DNA, 15 bp, Homo sapiens
ttttgagatggagtt

SEQ ID NO: 755716 - DNA, 15 bp, Homo sapiens
tttgagatggagttt

SEQ ID NO: 755717 - DNA, 15 bp, Homo sapiens
ttgagatggagtttc

SEQ ID NO: 755718 - DNA, 15 bp, Homo sapiens
tgagatggagtttca

SEQ ID NO: 755719 - DNA, 15 bp, Homo sapiens
gagatggagtttcac

SEQ ID NO: 755720 - DNA, 15 bp, Homo sapiens
agatggagtttcact

SEQ ID NO: 755721 - DNA, 15 bp, Homo sapiens
gatggagtttcactc

SEQ ID NO: 755722 - DNA, 15 bp, Homo sapiens
atggagtttcactct

SEQ ID NO: 755723 - DNA, 15 bp, Homo sapiens
tggagtttcactctt

SEQ ID NO: 755724 - DNA, 15 bp, Homo sapiens
ggagtttcactcttg

SEQ ID NO: 755725 - DNA, 15 bp, Homo sapiens
gagtttcactcttgt

SEQ ID NO: 755726 - DNA, 15 bp, Homo sapiens
agtttcactcttgtt

SEQ ID NO: 755727 - DNA, 15 bp, Homo sapiens
gtttcactcttgttg

SEQ ID NO: 755728 - DNA, 15 bp, Homo sapiens
tttcactcttgttgc

SEQ ID NO: 755729 - DNA, 15 bp, Homo sapiens
ttcactcttgttgcc

SEQ ID NO: 755730 - DNA, 15 bp, Homo sapiens
tcactcttgttgccc

SEQ ID NO: 755731 - DNA, 15 bp, Homo sapiens
cactcttgttgccca

SEQ ID NO: 755732 - DNA, 15 bp, Homo sapiens
actcttgttgcccag

SEQ ID NO: 755733 - DNA, 15 bp, Homo sapiens
ctcttgttgcccagg

SEQ ID NO: 755734 - DNA, 15 bp, Homo sapiens
tcttgttgcccaggc

SEQ ID NO: 755735 - DNA, 15 bp, Homo sapiens
cttgttgcccaggct

SEQ ID NO: 755736 - DNA, 15 bp, Homo sapiens
ttgttgcccaggctg

SEQ ID NO: 755737 - DNA, 15 bp, Homo sapiens
agtgcaatggtgcag

SEQ ID NO: 755738 - DNA, 15 bp, Homo sapiens
gtgcaatggtgcagt

SEQ ID NO: 755739 - DNA, 15 bp, Homo sapiens
tgcaatggtgcagtc

SEQ ID NO: 755740 - DNA, 15 bp, Homo sapiens
gcaatggtgcagtct

SEQ ID NO: 755741 - DNA, 15 bp, Homo sapiens
caatggtgcagtctc

SEQ ID NO: 755742 - DNA, 15 bp, Homo sapiens
aatggtgcagtctca

SEQ ID NO: 755743 - DNA, 15 bp, Homo sapiens
atggtgcagtctcag

SEQ ID NO: 755744 - DNA, 15 bp, Homo sapiens
tggtgcagtctcagc

SEQ ID NO: 755745 - DNA, 15 bp, Homo sapiens
ggtgcagtctcagct

SEQ ID NO: 755746 - DNA, 15 bp, Homo sapiens
gtgcagtctcagctc

SEQ ID NO: 755747 - DNA, 15 bp, Homo sapiens
tgcagtctcagctca

SEQ ID NO: 755748 - DNA, 15 bp, Homo sapiens
gcagtctcagctcac

SEQ ID NO: 755749 - DNA, 15 bp, Homo sapiens
cagtctcagctcact

SEQ ID NO: 755750 - DNA, 15 bp, Homo sapiens
agtctcagctcactg

SEQ ID NO: 755751 - DNA, 15 bp, Homo sapiens
gtctcagctcactgc

SEQ ID NO: 755752 - DNA, 15 bp, Homo sapiens
tctcagctcactgca

SEQ ID NO: 755753 - DNA, 15 bp, Homo sapiens
ctcagctcactgcaa

SEQ ID NO: 755754 - DNA, 15 bp, Homo sapiens
tcagctcactgcaac

SEQ ID NO: 755755 - DNA, 15 bp, Homo sapiens
cagctcactgcaacc

SEQ ID NO: 755756 - DNA, 15 bp, Homo sapiens
agctcactgcaacct

SEQ ID NO: 755757 - DNA, 15 bp, Homo sapiens
ttcaagcgattctcc

SEQ ID NO: 755758 - DNA, 15 bp, Homo sapiens
tcaagcgattctcct

SEQ ID NO: 755759 - DNA, 15 bp, Homo sapiens
caagcgattctcctg

SEQ ID NO: 755760 - DNA, 15 bp, Homo sapiens
aagcgattctcctgc

SEQ ID NO: 755761 - DNA, 15 bp, Homo sapiens
agcgattctcctgcc

SEQ ID NO: 755762 - DNA, 15 bp, Homo sapiens
gcgattctcctgcct

SEQ ID NO: 755763 - DNA, 15 bp, Homo sapiens
cgattctcctgcctg

SEQ ID NO: 755764 - DNA, 15 bp, Homo sapiens
gattctcctgcctga

SEQ ID NO: 755765 - DNA, 15 bp, Homo sapiens
attctcctgcctgag

SEQ ID NO: 755766 - DNA, 15 bp, Homo sapiens
ttctcctgcctgagc

SEQ ID NO: 755767 - DNA, 15 bp, Homo sapiens
tctcctgcctgagcc

SEQ ID NO: 755768 - DNA, 15 bp, Homo sapiens
ctcctgcctgagcct

SEQ ID NO: 755769 - DNA, 15 bp, Homo sapiens
tcctgcctgagcctc

SEQ ID NO: 755770 - DNA, 15 bp, Homo sapiens
cctgcctgagcctcc

SEQ ID NO: 755771 - DNA, 15 bp, Homo sapiens
ctgcctgagcctccc

SEQ ID NO: 755772 - DNA, 15 bp, Homo sapiens
tgcctgagcctccca

SEQ ID NO: 755773 - DNA, 15 bp, Homo sapiens
gcctgagcctcccaa

SEQ ID NO: 755774 - DNA, 15 bp, Homo sapiens
cctgagcctcccaag

SEQ ID NO: 755775 - DNA, 15 bp, Homo sapiens
ctgagcctcccaagt

SEQ ID NO: 755776 - DNA, 15 bp, Homo sapiens
tgagcctcccaagta

SEQ ID NO: 755777 - DNA, 15 bp, Homo sapiens
gagcctcccaagtag

SEQ ID NO: 755778 - DNA, 15 bp, Homo sapiens
gggattacaggcata

SEQ ID NO: 755779 - DNA, 15 bp, Homo sapiens
ggattacaggcatat

SEQ ID NO: 755780 - DNA, 15 bp, Homo sapiens
gattacaggcatatg

SEQ ID NO: 755781 - DNA, 15 bp, Homo sapiens
attacaggcatatgc

SEQ ID NO: 755782 - DNA, 15 bp, Homo sapiens
ttacaggcatatgcc

SEQ ID NO: 755783 - DNA, 15 bp, Homo sapiens
tacaggcatatgcca

SEQ ID NO: 755784 - DNA, 15 bp, Homo sapiens
acaggcatatgccac

SEQ ID NO: 755785 - DNA, 15 bp, Homo sapiens
caggcatatgccacc

SEQ ID NO: 755786 - DNA, 15 bp, Homo sapiens
aggcatatgccacca

SEQ ID NO: 755787 - DNA, 15 bp, Homo sapiens
ggcatatgccaccac

SEQ ID NO: 755788 - DNA, 15 bp, Homo sapiens
gcatatgccaccacg

SEQ ID NO: 755789 - DNA, 15 bp, Homo sapiens
catatgccaccacgc

SEQ ID NO: 755790 - DNA, 15 bp, Homo sapiens
atatgccaccacgcc

SEQ ID NO: 755791 - DNA, 15 bp, Homo sapiens
tatgccaccacgcct

SEQ ID NO: 755792 - DNA, 15 bp, Homo sapiens
atgccaccacgcctg

SEQ ID NO: 755793 - DNA, 15 bp, Homo sapiens
tgccaccacgcctgg

SEQ ID NO: 755794 - DNA, 15 bp, Homo sapiens
gccaccacgcctggc

SEQ ID NO: 755795 - DNA, 15 bp, Homo sapiens
gcctggctaattttg

SEQ ID NO: 755796 - DNA, 15 bp, Homo sapiens
cctggctaattttgt

SEQ ID NO: 755797 - DNA, 15 bp, Homo sapiens
ctggctaattttgta

SEQ ID NO: 755798 - DNA, 15 bp, Homo sapiens
tggctaattttgtat

SEQ ID NO: 755799 - DNA, 15 bp, Homo sapiens
taattttgtattttg

SEQ ID NO: 755800 - DNA, 15 bp, Homo sapiens
aattttgtattttga

SEQ ID NO: 755801 - DNA, 15 bp, Homo sapiens
attttgtattttgag

SEQ ID NO: 755802 - DNA, 15 bp, Homo sapiens
ttttgtattttgagt

SEQ ID NO: 755803 - DNA, 15 bp, Homo sapiens
tttgtattttgagta

SEQ ID NO: 755804 - DNA, 15 bp, Homo sapiens
ttgtattttgagtag

SEQ ID NO: 755805 - DNA, 15 bp, Homo sapiens
tgtattttgagtaga

SEQ ID NO: 755806 - DNA, 15 bp, Homo sapiens
gtattttgagtagag

SEQ ID NO: 755807 - DNA, 15 bp, Homo sapiens
tattttgagtagaga

SEQ ID NO: 755808 - DNA, 15 bp, Homo sapiens
attttgagtagagat

SEQ ID NO: 755809 - DNA, 15 bp, Homo sapiens
ttttgagtagagatg

SEQ ID NO: 755810 - DNA, 15 bp, Homo sapiens
tttgagtagagatgt

SEQ ID NO: 755811 - DNA, 15 bp, Homo sapiens
ttgagtagagatgtg

SEQ ID NO: 755812 - DNA, 15 bp, Homo sapiens
tgagtagagatgtgg

SEQ ID NO: 755813 - DNA, 15 bp, Homo sapiens
gagtagagatgtggt

SEQ ID NO: 755814 - DNA, 15 bp, Homo sapiens
agtagagatgtggtt

SEQ ID NO: 755815 - DNA, 15 bp, Homo sapiens
gtagagatgtggttt

SEQ ID NO: 755816 - DNA, 15 bp, Homo sapiens
tagagatgtggtttc

SEQ ID NO: 755817 - DNA, 15 bp, Homo sapiens
agagatgtggtttca

SEQ ID NO: 755818 - DNA, 15 bp, Homo sapiens
gagatgtggtttcat

SEQ ID NO: 755819 - DNA, 15 bp, Homo sapiens
agatgtggtttcatc

SEQ ID NO: 755820 - DNA, 15 bp, Homo sapiens
gatgtggtttcatca

SEQ ID NO: 755821 - DNA, 15 bp, Homo sapiens
atgtggtttcatcat

SEQ ID NO: 755822 - DNA, 15 bp, Homo sapiens
tgtggtttcatcata

SEQ ID NO: 755823 - DNA, 15 bp, Homo sapiens
gtggtttcatcatat

SEQ ID NO: 755824 - DNA, 15 bp, Homo sapiens
tggtttcatcatatt

SEQ ID NO: 755825 - DNA, 15 bp, Homo sapiens
ggtttcatcatattg

SEQ ID NO: 755826 - DNA, 15 bp, Homo sapiens
gtttcatcatattgg

SEQ ID NO: 755827 - DNA, 15 bp, Homo sapiens
tttcatcatattggc

SEQ ID NO: 755828 - DNA, 15 bp, Homo sapiens
ttcatcatattggcc

SEQ ID NO: 755829 - DNA, 15 bp, Homo sapiens
tcatcatattggcca

SEQ ID NO: 755830 - DNA, 15 bp, Homo sapiens
catcatattggccaa

SEQ ID NO: 755831 - DNA, 15 bp, Homo sapiens
atcatattggccaag

SEQ ID NO: 755832 - DNA, 15 bp, Homo sapiens
tcatattggccaagc

SEQ ID NO: 755833 - DNA, 15 bp, Homo sapiens
catattggccaagct

SEQ ID NO: 755834 - DNA, 15 bp, Homo sapiens
atattggccaagctg

SEQ ID NO: 755835 - DNA, 15 bp, Homo sapiens
tattggccaagctgg

SEQ ID NO: 755836 - DNA, 15 bp, Homo sapiens
attggccaagctggt

SEQ ID NO: 755837 - DNA, 15 bp, Homo sapiens
ttggccaagctggtc

SEQ ID NO: 755838 - DNA, 15 bp, Homo sapiens
tggccaagctggtct

SEQ ID NO: 755839 - DNA, 15 bp, Homo sapiens
ggccaagctggtctt

SEQ ID NO: 755840 - DNA, 15 bp, Homo sapiens
gccaagctggtcttg

SEQ ID NO: 755841 - DNA, 15 bp, Homo sapiens
ccaagctggtcttga

SEQ ID NO: 755842 - DNA, 15 bp, Homo sapiens
caagctggtcttgaa

SEQ ID NO: 755843 - DNA, 15 bp, Homo sapiens
aagctggtcttgaac

SEQ ID NO: 755844 - DNA, 15 bp, Homo sapiens
agctggtcttgaact

SEQ ID NO: 755845 - DNA, 15 bp, Homo sapiens
ctggtcttgaactct

SEQ ID NO: 755846 - DNA, 15 bp, Homo sapiens
tggtcttgaactctt

SEQ ID NO: 755847 - DNA, 15 bp, Homo sapiens
ggtcttgaactcttg

SEQ ID NO: 755848 - DNA, 15 bp, Homo sapiens
gtcttgaactcttga

SEQ ID NO: 755849 - DNA, 15 bp, Homo sapiens
tcttgaactcttgac

SEQ ID NO: 755850 - DNA, 15 bp, Homo sapiens
cttgaactcttgacc

SEQ ID NO: 755851 - DNA, 15 bp, Homo sapiens
ttgaactcttgacct

SEQ ID NO: 755852 - DNA, 15 bp, Homo sapiens
tgaactcttgacctc

SEQ ID NO: 755853 - DNA, 15 bp, Homo sapiens
gaactcttgacctca

SEQ ID NO: 755854 - DNA, 15 bp, Homo sapiens
aactcttgacctcag

SEQ ID NO: 755855 - DNA, 15 bp, Homo sapiens
actcttgacctcagg

SEQ ID NO: 755856 - DNA, 15 bp, Homo sapiens
ctcttgacctcaggt

SEQ ID NO: 755857 - DNA, 15 bp, Homo sapiens
tcttgacctcaggtg

SEQ ID NO: 755858 - DNA, 15 bp, Homo sapiens
cttgacctcaggtga

SEQ ID NO: 755859 - DNA, 15 bp, Homo sapiens
ttgacctcaggtgat

SEQ ID NO: 755860 - DNA, 15 bp, Homo sapiens
tcaggtgatctgccc

SEQ ID NO: 755861 - DNA, 15 bp, Homo sapiens
caggtgatctgccca

SEQ ID NO: 755862 - DNA, 15 bp, Homo sapiens
aggtgatctgcccac

SEQ ID NO: 755863 - DNA, 15 bp, Homo sapiens
ggtgatctgcccacc

SEQ ID NO: 755864 - DNA, 15 bp, Homo sapiens
gtgatctgcccacct

SEQ ID NO: 755865 - DNA, 15 bp, Homo sapiens
tgatctgcccacctt

SEQ ID NO: 755866 - DNA, 15 bp, Homo sapiens
gatctgcccaccttg

SEQ ID NO: 755867 - DNA, 15 bp, Homo sapiens
atctgcccaccttgg

SEQ ID NO: 755868 - DNA, 15 bp, Homo sapiens
tctgcccaccttggc

SEQ ID NO: 755869 - DNA, 15 bp, Homo sapiens
ctgcccaccttggcc

SEQ ID NO: 755870 - DNA, 15 bp, Homo sapiens
tgcccaccttggcct

SEQ ID NO: 755871 - DNA, 15 bp, Homo sapiens
gcccaccttggcctc

SEQ ID NO: 755872 - DNA, 15 bp, Homo sapiens
cccaccttggcctcc

SEQ ID NO: 755873 - DNA, 15 bp, Homo sapiens
ccaccttggcctccc

SEQ ID NO: 755874 - DNA, 15 bp, Homo sapiens
caccttggcctccca

SEQ ID NO: 755875 - DNA, 15 bp, Homo sapiens
accttggcctcccaa

SEQ ID NO: 755876 - DNA, 15 bp, Homo sapiens
aggtgtgagccacca

SEQ ID NO: 755877 - DNA, 15 bp, Homo sapiens
ggtgtgagccaccac

SEQ ID NO: 755878 - DNA, 15 bp, Homo sapiens
gtgtgagccaccacg

SEQ ID NO: 755879 - DNA, 15 bp, Homo sapiens
tgtgagccaccacgc

SEQ ID NO: 755880 - DNA, 15 bp, Homo sapiens
ccaccacgcccagcc

SEQ ID NO: 755881 - DNA, 15 bp, Homo sapiens
caccacgcccagcca

SEQ ID NO: 755882 - DNA, 15 bp, Homo sapiens
accacgcccagccac

SEQ ID NO: 755883 - DNA, 15 bp, Homo sapiens
ccacgcccagccacg

SEQ ID NO: 755884 - DNA, 15 bp, Homo sapiens
cacgcccagccacgt

SEQ ID NO: 755885 - DNA, 15 bp, Homo sapiens
acgcccagccacgta

SEQ ID NO: 755886 - DNA, 15 bp, Homo sapiens
cgcccagccacgtat

SEQ ID NO: 755887 - DNA, 15 bp, Homo sapiens
gcccagccacgtata

SEQ ID NO: 755888 - DNA, 15 bp, Homo sapiens
cccagccacgtatat

SEQ ID NO: 755889 - DNA, 15 bp, Homo sapiens
ccagccacgtatatt

SEQ ID NO: 755890 - DNA, 15 bp, Homo sapiens
cagccacgtatattg

SEQ ID NO: 755891 - DNA, 15 bp, Homo sapiens
agccacgtatattgt

SEQ ID NO: 755892 - DNA, 15 bp, Homo sapiens
gccacgtatattgtt

SEQ ID NO: 755893 - DNA, 15 bp, Homo sapiens
ccacgtatattgttt

SEQ ID NO: 755894 - DNA, 15 bp, Homo sapiens
cacgtatattgtttt

SEQ ID NO: 755895 - DNA, 15 bp, Homo sapiens
acgtatattgttttt

SEQ ID NO: 755896 - DNA, 15 bp, Homo sapiens
cgtatattgttttta

SEQ ID NO: 755897 - DNA, 15 bp, Homo sapiens
gtatattgtttttat

SEQ ID NO: 755898 - DNA, 15 bp, Homo sapiens
tatattgtttttata

SEQ ID NO: 755899 - DNA, 15 bp, Homo sapiens
atattgtttttatat

SEQ ID NO: 755900 - DNA, 15 bp, Homo sapiens
tattgtttttatatc

SEQ ID NO: 755901 - DNA, 15 bp, Homo sapiens
attgtttttatatct

SEQ ID NO: 755902 - DNA, 15 bp, Homo sapiens
ttgtttttatatcta

SEQ ID NO: 755903 - DNA, 15 bp, Homo sapiens
tgtttttatatctag

SEQ ID NO: 755904 - DNA, 15 bp, Homo sapiens
gtttttatatctagt

SEQ ID NO: 755905 - DNA, 15 bp, Homo sapiens
tttttatatctagtt

SEQ ID NO: 755906 - DNA, 15 bp, Homo sapiens
ttttatatctagttc

SEQ ID NO: 755907 - DNA, 15 bp, Homo sapiens
tttatatctagttct

SEQ ID NO: 755908 - DNA, 15 bp, Homo sapiens
ttatatctagttctt

SEQ ID NO: 755909 - DNA, 15 bp, Homo sapiens
tatatctagttctta

SEQ ID NO: 755910 - DNA, 15 bp, Homo sapiens
atatctagttcttat

SEQ ID NO: 755911 - DNA, 15 bp, Homo sapiens
tatctagttcttatc

SEQ ID NO: 755912 - DNA, 15 bp, Homo sapiens
atctagttcttatct

SEQ ID NO: 755913 - DNA, 15 bp, Homo sapiens
tctagttcttatcta

SEQ ID NO: 755914 - DNA, 15 bp, Homo sapiens
ctagttcttatctat

SEQ ID NO: 755915 - DNA, 15 bp, Homo sapiens
tagttcttatctatc

SEQ ID NO: 755916 - DNA, 15 bp, Homo sapiens
agttcttatctatct

SEQ ID NO: 755917 - DNA, 15 bp, Homo sapiens
gttcttatctatctc

SEQ ID NO: 755918 - DNA, 15 bp, Homo sapiens
ttcttatctatctct

SEQ ID NO: 755919 - DNA, 15 bp, Homo sapiens
tcttatctatctctc

SEQ ID NO: 755920 - DNA, 15 bp, Homo sapiens
cttatctatctctct

SEQ ID NO: 755921 - DNA, 15 bp, Homo sapiens
ttatctatctctctt

SEQ ID NO: 755922 - DNA, 15 bp, Homo sapiens
tatctatctctcttg

SEQ ID NO: 755923 - DNA, 15 bp, Homo sapiens
atctatctctcttga

SEQ ID NO: 755924 - DNA, 15 bp, Homo sapiens
tctatctctcttgaa

SEQ ID NO: 755925 - DNA, 15 bp, Homo sapiens
ctatctctcttgaaa

SEQ ID NO: 755926 - DNA, 15 bp, Homo sapiens
tatctctcttgaaat

SEQ ID NO: 755927 - DNA, 15 bp, Homo sapiens
atctctcttgaaatt

SEQ ID NO: 755928 - DNA, 15 bp, Homo sapiens
tctctcttgaaatta

SEQ ID NO: 755929 - DNA, 15 bp, Homo sapiens
ctctcttgaaattat

SEQ ID NO: 755930 - DNA, 15 bp, Homo sapiens
tctcttgaaattata

SEQ ID NO: 755931 - DNA, 15 bp, Homo sapiens
ctcttgaaattataa

SEQ ID NO: 755932 - DNA, 15 bp, Homo sapiens
tcttgaaattataag

SEQ ID NO: 755933 - DNA, 15 bp, Homo sapiens
cttgaaattataagt

SEQ ID NO: 755934 - DNA, 15 bp, Homo sapiens
ttgaaattataagtt

SEQ ID NO: 755935 - DNA, 15 bp, Homo sapiens
tgaaattataagttc

SEQ ID NO: 755936 - DNA, 15 bp, Homo sapiens
gaaattataagttca

SEQ ID NO: 755937 - DNA, 15 bp, Homo sapiens
aaattataagttcat

SEQ ID NO: 755938 - DNA, 15 bp, Homo sapiens
aattataagttcata

SEQ ID NO: 755939 - DNA, 15 bp, Homo sapiens
attataagttcatat

SEQ ID NO: 755940 - DNA, 15 bp, Homo sapiens
ttataagttcatatt

SEQ ID NO: 755941 - DNA, 15 bp, Homo sapiens
tataagttcatattg

SEQ ID NO: 755942 - DNA, 15 bp, Homo sapiens
ataagttcatattga

SEQ ID NO: 755943 - DNA, 15 bp, Homo sapiens
taagttcatattgat

SEQ ID NO: 755944 - DNA, 15 bp, Homo sapiens
aagttcatattgata

SEQ ID NO: 755945 - DNA, 15 bp, Homo sapiens
agttcatattgatat

SEQ ID NO: 755946 - DNA, 15 bp, Homo sapiens
gttcatattgatatc

SEQ ID NO: 755947 - DNA, 15 bp, Homo sapiens
ttcatattgatatcg

SEQ ID NO: 755948 - DNA, 15 bp, Homo sapiens
tcatattgatatcgc

SEQ ID NO: 755949 - DNA, 15 bp, Homo sapiens
catattgatatcgca

SEQ ID NO: 755950 - DNA, 15 bp, Homo sapiens
atattgatatcgcag

SEQ ID NO: 755951 - DNA, 15 bp, Homo sapiens
tattgatatcgcaga

SEQ ID NO: 755952 - DNA, 15 bp, Homo sapiens
attgatatcgcagat

SEQ ID NO: 755953 - DNA, 15 bp, Homo sapiens
ttgatatcgcagatc

SEQ ID NO: 755954 - DNA, 15 bp, Homo sapiens
tgatatcgcagatcc

SEQ ID NO: 755955 - DNA, 15 bp, Homo sapiens
gatatcgcagatcct

SEQ ID NO: 755956 - DNA, 15 bp, Homo sapiens
atatcgcagatcctc

SEQ ID NO: 755957 - DNA, 15 bp, Homo sapiens
tatcgcagatcctca

SEQ ID NO: 755958 - DNA, 15 bp, Homo sapiens
atcgcagatcctcat

SEQ ID NO: 755959 - DNA, 15 bp, Homo sapiens
tcgcagatcctcatc

SEQ ID NO: 755960 - DNA, 15 bp, Homo sapiens
cgcagatcctcatct

SEQ ID NO: 755961 - DNA, 15 bp, Homo sapiens
gcagatcctcatcta

SEQ ID NO: 755962 - DNA, 15 bp, Homo sapiens
cagatcctcatctaa

SEQ ID NO: 755963 - DNA, 15 bp, Homo sapiens
agatcctcatctaat

SEQ ID NO: 755964 - DNA, 15 bp, Homo sapiens
gatcctcatctaatc

SEQ ID NO: 755965 - DNA, 15 bp, Homo sapiens
atcctcatctaatct

SEQ ID NO: 755966 - DNA, 15 bp, Homo sapiens
tcctcatctaatctc

SEQ ID NO: 755967 - DNA, 15 bp, Homo sapiens
cctcatctaatctct

SEQ ID NO: 755968 - DNA, 15 bp, Homo sapiens
ctcatctaatctctc

SEQ ID NO: 755969 - DNA, 15 bp, Homo sapiens
tcatctaatctctct

SEQ ID NO: 755970 - DNA, 15 bp, Homo sapiens
catctaatctctctg

SEQ ID NO: 755971 - DNA, 15 bp, Homo sapiens
atctaatctctctgt

SEQ ID NO: 755972 - DNA, 15 bp, Homo sapiens
tctaatctctctgtt

SEQ ID NO: 755973 - DNA, 15 bp, Homo sapiens
ctaatctctctgttt

SEQ ID NO: 755974 - DNA, 15 bp, Homo sapiens
taatctctctgtttc

SEQ ID NO: 755975 - DNA, 15 bp, Homo sapiens
aatctctctgtttcc

SEQ ID NO: 755976 - DNA, 15 bp, Homo sapiens
atctctctgtttcct

SEQ ID NO: 755977 - DNA, 15 bp, Homo sapiens
tctctctgtttcctt

SEQ ID NO: 755978 - DNA, 15 bp, Homo sapiens
ctctctgtttccttc

SEQ ID NO: 755979 - DNA, 15 bp, Homo sapiens
tctctgtttccttct

SEQ ID NO: 755980 - DNA, 15 bp, Homo sapiens
ctctgtttccttctt

SEQ ID NO: 755981 - DNA, 15 bp, Homo sapiens
tctgtttccttcttt

SEQ ID NO: 755982 - DNA, 15 bp, Homo sapiens
ctgtttccttctttt

SEQ ID NO: 755983 - DNA, 15 bp, Homo sapiens
tgtttccttcttttc

SEQ ID NO: 755984 - DNA, 15 bp, Homo sapiens
gtttccttcttttca

SEQ ID NO: 755985 - DNA, 15 bp, Homo sapiens
tttccttcttttcat

SEQ ID NO: 755986 - DNA, 15 bp, Homo sapiens
ttccttcttttcata

SEQ ID NO: 755987 - DNA, 15 bp, Homo sapiens
tccttcttttcatat

SEQ ID NO: 755988 - DNA, 15 bp, Homo sapiens
ccttcttttcatatt

SEQ ID NO: 755989 - DNA, 15 bp, Homo sapiens
cttcttttcatattt

SEQ ID NO: 755990 - DNA, 15 bp, Homo sapiens
ttcttttcatatttg

SEQ ID NO: 755991 - DNA, 15 bp, Homo sapiens
tcttttcatatttgt

SEQ ID NO: 755992 - DNA, 15 bp, Homo sapiens
cttttcatatttgtt

SEQ ID NO: 755993 - DNA, 15 bp, Homo sapiens
ttttcatatttgttc

SEQ ID NO: 755994 - DNA, 15 bp, Homo sapiens
tttcatatttgttca

SEQ ID NO: 755995 - DNA, 15 bp, Homo sapiens
ttcatatttgttcat

SEQ ID NO: 755996 - DNA, 15 bp, Homo sapiens
tcatatttgttcatt

SEQ ID NO: 755997 - DNA, 15 bp, Homo sapiens
catatttgttcattt

SEQ ID NO: 755998 - DNA, 15 bp, Homo sapiens
atatttgttcatttc

SEQ ID NO: 755999 - DNA, 15 bp, Homo sapiens
tatttgttcatttcc

SEQ ID NO: 756000 - DNA, 15 bp, Homo sapiens
atttgttcatttcct

SEQ ID NO: 756001 - DNA, 15 bp, Homo sapiens
tttgttcatttcctg

SEQ ID NO: 756002 - DNA, 15 bp, Homo sapiens
ttgttcatttcctga

SEQ ID NO: 756003 - DNA, 15 bp, Homo sapiens
tgttcatttcctgaa

SEQ ID NO: 756004 - DNA, 15 bp, Homo sapiens
gttcatttcctgaaa

SEQ ID NO: 756005 - DNA, 15 bp, Homo sapiens
ttcatttcctgaaaa

SEQ ID NO: 756006 - DNA, 15 bp, Homo sapiens
tcatttcctgaaaat

SEQ ID NO: 756007 - DNA, 15 bp, Homo sapiens
catttcctgaaaatc

SEQ ID NO: 756008 - DNA, 15 bp, Homo sapiens
atttcctgaaaatca

SEQ ID NO: 756009 - DNA, 15 bp, Homo sapiens
tttcctgaaaatcag

SEQ ID NO: 756010 - DNA, 15 bp, Homo sapiens
ttcctgaaaatcaga

SEQ ID NO: 756011 - DNA, 15 bp, Homo sapiens
tcctgaaaatcagaa

SEQ ID NO: 756012 - DNA, 15 bp, Homo sapiens
cctgaaaatcagaaa

SEQ ID NO: 756013 - DNA, 15 bp, Homo sapiens
ctgaaaatcagaaat

SEQ ID NO: 756014 - DNA, 15 bp, Homo sapiens
tgaaaatcagaaatg

SEQ ID NO: 756015 - DNA, 15 bp, Homo sapiens
gaaaatcagaaatgt

SEQ ID NO: 756016 - DNA, 15 bp, Homo sapiens
aaaatcagaaatgtg

SEQ ID NO: 756017 - DNA, 15 bp, Homo sapiens
aaatcagaaatgtgg

SEQ ID NO: 756018 - DNA, 15 bp, Homo sapiens
aatcagaaatgtggg

SEQ ID NO: 756019 - DNA, 15 bp, Homo sapiens
atcagaaatgtgggt

SEQ ID NO: 756020 - DNA, 15 bp, Homo sapiens
tcagaaatgtgggtc

SEQ ID NO: 756021 - DNA, 15 bp, Homo sapiens
cagaaatgtgggtcc

SEQ ID NO: 756022 - DNA, 15 bp, Homo sapiens
agaaatgtgggtccc

SEQ ID NO: 756023 - DNA, 15 bp, Homo sapiens
gaaatgtgggtccca

SEQ ID NO: 756024 - DNA, 15 bp, Homo sapiens
aaatgtgggtcccat

SEQ ID NO: 756025 - DNA, 15 bp, Homo sapiens
aatgtgggtcccatt

SEQ ID NO: 756026 - DNA, 15 bp, Homo sapiens
atgtgggtcccatta

SEQ ID NO: 756027 - DNA, 15 bp, Homo sapiens
tgtgggtcccattat

SEQ ID NO: 756028 - DNA, 15 bp, Homo sapiens
gtgggtcccattatc

SEQ ID NO: 756029 - DNA, 15 bp, Homo sapiens
tgggtcccattatcc

SEQ ID NO: 756030 - DNA, 15 bp, Homo sapiens
gggtcccattatcct

SEQ ID NO: 756031 - DNA, 15 bp, Homo sapiens
ggtcccattatcctt

SEQ ID NO: 756032 - DNA, 15 bp, Homo sapiens
gtcccattatcctta

SEQ ID NO: 756033 - DNA, 15 bp, Homo sapiens
tcccattatccttaa

SEQ ID NO: 756034 - DNA, 15 bp, Homo sapiens
cccattatccttaat

SEQ ID NO: 756035 - DNA, 15 bp, Homo sapiens
ccattatccttaata

SEQ ID NO: 756036 - DNA, 15 bp, Homo sapiens
cattatccttaatat

SEQ ID NO: 756037 - DNA, 15 bp, Homo sapiens
attatccttaatata

SEQ ID NO: 756038 - DNA, 15 bp, Homo sapiens
ttatccttaatatat

SEQ ID NO: 756039 - DNA, 15 bp, Homo sapiens
tatccttaatatatt

SEQ ID NO: 756040 - DNA, 15 bp, Homo sapiens
atccttaatatattt

SEQ ID NO: 756041 - DNA, 15 bp, Homo sapiens
tccttaatatattta

SEQ ID NO: 756042 - DNA, 15 bp, Homo sapiens
ccttaatatatttac

SEQ ID NO: 756043 - DNA, 15 bp, Homo sapiens
cttaatatatttact

SEQ ID NO: 756044 - DNA, 15 bp, Homo sapiens
ttaatatatttactt

SEQ ID NO: 756045 - DNA, 15 bp, Homo sapiens
taatatatttactta

SEQ ID NO: 756046 - DNA, 15 bp, Homo sapiens
aatatatttacttat

SEQ ID NO: 756047 - DNA, 15 bp, Homo sapiens
atatatttacttatt

SEQ ID NO: 756048 - DNA, 15 bp, Homo sapiens
tatatttacttattt

SEQ ID NO: 756049 - DNA, 15 bp, Homo sapiens
atatttacttatttg

SEQ ID NO: 756050 - DNA, 15 bp, Homo sapiens
tatttacttatttgc

SEQ ID NO: 756051 - DNA, 15 bp, Homo sapiens
atttacttatttgct

SEQ ID NO: 756052 - DNA, 15 bp, Homo sapiens
tttacttatttgctt

SEQ ID NO: 756053 - DNA, 15 bp, Homo sapiens
ttacttatttgctta

SEQ ID NO: 756054 - DNA, 15 bp, Homo sapiens
tacttatttgcttaa

SEQ ID NO: 756055 - DNA, 15 bp, Homo sapiens
acttatttgcttaac

SEQ ID NO: 756056 - DNA, 15 bp, Homo sapiens
cttatttgcttaacc

SEQ ID NO: 756057 - DNA, 15 bp, Homo sapiens
ttatttgcttaaccc

SEQ ID NO: 756058 - DNA, 15 bp, Homo sapiens
tatttgcttaaccca

SEQ ID NO: 756059 - DNA, 15 bp, Homo sapiens
atttgcttaacccat

SEQ ID NO: 756060 - DNA, 15 bp, Homo sapiens
tttgcttaacccatc

SEQ ID NO: 756061 - DNA, 15 bp, Homo sapiens
ttgcttaacccatct

SEQ ID NO: 756062 - DNA, 15 bp, Homo sapiens
tgcttaacccatctg

SEQ ID NO: 756063 - DNA, 15 bp, Homo sapiens
gcttaacccatctgt

SEQ ID NO: 756064 - DNA, 15 bp, Homo sapiens
cttaacccatctgta

SEQ ID NO: 756065 - DNA, 15 bp, Homo sapiens
ttaacccatctgtat

SEQ ID NO: 756066 - DNA, 15 bp, Homo sapiens
taacccatctgtatg

SEQ ID NO: 756067 - DNA, 15 bp, Homo sapiens
aacccatctgtatgt

SEQ ID NO: 756068 - DNA, 15 bp, Homo sapiens
acccatctgtatgta

SEQ ID NO: 756069 - DNA, 15 bp, Homo sapiens
cccatctgtatgtaa

SEQ ID NO: 756070 - DNA, 15 bp, Homo sapiens
ccatctgtatgtaac

SEQ ID NO: 756071 - DNA, 15 bp, Homo sapiens
catctgtatgtaacc

SEQ ID NO: 756072 - DNA, 15 bp, Homo sapiens
atctgtatgtaacca

SEQ ID NO: 756073 - DNA, 15 bp, Homo sapiens
tctgtatgtaaccag

SEQ ID NO: 756074 - DNA, 15 bp, Homo sapiens
ctgtatgtaaccagt

SEQ ID NO: 756075 - DNA, 15 bp, Homo sapiens
tgtatgtaaccagta

SEQ ID NO: 756076 - DNA, 15 bp, Homo sapiens
gtatgtaaccagtat

SEQ ID NO: 756077 - DNA, 15 bp, Homo sapiens
tatgtaaccagtatc

SEQ ID NO: 756078 - DNA, 15 bp, Homo sapiens
atgtaaccagtatct

SEQ ID NO: 756079 - DNA, 15 bp, Homo sapiens
tgtaaccagtatctc

SEQ ID NO: 756080 - DNA, 15 bp, Homo sapiens
gtaaccagtatctct

SEQ ID NO: 756081 - DNA, 15 bp, Homo sapiens
taaccagtatctctt

SEQ ID NO: 756082 - DNA, 15 bp, Homo sapiens
aaccagtatctctta

SEQ ID NO: 756083 - DNA, 15 bp, Homo sapiens
accagtatctcttaa

SEQ ID NO: 756084 - DNA, 15 bp, Homo sapiens
ccagtatctcttaat

SEQ ID NO: 756085 - DNA, 15 bp, Homo sapiens
cagtatctcttaata

SEQ ID NO: 756086 - DNA, 15 bp, Homo sapiens
agtatctcttaatat

SEQ ID NO: 756087 - DNA, 15 bp, Homo sapiens
gtatctcttaatatc

SEQ ID NO: 756088 - DNA, 15 bp, Homo sapiens
tatctcttaatatcc

SEQ ID NO: 756089 - DNA, 15 bp, Homo sapiens
atctcttaatatccc

SEQ ID NO: 756090 - DNA, 15 bp, Homo sapiens
tctcttaatatcccc

SEQ ID NO: 756091 - DNA, 15 bp, Homo sapiens
ctcttaatatccccc

SEQ ID NO: 756092 - DNA, 15 bp, Homo sapiens
tcttaatatcccccc

SEQ ID NO: 756093 - DNA, 15 bp, Homo sapiens
cttaatatcccccct

SEQ ID NO: 756094 - DNA, 15 bp, Homo sapiens
ttaatatcccccctc

SEQ ID NO: 756095 - DNA, 15 bp, Homo sapiens
taatatcccccctca

SEQ ID NO: 756096 - DNA, 15 bp, Homo sapiens
aatatcccccctcac

SEQ ID NO: 756097 - DNA, 15 bp, Homo sapiens
atatcccccctcacc

SEQ ID NO: 756098 - DNA, 15 bp, Homo sapiens
tatcccccctcacct

SEQ ID NO: 756099 - DNA, 15 bp, Homo sapiens
atcccccctcacctc

SEQ ID NO: 756100 - DNA, 15 bp, Homo sapiens
tcccccctcacctca

SEQ ID NO: 756101 - DNA, 15 bp, Homo sapiens
cccccctcacctcac

SEQ ID NO: 756102 - DNA, 15 bp, Homo sapiens
ccccctcacctcact

SEQ ID NO: 756103 - DNA, 15 bp, Homo sapiens
cccctcacctcactc

SEQ ID NO: 756104 - DNA, 15 bp, Homo sapiens
ccctcacctcactct

SEQ ID NO: 756105 - DNA, 15 bp, Homo sapiens
cctcacctcactctg

SEQ ID NO: 756106 - DNA, 15 bp, Homo sapiens
ctcacctcactctgg

SEQ ID NO: 756107 - DNA, 15 bp, Homo sapiens
tcacctcactctggc

SEQ ID NO: 756108 - DNA, 15 bp, Homo sapiens
cacctcactctggct

SEQ ID NO: 756109 - DNA, 15 bp, Homo sapiens
acctcactctggctc

SEQ ID NO: 756110 - DNA, 15 bp, Homo sapiens
cctcactctggctct

SEQ ID NO: 756111 - DNA, 15 bp, Homo sapiens
ctcactctggctctg

SEQ ID NO: 756112 - DNA, 15 bp, Homo sapiens
tcactctggctctga

SEQ ID NO: 756113 - DNA, 15 bp, Homo sapiens
cactctggctctgat

SEQ ID NO: 756114 - DNA, 15 bp, Homo sapiens
actctggctctgata

SEQ ID NO: 756115 - DNA, 15 bp, Homo sapiens
ctctggctctgatat

SEQ ID NO: 756116 - DNA, 15 bp, Homo sapiens
tctggctctgatatc

SEQ ID NO: 756117 - DNA, 15 bp, Homo sapiens
ctggctctgatatca

SEQ ID NO: 756118 - DNA, 15 bp, Homo sapiens
tggctctgatatcac

SEQ ID NO: 756119 - DNA, 15 bp, Homo sapiens
ggctctgatatcaca

SEQ ID NO: 756120 - DNA, 15 bp, Homo sapiens
gctctgatatcacat

SEQ ID NO: 756121 - DNA, 15 bp, Homo sapiens
ctctgatatcacatg

SEQ ID NO: 756122 - DNA, 15 bp, Homo sapiens
tctgatatcacatgc

SEQ ID NO: 756123 - DNA, 15 bp, Homo sapiens
ctgatatcacatgct

SEQ ID NO: 756124 - DNA, 15 bp, Homo sapiens
tgatatcacatgctt

SEQ ID NO: 756125 - DNA, 15 bp, Homo sapiens
gatatcacatgcttg

SEQ ID NO: 756126 - DNA, 15 bp, Homo sapiens
atatcacatgcttgg

SEQ ID NO: 756127 - DNA, 15 bp, Homo sapiens
tatcacatgcttggg

SEQ ID NO: 756128 - DNA, 15 bp, Homo sapiens
atcacatgcttgggt

SEQ ID NO: 756129 - DNA, 15 bp, Homo sapiens
tcacatgcttgggtt

SEQ ID NO: 756130 - DNA, 15 bp, Homo sapiens
cacatgcttgggttt

SEQ ID NO: 756131 - DNA, 15 bp, Homo sapiens
acatgcttgggtttt

SEQ ID NO: 756132 - DNA, 15 bp, Homo sapiens
catgcttgggttttg

SEQ ID NO: 756133 - DNA, 15 bp, Homo sapiens
atgcttgggttttga

SEQ ID NO: 756134 - DNA, 15 bp, Homo sapiens
tgcttgggttttgaa

SEQ ID NO: 756135 - DNA, 15 bp, Homo sapiens
gcttgggttttgaaa

SEQ ID NO: 756136 - DNA, 15 bp, Homo sapiens
cttgggttttgaaac

SEQ ID NO: 756137 - DNA, 15 bp, Homo sapiens
ttgggttttgaaacc

SEQ ID NO: 756138 - DNA, 15 bp, Homo sapiens
tgggttttgaaacca

SEQ ID NO: 756139 - DNA, 15 bp, Homo sapiens
gggttttgaaaccac

SEQ ID NO: 756140 - DNA, 15 bp, Homo sapiens
ggttttgaaaccaca

SEQ ID NO: 756141 - DNA, 15 bp, Homo sapiens
gttttgaaaccacat

SEQ ID NO: 756142 - DNA, 15 bp, Homo sapiens
ttttgaaaccacatg

SEQ ID NO: 756143 - DNA, 15 bp, Homo sapiens
tttgaaaccacatgc

SEQ ID NO: 756144 - DNA, 15 bp, Homo sapiens
ttgaaaccacatgct

SEQ ID NO: 756145 - DNA, 15 bp, Homo sapiens
tgaaaccacatgctg

SEQ ID NO: 756146 - DNA, 15 bp, Homo sapiens
gaaaccacatgctga

SEQ ID NO: 756147 - DNA, 15 bp, Homo sapiens
aaaccacatgctgag

SEQ ID NO: 756148 - DNA, 15 bp, Homo sapiens
aaccacatgctgagc

SEQ ID NO: 756149 - DNA, 15 bp, Homo sapiens
accacatgctgagca

SEQ ID NO: 756150 - DNA, 15 bp, Homo sapiens
ccacatgctgagcat

SEQ ID NO: 756151 - DNA, 15 bp, Homo sapiens
cacatgctgagcatc

SEQ ID NO: 756152 - DNA, 15 bp, Homo sapiens
acatgctgagcatcc

SEQ ID NO: 756153 - DNA, 15 bp, Homo sapiens
catgctgagcatcct

SEQ ID NO: 756154 - DNA, 15 bp, Homo sapiens
atgctgagcatcctc

SEQ ID NO: 756155 - DNA, 15 bp, Homo sapiens
tgctgagcatcctcc

SEQ ID NO: 756156 - DNA, 15 bp, Homo sapiens
gctgagcatcctcct

SEQ ID NO: 756157 - DNA, 15 bp, Homo sapiens
ctgagcatcctcctc

SEQ ID NO: 756158 - DNA, 15 bp, Homo sapiens
tgagcatcctcctca

SEQ ID NO: 756159 - DNA, 15 bp, Homo sapiens
gagcatcctcctcag

SEQ ID NO: 756160 - DNA, 15 bp, Homo sapiens
agcatcctcctcaga

SEQ ID NO: 756161 - DNA, 15 bp, Homo sapiens
gcatcctcctcagag

SEQ ID NO: 756162 - DNA, 15 bp, Homo sapiens
catcctcctcagagg

SEQ ID NO: 756163 - DNA, 15 bp, Homo sapiens
atcctcctcagaggc

SEQ ID NO: 756164 - DNA, 15 bp, Homo sapiens
tcctcctcagaggcc

SEQ ID NO: 756165 - DNA, 15 bp, Homo sapiens
cctcctcagaggcct

SEQ ID NO: 756166 - DNA, 15 bp, Homo sapiens
ctcctcagaggcctt

SEQ ID NO: 756167 - DNA, 15 bp, Homo sapiens
tcctcagaggccttg

SEQ ID NO: 756168 - DNA, 15 bp, Homo sapiens
cctcagaggccttgc

SEQ ID NO: 756169 - DNA, 15 bp, Homo sapiens
ctcagaggccttgct

SEQ ID NO: 756170 - DNA, 15 bp, Homo sapiens
tcagaggccttgctc

SEQ ID NO: 756171 - DNA, 15 bp, Homo sapiens
cagaggccttgctca

SEQ ID NO: 756172 - DNA, 15 bp, Homo sapiens
agaggccttgctcag

SEQ ID NO: 756173 - DNA, 15 bp, Homo sapiens
gaggccttgctcagt

SEQ ID NO: 756174 - DNA, 15 bp, Homo sapiens
aggccttgctcagtt

SEQ ID NO: 756175 - DNA, 15 bp, Homo sapiens
ggccttgctcagttg

SEQ ID NO: 756176 - DNA, 15 bp, Homo sapiens
gccttgctcagttgt

SEQ ID NO: 756177 - DNA, 15 bp, Homo sapiens
ccttgctcagttgtc

SEQ ID NO: 756178 - DNA, 15 bp, Homo sapiens
cttgctcagttgtct

SEQ ID NO: 756179 - DNA, 15 bp, Homo sapiens
ttgctcagttgtctg

SEQ ID NO: 756180 - DNA, 15 bp, Homo sapiens
tgctcagttgtctgg

SEQ ID NO: 756181 - DNA, 15 bp, Homo sapiens
gctcagttgtctggg

SEQ ID NO: 756182 - DNA, 15 bp, Homo sapiens
ctcagttgtctgggc

SEQ ID NO: 756183 - DNA, 15 bp, Homo sapiens
tcagttgtctgggct

SEQ ID NO: 756184 - DNA, 15 bp, Homo sapiens
cagttgtctgggctc

SEQ ID NO: 756185 - DNA, 15 bp, Homo sapiens
agttgtctgggctcc

SEQ ID NO: 756186 - DNA, 15 bp, Homo sapiens
gttgtctgggctcca

SEQ ID NO: 756187 - DNA, 15 bp, Homo sapiens
ttgtctgggctccag

SEQ ID NO: 756188 - DNA, 15 bp, Homo sapiens
tgtctgggctccagc

SEQ ID NO: 756189 - DNA, 15 bp, Homo sapiens
gtctgggctccagca

SEQ ID NO: 756190 - DNA, 15 bp, Homo sapiens
tctgggctccagcac

SEQ ID NO: 756191 - DNA, 15 bp, Homo sapiens
ctgggctccagcacc

SEQ ID NO: 756192 - DNA, 15 bp, Homo sapiens
tgggctccagcaccc

SEQ ID NO: 756193 - DNA, 15 bp, Homo sapiens
gggctccagcaccca

SEQ ID NO: 756194 - DNA, 15 bp, Homo sapiens
ggctccagcacccaa

SEQ ID NO: 756195 - DNA, 15 bp, Homo sapiens
gctccagcacccaat

SEQ ID NO: 756196 - DNA, 15 bp, Homo sapiens
ctccagcacccaata

SEQ ID NO: 756197 - DNA, 15 bp, Homo sapiens
tccagcacccaatat

SEQ ID NO: 756198 - DNA, 15 bp, Homo sapiens
ccagcacccaatatc

SEQ ID NO: 756199 - DNA, 15 bp, Homo sapiens
cagcacccaatatcc

SEQ ID NO: 756200 - DNA, 15 bp, Homo sapiens
agcacccaatatcct

SEQ ID NO: 756201 - DNA, 15 bp, Homo sapiens
gcacccaatatcctc

SEQ ID NO: 756202 - DNA, 15 bp, Homo sapiens
cacccaatatcctct

SEQ ID NO: 756203 - DNA, 15 bp, Homo sapiens
acccaatatcctcta

SEQ ID NO: 756204 - DNA, 15 bp, Homo sapiens
cccaatatcctctac

SEQ ID NO: 756205 - DNA, 15 bp, Homo sapiens
ccaatatcctctaca

SEQ ID NO: 756206 - DNA, 15 bp, Homo sapiens
caatatcctctacat

SEQ ID NO: 756207 - DNA, 15 bp, Homo sapiens
aatatcctctacatc

SEQ ID NO: 756208 - DNA, 15 bp, Homo sapiens
atatcctctacatcc

SEQ ID NO: 756209 - DNA, 15 bp, Homo sapiens
tatcctctacatcca

SEQ ID NO: 756210 - DNA, 15 bp, Homo sapiens
atcctctacatccat

SEQ ID NO: 756211 - DNA, 15 bp, Homo sapiens
tcctctacatccatc

SEQ ID NO: 756212 - DNA, 15 bp, Homo sapiens
cctctacatccatcc

SEQ ID NO: 756213 - DNA, 15 bp, Homo sapiens
ctctacatccatccc

SEQ ID NO: 756214 - DNA, 15 bp, Homo sapiens
tctacatccatcccc

SEQ ID NO: 756215 - DNA, 15 bp, Homo sapiens
ctacatccatccccc

SEQ ID NO: 756216 - DNA, 15 bp, Homo sapiens
tacatccatccccct

SEQ ID NO: 756217 - DNA, 15 bp, Homo sapiens
acatccatccccctt

SEQ ID NO: 756218 - DNA, 15 bp, Homo sapiens
catccatcccccttc

SEQ ID NO: 756219 - DNA, 15 bp, Homo sapiens
atccatcccccttcc

SEQ ID NO: 756220 - DNA, 15 bp, Homo sapiens
tccatcccccttccc

SEQ ID NO: 756221 - DNA, 15 bp, Homo sapiens
ccatcccccttcccc

SEQ ID NO: 756222 - DNA, 15 bp, Homo sapiens
catcccccttcccct

SEQ ID NO: 756223 - DNA, 15 bp, Homo sapiens
atcccccttccccta

SEQ ID NO: 756224 - DNA, 15 bp, Homo sapiens
tcccccttcccctag

SEQ ID NO: 756225 - DNA, 15 bp, Homo sapiens
cccccttcccctagg

SEQ ID NO: 756226 - DNA, 15 bp, Homo sapiens
ccccttcccctaggg

SEQ ID NO: 756227 - DNA, 15 bp, Homo sapiens
cccttcccctagggg

SEQ ID NO: 756228 - DNA, 15 bp, Homo sapiens
ccttcccctagggga

SEQ ID NO: 756229 - DNA, 15 bp, Homo sapiens
cttcccctaggggat

SEQ ID NO: 756230 - DNA, 15 bp, Homo sapiens
ttcccctaggggatg

SEQ ID NO: 756231 - DNA, 15 bp, Homo sapiens
tcccctaggggatgc

SEQ ID NO: 756232 - DNA, 15 bp, Homo sapiens
cccctaggggatgcc

SEQ ID NO: 756233 - DNA, 15 bp, Homo sapiens
ccctaggggatgcct

SEQ ID NO: 756234 - DNA, 15 bp, Homo sapiens
cctaggggatgcctc

SEQ ID NO: 756235 - DNA, 15 bp, Homo sapiens
ctaggggatgcctcc

SEQ ID NO: 756236 - DNA, 15 bp, Homo sapiens
taggggatgcctcct

SEQ ID NO: 756237 - DNA, 15 bp, Homo sapiens
aggggatgcctcctt

SEQ ID NO: 756238 - DNA, 15 bp, Homo sapiens
ggggatgcctcctta

SEQ ID NO: 756239 - DNA, 15 bp, Homo sapiens
gggatgcctccttat

SEQ ID NO: 756240 - DNA, 15 bp, Homo sapiens
ggatgcctccttata

SEQ ID NO: 756241 - DNA, 15 bp, Homo sapiens
gatgcctccttatac

SEQ ID NO: 756242 - DNA, 15 bp, Homo sapiens
atgcctccttataca

SEQ ID NO: 756243 - DNA, 15 bp, Homo sapiens
tgcctccttatacac

SEQ ID NO: 756244 - DNA, 15 bp, Homo sapiens
gcctccttatacaca

SEQ ID NO: 756245 - DNA, 15 bp, Homo sapiens
cctccttatacacac

SEQ ID NO: 756246 - DNA, 15 bp, Homo sapiens
ctccttatacacact

SEQ ID NO: 756247 - DNA, 15 bp, Homo sapiens
tccttatacacactg

SEQ ID NO: 756248 - DNA, 15 bp, Homo sapiens
ccttatacacactgg

SEQ ID NO: 756249 - DNA, 15 bp, Homo sapiens
cttatacacactggg

SEQ ID NO: 756250 - DNA, 15 bp, Homo sapiens
ttatacacactgggc

SEQ ID NO: 756251 - DNA, 15 bp, Homo sapiens
tatacacactgggct

SEQ ID NO: 756252 - DNA, 15 bp, Homo sapiens
atacacactgggctc

SEQ ID NO: 756253 - DNA, 15 bp, Homo sapiens
tacacactgggctct

SEQ ID NO: 756254 - DNA, 15 bp, Homo sapiens
acacactgggctctg

SEQ ID NO: 756255 - DNA, 15 bp, Homo sapiens
cacactgggctctga

SEQ ID NO: 756256 - DNA, 15 bp, Homo sapiens
acactgggctctgac

SEQ ID NO: 756257 - DNA, 15 bp, Homo sapiens
cactgggctctgaca

SEQ ID NO: 756258 - DNA, 15 bp, Homo sapiens
actgggctctgacac

SEQ ID NO: 756259 - DNA, 15 bp, Homo sapiens
ctgggctctgacacc

SEQ ID NO: 756260 - DNA, 15 bp, Homo sapiens
tgggctctgacacca

SEQ ID NO: 756261 - DNA, 15 bp, Homo sapiens
gggctctgacaccac

SEQ ID NO: 756262 - DNA, 15 bp, Homo sapiens
ggctctgacaccaca

SEQ ID NO: 756263 - DNA, 15 bp, Homo sapiens
gctctgacaccacat

SEQ ID NO: 756264 - DNA, 15 bp, Homo sapiens
ctctgacaccacatg

SEQ ID NO: 756265 - DNA, 15 bp, Homo sapiens
tctgacaccacatgc

SEQ ID NO: 756266 - DNA, 15 bp, Homo sapiens
ctgacaccacatgca

SEQ ID NO: 756267 - DNA, 15 bp, Homo sapiens
tgacaccacatgcag

SEQ ID NO: 756268 - DNA, 15 bp, Homo sapiens
gacaccacatgcagc

SEQ ID NO: 756269 - DNA, 15 bp, Homo sapiens
acaccacatgcagcc

SEQ ID NO: 756270 - DNA, 15 bp, Homo sapiens
caccacatgcagcct

SEQ ID NO: 756271 - DNA, 15 bp, Homo sapiens
accacatgcagcctg

SEQ ID NO: 756272 - DNA, 15 bp, Homo sapiens
ccacatgcagcctgc

SEQ ID NO: 756273 - DNA, 15 bp, Homo sapiens
cacatgcagcctgcc

SEQ ID NO: 756274 - DNA, 15 bp, Homo sapiens
acatgcagcctgccc

SEQ ID NO: 756275 - DNA, 15 bp, Homo sapiens
catgcagcctgcccc

SEQ ID NO: 756276 - DNA, 15 bp, Homo sapiens
atgcagcctgccccc

SEQ ID NO: 756277 - DNA, 15 bp, Homo sapiens
tgcagcctgccccct

SEQ ID NO: 756278 - DNA, 15 bp, Homo sapiens
gcagcctgccccctg

SEQ ID NO: 756279 - DNA, 15 bp, Homo sapiens
cagcctgccccctgt

SEQ ID NO: 756280 - DNA, 15 bp, Homo sapiens
agcctgccccctgtt

SEQ ID NO: 756281 - DNA, 15 bp, Homo sapiens
gcctgccccctgttc

SEQ ID NO: 756282 - DNA, 15 bp, Homo sapiens
cctgccccctgttct

SEQ ID NO: 756283 - DNA, 15 bp, Homo sapiens
ctgccccctgttctt

SEQ ID NO: 756284 - DNA, 15 bp, Homo sapiens
tgccccctgttctta

SEQ ID NO: 756285 - DNA, 15 bp, Homo sapiens
gccccctgttcttat

SEQ ID NO: 756286 - DNA, 15 bp, Homo sapiens
ccccctgttcttata

SEQ ID NO: 756287 - DNA, 15 bp, Homo sapiens
cccctgttcttatac

SEQ ID NO: 756288 - DNA, 15 bp, Homo sapiens
ccctgttcttatacc

SEQ ID NO: 756289 - DNA, 15 bp, Homo sapiens
cctgttcttataccc

SEQ ID NO: 756290 - DNA, 15 bp, Homo sapiens
ctgttcttataccct

SEQ ID NO: 756291 - DNA, 15 bp, Homo sapiens
tgttcttataccctc

SEQ ID NO: 756292 - DNA, 15 bp, Homo sapiens
gttcttataccctcc

SEQ ID NO: 756293 - DNA, 15 bp, Homo sapiens
ttcttataccctcct

SEQ ID NO: 756294 - DNA, 15 bp, Homo sapiens
tcttataccctcctt

SEQ ID NO: 756295 - DNA, 15 bp, Homo sapiens
cttataccctccttt

SEQ ID NO: 756296 - DNA, 15 bp, Homo sapiens
ttataccctcctttc

SEQ ID NO: 756297 - DNA, 15 bp, Homo sapiens
tataccctcctttct

SEQ ID NO: 756298 - DNA, 15 bp, Homo sapiens
ataccctcctttctc

SEQ ID NO: 756299 - DNA, 15 bp, Homo sapiens
taccctcctttctct

SEQ ID NO: 756300 - DNA, 15 bp, Homo sapiens
accctcctttctctg

SEQ ID NO: 756301 - DNA, 15 bp, Homo sapiens
ccctcctttctctgc

SEQ ID NO: 756302 - DNA, 15 bp, Homo sapiens
cctcctttctctgct

SEQ ID NO: 756303 - DNA, 15 bp, Homo sapiens
ctcctttctctgctt

SEQ ID NO: 756304 - DNA, 15 bp, Homo sapiens
tcctttctctgcttg

SEQ ID NO: 756305 - DNA, 15 bp, Homo sapiens
cctttctctgcttgg

SEQ ID NO: 756306 - DNA, 15 bp, Homo sapiens
ctttctctgcttggg

SEQ ID NO: 756307 - DNA, 15 bp, Homo sapiens
tttctctgcttgggc

SEQ ID NO: 756308 - DNA, 15 bp, Homo sapiens
ttctctgcttgggcc

SEQ ID NO: 756309 - DNA, 15 bp, Homo sapiens
tctctgcttgggcca

SEQ ID NO: 756310 - DNA, 15 bp, Homo sapiens
ctctgcttgggccat

SEQ ID NO: 756311 - DNA, 15 bp, Homo sapiens
tctgcttgggccatg

SEQ ID NO: 756312 - DNA, 15 bp, Homo sapiens
ctgcttgggccatga

SEQ ID NO: 756313 - DNA, 15 bp, Homo sapiens
tgcttgggccatgac

SEQ ID NO: 756314 - DNA, 15 bp, Homo sapiens
gcttgggccatgaca

SEQ ID NO: 756315 - DNA, 15 bp, Homo sapiens
cttgggccatgacac

SEQ ID NO: 756316 - DNA, 15 bp, Homo sapiens
ttgggccatgacacc

SEQ ID NO: 756317 - DNA, 15 bp, Homo sapiens
tgggccatgacaccc

SEQ ID NO: 756318 - DNA, 15 bp, Homo sapiens
gggccatgacaccct

SEQ ID NO: 756319 - DNA, 15 bp, Homo sapiens
ggccatgacacccta

SEQ ID NO: 756320 - DNA, 15 bp, Homo sapiens
gccatgacaccctaa

SEQ ID NO: 756321 - DNA, 15 bp, Homo sapiens
ccatgacaccctaag

SEQ ID NO: 756322 - DNA, 15 bp, Homo sapiens
catgacaccctaagc

SEQ ID NO: 756323 - DNA, 15 bp, Homo sapiens
atgacaccctaagca

SEQ ID NO: 756324 - DNA, 15 bp, Homo sapiens
tgacaccctaagcag

SEQ ID NO: 756325 - DNA, 15 bp, Homo sapiens
gacaccctaagcagg

SEQ ID NO: 756326 - DNA, 15 bp, Homo sapiens
acaccctaagcaggg

SEQ ID NO: 756327 - DNA, 15 bp, Homo sapiens
caccctaagcagggc

SEQ ID NO: 756328 - DNA, 15 bp, Homo sapiens
accctaagcagggct

SEQ ID NO: 756329 - DNA, 15 bp, Homo sapiens
ccctaagcagggctg

SEQ ID NO: 756330 - DNA, 15 bp, Homo sapiens
cctaagcagggctgc

SEQ ID NO: 756331 - DNA, 15 bp, Homo sapiens
ctaagcagggctgcc

SEQ ID NO: 756332 - DNA, 15 bp, Homo sapiens
taagcagggctgccg

SEQ ID NO: 756333 - DNA, 15 bp, Homo sapiens
aagcagggctgccgc

SEQ ID NO: 756334 - DNA, 15 bp, Homo sapiens
agcagggctgccgca

SEQ ID NO: 756335 - DNA, 15 bp, Homo sapiens
gcagggctgccgcat

SEQ ID NO: 756336 - DNA, 15 bp, Homo sapiens
cagggctgccgcatg

SEQ ID NO: 756337 - DNA, 15 bp, Homo sapiens
agggctgccgcatgc

SEQ ID NO: 756338 - DNA, 15 bp, Homo sapiens
gggctgccgcatgca

SEQ ID NO: 756339 - DNA, 15 bp, Homo sapiens
ggctgccgcatgcat

SEQ ID NO: 756340 - DNA, 15 bp, Homo sapiens
gctgccgcatgcatc

SEQ ID NO: 756341 - DNA, 15 bp, Homo sapiens
ctgccgcatgcatcg

SEQ ID NO: 756342 - DNA, 15 bp, Homo sapiens
tgccgcatgcatcga

SEQ ID NO: 756343 - DNA, 15 bp, Homo sapiens
gccgcatgcatcgat

SEQ ID NO: 756344 - DNA, 15 bp, Homo sapiens
ccgcatgcatcgatg

SEQ ID NO: 756345 - DNA, 15 bp, Homo sapiens
cgcatgcatcgatgc

SEQ ID NO: 756346 - DNA, 15 bp, Homo sapiens
gcatgcatcgatgct

SEQ ID NO: 756347 - DNA, 15 bp, Homo sapiens
catgcatcgatgctg

SEQ ID NO: 756348 - DNA, 15 bp, Homo sapiens
atgcatcgatgctgt

SEQ ID NO: 756349 - DNA, 15 bp, Homo sapiens
tgcatcgatgctgtc

SEQ ID NO: 756350 - DNA, 15 bp, Homo sapiens
gcatcgatgctgtcc

SEQ ID NO: 756351 - DNA, 15 bp, Homo sapiens
catcgatgctgtcct

SEQ ID NO: 756352 - DNA, 15 bp, Homo sapiens
atcgatgctgtcctc

SEQ ID NO: 756353 - DNA, 15 bp, Homo sapiens
tcgatgctgtcctca

SEQ ID NO: 756354 - DNA, 15 bp, Homo sapiens
cgatgctgtcctcac

SEQ ID NO: 756355 - DNA, 15 bp, Homo sapiens
gatgctgtcctcacc

SEQ ID NO: 756356 - DNA, 15 bp, Homo sapiens
atgctgtcctcacct

SEQ ID NO: 756357 - DNA, 15 bp, Homo sapiens
tgctgtcctcacctt

SEQ ID NO: 756358 - DNA, 15 bp, Homo sapiens
gctgtcctcaccttg

SEQ ID NO: 756359 - DNA, 15 bp, Homo sapiens
ctgtcctcaccttgc

SEQ ID NO: 756360 - DNA, 15 bp, Homo sapiens
tgtcctcaccttgct

SEQ ID NO: 756361 - DNA, 15 bp, Homo sapiens
gtcctcaccttgctg

SEQ ID NO: 756362 - DNA, 15 bp, Homo sapiens
tcctcaccttgctga

SEQ ID NO: 756363 - DNA, 15 bp, Homo sapiens
cctcaccttgctgag

SEQ ID NO: 756364 - DNA, 15 bp, Homo sapiens
ctcaccttgctgagt

SEQ ID NO: 756365 - DNA, 15 bp, Homo sapiens
tcaccttgctgagtc

SEQ ID NO: 756366 - DNA, 15 bp, Homo sapiens
caccttgctgagtct

SEQ ID NO: 756367 - DNA, 15 bp, Homo sapiens
accttgctgagtctc

SEQ ID NO: 756368 - DNA, 15 bp, Homo sapiens
ccttgctgagtctca

SEQ ID NO: 756369 - DNA, 15 bp, Homo sapiens
cttgctgagtctcag

SEQ ID NO: 756370 - DNA, 15 bp, Homo sapiens
ttgctgagtctcagt

SEQ ID NO: 756371 - DNA, 15 bp, Homo sapiens
tgctgagtctcagtg

SEQ ID NO: 756372 - DNA, 15 bp, Homo sapiens
gctgagtctcagtgc

SEQ ID NO: 756373 - DNA, 15 bp, Homo sapiens
ctgagtctcagtgcc

SEQ ID NO: 756374 - DNA, 15 bp, Homo sapiens
tgagtctcagtgccg

SEQ ID NO: 756375 - DNA, 15 bp, Homo sapiens
gagtctcagtgccgc

SEQ ID NO: 756376 - DNA, 15 bp, Homo sapiens
agtctcagtgccgct

SEQ ID NO: 756377 - DNA, 15 bp, Homo sapiens
gtctcagtgccgcta

SEQ ID NO: 756378 - DNA, 15 bp, Homo sapiens
tctcagtgccgctac

SEQ ID NO: 756379 - DNA, 15 bp, Homo sapiens
ctcagtgccgctacc

SEQ ID NO: 756380 - DNA, 15 bp, Homo sapiens
tcagtgccgctacca

SEQ ID NO: 756381 - DNA, 15 bp, Homo sapiens
cagtgccgctaccaa

SEQ ID NO: 756382 - DNA, 15 bp, Homo sapiens
agtgccgctaccaac

SEQ ID NO: 756383 - DNA, 15 bp, Homo sapiens
gtgccgctaccaacc

SEQ ID NO: 756384 - DNA, 15 bp, Homo sapiens
tgccgctaccaaccc

SEQ ID NO: 756385 - DNA, 15 bp, Homo sapiens
gccgctaccaacccc

SEQ ID NO: 756386 - DNA, 15 bp, Homo sapiens
ccgctaccaaccccc

SEQ ID NO: 756387 - DNA, 15 bp, Homo sapiens
cgctaccaaccccca

SEQ ID NO: 756388 - DNA, 15 bp, Homo sapiens
gctaccaacccccac

SEQ ID NO: 756389 - DNA, 15 bp, Homo sapiens
ctaccaacccccact

SEQ ID NO: 756390 - DNA, 15 bp, Homo sapiens
taccaacccccactg

SEQ ID NO: 756391 - DNA, 15 bp, Homo sapiens
accaacccccactgt

SEQ ID NO: 756392 - DNA, 15 bp, Homo sapiens
ccaacccccactgtc

SEQ ID NO: 756393 - DNA, 15 bp, Homo sapiens
caacccccactgtct

SEQ ID NO: 756394 - DNA, 15 bp, Homo sapiens
aacccccactgtctg

SEQ ID NO: 756395 - DNA, 15 bp, Homo sapiens
acccccactgtctgt

SEQ ID NO: 756396 - DNA, 15 bp, Homo sapiens
cccccactgtctgtc

SEQ ID NO: 756397 - DNA, 15 bp, Homo sapiens
ccccactgtctgtct

SEQ ID NO: 756398 - DNA, 15 bp, Homo sapiens
cccactgtctgtctt

SEQ ID NO: 756399 - DNA, 15 bp, Homo sapiens
ccactgtctgtcttc

SEQ ID NO: 756400 - DNA, 15 bp, Homo sapiens
cactgtctgtcttca

SEQ ID NO: 756401 - DNA, 15 bp, Homo sapiens
actgtctgtcttcac

SEQ ID NO: 756402 - DNA, 15 bp, Homo sapiens
ctgtctgtcttcacc

SEQ ID NO: 756403 - DNA, 15 bp, Homo sapiens
tgtctgtcttcaccc

SEQ ID NO: 756404 - DNA, 15 bp, Homo sapiens
gtctgtcttcaccca

SEQ ID NO: 756405 - DNA, 15 bp, Homo sapiens
tctgtcttcacccaa

SEQ ID NO: 756406 - DNA, 15 bp, Homo sapiens
ctgtcttcacccaag

SEQ ID NO: 756407 - DNA, 15 bp, Homo sapiens
tgtcttcacccaagc

SEQ ID NO: 756408 - DNA, 15 bp, Homo sapiens
gtcttcacccaagca

SEQ ID NO: 756409 - DNA, 15 bp, Homo sapiens
tcttcacccaagcat

SEQ ID NO: 756410 - DNA, 15 bp, Homo sapiens
cttcacccaagcata

SEQ ID NO: 756411 - DNA, 15 bp, Homo sapiens
ttcacccaagcatag

SEQ ID NO: 756412 - DNA, 15 bp, Homo sapiens
tcacccaagcataga

SEQ ID NO: 756413 - DNA, 15 bp, Homo sapiens
cacccaagcatagat

SEQ ID NO: 756414 - DNA, 15 bp, Homo sapiens
acccaagcatagata

SEQ ID NO: 756415 - DNA, 15 bp, Homo sapiens
cccaagcatagatac

SEQ ID NO: 756416 - DNA, 15 bp, Homo sapiens
ccaagcatagatacc

SEQ ID NO: 756417 - DNA, 15 bp, Homo sapiens
caagcatagatacct

SEQ ID NO: 756418 - DNA, 15 bp, Homo sapiens
aagcatagataccta

SEQ ID NO: 756419 - DNA, 15 bp, Homo sapiens
agcatagatacctac

SEQ ID NO: 756420 - DNA, 15 bp, Homo sapiens
gcatagatacctacc

SEQ ID NO: 756421 - DNA, 15 bp, Homo sapiens
catagatacctacct

SEQ ID NO: 756422 - DNA, 15 bp, Homo sapiens
atagatacctacctc

SEQ ID NO: 756423 - DNA, 15 bp, Homo sapiens
tagatacctacctcg

SEQ ID NO: 756424 - DNA, 15 bp, Homo sapiens
agatacctacctcgc

SEQ ID NO: 756425 - DNA, 15 bp, Homo sapiens
gatacctacctcgct

SEQ ID NO: 756426 - DNA, 15 bp, Homo sapiens
atacctacctcgctt

SEQ ID NO: 756427 - DNA, 15 bp, Homo sapiens
tacctacctcgcttg

SEQ ID NO: 756428 - DNA, 15 bp, Homo sapiens
acctacctcgcttgg

SEQ ID NO: 756429 - DNA, 15 bp, Homo sapiens
cctacctcgcttggc

SEQ ID NO: 756430 - DNA, 15 bp, Homo sapiens
ctacctcgcttggcc

SEQ ID NO: 756431 - DNA, 15 bp, Homo sapiens
tacctcgcttggccc

SEQ ID NO: 756432 - DNA, 15 bp, Homo sapiens
acctcgcttggcccc

SEQ ID NO: 756433 - DNA, 15 bp, Homo sapiens
cctcgcttggcccca

SEQ ID NO: 756434 - DNA, 15 bp, Homo sapiens
ctcgcttggccccac

SEQ ID NO: 756435 - DNA, 15 bp, Homo sapiens
tcgcttggccccacc

SEQ ID NO: 756436 - DNA, 15 bp, Homo sapiens
cgcttggccccacct

SEQ ID NO: 756437 - DNA, 15 bp, Homo sapiens
gcttggccccaccta

SEQ ID NO: 756438 - DNA, 15 bp, Homo sapiens
cttggccccacctat

SEQ ID NO: 756439 - DNA, 15 bp, Homo sapiens
ttggccccacctatg

SEQ ID NO: 756440 - DNA, 15 bp, Homo sapiens
tggccccacctatga

SEQ ID NO: 756441 - DNA, 15 bp, Homo sapiens
ggccccacctatgac

SEQ ID NO: 756442 - DNA, 15 bp, Homo sapiens
gccccacctatgact

SEQ ID NO: 756443 - DNA, 15 bp, Homo sapiens
ccccacctatgactt

SEQ ID NO: 756444 - DNA, 15 bp, Homo sapiens
cccacctatgacttt

SEQ ID NO: 756445 - DNA, 15 bp, Homo sapiens
ccacctatgacttta

SEQ ID NO: 756446 - DNA, 15 bp, Homo sapiens
cacctatgactttag

SEQ ID NO: 756447 - DNA, 15 bp, Homo sapiens
acctatgactttaga

SEQ ID NO: 756448 - DNA, 15 bp, Homo sapiens
cctatgactttagaa

SEQ ID NO: 756449 - DNA, 15 bp, Homo sapiens
ctatgactttagaac

SEQ ID NO: 756450 - DNA, 15 bp, Homo sapiens
tatgactttagaact

SEQ ID NO: 756451 - DNA, 15 bp, Homo sapiens
atgactttagaacta

SEQ ID NO: 756452 - DNA, 15 bp, Homo sapiens
tgactttagaactat

SEQ ID NO: 756453 - DNA, 15 bp, Homo sapiens
gactttagaactatg

SEQ ID NO: 756454 - DNA, 15 bp, Homo sapiens
actttagaactatgt

SEQ ID NO: 756455 - DNA, 15 bp, Homo sapiens
ctttagaactatgta

SEQ ID NO: 756456 - DNA, 15 bp, Homo sapiens
tttagaactatgtag

SEQ ID NO: 756457 - DNA, 15 bp, Homo sapiens
ttagaactatgtagg

SEQ ID NO: 756458 - DNA, 15 bp, Homo sapiens
tagaactatgtagga

SEQ ID NO: 756459 - DNA, 15 bp, Homo sapiens
agaactatgtaggaa

SEQ ID NO: 756460 - DNA, 15 bp, Homo sapiens
gaactatgtaggaag

SEQ ID NO: 756461 - DNA, 15 bp, Homo sapiens
aactatgtaggaagg

SEQ ID NO: 756462 - DNA, 15 bp, Homo sapiens
actatgtaggaaggg

SEQ ID NO: 756463 - DNA, 15 bp, Homo sapiens
ctatgtaggaagggg

SEQ ID NO: 756464 - DNA, 15 bp, Homo sapiens
tatgtaggaagggga

SEQ ID NO: 756465 - DNA, 15 bp, Homo sapiens
atgtaggaaggggaa

SEQ ID NO: 756466 - DNA, 15 bp, Homo sapiens
tgtaggaaggggaag

SEQ ID NO: 756467 - DNA, 15 bp, Homo sapiens
gtaggaaggggaaga

SEQ ID NO: 756468 - DNA, 15 bp, Homo sapiens
taggaaggggaagac

SEQ ID NO: 756469 - DNA, 15 bp, Homo sapiens
aggaaggggaagaca

SEQ ID NO: 756470 - DNA, 15 bp, Homo sapiens
ggaaggggaagacaa

SEQ ID NO: 756471 - DNA, 15 bp, Homo sapiens
gaaggggaagacaaa

SEQ ID NO: 756472 - DNA, 15 bp, Homo sapiens
aaggggaagacaaag

SEQ ID NO: 756473 - DNA, 15 bp, Homo sapiens
aggggaagacaaaga

SEQ ID NO: 756474 - DNA, 15 bp, Homo sapiens
ggggaagacaaagag

SEQ ID NO: 756475 - DNA, 15 bp, Homo sapiens
gggaagacaaagagg

SEQ ID NO: 756476 - DNA, 15 bp, Homo sapiens
ggaagacaaagagga

SEQ ID NO: 756477 - DNA, 15 bp, Homo sapiens
gaagacaaagaggag

SEQ ID NO: 756478 - DNA, 15 bp, Homo sapiens
aagacaaagaggagg

SEQ ID NO: 756479 - DNA, 15 bp, Homo sapiens
agacaaagaggaggt

SEQ ID NO: 756480 - DNA, 15 bp, Homo sapiens
gacaaagaggaggtg

SEQ ID NO: 756481 - DNA, 15 bp, Homo sapiens
acaaagaggaggtgg

SEQ ID NO: 756482 - DNA, 15 bp, Homo sapiens
caaagaggaggtggg

SEQ ID NO: 756483 - DNA, 15 bp, Homo sapiens
aaagaggaggtgggc

SEQ ID NO: 756484 - DNA, 15 bp, Homo sapiens
aagaggaggtgggcc

SEQ ID NO: 756485 - DNA, 15 bp, Homo sapiens
agaggaggtgggccc

SEQ ID NO: 756486 - DNA, 15 bp, Homo sapiens
gaggaggtgggccca

SEQ ID NO: 756487 - DNA, 15 bp, Homo sapiens
aggaggtgggcccac

SEQ ID NO: 756488 - DNA, 15 bp, Homo sapiens
ggaggtgggcccacc

SEQ ID NO: 756489 - DNA, 15 bp, Homo sapiens
gaggtgggcccacct

SEQ ID NO: 756490 - DNA, 15 bp, Homo sapiens
aggtgggcccacctt

SEQ ID NO: 756491 - DNA, 15 bp, Homo sapiens
ggtgggcccaccttt

SEQ ID NO: 756492 - DNA, 15 bp, Homo sapiens
gtgggcccaccttta

SEQ ID NO: 756493 - DNA, 15 bp, Homo sapiens
tgggcccacctttat

SEQ ID NO: 756494 - DNA, 15 bp, Homo sapiens
gggcccacctttatg

SEQ ID NO: 756495 - DNA, 15 bp, Homo sapiens
ggcccacctttatga

SEQ ID NO: 756496 - DNA, 15 bp, Homo sapiens
gcccacctttatgat

SEQ ID NO: 756497 - DNA, 15 bp, Homo sapiens
cccacctttatgatt

SEQ ID NO: 756498 - DNA, 15 bp, Homo sapiens
ccacctttatgattg

SEQ ID NO: 756499 - DNA, 15 bp, Homo sapiens
cacctttatgattga

SEQ ID NO: 756500 - DNA, 15 bp, Homo sapiens
acctttatgattgat

SEQ ID NO: 756501 - DNA, 15 bp, Homo sapiens
cctttatgattgatt

SEQ ID NO: 756502 - DNA, 15 bp, Homo sapiens
ctttatgattgattc

SEQ ID NO: 756503 - DNA, 15 bp, Homo sapiens
tttatgattgattct

SEQ ID NO: 756504 - DNA, 15 bp, Homo sapiens
ttatgattgattctc

SEQ ID NO: 756505 - DNA, 15 bp, Homo sapiens
tatgattgattctcc

SEQ ID NO: 756506 - DNA, 15 bp, Homo sapiens
atgattgattctcct

SEQ ID NO: 756507 - DNA, 15 bp, Homo sapiens
tgattgattctcctc

SEQ ID NO: 756508 - DNA, 15 bp, Homo sapiens
gattgattctcctct

SEQ ID NO: 756509 - DNA, 15 bp, Homo sapiens
attgattctcctctc

SEQ ID NO: 756510 - DNA, 15 bp, Homo sapiens
ttgattctcctctca

SEQ ID NO: 756511 - DNA, 15 bp, Homo sapiens
tgattctcctctcac

SEQ ID NO: 756512 - DNA, 15 bp, Homo sapiens
gattctcctctcacc

SEQ ID NO: 756513 - DNA, 15 bp, Homo sapiens
attctcctctcaccc

SEQ ID NO: 756514 - DNA, 15 bp, Homo sapiens
ttctcctctcacccc

SEQ ID NO: 756515 - DNA, 15 bp, Homo sapiens
tctcctctcacccct

SEQ ID NO: 756516 - DNA, 15 bp, Homo sapiens
ctcctctcacccctt

SEQ ID NO: 756517 - DNA, 15 bp, Homo sapiens
tcctctcaccccttt

SEQ ID NO: 756518 - DNA, 15 bp, Homo sapiens
cctctcacccctttc

SEQ ID NO: 756519 - DNA, 15 bp, Homo sapiens
ctctcacccctttct

SEQ ID NO: 756520 - DNA, 15 bp, Homo sapiens
tctcacccctttctc

SEQ ID NO: 756521 - DNA, 15 bp, Homo sapiens
ctcacccctttctct

SEQ ID NO: 756522 - DNA, 15 bp, Homo sapiens
tcacccctttctctt

SEQ ID NO: 756523 - DNA, 15 bp, Homo sapiens
cacccctttctcttt

SEQ ID NO: 756524 - DNA, 15 bp, Homo sapiens
acccctttctctttc

SEQ ID NO: 756525 - DNA, 15 bp, Homo sapiens
cccctttctctttct

SEQ ID NO: 756526 - DNA, 15 bp, Homo sapiens
ccctttctctttctt

SEQ ID NO: 756527 - DNA, 15 bp, Homo sapiens
cctttctctttcttg

SEQ ID NO: 756528 - DNA, 15 bp, Homo sapiens
ctttctctttcttgc

SEQ ID NO: 756529 - DNA, 15 bp, Homo sapiens
tttctctttcttgct

SEQ ID NO: 756530 - DNA, 15 bp, Homo sapiens
ttctctttcttgcta

SEQ ID NO: 756531 - DNA, 15 bp, Homo sapiens
tctctttcttgctac

SEQ ID NO: 756532 - DNA, 15 bp, Homo sapiens
ctctttcttgctacc

SEQ ID NO: 756533 - DNA, 15 bp, Homo sapiens
tctttcttgctacct

SEQ ID NO: 756534 - DNA, 15 bp, Homo sapiens
ctttcttgctacctt

SEQ ID NO: 756535 - DNA, 15 bp, Homo sapiens
tttcttgctaccttt

SEQ ID NO: 756536 - DNA, 15 bp, Homo sapiens
ttcttgctaccttta

SEQ ID NO: 756537 - DNA, 15 bp, Homo sapiens
tcttgctacctttaa

SEQ ID NO: 756538 - DNA, 15 bp, Homo sapiens
cttgctacctttaag

SEQ ID NO: 756539 - DNA, 15 bp, Homo sapiens
ttgctacctttaaga

SEQ ID NO: 756540 - DNA, 15 bp, Homo sapiens
tgctacctttaagaa

SEQ ID NO: 756541 - DNA, 15 bp, Homo sapiens
gctacctttaagaaa

SEQ ID NO: 756542 - DNA, 15 bp, Homo sapiens
ctacctttaagaaaa

SEQ ID NO: 756543 - DNA, 15 bp, Homo sapiens
tacctttaagaaaat

SEQ ID NO: 756544 - DNA, 15 bp, Homo sapiens
acctttaagaaaatc

SEQ ID NO: 756545 - DNA, 15 bp, Homo sapiens
cctttaagaaaatcc

SEQ ID NO: 756546 - DNA, 15 bp, Homo sapiens
ctttaagaaaatcca

SEQ ID NO: 756547 - DNA, 15 bp, Homo sapiens
tttaagaaaatccaa

SEQ ID NO: 756548 - DNA, 15 bp, Homo sapiens
ttaagaaaatccaaa

SEQ ID NO: 756549 - DNA, 15 bp, Homo sapiens
taagaaaatccaaat

SEQ ID NO: 756550 - DNA, 15 bp, Homo sapiens
aagaaaatccaaata

SEQ ID NO: 756551 - DNA, 15 bp, Homo sapiens
agaaaatccaaataa

SEQ ID NO: 756552 - DNA, 15 bp, Homo sapiens
gaaaatccaaataat

SEQ ID NO: 756553 - DNA, 15 bp, Homo sapiens
aaaatccaaataata

SEQ ID NO: 756554 - DNA, 15 bp, Homo sapiens
aaatccaaataatat

SEQ ID NO: 756555 - DNA, 15 bp, Homo sapiens
aatccaaataatata

SEQ ID NO: 756556 - DNA, 15 bp, Homo sapiens
atccaaataatatat

SEQ ID NO: 756557 - DNA, 15 bp, Homo sapiens
tccaaataatatatt

SEQ ID NO: 756558 - DNA, 15 bp, Homo sapiens
ccaaataatatatta

SEQ ID NO: 756559 - DNA, 15 bp, Homo sapiens
caaataatatattaa

SEQ ID NO: 756560 - DNA, 15 bp, Homo sapiens
aaataatatattaat

SEQ ID NO: 756561 - DNA, 15 bp, Homo sapiens
aataatatattaatc

SEQ ID NO: 756562 - DNA, 15 bp, Homo sapiens
ataatatattaatca

SEQ ID NO: 756563 - DNA, 15 bp, Homo sapiens
taatatattaatcag

SEQ ID NO: 756564 - DNA, 15 bp, Homo sapiens
aatatattaatcagt

SEQ ID NO: 756565 - DNA, 15 bp, Homo sapiens
atatattaatcagtt

SEQ ID NO: 756566 - DNA, 15 bp, Homo sapiens
tatattaatcagtta

SEQ ID NO: 756567 - DNA, 15 bp, Homo sapiens
atattaatcagttac

SEQ ID NO: 756568 - DNA, 15 bp, Homo sapiens
tattaatcagttact

SEQ ID NO: 756569 - DNA, 15 bp, Homo sapiens
attaatcagttacta

SEQ ID NO: 756570 - DNA, 15 bp, Homo sapiens
ttaatcagttactac

SEQ ID NO: 756571 - DNA, 15 bp, Homo sapiens
taatcagttactaca

SEQ ID NO: 756572 - DNA, 15 bp, Homo sapiens
aatcagttactacat

SEQ ID NO: 756573 - DNA, 15 bp, Homo sapiens
atcagttactacata

SEQ ID NO: 756574 - DNA, 15 bp, Homo sapiens
tcagttactacatac

SEQ ID NO: 756575 - DNA, 15 bp, Homo sapiens
cagttactacatact

SEQ ID NO: 756576 - DNA, 15 bp, Homo sapiens
agttactacatactt

SEQ ID NO: 756577 - DNA, 15 bp, Homo sapiens
gttactacatactta

SEQ ID NO: 756578 - DNA, 15 bp, Homo sapiens
ttactacatacttaa

SEQ ID NO: 756579 - DNA, 15 bp, Homo sapiens
tactacatacttaaa

SEQ ID NO: 756580 - DNA, 15 bp, Homo sapiens
actacatacttaaag

SEQ ID NO: 756581 - DNA, 15 bp, Homo sapiens
ctacatacttaaagt

SEQ ID NO: 756582 - DNA, 15 bp, Homo sapiens
tacatacttaaagtt

SEQ ID NO: 756583 - DNA, 15 bp, Homo sapiens
acatacttaaagttt

SEQ ID NO: 756584 - DNA, 15 bp, Homo sapiens
catacttaaagtttt

SEQ ID NO: 756585 - DNA, 15 bp, Homo sapiens
atacttaaagttttt

SEQ ID NO: 756586 - DNA, 15 bp, Homo sapiens
tacttaaagtttttg

SEQ ID NO: 756587 - DNA, 15 bp, Homo sapiens
acttaaagtttttgg

SEQ ID NO: 756588 - DNA, 15 bp, Homo sapiens
cttaaagtttttggt

SEQ ID NO: 756589 - DNA, 15 bp, Homo sapiens
ttaaagtttttggtc

SEQ ID NO: 756590 - DNA, 15 bp, Homo sapiens
taaagtttttggtct

SEQ ID NO: 756591 - DNA, 15 bp, Homo sapiens
aaagtttttggtctc

SEQ ID NO: 756592 - DNA, 15 bp, Homo sapiens
aagtttttggtctca

SEQ ID NO: 756593 - DNA, 15 bp, Homo sapiens
agtttttggtctcat

SEQ ID NO: 756594 - DNA, 15 bp, Homo sapiens
gtttttggtctcatt

SEQ ID NO: 756595 - DNA, 15 bp, Homo sapiens
tttttggtctcattc

SEQ ID NO: 756596 - DNA, 15 bp, Homo sapiens
ttttggtctcattct

SEQ ID NO: 756597 - DNA, 15 bp, Homo sapiens
tttggtctcattctt

SEQ ID NO: 756598 - DNA, 15 bp, Homo sapiens
ttggtctcattcttg

SEQ ID NO: 756599 - DNA, 15 bp, Homo sapiens
tggtctcattcttgg

SEQ ID NO: 756600 - DNA, 15 bp, Homo sapiens
ggtctcattcttggt

SEQ ID NO: 756601 - DNA, 15 bp, Homo sapiens
gtctcattcttggtt

SEQ ID NO: 756602 - DNA, 15 bp, Homo sapiens
tctcattcttggttc

SEQ ID NO: 756603 - DNA, 15 bp, Homo sapiens
ctcattcttggttcc

SEQ ID NO: 756604 - DNA, 15 bp, Homo sapiens
tcattcttggttcca

SEQ ID NO: 756605 - DNA, 15 bp, Homo sapiens
cattcttggttccaa

SEQ ID NO: 756606 - DNA, 15 bp, Homo sapiens
attcttggttccaaa

SEQ ID NO: 756607 - DNA, 15 bp, Homo sapiens
ttcttggttccaaag

SEQ ID NO: 756608 - DNA, 15 bp, Homo sapiens
tcttggttccaaagt

SEQ ID NO: 756609 - DNA, 15 bp, Homo sapiens
cttggttccaaagtc

SEQ ID NO: 756610 - DNA, 15 bp, Homo sapiens
ttggttccaaagtca

SEQ ID NO: 756611 - DNA, 15 bp, Homo sapiens
tggttccaaagtcat

SEQ ID NO: 756612 - DNA, 15 bp, Homo sapiens
ggttccaaagtcatg

SEQ ID NO: 756613 - DNA, 15 bp, Homo sapiens
gttccaaagtcatgt

SEQ ID NO: 756614 - DNA, 15 bp, Homo sapiens
ttccaaagtcatgtc

SEQ ID NO: 756615 - DNA, 15 bp, Homo sapiens
tccaaagtcatgtcc

SEQ ID NO: 756616 - DNA, 15 bp, Homo sapiens
ccaaagtcatgtcct

SEQ ID NO: 756617 - DNA, 15 bp, Homo sapiens
caaagtcatgtcctc

SEQ ID NO: 756618 - DNA, 15 bp, Homo sapiens
aaagtcatgtcctct

SEQ ID NO: 756619 - DNA, 15 bp, Homo sapiens
aagtcatgtcctctt

SEQ ID NO: 756620 - DNA, 15 bp, Homo sapiens
agtcatgtcctcttt

SEQ ID NO: 756621 - DNA, 15 bp, Homo sapiens
gtcatgtcctctttc

SEQ ID NO: 756622 - DNA, 15 bp, Homo sapiens
tcatgtcctctttca

SEQ ID NO: 756623 - DNA, 15 bp, Homo sapiens
catgtcctctttcat

SEQ ID NO: 756624 - DNA, 15 bp, Homo sapiens
atgtcctctttcatt

SEQ ID NO: 756625 - DNA, 15 bp, Homo sapiens
tgtcctctttcatta

SEQ ID NO: 756626 - DNA, 15 bp, Homo sapiens
gtcctctttcattaa

SEQ ID NO: 756627 - DNA, 15 bp, Homo sapiens
tcctctttcattaag

SEQ ID NO: 756628 - DNA, 15 bp, Homo sapiens
cctctttcattaagc

SEQ ID NO: 756629 - DNA, 15 bp, Homo sapiens
ctctttcattaagct

SEQ ID NO: 756630 - DNA, 15 bp, Homo sapiens
tctttcattaagcta

SEQ ID NO: 756631 - DNA, 15 bp, Homo sapiens
ctttcattaagctaa

SEQ ID NO: 756632 - DNA, 15 bp, Homo sapiens
tttcattaagctaag

SEQ ID NO: 756633 - DNA, 15 bp, Homo sapiens
ttcattaagctaagc

SEQ ID NO: 756634 - DNA, 15 bp, Homo sapiens
tcattaagctaagct

SEQ ID NO: 756635 - DNA, 15 bp, Homo sapiens
cattaagctaagctc

SEQ ID NO: 756636 - DNA, 15 bp, Homo sapiens
attaagctaagctct

SEQ ID NO: 756637 - DNA, 15 bp, Homo sapiens
ttaagctaagctctc

SEQ ID NO: 756638 - DNA, 15 bp, Homo sapiens
taagctaagctctca

SEQ ID NO: 756639 - DNA, 15 bp, Homo sapiens
aagctaagctctcat

SEQ ID NO: 756640 - DNA, 15 bp, Homo sapiens
agctaagctctcatc

SEQ ID NO: 756641 - DNA, 15 bp, Homo sapiens
gctaagctctcatct

SEQ ID NO: 756642 - DNA, 15 bp, Homo sapiens
ctaagctctcatcta

SEQ ID NO: 756643 - DNA, 15 bp, Homo sapiens
taagctctcatctat

SEQ ID NO: 756644 - DNA, 15 bp, Homo sapiens
aagctctcatctatt

SEQ ID NO: 756645 - DNA, 15 bp, Homo sapiens
agctctcatctattt

SEQ ID NO: 756646 - DNA, 15 bp, Homo sapiens
gctctcatctatttg

SEQ ID NO: 756647 - DNA, 15 bp, Homo sapiens
ctctcatctatttgt

SEQ ID NO: 756648 - DNA, 15 bp, Homo sapiens
tctcatctatttgtc

SEQ ID NO: 756649 - DNA, 15 bp, Homo sapiens
ctcatctatttgtca

SEQ ID NO: 756650 - DNA, 15 bp, Homo sapiens
tcatctatttgtcac

SEQ ID NO: 756651 - DNA, 15 bp, Homo sapiens
catctatttgtcaca

SEQ ID NO: 756652 - DNA, 15 bp, Homo sapiens
atctatttgtcacat

SEQ ID NO: 756653 - DNA, 15 bp, Homo sapiens
tctatttgtcacatc

SEQ ID NO: 756654 - DNA, 15 bp, Homo sapiens
ctatttgtcacatcc

SEQ ID NO: 756655 - DNA, 15 bp, Homo sapiens
tatttgtcacatcct

SEQ ID NO: 756656 - DNA, 15 bp, Homo sapiens
atttgtcacatcctt

SEQ ID NO: 756657 - DNA, 15 bp, Homo sapiens
tttgtcacatccttt

SEQ ID NO: 756658 - DNA, 15 bp, Homo sapiens
ttgtcacatcctttg

SEQ ID NO: 756659 - DNA, 15 bp, Homo sapiens
tgtcacatcctttgg

SEQ ID NO: 756660 - DNA, 15 bp, Homo sapiens
gtcacatcctttggt

SEQ ID NO: 756661 - DNA, 15 bp, Homo sapiens
tcacatcctttggtt

SEQ ID NO: 756662 - DNA, 15 bp, Homo sapiens
cacatcctttggttc

SEQ ID NO: 756663 - DNA, 15 bp, Homo sapiens
acatcctttggttct

SEQ ID NO: 756664 - DNA, 15 bp, Homo sapiens
catcctttggttctt

SEQ ID NO: 756665 - DNA, 15 bp, Homo sapiens
atcctttggttctta

SEQ ID NO: 756666 - DNA, 15 bp, Homo sapiens
tcctttggttcttaa

SEQ ID NO: 756667 - DNA, 15 bp, Homo sapiens
cctttggttcttaag

SEQ ID NO: 756668 - DNA, 15 bp, Homo sapiens
ctttggttcttaagg

SEQ ID NO: 756669 - DNA, 15 bp, Homo sapiens
tttggttcttaaggt

SEQ ID NO: 756670 - DNA, 15 bp, Homo sapiens
ttggttcttaaggtg

SEQ ID NO: 756671 - DNA, 15 bp, Homo sapiens
tggttcttaaggtga

SEQ ID NO: 756672 - DNA, 15 bp, Homo sapiens
ggttcttaaggtgat

SEQ ID NO: 756673 - DNA, 15 bp, Homo sapiens
gttcttaaggtgata

SEQ ID NO: 756674 - DNA, 15 bp, Homo sapiens
ttcttaaggtgatat

SEQ ID NO: 756675 - DNA, 15 bp, Homo sapiens
tcttaaggtgatatc

SEQ ID NO: 756676 - DNA, 15 bp, Homo sapiens
cttaaggtgatatcg

SEQ ID NO: 756677 - DNA, 15 bp, Homo sapiens
ttaaggtgatatcga

SEQ ID NO: 756678 - DNA, 15 bp, Homo sapiens
taaggtgatatcgat

SEQ ID NO: 756679 - DNA, 15 bp, Homo sapiens
aaggtgatatcgatc

SEQ ID NO: 756680 - DNA, 15 bp, Homo sapiens
aggtgatatcgatca

SEQ ID NO: 756681 - DNA, 15 bp, Homo sapiens
ggtgatatcgatcaa

SEQ ID NO: 756682 - DNA, 15 bp, Homo sapiens
gtgatatcgatcaaa

SEQ ID NO: 756683 - DNA, 15 bp, Homo sapiens
tgatatcgatcaaat

SEQ ID NO: 756684 - DNA, 15 bp, Homo sapiens
gatatcgatcaaatt

SEQ ID NO: 756685 - DNA, 15 bp, Homo sapiens
atatcgatcaaatta

SEQ ID NO: 756686 - DNA, 15 bp, Homo sapiens
tatcgatcaaattat

SEQ ID NO: 756687 - DNA, 15 bp, Homo sapiens
atcgatcaaattatg

SEQ ID NO: 756688 - DNA, 15 bp, Homo sapiens
tcgatcaaattatgt

SEQ ID NO: 756689 - DNA, 15 bp, Homo sapiens
cgatcaaattatgtg

SEQ ID NO: 756690 - DNA, 15 bp, Homo sapiens
gatcaaattatgtga

SEQ ID NO: 756691 - DNA, 15 bp, Homo sapiens
atcaaattatgtgaa

SEQ ID NO: 756692 - DNA, 15 bp, Homo sapiens
tcaaattatgtgaag

SEQ ID NO: 756693 - DNA, 15 bp, Homo sapiens
caaattatgtgaaga

SEQ ID NO: 756694 - DNA, 15 bp, Homo sapiens
aaattatgtgaagat

SEQ ID NO: 756695 - DNA, 15 bp, Homo sapiens
aattatgtgaagatg

SEQ ID NO: 756696 - DNA, 15 bp, Homo sapiens
attatgtgaagatgt

SEQ ID NO: 756697 - DNA, 15 bp, Homo sapiens
ttatgtgaagatgta

SEQ ID NO: 756698 - DNA, 15 bp, Homo sapiens
tatgtgaagatgtaa

SEQ ID NO: 756699 - DNA, 15 bp, Homo sapiens
atgtgaagatgtaag

SEQ ID NO: 756700 - DNA, 15 bp, Homo sapiens
tgtgaagatgtaagg

SEQ ID NO: 756701 - DNA, 15 bp, Homo sapiens
gtgaagatgtaaggc

SEQ ID NO: 756702 - DNA, 15 bp, Homo sapiens
tgaagatgtaaggcc

SEQ ID NO: 756703 - DNA, 15 bp, Homo sapiens
gaagatgtaaggcct

SEQ ID NO: 756704 - DNA, 15 bp, Homo sapiens
aagatgtaaggcctt

SEQ ID NO: 756705 - DNA, 15 bp, Homo sapiens
agatgtaaggccttg

SEQ ID NO: 756706 - DNA, 15 bp, Homo sapiens
gatgtaaggccttga

SEQ ID NO: 756707 - DNA, 15 bp, Homo sapiens
atgtaaggccttgaa

SEQ ID NO: 756708 - DNA, 15 bp, Homo sapiens
tgtaaggccttgaag

SEQ ID NO: 756709 - DNA, 15 bp, Homo sapiens
gtaaggccttgaaga

SEQ ID NO: 756710 - DNA, 15 bp, Homo sapiens
taaggccttgaagaa

SEQ ID NO: 756711 - DNA, 15 bp, Homo sapiens
aaggccttgaagaaa

SEQ ID NO: 756712 - DNA, 15 bp, Homo sapiens
aggccttgaagaaac

SEQ ID NO: 756713 - DNA, 15 bp, Homo sapiens
ggccttgaagaaacc

SEQ ID NO: 756714 - DNA, 15 bp, Homo sapiens
gccttgaagaaacct

SEQ ID NO: 756715 - DNA, 15 bp, Homo sapiens
ccttgaagaaacctt

SEQ ID NO: 756716 - DNA, 15 bp, Homo sapiens
cttgaagaaaccttg

SEQ ID NO: 756717 - DNA, 15 bp, Homo sapiens
ttgaagaaaccttgc

SEQ ID NO: 756718 - DNA, 15 bp, Homo sapiens
tgaagaaaccttgca

SEQ ID NO: 756719 - DNA, 15 bp, Homo sapiens
gaagaaaccttgcaa

SEQ ID NO: 756720 - DNA, 15 bp, Homo sapiens
aagaaaccttgcaaa

SEQ ID NO: 756721 - DNA, 15 bp, Homo sapiens
agaaaccttgcaaac

SEQ ID NO: 756722 - DNA, 15 bp, Homo sapiens
gaaaccttgcaaacc

SEQ ID NO: 756723 - DNA, 15 bp, Homo sapiens
aaaccttgcaaacct

SEQ ID NO: 756724 - DNA, 15 bp, Homo sapiens
aaccttgcaaacctt

SEQ ID NO: 756725 - DNA, 15 bp, Homo sapiens
accttgcaaaccttg

SEQ ID NO: 756726 - DNA, 15 bp, Homo sapiens
ccttgcaaaccttgc

SEQ ID NO: 756727 - DNA, 15 bp, Homo sapiens
cttgcaaaccttgcc

SEQ ID NO: 756728 - DNA, 15 bp, Homo sapiens
ttgcaaaccttgcca

SEQ ID NO: 756729 - DNA, 15 bp, Homo sapiens
tgcaaaccttgccac

SEQ ID NO: 756730 - DNA, 15 bp, Homo sapiens
gcaaaccttgccaca

SEQ ID NO: 756731 - DNA, 15 bp, Homo sapiens
caaaccttgccacaa

SEQ ID NO: 756732 - DNA, 15 bp, Homo sapiens
aaaccttgccacaaa

SEQ ID NO: 756733 - DNA, 15 bp, Homo sapiens
aaccttgccacaaag

SEQ ID NO: 756734 - DNA, 15 bp, Homo sapiens
accttgccacaaaga

SEQ ID NO: 756735 - DNA, 15 bp, Homo sapiens
ccttgccacaaagag

SEQ ID NO: 756736 - DNA, 15 bp, Homo sapiens
cttgccacaaagagc

SEQ ID NO: 756737 - DNA, 15 bp, Homo sapiens
ttgccacaaagagca

SEQ ID NO: 756738 - DNA, 15 bp, Homo sapiens
tgccacaaagagcat

SEQ ID NO: 756739 - DNA, 15 bp, Homo sapiens
gccacaaagagcatg

SEQ ID NO: 756740 - DNA, 15 bp, Homo sapiens
ccacaaagagcatgt

SEQ ID NO: 756741 - DNA, 15 bp, Homo sapiens
cacaaagagcatgtc

SEQ ID NO: 756742 - DNA, 15 bp, Homo sapiens
acaaagagcatgtct

SEQ ID NO: 756743 - DNA, 15 bp, Homo sapiens
caaagagcatgtcta

SEQ ID NO: 756744 - DNA, 15 bp, Homo sapiens
aaagagcatgtctat

SEQ ID NO: 756745 - DNA, 15 bp, Homo sapiens
aagagcatgtctatt

SEQ ID NO: 756746 - DNA, 15 bp, Homo sapiens
agagcatgtctattg

SEQ ID NO: 756747 - DNA, 15 bp, Homo sapiens
gagcatgtctattgg

SEQ ID NO: 756748 - DNA, 15 bp, Homo sapiens
agcatgtctattgga

SEQ ID NO: 756749 - DNA, 15 bp, Homo sapiens
gcatgtctattggaa

SEQ ID NO: 756750 - DNA, 15 bp, Homo sapiens
catgtctattggaaa

SEQ ID NO: 756751 - DNA, 15 bp, Homo sapiens
atgtctattggaaag

SEQ ID NO: 756752 - DNA, 15 bp, Homo sapiens
tgtctattggaaagc

SEQ ID NO: 756753 - DNA, 15 bp, Homo sapiens
gtctattggaaagca

SEQ ID NO: 756754 - DNA, 15 bp, Homo sapiens
tctattggaaagcag

SEQ ID NO: 756755 - DNA, 15 bp, Homo sapiens
ctattggaaagcagc

SEQ ID NO: 756756 - DNA, 15 bp, Homo sapiens
tattggaaagcagca

SEQ ID NO: 756757 - DNA, 15 bp, Homo sapiens
attggaaagcagcag

SEQ ID NO: 756758 - DNA, 15 bp, Homo sapiens
ttggaaagcagcagt

SEQ ID NO: 756759 - DNA, 15 bp, Homo sapiens
tggaaagcagcagtt

SEQ ID NO: 756760 - DNA, 15 bp, Homo sapiens
ggaaagcagcagttt

SEQ ID NO: 756761 - DNA, 15 bp, Homo sapiens
gaaagcagcagtttg

SEQ ID NO: 756762 - DNA, 15 bp, Homo sapiens
aaagcagcagtttga

SEQ ID NO: 756763 - DNA, 15 bp, Homo sapiens
aagcagcagtttgaa

SEQ ID NO: 756764 - DNA, 15 bp, Homo sapiens
agcagcagtttgaat

SEQ ID NO: 756765 - DNA, 15 bp, Homo sapiens
gcagcagtttgaatg

SEQ ID NO: 756766 - DNA, 15 bp, Homo sapiens
cagcagtttgaatgc

SEQ ID NO: 756767 - DNA, 15 bp, Homo sapiens
agcagtttgaatgct

SEQ ID NO: 756768 - DNA, 15 bp, Homo sapiens
gcagtttgaatgcta

SEQ ID NO: 756769 - DNA, 15 bp, Homo sapiens
cagtttgaatgctag

SEQ ID NO: 756770 - DNA, 15 bp, Homo sapiens
agtttgaatgctagc

SEQ ID NO: 756771 - DNA, 15 bp, Homo sapiens
gtttgaatgctagct

SEQ ID NO: 756772 - DNA, 15 bp, Homo sapiens
tttgaatgctagctc

SEQ ID NO: 756773 - DNA, 15 bp, Homo sapiens
ttgaatgctagctcc

SEQ ID NO: 756774 - DNA, 15 bp, Homo sapiens
tgaatgctagctcca

SEQ ID NO: 756775 - DNA, 15 bp, Homo sapiens
gaatgctagctccag

SEQ ID NO: 756776 - DNA, 15 bp, Homo sapiens
aatgctagctccagt

SEQ ID NO: 756777 - DNA, 15 bp, Homo sapiens
atgctagctccagtt

SEQ ID NO: 756778 - DNA, 15 bp, Homo sapiens
tgctagctccagttt

SEQ ID NO: 756779 - DNA, 15 bp, Homo sapiens
gctagctccagtttg

SEQ ID NO: 756780 - DNA, 15 bp, Homo sapiens
ctagctccagtttgc

SEQ ID NO: 756781 - DNA, 15 bp, Homo sapiens
tagctccagtttgca

SEQ ID NO: 756782 - DNA, 15 bp, Homo sapiens
agctccagtttgcac

SEQ ID NO: 756783 - DNA, 15 bp, Homo sapiens
gctccagtttgcacg

SEQ ID NO: 756784 - DNA, 15 bp, Homo sapiens
ctccagtttgcacgt

SEQ ID NO: 756785 - DNA, 15 bp, Homo sapiens
tccagtttgcacgta

SEQ ID NO: 756786 - DNA, 15 bp, Homo sapiens
ccagtttgcacgtat

SEQ ID NO: 756787 - DNA, 15 bp, Homo sapiens
cagtttgcacgtatt

SEQ ID NO: 756788 - DNA, 15 bp, Homo sapiens
agtttgcacgtattt

SEQ ID NO: 756789 - DNA, 15 bp, Homo sapiens
gtttgcacgtattta

SEQ ID NO: 756790 - DNA, 15 bp, Homo sapiens
tttgcacgtatttat

SEQ ID NO: 756791 - DNA, 15 bp, Homo sapiens
ttgcacgtatttatg

SEQ ID NO: 756792 - DNA, 15 bp, Homo sapiens
tgcacgtatttatgt

SEQ ID NO: 756793 - DNA, 15 bp, Homo sapiens
gcacgtatttatgtc

SEQ ID NO: 756794 - DNA, 15 bp, Homo sapiens
cacgtatttatgtca

SEQ ID NO: 756795 - DNA, 15 bp, Homo sapiens
acgtatttatgtcag

SEQ ID NO: 756796 - DNA, 15 bp, Homo sapiens
cgtatttatgtcagc

SEQ ID NO: 756797 - DNA, 15 bp, Homo sapiens
gtatttatgtcagct

SEQ ID NO: 756798 - DNA, 15 bp, Homo sapiens
tatttatgtcagctg

SEQ ID NO: 756799 - DNA, 15 bp, Homo sapiens
atttatgtcagctgt

SEQ ID NO: 756800 - DNA, 15 bp, Homo sapiens
tttatgtcagctgtg

SEQ ID NO: 756801 - DNA, 15 bp, Homo sapiens
ttatgtcagctgtgt

SEQ ID NO: 756802 - DNA, 15 bp, Homo sapiens
tatgtcagctgtgtg

SEQ ID NO: 756803 - DNA, 15 bp, Homo sapiens
atgtcagctgtgtgt

SEQ ID NO: 756804 - DNA, 15 bp, Homo sapiens
tgtcagctgtgtgtg

SEQ ID NO: 756805 - DNA, 15 bp, Homo sapiens
gtcagctgtgtgtgt

SEQ ID NO: 756806 - DNA, 15 bp, Homo sapiens
tcagctgtgtgtgtg

SEQ ID NO: 756807 - DNA, 15 bp, Homo sapiens
cagctgtgtgtgtgt

SEQ ID NO: 756808 - DNA, 15 bp, Homo sapiens
agctgtgtgtgtgtg

SEQ ID NO: 756809 - DNA, 15 bp, Homo sapiens
gctgtgtgtgtgtgt

SEQ ID NO: 756810 - DNA, 15 bp, Homo sapiens
ctgtgtgtgtgtgtg

SEQ ID NO: 756811 - DNA, 15 bp, Homo sapiens
tactgttgacatttc

SEQ ID NO: 756812 - DNA, 15 bp, Homo sapiens
actgttgacatttct

SEQ ID NO: 756813 - DNA, 15 bp, Homo sapiens
ctgttgacatttctg

SEQ ID NO: 756814 - DNA, 15 bp, Homo sapiens
tgttgacatttctgt

SEQ ID NO: 756815 - DNA, 15 bp, Homo sapiens
gttgacatttctgtt

SEQ ID NO: 756816 - DNA, 15 bp, Homo sapiens
ttgacatttctgttt

SEQ ID NO: 756817 - DNA, 15 bp, Homo sapiens
tgacatttctgtttt

SEQ ID NO: 756818 - DNA, 15 bp, Homo sapiens
gacatttctgttttt

SEQ ID NO: 756819 - DNA, 15 bp, Homo sapiens
acatttctgttttta

SEQ ID NO: 756820 - DNA, 15 bp, Homo sapiens
catttctgtttttaa

SEQ ID NO: 756821 - DNA, 15 bp, Homo sapiens
atttctgtttttaat

SEQ ID NO: 756822 - DNA, 15 bp, Homo sapiens
tttctgtttttaatt

SEQ ID NO: 756823 - DNA, 15 bp, Homo sapiens
ttctgtttttaattt

SEQ ID NO: 756824 - DNA, 15 bp, Homo sapiens
tctgtttttaatttt

SEQ ID NO: 756825 - DNA, 15 bp, Homo sapiens
ctgtttttaattttg

SEQ ID NO: 756826 - DNA, 15 bp, Homo sapiens
tgtttttaattttgc

SEQ ID NO: 756827 - DNA, 15 bp, Homo sapiens
gtttttaattttgct

SEQ ID NO: 756828 - DNA, 15 bp, Homo sapiens
tttttaattttgctt

SEQ ID NO: 756829 - DNA, 15 bp, Homo sapiens
ttttaattttgcttg

SEQ ID NO: 756830 - DNA, 15 bp, Homo sapiens
tttaattttgcttgt

SEQ ID NO: 756831 - DNA, 15 bp, Homo sapiens
ttaattttgcttgtg

SEQ ID NO: 756832 - DNA, 15 bp, Homo sapiens
taattttgcttgtgc

SEQ ID NO: 756833 - DNA, 15 bp, Homo sapiens
aattttgcttgtgcc

SEQ ID NO: 756834 - DNA, 15 bp, Homo sapiens
attttgcttgtgcct

SEQ ID NO: 756835 - DNA, 15 bp, Homo sapiens
ttttgcttgtgccta

SEQ ID NO: 756836 - DNA, 15 bp, Homo sapiens
tttgcttgtgcctag

SEQ ID NO: 756837 - DNA, 15 bp, Homo sapiens
ttgcttgtgcctaga

SEQ ID NO: 756838 - DNA, 15 bp, Homo sapiens
tgcttgtgcctagaa

SEQ ID NO: 756839 - DNA, 15 bp, Homo sapiens
gcttgtgcctagaat

SEQ ID NO: 756840 - DNA, 15 bp, Homo sapiens
cttgtgcctagaatt

SEQ ID NO: 756841 - DNA, 15 bp, Homo sapiens
ttgtgcctagaattt

SEQ ID NO: 756842 - DNA, 15 bp, Homo sapiens
tgtgcctagaatttt

SEQ ID NO: 756843 - DNA, 15 bp, Homo sapiens
gtgcctagaattttc

SEQ ID NO: 756844 - DNA, 15 bp, Homo sapiens
tgcctagaattttct

SEQ ID NO: 756845 - DNA, 15 bp, Homo sapiens
gcctagaattttctt

SEQ ID NO: 756846 - DNA, 15 bp, Homo sapiens
cctagaattttcttt

SEQ ID NO: 756847 - DNA, 15 bp, Homo sapiens
ctagaattttctttc

SEQ ID NO: 756848 - DNA, 15 bp, Homo sapiens
tagaattttctttct

SEQ ID NO: 756849 - DNA, 15 bp, Homo sapiens
agaattttctttctt

SEQ ID NO: 756850 - DNA, 15 bp, Homo sapiens
gaattttctttcttt

SEQ ID NO: 756851 - DNA, 15 bp, Homo sapiens
aattttctttctttt

SEQ ID NO: 756852 - DNA, 15 bp, Homo sapiens
attttctttcttttt

SEQ ID NO: 756853 - DNA, 15 bp, Homo sapiens
gacagagtctcgctg

SEQ ID NO: 756854 - DNA, 15 bp, Homo sapiens
acagagtctcgctgt

SEQ ID NO: 756855 - DNA, 15 bp, Homo sapiens
cagagtctcgctgtg

SEQ ID NO: 756856 - DNA, 15 bp, Homo sapiens
agagtctcgctgtgt

SEQ ID NO: 756857 - DNA, 15 bp, Homo sapiens
gagtctcgctgtgtc

SEQ ID NO: 756858 - DNA, 15 bp, Homo sapiens
agtctcgctgtgtca

SEQ ID NO: 756859 - DNA, 15 bp, Homo sapiens
gtctcgctgtgtcac

SEQ ID NO: 756860 - DNA, 15 bp, Homo sapiens
tctcgctgtgtcacc

SEQ ID NO: 756861 - DNA, 15 bp, Homo sapiens
ctcgctgtgtcaccc

SEQ ID NO: 756862 - DNA, 15 bp, Homo sapiens
tcgctgtgtcaccca

SEQ ID NO: 756863 - DNA, 15 bp, Homo sapiens
cgctgtgtcacccag

SEQ ID NO: 756864 - DNA, 15 bp, Homo sapiens
gctgtgtcacccaga

SEQ ID NO: 756865 - DNA, 15 bp, Homo sapiens
ctgtgtcacccagac

SEQ ID NO: 756866 - DNA, 15 bp, Homo sapiens
tgtgtcacccagact

SEQ ID NO: 756867 - DNA, 15 bp, Homo sapiens
gtgtcacccagactg

SEQ ID NO: 756868 - DNA, 15 bp, Homo sapiens
tgtcacccagactgg

SEQ ID NO: 756869 - DNA, 15 bp, Homo sapiens
gtcacccagactgga

SEQ ID NO: 756870 - DNA, 15 bp, Homo sapiens
tcacccagactggag

SEQ ID NO: 756871 - DNA, 15 bp, Homo sapiens
cacccagactggagt

SEQ ID NO: 756872 - DNA, 15 bp, Homo sapiens
acccagactggagtg

SEQ ID NO: 756873 - DNA, 15 bp, Homo sapiens
ggagtgcagtggcgc

SEQ ID NO: 756874 - DNA, 15 bp, Homo sapiens
gagtgcagtggcgca

SEQ ID NO: 756875 - DNA, 15 bp, Homo sapiens
agtgcagtggcgcaa

SEQ ID NO: 756876 - DNA, 15 bp, Homo sapiens
gtgcagtggcgcaat

SEQ ID NO: 756877 - DNA, 15 bp, Homo sapiens
tgcagtggcgcaatc

SEQ ID NO: 756878 - DNA, 15 bp, Homo sapiens
gcagtggcgcaatct

SEQ ID NO: 756879 - DNA, 15 bp, Homo sapiens
cagtggcgcaatctc

SEQ ID NO: 756880 - DNA, 15 bp, Homo sapiens
agtggcgcaatctca

SEQ ID NO: 756881 - DNA, 15 bp, Homo sapiens
gtggcgcaatctcag

SEQ ID NO: 756882 - DNA, 15 bp, Homo sapiens
tggcgcaatctcagc

SEQ ID NO: 756883 - DNA, 15 bp, Homo sapiens
ggcgcaatctcagct

SEQ ID NO: 756884 - DNA, 15 bp, Homo sapiens
gcgcaatctcagctc

SEQ ID NO: 756885 - DNA, 15 bp, Homo sapiens
cgcaatctcagctca

SEQ ID NO: 756886 - DNA, 15 bp, Homo sapiens
gcaatctcagctcac

SEQ ID NO: 756887 - DNA, 15 bp, Homo sapiens
caatctcagctcact

SEQ ID NO: 756888 - DNA, 15 bp, Homo sapiens
aatctcagctcactg

SEQ ID NO: 756889 - DNA, 15 bp, Homo sapiens
atctcagctcactgc

SEQ ID NO: 756890 - DNA, 15 bp, Homo sapiens
tcagctcactgcaag

SEQ ID NO: 756891 - DNA, 15 bp, Homo sapiens
cagctcactgcaagc

SEQ ID NO: 756892 - DNA, 15 bp, Homo sapiens
agctcactgcaagct

SEQ ID NO: 756893 - DNA, 15 bp, Homo sapiens
gctcactgcaagctt

SEQ ID NO: 756894 - DNA, 15 bp, Homo sapiens
ctcactgcaagcttc

SEQ ID NO: 756895 - DNA, 15 bp, Homo sapiens
tcactgcaagcttca

SEQ ID NO: 756896 - DNA, 15 bp, Homo sapiens
cactgcaagcttcat

SEQ ID NO: 756897 - DNA, 15 bp, Homo sapiens
actgcaagcttcatc

SEQ ID NO: 756898 - DNA, 15 bp, Homo sapiens
ctgcaagcttcatct

SEQ ID NO: 756899 - DNA, 15 bp, Homo sapiens
tgcaagcttcatctc

SEQ ID NO: 756900 - DNA, 15 bp, Homo sapiens
gcaagcttcatctcc

SEQ ID NO: 756901 - DNA, 15 bp, Homo sapiens
caagcttcatctcct

SEQ ID NO: 756902 - DNA, 15 bp, Homo sapiens
aagcttcatctcctg

SEQ ID NO: 756903 - DNA, 15 bp, Homo sapiens
agcttcatctcctgg

SEQ ID NO: 756904 - DNA, 15 bp, Homo sapiens
gcttcatctcctggg

SEQ ID NO: 756905 - DNA, 15 bp, Homo sapiens
cttcatctcctgggt

SEQ ID NO: 756906 - DNA, 15 bp, Homo sapiens
ttcatctcctgggtt

SEQ ID NO: 756907 - DNA, 15 bp, Homo sapiens
tcatctcctgggttc

SEQ ID NO: 756908 - DNA, 15 bp, Homo sapiens
catctcctgggttca

SEQ ID NO: 756909 - DNA, 15 bp, Homo sapiens
atctcctgggttcac

SEQ ID NO: 756910 - DNA, 15 bp, Homo sapiens
tctcctgggttcacg

SEQ ID NO: 756911 - DNA, 15 bp, Homo sapiens
ctcctgggttcacgc

SEQ ID NO: 756912 - DNA, 15 bp, Homo sapiens
tcctgggttcacgcc

SEQ ID NO: 756913 - DNA, 15 bp, Homo sapiens
cctgggttcacgcca

SEQ ID NO: 756914 - DNA, 15 bp, Homo sapiens
ctgggttcacgccat

SEQ ID NO: 756915 - DNA, 15 bp, Homo sapiens
tgggttcacgccatt

SEQ ID NO: 756916 - DNA, 15 bp, Homo sapiens
gggactacaggtgcc

SEQ ID NO: 756917 - DNA, 15 bp, Homo sapiens
ggactacaggtgcct

SEQ ID NO: 756918 - DNA, 15 bp, Homo sapiens
gactacaggtgcctg

SEQ ID NO: 756919 - DNA, 15 bp, Homo sapiens
actacaggtgcctgc

SEQ ID NO: 756920 - DNA, 15 bp, Homo sapiens
ctacaggtgcctgcc

SEQ ID NO: 756921 - DNA, 15 bp, Homo sapiens
tacaggtgcctgcca

SEQ ID NO: 756922 - DNA, 15 bp, Homo sapiens
acaggtgcctgccac

SEQ ID NO: 756923 - DNA, 15 bp, Homo sapiens
caggtgcctgccacc

SEQ ID NO: 756924 - DNA, 15 bp, Homo sapiens
aggtgcctgccacca

SEQ ID NO: 756925 - DNA, 15 bp, Homo sapiens
ggtgcctgccaccac

SEQ ID NO: 756926 - DNA, 15 bp, Homo sapiens
gtgcctgccaccacg

SEQ ID NO: 756927 - DNA, 15 bp, Homo sapiens
tgcctgccaccacgc

SEQ ID NO: 756928 - DNA, 15 bp, Homo sapiens
gcctgccaccacgcc

SEQ ID NO: 756929 - DNA, 15 bp, Homo sapiens
cctgccaccacgccc

SEQ ID NO: 756930 - DNA, 15 bp, Homo sapiens
ttttttgtatttttt

SEQ ID NO: 756931 - DNA, 15 bp, Homo sapiens
tttttgtatttttta

SEQ ID NO: 756932 - DNA, 15 bp, Homo sapiens
ttttgtattttttag

SEQ ID NO: 756933 - DNA, 15 bp, Homo sapiens
tttgtattttttagt

SEQ ID NO: 756934 - DNA, 15 bp, Homo sapiens
ttgtattttttagta

SEQ ID NO: 756935 - DNA, 15 bp, Homo sapiens
tgtattttttagtag

SEQ ID NO: 756936 - DNA, 15 bp, Homo sapiens
gtattttttagtaga

SEQ ID NO: 756937 - DNA, 15 bp, Homo sapiens
tattttttagtagag

SEQ ID NO: 756938 - DNA, 15 bp, Homo sapiens
attttttagtagaga

SEQ ID NO: 756939 - DNA, 15 bp, Homo sapiens
ttttttagtagagat

SEQ ID NO: 756940 - DNA, 15 bp, Homo sapiens
cctcgtgatccaccc

SEQ ID NO: 756941 - DNA, 15 bp, Homo sapiens
ctcgtgatccaccca

SEQ ID NO: 756942 - DNA, 15 bp, Homo sapiens
tcgtgatccacccac

SEQ ID NO: 756943 - DNA, 15 bp, Homo sapiens
cgtgatccacccacc

SEQ ID NO: 756944 - DNA, 15 bp, Homo sapiens
gtgatccacccacct

SEQ ID NO: 756945 - DNA, 15 bp, Homo sapiens
gatccacccacctca

SEQ ID NO: 756946 - DNA, 15 bp, Homo sapiens
atccacccacctcag

SEQ ID NO: 756947 - DNA, 15 bp, Homo sapiens
tccacccacctcagc

SEQ ID NO: 756948 - DNA, 15 bp, Homo sapiens
ccacccacctcagcc

SEQ ID NO: 756949 - DNA, 15 bp, Homo sapiens
cacccacctcagcct

SEQ ID NO: 756950 - DNA, 15 bp, Homo sapiens
acccacctcagcctc

SEQ ID NO: 756951 - DNA, 15 bp, Homo sapiens
cacctcagcctccca

SEQ ID NO: 756952 - DNA, 15 bp, Homo sapiens
acctcagcctcccaa

SEQ ID NO: 756953 - DNA, 15 bp, Homo sapiens
tgagccactgcgccc

SEQ ID NO: 756954 - DNA, 15 bp, Homo sapiens
gagccactgcgccca

SEQ ID NO: 756955 - DNA, 15 bp, Homo sapiens
agccactgcgcccag

SEQ ID NO: 756956 - DNA, 15 bp, Homo sapiens
gccactgcgcccagc

SEQ ID NO: 756957 - DNA, 15 bp, Homo sapiens
ccactgcgcccagcc

SEQ ID NO: 756958 - DNA, 15 bp, Homo sapiens
cactgcgcccagcct

SEQ ID NO: 756959 - DNA, 15 bp, Homo sapiens
actgcgcccagccta

SEQ ID NO: 756960 - DNA, 15 bp, Homo sapiens
ctgcgcccagcctag

SEQ ID NO: 756961 - DNA, 15 bp, Homo sapiens
tgcgcccagcctaga

SEQ ID NO: 756962 - DNA, 15 bp, Homo sapiens
gcgcccagcctagaa

SEQ ID NO: 756963 - DNA, 15 bp, Homo sapiens
cgcccagcctagaat

SEQ ID NO: 756964 - DNA, 15 bp, Homo sapiens
gcccagcctagaatt

SEQ ID NO: 756965 - DNA, 15 bp, Homo sapiens
cccagcctagaattt

SEQ ID NO: 756966 - DNA, 15 bp, Homo sapiens
ccagcctagaatttt

SEQ ID NO: 756967 - DNA, 15 bp, Homo sapiens
cagcctagaattttc

SEQ ID NO: 756968 - DNA, 15 bp, Homo sapiens
agcctagaattttct

SEQ ID NO: 756969 - DNA, 15 bp, Homo sapiens
ctagaattttctttt

SEQ ID NO: 756970 - DNA, 15 bp, Homo sapiens
tagaattttctttta

SEQ ID NO: 756971 - DNA, 15 bp, Homo sapiens
agaattttcttttaa

SEQ ID NO: 756972 - DNA, 15 bp, Homo sapiens
gaattttcttttaaa

SEQ ID NO: 756973 - DNA, 15 bp, Homo sapiens
aattttcttttaaag

SEQ ID NO: 756974 - DNA, 15 bp, Homo sapiens
attttcttttaaagc

SEQ ID NO: 756975 - DNA, 15 bp, Homo sapiens
ttttcttttaaagcc

SEQ ID NO: 756976 - DNA, 15 bp, Homo sapiens
tttcttttaaagcca

SEQ ID NO: 756977 - DNA, 15 bp, Homo sapiens
ttcttttaaagccaa

SEQ ID NO: 756978 - DNA, 15 bp, Homo sapiens
tcttttaaagccaaa

SEQ ID NO: 756979 - DNA, 15 bp, Homo sapiens
cttttaaagccaaat

SEQ ID NO: 756980 - DNA, 15 bp, Homo sapiens
ttttaaagccaaata

SEQ ID NO: 756981 - DNA, 15 bp, Homo sapiens
tttaaagccaaatat

SEQ ID NO: 756982 - DNA, 15 bp, Homo sapiens
ttaaagccaaatatc

SEQ ID NO: 756983 - DNA, 15 bp, Homo sapiens
taaagccaaatatca

SEQ ID NO: 756984 - DNA, 15 bp, Homo sapiens
aaagccaaatatcaa

SEQ ID NO: 756985 - DNA, 15 bp, Homo sapiens
aagccaaatatcaaa

SEQ ID NO: 756986 - DNA, 15 bp, Homo sapiens
agccaaatatcaaaa

SEQ ID NO: 756987 - DNA, 15 bp, Homo sapiens
gccaaatatcaaaaa

SEQ ID NO: 756988 - DNA, 15 bp, Homo sapiens
ccaaatatcaaaaag

SEQ ID NO: 756989 - DNA, 15 bp, Homo sapiens
caaatatcaaaaagt

SEQ ID NO: 756990 - DNA, 15 bp, Homo sapiens
aaatatcaaaaagtg

SEQ ID NO: 756991 - DNA, 15 bp, Homo sapiens
aatatcaaaaagtgt

SEQ ID NO: 756992 - DNA, 15 bp, Homo sapiens
atatcaaaaagtgtt

SEQ ID NO: 756993 - DNA, 15 bp, Homo sapiens
tatcaaaaagtgttt

SEQ ID NO: 756994 - DNA, 15 bp, Homo sapiens
atcaaaaagtgtttg

SEQ ID NO: 756995 - DNA, 15 bp, Homo sapiens
tcaaaaagtgtttgg

SEQ ID NO: 756996 - DNA, 15 bp, Homo sapiens
caaaaagtgtttgga

SEQ ID NO: 756997 - DNA, 15 bp, Homo sapiens
aaaaagtgtttggag

SEQ ID NO: 756998 - DNA, 15 bp, Homo sapiens
aaaagtgtttggaga

SEQ ID NO: 756999 - DNA, 15 bp, Homo sapiens
aaagtgtttggagat

SEQ ID NO: 757000 - DNA, 15 bp, Homo sapiens
aagtgtttggagatg

SEQ ID NO: 757001 - DNA, 15 bp, Homo sapiens
agtgtttggagatga

SEQ ID NO: 757002 - DNA, 15 bp, Homo sapiens
gtgtttggagatgaa

SEQ ID NO: 757003 - DNA, 15 bp, Homo sapiens
tgtttggagatgaac

SEQ ID NO: 757004 - DNA, 15 bp, Homo sapiens
gtttggagatgaacc

SEQ ID NO: 757005 - DNA, 15 bp, Homo sapiens
tttggagatgaaccg

SEQ ID NO: 757006 - DNA, 15 bp, Homo sapiens
ttggagatgaaccgt

SEQ ID NO: 757007 - DNA, 15 bp, Homo sapiens
tggagatgaaccgtg

SEQ ID NO: 757008 - DNA, 15 bp, Homo sapiens
ggagatgaaccgtgg

SEQ ID NO: 757009 - DNA, 15 bp, Homo sapiens
gagatgaaccgtgga

SEQ ID NO: 757010 - DNA, 15 bp, Homo sapiens
agatgaaccgtggac

SEQ ID NO: 757011 - DNA, 15 bp, Homo sapiens
gatgaaccgtggact

SEQ ID NO: 757012 - DNA, 15 bp, Homo sapiens
atgaaccgtggactg

SEQ ID NO: 757013 - DNA, 15 bp, Homo sapiens
tgaaccgtggactgt

SEQ ID NO: 757014 - DNA, 15 bp, Homo sapiens
gaaccgtggactgtg

SEQ ID NO: 757015 - DNA, 15 bp, Homo sapiens
aaccgtggactgtgt

SEQ ID NO: 757016 - DNA, 15 bp, Homo sapiens
accgtggactgtgta

SEQ ID NO: 757017 - DNA, 15 bp, Homo sapiens
ccgtggactgtgtaa

SEQ ID NO: 757018 - DNA, 15 bp, Homo sapiens
cgtggactgtgtaag

SEQ ID NO: 757019 - DNA, 15 bp, Homo sapiens
gtggactgtgtaagt

SEQ ID NO: 757020 - DNA, 15 bp, Homo sapiens
tggactgtgtaagta

SEQ ID NO: 757021 - DNA, 15 bp, Homo sapiens
ggactgtgtaagtac

SEQ ID NO: 757022 - DNA, 15 bp, Homo sapiens
gactgtgtaagtact

SEQ ID NO: 757023 - DNA, 15 bp, Homo sapiens
actgtgtaagtactt

SEQ ID NO: 757024 - DNA, 15 bp, Homo sapiens
ctgtgtaagtacttt

SEQ ID NO: 757025 - DNA, 15 bp, Homo sapiens
tgtgtaagtactttc

SEQ ID NO: 757026 - DNA, 15 bp, Homo sapiens
gtgtaagtactttct

SEQ ID NO: 757027 - DNA, 15 bp, Homo sapiens
tgtaagtactttctg

SEQ ID NO: 757028 - DNA, 15 bp, Homo sapiens
gtaagtactttctgt

SEQ ID NO: 757029 - DNA, 15 bp, Homo sapiens
taagtactttctgtt

SEQ ID NO: 757030 - DNA, 15 bp, Homo sapiens
aagtactttctgtta

SEQ ID NO: 757031 - DNA, 15 bp, Homo sapiens
agtactttctgttac

SEQ ID NO: 757032 - DNA, 15 bp, Homo sapiens
gtactttctgttact

SEQ ID NO: 757033 - DNA, 15 bp, Homo sapiens
tactttctgttactg

SEQ ID NO: 757034 - DNA, 15 bp, Homo sapiens
actttctgttactga

SEQ ID NO: 757035 - DNA, 15 bp, Homo sapiens
ctttctgttactgac

SEQ ID NO: 757036 - DNA, 15 bp, Homo sapiens
tttctgttactgaca

SEQ ID NO: 757037 - DNA, 15 bp, Homo sapiens
ttctgttactgacac

SEQ ID NO: 757038 - DNA, 15 bp, Homo sapiens
tctgttactgacact

SEQ ID NO: 757039 - DNA, 15 bp, Homo sapiens
ctgttactgacactg

SEQ ID NO: 757040 - DNA, 15 bp, Homo sapiens
tgttactgacactga

SEQ ID NO: 757041 - DNA, 15 bp, Homo sapiens
gttactgacactgaa

SEQ ID NO: 757042 - DNA, 15 bp, Homo sapiens
ttactgacactgaag

SEQ ID NO: 757043 - DNA, 15 bp, Homo sapiens
tactgacactgaaga

SEQ ID NO: 757044 - DNA, 15 bp, Homo sapiens
actgacactgaagaa

SEQ ID NO: 757045 - DNA, 15 bp, Homo sapiens
ctgacactgaagaat

SEQ ID NO: 757046 - DNA, 15 bp, Homo sapiens
tgacactgaagaatt

SEQ ID NO: 757047 - DNA, 15 bp, Homo sapiens
gacactgaagaattc

SEQ ID NO: 757048 - DNA, 15 bp, Homo sapiens
acactgaagaattct

SEQ ID NO: 757049 - DNA, 15 bp, Homo sapiens
cactgaagaattctg

SEQ ID NO: 757050 - DNA, 15 bp, Homo sapiens
actgaagaattctgt

SEQ ID NO: 757051 - DNA, 15 bp, Homo sapiens
ctgaagaattctgtc

SEQ ID NO: 757052 - DNA, 15 bp, Homo sapiens
tgaagaattctgtct

SEQ ID NO: 757053 - DNA, 15 bp, Homo sapiens
gaagaattctgtctt

SEQ ID NO: 757054 - DNA, 15 bp, Homo sapiens
aagaattctgtcttt

SEQ ID NO: 757055 - DNA, 15 bp, Homo sapiens
agaattctgtctttg

SEQ ID NO: 757056 - DNA, 15 bp, Homo sapiens
gaattctgtctttgc

SEQ ID NO: 757057 - DNA, 15 bp, Homo sapiens
aattctgtctttgct

SEQ ID NO: 757058 - DNA, 15 bp, Homo sapiens
attctgtctttgctg

SEQ ID NO: 757059 - DNA, 15 bp, Homo sapiens
ttctgtctttgctgc

SEQ ID NO: 757060 - DNA, 15 bp, Homo sapiens
tctgtctttgctgca

SEQ ID NO: 757061 - DNA, 15 bp, Homo sapiens
ctgtctttgctgcaa

SEQ ID NO: 757062 - DNA, 15 bp, Homo sapiens
tgtctttgctgcaaa

SEQ ID NO: 757063 - DNA, 15 bp, Homo sapiens
gtctttgctgcaaac

SEQ ID NO: 757064 - DNA, 15 bp, Homo sapiens
tctttgctgcaaact

SEQ ID NO: 757065 - DNA, 15 bp, Homo sapiens
ctttgctgcaaacta

SEQ ID NO: 757066 - DNA, 15 bp, Homo sapiens
tttgctgcaaactac

SEQ ID NO: 757067 - DNA, 15 bp, Homo sapiens
ttgctgcaaactacc

SEQ ID NO: 757068 - DNA, 15 bp, Homo sapiens
tgctgcaaactaccc

SEQ ID NO: 757069 - DNA, 15 bp, Homo sapiens
gctgcaaactaccct

SEQ ID NO: 757070 - DNA, 15 bp, Homo sapiens
ctgcaaactaccctc

SEQ ID NO: 757071 - DNA, 15 bp, Homo sapiens
tgcaaactaccctca

SEQ ID NO: 757072 - DNA, 15 bp, Homo sapiens
gcaaactaccctcaa

SEQ ID NO: 757073 - DNA, 15 bp, Homo sapiens
caaactaccctcaaa

SEQ ID NO: 757074 - DNA, 15 bp, Homo sapiens
aaactaccctcaaaa

SEQ ID NO: 757075 - DNA, 15 bp, Homo sapiens
aactaccctcaaaat

SEQ ID NO: 757076 - DNA, 15 bp, Homo sapiens
actaccctcaaaatg

SEQ ID NO: 757077 - DNA, 15 bp, Homo sapiens
ctaccctcaaaatgg

SEQ ID NO: 757078 - DNA, 15 bp, Homo sapiens
taccctcaaaatggc

SEQ ID NO: 757079 - DNA, 15 bp, Homo sapiens
accctcaaaatggca

SEQ ID NO: 757080 - DNA, 15 bp, Homo sapiens
ccctcaaaatggcaa

SEQ ID NO: 757081 - DNA, 15 bp, Homo sapiens
cctcaaaatggcaat

SEQ ID NO: 757082 - DNA, 15 bp, Homo sapiens
ctcaaaatggcaatg

SEQ ID NO: 757083 - DNA, 15 bp, Homo sapiens
tcaaaatggcaatga

SEQ ID NO: 757084 - DNA, 15 bp, Homo sapiens
caaaatggcaatgag

SEQ ID NO: 757085 - DNA, 15 bp, Homo sapiens
aaaatggcaatgagt

SEQ ID NO: 757086 - DNA, 15 bp, Homo sapiens
aaatggcaatgagtt

SEQ ID NO: 757087 - DNA, 15 bp, Homo sapiens
aatggcaatgagttg

SEQ ID NO: 757088 - DNA, 15 bp, Homo sapiens
atggcaatgagttgg

SEQ ID NO: 757089 - DNA, 15 bp, Homo sapiens
tggcaatgagttggt

SEQ ID NO: 757090 - DNA, 15 bp, Homo sapiens
ggcaatgagttggtg

SEQ ID NO: 757091 - DNA, 15 bp, Homo sapiens
gcaatgagttggtgg

SEQ ID NO: 757092 - DNA, 15 bp, Homo sapiens
caatgagttggtggc

SEQ ID NO: 757093 - DNA, 15 bp, Homo sapiens
aatgagttggtggca

SEQ ID NO: 757094 - DNA, 15 bp, Homo sapiens
atgagttggtggcag

SEQ ID NO: 757095 - DNA, 15 bp, Homo sapiens
tgagttggtggcagg

SEQ ID NO: 757096 - DNA, 15 bp, Homo sapiens
gagttggtggcaggt

SEQ ID NO: 757097 - DNA, 15 bp, Homo sapiens
agttggtggcaggtc

SEQ ID NO: 757098 - DNA, 15 bp, Homo sapiens
gttggtggcaggtca

SEQ ID NO: 757099 - DNA, 15 bp, Homo sapiens
ttggtggcaggtcat

SEQ ID NO: 757100 - DNA, 15 bp, Homo sapiens
tggtggcaggtcata

SEQ ID NO: 757101 - DNA, 15 bp, Homo sapiens
ggtggcaggtcatat

SEQ ID NO: 757102 - DNA, 15 bp, Homo sapiens
gtggcaggtcatatg

SEQ ID NO: 757103 - DNA, 15 bp, Homo sapiens
tggcaggtcatatgc

SEQ ID NO: 757104 - DNA, 15 bp, Homo sapiens
ggcaggtcatatgct

SEQ ID NO: 757105 - DNA, 15 bp, Homo sapiens
gcaggtcatatgctt

SEQ ID NO: 757106 - DNA, 15 bp, Homo sapiens
caggtcatatgctta

SEQ ID NO: 757107 - DNA, 15 bp, Homo sapiens
aggtcatatgcttag

SEQ ID NO: 757108 - DNA, 15 bp, Homo sapiens
ggtcatatgcttagg

SEQ ID NO: 757109 - DNA, 15 bp, Homo sapiens
gtcatatgcttagga

SEQ ID NO: 757110 - DNA, 15 bp, Homo sapiens
tcatatgcttaggaa

SEQ ID NO: 757111 - DNA, 15 bp, Homo sapiens
catatgcttaggaag

SEQ ID NO: 757112 - DNA, 15 bp, Homo sapiens
atatgcttaggaagt

SEQ ID NO: 757113 - DNA, 15 bp, Homo sapiens
tatgcttaggaagtt

SEQ ID NO: 757114 - DNA, 15 bp, Homo sapiens
atgcttaggaagttt

SEQ ID NO: 757115 - DNA, 15 bp, Homo sapiens
tgcttaggaagtttt

SEQ ID NO: 757116 - DNA, 15 bp, Homo sapiens
gcttaggaagttttt

SEQ ID NO: 757117 - DNA, 15 bp, Homo sapiens
cttaggaagttttta

SEQ ID NO: 757118 - DNA, 15 bp, Homo sapiens
ttaggaagtttttag

SEQ ID NO: 757119 - DNA, 15 bp, Homo sapiens
taggaagtttttaga

SEQ ID NO: 757120 - DNA, 15 bp, Homo sapiens
aggaagtttttagag

SEQ ID NO: 757121 - DNA, 15 bp, Homo sapiens
ggaagtttttagagc

SEQ ID NO: 757122 - DNA, 15 bp, Homo sapiens
gaagtttttagagca

SEQ ID NO: 757123 - DNA, 15 bp, Homo sapiens
aagtttttagagcag

SEQ ID NO: 757124 - DNA, 15 bp, Homo sapiens
agtttttagagcagc

SEQ ID NO: 757125 - DNA, 15 bp, Homo sapiens
gtttttagagcagcg

SEQ ID NO: 757126 - DNA, 15 bp, Homo sapiens
tttttagagcagcgt

SEQ ID NO: 757127 - DNA, 15 bp, Homo sapiens
ttttagagcagcgtt

SEQ ID NO: 757128 - DNA, 15 bp, Homo sapiens
tttagagcagcgttg

SEQ ID NO: 757129 - DNA, 15 bp, Homo sapiens
ttagagcagcgttgt

SEQ ID NO: 757130 - DNA, 15 bp, Homo sapiens
tagagcagcgttgtc

SEQ ID NO: 757131 - DNA, 15 bp, Homo sapiens
agagcagcgttgtcc

SEQ ID NO: 757132 - DNA, 15 bp, Homo sapiens
gagcagcgttgtcca

SEQ ID NO: 757133 - DNA, 15 bp, Homo sapiens
agcagcgttgtccaa

SEQ ID NO: 757134 - DNA, 15 bp, Homo sapiens
gcagcgttgtccaat

SEQ ID NO: 757135 - DNA, 15 bp, Homo sapiens
cagcgttgtccaata

SEQ ID NO: 757136 - DNA, 15 bp, Homo sapiens
agcgttgtccaatag

SEQ ID NO: 757137 - DNA, 15 bp, Homo sapiens
gcgttgtccaataga

SEQ ID NO: 757138 - DNA, 15 bp, Homo sapiens
cgttgtccaatagaa

SEQ ID NO: 757139 - DNA, 15 bp, Homo sapiens
gttgtccaatagaac

SEQ ID NO: 757140 - DNA, 15 bp, Homo sapiens
ttgtccaatagaact

SEQ ID NO: 757141 - DNA, 15 bp, Homo sapiens
tgtccaatagaactt

SEQ ID NO: 757142 - DNA, 15 bp, Homo sapiens
gtccaatagaacttt

SEQ ID NO: 757143 - DNA, 15 bp, Homo sapiens
tccaatagaactttc

SEQ ID NO: 757144 - DNA, 15 bp, Homo sapiens
ccaatagaactttct

SEQ ID NO: 757145 - DNA, 15 bp, Homo sapiens
caatagaactttctg

SEQ ID NO: 757146 - DNA, 15 bp, Homo sapiens
aatagaactttctgc

SEQ ID NO: 757147 - DNA, 15 bp, Homo sapiens
atagaactttctgca

SEQ ID NO: 757148 - DNA, 15 bp, Homo sapiens
tagaactttctgcaa

SEQ ID NO: 757149 - DNA, 15 bp, Homo sapiens
agaactttctgcaat

SEQ ID NO: 757150 - DNA, 15 bp, Homo sapiens
gaactttctgcaata

SEQ ID NO: 757151 - DNA, 15 bp, Homo sapiens
aactttctgcaataa

SEQ ID NO: 757152 - DNA, 15 bp, Homo sapiens
actttctgcaataat

SEQ ID NO: 757153 - DNA, 15 bp, Homo sapiens
ctttctgcaataatg

SEQ ID NO: 757154 - DNA, 15 bp, Homo sapiens
tttctgcaataatgg

SEQ ID NO: 757155 - DNA, 15 bp, Homo sapiens
ttctgcaataatgga

SEQ ID NO: 757156 - DNA, 15 bp, Homo sapiens
tctgcaataatggaa

SEQ ID NO: 757157 - DNA, 15 bp, Homo sapiens
ctgcaataatggaaa

SEQ ID NO: 757158 - DNA, 15 bp, Homo sapiens
tgcaataatggaaat

SEQ ID NO: 757159 - DNA, 15 bp, Homo sapiens
gcaataatggaaatg

SEQ ID NO: 757160 - DNA, 15 bp, Homo sapiens
caataatggaaatgt

SEQ ID NO: 757161 - DNA, 15 bp, Homo sapiens
aataatggaaatgtc

SEQ ID NO: 757162 - DNA, 15 bp, Homo sapiens
ataatggaaatgtcc

SEQ ID NO: 757163 - DNA, 15 bp, Homo sapiens
taatggaaatgtcct

SEQ ID NO: 757164 - DNA, 15 bp, Homo sapiens
aatggaaatgtcctg

SEQ ID NO: 757165 - DNA, 15 bp, Homo sapiens
atggaaatgtcctgt

SEQ ID NO: 757166 - DNA, 15 bp, Homo sapiens
tggaaatgtcctgta

SEQ ID NO: 757167 - DNA, 15 bp, Homo sapiens
ggaaatgtcctgtaa

SEQ ID NO: 757168 - DNA, 15 bp, Homo sapiens
gaaatgtcctgtaat

SEQ ID NO: 757169 - DNA, 15 bp, Homo sapiens
aaatgtcctgtaata

SEQ ID NO: 757170 - DNA, 15 bp, Homo sapiens
aatgtcctgtaatac

SEQ ID NO: 757171 - DNA, 15 bp, Homo sapiens
atgtcctgtaataca

SEQ ID NO: 757172 - DNA, 15 bp, Homo sapiens
tgtcctgtaatacag

SEQ ID NO: 757173 - DNA, 15 bp, Homo sapiens
gtcctgtaatacagt

SEQ ID NO: 757174 - DNA, 15 bp, Homo sapiens
tcctgtaatacagtg

SEQ ID NO: 757175 - DNA, 15 bp, Homo sapiens
cctgtaatacagtgt

SEQ ID NO: 757176 - DNA, 15 bp, Homo sapiens
ctgtaatacagtgtc

SEQ ID NO: 757177 - DNA, 15 bp, Homo sapiens
tgtaatacagtgtct

SEQ ID NO: 757178 - DNA, 15 bp, Homo sapiens
gtaatacagtgtctg

SEQ ID NO: 757179 - DNA, 15 bp, Homo sapiens
taatacagtgtctgt

SEQ ID NO: 757180 - DNA, 15 bp, Homo sapiens
aatacagtgtctgtt

SEQ ID NO: 757181 - DNA, 15 bp, Homo sapiens
atacagtgtctgttg

SEQ ID NO: 757182 - DNA, 15 bp, Homo sapiens
tacagtgtctgttga

SEQ ID NO: 757183 - DNA, 15 bp, Homo sapiens
acagtgtctgttgag

SEQ ID NO: 757184 - DNA, 15 bp, Homo sapiens
cagtgtctgttgagc

SEQ ID NO: 757185 - DNA, 15 bp, Homo sapiens
agtgtctgttgagct

SEQ ID NO: 757186 - DNA, 15 bp, Homo sapiens
gtgtctgttgagctc

SEQ ID NO: 757187 - DNA, 15 bp, Homo sapiens
tgtctgttgagctca

SEQ ID NO: 757188 - DNA, 15 bp, Homo sapiens
gtctgttgagctcat

SEQ ID NO: 757189 - DNA, 15 bp, Homo sapiens
tctgttgagctcatg

SEQ ID NO: 757190 - DNA, 15 bp, Homo sapiens
ctgttgagctcatgt

SEQ ID NO: 757191 - DNA, 15 bp, Homo sapiens
tgttgagctcatgtg

SEQ ID NO: 757192 - DNA, 15 bp, Homo sapiens
gttgagctcatgtgg

SEQ ID NO: 757193 - DNA, 15 bp, Homo sapiens
ttgagctcatgtggc

SEQ ID NO: 757194 - DNA, 15 bp, Homo sapiens
tgagctcatgtggct

SEQ ID NO: 757195 - DNA, 15 bp, Homo sapiens
gagctcatgtggcta

SEQ ID NO: 757196 - DNA, 15 bp, Homo sapiens
agctcatgtggctag

SEQ ID NO: 757197 - DNA, 15 bp, Homo sapiens
gctcatgtggctagt

SEQ ID NO: 757198 - DNA, 15 bp, Homo sapiens
ctcatgtggctagtg

SEQ ID NO: 757199 - DNA, 15 bp, Homo sapiens
tcatgtggctagtgt

SEQ ID NO: 757200 - DNA, 15 bp, Homo sapiens
catgtggctagtgtg

SEQ ID NO: 757201 - DNA, 15 bp, Homo sapiens
atgtggctagtgtga

SEQ ID NO: 757202 - DNA, 15 bp, Homo sapiens
tgtggctagtgtgac

SEQ ID NO: 757203 - DNA, 15 bp, Homo sapiens
gtggctagtgtgact

SEQ ID NO: 757204 - DNA, 15 bp, Homo sapiens
tggctagtgtgactg

SEQ ID NO: 757205 - DNA, 15 bp, Homo sapiens
ggctagtgtgactga

SEQ ID NO: 757206 - DNA, 15 bp, Homo sapiens
gctagtgtgactgag

SEQ ID NO: 757207 - DNA, 15 bp, Homo sapiens
ctagtgtgactgagg

SEQ ID NO: 757208 - DNA, 15 bp, Homo sapiens
tagtgtgactgagga

SEQ ID NO: 757209 - DNA, 15 bp, Homo sapiens
agtgtgactgaggaa

SEQ ID NO: 757210 - DNA, 15 bp, Homo sapiens
gtgtgactgaggaag

SEQ ID NO: 757211 - DNA, 15 bp, Homo sapiens
tgtgactgaggaagt

SEQ ID NO: 757212 - DNA, 15 bp, Homo sapiens
gtgactgaggaagtg

SEQ ID NO: 757213 - DNA, 15 bp, Homo sapiens
tgactgaggaagtga

SEQ ID NO: 757214 - DNA, 15 bp, Homo sapiens
gactgaggaagtgaa

SEQ ID NO: 757215 - DNA, 15 bp, Homo sapiens
actgaggaagtgaat

SEQ ID NO: 757216 - DNA, 15 bp, Homo sapiens
ctgaggaagtgaata

SEQ ID NO: 757217 - DNA, 15 bp, Homo sapiens
tgaggaagtgaatat

SEQ ID NO: 757218 - DNA, 15 bp, Homo sapiens
gaggaagtgaatatt

SEQ ID NO: 757219 - DNA, 15 bp, Homo sapiens
aggaagtgaatattt

SEQ ID NO: 757220 - DNA, 15 bp, Homo sapiens
ggaagtgaatattta

SEQ ID NO: 757221 - DNA, 15 bp, Homo sapiens
gaagtgaatatttaa

SEQ ID NO: 757222 - DNA, 15 bp, Homo sapiens
aagtgaatatttaat

SEQ ID NO: 757223 - DNA, 15 bp, Homo sapiens
agtgaatatttaatt

SEQ ID NO: 757224 - DNA, 15 bp, Homo sapiens
gtgaatatttaattt

SEQ ID NO: 757225 - DNA, 15 bp, Homo sapiens
tgaatatttaatttt

SEQ ID NO: 757226 - DNA, 15 bp, Homo sapiens
gaatatttaatttta

SEQ ID NO: 757227 - DNA, 15 bp, Homo sapiens
aatatttaattttaa

SEQ ID NO: 757228 - DNA, 15 bp, Homo sapiens
atatttaattttaat

SEQ ID NO: 757229 - DNA, 15 bp, Homo sapiens
tatttaattttaatt

SEQ ID NO: 757230 - DNA, 15 bp, Homo sapiens
atttaattttaatta

SEQ ID NO: 757231 - DNA, 15 bp, Homo sapiens
tttaattttaattaa

SEQ ID NO: 757232 - DNA, 15 bp, Homo sapiens
ttaattttaattaat

SEQ ID NO: 757233 - DNA, 15 bp, Homo sapiens
taattttaattaatt

SEQ ID NO: 757234 - DNA, 15 bp, Homo sapiens
aattttaattaattt

SEQ ID NO: 757235 - DNA, 15 bp, Homo sapiens
attttaattaattta

SEQ ID NO: 757236 - DNA, 15 bp, Homo sapiens
ttttaattaatttaa

SEQ ID NO: 757237 - DNA, 15 bp, Homo sapiens
tttaattaatttaaa

SEQ ID NO: 757238 - DNA, 15 bp, Homo sapiens
ttaattaatttaaat

SEQ ID NO: 757239 - DNA, 15 bp, Homo sapiens
taattaatttaaatt

SEQ ID NO: 757240 - DNA, 15 bp, Homo sapiens
aattaatttaaattt

SEQ ID NO: 757241 - DNA, 15 bp, Homo sapiens
attaatttaaattta

SEQ ID NO: 757242 - DNA, 15 bp, Homo sapiens
ttaatttaaatttag

SEQ ID NO: 757243 - DNA, 15 bp, Homo sapiens
taatttaaatttagc

SEQ ID NO: 757244 - DNA, 15 bp, Homo sapiens
aatttaaatttagcc

SEQ ID NO: 757245 - DNA, 15 bp, Homo sapiens
atttaaatttagcca

SEQ ID NO: 757246 - DNA, 15 bp, Homo sapiens
tttaaatttagccat

SEQ ID NO: 757247 - DNA, 15 bp, Homo sapiens
ttaaatttagccatt

SEQ ID NO: 757248 - DNA, 15 bp, Homo sapiens
taaatttagccattt

SEQ ID NO: 757249 - DNA, 15 bp, Homo sapiens
aaatttagccattta

SEQ ID NO: 757250 - DNA, 15 bp, Homo sapiens
aatttagccatttat

SEQ ID NO: 757251 - DNA, 15 bp, Homo sapiens
atttagccatttata

SEQ ID NO: 757252 - DNA, 15 bp, Homo sapiens
tttagccatttatag

SEQ ID NO: 757253 - DNA, 15 bp, Homo sapiens
ttagccatttatagc

SEQ ID NO: 757254 - DNA, 15 bp, Homo sapiens
tagccatttatagct

SEQ ID NO: 757255 - DNA, 15 bp, Homo sapiens
agccatttatagcta

SEQ ID NO: 757256 - DNA, 15 bp, Homo sapiens
gccatttatagctag

SEQ ID NO: 757257 - DNA, 15 bp, Homo sapiens
ccatttatagctagt

SEQ ID NO: 757258 - DNA, 15 bp, Homo sapiens
catttatagctagtg

SEQ ID NO: 757259 - DNA, 15 bp, Homo sapiens
atttatagctagtgg

SEQ ID NO: 757260 - DNA, 15 bp, Homo sapiens
tttatagctagtggc

SEQ ID NO: 757261 - DNA, 15 bp, Homo sapiens
ttatagctagtggct

SEQ ID NO: 757262 - DNA, 15 bp, Homo sapiens
tatagctagtggcta

SEQ ID NO: 757263 - DNA, 15 bp, Homo sapiens
atagctagtggctac

SEQ ID NO: 757264 - DNA, 15 bp, Homo sapiens
tagctagtggctacc

SEQ ID NO: 757265 - DNA, 15 bp, Homo sapiens
agctagtggctacca

SEQ ID NO: 757266 - DNA, 15 bp, Homo sapiens
gctagtggctaccat

SEQ ID NO: 757267 - DNA, 15 bp, Homo sapiens
ctagtggctaccata

SEQ ID NO: 757268 - DNA, 15 bp, Homo sapiens
tagtggctaccatat

SEQ ID NO: 757269 - DNA, 15 bp, Homo sapiens
agtggctaccatatt

SEQ ID NO: 757270 - DNA, 15 bp, Homo sapiens
gtggctaccatattg

SEQ ID NO: 757271 - DNA, 15 bp, Homo sapiens
tggctaccatattga

SEQ ID NO: 757272 - DNA, 15 bp, Homo sapiens
ggctaccatattgaa

SEQ ID NO: 757273 - DNA, 15 bp, Homo sapiens
gctaccatattgaat

SEQ ID NO: 757274 - DNA, 15 bp, Homo sapiens
ctaccatattgaata

SEQ ID NO: 757275 - DNA, 15 bp, Homo sapiens
taccatattgaatag

SEQ ID NO: 757276 - DNA, 15 bp, Homo sapiens
accatattgaatagc

SEQ ID NO: 757277 - DNA, 15 bp, Homo sapiens
ccatattgaatagca

SEQ ID NO: 757278 - DNA, 15 bp, Homo sapiens
catattgaatagcac

SEQ ID NO: 757279 - DNA, 15 bp, Homo sapiens
atattgaatagcaca

SEQ ID NO: 757280 - DNA, 15 bp, Homo sapiens
tattgaatagcacag

SEQ ID NO: 757281 - DNA, 15 bp, Homo sapiens
attgaatagcacagg

SEQ ID NO: 757282 - DNA, 15 bp, Homo sapiens
ttgaatagcacaggc

SEQ ID NO: 757283 - DNA, 15 bp, Homo sapiens
tgaatagcacaggct

SEQ ID NO: 757284 - DNA, 15 bp, Homo sapiens
gaatagcacaggctt

SEQ ID NO: 757285 - DNA, 15 bp, Homo sapiens
aatagcacaggcttt

SEQ ID NO: 757286 - DNA, 15 bp, Homo sapiens
atagcacaggctttg

SEQ ID NO: 757287 - DNA, 15 bp, Homo sapiens
tagcacaggctttga

SEQ ID NO: 757288 - DNA, 15 bp, Homo sapiens
agcacaggctttgag

SEQ ID NO: 757289 - DNA, 15 bp, Homo sapiens
gcacaggctttgaga

SEQ ID NO: 757290 - DNA, 15 bp, Homo sapiens
cacaggctttgagat

SEQ ID NO: 757291 - DNA, 15 bp, Homo sapiens
acaggctttgagata

SEQ ID NO: 757292 - DNA, 15 bp, Homo sapiens
caggctttgagataa

SEQ ID NO: 757293 - DNA, 15 bp, Homo sapiens
aggctttgagataac

SEQ ID NO: 757294 - DNA, 15 bp, Homo sapiens
ggctttgagataact

SEQ ID NO: 757295 - DNA, 15 bp, Homo sapiens
gctttgagataactt

SEQ ID NO: 757296 - DNA, 15 bp, Homo sapiens
ctttgagataacttt

SEQ ID NO: 757297 - DNA, 15 bp, Homo sapiens
tttgagataacttta

SEQ ID NO: 757298 - DNA, 15 bp, Homo sapiens
ttgagataactttaa

SEQ ID NO: 757299 - DNA, 15 bp, Homo sapiens
tgagataactttaat

SEQ ID NO: 757300 - DNA, 15 bp, Homo sapiens
gagataactttaata

SEQ ID NO: 757301 - DNA, 15 bp, Homo sapiens
agataactttaatac

SEQ ID NO: 757302 - DNA, 15 bp, Homo sapiens
gataactttaatacc

SEQ ID NO: 757303 - DNA, 15 bp, Homo sapiens
ataactttaatacct

SEQ ID NO: 757304 - DNA, 15 bp, Homo sapiens
taactttaatacctt

SEQ ID NO: 757305 - DNA, 15 bp, Homo sapiens
aactttaataccttt

SEQ ID NO: 757306 - DNA, 15 bp, Homo sapiens
actttaataccttta

SEQ ID NO: 757307 - DNA, 15 bp, Homo sapiens
ctttaatacctttat

SEQ ID NO: 757308 - DNA, 15 bp, Homo sapiens
tttaatacctttatg

SEQ ID NO: 757309 - DNA, 15 bp, Homo sapiens
ttaatacctttatga

SEQ ID NO: 757310 - DNA, 15 bp, Homo sapiens
taatacctttatgag

SEQ ID NO: 757311 - DNA, 15 bp, Homo sapiens
aatacctttatgagg

SEQ ID NO: 757312 - DNA, 15 bp, Homo sapiens
atacctttatgaggt

SEQ ID NO: 757313 - DNA, 15 bp, Homo sapiens
tacctttatgaggta

SEQ ID NO: 757314 - DNA, 15 bp, Homo sapiens
acctttatgaggtat

SEQ ID NO: 757315 - DNA, 15 bp, Homo sapiens
cctttatgaggtatt

SEQ ID NO: 757316 - DNA, 15 bp, Homo sapiens
ctttatgaggtattt

SEQ ID NO: 757317 - DNA, 15 bp, Homo sapiens
tttatgaggtattta

SEQ ID NO: 757318 - DNA, 15 bp, Homo sapiens
ttatgaggtatttaa

SEQ ID NO: 757319 - DNA, 15 bp, Homo sapiens
tatgaggtatttaat

SEQ ID NO: 757320 - DNA, 15 bp, Homo sapiens
atgaggtatttaata

SEQ ID NO: 757321 - DNA, 15 bp, Homo sapiens
tgaggtatttaatac

SEQ ID NO: 757322 - DNA, 15 bp, Homo sapiens
gaggtatttaatacc

SEQ ID NO: 757323 - DNA, 15 bp, Homo sapiens
aggtatttaatacct

SEQ ID NO: 757324 - DNA, 15 bp, Homo sapiens
ggtatttaatacctt

SEQ ID NO: 757325 - DNA, 15 bp, Homo sapiens
gtatttaataccttt

SEQ ID NO: 757326 - DNA, 15 bp, Homo sapiens
tatttaataccttta

SEQ ID NO: 757327 - DNA, 15 bp, Homo sapiens
atttaatacctttat

SEQ ID NO: 757328 - DNA, 15 bp, Homo sapiens
atacctttatgaggg

SEQ ID NO: 757329 - DNA, 15 bp, Homo sapiens
tacctttatgagggg

SEQ ID NO: 757330 - DNA, 15 bp, Homo sapiens
acctttatgagggga

SEQ ID NO: 757331 - DNA, 15 bp, Homo sapiens
cctttatgaggggag

SEQ ID NO: 757332 - DNA, 15 bp, Homo sapiens
ctttatgaggggaga

SEQ ID NO: 757333 - DNA, 15 bp, Homo sapiens
tttatgaggggagaa

SEQ ID NO: 757334 - DNA, 15 bp, Homo sapiens
ttatgaggggagaaa

SEQ ID NO: 757335 - DNA, 15 bp, Homo sapiens
tatgaggggagaaac

SEQ ID NO: 757336 - DNA, 15 bp, Homo sapiens
atgaggggagaaaca

SEQ ID NO: 757337 - DNA, 15 bp, Homo sapiens
tgaggggagaaacaa

SEQ ID NO: 757338 - DNA, 15 bp, Homo sapiens
gaggggagaaacaag

SEQ ID NO: 757339 - DNA, 15 bp, Homo sapiens
aggggagaaacaagt

SEQ ID NO: 757340 - DNA, 15 bp, Homo sapiens
ggggagaaacaagtg

SEQ ID NO: 757341 - DNA, 15 bp, Homo sapiens
gggagaaacaagtga

SEQ ID NO: 757342 - DNA, 15 bp, Homo sapiens
ggagaaacaagtgac

SEQ ID NO: 757343 - DNA, 15 bp, Homo sapiens
gagaaacaagtgacc

SEQ ID NO: 757344 - DNA, 15 bp, Homo sapiens
agaaacaagtgacca

SEQ ID NO: 757345 - DNA, 15 bp, Homo sapiens
gaaacaagtgaccaa

SEQ ID NO: 757346 - DNA, 15 bp, Homo sapiens
aaacaagtgaccaaa

SEQ ID NO: 757347 - DNA, 15 bp, Homo sapiens
aacaagtgaccaaaa

SEQ ID NO: 757348 - DNA, 15 bp, Homo sapiens
acaagtgaccaaaaa

SEQ ID NO: 757349 - DNA, 15 bp, Homo sapiens
caagtgaccaaaaag

SEQ ID NO: 757350 - DNA, 15 bp, Homo sapiens
aagtgaccaaaaagc

SEQ ID NO: 757351 - DNA, 15 bp, Homo sapiens
agtgaccaaaaagca

SEQ ID NO: 757352 - DNA, 15 bp, Homo sapiens
gtgaccaaaaagcaa

SEQ ID NO: 757353 - DNA, 15 bp, Homo sapiens
tgaccaaaaagcaaa

SEQ ID NO: 757354 - DNA, 15 bp, Homo sapiens
gaccaaaaagcaaag

SEQ ID NO: 757355 - DNA, 15 bp, Homo sapiens
accaaaaagcaaagt

SEQ ID NO: 757356 - DNA, 15 bp, Homo sapiens
ccaaaaagcaaagtg

SEQ ID NO: 757357 - DNA, 15 bp, Homo sapiens
caaaaagcaaagtga

SEQ ID NO: 757358 - DNA, 15 bp, Homo sapiens
aaaaagcaaagtgat

SEQ ID NO: 757359 - DNA, 15 bp, Homo sapiens
aaaagcaaagtgatc

SEQ ID NO: 757360 - DNA, 15 bp, Homo sapiens
aaagcaaagtgatct

SEQ ID NO: 757361 - DNA, 15 bp, Homo sapiens
aagcaaagtgatctt

SEQ ID NO: 757362 - DNA, 15 bp, Homo sapiens
agcaaagtgatcttt

SEQ ID NO: 757363 - DNA, 15 bp, Homo sapiens
gcaaagtgatctttg

SEQ ID NO: 757364 - DNA, 15 bp, Homo sapiens
caaagtgatctttga

SEQ ID NO: 757365 - DNA, 15 bp, Homo sapiens
aaagtgatctttgag

SEQ ID NO: 757366 - DNA, 15 bp, Homo sapiens
aagtgatctttgaga

SEQ ID NO: 757367 - DNA, 15 bp, Homo sapiens
agtgatctttgagac

SEQ ID NO: 757368 - DNA, 15 bp, Homo sapiens
gtgatctttgagact

SEQ ID NO: 757369 - DNA, 15 bp, Homo sapiens
tgatctttgagactt

SEQ ID NO: 757370 - DNA, 15 bp, Homo sapiens
gatctttgagacttt

SEQ ID NO: 757371 - DNA, 15 bp, Homo sapiens
atctttgagactttg

SEQ ID NO: 757372 - DNA, 15 bp, Homo sapiens
tctttgagactttga

SEQ ID NO: 757373 - DNA, 15 bp, Homo sapiens
ctttgagactttgaa

SEQ ID NO: 757374 - DNA, 15 bp, Homo sapiens
tttgagactttgaag

SEQ ID NO: 757375 - DNA, 15 bp, Homo sapiens
ttgagactttgaagc

SEQ ID NO: 757376 - DNA, 15 bp, Homo sapiens
tgagactttgaagca

SEQ ID NO: 757377 - DNA, 15 bp, Homo sapiens
gagactttgaagcag

SEQ ID NO: 757378 - DNA, 15 bp, Homo sapiens
agactttgaagcagc

SEQ ID NO: 757379 - DNA, 15 bp, Homo sapiens
gactttgaagcagct

SEQ ID NO: 757380 - DNA, 15 bp, Homo sapiens
actttgaagcagctt

SEQ ID NO: 757381 - DNA, 15 bp, Homo sapiens
ctttgaagcagcttg

SEQ ID NO: 757382 - DNA, 15 bp, Homo sapiens
tttgaagcagcttgt

SEQ ID NO: 757383 - DNA, 15 bp, Homo sapiens
ttgaagcagcttgtt

SEQ ID NO: 757384 - DNA, 15 bp, Homo sapiens
tgaagcagcttgttc

SEQ ID NO: 757385 - DNA, 15 bp, Homo sapiens
gaagcagcttgttcg

SEQ ID NO: 757386 - DNA, 15 bp, Homo sapiens
aagcagcttgttcga

SEQ ID NO: 757387 - DNA, 15 bp, Homo sapiens
agcagcttgttcgag

SEQ ID NO: 757388 - DNA, 15 bp, Homo sapiens
gcagcttgttcgaga

SEQ ID NO: 757389 - DNA, 15 bp, Homo sapiens
cagcttgttcgagag

SEQ ID NO: 757390 - DNA, 15 bp, Homo sapiens
agcttgttcgagagc

SEQ ID NO: 757391 - DNA, 15 bp, Homo sapiens
gcttgttcgagagcc

SEQ ID NO: 757392 - DNA, 15 bp, Homo sapiens
cttgttcgagagcct

SEQ ID NO: 757393 - DNA, 15 bp, Homo sapiens
ttgttcgagagcctg

SEQ ID NO: 757394 - DNA, 15 bp, Homo sapiens
tgttcgagagcctgt

SEQ ID NO: 757395 - DNA, 15 bp, Homo sapiens
gttcgagagcctgtt

SEQ ID NO: 757396 - DNA, 15 bp, Homo sapiens
ttcgagagcctgttt

SEQ ID NO: 757397 - DNA, 15 bp, Homo sapiens
tcgagagcctgttta

SEQ ID NO: 757398 - DNA, 15 bp, Homo sapiens
cgagagcctgtttag

SEQ ID NO: 757399 - DNA, 15 bp, Homo sapiens
gagagcctgtttaga

SEQ ID NO: 757400 - DNA, 15 bp, Homo sapiens
agagcctgtttagag

SEQ ID NO: 757401 - DNA, 15 bp, Homo sapiens
gagcctgtttagagg

SEQ ID NO: 757402 - DNA, 15 bp, Homo sapiens
agcctgtttagaggt

SEQ ID NO: 757403 - DNA, 15 bp, Homo sapiens
gcctgtttagaggtt

SEQ ID NO: 757404 - DNA, 15 bp, Homo sapiens
cctgtttagaggtta

SEQ ID NO: 757405 - DNA, 15 bp, Homo sapiens
ctgtttagaggttag

SEQ ID NO: 757406 - DNA, 15 bp, Homo sapiens
tgtttagaggttagg

SEQ ID NO: 757407 - DNA, 15 bp, Homo sapiens
gtttagaggttaggc

SEQ ID NO: 757408 - DNA, 15 bp, Homo sapiens
tttagaggttaggcc

SEQ ID NO: 757409 - DNA, 15 bp, Homo sapiens
ttagaggttaggcct

SEQ ID NO: 757410 - DNA, 15 bp, Homo sapiens
tagaggttaggccta

SEQ ID NO: 757411 - DNA, 15 bp, Homo sapiens
agaggttaggcctat

SEQ ID NO: 757412 - DNA, 15 bp, Homo sapiens
gaggttaggcctata

SEQ ID NO: 757413 - DNA, 15 bp, Homo sapiens
aggttaggcctatat

SEQ ID NO: 757414 - DNA, 15 bp, Homo sapiens
ggttaggcctatatc

SEQ ID NO: 757415 - DNA, 15 bp, Homo sapiens
gttaggcctatatcc

SEQ ID NO: 757416 - DNA, 15 bp, Homo sapiens
ttaggcctatatccc

SEQ ID NO: 757417 - DNA, 15 bp, Homo sapiens
taggcctatatccca

SEQ ID NO: 757418 - DNA, 15 bp, Homo sapiens
aggcctatatcccac

SEQ ID NO: 757419 - DNA, 15 bp, Homo sapiens
ggcctatatcccaca

SEQ ID NO: 757420 - DNA, 15 bp, Homo sapiens
gcctatatcccacat

SEQ ID NO: 757421 - DNA, 15 bp, Homo sapiens
cctatatcccacatc

SEQ ID NO: 757422 - DNA, 15 bp, Homo sapiens
ctatatcccacatca

SEQ ID NO: 757423 - DNA, 15 bp, Homo sapiens
tatatcccacatcat

SEQ ID NO: 757424 - DNA, 15 bp, Homo sapiens
atatcccacatcatc

SEQ ID NO: 757425 - DNA, 15 bp, Homo sapiens
tatcccacatcatct

SEQ ID NO: 757426 - DNA, 15 bp, Homo sapiens
atcccacatcatctt

SEQ ID NO: 757427 - DNA, 15 bp, Homo sapiens
tcccacatcatcttt

SEQ ID NO: 757428 - DNA, 15 bp, Homo sapiens
cccacatcatcttta

SEQ ID NO: 757429 - DNA, 15 bp, Homo sapiens
ccacatcatctttat

SEQ ID NO: 757430 - DNA, 15 bp, Homo sapiens
cacatcatctttatt

SEQ ID NO: 757431 - DNA, 15 bp, Homo sapiens
acatcatctttattt

SEQ ID NO: 757432 - DNA, 15 bp, Homo sapiens
catcatctttatttg

SEQ ID NO: 757433 - DNA, 15 bp, Homo sapiens
atcatctttatttgc

SEQ ID NO: 757434 - DNA, 15 bp, Homo sapiens
tcatctttatttgca

SEQ ID NO: 757435 - DNA, 15 bp, Homo sapiens
catctttatttgcat

SEQ ID NO: 757436 - DNA, 15 bp, Homo sapiens
atctttatttgcatc

SEQ ID NO: 757437 - DNA, 15 bp, Homo sapiens
tctttatttgcatct

SEQ ID NO: 757438 - DNA, 15 bp, Homo sapiens
ctttatttgcatctc

SEQ ID NO: 757439 - DNA, 15 bp, Homo sapiens
tttatttgcatctcc

SEQ ID NO: 757440 - DNA, 15 bp, Homo sapiens
ttatttgcatctcca

SEQ ID NO: 757441 - DNA, 15 bp, Homo sapiens
tatttgcatctccag

SEQ ID NO: 757442 - DNA, 15 bp, Homo sapiens
atttgcatctccagt

SEQ ID NO: 757443 - DNA, 15 bp, Homo sapiens
tttgcatctccagtt

SEQ ID NO: 757444 - DNA, 15 bp, Homo sapiens
ttgcatctccagtta

SEQ ID NO: 757445 - DNA, 15 bp, Homo sapiens
tgcatctccagttac

SEQ ID NO: 757446 - DNA, 15 bp, Homo sapiens
gcatctccagttact

SEQ ID NO: 757447 - DNA, 15 bp, Homo sapiens
catctccagttactt

SEQ ID NO: 757448 - DNA, 15 bp, Homo sapiens
atctccagttacttc

SEQ ID NO: 757449 - DNA, 15 bp, Homo sapiens
tctccagttacttct

SEQ ID NO: 757450 - DNA, 15 bp, Homo sapiens
ctccagttacttctg

SEQ ID NO: 757451 - DNA, 15 bp, Homo sapiens
tccagttacttctgt

SEQ ID NO: 757452 - DNA, 15 bp, Homo sapiens
ccagttacttctgta

SEQ ID NO: 757453 - DNA, 15 bp, Homo sapiens
cagttacttctgtag

SEQ ID NO: 757454 - DNA, 15 bp, Homo sapiens
agttacttctgtagt

SEQ ID NO: 757455 - DNA, 15 bp, Homo sapiens
gttacttctgtagtc

SEQ ID NO: 757456 - DNA, 15 bp, Homo sapiens
ttacttctgtagtct

SEQ ID NO: 757457 - DNA, 15 bp, Homo sapiens
tacttctgtagtcta

SEQ ID NO: 757458 - DNA, 15 bp, Homo sapiens
acttctgtagtctat

SEQ ID NO: 757459 - DNA, 15 bp, Homo sapiens
cttctgtagtctatc

SEQ ID NO: 757460 - DNA, 15 bp, Homo sapiens
ttctgtagtctatca

SEQ ID NO: 757461 - DNA, 15 bp, Homo sapiens
tctgtagtctatcaa

SEQ ID NO: 757462 - DNA, 15 bp, Homo sapiens
ctgtagtctatcaaa

SEQ ID NO: 757463 - DNA, 15 bp, Homo sapiens
tgtagtctatcaaag

SEQ ID NO: 757464 - DNA, 15 bp, Homo sapiens
gtagtctatcaaagt

SEQ ID NO: 757465 - DNA, 15 bp, Homo sapiens
tagtctatcaaagta

SEQ ID NO: 757466 - DNA, 15 bp, Homo sapiens
agtctatcaaagtaa

SEQ ID NO: 757467 - DNA, 15 bp, Homo sapiens
gtctatcaaagtaat

SEQ ID NO: 757468 - DNA, 15 bp, Homo sapiens
tctatcaaagtaatt

SEQ ID NO: 757469 - DNA, 15 bp, Homo sapiens
ctatcaaagtaattg

SEQ ID NO: 757470 - DNA, 15 bp, Homo sapiens
tatcaaagtaattgc

SEQ ID NO: 757471 - DNA, 15 bp, Homo sapiens
atcaaagtaattgca

SEQ ID NO: 757472 - DNA, 15 bp, Homo sapiens
tcaaagtaattgcat

SEQ ID NO: 757473 - DNA, 15 bp, Homo sapiens
caaagtaattgcatt

SEQ ID NO: 757474 - DNA, 15 bp, Homo sapiens
aaagtaattgcatta

SEQ ID NO: 757475 - DNA, 15 bp, Homo sapiens
aagtaattgcattat

SEQ ID NO: 757476 - DNA, 15 bp, Homo sapiens
agtaattgcattatt

SEQ ID NO: 757477 - DNA, 15 bp, Homo sapiens
gtaattgcattatta

SEQ ID NO: 757478 - DNA, 15 bp, Homo sapiens
taattgcattattag

SEQ ID NO: 757479 - DNA, 15 bp, Homo sapiens
aattgcattattagg

SEQ ID NO: 757480 - DNA, 15 bp, Homo sapiens
attgcattattagga

SEQ ID NO: 757481 - DNA, 15 bp, Homo sapiens
ttgcattattaggag

SEQ ID NO: 757482 - DNA, 15 bp, Homo sapiens
tgcattattaggaga

SEQ ID NO: 757483 - DNA, 15 bp, Homo sapiens
gcattattaggagaa

SEQ ID NO: 757484 - DNA, 15 bp, Homo sapiens
cattattaggagaag

SEQ ID NO: 757485 - DNA, 15 bp, Homo sapiens
attattaggagaagc

SEQ ID NO: 757486 - DNA, 15 bp, Homo sapiens
ttattaggagaagct

SEQ ID NO: 757487 - DNA, 15 bp, Homo sapiens
tattaggagaagctt

SEQ ID NO: 757488 - DNA, 15 bp, Homo sapiens
attaggagaagcttt

SEQ ID NO: 757489 - DNA, 15 bp, Homo sapiens
ttaggagaagctttt

SEQ ID NO: 757490 - DNA, 15 bp, Homo sapiens
taggagaagcttttt

SEQ ID NO: 757491 - DNA, 15 bp, Homo sapiens
aggagaagctttttc

SEQ ID NO: 757492 - DNA, 15 bp, Homo sapiens
ggagaagctttttca

SEQ ID NO: 757493 - DNA, 15 bp, Homo sapiens
gagaagctttttcag

SEQ ID NO: 757494 - DNA, 15 bp, Homo sapiens
agaagctttttcaga

SEQ ID NO: 757495 - DNA, 15 bp, Homo sapiens
gaagctttttcagag

SEQ ID NO: 757496 - DNA, 15 bp, Homo sapiens
aagctttttcagagc

SEQ ID NO: 757497 - DNA, 15 bp, Homo sapiens
agctttttcagagct

SEQ ID NO: 757498 - DNA, 15 bp, Homo sapiens
gctttttcagagctt

SEQ ID NO: 757499 - DNA, 15 bp, Homo sapiens
ctttttcagagcttt

SEQ ID NO: 757500 - DNA, 15 bp, Homo sapiens
tttttcagagctttg

SEQ ID NO: 757501 - DNA, 15 bp, Homo sapiens
ttttcagagctttgt

SEQ ID NO: 757502 - DNA, 15 bp, Homo sapiens
tttcagagctttgtg

SEQ ID NO: 757503 - DNA, 15 bp, Homo sapiens
ttcagagctttgtgt

SEQ ID NO: 757504 - DNA, 15 bp, Homo sapiens
tcagagctttgtgtg

SEQ ID NO: 757505 - DNA, 15 bp, Homo sapiens
cagagctttgtgtga

SEQ ID NO: 757506 - DNA, 15 bp, Homo sapiens
agagctttgtgtgac

SEQ ID NO: 757507 - DNA, 15 bp, Homo sapiens
gagctttgtgtgact

SEQ ID NO: 757508 - DNA, 15 bp, Homo sapiens
agctttgtgtgactt

SEQ ID NO: 757509 - DNA, 15 bp, Homo sapiens
gctttgtgtgactta

SEQ ID NO: 757510 - DNA, 15 bp, Homo sapiens
ctttgtgtgacttaa

SEQ ID NO: 757511 - DNA, 15 bp, Homo sapiens
tttgtgtgacttaag

SEQ ID NO: 757512 - DNA, 15 bp, Homo sapiens
ttgtgtgacttaaga

SEQ ID NO: 757513 - DNA, 15 bp, Homo sapiens
tgtgtgacttaagat

SEQ ID NO: 757514 - DNA, 15 bp, Homo sapiens
gtgtgacttaagatc

SEQ ID NO: 757515 - DNA, 15 bp, Homo sapiens
tgtgacttaagatcg

SEQ ID NO: 757516 - DNA, 15 bp, Homo sapiens
gtgacttaagatcgc

SEQ ID NO: 757517 - DNA, 15 bp, Homo sapiens
tgacttaagatcgca

SEQ ID NO: 757518 - DNA, 15 bp, Homo sapiens
gacttaagatcgcag

SEQ ID NO: 757519 - DNA, 15 bp, Homo sapiens
acttaagatcgcagg

SEQ ID NO: 757520 - DNA, 15 bp, Homo sapiens
cttaagatcgcaggg

SEQ ID NO: 757521 - DNA, 15 bp, Homo sapiens
ttaagatcgcaggga

SEQ ID NO: 757522 - DNA, 15 bp, Homo sapiens
taagatcgcagggaa

SEQ ID NO: 757523 - DNA, 15 bp, Homo sapiens
aagatcgcagggaaa

SEQ ID NO: 757524 - DNA, 15 bp, Homo sapiens
agatcgcagggaaat

SEQ ID NO: 757525 - DNA, 15 bp, Homo sapiens
gatcgcagggaaata

SEQ ID NO: 757526 - DNA, 15 bp, Homo sapiens
atcgcagggaaatac

SEQ ID NO: 757527 - DNA, 15 bp, Homo sapiens
tcgcagggaaataca

SEQ ID NO: 757528 - DNA, 15 bp, Homo sapiens
cgcagggaaatacat

SEQ ID NO: 757529 - DNA, 15 bp, Homo sapiens
gcagggaaatacata

SEQ ID NO: 757530 - DNA, 15 bp, Homo sapiens
cagggaaatacatat

SEQ ID NO: 757531 - DNA, 15 bp, Homo sapiens
agggaaatacatatg

SEQ ID NO: 757532 - DNA, 15 bp, Homo sapiens
gggaaatacatatga

SEQ ID NO: 757533 - DNA, 15 bp, Homo sapiens
ggaaatacatatgaa

SEQ ID NO: 757534 - DNA, 15 bp, Homo sapiens
gaaatacatatgaag

SEQ ID NO: 757535 - DNA, 15 bp, Homo sapiens
aaatacatatgaagg

SEQ ID NO: 757536 - DNA, 15 bp, Homo sapiens
aatacatatgaaggt

SEQ ID NO: 757537 - DNA, 15 bp, Homo sapiens
atacatatgaaggtt

SEQ ID NO: 757538 - DNA, 15 bp, Homo sapiens
tacatatgaaggttg

SEQ ID NO: 757539 - DNA, 15 bp, Homo sapiens
acatatgaaggttgc

SEQ ID NO: 757540 - DNA, 15 bp, Homo sapiens
catatgaaggttgcg

SEQ ID NO: 757541 - DNA, 15 bp, Homo sapiens
atatgaaggttgcgt

SEQ ID NO: 757542 - DNA, 15 bp, Homo sapiens
tatgaaggttgcgtg

SEQ ID NO: 757543 - DNA, 15 bp, Homo sapiens
atgaaggttgcgtgg

SEQ ID NO: 757544 - DNA, 15 bp, Homo sapiens
tgaaggttgcgtggc

SEQ ID NO: 757545 - DNA, 15 bp, Homo sapiens
gaaggttgcgtggca

SEQ ID NO: 757546 - DNA, 15 bp, Homo sapiens
aaggttgcgtggcag

SEQ ID NO: 757547 - DNA, 15 bp, Homo sapiens
aggttgcgtggcagt

SEQ ID NO: 757548 - DNA, 15 bp, Homo sapiens
ggttgcgtggcagta

SEQ ID NO: 757549 - DNA, 15 bp, Homo sapiens
gttgcgtggcagtac

SEQ ID NO: 757550 - DNA, 15 bp, Homo sapiens
ttgcgtggcagtact

SEQ ID NO: 757551 - DNA, 15 bp, Homo sapiens
tgcgtggcagtactg

SEQ ID NO: 757552 - DNA, 15 bp, Homo sapiens
gcgtggcagtactgc

SEQ ID NO: 757553 - DNA, 15 bp, Homo sapiens
cgtggcagtactgcc

SEQ ID NO: 757554 - DNA, 15 bp, Homo sapiens
gtggcagtactgcca

SEQ ID NO: 757555 - DNA, 15 bp, Homo sapiens
tggcagtactgccat

SEQ ID NO: 757556 - DNA, 15 bp, Homo sapiens
ggcagtactgccatg

SEQ ID NO: 757557 - DNA, 15 bp, Homo sapiens
gcagtactgccatgt

SEQ ID NO: 757558 - DNA, 15 bp, Homo sapiens
cagtactgccatgtg

SEQ ID NO: 757559 - DNA, 15 bp, Homo sapiens
agtactgccatgtgg

SEQ ID NO: 757560 - DNA, 15 bp, Homo sapiens
gtactgccatgtgga

SEQ ID NO: 757561 - DNA, 15 bp, Homo sapiens
tactgccatgtggaa

SEQ ID NO: 757562 - DNA, 15 bp, Homo sapiens
actgccatgtggaaa

SEQ ID NO: 757563 - DNA, 15 bp, Homo sapiens
ctgccatgtggaaat

SEQ ID NO: 757564 - DNA, 15 bp, Homo sapiens
tgccatgtggaaatg

SEQ ID NO: 757565 - DNA, 15 bp, Homo sapiens
gccatgtggaaatgt

SEQ ID NO: 757566 - DNA, 15 bp, Homo sapiens
ccatgtggaaatgtg

SEQ ID NO: 757567 - DNA, 15 bp, Homo sapiens
catgtggaaatgtgg

SEQ ID NO: 757568 - DNA, 15 bp, Homo sapiens
atgtggaaatgtggg

SEQ ID NO: 757569 - DNA, 15 bp, Homo sapiens
tgtggaaatgtgggt

SEQ ID NO: 757570 - DNA, 15 bp, Homo sapiens
gtggaaatgtgggtg

SEQ ID NO: 757571 - DNA, 15 bp, Homo sapiens
tggaaatgtgggtgt

SEQ ID NO: 757572 - DNA, 15 bp, Homo sapiens
ggaaatgtgggtgtg

SEQ ID NO: 757573 - DNA, 15 bp, Homo sapiens
gaaatgtgggtgtgg

SEQ ID NO: 757574 - DNA, 15 bp, Homo sapiens
aaatgtgggtgtggg

SEQ ID NO: 757575 - DNA, 15 bp, Homo sapiens
aatgtgggtgtgggc

SEQ ID NO: 757576 - DNA, 15 bp, Homo sapiens
atgtgggtgtgggct

SEQ ID NO: 757577 - DNA, 15 bp, Homo sapiens
tgtgggtgtgggctt

SEQ ID NO: 757578 - DNA, 15 bp, Homo sapiens
gtgggtgtgggcttt

SEQ ID NO: 757579 - DNA, 15 bp, Homo sapiens
tgggtgtgggctttg

SEQ ID NO: 757580 - DNA, 15 bp, Homo sapiens
gggtgtgggctttgc

SEQ ID NO: 757581 - DNA, 15 bp, Homo sapiens
ggtgtgggctttgcc

SEQ ID NO: 757582 - DNA, 15 bp, Homo sapiens
gtgtgggctttgcct

SEQ ID NO: 757583 - DNA, 15 bp, Homo sapiens
tgtgggctttgcctt

SEQ ID NO: 757584 - DNA, 15 bp, Homo sapiens
gtgggctttgccttg

SEQ ID NO: 757585 - DNA, 15 bp, Homo sapiens
tgggctttgccttgt

SEQ ID NO: 757586 - DNA, 15 bp, Homo sapiens
gggctttgccttgtt

SEQ ID NO: 757587 - DNA, 15 bp, Homo sapiens
ggctttgccttgttg

SEQ ID NO: 757588 - DNA, 15 bp, Homo sapiens
gctttgccttgttgc

SEQ ID NO: 757589 - DNA, 15 bp, Homo sapiens
ctttgccttgttgca

SEQ ID NO: 757590 - DNA, 15 bp, Homo sapiens
tttgccttgttgcaa

SEQ ID NO: 757591 - DNA, 15 bp, Homo sapiens
ttgccttgttgcaat

SEQ ID NO: 757592 - DNA, 15 bp, Homo sapiens
tgccttgttgcaatg

SEQ ID NO: 757593 - DNA, 15 bp, Homo sapiens
gccttgttgcaatga

SEQ ID NO: 757594 - DNA, 15 bp, Homo sapiens
ccttgttgcaatgac

SEQ ID NO: 757595 - DNA, 15 bp, Homo sapiens
cttgttgcaatgact

SEQ ID NO: 757596 - DNA, 15 bp, Homo sapiens
ttgttgcaatgactt

SEQ ID NO: 757597 - DNA, 15 bp, Homo sapiens
tgttgcaatgacttg

SEQ ID NO: 757598 - DNA, 15 bp, Homo sapiens
gttgcaatgacttgt

SEQ ID NO: 757599 - DNA, 15 bp, Homo sapiens
ttgcaatgacttgtt

SEQ ID NO: 757600 - DNA, 15 bp, Homo sapiens
tgcaatgacttgtta

SEQ ID NO: 757601 - DNA, 15 bp, Homo sapiens
gcaatgacttgttag

SEQ ID NO: 757602 - DNA, 15 bp, Homo sapiens
caatgacttgttagt

SEQ ID NO: 757603 - DNA, 15 bp, Homo sapiens
aatgacttgttagtg

SEQ ID NO: 757604 - DNA, 15 bp, Homo sapiens
atgacttgttagtgc

SEQ ID NO: 757605 - DNA, 15 bp, Homo sapiens
tgacttgttagtgct

SEQ ID NO: 757606 - DNA, 15 bp, Homo sapiens
gacttgttagtgcta

SEQ ID NO: 757607 - DNA, 15 bp, Homo sapiens
acttgttagtgctac

SEQ ID NO: 757608 - DNA, 15 bp, Homo sapiens
cttgttagtgctact

SEQ ID NO: 757609 - DNA, 15 bp, Homo sapiens
ttgttagtgctactg

SEQ ID NO: 757610 - DNA, 15 bp, Homo sapiens
tgttagtgctactgg

SEQ ID NO: 757611 - DNA, 15 bp, Homo sapiens
gttagtgctactggc

SEQ ID NO: 757612 - DNA, 15 bp, Homo sapiens
ttagtgctactggcc

SEQ ID NO: 757613 - DNA, 15 bp, Homo sapiens
tagtgctactggcca

SEQ ID NO: 757614 - DNA, 15 bp, Homo sapiens
agtgctactggccat

SEQ ID NO: 757615 - DNA, 15 bp, Homo sapiens
gtgctactggccata

SEQ ID NO: 757616 - DNA, 15 bp, Homo sapiens
tgctactggccataa

SEQ ID NO: 757617 - DNA, 15 bp, Homo sapiens
gctactggccataat

SEQ ID NO: 757618 - DNA, 15 bp, Homo sapiens
ctactggccataata

SEQ ID NO: 757619 - DNA, 15 bp, Homo sapiens
tactggccataatac

SEQ ID NO: 757620 - DNA, 15 bp, Homo sapiens
actggccataatacc

SEQ ID NO: 757621 - DNA, 15 bp, Homo sapiens
ctggccataatacct

SEQ ID NO: 757622 - DNA, 15 bp, Homo sapiens
tggccataatacctg

SEQ ID NO: 757623 - DNA, 15 bp, Homo sapiens
ggccataatacctgg

SEQ ID NO: 757624 - DNA, 15 bp, Homo sapiens
gccataatacctggg

SEQ ID NO: 757625 - DNA, 15 bp, Homo sapiens
ccataatacctggga

SEQ ID NO: 757626 - DNA, 15 bp, Homo sapiens
cataatacctgggag

SEQ ID NO: 757627 - DNA, 15 bp, Homo sapiens
ataatacctgggagg

SEQ ID NO: 757628 - DNA, 15 bp, Homo sapiens
taatacctgggaggc

SEQ ID NO: 757629 - DNA, 15 bp, Homo sapiens
aatacctgggaggcc

SEQ ID NO: 757630 - DNA, 15 bp, Homo sapiens
atacctgggaggcca

SEQ ID NO: 757631 - DNA, 15 bp, Homo sapiens
tacctgggaggccag

SEQ ID NO: 757632 - DNA, 15 bp, Homo sapiens
acctgggaggccagg

SEQ ID NO: 757633 - DNA, 15 bp, Homo sapiens
cctgggaggccaggg

SEQ ID NO: 757634 - DNA, 15 bp, Homo sapiens
ctgggaggccaggga

SEQ ID NO: 757635 - DNA, 15 bp, Homo sapiens
tgggaggccagggat

SEQ ID NO: 757636 - DNA, 15 bp, Homo sapiens
gggaggccagggata

SEQ ID NO: 757637 - DNA, 15 bp, Homo sapiens
ggaggccagggatat

SEQ ID NO: 757638 - DNA, 15 bp, Homo sapiens
gaggccagggatatt

SEQ ID NO: 757639 - DNA, 15 bp, Homo sapiens
aggccagggatattg

SEQ ID NO: 757640 - DNA, 15 bp, Homo sapiens
ggccagggatattga

SEQ ID NO: 757641 - DNA, 15 bp, Homo sapiens
gccagggatattgac

SEQ ID NO: 757642 - DNA, 15 bp, Homo sapiens
ccagggatattgact

SEQ ID NO: 757643 - DNA, 15 bp, Homo sapiens
cagggatattgactg

SEQ ID NO: 757644 - DNA, 15 bp, Homo sapiens
agggatattgactgt

SEQ ID NO: 757645 - DNA, 15 bp, Homo sapiens
gggatattgactgta

SEQ ID NO: 757646 - DNA, 15 bp, Homo sapiens
ggatattgactgtaa

SEQ ID NO: 757647 - DNA, 15 bp, Homo sapiens
gatattgactgtaat

SEQ ID NO: 757648 - DNA, 15 bp, Homo sapiens
atattgactgtaata

SEQ ID NO: 757649 - DNA, 15 bp, Homo sapiens
tattgactgtaatat

SEQ ID NO: 757650 - DNA, 15 bp, Homo sapiens
attgactgtaatatt

SEQ ID NO: 757651 - DNA, 15 bp, Homo sapiens
ttgactgtaatatta

SEQ ID NO: 757652 - DNA, 15 bp, Homo sapiens
tgactgtaatattat

SEQ ID NO: 757653 - DNA, 15 bp, Homo sapiens
gactgtaatattatc

SEQ ID NO: 757654 - DNA, 15 bp, Homo sapiens
actgtaatattatcc

SEQ ID NO: 757655 - DNA, 15 bp, Homo sapiens
ctgtaatattatcct

SEQ ID NO: 757656 - DNA, 15 bp, Homo sapiens
tgtaatattatcctg

SEQ ID NO: 757657 - DNA, 15 bp, Homo sapiens
gtaatattatcctgc

SEQ ID NO: 757658 - DNA, 15 bp, Homo sapiens
taatattatcctgcc

SEQ ID NO: 757659 - DNA, 15 bp, Homo sapiens
aatattatcctgcct

SEQ ID NO: 757660 - DNA, 15 bp, Homo sapiens
atattatcctgccta

SEQ ID NO: 757661 - DNA, 15 bp, Homo sapiens
tattatcctgcctaa

SEQ ID NO: 757662 - DNA, 15 bp, Homo sapiens
attatcctgcctaaa

SEQ ID NO: 757663 - DNA, 15 bp, Homo sapiens
ttatcctgcctaaaa

SEQ ID NO: 757664 - DNA, 15 bp, Homo sapiens
tatcctgcctaaaat

SEQ ID NO: 757665 - DNA, 15 bp, Homo sapiens
atcctgcctaaaata

SEQ ID NO: 757666 - DNA, 15 bp, Homo sapiens
tcctgcctaaaatac

SEQ ID NO: 757667 - DNA, 15 bp, Homo sapiens
cctgcctaaaatacc

SEQ ID NO: 757668 - DNA, 15 bp, Homo sapiens
ctgcctaaaatacca

SEQ ID NO: 757669 - DNA, 15 bp, Homo sapiens
tgcctaaaataccaa

SEQ ID NO: 757670 - DNA, 15 bp, Homo sapiens
gcctaaaataccaat

SEQ ID NO: 757671 - DNA, 15 bp, Homo sapiens
cctaaaataccaata

SEQ ID NO: 757672 - DNA, 15 bp, Homo sapiens
ctaaaataccaataa

SEQ ID NO: 757673 - DNA, 15 bp, Homo sapiens
taaaataccaataac

SEQ ID NO: 757674 - DNA, 15 bp, Homo sapiens
aaaataccaataaca

SEQ ID NO: 757675 - DNA, 15 bp, Homo sapiens
aaataccaataacac

SEQ ID NO: 757676 - DNA, 15 bp, Homo sapiens
aataccaataacacc

SEQ ID NO: 757677 - DNA, 15 bp, Homo sapiens
ataccaataacaccc

SEQ ID NO: 757678 - DNA, 15 bp, Homo sapiens
taccaataacaccct

SEQ ID NO: 757679 - DNA, 15 bp, Homo sapiens
accaataacaccctc

SEQ ID NO: 757680 - DNA, 15 bp, Homo sapiens
ccaataacaccctca

SEQ ID NO: 757681 - DNA, 15 bp, Homo sapiens
caataacaccctcat

SEQ ID NO: 757682 - DNA, 15 bp, Homo sapiens
aataacaccctcatt

SEQ ID NO: 757683 - DNA, 15 bp, Homo sapiens
ataacaccctcattg

SEQ ID NO: 757684 - DNA, 15 bp, Homo sapiens
taacaccctcattga

SEQ ID NO: 757685 - DNA, 15 bp, Homo sapiens
aacaccctcattgag

SEQ ID NO: 757686 - DNA, 15 bp, Homo sapiens
acaccctcattgaga

SEQ ID NO: 757687 - DNA, 15 bp, Homo sapiens
caccctcattgagaa

SEQ ID NO: 757688 - DNA, 15 bp, Homo sapiens
accctcattgagaag

SEQ ID NO: 757689 - DNA, 15 bp, Homo sapiens
ccctcattgagaagt

SEQ ID NO: 757690 - DNA, 15 bp, Homo sapiens
cctcattgagaagta

SEQ ID NO: 757691 - DNA, 15 bp, Homo sapiens
ctcattgagaagtat

SEQ ID NO: 757692 - DNA, 15 bp, Homo sapiens
tcattgagaagtatt

SEQ ID NO: 757693 - DNA, 15 bp, Homo sapiens
cattgagaagtattg

SEQ ID NO: 757694 - DNA, 15 bp, Homo sapiens
attgagaagtattgc

SEQ ID NO: 757695 - DNA, 15 bp, Homo sapiens
ttgagaagtattgct

SEQ ID NO: 757696 - DNA, 15 bp, Homo sapiens
tgagaagtattgctg

SEQ ID NO: 757697 - DNA, 15 bp, Homo sapiens
gagaagtattgctgg

SEQ ID NO: 757698 - DNA, 15 bp, Homo sapiens
agaagtattgctgga

SEQ ID NO: 757699 - DNA, 15 bp, Homo sapiens
gaagtattgctggat

SEQ ID NO: 757700 - DNA, 15 bp, Homo sapiens
aagtattgctggatc

SEQ ID NO: 757701 - DNA, 15 bp, Homo sapiens
agtattgctggatct

SEQ ID NO: 757702 - DNA, 15 bp, Homo sapiens
gtattgctggatctt

SEQ ID NO: 757703 - DNA, 15 bp, Homo sapiens
tattgctggatcttt

SEQ ID NO: 757704 - DNA, 15 bp, Homo sapiens
attgctggatctttt

SEQ ID NO: 757705 - DNA, 15 bp, Homo sapiens
ttgctggatcttttt

SEQ ID NO: 757706 - DNA, 15 bp, Homo sapiens
tgctggatctttttg

SEQ ID NO: 757707 - DNA, 15 bp, Homo sapiens
gctggatctttttga

SEQ ID NO: 757708 - DNA, 15 bp, Homo sapiens
ctggatctttttgat

SEQ ID NO: 757709 - DNA, 15 bp, Homo sapiens
tggatctttttgatg

SEQ ID NO: 757710 - DNA, 15 bp, Homo sapiens
ggatctttttgatgg

SEQ ID NO: 757711 - DNA, 15 bp, Homo sapiens
gatctttttgatggt

SEQ ID NO: 757712 - DNA, 15 bp, Homo sapiens
atctttttgatggta

SEQ ID NO: 757713 - DNA, 15 bp, Homo sapiens
tctttttgatggtaa

SEQ ID NO: 757714 - DNA, 15 bp, Homo sapiens
ctttttgatggtaag

SEQ ID NO: 757715 - DNA, 15 bp, Homo sapiens
tttttgatggtaaga

SEQ ID NO: 757716 - DNA, 15 bp, Homo sapiens
ttttgatggtaagag

SEQ ID NO: 757717 - DNA, 15 bp, Homo sapiens
tttgatggtaagagt

SEQ ID NO: 757718 - DNA, 15 bp, Homo sapiens
ttgatggtaagagtt

SEQ ID NO: 757719 - DNA, 15 bp, Homo sapiens
tgatggtaagagtta

SEQ ID NO: 757720 - DNA, 15 bp, Homo sapiens
gatggtaagagttat

SEQ ID NO: 757721 - DNA, 15 bp, Homo sapiens
atggtaagagttatt

SEQ ID NO: 757722 - DNA, 15 bp, Homo sapiens
tggtaagagttatta

SEQ ID NO: 757723 - DNA, 15 bp, Homo sapiens
ggtaagagttattaa

SEQ ID NO: 757724 - DNA, 15 bp, Homo sapiens
gtaagagttattaaa

SEQ ID NO: 757725 - DNA, 15 bp, Homo sapiens
taagagttattaaaa

SEQ ID NO: 757726 - DNA, 15 bp, Homo sapiens
aagagttattaaaat

SEQ ID NO: 757727 - DNA, 15 bp, Homo sapiens
agagttattaaaatt

SEQ ID NO: 757728 - DNA, 15 bp, Homo sapiens
gagttattaaaattt

SEQ ID NO: 757729 - DNA, 15 bp, Homo sapiens
agttattaaaattta

SEQ ID NO: 757730 - DNA, 15 bp, Homo sapiens
gttattaaaatttag

SEQ ID NO: 757731 - DNA, 15 bp, Homo sapiens
ttattaaaatttaga

SEQ ID NO: 757732 - DNA, 15 bp, Homo sapiens
tattaaaatttagaa

SEQ ID NO: 757733 - DNA, 15 bp, Homo sapiens
attaaaatttagaaa

SEQ ID NO: 757734 - DNA, 15 bp, Homo sapiens
ttaaaatttagaaat

SEQ ID NO: 757735 - DNA, 15 bp, Homo sapiens
taaaatttagaaatt

SEQ ID NO: 757736 - DNA, 15 bp, Homo sapiens
aaaatttagaaattc

SEQ ID NO: 757737 - DNA, 15 bp, Homo sapiens
aaatttagaaattcc

SEQ ID NO: 757738 - DNA, 15 bp, Homo sapiens
aatttagaaattcca

SEQ ID NO: 757739 - DNA, 15 bp, Homo sapiens
atttagaaattccag

SEQ ID NO: 757740 - DNA, 15 bp, Homo sapiens
tttagaaattccaga

SEQ ID NO: 757741 - DNA, 15 bp, Homo sapiens
ttagaaattccagaa

SEQ ID NO: 757742 - DNA, 15 bp, Homo sapiens
tagaaattccagaac

SEQ ID NO: 757743 - DNA, 15 bp, Homo sapiens
agaaattccagaact

SEQ ID NO: 757744 - DNA, 15 bp, Homo sapiens
gaaattccagaactc

SEQ ID NO: 757745 - DNA, 15 bp, Homo sapiens
aaattccagaactca

SEQ ID NO: 757746 - DNA, 15 bp, Homo sapiens
aattccagaactcaa

SEQ ID NO: 757747 - DNA, 15 bp, Homo sapiens
attccagaactcaaa

SEQ ID NO: 757748 - DNA, 15 bp, Homo sapiens
ttccagaactcaaag

SEQ ID NO: 757749 - DNA, 15 bp, Homo sapiens
tccagaactcaaaga

SEQ ID NO: 757750 - DNA, 15 bp, Homo sapiens
ccagaactcaaagaa

SEQ ID NO: 757751 - DNA, 15 bp, Homo sapiens
cagaactcaaagaat

SEQ ID NO: 757752 - DNA, 15 bp, Homo sapiens
agaactcaaagaatt

SEQ ID NO: 757753 - DNA, 15 bp, Homo sapiens
gaactcaaagaatta

SEQ ID NO: 757754 - DNA, 15 bp, Homo sapiens
aactcaaagaattat

SEQ ID NO: 757755 - DNA, 15 bp, Homo sapiens
actcaaagaattatt

SEQ ID NO: 757756 - DNA, 15 bp, Homo sapiens
ctcaaagaattattt

SEQ ID NO: 757757 - DNA, 15 bp, Homo sapiens
tcaaagaattatttc

SEQ ID NO: 757758 - DNA, 15 bp, Homo sapiens
caaagaattatttct

SEQ ID NO: 757759 - DNA, 15 bp, Homo sapiens
aaagaattatttctt

SEQ ID NO: 757760 - DNA, 15 bp, Homo sapiens
aagaattatttcttc

SEQ ID NO: 757761 - DNA, 15 bp, Homo sapiens
agaattatttcttct

SEQ ID NO: 757762 - DNA, 15 bp, Homo sapiens
gaattatttcttctc

SEQ ID NO: 757763 - DNA, 15 bp, Homo sapiens
aattatttcttctct

SEQ ID NO: 757764 - DNA, 15 bp, Homo sapiens
attatttcttctctg

SEQ ID NO: 757765 - DNA, 15 bp, Homo sapiens
ttatttcttctctga

SEQ ID NO: 757766 - DNA, 15 bp, Homo sapiens
tatttcttctctgaa

SEQ ID NO: 757767 - DNA, 15 bp, Homo sapiens
atttcttctctgaaa

SEQ ID NO: 757768 - DNA, 15 bp, Homo sapiens
tttcttctctgaaaa

SEQ ID NO: 757769 - DNA, 15 bp, Homo sapiens
ttcttctctgaaaaa

SEQ ID NO: 757770 - DNA, 15 bp, Homo sapiens
tcttctctgaaaaac

SEQ ID NO: 757771 - DNA, 15 bp, Homo sapiens
cttctctgaaaaacc

SEQ ID NO: 757772 - DNA, 15 bp, Homo sapiens
ttctctgaaaaaccc

SEQ ID NO: 757773 - DNA, 15 bp, Homo sapiens
tctctgaaaaaccca

SEQ ID NO: 757774 - DNA, 15 bp, Homo sapiens
ctctgaaaaacccag

SEQ ID NO: 757775 - DNA, 15 bp, Homo sapiens
tctgaaaaacccaga

SEQ ID NO: 757776 - DNA, 15 bp, Homo sapiens
ctgaaaaacccagac

SEQ ID NO: 757777 - DNA, 15 bp, Homo sapiens
tgaaaaacccagaca

SEQ ID NO: 757778 - DNA, 15 bp, Homo sapiens
gaaaaacccagacat

SEQ ID NO: 757779 - DNA, 15 bp, Homo sapiens
aaaaacccagacatc

SEQ ID NO: 757780 - DNA, 15 bp, Homo sapiens
aaaacccagacatct

SEQ ID NO: 757781 - DNA, 15 bp, Homo sapiens
aaacccagacatctg

SEQ ID NO: 757782 - DNA, 15 bp, Homo sapiens
aacccagacatctgg

SEQ ID NO: 757783 - DNA, 15 bp, Homo sapiens
acccagacatctggt

SEQ ID NO: 757784 - DNA, 15 bp, Homo sapiens
cccagacatctggta

SEQ ID NO: 757785 - DNA, 15 bp, Homo sapiens
ccagacatctggtag

SEQ ID NO: 757786 - DNA, 15 bp, Homo sapiens
cagacatctggtaga

SEQ ID NO: 757787 - DNA, 15 bp, Homo sapiens
agacatctggtagac

SEQ ID NO: 757788 - DNA, 15 bp, Homo sapiens
gacatctggtagaca

SEQ ID NO: 757789 - DNA, 15 bp, Homo sapiens
acatctggtagacat

SEQ ID NO: 757790 - DNA, 15 bp, Homo sapiens
catctggtagacatt

SEQ ID NO: 757791 - DNA, 15 bp, Homo sapiens
atctggtagacattc

SEQ ID NO: 757792 - DNA, 15 bp, Homo sapiens
tctggtagacattct

SEQ ID NO: 757793 - DNA, 15 bp, Homo sapiens
ctggtagacattctc

SEQ ID NO: 757794 - DNA, 15 bp, Homo sapiens
tggtagacattctct

SEQ ID NO: 757795 - DNA, 15 bp, Homo sapiens
ggtagacattctctg

SEQ ID NO: 757796 - DNA, 15 bp, Homo sapiens
gtagacattctctga

SEQ ID NO: 757797 - DNA, 15 bp, Homo sapiens
tagacattctctgaa

SEQ ID NO: 757798 - DNA, 15 bp, Homo sapiens
agacattctctgaag

SEQ ID NO: 757799 - DNA, 15 bp, Homo sapiens
gacattctctgaagc

SEQ ID NO: 757800 - DNA, 15 bp, Homo sapiens
acattctctgaagct

SEQ ID NO: 757801 - DNA, 15 bp, Homo sapiens
cattctctgaagctt

SEQ ID NO: 757802 - DNA, 15 bp, Homo sapiens
attctctgaagcttc

SEQ ID NO: 757803 - DNA, 15 bp, Homo sapiens
ttctctgaagcttct

SEQ ID NO: 757804 - DNA, 15 bp, Homo sapiens
tctctgaagcttctg

SEQ ID NO: 757805 - DNA, 15 bp, Homo sapiens
ctctgaagcttctgg

SEQ ID NO: 757806 - DNA, 15 bp, Homo sapiens
tctgaagcttctgga

SEQ ID NO: 757807 - DNA, 15 bp, Homo sapiens
ctgaagcttctggat

SEQ ID NO: 757808 - DNA, 15 bp, Homo sapiens
tgaagcttctggatg

SEQ ID NO: 757809 - DNA, 15 bp, Homo sapiens
gaagcttctggatgt

SEQ ID NO: 757810 - DNA, 15 bp, Homo sapiens
aagcttctggatgtt

SEQ ID NO: 757811 - DNA, 15 bp, Homo sapiens
agcttctggatgttt

SEQ ID NO: 757812 - DNA, 15 bp, Homo sapiens
gcttctggatgtttt

SEQ ID NO: 757813 - DNA, 15 bp, Homo sapiens
cttctggatgttttt

SEQ ID NO: 757814 - DNA, 15 bp, Homo sapiens
ttctggatgtttttc

SEQ ID NO: 757815 - DNA, 15 bp, Homo sapiens
tctggatgtttttct

SEQ ID NO: 757816 - DNA, 15 bp, Homo sapiens
ctggatgtttttctg

SEQ ID NO: 757817 - DNA, 15 bp, Homo sapiens
tggatgtttttctgt

SEQ ID NO: 757818 - DNA, 15 bp, Homo sapiens
ggatgtttttctgta

SEQ ID NO: 757819 - DNA, 15 bp, Homo sapiens
gatgtttttctgtat

SEQ ID NO: 757820 - DNA, 15 bp, Homo sapiens
atgtttttctgtatt

SEQ ID NO: 757821 - DNA, 15 bp, Homo sapiens
tgtttttctgtattg

SEQ ID NO: 757822 - DNA, 15 bp, Homo sapiens
gtttttctgtattgt

SEQ ID NO: 757823 - DNA, 15 bp, Homo sapiens
tttttctgtattgta

SEQ ID NO: 757824 - DNA, 15 bp, Homo sapiens
ttttctgtattgtag

SEQ ID NO: 757825 - DNA, 15 bp, Homo sapiens
tttctgtattgtagc

SEQ ID NO: 757826 - DNA, 15 bp, Homo sapiens
ttctgtattgtagcc

SEQ ID NO: 757827 - DNA, 15 bp, Homo sapiens
tctgtattgtagcct

SEQ ID NO: 757828 - DNA, 15 bp, Homo sapiens
ctgtattgtagccta

SEQ ID NO: 757829 - DNA, 15 bp, Homo sapiens
tgtattgtagcctat

SEQ ID NO: 757830 - DNA, 15 bp, Homo sapiens
gtattgtagcctatg

SEQ ID NO: 757831 - DNA, 15 bp, Homo sapiens
tattgtagcctatgg

SEQ ID NO: 757832 - DNA, 15 bp, Homo sapiens
attgtagcctatggc

SEQ ID NO: 757833 - DNA, 15 bp, Homo sapiens
ttgtagcctatggca

SEQ ID NO: 757834 - DNA, 15 bp, Homo sapiens
tgtagcctatggcat

SEQ ID NO: 757835 - DNA, 15 bp, Homo sapiens
gtagcctatggcatt

SEQ ID NO: 757836 - DNA, 15 bp, Homo sapiens
tagcctatggcattg

SEQ ID NO: 757837 - DNA, 15 bp, Homo sapiens
agcctatggcattgt

SEQ ID NO: 757838 - DNA, 15 bp, Homo sapiens
gcctatggcattgtg

SEQ ID NO: 757839 - DNA, 15 bp, Homo sapiens
cctatggcattgtga

SEQ ID NO: 757840 - DNA, 15 bp, Homo sapiens
ctatggcattgtgaa

SEQ ID NO: 757841 - DNA, 15 bp, Homo sapiens
tatggcattgtgaat

SEQ ID NO: 757842 - DNA, 15 bp, Homo sapiens
atggcattgtgaatc

SEQ ID NO: 757843 - DNA, 15 bp, Homo sapiens
tggcattgtgaatct

SEQ ID NO: 757844 - DNA, 15 bp, Homo sapiens
ggcattgtgaatcta

SEQ ID NO: 757845 - DNA, 15 bp, Homo sapiens
gcattgtgaatctaa

SEQ ID NO: 757846 - DNA, 15 bp, Homo sapiens
cattgtgaatctaag

SEQ ID NO: 757847 - DNA, 15 bp, Homo sapiens
attgtgaatctaaga

SEQ ID NO: 757848 - DNA, 15 bp, Homo sapiens
ttgtgaatctaagat

SEQ ID NO: 757849 - DNA, 15 bp, Homo sapiens
tgtgaatctaagatg

SEQ ID NO: 757850 - DNA, 15 bp, Homo sapiens
gtgaatctaagatgc

SEQ ID NO: 757851 - DNA, 15 bp, Homo sapiens
tgaatctaagatgct

SEQ ID NO: 757852 - DNA, 15 bp, Homo sapiens
gaatctaagatgctt

SEQ ID NO: 757853 - DNA, 15 bp, Homo sapiens
aatctaagatgcttt

SEQ ID NO: 757854 - DNA, 15 bp, Homo sapiens
atctaagatgctttt

SEQ ID NO: 757855 - DNA, 15 bp, Homo sapiens
tctaagatgcttttt

SEQ ID NO: 757856 - DNA, 15 bp, Homo sapiens
ctaagatgctttttg

SEQ ID NO: 757857 - DNA, 15 bp, Homo sapiens
taagatgctttttga

SEQ ID NO: 757858 - DNA, 15 bp, Homo sapiens
aagatgctttttgag

SEQ ID NO: 757859 - DNA, 15 bp, Homo sapiens
agatgctttttgagc

SEQ ID NO: 757860 - DNA, 15 bp, Homo sapiens
gatgctttttgagca

SEQ ID NO: 757861 - DNA, 15 bp, Homo sapiens
atgctttttgagcac

SEQ ID NO: 757862 - DNA, 15 bp, Homo sapiens
tgctttttgagcacc

SEQ ID NO: 757863 - DNA, 15 bp, Homo sapiens
gctttttgagcacca

SEQ ID NO: 757864 - DNA, 15 bp, Homo sapiens
ctttttgagcaccag

SEQ ID NO: 757865 - DNA, 15 bp, Homo sapiens
tttttgagcaccaga

SEQ ID NO: 757866 - DNA, 15 bp, Homo sapiens
ttttgagcaccagac

SEQ ID NO: 757867 - DNA, 15 bp, Homo sapiens
tttgagcaccagaca

SEQ ID NO: 757868 - DNA, 15 bp, Homo sapiens
ttgagcaccagacaa

SEQ ID NO: 757869 - DNA, 15 bp, Homo sapiens
tgagcaccagacaat

SEQ ID NO: 757870 - DNA, 15 bp, Homo sapiens
gagcaccagacaatt

SEQ ID NO: 757871 - DNA, 15 bp, Homo sapiens
agcaccagacaatta

SEQ ID NO: 757872 - DNA, 15 bp, Homo sapiens
gcaccagacaattag

SEQ ID NO: 757873 - DNA, 15 bp, Homo sapiens
caccagacaattagt

SEQ ID NO: 757874 - DNA, 15 bp, Homo sapiens
accagacaattagta

SEQ ID NO: 757875 - DNA, 15 bp, Homo sapiens
ccagacaattagtag

SEQ ID NO: 757876 - DNA, 15 bp, Homo sapiens
cagacaattagtaga

SEQ ID NO: 757877 - DNA, 15 bp, Homo sapiens
agacaattagtagaa

SEQ ID NO: 757878 - DNA, 15 bp, Homo sapiens
gacaattagtagaac

SEQ ID NO: 757879 - DNA, 15 bp, Homo sapiens
acaattagtagaaca

SEQ ID NO: 757880 - DNA, 15 bp, Homo sapiens
caattagtagaacat

SEQ ID NO: 757881 - DNA, 15 bp, Homo sapiens
aattagtagaacatt

SEQ ID NO: 757882 - DNA, 15 bp, Homo sapiens
attagtagaacattt

SEQ ID NO: 757883 - DNA, 15 bp, Homo sapiens
ttagtagaacatttt

SEQ ID NO: 757884 - DNA, 15 bp, Homo sapiens
tagtagaacatttta

SEQ ID NO: 757885 - DNA, 15 bp, Homo sapiens
agtagaacattttaa

SEQ ID NO: 757886 - DNA, 15 bp, Homo sapiens
gtagaacattttaat

SEQ ID NO: 757887 - DNA, 15 bp, Homo sapiens
tagaacattttaatg

SEQ ID NO: 757888 - DNA, 15 bp, Homo sapiens
agaacattttaatgt

SEQ ID NO: 757889 - DNA, 15 bp, Homo sapiens
gaacattttaatgtt

SEQ ID NO: 757890 - DNA, 15 bp, Homo sapiens
aacattttaatgttg

SEQ ID NO: 757891 - DNA, 15 bp, Homo sapiens
acattttaatgttgt

SEQ ID NO: 757892 - DNA, 15 bp, Homo sapiens
cattttaatgttgtg

SEQ ID NO: 757893 - DNA, 15 bp, Homo sapiens
attttaatgttgtgg

SEQ ID NO: 757894 - DNA, 15 bp, Homo sapiens
ttttaatgttgtggt

SEQ ID NO: 757895 - DNA, 15 bp, Homo sapiens
tttaatgttgtggtt

SEQ ID NO: 757896 - DNA, 15 bp, Homo sapiens
ttaatgttgtggttg

SEQ ID NO: 757897 - DNA, 15 bp, Homo sapiens
taatgttgtggttgg

SEQ ID NO: 757898 - DNA, 15 bp, Homo sapiens
aatgttgtggttgga

SEQ ID NO: 757899 - DNA, 15 bp, Homo sapiens
atgttgtggttggat

SEQ ID NO: 757900 - DNA, 15 bp, Homo sapiens
tgttgtggttggata

SEQ ID NO: 757901 - DNA, 15 bp, Homo sapiens
gttgtggttggataa

SEQ ID NO: 757902 - DNA, 15 bp, Homo sapiens
ttgtggttggataac

SEQ ID NO: 757903 - DNA, 15 bp, Homo sapiens
tgtggttggataaca

SEQ ID NO: 757904 - DNA, 15 bp, Homo sapiens
gtggttggataacac

SEQ ID NO: 757905 - DNA, 15 bp, Homo sapiens
tggttggataacact

SEQ ID NO: 757906 - DNA, 15 bp, Homo sapiens
ggttggataacactg

SEQ ID NO: 757907 - DNA, 15 bp, Homo sapiens
gttggataacactga

SEQ ID NO: 757908 - DNA, 15 bp, Homo sapiens
ttggataacactgaa

SEQ ID NO: 757909 - DNA, 15 bp, Homo sapiens
tggataacactgaaa

SEQ ID NO: 757910 - DNA, 15 bp, Homo sapiens
ggataacactgaaaa

SEQ ID NO: 757911 - DNA, 15 bp, Homo sapiens
gataacactgaaaaa

SEQ ID NO: 757912 - DNA, 15 bp, Homo sapiens
ataacactgaaaaag

SEQ ID NO: 757913 - DNA, 15 bp, Homo sapiens
taacactgaaaaagc

SEQ ID NO: 757914 - DNA, 15 bp, Homo sapiens
aacactgaaaaagcc

SEQ ID NO: 757915 - DNA, 15 bp, Homo sapiens
acactgaaaaagcca

SEQ ID NO: 757916 - DNA, 15 bp, Homo sapiens
cactgaaaaagccat

SEQ ID NO: 757917 - DNA, 15 bp, Homo sapiens
actgaaaaagccatt

SEQ ID NO: 757918 - DNA, 15 bp, Homo sapiens
ctgaaaaagccattg

SEQ ID NO: 757919 - DNA, 15 bp, Homo sapiens
tgaaaaagccattga

SEQ ID NO: 757920 - DNA, 15 bp, Homo sapiens
gaaaaagccattgac

SEQ ID NO: 757921 - DNA, 15 bp, Homo sapiens
aaaaagccattgaca

SEQ ID NO: 757922 - DNA, 15 bp, Homo sapiens
aaaagccattgacat

SEQ ID NO: 757923 - DNA, 15 bp, Homo sapiens
aaagccattgacatt

SEQ ID NO: 757924 - DNA, 15 bp, Homo sapiens
aagccattgacattt

SEQ ID NO: 757925 - DNA, 15 bp, Homo sapiens
agccattgacatttg

SEQ ID NO: 757926 - DNA, 15 bp, Homo sapiens
gccattgacatttgt

SEQ ID NO: 757927 - DNA, 15 bp, Homo sapiens
ccattgacatttgtt

SEQ ID NO: 757928 - DNA, 15 bp, Homo sapiens
cattgacatttgttt

SEQ ID NO: 757929 - DNA, 15 bp, Homo sapiens
attgacatttgtttt

SEQ ID NO: 757930 - DNA, 15 bp, Homo sapiens
ttgacatttgttttg

SEQ ID NO: 757931 - DNA, 15 bp, Homo sapiens
tgacatttgttttga

SEQ ID NO: 757932 - DNA, 15 bp, Homo sapiens
gacatttgttttgag

SEQ ID NO: 757933 - DNA, 15 bp, Homo sapiens
acatttgttttgagc

SEQ ID NO: 757934 - DNA, 15 bp, Homo sapiens
catttgttttgagca

SEQ ID NO: 757935 - DNA, 15 bp, Homo sapiens
atttgttttgagcag

SEQ ID NO: 757936 - DNA, 15 bp, Homo sapiens
tttgttttgagcagc

SEQ ID NO: 757937 - DNA, 15 bp, Homo sapiens
ttgttttgagcagca

SEQ ID NO: 757938 - DNA, 15 bp, Homo sapiens
tgttttgagcagcag

SEQ ID NO: 757939 - DNA, 15 bp, Homo sapiens
gttttgagcagcagc

SEQ ID NO: 757940 - DNA, 15 bp, Homo sapiens
ttttgagcagcagca

SEQ ID NO: 757941 - DNA, 15 bp, Homo sapiens
tttgagcagcagcag

SEQ ID NO: 757942 - DNA, 15 bp, Homo sapiens
ttgagcagcagcagt

SEQ ID NO: 757943 - DNA, 15 bp, Homo sapiens
tgagcagcagcagtg

SEQ ID NO: 757944 - DNA, 15 bp, Homo sapiens
gagcagcagcagtga

SEQ ID NO: 757945 - DNA, 15 bp, Homo sapiens
agcagcagcagtgaa

SEQ ID NO: 757946 - DNA, 15 bp, Homo sapiens
gcagcagcagtgaaa

SEQ ID NO: 757947 - DNA, 15 bp, Homo sapiens
cagcagcagtgaaac

SEQ ID NO: 757948 - DNA, 15 bp, Homo sapiens
agcagcagtgaaacc

SEQ ID NO: 757949 - DNA, 15 bp, Homo sapiens
gcagcagtgaaaccg

SEQ ID NO: 757950 - DNA, 15 bp, Homo sapiens
cagcagtgaaaccgg

SEQ ID NO: 757951 - DNA, 15 bp, Homo sapiens
agcagtgaaaccggc

SEQ ID NO: 757952 - DNA, 15 bp, Homo sapiens
gcagtgaaaccggca

SEQ ID NO: 757953 - DNA, 15 bp, Homo sapiens
cagtgaaaccggcac

SEQ ID NO: 757954 - DNA, 15 bp, Homo sapiens
agtgaaaccggcacc

SEQ ID NO: 757955 - DNA, 15 bp, Homo sapiens
gtgaaaccggcacct

SEQ ID NO: 757956 - DNA, 15 bp, Homo sapiens
tgaaaccggcacctt

SEQ ID NO: 757957 - DNA, 15 bp, Homo sapiens
gaaaccggcacctta

SEQ ID NO: 757958 - DNA, 15 bp, Homo sapiens
aaaccggcaccttat

SEQ ID NO: 757959 - DNA, 15 bp, Homo sapiens
aaccggcaccttatc

SEQ ID NO: 757960 - DNA, 15 bp, Homo sapiens
accggcaccttatct

SEQ ID NO: 757961 - DNA, 15 bp, Homo sapiens
ccggcaccttatctc

SEQ ID NO: 757962 - DNA, 15 bp, Homo sapiens
cggcaccttatctca

SEQ ID NO: 757963 - DNA, 15 bp, Homo sapiens
ggcaccttatctcat

SEQ ID NO: 757964 - DNA, 15 bp, Homo sapiens
gcaccttatctcatg

SEQ ID NO: 757965 - DNA, 15 bp, Homo sapiens
caccttatctcatgt

SEQ ID NO: 757966 - DNA, 15 bp, Homo sapiens
accttatctcatgtg

SEQ ID NO: 757967 - DNA, 15 bp, Homo sapiens
ccttatctcatgtgc

SEQ ID NO: 757968 - DNA, 15 bp, Homo sapiens
cttatctcatgtgca

SEQ ID NO: 757969 - DNA, 15 bp, Homo sapiens
ttatctcatgtgcac

SEQ ID NO: 757970 - DNA, 15 bp, Homo sapiens
tatctcatgtgcaca

SEQ ID NO: 757971 - DNA, 15 bp, Homo sapiens
atctcatgtgcacaa

SEQ ID NO: 757972 - DNA, 15 bp, Homo sapiens
tctcatgtgcacaaa

SEQ ID NO: 757973 - DNA, 15 bp, Homo sapiens
ctcatgtgcacaaaa

SEQ ID NO: 757974 - DNA, 15 bp, Homo sapiens
tcatgtgcacaaaaa

SEQ ID NO: 757975 - DNA, 15 bp, Homo sapiens
catgtgcacaaaaat

SEQ ID NO: 757976 - DNA, 15 bp, Homo sapiens
atgtgcacaaaaatc

SEQ ID NO: 757977 - DNA, 15 bp, Homo sapiens
tgtgcacaaaaatcc

SEQ ID NO: 757978 - DNA, 15 bp, Homo sapiens
gtgcacaaaaatcca

SEQ ID NO: 757979 - DNA, 15 bp, Homo sapiens
tgcacaaaaatccat

SEQ ID NO: 757980 - DNA, 15 bp, Homo sapiens
gcacaaaaatccatg

SEQ ID NO: 757981 - DNA, 15 bp, Homo sapiens
cacaaaaatccatgt

SEQ ID NO: 757982 - DNA, 15 bp, Homo sapiens
acaaaaatccatgta

SEQ ID NO: 757983 - DNA, 15 bp, Homo sapiens
caaaaatccatgtag

SEQ ID NO: 757984 - DNA, 15 bp, Homo sapiens
aaaaatccatgtaga

SEQ ID NO: 757985 - DNA, 15 bp, Homo sapiens
aaaatccatgtagat

SEQ ID NO: 757986 - DNA, 15 bp, Homo sapiens
aaatccatgtagatg

SEQ ID NO: 757987 - DNA, 15 bp, Homo sapiens
aatccatgtagatga

SEQ ID NO: 757988 - DNA, 15 bp, Homo sapiens
atccatgtagatgat

SEQ ID NO: 757989 - DNA, 15 bp, Homo sapiens
tccatgtagatgatt

SEQ ID NO: 757990 - DNA, 15 bp, Homo sapiens
ccatgtagatgattt

SEQ ID NO: 757991 - DNA, 15 bp, Homo sapiens
catgtagatgattta

SEQ ID NO: 757992 - DNA, 15 bp, Homo sapiens
atgtagatgatttaa

SEQ ID NO: 757993 - DNA, 15 bp, Homo sapiens
tgtagatgatttaaa

SEQ ID NO: 757994 - DNA, 15 bp, Homo sapiens
gtagatgatttaaaa

SEQ ID NO: 757995 - DNA, 15 bp, Homo sapiens
tagatgatttaaaaa

SEQ ID NO: 757996 - DNA, 15 bp, Homo sapiens
agatgatttaaaaac

SEQ ID NO: 757997 - DNA, 15 bp, Homo sapiens
gatgatttaaaaact

SEQ ID NO: 757998 - DNA, 15 bp, Homo sapiens
atgatttaaaaactg

SEQ ID NO: 757999 - DNA, 15 bp, Homo sapiens
tgatttaaaaactgc

SEQ ID NO: 758000 - DNA, 15 bp, Homo sapiens
gatttaaaaactgct

SEQ ID NO: 758001 - DNA, 15 bp, Homo sapiens
atttaaaaactgctg

SEQ ID NO: 758002 - DNA, 15 bp, Homo sapiens
tttaaaaactgctgt

SEQ ID NO: 758003 - DNA, 15 bp, Homo sapiens
ttaaaaactgctgtg

SEQ ID NO: 758004 - DNA, 15 bp, Homo sapiens
taaaaactgctgtgc

SEQ ID NO: 758005 - DNA, 15 bp, Homo sapiens
aaaaactgctgtgct

SEQ ID NO: 758006 - DNA, 15 bp, Homo sapiens
aaaactgctgtgctg

SEQ ID NO: 758007 - DNA, 15 bp, Homo sapiens
aaactgctgtgctgc

SEQ ID NO: 758008 - DNA, 15 bp, Homo sapiens
aactgctgtgctgcc

SEQ ID NO: 758009 - DNA, 15 bp, Homo sapiens
actgctgtgctgccg

SEQ ID NO: 758010 - DNA, 15 bp, Homo sapiens
ctgctgtgctgccga

SEQ ID NO: 758011 - DNA, 15 bp, Homo sapiens
tgctgtgctgccgat

SEQ ID NO: 758012 - DNA, 15 bp, Homo sapiens
gctgtgctgccgatg

SEQ ID NO: 758013 - DNA, 15 bp, Homo sapiens
ctgtgctgccgatga

SEQ ID NO: 758014 - DNA, 15 bp, Homo sapiens
tgtgctgccgatgaa

SEQ ID NO: 758015 - DNA, 15 bp, Homo sapiens
gtgctgccgatgaag

SEQ ID NO: 758016 - DNA, 15 bp, Homo sapiens
tgctgccgatgaagg

SEQ ID NO: 758017 - DNA, 15 bp, Homo sapiens
gctgccgatgaaggg

SEQ ID NO: 758018 - DNA, 15 bp, Homo sapiens
ctgccgatgaaggga

SEQ ID NO: 758019 - DNA, 15 bp, Homo sapiens
tgccgatgaagggaa

SEQ ID NO: 758020 - DNA, 15 bp, Homo sapiens
gccgatgaagggaag

SEQ ID NO: 758021 - DNA, 15 bp, Homo sapiens
ccgatgaagggaaga

SEQ ID NO: 758022 - DNA, 15 bp, Homo sapiens
cgatgaagggaagaa

SEQ ID NO: 758023 - DNA, 15 bp, Homo sapiens
gatgaagggaagaaa

SEQ ID NO: 758024 - DNA, 15 bp, Homo sapiens
atgaagggaagaaag

SEQ ID NO: 758025 - DNA, 15 bp, Homo sapiens
tgaagggaagaaagc

SEQ ID NO: 758026 - DNA, 15 bp, Homo sapiens
gaagggaagaaagca

SEQ ID NO: 758027 - DNA, 15 bp, Homo sapiens
aagggaagaaagcag

SEQ ID NO: 758028 - DNA, 15 bp, Homo sapiens
agggaagaaagcagg

SEQ ID NO: 758029 - DNA, 15 bp, Homo sapiens
gggaagaaagcagga

SEQ ID NO: 758030 - DNA, 15 bp, Homo sapiens
ggaagaaagcaggag

SEQ ID NO: 758031 - DNA, 15 bp, Homo sapiens
gaagaaagcaggagg

SEQ ID NO: 758032 - DNA, 15 bp, Homo sapiens
aagaaagcaggaggt

SEQ ID NO: 758033 - DNA, 15 bp, Homo sapiens
agaaagcaggaggtc

SEQ ID NO: 758034 - DNA, 15 bp, Homo sapiens
gaaagcaggaggtct

SEQ ID NO: 758035 - DNA, 15 bp, Homo sapiens
aaagcaggaggtcta

SEQ ID NO: 758036 - DNA, 15 bp, Homo sapiens
aagcaggaggtctaa

SEQ ID NO: 758037 - DNA, 15 bp, Homo sapiens
agcaggaggtctaat

SEQ ID NO: 758038 - DNA, 15 bp, Homo sapiens
gcaggaggtctaatc

SEQ ID NO: 758039 - DNA, 15 bp, Homo sapiens
caggaggtctaatca

SEQ ID NO: 758040 - DNA, 15 bp, Homo sapiens
aggaggtctaatcat

SEQ ID NO: 758041 - DNA, 15 bp, Homo sapiens
ggaggtctaatcatc

SEQ ID NO: 758042 - DNA, 15 bp, Homo sapiens
gaggtctaatcatcg

SEQ ID NO: 758043 - DNA, 15 bp, Homo sapiens
aggtctaatcatcgt

SEQ ID NO: 758044 - DNA, 15 bp, Homo sapiens
ggtctaatcatcgtc

SEQ ID NO: 758045 - DNA, 15 bp, Homo sapiens
gtctaatcatcgtca

SEQ ID NO: 758046 - DNA, 15 bp, Homo sapiens
tctaatcatcgtcaa

SEQ ID NO: 758047 - DNA, 15 bp, Homo sapiens
ctaatcatcgtcaac

SEQ ID NO: 758048 - DNA, 15 bp, Homo sapiens
taatcatcgtcaact

SEQ ID NO: 758049 - DNA, 15 bp, Homo sapiens
aatcatcgtcaactg

SEQ ID NO: 758050 - DNA, 15 bp, Homo sapiens
atcatcgtcaactga

SEQ ID NO: 758051 - DNA, 15 bp, Homo sapiens
tcatcgtcaactgaa

SEQ ID NO: 758052 - DNA, 15 bp, Homo sapiens
catcgtcaactgaaa

SEQ ID NO: 758053 - DNA, 15 bp, Homo sapiens
atcgtcaactgaaac

SEQ ID NO: 758054 - DNA, 15 bp, Homo sapiens
tcgtcaactgaaacc

SEQ ID NO: 758055 - DNA, 15 bp, Homo sapiens
cgtcaactgaaacct

SEQ ID NO: 758056 - DNA, 15 bp, Homo sapiens
gtcaactgaaacctc

SEQ ID NO: 758057 - DNA, 15 bp, Homo sapiens
tcaactgaaacctca

SEQ ID NO: 758058 - DNA, 15 bp, Homo sapiens
caactgaaacctcac

SEQ ID NO: 758059 - DNA, 15 bp, Homo sapiens
aactgaaacctcacc

SEQ ID NO: 758060 - DNA, 15 bp, Homo sapiens
actgaaacctcacct

SEQ ID NO: 758061 - DNA, 15 bp, Homo sapiens
ctgaaacctcaccta

SEQ ID NO: 758062 - DNA, 15 bp, Homo sapiens
tgaaacctcacctaa

SEQ ID NO: 758063 - DNA, 15 bp, Homo sapiens
gaaacctcacctaag

SEQ ID NO: 758064 - DNA, 15 bp, Homo sapiens
aaacctcacctaagt

SEQ ID NO: 758065 - DNA, 15 bp, Homo sapiens
aacctcacctaagta

SEQ ID NO: 758066 - DNA, 15 bp, Homo sapiens
acctcacctaagtag

SEQ ID NO: 758067 - DNA, 15 bp, Homo sapiens
cctcacctaagtagt

SEQ ID NO: 758068 - DNA, 15 bp, Homo sapiens
ctcacctaagtagta

SEQ ID NO: 758069 - DNA, 15 bp, Homo sapiens
tcacctaagtagtat

SEQ ID NO: 758070 - DNA, 15 bp, Homo sapiens
cacctaagtagtatt

SEQ ID NO: 758071 - DNA, 15 bp, Homo sapiens
acctaagtagtattc

SEQ ID NO: 758072 - DNA, 15 bp, Homo sapiens
cctaagtagtattcg

SEQ ID NO: 758073 - DNA, 15 bp, Homo sapiens
ctaagtagtattcgc

SEQ ID NO: 758074 - DNA, 15 bp, Homo sapiens
taagtagtattcgcc

SEQ ID NO: 758075 - DNA, 15 bp, Homo sapiens
aagtagtattcgcct

SEQ ID NO: 758076 - DNA, 15 bp, Homo sapiens
agtagtattcgcctg

SEQ ID NO: 758077 - DNA, 15 bp, Homo sapiens
gtagtattcgcctgc

SEQ ID NO: 758078 - DNA, 15 bp, Homo sapiens
tagtattcgcctgcc

SEQ ID NO: 758079 - DNA, 15 bp, Homo sapiens
agtattcgcctgcct

SEQ ID NO: 758080 - DNA, 15 bp, Homo sapiens
gtattcgcctgcctc

SEQ ID NO: 758081 - DNA, 15 bp, Homo sapiens
tattcgcctgcctcc

SEQ ID NO: 758082 - DNA, 15 bp, Homo sapiens
attcgcctgcctcca

SEQ ID NO: 758083 - DNA, 15 bp, Homo sapiens
ttcgcctgcctccac

SEQ ID NO: 758084 - DNA, 15 bp, Homo sapiens
tcgcctgcctccact

SEQ ID NO: 758085 - DNA, 15 bp, Homo sapiens
cgcctgcctccactt

SEQ ID NO: 758086 - DNA, 15 bp, Homo sapiens
gcctgcctccacttt

SEQ ID NO: 758087 - DNA, 15 bp, Homo sapiens
cctgcctccacttta

SEQ ID NO: 758088 - DNA, 15 bp, Homo sapiens
ctgcctccactttaa

SEQ ID NO: 758089 - DNA, 15 bp, Homo sapiens
tgcctccactttaaa

SEQ ID NO: 758090 - DNA, 15 bp, Homo sapiens
gcctccactttaaaa

SEQ ID NO: 758091 - DNA, 15 bp, Homo sapiens
cctccactttaaaag

SEQ ID NO: 758092 - DNA, 15 bp, Homo sapiens
ctccactttaaaaga

SEQ ID NO: 758093 - DNA, 15 bp, Homo sapiens
tccactttaaaagac

SEQ ID NO: 758094 - DNA, 15 bp, Homo sapiens
ccactttaaaagaca

SEQ ID NO: 758095 - DNA, 15 bp, Homo sapiens
cactttaaaagacaa

SEQ ID NO: 758096 - DNA, 15 bp, Homo sapiens
actttaaaagacaaa

SEQ ID NO: 758097 - DNA, 15 bp, Homo sapiens
ctttaaaagacaaat

SEQ ID NO: 758098 - DNA, 15 bp, Homo sapiens
tttaaaagacaaatt

SEQ ID NO: 758099 - DNA, 15 bp, Homo sapiens
ttaaaagacaaatta

SEQ ID NO: 758100 - DNA, 15 bp, Homo sapiens
taaaagacaaattaa

SEQ ID NO: 758101 - DNA, 15 bp, Homo sapiens
aaaagacaaattaaa

SEQ ID NO: 758102 - DNA, 15 bp, Homo sapiens
aaagacaaattaaac

SEQ ID NO: 758103 - DNA, 15 bp, Homo sapiens
aagacaaattaaact

SEQ ID NO: 758104 - DNA, 15 bp, Homo sapiens
agacaaattaaacta

SEQ ID NO: 758105 - DNA, 15 bp, Homo sapiens
gacaaattaaactac

SEQ ID NO: 758106 - DNA, 15 bp, Homo sapiens
acaaattaaactact

SEQ ID NO: 758107 - DNA, 15 bp, Homo sapiens
caaattaaactactt

SEQ ID NO: 758108 - DNA, 15 bp, Homo sapiens
aaattaaactacttg

SEQ ID NO: 758109 - DNA, 15 bp, Homo sapiens
aattaaactacttgt

SEQ ID NO: 758110 - DNA, 15 bp, Homo sapiens
attaaactacttgta

SEQ ID NO: 758111 - DNA, 15 bp, Homo sapiens
ttaaactacttgtag

SEQ ID NO: 758112 - DNA, 15 bp, Homo sapiens
taaactacttgtagt

SEQ ID NO: 758113 - DNA, 15 bp, Homo sapiens
aaactacttgtagta

SEQ ID NO: 758114 - DNA, 15 bp, Homo sapiens
aactacttgtagtat

SEQ ID NO: 758115 - DNA, 15 bp, Homo sapiens
actacttgtagtatt

SEQ ID NO: 758116 - DNA, 15 bp, Homo sapiens
ctacttgtagtatta

SEQ ID NO: 758117 - DNA, 15 bp, Homo sapiens
tacttgtagtattat

SEQ ID NO: 758118 - DNA, 15 bp, Homo sapiens
acttgtagtattatg

SEQ ID NO: 758119 - DNA, 15 bp, Homo sapiens
cttgtagtattatgt

SEQ ID NO: 758120 - DNA, 15 bp, Homo sapiens
ttgtagtattatgta

SEQ ID NO: 758121 - DNA, 15 bp, Homo sapiens
tgtagtattatgtag

SEQ ID NO: 758122 - DNA, 15 bp, Homo sapiens
gtagtattatgtaga

SEQ ID NO: 758123 - DNA, 15 bp, Homo sapiens
tagtattatgtagaa

SEQ ID NO: 758124 - DNA, 15 bp, Homo sapiens
agtattatgtagaag

SEQ ID NO: 758125 - DNA, 15 bp, Homo sapiens
gtattatgtagaaga

SEQ ID NO: 758126 - DNA, 15 bp, Homo sapiens
tattatgtagaagaa

SEQ ID NO: 758127 - DNA, 15 bp, Homo sapiens
attatgtagaagaat

SEQ ID NO: 758128 - DNA, 15 bp, Homo sapiens
ttatgtagaagaatg

SEQ ID NO: 758129 - DNA, 15 bp, Homo sapiens
tatgtagaagaatgt

SEQ ID NO: 758130 - DNA, 15 bp, Homo sapiens
atgtagaagaatgta

SEQ ID NO: 758131 - DNA, 15 bp, Homo sapiens
tgtagaagaatgtat

SEQ ID NO: 758132 - DNA, 15 bp, Homo sapiens
gtagaagaatgtatg

SEQ ID NO: 758133 - DNA, 15 bp, Homo sapiens
tagaagaatgtatgt

SEQ ID NO: 758134 - DNA, 15 bp, Homo sapiens
agaagaatgtatgta

SEQ ID NO: 758135 - DNA, 15 bp, Homo sapiens
gaagaatgtatgtat

SEQ ID NO: 758136 - DNA, 15 bp, Homo sapiens
aagaatgtatgtatt

SEQ ID NO: 758137 - DNA, 15 bp, Homo sapiens
agaatgtatgtattt

SEQ ID NO: 758138 - DNA, 15 bp, Homo sapiens
gaatgtatgtatttg

SEQ ID NO: 758139 - DNA, 15 bp, Homo sapiens
aatgtatgtatttgt

SEQ ID NO: 758140 - DNA, 15 bp, Homo sapiens
atgtatgtatttgta

SEQ ID NO: 758141 - DNA, 15 bp, Homo sapiens
tgtatgtatttgtat

SEQ ID NO: 758142 - DNA, 15 bp, Homo sapiens
gtatgtatttgtata

SEQ ID NO: 758143 - DNA, 15 bp, Homo sapiens
tatgtatttgtatat

SEQ ID NO: 758144 - DNA, 15 bp, Homo sapiens
atgtatttgtatatt

SEQ ID NO: 758145 - DNA, 15 bp, Homo sapiens
tgtatttgtatattt

SEQ ID NO: 758146 - DNA, 15 bp, Homo sapiens
gtatttgtatatttc

SEQ ID NO: 758147 - DNA, 15 bp, Homo sapiens
tatttgtatatttcc

SEQ ID NO: 758148 - DNA, 15 bp, Homo sapiens
atttgtatatttcca

SEQ ID NO: 758149 - DNA, 15 bp, Homo sapiens
tttgtatatttccaa

SEQ ID NO: 758150 - DNA, 15 bp, Homo sapiens
ttgtatatttccaaa

SEQ ID NO: 758151 - DNA, 15 bp, Homo sapiens
tgtatatttccaaat

SEQ ID NO: 758152 - DNA, 15 bp, Homo sapiens
gtatatttccaaatt

SEQ ID NO: 758153 - DNA, 15 bp, Homo sapiens
tatatttccaaattt

SEQ ID NO: 758154 - DNA, 15 bp, Homo sapiens
atatttccaaattta

SEQ ID NO: 758155 - DNA, 15 bp, Homo sapiens
tatttccaaatttaa

SEQ ID NO: 758156 - DNA, 15 bp, Homo sapiens
atttccaaatttaaa

SEQ ID NO: 758157 - DNA, 15 bp, Homo sapiens
tttccaaatttaaag

SEQ ID NO: 758158 - DNA, 15 bp, Homo sapiens
ttccaaatttaaagt

SEQ ID NO: 758159 - DNA, 15 bp, Homo sapiens
tccaaatttaaagtc

SEQ ID NO: 758160 - DNA, 15 bp, Homo sapiens
ccaaatttaaagtct

SEQ ID NO: 758161 - DNA, 15 bp, Homo sapiens
caaatttaaagtcta

SEQ ID NO: 758162 - DNA, 15 bp, Homo sapiens
aaatttaaagtctac

SEQ ID NO: 758163 - DNA, 15 bp, Homo sapiens
aatttaaagtctacc

SEQ ID NO: 758164 - DNA, 15 bp, Homo sapiens
atttaaagtctacct

SEQ ID NO: 758165 - DNA, 15 bp, Homo sapiens
tttaaagtctacctt

SEQ ID NO: 758166 - DNA, 15 bp, Homo sapiens
ttaaagtctaccttt

SEQ ID NO: 758167 - DNA, 15 bp, Homo sapiens
taaagtctacctttt

SEQ ID NO: 758168 - DNA, 15 bp, Homo sapiens
aaagtctaccttttg

SEQ ID NO: 758169 - DNA, 15 bp, Homo sapiens
aagtctaccttttgc

SEQ ID NO: 758170 - DNA, 15 bp, Homo sapiens
agtctaccttttgcc

SEQ ID NO: 758171 - DNA, 15 bp, Homo sapiens
gtctaccttttgcct

SEQ ID NO: 758172 - DNA, 15 bp, Homo sapiens
tctaccttttgcctg

SEQ ID NO: 758173 - DNA, 15 bp, Homo sapiens
ctaccttttgcctga

SEQ ID NO: 758174 - DNA, 15 bp, Homo sapiens
taccttttgcctgaa

SEQ ID NO: 758175 - DNA, 15 bp, Homo sapiens
accttttgcctgaaa

SEQ ID NO: 758176 - DNA, 15 bp, Homo sapiens
ccttttgcctgaaaa

SEQ ID NO: 758177 - DNA, 15 bp, Homo sapiens
cttttgcctgaaaaa

SEQ ID NO: 758178 - DNA, 15 bp, Homo sapiens
ttttgcctgaaaaaa

SEQ ID NO: 758179 - DNA, 15 bp, Homo sapiens
tttgcctgaaaaaaa

SEQ ID NO: 758180 - DNA, 15 bp, Homo sapiens
ttgcctgaaaaaaac

SEQ ID NO: 758181 - DNA, 15 bp, Homo sapiens
tgcctgaaaaaaaca

SEQ ID NO: 758182 - DNA, 15 bp, Homo sapiens
gcctgaaaaaaacat

SEQ ID NO: 758183 - DNA, 15 bp, Homo sapiens
cctgaaaaaaacata

SEQ ID NO: 758184 - DNA, 15 bp, Homo sapiens
ctgaaaaaaacatag

SEQ ID NO: 758185 - DNA, 15 bp, Homo sapiens
tgaaaaaaacataga

SEQ ID NO: 758186 - DNA, 15 bp, Homo sapiens
gaaaaaaacatagaa

SEQ ID NO: 758187 - DNA, 15 bp, Homo sapiens
aaaaaaacatagaaa

SEQ ID NO: 758188 - DNA, 15 bp, Homo sapiens
aaaaaacatagaaaa

SEQ ID NO: 758189 - DNA, 15 bp, Homo sapiens
aaaaacatagaaaag

SEQ ID NO: 758190 - DNA, 15 bp, Homo sapiens
aaaacatagaaaaga

SEQ ID NO: 758191 - DNA, 15 bp, Homo sapiens
aaacatagaaaagaa

SEQ ID NO: 758192 - DNA, 15 bp, Homo sapiens
aacatagaaaagaaa

SEQ ID NO: 758193 - DNA, 15 bp, Homo sapiens
acatagaaaagaaaa

SEQ ID NO: 758194 - DNA, 15 bp, Homo sapiens
catagaaaagaaaac

SEQ ID NO: 758195 - DNA, 15 bp, Homo sapiens
atagaaaagaaaact

SEQ ID NO: 758196 - DNA, 15 bp, Homo sapiens
tagaaaagaaaacta

SEQ ID NO: 758197 - DNA, 15 bp, Homo sapiens
agaaaagaaaactac

SEQ ID NO: 758198 - DNA, 15 bp, Homo sapiens
gaaaagaaaactacc

SEQ ID NO: 758199 - DNA, 15 bp, Homo sapiens
aaaagaaaactacca

SEQ ID NO: 758200 - DNA, 15 bp, Homo sapiens
aaagaaaactaccaa

SEQ ID NO: 758201 - DNA, 15 bp, Homo sapiens
aagaaaactaccaat

SEQ ID NO: 758202 - DNA, 15 bp, Homo sapiens
agaaaactaccaata

SEQ ID NO: 758203 - DNA, 15 bp, Homo sapiens
gaaaactaccaatac

SEQ ID NO: 758204 - DNA, 15 bp, Homo sapiens
aaaactaccaatact

SEQ ID NO: 758205 - DNA, 15 bp, Homo sapiens
aaactaccaatacta

SEQ ID NO: 758206 - DNA, 15 bp, Homo sapiens
aactaccaatactaa

SEQ ID NO: 758207 - DNA, 15 bp, Homo sapiens
actaccaatactaag

SEQ ID NO: 758208 - DNA, 15 bp, Homo sapiens
ctaccaatactaagt

SEQ ID NO: 758209 - DNA, 15 bp, Homo sapiens
taccaatactaagta

SEQ ID NO: 758210 - DNA, 15 bp, Homo sapiens
accaatactaagtat

SEQ ID NO: 758211 - DNA, 15 bp, Homo sapiens
ccaatactaagtata

SEQ ID NO: 758212 - DNA, 15 bp, Homo sapiens
caatactaagtatag

SEQ ID NO: 758213 - DNA, 15 bp, Homo sapiens
aatactaagtatagt

SEQ ID NO: 758214 - DNA, 15 bp, Homo sapiens
atactaagtatagtt

SEQ ID NO: 758215 - DNA, 15 bp, Homo sapiens
tactaagtatagttg

SEQ ID NO: 758216 - DNA, 15 bp, Homo sapiens
actaagtatagttga

SEQ ID NO: 758217 - DNA, 15 bp, Homo sapiens
ctaagtatagttgag

SEQ ID NO: 758218 - DNA, 15 bp, Homo sapiens
taagtatagttgagt

SEQ ID NO: 758219 - DNA, 15 bp, Homo sapiens
aagtatagttgagtg

SEQ ID NO: 758220 - DNA, 15 bp, Homo sapiens
agtatagttgagtgg

SEQ ID NO: 758221 - DNA, 15 bp, Homo sapiens
gtatagttgagtggt

SEQ ID NO: 758222 - DNA, 15 bp, Homo sapiens
tatagttgagtggtt

SEQ ID NO: 758223 - DNA, 15 bp, Homo sapiens
atagttgagtggttt

SEQ ID NO: 758224 - DNA, 15 bp, Homo sapiens
tagttgagtggtttt

SEQ ID NO: 758225 - DNA, 15 bp, Homo sapiens
agttgagtggttttc

SEQ ID NO: 758226 - DNA, 15 bp, Homo sapiens
gttgagtggttttcc

SEQ ID NO: 758227 - DNA, 15 bp, Homo sapiens
ttgagtggttttcct

SEQ ID NO: 758228 - DNA, 15 bp, Homo sapiens
tgagtggttttcctg

SEQ ID NO: 758229 - DNA, 15 bp, Homo sapiens
gagtggttttcctgc

SEQ ID NO: 758230 - DNA, 15 bp, Homo sapiens
agtggttttcctgct

SEQ ID NO: 758231 - DNA, 15 bp, Homo sapiens
gtggttttcctgctg

SEQ ID NO: 758232 - DNA, 15 bp, Homo sapiens
tggttttcctgctgt

SEQ ID NO: 758233 - DNA, 15 bp, Homo sapiens
ggttttcctgctgtt

SEQ ID NO: 758234 - DNA, 15 bp, Homo sapiens
gttttcctgctgttt

SEQ ID NO: 758235 - DNA, 15 bp, Homo sapiens
ttttcctgctgtttt

SEQ ID NO: 758236 - DNA, 15 bp, Homo sapiens
tttcctgctgttttc

SEQ ID NO: 758237 - DNA, 15 bp, Homo sapiens
ttcctgctgttttct

SEQ ID NO: 758238 - DNA, 15 bp, Homo sapiens
tcctgctgttttcta

SEQ ID NO: 758239 - DNA, 15 bp, Homo sapiens
cctgctgttttctat

SEQ ID NO: 758240 - DNA, 15 bp, Homo sapiens
ctgctgttttctatt

SEQ ID NO: 758241 - DNA, 15 bp, Homo sapiens
tgctgttttctatta

SEQ ID NO: 758242 - DNA, 15 bp, Homo sapiens
gctgttttctattat

SEQ ID NO: 758243 - DNA, 15 bp, Homo sapiens
ctgttttctattatg

SEQ ID NO: 758244 - DNA, 15 bp, Homo sapiens
tgttttctattatgg

SEQ ID NO: 758245 - DNA, 15 bp, Homo sapiens
gttttctattatggt

SEQ ID NO: 758246 - DNA, 15 bp, Homo sapiens
ttttctattatggtc

SEQ ID NO: 758247 - DNA, 15 bp, Homo sapiens
tttctattatggtcc

SEQ ID NO: 758248 - DNA, 15 bp, Homo sapiens
ttctattatggtccc

SEQ ID NO: 758249 - DNA, 15 bp, Homo sapiens
tctattatggtccct

SEQ ID NO: 758250 - DNA, 15 bp, Homo sapiens
ctattatggtccctg

SEQ ID NO: 758251 - DNA, 15 bp, Homo sapiens
tattatggtccctgg

SEQ ID NO: 758252 - DNA, 15 bp, Homo sapiens
attatggtccctgga

SEQ ID NO: 758253 - DNA, 15 bp, Homo sapiens
ttatggtccctggag

SEQ ID NO: 758254 - DNA, 15 bp, Homo sapiens
tatggtccctggagc

SEQ ID NO: 758255 - DNA, 15 bp, Homo sapiens
atggtccctggagct

SEQ ID NO: 758256 - DNA, 15 bp, Homo sapiens
tggtccctggagctc

SEQ ID NO: 758257 - DNA, 15 bp, Homo sapiens
ggtccctggagctca

SEQ ID NO: 758258 - DNA, 15 bp, Homo sapiens
gtccctggagctcag

SEQ ID NO: 758259 - DNA, 15 bp, Homo sapiens
tccctggagctcagg

SEQ ID NO: 758260 - DNA, 15 bp, Homo sapiens
ccctggagctcaggt

SEQ ID NO: 758261 - DNA, 15 bp, Homo sapiens
cctggagctcaggtg

SEQ ID NO: 758262 - DNA, 15 bp, Homo sapiens
ctggagctcaggtgt

SEQ ID NO: 758263 - DNA, 15 bp, Homo sapiens
tggagctcaggtgtc

SEQ ID NO: 758264 - DNA, 15 bp, Homo sapiens
ggagctcaggtgtcc

SEQ ID NO: 758265 - DNA, 15 bp, Homo sapiens
gagctcaggtgtcca

SEQ ID NO: 758266 - DNA, 15 bp, Homo sapiens
agctcaggtgtccat

SEQ ID NO: 758267 - DNA, 15 bp, Homo sapiens
gctcaggtgtccatt

SEQ ID NO: 758268 - DNA, 15 bp, Homo sapiens
ctcaggtgtccattt

SEQ ID NO: 758269 - DNA, 15 bp, Homo sapiens
tcaggtgtccatttt

SEQ ID NO: 758270 - DNA, 15 bp, Homo sapiens
caggtgtccattttc

SEQ ID NO: 758271 - DNA, 15 bp, Homo sapiens
aggtgtccattttca

SEQ ID NO: 758272 - DNA, 15 bp, Homo sapiens
ggtgtccattttcat

SEQ ID NO: 758273 - DNA, 15 bp, Homo sapiens
gtgtccattttcatg

SEQ ID NO: 758274 - DNA, 15 bp, Homo sapiens
tgtccattttcatgg

SEQ ID NO: 758275 - DNA, 15 bp, Homo sapiens
gtccattttcatggg

SEQ ID NO: 758276 - DNA, 15 bp, Homo sapiens
tccattttcatggga

SEQ ID NO: 758277 - DNA, 15 bp, Homo sapiens
ccattttcatgggaa

SEQ ID NO: 758278 - DNA, 15 bp, Homo sapiens
cattttcatgggaag

SEQ ID NO: 758279 - DNA, 15 bp, Homo sapiens
attttcatgggaagg

SEQ ID NO: 758280 - DNA, 15 bp, Homo sapiens
ttttcatgggaagga

SEQ ID NO: 758281 - DNA, 15 bp, Homo sapiens
tttcatgggaaggaa

SEQ ID NO: 758282 - DNA, 15 bp, Homo sapiens
ttcatgggaaggaac

SEQ ID NO: 758283 - DNA, 15 bp, Homo sapiens
tcatgggaaggaacc

SEQ ID NO: 758284 - DNA, 15 bp, Homo sapiens
catgggaaggaacct

SEQ ID NO: 758285 - DNA, 15 bp, Homo sapiens
atgggaaggaacctt

SEQ ID NO: 758286 - DNA, 15 bp, Homo sapiens
tgggaaggaaccttt

SEQ ID NO: 758287 - DNA, 15 bp, Homo sapiens
gggaaggaacctttc

SEQ ID NO: 758288 - DNA, 15 bp, Homo sapiens
ggaaggaacctttca

SEQ ID NO: 758289 - DNA, 15 bp, Homo sapiens
gaaggaacctttcac

SEQ ID NO: 758290 - DNA, 15 bp, Homo sapiens
aaggaacctttcact

SEQ ID NO: 758291 - DNA, 15 bp, Homo sapiens
aggaacctttcactt

SEQ ID NO: 758292 - DNA, 15 bp, Homo sapiens
ggaacctttcacttg

SEQ ID NO: 758293 - DNA, 15 bp, Homo sapiens
gaacctttcacttga

SEQ ID NO: 758294 - DNA, 15 bp, Homo sapiens
aacctttcacttgat

SEQ ID NO: 758295 - DNA, 15 bp, Homo sapiens
acctttcacttgata

SEQ ID NO: 758296 - DNA, 15 bp, Homo sapiens
cctttcacttgataa

SEQ ID NO: 758297 - DNA, 15 bp, Homo sapiens
ctttcacttgataaa

SEQ ID NO: 758298 - DNA, 15 bp, Homo sapiens
tttcacttgataaat

SEQ ID NO: 758299 - DNA, 15 bp, Homo sapiens
ttcacttgataaatg

SEQ ID NO: 758300 - DNA, 15 bp, Homo sapiens
tcacttgataaatga

SEQ ID NO: 758301 - DNA, 15 bp, Homo sapiens
cacttgataaatgag

SEQ ID NO: 758302 - DNA, 15 bp, Homo sapiens
acttgataaatgagc

SEQ ID NO: 758303 - DNA, 15 bp, Homo sapiens
cttgataaatgagct

SEQ ID NO: 758304 - DNA, 15 bp, Homo sapiens
ttgataaatgagctg

SEQ ID NO: 758305 - DNA, 15 bp, Homo sapiens
tgataaatgagctgg

SEQ ID NO: 758306 - DNA, 15 bp, Homo sapiens
gataaatgagctgga

SEQ ID NO: 758307 - DNA, 15 bp, Homo sapiens
ataaatgagctggaa

SEQ ID NO: 758308 - DNA, 15 bp, Homo sapiens
taaatgagctggaaa

SEQ ID NO: 758309 - DNA, 15 bp, Homo sapiens
aaatgagctggaaaa

SEQ ID NO: 758310 - DNA, 15 bp, Homo sapiens
aatgagctggaaaaa

SEQ ID NO: 758311 - DNA, 15 bp, Homo sapiens
atgagctggaaaaag

SEQ ID NO: 758312 - DNA, 15 bp, Homo sapiens
tgagctggaaaaagg

SEQ ID NO: 758313 - DNA, 15 bp, Homo sapiens
gagctggaaaaaggg

SEQ ID NO: 758314 - DNA, 15 bp, Homo sapiens
agctggaaaaagggg

SEQ ID NO: 758315 - DNA, 15 bp, Homo sapiens
gctggaaaaaggggg

SEQ ID NO: 758316 - DNA, 15 bp, Homo sapiens
ctggaaaaagggggt

SEQ ID NO: 758317 - DNA, 15 bp, Homo sapiens
tggaaaaagggggtt

SEQ ID NO: 758318 - DNA, 15 bp, Homo sapiens
ggaaaaagggggttt

SEQ ID NO: 758319 - DNA, 15 bp, Homo sapiens
gaaaaagggggttta

SEQ ID NO: 758320 - DNA, 15 bp, Homo sapiens
aaaaagggggtttat

SEQ ID NO: 758321 - DNA, 15 bp, Homo sapiens
aaaagggggtttatg

SEQ ID NO: 758322 - DNA, 15 bp, Homo sapiens
aaagggggtttatgt

SEQ ID NO: 758323 - DNA, 15 bp, Homo sapiens
aagggggtttatgtc

SEQ ID NO: 758324 - DNA, 15 bp, Homo sapiens
agggggtttatgtct

SEQ ID NO: 758325 - DNA, 15 bp, Homo sapiens
gggggtttatgtctg

SEQ ID NO: 758326 - DNA, 15 bp, Homo sapiens
ggggtttatgtctgt

SEQ ID NO: 758327 - DNA, 15 bp, Homo sapiens
gggtttatgtctgtg

SEQ ID NO: 758328 - DNA, 15 bp, Homo sapiens
ggtttatgtctgtgt

SEQ ID NO: 758329 - DNA, 15 bp, Homo sapiens
gtttatgtctgtgtg

SEQ ID NO: 758330 - DNA, 15 bp, Homo sapiens
tttatgtctgtgtga

SEQ ID NO: 758331 - DNA, 15 bp, Homo sapiens
ttatgtctgtgtgag

SEQ ID NO: 758332 - DNA, 15 bp, Homo sapiens
tatgtctgtgtgagc

SEQ ID NO: 758333 - DNA, 15 bp, Homo sapiens
atgtctgtgtgagct

SEQ ID NO: 758334 - DNA, 15 bp, Homo sapiens
tgtctgtgtgagctg

SEQ ID NO: 758335 - DNA, 15 bp, Homo sapiens
gtctgtgtgagctgc

SEQ ID NO: 758336 - DNA, 15 bp, Homo sapiens
tctgtgtgagctgca

SEQ ID NO: 758337 - DNA, 15 bp, Homo sapiens
ctgtgtgagctgcag

SEQ ID NO: 758338 - DNA, 15 bp, Homo sapiens
tgtgtgagctgcaga

SEQ ID NO: 758339 - DNA, 15 bp, Homo sapiens
gtgtgagctgcagaa

SEQ ID NO: 758340 - DNA, 15 bp, Homo sapiens
tgtgagctgcagaaa

SEQ ID NO: 758341 - DNA, 15 bp, Homo sapiens
gtgagctgcagaaag

SEQ ID NO: 758342 - DNA, 15 bp, Homo sapiens
tgagctgcagaaagg

SEQ ID NO: 758343 - DNA, 15 bp, Homo sapiens
gagctgcagaaagga

SEQ ID NO: 758344 - DNA, 15 bp, Homo sapiens
agctgcagaaaggac

SEQ ID NO: 758345 - DNA, 15 bp, Homo sapiens
gctgcagaaaggact

SEQ ID NO: 758346 - DNA, 15 bp, Homo sapiens
ctgcagaaaggacta

SEQ ID NO: 758347 - DNA, 15 bp, Homo sapiens
tgcagaaaggactag

SEQ ID NO: 758348 - DNA, 15 bp, Homo sapiens
gcagaaaggactagt

SEQ ID NO: 758349 - DNA, 15 bp, Homo sapiens
cagaaaggactagta

SEQ ID NO: 758350 - DNA, 15 bp, Homo sapiens
agaaaggactagtag

SEQ ID NO: 758351 - DNA, 15 bp, Homo sapiens
gaaaggactagtagt

SEQ ID NO: 758352 - DNA, 15 bp, Homo sapiens
aaaggactagtagtt

SEQ ID NO: 758353 - DNA, 15 bp, Homo sapiens
aaggactagtagtta

SEQ ID NO: 758354 - DNA, 15 bp, Homo sapiens
aggactagtagttag

SEQ ID NO: 758355 - DNA, 15 bp, Homo sapiens
ggactagtagttagt

SEQ ID NO: 758356 - DNA, 15 bp, Homo sapiens
gactagtagttagta

SEQ ID NO: 758357 - DNA, 15 bp, Homo sapiens
actagtagttagtaa

SEQ ID NO: 758358 - DNA, 15 bp, Homo sapiens
ctagtagttagtaag

SEQ ID NO: 758359 - DNA, 15 bp, Homo sapiens
tagtagttagtaagg

SEQ ID NO: 758360 - DNA, 15 bp, Homo sapiens
agtagttagtaaggt

SEQ ID NO: 758361 - DNA, 15 bp, Homo sapiens
gtagttagtaaggtg

SEQ ID NO: 758362 - DNA, 15 bp, Homo sapiens
tagttagtaaggtga

SEQ ID NO: 758363 - DNA, 15 bp, Homo sapiens
agttagtaaggtgat

SEQ ID NO: 758364 - DNA, 15 bp, Homo sapiens
gttagtaaggtgata

SEQ ID NO: 758365 - DNA, 15 bp, Homo sapiens
ttagtaaggtgataa

SEQ ID NO: 758366 - DNA, 15 bp, Homo sapiens
tagtaaggtgataaa

SEQ ID NO: 758367 - DNA, 15 bp, Homo sapiens
agtaaggtgataaaa

SEQ ID NO: 758368 - DNA, 15 bp, Homo sapiens
gtaaggtgataaaat

SEQ ID NO: 758369 - DNA, 15 bp, Homo sapiens
taaggtgataaaatt

SEQ ID NO: 758370 - DNA, 15 bp, Homo sapiens
aaggtgataaaattg

SEQ ID NO: 758371 - DNA, 15 bp, Homo sapiens
ggtgataaaattgca

SEQ ID NO: 758372 - DNA, 15 bp, Homo sapiens
gtgataaaattgcag

SEQ ID NO: 758373 - DNA, 15 bp, Homo sapiens
tgataaaattgcagg

SEQ ID NO: 758374 - DNA, 15 bp, Homo sapiens
gataaaattgcagga

SEQ ID NO: 758375 - DNA, 15 bp, Homo sapiens
ataaaattgcaggat

SEQ ID NO: 758376 - DNA, 15 bp, Homo sapiens
taaaattgcaggatc

SEQ ID NO: 758377 - DNA, 15 bp, Homo sapiens
aaaattgcaggatca

SEQ ID NO: 758378 - DNA, 15 bp, Homo sapiens
aaattgcaggatcag

SEQ ID NO: 758379 - DNA, 15 bp, Homo sapiens
aattgcaggatcagg

SEQ ID NO: 758380 - DNA, 15 bp, Homo sapiens
attgcaggatcaggc

SEQ ID NO: 758381 - DNA, 15 bp, Homo sapiens
ttgcaggatcaggca

SEQ ID NO: 758382 - DNA, 15 bp, Homo sapiens
tgcaggatcaggcaa

SEQ ID NO: 758383 - DNA, 15 bp, Homo sapiens
gcaggatcaggcaat

SEQ ID NO: 758384 - DNA, 15 bp, Homo sapiens
caggatcaggcaatg

SEQ ID NO: 758385 - DNA, 15 bp, Homo sapiens
aggatcaggcaatga

SEQ ID NO: 758386 - DNA, 15 bp, Homo sapiens
ggatcaggcaatgat

SEQ ID NO: 758387 - DNA, 15 bp, Homo sapiens
gatcaggcaatgata

SEQ ID NO: 758388 - DNA, 15 bp, Homo sapiens
atcaggcaatgatac

SEQ ID NO: 758389 - DNA, 15 bp, Homo sapiens
tcaggcaatgatact

SEQ ID NO: 758390 - DNA, 15 bp, Homo sapiens
caggcaatgatactt

SEQ ID NO: 758391 - DNA, 15 bp, Homo sapiens
aggcaatgatacttt

SEQ ID NO: 758392 - DNA, 15 bp, Homo sapiens
ggcaatgatactttc

SEQ ID NO: 758393 - DNA, 15 bp, Homo sapiens
gcaatgatactttca

SEQ ID NO: 758394 - DNA, 15 bp, Homo sapiens
caatgatactttcag

SEQ ID NO: 758395 - DNA, 15 bp, Homo sapiens
aatgatactttcaga

SEQ ID NO: 758396 - DNA, 15 bp, Homo sapiens
atgatactttcagaa

SEQ ID NO: 758397 - DNA, 15 bp, Homo sapiens
tgatactttcagaag

SEQ ID NO: 758398 - DNA, 15 bp, Homo sapiens
gatactttcagaagc

SEQ ID NO: 758399 - DNA, 15 bp, Homo sapiens
atactttcagaagca

SEQ ID NO: 758400 - DNA, 15 bp, Homo sapiens
tactttcagaagcaa

SEQ ID NO: 758401 - DNA, 15 bp, Homo sapiens
actttcagaagcaat

SEQ ID NO: 758402 - DNA, 15 bp, Homo sapiens
ctttcagaagcaatc

SEQ ID NO: 758403 - DNA, 15 bp, Homo sapiens
tttcagaagcaatca

SEQ ID NO: 758404 - DNA, 15 bp, Homo sapiens
ttcagaagcaatcac

SEQ ID NO: 758405 - DNA, 15 bp, Homo sapiens
tcagaagcaatcact

SEQ ID NO: 758406 - DNA, 15 bp, Homo sapiens
cagaagcaatcactg

SEQ ID NO: 758407 - DNA, 15 bp, Homo sapiens
agaagcaatcactgc

SEQ ID NO: 758408 - DNA, 15 bp, Homo sapiens
gaagcaatcactgca

SEQ ID NO: 758409 - DNA, 15 bp, Homo sapiens
aagcaatcactgcag

SEQ ID NO: 758410 - DNA, 15 bp, Homo sapiens
agcaatcactgcagg

SEQ ID NO: 758411 - DNA, 15 bp, Homo sapiens
gcaatcactgcaggc

SEQ ID NO: 758412 - DNA, 15 bp, Homo sapiens
caatcactgcaggct

SEQ ID NO: 758413 - DNA, 15 bp, Homo sapiens
aatcactgcaggctg

SEQ ID NO: 758414 - DNA, 15 bp, Homo sapiens
atcactgcaggctgt

SEQ ID NO: 758415 - DNA, 15 bp, Homo sapiens
tcactgcaggctgtc

SEQ ID NO: 758416 - DNA, 15 bp, Homo sapiens
cactgcaggctgtca

SEQ ID NO: 758417 - DNA, 15 bp, Homo sapiens
actgcaggctgtcaa

SEQ ID NO: 758418 - DNA, 15 bp, Homo sapiens
ctgcaggctgtcaac

SEQ ID NO: 758419 - DNA, 15 bp, Homo sapiens
tgcaggctgtcaaca

SEQ ID NO: 758420 - DNA, 15 bp, Homo sapiens
gcaggctgtcaacag

SEQ ID NO: 758421 - DNA, 15 bp, Homo sapiens
caggctgtcaacaga

SEQ ID NO: 758422 - DNA, 15 bp, Homo sapiens
aggctgtcaacagag

SEQ ID NO: 758423 - DNA, 15 bp, Homo sapiens
ggctgtcaacagagc

SEQ ID NO: 758424 - DNA, 15 bp, Homo sapiens
gctgtcaacagagct

SEQ ID NO: 758425 - DNA, 15 bp, Homo sapiens
ctgtcaacagagctt

SEQ ID NO: 758426 - DNA, 15 bp, Homo sapiens
tgtcaacagagctta

SEQ ID NO: 758427 - DNA, 15 bp, Homo sapiens
gtcaacagagcttac

SEQ ID NO: 758428 - DNA, 15 bp, Homo sapiens
tcaacagagcttaca

SEQ ID NO: 758429 - DNA, 15 bp, Homo sapiens
caacagagcttacaa

SEQ ID NO: 758430 - DNA, 15 bp, Homo sapiens
aacagagcttacaaa

SEQ ID NO: 758431 - DNA, 15 bp, Homo sapiens
acagagcttacaaac

SEQ ID NO: 758432 - DNA, 15 bp, Homo sapiens
cagagcttacaaacc

SEQ ID NO: 758433 - DNA, 15 bp, Homo sapiens
agagcttacaaacct

SEQ ID NO: 758434 - DNA, 15 bp, Homo sapiens
gagcttacaaacctt

SEQ ID NO: 758435 - DNA, 15 bp, Homo sapiens
agcttacaaaccttt

SEQ ID NO: 758436 - DNA, 15 bp, Homo sapiens
gcttacaaacctttg

SEQ ID NO: 758437 - DNA, 15 bp, Homo sapiens
cttacaaacctttga

SEQ ID NO: 758438 - DNA, 15 bp, Homo sapiens
ttacaaacctttgag

SEQ ID NO: 758439 - DNA, 15 bp, Homo sapiens
tacaaacctttgagg

SEQ ID NO: 758440 - DNA, 15 bp, Homo sapiens
acaaacctttgaggt

SEQ ID NO: 758441 - DNA, 15 bp, Homo sapiens
caaacctttgaggtt

SEQ ID NO: 758442 - DNA, 15 bp, Homo sapiens
aaacctttgaggttg

SEQ ID NO: 758443 - DNA, 15 bp, Homo sapiens
aacctttgaggttgt

SEQ ID NO: 758444 - DNA, 15 bp, Homo sapiens
acctttgaggttgtt

SEQ ID NO: 758445 - DNA, 15 bp, Homo sapiens
cctttgaggttgttc

SEQ ID NO: 758446 - DNA, 15 bp, Homo sapiens
ctttgaggttgttcc

SEQ ID NO: 758447 - DNA, 15 bp, Homo sapiens
tttgaggttgttcct

SEQ ID NO: 758448 - DNA, 15 bp, Homo sapiens
ttgaggttgttcctg

SEQ ID NO: 758449 - DNA, 15 bp, Homo sapiens
tgaggttgttcctgg

SEQ ID NO: 758450 - DNA, 15 bp, Homo sapiens
gaggttgttcctggg

SEQ ID NO: 758451 - DNA, 15 bp, Homo sapiens
aggttgttcctgggc

SEQ ID NO: 758452 - DNA, 15 bp, Homo sapiens
ggttgttcctgggcc

SEQ ID NO: 758453 - DNA, 15 bp, Homo sapiens
gttgttcctgggcca

SEQ ID NO: 758454 - DNA, 15 bp, Homo sapiens
ttgttcctgggccaa

SEQ ID NO: 758455 - DNA, 15 bp, Homo sapiens
tgttcctgggccaac

SEQ ID NO: 758456 - DNA, 15 bp, Homo sapiens
gttcctgggccaacc

SEQ ID NO: 758457 - DNA, 15 bp, Homo sapiens
ttcctgggccaacct

SEQ ID NO: 758458 - DNA, 15 bp, Homo sapiens
tcctgggccaacctt

SEQ ID NO: 758459 - DNA, 15 bp, Homo sapiens
cctgggccaaccttg

SEQ ID NO: 758460 - DNA, 15 bp, Homo sapiens
ctgggccaaccttgg

SEQ ID NO: 758461 - DNA, 15 bp, Homo sapiens
tgggccaaccttgga

SEQ ID NO: 758462 - DNA, 15 bp, Homo sapiens
gggccaaccttggaa

SEQ ID NO: 758463 - DNA, 15 bp, Homo sapiens
ggccaaccttggaag

SEQ ID NO: 758464 - DNA, 15 bp, Homo sapiens
gccaaccttggaaga

SEQ ID NO: 758465 - DNA, 15 bp, Homo sapiens
ccaaccttggaagaa

SEQ ID NO: 758466 - DNA, 15 bp, Homo sapiens
caaccttggaagaag

SEQ ID NO: 758467 - DNA, 15 bp, Homo sapiens
aaccttggaagaagg

SEQ ID NO: 758468 - DNA, 15 bp, Homo sapiens
accttggaagaaggt

SEQ ID NO: 758469 - DNA, 15 bp, Homo sapiens
ccttggaagaaggta

SEQ ID NO: 758470 - DNA, 15 bp, Homo sapiens
cttggaagaaggtat

SEQ ID NO: 758471 - DNA, 15 bp, Homo sapiens
ttggaagaaggtata

SEQ ID NO: 758472 - DNA, 15 bp, Homo sapiens
tggaagaaggtatat

SEQ ID NO: 758473 - DNA, 15 bp, Homo sapiens
ggaagaaggtatatc

SEQ ID NO: 758474 - DNA, 15 bp, Homo sapiens
gaagaaggtatatct

SEQ ID NO: 758475 - DNA, 15 bp, Homo sapiens
aagaaggtatatctt

SEQ ID NO: 758476 - DNA, 15 bp, Homo sapiens
agaaggtatatctta

SEQ ID NO: 758477 - DNA, 15 bp, Homo sapiens
gaaggtatatcttat

SEQ ID NO: 758478 - DNA, 15 bp, Homo sapiens
aaggtatatcttatg

SEQ ID NO: 758479 - DNA, 15 bp, Homo sapiens
aggtatatcttatgt

SEQ ID NO: 758480 - DNA, 15 bp, Homo sapiens
ggtatatcttatgta

SEQ ID NO: 758481 - DNA, 15 bp, Homo sapiens
gtatatcttatgtaa

SEQ ID NO: 758482 - DNA, 15 bp, Homo sapiens
tatatcttatgtaat

SEQ ID NO: 758483 - DNA, 15 bp, Homo sapiens
atatcttatgtaatt

SEQ ID NO: 758484 - DNA, 15 bp, Homo sapiens
tatcttatgtaattg

SEQ ID NO: 758485 - DNA, 15 bp, Homo sapiens
atcttatgtaattgt

SEQ ID NO: 758486 - DNA, 15 bp, Homo sapiens
tcttatgtaattgtc

SEQ ID NO: 758487 - DNA, 15 bp, Homo sapiens
cttatgtaattgtca

SEQ ID NO: 758488 - DNA, 15 bp, Homo sapiens
ttatgtaattgtcat

SEQ ID NO: 758489 - DNA, 15 bp, Homo sapiens
tatgtaattgtcatt

SEQ ID NO: 758490 - DNA, 15 bp, Homo sapiens
atgtaattgtcattg

SEQ ID NO: 758491 - DNA, 15 bp, Homo sapiens
tgtaattgtcattgt

SEQ ID NO: 758492 - DNA, 15 bp, Homo sapiens
gtaattgtcattgta

SEQ ID NO: 758493 - DNA, 15 bp, Homo sapiens
taattgtcattgtaa

SEQ ID NO: 758494 - DNA, 15 bp, Homo sapiens
aattgtcattgtaac

SEQ ID NO: 758495 - DNA, 15 bp, Homo sapiens
attgtcattgtaacc

SEQ ID NO: 758496 - DNA, 15 bp, Homo sapiens
ttgtcattgtaacca

SEQ ID NO: 758497 - DNA, 15 bp, Homo sapiens
tgtcattgtaaccag

SEQ ID NO: 758498 - DNA, 15 bp, Homo sapiens
gtcattgtaaccaga

SEQ ID NO: 758499 - DNA, 15 bp, Homo sapiens
tcattgtaaccagag

SEQ ID NO: 758500 - DNA, 15 bp, Homo sapiens
cattgtaaccagaga

SEQ ID NO: 758501 - DNA, 15 bp, Homo sapiens
attgtaaccagagaa

SEQ ID NO: 758502 - DNA, 15 bp, Homo sapiens
ttgtaaccagagaac

SEQ ID NO: 758503 - DNA, 15 bp, Homo sapiens
tgtaaccagagaaca

SEQ ID NO: 758504 - DNA, 15 bp, Homo sapiens
gtaaccagagaacat

SEQ ID NO: 758505 - DNA, 15 bp, Homo sapiens
taaccagagaacatt

SEQ ID NO: 758506 - DNA, 15 bp, Homo sapiens
aaccagagaacattt

SEQ ID NO: 758507 - DNA, 15 bp, Homo sapiens
accagagaacatttt

SEQ ID NO: 758508 - DNA, 15 bp, Homo sapiens
ccagagaacattttt

SEQ ID NO: 758509 - DNA, 15 bp, Homo sapiens
cagagaacatttttg

SEQ ID NO: 758510 - DNA, 15 bp, Homo sapiens
agagaacatttttga

SEQ ID NO: 758511 - DNA, 15 bp, Homo sapiens
gagaacatttttgat

SEQ ID NO: 758512 - DNA, 15 bp, Homo sapiens
agaacatttttgata

SEQ ID NO: 758513 - DNA, 15 bp, Homo sapiens
gaacatttttgatac

SEQ ID NO: 758514 - DNA, 15 bp, Homo sapiens
aacatttttgataca

SEQ ID NO: 758515 - DNA, 15 bp, Homo sapiens
acatttttgatacag

SEQ ID NO: 758516 - DNA, 15 bp, Homo sapiens
catttttgatacagt

SEQ ID NO: 758517 - DNA, 15 bp, Homo sapiens
atttttgatacagtt

SEQ ID NO: 758518 - DNA, 15 bp, Homo sapiens
tttttgatacagttt

SEQ ID NO: 758519 - DNA, 15 bp, Homo sapiens
ttttgatacagttta

SEQ ID NO: 758520 - DNA, 15 bp, Homo sapiens
tttgatacagtttag

SEQ ID NO: 758521 - DNA, 15 bp, Homo sapiens
ttgatacagtttagt

SEQ ID NO: 758522 - DNA, 15 bp, Homo sapiens
tgatacagtttagtg

SEQ ID NO: 758523 - DNA, 15 bp, Homo sapiens
gatacagtttagtgt

SEQ ID NO: 758524 - DNA, 15 bp, Homo sapiens
atacagtttagtgtt

SEQ ID NO: 758525 - DNA, 15 bp, Homo sapiens
tacagtttagtgtta

SEQ ID NO: 758526 - DNA, 15 bp, Homo sapiens
acagtttagtgttat

SEQ ID NO: 758527 - DNA, 15 bp, Homo sapiens
cagtttagtgttatt

SEQ ID NO: 758528 - DNA, 15 bp, Homo sapiens
agtttagtgttatta

SEQ ID NO: 758529 - DNA, 15 bp, Homo sapiens
gtttagtgttattat

SEQ ID NO: 758530 - DNA, 15 bp, Homo sapiens
tttagtgttattatc

SEQ ID NO: 758531 - DNA, 15 bp, Homo sapiens
ttagtgttattatct

SEQ ID NO: 758532 - DNA, 15 bp, Homo sapiens
tagtgttattatctt

SEQ ID NO: 758533 - DNA, 15 bp, Homo sapiens
agtgttattatcttt

SEQ ID NO: 758534 - DNA, 15 bp, Homo sapiens
gtgttattatctttt

SEQ ID NO: 758535 - DNA, 15 bp, Homo sapiens
tgttattatcttttt

SEQ ID NO: 758536 - DNA, 15 bp, Homo sapiens
gttattatctttttt

SEQ ID NO: 758537 - DNA, 15 bp, Homo sapiens
ttattatcttttttt

SEQ ID NO: 758538 - DNA, 15 bp, Homo sapiens
tattatctttttttg

SEQ ID NO: 758539 - DNA, 15 bp, Homo sapiens
attatctttttttgt

SEQ ID NO: 758540 - DNA, 15 bp, Homo sapiens
ttatctttttttgta

SEQ ID NO: 758541 - DNA, 15 bp, Homo sapiens
tatctttttttgtaa

SEQ ID NO: 758542 - DNA, 15 bp, Homo sapiens
atctttttttgtaat

SEQ ID NO: 758543 - DNA, 15 bp, Homo sapiens
tctttttttgtaatt

SEQ ID NO: 758544 - DNA, 15 bp, Homo sapiens
ctttttttgtaatta

SEQ ID NO: 758545 - DNA, 15 bp, Homo sapiens
tttttttgtaattat

SEQ ID NO: 758546 - DNA, 15 bp, Homo sapiens
ttttttgtaattatg

SEQ ID NO: 758547 - DNA, 15 bp, Homo sapiens
tttttgtaattatgg

SEQ ID NO: 758548 - DNA, 15 bp, Homo sapiens
ttttgtaattatggg

SEQ ID NO: 758549 - DNA, 15 bp, Homo sapiens
tttgtaattatgggt

SEQ ID NO: 758550 - DNA, 15 bp, Homo sapiens
ttgtaattatgggtg

SEQ ID NO: 758551 - DNA, 15 bp, Homo sapiens
tgtaattatgggtga

SEQ ID NO: 758552 - DNA, 15 bp, Homo sapiens
gtaattatgggtgat

SEQ ID NO: 758553 - DNA, 15 bp, Homo sapiens
taattatgggtgata

SEQ ID NO: 758554 - DNA, 15 bp, Homo sapiens
aattatgggtgatag

SEQ ID NO: 758555 - DNA, 15 bp, Homo sapiens
attatgggtgataga

SEQ ID NO: 758556 - DNA, 15 bp, Homo sapiens
ttatgggtgatagat

SEQ ID NO: 758557 - DNA, 15 bp, Homo sapiens
tatgggtgatagatt

SEQ ID NO: 758558 - DNA, 15 bp, Homo sapiens
atgggtgatagattg

SEQ ID NO: 758559 - DNA, 15 bp, Homo sapiens
tgggtgatagattga

SEQ ID NO: 758560 - DNA, 15 bp, Homo sapiens
gggtgatagattgat

SEQ ID NO: 758561 - DNA, 15 bp, Homo sapiens
ggtgatagattgata

SEQ ID NO: 758562 - DNA, 15 bp, Homo sapiens
gtgatagattgataa

SEQ ID NO: 758563 - DNA, 15 bp, Homo sapiens
tgatagattgataat

SEQ ID NO: 758564 - DNA, 15 bp, Homo sapiens
gatagattgataatt

SEQ ID NO: 758565 - DNA, 15 bp, Homo sapiens
atagattgataattg

SEQ ID NO: 758566 - DNA, 15 bp, Homo sapiens
tagattgataattgc

SEQ ID NO: 758567 - DNA, 15 bp, Homo sapiens
agattgataattgca

SEQ ID NO: 758568 - DNA, 15 bp, Homo sapiens
gattgataattgcat

SEQ ID NO: 758569 - DNA, 15 bp, Homo sapiens
attgataattgcatt

SEQ ID NO: 758570 - DNA, 15 bp, Homo sapiens
ttgataattgcatta

SEQ ID NO: 758571 - DNA, 15 bp, Homo sapiens
tgataattgcattaa

SEQ ID NO: 758572 - DNA, 15 bp, Homo sapiens
gataattgcattaat

SEQ ID NO: 758573 - DNA, 15 bp, Homo sapiens
ataattgcattaata

SEQ ID NO: 758574 - DNA, 15 bp, Homo sapiens
taattgcattaatat

SEQ ID NO: 758575 - DNA, 15 bp, Homo sapiens
aattgcattaatatc

SEQ ID NO: 758576 - DNA, 15 bp, Homo sapiens
attgcattaatatca

SEQ ID NO: 758577 - DNA, 15 bp, Homo sapiens
ttgcattaatatcat

SEQ ID NO: 758578 - DNA, 15 bp, Homo sapiens
tgcattaatatcatt

SEQ ID NO: 758579 - DNA, 15 bp, Homo sapiens
gcattaatatcatta

SEQ ID NO: 758580 - DNA, 15 bp, Homo sapiens
cattaatatcattac

SEQ ID NO: 758581 - DNA, 15 bp, Homo sapiens
attaatatcattaca

SEQ ID NO: 758582 - DNA, 15 bp, Homo sapiens
ttaatatcattacag

SEQ ID NO: 758583 - DNA, 15 bp, Homo sapiens
taatatcattacagg

SEQ ID NO: 758584 - DNA, 15 bp, Homo sapiens
aatatcattacaggg

SEQ ID NO: 758585 - DNA, 15 bp, Homo sapiens
atatcattacagggg

SEQ ID NO: 758586 - DNA, 15 bp, Homo sapiens
tatcattacaggggg

SEQ ID NO: 758587 - DNA, 15 bp, Homo sapiens
atcattacagggggt

SEQ ID NO: 758588 - DNA, 15 bp, Homo sapiens
tcattacagggggta

SEQ ID NO: 758589 - DNA, 15 bp, Homo sapiens
cattacagggggtat

SEQ ID NO: 758590 - DNA, 15 bp, Homo sapiens
attacagggggtata

SEQ ID NO: 758591 - DNA, 15 bp, Homo sapiens
ttacagggggtatat

SEQ ID NO: 758592 - DNA, 15 bp, Homo sapiens
tacagggggtatatt

SEQ ID NO: 758593 - DNA, 15 bp, Homo sapiens
acagggggtatattt

SEQ ID NO: 758594 - DNA, 15 bp, Homo sapiens
cagggggtatattta

SEQ ID NO: 758595 - DNA, 15 bp, Homo sapiens
agggggtatatttaa

SEQ ID NO: 758596 - DNA, 15 bp, Homo sapiens
gggggtatatttaaa

SEQ ID NO: 758597 - DNA, 15 bp, Homo sapiens
ggggtatatttaaaa

SEQ ID NO: 758598 - DNA, 15 bp, Homo sapiens
gggtatatttaaaaa

SEQ ID NO: 758599 - DNA, 15 bp, Homo sapiens
ggtatatttaaaaaa

SEQ ID NO: 758600 - DNA, 15 bp, Homo sapiens
gtatatttaaaaaaa

SEQ ID NO: 758601 - DNA, 15 bp, Homo sapiens
tatatttaaaaaaaa

SEQ ID NO: 758602 - DNA, 15 bp, Homo sapiens
atatttaaaaaaaag

SEQ ID NO: 758603 - DNA, 15 bp, Homo sapiens
tatttaaaaaaaagt

SEQ ID NO: 758604 - DNA, 15 bp, Homo sapiens
atttaaaaaaaagtg

SEQ ID NO: 758605 - DNA, 15 bp, Homo sapiens
tttaaaaaaaagtgg

SEQ ID NO: 758606 - DNA, 15 bp, Homo sapiens
ttaaaaaaaagtggc

SEQ ID NO: 758607 - DNA, 15 bp, Homo sapiens
taaaaaaaagtggct

SEQ ID NO: 758608 - DNA, 15 bp, Homo sapiens
aaaaaaaagtggctg

SEQ ID NO: 758609 - DNA, 15 bp, Homo sapiens
aaaaaaagtggctga

SEQ ID NO: 758610 - DNA, 15 bp, Homo sapiens
aaaaaagtggctgat

SEQ ID NO: 758611 - DNA, 15 bp, Homo sapiens
aaaaagtggctgatt

SEQ ID NO: 758612 - DNA, 15 bp, Homo sapiens
aaaagtggctgattt

SEQ ID NO: 758613 - DNA, 15 bp, Homo sapiens
aaagtggctgatttt

SEQ ID NO: 758614 - DNA, 15 bp, Homo sapiens
aagtggctgattttt

SEQ ID NO: 758615 - DNA, 15 bp, Homo sapiens
agtggctgatttttc

SEQ ID NO: 758616 - DNA, 15 bp, Homo sapiens
gtggctgatttttct

SEQ ID NO: 758617 - DNA, 15 bp, Homo sapiens
tggctgatttttctt

SEQ ID NO: 758618 - DNA, 15 bp, Homo sapiens
ggctgatttttctta

SEQ ID NO: 758619 - DNA, 15 bp, Homo sapiens
gctgatttttcttat

SEQ ID NO: 758620 - DNA, 15 bp, Homo sapiens
ctgatttttcttatt

SEQ ID NO: 758621 - DNA, 15 bp, Homo sapiens
tgatttttcttattc

SEQ ID NO: 758622 - DNA, 15 bp, Homo sapiens
gatttttcttattct

SEQ ID NO: 758623 - DNA, 15 bp, Homo sapiens
atttttcttattctt

SEQ ID NO: 758624 - DNA, 15 bp, Homo sapiens
tttttcttattcttc

SEQ ID NO: 758625 - DNA, 15 bp, Homo sapiens
ttttcttattcttcc

SEQ ID NO: 758626 - DNA, 15 bp, Homo sapiens
tttcttattcttccc

SEQ ID NO: 758627 - DNA, 15 bp, Homo sapiens
ttcttattcttccct

SEQ ID NO: 758628 - DNA, 15 bp, Homo sapiens
tcttattcttccctc

SEQ ID NO: 758629 - DNA, 15 bp, Homo sapiens
cttattcttccctcc

SEQ ID NO: 758630 - DNA, 15 bp, Homo sapiens
ttattcttccctcca

SEQ ID NO: 758631 - DNA, 15 bp, Homo sapiens
tattcttccctccaa

SEQ ID NO: 758632 - DNA, 15 bp, Homo sapiens
attcttccctccaat

SEQ ID NO: 758633 - DNA, 15 bp, Homo sapiens
ttcttccctccaata

SEQ ID NO: 758634 - DNA, 15 bp, Homo sapiens
tcttccctccaatac

SEQ ID NO: 758635 - DNA, 15 bp, Homo sapiens
cttccctccaatacc

SEQ ID NO: 758636 - DNA, 15 bp, Homo sapiens
ttccctccaatacca

SEQ ID NO: 758637 - DNA, 15 bp, Homo sapiens
tccctccaataccat

SEQ ID NO: 758638 - DNA, 15 bp, Homo sapiens
ccctccaataccata

SEQ ID NO: 758639 - DNA, 15 bp, Homo sapiens
cctccaataccatag

SEQ ID NO: 758640 - DNA, 15 bp, Homo sapiens
ctccaataccatagt

SEQ ID NO: 758641 - DNA, 15 bp, Homo sapiens
tccaataccatagta

SEQ ID NO: 758642 - DNA, 15 bp, Homo sapiens
ccaataccatagtaa

SEQ ID NO: 758643 - DNA, 15 bp, Homo sapiens
caataccatagtaat

SEQ ID NO: 758644 - DNA, 15 bp, Homo sapiens
aataccatagtaatg

SEQ ID NO: 758645 - DNA, 15 bp, Homo sapiens
ataccatagtaatgg

SEQ ID NO: 758646 - DNA, 15 bp, Homo sapiens
taccatagtaatggc

SEQ ID NO: 758647 - DNA, 15 bp, Homo sapiens
accatagtaatggca

SEQ ID NO: 758648 - DNA, 15 bp, Homo sapiens
ccatagtaatggcag

SEQ ID NO: 758649 - DNA, 15 bp, Homo sapiens
catagtaatggcagg

SEQ ID NO: 758650 - DNA, 15 bp, Homo sapiens
atagtaatggcagga

SEQ ID NO: 758651 - DNA, 15 bp, Homo sapiens
tagtaatggcaggat

SEQ ID NO: 758652 - DNA, 15 bp, Homo sapiens
agtaatggcaggatc

SEQ ID NO: 758653 - DNA, 15 bp, Homo sapiens
gtaatggcaggatcc

SEQ ID NO: 758654 - DNA, 15 bp, Homo sapiens
taatggcaggatcct

SEQ ID NO: 758655 - DNA, 15 bp, Homo sapiens
aatggcaggatcctt

SEQ ID NO: 758656 - DNA, 15 bp, Homo sapiens
atggcaggatccttt

SEQ ID NO: 758657 - DNA, 15 bp, Homo sapiens
tggcaggatcctttt

SEQ ID NO: 758658 - DNA, 15 bp, Homo sapiens
ggcaggatccttttg

SEQ ID NO: 758659 - DNA, 15 bp, Homo sapiens
gcaggatccttttgt

SEQ ID NO: 758660 - DNA, 15 bp, Homo sapiens
caggatccttttgtt

SEQ ID NO: 758661 - DNA, 15 bp, Homo sapiens
aggatccttttgttg

SEQ ID NO: 758662 - DNA, 15 bp, Homo sapiens
ggatccttttgttgt

SEQ ID NO: 758663 - DNA, 15 bp, Homo sapiens
gatccttttgttgtt

SEQ ID NO: 758664 - DNA, 15 bp, Homo sapiens
atccttttgttgttc

SEQ ID NO: 758665 - DNA, 15 bp, Homo sapiens
tccttttgttgttcc

SEQ ID NO: 758666 - DNA, 15 bp, Homo sapiens
ccttttgttgttcca

SEQ ID NO: 758667 - DNA, 15 bp, Homo sapiens
cttttgttgttccac

SEQ ID NO: 758668 - DNA, 15 bp, Homo sapiens
ttttgttgttccaca

SEQ ID NO: 758669 - DNA, 15 bp, Homo sapiens
tttgttgttccacaa

SEQ ID NO: 758670 - DNA, 15 bp, Homo sapiens
ttgttgttccacaaa

SEQ ID NO: 758671 - DNA, 15 bp, Homo sapiens
tgttgttccacaaag

SEQ ID NO: 758672 - DNA, 15 bp, Homo sapiens
gttgttccacaaaga

SEQ ID NO: 758673 - DNA, 15 bp, Homo sapiens
ttgttccacaaagat

SEQ ID NO: 758674 - DNA, 15 bp, Homo sapiens
tgttccacaaagata

SEQ ID NO: 758675 - DNA, 15 bp, Homo sapiens
gttccacaaagataa

SEQ ID NO: 758676 - DNA, 15 bp, Homo sapiens
ttccacaaagataat

SEQ ID NO: 758677 - DNA, 15 bp, Homo sapiens
tccacaaagataatc

SEQ ID NO: 758678 - DNA, 15 bp, Homo sapiens
ccacaaagataatct

SEQ ID NO: 758679 - DNA, 15 bp, Homo sapiens
cacaaagataatctg

SEQ ID NO: 758680 - DNA, 15 bp, Homo sapiens
acaaagataatctga

SEQ ID NO: 758681 - DNA, 15 bp, Homo sapiens
caaagataatctgat

SEQ ID NO: 758682 - DNA, 15 bp, Homo sapiens
aaagataatctgatg

SEQ ID NO: 758683 - DNA, 15 bp, Homo sapiens
aagataatctgatgt

SEQ ID NO: 758684 - DNA, 15 bp, Homo sapiens
agataatctgatgtc

SEQ ID NO: 758685 - DNA, 15 bp, Homo sapiens
gataatctgatgtct

SEQ ID NO: 758686 - DNA, 15 bp, Homo sapiens
ataatctgatgtcta

SEQ ID NO: 758687 - DNA, 15 bp, Homo sapiens
taatctgatgtctat

SEQ ID NO: 758688 - DNA, 15 bp, Homo sapiens
aatctgatgtctatt

SEQ ID NO: 758689 - DNA, 15 bp, Homo sapiens
atctgatgtctattt

SEQ ID NO: 758690 - DNA, 15 bp, Homo sapiens
tctgatgtctatttt

SEQ ID NO: 758691 - DNA, 15 bp, Homo sapiens
ctgatgtctattttg

SEQ ID NO: 758692 - DNA, 15 bp, Homo sapiens
tgatgtctattttgt

SEQ ID NO: 758693 - DNA, 15 bp, Homo sapiens
gatgtctattttgtc

SEQ ID NO: 758694 - DNA, 15 bp, Homo sapiens
atgtctattttgtct

SEQ ID NO: 758695 - DNA, 15 bp, Homo sapiens
tgtctattttgtcta

SEQ ID NO: 758696 - DNA, 15 bp, Homo sapiens
gtctattttgtctac

SEQ ID NO: 758697 - DNA, 15 bp, Homo sapiens
tctattttgtctaca

SEQ ID NO: 758698 - DNA, 15 bp, Homo sapiens
ctattttgtctacag

SEQ ID NO: 758699 - DNA, 15 bp, Homo sapiens
tattttgtctacaga

SEQ ID NO: 758700 - DNA, 15 bp, Homo sapiens
attttgtctacagac

SEQ ID NO: 758701 - DNA, 15 bp, Homo sapiens
ttttgtctacagaca

SEQ ID NO: 758702 - DNA, 15 bp, Homo sapiens
tttgtctacagacaa

SEQ ID NO: 758703 - DNA, 15 bp, Homo sapiens
ttgtctacagacaaa

SEQ ID NO: 758704 - DNA, 15 bp, Homo sapiens
tgtctacagacaaaa

SEQ ID NO: 758705 - DNA, 15 bp, Homo sapiens
gtctacagacaaaat

SEQ ID NO: 758706 - DNA, 15 bp, Homo sapiens
tctacagacaaaata

SEQ ID NO: 758707 - DNA, 15 bp, Homo sapiens
ctacagacaaaatat

SEQ ID NO: 758708 - DNA, 15 bp, Homo sapiens
tacagacaaaatata

SEQ ID NO: 758709 - DNA, 15 bp, Homo sapiens
acagacaaaatataa

SEQ ID NO: 758710 - DNA, 15 bp, Homo sapiens
cagacaaaatataat

SEQ ID NO: 758711 - DNA, 15 bp, Homo sapiens
agacaaaatataata

SEQ ID NO: 758712 - DNA, 15 bp, Homo sapiens
gacaaaatataataa

SEQ ID NO: 758713 - DNA, 15 bp, Homo sapiens
acaaaatataataaa

SEQ ID NO: 758714 - DNA, 15 bp, Homo sapiens
caaaatataataaaa

SEQ ID NO: 758715 - DNA, 15 bp, Homo sapiens
aaaatataataaaag

SEQ ID NO: 758716 - DNA, 15 bp, Homo sapiens
aaatataataaaagt

SEQ ID NO: 758717 - DNA, 15 bp, Homo sapiens
aatataataaaagta

SEQ ID NO: 758718 - DNA, 15 bp, Homo sapiens
atataataaaagtac

SEQ ID NO: 758719 - DNA, 15 bp, Homo sapiens
tataataaaagtaca

SEQ ID NO: 758720 - DNA, 15 bp, Homo sapiens
ataataaaagtacat

SEQ ID NO: 758721 - DNA, 15 bp, Homo sapiens
taataaaagtacatg

SEQ ID NO: 758722 - DNA, 15 bp, Homo sapiens
aataaaagtacatgg

SEQ ID NO: 758723 - DNA, 15 bp, Homo sapiens
ataaaagtacatggg

SEQ ID NO: 758724 - DNA, 15 bp, Homo sapiens
taaaagtacatggga

SEQ ID NO: 758725 - DNA, 15 bp, Homo sapiens
aaaagtacatgggaa

SEQ ID NO: 758726 - DNA, 15 bp, Homo sapiens
aaagtacatgggaaa

SEQ ID NO: 758727 - DNA, 15 bp, Homo sapiens
aagtacatgggaaag

SEQ ID NO: 758728 - DNA, 15 bp, Homo sapiens
agtacatgggaaagt

SEQ ID NO: 758729 - DNA, 15 bp, Homo sapiens
gtacatgggaaagta

SEQ ID NO: 758730 - DNA, 15 bp, Homo sapiens
tacatgggaaagtac

SEQ ID NO: 758731 - DNA, 15 bp, Homo sapiens
acatgggaaagtaca

SEQ ID NO: 758732 - DNA, 15 bp, Homo sapiens
catgggaaagtacat

SEQ ID NO: 758733 - DNA, 15 bp, Homo sapiens
atgggaaagtacatg

SEQ ID NO: 758734 - DNA, 15 bp, Homo sapiens
tgggaaagtacatgg

SEQ ID NO: 758735 - DNA, 15 bp, Homo sapiens
gggaaagtacatgga

SEQ ID NO: 758736 - DNA, 15 bp, Homo sapiens
ggaaagtacatggac

SEQ ID NO: 758737 - DNA, 15 bp, Homo sapiens
gaaagtacatggaca

SEQ ID NO: 758738 - DNA, 15 bp, Homo sapiens
aaagtacatggacaa

SEQ ID NO: 758739 - DNA, 15 bp, Homo sapiens
aagtacatggacaag

SEQ ID NO: 758740 - DNA, 15 bp, Homo sapiens
agtacatggacaaga

SEQ ID NO: 758741 - DNA, 15 bp, Homo sapiens
gtacatggacaagac

SEQ ID NO: 758742 - DNA, 15 bp, Homo sapiens
tacatggacaagaca

SEQ ID NO: 758743 - DNA, 15 bp, Homo sapiens
acatggacaagacat

SEQ ID NO: 758744 - DNA, 15 bp, Homo sapiens
catggacaagacatt

SEQ ID NO: 758745 - DNA, 15 bp, Homo sapiens
atggacaagacatta

SEQ ID NO: 758746 - DNA, 15 bp, Homo sapiens
tggacaagacattat

SEQ ID NO: 758747 - DNA, 15 bp, Homo sapiens
ggacaagacattatg

SEQ ID NO: 758748 - DNA, 15 bp, Homo sapiens
gacaagacattatgt

SEQ ID NO: 758749 - DNA, 15 bp, Homo sapiens
acaagacattatgtg

SEQ ID NO: 758750 - DNA, 15 bp, Homo sapiens
caagacattatgtgt

SEQ ID NO: 758751 - DNA, 15 bp, Homo sapiens
aagacattatgtgtt

SEQ ID NO: 758752 - DNA, 15 bp, Homo sapiens
agacattatgtgtta

SEQ ID NO: 758753 - DNA, 15 bp, Homo sapiens
gacattatgtgttat

SEQ ID NO: 758754 - DNA, 15 bp, Homo sapiens
acattatgtgttatg

SEQ ID NO: 758755 - DNA, 15 bp, Homo sapiens
cattatgtgttatga

SEQ ID NO: 758756 - DNA, 15 bp, Homo sapiens
attatgtgttatgaa

SEQ ID NO: 758757 - DNA, 15 bp, Homo sapiens
ttatgtgttatgaac

SEQ ID NO: 758758 - DNA, 15 bp, Homo sapiens
tatgtgttatgaaca

SEQ ID NO: 758759 - DNA, 15 bp, Homo sapiens
atgtgttatgaacat

SEQ ID NO: 758760 - DNA, 15 bp, Homo sapiens
tgtgttatgaacata

SEQ ID NO: 758761 - DNA, 15 bp, Homo sapiens
gtgttatgaacatac

SEQ ID NO: 758762 - DNA, 15 bp, Homo sapiens
tgttatgaacatact

SEQ ID NO: 758763 - DNA, 15 bp, Homo sapiens
gttatgaacatactt

SEQ ID NO: 758764 - DNA, 15 bp, Homo sapiens
ttatgaacatacttt

SEQ ID NO: 758765 - DNA, 15 bp, Homo sapiens
tatgaacatactttc

SEQ ID NO: 758766 - DNA, 15 bp, Homo sapiens
atgaacatactttct

SEQ ID NO: 758767 - DNA, 15 bp, Homo sapiens
tgaacatactttctt

SEQ ID NO: 758768 - DNA, 15 bp, Homo sapiens
gaacatactttcttt

SEQ ID NO: 758769 - DNA, 15 bp, Homo sapiens
aacatactttctttt

SEQ ID NO: 758770 - DNA, 15 bp, Homo sapiens
acatactttcttttt

SEQ ID NO: 758771 - DNA, 15 bp, Homo sapiens
catactttcttttta

SEQ ID NO: 758772 - DNA, 15 bp, Homo sapiens
atactttctttttaa

SEQ ID NO: 758773 - DNA, 15 bp, Homo sapiens
tactttctttttaaa

SEQ ID NO: 758774 - DNA, 15 bp, Homo sapiens
actttctttttaaaa

SEQ ID NO: 758775 - DNA, 15 bp, Homo sapiens
ctttctttttaaaat

SEQ ID NO: 758776 - DNA, 15 bp, Homo sapiens
tttctttttaaaatg

SEQ ID NO: 758777 - DNA, 15 bp, Homo sapiens
ttctttttaaaatgt

SEQ ID NO: 758778 - DNA, 15 bp, Homo sapiens
tctttttaaaatgtt

SEQ ID NO: 758779 - DNA, 15 bp, Homo sapiens
ctttttaaaatgttt

SEQ ID NO: 758780 - DNA, 15 bp, Homo sapiens
tttttaaaatgtttt

SEQ ID NO: 758781 - DNA, 15 bp, Homo sapiens
ttttaaaatgtttta

SEQ ID NO: 758782 - DNA, 15 bp, Homo sapiens
tttaaaatgttttat

SEQ ID NO: 758783 - DNA, 15 bp, Homo sapiens
ttaaaatgttttatt

SEQ ID NO: 758784 - DNA, 15 bp, Homo sapiens
taaaatgttttattg

SEQ ID NO: 758785 - DNA, 15 bp, Homo sapiens
aaaatgttttattgg

SEQ ID NO: 758786 - DNA, 15 bp, Homo sapiens
aaatgttttattggc

SEQ ID NO: 758787 - DNA, 15 bp, Homo sapiens
aatgttttattggcc

SEQ ID NO: 758788 - DNA, 15 bp, Homo sapiens
atgttttattggcca

SEQ ID NO: 758789 - DNA, 15 bp, Homo sapiens
tgttttattggccag

SEQ ID NO: 758790 - DNA, 15 bp, Homo sapiens
gttttattggccagg

SEQ ID NO: 758791 - DNA, 15 bp, Homo sapiens
ttttattggccaggc

SEQ ID NO: 758792 - DNA, 15 bp, Homo sapiens
tttattggccaggcg

SEQ ID NO: 758793 - DNA, 15 bp, Homo sapiens
ttattggccaggcgt

SEQ ID NO: 758794 - DNA, 15 bp, Homo sapiens
tattggccaggcgtg

SEQ ID NO: 758795 - DNA, 15 bp, Homo sapiens
attggccaggcgtgg

SEQ ID NO: 758796 - DNA, 15 bp, Homo sapiens
ttggccaggcgtggt

SEQ ID NO: 758797 - DNA, 15 bp, Homo sapiens
tggccaggcgtggtg

SEQ ID NO: 758798 - DNA, 15 bp, Homo sapiens
ggccaggcgtggtgg

SEQ ID NO: 758799 - DNA, 15 bp, Homo sapiens
gccaggcgtggtggc

SEQ ID NO: 758800 - DNA, 15 bp, Homo sapiens
ccaggcgtggtggct

SEQ ID NO: 758801 - DNA, 15 bp, Homo sapiens
caggcgtggtggctc

SEQ ID NO: 758802 - DNA, 15 bp, Homo sapiens
aggcgtggtggctca

SEQ ID NO: 758803 - DNA, 15 bp, Homo sapiens
ggcgtggtggctcac

SEQ ID NO: 758804 - DNA, 15 bp, Homo sapiens
gcgtggtggctcacg

SEQ ID NO: 758805 - DNA, 15 bp, Homo sapiens
cgtggtggctcacgc

SEQ ID NO: 758806 - DNA, 15 bp, Homo sapiens
gtggtggctcacgcc

SEQ ID NO: 758807 - DNA, 15 bp, Homo sapiens
tggtggctcacgcct

SEQ ID NO: 758808 - DNA, 15 bp, Homo sapiens
cgcctgtaatcccaa

SEQ ID NO: 758809 - DNA, 15 bp, Homo sapiens
gcctgtaatcccaac

SEQ ID NO: 758810 - DNA, 15 bp, Homo sapiens
cctgtaatcccaaca

SEQ ID NO: 758811 - DNA, 15 bp, Homo sapiens
ctgtaatcccaacac

SEQ ID NO: 758812 - DNA, 15 bp, Homo sapiens
tgtaatcccaacact

SEQ ID NO: 758813 - DNA, 15 bp, Homo sapiens
gtaatcccaacactt

SEQ ID NO: 758814 - DNA, 15 bp, Homo sapiens
taatcccaacacttt

SEQ ID NO: 758815 - DNA, 15 bp, Homo sapiens
aatcccaacactttg

SEQ ID NO: 758816 - DNA, 15 bp, Homo sapiens
atcccaacactttgg

SEQ ID NO: 758817 - DNA, 15 bp, Homo sapiens
tcccaacactttggg

SEQ ID NO: 758818 - DNA, 15 bp, Homo sapiens
cccaacactttggga

SEQ ID NO: 758819 - DNA, 15 bp, Homo sapiens
ccaacactttgggag

SEQ ID NO: 758820 - DNA, 15 bp, Homo sapiens
caacactttgggagg

SEQ ID NO: 758821 - DNA, 15 bp, Homo sapiens
aacactttgggaggc

SEQ ID NO: 758822 - DNA, 15 bp, Homo sapiens
acactttgggaggct

SEQ ID NO: 758823 - DNA, 15 bp, Homo sapiens
tgggaggctgaggcg

SEQ ID NO: 758824 - DNA, 15 bp, Homo sapiens
gggaggctgaggcgg

SEQ ID NO: 758825 - DNA, 15 bp, Homo sapiens
ggaggctgaggcgga

SEQ ID NO: 758826 - DNA, 15 bp, Homo sapiens
gaggctgaggcggac

SEQ ID NO: 758827 - DNA, 15 bp, Homo sapiens
aggctgaggcggacg

SEQ ID NO: 758828 - DNA, 15 bp, Homo sapiens
ggctgaggcggacgg

SEQ ID NO: 758829 - DNA, 15 bp, Homo sapiens
gctgaggcggacgga

SEQ ID NO: 758830 - DNA, 15 bp, Homo sapiens
ctgaggcggacggat

SEQ ID NO: 758831 - DNA, 15 bp, Homo sapiens
tgaggcggacggatc

SEQ ID NO: 758832 - DNA, 15 bp, Homo sapiens
gaggcggacggatca

SEQ ID NO: 758833 - DNA, 15 bp, Homo sapiens
aggcggacggatcac

SEQ ID NO: 758834 - DNA, 15 bp, Homo sapiens
ggcggacggatcacg

SEQ ID NO: 758835 - DNA, 15 bp, Homo sapiens
gcggacggatcacga

SEQ ID NO: 758836 - DNA, 15 bp, Homo sapiens
cggacggatcacgag

SEQ ID NO: 758837 - DNA, 15 bp, Homo sapiens
ggacggatcacgagg

SEQ ID NO: 758838 - DNA, 15 bp, Homo sapiens
gacggatcacgaggt

SEQ ID NO: 758839 - DNA, 15 bp, Homo sapiens
acggatcacgaggtc

SEQ ID NO: 758840 - DNA, 15 bp, Homo sapiens
cggatcacgaggtca

SEQ ID NO: 758841 - DNA, 15 bp, Homo sapiens
ggatcacgaggtcaa

SEQ ID NO: 758842 - DNA, 15 bp, Homo sapiens
gatcacgaggtcaag

SEQ ID NO: 758843 - DNA, 15 bp, Homo sapiens
atcacgaggtcaaga

SEQ ID NO: 758844 - DNA, 15 bp, Homo sapiens
tcacgaggtcaagag

SEQ ID NO: 758845 - DNA, 15 bp, Homo sapiens
cacgaggtcaagaga

SEQ ID NO: 758846 - DNA, 15 bp, Homo sapiens
acgaggtcaagagat

SEQ ID NO: 758847 - DNA, 15 bp, Homo sapiens
cgaggtcaagagatc

SEQ ID NO: 758848 - DNA, 15 bp, Homo sapiens
gaggtcaagagatca

SEQ ID NO: 758849 - DNA, 15 bp, Homo sapiens
aggtcaagagatcaa

SEQ ID NO: 758850 - DNA, 15 bp, Homo sapiens
ggtcaagagatcaag

SEQ ID NO: 758851 - DNA, 15 bp, Homo sapiens
gtcaagagatcaaga

SEQ ID NO: 758852 - DNA, 15 bp, Homo sapiens
tcaagagatcaagac

SEQ ID NO: 758853 - DNA, 15 bp, Homo sapiens
caagagatcaagacc

SEQ ID NO: 758854 - DNA, 15 bp, Homo sapiens
aagagatcaagacca

SEQ ID NO: 758855 - DNA, 15 bp, Homo sapiens
agagatcaagaccat

SEQ ID NO: 758856 - DNA, 15 bp, Homo sapiens
gagatcaagaccatc

SEQ ID NO: 758857 - DNA, 15 bp, Homo sapiens
agatcaagaccatcc

SEQ ID NO: 758858 - DNA, 15 bp, Homo sapiens
gatcaagaccatcct

SEQ ID NO: 758859 - DNA, 15 bp, Homo sapiens
atcaagaccatcctg

SEQ ID NO: 758860 - DNA, 15 bp, Homo sapiens
tcaagaccatcctgg

SEQ ID NO: 758861 - DNA, 15 bp, Homo sapiens
caagaccatcctggc

SEQ ID NO: 758862 - DNA, 15 bp, Homo sapiens
aagaccatcctggcc

SEQ ID NO: 758863 - DNA, 15 bp, Homo sapiens
catcctggccaacaa

SEQ ID NO: 758864 - DNA, 15 bp, Homo sapiens
atcctggccaacaat

SEQ ID NO: 758865 - DNA, 15 bp, Homo sapiens
tcctggccaacaatg

SEQ ID NO: 758866 - DNA, 15 bp, Homo sapiens
cctggccaacaatgg

SEQ ID NO: 758867 - DNA, 15 bp, Homo sapiens
ctggccaacaatggt

SEQ ID NO: 758868 - DNA, 15 bp, Homo sapiens
tggccaacaatggtg

SEQ ID NO: 758869 - DNA, 15 bp, Homo sapiens
ggccaacaatggtga

SEQ ID NO: 758870 - DNA, 15 bp, Homo sapiens
gccaacaatggtgaa

SEQ ID NO: 758871 - DNA, 15 bp, Homo sapiens
ccaacaatggtgaaa

SEQ ID NO: 758872 - DNA, 15 bp, Homo sapiens
caacaatggtgaaac

SEQ ID NO: 758873 - DNA, 15 bp, Homo sapiens
aacaatggtgaaacc

SEQ ID NO: 758874 - DNA, 15 bp, Homo sapiens
acaatggtgaaaccc

SEQ ID NO: 758875 - DNA, 15 bp, Homo sapiens
caatggtgaaacccc

SEQ ID NO: 758876 - DNA, 15 bp, Homo sapiens
aatggtgaaacccca

SEQ ID NO: 758877 - DNA, 15 bp, Homo sapiens
atggtgaaaccccat

SEQ ID NO: 758878 - DNA, 15 bp, Homo sapiens
tggtgaaaccccatc

SEQ ID NO: 758879 - DNA, 15 bp, Homo sapiens
ggtgaaaccccatct

SEQ ID NO: 758880 - DNA, 15 bp, Homo sapiens
aaatacaaaaaaatg

SEQ ID NO: 758881 - DNA, 15 bp, Homo sapiens
aatacaaaaaaatgt

SEQ ID NO: 758882 - DNA, 15 bp, Homo sapiens
atacaaaaaaatgta

SEQ ID NO: 758883 - DNA, 15 bp, Homo sapiens
tacaaaaaaatgtag

SEQ ID NO: 758884 - DNA, 15 bp, Homo sapiens
acaaaaaaatgtagc

SEQ ID NO: 758885 - DNA, 15 bp, Homo sapiens
caaaaaaatgtagct

SEQ ID NO: 758886 - DNA, 15 bp, Homo sapiens
aaaaaaatgtagctg

SEQ ID NO: 758887 - DNA, 15 bp, Homo sapiens
aaaaaatgtagctgg

SEQ ID NO: 758888 - DNA, 15 bp, Homo sapiens
aaaaatgtagctggg

SEQ ID NO: 758889 - DNA, 15 bp, Homo sapiens
aaaatgtagctgggc

SEQ ID NO: 758890 - DNA, 15 bp, Homo sapiens
aaatgtagctgggca

SEQ ID NO: 758891 - DNA, 15 bp, Homo sapiens
aatgtagctgggcat

SEQ ID NO: 758892 - DNA, 15 bp, Homo sapiens
atgtagctgggcatg

SEQ ID NO: 758893 - DNA, 15 bp, Homo sapiens
tgtagctgggcatgg

SEQ ID NO: 758894 - DNA, 15 bp, Homo sapiens
gtagctgggcatggt

SEQ ID NO: 758895 - DNA, 15 bp, Homo sapiens
tgggcatggtggtgc

SEQ ID NO: 758896 - DNA, 15 bp, Homo sapiens
gggcatggtggtgca

SEQ ID NO: 758897 - DNA, 15 bp, Homo sapiens
ggcatggtggtgcat

SEQ ID NO: 758898 - DNA, 15 bp, Homo sapiens
gcatggtggtgcatg

SEQ ID NO: 758899 - DNA, 15 bp, Homo sapiens
catggtggtgcatgc

SEQ ID NO: 758900 - DNA, 15 bp, Homo sapiens
atggtggtgcatgcc

SEQ ID NO: 758901 - DNA, 15 bp, Homo sapiens
ggtggtgcatgccta

SEQ ID NO: 758902 - DNA, 15 bp, Homo sapiens
gtggtgcatgcctat

SEQ ID NO: 758903 - DNA, 15 bp, Homo sapiens
tggtgcatgcctata

SEQ ID NO: 758904 - DNA, 15 bp, Homo sapiens
ggtgcatgcctatag

SEQ ID NO: 758905 - DNA, 15 bp, Homo sapiens
gtgcatgcctatagt

SEQ ID NO: 758906 - DNA, 15 bp, Homo sapiens
tgcatgcctatagtc

SEQ ID NO: 758907 - DNA, 15 bp, Homo sapiens
gcatgcctatagtcc

SEQ ID NO: 758908 - DNA, 15 bp, Homo sapiens
catgcctatagtccc

SEQ ID NO: 758909 - DNA, 15 bp, Homo sapiens
atgcctatagtccca

SEQ ID NO: 758910 - DNA, 15 bp, Homo sapiens
tgcctatagtcccag

SEQ ID NO: 758911 - DNA, 15 bp, Homo sapiens
gcctatagtcccagc

SEQ ID NO: 758912 - DNA, 15 bp, Homo sapiens
cctatagtcccagct

SEQ ID NO: 758913 - DNA, 15 bp, Homo sapiens
ctatagtcccagcta

SEQ ID NO: 758914 - DNA, 15 bp, Homo sapiens
tatagtcccagctac

SEQ ID NO: 758915 - DNA, 15 bp, Homo sapiens
atagtcccagctact

SEQ ID NO: 758916 - DNA, 15 bp, Homo sapiens
agtcccagctactcg

SEQ ID NO: 758917 - DNA, 15 bp, Homo sapiens
gtcccagctactcgg

SEQ ID NO: 758918 - DNA, 15 bp, Homo sapiens
gaggcaggagaattg

SEQ ID NO: 758919 - DNA, 15 bp, Homo sapiens
aggcaggagaattgc

SEQ ID NO: 758920 - DNA, 15 bp, Homo sapiens
ggcaggagaattgct

SEQ ID NO: 758921 - DNA, 15 bp, Homo sapiens
gcaggagaattgctt

SEQ ID NO: 758922 - DNA, 15 bp, Homo sapiens
caggagaattgcttg

SEQ ID NO: 758923 - DNA, 15 bp, Homo sapiens
aggagaattgcttga

SEQ ID NO: 758924 - DNA, 15 bp, Homo sapiens
ggagaattgcttgaa

SEQ ID NO: 758925 - DNA, 15 bp, Homo sapiens
gagaattgcttgaac

SEQ ID NO: 758926 - DNA, 15 bp, Homo sapiens
agaattgcttgaacc

SEQ ID NO: 758927 - DNA, 15 bp, Homo sapiens
gaattgcttgaacct

SEQ ID NO: 758928 - DNA, 15 bp, Homo sapiens
aattgcttgaacctg

SEQ ID NO: 758929 - DNA, 15 bp, Homo sapiens
attgcttgaacctgg

SEQ ID NO: 758930 - DNA, 15 bp, Homo sapiens
ttgcttgaacctggg

SEQ ID NO: 758931 - DNA, 15 bp, Homo sapiens
tgcttgaacctggga

SEQ ID NO: 758932 - DNA, 15 bp, Homo sapiens
gcttgaacctgggat

SEQ ID NO: 758933 - DNA, 15 bp, Homo sapiens
cttgaacctgggatg

SEQ ID NO: 758934 - DNA, 15 bp, Homo sapiens
ttgaacctgggatgt

SEQ ID NO: 758935 - DNA, 15 bp, Homo sapiens
tgaacctgggatgtg

SEQ ID NO: 758936 - DNA, 15 bp, Homo sapiens
gaacctgggatgtgg

SEQ ID NO: 758937 - DNA, 15 bp, Homo sapiens
aacctgggatgtgga

SEQ ID NO: 758938 - DNA, 15 bp, Homo sapiens
acctgggatgtggag

SEQ ID NO: 758939 - DNA, 15 bp, Homo sapiens
cctgggatgtggagg

SEQ ID NO: 758940 - DNA, 15 bp, Homo sapiens
ctgggatgtggaggt

SEQ ID NO: 758941 - DNA, 15 bp, Homo sapiens
tgggatgtggaggtt

SEQ ID NO: 758942 - DNA, 15 bp, Homo sapiens
gggatgtggaggttg

SEQ ID NO: 758943 - DNA, 15 bp, Homo sapiens
ggatgtggaggttgc

SEQ ID NO: 758944 - DNA, 15 bp, Homo sapiens
gatgtggaggttgca

SEQ ID NO: 758945 - DNA, 15 bp, Homo sapiens
atgtggaggttgcag

SEQ ID NO: 758946 - DNA, 15 bp, Homo sapiens
tgtggaggttgcagt

SEQ ID NO: 758947 - DNA, 15 bp, Homo sapiens
gtggaggttgcagtg

SEQ ID NO: 758948 - DNA, 15 bp, Homo sapiens
tggaggttgcagtga

SEQ ID NO: 758949 - DNA, 15 bp, Homo sapiens
ggaggttgcagtgag

SEQ ID NO: 758950 - DNA, 15 bp, Homo sapiens
tgcagtgagccgagg

SEQ ID NO: 758951 - DNA, 15 bp, Homo sapiens
gcagtgagccgaggt

SEQ ID NO: 758952 - DNA, 15 bp, Homo sapiens
cagtgagccgaggtc

SEQ ID NO: 758953 - DNA, 15 bp, Homo sapiens
agtgagccgaggtcg

SEQ ID NO: 758954 - DNA, 15 bp, Homo sapiens
gtgagccgaggtcgc

SEQ ID NO: 758955 - DNA, 15 bp, Homo sapiens
tgagccgaggtcgcg

SEQ ID NO: 758956 - DNA, 15 bp, Homo sapiens
gagccgaggtcgcgc

SEQ ID NO: 758957 - DNA, 15 bp, Homo sapiens
agccgaggtcgcgcc

SEQ ID NO: 758958 - DNA, 15 bp, Homo sapiens
gccgaggtcgcgcca

SEQ ID NO: 758959 - DNA, 15 bp, Homo sapiens
ccgaggtcgcgccac

SEQ ID NO: 758960 - DNA, 15 bp, Homo sapiens
cgaggtcgcgccact

SEQ ID NO: 758961 - DNA, 15 bp, Homo sapiens
gaggtcgcgccactg

SEQ ID NO: 758962 - DNA, 15 bp, Homo sapiens
aggtcgcgccactgt

SEQ ID NO: 758963 - DNA, 15 bp, Homo sapiens
ggtcgcgccactgta

SEQ ID NO: 758964 - DNA, 15 bp, Homo sapiens
gtcgcgccactgtac

SEQ ID NO: 758965 - DNA, 15 bp, Homo sapiens
tcgcgccactgtact

SEQ ID NO: 758966 - DNA, 15 bp, Homo sapiens
cgcgccactgtactc

SEQ ID NO: 758967 - DNA, 15 bp, Homo sapiens
gcgccactgtactcc

SEQ ID NO: 758968 - DNA, 15 bp, Homo sapiens
cgccactgtactcca

SEQ ID NO: 758969 - DNA, 15 bp, Homo sapiens
gccactgtactccag

SEQ ID NO: 758970 - DNA, 15 bp, Homo sapiens
ccactgtactccagc

SEQ ID NO: 758971 - DNA, 15 bp, Homo sapiens
ctgtactccagcctg

SEQ ID NO: 758972 - DNA, 15 bp, Homo sapiens
tgtactccagcctgg

SEQ ID NO: 758973 - DNA, 15 bp, Homo sapiens
gtactccagcctggg

SEQ ID NO: 758974 - DNA, 15 bp, Homo sapiens
tactccagcctgggc

SEQ ID NO: 758975 - DNA, 15 bp, Homo sapiens
ccagcctgggcgaca

SEQ ID NO: 758976 - DNA, 15 bp, Homo sapiens
cagcctgggcgacag

SEQ ID NO: 758977 - DNA, 15 bp, Homo sapiens
agcctgggcgacaga

SEQ ID NO: 758978 - DNA, 15 bp, Homo sapiens
gcctgggcgacagag

SEQ ID NO: 758979 - DNA, 15 bp, Homo sapiens
cctgggcgacagagc

SEQ ID NO: 758980 - DNA, 15 bp, Homo sapiens
ctgggcgacagagca

SEQ ID NO: 758981 - DNA, 15 bp, Homo sapiens
tgggcgacagagcaa

SEQ ID NO: 758982 - DNA, 15 bp, Homo sapiens
gggcgacagagcaag

SEQ ID NO: 758983 - DNA, 15 bp, Homo sapiens
ggcgacagagcaaga

SEQ ID NO: 758984 - DNA, 15 bp, Homo sapiens
gcgacagagcaagac

SEQ ID NO: 758985 - DNA, 15 bp, Homo sapiens
cgacagagcaagact

SEQ ID NO: 758986 - DNA, 15 bp, Homo sapiens
cagagcaagactctg

SEQ ID NO: 758987 - DNA, 15 bp, Homo sapiens
agagcaagactctgt

SEQ ID NO: 758988 - DNA, 15 bp, Homo sapiens
gagcaagactctgtc

SEQ ID NO: 758989 - DNA, 15 bp, Homo sapiens
agcaagactctgtct

SEQ ID NO: 758990 - DNA, 15 bp, Homo sapiens
gcaagactctgtctc

SEQ ID NO: 758991 - DNA, 15 bp, Homo sapiens
caagactctgtctca

SEQ ID NO: 758992 - DNA, 15 bp, Homo sapiens
aagactctgtctcaa

SEQ ID NO: 758993 - DNA, 15 bp, Homo sapiens
gactctgtctcaaat

SEQ ID NO: 758994 - DNA, 15 bp, Homo sapiens
actctgtctcaaata

SEQ ID NO: 758995 - DNA, 15 bp, Homo sapiens
ctctgtctcaaataa

SEQ ID NO: 758996 - DNA, 15 bp, Homo sapiens
tctgtctcaaataaa

SEQ ID NO: 758997 - DNA, 15 bp, Homo sapiens
ctgtctcaaataaag

SEQ ID NO: 758998 - DNA, 15 bp, Homo sapiens
tgtctcaaataaagt

SEQ ID NO: 758999 - DNA, 15 bp, Homo sapiens
gtctcaaataaagta

SEQ ID NO: 759000 - DNA, 15 bp, Homo sapiens
tctcaaataaagtaa

SEQ ID NO: 759001 - DNA, 15 bp, Homo sapiens
ctcaaataaagtaaa

SEQ ID NO: 759002 - DNA, 15 bp, Homo sapiens
tcaaataaagtaaaa

SEQ ID NO: 759003 - DNA, 15 bp, Homo sapiens
caaataaagtaaaat

SEQ ID NO: 759004 - DNA, 15 bp, Homo sapiens
aaataaagtaaaata

SEQ ID NO: 759005 - DNA, 15 bp, Homo sapiens
aataaagtaaaataa

SEQ ID NO: 759006 - DNA, 15 bp, Homo sapiens
ataaagtaaaataaa

SEQ ID NO: 759007 - DNA, 15 bp, Homo sapiens
taaagtaaaataaaa

SEQ ID NO: 759008 - DNA, 15 bp, Homo sapiens
aaagtaaaataaaat

SEQ ID NO: 759009 - DNA, 15 bp, Homo sapiens
aagtaaaataaaata

SEQ ID NO: 759010 - DNA, 15 bp, Homo sapiens
agtaaaataaaataa

SEQ ID NO: 759011 - DNA, 15 bp, Homo sapiens
gtaaaataaaataaa

SEQ ID NO: 759012 - DNA, 15 bp, Homo sapiens
taaaataaaataaaa

SEQ ID NO: 759013 - DNA, 15 bp, Homo sapiens
aaaataaaataaaat

SEQ ID NO: 759014 - DNA, 15 bp, Homo sapiens
aaataaaataaaata

SEQ ID NO: 759015 - DNA, 15 bp, Homo sapiens
aataaaataaaatac

SEQ ID NO: 759016 - DNA, 15 bp, Homo sapiens
ataaaataaaatact

SEQ ID NO: 759017 - DNA, 15 bp, Homo sapiens
taaaataaaatactt

SEQ ID NO: 759018 - DNA, 15 bp, Homo sapiens
aaaataaaatacttt

SEQ ID NO: 759019 - DNA, 15 bp, Homo sapiens
aaataaaatacttta

SEQ ID NO: 759020 - DNA, 15 bp, Homo sapiens
aataaaatactttat

SEQ ID NO: 759021 - DNA, 15 bp, Homo sapiens
ataaaatactttatt

SEQ ID NO: 759022 - DNA, 15 bp, Homo sapiens
taaaatactttattt

SEQ ID NO: 759023 - DNA, 15 bp, Homo sapiens
aaaatactttattta

SEQ ID NO: 759024 - DNA, 15 bp, Homo sapiens
aaatactttatttat

SEQ ID NO: 759025 - DNA, 15 bp, Homo sapiens
aatactttatttatt

SEQ ID NO: 759026 - DNA, 15 bp, Homo sapiens
atactttatttattt

SEQ ID NO: 759027 - DNA, 15 bp, Homo sapiens
tactttatttatttt

SEQ ID NO: 759028 - DNA, 15 bp, Homo sapiens
actttatttatttta

SEQ ID NO: 759029 - DNA, 15 bp, Homo sapiens
ctttatttattttat

SEQ ID NO: 759030 - DNA, 15 bp, Homo sapiens
tttatttattttata

SEQ ID NO: 759031 - DNA, 15 bp, Homo sapiens
ttatttattttatat

SEQ ID NO: 759032 - DNA, 15 bp, Homo sapiens
tatttattttatata

SEQ ID NO: 759033 - DNA, 15 bp, Homo sapiens
atttattttatatat

SEQ ID NO: 759034 - DNA, 15 bp, Homo sapiens
tttattttatatatt

SEQ ID NO: 759035 - DNA, 15 bp, Homo sapiens
ttattttatatattt

SEQ ID NO: 759036 - DNA, 15 bp, Homo sapiens
tattttatatatttt

SEQ ID NO: 759037 - DNA, 15 bp, Homo sapiens
attttatatattttt

SEQ ID NO: 759038 - DNA, 15 bp, Homo sapiens
tttatatatttttta

SEQ ID NO: 759039 - DNA, 15 bp, Homo sapiens
ttatatattttttag

SEQ ID NO: 759040 - DNA, 15 bp, Homo sapiens
tatatattttttaga

SEQ ID NO: 759041 - DNA, 15 bp, Homo sapiens
atatattttttagag

SEQ ID NO: 759042 - DNA, 15 bp, Homo sapiens
tatattttttagaga

SEQ ID NO: 759043 - DNA, 15 bp, Homo sapiens
atattttttagagac

SEQ ID NO: 759044 - DNA, 15 bp, Homo sapiens
tattttttagagaca

SEQ ID NO: 759045 - DNA, 15 bp, Homo sapiens
attttttagagacag

SEQ ID NO: 759046 - DNA, 15 bp, Homo sapiens
ttttttagagacagg

SEQ ID NO: 759047 - DNA, 15 bp, Homo sapiens
tttttagagacaggt

SEQ ID NO: 759048 - DNA, 15 bp, Homo sapiens
ttttagagacaggtc

SEQ ID NO: 759049 - DNA, 15 bp, Homo sapiens
tttagagacaggtct

SEQ ID NO: 759050 - DNA, 15 bp, Homo sapiens
ttagagacaggtctc

SEQ ID NO: 759051 - DNA, 15 bp, Homo sapiens
tagagacaggtctct

SEQ ID NO: 759052 - DNA, 15 bp, Homo sapiens
agagacaggtctctc

SEQ ID NO: 759053 - DNA, 15 bp, Homo sapiens
gagacaggtctctct

SEQ ID NO: 759054 - DNA, 15 bp, Homo sapiens
agacaggtctctctg

SEQ ID NO: 759055 - DNA, 15 bp, Homo sapiens
gacaggtctctctgt

SEQ ID NO: 759056 - DNA, 15 bp, Homo sapiens
acaggtctctctgtg

SEQ ID NO: 759057 - DNA, 15 bp, Homo sapiens
caggtctctctgtgc

SEQ ID NO: 759058 - DNA, 15 bp, Homo sapiens
aggtctctctgtgct

SEQ ID NO: 759059 - DNA, 15 bp, Homo sapiens
ggtctctctgtgctg

SEQ ID NO: 759060 - DNA, 15 bp, Homo sapiens
gtctctctgtgctgt

SEQ ID NO: 759061 - DNA, 15 bp, Homo sapiens
tctctctgtgctgtc

SEQ ID NO: 759062 - DNA, 15 bp, Homo sapiens
ctctctgtgctgtcc

SEQ ID NO: 759063 - DNA, 15 bp, Homo sapiens
tctctgtgctgtcca

SEQ ID NO: 759064 - DNA, 15 bp, Homo sapiens
ctctgtgctgtccag

SEQ ID NO: 759065 - DNA, 15 bp, Homo sapiens
tctgtgctgtccagg

SEQ ID NO: 759066 - DNA, 15 bp, Homo sapiens
ctgtgctgtccaggt

SEQ ID NO: 759067 - DNA, 15 bp, Homo sapiens
tgtgctgtccaggtt

SEQ ID NO: 759068 - DNA, 15 bp, Homo sapiens
gtgctgtccaggttg

SEQ ID NO: 759069 - DNA, 15 bp, Homo sapiens
tgctgtccaggttgg

SEQ ID NO: 759070 - DNA, 15 bp, Homo sapiens
gctgtccaggttggt

SEQ ID NO: 759071 - DNA, 15 bp, Homo sapiens
ctgtccaggttggtc

SEQ ID NO: 759072 - DNA, 15 bp, Homo sapiens
tgtccaggttggtct

SEQ ID NO: 759073 - DNA, 15 bp, Homo sapiens
gtccaggttggtctt

SEQ ID NO: 759074 - DNA, 15 bp, Homo sapiens
tccaggttggtcttg

SEQ ID NO: 759075 - DNA, 15 bp, Homo sapiens
ccaggttggtcttga

SEQ ID NO: 759076 - DNA, 15 bp, Homo sapiens
caggttggtcttgat

SEQ ID NO: 759077 - DNA, 15 bp, Homo sapiens
aggttggtcttgatc

SEQ ID NO: 759078 - DNA, 15 bp, Homo sapiens
ggttggtcttgatct

SEQ ID NO: 759079 - DNA, 15 bp, Homo sapiens
gttggtcttgatctc

SEQ ID NO: 759080 - DNA, 15 bp, Homo sapiens
ttggtcttgatctcc

SEQ ID NO: 759081 - DNA, 15 bp, Homo sapiens
tggtcttgatctcct

SEQ ID NO: 759082 - DNA, 15 bp, Homo sapiens
ggtcttgatctccta

SEQ ID NO: 759083 - DNA, 15 bp, Homo sapiens
gtcttgatctcctag

SEQ ID NO: 759084 - DNA, 15 bp, Homo sapiens
tcttgatctcctagg

SEQ ID NO: 759085 - DNA, 15 bp, Homo sapiens
cttgatctcctaggc

SEQ ID NO: 759086 - DNA, 15 bp, Homo sapiens
ttgatctcctaggct

SEQ ID NO: 759087 - DNA, 15 bp, Homo sapiens
tgatctcctaggctt

SEQ ID NO: 759088 - DNA, 15 bp, Homo sapiens
gatctcctaggctta

SEQ ID NO: 759089 - DNA, 15 bp, Homo sapiens
atctcctaggcttaa

SEQ ID NO: 759090 - DNA, 15 bp, Homo sapiens
tctcctaggcttaaa

SEQ ID NO: 759091 - DNA, 15 bp, Homo sapiens
ctcctaggcttaaat

SEQ ID NO: 759092 - DNA, 15 bp, Homo sapiens
tcctaggcttaaatg

SEQ ID NO: 759093 - DNA, 15 bp, Homo sapiens
cctaggcttaaatga

SEQ ID NO: 759094 - DNA, 15 bp, Homo sapiens
ctaggcttaaatgat

SEQ ID NO: 759095 - DNA, 15 bp, Homo sapiens
taggcttaaatgatc

SEQ ID NO: 759096 - DNA, 15 bp, Homo sapiens
aggcttaaatgatcc

SEQ ID NO: 759097 - DNA, 15 bp, Homo sapiens
ggcttaaatgatcct

SEQ ID NO: 759098 - DNA, 15 bp, Homo sapiens
gcttaaatgatcctc

SEQ ID NO: 759099 - DNA, 15 bp, Homo sapiens
cttaaatgatcctcc

SEQ ID NO: 759100 - DNA, 15 bp, Homo sapiens
ttaaatgatcctcct

SEQ ID NO: 759101 - DNA, 15 bp, Homo sapiens
taaatgatcctccta

SEQ ID NO: 759102 - DNA, 15 bp, Homo sapiens
aaatgatcctcctac

SEQ ID NO: 759103 - DNA, 15 bp, Homo sapiens
aatgatcctcctacc

SEQ ID NO: 759104 - DNA, 15 bp, Homo sapiens
atgatcctcctacct

SEQ ID NO: 759105 - DNA, 15 bp, Homo sapiens
tgatcctcctacctc

SEQ ID NO: 759106 - DNA, 15 bp, Homo sapiens
gatcctcctacctca

SEQ ID NO: 759107 - DNA, 15 bp, Homo sapiens
atcctcctacctcag

SEQ ID NO: 759108 - DNA, 15 bp, Homo sapiens
tcctcctacctcagc

SEQ ID NO: 759109 - DNA, 15 bp, Homo sapiens
cctcctacctcagcc

SEQ ID NO: 759110 - DNA, 15 bp, Homo sapiens
ctcctacctcagcct

SEQ ID NO: 759111 - DNA, 15 bp, Homo sapiens
tcctacctcagcctc

SEQ ID NO: 759112 - DNA, 15 bp, Homo sapiens
cctacctcagcctct

SEQ ID NO: 759113 - DNA, 15 bp, Homo sapiens
ctacctcagcctctc

SEQ ID NO: 759114 - DNA, 15 bp, Homo sapiens
tacctcagcctctcg

SEQ ID NO: 759115 - DNA, 15 bp, Homo sapiens
acctcagcctctcga

SEQ ID NO: 759116 - DNA, 15 bp, Homo sapiens
cctcagcctctcgag

SEQ ID NO: 759117 - DNA, 15 bp, Homo sapiens
ctcagcctctcgagt

SEQ ID NO: 759118 - DNA, 15 bp, Homo sapiens
tcagcctctcgagta

SEQ ID NO: 759119 - DNA, 15 bp, Homo sapiens
cagcctctcgagtag

SEQ ID NO: 759120 - DNA, 15 bp, Homo sapiens
agcctctcgagtagc

SEQ ID NO: 759121 - DNA, 15 bp, Homo sapiens
gcctctcgagtagct

SEQ ID NO: 759122 - DNA, 15 bp, Homo sapiens
cctctcgagtagctg

SEQ ID NO: 759123 - DNA, 15 bp, Homo sapiens
ctctcgagtagctga

SEQ ID NO: 759124 - DNA, 15 bp, Homo sapiens
tctcgagtagctgag

SEQ ID NO: 759125 - DNA, 15 bp, Homo sapiens
ctcgagtagctgaga

SEQ ID NO: 759126 - DNA, 15 bp, Homo sapiens
tcgagtagctgagac

SEQ ID NO: 759127 - DNA, 15 bp, Homo sapiens
cgagtagctgagact

SEQ ID NO: 759128 - DNA, 15 bp, Homo sapiens
gagtagctgagactg

SEQ ID NO: 759129 - DNA, 15 bp, Homo sapiens
agtagctgagactgt

SEQ ID NO: 759130 - DNA, 15 bp, Homo sapiens
gtagctgagactgtg

SEQ ID NO: 759131 - DNA, 15 bp, Homo sapiens
tagctgagactgtga

SEQ ID NO: 759132 - DNA, 15 bp, Homo sapiens
agctgagactgtgag

SEQ ID NO: 759133 - DNA, 15 bp, Homo sapiens
gctgagactgtgaga

SEQ ID NO: 759134 - DNA, 15 bp, Homo sapiens
ctgagactgtgagaa

SEQ ID NO: 759135 - DNA, 15 bp, Homo sapiens
tgagactgtgagaat

SEQ ID NO: 759136 - DNA, 15 bp, Homo sapiens
gagactgtgagaatg

SEQ ID NO: 759137 - DNA, 15 bp, Homo sapiens
agactgtgagaatgc

SEQ ID NO: 759138 - DNA, 15 bp, Homo sapiens
gactgtgagaatgca

SEQ ID NO: 759139 - DNA, 15 bp, Homo sapiens
actgtgagaatgcaa

SEQ ID NO: 759140 - DNA, 15 bp, Homo sapiens
ctgtgagaatgcaac

SEQ ID NO: 759141 - DNA, 15 bp, Homo sapiens
tgtgagaatgcaaca

SEQ ID NO: 759142 - DNA, 15 bp, Homo sapiens
gtgagaatgcaacac

SEQ ID NO: 759143 - DNA, 15 bp, Homo sapiens
tgagaatgcaacacc

SEQ ID NO: 759144 - DNA, 15 bp, Homo sapiens
gagaatgcaacacca

SEQ ID NO: 759145 - DNA, 15 bp, Homo sapiens
agaatgcaacaccat

SEQ ID NO: 759146 - DNA, 15 bp, Homo sapiens
gaatgcaacaccatg

SEQ ID NO: 759147 - DNA, 15 bp, Homo sapiens
aatgcaacaccatgc

SEQ ID NO: 759148 - DNA, 15 bp, Homo sapiens
atgcaacaccatgcc

SEQ ID NO: 759149 - DNA, 15 bp, Homo sapiens
tgcaacaccatgccc

SEQ ID NO: 759150 - DNA, 15 bp, Homo sapiens
gcaacaccatgccca

SEQ ID NO: 759151 - DNA, 15 bp, Homo sapiens
caacaccatgcccag

SEQ ID NO: 759152 - DNA, 15 bp, Homo sapiens
aacaccatgcccagc

SEQ ID NO: 759153 - DNA, 15 bp, Homo sapiens
acaccatgcccagcc

SEQ ID NO: 759154 - DNA, 15 bp, Homo sapiens
ccatgcccagcctta

SEQ ID NO: 759155 - DNA, 15 bp, Homo sapiens
catgcccagccttat

SEQ ID NO: 759156 - DNA, 15 bp, Homo sapiens
atgcccagccttatg

SEQ ID NO: 759157 - DNA, 15 bp, Homo sapiens
tgcccagccttatga

SEQ ID NO: 759158 - DNA, 15 bp, Homo sapiens
gcccagccttatgaa

SEQ ID NO: 759159 - DNA, 15 bp, Homo sapiens
cccagccttatgaat

SEQ ID NO: 759160 - DNA, 15 bp, Homo sapiens
ccagccttatgaata

SEQ ID NO: 759161 - DNA, 15 bp, Homo sapiens
cagccttatgaatat

SEQ ID NO: 759162 - DNA, 15 bp, Homo sapiens
agccttatgaatata

SEQ ID NO: 759163 - DNA, 15 bp, Homo sapiens
gccttatgaatatac

SEQ ID NO: 759164 - DNA, 15 bp, Homo sapiens
ccttatgaatataca

SEQ ID NO: 759165 - DNA, 15 bp, Homo sapiens
cttatgaatatacac

SEQ ID NO: 759166 - DNA, 15 bp, Homo sapiens
ttatgaatatacact

SEQ ID NO: 759167 - DNA, 15 bp, Homo sapiens
tatgaatatacactc

SEQ ID NO: 759168 - DNA, 15 bp, Homo sapiens
atgaatatacactct

SEQ ID NO: 759169 - DNA, 15 bp, Homo sapiens
tgaatatacactctt

SEQ ID NO: 759170 - DNA, 15 bp, Homo sapiens
gaatatacactctta

SEQ ID NO: 759171 - DNA, 15 bp, Homo sapiens
aatatacactcttaa

SEQ ID NO: 759172 - DNA, 15 bp, Homo sapiens
atatacactcttaaa

SEQ ID NO: 759173 - DNA, 15 bp, Homo sapiens
tatacactcttaaac

SEQ ID NO: 759174 - DNA, 15 bp, Homo sapiens
atacactcttaaaca

SEQ ID NO: 759175 - DNA, 15 bp, Homo sapiens
tacactcttaaacac

SEQ ID NO: 759176 - DNA, 15 bp, Homo sapiens
acactcttaaacact

SEQ ID NO: 759177 - DNA, 15 bp, Homo sapiens
cactcttaaacacta

SEQ ID NO: 759178 - DNA, 15 bp, Homo sapiens
actcttaaacactaa

SEQ ID NO: 759179 - DNA, 15 bp, Homo sapiens
ctcttaaacactaac

SEQ ID NO: 759180 - DNA, 15 bp, Homo sapiens
tcttaaacactaacg

SEQ ID NO: 759181 - DNA, 15 bp, Homo sapiens
cttaaacactaacgt

SEQ ID NO: 759182 - DNA, 15 bp, Homo sapiens
ttaaacactaacgtt

SEQ ID NO: 759183 - DNA, 15 bp, Homo sapiens
taaacactaacgttt

SEQ ID NO: 759184 - DNA, 15 bp, Homo sapiens
aaacactaacgtttg

SEQ ID NO: 759185 - DNA, 15 bp, Homo sapiens
aacactaacgtttgt

SEQ ID NO: 759186 - DNA, 15 bp, Homo sapiens
acactaacgtttgtc

SEQ ID NO: 759187 - DNA, 15 bp, Homo sapiens
cactaacgtttgtct

SEQ ID NO: 759188 - DNA, 15 bp, Homo sapiens
actaacgtttgtcta

SEQ ID NO: 759189 - DNA, 15 bp, Homo sapiens
ctaacgtttgtctaa

SEQ ID NO: 759190 - DNA, 15 bp, Homo sapiens
taacgtttgtctaag

SEQ ID NO: 759191 - DNA, 15 bp, Homo sapiens
aacgtttgtctaagt

SEQ ID NO: 759192 - DNA, 15 bp, Homo sapiens
acgtttgtctaagta

SEQ ID NO: 759193 - DNA, 15 bp, Homo sapiens
cgtttgtctaagtaa

SEQ ID NO: 759194 - DNA, 15 bp, Homo sapiens
gtttgtctaagtaat

SEQ ID NO: 759195 - DNA, 15 bp, Homo sapiens
tttgtctaagtaatt

SEQ ID NO: 759196 - DNA, 15 bp, Homo sapiens
ttgtctaagtaattt

SEQ ID NO: 759197 - DNA, 15 bp, Homo sapiens
tgtctaagtaatttt

SEQ ID NO: 759198 - DNA, 15 bp, Homo sapiens
gtctaagtaatttta

SEQ ID NO: 759199 - DNA, 15 bp, Homo sapiens
tctaagtaattttaa

SEQ ID NO: 759200 - DNA, 15 bp, Homo sapiens
ctaagtaattttaac

SEQ ID NO: 759201 - DNA, 15 bp, Homo sapiens
taagtaattttaact

SEQ ID NO: 759202 - DNA, 15 bp, Homo sapiens
aagtaattttaactg

SEQ ID NO: 759203 - DNA, 15 bp, Homo sapiens
agtaattttaactgg

SEQ ID NO: 759204 - DNA, 15 bp, Homo sapiens
gtaattttaactgga

SEQ ID NO: 759205 - DNA, 15 bp, Homo sapiens
taattttaactggag

SEQ ID NO: 759206 - DNA, 15 bp, Homo sapiens
aattttaactggaga

SEQ ID NO: 759207 - DNA, 15 bp, Homo sapiens
attttaactggagat

SEQ ID NO: 759208 - DNA, 15 bp, Homo sapiens
ttttaactggagatg

SEQ ID NO: 759209 - DNA, 15 bp, Homo sapiens
tttaactggagatga

SEQ ID NO: 759210 - DNA, 15 bp, Homo sapiens
ttaactggagatgaa

SEQ ID NO: 759211 - DNA, 15 bp, Homo sapiens
taactggagatgaac

SEQ ID NO: 759212 - DNA, 15 bp, Homo sapiens
aactggagatgaact

SEQ ID NO: 759213 - DNA, 15 bp, Homo sapiens
actggagatgaacta

SEQ ID NO: 759214 - DNA, 15 bp, Homo sapiens
ctggagatgaactaa

SEQ ID NO: 759215 - DNA, 15 bp, Homo sapiens
tggagatgaactaag

SEQ ID NO: 759216 - DNA, 15 bp, Homo sapiens
ggagatgaactaaga

SEQ ID NO: 759217 - DNA, 15 bp, Homo sapiens
gagatgaactaagac

SEQ ID NO: 759218 - DNA, 15 bp, Homo sapiens
agatgaactaagacc

SEQ ID NO: 759219 - DNA, 15 bp, Homo sapiens
gatgaactaagaccc

SEQ ID NO: 759220 - DNA, 15 bp, Homo sapiens
atgaactaagaccca

SEQ ID NO: 759221 - DNA, 15 bp, Homo sapiens
tgaactaagacccat

SEQ ID NO: 759222 - DNA, 15 bp, Homo sapiens
gaactaagacccatt

SEQ ID NO: 759223 - DNA, 15 bp, Homo sapiens
aactaagacccatta

SEQ ID NO: 759224 - DNA, 15 bp, Homo sapiens
actaagacccattat

SEQ ID NO: 759225 - DNA, 15 bp, Homo sapiens
ctaagacccattatt

SEQ ID NO: 759226 - DNA, 15 bp, Homo sapiens
taagacccattattt

SEQ ID NO: 759227 - DNA, 15 bp, Homo sapiens
aagacccattatttt

SEQ ID NO: 759228 - DNA, 15 bp, Homo sapiens
agacccattatttta

SEQ ID NO: 759229 - DNA, 15 bp, Homo sapiens
gacccattattttag

SEQ ID NO: 759230 - DNA, 15 bp, Homo sapiens
acccattattttagg

SEQ ID NO: 759231 - DNA, 15 bp, Homo sapiens
cccattattttagga

SEQ ID NO: 759232 - DNA, 15 bp, Homo sapiens
ccattattttaggat

SEQ ID NO: 759233 - DNA, 15 bp, Homo sapiens
cattattttaggatt

SEQ ID NO: 759234 - DNA, 15 bp, Homo sapiens
attattttaggattt

SEQ ID NO: 759235 - DNA, 15 bp, Homo sapiens
ttattttaggatttc

SEQ ID NO: 759236 - DNA, 15 bp, Homo sapiens
tattttaggatttca

SEQ ID NO: 759237 - DNA, 15 bp, Homo sapiens
attttaggatttcaa

SEQ ID NO: 759238 - DNA, 15 bp, Homo sapiens
ttttaggatttcaag

SEQ ID NO: 759239 - DNA, 15 bp, Homo sapiens
tttaggatttcaagg

SEQ ID NO: 759240 - DNA, 15 bp, Homo sapiens
ttaggatttcaaggt

SEQ ID NO: 759241 - DNA, 15 bp, Homo sapiens
taggatttcaaggtt

SEQ ID NO: 759242 - DNA, 15 bp, Homo sapiens
aggatttcaaggttc

SEQ ID NO: 759243 - DNA, 15 bp, Homo sapiens
ggatttcaaggttct

SEQ ID NO: 759244 - DNA, 15 bp, Homo sapiens
gatttcaaggttcta

SEQ ID NO: 759245 - DNA, 15 bp, Homo sapiens
atttcaaggttctaa

SEQ ID NO: 759246 - DNA, 15 bp, Homo sapiens
tttcaaggttctaat

SEQ ID NO: 759247 - DNA, 15 bp, Homo sapiens
ttcaaggttctaata

SEQ ID NO: 759248 - DNA, 15 bp, Homo sapiens
tcaaggttctaatac

SEQ ID NO: 759249 - DNA, 15 bp, Homo sapiens
caaggttctaataca

SEQ ID NO: 759250 - DNA, 15 bp, Homo sapiens
aaggttctaatacaa

SEQ ID NO: 759251 - DNA, 15 bp, Homo sapiens
aggttctaatacaat

SEQ ID NO: 759252 - DNA, 15 bp, Homo sapiens
ggttctaatacaata

SEQ ID NO: 759253 - DNA, 15 bp, Homo sapiens
gttctaatacaatat

SEQ ID NO: 759254 - DNA, 15 bp, Homo sapiens
ttctaatacaatatt

SEQ ID NO: 759255 - DNA, 15 bp, Homo sapiens
tctaatacaatatta

SEQ ID NO: 759256 - DNA, 15 bp, Homo sapiens
ctaatacaatattat

SEQ ID NO: 759257 - DNA, 15 bp, Homo sapiens
taatacaatattatt

SEQ ID NO: 759258 - DNA, 15 bp, Homo sapiens
aatacaatattatta

SEQ ID NO: 759259 - DNA, 15 bp, Homo sapiens
atacaatattattat

SEQ ID NO: 759260 - DNA, 15 bp, Homo sapiens
tacaatattattatt

SEQ ID NO: 759261 - DNA, 15 bp, Homo sapiens
acaatattattattt

SEQ ID NO: 759262 - DNA, 15 bp, Homo sapiens
caatattattatttt

SEQ ID NO: 759263 - DNA, 15 bp, Homo sapiens
aatattattattttt

SEQ ID NO: 759264 - DNA, 15 bp, Homo sapiens
atattattattttta

SEQ ID NO: 759265 - DNA, 15 bp, Homo sapiens
tattattatttttac

SEQ ID NO: 759266 - DNA, 15 bp, Homo sapiens
attattatttttaca

SEQ ID NO: 759267 - DNA, 15 bp, Homo sapiens
ttattatttttacac

SEQ ID NO: 759268 - DNA, 15 bp, Homo sapiens
tattatttttacaca

SEQ ID NO: 759269 - DNA, 15 bp, Homo sapiens
attatttttacacag

SEQ ID NO: 759270 - DNA, 15 bp, Homo sapiens
ttatttttacacagc

SEQ ID NO: 759271 - DNA, 15 bp, Homo sapiens
tatttttacacagca

SEQ ID NO: 759272 - DNA, 15 bp, Homo sapiens
atttttacacagcat

SEQ ID NO: 759273 - DNA, 15 bp, Homo sapiens
tttttacacagcatt

SEQ ID NO: 759274 - DNA, 15 bp, Homo sapiens
ttttacacagcattt

SEQ ID NO: 759275 - DNA, 15 bp, Homo sapiens
tttacacagcatttg

SEQ ID NO: 759276 - DNA, 15 bp, Homo sapiens
ttacacagcatttgt

SEQ ID NO: 759277 - DNA, 15 bp, Homo sapiens
tacacagcatttgtt

SEQ ID NO: 759278 - DNA, 15 bp, Homo sapiens
acacagcatttgttg

SEQ ID NO: 759279 - DNA, 15 bp, Homo sapiens
cacagcatttgttgt

SEQ ID NO: 759280 - DNA, 15 bp, Homo sapiens
acagcatttgttgtg

SEQ ID NO: 759281 - DNA, 15 bp, Homo sapiens
cagcatttgttgtgt

SEQ ID NO: 759282 - DNA, 15 bp, Homo sapiens
agcatttgttgtgtt

SEQ ID NO: 759283 - DNA, 15 bp, Homo sapiens
gcatttgttgtgttt

SEQ ID NO: 759284 - DNA, 15 bp, Homo sapiens
catttgttgtgttta

SEQ ID NO: 759285 - DNA, 15 bp, Homo sapiens
atttgttgtgtttaa

SEQ ID NO: 759286 - DNA, 15 bp, Homo sapiens
tttgttgtgtttaaa

SEQ ID NO: 759287 - DNA, 15 bp, Homo sapiens
ttgttgtgtttaaaa

SEQ ID NO: 759288 - DNA, 15 bp, Homo sapiens
tgttgtgtttaaaag

SEQ ID NO: 759289 - DNA, 15 bp, Homo sapiens
gttgtgtttaaaagt

SEQ ID NO: 759290 - DNA, 15 bp, Homo sapiens
ttgtgtttaaaagtt

SEQ ID NO: 759291 - DNA, 15 bp, Homo sapiens
tgtgtttaaaagttt

SEQ ID NO: 759292 - DNA, 15 bp, Homo sapiens
gtgtttaaaagtttc

SEQ ID NO: 759293 - DNA, 15 bp, Homo sapiens
tgtttaaaagtttca

SEQ ID NO: 759294 - DNA, 15 bp, Homo sapiens
gtttaaaagtttcat

SEQ ID NO: 759295 - DNA, 15 bp, Homo sapiens
tttaaaagtttcatt

SEQ ID NO: 759296 - DNA, 15 bp, Homo sapiens
ttaaaagtttcatta

SEQ ID NO: 759297 - DNA, 15 bp, Homo sapiens
taaaagtttcattaa

SEQ ID NO: 759298 - DNA, 15 bp, Homo sapiens
aaaagtttcattaat

SEQ ID NO: 759299 - DNA, 15 bp, Homo sapiens
aaagtttcattaatt

SEQ ID NO: 759300 - DNA, 15 bp, Homo sapiens
aagtttcattaatta

SEQ ID NO: 759301 - DNA, 15 bp, Homo sapiens
agtttcattaattac

SEQ ID NO: 759302 - DNA, 15 bp, Homo sapiens
gtttcattaattacc

SEQ ID NO: 759303 - DNA, 15 bp, Homo sapiens
tttcattaattacct

SEQ ID NO: 759304 - DNA, 15 bp, Homo sapiens
ttcattaattacctc

SEQ ID NO: 759305 - DNA, 15 bp, Homo sapiens
tcattaattacctcc

SEQ ID NO: 759306 - DNA, 15 bp, Homo sapiens
cattaattacctcca

SEQ ID NO: 759307 - DNA, 15 bp, Homo sapiens
attaattacctccag

SEQ ID NO: 759308 - DNA, 15 bp, Homo sapiens
ttaattacctccagt

SEQ ID NO: 759309 - DNA, 15 bp, Homo sapiens
taattacctccagtt

SEQ ID NO: 759310 - DNA, 15 bp, Homo sapiens
aattacctccagtta

SEQ ID NO: 759311 - DNA, 15 bp, Homo sapiens
attacctccagttaa

SEQ ID NO: 759312 - DNA, 15 bp, Homo sapiens
ttacctccagttaat

SEQ ID NO: 759313 - DNA, 15 bp, Homo sapiens
tacctccagttaata

SEQ ID NO: 759314 - DNA, 15 bp, Homo sapiens
acctccagttaatag

SEQ ID NO: 759315 - DNA, 15 bp, Homo sapiens
cctccagttaatagc

SEQ ID NO: 759316 - DNA, 15 bp, Homo sapiens
ctccagttaatagca

SEQ ID NO: 759317 - DNA, 15 bp, Homo sapiens
tccagttaatagcat

SEQ ID NO: 759318 - DNA, 15 bp, Homo sapiens
ccagttaatagcatg

SEQ ID NO: 759319 - DNA, 15 bp, Homo sapiens
cagttaatagcatga

SEQ ID NO: 759320 - DNA, 15 bp, Homo sapiens
agttaatagcatgat

SEQ ID NO: 759321 - DNA, 15 bp, Homo sapiens
gttaatagcatgata

SEQ ID NO: 759322 - DNA, 15 bp, Homo sapiens
ttaatagcatgatat

SEQ ID NO: 759323 - DNA, 15 bp, Homo sapiens
taatagcatgatata

SEQ ID NO: 759324 - DNA, 15 bp, Homo sapiens
aatagcatgatatat

SEQ ID NO: 759325 - DNA, 15 bp, Homo sapiens
atagcatgatatatt

SEQ ID NO: 759326 - DNA, 15 bp, Homo sapiens
tagcatgatatattt

SEQ ID NO: 759327 - DNA, 15 bp, Homo sapiens
agcatgatatatttt

SEQ ID NO: 759328 - DNA, 15 bp, Homo sapiens
gcatgatatattttc

SEQ ID NO: 759329 - DNA, 15 bp, Homo sapiens
catgatatattttca

SEQ ID NO: 759330 - DNA, 15 bp, Homo sapiens
atgatatattttcaa

SEQ ID NO: 759331 - DNA, 15 bp, Homo sapiens
tgatatattttcaat

SEQ ID NO: 759332 - DNA, 15 bp, Homo sapiens
gatatattttcaatg

SEQ ID NO: 759333 - DNA, 15 bp, Homo sapiens
atatattttcaatgc

SEQ ID NO: 759334 - DNA, 15 bp, Homo sapiens
tatattttcaatgca

SEQ ID NO: 759335 - DNA, 15 bp, Homo sapiens
atattttcaatgcaa

SEQ ID NO: 759336 - DNA, 15 bp, Homo sapiens
tattttcaatgcaat

SEQ ID NO: 759337 - DNA, 15 bp, Homo sapiens
attttcaatgcaatc

SEQ ID NO: 759338 - DNA, 15 bp, Homo sapiens
ttttcaatgcaatct

SEQ ID NO: 759339 - DNA, 15 bp, Homo sapiens
tttcaatgcaatctg

SEQ ID NO: 759340 - DNA, 15 bp, Homo sapiens
ttcaatgcaatctgt

SEQ ID NO: 759341 - DNA, 15 bp, Homo sapiens
tcaatgcaatctgtt

SEQ ID NO: 759342 - DNA, 15 bp, Homo sapiens
caatgcaatctgttt

SEQ ID NO: 759343 - DNA, 15 bp, Homo sapiens
aatgcaatctgtttc

SEQ ID NO: 759344 - DNA, 15 bp, Homo sapiens
atgcaatctgtttca

SEQ ID NO: 759345 - DNA, 15 bp, Homo sapiens
tgcaatctgtttcaa

SEQ ID NO: 759346 - DNA, 15 bp, Homo sapiens
gcaatctgtttcaaa

SEQ ID NO: 759347 - DNA, 15 bp, Homo sapiens
caatctgtttcaaat

SEQ ID NO: 759348 - DNA, 15 bp, Homo sapiens
aatctgtttcaaatt

SEQ ID NO: 759349 - DNA, 15 bp, Homo sapiens
atctgtttcaaattg

SEQ ID NO: 759350 - DNA, 15 bp, Homo sapiens
tctgtttcaaattga

SEQ ID NO: 759351 - DNA, 15 bp, Homo sapiens
ctgtttcaaattgat

SEQ ID NO: 759352 - DNA, 15 bp, Homo sapiens
tgtttcaaattgatc

SEQ ID NO: 759353 - DNA, 15 bp, Homo sapiens
gtttcaaattgatca

SEQ ID NO: 759354 - DNA, 15 bp, Homo sapiens
tttcaaattgatcag

SEQ ID NO: 759355 - DNA, 15 bp, Homo sapiens
ttcaaattgatcaga

SEQ ID NO: 759356 - DNA, 15 bp, Homo sapiens
tcaaattgatcagat

SEQ ID NO: 759357 - DNA, 15 bp, Homo sapiens
caaattgatcagata

SEQ ID NO: 759358 - DNA, 15 bp, Homo sapiens
aaattgatcagatat

SEQ ID NO: 759359 - DNA, 15 bp, Homo sapiens
aattgatcagatata

SEQ ID NO: 759360 - DNA, 15 bp, Homo sapiens
attgatcagatatat

SEQ ID NO: 759361 - DNA, 15 bp, Homo sapiens
ttgatcagatatata

SEQ ID NO: 759362 - DNA, 15 bp, Homo sapiens
tgatcagatatatag

SEQ ID NO: 759363 - DNA, 15 bp, Homo sapiens
gatcagatatataga

SEQ ID NO: 759364 - DNA, 15 bp, Homo sapiens
atcagatatatagaa

SEQ ID NO: 759365 - DNA, 15 bp, Homo sapiens
tcagatatatagaat

SEQ ID NO: 759366 - DNA, 15 bp, Homo sapiens
cagatatatagaatc

SEQ ID NO: 759367 - DNA, 15 bp, Homo sapiens
agatatatagaatct

SEQ ID NO: 759368 - DNA, 15 bp, Homo sapiens
gatatatagaatctc

SEQ ID NO: 759369 - DNA, 15 bp, Homo sapiens
atatatagaatctct

SEQ ID NO: 759370 - DNA, 15 bp, Homo sapiens
tatatagaatctctg

SEQ ID NO: 759371 - DNA, 15 bp, Homo sapiens
atatagaatctctgg

SEQ ID NO: 759372 - DNA, 15 bp, Homo sapiens
tatagaatctctggt

SEQ ID NO: 759373 - DNA, 15 bp, Homo sapiens
atagaatctctggta

SEQ ID NO: 759374 - DNA, 15 bp, Homo sapiens
tagaatctctggtaa

SEQ ID NO: 759375 - DNA, 15 bp, Homo sapiens
agaatctctggtaac

SEQ ID NO: 759376 - DNA, 15 bp, Homo sapiens
gaatctctggtaacc

SEQ ID NO: 759377 - DNA, 15 bp, Homo sapiens
aatctctggtaacct

SEQ ID NO: 759378 - DNA, 15 bp, Homo sapiens
atctctggtaacctc

SEQ ID NO: 759379 - DNA, 15 bp, Homo sapiens
tctctggtaacctcc

SEQ ID NO: 759380 - DNA, 15 bp, Homo sapiens
ctctggtaacctcct

SEQ ID NO: 759381 - DNA, 15 bp, Homo sapiens
tctggtaacctccta

SEQ ID NO: 759382 - DNA, 15 bp, Homo sapiens
ctggtaacctcctaa

SEQ ID NO: 759383 - DNA, 15 bp, Homo sapiens
tggtaacctcctaag

SEQ ID NO: 759384 - DNA, 15 bp, Homo sapiens
ggtaacctcctaagg

SEQ ID NO: 759385 - DNA, 15 bp, Homo sapiens
gtaacctcctaagga

SEQ ID NO: 759386 - DNA, 15 bp, Homo sapiens
taacctcctaaggat

SEQ ID NO: 759387 - DNA, 15 bp, Homo sapiens
aacctcctaaggatt

SEQ ID NO: 759388 - DNA, 15 bp, Homo sapiens
acctcctaaggattg

SEQ ID NO: 759389 - DNA, 15 bp, Homo sapiens
cctcctaaggattgt

SEQ ID NO: 759390 - DNA, 15 bp, Homo sapiens
ctcctaaggattgta

SEQ ID NO: 759391 - DNA, 15 bp, Homo sapiens
tcctaaggattgtag

SEQ ID NO: 759392 - DNA, 15 bp, Homo sapiens
cctaaggattgtagt

SEQ ID NO: 759393 - DNA, 15 bp, Homo sapiens
ctaaggattgtagtt

SEQ ID NO: 759394 - DNA, 15 bp, Homo sapiens
taaggattgtagttg

SEQ ID NO: 759395 - DNA, 15 bp, Homo sapiens
aaggattgtagttga

SEQ ID NO: 759396 - DNA, 15 bp, Homo sapiens
aggattgtagttgag

SEQ ID NO: 759397 - DNA, 15 bp, Homo sapiens
ggattgtagttgagg

SEQ ID NO: 759398 - DNA, 15 bp, Homo sapiens
gattgtagttgaggc

SEQ ID NO: 759399 - DNA, 15 bp, Homo sapiens
attgtagttgaggct

SEQ ID NO: 759400 - DNA, 15 bp, Homo sapiens
ttgtagttgaggctg

SEQ ID NO: 759401 - DNA, 15 bp, Homo sapiens
tgtagttgaggctgt

SEQ ID NO: 759402 - DNA, 15 bp, Homo sapiens
gtagttgaggctgtg

SEQ ID NO: 759403 - DNA, 15 bp, Homo sapiens
tagttgaggctgtgt

SEQ ID NO: 759404 - DNA, 15 bp, Homo sapiens
agttgaggctgtgtg

SEQ ID NO: 759405 - DNA, 15 bp, Homo sapiens
gttgaggctgtgtgt

SEQ ID NO: 759406 - DNA, 15 bp, Homo sapiens
ttgaggctgtgtgtg

SEQ ID NO: 759407 - DNA, 15 bp, Homo sapiens
tgaggctgtgtgtgt

SEQ ID NO: 759408 - DNA, 15 bp, Homo sapiens
gaggctgtgtgtgtg

SEQ ID NO: 759409 - DNA, 15 bp, Homo sapiens
aggctgtgtgtgtgt

SEQ ID NO: 759410 - DNA, 15 bp, Homo sapiens
ggctgtgtgtgtgtg

SEQ ID NO: 759411 - DNA, 15 bp, Homo sapiens
gtgtgtgtgtgtgtt

SEQ ID NO: 759412 - DNA, 15 bp, Homo sapiens
tgtgtgtgtgtgttt

SEQ ID NO: 759413 - DNA, 15 bp, Homo sapiens
gtgtgtgtgtgtttg

SEQ ID NO: 759414 - DNA, 15 bp, Homo sapiens
tgtgtgtgtgtttgt

SEQ ID NO: 759415 - DNA, 15 bp, Homo sapiens
gtgtgtgtgtttgta

SEQ ID NO: 759416 - DNA, 15 bp, Homo sapiens
tgtgtgtgtttgtat

SEQ ID NO: 759417 - DNA, 15 bp, Homo sapiens
gtgtgtgtttgtatg

SEQ ID NO: 759418 - DNA, 15 bp, Homo sapiens
tgtgtgtttgtatgt

SEQ ID NO: 759419 - DNA, 15 bp, Homo sapiens
gtgtgtttgtatgta

SEQ ID NO: 759420 - DNA, 15 bp, Homo sapiens
tgtgtttgtatgtat

SEQ ID NO: 759421 - DNA, 15 bp, Homo sapiens
gtgtttgtatgtatg

SEQ ID NO: 759422 - DNA, 15 bp, Homo sapiens
tgtttgtatgtatgt

SEQ ID NO: 759423 - DNA, 15 bp, Homo sapiens
gtttgtatgtatgtg

SEQ ID NO: 759424 - DNA, 15 bp, Homo sapiens
tttgtatgtatgtgt

SEQ ID NO: 759425 - DNA, 15 bp, Homo sapiens
ttgtatgtatgtgtg

SEQ ID NO: 759426 - DNA, 15 bp, Homo sapiens
tgtatgtatgtgtgt

SEQ ID NO: 759427 - DNA, 15 bp, Homo sapiens
gtatgtatgtgtgtt

SEQ ID NO: 759428 - DNA, 15 bp, Homo sapiens
tatgtatgtgtgtta

SEQ ID NO: 759429 - DNA, 15 bp, Homo sapiens
atgtatgtgtgttaa

SEQ ID NO: 759430 - DNA, 15 bp, Homo sapiens
tgtatgtgtgttaaa

SEQ ID NO: 759431 - DNA, 15 bp, Homo sapiens
gtatgtgtgttaaag

SEQ ID NO: 759432 - DNA, 15 bp, Homo sapiens
tatgtgtgttaaagg

SEQ ID NO: 759433 - DNA, 15 bp, Homo sapiens
atgtgtgttaaaggc

SEQ ID NO: 759434 - DNA, 15 bp, Homo sapiens
tgtgtgttaaaggca

SEQ ID NO: 759435 - DNA, 15 bp, Homo sapiens
gtgtgttaaaggcag

SEQ ID NO: 759436 - DNA, 15 bp, Homo sapiens
tgtgttaaaggcaga

SEQ ID NO: 759437 - DNA, 15 bp, Homo sapiens
gtgttaaaggcagaa

SEQ ID NO: 759438 - DNA, 15 bp, Homo sapiens
tgttaaaggcagaat

SEQ ID NO: 759439 - DNA, 15 bp, Homo sapiens
gttaaaggcagaatc

SEQ ID NO: 759440 - DNA, 15 bp, Homo sapiens
ttaaaggcagaatct

SEQ ID NO: 759441 - DNA, 15 bp, Homo sapiens
taaaggcagaatctc

SEQ ID NO: 759442 - DNA, 15 bp, Homo sapiens
aaaggcagaatctct

SEQ ID NO: 759443 - DNA, 15 bp, Homo sapiens
aaggcagaatctctt

SEQ ID NO: 759444 - DNA, 15 bp, Homo sapiens
aggcagaatctcttc

SEQ ID NO: 759445 - DNA, 15 bp, Homo sapiens
ggcagaatctcttca

SEQ ID NO: 759446 - DNA, 15 bp, Homo sapiens
gcagaatctcttcac

SEQ ID NO: 759447 - DNA, 15 bp, Homo sapiens
cagaatctcttcact

SEQ ID NO: 759448 - DNA, 15 bp, Homo sapiens
agaatctcttcacta

SEQ ID NO: 759449 - DNA, 15 bp, Homo sapiens
gaatctcttcactat

SEQ ID NO: 759450 - DNA, 15 bp, Homo sapiens
aatctcttcactatg

SEQ ID NO: 759451 - DNA, 15 bp, Homo sapiens
atctcttcactatga

SEQ ID NO: 759452 - DNA, 15 bp, Homo sapiens
tctcttcactatgaa

SEQ ID NO: 759453 - DNA, 15 bp, Homo sapiens
ctcttcactatgaac

SEQ ID NO: 759454 - DNA, 15 bp, Homo sapiens
tcttcactatgaacc

SEQ ID NO: 759455 - DNA, 15 bp, Homo sapiens
cttcactatgaacca

SEQ ID NO: 759456 - DNA, 15 bp, Homo sapiens
ttcactatgaaccac

SEQ ID NO: 759457 - DNA, 15 bp, Homo sapiens
tcactatgaaccact

SEQ ID NO: 759458 - DNA, 15 bp, Homo sapiens
cactatgaaccactg

SEQ ID NO: 759459 - DNA, 15 bp, Homo sapiens
actatgaaccactga

SEQ ID NO: 759460 - DNA, 15 bp, Homo sapiens
ctatgaaccactgaa

SEQ ID NO: 759461 - DNA, 15 bp, Homo sapiens
tatgaaccactgaat

SEQ ID NO: 759462 - DNA, 15 bp, Homo sapiens
atgaaccactgaatg

SEQ ID NO: 759463 - DNA, 15 bp, Homo sapiens
tgaaccactgaatga

SEQ ID NO: 759464 - DNA, 15 bp, Homo sapiens
gaaccactgaatgaa

SEQ ID NO: 759465 - DNA, 15 bp, Homo sapiens
aaccactgaatgaag

SEQ ID NO: 759466 - DNA, 15 bp, Homo sapiens
accactgaatgaaga

SEQ ID NO: 759467 - DNA, 15 bp, Homo sapiens
ccactgaatgaagaa

SEQ ID NO: 759468 - DNA, 15 bp, Homo sapiens
cactgaatgaagaaa

SEQ ID NO: 759469 - DNA, 15 bp, Homo sapiens
actgaatgaagaaat

SEQ ID NO: 759470 - DNA, 15 bp, Homo sapiens
ctgaatgaagaaatt

SEQ ID NO: 759471 - DNA, 15 bp, Homo sapiens
tgaatgaagaaatta

SEQ ID NO: 759472 - DNA, 15 bp, Homo sapiens
gaatgaagaaattat

SEQ ID NO: 759473 - DNA, 15 bp, Homo sapiens
aatgaagaaattatg

SEQ ID NO: 759474 - DNA, 15 bp, Homo sapiens
atgaagaaattatgc

SEQ ID NO: 759475 - DNA, 15 bp, Homo sapiens
tgaagaaattatgca

SEQ ID NO: 759476 - DNA, 15 bp, Homo sapiens
gaagaaattatgcaa

SEQ ID NO: 759477 - DNA, 15 bp, Homo sapiens
aagaaattatgcaaa

SEQ ID NO: 759478 - DNA, 15 bp, Homo sapiens
agaaattatgcaaat

SEQ ID NO: 759479 - DNA, 15 bp, Homo sapiens
gaaattatgcaaatt

SEQ ID NO: 759480 - DNA, 15 bp, Homo sapiens
aaattatgcaaatta

SEQ ID NO: 759481 - DNA, 15 bp, Homo sapiens
aattatgcaaattaa

SEQ ID NO: 759482 - DNA, 15 bp, Homo sapiens
attatgcaaattaat

SEQ ID NO: 759483 - DNA, 15 bp, Homo sapiens
ttatgcaaattaata

SEQ ID NO: 759484 - DNA, 15 bp, Homo sapiens
tatgcaaattaataa

SEQ ID NO: 759485 - DNA, 15 bp, Homo sapiens
atgcaaattaataat

SEQ ID NO: 759486 - DNA, 15 bp, Homo sapiens
tgcaaattaataata

SEQ ID NO: 759487 - DNA, 15 bp, Homo sapiens
gcaaattaataataa

SEQ ID NO: 759488 - DNA, 15 bp, Homo sapiens
caaattaataataac

SEQ ID NO: 759489 - DNA, 15 bp, Homo sapiens
aaattaataataaca

SEQ ID NO: 759490 - DNA, 15 bp, Homo sapiens
aattaataataacaa

SEQ ID NO: 759491 - DNA, 15 bp, Homo sapiens
attaataataacaaa

SEQ ID NO: 759492 - DNA, 15 bp, Homo sapiens
ttaataataacaaaa

SEQ ID NO: 759493 - DNA, 15 bp, Homo sapiens
taataataacaaaat

SEQ ID NO: 759494 - DNA, 15 bp, Homo sapiens
aataataacaaaatc

SEQ ID NO: 759495 - DNA, 15 bp, Homo sapiens
ataataacaaaatct

SEQ ID NO: 759496 - DNA, 15 bp, Homo sapiens
taataacaaaatctg

SEQ ID NO: 759497 - DNA, 15 bp, Homo sapiens
aataacaaaatctgt

SEQ ID NO: 759498 - DNA, 15 bp, Homo sapiens
ataacaaaatctgtt

SEQ ID NO: 759499 - DNA, 15 bp, Homo sapiens
taacaaaatctgttt

SEQ ID NO: 759500 - DNA, 15 bp, Homo sapiens
aacaaaatctgttta

SEQ ID NO: 759501 - DNA, 15 bp, Homo sapiens
acaaaatctgtttat

SEQ ID NO: 759502 - DNA, 15 bp, Homo sapiens
caaaatctgtttatg

SEQ ID NO: 759503 - DNA, 15 bp, Homo sapiens
aaaatctgtttatga

SEQ ID NO: 759504 - DNA, 15 bp, Homo sapiens
aaatctgtttatgat

SEQ ID NO: 759505 - DNA, 15 bp, Homo sapiens
aatctgtttatgatt

SEQ ID NO: 759506 - DNA, 15 bp, Homo sapiens
atctgtttatgattt

SEQ ID NO: 759507 - DNA, 15 bp, Homo sapiens
tctgtttatgatttt

SEQ ID NO: 759508 - DNA, 15 bp, Homo sapiens
ctgtttatgatttta

SEQ ID NO: 759509 - DNA, 15 bp, Homo sapiens
tgtttatgattttat

SEQ ID NO: 759510 - DNA, 15 bp, Homo sapiens
gtttatgattttata

SEQ ID NO: 759511 - DNA, 15 bp, Homo sapiens
tttatgattttatat

SEQ ID NO: 759512 - DNA, 15 bp, Homo sapiens
ttatgattttatatg

SEQ ID NO: 759513 - DNA, 15 bp, Homo sapiens
tatgattttatatga

SEQ ID NO: 759514 - DNA, 15 bp, Homo sapiens
atgattttatatgat

SEQ ID NO: 759515 - DNA, 15 bp, Homo sapiens
tgattttatatgatt

SEQ ID NO: 759516 - DNA, 15 bp, Homo sapiens
gattttatatgatta

SEQ ID NO: 759517 - DNA, 15 bp, Homo sapiens
attttatatgattaa

SEQ ID NO: 759518 - DNA, 15 bp, Homo sapiens
ttttatatgattaag

SEQ ID NO: 759519 - DNA, 15 bp, Homo sapiens
tttatatgattaaga

SEQ ID NO: 759520 - DNA, 15 bp, Homo sapiens
ttatatgattaagac

SEQ ID NO: 759521 - DNA, 15 bp, Homo sapiens
tatatgattaagaca

SEQ ID NO: 759522 - DNA, 15 bp, Homo sapiens
atatgattaagacaa

SEQ ID NO: 759523 - DNA, 15 bp, Homo sapiens
tatgattaagacaac

SEQ ID NO: 759524 - DNA, 15 bp, Homo sapiens
atgattaagacaaca

SEQ ID NO: 759525 - DNA, 15 bp, Homo sapiens
tgattaagacaacat

SEQ ID NO: 759526 - DNA, 15 bp, Homo sapiens
gattaagacaacatg

SEQ ID NO: 759527 - DNA, 15 bp, Homo sapiens
attaagacaacatga

SEQ ID NO: 759528 - DNA, 15 bp, Homo sapiens
ttaagacaacatgaa

SEQ ID NO: 759529 - DNA, 15 bp, Homo sapiens
taagacaacatgaaa

SEQ ID NO: 759530 - DNA, 15 bp, Homo sapiens
aagacaacatgaaat

SEQ ID NO: 759531 - DNA, 15 bp, Homo sapiens
agacaacatgaaatt

SEQ ID NO: 759532 - DNA, 15 bp, Homo sapiens
gacaacatgaaatta

SEQ ID NO: 759533 - DNA, 15 bp, Homo sapiens
acaacatgaaattag

SEQ ID NO: 759534 - DNA, 15 bp, Homo sapiens
caacatgaaattaga

SEQ ID NO: 759535 - DNA, 15 bp, Homo sapiens
aacatgaaattagat

SEQ ID NO: 759536 - DNA, 15 bp, Homo sapiens
acatgaaattagatg

SEQ ID NO: 759537 - DNA, 15 bp, Homo sapiens
catgaaattagatgc

SEQ ID NO: 759538 - DNA, 15 bp, Homo sapiens
atgaaattagatgca

SEQ ID NO: 759539 - DNA, 15 bp, Homo sapiens
tgaaattagatgcat

SEQ ID NO: 759540 - DNA, 15 bp, Homo sapiens
gaaattagatgcatc

SEQ ID NO: 759541 - DNA, 15 bp, Homo sapiens
aaattagatgcatct

SEQ ID NO: 759542 - DNA, 15 bp, Homo sapiens
aattagatgcatcta

SEQ ID NO: 759543 - DNA, 15 bp, Homo sapiens
attagatgcatctac

SEQ ID NO: 759544 - DNA, 15 bp, Homo sapiens
ttagatgcatctact

SEQ ID NO: 759545 - DNA, 15 bp, Homo sapiens
tagatgcatctactg

SEQ ID NO: 759546 - DNA, 15 bp, Homo sapiens
agatgcatctactga

SEQ ID NO: 759547 - DNA, 15 bp, Homo sapiens
gatgcatctactgaa

SEQ ID NO: 759548 - DNA, 15 bp, Homo sapiens
atgcatctactgaat

SEQ ID NO: 759549 - DNA, 15 bp, Homo sapiens
tgcatctactgaatt

SEQ ID NO: 759550 - DNA, 15 bp, Homo sapiens
gcatctactgaattt

SEQ ID NO: 759551 - DNA, 15 bp, Homo sapiens
catctactgaatttt

SEQ ID NO: 759552 - DNA, 15 bp, Homo sapiens
atctactgaattttt

SEQ ID NO: 759553 - DNA, 15 bp, Homo sapiens
tctactgaatttttt

SEQ ID NO: 759554 - DNA, 15 bp, Homo sapiens
ctactgaattttttt

SEQ ID NO: 759555 - DNA, 15 bp, Homo sapiens
tactgaatttttttt

SEQ ID NO: 759556 - DNA, 15 bp, Homo sapiens
actgaattttttttc

SEQ ID NO: 759557 - DNA, 15 bp, Homo sapiens
ctgaattttttttcc

SEQ ID NO: 759558 - DNA, 15 bp, Homo sapiens
tgaattttttttcct

SEQ ID NO: 759559 - DNA, 15 bp, Homo sapiens
gaattttttttcctt

SEQ ID NO: 759560 - DNA, 15 bp, Homo sapiens
aattttttttccttt

SEQ ID NO: 759561 - DNA, 15 bp, Homo sapiens
attttttttcctttt

SEQ ID NO: 759562 - DNA, 15 bp, Homo sapiens
ttttttttccttttt

SEQ ID NO: 759563 - DNA, 15 bp, Homo sapiens
tttttttcctttttt

SEQ ID NO: 759564 - DNA, 15 bp, Homo sapiens
ttttttccttttttt

SEQ ID NO: 759565 - DNA, 15 bp, Homo sapiens
tttttcctttttttt

SEQ ID NO: 759566 - DNA, 15 bp, Homo sapiens
ttttccttttttttt

SEQ ID NO: 759567 - DNA, 15 bp, Homo sapiens
tttcctttttttttt

SEQ ID NO: 759568 - DNA, 15 bp, Homo sapiens
ttccttttttttttt

SEQ ID NO: 759569 - DNA, 15 bp, Homo sapiens
tcctttttttttttt

SEQ ID NO: 759570 - DNA, 15 bp, Homo sapiens
ccttttttttttttt

SEQ ID NO: 759571 - DNA, 15 bp, Homo sapiens
ttttttgagatggag

SEQ ID NO: 759572 - DNA, 15 bp, Homo sapiens
ttgagatggagtttt

SEQ ID NO: 759573 - DNA, 15 bp, Homo sapiens
tgagatggagttttt

SEQ ID NO: 759574 - DNA, 15 bp, Homo sapiens
gagatggagtttttg

SEQ ID NO: 759575 - DNA, 15 bp, Homo sapiens
agatggagtttttgc

SEQ ID NO: 759576 - DNA, 15 bp, Homo sapiens
gatggagtttttgct

SEQ ID NO: 759577 - DNA, 15 bp, Homo sapiens
atggagtttttgctc

SEQ ID NO: 759578 - DNA, 15 bp, Homo sapiens
tggagtttttgctct

SEQ ID NO: 759579 - DNA, 15 bp, Homo sapiens
ggagtttttgctcta

SEQ ID NO: 759580 - DNA, 15 bp, Homo sapiens
gagtttttgctctag

SEQ ID NO: 759581 - DNA, 15 bp, Homo sapiens
agtttttgctctagt

SEQ ID NO: 759582 - DNA, 15 bp, Homo sapiens
gtttttgctctagtt

SEQ ID NO: 759583 - DNA, 15 bp, Homo sapiens
tttttgctctagttg

SEQ ID NO: 759584 - DNA, 15 bp, Homo sapiens
ttttgctctagttgc

SEQ ID NO: 759585 - DNA, 15 bp, Homo sapiens
tttgctctagttgcc

SEQ ID NO: 759586 - DNA, 15 bp, Homo sapiens
ttgctctagttgccc

SEQ ID NO: 759587 - DNA, 15 bp, Homo sapiens
tgctctagttgccca

SEQ ID NO: 759588 - DNA, 15 bp, Homo sapiens
gctctagttgcccag

SEQ ID NO: 759589 - DNA, 15 bp, Homo sapiens
ctctagttgcccagg

SEQ ID NO: 759590 - DNA, 15 bp, Homo sapiens
tctagttgcccaggc

SEQ ID NO: 759591 - DNA, 15 bp, Homo sapiens
ctagttgcccaggct

SEQ ID NO: 759592 - DNA, 15 bp, Homo sapiens
tagttgcccaggctg

SEQ ID NO: 759593 - DNA, 15 bp, Homo sapiens
agttgcccaggctgg

SEQ ID NO: 759594 - DNA, 15 bp, Homo sapiens
aggctggagtgcaag

SEQ ID NO: 759595 - DNA, 15 bp, Homo sapiens
ggctggagtgcaagg

SEQ ID NO: 759596 - DNA, 15 bp, Homo sapiens
gctggagtgcaaggg

SEQ ID NO: 759597 - DNA, 15 bp, Homo sapiens
ctggagtgcaagggc

SEQ ID NO: 759598 - DNA, 15 bp, Homo sapiens
tggagtgcaagggcc

SEQ ID NO: 759599 - DNA, 15 bp, Homo sapiens
ggagtgcaagggcca

SEQ ID NO: 759600 - DNA, 15 bp, Homo sapiens
gagtgcaagggccaa

SEQ ID NO: 759601 - DNA, 15 bp, Homo sapiens
agtgcaagggccaat

SEQ ID NO: 759602 - DNA, 15 bp, Homo sapiens
gtgcaagggccaatc

SEQ ID NO: 759603 - DNA, 15 bp, Homo sapiens
tgcaagggccaatct

SEQ ID NO: 759604 - DNA, 15 bp, Homo sapiens
gcaagggccaatctc

SEQ ID NO: 759605 - DNA, 15 bp, Homo sapiens
caagggccaatctcg

SEQ ID NO: 759606 - DNA, 15 bp, Homo sapiens
aagggccaatctcgg

SEQ ID NO: 759607 - DNA, 15 bp, Homo sapiens
agggccaatctcggc

SEQ ID NO: 759608 - DNA, 15 bp, Homo sapiens
gggccaatctcggct

SEQ ID NO: 759609 - DNA, 15 bp, Homo sapiens
ggccaatctcggctc

SEQ ID NO: 759610 - DNA, 15 bp, Homo sapiens
gccaatctcggctca

SEQ ID NO: 759611 - DNA, 15 bp, Homo sapiens
ccaatctcggctcac

SEQ ID NO: 759612 - DNA, 15 bp, Homo sapiens
tctcggctcactgct

SEQ ID NO: 759613 - DNA, 15 bp, Homo sapiens
ctcggctcactgcta

SEQ ID NO: 759614 - DNA, 15 bp, Homo sapiens
tcggctcactgctaa

SEQ ID NO: 759615 - DNA, 15 bp, Homo sapiens
cggctcactgctaac

SEQ ID NO: 759616 - DNA, 15 bp, Homo sapiens
ggctcactgctaact

SEQ ID NO: 759617 - DNA, 15 bp, Homo sapiens
gctcactgctaactc

SEQ ID NO: 759618 - DNA, 15 bp, Homo sapiens
ctcactgctaactct

SEQ ID NO: 759619 - DNA, 15 bp, Homo sapiens
tcactgctaactctg

SEQ ID NO: 759620 - DNA, 15 bp, Homo sapiens
cactgctaactctgc

SEQ ID NO: 759621 - DNA, 15 bp, Homo sapiens
actgctaactctgcc

SEQ ID NO: 759622 - DNA, 15 bp, Homo sapiens
ctgctaactctgcct

SEQ ID NO: 759623 - DNA, 15 bp, Homo sapiens
tgctaactctgcctc

SEQ ID NO: 759624 - DNA, 15 bp, Homo sapiens
gctaactctgcctcc

SEQ ID NO: 759625 - DNA, 15 bp, Homo sapiens
ctaactctgcctccc

SEQ ID NO: 759626 - DNA, 15 bp, Homo sapiens
taactctgcctccca

SEQ ID NO: 759627 - DNA, 15 bp, Homo sapiens
aactctgcctcccag

SEQ ID NO: 759628 - DNA, 15 bp, Homo sapiens
actctgcctcccagg

SEQ ID NO: 759629 - DNA, 15 bp, Homo sapiens
gttcaagcaattctt

SEQ ID NO: 759630 - DNA, 15 bp, Homo sapiens
ttcaagcaattcttc

SEQ ID NO: 759631 - DNA, 15 bp, Homo sapiens
tcaagcaattcttct

SEQ ID NO: 759632 - DNA, 15 bp, Homo sapiens
caagcaattcttctg

SEQ ID NO: 759633 - DNA, 15 bp, Homo sapiens
aagcaattcttctgc

SEQ ID NO: 759634 - DNA, 15 bp, Homo sapiens
agcaattcttctgct

SEQ ID NO: 759635 - DNA, 15 bp, Homo sapiens
gcaattcttctgctt

SEQ ID NO: 759636 - DNA, 15 bp, Homo sapiens
caattcttctgcttc

SEQ ID NO: 759637 - DNA, 15 bp, Homo sapiens
aattcttctgcttca

SEQ ID NO: 759638 - DNA, 15 bp, Homo sapiens
attcttctgcttcag

SEQ ID NO: 759639 - DNA, 15 bp, Homo sapiens
ttcttctgcttcagc

SEQ ID NO: 759640 - DNA, 15 bp, Homo sapiens
tcttctgcttcagcc

SEQ ID NO: 759641 - DNA, 15 bp, Homo sapiens
cttctgcttcagcct

SEQ ID NO: 759642 - DNA, 15 bp, Homo sapiens
ttctgcttcagcctc

SEQ ID NO: 759643 - DNA, 15 bp, Homo sapiens
tctgcttcagcctcc

SEQ ID NO: 759644 - DNA, 15 bp, Homo sapiens
ctgagtagctgggat

SEQ ID NO: 759645 - DNA, 15 bp, Homo sapiens
tgagtagctgggatt

SEQ ID NO: 759646 - DNA, 15 bp, Homo sapiens
ggattacaggcaccc

SEQ ID NO: 759647 - DNA, 15 bp, Homo sapiens
gattacaggcaccca

SEQ ID NO: 759648 - DNA, 15 bp, Homo sapiens
attacaggcacccac

SEQ ID NO: 759649 - DNA, 15 bp, Homo sapiens
ttacaggcacccaca

SEQ ID NO: 759650 - DNA, 15 bp, Homo sapiens
tacaggcacccacaa

SEQ ID NO: 759651 - DNA, 15 bp, Homo sapiens
acaggcacccacaac

SEQ ID NO: 759652 - DNA, 15 bp, Homo sapiens
caggcacccacaacc

SEQ ID NO: 759653 - DNA, 15 bp, Homo sapiens
aggcacccacaaccg

SEQ ID NO: 759654 - DNA, 15 bp, Homo sapiens
ggcacccacaaccgt

SEQ ID NO: 759655 - DNA, 15 bp, Homo sapiens
gcacccacaaccgtg

SEQ ID NO: 759656 - DNA, 15 bp, Homo sapiens
cacccacaaccgtgc

SEQ ID NO: 759657 - DNA, 15 bp, Homo sapiens
acccacaaccgtgcc

SEQ ID NO: 759658 - DNA, 15 bp, Homo sapiens
cccacaaccgtgccc

SEQ ID NO: 759659 - DNA, 15 bp, Homo sapiens
ccacaaccgtgccca

SEQ ID NO: 759660 - DNA, 15 bp, Homo sapiens
cacaaccgtgcccag

SEQ ID NO: 759661 - DNA, 15 bp, Homo sapiens
acaaccgtgcccagc

SEQ ID NO: 759662 - DNA, 15 bp, Homo sapiens
caaccgtgcccagct

SEQ ID NO: 759663 - DNA, 15 bp, Homo sapiens
aaccgtgcccagcta

SEQ ID NO: 759664 - DNA, 15 bp, Homo sapiens
accgtgcccagctaa

SEQ ID NO: 759665 - DNA, 15 bp, Homo sapiens
ccgtgcccagctaat

SEQ ID NO: 759666 - DNA, 15 bp, Homo sapiens
cgtgcccagctaatt

SEQ ID NO: 759667 - DNA, 15 bp, Homo sapiens
gtgcccagctaattt

SEQ ID NO: 759668 - DNA, 15 bp, Homo sapiens
tgcccagctaatttt

SEQ ID NO: 759669 - DNA, 15 bp, Homo sapiens
ttagtagagacaggt

SEQ ID NO: 759670 - DNA, 15 bp, Homo sapiens
tagtagagacaggtt

SEQ ID NO: 759671 - DNA, 15 bp, Homo sapiens
agtagagacaggttt

SEQ ID NO: 759672 - DNA, 15 bp, Homo sapiens
gtagagacaggtttt

SEQ ID NO: 759673 - DNA, 15 bp, Homo sapiens
tagagacaggttttc

SEQ ID NO: 759674 - DNA, 15 bp, Homo sapiens
agagacaggttttca

SEQ ID NO: 759675 - DNA, 15 bp, Homo sapiens
gagacaggttttcac

SEQ ID NO: 759676 - DNA, 15 bp, Homo sapiens
agacaggttttcacc

SEQ ID NO: 759677 - DNA, 15 bp, Homo sapiens
gacaggttttcacca

SEQ ID NO: 759678 - DNA, 15 bp, Homo sapiens
acaggttttcaccat

SEQ ID NO: 759679 - DNA, 15 bp, Homo sapiens
caggttttcaccatg

SEQ ID NO: 759680 - DNA, 15 bp, Homo sapiens
aggttttcaccatgt

SEQ ID NO: 759681 - DNA, 15 bp, Homo sapiens
ggttttcaccatgtt

SEQ ID NO: 759682 - DNA, 15 bp, Homo sapiens
gttttcaccatgttg

SEQ ID NO: 759683 - DNA, 15 bp, Homo sapiens
ttttcaccatgttgg

SEQ ID NO: 759684 - DNA, 15 bp, Homo sapiens
gccaggctggtctcg

SEQ ID NO: 759685 - DNA, 15 bp, Homo sapiens
ccaggctggtctcga

SEQ ID NO: 759686 - DNA, 15 bp, Homo sapiens
tggtctcgaactcct

SEQ ID NO: 759687 - DNA, 15 bp, Homo sapiens
ggtctcgaactcctg

SEQ ID NO: 759688 - DNA, 15 bp, Homo sapiens
gtctcgaactcctgc

SEQ ID NO: 759689 - DNA, 15 bp, Homo sapiens
tctcgaactcctgcc

SEQ ID NO: 759690 - DNA, 15 bp, Homo sapiens
ctcgaactcctgccc

SEQ ID NO: 759691 - DNA, 15 bp, Homo sapiens
tcgaactcctgccct

SEQ ID NO: 759692 - DNA, 15 bp, Homo sapiens
cgaactcctgccctc

SEQ ID NO: 759693 - DNA, 15 bp, Homo sapiens
gaactcctgccctca

SEQ ID NO: 759694 - DNA, 15 bp, Homo sapiens
aactcctgccctcag

SEQ ID NO: 759695 - DNA, 15 bp, Homo sapiens
actcctgccctcagg

SEQ ID NO: 759696 - DNA, 15 bp, Homo sapiens
ctcctgccctcaggt

SEQ ID NO: 759697 - DNA, 15 bp, Homo sapiens
tcctgccctcaggtg

SEQ ID NO: 759698 - DNA, 15 bp, Homo sapiens
cctgccctcaggtga

SEQ ID NO: 759699 - DNA, 15 bp, Homo sapiens
ctgccctcaggtgat

SEQ ID NO: 759700 - DNA, 15 bp, Homo sapiens
tgccctcaggtgatc

SEQ ID NO: 759701 - DNA, 15 bp, Homo sapiens
gccctcaggtgatcc

SEQ ID NO: 759702 - DNA, 15 bp, Homo sapiens
ccctcaggtgatcca

SEQ ID NO: 759703 - DNA, 15 bp, Homo sapiens
cctcaggtgatccac

SEQ ID NO: 759704 - DNA, 15 bp, Homo sapiens
ctcaggtgatccacc

SEQ ID NO: 759705 - DNA, 15 bp, Homo sapiens
tcaggtgatccacct

SEQ ID NO: 759706 - DNA, 15 bp, Homo sapiens
caggtgatccacctg

SEQ ID NO: 759707 - DNA, 15 bp, Homo sapiens
aggtgatccacctgc

SEQ ID NO: 759708 - DNA, 15 bp, Homo sapiens
ggtgatccacctgcc

SEQ ID NO: 759709 - DNA, 15 bp, Homo sapiens
gatccacctgcctca

SEQ ID NO: 759710 - DNA, 15 bp, Homo sapiens
atccacctgcctcag

SEQ ID NO: 759711 - DNA, 15 bp, Homo sapiens
tccacctgcctcagc

SEQ ID NO: 759712 - DNA, 15 bp, Homo sapiens
ccacctgcctcagcc

SEQ ID NO: 759713 - DNA, 15 bp, Homo sapiens
cacctgcctcagcct

SEQ ID NO: 759714 - DNA, 15 bp, Homo sapiens
acctgcctcagcctc

SEQ ID NO: 759715 - DNA, 15 bp, Homo sapiens
tgagccaccacgcca

SEQ ID NO: 759716 - DNA, 15 bp, Homo sapiens
gagccaccacgccaa

SEQ ID NO: 759717 - DNA, 15 bp, Homo sapiens
agccaccacgccaag

SEQ ID NO: 759718 - DNA, 15 bp, Homo sapiens
gccaccacgccaagc

SEQ ID NO: 759719 - DNA, 15 bp, Homo sapiens
ccaccacgccaagcc

SEQ ID NO: 759720 - DNA, 15 bp, Homo sapiens
caccacgccaagcct

SEQ ID NO: 759721 - DNA, 15 bp, Homo sapiens
accacgccaagcctg

SEQ ID NO: 759722 - DNA, 15 bp, Homo sapiens
ccacgccaagcctga

SEQ ID NO: 759723 - DNA, 15 bp, Homo sapiens
cacgccaagcctgaa

SEQ ID NO: 759724 - DNA, 15 bp, Homo sapiens
acgccaagcctgaat

SEQ ID NO: 759725 - DNA, 15 bp, Homo sapiens
cgccaagcctgaatt

SEQ ID NO: 759726 - DNA, 15 bp, Homo sapiens
gccaagcctgaatta

SEQ ID NO: 759727 - DNA, 15 bp, Homo sapiens
ccaagcctgaattag

SEQ ID NO: 759728 - DNA, 15 bp, Homo sapiens
caagcctgaattagt

SEQ ID NO: 759729 - DNA, 15 bp, Homo sapiens
aagcctgaattagtt

SEQ ID NO: 759730 - DNA, 15 bp, Homo sapiens
agcctgaattagttt

SEQ ID NO: 759731 - DNA, 15 bp, Homo sapiens
gcctgaattagtttt

SEQ ID NO: 759732 - DNA, 15 bp, Homo sapiens
cctgaattagttttt

SEQ ID NO: 759733 - DNA, 15 bp, Homo sapiens
ctgaattagtttttt

SEQ ID NO: 759734 - DNA, 15 bp, Homo sapiens
tgaattagtttttta

SEQ ID NO: 759735 - DNA, 15 bp, Homo sapiens
gaattagttttttag

SEQ ID NO: 759736 - DNA, 15 bp, Homo sapiens
aattagttttttaga

SEQ ID NO: 759737 - DNA, 15 bp, Homo sapiens
attagttttttagaa

SEQ ID NO: 759738 - DNA, 15 bp, Homo sapiens
ttagttttttagaat

SEQ ID NO: 759739 - DNA, 15 bp, Homo sapiens
tagttttttagaatg

SEQ ID NO: 759740 - DNA, 15 bp, Homo sapiens
agttttttagaatgt

SEQ ID NO: 759741 - DNA, 15 bp, Homo sapiens
gttttttagaatgtg

SEQ ID NO: 759742 - DNA, 15 bp, Homo sapiens
ttttttagaatgtgt

SEQ ID NO: 759743 - DNA, 15 bp, Homo sapiens
tttttagaatgtgtg

SEQ ID NO: 759744 - DNA, 15 bp, Homo sapiens
ttttagaatgtgtgt

SEQ ID NO: 759745 - DNA, 15 bp, Homo sapiens
tttagaatgtgtgta

SEQ ID NO: 759746 - DNA, 15 bp, Homo sapiens
ttagaatgtgtgtat

SEQ ID NO: 759747 - DNA, 15 bp, Homo sapiens
tagaatgtgtgtatt

SEQ ID NO: 759748 - DNA, 15 bp, Homo sapiens
agaatgtgtgtatta

SEQ ID NO: 759749 - DNA, 15 bp, Homo sapiens
gaatgtgtgtattat

SEQ ID NO: 759750 - DNA, 15 bp, Homo sapiens
aatgtgtgtattatt

SEQ ID NO: 759751 - DNA, 15 bp, Homo sapiens
atgtgtgtattatta

SEQ ID NO: 759752 - DNA, 15 bp, Homo sapiens
tgtgtgtattattat

SEQ ID NO: 759753 - DNA, 15 bp, Homo sapiens
gtgtgtattattatt

SEQ ID NO: 759754 - DNA, 15 bp, Homo sapiens
tgtgtattattatta

SEQ ID NO: 759755 - DNA, 15 bp, Homo sapiens
gtgtattattattat

SEQ ID NO: 759756 - DNA, 15 bp, Homo sapiens
tgtattattattatt

SEQ ID NO: 759757 - DNA, 15 bp, Homo sapiens
gtattattattattt

SEQ ID NO: 759758 - DNA, 15 bp, Homo sapiens
attattattattttt

SEQ ID NO: 759759 - DNA, 15 bp, Homo sapiens
ttattattatttttt

SEQ ID NO: 759760 - DNA, 15 bp, Homo sapiens
tattattattttttt

SEQ ID NO: 759761 - DNA, 15 bp, Homo sapiens
attattatttttttt

SEQ ID NO: 759762 - DNA, 15 bp, Homo sapiens
ttattattttttttt

SEQ ID NO: 759763 - DNA, 15 bp, Homo sapiens
tattatttttttttt

SEQ ID NO: 759764 - DNA, 15 bp, Homo sapiens
attattttttttttg

SEQ ID NO: 759765 - DNA, 15 bp, Homo sapiens
ttattttttttttga

SEQ ID NO: 759766 - DNA, 15 bp, Homo sapiens
tattttttttttgag

SEQ ID NO: 759767 - DNA, 15 bp, Homo sapiens
attttttttttgaga

SEQ ID NO: 759768 - DNA, 15 bp, Homo sapiens
ttttttttgagacaa

SEQ ID NO: 759769 - DNA, 15 bp, Homo sapiens
tttttttgagacaag

SEQ ID NO: 759770 - DNA, 15 bp, Homo sapiens
ttttttgagacaagg

SEQ ID NO: 759771 - DNA, 15 bp, Homo sapiens
tttttgagacaaggt

SEQ ID NO: 759772 - DNA, 15 bp, Homo sapiens
ttttgagacaaggtc

SEQ ID NO: 759773 - DNA, 15 bp, Homo sapiens
tttgagacaaggtct

SEQ ID NO: 759774 - DNA, 15 bp, Homo sapiens
ttgagacaaggtctt

SEQ ID NO: 759775 - DNA, 15 bp, Homo sapiens
tgagacaaggtctta

SEQ ID NO: 759776 - DNA, 15 bp, Homo sapiens
gagacaaggtcttac

SEQ ID NO: 759777 - DNA, 15 bp, Homo sapiens
agacaaggtcttact

SEQ ID NO: 759778 - DNA, 15 bp, Homo sapiens
gacaaggtcttactc

SEQ ID NO: 759779 - DNA, 15 bp, Homo sapiens
acaaggtcttactct

SEQ ID NO: 759780 - DNA, 15 bp, Homo sapiens
caaggtcttactctg

SEQ ID NO: 759781 - DNA, 15 bp, Homo sapiens
aaggtcttactctgt

SEQ ID NO: 759782 - DNA, 15 bp, Homo sapiens
aggtcttactctgtc

SEQ ID NO: 759783 - DNA, 15 bp, Homo sapiens
ggtcttactctgtcg

SEQ ID NO: 759784 - DNA, 15 bp, Homo sapiens
gtcttactctgtcgc

SEQ ID NO: 759785 - DNA, 15 bp, Homo sapiens
tcttactctgtcgcc

SEQ ID NO: 759786 - DNA, 15 bp, Homo sapiens
cttactctgtcgccc

SEQ ID NO: 759787 - DNA, 15 bp, Homo sapiens
ttactctgtcgccca

SEQ ID NO: 759788 - DNA, 15 bp, Homo sapiens
tactctgtcgcccag

SEQ ID NO: 759789 - DNA, 15 bp, Homo sapiens
actctgtcgcccagg

SEQ ID NO: 759790 - DNA, 15 bp, Homo sapiens
ctctgtcgcccaggc

SEQ ID NO: 759791 - DNA, 15 bp, Homo sapiens
tctgtcgcccaggct

SEQ ID NO: 759792 - DNA, 15 bp, Homo sapiens
ctgtcgcccaggcta

SEQ ID NO: 759793 - DNA, 15 bp, Homo sapiens
tgtcgcccaggctag

SEQ ID NO: 759794 - DNA, 15 bp, Homo sapiens
gtcgcccaggctaga

SEQ ID NO: 759795 - DNA, 15 bp, Homo sapiens
tcgcccaggctagag

SEQ ID NO: 759796 - DNA, 15 bp, Homo sapiens
cgcccaggctagagt

SEQ ID NO: 759797 - DNA, 15 bp, Homo sapiens
gcccaggctagagtg

SEQ ID NO: 759798 - DNA, 15 bp, Homo sapiens
gctagagtgcagtgt

SEQ ID NO: 759799 - DNA, 15 bp, Homo sapiens
ctagagtgcagtgtc

SEQ ID NO: 759800 - DNA, 15 bp, Homo sapiens
tagagtgcagtgtca

SEQ ID NO: 759801 - DNA, 15 bp, Homo sapiens
agagtgcagtgtcat

SEQ ID NO: 759802 - DNA, 15 bp, Homo sapiens
gagtgcagtgtcatg

SEQ ID NO: 759803 - DNA, 15 bp, Homo sapiens
agtgcagtgtcatga

SEQ ID NO: 759804 - DNA, 15 bp, Homo sapiens
gtgcagtgtcatgag

SEQ ID NO: 759805 - DNA, 15 bp, Homo sapiens
tgcagtgtcatgagc

SEQ ID NO: 759806 - DNA, 15 bp, Homo sapiens
gcagtgtcatgagcc

SEQ ID NO: 759807 - DNA, 15 bp, Homo sapiens
cagtgtcatgagccc

SEQ ID NO: 759808 - DNA, 15 bp, Homo sapiens
agtgtcatgagcccc

SEQ ID NO: 759809 - DNA, 15 bp, Homo sapiens
gtgtcatgagcccca

SEQ ID NO: 759810 - DNA, 15 bp, Homo sapiens
tgtcatgagccccac

SEQ ID NO: 759811 - DNA, 15 bp, Homo sapiens
gtcatgagccccacc

SEQ ID NO: 759812 - DNA, 15 bp, Homo sapiens
tcatgagccccacct

SEQ ID NO: 759813 - DNA, 15 bp, Homo sapiens
catgagccccacctg

SEQ ID NO: 759814 - DNA, 15 bp, Homo sapiens
atgagccccacctgg

SEQ ID NO: 759815 - DNA, 15 bp, Homo sapiens
tgagccccacctggg

SEQ ID NO: 759816 - DNA, 15 bp, Homo sapiens
gagccccacctgggc

SEQ ID NO: 759817 - DNA, 15 bp, Homo sapiens
agccccacctgggcc

SEQ ID NO: 759818 - DNA, 15 bp, Homo sapiens
gccccacctgggccc

SEQ ID NO: 759819 - DNA, 15 bp, Homo sapiens
ccccacctgggccca

SEQ ID NO: 759820 - DNA, 15 bp, Homo sapiens
cccacctgggcccaa

SEQ ID NO: 759821 - DNA, 15 bp, Homo sapiens
ccacctgggcccaag

SEQ ID NO: 759822 - DNA, 15 bp, Homo sapiens
cacctgggcccaagt

SEQ ID NO: 759823 - DNA, 15 bp, Homo sapiens
acctgggcccaagtg

SEQ ID NO: 759824 - DNA, 15 bp, Homo sapiens
cctgggcccaagtga

SEQ ID NO: 759825 - DNA, 15 bp, Homo sapiens
ctgggcccaagtgat

SEQ ID NO: 759826 - DNA, 15 bp, Homo sapiens
tgggcccaagtgatc

SEQ ID NO: 759827 - DNA, 15 bp, Homo sapiens
gggcccaagtgatct

SEQ ID NO: 759828 - DNA, 15 bp, Homo sapiens
ggcccaagtgatctt

SEQ ID NO: 759829 - DNA, 15 bp, Homo sapiens
gcccaagtgatcttt

SEQ ID NO: 759830 - DNA, 15 bp, Homo sapiens
cccaagtgatctttc

SEQ ID NO: 759831 - DNA, 15 bp, Homo sapiens
ccaagtgatctttcc

SEQ ID NO: 759832 - DNA, 15 bp, Homo sapiens
caagtgatctttcca

SEQ ID NO: 759833 - DNA, 15 bp, Homo sapiens
aagtgatctttccat

SEQ ID NO: 759834 - DNA, 15 bp, Homo sapiens
agtgatctttccatc

SEQ ID NO: 759835 - DNA, 15 bp, Homo sapiens
gtgatctttccatct

SEQ ID NO: 759836 - DNA, 15 bp, Homo sapiens
tgatctttccatctc

SEQ ID NO: 759837 - DNA, 15 bp, Homo sapiens
gatctttccatctca

SEQ ID NO: 759838 - DNA, 15 bp, Homo sapiens
atctttccatctcag

SEQ ID NO: 759839 - DNA, 15 bp, Homo sapiens
tctttccatctcagc

SEQ ID NO: 759840 - DNA, 15 bp, Homo sapiens
ctttccatctcagcc

SEQ ID NO: 759841 - DNA, 15 bp, Homo sapiens
tttccatctcagcct

SEQ ID NO: 759842 - DNA, 15 bp, Homo sapiens
catctcagcctccca

SEQ ID NO: 759843 - DNA, 15 bp, Homo sapiens
atctcagcctcccaa

SEQ ID NO: 759844 - DNA, 15 bp, Homo sapiens
tctcagcctcccaag

SEQ ID NO: 759845 - DNA, 15 bp, Homo sapiens
cctcccaagtagcta

SEQ ID NO: 759846 - DNA, 15 bp, Homo sapiens
ctcccaagtagctaa

SEQ ID NO: 759847 - DNA, 15 bp, Homo sapiens
tcccaagtagctaag

SEQ ID NO: 759848 - DNA, 15 bp, Homo sapiens
cccaagtagctaaga

SEQ ID NO: 759849 - DNA, 15 bp, Homo sapiens
ccaagtagctaagac

SEQ ID NO: 759850 - DNA, 15 bp, Homo sapiens
caagtagctaagact

SEQ ID NO: 759851 - DNA, 15 bp, Homo sapiens
aagtagctaagacta

SEQ ID NO: 759852 - DNA, 15 bp, Homo sapiens
agtagctaagactat

SEQ ID NO: 759853 - DNA, 15 bp, Homo sapiens
gtagctaagactata

SEQ ID NO: 759854 - DNA, 15 bp, Homo sapiens
tagctaagactatag

SEQ ID NO: 759855 - DNA, 15 bp, Homo sapiens
agctaagactatagg

SEQ ID NO: 759856 - DNA, 15 bp, Homo sapiens
gctaagactataggt

SEQ ID NO: 759857 - DNA, 15 bp, Homo sapiens
ctaagactataggtg

SEQ ID NO: 759858 - DNA, 15 bp, Homo sapiens
taagactataggtgt

SEQ ID NO: 759859 - DNA, 15 bp, Homo sapiens
aagactataggtgtg

SEQ ID NO: 759860 - DNA, 15 bp, Homo sapiens
agactataggtgtgc

SEQ ID NO: 759861 - DNA, 15 bp, Homo sapiens
gactataggtgtgca

SEQ ID NO: 759862 - DNA, 15 bp, Homo sapiens
actataggtgtgcac

SEQ ID NO: 759863 - DNA, 15 bp, Homo sapiens
ctataggtgtgcacc

SEQ ID NO: 759864 - DNA, 15 bp, Homo sapiens
tataggtgtgcacca

SEQ ID NO: 759865 - DNA, 15 bp, Homo sapiens
ataggtgtgcaccac

SEQ ID NO: 759866 - DNA, 15 bp, Homo sapiens
taggtgtgcaccacc

SEQ ID NO: 759867 - DNA, 15 bp, Homo sapiens
aggtgtgcaccacca

SEQ ID NO: 759868 - DNA, 15 bp, Homo sapiens
ggtgtgcaccaccat

SEQ ID NO: 759869 - DNA, 15 bp, Homo sapiens
gtgtgcaccaccata

SEQ ID NO: 759870 - DNA, 15 bp, Homo sapiens
tgtgcaccaccatac

SEQ ID NO: 759871 - DNA, 15 bp, Homo sapiens
gtgcaccaccatacc

SEQ ID NO: 759872 - DNA, 15 bp, Homo sapiens
tgcaccaccatacct

SEQ ID NO: 759873 - DNA, 15 bp, Homo sapiens
gcaccaccatacctg

SEQ ID NO: 759874 - DNA, 15 bp, Homo sapiens
caccaccatacctgg

SEQ ID NO: 759875 - DNA, 15 bp, Homo sapiens
accaccatacctggc

SEQ ID NO: 759876 - DNA, 15 bp, Homo sapiens
cctggctaatttttc

SEQ ID NO: 759877 - DNA, 15 bp, Homo sapiens
ctggctaatttttct

SEQ ID NO: 759878 - DNA, 15 bp, Homo sapiens
tggctaatttttctt

SEQ ID NO: 759879 - DNA, 15 bp, Homo sapiens
ggctaatttttcttt

SEQ ID NO: 759880 - DNA, 15 bp, Homo sapiens
gctaatttttcttta

SEQ ID NO: 759881 - DNA, 15 bp, Homo sapiens
ctaatttttctttat

SEQ ID NO: 759882 - DNA, 15 bp, Homo sapiens
taatttttctttatt

SEQ ID NO: 759883 - DNA, 15 bp, Homo sapiens
aatttttctttattt

SEQ ID NO: 759884 - DNA, 15 bp, Homo sapiens
atttttctttatttt

SEQ ID NO: 759885 - DNA, 15 bp, Homo sapiens
tttttctttattttt

SEQ ID NO: 759886 - DNA, 15 bp, Homo sapiens
ttttctttatttttc

SEQ ID NO: 759887 - DNA, 15 bp, Homo sapiens
tttctttatttttct

SEQ ID NO: 759888 - DNA, 15 bp, Homo sapiens
ttctttatttttctg

SEQ ID NO: 759889 - DNA, 15 bp, Homo sapiens
tctttatttttctga

SEQ ID NO: 759890 - DNA, 15 bp, Homo sapiens
ctttatttttctgag

SEQ ID NO: 759891 - DNA, 15 bp, Homo sapiens
tttatttttctgaga

SEQ ID NO: 759892 - DNA, 15 bp, Homo sapiens
ttatttttctgagac

SEQ ID NO: 759893 - DNA, 15 bp, Homo sapiens
tatttttctgagaca

SEQ ID NO: 759894 - DNA, 15 bp, Homo sapiens
atttttctgagacac

SEQ ID NO: 759895 - DNA, 15 bp, Homo sapiens
tttttctgagacaca

SEQ ID NO: 759896 - DNA, 15 bp, Homo sapiens
ttttctgagacacag

SEQ ID NO: 759897 - DNA, 15 bp, Homo sapiens
tttctgagacacagt

SEQ ID NO: 759898 - DNA, 15 bp, Homo sapiens
ttctgagacacagtc

SEQ ID NO: 759899 - DNA, 15 bp, Homo sapiens
tctgagacacagtct

SEQ ID NO: 759900 - DNA, 15 bp, Homo sapiens
ctgagacacagtctc

SEQ ID NO: 759901 - DNA, 15 bp, Homo sapiens
tgagacacagtctca

SEQ ID NO: 759902 - DNA, 15 bp, Homo sapiens
gagacacagtctcac

SEQ ID NO: 759903 - DNA, 15 bp, Homo sapiens
agacacagtctcact

SEQ ID NO: 759904 - DNA, 15 bp, Homo sapiens
gacacagtctcactc

SEQ ID NO: 759905 - DNA, 15 bp, Homo sapiens
acacagtctcactct

SEQ ID NO: 759906 - DNA, 15 bp, Homo sapiens
cacagtctcactctg

SEQ ID NO: 759907 - DNA, 15 bp, Homo sapiens
acagtctcactctgt

SEQ ID NO: 759908 - DNA, 15 bp, Homo sapiens
cagtctcactctgtc

SEQ ID NO: 759909 - DNA, 15 bp, Homo sapiens
tctcactctgtcgcc

SEQ ID NO: 759910 - DNA, 15 bp, Homo sapiens
ctcactctgtcgccc

SEQ ID NO: 759911 - DNA, 15 bp, Homo sapiens
tcactctgtcgccca

SEQ ID NO: 759912 - DNA, 15 bp, Homo sapiens
cactctgtcgcccag

SEQ ID NO: 759913 - DNA, 15 bp, Homo sapiens
tagagtgcagtggcc

SEQ ID NO: 759914 - DNA, 15 bp, Homo sapiens
agagtgcagtggccc

SEQ ID NO: 759915 - DNA, 15 bp, Homo sapiens
gagtgcagtggccca

SEQ ID NO: 759916 - DNA, 15 bp, Homo sapiens
agtgcagtggcccaa

SEQ ID NO: 759917 - DNA, 15 bp, Homo sapiens
gtgcagtggcccaat

SEQ ID NO: 759918 - DNA, 15 bp, Homo sapiens
tgcagtggcccaatc

SEQ ID NO: 759919 - DNA, 15 bp, Homo sapiens
gcagtggcccaatct

SEQ ID NO: 759920 - DNA, 15 bp, Homo sapiens
cagtggcccaatctt

SEQ ID NO: 759921 - DNA, 15 bp, Homo sapiens
agtggcccaatcttg

SEQ ID NO: 759922 - DNA, 15 bp, Homo sapiens
gtggcccaatcttgg

SEQ ID NO: 759923 - DNA, 15 bp, Homo sapiens
tggcccaatcttggc

SEQ ID NO: 759924 - DNA, 15 bp, Homo sapiens
ggcccaatcttggca

SEQ ID NO: 759925 - DNA, 15 bp, Homo sapiens
gcccaatcttggcac

SEQ ID NO: 759926 - DNA, 15 bp, Homo sapiens
cccaatcttggcaca

SEQ ID NO: 759927 - DNA, 15 bp, Homo sapiens
ccaatcttggcacat

SEQ ID NO: 759928 - DNA, 15 bp, Homo sapiens
caatcttggcacatt

SEQ ID NO: 759929 - DNA, 15 bp, Homo sapiens
aatcttggcacattg

SEQ ID NO: 759930 - DNA, 15 bp, Homo sapiens
atcttggcacattgc

SEQ ID NO: 759931 - DNA, 15 bp, Homo sapiens
tcttggcacattgca

SEQ ID NO: 759932 - DNA, 15 bp, Homo sapiens
cttggcacattgcaa

SEQ ID NO: 759933 - DNA, 15 bp, Homo sapiens
ttggcacattgcaac

SEQ ID NO: 759934 - DNA, 15 bp, Homo sapiens
tggcacattgcaacc

SEQ ID NO: 759935 - DNA, 15 bp, Homo sapiens
ggcacattgcaacct

SEQ ID NO: 759936 - DNA, 15 bp, Homo sapiens
gcacattgcaacctc

SEQ ID NO: 759937 - DNA, 15 bp, Homo sapiens
cacattgcaacctct

SEQ ID NO: 759938 - DNA, 15 bp, Homo sapiens
acattgcaacctctg

SEQ ID NO: 759939 - DNA, 15 bp, Homo sapiens
cattgcaacctctga

SEQ ID NO: 759940 - DNA, 15 bp, Homo sapiens
attgcaacctctgac

SEQ ID NO: 759941 - DNA, 15 bp, Homo sapiens
ttgcaacctctgact

SEQ ID NO: 759942 - DNA, 15 bp, Homo sapiens
tgcaacctctgactc

SEQ ID NO: 759943 - DNA, 15 bp, Homo sapiens
gcaacctctgactcc

SEQ ID NO: 759944 - DNA, 15 bp, Homo sapiens
caacctctgactcct

SEQ ID NO: 759945 - DNA, 15 bp, Homo sapiens
aacctctgactcctg

SEQ ID NO: 759946 - DNA, 15 bp, Homo sapiens
acctctgactcctgg

SEQ ID NO: 759947 - DNA, 15 bp, Homo sapiens
cctctgactcctggg

SEQ ID NO: 759948 - DNA, 15 bp, Homo sapiens
ctctgactcctgggt

SEQ ID NO: 759949 - DNA, 15 bp, Homo sapiens
tctgactcctgggtt

SEQ ID NO: 759950 - DNA, 15 bp, Homo sapiens
ctgactcctgggttc

SEQ ID NO: 759951 - DNA, 15 bp, Homo sapiens
tgactcctgggttca

SEQ ID NO: 759952 - DNA, 15 bp, Homo sapiens
gactcctgggttcaa

SEQ ID NO: 759953 - DNA, 15 bp, Homo sapiens
actcctgggttcaag

SEQ ID NO: 759954 - DNA, 15 bp, Homo sapiens
tcctgggttcaagca

SEQ ID NO: 759955 - DNA, 15 bp, Homo sapiens
cctgggttcaagcaa

SEQ ID NO: 759956 - DNA, 15 bp, Homo sapiens
ctgggttcaagcaat

SEQ ID NO: 759957 - DNA, 15 bp, Homo sapiens
tgggttcaagcaatt

SEQ ID NO: 759958 - DNA, 15 bp, Homo sapiens
gggttcaagcaattc

SEQ ID NO: 759959 - DNA, 15 bp, Homo sapiens
gggactacaggcgca

SEQ ID NO: 759960 - DNA, 15 bp, Homo sapiens
ggactacaggcgcac

SEQ ID NO: 759961 - DNA, 15 bp, Homo sapiens
gactacaggcgcaca

SEQ ID NO: 759962 - DNA, 15 bp, Homo sapiens
actacaggcgcacac

SEQ ID NO: 759963 - DNA, 15 bp, Homo sapiens
ctacaggcgcacacc

SEQ ID NO: 759964 - DNA, 15 bp, Homo sapiens
tacaggcgcacacca

SEQ ID NO: 759965 - DNA, 15 bp, Homo sapiens
acaggcgcacaccac

SEQ ID NO: 759966 - DNA, 15 bp, Homo sapiens
caggcgcacaccacc

SEQ ID NO: 759967 - DNA, 15 bp, Homo sapiens
aggcgcacaccacca

SEQ ID NO: 759968 - DNA, 15 bp, Homo sapiens
ggcgcacaccaccac

SEQ ID NO: 759969 - DNA, 15 bp, Homo sapiens
gcgcacaccaccaca

SEQ ID NO: 759970 - DNA, 15 bp, Homo sapiens
cgcacaccaccacac

SEQ ID NO: 759971 - DNA, 15 bp, Homo sapiens
gcacaccaccacacc

SEQ ID NO: 759972 - DNA, 15 bp, Homo sapiens
cacaccaccacacct

SEQ ID NO: 759973 - DNA, 15 bp, Homo sapiens
acaccaccacacctg

SEQ ID NO: 759974 - DNA, 15 bp, Homo sapiens
caccaccacacctgg

SEQ ID NO: 759975 - DNA, 15 bp, Homo sapiens
accaccacacctggc

SEQ ID NO: 759976 - DNA, 15 bp, Homo sapiens
ttgtatttttagtaa

SEQ ID NO: 759977 - DNA, 15 bp, Homo sapiens
tgtatttttagtaaa

SEQ ID NO: 759978 - DNA, 15 bp, Homo sapiens
gtatttttagtaaag

SEQ ID NO: 759979 - DNA, 15 bp, Homo sapiens
tatttttagtaaaga

SEQ ID NO: 759980 - DNA, 15 bp, Homo sapiens
atttttagtaaagat

SEQ ID NO: 759981 - DNA, 15 bp, Homo sapiens
tttttagtaaagatg

SEQ ID NO: 759982 - DNA, 15 bp, Homo sapiens
ttttagtaaagatgg

SEQ ID NO: 759983 - DNA, 15 bp, Homo sapiens
tttagtaaagatggg

SEQ ID NO: 759984 - DNA, 15 bp, Homo sapiens
ttagtaaagatgggg

SEQ ID NO: 759985 - DNA, 15 bp, Homo sapiens
tagtaaagatggggt

SEQ ID NO: 759986 - DNA, 15 bp, Homo sapiens
agtaaagatggggtt

SEQ ID NO: 759987 - DNA, 15 bp, Homo sapiens
gtaaagatggggttt

SEQ ID NO: 759988 - DNA, 15 bp, Homo sapiens
taaagatggggtttc

SEQ ID NO: 759989 - DNA, 15 bp, Homo sapiens
aaagatggggtttca

SEQ ID NO: 759990 - DNA, 15 bp, Homo sapiens
aagatggggtttcac

SEQ ID NO: 759991 - DNA, 15 bp, Homo sapiens
gtttcaccatgttga

SEQ ID NO: 759992 - DNA, 15 bp, Homo sapiens
tttcaccatgttgaa

SEQ ID NO: 759993 - DNA, 15 bp, Homo sapiens
ttcaccatgttgaac

SEQ ID NO: 759994 - DNA, 15 bp, Homo sapiens
tcaccatgttgaaca

SEQ ID NO: 759995 - DNA, 15 bp, Homo sapiens
caccatgttgaacag

SEQ ID NO: 759996 - DNA, 15 bp, Homo sapiens
accatgttgaacagg

SEQ ID NO: 759997 - DNA, 15 bp, Homo sapiens
ccatgttgaacaggc

SEQ ID NO: 759998 - DNA, 15 bp, Homo sapiens
catgttgaacaggct

SEQ ID NO: 759999 - DNA, 15 bp, Homo sapiens
atgttgaacaggctg

SEQ ID NO: 760000 - DNA, 15 bp, Homo sapiens
tgttgaacaggctgg

SEQ ID NO: 760001 - DNA, 15 bp, Homo sapiens
gttgaacaggctggt

SEQ ID NO: 760002 - DNA, 15 bp, Homo sapiens
ttgaacaggctggtc

SEQ ID NO: 760003 - DNA, 15 bp, Homo sapiens
tgaacaggctggtct

SEQ ID NO: 760004 - DNA, 15 bp, Homo sapiens
gaacaggctggtctt

SEQ ID NO: 760005 - DNA, 15 bp, Homo sapiens
aacaggctggtcttg

SEQ ID NO: 760006 - DNA, 15 bp, Homo sapiens
acaggctggtcttga

SEQ ID NO: 760007 - DNA, 15 bp, Homo sapiens
tcaggtgatccaccc

SEQ ID NO: 760008 - DNA, 15 bp, Homo sapiens
caggtgatccaccca

SEQ ID NO: 760009 - DNA, 15 bp, Homo sapiens
aggtgatccacccaa

SEQ ID NO: 760010 - DNA, 15 bp, Homo sapiens
ggtgatccacccaaa

SEQ ID NO: 760011 - DNA, 15 bp, Homo sapiens
gtgatccacccaaag

SEQ ID NO: 760012 - DNA, 15 bp, Homo sapiens
tgatccacccaaagg

SEQ ID NO: 760013 - DNA, 15 bp, Homo sapiens
gatccacccaaaggg

SEQ ID NO: 760014 - DNA, 15 bp, Homo sapiens
atccacccaaagggc

SEQ ID NO: 760015 - DNA, 15 bp, Homo sapiens
tccacccaaagggct

SEQ ID NO: 760016 - DNA, 15 bp, Homo sapiens
ccacccaaagggctg

SEQ ID NO: 760017 - DNA, 15 bp, Homo sapiens
cacccaaagggctgg

SEQ ID NO: 760018 - DNA, 15 bp, Homo sapiens
acccaaagggctggg

SEQ ID NO: 760019 - DNA, 15 bp, Homo sapiens
cccaaagggctggga

SEQ ID NO: 760020 - DNA, 15 bp, Homo sapiens
ccaaagggctgggat

SEQ ID NO: 760021 - DNA, 15 bp, Homo sapiens
caaagggctgggatt

SEQ ID NO: 760022 - DNA, 15 bp, Homo sapiens
aaagggctgggatta

SEQ ID NO: 760023 - DNA, 15 bp, Homo sapiens
aagggctgggattac

SEQ ID NO: 760024 - DNA, 15 bp, Homo sapiens
agggctgggattaca

SEQ ID NO: 760025 - DNA, 15 bp, Homo sapiens
gggctgggattacaa

SEQ ID NO: 760026 - DNA, 15 bp, Homo sapiens
ggctgggattacaag

SEQ ID NO: 760027 - DNA, 15 bp, Homo sapiens
gctgggattacaagc

SEQ ID NO: 760028 - DNA, 15 bp, Homo sapiens
ctgggattacaagcg

SEQ ID NO: 760029 - DNA, 15 bp, Homo sapiens
tgggattacaagcgt

SEQ ID NO: 760030 - DNA, 15 bp, Homo sapiens
gggattacaagcgtg

SEQ ID NO: 760031 - DNA, 15 bp, Homo sapiens
ggattacaagcgtga

SEQ ID NO: 760032 - DNA, 15 bp, Homo sapiens
gattacaagcgtgag

SEQ ID NO: 760033 - DNA, 15 bp, Homo sapiens
attacaagcgtgagc

SEQ ID NO: 760034 - DNA, 15 bp, Homo sapiens
ttacaagcgtgagcc

SEQ ID NO: 760035 - DNA, 15 bp, Homo sapiens
tacaagcgtgagcca

SEQ ID NO: 760036 - DNA, 15 bp, Homo sapiens
acaagcgtgagccac

SEQ ID NO: 760037 - DNA, 15 bp, Homo sapiens
caagcgtgagccact

SEQ ID NO: 760038 - DNA, 15 bp, Homo sapiens
aagcgtgagccactg

SEQ ID NO: 760039 - DNA, 15 bp, Homo sapiens
agcgtgagccactgc

SEQ ID NO: 760040 - DNA, 15 bp, Homo sapiens
cactgcgcctggcca

SEQ ID NO: 760041 - DNA, 15 bp, Homo sapiens
actgcgcctggccat

SEQ ID NO: 760042 - DNA, 15 bp, Homo sapiens
ctgcgcctggccatg

SEQ ID NO: 760043 - DNA, 15 bp, Homo sapiens
tgcgcctggccatgc

SEQ ID NO: 760044 - DNA, 15 bp, Homo sapiens
gcgcctggccatgcc

SEQ ID NO: 760045 - DNA, 15 bp, Homo sapiens
cgcctggccatgcct

SEQ ID NO: 760046 - DNA, 15 bp, Homo sapiens
gcctggccatgcctg

SEQ ID NO: 760047 - DNA, 15 bp, Homo sapiens
cctggccatgcctgg

SEQ ID NO: 760048 - DNA, 15 bp, Homo sapiens
ctggccatgcctggc

SEQ ID NO: 760049 - DNA, 15 bp, Homo sapiens
tggccatgcctggct

SEQ ID NO: 760050 - DNA, 15 bp, Homo sapiens
ggccatgcctggcta

SEQ ID NO: 760051 - DNA, 15 bp, Homo sapiens
gccatgcctggctaa

SEQ ID NO: 760052 - DNA, 15 bp, Homo sapiens
catgcctggctaatt

SEQ ID NO: 760053 - DNA, 15 bp, Homo sapiens
atgcctggctaattt

SEQ ID NO: 760054 - DNA, 15 bp, Homo sapiens
tgcctggctaatttt

SEQ ID NO: 760055 - DNA, 15 bp, Homo sapiens
gctaatttttgtata

SEQ ID NO: 760056 - DNA, 15 bp, Homo sapiens
ctaatttttgtataa

SEQ ID NO: 760057 - DNA, 15 bp, Homo sapiens
taatttttgtataac

SEQ ID NO: 760058 - DNA, 15 bp, Homo sapiens
aatttttgtataact

SEQ ID NO: 760059 - DNA, 15 bp, Homo sapiens
atttttgtataactt

SEQ ID NO: 760060 - DNA, 15 bp, Homo sapiens
tttttgtataacttt

SEQ ID NO: 760061 - DNA, 15 bp, Homo sapiens
ttttgtataactttg

SEQ ID NO: 760062 - DNA, 15 bp, Homo sapiens
tttgtataactttgg

SEQ ID NO: 760063 - DNA, 15 bp, Homo sapiens
ttgtataactttggg

SEQ ID NO: 760064 - DNA, 15 bp, Homo sapiens
tgtataactttggga

SEQ ID NO: 760065 - DNA, 15 bp, Homo sapiens
gtataactttgggag

SEQ ID NO: 760066 - DNA, 15 bp, Homo sapiens
tataactttgggaga

SEQ ID NO: 760067 - DNA, 15 bp, Homo sapiens
ataactttgggagag

SEQ ID NO: 760068 - DNA, 15 bp, Homo sapiens
taactttgggagaga

SEQ ID NO: 760069 - DNA, 15 bp, Homo sapiens
aactttgggagagat

SEQ ID NO: 760070 - DNA, 15 bp, Homo sapiens
actttgggagagatg

SEQ ID NO: 760071 - DNA, 15 bp, Homo sapiens
ctttgggagagatgg

SEQ ID NO: 760072 - DNA, 15 bp, Homo sapiens
tttgggagagatggg

SEQ ID NO: 760073 - DNA, 15 bp, Homo sapiens
ttgggagagatgggg

SEQ ID NO: 760074 - DNA, 15 bp, Homo sapiens
tgggagagatggggg

SEQ ID NO: 760075 - DNA, 15 bp, Homo sapiens
gggagagatgggggt

SEQ ID NO: 760076 - DNA, 15 bp, Homo sapiens
ggagagatgggggtt

SEQ ID NO: 760077 - DNA, 15 bp, Homo sapiens
gagagatgggggttt

SEQ ID NO: 760078 - DNA, 15 bp, Homo sapiens
agagatgggggtttc

SEQ ID NO: 760079 - DNA, 15 bp, Homo sapiens
gagatgggggtttcg

SEQ ID NO: 760080 - DNA, 15 bp, Homo sapiens
agatgggggtttcgc

SEQ ID NO: 760081 - DNA, 15 bp, Homo sapiens
gatgggggtttcgcc

SEQ ID NO: 760082 - DNA, 15 bp, Homo sapiens
atgggggtttcgcca

SEQ ID NO: 760083 - DNA, 15 bp, Homo sapiens
tgggggtttcgccat

SEQ ID NO: 760084 - DNA, 15 bp, Homo sapiens
gggggtttcgccatg

SEQ ID NO: 760085 - DNA, 15 bp, Homo sapiens
ggggtttcgccatgt

SEQ ID NO: 760086 - DNA, 15 bp, Homo sapiens
gggtttcgccatgtt

SEQ ID NO: 760087 - DNA, 15 bp, Homo sapiens
ggtttcgccatgttg

SEQ ID NO: 760088 - DNA, 15 bp, Homo sapiens
gtttcgccatgttgc

SEQ ID NO: 760089 - DNA, 15 bp, Homo sapiens
tttcgccatgttgcc

SEQ ID NO: 760090 - DNA, 15 bp, Homo sapiens
ttcgccatgttgccc

SEQ ID NO: 760091 - DNA, 15 bp, Homo sapiens
tcgccatgttgccca

SEQ ID NO: 760092 - DNA, 15 bp, Homo sapiens
cgccatgttgcccag

SEQ ID NO: 760093 - DNA, 15 bp, Homo sapiens
gccatgttgcccagg

SEQ ID NO: 760094 - DNA, 15 bp, Homo sapiens
ccatgttgcccaggc

SEQ ID NO: 760095 - DNA, 15 bp, Homo sapiens
catgttgcccaggct

SEQ ID NO: 760096 - DNA, 15 bp, Homo sapiens
gcccaggctagtctt

SEQ ID NO: 760097 - DNA, 15 bp, Homo sapiens
cccaggctagtcttg

SEQ ID NO: 760098 - DNA, 15 bp, Homo sapiens
ccaggctagtcttga

SEQ ID NO: 760099 - DNA, 15 bp, Homo sapiens
caggctagtcttgac

SEQ ID NO: 760100 - DNA, 15 bp, Homo sapiens
aggctagtcttgacc

SEQ ID NO: 760101 - DNA, 15 bp, Homo sapiens
ggctagtcttgacct

SEQ ID NO: 760102 - DNA, 15 bp, Homo sapiens
gctagtcttgacctc

SEQ ID NO: 760103 - DNA, 15 bp, Homo sapiens
ctagtcttgacctcc

SEQ ID NO: 760104 - DNA, 15 bp, Homo sapiens
tagtcttgacctcct

SEQ ID NO: 760105 - DNA, 15 bp, Homo sapiens
agtcttgacctcctg

SEQ ID NO: 760106 - DNA, 15 bp, Homo sapiens
gtcttgacctcctgg

SEQ ID NO: 760107 - DNA, 15 bp, Homo sapiens
tcttgacctcctggg

SEQ ID NO: 760108 - DNA, 15 bp, Homo sapiens
cttgacctcctgggc

SEQ ID NO: 760109 - DNA, 15 bp, Homo sapiens
ttgacctcctgggct

SEQ ID NO: 760110 - DNA, 15 bp, Homo sapiens
tgacctcctgggctc

SEQ ID NO: 760111 - DNA, 15 bp, Homo sapiens
gacctcctgggctca

SEQ ID NO: 760112 - DNA, 15 bp, Homo sapiens
acctcctgggctcaa

SEQ ID NO: 760113 - DNA, 15 bp, Homo sapiens
cctcctgggctcaag

SEQ ID NO: 760114 - DNA, 15 bp, Homo sapiens
ctcctgggctcaagt

SEQ ID NO: 760115 - DNA, 15 bp, Homo sapiens
tcctgggctcaagtg

SEQ ID NO: 760116 - DNA, 15 bp, Homo sapiens
cctgggctcaagtga

SEQ ID NO: 760117 - DNA, 15 bp, Homo sapiens
ctgggctcaagtgat

SEQ ID NO: 760118 - DNA, 15 bp, Homo sapiens
tgggctcaagtgatc

SEQ ID NO: 760119 - DNA, 15 bp, Homo sapiens
gggctcaagtgatcc

SEQ ID NO: 760120 - DNA, 15 bp, Homo sapiens
tcaagtgatcctcct

SEQ ID NO: 760121 - DNA, 15 bp, Homo sapiens
caagtgatcctcctg

SEQ ID NO: 760122 - DNA, 15 bp, Homo sapiens
aagtgatcctcctgc

SEQ ID NO: 760123 - DNA, 15 bp, Homo sapiens
agtgatcctcctgcc

SEQ ID NO: 760124 - DNA, 15 bp, Homo sapiens
gtgatcctcctgcct

SEQ ID NO: 760125 - DNA, 15 bp, Homo sapiens
tgatcctcctgcctc

SEQ ID NO: 760126 - DNA, 15 bp, Homo sapiens
gatcctcctgcctca

SEQ ID NO: 760127 - DNA, 15 bp, Homo sapiens
atcctcctgcctcag

SEQ ID NO: 760128 - DNA, 15 bp, Homo sapiens
tcctcctgcctcagc

SEQ ID NO: 760129 - DNA, 15 bp, Homo sapiens
cctcctgcctcagcc

SEQ ID NO: 760130 - DNA, 15 bp, Homo sapiens
ctcccaaagtgctag

SEQ ID NO: 760131 - DNA, 15 bp, Homo sapiens
tcccaaagtgctagc

SEQ ID NO: 760132 - DNA, 15 bp, Homo sapiens
cccaaagtgctagca

SEQ ID NO: 760133 - DNA, 15 bp, Homo sapiens
ccaaagtgctagcat

SEQ ID NO: 760134 - DNA, 15 bp, Homo sapiens
caaagtgctagcatt

SEQ ID NO: 760135 - DNA, 15 bp, Homo sapiens
aaagtgctagcatta

SEQ ID NO: 760136 - DNA, 15 bp, Homo sapiens
aagtgctagcattag

SEQ ID NO: 760137 - DNA, 15 bp, Homo sapiens
agtgctagcattaga

SEQ ID NO: 760138 - DNA, 15 bp, Homo sapiens
gtgctagcattagag

SEQ ID NO: 760139 - DNA, 15 bp, Homo sapiens
tgctagcattagagc

SEQ ID NO: 760140 - DNA, 15 bp, Homo sapiens
gctagcattagagcg

SEQ ID NO: 760141 - DNA, 15 bp, Homo sapiens
ctagcattagagcgt

SEQ ID NO: 760142 - DNA, 15 bp, Homo sapiens
tagcattagagcgtg

SEQ ID NO: 760143 - DNA, 15 bp, Homo sapiens
agcattagagcgtga

SEQ ID NO: 760144 - DNA, 15 bp, Homo sapiens
gcattagagcgtgag

SEQ ID NO: 760145 - DNA, 15 bp, Homo sapiens
cattagagcgtgagc

SEQ ID NO: 760146 - DNA, 15 bp, Homo sapiens
attagagcgtgagcc

SEQ ID NO: 760147 - DNA, 15 bp, Homo sapiens
ttagagcgtgagcca

SEQ ID NO: 760148 - DNA, 15 bp, Homo sapiens
tagagcgtgagccac

SEQ ID NO: 760149 - DNA, 15 bp, Homo sapiens
agagcgtgagccacc

SEQ ID NO: 760150 - DNA, 15 bp, Homo sapiens
gagcgtgagccacca

SEQ ID NO: 760151 - DNA, 15 bp, Homo sapiens
agcgtgagccaccat

SEQ ID NO: 760152 - DNA, 15 bp, Homo sapiens
gcgtgagccaccata

SEQ ID NO: 760153 - DNA, 15 bp, Homo sapiens
cgtgagccaccatac

SEQ ID NO: 760154 - DNA, 15 bp, Homo sapiens
gtgagccaccatacc

SEQ ID NO: 760155 - DNA, 15 bp, Homo sapiens
tgagccaccatacct

SEQ ID NO: 760156 - DNA, 15 bp, Homo sapiens
gagccaccatacctg

SEQ ID NO: 760157 - DNA, 15 bp, Homo sapiens
agccaccatacctga

SEQ ID NO: 760158 - DNA, 15 bp, Homo sapiens
gccaccatacctgac

SEQ ID NO: 760159 - DNA, 15 bp, Homo sapiens
ccaccatacctgacg

SEQ ID NO: 760160 - DNA, 15 bp, Homo sapiens
caccatacctgacga

SEQ ID NO: 760161 - DNA, 15 bp, Homo sapiens
accatacctgacgaa

SEQ ID NO: 760162 - DNA, 15 bp, Homo sapiens
ccatacctgacgaat

SEQ ID NO: 760163 - DNA, 15 bp, Homo sapiens
catacctgacgaatg

SEQ ID NO: 760164 - DNA, 15 bp, Homo sapiens
atacctgacgaatgt

SEQ ID NO: 760165 - DNA, 15 bp, Homo sapiens
tacctgacgaatgtg

SEQ ID NO: 760166 - DNA, 15 bp, Homo sapiens
acctgacgaatgtgt

SEQ ID NO: 760167 - DNA, 15 bp, Homo sapiens
cctgacgaatgtgta

SEQ ID NO: 760168 - DNA, 15 bp, Homo sapiens
ctgacgaatgtgtat

SEQ ID NO: 760169 - DNA, 15 bp, Homo sapiens
tgacgaatgtgtata

SEQ ID NO: 760170 - DNA, 15 bp, Homo sapiens
gacgaatgtgtatat

SEQ ID NO: 760171 - DNA, 15 bp, Homo sapiens
acgaatgtgtatatc

SEQ ID NO: 760172 - DNA, 15 bp, Homo sapiens
cgaatgtgtatatct

SEQ ID NO: 760173 - DNA, 15 bp, Homo sapiens
gaatgtgtatatctt

SEQ ID NO: 760174 - DNA, 15 bp, Homo sapiens
aatgtgtatatcttt

SEQ ID NO: 760175 - DNA, 15 bp, Homo sapiens
atgtgtatatctttt

SEQ ID NO: 760176 - DNA, 15 bp, Homo sapiens
tgtgtatatcttttc

SEQ ID NO: 760177 - DNA, 15 bp, Homo sapiens
gtgtatatcttttcc

SEQ ID NO: 760178 - DNA, 15 bp, Homo sapiens
tgtatatcttttcct

SEQ ID NO: 760179 - DNA, 15 bp, Homo sapiens
gtatatcttttcctt

SEQ ID NO: 760180 - DNA, 15 bp, Homo sapiens
tatatcttttccttg

SEQ ID NO: 760181 - DNA, 15 bp, Homo sapiens
atatcttttccttgt

SEQ ID NO: 760182 - DNA, 15 bp, Homo sapiens
tatcttttccttgtg

SEQ ID NO: 760183 - DNA, 15 bp, Homo sapiens
atcttttccttgtgg

SEQ ID NO: 760184 - DNA, 15 bp, Homo sapiens
tcttttccttgtggt

SEQ ID NO: 760185 - DNA, 15 bp, Homo sapiens
cttttccttgtggtg

SEQ ID NO: 760186 - DNA, 15 bp, Homo sapiens
ttttccttgtggtgt

SEQ ID NO: 760187 - DNA, 15 bp, Homo sapiens
tttccttgtggtgta

SEQ ID NO: 760188 - DNA, 15 bp, Homo sapiens
ttccttgtggtgtac

SEQ ID NO: 760189 - DNA, 15 bp, Homo sapiens
tccttgtggtgtact

SEQ ID NO: 760190 - DNA, 15 bp, Homo sapiens
ccttgtggtgtactg

SEQ ID NO: 760191 - DNA, 15 bp, Homo sapiens
cttgtggtgtactga

SEQ ID NO: 760192 - DNA, 15 bp, Homo sapiens
ttgtggtgtactgaa

SEQ ID NO: 760193 - DNA, 15 bp, Homo sapiens
tgtggtgtactgaag

SEQ ID NO: 760194 - DNA, 15 bp, Homo sapiens
gtggtgtactgaagg

SEQ ID NO: 760195 - DNA, 15 bp, Homo sapiens
tggtgtactgaagga

SEQ ID NO: 760196 - DNA, 15 bp, Homo sapiens
ggtgtactgaaggac

SEQ ID NO: 760197 - DNA, 15 bp, Homo sapiens
gtgtactgaaggact

SEQ ID NO: 760198 - DNA, 15 bp, Homo sapiens
tgtactgaaggactt

SEQ ID NO: 760199 - DNA, 15 bp, Homo sapiens
gtactgaaggacttt

SEQ ID NO: 760200 - DNA, 15 bp, Homo sapiens
tactgaaggactttt

SEQ ID NO: 760201 - DNA, 15 bp, Homo sapiens
actgaaggacttttt

SEQ ID NO: 760202 - DNA, 15 bp, Homo sapiens
ctgaaggactttttt

SEQ ID NO: 760203 - DNA, 15 bp, Homo sapiens
tgaaggactttttta

SEQ ID NO: 760204 - DNA, 15 bp, Homo sapiens
gaaggacttttttaa

SEQ ID NO: 760205 - DNA, 15 bp, Homo sapiens
aaggacttttttaag

SEQ ID NO: 760206 - DNA, 15 bp, Homo sapiens
aggacttttttaaga

SEQ ID NO: 760207 - DNA, 15 bp, Homo sapiens
ggacttttttaagaa

SEQ ID NO: 760208 - DNA, 15 bp, Homo sapiens
gacttttttaagaaa

SEQ ID NO: 760209 - DNA, 15 bp, Homo sapiens
acttttttaagaaaa

SEQ ID NO: 760210 - DNA, 15 bp, Homo sapiens
cttttttaagaaaat

SEQ ID NO: 760211 - DNA, 15 bp, Homo sapiens
ttttttaagaaaatg

SEQ ID NO: 760212 - DNA, 15 bp, Homo sapiens
tttttaagaaaatgt

SEQ ID NO: 760213 - DNA, 15 bp, Homo sapiens
ttttaagaaaatgtt

SEQ ID NO: 760214 - DNA, 15 bp, Homo sapiens
tttaagaaaatgttt

SEQ ID NO: 760215 - DNA, 15 bp, Homo sapiens
ttaagaaaatgtttc

SEQ ID NO: 760216 - DNA, 15 bp, Homo sapiens
taagaaaatgtttca

SEQ ID NO: 760217 - DNA, 15 bp, Homo sapiens
aagaaaatgtttcat

SEQ ID NO: 760218 - DNA, 15 bp, Homo sapiens
agaaaatgtttcata

SEQ ID NO: 760219 - DNA, 15 bp, Homo sapiens
gaaaatgtttcatag

SEQ ID NO: 760220 - DNA, 15 bp, Homo sapiens
aaaatgtttcatagg

SEQ ID NO: 760221 - DNA, 15 bp, Homo sapiens
aaatgtttcatagga

SEQ ID NO: 760222 - DNA, 15 bp, Homo sapiens
aatgtttcataggaa

SEQ ID NO: 760223 - DNA, 15 bp, Homo sapiens
atgtttcataggaag

SEQ ID NO: 760224 - DNA, 15 bp, Homo sapiens
tgtttcataggaagg

SEQ ID NO: 760225 - DNA, 15 bp, Homo sapiens
gtttcataggaaggg

SEQ ID NO: 760226 - DNA, 15 bp, Homo sapiens
tttcataggaagggg

SEQ ID NO: 760227 - DNA, 15 bp, Homo sapiens
ttcataggaaggggt

SEQ ID NO: 760228 - DNA, 15 bp, Homo sapiens
tcataggaaggggtt

SEQ ID NO: 760229 - DNA, 15 bp, Homo sapiens
cataggaaggggttt

SEQ ID NO: 760230 - DNA, 15 bp, Homo sapiens
ataggaaggggtttt

SEQ ID NO: 760231 - DNA, 15 bp, Homo sapiens
taggaaggggttttg

SEQ ID NO: 760232 - DNA, 15 bp, Homo sapiens
aggaaggggttttga

SEQ ID NO: 760233 - DNA, 15 bp, Homo sapiens
ggaaggggttttgag

SEQ ID NO: 760234 - DNA, 15 bp, Homo sapiens
gaaggggttttgagt

SEQ ID NO: 760235 - DNA, 15 bp, Homo sapiens
aaggggttttgagtt

SEQ ID NO: 760236 - DNA, 15 bp, Homo sapiens
aggggttttgagttg

SEQ ID NO: 760237 - DNA, 15 bp, Homo sapiens
ggggttttgagttgt

SEQ ID NO: 760238 - DNA, 15 bp, Homo sapiens
gggttttgagttgtt

SEQ ID NO: 760239 - DNA, 15 bp, Homo sapiens
ggttttgagttgttc

SEQ ID NO: 760240 - DNA, 15 bp, Homo sapiens
gttttgagttgttca

SEQ ID NO: 760241 - DNA, 15 bp, Homo sapiens
ttttgagttgttcaa

SEQ ID NO: 760242 - DNA, 15 bp, Homo sapiens
tttgagttgttcaaa

SEQ ID NO: 760243 - DNA, 15 bp, Homo sapiens
ttgagttgttcaaag

SEQ ID NO: 760244 - DNA, 15 bp, Homo sapiens
tgagttgttcaaagg

SEQ ID NO: 760245 - DNA, 15 bp, Homo sapiens
gagttgttcaaagga

SEQ ID NO: 760246 - DNA, 15 bp, Homo sapiens
agttgttcaaaggac

SEQ ID NO: 760247 - DNA, 15 bp, Homo sapiens
gttgttcaaaggaca

SEQ ID NO: 760248 - DNA, 15 bp, Homo sapiens
ttgttcaaaggacaa

SEQ ID NO: 760249 - DNA, 15 bp, Homo sapiens
tgttcaaaggacaac

SEQ ID NO: 760250 - DNA, 15 bp, Homo sapiens
gttcaaaggacaact

SEQ ID NO: 760251 - DNA, 15 bp, Homo sapiens
ttcaaaggacaactt

SEQ ID NO: 760252 - DNA, 15 bp, Homo sapiens
tcaaaggacaacttt

SEQ ID NO: 760253 - DNA, 15 bp, Homo sapiens
caaaggacaactttt

SEQ ID NO: 760254 - DNA, 15 bp, Homo sapiens
aaaggacaacttttg

SEQ ID NO: 760255 - DNA, 15 bp, Homo sapiens
aaggacaacttttga

SEQ ID NO: 760256 - DNA, 15 bp, Homo sapiens
aggacaacttttgaa

SEQ ID NO: 760257 - DNA, 15 bp, Homo sapiens
ggacaacttttgaat

SEQ ID NO: 760258 - DNA, 15 bp, Homo sapiens
gacaacttttgaatg

SEQ ID NO: 760259 - DNA, 15 bp, Homo sapiens
acaacttttgaatga

SEQ ID NO: 760260 - DNA, 15 bp, Homo sapiens
caacttttgaatgag

SEQ ID NO: 760261 - DNA, 15 bp, Homo sapiens
aacttttgaatgagt

SEQ ID NO: 760262 - DNA, 15 bp, Homo sapiens
gtcttagatatgcta

SEQ ID NO: 760263 - DNA, 15 bp, Homo sapiens
tcttagatatgctat

SEQ ID NO: 760264 - DNA, 15 bp, Homo sapiens
cttagatatgctata

SEQ ID NO: 760265 - DNA, 15 bp, Homo sapiens
ttagatatgctataa

SEQ ID NO: 760266 - DNA, 15 bp, Homo sapiens
tagatatgctataaa

SEQ ID NO: 760267 - DNA, 15 bp, Homo sapiens
agatatgctataaag

SEQ ID NO: 760268 - DNA, 15 bp, Homo sapiens
gatatgctataaagg

SEQ ID NO: 760269 - DNA, 15 bp, Homo sapiens
atatgctataaagga

SEQ ID NO: 760270 - DNA, 15 bp, Homo sapiens
tatgctataaaggac

SEQ ID NO: 760271 - DNA, 15 bp, Homo sapiens
atgctataaaggact

SEQ ID NO: 760272 - DNA, 15 bp, Homo sapiens
tgctataaaggactg

SEQ ID NO: 760273 - DNA, 15 bp, Homo sapiens
gctataaaggactgt

SEQ ID NO: 760274 - DNA, 15 bp, Homo sapiens
ctataaaggactgtt

SEQ ID NO: 760275 - DNA, 15 bp, Homo sapiens
tataaaggactgttc

SEQ ID NO: 760276 - DNA, 15 bp, Homo sapiens
ataaaggactgttct

SEQ ID NO: 760277 - DNA, 15 bp, Homo sapiens
taaaggactgttctt

SEQ ID NO: 760278 - DNA, 15 bp, Homo sapiens
aaaggactgttcttg

SEQ ID NO: 760279 - DNA, 15 bp, Homo sapiens
aaggactgttcttgc

SEQ ID NO: 760280 - DNA, 15 bp, Homo sapiens
aggactgttcttgca

SEQ ID NO: 760281 - DNA, 15 bp, Homo sapiens
ggactgttcttgcat

SEQ ID NO: 760282 - DNA, 15 bp, Homo sapiens
gactgttcttgcatc

SEQ ID NO: 760283 - DNA, 15 bp, Homo sapiens
actgttcttgcatca

SEQ ID NO: 760284 - DNA, 15 bp, Homo sapiens
ctgttcttgcatcac

SEQ ID NO: 760285 - DNA, 15 bp, Homo sapiens
tgttcttgcatcacc

SEQ ID NO: 760286 - DNA, 15 bp, Homo sapiens
gttcttgcatcacct

SEQ ID NO: 760287 - DNA, 15 bp, Homo sapiens
ttcttgcatcacctt

SEQ ID NO: 760288 - DNA, 15 bp, Homo sapiens
tcttgcatcaccttt

SEQ ID NO: 760289 - DNA, 15 bp, Homo sapiens
cttgcatcaccttta

SEQ ID NO: 760290 - DNA, 15 bp, Homo sapiens
ttgcatcacctttat

SEQ ID NO: 760291 - DNA, 15 bp, Homo sapiens
tgcatcacctttatt

SEQ ID NO: 760292 - DNA, 15 bp, Homo sapiens
gcatcacctttatta

SEQ ID NO: 760293 - DNA, 15 bp, Homo sapiens
catcacctttattag

SEQ ID NO: 760294 - DNA, 15 bp, Homo sapiens
atcacctttattagg

SEQ ID NO: 760295 - DNA, 15 bp, Homo sapiens
tcacctttattaggt

SEQ ID NO: 760296 - DNA, 15 bp, Homo sapiens
cacctttattaggtt

SEQ ID NO: 760297 - DNA, 15 bp, Homo sapiens
acctttattaggttt

SEQ ID NO: 760298 - DNA, 15 bp, Homo sapiens
cctttattaggtttg

SEQ ID NO: 760299 - DNA, 15 bp, Homo sapiens
ctttattaggtttgt

SEQ ID NO: 760300 - DNA, 15 bp, Homo sapiens
tttattaggtttgtt

SEQ ID NO: 760301 - DNA, 15 bp, Homo sapiens
ttattaggtttgttt

SEQ ID NO: 760302 - DNA, 15 bp, Homo sapiens
tattaggtttgtttt

SEQ ID NO: 760303 - DNA, 15 bp, Homo sapiens
attaggtttgttttc

SEQ ID NO: 760304 - DNA, 15 bp, Homo sapiens
ttaggtttgttttca

SEQ ID NO: 760305 - DNA, 15 bp, Homo sapiens
taggtttgttttcac

SEQ ID NO: 760306 - DNA, 15 bp, Homo sapiens
aggtttgttttcaca

SEQ ID NO: 760307 - DNA, 15 bp, Homo sapiens
ggtttgttttcacat

SEQ ID NO: 760308 - DNA, 15 bp, Homo sapiens
gtttgttttcacatt

SEQ ID NO: 760309 - DNA, 15 bp, Homo sapiens
tttgttttcacatta

SEQ ID NO: 760310 - DNA, 15 bp, Homo sapiens
ttgttttcacattag

SEQ ID NO: 760311 - DNA, 15 bp, Homo sapiens
tgttttcacattagt

SEQ ID NO: 760312 - DNA, 15 bp, Homo sapiens
gttttcacattagtc

SEQ ID NO: 760313 - DNA, 15 bp, Homo sapiens
ttttcacattagtca

SEQ ID NO: 760314 - DNA, 15 bp, Homo sapiens
tttcacattagtcaa

SEQ ID NO: 760315 - DNA, 15 bp, Homo sapiens
ttcacattagtcaaa

SEQ ID NO: 760316 - DNA, 15 bp, Homo sapiens
tcacattagtcaaat

SEQ ID NO: 760317 - DNA, 15 bp, Homo sapiens
cacattagtcaaatg

SEQ ID NO: 760318 - DNA, 15 bp, Homo sapiens
acattagtcaaatgt

SEQ ID NO: 760319 - DNA, 15 bp, Homo sapiens
cattagtcaaatgta

SEQ ID NO: 760320 - DNA, 15 bp, Homo sapiens
attagtcaaatgtat

SEQ ID NO: 760321 - DNA, 15 bp, Homo sapiens
ttagtcaaatgtatt

SEQ ID NO: 760322 - DNA, 15 bp, Homo sapiens
tagtcaaatgtattt

SEQ ID NO: 760323 - DNA, 15 bp, Homo sapiens
agtcaaatgtatttc

SEQ ID NO: 760324 - DNA, 15 bp, Homo sapiens
gtcaaatgtatttca

SEQ ID NO: 760325 - DNA, 15 bp, Homo sapiens
tcaaatgtatttcaa

SEQ ID NO: 760326 - DNA, 15 bp, Homo sapiens
caaatgtatttcaaa

SEQ ID NO: 760327 - DNA, 15 bp, Homo sapiens
aaatgtatttcaaat

SEQ ID NO: 760328 - DNA, 15 bp, Homo sapiens
aatgtatttcaaatg

SEQ ID NO: 760329 - DNA, 15 bp, Homo sapiens
atgtatttcaaatgg

SEQ ID NO: 760330 - DNA, 15 bp, Homo sapiens
tgtatttcaaatgga

SEQ ID NO: 760331 - DNA, 15 bp, Homo sapiens
gtatttcaaatggac

SEQ ID NO: 760332 - DNA, 15 bp, Homo sapiens
tatttcaaatggaca

SEQ ID NO: 760333 - DNA, 15 bp, Homo sapiens
atttcaaatggacaa

SEQ ID NO: 760334 - DNA, 15 bp, Homo sapiens
tttcaaatggacaaa

SEQ ID NO: 760335 - DNA, 15 bp, Homo sapiens
ttcaaatggacaaat

SEQ ID NO: 760336 - DNA, 15 bp, Homo sapiens
tcaaatggacaaatg

SEQ ID NO: 760337 - DNA, 15 bp, Homo sapiens
caaatggacaaatgg

SEQ ID NO: 760338 - DNA, 15 bp, Homo sapiens
aaatggacaaatgga

SEQ ID NO: 760339 - DNA, 15 bp, Homo sapiens
aatggacaaatggat

SEQ ID NO: 760340 - DNA, 15 bp, Homo sapiens
atggacaaatggata

SEQ ID NO: 760341 - DNA, 15 bp, Homo sapiens
tggacaaatggataa

SEQ ID NO: 760342 - DNA, 15 bp, Homo sapiens
ggacaaatggataaa

SEQ ID NO: 760343 - DNA, 15 bp, Homo sapiens
gacaaatggataaaa

SEQ ID NO: 760344 - DNA, 15 bp, Homo sapiens
acaaatggataaaat

SEQ ID NO: 760345 - DNA, 15 bp, Homo sapiens
caaatggataaaata

SEQ ID NO: 760346 - DNA, 15 bp, Homo sapiens
aaatggataaaatat

SEQ ID NO: 760347 - DNA, 15 bp, Homo sapiens
aatggataaaatatg

SEQ ID NO: 760348 - DNA, 15 bp, Homo sapiens
atggataaaatatgc

SEQ ID NO: 760349 - DNA, 15 bp, Homo sapiens
tggataaaatatgca

SEQ ID NO: 760350 - DNA, 15 bp, Homo sapiens
ggataaaatatgcat

SEQ ID NO: 760351 - DNA, 15 bp, Homo sapiens
gataaaatatgcata

SEQ ID NO: 760352 - DNA, 15 bp, Homo sapiens
ataaaatatgcatat

SEQ ID NO: 760353 - DNA, 15 bp, Homo sapiens
taaaatatgcatatg

SEQ ID NO: 760354 - DNA, 15 bp, Homo sapiens
aaaatatgcatatgt

SEQ ID NO: 760355 - DNA, 15 bp, Homo sapiens
aaatatgcatatgta

SEQ ID NO: 760356 - DNA, 15 bp, Homo sapiens
aatatgcatatgtac

SEQ ID NO: 760357 - DNA, 15 bp, Homo sapiens
atatgcatatgtact

SEQ ID NO: 760358 - DNA, 15 bp, Homo sapiens
tatgcatatgtacta

SEQ ID NO: 760359 - DNA, 15 bp, Homo sapiens
atgcatatgtactat

SEQ ID NO: 760360 - DNA, 15 bp, Homo sapiens
tgcatatgtactatc

SEQ ID NO: 760361 - DNA, 15 bp, Homo sapiens
gcatatgtactatca

SEQ ID NO: 760362 - DNA, 15 bp, Homo sapiens
catatgtactatcaa

SEQ ID NO: 760363 - DNA, 15 bp, Homo sapiens
atatgtactatcaaa

SEQ ID NO: 760364 - DNA, 15 bp, Homo sapiens
tatgtactatcaaat

SEQ ID NO: 760365 - DNA, 15 bp, Homo sapiens
atgtactatcaaatg

SEQ ID NO: 760366 - DNA, 15 bp, Homo sapiens
tgtactatcaaatga

SEQ ID NO: 760367 - DNA, 15 bp, Homo sapiens
gtactatcaaatgaa

SEQ ID NO: 760368 - DNA, 15 bp, Homo sapiens
tactatcaaatgaat

SEQ ID NO: 760369 - DNA, 15 bp, Homo sapiens
actatcaaatgaatg

SEQ ID NO: 760370 - DNA, 15 bp, Homo sapiens
ctatcaaatgaatga

SEQ ID NO: 760371 - DNA, 15 bp, Homo sapiens
tatcaaatgaatgaa

SEQ ID NO: 760372 - DNA, 15 bp, Homo sapiens
atcaaatgaatgaat

SEQ ID NO: 760373 - DNA, 15 bp, Homo sapiens
tcaaatgaatgaatg

SEQ ID NO: 760374 - DNA, 15 bp, Homo sapiens
caaatgaatgaatgt

SEQ ID NO: 760375 - DNA, 15 bp, Homo sapiens
aaatgaatgaatgta

SEQ ID NO: 760376 - DNA, 15 bp, Homo sapiens
aatgaatgaatgtaa

SEQ ID NO: 760377 - DNA, 15 bp, Homo sapiens
atgaatgaatgtaat

SEQ ID NO: 760378 - DNA, 15 bp, Homo sapiens
tgaatgaatgtaatg

SEQ ID NO: 760379 - DNA, 15 bp, Homo sapiens
gaatgaatgtaatga

SEQ ID NO: 760380 - DNA, 15 bp, Homo sapiens
aatgaatgtaatgac

SEQ ID NO: 760381 - DNA, 15 bp, Homo sapiens
atgaatgtaatgaca

SEQ ID NO: 760382 - DNA, 15 bp, Homo sapiens
tgaatgtaatgacaa

SEQ ID NO: 760383 - DNA, 15 bp, Homo sapiens
gaatgtaatgacaaa

SEQ ID NO: 760384 - DNA, 15 bp, Homo sapiens
aatgtaatgacaaaa

SEQ ID NO: 760385 - DNA, 15 bp, Homo sapiens
atgtaatgacaaaat

SEQ ID NO: 760386 - DNA, 15 bp, Homo sapiens
tgtaatgacaaaatt

SEQ ID NO: 760387 - DNA, 15 bp, Homo sapiens
gtaatgacaaaattg

SEQ ID NO: 760388 - DNA, 15 bp, Homo sapiens
taatgacaaaattga

SEQ ID NO: 760389 - DNA, 15 bp, Homo sapiens
aatgacaaaattgag

SEQ ID NO: 760390 - DNA, 15 bp, Homo sapiens
atgacaaaattgaga

SEQ ID NO: 760391 - DNA, 15 bp, Homo sapiens
tgacaaaattgagac

SEQ ID NO: 760392 - DNA, 15 bp, Homo sapiens
gacaaaattgagaca

SEQ ID NO: 760393 - DNA, 15 bp, Homo sapiens
acaaaattgagacaa

SEQ ID NO: 760394 - DNA, 15 bp, Homo sapiens
caaaattgagacaaa

SEQ ID NO: 760395 - DNA, 15 bp, Homo sapiens
aaaattgagacaaaa

SEQ ID NO: 760396 - DNA, 15 bp, Homo sapiens
aaattgagacaaaaa

SEQ ID NO: 760397 - DNA, 15 bp, Homo sapiens
aattgagacaaaaat

SEQ ID NO: 760398 - DNA, 15 bp, Homo sapiens
attgagacaaaaatt

SEQ ID NO: 760399 - DNA, 15 bp, Homo sapiens
ttgagacaaaaattt

SEQ ID NO: 760400 - DNA, 15 bp, Homo sapiens
tgagacaaaaatttg

SEQ ID NO: 760401 - DNA, 15 bp, Homo sapiens
gagacaaaaatttgg

SEQ ID NO: 760402 - DNA, 15 bp, Homo sapiens
agacaaaaatttgga

SEQ ID NO: 760403 - DNA, 15 bp, Homo sapiens
gacaaaaatttggac

SEQ ID NO: 760404 - DNA, 15 bp, Homo sapiens
acaaaaatttggacg

SEQ ID NO: 760405 - DNA, 15 bp, Homo sapiens
caaaaatttggacgc

SEQ ID NO: 760406 - DNA, 15 bp, Homo sapiens
aaaaatttggacgct

SEQ ID NO: 760407 - DNA, 15 bp, Homo sapiens
aaaatttggacgctg

SEQ ID NO: 760408 - DNA, 15 bp, Homo sapiens
aaatttggacgctga

SEQ ID NO: 760409 - DNA, 15 bp, Homo sapiens
aatttggacgctgat

SEQ ID NO: 760410 - DNA, 15 bp, Homo sapiens
atttggacgctgatt

SEQ ID NO: 760411 - DNA, 15 bp, Homo sapiens
tttggacgctgattc

SEQ ID NO: 760412 - DNA, 15 bp, Homo sapiens
ttggacgctgattcc

SEQ ID NO: 760413 - DNA, 15 bp, Homo sapiens
tggacgctgattcct

SEQ ID NO: 760414 - DNA, 15 bp, Homo sapiens
ggacgctgattcctt

SEQ ID NO: 760415 - DNA, 15 bp, Homo sapiens
gacgctgattccttt

SEQ ID NO: 760416 - DNA, 15 bp, Homo sapiens
acgctgattcctttc

SEQ ID NO: 760417 - DNA, 15 bp, Homo sapiens
cgctgattcctttca

SEQ ID NO: 760418 - DNA, 15 bp, Homo sapiens
gctgattcctttcag

SEQ ID NO: 760419 - DNA, 15 bp, Homo sapiens
ctgattcctttcagg

SEQ ID NO: 760420 - DNA, 15 bp, Homo sapiens
tgattcctttcaggt

SEQ ID NO: 760421 - DNA, 15 bp, Homo sapiens
gattcctttcaggtt

SEQ ID NO: 760422 - DNA, 15 bp, Homo sapiens
attcctttcaggtta

SEQ ID NO: 760423 - DNA, 15 bp, Homo sapiens
ttcctttcaggttat

SEQ ID NO: 760424 - DNA, 15 bp, Homo sapiens
tcctttcaggttatg

SEQ ID NO: 760425 - DNA, 15 bp, Homo sapiens
cctttcaggttatgt

SEQ ID NO: 760426 - DNA, 15 bp, Homo sapiens
ctttcaggttatgtg

SEQ ID NO: 760427 - DNA, 15 bp, Homo sapiens
tttcaggttatgtgg

SEQ ID NO: 760428 - DNA, 15 bp, Homo sapiens
ttcaggttatgtggc

SEQ ID NO: 760429 - DNA, 15 bp, Homo sapiens
tcaggttatgtggct

SEQ ID NO: 760430 - DNA, 15 bp, Homo sapiens
caggttatgtggctt

SEQ ID NO: 760431 - DNA, 15 bp, Homo sapiens
aggttatgtggcttc

SEQ ID NO: 760432 - DNA, 15 bp, Homo sapiens
ggttatgtggcttct

SEQ ID NO: 760433 - DNA, 15 bp, Homo sapiens
gttatgtggcttctt

SEQ ID NO: 760434 - DNA, 15 bp, Homo sapiens
ttatgtggcttcttt

SEQ ID NO: 760435 - DNA, 15 bp, Homo sapiens
tatgtggcttctttc

SEQ ID NO: 760436 - DNA, 15 bp, Homo sapiens
atgtggcttctttca

SEQ ID NO: 760437 - DNA, 15 bp, Homo sapiens
tgtggcttctttcat

SEQ ID NO: 760438 - DNA, 15 bp, Homo sapiens
gtggcttctttcata

SEQ ID NO: 760439 - DNA, 15 bp, Homo sapiens
tggcttctttcatat

SEQ ID NO: 760440 - DNA, 15 bp, Homo sapiens
ggcttctttcatatc

SEQ ID NO: 760441 - DNA, 15 bp, Homo sapiens
gcttctttcatatca

SEQ ID NO: 760442 - DNA, 15 bp, Homo sapiens
cttctttcatatcat

SEQ ID NO: 760443 - DNA, 15 bp, Homo sapiens
ttctttcatatcatt

SEQ ID NO: 760444 - DNA, 15 bp, Homo sapiens
tctttcatatcattg

SEQ ID NO: 760445 - DNA, 15 bp, Homo sapiens
ctttcatatcattga

SEQ ID NO: 760446 - DNA, 15 bp, Homo sapiens
tttcatatcattgag

SEQ ID NO: 760447 - DNA, 15 bp, Homo sapiens
ttcatatcattgagt

SEQ ID NO: 760448 - DNA, 15 bp, Homo sapiens
tcatatcattgagta

SEQ ID NO: 760449 - DNA, 15 bp, Homo sapiens
catatcattgagtac

SEQ ID NO: 760450 - DNA, 15 bp, Homo sapiens
atatcattgagtact

SEQ ID NO: 760451 - DNA, 15 bp, Homo sapiens
tatcattgagtacta

SEQ ID NO: 760452 - DNA, 15 bp, Homo sapiens
atcattgagtactag

SEQ ID NO: 760453 - DNA, 15 bp, Homo sapiens
tcattgagtactagg

SEQ ID NO: 760454 - DNA, 15 bp, Homo sapiens
cattgagtactagga

SEQ ID NO: 760455 - DNA, 15 bp, Homo sapiens
attgagtactaggaa

SEQ ID NO: 760456 - DNA, 15 bp, Homo sapiens
ttgagtactaggaag

SEQ ID NO: 760457 - DNA, 15 bp, Homo sapiens
tgagtactaggaaga

SEQ ID NO: 760458 - DNA, 15 bp, Homo sapiens
gagtactaggaagaa

SEQ ID NO: 760459 - DNA, 15 bp, Homo sapiens
agtactaggaagaag

SEQ ID NO: 760460 - DNA, 15 bp, Homo sapiens
gtactaggaagaagt

SEQ ID NO: 760461 - DNA, 15 bp, Homo sapiens
tactaggaagaagta

SEQ ID NO: 760462 - DNA, 15 bp, Homo sapiens
actaggaagaagtat

SEQ ID NO: 760463 - DNA, 15 bp, Homo sapiens
ctaggaagaagtatg

SEQ ID NO: 760464 - DNA, 15 bp, Homo sapiens
taggaagaagtatgg

SEQ ID NO: 760465 - DNA, 15 bp, Homo sapiens
aggaagaagtatgga

SEQ ID NO: 760466 - DNA, 15 bp, Homo sapiens
ggaagaagtatggat

SEQ ID NO: 760467 - DNA, 15 bp, Homo sapiens
gaagaagtatggata

SEQ ID NO: 760468 - DNA, 15 bp, Homo sapiens
aagaagtatggatat

SEQ ID NO: 760469 - DNA, 15 bp, Homo sapiens
agaagtatggatatc

SEQ ID NO: 760470 - DNA, 15 bp, Homo sapiens
gaagtatggatatct

SEQ ID NO: 760471 - DNA, 15 bp, Homo sapiens
aagtatggatatctt

SEQ ID NO: 760472 - DNA, 15 bp, Homo sapiens
agtatggatatcttg

SEQ ID NO: 760473 - DNA, 15 bp, Homo sapiens
gtatggatatcttgt

SEQ ID NO: 760474 - DNA, 15 bp, Homo sapiens
tatggatatcttgtg

SEQ ID NO: 760475 - DNA, 15 bp, Homo sapiens
atggatatcttgtgt

SEQ ID NO: 760476 - DNA, 15 bp, Homo sapiens
tggatatcttgtgtc

SEQ ID NO: 760477 - DNA, 15 bp, Homo sapiens
ggatatcttgtgtcc

SEQ ID NO: 760478 - DNA, 15 bp, Homo sapiens
gatatcttgtgtcct

SEQ ID NO: 760479 - DNA, 15 bp, Homo sapiens
atatcttgtgtcctt

SEQ ID NO: 760480 - DNA, 15 bp, Homo sapiens
tatcttgtgtccttt

SEQ ID NO: 760481 - DNA, 15 bp, Homo sapiens
atcttgtgtcctttt

SEQ ID NO: 760482 - DNA, 15 bp, Homo sapiens
tcttgtgtccttttc

SEQ ID NO: 760483 - DNA, 15 bp, Homo sapiens
cttgtgtccttttca

SEQ ID NO: 760484 - DNA, 15 bp, Homo sapiens
ttgtgtccttttcac

SEQ ID NO: 760485 - DNA, 15 bp, Homo sapiens
tgtgtccttttcact

SEQ ID NO: 760486 - DNA, 15 bp, Homo sapiens
gtgtccttttcactt

SEQ ID NO: 760487 - DNA, 15 bp, Homo sapiens
tgtccttttcactta

SEQ ID NO: 760488 - DNA, 15 bp, Homo sapiens
gtccttttcacttac

SEQ ID NO: 760489 - DNA, 15 bp, Homo sapiens
tccttttcacttaca

SEQ ID NO: 760490 - DNA, 15 bp, Homo sapiens
ccttttcacttacag

SEQ ID NO: 760491 - DNA, 15 bp, Homo sapiens
cttttcacttacagg

SEQ ID NO: 760492 - DNA, 15 bp, Homo sapiens
ttttcacttacagga

SEQ ID NO: 760493 - DNA, 15 bp, Homo sapiens
tttcacttacaggaa

SEQ ID NO: 760494 - DNA, 15 bp, Homo sapiens
ttcacttacaggaat

SEQ ID NO: 760495 - DNA, 15 bp, Homo sapiens
tcacttacaggaata

SEQ ID NO: 760496 - DNA, 15 bp, Homo sapiens
cacttacaggaataa

SEQ ID NO: 760497 - DNA, 15 bp, Homo sapiens
acttacaggaataaa

SEQ ID NO: 760498 - DNA, 15 bp, Homo sapiens
cttacaggaataaaa

SEQ ID NO: 760499 - DNA, 15 bp, Homo sapiens
ttacaggaataaaat

SEQ ID NO: 760500 - DNA, 15 bp, Homo sapiens
tacaggaataaaata

SEQ ID NO: 760501 - DNA, 15 bp, Homo sapiens
acaggaataaaataa

SEQ ID NO: 760502 - DNA, 15 bp, Homo sapiens
caggaataaaataat

SEQ ID NO: 760503 - DNA, 15 bp, Homo sapiens
aggaataaaataatt

SEQ ID NO: 760504 - DNA, 15 bp, Homo sapiens
ggaataaaataattt

SEQ ID NO: 760505 - DNA, 15 bp, Homo sapiens
gaataaaataattta

SEQ ID NO: 760506 - DNA, 15 bp, Homo sapiens
aataaaataatttat

SEQ ID NO: 760507 - DNA, 15 bp, Homo sapiens
ataaaataatttatt

SEQ ID NO: 760508 - DNA, 15 bp, Homo sapiens
taaaataatttattt

SEQ ID NO: 760509 - DNA, 15 bp, Homo sapiens
aaaataatttatttt

SEQ ID NO: 760510 - DNA, 15 bp, Homo sapiens
aaataatttattttt

SEQ ID NO: 760511 - DNA, 15 bp, Homo sapiens
aataatttatttttt

SEQ ID NO: 760512 - DNA, 15 bp, Homo sapiens
ataatttattttttc

SEQ ID NO: 760513 - DNA, 15 bp, Homo sapiens
taatttattttttct

SEQ ID NO: 760514 - DNA, 15 bp, Homo sapiens
aatttattttttctc

SEQ ID NO: 760515 - DNA, 15 bp, Homo sapiens
atttattttttctct

SEQ ID NO: 760516 - DNA, 15 bp, Homo sapiens
tttattttttctctt

SEQ ID NO: 760517 - DNA, 15 bp, Homo sapiens
ttattttttctctta

SEQ ID NO: 760518 - DNA, 15 bp, Homo sapiens
tattttttctcttat

SEQ ID NO: 760519 - DNA, 15 bp, Homo sapiens
attttttctcttatt

SEQ ID NO: 760520 - DNA, 15 bp, Homo sapiens
ttttttctcttattt

SEQ ID NO: 760521 - DNA, 15 bp, Homo sapiens
tttttctcttattta

SEQ ID NO: 760522 - DNA, 15 bp, Homo sapiens
ttttctcttatttag

SEQ ID NO: 760523 - DNA, 15 bp, Homo sapiens
tttctcttatttaga

SEQ ID NO: 760524 - DNA, 15 bp, Homo sapiens
ttctcttatttagag

SEQ ID NO: 760525 - DNA, 15 bp, Homo sapiens
tctcttatttagagt

SEQ ID NO: 760526 - DNA, 15 bp, Homo sapiens
ctcttatttagagtt

SEQ ID NO: 760527 - DNA, 15 bp, Homo sapiens
tcttatttagagttt

SEQ ID NO: 760528 - DNA, 15 bp, Homo sapiens
cttatttagagtttt

SEQ ID NO: 760529 - DNA, 15 bp, Homo sapiens
ttatttagagtttta

SEQ ID NO: 760530 - DNA, 15 bp, Homo sapiens
tatttagagttttaa

SEQ ID NO: 760531 - DNA, 15 bp, Homo sapiens
atttagagttttaac

SEQ ID NO: 760532 - DNA, 15 bp, Homo sapiens
tttagagttttaacc

SEQ ID NO: 760533 - DNA, 15 bp, Homo sapiens
ttagagttttaacct

SEQ ID NO: 760534 - DNA, 15 bp, Homo sapiens
tagagttttaaccta

SEQ ID NO: 760535 - DNA, 15 bp, Homo sapiens
agagttttaacctaa

SEQ ID NO: 760536 - DNA, 15 bp, Homo sapiens
gagttttaacctaaa

SEQ ID NO: 760537 - DNA, 15 bp, Homo sapiens
agttttaacctaaaa

SEQ ID NO: 760538 - DNA, 15 bp, Homo sapiens
gttttaacctaaaac

SEQ ID NO: 760539 - DNA, 15 bp, Homo sapiens
ttttaacctaaaacc

SEQ ID NO: 760540 - DNA, 15 bp, Homo sapiens
tttaacctaaaacca

SEQ ID NO: 760541 - DNA, 15 bp, Homo sapiens
ttaacctaaaaccaa

SEQ ID NO: 760542 - DNA, 15 bp, Homo sapiens
taacctaaaaccaaa

SEQ ID NO: 760543 - DNA, 15 bp, Homo sapiens
aacctaaaaccaaaa

SEQ ID NO: 760544 - DNA, 15 bp, Homo sapiens
acctaaaaccaaaat

SEQ ID NO: 760545 - DNA, 15 bp, Homo sapiens
cctaaaaccaaaatt

SEQ ID NO: 760546 - DNA, 15 bp, Homo sapiens
ctaaaaccaaaattt

SEQ ID NO: 760547 - DNA, 15 bp, Homo sapiens
taaaaccaaaattta

SEQ ID NO: 760548 - DNA, 15 bp, Homo sapiens
aaaaccaaaatttag

SEQ ID NO: 760549 - DNA, 15 bp, Homo sapiens
aaaccaaaatttagt

SEQ ID NO: 760550 - DNA, 15 bp, Homo sapiens
aaccaaaatttagtt

SEQ ID NO: 760551 - DNA, 15 bp, Homo sapiens
accaaaatttagttt

SEQ ID NO: 760552 - DNA, 15 bp, Homo sapiens
ccaaaatttagtttt

SEQ ID NO: 760553 - DNA, 15 bp, Homo sapiens
caaaatttagtttta

SEQ ID NO: 760554 - DNA, 15 bp, Homo sapiens
aaaatttagttttaa

SEQ ID NO: 760555 - DNA, 15 bp, Homo sapiens
aaatttagttttaac

SEQ ID NO: 760556 - DNA, 15 bp, Homo sapiens
aatttagttttaacc

SEQ ID NO: 760557 - DNA, 15 bp, Homo sapiens
atttagttttaacct

SEQ ID NO: 760558 - DNA, 15 bp, Homo sapiens
tttagttttaaccta

SEQ ID NO: 760559 - DNA, 15 bp, Homo sapiens
ttagttttaacctaa

SEQ ID NO: 760560 - DNA, 15 bp, Homo sapiens
tagttttaacctaat

SEQ ID NO: 760561 - DNA, 15 bp, Homo sapiens
agttttaacctaata

SEQ ID NO: 760562 - DNA, 15 bp, Homo sapiens
gttttaacctaataa

SEQ ID NO: 760563 - DNA, 15 bp, Homo sapiens
ttttaacctaataat

SEQ ID NO: 760564 - DNA, 15 bp, Homo sapiens
tttaacctaataatt

SEQ ID NO: 760565 - DNA, 15 bp, Homo sapiens
ttaacctaataatta

SEQ ID NO: 760566 - DNA, 15 bp, Homo sapiens
taacctaataattaa

SEQ ID NO: 760567 - DNA, 15 bp, Homo sapiens
aacctaataattaat

SEQ ID NO: 760568 - DNA, 15 bp, Homo sapiens
acctaataattaata

SEQ ID NO: 760569 - DNA, 15 bp, Homo sapiens
cctaataattaatac

SEQ ID NO: 760570 - DNA, 15 bp, Homo sapiens
ctaataattaataca

SEQ ID NO: 760571 - DNA, 15 bp, Homo sapiens
taataattaatacag

SEQ ID NO: 760572 - DNA, 15 bp, Homo sapiens
aataattaatacagg

SEQ ID NO: 760573 - DNA, 15 bp, Homo sapiens
ataattaatacagga

SEQ ID NO: 760574 - DNA, 15 bp, Homo sapiens
taattaatacaggag

SEQ ID NO: 760575 - DNA, 15 bp, Homo sapiens
aattaatacaggagg

SEQ ID NO: 760576 - DNA, 15 bp, Homo sapiens
attaatacaggaggg

SEQ ID NO: 760577 - DNA, 15 bp, Homo sapiens
ttaatacaggaggga

SEQ ID NO: 760578 - DNA, 15 bp, Homo sapiens
taatacaggagggaa

SEQ ID NO: 760579 - DNA, 15 bp, Homo sapiens
aatacaggagggaaa

SEQ ID NO: 760580 - DNA, 15 bp, Homo sapiens
atacaggagggaaat

SEQ ID NO: 760581 - DNA, 15 bp, Homo sapiens
tacaggagggaaatg

SEQ ID NO: 760582 - DNA, 15 bp, Homo sapiens
acaggagggaaatgg

SEQ ID NO: 760583 - DNA, 15 bp, Homo sapiens
caggagggaaatggg

SEQ ID NO: 760584 - DNA, 15 bp, Homo sapiens
aggagggaaatggga

SEQ ID NO: 760585 - DNA, 15 bp, Homo sapiens
ggagggaaatgggag

SEQ ID NO: 760586 - DNA, 15 bp, Homo sapiens
gagggaaatgggagt

SEQ ID NO: 760587 - DNA, 15 bp, Homo sapiens
agggaaatgggagta

SEQ ID NO: 760588 - DNA, 15 bp, Homo sapiens
gggaaatgggagtaa

SEQ ID NO: 760589 - DNA, 15 bp, Homo sapiens
ggaaatgggagtaaa

SEQ ID NO: 760590 - DNA, 15 bp, Homo sapiens
gaaatgggagtaaat

SEQ ID NO: 760591 - DNA, 15 bp, Homo sapiens
aaatgggagtaaata

SEQ ID NO: 760592 - DNA, 15 bp, Homo sapiens
aatgggagtaaataa

SEQ ID NO: 760593 - DNA, 15 bp, Homo sapiens
atgggagtaaataac

SEQ ID NO: 760594 - DNA, 15 bp, Homo sapiens
tgggagtaaataaca

SEQ ID NO: 760595 - DNA, 15 bp, Homo sapiens
gggagtaaataacag

SEQ ID NO: 760596 - DNA, 15 bp, Homo sapiens
ggagtaaataacagt

SEQ ID NO: 760597 - DNA, 15 bp, Homo sapiens
gagtaaataacagtt

SEQ ID NO: 760598 - DNA, 15 bp, Homo sapiens
agtaaataacagtta

SEQ ID NO: 760599 - DNA, 15 bp, Homo sapiens
gtaaataacagttat

SEQ ID NO: 760600 - DNA, 15 bp, Homo sapiens
taaataacagttatt

SEQ ID NO: 760601 - DNA, 15 bp, Homo sapiens
aaataacagttattt

SEQ ID NO: 760602 - DNA, 15 bp, Homo sapiens
aataacagttatttt

SEQ ID NO: 760603 - DNA, 15 bp, Homo sapiens
ataacagttattttc

SEQ ID NO: 760604 - DNA, 15 bp, Homo sapiens
taacagttattttct

SEQ ID NO: 760605 - DNA, 15 bp, Homo sapiens
aacagttattttctg

SEQ ID NO: 760606 - DNA, 15 bp, Homo sapiens
acagttattttctga

SEQ ID NO: 760607 - DNA, 15 bp, Homo sapiens
cagttattttctgag

SEQ ID NO: 760608 - DNA, 15 bp, Homo sapiens
agttattttctgaga

SEQ ID NO: 760609 - DNA, 15 bp, Homo sapiens
gttattttctgagag

SEQ ID NO: 760610 - DNA, 15 bp, Homo sapiens
ttattttctgagaga

SEQ ID NO: 760611 - DNA, 15 bp, Homo sapiens
tattttctgagagac

SEQ ID NO: 760612 - DNA, 15 bp, Homo sapiens
attttctgagagaca

SEQ ID NO: 760613 - DNA, 15 bp, Homo sapiens
ttttctgagagacat

SEQ ID NO: 760614 - DNA, 15 bp, Homo sapiens
tttctgagagacatt

SEQ ID NO: 760615 - DNA, 15 bp, Homo sapiens
ttctgagagacattt

SEQ ID NO: 760616 - DNA, 15 bp, Homo sapiens
tctgagagacatttc

SEQ ID NO: 760617 - DNA, 15 bp, Homo sapiens
ctgagagacatttct

SEQ ID NO: 760618 - DNA, 15 bp, Homo sapiens
tgagagacatttcta

SEQ ID NO: 760619 - DNA, 15 bp, Homo sapiens
gagagacatttctaa

SEQ ID NO: 760620 - DNA, 15 bp, Homo sapiens
agagacatttctaag

SEQ ID NO: 760621 - DNA, 15 bp, Homo sapiens
gagacatttctaagg

SEQ ID NO: 760622 - DNA, 15 bp, Homo sapiens
agacatttctaagga

SEQ ID NO: 760623 - DNA, 15 bp, Homo sapiens
gacatttctaaggac

SEQ ID NO: 760624 - DNA, 15 bp, Homo sapiens
acatttctaaggacg

SEQ ID NO: 760625 - DNA, 15 bp, Homo sapiens
catttctaaggacga

SEQ ID NO: 760626 - DNA, 15 bp, Homo sapiens
atttctaaggacgac

SEQ ID NO: 760627 - DNA, 15 bp, Homo sapiens
tttctaaggacgact

SEQ ID NO: 760628 - DNA, 15 bp, Homo sapiens
ttctaaggacgactt

SEQ ID NO: 760629 - DNA, 15 bp, Homo sapiens
tctaaggacgacttt

SEQ ID NO: 760630 - DNA, 15 bp, Homo sapiens
ctaaggacgacttta

SEQ ID NO: 760631 - DNA, 15 bp, Homo sapiens
taaggacgactttaa

SEQ ID NO: 760632 - DNA, 15 bp, Homo sapiens
aaggacgactttaaa

SEQ ID NO: 760633 - DNA, 15 bp, Homo sapiens
aggacgactttaaaa

SEQ ID NO: 760634 - DNA, 15 bp, Homo sapiens
ggacgactttaaaag

SEQ ID NO: 760635 - DNA, 15 bp, Homo sapiens
gacgactttaaaaga

SEQ ID NO: 760636 - DNA, 15 bp, Homo sapiens
acgactttaaaagac

SEQ ID NO: 760637 - DNA, 15 bp, Homo sapiens
cgactttaaaagacc

SEQ ID NO: 760638 - DNA, 15 bp, Homo sapiens
gactttaaaagacca

SEQ ID NO: 760639 - DNA, 15 bp, Homo sapiens
actttaaaagaccag

SEQ ID NO: 760640 - DNA, 15 bp, Homo sapiens
ctttaaaagaccagg

SEQ ID NO: 760641 - DNA, 15 bp, Homo sapiens
tttaaaagaccaggc

SEQ ID NO: 760642 - DNA, 15 bp, Homo sapiens
ttaaaagaccaggca

SEQ ID NO: 760643 - DNA, 15 bp, Homo sapiens
taaaagaccaggcaa

SEQ ID NO: 760644 - DNA, 15 bp, Homo sapiens
aaaagaccaggcaaa

SEQ ID NO: 760645 - DNA, 15 bp, Homo sapiens
aaagaccaggcaaag

SEQ ID NO: 760646 - DNA, 15 bp, Homo sapiens
aagaccaggcaaagg

SEQ ID NO: 760647 - DNA, 15 bp, Homo sapiens
agaccaggcaaagga

SEQ ID NO: 760648 - DNA, 15 bp, Homo sapiens
gaccaggcaaaggag

SEQ ID NO: 760649 - DNA, 15 bp, Homo sapiens
accaggcaaaggaga

SEQ ID NO: 760650 - DNA, 15 bp, Homo sapiens
ccaggcaaaggagag

SEQ ID NO: 760651 - DNA, 15 bp, Homo sapiens
caggcaaaggagagc

SEQ ID NO: 760652 - DNA, 15 bp, Homo sapiens
aggcaaaggagagca

SEQ ID NO: 760653 - DNA, 15 bp, Homo sapiens
ggcaaaggagagcag

SEQ ID NO: 760654 - DNA, 15 bp, Homo sapiens
gcaaaggagagcaga

SEQ ID NO: 760655 - DNA, 15 bp, Homo sapiens
caaaggagagcagag

SEQ ID NO: 760656 - DNA, 15 bp, Homo sapiens
aaaggagagcagagc

SEQ ID NO: 760657 - DNA, 15 bp, Homo sapiens
aaggagagcagagcc

SEQ ID NO: 760658 - DNA, 15 bp, Homo sapiens
aggagagcagagccc

SEQ ID NO: 760659 - DNA, 15 bp, Homo sapiens
ggagagcagagccca

SEQ ID NO: 760660 - DNA, 15 bp, Homo sapiens
gagagcagagcccag

SEQ ID NO: 760661 - DNA, 15 bp, Homo sapiens
agagcagagcccagc

SEQ ID NO: 760662 - DNA, 15 bp, Homo sapiens
gagcagagcccagcc

SEQ ID NO: 760663 - DNA, 15 bp, Homo sapiens
agcagagcccagccg

SEQ ID NO: 760664 - DNA, 15 bp, Homo sapiens
gcagagcccagccgt

SEQ ID NO: 760665 - DNA, 15 bp, Homo sapiens
cagagcccagccgtt

SEQ ID NO: 760666 - DNA, 15 bp, Homo sapiens
agagcccagccgttg

SEQ ID NO: 760667 - DNA, 15 bp, Homo sapiens
gagcccagccgttgc

SEQ ID NO: 760668 - DNA, 15 bp, Homo sapiens
agcccagccgttgcc

SEQ ID NO: 760669 - DNA, 15 bp, Homo sapiens
gcccagccgttgccg

SEQ ID NO: 760670 - DNA, 15 bp, Homo sapiens
cccagccgttgccgc

SEQ ID NO: 760671 - DNA, 15 bp, Homo sapiens
ccagccgttgccgct

SEQ ID NO: 760672 - DNA, 15 bp, Homo sapiens
cagccgttgccgctt

SEQ ID NO: 760673 - DNA, 15 bp, Homo sapiens
agccgttgccgcttg

SEQ ID NO: 760674 - DNA, 15 bp, Homo sapiens
gccgttgccgcttga

SEQ ID NO: 760675 - DNA, 15 bp, Homo sapiens
ccgttgccgcttgag

SEQ ID NO: 760676 - DNA, 15 bp, Homo sapiens
cgttgccgcttgaga

SEQ ID NO: 760677 - DNA, 15 bp, Homo sapiens
gttgccgcttgagag

SEQ ID NO: 760678 - DNA, 15 bp, Homo sapiens
ttgccgcttgagaga

SEQ ID NO: 760679 - DNA, 15 bp, Homo sapiens
tgccgcttgagagag

SEQ ID NO: 760680 - DNA, 15 bp, Homo sapiens
gccgcttgagagaga

SEQ ID NO: 760681 - DNA, 15 bp, Homo sapiens
ccgcttgagagagat

SEQ ID NO: 760682 - DNA, 15 bp, Homo sapiens
cgcttgagagagata

SEQ ID NO: 760683 - DNA, 15 bp, Homo sapiens
gcttgagagagataa

SEQ ID NO: 760684 - DNA, 15 bp, Homo sapiens
cttgagagagataag

SEQ ID NO: 760685 - DNA, 15 bp, Homo sapiens
ttgagagagataagc

SEQ ID NO: 760686 - DNA, 15 bp, Homo sapiens
tgagagagataagca

SEQ ID NO: 760687 - DNA, 15 bp, Homo sapiens
gagagagataagcag

SEQ ID NO: 760688 - DNA, 15 bp, Homo sapiens
agagagataagcaga

SEQ ID NO: 760689 - DNA, 15 bp, Homo sapiens
gagagataagcagaa

SEQ ID NO: 760690 - DNA, 15 bp, Homo sapiens
agagataagcagaag

SEQ ID NO: 760691 - DNA, 15 bp, Homo sapiens
gagataagcagaagt

SEQ ID NO: 760692 - DNA, 15 bp, Homo sapiens
agataagcagaagtg

SEQ ID NO: 760693 - DNA, 15 bp, Homo sapiens
gataagcagaagtgt

SEQ ID NO: 760694 - DNA, 15 bp, Homo sapiens
ataagcagaagtgtg

SEQ ID NO: 760695 - DNA, 15 bp, Homo sapiens
taagcagaagtgtgg

SEQ ID NO: 760696 - DNA, 15 bp, Homo sapiens
aagcagaagtgtggg

SEQ ID NO: 760697 - DNA, 15 bp, Homo sapiens
agcagaagtgtgggt

SEQ ID NO: 760698 - DNA, 15 bp, Homo sapiens
gcagaagtgtgggtg

SEQ ID NO: 760699 - DNA, 15 bp, Homo sapiens
cagaagtgtgggtgt

SEQ ID NO: 760700 - DNA, 15 bp, Homo sapiens
agaagtgtgggtgtg

SEQ ID NO: 760701 - DNA, 15 bp, Homo sapiens
gaagtgtgggtgtgc

SEQ ID NO: 760702 - DNA, 15 bp, Homo sapiens
aagtgtgggtgtgct

SEQ ID NO: 760703 - DNA, 15 bp, Homo sapiens
agtgtgggtgtgctt

SEQ ID NO: 760704 - DNA, 15 bp, Homo sapiens
gtgtgggtgtgcttc

SEQ ID NO: 760705 - DNA, 15 bp, Homo sapiens
tgtgggtgtgcttca

SEQ ID NO: 760706 - DNA, 15 bp, Homo sapiens
gtgggtgtgcttcat

SEQ ID NO: 760707 - DNA, 15 bp, Homo sapiens
tgggtgtgcttcatg

SEQ ID NO: 760708 - DNA, 15 bp, Homo sapiens
gggtgtgcttcatgt

SEQ ID NO: 760709 - DNA, 15 bp, Homo sapiens
ggtgtgcttcatgtc

SEQ ID NO: 760710 - DNA, 15 bp, Homo sapiens
gtgtgcttcatgtca

SEQ ID NO: 760711 - DNA, 15 bp, Homo sapiens
tgtgcttcatgtcac

SEQ ID NO: 760712 - DNA, 15 bp, Homo sapiens
gtgcttcatgtcaca

SEQ ID NO: 760713 - DNA, 15 bp, Homo sapiens
tgcttcatgtcacat

SEQ ID NO: 760714 - DNA, 15 bp, Homo sapiens
gcttcatgtcacatg

SEQ ID NO: 760715 - DNA, 15 bp, Homo sapiens
cttcatgtcacatgg

SEQ ID NO: 760716 - DNA, 15 bp, Homo sapiens
ttcatgtcacatggc

SEQ ID NO: 760717 - DNA, 15 bp, Homo sapiens
tcatgtcacatggca

SEQ ID NO: 760718 - DNA, 15 bp, Homo sapiens
catgtcacatggcag

SEQ ID NO: 760719 - DNA, 15 bp, Homo sapiens
atgtcacatggcagg

SEQ ID NO: 760720 - DNA, 15 bp, Homo sapiens
tgtcacatggcagga

SEQ ID NO: 760721 - DNA, 15 bp, Homo sapiens
gtcacatggcaggag

SEQ ID NO: 760722 - DNA, 15 bp, Homo sapiens
tcacatggcaggagg

SEQ ID NO: 760723 - DNA, 15 bp, Homo sapiens
cacatggcaggaggc

SEQ ID NO: 760724 - DNA, 15 bp, Homo sapiens
acatggcaggaggct

SEQ ID NO: 760725 - DNA, 15 bp, Homo sapiens
catggcaggaggctt

SEQ ID NO: 760726 - DNA, 15 bp, Homo sapiens
atggcaggaggcttc

SEQ ID NO: 760727 - DNA, 15 bp, Homo sapiens
tggcaggaggcttcc

SEQ ID NO: 760728 - DNA, 15 bp, Homo sapiens
ggcaggaggcttccc

SEQ ID NO: 760729 - DNA, 15 bp, Homo sapiens
gcaggaggcttcccc

SEQ ID NO: 760730 - DNA, 15 bp, Homo sapiens
caggaggcttcccca

SEQ ID NO: 760731 - DNA, 15 bp, Homo sapiens
aggaggcttccccag

SEQ ID NO: 760732 - DNA, 15 bp, Homo sapiens
ggaggcttccccaga

SEQ ID NO: 760733 - DNA, 15 bp, Homo sapiens
gaggcttccccagaa

SEQ ID NO: 760734 - DNA, 15 bp, Homo sapiens
aggcttccccagaac

SEQ ID NO: 760735 - DNA, 15 bp, Homo sapiens
ggcttccccagaacg

SEQ ID NO: 760736 - DNA, 15 bp, Homo sapiens
gcttccccagaacgg

SEQ ID NO: 760737 - DNA, 15 bp, Homo sapiens
cttccccagaacggt

SEQ ID NO: 760738 - DNA, 15 bp, Homo sapiens
ttccccagaacggtt

SEQ ID NO: 760739 - DNA, 15 bp, Homo sapiens
tccccagaacggttc

SEQ ID NO: 760740 - DNA, 15 bp, Homo sapiens
ccccagaacggttcg

SEQ ID NO: 760741 - DNA, 15 bp, Homo sapiens
cccagaacggttcgt

SEQ ID NO: 760742 - DNA, 15 bp, Homo sapiens
ccagaacggttcgtc

SEQ ID NO: 760743 - DNA, 15 bp, Homo sapiens
cagaacggttcgtca

SEQ ID NO: 760744 - DNA, 15 bp, Homo sapiens
agaacggttcgtcag

SEQ ID NO: 760745 - DNA, 15 bp, Homo sapiens
gaacggttcgtcagt

SEQ ID NO: 760746 - DNA, 15 bp, Homo sapiens
aacggttcgtcagtc

SEQ ID NO: 760747 - DNA, 15 bp, Homo sapiens
acggttcgtcagtcc

SEQ ID NO: 760748 - DNA, 15 bp, Homo sapiens
cggttcgtcagtcca

SEQ ID NO: 760749 - DNA, 15 bp, Homo sapiens
ggttcgtcagtccag

SEQ ID NO: 760750 - DNA, 15 bp, Homo sapiens
gttcgtcagtccagg

SEQ ID NO: 760751 - DNA, 15 bp, Homo sapiens
ttcgtcagtccaggg

SEQ ID NO: 760752 - DNA, 15 bp, Homo sapiens
tcgtcagtccaggga

SEQ ID NO: 760753 - DNA, 15 bp, Homo sapiens
cgtcagtccagggag

SEQ ID NO: 760754 - DNA, 15 bp, Homo sapiens
gtcagtccagggagc

SEQ ID NO: 760755 - DNA, 15 bp, Homo sapiens
tcagtccagggagcc

SEQ ID NO: 760756 - DNA, 15 bp, Homo sapiens
cagtccagggagccg

SEQ ID NO: 760757 - DNA, 15 bp, Homo sapiens
agtccagggagccgt

SEQ ID NO: 760758 - DNA, 15 bp, Homo sapiens
gtccagggagccgtt

SEQ ID NO: 760759 - DNA, 15 bp, Homo sapiens
tccagggagccgttt

SEQ ID NO: 760760 - DNA, 15 bp, Homo sapiens
ccagggagccgtttc

SEQ ID NO: 760761 - DNA, 15 bp, Homo sapiens
cagggagccgtttca

SEQ ID NO: 760762 - DNA, 15 bp, Homo sapiens
agggagccgtttcat

SEQ ID NO: 760763 - DNA, 15 bp, Homo sapiens
gggagccgtttcatt

SEQ ID NO: 760764 - DNA, 15 bp, Homo sapiens
ggagccgtttcattt

SEQ ID NO: 760765 - DNA, 15 bp, Homo sapiens
gagccgtttcatttt

SEQ ID NO: 760766 - DNA, 15 bp, Homo sapiens
agccgtttcattttc

SEQ ID NO: 760767 - DNA, 15 bp, Homo sapiens
gccgtttcattttct

SEQ ID NO: 760768 - DNA, 15 bp, Homo sapiens
ccgtttcattttctg

SEQ ID NO: 760769 - DNA, 15 bp, Homo sapiens
cgtttcattttctgg

SEQ ID NO: 760770 - DNA, 15 bp, Homo sapiens
gtttcattttctggc

SEQ ID NO: 760771 - DNA, 15 bp, Homo sapiens
tttcattttctggct

SEQ ID NO: 760772 - DNA, 15 bp, Homo sapiens
ttcattttctggctg

SEQ ID NO: 760773 - DNA, 15 bp, Homo sapiens
tcattttctggctga

SEQ ID NO: 760774 - DNA, 15 bp, Homo sapiens
cattttctggctgat

SEQ ID NO: 760775 - DNA, 15 bp, Homo sapiens
attttctggctgata

SEQ ID NO: 760776 - DNA, 15 bp, Homo sapiens
ttttctggctgatag

SEQ ID NO: 760777 - DNA, 15 bp, Homo sapiens
tttctggctgataga

SEQ ID NO: 760778 - DNA, 15 bp, Homo sapiens
ttctggctgatagag

SEQ ID NO: 760779 - DNA, 15 bp, Homo sapiens
tctggctgatagagt

SEQ ID NO: 760780 - DNA, 15 bp, Homo sapiens
ctggctgatagagtt

SEQ ID NO: 760781 - DNA, 15 bp, Homo sapiens
tggctgatagagttg

SEQ ID NO: 760782 - DNA, 15 bp, Homo sapiens
ggctgatagagttgt

SEQ ID NO: 760783 - DNA, 15 bp, Homo sapiens
gctgatagagttgta

SEQ ID NO: 760784 - DNA, 15 bp, Homo sapiens
ctgatagagttgtac

SEQ ID NO: 760785 - DNA, 15 bp, Homo sapiens
tgatagagttgtact

SEQ ID NO: 760786 - DNA, 15 bp, Homo sapiens
gatagagttgtactt

SEQ ID NO: 760787 - DNA, 15 bp, Homo sapiens
atagagttgtacttg

SEQ ID NO: 760788 - DNA, 15 bp, Homo sapiens
tagagttgtacttgg

SEQ ID NO: 760789 - DNA, 15 bp, Homo sapiens
agagttgtacttgga

SEQ ID NO: 760790 - DNA, 15 bp, Homo sapiens
gagttgtacttggaa

SEQ ID NO: 760791 - DNA, 15 bp, Homo sapiens
agttgtacttggaaa

SEQ ID NO: 760792 - DNA, 15 bp, Homo sapiens
gttgtacttggaaaa

SEQ ID NO: 760793 - DNA, 15 bp, Homo sapiens
ttgtacttggaaaat

SEQ ID NO: 760794 - DNA, 15 bp, Homo sapiens
tgtacttggaaaata

SEQ ID NO: 760795 - DNA, 15 bp, Homo sapiens
gtacttggaaaatac

SEQ ID NO: 760796 - DNA, 15 bp, Homo sapiens
tacttggaaaatact

SEQ ID NO: 760797 - DNA, 15 bp, Homo sapiens
acttggaaaatactc

SEQ ID NO: 760798 - DNA, 15 bp, Homo sapiens
cttggaaaatactca

SEQ ID NO: 760799 - DNA, 15 bp, Homo sapiens
ttggaaaatactcag

SEQ ID NO: 760800 - DNA, 15 bp, Homo sapiens
tggaaaatactcagt

SEQ ID NO: 760801 - DNA, 15 bp, Homo sapiens
ggaaaatactcagtt

SEQ ID NO: 760802 - DNA, 15 bp, Homo sapiens
gaaaatactcagttt

SEQ ID NO: 760803 - DNA, 15 bp, Homo sapiens
aaaatactcagtttc

SEQ ID NO: 760804 - DNA, 15 bp, Homo sapiens
aaatactcagtttcc

SEQ ID NO: 760805 - DNA, 15 bp, Homo sapiens
aatactcagtttcct

SEQ ID NO: 760806 - DNA, 15 bp, Homo sapiens
atactcagtttcctg

SEQ ID NO: 760807 - DNA, 15 bp, Homo sapiens
tactcagtttcctgc

SEQ ID NO: 760808 - DNA, 15 bp, Homo sapiens
actcagtttcctgct

SEQ ID NO: 760809 - DNA, 15 bp, Homo sapiens
ctcagtttcctgctt

SEQ ID NO: 760810 - DNA, 15 bp, Homo sapiens
tcagtttcctgctta

SEQ ID NO: 760811 - DNA, 15 bp, Homo sapiens
cagtttcctgcttac

SEQ ID NO: 760812 - DNA, 15 bp, Homo sapiens
agtttcctgcttact

SEQ ID NO: 760813 - DNA, 15 bp, Homo sapiens
gtttcctgcttactg

SEQ ID NO: 760814 - DNA, 15 bp, Homo sapiens
tttcctgcttactgc

SEQ ID NO: 760815 - DNA, 15 bp, Homo sapiens
ttcctgcttactgct

SEQ ID NO: 760816 - DNA, 15 bp, Homo sapiens
tcctgcttactgctt

SEQ ID NO: 760817 - DNA, 15 bp, Homo sapiens
cctgcttactgcttc

SEQ ID NO: 760818 - DNA, 15 bp, Homo sapiens
ctgcttactgcttca

SEQ ID NO: 760819 - DNA, 15 bp, Homo sapiens
tgcttactgcttcat

SEQ ID NO: 760820 - DNA, 15 bp, Homo sapiens
gcttactgcttcatt

SEQ ID NO: 760821 - DNA, 15 bp, Homo sapiens
cttactgcttcatta

SEQ ID NO: 760822 - DNA, 15 bp, Homo sapiens
ttactgcttcattat

SEQ ID NO: 760823 - DNA, 15 bp, Homo sapiens
tactgcttcattatg

SEQ ID NO: 760824 - DNA, 15 bp, Homo sapiens
actgcttcattatgg

SEQ ID NO: 760825 - DNA, 15 bp, Homo sapiens
ctgcttcattatgga

SEQ ID NO: 760826 - DNA, 15 bp, Homo sapiens
tgcttcattatggat

SEQ ID NO: 760827 - DNA, 15 bp, Homo sapiens
gcttcattatggatt

SEQ ID NO: 760828 - DNA, 15 bp, Homo sapiens
cttcattatggatta

SEQ ID NO: 760829 - DNA, 15 bp, Homo sapiens
ttcattatggattat

SEQ ID NO: 760830 - DNA, 15 bp, Homo sapiens
tcattatggattata

SEQ ID NO: 760831 - DNA, 15 bp, Homo sapiens
cattatggattatac

SEQ ID NO: 760832 - DNA, 15 bp, Homo sapiens
attatggattataca

SEQ ID NO: 760833 - DNA, 15 bp, Homo sapiens
ttatggattatacag

SEQ ID NO: 760834 - DNA, 15 bp, Homo sapiens
tatggattatacagg

SEQ ID NO: 760835 - DNA, 15 bp, Homo sapiens
atggattatacaggt

SEQ ID NO: 760836 - DNA, 15 bp, Homo sapiens
tggattatacaggta

SEQ ID NO: 760837 - DNA, 15 bp, Homo sapiens
ggattatacaggtaa

SEQ ID NO: 760838 - DNA, 15 bp, Homo sapiens
gattatacaggtaaa

SEQ ID NO: 760839 - DNA, 15 bp, Homo sapiens
attatacaggtaaaa

SEQ ID NO: 760840 - DNA, 15 bp, Homo sapiens
ttatacaggtaaaat

SEQ ID NO: 760841 - DNA, 15 bp, Homo sapiens
tatacaggtaaaatt

SEQ ID NO: 760842 - DNA, 15 bp, Homo sapiens
atacaggtaaaatta

SEQ ID NO: 760843 - DNA, 15 bp, Homo sapiens
tacaggtaaaattaa

SEQ ID NO: 760844 - DNA, 15 bp, Homo sapiens
acaggtaaaattaaa

SEQ ID NO: 760845 - DNA, 15 bp, Homo sapiens
caggtaaaattaaat

SEQ ID NO: 760846 - DNA, 15 bp, Homo sapiens
aggtaaaattaaatg

SEQ ID NO: 760847 - DNA, 15 bp, Homo sapiens
ggtaaaattaaatgt

SEQ ID NO: 760848 - DNA, 15 bp, Homo sapiens
gtaaaattaaatgtt

SEQ ID NO: 760849 - DNA, 15 bp, Homo sapiens
taaaattaaatgtta

SEQ ID NO: 760850 - DNA, 15 bp, Homo sapiens
aaaattaaatgttaa

SEQ ID NO: 760851 - DNA, 15 bp, Homo sapiens
aaattaaatgttaaa

SEQ ID NO: 760852 - DNA, 15 bp, Homo sapiens
aattaaatgttaaat

SEQ ID NO: 760853 - DNA, 15 bp, Homo sapiens
attaaatgttaaata

SEQ ID NO: 760854 - DNA, 15 bp, Homo sapiens
ttaaatgttaaatat

SEQ ID NO: 760855 - DNA, 15 bp, Homo sapiens
taaatgttaaatatt

SEQ ID NO: 760856 - DNA, 15 bp, Homo sapiens
aaatgttaaatattt

SEQ ID NO: 760857 - DNA, 15 bp, Homo sapiens
aatgttaaatatttt

SEQ ID NO: 760858 - DNA, 15 bp, Homo sapiens
atgttaaatattttc

SEQ ID NO: 760859 - DNA, 15 bp, Homo sapiens
tgttaaatattttcc

SEQ ID NO: 760860 - DNA, 15 bp, Homo sapiens
gttaaatattttcca

SEQ ID NO: 760861 - DNA, 15 bp, Homo sapiens
ttaaatattttccag

SEQ ID NO: 760862 - DNA, 15 bp, Homo sapiens
taaatattttccagt

SEQ ID NO: 760863 - DNA, 15 bp, Homo sapiens
aaatattttccagtt

SEQ ID NO: 760864 - DNA, 15 bp, Homo sapiens
aatattttccagtta

SEQ ID NO: 760865 - DNA, 15 bp, Homo sapiens
atattttccagttat

SEQ ID NO: 760866 - DNA, 15 bp, Homo sapiens
tattttccagttatg

SEQ ID NO: 760867 - DNA, 15 bp, Homo sapiens
attttccagttatgt

SEQ ID NO: 760868 - DNA, 15 bp, Homo sapiens
ttttccagttatgta

SEQ ID NO: 760869 - DNA, 15 bp, Homo sapiens
tttccagttatgtag

SEQ ID NO: 760870 - DNA, 15 bp, Homo sapiens
ttccagttatgtaga

SEQ ID NO: 760871 - DNA, 15 bp, Homo sapiens
tccagttatgtagaa

SEQ ID NO: 760872 - DNA, 15 bp, Homo sapiens
ccagttatgtagaat

SEQ ID NO: 760873 - DNA, 15 bp, Homo sapiens
cagttatgtagaatt

SEQ ID NO: 760874 - DNA, 15 bp, Homo sapiens
agttatgtagaatta

SEQ ID NO: 760875 - DNA, 15 bp, Homo sapiens
gttatgtagaattac

SEQ ID NO: 760876 - DNA, 15 bp, Homo sapiens
ttatgtagaattact

SEQ ID NO: 760877 - DNA, 15 bp, Homo sapiens
tatgtagaattactt

SEQ ID NO: 760878 - DNA, 15 bp, Homo sapiens
atgtagaattacttt

SEQ ID NO: 760879 - DNA, 15 bp, Homo sapiens
tgtagaattacttta

SEQ ID NO: 760880 - DNA, 15 bp, Homo sapiens
gtagaattactttaa

SEQ ID NO: 760881 - DNA, 15 bp, Homo sapiens
tagaattactttaaa

SEQ ID NO: 760882 - DNA, 15 bp, Homo sapiens
agaattactttaaaa

SEQ ID NO: 760883 - DNA, 15 bp, Homo sapiens
gaattactttaaaaa

SEQ ID NO: 760884 - DNA, 15 bp, Homo sapiens
aattactttaaaaat

SEQ ID NO: 760885 - DNA, 15 bp, Homo sapiens
attactttaaaaata

SEQ ID NO: 760886 - DNA, 15 bp, Homo sapiens
ttactttaaaaataa

SEQ ID NO: 760887 - DNA, 15 bp, Homo sapiens
tactttaaaaataat

SEQ ID NO: 760888 - DNA, 15 bp, Homo sapiens
actttaaaaataata

SEQ ID NO: 760889 - DNA, 15 bp, Homo sapiens
ctttaaaaataatat

SEQ ID NO: 760890 - DNA, 15 bp, Homo sapiens
tttaaaaataatatt

SEQ ID NO: 760891 - DNA, 15 bp, Homo sapiens
ttaaaaataatattt

SEQ ID NO: 760892 - DNA, 15 bp, Homo sapiens
taaaaataatatttt

SEQ ID NO: 760893 - DNA, 15 bp, Homo sapiens
aaaaataatattttg

SEQ ID NO: 760894 - DNA, 15 bp, Homo sapiens
aaaataatattttga

SEQ ID NO: 760895 - DNA, 15 bp, Homo sapiens
aaataatattttgaa

SEQ ID NO: 760896 - DNA, 15 bp, Homo sapiens
aataatattttgaat

SEQ ID NO: 760897 - DNA, 15 bp, Homo sapiens
ataatattttgaatt

SEQ ID NO: 760898 - DNA, 15 bp, Homo sapiens
taatattttgaattt

SEQ ID NO: 760899 - DNA, 15 bp, Homo sapiens
aatattttgaattta

SEQ ID NO: 760900 - DNA, 15 bp, Homo sapiens
atattttgaatttat

SEQ ID NO: 760901 - DNA, 15 bp, Homo sapiens
tattttgaatttata

SEQ ID NO: 760902 - DNA, 15 bp, Homo sapiens
attttgaatttatat

SEQ ID NO: 760903 - DNA, 15 bp, Homo sapiens
ttttgaatttatatt

SEQ ID NO: 760904 - DNA, 15 bp, Homo sapiens
tttgaatttatattt

SEQ ID NO: 760905 - DNA, 15 bp, Homo sapiens
ttgaatttatatttt

SEQ ID NO: 760906 - DNA, 15 bp, Homo sapiens
tgaatttatatttta

SEQ ID NO: 760907 - DNA, 15 bp, Homo sapiens
gaatttatattttaa

SEQ ID NO: 760908 - DNA, 15 bp, Homo sapiens
aatttatattttaaa

SEQ ID NO: 760909 - DNA, 15 bp, Homo sapiens
atttatattttaaaa

SEQ ID NO: 760910 - DNA, 15 bp, Homo sapiens
tttatattttaaaaa

SEQ ID NO: 760911 - DNA, 15 bp, Homo sapiens
ttatattttaaaaac

SEQ ID NO: 760912 - DNA, 15 bp, Homo sapiens
tatattttaaaaact

SEQ ID NO: 760913 - DNA, 15 bp, Homo sapiens
atattttaaaaacta

SEQ ID NO: 760914 - DNA, 15 bp, Homo sapiens
tattttaaaaactac

SEQ ID NO: 760915 - DNA, 15 bp, Homo sapiens
attttaaaaactaca

SEQ ID NO: 760916 - DNA, 15 bp, Homo sapiens
ttttaaaaactacat

SEQ ID NO: 760917 - DNA, 15 bp, Homo sapiens
tttaaaaactacatt

SEQ ID NO: 760918 - DNA, 15 bp, Homo sapiens
ttaaaaactacattg

SEQ ID NO: 760919 - DNA, 15 bp, Homo sapiens
taaaaactacattga

SEQ ID NO: 760920 - DNA, 15 bp, Homo sapiens
aaaaactacattgat

SEQ ID NO: 760921 - DNA, 15 bp, Homo sapiens
aaaactacattgatt

SEQ ID NO: 760922 - DNA, 15 bp, Homo sapiens
aaactacattgattg

SEQ ID NO: 760923 - DNA, 15 bp, Homo sapiens
aactacattgattgt

SEQ ID NO: 760924 - DNA, 15 bp, Homo sapiens
actacattgattgtg

SEQ ID NO: 760925 - DNA, 15 bp, Homo sapiens
ctacattgattgtgt

SEQ ID NO: 760926 - DNA, 15 bp, Homo sapiens
tacattgattgtgtg

SEQ ID NO: 760927 - DNA, 15 bp, Homo sapiens
acattgattgtgtga

SEQ ID NO: 760928 - DNA, 15 bp, Homo sapiens
cattgattgtgtgag

SEQ ID NO: 760929 - DNA, 15 bp, Homo sapiens
attgattgtgtgagt

SEQ ID NO: 760930 - DNA, 15 bp, Homo sapiens
ttgattgtgtgagta

SEQ ID NO: 760931 - DNA, 15 bp, Homo sapiens
tgattgtgtgagtac

SEQ ID NO: 760932 - DNA, 15 bp, Homo sapiens
gattgtgtgagtact

SEQ ID NO: 760933 - DNA, 15 bp, Homo sapiens
attgtgtgagtactt

SEQ ID NO: 760934 - DNA, 15 bp, Homo sapiens
ttgtgtgagtacttt

SEQ ID NO: 760935 - DNA, 15 bp, Homo sapiens
tgtgtgagtacttta

SEQ ID NO: 760936 - DNA, 15 bp, Homo sapiens
gtgtgagtactttaa

SEQ ID NO: 760937 - DNA, 15 bp, Homo sapiens
tgtgagtactttaaa

SEQ ID NO: 760938 - DNA, 15 bp, Homo sapiens
gtgagtactttaaaa

SEQ ID NO: 760939 - DNA, 15 bp, Homo sapiens
tgagtactttaaaaa

SEQ ID NO: 760940 - DNA, 15 bp, Homo sapiens
gagtactttaaaaat

SEQ ID NO: 760941 - DNA, 15 bp, Homo sapiens
agtactttaaaaata

SEQ ID NO: 760942 - DNA, 15 bp, Homo sapiens
gtactttaaaaatat

SEQ ID NO: 760943 - DNA, 15 bp, Homo sapiens
tactttaaaaatatt

SEQ ID NO: 760944 - DNA, 15 bp, Homo sapiens
actttaaaaatattg

SEQ ID NO: 760945 - DNA, 15 bp, Homo sapiens
ctttaaaaatattgt

SEQ ID NO: 760946 - DNA, 15 bp, Homo sapiens
tttaaaaatattgtg

SEQ ID NO: 760947 - DNA, 15 bp, Homo sapiens
ttaaaaatattgtgc

SEQ ID NO: 760948 - DNA, 15 bp, Homo sapiens
taaaaatattgtgca

SEQ ID NO: 760949 - DNA, 15 bp, Homo sapiens
aaaaatattgtgcat

SEQ ID NO: 760950 - DNA, 15 bp, Homo sapiens
aaaatattgtgcatc

SEQ ID NO: 760951 - DNA, 15 bp, Homo sapiens
aaatattgtgcatca

SEQ ID NO: 760952 - DNA, 15 bp, Homo sapiens
aatattgtgcatcag

SEQ ID NO: 760953 - DNA, 15 bp, Homo sapiens
atattgtgcatcagt

SEQ ID NO: 760954 - DNA, 15 bp, Homo sapiens
tattgtgcatcagtt

SEQ ID NO: 760955 - DNA, 15 bp, Homo sapiens
attgtgcatcagttt

SEQ ID NO: 760956 - DNA, 15 bp, Homo sapiens
ttgtgcatcagttta

SEQ ID NO: 760957 - DNA, 15 bp, Homo sapiens
tgtgcatcagtttat

SEQ ID NO: 760958 - DNA, 15 bp, Homo sapiens
gtgcatcagtttatt

SEQ ID NO: 760959 - DNA, 15 bp, Homo sapiens
tgcatcagtttattc

SEQ ID NO: 760960 - DNA, 15 bp, Homo sapiens
gcatcagtttattcc

SEQ ID NO: 760961 - DNA, 15 bp, Homo sapiens
catcagtttattcct

SEQ ID NO: 760962 - DNA, 15 bp, Homo sapiens
atcagtttattcctg

SEQ ID NO: 760963 - DNA, 15 bp, Homo sapiens
tcagtttattcctga

SEQ ID NO: 760964 - DNA, 15 bp, Homo sapiens
cagtttattcctgag

SEQ ID NO: 760965 - DNA, 15 bp, Homo sapiens
agtttattcctgagt

SEQ ID NO: 760966 - DNA, 15 bp, Homo sapiens
gtttattcctgagta

SEQ ID NO: 760967 - DNA, 15 bp, Homo sapiens
tttattcctgagtat

SEQ ID NO: 760968 - DNA, 15 bp, Homo sapiens
ttattcctgagtatt

SEQ ID NO: 760969 - DNA, 15 bp, Homo sapiens
tattcctgagtattg

SEQ ID NO: 760970 - DNA, 15 bp, Homo sapiens
attcctgagtattgt

SEQ ID NO: 760971 - DNA, 15 bp, Homo sapiens
ttcctgagtattgta

SEQ ID NO: 760972 - DNA, 15 bp, Homo sapiens
tcctgagtattgtat

SEQ ID NO: 760973 - DNA, 15 bp, Homo sapiens
cctgagtattgtatg

SEQ ID NO: 760974 - DNA, 15 bp, Homo sapiens
ctgagtattgtatga

SEQ ID NO: 760975 - DNA, 15 bp, Homo sapiens
tgagtattgtatgaa

SEQ ID NO: 760976 - DNA, 15 bp, Homo sapiens
gagtattgtatgaat

SEQ ID NO: 760977 - DNA, 15 bp, Homo sapiens
agtattgtatgaatt

SEQ ID NO: 760978 - DNA, 15 bp, Homo sapiens
gtattgtatgaattt

SEQ ID NO: 760979 - DNA, 15 bp, Homo sapiens
tattgtatgaatttg

SEQ ID NO: 760980 - DNA, 15 bp, Homo sapiens
attgtatgaatttgt

SEQ ID NO: 760981 - DNA, 15 bp, Homo sapiens
ttgtatgaatttgtt

SEQ ID NO: 760982 - DNA, 15 bp, Homo sapiens
tgtatgaatttgttt

SEQ ID NO: 760983 - DNA, 15 bp, Homo sapiens
gtatgaatttgtttt

SEQ ID NO: 760984 - DNA, 15 bp, Homo sapiens
tatgaatttgtttta

SEQ ID NO: 760985 - DNA, 15 bp, Homo sapiens
atgaatttgttttat

SEQ ID NO: 760986 - DNA, 15 bp, Homo sapiens
tgaatttgttttatc

SEQ ID NO: 760987 - DNA, 15 bp, Homo sapiens
gaatttgttttatcc

SEQ ID NO: 760988 - DNA, 15 bp, Homo sapiens
aatttgttttatcca

SEQ ID NO: 760989 - DNA, 15 bp, Homo sapiens
atttgttttatccaa

SEQ ID NO: 760990 - DNA, 15 bp, Homo sapiens
tttgttttatccaaa

SEQ ID NO: 760991 - DNA, 15 bp, Homo sapiens
ttgttttatccaaat

SEQ ID NO: 760992 - DNA, 15 bp, Homo sapiens
tgttttatccaaatt

SEQ ID NO: 760993 - DNA, 15 bp, Homo sapiens
gttttatccaaattg

SEQ ID NO: 760994 - DNA, 15 bp, Homo sapiens
ttttatccaaattgt

SEQ ID NO: 760995 - DNA, 15 bp, Homo sapiens
tttatccaaattgtg

SEQ ID NO: 760996 - DNA, 15 bp, Homo sapiens
ttatccaaattgtga

SEQ ID NO: 760997 - DNA, 15 bp, Homo sapiens
tatccaaattgtgat

SEQ ID NO: 760998 - DNA, 15 bp, Homo sapiens
atccaaattgtgatt

SEQ ID NO: 760999 - DNA, 15 bp, Homo sapiens
tccaaattgtgatta

SEQ ID NO: 761000 - DNA, 15 bp, Homo sapiens
ccaaattgtgattaa

SEQ ID NO: 761001 - DNA, 15 bp, Homo sapiens
caaattgtgattaat

SEQ ID NO: 761002 - DNA, 15 bp, Homo sapiens
aaattgtgattaatt

SEQ ID NO: 761003 - DNA, 15 bp, Homo sapiens
aattgtgattaattt

SEQ ID NO: 761004 - DNA, 15 bp, Homo sapiens
attgtgattaattta

SEQ ID NO: 761005 - DNA, 15 bp, Homo sapiens
ttgtgattaatttag

SEQ ID NO: 761006 - DNA, 15 bp, Homo sapiens
tgtgattaatttagg

SEQ ID NO: 761007 - DNA, 15 bp, Homo sapiens
gtgattaatttagga

SEQ ID NO: 761008 - DNA, 15 bp, Homo sapiens
tgattaatttaggat

SEQ ID NO: 761009 - DNA, 15 bp, Homo sapiens
gattaatttaggata

SEQ ID NO: 761010 - DNA, 15 bp, Homo sapiens
attaatttaggataa

SEQ ID NO: 761011 - DNA, 15 bp, Homo sapiens
ttaatttaggataag

SEQ ID NO: 761012 - DNA, 15 bp, Homo sapiens
taatttaggataagt

SEQ ID NO: 761013 - DNA, 15 bp, Homo sapiens
aatttaggataagtg

SEQ ID NO: 761014 - DNA, 15 bp, Homo sapiens
atttaggataagtgc

SEQ ID NO: 761015 - DNA, 15 bp, Homo sapiens
tttaggataagtgct

SEQ ID NO: 761016 - DNA, 15 bp, Homo sapiens
ttaggataagtgctt

SEQ ID NO: 761017 - DNA, 15 bp, Homo sapiens
taggataagtgctta

SEQ ID NO: 761018 - DNA, 15 bp, Homo sapiens
aggataagtgcttaa

SEQ ID NO: 761019 - DNA, 15 bp, Homo sapiens
ggataagtgcttaag

SEQ ID NO: 761020 - DNA, 15 bp, Homo sapiens
gataagtgcttaagg

SEQ ID NO: 761021 - DNA, 15 bp, Homo sapiens
ataagtgcttaaggg

SEQ ID NO: 761022 - DNA, 15 bp, Homo sapiens
taagtgcttaaggga

SEQ ID NO: 761023 - DNA, 15 bp, Homo sapiens
aagtgcttaagggaa

SEQ ID NO: 761024 - DNA, 15 bp, Homo sapiens
agtgcttaagggaat

SEQ ID NO: 761025 - DNA, 15 bp, Homo sapiens
gtgcttaagggaatt

SEQ ID NO: 761026 - DNA, 15 bp, Homo sapiens
tgcttaagggaattt

SEQ ID NO: 761027 - DNA, 15 bp, Homo sapiens
gcttaagggaatttc

SEQ ID NO: 761028 - DNA, 15 bp, Homo sapiens
cttaagggaatttct

SEQ ID NO: 761029 - DNA, 15 bp, Homo sapiens
ttaagggaatttctg

SEQ ID NO: 761030 - DNA, 15 bp, Homo sapiens
taagggaatttctga

SEQ ID NO: 761031 - DNA, 15 bp, Homo sapiens
aagggaatttctgag

SEQ ID NO: 761032 - DNA, 15 bp, Homo sapiens
agggaatttctgaga

SEQ ID NO: 761033 - DNA, 15 bp, Homo sapiens
gggaatttctgagac

SEQ ID NO: 761034 - DNA, 15 bp, Homo sapiens
ggaatttctgagaca

SEQ ID NO: 761035 - DNA, 15 bp, Homo sapiens
gaatttctgagacat

SEQ ID NO: 761036 - DNA, 15 bp, Homo sapiens
aatttctgagacata

SEQ ID NO: 761037 - DNA, 15 bp, Homo sapiens
atttctgagacatac

SEQ ID NO: 761038 - DNA, 15 bp, Homo sapiens
tttctgagacatacc

SEQ ID NO: 761039 - DNA, 15 bp, Homo sapiens
ttctgagacatacct

SEQ ID NO: 761040 - DNA, 15 bp, Homo sapiens
tctgagacatacctt

SEQ ID NO: 761041 - DNA, 15 bp, Homo sapiens
ctgagacataccttt

SEQ ID NO: 761042 - DNA, 15 bp, Homo sapiens
tgagacatacctttg

SEQ ID NO: 761043 - DNA, 15 bp, Homo sapiens
gagacatacctttgt

SEQ ID NO: 761044 - DNA, 15 bp, Homo sapiens
agacatacctttgtt

SEQ ID NO: 761045 - DNA, 15 bp, Homo sapiens
gacatacctttgttg

SEQ ID NO: 761046 - DNA, 15 bp, Homo sapiens
acatacctttgttgt

SEQ ID NO: 761047 - DNA, 15 bp, Homo sapiens
catacctttgttgtt

SEQ ID NO: 761048 - DNA, 15 bp, Homo sapiens
atacctttgttgttt

SEQ ID NO: 761049 - DNA, 15 bp, Homo sapiens
tacctttgttgtttc

SEQ ID NO: 761050 - DNA, 15 bp, Homo sapiens
acctttgttgtttct

SEQ ID NO: 761051 - DNA, 15 bp, Homo sapiens
cctttgttgtttctt

SEQ ID NO: 761052 - DNA, 15 bp, Homo sapiens
ctttgttgtttcttc

SEQ ID NO: 761053 - DNA, 15 bp, Homo sapiens
tttgttgtttcttcc

SEQ ID NO: 761054 - DNA, 15 bp, Homo sapiens
ttgttgtttcttcca

SEQ ID NO: 761055 - DNA, 15 bp, Homo sapiens
tgttgtttcttccat

SEQ ID NO: 761056 - DNA, 15 bp, Homo sapiens
gttgtttcttccatt

SEQ ID NO: 761057 - DNA, 15 bp, Homo sapiens
ttgtttcttccattt

SEQ ID NO: 761058 - DNA, 15 bp, Homo sapiens
tgtttcttccatttc

SEQ ID NO: 761059 - DNA, 15 bp, Homo sapiens
gtttcttccatttca

SEQ ID NO: 761060 - DNA, 15 bp, Homo sapiens
tttcttccatttcag

SEQ ID NO: 761061 - DNA, 15 bp, Homo sapiens
ttcttccatttcagt

SEQ ID NO: 761062 - DNA, 15 bp, Homo sapiens
tcttccatttcagtt

SEQ ID NO: 761063 - DNA, 15 bp, Homo sapiens
cttccatttcagttg

SEQ ID NO: 761064 - DNA, 15 bp, Homo sapiens
ttccatttcagttgg

SEQ ID NO: 761065 - DNA, 15 bp, Homo sapiens
tccatttcagttgga

SEQ ID NO: 761066 - DNA, 15 bp, Homo sapiens
ccatttcagttggat

SEQ ID NO: 761067 - DNA, 15 bp, Homo sapiens
catttcagttggatc

SEQ ID NO: 761068 - DNA, 15 bp, Homo sapiens
atttcagttggatca

SEQ ID NO: 761069 - DNA, 15 bp, Homo sapiens
tttcagttggatcat

SEQ ID NO: 761070 - DNA, 15 bp, Homo sapiens
ttcagttggatcata

SEQ ID NO: 761071 - DNA, 15 bp, Homo sapiens
tcagttggatcatac

SEQ ID NO: 761072 - DNA, 15 bp, Homo sapiens
cagttggatcatact

SEQ ID NO: 761073 - DNA, 15 bp, Homo sapiens
agttggatcatactt

SEQ ID NO: 761074 - DNA, 15 bp, Homo sapiens
gttggatcatactta

SEQ ID NO: 761075 - DNA, 15 bp, Homo sapiens
ttggatcatacttaa

SEQ ID NO: 761076 - DNA, 15 bp, Homo sapiens
tggatcatacttaaa

SEQ ID NO: 761077 - DNA, 15 bp, Homo sapiens
ggatcatacttaaat

SEQ ID NO: 761078 - DNA, 15 bp, Homo sapiens
gatcatacttaaatg

SEQ ID NO: 761079 - DNA, 15 bp, Homo sapiens
atcatacttaaatgg

SEQ ID NO: 761080 - DNA, 15 bp, Homo sapiens
tcatacttaaatgga

SEQ ID NO: 761081 - DNA, 15 bp, Homo sapiens
catacttaaatggac

SEQ ID NO: 761082 - DNA, 15 bp, Homo sapiens
atacttaaatggact

SEQ ID NO: 761083 - DNA, 15 bp, Homo sapiens
tacttaaatggactt

SEQ ID NO: 761084 - DNA, 15 bp, Homo sapiens
acttaaatggactta

SEQ ID NO: 761085 - DNA, 15 bp, Homo sapiens
cttaaatggacttaa

SEQ ID NO: 761086 - DNA, 15 bp, Homo sapiens
ttaaatggacttaaa

SEQ ID NO: 761087 - DNA, 15 bp, Homo sapiens
taaatggacttaaac

SEQ ID NO: 761088 - DNA, 15 bp, Homo sapiens
aaatggacttaaact

SEQ ID NO: 761089 - DNA, 15 bp, Homo sapiens
aatggacttaaactc

SEQ ID NO: 761090 - DNA, 15 bp, Homo sapiens
atggacttaaactcc

SEQ ID NO: 761091 - DNA, 15 bp, Homo sapiens
tggacttaaactcca

SEQ ID NO: 761092 - DNA, 15 bp, Homo sapiens
ggacttaaactccaa

SEQ ID NO: 761093 - DNA, 15 bp, Homo sapiens
gacttaaactccaac

SEQ ID NO: 761094 - DNA, 15 bp, Homo sapiens
acttaaactccaacc

SEQ ID NO: 761095 - DNA, 15 bp, Homo sapiens
cttaaactccaaccc

SEQ ID NO: 761096 - DNA, 15 bp, Homo sapiens
ttaaactccaaccca

SEQ ID NO: 761097 - DNA, 15 bp, Homo sapiens
taaactccaacccat

SEQ ID NO: 761098 - DNA, 15 bp, Homo sapiens
aaactccaacccata

SEQ ID NO: 761099 - DNA, 15 bp, Homo sapiens
aactccaacccatag

SEQ ID NO: 761100 - DNA, 15 bp, Homo sapiens
actccaacccatagt

SEQ ID NO: 761101 - DNA, 15 bp, Homo sapiens
ctccaacccatagtt

SEQ ID NO: 761102 - DNA, 15 bp, Homo sapiens
tccaacccatagtta

SEQ ID NO: 761103 - DNA, 15 bp, Homo sapiens
ccaacccatagttaa

SEQ ID NO: 761104 - DNA, 15 bp, Homo sapiens
caacccatagttaat

SEQ ID NO: 761105 - DNA, 15 bp, Homo sapiens
aacccatagttaatc

SEQ ID NO: 761106 - DNA, 15 bp, Homo sapiens
acccatagttaatcc

SEQ ID NO: 761107 - DNA, 15 bp, Homo sapiens
cccatagttaatcca

SEQ ID NO: 761108 - DNA, 15 bp, Homo sapiens
ccatagttaatccac

SEQ ID NO: 761109 - DNA, 15 bp, Homo sapiens
catagttaatccaca

SEQ ID NO: 761110 - DNA, 15 bp, Homo sapiens
atagttaatccacat

SEQ ID NO: 761111 - DNA, 15 bp, Homo sapiens
tagttaatccacatt

SEQ ID NO: 761112 - DNA, 15 bp, Homo sapiens
agttaatccacattt

SEQ ID NO: 761113 - DNA, 15 bp, Homo sapiens
gttaatccacatttc

SEQ ID NO: 761114 - DNA, 15 bp, Homo sapiens
ttaatccacatttct

SEQ ID NO: 761115 - DNA, 15 bp, Homo sapiens
taatccacatttctc

SEQ ID NO: 761116 - DNA, 15 bp, Homo sapiens
aatccacatttctcc

SEQ ID NO: 761117 - DNA, 15 bp, Homo sapiens
atccacatttctccc

SEQ ID NO: 761118 - DNA, 15 bp, Homo sapiens
tccacatttctcccc

SEQ ID NO: 761119 - DNA, 15 bp, Homo sapiens
ccacatttctcccct

SEQ ID NO: 761120 - DNA, 15 bp, Homo sapiens
cacatttctcccctc

SEQ ID NO: 761121 - DNA, 15 bp, Homo sapiens
acatttctcccctct

SEQ ID NO: 761122 - DNA, 15 bp, Homo sapiens
catttctcccctctt

SEQ ID NO: 761123 - DNA, 15 bp, Homo sapiens
atttctcccctctta

SEQ ID NO: 761124 - DNA, 15 bp, Homo sapiens
tttctcccctcttag

SEQ ID NO: 761125 - DNA, 15 bp, Homo sapiens
ttctcccctcttagg

SEQ ID NO: 761126 - DNA, 15 bp, Homo sapiens
tctcccctcttaggc

SEQ ID NO: 761127 - DNA, 15 bp, Homo sapiens
ctcccctcttaggcc

SEQ ID NO: 761128 - DNA, 15 bp, Homo sapiens
tcccctcttaggcca

SEQ ID NO: 761129 - DNA, 15 bp, Homo sapiens
cccctcttaggccag

SEQ ID NO: 761130 - DNA, 15 bp, Homo sapiens
ccctcttaggccaga

SEQ ID NO: 761131 - DNA, 15 bp, Homo sapiens
cctcttaggccagag

SEQ ID NO: 761132 - DNA, 15 bp, Homo sapiens
ctcttaggccagagg

SEQ ID NO: 761133 - DNA, 15 bp, Homo sapiens
tcttaggccagagga

SEQ ID NO: 761134 - DNA, 15 bp, Homo sapiens
cttaggccagaggat

SEQ ID NO: 761135 - DNA, 15 bp, Homo sapiens
ttaggccagaggatt

SEQ ID NO: 761136 - DNA, 15 bp, Homo sapiens
taggccagaggattt

SEQ ID NO: 761137 - DNA, 15 bp, Homo sapiens
aggccagaggattta

SEQ ID NO: 761138 - DNA, 15 bp, Homo sapiens
ggccagaggatttaa

SEQ ID NO: 761139 - DNA, 15 bp, Homo sapiens
gccagaggatttaaa

SEQ ID NO: 761140 - DNA, 15 bp, Homo sapiens
ccagaggatttaaag

SEQ ID NO: 761141 - DNA, 15 bp, Homo sapiens
cagaggatttaaagt

SEQ ID NO: 761142 - DNA, 15 bp, Homo sapiens
agaggatttaaagta

SEQ ID NO: 761143 - DNA, 15 bp, Homo sapiens
gaggatttaaagtac

SEQ ID NO: 761144 - DNA, 15 bp, Homo sapiens
aggatttaaagtaca

SEQ ID NO: 761145 - DNA, 15 bp, Homo sapiens
ggatttaaagtacaa

SEQ ID NO: 761146 - DNA, 15 bp, Homo sapiens
gatttaaagtacaaa

SEQ ID NO: 761147 - DNA, 15 bp, Homo sapiens
atttaaagtacaaac

SEQ ID NO: 761148 - DNA, 15 bp, Homo sapiens
tttaaagtacaaaca

SEQ ID NO: 761149 - DNA, 15 bp, Homo sapiens
ttaaagtacaaacat

SEQ ID NO: 761150 - DNA, 15 bp, Homo sapiens
taaagtacaaacatc

SEQ ID NO: 761151 - DNA, 15 bp, Homo sapiens
aaagtacaaacatct

SEQ ID NO: 761152 - DNA, 15 bp, Homo sapiens
aagtacaaacatctg

SEQ ID NO: 761153 - DNA, 15 bp, Homo sapiens
agtacaaacatctga

SEQ ID NO: 761154 - DNA, 15 bp, Homo sapiens
gtacaaacatctgag

SEQ ID NO: 761155 - DNA, 15 bp, Homo sapiens
tacaaacatctgagt

SEQ ID NO: 761156 - DNA, 15 bp, Homo sapiens
acaaacatctgagtt

SEQ ID NO: 761157 - DNA, 15 bp, Homo sapiens
caaacatctgagttc

SEQ ID NO: 761158 - DNA, 15 bp, Homo sapiens
aaacatctgagttca

SEQ ID NO: 761159 - DNA, 15 bp, Homo sapiens
aacatctgagttcag

SEQ ID NO: 761160 - DNA, 15 bp, Homo sapiens
acatctgagttcaga

SEQ ID NO: 761161 - DNA, 15 bp, Homo sapiens
catctgagttcagat

SEQ ID NO: 761162 - DNA, 15 bp, Homo sapiens
atctgagttcagatt

SEQ ID NO: 761163 - DNA, 15 bp, Homo sapiens
tctgagttcagatta

SEQ ID NO: 761164 - DNA, 15 bp, Homo sapiens
ctgagttcagattat

SEQ ID NO: 761165 - DNA, 15 bp, Homo sapiens
tgagttcagattatt

SEQ ID NO: 761166 - DNA, 15 bp, Homo sapiens
gagttcagattattc

SEQ ID NO: 761167 - DNA, 15 bp, Homo sapiens
agttcagattattcc

SEQ ID NO: 761168 - DNA, 15 bp, Homo sapiens
gttcagattattcca

SEQ ID NO: 761169 - DNA, 15 bp, Homo sapiens
ttcagattattccac

SEQ ID NO: 761170 - DNA, 15 bp, Homo sapiens
tcagattattccaca

SEQ ID NO: 761171 - DNA, 15 bp, Homo sapiens
cagattattccacac

SEQ ID NO: 761172 - DNA, 15 bp, Homo sapiens
agattattccacaca

SEQ ID NO: 761173 - DNA, 15 bp, Homo sapiens
gattattccacacag

SEQ ID NO: 761174 - DNA, 15 bp, Homo sapiens
attattccacacagg

SEQ ID NO: 761175 - DNA, 15 bp, Homo sapiens
ttattccacacaggg

SEQ ID NO: 761176 - DNA, 15 bp, Homo sapiens
tattccacacaggga

SEQ ID NO: 761177 - DNA, 15 bp, Homo sapiens
attccacacagggaa

SEQ ID NO: 761178 - DNA, 15 bp, Homo sapiens
ttccacacagggaat

SEQ ID NO: 761179 - DNA, 15 bp, Homo sapiens
tccacacagggaata

SEQ ID NO: 761180 - DNA, 15 bp, Homo sapiens
ccacacagggaataa

SEQ ID NO: 761181 - DNA, 15 bp, Homo sapiens
cacacagggaataaa

SEQ ID NO: 761182 - DNA, 15 bp, Homo sapiens
acacagggaataaaa

SEQ ID NO: 761183 - DNA, 15 bp, Homo sapiens
cacagggaataaaat

SEQ ID NO: 761184 - DNA, 15 bp, Homo sapiens
acagggaataaaata

SEQ ID NO: 761185 - DNA, 15 bp, Homo sapiens
cagggaataaaatat

SEQ ID NO: 761186 - DNA, 15 bp, Homo sapiens
agggaataaaatatg

SEQ ID NO: 761187 - DNA, 15 bp, Homo sapiens
gggaataaaatatgt

SEQ ID NO: 761188 - DNA, 15 bp, Homo sapiens
ggaataaaatatgta

SEQ ID NO: 761189 - DNA, 15 bp, Homo sapiens
gaataaaatatgtac

SEQ ID NO: 761190 - DNA, 15 bp, Homo sapiens
aataaaatatgtaca

SEQ ID NO: 761191 - DNA, 15 bp, Homo sapiens
ataaaatatgtacac

SEQ ID NO: 761192 - DNA, 15 bp, Homo sapiens
taaaatatgtacaca

SEQ ID NO: 761193 - DNA, 15 bp, Homo sapiens
aaaatatgtacacag

SEQ ID NO: 761194 - DNA, 15 bp, Homo sapiens
aaatatgtacacagt

SEQ ID NO: 761195 - DNA, 15 bp, Homo sapiens
aatatgtacacagtc

SEQ ID NO: 761196 - DNA, 15 bp, Homo sapiens
atatgtacacagtct

SEQ ID NO: 761197 - DNA, 15 bp, Homo sapiens
tatgtacacagtcta

SEQ ID NO: 761198 - DNA, 15 bp, Homo sapiens
atgtacacagtctac

SEQ ID NO: 761199 - DNA, 15 bp, Homo sapiens
tgtacacagtctaca

SEQ ID NO: 761200 - DNA, 15 bp, Homo sapiens
gtacacagtctacag

SEQ ID NO: 761201 - DNA, 15 bp, Homo sapiens
tacacagtctacaga

SEQ ID NO: 761202 - DNA, 15 bp, Homo sapiens
acacagtctacagag

SEQ ID NO: 761203 - DNA, 15 bp, Homo sapiens
cacagtctacagaga

SEQ ID NO: 761204 - DNA, 15 bp, Homo sapiens
acagtctacagagag

SEQ ID NO: 761205 - DNA, 15 bp, Homo sapiens
cagtctacagagagt

SEQ ID NO: 761206 - DNA, 15 bp, Homo sapiens
agtctacagagagtt

SEQ ID NO: 761207 - DNA, 15 bp, Homo sapiens
gtctacagagagttt

SEQ ID NO: 761208 - DNA, 15 bp, Homo sapiens
tctacagagagtttc

SEQ ID NO: 761209 - DNA, 15 bp, Homo sapiens
ctacagagagtttct

SEQ ID NO: 761210 - DNA, 15 bp, Homo sapiens
tacagagagtttctg

SEQ ID NO: 761211 - DNA, 15 bp, Homo sapiens
acagagagtttctgt

SEQ ID NO: 761212 - DNA, 15 bp, Homo sapiens
cagagagtttctgtt

SEQ ID NO: 761213 - DNA, 15 bp, Homo sapiens
agagagtttctgtta

SEQ ID NO: 761214 - DNA, 15 bp, Homo sapiens
gagagtttctgttat

SEQ ID NO: 761215 - DNA, 15 bp, Homo sapiens
agagtttctgttatt

SEQ ID NO: 761216 - DNA, 15 bp, Homo sapiens
gagtttctgttattg

SEQ ID NO: 761217 - DNA, 15 bp, Homo sapiens
agtttctgttattgt

SEQ ID NO: 761218 - DNA, 15 bp, Homo sapiens
gtttctgttattgtg

SEQ ID NO: 761219 - DNA, 15 bp, Homo sapiens
tttctgttattgtgg

SEQ ID NO: 761220 - DNA, 15 bp, Homo sapiens
ttctgttattgtggt

SEQ ID NO: 761221 - DNA, 15 bp, Homo sapiens
tctgttattgtggtg

SEQ ID NO: 761222 - DNA, 15 bp, Homo sapiens
ctgttattgtggtgg

SEQ ID NO: 761223 - DNA, 15 bp, Homo sapiens
tgttattgtggtggt

SEQ ID NO: 761224 - DNA, 15 bp, Homo sapiens
gttattgtggtggtg

SEQ ID NO: 761225 - DNA, 15 bp, Homo sapiens
ttattgtggtggtgg

SEQ ID NO: 761226 - DNA, 15 bp, Homo sapiens
tattgtggtggtggt

SEQ ID NO: 761227 - DNA, 15 bp, Homo sapiens
attgtggtggtggtt

SEQ ID NO: 761228 - DNA, 15 bp, Homo sapiens
ttgtggtggtggttt

SEQ ID NO: 761229 - DNA, 15 bp, Homo sapiens
tgtggtggtggtttt

SEQ ID NO: 761230 - DNA, 15 bp, Homo sapiens
gtggtggtggttttg

SEQ ID NO: 761231 - DNA, 15 bp, Homo sapiens
tggtggtggttttgt

SEQ ID NO: 761232 - DNA, 15 bp, Homo sapiens
ggtggtggttttgtg

SEQ ID NO: 761233 - DNA, 15 bp, Homo sapiens
gtggtggttttgtgc

SEQ ID NO: 761234 - DNA, 15 bp, Homo sapiens
tggtggttttgtgct

SEQ ID NO: 761235 - DNA, 15 bp, Homo sapiens
ggtggttttgtgctt

SEQ ID NO: 761236 - DNA, 15 bp, Homo sapiens
gtggttttgtgcttg

SEQ ID NO: 761237 - DNA, 15 bp, Homo sapiens
tggttttgtgcttgt

SEQ ID NO: 761238 - DNA, 15 bp, Homo sapiens
ggttttgtgcttgtg

SEQ ID NO: 761239 - DNA, 15 bp, Homo sapiens
gttttgtgcttgtgt

SEQ ID NO: 761240 - DNA, 15 bp, Homo sapiens
ttttgtgcttgtgta

SEQ ID NO: 761241 - DNA, 15 bp, Homo sapiens
tttgtgcttgtgtat

SEQ ID NO: 761242 - DNA, 15 bp, Homo sapiens
ttgtgcttgtgtatt

SEQ ID NO: 761243 - DNA, 15 bp, Homo sapiens
tgtgcttgtgtattg

SEQ ID NO: 761244 - DNA, 15 bp, Homo sapiens
gtgcttgtgtattgc

SEQ ID NO: 761245 - DNA, 15 bp, Homo sapiens
tgcttgtgtattgct

SEQ ID NO: 761246 - DNA, 15 bp, Homo sapiens
gcttgtgtattgctc

SEQ ID NO: 761247 - DNA, 15 bp, Homo sapiens
cttgtgtattgctct

SEQ ID NO: 761248 - DNA, 15 bp, Homo sapiens
ttgtgtattgctctt

SEQ ID NO: 761249 - DNA, 15 bp, Homo sapiens
tgtgtattgctcttt

SEQ ID NO: 761250 - DNA, 15 bp, Homo sapiens
gtgtattgctctttt

SEQ ID NO: 761251 - DNA, 15 bp, Homo sapiens
tgtattgctctttta

SEQ ID NO: 761252 - DNA, 15 bp, Homo sapiens
gtattgctcttttag

SEQ ID NO: 761253 - DNA, 15 bp, Homo sapiens
tattgctcttttaga

SEQ ID NO: 761254 - DNA, 15 bp, Homo sapiens
attgctcttttagat

SEQ ID NO: 761255 - DNA, 15 bp, Homo sapiens
ttgctcttttagatg

SEQ ID NO: 761256 - DNA, 15 bp, Homo sapiens
tgctcttttagatgg

SEQ ID NO: 761257 - DNA, 15 bp, Homo sapiens
gctcttttagatggt

SEQ ID NO: 761258 - DNA, 15 bp, Homo sapiens
ctcttttagatggtg

SEQ ID NO: 761259 - DNA, 15 bp, Homo sapiens
tcttttagatggtgt

SEQ ID NO: 761260 - DNA, 15 bp, Homo sapiens
cttttagatggtgtt

SEQ ID NO: 761261 - DNA, 15 bp, Homo sapiens
ttttagatggtgtta

SEQ ID NO: 761262 - DNA, 15 bp, Homo sapiens
tttagatggtgttaa

SEQ ID NO: 761263 - DNA, 15 bp, Homo sapiens
ttagatggtgttaat

SEQ ID NO: 761264 - DNA, 15 bp, Homo sapiens
tagatggtgttaatg

SEQ ID NO: 761265 - DNA, 15 bp, Homo sapiens
agatggtgttaatgt

SEQ ID NO: 761266 - DNA, 15 bp, Homo sapiens
gatggtgttaatgta

SEQ ID NO: 761267 - DNA, 15 bp, Homo sapiens
atggtgttaatgtaa

SEQ ID NO: 761268 - DNA, 15 bp, Homo sapiens
tggtgttaatgtaat

SEQ ID NO: 761269 - DNA, 15 bp, Homo sapiens
ggtgttaatgtaatg

SEQ ID NO: 761270 - DNA, 15 bp, Homo sapiens
gtgttaatgtaatga

SEQ ID NO: 761271 - DNA, 15 bp, Homo sapiens
tgttaatgtaatgaa

SEQ ID NO: 761272 - DNA, 15 bp, Homo sapiens
gttaatgtaatgaag

SEQ ID NO: 761273 - DNA, 15 bp, Homo sapiens
ttaatgtaatgaagt

SEQ ID NO: 761274 - DNA, 15 bp, Homo sapiens
taatgtaatgaagtg

SEQ ID NO: 761275 - DNA, 15 bp, Homo sapiens
aatgtaatgaagtga

SEQ ID NO: 761276 - DNA, 15 bp, Homo sapiens
atgtaatgaagtgaa

SEQ ID NO: 761277 - DNA, 15 bp, Homo sapiens
tgtaatgaagtgaat

SEQ ID NO: 761278 - DNA, 15 bp, Homo sapiens
gtaatgaagtgaatt

SEQ ID NO: 761279 - DNA, 15 bp, Homo sapiens
taatgaagtgaattg

SEQ ID NO: 761280 - DNA, 15 bp, Homo sapiens
aatgaagtgaattgg

SEQ ID NO: 761281 - DNA, 15 bp, Homo sapiens
atgaagtgaattgga

SEQ ID NO: 761282 - DNA, 15 bp, Homo sapiens
tgaagtgaattggag

SEQ ID NO: 761283 - DNA, 15 bp, Homo sapiens
gaagtgaattggaga

SEQ ID NO: 761284 - DNA, 15 bp, Homo sapiens
aagtgaattggagaa

SEQ ID NO: 761285 - DNA, 15 bp, Homo sapiens
agtgaattggagaat

SEQ ID NO: 761286 - DNA, 15 bp, Homo sapiens
gtgaattggagaatt

SEQ ID NO: 761287 - DNA, 15 bp, Homo sapiens
tgaattggagaattt

SEQ ID NO: 761288 - DNA, 15 bp, Homo sapiens
gaattggagaatttc

SEQ ID NO: 761289 - DNA, 15 bp, Homo sapiens
aattggagaatttca

SEQ ID NO: 761290 - DNA, 15 bp, Homo sapiens
attggagaatttcag

SEQ ID NO: 761291 - DNA, 15 bp, Homo sapiens
ttggagaatttcagt

SEQ ID NO: 761292 - DNA, 15 bp, Homo sapiens
tggagaatttcagtt

SEQ ID NO: 761293 - DNA, 15 bp, Homo sapiens
ggagaatttcagttt

SEQ ID NO: 761294 - DNA, 15 bp, Homo sapiens
gagaatttcagtttt

SEQ ID NO: 761295 - DNA, 15 bp, Homo sapiens
agaatttcagttttt

SEQ ID NO: 761296 - DNA, 15 bp, Homo sapiens
gaatttcagttttta

SEQ ID NO: 761297 - DNA, 15 bp, Homo sapiens
aatttcagtttttat

SEQ ID NO: 761298 - DNA, 15 bp, Homo sapiens
atttcagtttttatc

SEQ ID NO: 761299 - DNA, 15 bp, Homo sapiens
tttcagtttttatcc

SEQ ID NO: 761300 - DNA, 15 bp, Homo sapiens
ttcagtttttatcct

SEQ ID NO: 761301 - DNA, 15 bp, Homo sapiens
tcagtttttatccta

SEQ ID NO: 761302 - DNA, 15 bp, Homo sapiens
cagtttttatcctaa

SEQ ID NO: 761303 - DNA, 15 bp, Homo sapiens
agtttttatcctaaa

SEQ ID NO: 761304 - DNA, 15 bp, Homo sapiens
gtttttatcctaaat

SEQ ID NO: 761305 - DNA, 15 bp, Homo sapiens
tttttatcctaaatt

SEQ ID NO: 761306 - DNA, 15 bp, Homo sapiens
ttttatcctaaattt

SEQ ID NO: 761307 - DNA, 15 bp, Homo sapiens
tttatcctaaatttt

SEQ ID NO: 761308 - DNA, 15 bp, Homo sapiens
ttatcctaaattttc

SEQ ID NO: 761309 - DNA, 15 bp, Homo sapiens
tatcctaaattttct

SEQ ID NO: 761310 - DNA, 15 bp, Homo sapiens
atcctaaattttctg

SEQ ID NO: 761311 - DNA, 15 bp, Homo sapiens
tcctaaattttctga

SEQ ID NO: 761312 - DNA, 15 bp, Homo sapiens
cctaaattttctgag

SEQ ID NO: 761313 - DNA, 15 bp, Homo sapiens
ctaaattttctgagt

SEQ ID NO: 761314 - DNA, 15 bp, Homo sapiens
taaattttctgagta

SEQ ID NO: 761315 - DNA, 15 bp, Homo sapiens
aaattttctgagtat

SEQ ID NO: 761316 - DNA, 15 bp, Homo sapiens
aattttctgagtata

SEQ ID NO: 761317 - DNA, 15 bp, Homo sapiens
attttctgagtataa

SEQ ID NO: 761318 - DNA, 15 bp, Homo sapiens
ttttctgagtataaa

SEQ ID NO: 761319 - DNA, 15 bp, Homo sapiens
tttctgagtataaat

SEQ ID NO: 761320 - DNA, 15 bp, Homo sapiens
ttctgagtataaatg

SEQ ID NO: 761321 - DNA, 15 bp, Homo sapiens
tctgagtataaatgt

SEQ ID NO: 761322 - DNA, 15 bp, Homo sapiens
ctgagtataaatgtg

SEQ ID NO: 761323 - DNA, 15 bp, Homo sapiens
tgagtataaatgtgc

SEQ ID NO: 761324 - DNA, 15 bp, Homo sapiens
gagtataaatgtgcc

SEQ ID NO: 761325 - DNA, 15 bp, Homo sapiens
agtataaatgtgccc

SEQ ID NO: 761326 - DNA, 15 bp, Homo sapiens
gtataaatgtgccca

SEQ ID NO: 761327 - DNA, 15 bp, Homo sapiens
tataaatgtgcccag

SEQ ID NO: 761328 - DNA, 15 bp, Homo sapiens
ataaatgtgcccaga

SEQ ID NO: 761329 - DNA, 15 bp, Homo sapiens
taaatgtgcccagat

SEQ ID NO: 761330 - DNA, 15 bp, Homo sapiens
aaatgtgcccagatt

SEQ ID NO: 761331 - DNA, 15 bp, Homo sapiens
aatgtgcccagattt

SEQ ID NO: 761332 - DNA, 15 bp, Homo sapiens
atgtgcccagatttt

SEQ ID NO: 761333 - DNA, 15 bp, Homo sapiens
tgtgcccagattttt

SEQ ID NO: 761334 - DNA, 15 bp, Homo sapiens
gtgcccagatttttc

SEQ ID NO: 761335 - DNA, 15 bp, Homo sapiens
tgcccagatttttct

SEQ ID NO: 761336 - DNA, 15 bp, Homo sapiens
gcccagatttttctg

SEQ ID NO: 761337 - DNA, 15 bp, Homo sapiens
cccagatttttctga

SEQ ID NO: 761338 - DNA, 15 bp, Homo sapiens
ccagatttttctgac

SEQ ID NO: 761339 - DNA, 15 bp, Homo sapiens
cagatttttctgacc

SEQ ID NO: 761340 - DNA, 15 bp, Homo sapiens
agatttttctgacct

SEQ ID NO: 761341 - DNA, 15 bp, Homo sapiens
gatttttctgacctt

SEQ ID NO: 761342 - DNA, 15 bp, Homo sapiens
atttttctgaccttt

SEQ ID NO: 761343 - DNA, 15 bp, Homo sapiens
tttttctgacctttt

SEQ ID NO: 761344 - DNA, 15 bp, Homo sapiens
ttttctgaccttttc

SEQ ID NO: 761345 - DNA, 15 bp, Homo sapiens
tttctgaccttttct

SEQ ID NO: 761346 - DNA, 15 bp, Homo sapiens
ttctgaccttttctg

SEQ ID NO: 761347 - DNA, 15 bp, Homo sapiens
tctgaccttttctga

SEQ ID NO: 761348 - DNA, 15 bp, Homo sapiens
ctgaccttttctgac

SEQ ID NO: 761349 - DNA, 15 bp, Homo sapiens
tgaccttttctgacc

SEQ ID NO: 761350 - DNA, 15 bp, Homo sapiens
gaccttttctgacct

SEQ ID NO: 761351 - DNA, 15 bp, Homo sapiens
accttttctgacctt

SEQ ID NO: 761352 - DNA, 15 bp, Homo sapiens
ccttttctgaccttt

SEQ ID NO: 761353 - DNA, 15 bp, Homo sapiens
cttttctgacctttc

SEQ ID NO: 761354 - DNA, 15 bp, Homo sapiens
ttttctgacctttct

SEQ ID NO: 761355 - DNA, 15 bp, Homo sapiens
tttctgacctttcta

SEQ ID NO: 761356 - DNA, 15 bp, Homo sapiens
ttctgacctttctaa

SEQ ID NO: 761357 - DNA, 15 bp, Homo sapiens
tctgacctttctaac

SEQ ID NO: 761358 - DNA, 15 bp, Homo sapiens
ctgacctttctaacc

SEQ ID NO: 761359 - DNA, 15 bp, Homo sapiens
tgacctttctaacct

SEQ ID NO: 761360 - DNA, 15 bp, Homo sapiens
gacctttctaacctt

SEQ ID NO: 761361 - DNA, 15 bp, Homo sapiens
acctttctaaccttt

SEQ ID NO: 761362 - DNA, 15 bp, Homo sapiens
cctttctaacctttt

SEQ ID NO: 761363 - DNA, 15 bp, Homo sapiens
ctttctaaccttttc

SEQ ID NO: 761364 - DNA, 15 bp, Homo sapiens
tttctaaccttttcc

SEQ ID NO: 761365 - DNA, 15 bp, Homo sapiens
ttctaaccttttcct

SEQ ID NO: 761366 - DNA, 15 bp, Homo sapiens
tctaaccttttcctt

SEQ ID NO: 761367 - DNA, 15 bp, Homo sapiens
ctaaccttttccttt

SEQ ID NO: 761368 - DNA, 15 bp, Homo sapiens
taaccttttcctttt

SEQ ID NO: 761369 - DNA, 15 bp, Homo sapiens
aaccttttccttttt

SEQ ID NO: 761370 - DNA, 15 bp, Homo sapiens
accttttcctttttt

SEQ ID NO: 761371 - DNA, 15 bp, Homo sapiens
ccttttcctttttta

SEQ ID NO: 761372 - DNA, 15 bp, Homo sapiens
cttttccttttttaa

SEQ ID NO: 761373 - DNA, 15 bp, Homo sapiens
ttttccttttttaaa

SEQ ID NO: 761374 - DNA, 15 bp, Homo sapiens
tttccttttttaaat

SEQ ID NO: 761375 - DNA, 15 bp, Homo sapiens
ttccttttttaaatt

SEQ ID NO: 761376 - DNA, 15 bp, Homo sapiens
tccttttttaaattg

SEQ ID NO: 761377 - DNA, 15 bp, Homo sapiens
ccttttttaaattgc

SEQ ID NO: 761378 - DNA, 15 bp, Homo sapiens
cttttttaaattgca

SEQ ID NO: 761379 - DNA, 15 bp, Homo sapiens
ttttttaaattgcat

SEQ ID NO: 761380 - DNA, 15 bp, Homo sapiens
tttttaaattgcata

SEQ ID NO: 761381 - DNA, 15 bp, Homo sapiens
ttttaaattgcatag

SEQ ID NO: 761382 - DNA, 15 bp, Homo sapiens
tttaaattgcataga

SEQ ID NO: 761383 - DNA, 15 bp, Homo sapiens
ttaaattgcatagac

SEQ ID NO: 761384 - DNA, 15 bp, Homo sapiens
taaattgcatagact

SEQ ID NO: 761385 - DNA, 15 bp, Homo sapiens
aaattgcatagactt

SEQ ID NO: 761386 - DNA, 15 bp, Homo sapiens
aattgcatagacttg

SEQ ID NO: 761387 - DNA, 15 bp, Homo sapiens
attgcatagacttgt

SEQ ID NO: 761388 - DNA, 15 bp, Homo sapiens
ttgcatagacttgtt

SEQ ID NO: 761389 - DNA, 15 bp, Homo sapiens
tgcatagacttgttt

SEQ ID NO: 761390 - DNA, 15 bp, Homo sapiens
gcatagacttgtttc

SEQ ID NO: 761391 - DNA, 15 bp, Homo sapiens
catagacttgtttct

SEQ ID NO: 761392 - DNA, 15 bp, Homo sapiens
atagacttgtttctc

SEQ ID NO: 761393 - DNA, 15 bp, Homo sapiens
tagacttgtttctca

SEQ ID NO: 761394 - DNA, 15 bp, Homo sapiens
agacttgtttctcaa

SEQ ID NO: 761395 - DNA, 15 bp, Homo sapiens
gacttgtttctcaat

SEQ ID NO: 761396 - DNA, 15 bp, Homo sapiens
acttgtttctcaatc

SEQ ID NO: 761397 - DNA, 15 bp, Homo sapiens
cttgtttctcaatct

SEQ ID NO: 761398 - DNA, 15 bp, Homo sapiens
ttgtttctcaatctc

SEQ ID NO: 761399 - DNA, 15 bp, Homo sapiens
tgtttctcaatctct

SEQ ID NO: 761400 - DNA, 15 bp, Homo sapiens
gtttctcaatctcta

SEQ ID NO: 761401 - DNA, 15 bp, Homo sapiens
tttctcaatctctag

SEQ ID NO: 761402 - DNA, 15 bp, Homo sapiens
ttctcaatctctagt

SEQ ID NO: 761403 - DNA, 15 bp, Homo sapiens
tctcaatctctagtt

SEQ ID NO: 761404 - DNA, 15 bp, Homo sapiens
ctcaatctctagttt

SEQ ID NO: 761405 - DNA, 15 bp, Homo sapiens
tcaatctctagtttc

SEQ ID NO: 761406 - DNA, 15 bp, Homo sapiens
caatctctagtttca

SEQ ID NO: 761407 - DNA, 15 bp, Homo sapiens
aatctctagtttcac

SEQ ID NO: 761408 - DNA, 15 bp, Homo sapiens
atctctagtttcact

SEQ ID NO: 761409 - DNA, 15 bp, Homo sapiens
tctctagtttcactg

SEQ ID NO: 761410 - DNA, 15 bp, Homo sapiens
ctctagtttcactga

SEQ ID NO: 761411 - DNA, 15 bp, Homo sapiens
tctagtttcactgaa

SEQ ID NO: 761412 - DNA, 15 bp, Homo sapiens
ctagtttcactgaat

SEQ ID NO: 761413 - DNA, 15 bp, Homo sapiens
tagtttcactgaatg

SEQ ID NO: 761414 - DNA, 15 bp, Homo sapiens
agtttcactgaatgg

SEQ ID NO: 761415 - DNA, 15 bp, Homo sapiens
gtttcactgaatggt

SEQ ID NO: 761416 - DNA, 15 bp, Homo sapiens
tttcactgaatggta

SEQ ID NO: 761417 - DNA, 15 bp, Homo sapiens
ttcactgaatggtaa

SEQ ID NO: 761418 - DNA, 15 bp, Homo sapiens
tcactgaatggtaaa

SEQ ID NO: 761419 - DNA, 15 bp, Homo sapiens
cactgaatggtaaat

SEQ ID NO: 761420 - DNA, 15 bp, Homo sapiens
actgaatggtaaatt

SEQ ID NO: 761421 - DNA, 15 bp, Homo sapiens
ctgaatggtaaattg

SEQ ID NO: 761422 - DNA, 15 bp, Homo sapiens
tgaatggtaaattgg

SEQ ID NO: 761423 - DNA, 15 bp, Homo sapiens
gaatggtaaattggt

SEQ ID NO: 761424 - DNA, 15 bp, Homo sapiens
aatggtaaattggta

SEQ ID NO: 761425 - DNA, 15 bp, Homo sapiens
atggtaaattggtac

SEQ ID NO: 761426 - DNA, 15 bp, Homo sapiens
tggtaaattggtaca

SEQ ID NO: 761427 - DNA, 15 bp, Homo sapiens
ggtaaattggtacat

SEQ ID NO: 761428 - DNA, 15 bp, Homo sapiens
gtaaattggtacatg

SEQ ID NO: 761429 - DNA, 15 bp, Homo sapiens
taaattggtacatgt

SEQ ID NO: 761430 - DNA, 15 bp, Homo sapiens
aaattggtacatgtt

SEQ ID NO: 761431 - DNA, 15 bp, Homo sapiens
aattggtacatgttt

SEQ ID NO: 761432 - DNA, 15 bp, Homo sapiens
attggtacatgttta

SEQ ID NO: 761433 - DNA, 15 bp, Homo sapiens
ttggtacatgtttag

SEQ ID NO: 761434 - DNA, 15 bp, Homo sapiens
tggtacatgtttaga

SEQ ID NO: 761435 - DNA, 15 bp, Homo sapiens
ggtacatgtttagaa

SEQ ID NO: 761436 - DNA, 15 bp, Homo sapiens
gtacatgtttagaaa

SEQ ID NO: 761437 - DNA, 15 bp, Homo sapiens
tacatgtttagaaat

SEQ ID NO: 761438 - DNA, 15 bp, Homo sapiens
acatgtttagaaata

SEQ ID NO: 761439 - DNA, 15 bp, Homo sapiens
catgtttagaaataa

SEQ ID NO: 761440 - DNA, 15 bp, Homo sapiens
atgtttagaaataag

SEQ ID NO: 761441 - DNA, 15 bp, Homo sapiens
tgtttagaaataagg

SEQ ID NO: 761442 - DNA, 15 bp, Homo sapiens
gtttagaaataaggt

SEQ ID NO: 761443 - DNA, 15 bp, Homo sapiens
tttagaaataaggtt

SEQ ID NO: 761444 - DNA, 15 bp, Homo sapiens
ttagaaataaggtta

SEQ ID NO: 761445 - DNA, 15 bp, Homo sapiens
tagaaataaggttag

SEQ ID NO: 761446 - DNA, 15 bp, Homo sapiens
agaaataaggttaga

SEQ ID NO: 761447 - DNA, 15 bp, Homo sapiens
gaaataaggttagat

SEQ ID NO: 761448 - DNA, 15 bp, Homo sapiens
aaataaggttagatt

SEQ ID NO: 761449 - DNA, 15 bp, Homo sapiens
aataaggttagatta

SEQ ID NO: 761450 - DNA, 15 bp, Homo sapiens
ataaggttagattaa

SEQ ID NO: 761451 - DNA, 15 bp, Homo sapiens
taaggttagattaac

SEQ ID NO: 761452 - DNA, 15 bp, Homo sapiens
aaggttagattaacc

SEQ ID NO: 761453 - DNA, 15 bp, Homo sapiens
aggttagattaacca

SEQ ID NO: 761454 - DNA, 15 bp, Homo sapiens
ggttagattaaccat

SEQ ID NO: 761455 - DNA, 15 bp, Homo sapiens
gttagattaaccatg

SEQ ID NO: 761456 - DNA, 15 bp, Homo sapiens
ttagattaaccatgg

SEQ ID NO: 761457 - DNA, 15 bp, Homo sapiens
tagattaaccatggg

SEQ ID NO: 761458 - DNA, 15 bp, Homo sapiens
agattaaccatgggt

SEQ ID NO: 761459 - DNA, 15 bp, Homo sapiens
gattaaccatgggtg

SEQ ID NO: 761460 - DNA, 15 bp, Homo sapiens
attaaccatgggtgg

SEQ ID NO: 761461 - DNA, 15 bp, Homo sapiens
ttaaccatgggtggt

SEQ ID NO: 761462 - DNA, 15 bp, Homo sapiens
taaccatgggtggtg

SEQ ID NO: 761463 - DNA, 15 bp, Homo sapiens
aaccatgggtggtgg

SEQ ID NO: 761464 - DNA, 15 bp, Homo sapiens
accatgggtggtggt

SEQ ID NO: 761465 - DNA, 15 bp, Homo sapiens
ccatgggtggtggtt

SEQ ID NO: 761466 - DNA, 15 bp, Homo sapiens
catgggtggtggtta

SEQ ID NO: 761467 - DNA, 15 bp, Homo sapiens
atgggtggtggttac

SEQ ID NO: 761468 - DNA, 15 bp, Homo sapiens
tgggtggtggttact

SEQ ID NO: 761469 - DNA, 15 bp, Homo sapiens
gggtggtggttactt

SEQ ID NO: 761470 - DNA, 15 bp, Homo sapiens
ggtggtggttacttg

SEQ ID NO: 761471 - DNA, 15 bp, Homo sapiens
gtggtggttacttga

SEQ ID NO: 761472 - DNA, 15 bp, Homo sapiens
tggtggttacttgat

SEQ ID NO: 761473 - DNA, 15 bp, Homo sapiens
ggtggttacttgatg

SEQ ID NO: 761474 - DNA, 15 bp, Homo sapiens
gtggttacttgatga

SEQ ID NO: 761475 - DNA, 15 bp, Homo sapiens
tggttacttgatgag

SEQ ID NO: 761476 - DNA, 15 bp, Homo sapiens
ggttacttgatgagt

SEQ ID NO: 761477 - DNA, 15 bp, Homo sapiens
gttacttgatgagta

SEQ ID NO: 761478 - DNA, 15 bp, Homo sapiens
ttacttgatgagtaa

SEQ ID NO: 761479 - DNA, 15 bp, Homo sapiens
tacttgatgagtaag

SEQ ID NO: 761480 - DNA, 15 bp, Homo sapiens
acttgatgagtaagt

SEQ ID NO: 761481 - DNA, 15 bp, Homo sapiens
cttgatgagtaagtg

SEQ ID NO: 761482 - DNA, 15 bp, Homo sapiens
ttgatgagtaagtgg

SEQ ID NO: 761483 - DNA, 15 bp, Homo sapiens
tgatgagtaagtggg

SEQ ID NO: 761484 - DNA, 15 bp, Homo sapiens
gatgagtaagtgggc

SEQ ID NO: 761485 - DNA, 15 bp, Homo sapiens
atgagtaagtgggcg

SEQ ID NO: 761486 - DNA, 15 bp, Homo sapiens
tgagtaagtgggcga

SEQ ID NO: 761487 - DNA, 15 bp, Homo sapiens
gagtaagtgggcgat

SEQ ID NO: 761488 - DNA, 15 bp, Homo sapiens
agtaagtgggcgatt

SEQ ID NO: 761489 - DNA, 15 bp, Homo sapiens
gtaagtgggcgattc

SEQ ID NO: 761490 - DNA, 15 bp, Homo sapiens
taagtgggcgattcc

SEQ ID NO: 761491 - DNA, 15 bp, Homo sapiens
aagtgggcgattccc

SEQ ID NO: 761492 - DNA, 15 bp, Homo sapiens
agtgggcgattccct

SEQ ID NO: 761493 - DNA, 15 bp, Homo sapiens
gtgggcgattccctt

SEQ ID NO: 761494 - DNA, 15 bp, Homo sapiens
tgggcgattccctta

SEQ ID NO: 761495 - DNA, 15 bp, Homo sapiens
gggcgattcccttac

SEQ ID NO: 761496 - DNA, 15 bp, Homo sapiens
ggcgattcccttaca

SEQ ID NO: 761497 - DNA, 15 bp, Homo sapiens
gcgattcccttacat

SEQ ID NO: 761498 - DNA, 15 bp, Homo sapiens
cgattcccttacatc

SEQ ID NO: 761499 - DNA, 15 bp, Homo sapiens
gattcccttacatct

SEQ ID NO: 761500 - DNA, 15 bp, Homo sapiens
attcccttacatctg

SEQ ID NO: 761501 - DNA, 15 bp, Homo sapiens
ttcccttacatctgg

SEQ ID NO: 761502 - DNA, 15 bp, Homo sapiens
tcccttacatctggt

SEQ ID NO: 761503 - DNA, 15 bp, Homo sapiens
cccttacatctggta

SEQ ID NO: 761504 - DNA, 15 bp, Homo sapiens
ccttacatctggtag

SEQ ID NO: 761505 - DNA, 15 bp, Homo sapiens
cttacatctggtagg

SEQ ID NO: 761506 - DNA, 15 bp, Homo sapiens
ttacatctggtaggg

SEQ ID NO: 761507 - DNA, 15 bp, Homo sapiens
tacatctggtagggt

SEQ ID NO: 761508 - DNA, 15 bp, Homo sapiens
acatctggtagggta

SEQ ID NO: 761509 - DNA, 15 bp, Homo sapiens
catctggtagggtaa

SEQ ID NO: 761510 - DNA, 15 bp, Homo sapiens
atctggtagggtaaa

SEQ ID NO: 761511 - DNA, 15 bp, Homo sapiens
tctggtagggtaaag

SEQ ID NO: 761512 - DNA, 15 bp, Homo sapiens
ctggtagggtaaagg

SEQ ID NO: 761513 - DNA, 15 bp, Homo sapiens
tggtagggtaaaggt

SEQ ID NO: 761514 - DNA, 15 bp, Homo sapiens
ggtagggtaaaggtg

SEQ ID NO: 761515 - DNA, 15 bp, Homo sapiens
gtagggtaaaggtgt

SEQ ID NO: 761516 - DNA, 15 bp, Homo sapiens
tagggtaaaggtgtg

SEQ ID NO: 761517 - DNA, 15 bp, Homo sapiens
agggtaaaggtgtgg

SEQ ID NO: 761518 - DNA, 15 bp, Homo sapiens
gggtaaaggtgtggg

SEQ ID NO: 761519 - DNA, 15 bp, Homo sapiens
ggtaaaggtgtgggt

SEQ ID NO: 761520 - DNA, 15 bp, Homo sapiens
gtaaaggtgtgggtg

SEQ ID NO: 761521 - DNA, 15 bp, Homo sapiens
taaaggtgtgggtgg

SEQ ID NO: 761522 - DNA, 15 bp, Homo sapiens
aaaggtgtgggtggg

SEQ ID NO: 761523 - DNA, 15 bp, Homo sapiens
aaggtgtgggtggga

SEQ ID NO: 761524 - DNA, 15 bp, Homo sapiens
aggtgtgggtgggag

SEQ ID NO: 761525 - DNA, 15 bp, Homo sapiens
ggtgtgggtgggagg

SEQ ID NO: 761526 - DNA, 15 bp, Homo sapiens
gtgtgggtgggaggt

SEQ ID NO: 761527 - DNA, 15 bp, Homo sapiens
tgtgggtgggaggtg

SEQ ID NO: 761528 - DNA, 15 bp, Homo sapiens
gtgggtgggaggtga

SEQ ID NO: 761529 - DNA, 15 bp, Homo sapiens
tgggtgggaggtgaa

SEQ ID NO: 761530 - DNA, 15 bp, Homo sapiens
gggtgggaggtgaag

SEQ ID NO: 761531 - DNA, 15 bp, Homo sapiens
ggtgggaggtgaagc

SEQ ID NO: 761532 - DNA, 15 bp, Homo sapiens
gtgggaggtgaagca

SEQ ID NO: 761533 - DNA, 15 bp, Homo sapiens
tgggaggtgaagcag

SEQ ID NO: 761534 - DNA, 15 bp, Homo sapiens
gggaggtgaagcagt

SEQ ID NO: 761535 - DNA, 15 bp, Homo sapiens
ggaggtgaagcagtg

SEQ ID NO: 761536 - DNA, 15 bp, Homo sapiens
gaggtgaagcagtga

SEQ ID NO: 761537 - DNA, 15 bp, Homo sapiens
aggtgaagcagtgat

SEQ ID NO: 761538 - DNA, 15 bp, Homo sapiens
ggtgaagcagtgatc

SEQ ID NO: 761539 - DNA, 15 bp, Homo sapiens
gtgaagcagtgatca

SEQ ID NO: 761540 - DNA, 15 bp, Homo sapiens
tgaagcagtgatcag

SEQ ID NO: 761541 - DNA, 15 bp, Homo sapiens
gaagcagtgatcagg

SEQ ID NO: 761542 - DNA, 15 bp, Homo sapiens
aagcagtgatcaggt

SEQ ID NO: 761543 - DNA, 15 bp, Homo sapiens
agcagtgatcaggta

SEQ ID NO: 761544 - DNA, 15 bp, Homo sapiens
gcagtgatcaggtag

SEQ ID NO: 761545 - DNA, 15 bp, Homo sapiens
cagtgatcaggtagg

SEQ ID NO: 761546 - DNA, 15 bp, Homo sapiens
agtgatcaggtaggg

SEQ ID NO: 761547 - DNA, 15 bp, Homo sapiens
gtgatcaggtaggga

SEQ ID NO: 761548 - DNA, 15 bp, Homo sapiens
tgatcaggtagggac

SEQ ID NO: 761549 - DNA, 15 bp, Homo sapiens
gatcaggtagggaca

SEQ ID NO: 761550 - DNA, 15 bp, Homo sapiens
atcaggtagggacat

SEQ ID NO: 761551 - DNA, 15 bp, Homo sapiens
tcaggtagggacatg

SEQ ID NO: 761552 - DNA, 15 bp, Homo sapiens
caggtagggacatga

SEQ ID NO: 761553 - DNA, 15 bp, Homo sapiens
aggtagggacatgag

SEQ ID NO: 761554 - DNA, 15 bp, Homo sapiens
ggtagggacatgagt

SEQ ID NO: 761555 - DNA, 15 bp, Homo sapiens
gtagggacatgagtc

SEQ ID NO: 761556 - DNA, 15 bp, Homo sapiens
tagggacatgagtct

SEQ ID NO: 761557 - DNA, 15 bp, Homo sapiens
agggacatgagtctt

SEQ ID NO: 761558 - DNA, 15 bp, Homo sapiens
gggacatgagtcttt

SEQ ID NO: 761559 - DNA, 15 bp, Homo sapiens
ggacatgagtctttg

SEQ ID NO: 761560 - DNA, 15 bp, Homo sapiens
gacatgagtctttgc

SEQ ID NO: 761561 - DNA, 15 bp, Homo sapiens
acatgagtctttgcc

SEQ ID NO: 761562 - DNA, 15 bp, Homo sapiens
catgagtctttgccc

SEQ ID NO: 761563 - DNA, 15 bp, Homo sapiens
atgagtctttgccca

SEQ ID NO: 761564 - DNA, 15 bp, Homo sapiens
tgagtctttgcccaa

SEQ ID NO: 761565 - DNA, 15 bp, Homo sapiens
gagtctttgcccaaa

SEQ ID NO: 761566 - DNA, 15 bp, Homo sapiens
agtctttgcccaaaa

SEQ ID NO: 761567 - DNA, 15 bp, Homo sapiens
gtctttgcccaaaat

SEQ ID NO: 761568 - DNA, 15 bp, Homo sapiens
tctttgcccaaaatt

SEQ ID NO: 761569 - DNA, 15 bp, Homo sapiens
ctttgcccaaaattt

SEQ ID NO: 761570 - DNA, 15 bp, Homo sapiens
tttgcccaaaatttg

SEQ ID NO: 761571 - DNA, 15 bp, Homo sapiens
ttgcccaaaatttgt

SEQ ID NO: 761572 - DNA, 15 bp, Homo sapiens
tgcccaaaatttgtg

SEQ ID NO: 761573 - DNA, 15 bp, Homo sapiens
gcccaaaatttgtgc

SEQ ID NO: 761574 - DNA, 15 bp, Homo sapiens
cccaaaatttgtgca

SEQ ID NO: 761575 - DNA, 15 bp, Homo sapiens
ccaaaatttgtgcac

SEQ ID NO: 761576 - DNA, 15 bp, Homo sapiens
caaaatttgtgcacc

SEQ ID NO: 761577 - DNA, 15 bp, Homo sapiens
aaaatttgtgcaccc

SEQ ID NO: 761578 - DNA, 15 bp, Homo sapiens
aaatttgtgcaccca

SEQ ID NO: 761579 - DNA, 15 bp, Homo sapiens
aatttgtgcacccaa

SEQ ID NO: 761580 - DNA, 15 bp, Homo sapiens
atttgtgcacccaat

SEQ ID NO: 761581 - DNA, 15 bp, Homo sapiens
tttgtgcacccaatt

SEQ ID NO: 761582 - DNA, 15 bp, Homo sapiens
ttgtgcacccaattc

SEQ ID NO: 761583 - DNA, 15 bp, Homo sapiens
tgtgcacccaattca

SEQ ID NO: 761584 - DNA, 15 bp, Homo sapiens
gtgcacccaattcag

SEQ ID NO: 761585 - DNA, 15 bp, Homo sapiens
tgcacccaattcaga

SEQ ID NO: 761586 - DNA, 15 bp, Homo sapiens
gcacccaattcagaa

SEQ ID NO: 761587 - DNA, 15 bp, Homo sapiens
cacccaattcagaat

SEQ ID NO: 761588 - DNA, 15 bp, Homo sapiens
acccaattcagaatt

SEQ ID NO: 761589 - DNA, 15 bp, Homo sapiens
cccaattcagaatta

SEQ ID NO: 761590 - DNA, 15 bp, Homo sapiens
ccaattcagaattat

SEQ ID NO: 761591 - DNA, 15 bp, Homo sapiens
caattcagaattata

SEQ ID NO: 761592 - DNA, 15 bp, Homo sapiens
aattcagaattatat

SEQ ID NO: 761593 - DNA, 15 bp, Homo sapiens
attcagaattatatt

SEQ ID NO: 761594 - DNA, 15 bp, Homo sapiens
ttcagaattatattg

SEQ ID NO: 761595 - DNA, 15 bp, Homo sapiens
tcagaattatattgc

SEQ ID NO: 761596 - DNA, 15 bp, Homo sapiens
cagaattatattgcc

SEQ ID NO: 761597 - DNA, 15 bp, Homo sapiens
agaattatattgccc

SEQ ID NO: 761598 - DNA, 15 bp, Homo sapiens
gaattatattgccct

SEQ ID NO: 761599 - DNA, 15 bp, Homo sapiens
aattatattgcccta

SEQ ID NO: 761600 - DNA, 15 bp, Homo sapiens
attatattgccctaa

SEQ ID NO: 761601 - DNA, 15 bp, Homo sapiens
ttatattgccctaaa

SEQ ID NO: 761602 - DNA, 15 bp, Homo sapiens
tatattgccctaaat

SEQ ID NO: 761603 - DNA, 15 bp, Homo sapiens
atattgccctaaatt

SEQ ID NO: 761604 - DNA, 15 bp, Homo sapiens
tattgccctaaattt

SEQ ID NO: 761605 - DNA, 15 bp, Homo sapiens
attgccctaaatttg

SEQ ID NO: 761606 - DNA, 15 bp, Homo sapiens
ttgccctaaatttga

SEQ ID NO: 761607 - DNA, 15 bp, Homo sapiens
tgccctaaatttgaa

SEQ ID NO: 761608 - DNA, 15 bp, Homo sapiens
gccctaaatttgaac

SEQ ID NO: 761609 - DNA, 15 bp, Homo sapiens
ccctaaatttgaact

SEQ ID NO: 761610 - DNA, 15 bp, Homo sapiens
cctaaatttgaactt

SEQ ID NO: 761611 - DNA, 15 bp, Homo sapiens
ctaaatttgaacttt

SEQ ID NO: 761612 - DNA, 15 bp, Homo sapiens
taaatttgaactttt

SEQ ID NO: 761613 - DNA, 15 bp, Homo sapiens
aaatttgaacttttg

SEQ ID NO: 761614 - DNA, 15 bp, Homo sapiens
aatttgaacttttgg

SEQ ID NO: 761615 - DNA, 15 bp, Homo sapiens
atttgaacttttggg

SEQ ID NO: 761616 - DNA, 15 bp, Homo sapiens
tttgaacttttgggg

SEQ ID NO: 761617 - DNA, 15 bp, Homo sapiens
ttgaacttttgggga

SEQ ID NO: 761618 - DNA, 15 bp, Homo sapiens
tgaacttttggggaa

SEQ ID NO: 761619 - DNA, 15 bp, Homo sapiens
gaacttttggggaat

SEQ ID NO: 761620 - DNA, 15 bp, Homo sapiens
aacttttggggaatg

SEQ ID NO: 761621 - DNA, 15 bp, Homo sapiens
acttttggggaatgg

SEQ ID NO: 761622 - DNA, 15 bp, Homo sapiens
cttttggggaatggc

SEQ ID NO: 761623 - DNA, 15 bp, Homo sapiens
ttttggggaatggcg

SEQ ID NO: 761624 - DNA, 15 bp, Homo sapiens
tttggggaatggcga

SEQ ID NO: 761625 - DNA, 15 bp, Homo sapiens
ttggggaatggcgac

SEQ ID NO: 761626 - DNA, 15 bp, Homo sapiens
tggggaatggcgaca

SEQ ID NO: 761627 - DNA, 15 bp, Homo sapiens
ggggaatggcgacat

SEQ ID NO: 761628 - DNA, 15 bp, Homo sapiens
gggaatggcgacatt

SEQ ID NO: 761629 - DNA, 15 bp, Homo sapiens
ggaatggcgacattg

SEQ ID NO: 761630 - DNA, 15 bp, Homo sapiens
gaatggcgacattgt

SEQ ID NO: 761631 - DNA, 15 bp, Homo sapiens
aatggcgacattgtt

SEQ ID NO: 761632 - DNA, 15 bp, Homo sapiens
atggcgacattgttt

SEQ ID NO: 761633 - DNA, 15 bp, Homo sapiens
tggcgacattgtttg

SEQ ID NO: 761634 - DNA, 15 bp, Homo sapiens
ggcgacattgtttgc

SEQ ID NO: 761635 - DNA, 15 bp, Homo sapiens
gcgacattgtttgct

SEQ ID NO: 761636 - DNA, 15 bp, Homo sapiens
cgacattgtttgctg

SEQ ID NO: 761637 - DNA, 15 bp, Homo sapiens
gacattgtttgctga

SEQ ID NO: 761638 - DNA, 15 bp, Homo sapiens
acattgtttgctgac

SEQ ID NO: 761639 - DNA, 15 bp, Homo sapiens
cattgtttgctgaca

SEQ ID NO: 761640 - DNA, 15 bp, Homo sapiens
attgtttgctgacag

SEQ ID NO: 761641 - DNA, 15 bp, Homo sapiens
ttgtttgctgacaga

SEQ ID NO: 761642 - DNA, 15 bp, Homo sapiens
tgtttgctgacagat

SEQ ID NO: 761643 - DNA, 15 bp, Homo sapiens
gtttgctgacagatt

SEQ ID NO: 761644 - DNA, 15 bp, Homo sapiens
tttgctgacagattg

SEQ ID NO: 761645 - DNA, 15 bp, Homo sapiens
ttgctgacagattgc

SEQ ID NO: 761646 - DNA, 15 bp, Homo sapiens
tgctgacagattgct

SEQ ID NO: 761647 - DNA, 15 bp, Homo sapiens
gctgacagattgctt

SEQ ID NO: 761648 - DNA, 15 bp, Homo sapiens
ctgacagattgcttt

SEQ ID NO: 761649 - DNA, 15 bp, Homo sapiens
tgacagattgctttt

SEQ ID NO: 761650 - DNA, 15 bp, Homo sapiens
gacagattgctttta

SEQ ID NO: 761651 - DNA, 15 bp, Homo sapiens
acagattgcttttaa

SEQ ID NO: 761652 - DNA, 15 bp, Homo sapiens
cagattgcttttaaa

SEQ ID NO: 761653 - DNA, 15 bp, Homo sapiens
agattgcttttaaac

SEQ ID NO: 761654 - DNA, 15 bp, Homo sapiens
gattgcttttaaact

SEQ ID NO: 761655 - DNA, 15 bp, Homo sapiens
attgcttttaaacta

SEQ ID NO: 761656 - DNA, 15 bp, Homo sapiens
ttgcttttaaactaa

SEQ ID NO: 761657 - DNA, 15 bp, Homo sapiens
tgcttttaaactaaa

SEQ ID NO: 761658 - DNA, 15 bp, Homo sapiens
gcttttaaactaaag

SEQ ID NO: 761659 - DNA, 15 bp, Homo sapiens
cttttaaactaaaga

SEQ ID NO: 761660 - DNA, 15 bp, Homo sapiens
ttttaaactaaagaa

SEQ ID NO: 761661 - DNA, 15 bp, Homo sapiens
tttaaactaaagaac

SEQ ID NO: 761662 - DNA, 15 bp, Homo sapiens
ttaaactaaagaacg

SEQ ID NO: 761663 - DNA, 15 bp, Homo sapiens
taaactaaagaacga

SEQ ID NO: 761664 - DNA, 15 bp, Homo sapiens
aaactaaagaacgaa

SEQ ID NO: 761665 - DNA, 15 bp, Homo sapiens
aactaaagaacgaag

SEQ ID NO: 761666 - DNA, 15 bp, Homo sapiens
actaaagaacgaaga

SEQ ID NO: 761667 - DNA, 15 bp, Homo sapiens
ctaaagaacgaagaa

SEQ ID NO: 761668 - DNA, 15 bp, Homo sapiens
taaagaacgaagaat

SEQ ID NO: 761669 - DNA, 15 bp, Homo sapiens
aaagaacgaagaatt

SEQ ID NO: 761670 - DNA, 15 bp, Homo sapiens
aagaacgaagaattg

SEQ ID NO: 761671 - DNA, 15 bp, Homo sapiens
agaacgaagaattgg

SEQ ID NO: 761672 - DNA, 15 bp, Homo sapiens
gaacgaagaattgga

SEQ ID NO: 761673 - DNA, 15 bp, Homo sapiens
aacgaagaattggaa

SEQ ID NO: 761674 - DNA, 15 bp, Homo sapiens
acgaagaattggaaa

SEQ ID NO: 761675 - DNA, 15 bp, Homo sapiens
cgaagaattggaaaa

SEQ ID NO: 761676 - DNA, 15 bp, Homo sapiens
gaagaattggaaaat

SEQ ID NO: 761677 - DNA, 15 bp, Homo sapiens
aagaattggaaaatt

SEQ ID NO: 761678 - DNA, 15 bp, Homo sapiens
agaattggaaaattt

SEQ ID NO: 761679 - DNA, 15 bp, Homo sapiens
gaattggaaaatttt

SEQ ID NO: 761680 - DNA, 15 bp, Homo sapiens
aattggaaaattttt

SEQ ID NO: 761681 - DNA, 15 bp, Homo sapiens
attggaaaatttttt

SEQ ID NO: 761682 - DNA, 15 bp, Homo sapiens
ttggaaaattttttt

SEQ ID NO: 761683 - DNA, 15 bp, Homo sapiens
tggaaaatttttttt

SEQ ID NO: 761684 - DNA, 15 bp, Homo sapiens
ggaaaattttttttc

SEQ ID NO: 761685 - DNA, 15 bp, Homo sapiens
gaaaattttttttct

SEQ ID NO: 761686 - DNA, 15 bp, Homo sapiens
aaaattttttttcta

SEQ ID NO: 761687 - DNA, 15 bp, Homo sapiens
aaattttttttctag

SEQ ID NO: 761688 - DNA, 15 bp, Homo sapiens
aattttttttctagg

SEQ ID NO: 761689 - DNA, 15 bp, Homo sapiens
attttttttctaggg

SEQ ID NO: 761690 - DNA, 15 bp, Homo sapiens
ttttttttctagggc

SEQ ID NO: 761691 - DNA, 15 bp, Homo sapiens
tttttttctagggca

SEQ ID NO: 761692 - DNA, 15 bp, Homo sapiens
ttttttctagggcag

SEQ ID NO: 761693 - DNA, 15 bp, Homo sapiens
tttttctagggcaga

SEQ ID NO: 761694 - DNA, 15 bp, Homo sapiens
ttttctagggcagag

SEQ ID NO: 761695 - DNA, 15 bp, Homo sapiens
tttctagggcagaga

SEQ ID NO: 761696 - DNA, 15 bp, Homo sapiens
ttctagggcagagag

SEQ ID NO: 761697 - DNA, 15 bp, Homo sapiens
tctagggcagagaga

SEQ ID NO: 761698 - DNA, 15 bp, Homo sapiens
ctagggcagagagag

SEQ ID NO: 761699 - DNA, 15 bp, Homo sapiens
tagggcagagagagg

SEQ ID NO: 761700 - DNA, 15 bp, Homo sapiens
agggcagagagaggc

SEQ ID NO: 761701 - DNA, 15 bp, Homo sapiens
gggcagagagaggcc

SEQ ID NO: 761702 - DNA, 15 bp, Homo sapiens
ggcagagagaggcca

SEQ ID NO: 761703 - DNA, 15 bp, Homo sapiens
gcagagagaggccac

SEQ ID NO: 761704 - DNA, 15 bp, Homo sapiens
cagagagaggccact

SEQ ID NO: 761705 - DNA, 15 bp, Homo sapiens
agagagaggccactt

SEQ ID NO: 761706 - DNA, 15 bp, Homo sapiens
gagagaggccacttt

SEQ ID NO: 761707 - DNA, 15 bp, Homo sapiens
agagaggccactttt

SEQ ID NO: 761708 - DNA, 15 bp, Homo sapiens
gagaggccacttttc

SEQ ID NO: 761709 - DNA, 15 bp, Homo sapiens
agaggccacttttca

SEQ ID NO: 761710 - DNA, 15 bp, Homo sapiens
gaggccacttttcat

SEQ ID NO: 761711 - DNA, 15 bp, Homo sapiens
aggccacttttcata

SEQ ID NO: 761712 - DNA, 15 bp, Homo sapiens
ggccacttttcatac

SEQ ID NO: 761713 - DNA, 15 bp, Homo sapiens
gccacttttcatacc

SEQ ID NO: 761714 - DNA, 15 bp, Homo sapiens
ccacttttcataccc

SEQ ID NO: 761715 - DNA, 15 bp, Homo sapiens
cacttttcataccca

SEQ ID NO: 761716 - DNA, 15 bp, Homo sapiens
acttttcatacccag

SEQ ID NO: 761717 - DNA, 15 bp, Homo sapiens
cttttcatacccagt

SEQ ID NO: 761718 - DNA, 15 bp, Homo sapiens
ttttcatacccagtg

SEQ ID NO: 761719 - DNA, 15 bp, Homo sapiens
tttcatacccagtgt

SEQ ID NO: 761720 - DNA, 15 bp, Homo sapiens
ttcatacccagtgta

SEQ ID NO: 761721 - DNA, 15 bp, Homo sapiens
tcatacccagtgtaa

SEQ ID NO: 761722 - DNA, 15 bp, Homo sapiens
catacccagtgtaat

SEQ ID NO: 761723 - DNA, 15 bp, Homo sapiens
atacccagtgtaata

SEQ ID NO: 761724 - DNA, 15 bp, Homo sapiens
tacccagtgtaatat

SEQ ID NO: 761725 - DNA, 15 bp, Homo sapiens
acccagtgtaatata

SEQ ID NO: 761726 - DNA, 15 bp, Homo sapiens
cccagtgtaatataa

SEQ ID NO: 761727 - DNA, 15 bp, Homo sapiens
ccagtgtaatataaa

SEQ ID NO: 761728 - DNA, 15 bp, Homo sapiens
cagtgtaatataaat

SEQ ID NO: 761729 - DNA, 15 bp, Homo sapiens
agtgtaatataaatt

SEQ ID NO: 761730 - DNA, 15 bp, Homo sapiens
gtgtaatataaattc

SEQ ID NO: 761731 - DNA, 15 bp, Homo sapiens
tgtaatataaattcc

SEQ ID NO: 761732 - DNA, 15 bp, Homo sapiens
gtaatataaattcca

SEQ ID NO: 761733 - DNA, 15 bp, Homo sapiens
taatataaattccag

SEQ ID NO: 761734 - DNA, 15 bp, Homo sapiens
aatataaattccagt

SEQ ID NO: 761735 - DNA, 15 bp, Homo sapiens
atataaattccagtg

SEQ ID NO: 761736 - DNA, 15 bp, Homo sapiens
tataaattccagtgt

SEQ ID NO: 761737 - DNA, 15 bp, Homo sapiens
ataaattccagtgtg

SEQ ID NO: 761738 - DNA, 15 bp, Homo sapiens
taaattccagtgtgc

SEQ ID NO: 761739 - DNA, 15 bp, Homo sapiens
aaattccagtgtgca

SEQ ID NO: 761740 - DNA, 15 bp, Homo sapiens
aattccagtgtgcat

SEQ ID NO: 761741 - DNA, 15 bp, Homo sapiens
attccagtgtgcatc

SEQ ID NO: 761742 - DNA, 15 bp, Homo sapiens
ttccagtgtgcatcc

SEQ ID NO: 761743 - DNA, 15 bp, Homo sapiens
tccagtgtgcatccg

SEQ ID NO: 761744 - DNA, 15 bp, Homo sapiens
ccagtgtgcatccgg

SEQ ID NO: 761745 - DNA, 15 bp, Homo sapiens
cagtgtgcatccgga

SEQ ID NO: 761746 - DNA, 15 bp, Homo sapiens
agtgtgcatccggat

SEQ ID NO: 761747 - DNA, 15 bp, Homo sapiens
gtgtgcatccggatt

SEQ ID NO: 761748 - DNA, 15 bp, Homo sapiens
tgtgcatccggattg

SEQ ID NO: 761749 - DNA, 15 bp, Homo sapiens
gtgcatccggattga

SEQ ID NO: 761750 - DNA, 15 bp, Homo sapiens
tgcatccggattgaa

SEQ ID NO: 761751 - DNA, 15 bp, Homo sapiens
gcatccggattgaac

SEQ ID NO: 761752 - DNA, 15 bp, Homo sapiens
catccggattgaact

SEQ ID NO: 761753 - DNA, 15 bp, Homo sapiens
atccggattgaactc

SEQ ID NO: 761754 - DNA, 15 bp, Homo sapiens
tccggattgaactct

SEQ ID NO: 761755 - DNA, 15 bp, Homo sapiens
ccggattgaactcta

SEQ ID NO: 761756 - DNA, 15 bp, Homo sapiens
cggattgaactctac

SEQ ID NO: 761757 - DNA, 15 bp, Homo sapiens
ggattgaactctact

SEQ ID NO: 761758 - DNA, 15 bp, Homo sapiens
gattgaactctactt

SEQ ID NO: 761759 - DNA, 15 bp, Homo sapiens
attgaactctactta

SEQ ID NO: 761760 - DNA, 15 bp, Homo sapiens
ttgaactctacttac

SEQ ID NO: 761761 - DNA, 15 bp, Homo sapiens
tgaactctacttaca

SEQ ID NO: 761762 - DNA, 15 bp, Homo sapiens
gaactctacttacac

SEQ ID NO: 761763 - DNA, 15 bp, Homo sapiens
aactctacttacaca

SEQ ID NO: 761764 - DNA, 15 bp, Homo sapiens
actctacttacacag

SEQ ID NO: 761765 - DNA, 15 bp, Homo sapiens
ctctacttacacagt

SEQ ID NO: 761766 - DNA, 15 bp, Homo sapiens
tctacttacacagta

SEQ ID NO: 761767 - DNA, 15 bp, Homo sapiens
ctacttacacagtat

SEQ ID NO: 761768 - DNA, 15 bp, Homo sapiens
tacttacacagtatc

SEQ ID NO: 761769 - DNA, 15 bp, Homo sapiens
acttacacagtatct

SEQ ID NO: 761770 - DNA, 15 bp, Homo sapiens
cttacacagtatcta

SEQ ID NO: 761771 - DNA, 15 bp, Homo sapiens
ttacacagtatctat

SEQ ID NO: 761772 - DNA, 15 bp, Homo sapiens
tacacagtatctata

SEQ ID NO: 761773 - DNA, 15 bp, Homo sapiens
acacagtatctataa

SEQ ID NO: 761774 - DNA, 15 bp, Homo sapiens
cacagtatctataaa

SEQ ID NO: 761775 - DNA, 15 bp, Homo sapiens
acagtatctataaat

SEQ ID NO: 761776 - DNA, 15 bp, Homo sapiens
cagtatctataaatt

SEQ ID NO: 761777 - DNA, 15 bp, Homo sapiens
agtatctataaatta

SEQ ID NO: 761778 - DNA, 15 bp, Homo sapiens
gtatctataaattat

SEQ ID NO: 761779 - DNA, 15 bp, Homo sapiens
tatctataaattata

SEQ ID NO: 761780 - DNA, 15 bp, Homo sapiens
atctataaattataa

SEQ ID NO: 761781 - DNA, 15 bp, Homo sapiens
tctataaattataac

SEQ ID NO: 761782 - DNA, 15 bp, Homo sapiens
ctataaattataact

SEQ ID NO: 761783 - DNA, 15 bp, Homo sapiens
tataaattataactg

SEQ ID NO: 761784 - DNA, 15 bp, Homo sapiens
ataaattataactgt

SEQ ID NO: 761785 - DNA, 15 bp, Homo sapiens
taaattataactgta

SEQ ID NO: 761786 - DNA, 15 bp, Homo sapiens
aaattataactgtag

SEQ ID NO: 761787 - DNA, 15 bp, Homo sapiens
aattataactgtagg

SEQ ID NO: 761788 - DNA, 15 bp, Homo sapiens
attataactgtaggt

SEQ ID NO: 761789 - DNA, 15 bp, Homo sapiens
ttataactgtaggtg

SEQ ID NO: 761790 - DNA, 15 bp, Homo sapiens
tataactgtaggtgg

SEQ ID NO: 761791 - DNA, 15 bp, Homo sapiens
ataactgtaggtgga

SEQ ID NO: 761792 - DNA, 15 bp, Homo sapiens
taactgtaggtggat

SEQ ID NO: 761793 - DNA, 15 bp, Homo sapiens
aactgtaggtggatc

SEQ ID NO: 761794 - DNA, 15 bp, Homo sapiens
actgtaggtggatct

SEQ ID NO: 761795 - DNA, 15 bp, Homo sapiens
ctgtaggtggatctt

SEQ ID NO: 761796 - DNA, 15 bp, Homo sapiens
tgtaggtggatcttt

SEQ ID NO: 761797 - DNA, 15 bp, Homo sapiens
gtaggtggatctttg

SEQ ID NO: 761798 - DNA, 15 bp, Homo sapiens
taggtggatctttgg

SEQ ID NO: 761799 - DNA, 15 bp, Homo sapiens
aggtggatctttggc

SEQ ID NO: 761800 - DNA, 15 bp, Homo sapiens
ggtggatctttggca

SEQ ID NO: 761801 - DNA, 15 bp, Homo sapiens
gtggatctttggcaa

SEQ ID NO: 761802 - DNA, 15 bp, Homo sapiens
tggatctttggcaag

SEQ ID NO: 761803 - DNA, 15 bp, Homo sapiens
ggatctttggcaaga

SEQ ID NO: 761804 - DNA, 15 bp, Homo sapiens
gatctttggcaagac

SEQ ID NO: 761805 - DNA, 15 bp, Homo sapiens
atctttggcaagaca

SEQ ID NO: 761806 - DNA, 15 bp, Homo sapiens
tctttggcaagacag

SEQ ID NO: 761807 - DNA, 15 bp, Homo sapiens
ctttggcaagacagt

SEQ ID NO: 761808 - DNA, 15 bp, Homo sapiens
tttggcaagacagtt

SEQ ID NO: 761809 - DNA, 15 bp, Homo sapiens
ttggcaagacagtta

SEQ ID NO: 761810 - DNA, 15 bp, Homo sapiens
tggcaagacagttaa

SEQ ID NO: 761811 - DNA, 15 bp, Homo sapiens
ggcaagacagttaat

SEQ ID NO: 761812 - DNA, 15 bp, Homo sapiens
gcaagacagttaatt

SEQ ID NO: 761813 - DNA, 15 bp, Homo sapiens
caagacagttaatta

SEQ ID NO: 761814 - DNA, 15 bp, Homo sapiens
aagacagttaattac

SEQ ID NO: 761815 - DNA, 15 bp, Homo sapiens
agacagttaattaca

SEQ ID NO: 761816 - DNA, 15 bp, Homo sapiens
gacagttaattacag

SEQ ID NO: 761817 - DNA, 15 bp, Homo sapiens
acagttaattacagt

SEQ ID NO: 761818 - DNA, 15 bp, Homo sapiens
cagttaattacagtg

SEQ ID NO: 761819 - DNA, 15 bp, Homo sapiens
agttaattacagtgt

SEQ ID NO: 761820 - DNA, 15 bp, Homo sapiens
gttaattacagtgtg

SEQ ID NO: 761821 - DNA, 15 bp, Homo sapiens
ttaattacagtgtgc

SEQ ID NO: 761822 - DNA, 15 bp, Homo sapiens
taattacagtgtgca

SEQ ID NO: 761823 - DNA, 15 bp, Homo sapiens
aattacagtgtgcaa

SEQ ID NO: 761824 - DNA, 15 bp, Homo sapiens
attacagtgtgcaaa

SEQ ID NO: 761825 - DNA, 15 bp, Homo sapiens
ttacagtgtgcaaat

SEQ ID NO: 761826 - DNA, 15 bp, Homo sapiens
tacagtgtgcaaata

SEQ ID NO: 761827 - DNA, 15 bp, Homo sapiens
acagtgtgcaaataa

SEQ ID NO: 761828 - DNA, 15 bp, Homo sapiens
cagtgtgcaaataaa

SEQ ID NO: 761829 - DNA, 15 bp, Homo sapiens
agtgtgcaaataaaa

SEQ ID NO: 761830 - DNA, 15 bp, Homo sapiens
gtgtgcaaataaaag

SEQ ID NO: 761831 - DNA, 15 bp, Homo sapiens
tgtgcaaataaaagt

SEQ ID NO: 761832 - DNA, 15 bp, Homo sapiens
gtgcaaataaaagtt

SEQ ID NO: 761833 - DNA, 15 bp, Homo sapiens
tgcaaataaaagttt

SEQ ID NO: 761834 - DNA, 15 bp, Homo sapiens
gcaaataaaagtttt

SEQ ID NO: 761835 - DNA, 15 bp, Homo sapiens
caaataaaagttttg

SEQ ID NO: 761836 - DNA, 15 bp, Homo sapiens
aaataaaagttttgt

SEQ ID NO: 761837 - DNA, 15 bp, Homo sapiens
aataaaagttttgtg

SEQ ID NO: 761838 - DNA, 15 bp, Homo sapiens
ataaaagttttgtga

SEQ ID NO: 761839 - DNA, 15 bp, Homo sapiens
taaaagttttgtgaa

SEQ ID NO: 761840 - DNA, 15 bp, Homo sapiens
aaaagttttgtgaaa

SEQ ID NO: 761841 - DNA, 15 bp, Homo sapiens
aaagttttgtgaaat

SEQ ID NO: 761842 - DNA, 15 bp, Homo sapiens
aagttttgtgaaatt

SEQ ID NO: 761843 - DNA, 15 bp, Homo sapiens
agttttgtgaaattg

SEQ ID NO: 761844 - DNA, 15 bp, Homo sapiens
gttttgtgaaattgc

SEQ ID NO: 761845 - DNA, 15 bp, Homo sapiens
ttttgtgaaattgct

SEQ ID NO: 761846 - DNA, 15 bp, Homo sapiens
tttgtgaaattgctc

SEQ ID NO: 761847 - DNA, 15 bp, Homo sapiens
ttgtgaaattgctca

SEQ ID NO: 761848 - DNA, 15 bp, Homo sapiens
tgtgaaattgctcat

SEQ ID NO: 761849 - DNA, 15 bp, Homo sapiens
gtgaaattgctcatt

SEQ ID NO: 761850 - DNA, 15 bp, Homo sapiens
tgaaattgctcattt

SEQ ID NO: 761851 - DNA, 15 bp, Homo sapiens
gaaattgctcattta

SEQ ID NO: 761852 - DNA, 15 bp, Homo sapiens
aaattgctcatttaa

SEQ ID NO: 761853 - DNA, 15 bp, Homo sapiens
aattgctcatttaaa

SEQ ID NO: 761854 - DNA, 15 bp, Homo sapiens
attgctcatttaaaa

SEQ ID NO: 761855 - DNA, 15 bp, Homo sapiens
ttgctcatttaaaat

SEQ ID NO: 761856 - DNA, 15 bp, Homo sapiens
tgctcatttaaaata

SEQ ID NO: 761857 - DNA, 15 bp, Homo sapiens
gctcatttaaaatat

SEQ ID NO: 761858 - DNA, 15 bp, Homo sapiens
ctcatttaaaatata

SEQ ID NO: 761859 - DNA, 15 bp, Homo sapiens
tcatttaaaatatag

SEQ ID NO: 761860 - DNA, 15 bp, Homo sapiens
catttaaaatatagc

SEQ ID NO: 761861 - DNA, 15 bp, Homo sapiens
atttaaaatatagct

SEQ ID NO: 761862 - DNA, 15 bp, Homo sapiens
tttaaaatatagctt

SEQ ID NO: 761863 - DNA, 15 bp, Homo sapiens
ttaaaatatagcttt

SEQ ID NO: 761864 - DNA, 15 bp, Homo sapiens
taaaatatagctttt

SEQ ID NO: 761865 - DNA, 15 bp, Homo sapiens
aaaatatagctttta

SEQ ID NO: 761866 - DNA, 15 bp, Homo sapiens
aaatatagcttttag

SEQ ID NO: 761867 - DNA, 15 bp, Homo sapiens
aatatagcttttagg

SEQ ID NO: 761868 - DNA, 15 bp, Homo sapiens
atatagcttttagga

SEQ ID NO: 761869 - DNA, 15 bp, Homo sapiens
tatagcttttaggag

SEQ ID NO: 761870 - DNA, 15 bp, Homo sapiens
atagcttttaggagc

SEQ ID NO: 761871 - DNA, 15 bp, Homo sapiens
tagcttttaggagct

SEQ ID NO: 761872 - DNA, 15 bp, Homo sapiens
agcttttaggagctt

SEQ ID NO: 761873 - DNA, 15 bp, Homo sapiens
gcttttaggagcttg

SEQ ID NO: 761874 - DNA, 15 bp, Homo sapiens
cttttaggagcttgc

SEQ ID NO: 761875 - DNA, 15 bp, Homo sapiens
ttttaggagcttgct

SEQ ID NO: 761876 - DNA, 15 bp, Homo sapiens
tttaggagcttgcta

SEQ ID NO: 761877 - DNA, 15 bp, Homo sapiens
ttaggagcttgctat

SEQ ID NO: 761878 - DNA, 15 bp, Homo sapiens
taggagcttgctatt

SEQ ID NO: 761879 - DNA, 15 bp, Homo sapiens
aggagcttgctattt

SEQ ID NO: 761880 - DNA, 15 bp, Homo sapiens
ggagcttgctattta

SEQ ID NO: 761881 - DNA, 15 bp, Homo sapiens
gagcttgctatttaa

SEQ ID NO: 761882 - DNA, 15 bp, Homo sapiens
agcttgctatttaaa

SEQ ID NO: 761883 - DNA, 15 bp, Homo sapiens
gcttgctatttaaag

SEQ ID NO: 761884 - DNA, 15 bp, Homo sapiens
cttgctatttaaagg

SEQ ID NO: 761885 - DNA, 15 bp, Homo sapiens
ttgctatttaaagga

SEQ ID NO: 761886 - DNA, 15 bp, Homo sapiens
tgctatttaaaggac

SEQ ID NO: 761887 - DNA, 15 bp, Homo sapiens
gctatttaaaggact

SEQ ID NO: 761888 - DNA, 15 bp, Homo sapiens
ctatttaaaggactt

SEQ ID NO: 761889 - DNA, 15 bp, Homo sapiens
tatttaaaggacttc

SEQ ID NO: 761890 - DNA, 15 bp, Homo sapiens
atttaaaggacttct

SEQ ID NO: 761891 - DNA, 15 bp, Homo sapiens
tttaaaggacttctg

SEQ ID NO: 761892 - DNA, 15 bp, Homo sapiens
ttaaaggacttctgt

SEQ ID NO: 761893 - DNA, 15 bp, Homo sapiens
taaaggacttctgtg

SEQ ID NO: 761894 - DNA, 15 bp, Homo sapiens
aaaggacttctgtgg

SEQ ID NO: 761895 - DNA, 15 bp, Homo sapiens
aaggacttctgtggt

SEQ ID NO: 761896 - DNA, 15 bp, Homo sapiens
aggacttctgtggta

SEQ ID NO: 761897 - DNA, 15 bp, Homo sapiens
ggacttctgtggtag

SEQ ID NO: 761898 - DNA, 15 bp, Homo sapiens
gacttctgtggtaga

SEQ ID NO: 761899 - DNA, 15 bp, Homo sapiens
acttctgtggtagat

SEQ ID NO: 761900 - DNA, 15 bp, Homo sapiens
cttctgtggtagata

SEQ ID NO: 761901 - DNA, 15 bp, Homo sapiens
ttctgtggtagatac

SEQ ID NO: 761902 - DNA, 15 bp, Homo sapiens
tctgtggtagatact

SEQ ID NO: 761903 - DNA, 15 bp, Homo sapiens
ctgtggtagatactt

SEQ ID NO: 761904 - DNA, 15 bp, Homo sapiens
tgtggtagatacttt

SEQ ID NO: 761905 - DNA, 15 bp, Homo sapiens
gtggtagatactttt

SEQ ID NO: 761906 - DNA, 15 bp, Homo sapiens
tggtagatacttttt

SEQ ID NO: 761907 - DNA, 15 bp, Homo sapiens
ggtagatactttttg

SEQ ID NO: 761908 - DNA, 15 bp, Homo sapiens
gtagatactttttga

SEQ ID NO: 761909 - DNA, 15 bp, Homo sapiens
tagatactttttgaa

SEQ ID NO: 761910 - DNA, 15 bp, Homo sapiens
agatactttttgaag

SEQ ID NO: 761911 - DNA, 15 bp, Homo sapiens
gatactttttgaaga

SEQ ID NO: 761912 - DNA, 15 bp, Homo sapiens
atactttttgaagat

SEQ ID NO: 761913 - DNA, 15 bp, Homo sapiens
tactttttgaagata

SEQ ID NO: 761914 - DNA, 15 bp, Homo sapiens
actttttgaagataa

SEQ ID NO: 761915 - DNA, 15 bp, Homo sapiens
ctttttgaagataaa

SEQ ID NO: 761916 - DNA, 15 bp, Homo sapiens
tttttgaagataaaa

SEQ ID NO: 761917 - DNA, 15 bp, Homo sapiens
ttttgaagataaaac

SEQ ID NO: 761918 - DNA, 15 bp, Homo sapiens
tttgaagataaaaca

SEQ ID NO: 761919 - DNA, 15 bp, Homo sapiens
ttgaagataaaacat

SEQ ID NO: 761920 - DNA, 15 bp, Homo sapiens
tgaagataaaacatt

SEQ ID NO: 761921 - DNA, 15 bp, Homo sapiens
gaagataaaacattt

SEQ ID NO: 761922 - DNA, 15 bp, Homo sapiens
aagataaaacatttt

SEQ ID NO: 761923 - DNA, 15 bp, Homo sapiens
agataaaacatttta

SEQ ID NO: 761924 - DNA, 15 bp, Homo sapiens
gataaaacattttaa

SEQ ID NO: 761925 - DNA, 15 bp, Homo sapiens
ataaaacattttaaa

SEQ ID NO: 761926 - DNA, 15 bp, Homo sapiens
taaaacattttaaag

SEQ ID NO: 761927 - DNA, 15 bp, Homo sapiens
aaaacattttaaagc

SEQ ID NO: 761928 - DNA, 15 bp, Homo sapiens
aaacattttaaagca

SEQ ID NO: 761929 - DNA, 15 bp, Homo sapiens
aacattttaaagcaa

SEQ ID NO: 761930 - DNA, 15 bp, Homo sapiens
acattttaaagcaat

SEQ ID NO: 761931 - DNA, 15 bp, Homo sapiens
cattttaaagcaatt

SEQ ID NO: 761932 - DNA, 15 bp, Homo sapiens
attttaaagcaatta

SEQ ID NO: 761933 - DNA, 15 bp, Homo sapiens
ttttaaagcaattaa

SEQ ID NO: 761934 - DNA, 15 bp, Homo sapiens
tttaaagcaattaat

SEQ ID NO: 761935 - DNA, 15 bp, Homo sapiens
ttaaagcaattaatt

SEQ ID NO: 761936 - DNA, 15 bp, Homo sapiens
taaagcaattaattg

SEQ ID NO: 761937 - DNA, 15 bp, Homo sapiens
aaagcaattaattgc

SEQ ID NO: 761938 - DNA, 15 bp, Homo sapiens
aagcaattaattgcc

SEQ ID NO: 761939 - DNA, 15 bp, Homo sapiens
agcaattaattgccc

SEQ ID NO: 761940 - DNA, 15 bp, Homo sapiens
gcaattaattgcccc

SEQ ID NO: 761941 - DNA, 15 bp, Homo sapiens
caattaattgcccca

SEQ ID NO: 761942 - DNA, 15 bp, Homo sapiens
aattaattgccccaa

SEQ ID NO: 761943 - DNA, 15 bp, Homo sapiens
attaattgccccaaa

SEQ ID NO: 761944 - DNA, 15 bp, Homo sapiens
ttaattgccccaaaa

SEQ ID NO: 761945 - DNA, 15 bp, Homo sapiens
taattgccccaaaag

SEQ ID NO: 761946 - DNA, 15 bp, Homo sapiens
aattgccccaaaaga

SEQ ID NO: 761947 - DNA, 15 bp, Homo sapiens
attgccccaaaagat

SEQ ID NO: 761948 - DNA, 15 bp, Homo sapiens
ttgccccaaaagatt

SEQ ID NO: 761949 - DNA, 15 bp, Homo sapiens
tgccccaaaagattt

SEQ ID NO: 761950 - DNA, 15 bp, Homo sapiens
gccccaaaagatttg

SEQ ID NO: 761951 - DNA, 15 bp, Homo sapiens
ccccaaaagatttgt

SEQ ID NO: 761952 - DNA, 15 bp, Homo sapiens
cccaaaagatttgtt

SEQ ID NO: 761953 - DNA, 15 bp, Homo sapiens
ccaaaagatttgttt

SEQ ID NO: 761954 - DNA, 15 bp, Homo sapiens
caaaagatttgtttt

SEQ ID NO: 761955 - DNA, 15 bp, Homo sapiens
aaaagatttgtttta

SEQ ID NO: 761956 - DNA, 15 bp, Homo sapiens
aaagatttgttttat

SEQ ID NO: 761957 - DNA, 15 bp, Homo sapiens
aagatttgttttata

SEQ ID NO: 761958 - DNA, 15 bp, Homo sapiens
agatttgttttataa

SEQ ID NO: 761959 - DNA, 15 bp, Homo sapiens
gatttgttttataaa

SEQ ID NO: 761960 - DNA, 15 bp, Homo sapiens
atttgttttataaat

SEQ ID NO: 761961 - DNA, 15 bp, Homo sapiens
tttgttttataaatc

SEQ ID NO: 761962 - DNA, 15 bp, Homo sapiens
ttgttttataaatct

SEQ ID NO: 761963 - DNA, 15 bp, Homo sapiens
tgttttataaatctt

SEQ ID NO: 761964 - DNA, 15 bp, Homo sapiens
gttttataaatcttt

SEQ ID NO: 761965 - DNA, 15 bp, Homo sapiens
ttttataaatcttta

SEQ ID NO: 761966 - DNA, 15 bp, Homo sapiens
tttataaatctttag

SEQ ID NO: 761967 - DNA, 15 bp, Homo sapiens
ttataaatctttagt

SEQ ID NO: 761968 - DNA, 15 bp, Homo sapiens
tataaatctttagta

SEQ ID NO: 761969 - DNA, 15 bp, Homo sapiens
ataaatctttagtat

SEQ ID NO: 761970 - DNA, 15 bp, Homo sapiens
taaatctttagtatt

SEQ ID NO: 761971 - DNA, 15 bp, Homo sapiens
aaatctttagtattc

SEQ ID NO: 761972 - DNA, 15 bp, Homo sapiens
aatctttagtattct

SEQ ID NO: 761973 - DNA, 15 bp, Homo sapiens
atctttagtattcta

SEQ ID NO: 761974 - DNA, 15 bp, Homo sapiens
tctttagtattctat

SEQ ID NO: 761975 - DNA, 15 bp, Homo sapiens
ctttagtattctatg

SEQ ID NO: 761976 - DNA, 15 bp, Homo sapiens
tttagtattctatgt

SEQ ID NO: 761977 - DNA, 15 bp, Homo sapiens
ttagtattctatgtt

SEQ ID NO: 761978 - DNA, 15 bp, Homo sapiens
tagtattctatgtta

SEQ ID NO: 761979 - DNA, 15 bp, Homo sapiens
agtattctatgttag

SEQ ID NO: 761980 - DNA, 15 bp, Homo sapiens
gtattctatgttagg

SEQ ID NO: 761981 - DNA, 15 bp, Homo sapiens
tattctatgttaggg

SEQ ID NO: 761982 - DNA, 15 bp, Homo sapiens
attctatgttagggt

SEQ ID NO: 761983 - DNA, 15 bp, Homo sapiens
ttctatgttagggtt

SEQ ID NO: 761984 - DNA, 15 bp, Homo sapiens
tctatgttagggttt

SEQ ID NO: 761985 - DNA, 15 bp, Homo sapiens
ctatgttagggtttc

SEQ ID NO: 761986 - DNA, 15 bp, Homo sapiens
tatgttagggtttct

SEQ ID NO: 761987 - DNA, 15 bp, Homo sapiens
atgttagggtttctt

SEQ ID NO: 761988 - DNA, 15 bp, Homo sapiens
tgttagggtttcttt

SEQ ID NO: 761989 - DNA, 15 bp, Homo sapiens
gttagggtttcttta

SEQ ID NO: 761990 - DNA, 15 bp, Homo sapiens
ttagggtttctttaa

SEQ ID NO: 761991 - DNA, 15 bp, Homo sapiens
tagggtttctttaaa

SEQ ID NO: 761992 - DNA, 15 bp, Homo sapiens
agggtttctttaaag

SEQ ID NO: 761993 - DNA, 15 bp, Homo sapiens
gggtttctttaaagc

SEQ ID NO: 761994 - DNA, 15 bp, Homo sapiens
ggtttctttaaagca

SEQ ID NO: 761995 - DNA, 15 bp, Homo sapiens
gtttctttaaagcaa

SEQ ID NO: 761996 - DNA, 15 bp, Homo sapiens
tttctttaaagcaag

SEQ ID NO: 761997 - DNA, 15 bp, Homo sapiens
ttctttaaagcaagt

SEQ ID NO: 761998 - DNA, 15 bp, Homo sapiens
tctttaaagcaagta

SEQ ID NO: 761999 - DNA, 15 bp, Homo sapiens
ctttaaagcaagtat

SEQ ID NO: 762000 - DNA, 15 bp, Homo sapiens
tttaaagcaagtata

SEQ ID NO: 762001 - DNA, 15 bp, Homo sapiens
ttaaagcaagtatac

SEQ ID NO: 762002 - DNA, 15 bp, Homo sapiens
taaagcaagtatacc

SEQ ID NO: 762003 - DNA, 15 bp, Homo sapiens
aaagcaagtatacct

SEQ ID NO: 762004 - DNA, 15 bp, Homo sapiens
aagcaagtatacctg

SEQ ID NO: 762005 - DNA, 15 bp, Homo sapiens
agcaagtatacctgt

SEQ ID NO: 762006 - DNA, 15 bp, Homo sapiens
gcaagtatacctgta

SEQ ID NO: 762007 - DNA, 15 bp, Homo sapiens
caagtatacctgtat

SEQ ID NO: 762008 - DNA, 15 bp, Homo sapiens
aagtatacctgtatc

SEQ ID NO: 762009 - DNA, 15 bp, Homo sapiens
agtatacctgtatct

SEQ ID NO: 762010 - DNA, 15 bp, Homo sapiens
gtatacctgtatctg

SEQ ID NO: 762011 - DNA, 15 bp, Homo sapiens
tatacctgtatctgt

SEQ ID NO: 762012 - DNA, 15 bp, Homo sapiens
atacctgtatctgtg

SEQ ID NO: 762013 - DNA, 15 bp, Homo sapiens
tacctgtatctgtgt

SEQ ID NO: 762014 - DNA, 15 bp, Homo sapiens
acctgtatctgtgtc

SEQ ID NO: 762015 - DNA, 15 bp, Homo sapiens
cctgtatctgtgtct

SEQ ID NO: 762016 - DNA, 15 bp, Homo sapiens
ctgtatctgtgtctt

SEQ ID NO: 762017 - DNA, 15 bp, Homo sapiens
tgtatctgtgtcttg

SEQ ID NO: 762018 - DNA, 15 bp, Homo sapiens
gtatctgtgtcttgt

SEQ ID NO: 762019 - DNA, 15 bp, Homo sapiens
tatctgtgtcttgtg

SEQ ID NO: 762020 - DNA, 15 bp, Homo sapiens
atctgtgtcttgtgt

SEQ ID NO: 762021 - DNA, 15 bp, Homo sapiens
tctgtgtcttgtgtg

SEQ ID NO: 762022 - DNA, 15 bp, Homo sapiens
ctgtgtcttgtgtgt

SEQ ID NO: 762023 - DNA, 15 bp, Homo sapiens
tgtgtcttgtgtgtg

SEQ ID NO: 762024 - DNA, 15 bp, Homo sapiens
gtgtcttgtgtgtgc

SEQ ID NO: 762025 - DNA, 15 bp, Homo sapiens
tgtcttgtgtgtgca

SEQ ID NO: 762026 - DNA, 15 bp, Homo sapiens
gtcttgtgtgtgcat

SEQ ID NO: 762027 - DNA, 15 bp, Homo sapiens
tcttgtgtgtgcatt

SEQ ID NO: 762028 - DNA, 15 bp, Homo sapiens
cttgtgtgtgcattt

SEQ ID NO: 762029 - DNA, 15 bp, Homo sapiens
ttgtgtgtgcatttt

SEQ ID NO: 762030 - DNA, 15 bp, Homo sapiens
tgtgtgtgcattttg

SEQ ID NO: 762031 - DNA, 15 bp, Homo sapiens
gtgtgtgcattttga

SEQ ID NO: 762032 - DNA, 15 bp, Homo sapiens
tgtgtgcattttgat

SEQ ID NO: 762033 - DNA, 15 bp, Homo sapiens
gtgtgcattttgatt

SEQ ID NO: 762034 - DNA, 15 bp, Homo sapiens
tgtgcattttgattt

SEQ ID NO: 762035 - DNA, 15 bp, Homo sapiens
gtgcattttgatttt

SEQ ID NO: 762036 - DNA, 15 bp, Homo sapiens
tgcattttgattttc

SEQ ID NO: 762037 - DNA, 15 bp, Homo sapiens
gcattttgattttct

SEQ ID NO: 762038 - DNA, 15 bp, Homo sapiens
cattttgattttctt

SEQ ID NO: 762039 - DNA, 15 bp, Homo sapiens
attttgattttcttt

SEQ ID NO: 762040 - DNA, 15 bp, Homo sapiens
ttttgattttctttt

SEQ ID NO: 762041 - DNA, 15 bp, Homo sapiens
tttgattttcttttc

SEQ ID NO: 762042 - DNA, 15 bp, Homo sapiens
ttgattttcttttcc

SEQ ID NO: 762043 - DNA, 15 bp, Homo sapiens
tgattttcttttcct

SEQ ID NO: 762044 - DNA, 15 bp, Homo sapiens
gattttcttttcctc

SEQ ID NO: 762045 - DNA, 15 bp, Homo sapiens
attttcttttcctca

SEQ ID NO: 762046 - DNA, 15 bp, Homo sapiens
ttttcttttcctcat

SEQ ID NO: 762047 - DNA, 15 bp, Homo sapiens
tttcttttcctcata

SEQ ID NO: 762048 - DNA, 15 bp, Homo sapiens
ttcttttcctcataa

SEQ ID NO: 762049 - DNA, 15 bp, Homo sapiens
tcttttcctcataag

SEQ ID NO: 762050 - DNA, 15 bp, Homo sapiens
cttttcctcataaga

SEQ ID NO: 762051 - DNA, 15 bp, Homo sapiens
ttttcctcataagat

SEQ ID NO: 762052 - DNA, 15 bp, Homo sapiens
tttcctcataagatt

SEQ ID NO: 762053 - DNA, 15 bp, Homo sapiens
ttcctcataagatta

SEQ ID NO: 762054 - DNA, 15 bp, Homo sapiens
tcctcataagattag

SEQ ID NO: 762055 - DNA, 15 bp, Homo sapiens
cctcataagattagc

SEQ ID NO: 762056 - DNA, 15 bp, Homo sapiens
ctcataagattagca

SEQ ID NO: 762057 - DNA, 15 bp, Homo sapiens
tcataagattagcat

SEQ ID NO: 762058 - DNA, 15 bp, Homo sapiens
cataagattagcatg

SEQ ID NO: 762059 - DNA, 15 bp, Homo sapiens
ataagattagcatgc

SEQ ID NO: 762060 - DNA, 15 bp, Homo sapiens
taagattagcatgcc

SEQ ID NO: 762061 - DNA, 15 bp, Homo sapiens
aagattagcatgcca

SEQ ID NO: 762062 - DNA, 15 bp, Homo sapiens
agattagcatgccag

SEQ ID NO: 762063 - DNA, 15 bp, Homo sapiens
gattagcatgccaga

SEQ ID NO: 762064 - DNA, 15 bp, Homo sapiens
attagcatgccagaa

SEQ ID NO: 762065 - DNA, 15 bp, Homo sapiens
ttagcatgccagaat

SEQ ID NO: 762066 - DNA, 15 bp, Homo sapiens
tagcatgccagaatt

SEQ ID NO: 762067 - DNA, 15 bp, Homo sapiens
agcatgccagaattt

SEQ ID NO: 762068 - DNA, 15 bp, Homo sapiens
gcatgccagaatttt

SEQ ID NO: 762069 - DNA, 15 bp, Homo sapiens
catgccagaattttt

SEQ ID NO: 762070 - DNA, 15 bp, Homo sapiens
atgccagaatttttg

SEQ ID NO: 762071 - DNA, 15 bp, Homo sapiens
tgccagaatttttgt

SEQ ID NO: 762072 - DNA, 15 bp, Homo sapiens
gccagaatttttgtt

SEQ ID NO: 762073 - DNA, 15 bp, Homo sapiens
ccagaatttttgttc

SEQ ID NO: 762074 - DNA, 15 bp, Homo sapiens
cagaatttttgttcc

SEQ ID NO: 762075 - DNA, 15 bp, Homo sapiens
agaatttttgttcca

SEQ ID NO: 762076 - DNA, 15 bp, Homo sapiens
gaatttttgttccag

SEQ ID NO: 762077 - DNA, 15 bp, Homo sapiens
aatttttgttccagg

SEQ ID NO: 762078 - DNA, 15 bp, Homo sapiens
atttttgttccaggg

SEQ ID NO: 762079 - DNA, 15 bp, Homo sapiens
tttttgttccagggc

SEQ ID NO: 762080 - DNA, 15 bp, Homo sapiens
ttttgttccagggct

SEQ ID NO: 762081 - DNA, 15 bp, Homo sapiens
tttgttccagggctc

SEQ ID NO: 762082 - DNA, 15 bp, Homo sapiens
ttgttccagggctct

SEQ ID NO: 762083 - DNA, 15 bp, Homo sapiens
tgttccagggctctg

SEQ ID NO: 762084 - DNA, 15 bp, Homo sapiens
gttccagggctctga

SEQ ID NO: 762085 - DNA, 15 bp, Homo sapiens
ttccagggctctgaa

SEQ ID NO: 762086 - DNA, 15 bp, Homo sapiens
tccagggctctgaaa

SEQ ID NO: 762087 - DNA, 15 bp, Homo sapiens
ccagggctctgaaat

SEQ ID NO: 762088 - DNA, 15 bp, Homo sapiens
cagggctctgaaata

SEQ ID NO: 762089 - DNA, 15 bp, Homo sapiens
agggctctgaaataa

SEQ ID NO: 762090 - DNA, 15 bp, Homo sapiens
gggctctgaaataaa

SEQ ID NO: 762091 - DNA, 15 bp, Homo sapiens
ggctctgaaataaaa

SEQ ID NO: 762092 - DNA, 15 bp, Homo sapiens
gctctgaaataaaat

SEQ ID NO: 762093 - DNA, 15 bp, Homo sapiens
ctctgaaataaaatg

SEQ ID NO: 762094 - DNA, 15 bp, Homo sapiens
tctgaaataaaatgc

SEQ ID NO: 762095 - DNA, 15 bp, Homo sapiens
ctgaaataaaatgca

SEQ ID NO: 762096 - DNA, 15 bp, Homo sapiens
tgaaataaaatgcac

SEQ ID NO: 762097 - DNA, 15 bp, Homo sapiens
gaaataaaatgcacc

SEQ ID NO: 762098 - DNA, 15 bp, Homo sapiens
aaataaaatgcaccc

SEQ ID NO: 762099 - DNA, 15 bp, Homo sapiens
aataaaatgcaccca

SEQ ID NO: 762100 - DNA, 15 bp, Homo sapiens
ataaaatgcacccac

SEQ ID NO: 762101 - DNA, 15 bp, Homo sapiens
taaaatgcacccacc

SEQ ID NO: 762102 - DNA, 15 bp, Homo sapiens
aaaatgcacccacct

SEQ ID NO: 762103 - DNA, 15 bp, Homo sapiens
aaatgcacccacctt

SEQ ID NO: 762104 - DNA, 15 bp, Homo sapiens
aatgcacccaccttt

SEQ ID NO: 762105 - DNA, 15 bp, Homo sapiens
atgcacccacctttt

SEQ ID NO: 762106 - DNA, 15 bp, Homo sapiens
tgcacccaccttttt

SEQ ID NO: 762107 - DNA, 15 bp, Homo sapiens
gcacccaccttttta

SEQ ID NO: 762108 - DNA, 15 bp, Homo sapiens
cacccacctttttag

SEQ ID NO: 762109 - DNA, 15 bp, Homo sapiens
acccacctttttaga

SEQ ID NO: 762110 - DNA, 15 bp, Homo sapiens
cccacctttttagaa

SEQ ID NO: 762111 - DNA, 15 bp, Homo sapiens
ccacctttttagaag

SEQ ID NO: 762112 - DNA, 15 bp, Homo sapiens
cacctttttagaagg

SEQ ID NO: 762113 - DNA, 15 bp, Homo sapiens
acctttttagaaggt

SEQ ID NO: 762114 - DNA, 15 bp, Homo sapiens
cctttttagaaggtt

SEQ ID NO: 762115 - DNA, 15 bp, Homo sapiens
ctttttagaaggttc

SEQ ID NO: 762116 - DNA, 15 bp, Homo sapiens
tttttagaaggttcg

SEQ ID NO: 762117 - DNA, 15 bp, Homo sapiens
ttttagaaggttcgc

SEQ ID NO: 762118 - DNA, 15 bp, Homo sapiens
tttagaaggttcgct

SEQ ID NO: 762119 - DNA, 15 bp, Homo sapiens
ttagaaggttcgctt

SEQ ID NO: 762120 - DNA, 15 bp, Homo sapiens
tagaaggttcgcttt

SEQ ID NO: 762121 - DNA, 15 bp, Homo sapiens
agaaggttcgcttta

SEQ ID NO: 762122 - DNA, 15 bp, Homo sapiens
gaaggttcgctttat

SEQ ID NO: 762123 - DNA, 15 bp, Homo sapiens
aaggttcgctttatg

SEQ ID NO: 762124 - DNA, 15 bp, Homo sapiens
aggttcgctttatgt

SEQ ID NO: 762125 - DNA, 15 bp, Homo sapiens
ggttcgctttatgtg

SEQ ID NO: 762126 - DNA, 15 bp, Homo sapiens
gttcgctttatgtgt

SEQ ID NO: 762127 - DNA, 15 bp, Homo sapiens
ttcgctttatgtgtg

SEQ ID NO: 762128 - DNA, 15 bp, Homo sapiens
tcgctttatgtgtgg

SEQ ID NO: 762129 - DNA, 15 bp, Homo sapiens
cgctttatgtgtggt

SEQ ID NO: 762130 - DNA, 15 bp, Homo sapiens
gctttatgtgtggta

SEQ ID NO: 762131 - DNA, 15 bp, Homo sapiens
ctttatgtgtggtac

SEQ ID NO: 762132 - DNA, 15 bp, Homo sapiens
tttatgtgtggtact

SEQ ID NO: 762133 - DNA, 15 bp, Homo sapiens
ttatgtgtggtacta

SEQ ID NO: 762134 - DNA, 15 bp, Homo sapiens
tatgtgtggtactac

SEQ ID NO: 762135 - DNA, 15 bp, Homo sapiens
atgtgtggtactaca

SEQ ID NO: 762136 - DNA, 15 bp, Homo sapiens
tgtgtggtactacat

SEQ ID NO: 762137 - DNA, 15 bp, Homo sapiens
gtgtggtactacatt

SEQ ID NO: 762138 - DNA, 15 bp, Homo sapiens
tgtggtactacattg

SEQ ID NO: 762139 - DNA, 15 bp, Homo sapiens
gtggtactacattga

SEQ ID NO: 762140 - DNA, 15 bp, Homo sapiens
tggtactacattgaa

SEQ ID NO: 762141 - DNA, 15 bp, Homo sapiens
ggtactacattgaag

SEQ ID NO: 762142 - DNA, 15 bp, Homo sapiens
gtactacattgaagc

SEQ ID NO: 762143 - DNA, 15 bp, Homo sapiens
tactacattgaagca

SEQ ID NO: 762144 - DNA, 15 bp, Homo sapiens
actacattgaagcag

SEQ ID NO: 762145 - DNA, 15 bp, Homo sapiens
ctacattgaagcagg

SEQ ID NO: 762146 - DNA, 15 bp, Homo sapiens
tacattgaagcagga

SEQ ID NO: 762147 - DNA, 15 bp, Homo sapiens
acattgaagcaggaa

SEQ ID NO: 762148 - DNA, 15 bp, Homo sapiens
cattgaagcaggaag

SEQ ID NO: 762149 - DNA, 15 bp, Homo sapiens
attgaagcaggaagg

SEQ ID NO: 762150 - DNA, 15 bp, Homo sapiens
ttgaagcaggaagga

SEQ ID NO: 762151 - DNA, 15 bp, Homo sapiens
tgaagcaggaaggaa

SEQ ID NO: 762152 - DNA, 15 bp, Homo sapiens
gaagcaggaaggaac

SEQ ID NO: 762153 - DNA, 15 bp, Homo sapiens
aagcaggaaggaaca

SEQ ID NO: 762154 - DNA, 15 bp, Homo sapiens
agcaggaaggaacac

SEQ ID NO: 762155 - DNA, 15 bp, Homo sapiens
gcaggaaggaacaca

SEQ ID NO: 762156 - DNA, 15 bp, Homo sapiens
caggaaggaacacat

SEQ ID NO: 762157 - DNA, 15 bp, Homo sapiens
aggaaggaacacatt

SEQ ID NO: 762158 - DNA, 15 bp, Homo sapiens
ggaaggaacacattt

SEQ ID NO: 762159 - DNA, 15 bp, Homo sapiens
gaaggaacacatttt

SEQ ID NO: 762160 - DNA, 15 bp, Homo sapiens
aaggaacacatttta

SEQ ID NO: 762161 - DNA, 15 bp, Homo sapiens
aggaacacattttag

SEQ ID NO: 762162 - DNA, 15 bp, Homo sapiens
ggaacacattttagc

SEQ ID NO: 762163 - DNA, 15 bp, Homo sapiens
gaacacattttagcc

SEQ ID NO: 762164 - DNA, 15 bp, Homo sapiens
aacacattttagcca

SEQ ID NO: 762165 - DNA, 15 bp, Homo sapiens
acacattttagccat

SEQ ID NO: 762166 - DNA, 15 bp, Homo sapiens
cacattttagccata

SEQ ID NO: 762167 - DNA, 15 bp, Homo sapiens
acattttagccatat

SEQ ID NO: 762168 - DNA, 15 bp, Homo sapiens
cattttagccatatg

SEQ ID NO: 762169 - DNA, 15 bp, Homo sapiens
attttagccatatgc

SEQ ID NO: 762170 - DNA, 15 bp, Homo sapiens
ttttagccatatgca

SEQ ID NO: 762171 - DNA, 15 bp, Homo sapiens
tttagccatatgcag

SEQ ID NO: 762172 - DNA, 15 bp, Homo sapiens
ttagccatatgcaga

SEQ ID NO: 762173 - DNA, 15 bp, Homo sapiens
tagccatatgcagag

SEQ ID NO: 762174 - DNA, 15 bp, Homo sapiens
agccatatgcagaga

SEQ ID NO: 762175 - DNA, 15 bp, Homo sapiens
gccatatgcagagaa

SEQ ID NO: 762176 - DNA, 15 bp, Homo sapiens
ccatatgcagagaaa

SEQ ID NO: 762177 - DNA, 15 bp, Homo sapiens
catatgcagagaaat

SEQ ID NO: 762178 - DNA, 15 bp, Homo sapiens
atatgcagagaaatc

SEQ ID NO: 762179 - DNA, 15 bp, Homo sapiens
tatgcagagaaatca

SEQ ID NO: 762180 - DNA, 15 bp, Homo sapiens
atgcagagaaatcaa

SEQ ID NO: 762181 - DNA, 15 bp, Homo sapiens
tgcagagaaatcaaa

SEQ ID NO: 762182 - DNA, 15 bp, Homo sapiens
gcagagaaatcaaat

SEQ ID NO: 762183 - DNA, 15 bp, Homo sapiens
cagagaaatcaaatt

SEQ ID NO: 762184 - DNA, 15 bp, Homo sapiens
agagaaatcaaattt

SEQ ID NO: 762185 - DNA, 15 bp, Homo sapiens
gagaaatcaaatttg

SEQ ID NO: 762186 - DNA, 15 bp, Homo sapiens
agaaatcaaatttgt

SEQ ID NO: 762187 - DNA, 15 bp, Homo sapiens
gaaatcaaatttgta

SEQ ID NO: 762188 - DNA, 15 bp, Homo sapiens
aaatcaaatttgtaa

SEQ ID NO: 762189 - DNA, 15 bp, Homo sapiens
aatcaaatttgtaaa

SEQ ID NO: 762190 - DNA, 15 bp, Homo sapiens
atcaaatttgtaaaa

SEQ ID NO: 762191 - DNA, 15 bp, Homo sapiens
tcaaatttgtaaaat

SEQ ID NO: 762192 - DNA, 15 bp, Homo sapiens
caaatttgtaaaatc

SEQ ID NO: 762193 - DNA, 15 bp, Homo sapiens
aaatttgtaaaatcc

SEQ ID NO: 762194 - DNA, 15 bp, Homo sapiens
aatttgtaaaatcct

SEQ ID NO: 762195 - DNA, 15 bp, Homo sapiens
atttgtaaaatccta

SEQ ID NO: 762196 - DNA, 15 bp, Homo sapiens
tttgtaaaatcctac

SEQ ID NO: 762197 - DNA, 15 bp, Homo sapiens
ttgtaaaatcctacc

SEQ ID NO: 762198 - DNA, 15 bp, Homo sapiens
tgtaaaatcctacca

SEQ ID NO: 762199 - DNA, 15 bp, Homo sapiens
gtaaaatcctaccac

SEQ ID NO: 762200 - DNA, 15 bp, Homo sapiens
taaaatcctaccaca

SEQ ID NO: 762201 - DNA, 15 bp, Homo sapiens
aaaatcctaccacag

SEQ ID NO: 762202 - DNA, 15 bp, Homo sapiens
aaatcctaccacaga

SEQ ID NO: 762203 - DNA, 15 bp, Homo sapiens
aatcctaccacagag

SEQ ID NO: 762204 - DNA, 15 bp, Homo sapiens
atcctaccacagagc

SEQ ID NO: 762205 - DNA, 15 bp, Homo sapiens
tcctaccacagagct

SEQ ID NO: 762206 - DNA, 15 bp, Homo sapiens
cctaccacagagctt

SEQ ID NO: 762207 - DNA, 15 bp, Homo sapiens
ctaccacagagcttt

SEQ ID NO: 762208 - DNA, 15 bp, Homo sapiens
taccacagagcttta

SEQ ID NO: 762209 - DNA, 15 bp, Homo sapiens
accacagagctttac

SEQ ID NO: 762210 - DNA, 15 bp, Homo sapiens
ccacagagctttact

SEQ ID NO: 762211 - DNA, 15 bp, Homo sapiens
cacagagctttacta

SEQ ID NO: 762212 - DNA, 15 bp, Homo sapiens
acagagctttactat

SEQ ID NO: 762213 - DNA, 15 bp, Homo sapiens
cagagctttactatg

SEQ ID NO: 762214 - DNA, 15 bp, Homo sapiens
agagctttactatga

SEQ ID NO: 762215 - DNA, 15 bp, Homo sapiens
gagctttactatgag

SEQ ID NO: 762216 - DNA, 15 bp, Homo sapiens
agctttactatgagt

SEQ ID NO: 762217 - DNA, 15 bp, Homo sapiens
gctttactatgagta

SEQ ID NO: 762218 - DNA, 15 bp, Homo sapiens
ctttactatgagtat

SEQ ID NO: 762219 - DNA, 15 bp, Homo sapiens
tttactatgagtatg

SEQ ID NO: 762220 - DNA, 15 bp, Homo sapiens
ttactatgagtatgc

SEQ ID NO: 762221 - DNA, 15 bp, Homo sapiens
tactatgagtatgct

SEQ ID NO: 762222 - DNA, 15 bp, Homo sapiens
actatgagtatgctt

SEQ ID NO: 762223 - DNA, 15 bp, Homo sapiens
ctatgagtatgcttt

SEQ ID NO: 762224 - DNA, 15 bp, Homo sapiens
tatgagtatgctttt

SEQ ID NO: 762225 - DNA, 15 bp, Homo sapiens
atgagtatgctttta

SEQ ID NO: 762226 - DNA, 15 bp, Homo sapiens
tgagtatgcttttag

SEQ ID NO: 762227 - DNA, 15 bp, Homo sapiens
gagtatgcttttagt

SEQ ID NO: 762228 - DNA, 15 bp, Homo sapiens
agtatgcttttagtt

SEQ ID NO: 762229 - DNA, 15 bp, Homo sapiens
gtatgcttttagtta

SEQ ID NO: 762230 - DNA, 15 bp, Homo sapiens
tatgcttttagttat

SEQ ID NO: 762231 - DNA, 15 bp, Homo sapiens
atgcttttagttata

SEQ ID NO: 762232 - DNA, 15 bp, Homo sapiens
tgcttttagttataa

SEQ ID NO: 762233 - DNA, 15 bp, Homo sapiens
gcttttagttataaa

SEQ ID NO: 762234 - DNA, 15 bp, Homo sapiens
cttttagttataaat

SEQ ID NO: 762235 - DNA, 15 bp, Homo sapiens
ttttagttataaatt

SEQ ID NO: 762236 - DNA, 15 bp, Homo sapiens
tttagttataaattt

SEQ ID NO: 762237 - DNA, 15 bp, Homo sapiens
ttagttataaatttg

SEQ ID NO: 762238 - DNA, 15 bp, Homo sapiens
tagttataaatttgt

SEQ ID NO: 762239 - DNA, 15 bp, Homo sapiens
agttataaatttgta

SEQ ID NO: 762240 - DNA, 15 bp, Homo sapiens
gttataaatttgtac

SEQ ID NO: 762241 - DNA, 15 bp, Homo sapiens
ttataaatttgtacc

SEQ ID NO: 762242 - DNA, 15 bp, Homo sapiens
tataaatttgtacct

SEQ ID NO: 762243 - DNA, 15 bp, Homo sapiens
ataaatttgtacctc

SEQ ID NO: 762244 - DNA, 15 bp, Homo sapiens
taaatttgtacctcc

SEQ ID NO: 762245 - DNA, 15 bp, Homo sapiens
aaatttgtacctcct

SEQ ID NO: 762246 - DNA, 15 bp, Homo sapiens
aatttgtacctcctc

SEQ ID NO: 762247 - DNA, 15 bp, Homo sapiens
atttgtacctcctcc

SEQ ID NO: 762248 - DNA, 15 bp, Homo sapiens
tttgtacctcctccc

SEQ ID NO: 762249 - DNA, 15 bp, Homo sapiens
ttgtacctcctccca

SEQ ID NO: 762250 - DNA, 15 bp, Homo sapiens
tgtacctcctcccac

SEQ ID NO: 762251 - DNA, 15 bp, Homo sapiens
gtacctcctcccaca

SEQ ID NO: 762252 - DNA, 15 bp, Homo sapiens
tacctcctcccacaa

SEQ ID NO: 762253 - DNA, 15 bp, Homo sapiens
acctcctcccacaaa

SEQ ID NO: 762254 - DNA, 15 bp, Homo sapiens
cctcctcccacaaag

SEQ ID NO: 762255 - DNA, 15 bp, Homo sapiens
ctcctcccacaaaga

SEQ ID NO: 762256 - DNA, 15 bp, Homo sapiens
tcctcccacaaagaa

SEQ ID NO: 762257 - DNA, 15 bp, Homo sapiens
cctcccacaaagaac

SEQ ID NO: 762258 - DNA, 15 bp, Homo sapiens
ctcccacaaagaaca

SEQ ID NO: 762259 - DNA, 15 bp, Homo sapiens
tcccacaaagaacac

SEQ ID NO: 762260 - DNA, 15 bp, Homo sapiens
cccacaaagaacacc

SEQ ID NO: 762261 - DNA, 15 bp, Homo sapiens
ccacaaagaacacca

SEQ ID NO: 762262 - DNA, 15 bp, Homo sapiens
cacaaagaacaccat

SEQ ID NO: 762263 - DNA, 15 bp, Homo sapiens
acaaagaacaccatc

SEQ ID NO: 762264 - DNA, 15 bp, Homo sapiens
caaagaacaccatca

SEQ ID NO: 762265 - DNA, 15 bp, Homo sapiens
aaagaacaccatcat

SEQ ID NO: 762266 - DNA, 15 bp, Homo sapiens
aagaacaccatcatt

SEQ ID NO: 762267 - DNA, 15 bp, Homo sapiens
agaacaccatcattg

SEQ ID NO: 762268 - DNA, 15 bp, Homo sapiens
gaacaccatcattga

SEQ ID NO: 762269 - DNA, 15 bp, Homo sapiens
aacaccatcattgaa

SEQ ID NO: 762270 - DNA, 15 bp, Homo sapiens
acaccatcattgaag

SEQ ID NO: 762271 - DNA, 15 bp, Homo sapiens
caccatcattgaaga

SEQ ID NO: 762272 - DNA, 15 bp, Homo sapiens
accatcattgaagaa

SEQ ID NO: 762273 - DNA, 15 bp, Homo sapiens
ccatcattgaagaat

SEQ ID NO: 762274 - DNA, 15 bp, Homo sapiens
catcattgaagaatt

SEQ ID NO: 762275 - DNA, 15 bp, Homo sapiens
atcattgaagaattc

SEQ ID NO: 762276 - DNA, 15 bp, Homo sapiens
tcattgaagaattct

SEQ ID NO: 762277 - DNA, 15 bp, Homo sapiens
cattgaagaattctt

SEQ ID NO: 762278 - DNA, 15 bp, Homo sapiens
attgaagaattcttt

SEQ ID NO: 762279 - DNA, 15 bp, Homo sapiens
ttgaagaattctttc

SEQ ID NO: 762280 - DNA, 15 bp, Homo sapiens
tgaagaattctttca

SEQ ID NO: 762281 - DNA, 15 bp, Homo sapiens
gaagaattctttcat

SEQ ID NO: 762282 - DNA, 15 bp, Homo sapiens
aagaattctttcatt

SEQ ID NO: 762283 - DNA, 15 bp, Homo sapiens
agaattctttcattt

SEQ ID NO: 762284 - DNA, 15 bp, Homo sapiens
gaattctttcatttt

SEQ ID NO: 762285 - DNA, 15 bp, Homo sapiens
aattctttcattttc

SEQ ID NO: 762286 - DNA, 15 bp, Homo sapiens
attctttcattttct

SEQ ID NO: 762287 - DNA, 15 bp, Homo sapiens
ttctttcattttcta

SEQ ID NO: 762288 - DNA, 15 bp, Homo sapiens
tctttcattttctat

SEQ ID NO: 762289 - DNA, 15 bp, Homo sapiens
ctttcattttctata

SEQ ID NO: 762290 - DNA, 15 bp, Homo sapiens
tttcattttctatag

SEQ ID NO: 762291 - DNA, 15 bp, Homo sapiens
ttcattttctatagt

SEQ ID NO: 762292 - DNA, 15 bp, Homo sapiens
tcattttctatagtt

SEQ ID NO: 762293 - DNA, 15 bp, Homo sapiens
cattttctatagttt

SEQ ID NO: 762294 - DNA, 15 bp, Homo sapiens
attttctatagtttg

SEQ ID NO: 762295 - DNA, 15 bp, Homo sapiens
ttttctatagtttgt

SEQ ID NO: 762296 - DNA, 15 bp, Homo sapiens
tttctatagtttgta

SEQ ID NO: 762297 - DNA, 15 bp, Homo sapiens
ttctatagtttgtat

SEQ ID NO: 762298 - DNA, 15 bp, Homo sapiens
tctatagtttgtata

SEQ ID NO: 762299 - DNA, 15 bp, Homo sapiens
ctatagtttgtatat

SEQ ID NO: 762300 - DNA, 15 bp, Homo sapiens
tatagtttgtatatt

SEQ ID NO: 762301 - DNA, 15 bp, Homo sapiens
atagtttgtatattg

SEQ ID NO: 762302 - DNA, 15 bp, Homo sapiens
tagtttgtatattgc

SEQ ID NO: 762303 - DNA, 15 bp, Homo sapiens
agtttgtatattgcc

SEQ ID NO: 762304 - DNA, 15 bp, Homo sapiens
gtttgtatattgcca

SEQ ID NO: 762305 - DNA, 15 bp, Homo sapiens
tttgtatattgccat

SEQ ID NO: 762306 - DNA, 15 bp, Homo sapiens
ttgtatattgccatt

SEQ ID NO: 762307 - DNA, 15 bp, Homo sapiens
tgtatattgccatta

SEQ ID NO: 762308 - DNA, 15 bp, Homo sapiens
gtatattgccattaa

SEQ ID NO: 762309 - DNA, 15 bp, Homo sapiens
tatattgccattaaa

SEQ ID NO: 762310 - DNA, 15 bp, Homo sapiens
atattgccattaaaa

SEQ ID NO: 762311 - DNA, 15 bp, Homo sapiens
tattgccattaaaac

SEQ ID NO: 762312 - DNA, 15 bp, Homo sapiens
attgccattaaaaca

SEQ ID NO: 762313 - DNA, 15 bp, Homo sapiens
ttgccattaaaacat

SEQ ID NO: 762314 - DNA, 15 bp, Homo sapiens
tgccattaaaacatt

SEQ ID NO: 762315 - DNA, 15 bp, Homo sapiens
gccattaaaacattt

SEQ ID NO: 762316 - DNA, 15 bp, Homo sapiens
ccattaaaacatttg

SEQ ID NO: 762317 - DNA, 15 bp, Homo sapiens
cattaaaacatttgt

SEQ ID NO: 762318 - DNA, 15 bp, Homo sapiens
attaaaacatttgtt

SEQ ID NO: 762319 - DNA, 15 bp, Homo sapiens
ttaaaacatttgttg

SEQ ID NO: 762320 - DNA, 15 bp, Homo sapiens
taaaacatttgttgt

SEQ ID NO: 762321 - DNA, 15 bp, Homo sapiens
aaaacatttgttgtt

SEQ ID NO: 762322 - DNA, 15 bp, Homo sapiens
aaacatttgttgttc

SEQ ID NO: 762323 - DNA, 15 bp, Homo sapiens
aacatttgttgttct

SEQ ID NO: 762324 - DNA, 15 bp, Homo sapiens
acatttgttgttctt

SEQ ID NO: 762325 - DNA, 15 bp, Homo sapiens
catttgttgttctta

SEQ ID NO: 762326 - DNA, 15 bp, Homo sapiens
atttgttgttcttaa

SEQ ID NO: 762327 - DNA, 15 bp, Homo sapiens
tttgttgttcttaag

SEQ ID NO: 762328 - DNA, 15 bp, Homo sapiens
ttgttgttcttaagt

SEQ ID NO: 762329 - DNA, 15 bp, Homo sapiens
tgttgttcttaagta

SEQ ID NO: 762330 - DNA, 15 bp, Homo sapiens
gttgttcttaagtaa

SEQ ID NO: 762331 - DNA, 15 bp, Homo sapiens
ttgttcttaagtaat

SEQ ID NO: 762332 - DNA, 15 bp, Homo sapiens
tgttcttaagtaata

SEQ ID NO: 762333 - DNA, 15 bp, Homo sapiens
gttcttaagtaatac

SEQ ID NO: 762334 - DNA, 15 bp, Homo sapiens
ttcttaagtaatact

SEQ ID NO: 762335 - DNA, 15 bp, Homo sapiens
tcttaagtaatactt

SEQ ID NO: 762336 - DNA, 15 bp, Homo sapiens
cttaagtaatacttt

SEQ ID NO: 762337 - DNA, 15 bp, Homo sapiens
ttaagtaatacttta

SEQ ID NO: 762338 - DNA, 15 bp, Homo sapiens
taagtaatactttat

SEQ ID NO: 762339 - DNA, 15 bp, Homo sapiens
aagtaatactttata

SEQ ID NO: 762340 - DNA, 15 bp, Homo sapiens
agtaatactttatat

SEQ ID NO: 762341 - DNA, 15 bp, Homo sapiens
gtaatactttatata

SEQ ID NO: 762342 - DNA, 15 bp, Homo sapiens
taatactttatatat

SEQ ID NO: 762343 - DNA, 15 bp, Homo sapiens
aatactttatatatg

SEQ ID NO: 762344 - DNA, 15 bp, Homo sapiens
atactttatatatgt

SEQ ID NO: 762345 - DNA, 15 bp, Homo sapiens
tactttatatatgta

SEQ ID NO: 762346 - DNA, 15 bp, Homo sapiens
actttatatatgtat

SEQ ID NO: 762347 - DNA, 15 bp, Homo sapiens
ctttatatatgtata

SEQ ID NO: 762348 - DNA, 15 bp, Homo sapiens
tttatatatgtataa

SEQ ID NO: 762349 - DNA, 15 bp, Homo sapiens
ttatatatgtataat

SEQ ID NO: 762350 - DNA, 15 bp, Homo sapiens
tatatatgtataatt

SEQ ID NO: 762351 - DNA, 15 bp, Homo sapiens
atatatgtataattg

SEQ ID NO: 762352 - DNA, 15 bp, Homo sapiens
tatatgtataattga

SEQ ID NO: 762353 - DNA, 15 bp, Homo sapiens
atatgtataattgat

SEQ ID NO: 762354 - DNA, 15 bp, Homo sapiens
tatgtataattgata

SEQ ID NO: 762355 - DNA, 15 bp, Homo sapiens
atgtataattgatag

SEQ ID NO: 762356 - DNA, 15 bp, Homo sapiens
tgtataattgatagt

SEQ ID NO: 762357 - DNA, 15 bp, Homo sapiens
gtataattgatagtt

SEQ ID NO: 762358 - DNA, 15 bp, Homo sapiens
tataattgatagttt

SEQ ID NO: 762359 - DNA, 15 bp, Homo sapiens
ataattgatagttta

SEQ ID NO: 762360 - DNA, 15 bp, Homo sapiens
taattgatagtttaa

SEQ ID NO: 762361 - DNA, 15 bp, Homo sapiens
aattgatagtttaag

SEQ ID NO: 762362 - DNA, 15 bp, Homo sapiens
attgatagtttaaga

SEQ ID NO: 762363 - DNA, 15 bp, Homo sapiens
ttgatagtttaagat

SEQ ID NO: 762364 - DNA, 15 bp, Homo sapiens
tgatagtttaagatg

SEQ ID NO: 762365 - DNA, 15 bp, Homo sapiens
gatagtttaagatgt

SEQ ID NO: 762366 - DNA, 15 bp, Homo sapiens
atagtttaagatgta

SEQ ID NO: 762367 - DNA, 15 bp, Homo sapiens
tagtttaagatgtac

SEQ ID NO: 762368 - DNA, 15 bp, Homo sapiens
agtttaagatgtaca

SEQ ID NO: 762369 - DNA, 15 bp, Homo sapiens
gtttaagatgtacag

SEQ ID NO: 762370 - DNA, 15 bp, Homo sapiens
tttaagatgtacagc

SEQ ID NO: 762371 - DNA, 15 bp, Homo sapiens
ttaagatgtacagcc

SEQ ID NO: 762372 - DNA, 15 bp, Homo sapiens
taagatgtacagcct

SEQ ID NO: 762373 - DNA, 15 bp, Homo sapiens
aagatgtacagcctt

SEQ ID NO: 762374 - DNA, 15 bp, Homo sapiens
agatgtacagcctta

SEQ ID NO: 762375 - DNA, 15 bp, Homo sapiens
gatgtacagccttaa

SEQ ID NO: 762376 - DNA, 15 bp, Homo sapiens
atgtacagccttaac

SEQ ID NO: 762377 - DNA, 15 bp, Homo sapiens
tgtacagccttaaca

SEQ ID NO: 762378 - DNA, 15 bp, Homo sapiens
gtacagccttaacat

SEQ ID NO: 762379 - DNA, 15 bp, Homo sapiens
tacagccttaacatt

SEQ ID NO: 762380 - DNA, 15 bp, Homo sapiens
acagccttaacattc

SEQ ID NO: 762381 - DNA, 15 bp, Homo sapiens
cagccttaacattct

SEQ ID NO: 762382 - DNA, 15 bp, Homo sapiens
agccttaacattcta

SEQ ID NO: 762383 - DNA, 15 bp, Homo sapiens
gccttaacattctaa

SEQ ID NO: 762384 - DNA, 15 bp, Homo sapiens
ccttaacattctaaa

SEQ ID NO: 762385 - DNA, 15 bp, Homo sapiens
cttaacattctaaat

SEQ ID NO: 762386 - DNA, 15 bp, Homo sapiens
ttaacattctaaata

SEQ ID NO: 762387 - DNA, 15 bp, Homo sapiens
taacattctaaatag

SEQ ID NO: 762388 - DNA, 15 bp, Homo sapiens
aacattctaaataga

SEQ ID NO: 762389 - DNA, 15 bp, Homo sapiens
acattctaaatagac

SEQ ID NO: 762390 - DNA, 15 bp, Homo sapiens
cattctaaatagaca

SEQ ID NO: 762391 - DNA, 15 bp, Homo sapiens
attctaaatagacat

SEQ ID NO: 762392 - DNA, 15 bp, Homo sapiens
ttctaaatagacatc

SEQ ID NO: 762393 - DNA, 15 bp, Homo sapiens
tctaaatagacatca

SEQ ID NO: 762394 - DNA, 15 bp, Homo sapiens
ctaaatagacatcaa

SEQ ID NO: 762395 - DNA, 15 bp, Homo sapiens
taaatagacatcaag
